United States Patent Application Publication US 2011/0318380 A1 - sequence listing, part 2

SEQ ID NO: 36575 - protein, 14 aa, Homo Sapiens
GSVTCFGPEADQCV

SEQ ID NO: 36576 - protein, 14 aa, Homo Sapiens
SVTCFGPEADQCVA

SEQ ID NO: 36577 - protein, 14 aa, Homo Sapiens
VTCFGPEADQCVAC

SEQ ID NO: 36578 - protein, 14 aa, Homo Sapiens
TCFGPEADQCVACA

SEQ ID NO: 36579 - protein, 14 aa, Homo Sapiens
CFGPEADQCVACAH

SEQ ID NO: 36580 - protein, 14 aa, Homo Sapiens
FGPEADQCVACAHY

SEQ ID NO: 36581 - protein, 14 aa, Homo Sapiens
GPEADQCVACAHYK

SEQ ID NO: 36582 - protein, 14 aa, Homo Sapiens
PEADQCVACAHYKD

SEQ ID NO: 36583 - protein, 14 aa, Homo Sapiens
EADQCVACAHYKDP

SEQ ID NO: 36584 - protein, 14 aa, Homo Sapiens
ADQCVACAHYKDPP

SEQ ID NO: 36585 - protein, 14 aa, Homo Sapiens
DQCVACAHYKDPPF

SEQ ID NO: 36586 - protein, 14 aa, Homo Sapiens
QCVACAHYKDPPFC

SEQ ID NO: 36587 - protein, 14 aa, Homo Sapiens
CVACAHYKDPPFCV

SEQ ID NO: 36588 - protein, 14 aa, Homo Sapiens
VACAHYKDPPFCVA

SEQ ID NO: 36589 - protein, 14 aa, Homo Sapiens
ACAHYKDPPFCVAR

SEQ ID NO: 36590 - protein, 14 aa, Homo Sapiens
CAHYKDPPFCVARC

SEQ ID NO: 36591 - protein, 14 aa, Homo Sapiens
AHYKDPPFCVARCP

SEQ ID NO: 36592 - protein, 14 aa, Homo Sapiens
HYKDPPFCVARCPS

SEQ ID NO: 36593 - protein, 14 aa, Homo Sapiens
YKDPPFCVARCPSG

SEQ ID NO: 36594 - protein, 14 aa, Homo Sapiens
KDPPFCVARCPSGV

SEQ ID NO: 36595 - protein, 14 aa, Homo Sapiens
DPPFCVARCPSGVK

SEQ ID NO: 36596 - protein, 14 aa, Homo Sapiens
PPFCVARCPSGVKP

SEQ ID NO: 36597 - protein, 14 aa, Homo Sapiens
PFCVARCPSGVKPD

SEQ ID NO: 36598 - protein, 14 aa, Homo Sapiens
FCVARCPSGVKPDL

SEQ ID NO: 36599 - protein, 14 aa, Homo Sapiens
CVARCPSGVKPDLS

SEQ ID NO: 36600 - protein, 14 aa, Homo Sapiens
VARCPSGVKPDLSY

SEQ ID NO: 36601 - protein, 14 aa, Homo Sapiens
ARCPSGVKPDLSYM

SEQ ID NO: 36602 - protein, 14 aa, Homo Sapiens
RCPSGVKPDLSYMP

SEQ ID NO: 36603 - protein, 14 aa, Homo Sapiens
CPSGVKPDLSYMPI

SEQ ID NO: 36604 - protein, 14 aa, Homo Sapiens
PSGVKPDLSYMPIW

SEQ ID NO: 36605 - protein, 14 aa, Homo Sapiens
SGVKPDLSYMPIWK

SEQ ID NO: 36606 - protein, 14 aa, Homo Sapiens
GVKPDLSYMPIWKF

SEQ ID NO: 36607 - protein, 14 aa, Homo Sapiens
VKPDLSYMPIWKFP

SEQ ID NO: 36608 - protein, 14 aa, Homo Sapiens
KPDLSYMPIWKFPD

SEQ ID NO: 36609 - protein, 14 aa, Homo Sapiens
PDLSYMPIWKFPDE

SEQ ID NO: 36610 - protein, 14 aa, Homo Sapiens
DLSYMPIWKFPDEE

SEQ ID NO: 36611 - protein, 14 aa, Homo Sapiens
LSYMPIWKFPDEEG

SEQ ID NO: 36612 - protein, 14 aa, Homo Sapiens
SYMPIWKFPDEEGA

SEQ ID NO: 36613 - protein, 14 aa, Homo Sapiens
YMPIWKFPDEEGAC

SEQ ID NO: 36614 - protein, 14 aa, Homo Sapiens
MPIWKFPDEEGACQ

SEQ ID NO: 36615 - protein, 14 aa, Homo Sapiens
PIWKFPDEEGACQP

SEQ ID NO: 36616 - protein, 14 aa, Homo Sapiens
IWKFPDEEGACQPC

SEQ ID NO: 36617 - protein, 14 aa, Homo Sapiens
WKFPDEEGACQPCP

SEQ ID NO: 36618 - protein, 14 aa, Homo Sapiens
KFPDEEGACQPCPI

SEQ ID NO: 36619 - protein, 14 aa, Homo Sapiens
FPDEEGACQPCPIN

SEQ ID NO: 36620 - protein, 14 aa, Homo Sapiens
PDEEGACQPCPINC

SEQ ID NO: 36621 - protein, 14 aa, Homo Sapiens
DEEGACQPCPINCT

SEQ ID NO: 36622 - protein, 14 aa, Homo Sapiens
EEGACQPCPINCTH

SEQ ID NO: 36623 - protein, 14 aa, Homo Sapiens
EGACQPCPINCTHS

SEQ ID NO: 36624 - protein, 14 aa, Homo Sapiens
GACQPCPINCTHSC

SEQ ID NO: 36625 - protein, 14 aa, Homo Sapiens
ACQPCPINCTHSCV

SEQ ID NO: 36626 - protein, 14 aa, Homo Sapiens
CQPCPINCTHSCVD

SEQ ID NO: 36627 - protein, 14 aa, Homo Sapiens
QPCPINCTHSCVDL

SEQ ID NO: 36628 - protein, 14 aa, Homo Sapiens
PCPINCTHSCVDLD

SEQ ID NO: 36629 - protein, 14 aa, Homo Sapiens
CPINCTHSCVDLDD

SEQ ID NO: 36630 - protein, 14 aa, Homo Sapiens
PINCTHSCVDLDDK

SEQ ID NO: 36631 - protein, 14 aa, Homo Sapiens
INCTHSCVDLDDKG

SEQ ID NO: 36632 - protein, 14 aa, Homo Sapiens
NCTHSCVDLDDKGC

SEQ ID NO: 36633 - protein, 14 aa, Homo Sapiens
CTHSCVDLDDKGCP

SEQ ID NO: 36634 - protein, 14 aa, Homo Sapiens
THSCVDLDDKGCPA

SEQ ID NO: 36635 - protein, 14 aa, Homo Sapiens
HSCVDLDDKGCPAE

SEQ ID NO: 36636 - protein, 14 aa, Homo Sapiens
SCVDLDDKGCPAEQ

SEQ ID NO: 36637 - protein, 14 aa, Homo Sapiens
CVDLDDKGCPAEQR

SEQ ID NO: 36638 - protein, 14 aa, Homo Sapiens
VDLDDKGCPAEQRA

SEQ ID NO: 36639 - protein, 14 aa, Homo Sapiens
DLDDKGCPAEQRAS

SEQ ID NO: 36640 - protein, 14 aa, Homo Sapiens
LDDKGCPAEQRASP

SEQ ID NO: 36641 - protein, 14 aa, Homo Sapiens
DDKGCPAEQRASPL

SEQ ID NO: 36642 - protein, 14 aa, Homo Sapiens
DKGCPAEQRASPLT

SEQ ID NO: 36643 - protein, 14 aa, Homo Sapiens
KGCPAEQRASPLTS

SEQ ID NO: 36644 - protein, 14 aa, Homo Sapiens
GCPAEQRASPLTSI

SEQ ID NO: 36645 - protein, 14 aa, Homo Sapiens
CPAEQRASPLTSII

SEQ ID NO: 36646 - protein, 14 aa, Homo Sapiens
PAEQRASPLTSIIS

SEQ ID NO: 36647 - protein, 14 aa, Homo Sapiens
AEQRASPLTSIISA

SEQ ID NO: 36648 - protein, 14 aa, Homo Sapiens
EQRASPLTSIISAV

SEQ ID NO: 36649 - protein, 14 aa, Homo Sapiens
QRASPLTSIISAVV

SEQ ID NO: 36650 - protein, 14 aa, Homo Sapiens
RASPLTSIISAVVG

SEQ ID NO: 36651 - protein, 14 aa, Homo Sapiens
ASPLTSIISAVVGI

SEQ ID NO: 36652 - protein, 14 aa, Homo Sapiens
SPLTSIISAVVGIL

SEQ ID NO: 36653 - protein, 14 aa, Homo Sapiens
PLTSIISAVVGILL

SEQ ID NO: 36654 - protein, 14 aa, Homo Sapiens
LTSIISAVVGILLV

SEQ ID NO: 36655 - protein, 14 aa, Homo Sapiens
TSIISAVVGILLVV

SEQ ID NO: 36656 - protein, 14 aa, Homo Sapiens
SIISAVVGILLVVV

SEQ ID NO: 36657 - protein, 14 aa, Homo Sapiens
IISAVVGILLVVVL

SEQ ID NO: 36658 - protein, 14 aa, Homo Sapiens
ISAVVGILLVVVLG

SEQ ID NO: 36659 - protein, 14 aa, Homo Sapiens
SAVVGILLVVVLGV

SEQ ID NO: 36660 - protein, 14 aa, Homo Sapiens
AVVGILLVVVLGVV

SEQ ID NO: 36661 - protein, 14 aa, Homo Sapiens
VVGILLVVVLGVVF

SEQ ID NO: 36662 - protein, 14 aa, Homo Sapiens
VGILLVVVLGVVFG

SEQ ID NO: 36663 - protein, 14 aa, Homo Sapiens
GILLVVVLGVVFGI

SEQ ID NO: 36664 - protein, 14 aa, Homo Sapiens
ILLVVVLGVVFGIL

SEQ ID NO: 36665 - protein, 14 aa, Homo Sapiens
LLVVVLGVVFGILI

SEQ ID NO: 36666 - protein, 14 aa, Homo Sapiens
LVVVLGVVFGILIK

SEQ ID NO: 36667 - protein, 14 aa, Homo Sapiens
VVVLGVVFGILIKR

SEQ ID NO: 36668 - protein, 14 aa, Homo Sapiens
VVLGVVFGILIKRR

SEQ ID NO: 36669 - protein, 14 aa, Homo Sapiens
VLGVVFGILIKRRQ

SEQ ID NO: 36670 - protein, 14 aa, Homo Sapiens
LGVVFGILIKRRQQ

SEQ ID NO: 36671 - protein, 14 aa, Homo Sapiens
GVVFGILIKRRQQK

SEQ ID NO: 36672 - protein, 14 aa, Homo Sapiens
VVFGILIKRRQQKI

SEQ ID NO: 36673 - protein, 14 aa, Homo Sapiens
VFGILIKRRQQKIR

SEQ ID NO: 36674 - protein, 14 aa, Homo Sapiens
FGILIKRRQQKIRK

SEQ ID NO: 36675 - protein, 14 aa, Homo Sapiens
GILIKRRQQKIRKY

SEQ ID NO: 36676 - protein, 14 aa, Homo Sapiens
ILIKRRQQKIRKYT

SEQ ID NO: 36677 - protein, 14 aa, Homo Sapiens
LIKRRQQKIRKYTM

SEQ ID NO: 36678 - protein, 14 aa, Homo Sapiens
IKRRQQKIRKYTMR

SEQ ID NO: 36679 - protein, 14 aa, Homo Sapiens
KRRQQKIRKYTMRR

SEQ ID NO: 36680 - protein, 14 aa, Homo Sapiens
RRQQKIRKYTMRRL

SEQ ID NO: 36681 - protein, 14 aa, Homo Sapiens
RQQKIRKYTMRRLL

SEQ ID NO: 36682 - protein, 14 aa, Homo Sapiens
QQKIRKYTMRRLLQ

SEQ ID NO: 36683 - protein, 14 aa, Homo Sapiens
QKIRKYTMRRLLQE

SEQ ID NO: 36684 - protein, 14 aa, Homo Sapiens
KIRKYTMRRLLQET

SEQ ID NO: 36685 - protein, 14 aa, Homo Sapiens
IRKYTMRRLLQETE

SEQ ID NO: 36686 - protein, 14 aa, Homo Sapiens
RKYTMRRLLQETEL

SEQ ID NO: 36687 - protein, 14 aa, Homo Sapiens
KYTMRRLLQETELV

SEQ ID NO: 36688 - protein, 14 aa, Homo Sapiens
YTMRRLLQETELVE

SEQ ID NO: 36689 - protein, 14 aa, Homo Sapiens
TMRRLLQETELVEP

SEQ ID NO: 36690 - protein, 14 aa, Homo Sapiens
MRRLLQETELVEPL

SEQ ID NO: 36691 - protein, 14 aa, Homo Sapiens
RRLLQETELVEPLT

SEQ ID NO: 36692 - protein, 14 aa, Homo Sapiens
RLLQETELVEPLTP

SEQ ID NO: 36693 - protein, 14 aa, Homo Sapiens
LLQETELVEPLTPS

SEQ ID NO: 36694 - protein, 14 aa, Homo Sapiens
LQETELVEPLTPSG

SEQ ID NO: 36695 - protein, 14 aa, Homo Sapiens
QETELVEPLTPSGA

SEQ ID NO: 36696 - protein, 14 aa, Homo Sapiens
ETELVEPLTPSGAM

SEQ ID NO: 36697 - protein, 14 aa, Homo Sapiens
TELVEPLTPSGAMP

SEQ ID NO: 36698 - protein, 14 aa, Homo Sapiens
ELVEPLTPSGAMPN

SEQ ID NO: 36699 - protein, 14 aa, Homo Sapiens
LVEPLTPSGAMPNQ

SEQ ID NO: 36700 - protein, 14 aa, Homo Sapiens
VEPLTPSGAMPNQA

SEQ ID NO: 36701 - protein, 14 aa, Homo Sapiens
EPLTPSGAMPNQAQ

SEQ ID NO: 36702 - protein, 14 aa, Homo Sapiens
PLTPSGAMPNQAQM

SEQ ID NO: 36703 - protein, 14 aa, Homo Sapiens
LTPSGAMPNQAQMR

SEQ ID NO: 36704 - protein, 14 aa, Homo Sapiens
TPSGAMPNQAQMRI

SEQ ID NO: 36705 - protein, 14 aa, Homo Sapiens
PSGAMPNQAQMRIL

SEQ ID NO: 36706 - protein, 14 aa, Homo Sapiens
SGAMPNQAQMRILK

SEQ ID NO: 36707 - protein, 14 aa, Homo Sapiens
GAMPNQAQMRILKE

SEQ ID NO: 36708 - protein, 14 aa, Homo Sapiens
AMPNQAQMRILKET

SEQ ID NO: 36709 - protein, 14 aa, Homo Sapiens
MPNQAQMRILKETE

SEQ ID NO: 36710 - protein, 14 aa, Homo Sapiens
PNQAQMRILKETEL

SEQ ID NO: 36711 - protein, 14 aa, Homo Sapiens
NQAQMRILKETELR

SEQ ID NO: 36712 - protein, 14 aa, Homo Sapiens
QAQMRILKETELRK

SEQ ID NO: 36713 - protein, 14 aa, Homo Sapiens
AQMRILKETELRKV

SEQ ID NO: 36714 - protein, 14 aa, Homo Sapiens
QMRILKETELRKVK

SEQ ID NO: 36715 - protein, 14 aa, Homo Sapiens
MRILKETELRKVKV

SEQ ID NO: 36716 - protein, 14 aa, Homo Sapiens
RILKETELRKVKVL

SEQ ID NO: 36717 - protein, 14 aa, Homo Sapiens
ILKETELRKVKVLG

SEQ ID NO: 36718 - protein, 14 aa, Homo Sapiens
LKETELRKVKVLGS

SEQ ID NO: 36719 - protein, 14 aa, Homo Sapiens
KETELRKVKVLGSG

SEQ ID NO: 36720 - protein, 14 aa, Homo Sapiens
ETELRKVKVLGSGA

SEQ ID NO: 36721 - protein, 14 aa, Homo Sapiens
TELRKVKVLGSGAF

SEQ ID NO: 36722 - protein, 14 aa, Homo Sapiens
ELRKVKVLGSGAFG

SEQ ID NO: 36723 - protein, 14 aa, Homo Sapiens
LRKVKVLGSGAFGT

SEQ ID NO: 36724 - protein, 14 aa, Homo Sapiens
RKVKVLGSGAFGTV

SEQ ID NO: 36725 - protein, 14 aa, Homo Sapiens
KVKVLGSGAFGTVY

SEQ ID NO: 36726 - protein, 14 aa, Homo Sapiens
VKVLGSGAFGTVYK

SEQ ID NO: 36727 - protein, 14 aa, Homo Sapiens
KVLGSGAFGTVYKG

SEQ ID NO: 36728 - protein, 14 aa, Homo Sapiens
VLGSGAFGTVYKGI

SEQ ID NO: 36729 - protein, 14 aa, Homo Sapiens
LGSGAFGTVYKGIW

SEQ ID NO: 36730 - protein, 14 aa, Homo Sapiens
GSGAFGTVYKGIWI

SEQ ID NO: 36731 - protein, 14 aa, Homo Sapiens
SGAFGTVYKGIWIP

SEQ ID NO: 36732 - protein, 14 aa, Homo Sapiens
GAFGTVYKGIWIPD

SEQ ID NO: 36733 - protein, 14 aa, Homo Sapiens
AFGTVYKGIWIPDG

SEQ ID NO: 36734 - protein, 14 aa, Homo Sapiens
FGTVYKGIWIPDGE

SEQ ID NO: 36735 - protein, 14 aa, Homo Sapiens
GTVYKGIWIPDGEN

SEQ ID NO: 36736 - protein, 14 aa, Homo Sapiens
TVYKGIWIPDGENV

SEQ ID NO: 36737 - protein, 14 aa, Homo Sapiens
VYKGIWIPDGENVK

SEQ ID NO: 36738 - protein, 14 aa, Homo Sapiens
YKGIWIPDGENVKI

SEQ ID NO: 36739 - protein, 14 aa, Homo Sapiens
KGIWIPDGENVKIP

SEQ ID NO: 36740 - protein, 14 aa, Homo Sapiens
GIWIPDGENVKIPV

SEQ ID NO: 36741 - protein, 14 aa, Homo Sapiens
IWIPDGENVKIPVA

SEQ ID NO: 36742 - protein, 14 aa, Homo Sapiens
WIPDGENVKIPVAI

SEQ ID NO: 36743 - protein, 14 aa, Homo Sapiens
IPDGENVKIPVAIK

SEQ ID NO: 36744 - protein, 14 aa, Homo Sapiens
PDGENVKIPVAIKV

SEQ ID NO: 36745 - protein, 14 aa, Homo Sapiens
DGENVKIPVAIKVL

SEQ ID NO: 36746 - protein, 14 aa, Homo Sapiens
GENVKIPVAIKVLR

SEQ ID NO: 36747 - protein, 14 aa, Homo Sapiens
ENVKIPVAIKVLRE

SEQ ID NO: 36748 - protein, 14 aa, Homo Sapiens
NVKIPVAIKVLREN

SEQ ID NO: 36749 - protein, 14 aa, Homo Sapiens
VKIPVAIKVLRENT

SEQ ID NO: 36750 - protein, 14 aa, Homo Sapiens
KIPVAIKVLRENTS

SEQ ID NO: 36751 - protein, 14 aa, Homo Sapiens
IPVAIKVLRENTSP

SEQ ID NO: 36752 - protein, 14 aa, Homo Sapiens
PVAIKVLRENTSPK

SEQ ID NO: 36753 - protein, 14 aa, Homo Sapiens
VAIKVLRENTSPKA

SEQ ID NO: 36754 - protein, 14 aa, Homo Sapiens
AIKVLRENTSPKAN

SEQ ID NO: 36755 - protein, 14 aa, Homo Sapiens
IKVLRENTSPKANK

SEQ ID NO: 36756 - protein, 14 aa, Homo Sapiens
KVLRENTSPKANKE

SEQ ID NO: 36757 - protein, 14 aa, Homo Sapiens
VLRENTSPKANKEI

SEQ ID NO: 36758 - protein, 14 aa, Homo Sapiens
LRENTSPKANKEIL

SEQ ID NO: 36759 - protein, 14 aa, Homo Sapiens
RENTSPKANKEILD

SEQ ID NO: 36760 - protein, 14 aa, Homo Sapiens
ENTSPKANKEILDE

SEQ ID NO: 36761 - protein, 14 aa, Homo Sapiens
NTSPKANKEILDEA

SEQ ID NO: 36762 - protein, 14 aa, Homo Sapiens
TSPKANKEILDEAY

SEQ ID NO: 36763 - protein, 14 aa, Homo Sapiens
SPKANKEILDEAYV

SEQ ID NO: 36764 - protein, 14 aa, Homo Sapiens
PKANKEILDEAYVM

SEQ ID NO: 36765 - protein, 14 aa, Homo Sapiens
KANKEILDEAYVMA

SEQ ID NO: 36766 - protein, 14 aa, Homo Sapiens
ANKEILDEAYVMAG

SEQ ID NO: 36767 - protein, 14 aa, Homo Sapiens
NKEILDEAYVMAGV

SEQ ID NO: 36768 - protein, 14 aa, Homo Sapiens
KEILDEAYVMAGVG

SEQ ID NO: 36769 - protein, 14 aa, Homo Sapiens
EILDEAYVMAGVGS

SEQ ID NO: 36770 - protein, 14 aa, Homo Sapiens
ILDEAYVMAGVGSP

SEQ ID NO: 36771 - protein, 14 aa, Homo Sapiens
LDEAYVMAGVGSPY

SEQ ID NO: 36772 - protein, 14 aa, Homo Sapiens
DEAYVMAGVGSPYV

SEQ ID NO: 36773 - protein, 14 aa, Homo Sapiens
EAYVMAGVGSPYVS

SEQ ID NO: 36774 - protein, 14 aa, Homo Sapiens
AYVMAGVGSPYVSR

SEQ ID NO: 36775 - protein, 14 aa, Homo Sapiens
YVMAGVGSPYVSRL

SEQ ID NO: 36776 - protein, 14 aa, Homo Sapiens
VMAGVGSPYVSRLL

SEQ ID NO: 36777 - protein, 14 aa, Homo Sapiens
MAGVGSPYVSRLLG

SEQ ID NO: 36778 - protein, 14 aa, Homo Sapiens
AGVGSPYVSRLLGI

SEQ ID NO: 36779 - protein, 14 aa, Homo Sapiens
GVGSPYVSRLLGIC

SEQ ID NO: 36780 - protein, 14 aa, Homo Sapiens
VGSPYVSRLLGICL

SEQ ID NO: 36781 - protein, 14 aa, Homo Sapiens
GSPYVSRLLGICLT

SEQ ID NO: 36782 - protein, 14 aa, Homo Sapiens
SPYVSRLLGICLTS

SEQ ID NO: 36783 - protein, 14 aa, Homo Sapiens
PYVSRLLGICLTST

SEQ ID NO: 36784 - protein, 14 aa, Homo Sapiens
YVSRLLGICLTSTV

SEQ ID NO: 36785 - protein, 14 aa, Homo Sapiens
VSRLLGICLTSTVQ

SEQ ID NO: 36786 - protein, 14 aa, Homo Sapiens
SRLLGICLTSTVQL

SEQ ID NO: 36787 - protein, 14 aa, Homo Sapiens
RLLGICLTSTVQLV

SEQ ID NO: 36788 - protein, 14 aa, Homo Sapiens
LLGICLTSTVQLVT

SEQ ID NO: 36789 - protein, 14 aa, Homo Sapiens
LGICLTSTVQLVTQ

SEQ ID NO: 36790 - protein, 14 aa, Homo Sapiens
GICLTSTVQLVTQL

SEQ ID NO: 36791 - protein, 14 aa, Homo Sapiens
ICLTSTVQLVTQLM

SEQ ID NO: 36792 - protein, 14 aa, Homo Sapiens
CLTSTVQLVTQLMP

SEQ ID NO: 36793 - protein, 14 aa, Homo Sapiens
LTSTVQLVTQLMPY

SEQ ID NO: 36794 - protein, 14 aa, Homo Sapiens
TSTVQLVTQLMPYG

SEQ ID NO: 36795 - protein, 14 aa, Homo Sapiens
STVQLVTQLMPYGC

SEQ ID NO: 36796 - protein, 14 aa, Homo Sapiens
TVQLVTQLMPYGCL

SEQ ID NO: 36797 - protein, 14 aa, Homo Sapiens
VQLVTQLMPYGCLL

SEQ ID NO: 36798 - protein, 14 aa, Homo Sapiens
QLVTQLMPYGCLLD

SEQ ID NO: 36799 - protein, 14 aa, Homo Sapiens
LVTQLMPYGCLLDH

SEQ ID NO: 36800 - protein, 14 aa, Homo Sapiens
VTQLMPYGCLLDHV

SEQ ID NO: 36801 - protein, 14 aa, Homo Sapiens
TQLMPYGCLLDHVR

SEQ ID NO: 36802 - protein, 14 aa, Homo Sapiens
QLMPYGCLLDHVRE

SEQ ID NO: 36803 - protein, 14 aa, Homo Sapiens
LMPYGCLLDHVREN

SEQ ID NO: 36804 - protein, 14 aa, Homo Sapiens
MPYGCLLDHVRENR

SEQ ID NO: 36805 - protein, 14 aa, Homo Sapiens
PYGCLLDHVRENRG

SEQ ID NO: 36806 - protein, 14 aa, Homo Sapiens
YGCLLDHVRENRGR

SEQ ID NO: 36807 - protein, 14 aa, Homo Sapiens
GCLLDHVRENRGRL

SEQ ID NO: 36808 - protein, 14 aa, Homo Sapiens
CLLDHVRENRGRLG

SEQ ID NO: 36809 - protein, 14 aa, Homo Sapiens
LLDHVRENRGRLGS

SEQ ID NO: 36810 - protein, 14 aa, Homo Sapiens
LDHVRENRGRLGSQ

SEQ ID NO: 36811 - protein, 14 aa, Homo Sapiens
DHVRENRGRLGSQD

SEQ ID NO: 36812 - protein, 14 aa, Homo Sapiens
HVRENRGRLGSQDL

SEQ ID NO: 36813 - protein, 14 aa, Homo Sapiens
VRENRGRLGSQDLL

SEQ ID NO: 36814 - protein, 14 aa, Homo Sapiens
RENRGRLGSQDLLN

SEQ ID NO: 36815 - protein, 14 aa, Homo Sapiens
ENRGRLGSQDLLNW

SEQ ID NO: 36816 - protein, 14 aa, Homo Sapiens
NRGRLGSQDLLNWC

SEQ ID NO: 36817 - protein, 14 aa, Homo Sapiens
RGRLGSQDLLNWCM

SEQ ID NO: 36818 - protein, 14 aa, Homo Sapiens
GRLGSQDLLNWCMQ

SEQ ID NO: 36819 - protein, 14 aa, Homo Sapiens
RLGSQDLLNWCMQI

SEQ ID NO: 36820 - protein, 14 aa, Homo Sapiens
LGSQDLLNWCMQIA

SEQ ID NO: 36821 - protein, 14 aa, Homo Sapiens
GSQDLLNWCMQIAK

SEQ ID NO: 36822 - protein, 14 aa, Homo Sapiens
SQDLLNWCMQIAKG

SEQ ID NO: 36823 - protein, 14 aa, Homo Sapiens
QDLLNWCMQIAKGM

SEQ ID NO: 36824 - protein, 14 aa, Homo Sapiens
DLLNWCMQIAKGMS

SEQ ID NO: 36825 - protein, 14 aa, Homo Sapiens
LLNWCMQIAKGMSY

SEQ ID NO: 36826 - protein, 14 aa, Homo Sapiens
LNWCMQIAKGMSYL

SEQ ID NO: 36827 - protein, 14 aa, Homo Sapiens
NWCMQIAKGMSYLE

SEQ ID NO: 36828 - protein, 14 aa, Homo Sapiens
WCMQIAKGMSYLED

SEQ ID NO: 36829 - protein, 14 aa, Homo Sapiens
CMQIAKGMSYLEDV

SEQ ID NO: 36830 - protein, 14 aa, Homo Sapiens
MQIAKGMSYLEDVR

SEQ ID NO: 36831 - protein, 14 aa, Homo Sapiens
QIAKGMSYLEDVRL

SEQ ID NO: 36832 - protein, 14 aa, Homo Sapiens
IAKGMSYLEDVRLV

SEQ ID NO: 36833 - protein, 14 aa, Homo Sapiens
AKGMSYLEDVRLVH

SEQ ID NO: 36834 - protein, 14 aa, Homo Sapiens
KGMSYLEDVRLVHR

SEQ ID NO: 36835 - protein, 14 aa, Homo Sapiens
GMSYLEDVRLVHRD

SEQ ID NO: 36836 - protein, 14 aa, Homo Sapiens
MSYLEDVRLVHRDL

SEQ ID NO: 36837 - protein, 14 aa, Homo Sapiens
SYLEDVRLVHRDLA

SEQ ID NO: 36838 - protein, 14 aa, Homo Sapiens
YLEDVRLVHRDLAA

SEQ ID NO: 36839 - protein, 14 aa, Homo Sapiens
LEDVRLVHRDLAAR

SEQ ID NO: 36840 - protein, 14 aa, Homo Sapiens
EDVRLVHRDLAARN

SEQ ID NO: 36841 - protein, 14 aa, Homo Sapiens
DVRLVHRDLAARNV

SEQ ID NO: 36842 - protein, 14 aa, Homo Sapiens
VRLVHRDLAARNVL

SEQ ID NO: 36843 - protein, 14 aa, Homo Sapiens
RLVHRDLAARNVLV

SEQ ID NO: 36844 - protein, 14 aa, Homo Sapiens
LVHRDLAARNVLVK

SEQ ID NO: 36845 - protein, 14 aa, Homo Sapiens
VHRDLAARNVLVKS

SEQ ID NO: 36846 - protein, 14 aa, Homo Sapiens
HRDLAARNVLVKSP

SEQ ID NO: 36847 - protein, 14 aa, Homo Sapiens
RDLAARNVLVKSPN

SEQ ID NO: 36848 - protein, 14 aa, Homo Sapiens
DLAARNVLVKSPNH

SEQ ID NO: 36849 - protein, 14 aa, Homo Sapiens
LAARNVLVKSPNHV

SEQ ID NO: 36850 - protein, 14 aa, Homo Sapiens
AARNVLVKSPNHVK

SEQ ID NO: 36851 - protein, 14 aa, Homo Sapiens
ARNVLVKSPNHVKI

SEQ ID NO: 36852 - protein, 14 aa, Homo Sapiens
RNVLVKSPNHVKIT

SEQ ID NO: 36853 - protein, 14 aa, Homo Sapiens
NVLVKSPNHVKITD

SEQ ID NO: 36854 - protein, 14 aa, Homo Sapiens
VLVKSPNHVKITDF

SEQ ID NO: 36855 - protein, 14 aa, Homo Sapiens
LVKSPNHVKITDFG

SEQ ID NO: 36856 - protein, 14 aa, Homo Sapiens
VKSPNHVKITDFGL

SEQ ID NO: 36857 - protein, 14 aa, Homo Sapiens
KSPNHVKITDFGLA

SEQ ID NO: 36858 - protein, 14 aa, Homo Sapiens
SPNHVKITDFGLAR

SEQ ID NO: 36859 - protein, 14 aa, Homo Sapiens
PNHVKITDFGLARL

SEQ ID NO: 36860 - protein, 14 aa, Homo Sapiens
NHVKITDFGLARLL

SEQ ID NO: 36861 - protein, 14 aa, Homo Sapiens
HVKITDFGLARLLD

SEQ ID NO: 36862 - protein, 14 aa, Homo Sapiens
VKITDFGLARLLDI

SEQ ID NO: 36863 - protein, 14 aa, Homo Sapiens
KITDFGLARLLDID

SEQ ID NO: 36864 - protein, 14 aa, Homo Sapiens
ITDFGLARLLDIDE

SEQ ID NO: 36865 - protein, 14 aa, Homo Sapiens
TDFGLARLLDIDET

SEQ ID NO: 36866 - protein, 14 aa, Homo Sapiens
DFGLARLLDIDETE

SEQ ID NO: 36867 - protein, 14 aa, Homo Sapiens
FGLARLLDIDETEY

SEQ ID NO: 36868 - protein, 14 aa, Homo Sapiens
GLARLLDIDETEYH

SEQ ID NO: 36869 - protein, 14 aa, Homo Sapiens
LARLLDIDETEYHA

SEQ ID NO: 36870 - protein, 14 aa, Homo Sapiens
ARLLDIDETEYHAD

SEQ ID NO: 36871 - protein, 14 aa, Homo Sapiens
RLLDIDETEYHADG

SEQ ID NO: 36872 - protein, 14 aa, Homo Sapiens
LLDIDETEYHADGG

SEQ ID NO: 36873 - protein, 14 aa, Homo Sapiens
LDIDETEYHADGGK

SEQ ID NO: 36874 - protein, 14 aa, Homo Sapiens
DIDETEYHADGGKV

SEQ ID NO: 36875 - protein, 14 aa, Homo Sapiens
IDETEYHADGGKVP

SEQ ID NO: 36876 - protein, 14 aa, Homo Sapiens
DETEYHADGGKVPI

SEQ ID NO: 36877 - protein, 14 aa, Homo Sapiens
ETEYHADGGKVPIK

SEQ ID NO: 36878 - protein, 14 aa, Homo Sapiens
TEYHADGGKVPIKW

SEQ ID NO: 36879 - protein, 14 aa, Homo Sapiens
EYHADGGKVPIKWM

SEQ ID NO: 36880 - protein, 14 aa, Homo Sapiens
YHADGGKVPIKWMA

SEQ ID NO: 36881 - protein, 14 aa, Homo Sapiens
HADGGKVPIKWMAL

SEQ ID NO: 36882 - protein, 14 aa, Homo Sapiens
ADGGKVPIKWMALE

SEQ ID NO: 36883 - protein, 14 aa, Homo Sapiens
DGGKVPIKWMALES

SEQ ID NO: 36884 - protein, 14 aa, Homo Sapiens
GGKVPIKWMALESI

SEQ ID NO: 36885 - protein, 14 aa, Homo Sapiens
GKVPIKWMALESIL

SEQ ID NO: 36886 - protein, 14 aa, Homo Sapiens
KVPIKWMALESILR

SEQ ID NO: 36887 - protein, 14 aa, Homo Sapiens
VPIKWMALESILRR

SEQ ID NO: 36888 - protein, 14 aa, Homo Sapiens
PIKWMALESILRRR

SEQ ID NO: 36889 - protein, 14 aa, Homo Sapiens
IKWMALESILRRRF

SEQ ID NO: 36890 - protein, 14 aa, Homo Sapiens
KWMALESILRRRFT

SEQ ID NO: 36891 - protein, 14 aa, Homo Sapiens
WMALESILRRRFTH

SEQ ID NO: 36892 - protein, 14 aa, Homo Sapiens
MALESILRRRFTHQ

SEQ ID NO: 36893 - protein, 14 aa, Homo Sapiens
ALESILRRRFTHQS

SEQ ID NO: 36894 - protein, 14 aa, Homo Sapiens
LESILRRRFTHQSD

SEQ ID NO: 36895 - protein, 14 aa, Homo Sapiens
ESILRRRFTHQSDV

SEQ ID NO: 36896 - protein, 14 aa, Homo Sapiens
SILRRRFTHQSDVW

SEQ ID NO: 36897 - protein, 14 aa, Homo Sapiens
ILRRRFTHQSDVWS

SEQ ID NO: 36898 - protein, 14 aa, Homo Sapiens
LRRRFTHQSDVWSY

SEQ ID NO: 36899 - protein, 14 aa, Homo Sapiens
RRRFTHQSDVWSYG

SEQ ID NO: 36900 - protein, 14 aa, Homo Sapiens
RRFTHQSDVWSYGV

SEQ ID NO: 36901 - protein, 14 aa, Homo Sapiens
RFTHQSDVWSYGVT

SEQ ID NO: 36902 - protein, 14 aa, Homo Sapiens
FTHQSDVWSYGVTV

SEQ ID NO: 36903 - protein, 14 aa, Homo Sapiens
THQSDVWSYGVTVW

SEQ ID NO: 36904 - protein, 14 aa, Homo Sapiens
HQSDVWSYGVTVWE

SEQ ID NO: 36905 - protein, 14 aa, Homo Sapiens
QSDVWSYGVTVWEL

SEQ ID NO: 36906 - protein, 14 aa, Homo Sapiens
SDVWSYGVTVWELM

SEQ ID NO: 36907 - protein, 14 aa, Homo Sapiens
DVWSYGVTVWELMT

SEQ ID NO: 36908 - protein, 14 aa, Homo Sapiens
VWSYGVTVWELMTF

SEQ ID NO: 36909 - protein, 14 aa, Homo Sapiens
WSYGVTVWELMTFG

SEQ ID NO: 36910 - protein, 14 aa, Homo Sapiens
SYGVTVWELMTFGA

SEQ ID NO: 36911 - protein, 14 aa, Homo Sapiens
YGVTVWELMTFGAK

SEQ ID NO: 36912 - protein, 14 aa, Homo Sapiens
GVTVWELMTFGAKP

SEQ ID NO: 36913 - protein, 14 aa, Homo Sapiens
VTVWELMTFGAKPY

SEQ ID NO: 36914 - protein, 14 aa, Homo Sapiens
TVWELMTFGAKPYD

SEQ ID NO: 36915 - protein, 14 aa, Homo Sapiens
VWELMTFGAKPYDG

SEQ ID NO: 36916 - protein, 14 aa, Homo Sapiens
WELMTFGAKPYDGI

SEQ ID NO: 36917 - protein, 14 aa, Homo Sapiens
ELMTFGAKPYDGIP

SEQ ID NO: 36918 - protein, 14 aa, Homo Sapiens
LMTFGAKPYDGIPA

SEQ ID NO: 36919 - protein, 14 aa, Homo Sapiens
MTFGAKPYDGIPAR

SEQ ID NO: 36920 - protein, 14 aa, Homo Sapiens
TFGAKPYDGIPARE

SEQ ID NO: 36921 - protein, 14 aa, Homo Sapiens
FGAKPYDGIPAREI

SEQ ID NO: 36922 - protein, 14 aa, Homo Sapiens
GAKPYDGIPAREIP

SEQ ID NO: 36923 - protein, 14 aa, Homo Sapiens
AKPYDGIPAREIPD

SEQ ID NO: 36924 - protein, 14 aa, Homo Sapiens
KPYDGIPAREIPDL

SEQ ID NO: 36925 - protein, 14 aa, Homo Sapiens
PYDGIPAREIPDLL

SEQ ID NO: 36926 - protein, 14 aa, Homo Sapiens
YDGIPAREIPDLLE

SEQ ID NO: 36927 - protein, 14 aa, Homo Sapiens
DGIPAREIPDLLEK

SEQ ID NO: 36928 - protein, 14 aa, Homo Sapiens
GIPAREIPDLLEKG

SEQ ID NO: 36929 - protein, 14 aa, Homo Sapiens
IPAREIPDLLEKGE

SEQ ID NO: 36930 - protein, 14 aa, Homo Sapiens
PAREIPDLLEKGER

SEQ ID NO: 36931 - protein, 14 aa, Homo Sapiens
AREIPDLLEKGERL

SEQ ID NO: 36932 - protein, 14 aa, Homo Sapiens
REIPDLLEKGERLP

SEQ ID NO: 36933 - protein, 14 aa, Homo Sapiens
EIPDLLEKGERLPQ

SEQ ID NO: 36934 - protein, 14 aa, Homo Sapiens
IPDLLEKGERLPQP

SEQ ID NO: 36935 - protein, 14 aa, Homo Sapiens
PDLLEKGERLPQPP

SEQ ID NO: 36936 - protein, 14 aa, Homo Sapiens
DLLEKGERLPQPPI

SEQ ID NO: 36937 - protein, 14 aa, Homo Sapiens
LLEKGERLPQPPIC

SEQ ID NO: 36938 - protein, 14 aa, Homo Sapiens
LEKGERLPQPPICT

SEQ ID NO: 36939 - protein, 14 aa, Homo Sapiens
EKGERLPQPPICTI

SEQ ID NO: 36940 - protein, 14 aa, Homo Sapiens
KGERLPQPPICTID

SEQ ID NO: 36941 - protein, 14 aa, Homo Sapiens
GERLPQPPICTIDV

SEQ ID NO: 36942 - protein, 14 aa, Homo Sapiens
ERLPQPPICTIDVY

SEQ ID NO: 36943 - protein, 14 aa, Homo Sapiens
RLPQPPICTIDVYM

SEQ ID NO: 36944 - protein, 14 aa, Homo Sapiens
LPQPPICTIDVYMI

SEQ ID NO: 36945 - protein, 14 aa, Homo Sapiens
PQPPICTIDVYMIM

SEQ ID NO: 36946 - protein, 14 aa, Homo Sapiens
QPPICTIDVYMIMV

SEQ ID NO: 36947 - protein, 14 aa, Homo Sapiens
PPICTIDVYMIMVK

SEQ ID NO: 36948 - protein, 14 aa, Homo Sapiens
PICTIDVYMIMVKC

SEQ ID NO: 36949 - protein, 14 aa, Homo Sapiens
ICTIDVYMIMVKCW

SEQ ID NO: 36950 - protein, 14 aa, Homo Sapiens
CTIDVYMIMVKCWM

SEQ ID NO: 36951 - protein, 14 aa, Homo Sapiens
TIDVYMIMVKCWMI

SEQ ID NO: 36952 - protein, 14 aa, Homo Sapiens
IDVYMIMVKCWMID

SEQ ID NO: 36953 - protein, 14 aa, Homo Sapiens
DVYMIMVKCWMIDS

SEQ ID NO: 36954 - protein, 14 aa, Homo Sapiens
VYMIMVKCWMIDSE

SEQ ID NO: 36955 - protein, 14 aa, Homo Sapiens
YMIMVKCWMIDSEC

SEQ ID NO: 36956 - protein, 14 aa, Homo Sapiens
MIMVKCWMIDSECR

SEQ ID NO: 36957 - protein, 14 aa, Homo Sapiens
IMVKCWMIDSECRP

SEQ ID NO: 36958 - protein, 14 aa, Homo Sapiens
MVKCWMIDSECRPR

SEQ ID NO: 36959 - protein, 14 aa, Homo Sapiens
VKCWMIDSECRPRF

SEQ ID NO: 36960 - protein, 14 aa, Homo Sapiens
KCWMIDSECRPRFR

SEQ ID NO: 36961 - protein, 14 aa, Homo Sapiens
CWMIDSECRPRFRE

SEQ ID NO: 36962 - protein, 14 aa, Homo Sapiens
WMIDSECRPRFREL

SEQ ID NO: 36963 - protein, 14 aa, Homo Sapiens
MIDSECRPRFRELV

SEQ ID NO: 36964 - protein, 14 aa, Homo Sapiens
IDSECRPRFRELVS

SEQ ID NO: 36965 - protein, 14 aa, Homo Sapiens
DSECRPRFRELVSE

SEQ ID NO: 36966 - protein, 14 aa, Homo Sapiens
SECRPRFRELVSEF

SEQ ID NO: 36967 - protein, 14 aa, Homo Sapiens
ECRPRFRELVSEFS

SEQ ID NO: 36968 - protein, 14 aa, Homo Sapiens
CRPRFRELVSEFSR

SEQ ID NO: 36969 - protein, 14 aa, Homo Sapiens
RPRFRELVSEFSRM

SEQ ID NO: 36970 - protein, 14 aa, Homo Sapiens
PRFRELVSEFSRMA

SEQ ID NO: 36971 - protein, 14 aa, Homo Sapiens
RFRELVSEFSRMAR

SEQ ID NO: 36972 - protein, 14 aa, Homo Sapiens
FRELVSEFSRMARD

SEQ ID NO: 36973 - protein, 14 aa, Homo Sapiens
RELVSEFSRMARDP

SEQ ID NO: 36974 - protein, 14 aa, Homo Sapiens
ELVSEFSRMARDPQ

SEQ ID NO: 36975 - protein, 14 aa, Homo Sapiens
LVSEFSRMARDPQR

SEQ ID NO: 36976 - protein, 14 aa, Homo Sapiens
VSEFSRMARDPQRF

SEQ ID NO: 36977 - protein, 14 aa, Homo Sapiens
SEFSRMARDPQRFV

SEQ ID NO: 36978 - protein, 14 aa, Homo Sapiens
EFSRMARDPQRFVV

SEQ ID NO: 36979 - protein, 14 aa, Homo Sapiens
FSRMARDPQRFVVI

SEQ ID NO: 36980 - protein, 14 aa, Homo Sapiens
SRMARDPQRFVVIQ

SEQ ID NO: 36981 - protein, 14 aa, Homo Sapiens
RMARDPQRFVVIQN

SEQ ID NO: 36982 - protein, 14 aa, Homo Sapiens
MARDPQRFVVIQNE

SEQ ID NO: 36983 - protein, 14 aa, Homo Sapiens
ARDPQRFVVIQNED

SEQ ID NO: 36984 - protein, 14 aa, Homo Sapiens
RDPQRFVVIQNEDL

SEQ ID NO: 36985 - protein, 14 aa, Homo Sapiens
DPQRFVVIQNEDLG

SEQ ID NO: 36986 - protein, 14 aa, Homo Sapiens
PQRFVVIQNEDLGP

SEQ ID NO: 36987 - protein, 14 aa, Homo Sapiens
QRFVVIQNEDLGPA

SEQ ID NO: 36988 - protein, 14 aa, Homo Sapiens
RFVVIQNEDLGPAS

SEQ ID NO: 36989 - protein, 14 aa, Homo Sapiens
FVVIQNEDLGPASP

SEQ ID NO: 36990 - protein, 14 aa, Homo Sapiens
VVIQNEDLGPASPL

SEQ ID NO: 36991 - protein, 14 aa, Homo Sapiens
VIQNEDLGPASPLD

SEQ ID NO: 36992 - protein, 14 aa, Homo Sapiens
IQNEDLGPASPLDS

SEQ ID NO: 36993 - protein, 14 aa, Homo Sapiens
QNEDLGPASPLDST

SEQ ID NO: 36994 - protein, 14 aa, Homo Sapiens
NEDLGPASPLDSTF

SEQ ID NO: 36995 - protein, 14 aa, Homo Sapiens
EDLGPASPLDSTFY

SEQ ID NO: 36996 - protein, 14 aa, Homo Sapiens
DLGPASPLDSTFYR

SEQ ID NO: 36997 - protein, 14 aa, Homo Sapiens
LGPASPLDSTFYRS

SEQ ID NO: 36998 - protein, 14 aa, Homo Sapiens
GPASPLDSTFYRSL

SEQ ID NO: 36999 - protein, 14 aa, Homo Sapiens
PASPLDSTFYRSLL

SEQ ID NO: 37000 - protein, 14 aa, Homo Sapiens
ASPLDSTFYRSLLE

SEQ ID NO: 37001 - protein, 14 aa, Homo Sapiens
SPLDSTFYRSLLED

SEQ ID NO: 37002 - protein, 14 aa, Homo Sapiens
PLDSTFYRSLLEDD

SEQ ID NO: 37003 - protein, 14 aa, Homo Sapiens
LDSTFYRSLLEDDD

SEQ ID NO: 37004 - protein, 14 aa, Homo Sapiens
DSTFYRSLLEDDDM

SEQ ID NO: 37005 - protein, 14 aa, Homo Sapiens
STFYRSLLEDDDMG

SEQ ID NO: 37006 - protein, 14 aa, Homo Sapiens
TFYRSLLEDDDMGD

SEQ ID NO: 37007 - protein, 14 aa, Homo Sapiens
FYRSLLEDDDMGDL

SEQ ID NO: 37008 - protein, 14 aa, Homo Sapiens
YRSLLEDDDMGDLV

SEQ ID NO: 37009 - protein, 14 aa, Homo Sapiens
RSLLEDDDMGDLVD

SEQ ID NO: 37010 - protein, 14 aa, Homo Sapiens
SLLEDDDMGDLVDA

SEQ ID NO: 37011 - protein, 14 aa, Homo Sapiens
LLEDDDMGDLVDAE

SEQ ID NO: 37012 - protein, 14 aa, Homo Sapiens
LEDDDMGDLVDAEE

SEQ ID NO: 37013 - protein, 14 aa, Homo Sapiens
EDDDMGDLVDAEEY

SEQ ID NO: 37014 - protein, 14 aa, Homo Sapiens
DDDMGDLVDAEEYL

SEQ ID NO: 37015 - protein, 14 aa, Homo Sapiens
DDMGDLVDAEEYLV

SEQ ID NO: 37016 - protein, 14 aa, Homo Sapiens
DMGDLVDAEEYLVP

SEQ ID NO: 37017 - protein, 14 aa, Homo Sapiens
MGDLVDAEEYLVPQ

SEQ ID NO: 37018 - protein, 14 aa, Homo Sapiens
GDLVDAEEYLVPQQ

SEQ ID NO: 37019 - protein, 14 aa, Homo Sapiens
DLVDAEEYLVPQQG

SEQ ID NO: 37020 - protein, 14 aa, Homo Sapiens
LVDAEEYLVPQQGF

SEQ ID NO: 37021 - protein, 14 aa, Homo Sapiens
VDAEEYLVPQQGFF

SEQ ID NO: 37022 - protein, 14 aa, Homo Sapiens
DAEEYLVPQQGFFC

SEQ ID NO: 37023 - protein, 14 aa, Homo Sapiens
AEEYLVPQQGFFCP

SEQ ID NO: 37024 - protein, 14 aa, Homo Sapiens
EEYLVPQQGFFCPD

SEQ ID NO: 37025 - protein, 14 aa, Homo Sapiens
EYLVPQQGFFCPDP

SEQ ID NO: 37026 - protein, 14 aa, Homo Sapiens
YLVPQQGFFCPDPA

SEQ ID NO: 37027 - protein, 14 aa, Homo Sapiens
LVPQQGFFCPDPAP

SEQ ID NO: 37028 - protein, 14 aa, Homo Sapiens
VPQQGFFCPDPAPG

SEQ ID NO: 37029 - protein, 14 aa, Homo Sapiens
PQQGFFCPDPAPGA

SEQ ID NO: 37030 - protein, 14 aa, Homo Sapiens
QQGFFCPDPAPGAG

SEQ ID NO: 37031 - protein, 14 aa, Homo Sapiens
QGFFCPDPAPGAGG

SEQ ID NO: 37032 - protein, 14 aa, Homo Sapiens
GFFCPDPAPGAGGM

SEQ ID NO: 37033 - protein, 14 aa, Homo Sapiens
FFCPDPAPGAGGMV

SEQ ID NO: 37034 - protein, 14 aa, Homo Sapiens
FCPDPAPGAGGMVH

SEQ ID NO: 37035 - protein, 14 aa, Homo Sapiens
CPDPAPGAGGMVHH

SEQ ID NO: 37036 - protein, 14 aa, Homo Sapiens
PDPAPGAGGMVHHR

SEQ ID NO: 37037 - protein, 14 aa, Homo Sapiens
DPAPGAGGMVHHRH

SEQ ID NO: 37038 - protein, 14 aa, Homo Sapiens
PAPGAGGMVHHRHR

SEQ ID NO: 37039 - protein, 14 aa, Homo Sapiens
APGAGGMVHHRHRS

SEQ ID NO: 37040 - protein, 14 aa, Homo Sapiens
PGAGGMVHHRHRSS

SEQ ID NO: 37041 - protein, 14 aa, Homo Sapiens
GAGGMVHHRHRSSS

SEQ ID NO: 37042 - protein, 14 aa, Homo Sapiens
AGGMVHHRHRSSST

SEQ ID NO: 37043 - protein, 14 aa, Homo Sapiens
GGMVHHRHRSSSTR

SEQ ID NO: 37044 - protein, 14 aa, Homo Sapiens
GMVHHRHRSSSTRS

SEQ ID NO: 37045 - protein, 14 aa, Homo Sapiens
MVHHRHRSSSTRSG

SEQ ID NO: 37046 - protein, 14 aa, Homo Sapiens
VHHRHRSSSTRSGG

SEQ ID NO: 37047 - protein, 14 aa, Homo Sapiens
HHRHRSSSTRSGGG

SEQ ID NO: 37048 - protein, 14 aa, Homo Sapiens
HRHRSSSTRSGGGD

SEQ ID NO: 37049 - protein, 14 aa, Homo Sapiens
RHRSSSTRSGGGDL

SEQ ID NO: 37050 - protein, 14 aa, Homo Sapiens
HRSSSTRSGGGDLT

SEQ ID NO: 37051 - protein, 14 aa, Homo Sapiens
RSSSTRSGGGDLTL

SEQ ID NO: 37052 - protein, 14 aa, Homo Sapiens
SSSTRSGGGDLTLG

SEQ ID NO: 37053 - protein, 14 aa, Homo Sapiens
SSTRSGGGDLTLGL

SEQ ID NO: 37054 - protein, 14 aa, Homo Sapiens
STRSGGGDLTLGLE

SEQ ID NO: 37055 - protein, 14 aa, Homo Sapiens
TRSGGGDLTLGLEP

SEQ ID NO: 37056 - protein, 14 aa, Homo Sapiens
RSGGGDLTLGLEPS

SEQ ID NO: 37057 - protein, 14 aa, Homo Sapiens
SGGGDLTLGLEPSE

SEQ ID NO: 37058 - protein, 14 aa, Homo Sapiens
GGGDLTLGLEPSEE

SEQ ID NO: 37059 - protein, 14 aa, Homo Sapiens
GGDLTLGLEPSEEE

SEQ ID NO: 37060 - protein, 14 aa, Homo Sapiens
GDLTLGLEPSEEEA

SEQ ID NO: 37061 - protein, 14 aa, Homo Sapiens
DLTLGLEPSEEEAP

SEQ ID NO: 37062 - protein, 14 aa, Homo Sapiens
LTLGLEPSEEEAPR

SEQ ID NO: 37063 - protein, 14 aa, Homo Sapiens
TLGLEPSEEEAPRS

SEQ ID NO: 37064 - protein, 14 aa, Homo Sapiens
LGLEPSEEEAPRSP

SEQ ID NO: 37065 - protein, 14 aa, Homo Sapiens
GLEPSEEEAPRSPL

SEQ ID NO: 37066 - protein, 14 aa, Homo Sapiens
LEPSEEEAPRSPLA

SEQ ID NO: 37067 - protein, 14 aa, Homo Sapiens
EPSEEEAPRSPLAP

SEQ ID NO: 37068 - protein, 14 aa, Homo Sapiens
PSEEEAPRSPLAPS

SEQ ID NO: 37069 - protein, 14 aa, Homo Sapiens
SEEEAPRSPLAPSE

SEQ ID NO: 37070 - protein, 14 aa, Homo Sapiens
EEEAPRSPLAPSEG

SEQ ID NO: 37071 - protein, 14 aa, Homo Sapiens
EEAPRSPLAPSEGA

SEQ ID NO: 37072 - protein, 14 aa, Homo Sapiens
EAPRSPLAPSEGAG

SEQ ID NO: 37073 - protein, 14 aa, Homo Sapiens
APRSPLAPSEGAGS

SEQ ID NO: 37074 - protein, 14 aa, Homo Sapiens
PRSPLAPSEGAGSD

SEQ ID NO: 37075 - protein, 14 aa, Homo Sapiens
RSPLAPSEGAGSDV

SEQ ID NO: 37076 - protein, 14 aa, Homo Sapiens
SPLAPSEGAGSDVF

SEQ ID NO: 37077 - protein, 14 aa, Homo Sapiens
PLAPSEGAGSDVFD

SEQ ID NO: 37078 - protein, 14 aa, Homo Sapiens
LAPSEGAGSDVFDG

SEQ ID NO: 37079 - protein, 14 aa, Homo Sapiens
APSEGAGSDVFDGD

SEQ ID NO: 37080 - protein, 14 aa, Homo Sapiens
PSEGAGSDVFDGDL

SEQ ID NO: 37081 - protein, 14 aa, Homo Sapiens
SEGAGSDVFDGDLG

SEQ ID NO: 37082 - protein, 14 aa, Homo Sapiens
EGAGSDVFDGDLGM

SEQ ID NO: 37083 - protein, 14 aa, Homo Sapiens
GAGSDVFDGDLGMG

SEQ ID NO: 37084 - protein, 14 aa, Homo Sapiens
AGSDVFDGDLGMGA

SEQ ID NO: 37085 - protein, 14 aa, Homo Sapiens
GSDVFDGDLGMGAA

SEQ ID NO: 37086 - protein, 14 aa, Homo Sapiens
SDVFDGDLGMGAAK

SEQ ID NO: 37087 - protein, 14 aa, Homo Sapiens
DVFDGDLGMGAAKG

SEQ ID NO: 37088 - protein, 14 aa, Homo Sapiens
VFDGDLGMGAAKGL

SEQ ID NO: 37089 - protein, 14 aa, Homo Sapiens
FDGDLGMGAAKGLQ

SEQ ID NO: 37090 - protein, 14 aa, Homo Sapiens
DGDLGMGAAKGLQS

SEQ ID NO: 37091 - protein, 14 aa, Homo Sapiens
GDLGMGAAKGLQSL

SEQ ID NO: 37092 - protein, 14 aa, Homo Sapiens
DLGMGAAKGLQSLP

SEQ ID NO: 37093 - protein, 14 aa, Homo Sapiens
LGMGAAKGLQSLPT

SEQ ID NO: 37094 - protein, 14 aa, Homo Sapiens
GMGAAKGLQSLPTH

SEQ ID NO: 37095 - protein, 14 aa, Homo Sapiens
MGAAKGLQSLPTHD

SEQ ID NO: 37096 - protein, 14 aa, Homo Sapiens
GAAKGLQSLPTHDP

SEQ ID NO: 37097 - protein, 14 aa, Homo Sapiens
AAKGLQSLPTHDPS

SEQ ID NO: 37098 - protein, 14 aa, Homo Sapiens
AKGLQSLPTHDPSP

SEQ ID NO: 37099 - protein, 14 aa, Homo Sapiens
KGLQSLPTHDPSPL

SEQ ID NO: 37100 - protein, 14 aa, Homo Sapiens
GLQSLPTHDPSPLQ

SEQ ID NO: 37101 - protein, 14 aa, Homo Sapiens
LQSLPTHDPSPLQR

SEQ ID NO: 37102 - protein, 14 aa, Homo Sapiens
QSLPTHDPSPLQRY

SEQ ID NO: 37103 - protein, 14 aa, Homo Sapiens
SLPTHDPSPLQRYS

SEQ ID NO: 37104 - protein, 14 aa, Homo Sapiens
LPTHDPSPLQRYSE

SEQ ID NO: 37105 - protein, 14 aa, Homo Sapiens
PTHDPSPLQRYSED

SEQ ID NO: 37106 - protein, 14 aa, Homo Sapiens
THDPSPLQRYSEDP

SEQ ID NO: 37107 - protein, 14 aa, Homo Sapiens
HDPSPLQRYSEDPT

SEQ ID NO: 37108 - protein, 14 aa, Homo Sapiens
DPSPLQRYSEDPTV

SEQ ID NO: 37109 - protein, 14 aa, Homo Sapiens
PSPLQRYSEDPTVP

SEQ ID NO: 37110 - protein, 14 aa, Homo Sapiens
SPLQRYSEDPTVPL

SEQ ID NO: 37111 - protein, 14 aa, Homo Sapiens
PLQRYSEDPTVPLP

SEQ ID NO: 37112 - protein, 14 aa, Homo Sapiens
LQRYSEDPTVPLPS

SEQ ID NO: 37113 - protein, 14 aa, Homo Sapiens
QRYSEDPTVPLPSE

SEQ ID NO: 37114 - protein, 14 aa, Homo Sapiens
RYSEDPTVPLPSET

SEQ ID NO: 37115 - protein, 14 aa, Homo Sapiens
YSEDPTVPLPSETD

SEQ ID NO: 37116 - protein, 14 aa, Homo Sapiens
SEDPTVPLPSETDG

SEQ ID NO: 37117 - protein, 14 aa, Homo Sapiens
EDPTVPLPSETDGY

SEQ ID NO: 37118 - protein, 14 aa, Homo Sapiens
DPTVPLPSETDGYV

SEQ ID NO: 37119 - protein, 14 aa, Homo Sapiens
PTVPLPSETDGYVA

SEQ ID NO: 37120 - protein, 14 aa, Homo Sapiens
TVPLPSETDGYVAP

SEQ ID NO: 37121 - protein, 14 aa, Homo Sapiens
VPLPSETDGYVAPL

SEQ ID NO: 37122 - protein, 14 aa, Homo Sapiens
PLPSETDGYVAPLT

SEQ ID NO: 37123 - protein, 14 aa, Homo Sapiens
LPSETDGYVAPLTC

SEQ ID NO: 37124 - protein, 14 aa, Homo Sapiens
PSETDGYVAPLTCS

SEQ ID NO: 37125 - protein, 14 aa, Homo Sapiens
SETDGYVAPLTCSP

SEQ ID NO: 37126 - protein, 14 aa, Homo Sapiens
ETDGYVAPLTCSPQ

SEQ ID NO: 37127 - protein, 14 aa, Homo Sapiens
TDGYVAPLTCSPQP

SEQ ID NO: 37128 - protein, 14 aa, Homo Sapiens
DGYVAPLTCSPQPE

SEQ ID NO: 37129 - protein, 14 aa, Homo Sapiens
GYVAPLTCSPQPEY

SEQ ID NO: 37130 - protein, 14 aa, Homo Sapiens
YVAPLTCSPQPEYV

SEQ ID NO: 37131 - protein, 14 aa, Homo Sapiens
VAPLTCSPQPEYVN

SEQ ID NO: 37132 - protein, 14 aa, Homo Sapiens
APLTCSPQPEYVNQ

SEQ ID NO: 37133 - protein, 14 aa, Homo Sapiens
PLTCSPQPEYVNQP

SEQ ID NO: 37134 - protein, 14 aa, Homo Sapiens
LTCSPQPEYVNQPD

SEQ ID NO: 37135 - protein, 14 aa, Homo Sapiens
TCSPQPEYVNQPDV

SEQ ID NO: 37136 - protein, 14 aa, Homo Sapiens
CSPQPEYVNQPDVR

SEQ ID NO: 37137 - protein, 14 aa, Homo Sapiens
SPQPEYVNQPDVRP

SEQ ID NO: 37138 - protein, 14 aa, Homo Sapiens
PQPEYVNQPDVRPQ

SEQ ID NO: 37139 - protein, 14 aa, Homo Sapiens
QPEYVNQPDVRPQP

SEQ ID NO: 37140 - protein, 14 aa, Homo Sapiens
PEYVNQPDVRPQPP

SEQ ID NO: 37141 - protein, 14 aa, Homo Sapiens
EYVNQPDVRPQPPS

SEQ ID NO: 37142 - protein, 14 aa, Homo Sapiens
YVNQPDVRPQPPSP

SEQ ID NO: 37143 - protein, 14 aa, Homo Sapiens
VNQPDVRPQPPSPR

SEQ ID NO: 37144 - protein, 14 aa, Homo Sapiens
NQPDVRPQPPSPRE

SEQ ID NO: 37145 - protein, 14 aa, Homo Sapiens
QPDVRPQPPSPREG

SEQ ID NO: 37146 - protein, 14 aa, Homo Sapiens
PDVRPQPPSPREGP

SEQ ID NO: 37147 - protein, 14 aa, Homo Sapiens
DVRPQPPSPREGPL

SEQ ID NO: 37148 - protein, 14 aa, Homo Sapiens
VRPQPPSPREGPLP

SEQ ID NO: 37149 - protein, 14 aa, Homo Sapiens
RPQPPSPREGPLPA

SEQ ID NO: 37150 - protein, 14 aa, Homo Sapiens
PQPPSPREGPLPAA

SEQ ID NO: 37151 - protein, 14 aa, Homo Sapiens
QPPSPREGPLPAAR

SEQ ID NO: 37152 - protein, 14 aa, Homo Sapiens
PPSPREGPLPAARP

SEQ ID NO: 37153 - protein, 14 aa, Homo Sapiens
PSPREGPLPAARPA

SEQ ID NO: 37154 - protein, 14 aa, Homo Sapiens
SPREGPLPAARPAG

SEQ ID NO: 37155 - protein, 14 aa, Homo Sapiens
PREGPLPAARPAGA

SEQ ID NO: 37156 - protein, 14 aa, Homo Sapiens
REGPLPAARPAGAT

SEQ ID NO: 37157 - protein, 14 aa, Homo Sapiens
EGPLPAARPAGATL

SEQ ID NO: 37158 - protein, 14 aa, Homo Sapiens
GPLPAARPAGATLE

SEQ ID NO: 37159 - protein, 14 aa, Homo Sapiens
PLPAARPAGATLER

SEQ ID NO: 37160 - protein, 14 aa, Homo Sapiens
LPAARPAGATLERP

SEQ ID NO: 37161 - protein, 14 aa, Homo Sapiens
PAARPAGATLERPK

SEQ ID NO: 37162 - protein, 14 aa, Homo Sapiens
AARPAGATLERPKT

SEQ ID NO: 37163 - protein, 14 aa, Homo Sapiens
ARPAGATLERPKTL

SEQ ID NO: 37164 - protein, 14 aa, Homo Sapiens
RPAGATLERPKTLS

SEQ ID NO: 37165 - protein, 14 aa, Homo Sapiens
PAGATLERPKTLSP

SEQ ID NO: 37166 - protein, 14 aa, Homo Sapiens
AGATLERPKTLSPG

SEQ ID NO: 37167 - protein, 14 aa, Homo Sapiens
GATLERPKTLSPGK

SEQ ID NO: 37168 - protein, 14 aa, Homo Sapiens
ATLERPKTLSPGKN

SEQ ID NO: 37169 - protein, 14 aa, Homo Sapiens
TLERPKTLSPGKNG

SEQ ID NO: 37170 - protein, 14 aa, Homo Sapiens
LERPKTLSPGKNGV

SEQ ID NO: 37171 - protein, 14 aa, Homo Sapiens
ERPKTLSPGKNGVV

SEQ ID NO: 37172 - protein, 14 aa, Homo Sapiens
RPKTLSPGKNGVVK

SEQ ID NO: 37173 - protein, 14 aa, Homo Sapiens
PKTLSPGKNGVVKD

SEQ ID NO: 37174 - protein, 14 aa, Homo Sapiens
KTLSPGKNGVVKDV

SEQ ID NO: 37175 - protein, 14 aa, Homo Sapiens
TLSPGKNGVVKDVF

SEQ ID NO: 37176 - protein, 14 aa, Homo Sapiens
LSPGKNGVVKDVFA

SEQ ID NO: 37177 - protein, 14 aa, Homo Sapiens
SPGKNGVVKDVFAF

SEQ ID NO: 37178 - protein, 14 aa, Homo Sapiens
PGKNGVVKDVFAFG

SEQ ID NO: 37179 - protein, 14 aa, Homo Sapiens
GKNGVVKDVFAFGG

SEQ ID NO: 37180 - protein, 14 aa, Homo Sapiens
KNGVVKDVFAFGGA

SEQ ID NO: 37181 - protein, 14 aa, Homo Sapiens
NGVVKDVFAFGGAV

SEQ ID NO: 37182 - protein, 14 aa, Homo Sapiens
GVVKDVFAFGGAVE

SEQ ID NO: 37183 - protein, 14 aa, Homo Sapiens
VVKDVFAFGGAVEN

SEQ ID NO: 37184 - protein, 14 aa, Homo Sapiens
VKDVFAFGGAVENP

SEQ ID NO: 37185 - protein, 14 aa, Homo Sapiens
KDVFAFGGAVENPE

SEQ ID NO: 37186 - protein, 14 aa, Homo Sapiens
DVFAFGGAVENPEY

SEQ ID NO: 37187 - protein, 14 aa, Homo Sapiens
VFAFGGAVENPEYL

SEQ ID NO: 37188 - protein, 14 aa, Homo Sapiens
FAFGGAVENPEYLT

SEQ ID NO: 37189 - protein, 14 aa, Homo Sapiens
AFGGAVENPEYLTP

SEQ ID NO: 37190 - protein, 14 aa, Homo Sapiens
FGGAVENPEYLTPQ

SEQ ID NO: 37191 - protein, 14 aa, Homo Sapiens
GGAVENPEYLTPQG

SEQ ID NO: 37192 - protein, 14 aa, Homo Sapiens
GAVENPEYLTPQGG

SEQ ID NO: 37193 - protein, 14 aa, Homo Sapiens
AVENPEYLTPQGGA

SEQ ID NO: 37194 - protein, 14 aa, Homo Sapiens
VENPEYLTPQGGAA

SEQ ID NO: 37195 - protein, 14 aa, Homo Sapiens
ENPEYLTPQGGAAP

SEQ ID NO: 37196 - protein, 14 aa, Homo Sapiens
NPEYLTPQGGAAPQ

SEQ ID NO: 37197 - protein, 14 aa, Homo Sapiens
PEYLTPQGGAAPQP

SEQ ID NO: 37198 - protein, 14 aa, Homo Sapiens
EYLTPQGGAAPQPH

SEQ ID NO: 37199 - protein, 14 aa, Homo Sapiens
YLTPQGGAAPQPHP

SEQ ID NO: 37200 - protein, 14 aa, Homo Sapiens
LTPQGGAAPQPHPP

SEQ ID NO: 37201 - protein, 14 aa, Homo Sapiens
TPQGGAAPQPHPPP

SEQ ID NO: 37202 - protein, 14 aa, Homo Sapiens
PQGGAAPQPHPPPA

SEQ ID NO: 37203 - protein, 14 aa, Homo Sapiens
QGGAAPQPHPPPAF

SEQ ID NO: 37204 - protein, 14 aa, Homo Sapiens
GGAAPQPHPPPAFS

SEQ ID NO: 37205 - protein, 14 aa, Homo Sapiens
GAAPQPHPPPAFSP

SEQ ID NO: 37206 - protein, 14 aa, Homo Sapiens
AAPQPHPPPAFSPA

SEQ ID NO: 37207 - protein, 14 aa, Homo Sapiens
APQPHPPPAFSPAF

SEQ ID NO: 37208 - protein, 14 aa, Homo Sapiens
PQPHPPPAFSPAFD

SEQ ID NO: 37209 - protein, 14 aa, Homo Sapiens
QPHPPPAFSPAFDN

SEQ ID NO: 37210 - protein, 14 aa, Homo Sapiens
PHPPPAFSPAFDNL

SEQ ID NO: 37211 - protein, 14 aa, Homo Sapiens
HPPPAFSPAFDNLY

SEQ ID NO: 37212 - protein, 14 aa, Homo Sapiens
PPPAFSPAFDNLYY

SEQ ID NO: 37213 - protein, 14 aa, Homo Sapiens
PPAFSPAFDNLYYW

SEQ ID NO: 37214 - protein, 14 aa, Homo Sapiens
PAFSPAFDNLYYWD

SEQ ID NO: 37215 - protein, 14 aa, Homo Sapiens
AFSPAFDNLYYWDQ

SEQ ID NO: 37216 - protein, 14 aa, Homo Sapiens
FSPAFDNLYYWDQD

SEQ ID NO: 37217 - protein, 14 aa, Homo Sapiens
SPAFDNLYYWDQDP

SEQ ID NO: 37218 - protein, 14 aa, Homo Sapiens
PAFDNLYYWDQDPP

SEQ ID NO: 37219 - protein, 14 aa, Homo Sapiens
AFDNLYYWDQDPPE

SEQ ID NO: 37220 - protein, 14 aa, Homo Sapiens
FDNLYYWDQDPPER

SEQ ID NO: 37221 - protein, 14 aa, Homo Sapiens
DNLYYWDQDPPERG

SEQ ID NO: 37222 - protein, 14 aa, Homo Sapiens
NLYYWDQDPPERGA

SEQ ID NO: 37223 - protein, 14 aa, Homo Sapiens
LYYWDQDPPERGAP

SEQ ID NO: 37224 - protein, 14 aa, Homo Sapiens
YYWDQDPPERGAPP

SEQ ID NO: 37225 - protein, 14 aa, Homo Sapiens
YWDQDPPERGAPPS

SEQ ID NO: 37226 - protein, 14 aa, Homo Sapiens
WDQDPPERGAPPST

SEQ ID NO: 37227 - protein, 14 aa, Homo Sapiens
DQDPPERGAPPSTF

SEQ ID NO: 37228 - protein, 14 aa, Homo Sapiens
QDPPERGAPPSTFK

SEQ ID NO: 37229 - protein, 14 aa, Homo Sapiens
DPPERGAPPSTFKG

SEQ ID NO: 37230 - protein, 14 aa, Homo Sapiens
PPERGAPPSTFKGT

SEQ ID NO: 37231 - protein, 14 aa, Homo Sapiens
PERGAPPSTFKGTP

SEQ ID NO: 37232 - protein, 14 aa, Homo Sapiens
ERGAPPSTFKGTPT

SEQ ID NO: 37233 - protein, 14 aa, Homo Sapiens
RGAPPSTFKGTPTA

SEQ ID NO: 37234 - protein, 14 aa, Homo Sapiens
GAPPSTFKGTPTAE

SEQ ID NO: 37235 - protein, 14 aa, Homo Sapiens
APPSTFKGTPTAEN

SEQ ID NO: 37236 - protein, 14 aa, Homo Sapiens
PPSTFKGTPTAENP

SEQ ID NO: 37237 - protein, 14 aa, Homo Sapiens
PSTFKGTPTAENPE

SEQ ID NO: 37238 - protein, 14 aa, Homo Sapiens
STFKGTPTAENPEY

SEQ ID NO: 37239 - protein, 14 aa, Homo Sapiens
TFKGTPTAENPEYL

SEQ ID NO: 37240 - protein, 14 aa, Homo Sapiens
FKGTPTAENPEYLG

SEQ ID NO: 37241 - protein, 14 aa, Homo Sapiens
KGTPTAENPEYLGL

SEQ ID NO: 37242 - protein, 14 aa, Homo Sapiens
GTPTAENPEYLGLD

SEQ ID NO: 37243 - protein, 14 aa, Homo Sapiens
TPTAENPEYLGLDV

SEQ ID NO: 37244 - protein, 14 aa, Homo Sapiens
PTAENPEYLGLDVP

SEQ ID NO: 37245 - protein, 14 aa, Homo Sapiens
TAENPEYLGLDVPV

SEQ ID NO: 37246 - protein, 15 aa, Homo Sapiens
MELAALCRWGLLLAL

SEQ ID NO: 37247 - protein, 15 aa, Homo Sapiens
ELAALCRWGLLLALL

SEQ ID NO: 37248 - protein, 15 aa, Homo Sapiens
LAALCRWGLLLALLP

SEQ ID NO: 37249 - protein, 15 aa, Homo Sapiens
AALCRWGLLLALLPP

SEQ ID NO: 37250 - protein, 15 aa, Homo Sapiens
ALCRWGLLLALLPPG

SEQ ID NO: 37251 - protein, 15 aa, Homo Sapiens
LCRWGLLLALLPPGA

SEQ ID NO: 37252 - protein, 15 aa, Homo Sapiens
CRWGLLLALLPPGAA

SEQ ID NO: 37253 - protein, 15 aa, Homo Sapiens
RWGLLLALLPPGAAS

SEQ ID NO: 37254 - protein, 15 aa, Homo Sapiens
WGLLLALLPPGAAST

SEQ ID NO: 37255 - protein, 15 aa, Homo Sapiens
GLLLALLPPGAASTQ

SEQ ID NO: 37256 - protein, 15 aa, Homo Sapiens
LLLALLPPGAASTQV

SEQ ID NO: 37257 - protein, 15 aa, Homo Sapiens
LLALLPPGAASTQVC

SEQ ID NO: 37258 - protein, 15 aa, Homo Sapiens
LALLPPGAASTQVCT

SEQ ID NO: 37259 - protein, 15 aa, Homo Sapiens
ALLPPGAASTQVCTG

SEQ ID NO: 37260 - protein, 15 aa, Homo Sapiens
LLPPGAASTQVCTGT

SEQ ID NO: 37261 - protein, 15 aa, Homo Sapiens
LPPGAASTQVCTGTD

SEQ ID NO: 37262 - protein, 15 aa, Homo Sapiens
PPGAASTQVCTGTDM

SEQ ID NO: 37263 - protein, 15 aa, Homo Sapiens
PGAASTQVCTGTDMK

SEQ ID NO: 37264 - protein, 15 aa, Homo Sapiens
GAASTQVCTGTDMKL

SEQ ID NO: 37265 - protein, 15 aa, Homo Sapiens
AASTQVCTGTDMKLR

SEQ ID NO: 37266 - protein, 15 aa, Homo Sapiens
ASTQVCTGTDMKLRL

SEQ ID NO: 37267 - protein, 15 aa, Homo Sapiens
STQVCTGTDMKLRLP

SEQ ID NO: 37268 - protein, 15 aa, Homo Sapiens
TQVCTGTDMKLRLPA

SEQ ID NO: 37269 - protein, 15 aa, Homo Sapiens
QVCTGTDMKLRLPAS

SEQ ID NO: 37270 - protein, 15 aa, Homo Sapiens
VCTGTDMKLRLPASP

SEQ ID NO: 37271 - protein, 15 aa, Homo Sapiens
CTGTDMKLRLPASPE

SEQ ID NO: 37272 - protein, 15 aa, Homo Sapiens
TGTDMKLRLPASPET

SEQ ID NO: 37273 - protein, 15 aa, Homo Sapiens
GTDMKLRLPASPETH

SEQ ID NO: 37274 - protein, 15 aa, Homo Sapiens
TDMKLRLPASPETHL

SEQ ID NO: 37275 - protein, 15 aa, Homo Sapiens
DMKLRLPASPETHLD

SEQ ID NO: 37276 - protein, 15 aa, Homo Sapiens
MKLRLPASPETHLDM

SEQ ID NO: 37277 - protein, 15 aa, Homo Sapiens
KLRLPASPETHLDML

SEQ ID NO: 37278 - protein, 15 aa, Homo Sapiens
LRLPASPETHLDMLR

SEQ ID NO: 37279 - protein, 15 aa, Homo Sapiens
RLPASPETHLDMLRH

SEQ ID NO: 37280 - protein, 15 aa, Homo Sapiens
LPASPETHLDMLRHL

SEQ ID NO: 37281 - protein, 15 aa, Homo Sapiens
PASPETHLDMLRHLY

SEQ ID NO: 37282 - protein, 15 aa, Homo Sapiens
ASPETHLDMLRHLYQ

SEQ ID NO: 37283 - protein, 15 aa, Homo Sapiens
SPETHLDMLRHLYQG

SEQ ID NO: 37284 - protein, 15 aa, Homo Sapiens
PETHLDMLRHLYQGC

SEQ ID NO: 37285 - protein, 15 aa, Homo Sapiens
ETHLDMLRHLYQGCQ

SEQ ID NO: 37286 - protein, 15 aa, Homo Sapiens
THLDMLRHLYQGCQV

SEQ ID NO: 37287 - protein, 15 aa, Homo Sapiens
HLDMLRHLYQGCQVV

SEQ ID NO: 37288 - protein, 15 aa, Homo Sapiens
LDMLRHLYQGCQVVQ

SEQ ID NO: 37289 - protein, 15 aa, Homo Sapiens
DMLRHLYQGCQVVQG

SEQ ID NO: 37290 - protein, 15 aa, Homo Sapiens
MLRHLYQGCQVVQGN

SEQ ID NO: 37291 - protein, 15 aa, Homo Sapiens
LRHLYQGCQVVQGNL

SEQ ID NO: 37292 - protein, 15 aa, Homo Sapiens
RHLYQGCQVVQGNLE

SEQ ID NO: 37293 - protein, 15 aa, Homo Sapiens
HLYQGCQVVQGNLEL

SEQ ID NO: 37294 - protein, 15 aa, Homo Sapiens
LYQGCQVVQGNLELT

SEQ ID NO: 37295 - protein, 15 aa, Homo Sapiens
YQGCQVVQGNLELTY

SEQ ID NO: 37296 - protein, 15 aa, Homo Sapiens
QGCQVVQGNLELTYL

SEQ ID NO: 37297 - protein, 15 aa, Homo Sapiens
GCQVVQGNLELTYLP

SEQ ID NO: 37298 - protein, 15 aa, Homo Sapiens
CQVVQGNLELTYLPT

SEQ ID NO: 37299 - protein, 15 aa, Homo Sapiens
QVVQGNLELTYLPTN

SEQ ID NO: 37300 - protein, 15 aa, Homo Sapiens
VVQGNLELTYLPTNA

SEQ ID NO: 37301 - protein, 15 aa, Homo Sapiens
VQGNLELTYLPTNAS

SEQ ID NO: 37302 - protein, 15 aa, Homo Sapiens
QGNLELTYLPTNASL

SEQ ID NO: 37303 - protein, 15 aa, Homo Sapiens
GNLELTYLPTNASLS

SEQ ID NO: 37304 - protein, 15 aa, Homo Sapiens
NLELTYLPTNASLSF

SEQ ID NO: 37305 - protein, 15 aa, Homo Sapiens
LELTYLPTNASLSFL

SEQ ID NO: 37306 - protein, 15 aa, Homo Sapiens
ELTYLPTNASLSFLQ

SEQ ID NO: 37307 - protein, 15 aa, Homo Sapiens
LTYLPTNASLSFLQD

SEQ ID NO: 37308 - protein, 15 aa, Homo Sapiens
TYLPTNASLSFLQDI

SEQ ID NO: 37309 - protein, 15 aa, Homo Sapiens
YLPTNASLSFLQDIQ

SEQ ID NO: 37310 - protein, 15 aa, Homo Sapiens
LPTNASLSFLQDIQE

SEQ ID NO: 37311 - protein, 15 aa, Homo Sapiens
PTNASLSFLQDIQEV

SEQ ID NO: 37312 - protein, 15 aa, Homo Sapiens
TNASLSFLQDIQEVQ

SEQ ID NO: 37313 - protein, 15 aa, Homo Sapiens
NASLSFLQDIQEVQG

SEQ ID NO: 37314 - protein, 15 aa, Homo Sapiens
ASLSFLQDIQEVQGY

SEQ ID NO: 37315 - protein, 15 aa, Homo Sapiens
SLSFLQDIQEVQGYV

SEQ ID NO: 37316 - protein, 15 aa, Homo Sapiens
LSFLQDIQEVQGYVL

SEQ ID NO: 37317 - protein, 15 aa, Homo Sapiens
SFLQDIQEVQGYVLI

SEQ ID NO: 37318 - protein, 15 aa, Homo Sapiens
FLQDIQEVQGYVLIA

SEQ ID NO: 37319 - protein, 15 aa, Homo Sapiens
LQDIQEVQGYVLIAH

SEQ ID NO: 37320 - protein, 15 aa, Homo Sapiens
QDIQEVQGYVLIAHN

SEQ ID NO: 37321 - protein, 15 aa, Homo Sapiens
DIQEVQGYVLIAHNQ

SEQ ID NO: 37322 - protein, 15 aa, Homo Sapiens
IQEVQGYVLIAHNQV

SEQ ID NO: 37323 - protein, 15 aa, Homo Sapiens
QEVQGYVLIAHNQVR

SEQ ID NO: 37324 - protein, 15 aa, Homo Sapiens
EVQGYVLIAHNQVRQ

SEQ ID NO: 37325 - protein, 15 aa, Homo Sapiens
VQGYVLIAHNQVRQV

SEQ ID NO: 37326 - protein, 15 aa, Homo Sapiens
QGYVLIAHNQVRQVP

SEQ ID NO: 37327 - protein, 15 aa, Homo Sapiens
GYVLIAHNQVRQVPL

SEQ ID NO: 37328 - protein, 15 aa, Homo Sapiens
YVLIAHNQVRQVPLQ

SEQ ID NO: 37329 - protein, 15 aa, Homo Sapiens
VLIAHNQVRQVPLQR

SEQ ID NO: 37330 - protein, 15 aa, Homo Sapiens
LIAHNQVRQVPLQRL

SEQ ID NO: 37331 - protein, 15 aa, Homo Sapiens
IAHNQVRQVPLQRLR

SEQ ID NO: 37332 - protein, 15 aa, Homo Sapiens
AHNQVRQVPLQRLRI

SEQ ID NO: 37333 - protein, 15 aa, Homo Sapiens
HNQVRQVPLQRLRIV

SEQ ID NO: 37334 - protein, 15 aa, Homo Sapiens
NQVRQVPLQRLRIVR

SEQ ID NO: 37335 - protein, 15 aa, Homo Sapiens
QVRQVPLQRLRIVRG

SEQ ID NO: 37336 - protein, 15 aa, Homo Sapiens
VRQVPLQRLRIVRGT

SEQ ID NO: 37337 - protein, 15 aa, Homo Sapiens
RQVPLQRLRIVRGTQ

SEQ ID NO: 37338 - protein, 15 aa, Homo Sapiens
QVPLQRLRIVRGTQL

SEQ ID NO: 37339 - protein, 15 aa, Homo Sapiens
VPLQRLRIVRGTQLF

SEQ ID NO: 37340 - protein, 15 aa, Homo Sapiens
PLQRLRIVRGTQLFE

SEQ ID NO: 37341 - protein, 15 aa, Homo Sapiens
LQRLRIVRGTQLFED

SEQ ID NO: 37342 - protein, 15 aa, Homo Sapiens
QRLRIVRGTQLFEDN

SEQ ID NO: 37343 - protein, 15 aa, Homo Sapiens
RLRIVRGTQLFEDNY

SEQ ID NO: 37344 - protein, 15 aa, Homo Sapiens
LRIVRGTQLFEDNYA

SEQ ID NO: 37345 - protein, 15 aa, Homo Sapiens
RIVRGTQLFEDNYAL

SEQ ID NO: 37346 - protein, 15 aa, Homo Sapiens
IVRGTQLFEDNYALA

SEQ ID NO: 37347 - protein, 15 aa, Homo Sapiens
VRGTQLFEDNYALAV

SEQ ID NO: 37348 - protein, 15 aa, Homo Sapiens
RGTQLFEDNYALAVL

SEQ ID NO: 37349 - protein, 15 aa, Homo Sapiens
GTQLFEDNYALAVLD

SEQ ID NO: 37350 - protein, 15 aa, Homo Sapiens
TQLFEDNYALAVLDN

SEQ ID NO: 37351 - protein, 15 aa, Homo Sapiens
QLFEDNYALAVLDNG

SEQ ID NO: 37352 - protein, 15 aa, Homo Sapiens
LFEDNYALAVLDNGD

SEQ ID NO: 37353 - protein, 15 aa, Homo Sapiens
FEDNYALAVLDNGDP

SEQ ID NO: 37354 - protein, 15 aa, Homo Sapiens
EDNYALAVLDNGDPL

SEQ ID NO: 37355 - protein, 15 aa, Homo Sapiens
DNYALAVLDNGDPLN

SEQ ID NO: 37356 - protein, 15 aa, Homo Sapiens
NYALAVLDNGDPLNN

SEQ ID NO: 37357 - protein, 15 aa, Homo Sapiens
YALAVLDNGDPLNNT

SEQ ID NO: 37358 - protein, 15 aa, Homo Sapiens
ALAVLDNGDPLNNTT

SEQ ID NO: 37359 - protein, 15 aa, Homo Sapiens
LAVLDNGDPLNNTTP

SEQ ID NO: 37360 - protein, 15 aa, Homo Sapiens
AVLDNGDPLNNTTPV

SEQ ID NO: 37361 - protein, 15 aa, Homo Sapiens
VLDNGDPLNNTTPVT

SEQ ID NO: 37362 - protein, 15 aa, Homo Sapiens
LDNGDPLNNTTPVTG

SEQ ID NO: 37363 - protein, 15 aa, Homo Sapiens
DNGDPLNNTTPVTGA

SEQ ID NO: 37364 - protein, 15 aa, Homo Sapiens
NGDPLNNTTPVTGAS

SEQ ID NO: 37365 - protein, 15 aa, Homo Sapiens
GDPLNNTTPVTGASP

SEQ ID NO: 37366 - protein, 15 aa, Homo Sapiens
DPLNNTTPVTGASPG

SEQ ID NO: 37367 - protein, 15 aa, Homo Sapiens
PLNNTTPVTGASPGG

SEQ ID NO: 37368 - protein, 15 aa, Homo Sapiens
LNNTTPVTGASPGGL

SEQ ID NO: 37369 - protein, 15 aa, Homo Sapiens
NNTTPVTGASPGGLR

SEQ ID NO: 37370 - protein, 15 aa, Homo Sapiens
NTTPVTGASPGGLRE

SEQ ID NO: 37371 - protein, 15 aa, Homo Sapiens
TTPVTGASPGGLREL

SEQ ID NO: 37372 - protein, 15 aa, Homo Sapiens
TPVTGASPGGLRELQ

SEQ ID NO: 37373 - protein, 15 aa, Homo Sapiens
PVTGASPGGLRELQL

SEQ ID NO: 37374 - protein, 15 aa, Homo Sapiens
VTGASPGGLRELQLR

SEQ ID NO: 37375 - protein, 15 aa, Homo Sapiens
TGASPGGLRELQLRS

SEQ ID NO: 37376 - protein, 15 aa, Homo Sapiens
GASPGGLRELQLRSL

SEQ ID NO: 37377 - protein, 15 aa, Homo Sapiens
ASPGGLRELQLRSLT

SEQ ID NO: 37378 - protein, 15 aa, Homo Sapiens
SPGGLRELQLRSLTE

SEQ ID NO: 37379 - protein, 15 aa, Homo Sapiens
PGGLRELQLRSLTEI

SEQ ID NO: 37380 - protein, 15 aa, Homo Sapiens
GGLRELQLRSLTEIL

SEQ ID NO: 37381 - protein, 15 aa, Homo Sapiens
GLRELQLRSLTEILK

SEQ ID NO: 37382 - protein, 15 aa, Homo Sapiens
LRELQLRSLTEILKG

SEQ ID NO: 37383 - protein, 15 aa, Homo Sapiens
RELQLRSLTEILKGG

SEQ ID NO: 37384 - protein, 15 aa, Homo Sapiens
ELQLRSLTEILKGGV

SEQ ID NO: 37385 - protein, 15 aa, Homo Sapiens
LQLRSLTEILKGGVL

SEQ ID NO: 37386 - protein, 15 aa, Homo Sapiens
QLRSLTEILKGGVLI

SEQ ID NO: 37387 - protein, 15 aa, Homo Sapiens
LRSLTEILKGGVLIQ

SEQ ID NO: 37388 - protein, 15 aa, Homo Sapiens
RSLTEILKGGVLIQR

SEQ ID NO: 37389 - protein, 15 aa, Homo Sapiens
SLTEILKGGVLIQRN

SEQ ID NO: 37390 - protein, 15 aa, Homo Sapiens
LTEILKGGVLIQRNP

SEQ ID NO: 37391 - protein, 15 aa, Homo Sapiens
TEILKGGVLIQRNPQ

SEQ ID NO: 37392 - protein, 15 aa, Homo Sapiens
EILKGGVLIQRNPQL

SEQ ID NO: 37393 - protein, 15 aa, Homo Sapiens
ILKGGVLIQRNPQLC

SEQ ID NO: 37394 - protein, 15 aa, Homo Sapiens
LKGGVLIQRNPQLCY

SEQ ID NO: 37395 - protein, 15 aa, Homo Sapiens
KGGVLIQRNPQLCYQ

SEQ ID NO: 37396 - protein, 15 aa, Homo Sapiens
GGVLIQRNPQLCYQD

SEQ ID NO: 37397 - protein, 15 aa, Homo Sapiens
GVLIQRNPQLCYQDT

SEQ ID NO: 37398 - protein, 15 aa, Homo Sapiens
VLIQRNPQLCYQDTI

SEQ ID NO: 37399 - protein, 15 aa, Homo Sapiens
LIQRNPQLCYQDTIL

SEQ ID NO: 37400 - protein, 15 aa, Homo Sapiens
IQRNPQLCYQDTILW

SEQ ID NO: 37401 - protein, 15 aa, Homo Sapiens
QRNPQLCYQDTILWK

SEQ ID NO: 37402 - protein, 15 aa, Homo Sapiens
RNPQLCYQDTILWKD

SEQ ID NO: 37403 - protein, 15 aa, Homo Sapiens
NPQLCYQDTILWKDI

SEQ ID NO: 37404 - protein, 15 aa, Homo Sapiens
PQLCYQDTILWKDIF

SEQ ID NO: 37405 - protein, 15 aa, Homo Sapiens
QLCYQDTILWKDIFH

SEQ ID NO: 37406 - protein, 15 aa, Homo Sapiens
LCYQDTILWKDIFHK

SEQ ID NO: 37407 - protein, 15 aa, Homo Sapiens
CYQDTILWKDIFHKN

SEQ ID NO: 37408 - protein, 15 aa, Homo Sapiens
YQDTILWKDIFHKNN

SEQ ID NO: 37409 - protein, 15 aa, Homo Sapiens
QDTILWKDIFHKNNQ

SEQ ID NO: 37410 - protein, 15 aa, Homo Sapiens
DTILWKDIFHKNNQL

SEQ ID NO: 37411 - protein, 15 aa, Homo Sapiens
TILWKDIFHKNNQLA

SEQ ID NO: 37412 - protein, 15 aa, Homo Sapiens
ILWKDIFHKNNQLAL

SEQ ID NO: 37413 - protein, 15 aa, Homo Sapiens
LWKDIFHKNNQLALT

SEQ ID NO: 37414 - protein, 15 aa, Homo Sapiens
WKDIFHKNNQLALTL

SEQ ID NO: 37415 - protein, 15 aa, Homo Sapiens
KDIFHKNNQLALTLI

SEQ ID NO: 37416 - protein, 15 aa, Homo Sapiens
DIFHKNNQLALTLID

SEQ ID NO: 37417 - protein, 15 aa, Homo Sapiens
IFHKNNQLALTLIDT

SEQ ID NO: 37418 - protein, 15 aa, Homo Sapiens
FHKNNQLALTLIDTN

SEQ ID NO: 37419 - protein, 15 aa, Homo Sapiens
HKNNQLALTLIDTNR

SEQ ID NO: 37420 - protein, 15 aa, Homo Sapiens
KNNQLALTLIDTNRS

SEQ ID NO: 37421 - protein, 15 aa, Homo Sapiens
NNQLALTLIDTNRSR

SEQ ID NO: 37422 - protein, 15 aa, Homo Sapiens
NQLALTLIDTNRSRA

SEQ ID NO: 37423 - protein, 15 aa, Homo Sapiens
QLALTLIDTNRSRAC

SEQ ID NO: 37424 - protein, 15 aa, Homo Sapiens
LALTLIDTNRSRACH

SEQ ID NO: 37425 - protein, 15 aa, Homo Sapiens
ALTLIDTNRSRACHP

SEQ ID NO: 37426 - protein, 15 aa, Homo Sapiens
LTLIDTNRSRACHPC

SEQ ID NO: 37427 - protein, 15 aa, Homo Sapiens
TLIDTNRSRACHPCS

SEQ ID NO: 37428 - protein, 15 aa, Homo Sapiens
LIDTNRSRACHPCSP

SEQ ID NO: 37429 - protein, 15 aa, Homo Sapiens
IDTNRSRACHPCSPM

SEQ ID NO: 37430 - protein, 15 aa, Homo Sapiens
DTNRSRACHPCSPMC

SEQ ID NO: 37431 - protein, 15 aa, Homo Sapiens
TNRSRACHPCSPMCK

SEQ ID NO: 37432 - protein, 15 aa, Homo Sapiens
NRSRACHPCSPMCKG

SEQ ID NO: 37433 - protein, 15 aa, Homo Sapiens
RSRACHPCSPMCKGS

SEQ ID NO: 37434 - protein, 15 aa, Homo Sapiens
SRACHPCSPMCKGSR

SEQ ID NO: 37435 - protein, 15 aa, Homo Sapiens
RACHPCSPMCKGSRC

SEQ ID NO: 37436 - protein, 15 aa, Homo Sapiens
ACHPCSPMCKGSRCW

SEQ ID NO: 37437 - protein, 15 aa, Homo Sapiens
CHPCSPMCKGSRCWG

SEQ ID NO: 37438 - protein, 15 aa, Homo Sapiens
HPCSPMCKGSRCWGE

SEQ ID NO: 37439 - protein, 15 aa, Homo Sapiens
PCSPMCKGSRCWGES

SEQ ID NO: 37440 - protein, 15 aa, Homo Sapiens
CSPMCKGSRCWGESS

SEQ ID NO: 37441 - protein, 15 aa, Homo Sapiens
SPMCKGSRCWGESSE

SEQ ID NO: 37442 - protein, 15 aa, Homo Sapiens
PMCKGSRCWGESSED

SEQ ID NO: 37443 - protein, 15 aa, Homo Sapiens
MCKGSRCWGESSEDC

SEQ ID NO: 37444 - protein, 15 aa, Homo Sapiens
CKGSRCWGESSEDCQ

SEQ ID NO: 37445 - protein, 15 aa, Homo Sapiens
KGSRCWGESSEDCQS

SEQ ID NO: 37446 - protein, 15 aa, Homo Sapiens
GSRCWGESSEDCQSL

SEQ ID NO: 37447 - protein, 15 aa, Homo Sapiens
SRCWGESSEDCQSLT

SEQ ID NO: 37448 - protein, 15 aa, Homo Sapiens
RCWGESSEDCQSLTR

SEQ ID NO: 37449 - protein, 15 aa, Homo Sapiens
CWGESSEDCQSLTRT

SEQ ID NO: 37450 - protein, 15 aa, Homo Sapiens
WGESSEDCQSLTRTV

SEQ ID NO: 37451 - protein, 15 aa, Homo Sapiens
GESSEDCQSLTRTVC

SEQ ID NO: 37452 - protein, 15 aa, Homo Sapiens
ESSEDCQSLTRTVCA

SEQ ID NO: 37453 - protein, 15 aa, Homo Sapiens
SSEDCQSLTRTVCAG

SEQ ID NO: 37454 - protein, 15 aa, Homo Sapiens
SEDCQSLTRTVCAGG

SEQ ID NO: 37455 - protein, 15 aa, Homo Sapiens
EDCQSLTRTVCAGGC

SEQ ID NO: 37456 - protein, 15 aa, Homo Sapiens
DCQSLTRTVCAGGCA

SEQ ID NO: 37457 - protein, 15 aa, Homo Sapiens
CQSLTRTVCAGGCAR

SEQ ID NO: 37458 - protein, 15 aa, Homo Sapiens
QSLTRTVCAGGCARC

SEQ ID NO: 37459 - protein, 15 aa, Homo Sapiens
SLTRTVCAGGCARCK

SEQ ID NO: 37460 - protein, 15 aa, Homo Sapiens
LTRTVCAGGCARCKG

SEQ ID NO: 37461 - protein, 15 aa, Homo Sapiens
TRTVCAGGCARCKGP

SEQ ID NO: 37462 - protein, 15 aa, Homo Sapiens
RTVCAGGCARCKGPL

SEQ ID NO: 37463 - protein, 15 aa, Homo Sapiens
TVCAGGCARCKGPLP

SEQ ID NO: 37464 - protein, 15 aa, Homo Sapiens
VCAGGCARCKGPLPT

SEQ ID NO: 37465 - protein, 15 aa, Homo Sapiens
CAGGCARCKGPLPTD

SEQ ID NO: 37466 - protein, 15 aa, Homo Sapiens
AGGCARCKGPLPTDC

SEQ ID NO: 37467 - protein, 15 aa, Homo Sapiens
GGCARCKGPLPTDCC

SEQ ID NO: 37468 - protein, 15 aa, Homo Sapiens
GCARCKGPLPTDCCH

SEQ ID NO: 37469 - protein, 15 aa, Homo Sapiens
CARCKGPLPTDCCHE

SEQ ID NO: 37470 - protein, 15 aa, Homo Sapiens
ARCKGPLPTDCCHEQ

SEQ ID NO: 37471 - protein, 15 aa, Homo Sapiens
RCKGPLPTDCCHEQC

SEQ ID NO: 37472 - protein, 15 aa, Homo Sapiens
CKGPLPTDCCHEQCA

SEQ ID NO: 37473 - protein, 15 aa, Homo Sapiens
KGPLPTDCCHEQCAA

SEQ ID NO: 37474 - protein, 15 aa, Homo Sapiens
GPLPTDCCHEQCAAG

SEQ ID NO: 37475 - protein, 15 aa, Homo Sapiens
PLPTDCCHEQCAAGC

SEQ ID NO: 37476 - protein, 15 aa, Homo Sapiens
LPTDCCHEQCAAGCT

SEQ ID NO: 37477 - protein, 15 aa, Homo Sapiens
PTDCCHEQCAAGCTG

SEQ ID NO: 37478 - protein, 15 aa, Homo Sapiens
TDCCHEQCAAGCTGP

SEQ ID NO: 37479 - protein, 15 aa, Homo Sapiens
DCCHEQCAAGCTGPK

SEQ ID NO: 37480 - protein, 15 aa, Homo Sapiens
CCHEQCAAGCTGPKH

SEQ ID NO: 37481 - protein, 15 aa, Homo Sapiens
CHEQCAAGCTGPKHS

SEQ ID NO: 37482 - protein, 15 aa, Homo Sapiens
HEQCAAGCTGPKHSD

SEQ ID NO: 37483 - protein, 15 aa, Homo Sapiens
EQCAAGCTGPKHSDC

SEQ ID NO: 37484 - protein, 15 aa, Homo Sapiens
QCAAGCTGPKHSDCL

SEQ ID NO: 37485 - protein, 15 aa, Homo Sapiens
CAAGCTGPKHSDCLA

SEQ ID NO: 37486 - protein, 15 aa, Homo Sapiens
AAGCTGPKHSDCLAC

SEQ ID NO: 37487 - protein, 15 aa, Homo Sapiens
AGCTGPKHSDCLACL

SEQ ID NO: 37488 - protein, 15 aa, Homo Sapiens
GCTGPKHSDCLACLH

SEQ ID NO: 37489 - protein, 15 aa, Homo Sapiens
CTGPKHSDCLACLHF

SEQ ID NO: 37490 - protein, 15 aa, Homo Sapiens
TGPKHSDCLACLHFN

SEQ ID NO: 37491 - protein, 15 aa, Homo Sapiens
GPKHSDCLACLHFNH

SEQ ID NO: 37492 - protein, 15 aa, Homo Sapiens
PKHSDCLACLHFNHS

SEQ ID NO: 37493 - protein, 15 aa, Homo Sapiens
KHSDCLACLHFNHSG

SEQ ID NO: 37494 - protein, 15 aa, Homo Sapiens
HSDCLACLHFNHSGI

SEQ ID NO: 37495 - protein, 15 aa, Homo Sapiens
SDCLACLHFNHSGIC

SEQ ID NO: 37496 - protein, 15 aa, Homo Sapiens
DCLACLHFNHSGICE

SEQ ID NO: 37497 - protein, 15 aa, Homo Sapiens
CLACLHFNHSGICEL

SEQ ID NO: 37498 - protein, 15 aa, Homo Sapiens
LACLHFNHSGICELH

SEQ ID NO: 37499 - protein, 15 aa, Homo Sapiens
ACLHFNHSGICELHC

SEQ ID NO: 37500 - protein, 15 aa, Homo Sapiens
CLHFNHSGICELHCP

SEQ ID NO: 37501 - protein, 15 aa, Homo Sapiens
LHFNHSGICELHCPA

SEQ ID NO: 37502 - protein, 15 aa, Homo Sapiens
HFNHSGICELHCPAL

SEQ ID NO: 37503 - protein, 15 aa, Homo Sapiens
FNHSGICELHCPALV

SEQ ID NO: 37504 - protein, 15 aa, Homo Sapiens
NHSGICELHCPALVT

SEQ ID NO: 37505 - protein, 15 aa, Homo Sapiens
HSGICELHCPALVTY

SEQ ID NO: 37506 - protein, 15 aa, Homo Sapiens
SGICELHCPALVTYN

SEQ ID NO: 37507 - protein, 15 aa, Homo Sapiens
GICELHCPALVTYNT

SEQ ID NO: 37508 - protein, 15 aa, Homo Sapiens
ICELHCPALVTYNTD

SEQ ID NO: 37509 - protein, 15 aa, Homo Sapiens
CELHCPALVTYNTDT

SEQ ID NO: 37510 - protein, 15 aa, Homo Sapiens
ELHCPALVTYNTDTF

SEQ ID NO: 37511 - protein, 15 aa, Homo Sapiens
LHCPALVTYNTDTFE

SEQ ID NO: 37512 - protein, 15 aa, Homo Sapiens
HCPALVTYNTDTFES

SEQ ID NO: 37513 - protein, 15 aa, Homo Sapiens
CPALVTYNTDTFESM

SEQ ID NO: 37514 - protein, 15 aa, Homo Sapiens
PALVTYNTDTFESMP

SEQ ID NO: 37515 - protein, 15 aa, Homo Sapiens
ALVTYNTDTFESMPN

SEQ ID NO: 37516 - protein, 15 aa, Homo Sapiens
LVTYNTDTFESMPNP

SEQ ID NO: 37517 - protein, 15 aa, Homo Sapiens
VTYNTDTFESMPNPE

SEQ ID NO: 37518 - protein, 15 aa, Homo Sapiens
TYNTDTFESMPNPEG

SEQ ID NO: 37519 - protein, 15 aa, Homo Sapiens
YNTDTFESMPNPEGR

SEQ ID NO: 37520 - protein, 15 aa, Homo Sapiens
NTDTFESMPNPEGRY

SEQ ID NO: 37521 - protein, 15 aa, Homo Sapiens
TDTFESMPNPEGRYT

SEQ ID NO: 37522 - protein, 15 aa, Homo Sapiens
DTFESMPNPEGRYTF

SEQ ID NO: 37523 - protein, 15 aa, Homo Sapiens
TFESMPNPEGRYTFG

SEQ ID NO: 37524 - protein, 15 aa, Homo Sapiens
FESMPNPEGRYTFGA

SEQ ID NO: 37525 - protein, 15 aa, Homo Sapiens
ESMPNPEGRYTFGAS

SEQ ID NO: 37526 - protein, 15 aa, Homo Sapiens
SMPNPEGRYTFGASC

SEQ ID NO: 37527 - protein, 15 aa, Homo Sapiens
MPNPEGRYTFGASCV

SEQ ID NO: 37528 - protein, 15 aa, Homo Sapiens
PNPEGRYTFGASCVT

SEQ ID NO: 37529 - protein, 15 aa, Homo Sapiens
NPEGRYTFGASCVTA

SEQ ID NO: 37530 - protein, 15 aa, Homo Sapiens
PEGRYTFGASCVTAC

SEQ ID NO: 37531 - protein, 15 aa, Homo Sapiens
EGRYTFGASCVTACP

SEQ ID NO: 37532 - protein, 15 aa, Homo Sapiens
GRYTFGASCVTACPY

SEQ ID NO: 37533 - protein, 15 aa, Homo Sapiens
RYTFGASCVTACPYN

SEQ ID NO: 37534 - protein, 15 aa, Homo Sapiens
YTFGASCVTACPYNY

SEQ ID NO: 37535 - protein, 15 aa, Homo Sapiens
TFGASCVTACPYNYL

SEQ ID NO: 37536 - protein, 15 aa, Homo Sapiens
FGASCVTACPYNYLS

SEQ ID NO: 37537 - protein, 15 aa, Homo Sapiens
GASCVTACPYNYLST

SEQ ID NO: 37538 - protein, 15 aa, Homo Sapiens
ASCVTACPYNYLSTD

SEQ ID NO: 37539 - protein, 15 aa, Homo Sapiens
SCVTACPYNYLSTDV

SEQ ID NO: 37540 - protein, 15 aa, Homo Sapiens
CVTACPYNYLSTDVG

SEQ ID NO: 37541 - protein, 15 aa, Homo Sapiens
VTACPYNYLSTDVGS

SEQ ID NO: 37542 - protein, 15 aa, Homo Sapiens
TACPYNYLSTDVGSC

SEQ ID NO: 37543 - protein, 15 aa, Homo Sapiens
ACPYNYLSTDVGSCT

SEQ ID NO: 37544 - protein, 15 aa, Homo Sapiens
CPYNYLSTDVGSCTL

SEQ ID NO: 37545 - protein, 15 aa, Homo Sapiens
PYNYLSTDVGSCTLV

SEQ ID NO: 37546 - protein, 15 aa, Homo Sapiens
YNYLSTDVGSCTLVC

SEQ ID NO: 37547 - protein, 15 aa, Homo Sapiens
NYLSTDVGSCTLVCP

SEQ ID NO: 37548 - protein, 15 aa, Homo Sapiens
YLSTDVGSCTLVCPL

SEQ ID NO: 37549 - protein, 15 aa, Homo Sapiens
LSTDVGSCTLVCPLH

SEQ ID NO: 37550 - protein, 15 aa, Homo Sapiens
STDVGSCTLVCPLHN

SEQ ID NO: 37551 - protein, 15 aa, Homo Sapiens
TDVGSCTLVCPLHNQ

SEQ ID NO: 37552 - protein, 15 aa, Homo Sapiens
DVGSCTLVCPLHNQE

SEQ ID NO: 37553 - protein, 15 aa, Homo Sapiens
VGSCTLVCPLHNQEV

SEQ ID NO: 37554 - protein, 15 aa, Homo Sapiens
GSCTLVCPLHNQEVT

SEQ ID NO: 37555 - protein, 15 aa, Homo Sapiens
SCTLVCPLHNQEVTA

SEQ ID NO: 37556 - protein, 15 aa, Homo Sapiens
CTLVCPLHNQEVTAE

SEQ ID NO: 37557 - protein, 15 aa, Homo Sapiens
TLVCPLHNQEVTAED

SEQ ID NO: 37558 - protein, 15 aa, Homo Sapiens
LVCPLHNQEVTAEDG

SEQ ID NO: 37559 - protein, 15 aa, Homo Sapiens
VCPLHNQEVTAEDGT

SEQ ID NO: 37560 - protein, 15 aa, Homo Sapiens
CPLHNQEVTAEDGTQ

SEQ ID NO: 37561 - protein, 15 aa, Homo Sapiens
PLHNQEVTAEDGTQR

SEQ ID NO: 37562 - protein, 15 aa, Homo Sapiens
LHNQEVTAEDGTQRC

SEQ ID NO: 37563 - protein, 15 aa, Homo Sapiens
HNQEVTAEDGTQRCE

SEQ ID NO: 37564 - protein, 15 aa, Homo Sapiens
NQEVTAEDGTQRCEK

SEQ ID NO: 37565 - protein, 15 aa, Homo Sapiens
QEVTAEDGTQRCEKC

SEQ ID NO: 37566 - protein, 15 aa, Homo Sapiens
EVTAEDGTQRCEKCS

SEQ ID NO: 37567 - protein, 15 aa, Homo Sapiens
VTAEDGTQRCEKCSK

SEQ ID NO: 37568 - protein, 15 aa, Homo Sapiens
TAEDGTQRCEKCSKP

SEQ ID NO: 37569 - protein, 15 aa, Homo Sapiens
AEDGTQRCEKCSKPC

SEQ ID NO: 37570 - protein, 15 aa, Homo Sapiens
EDGTQRCEKCSKPCA

SEQ ID NO: 37571 - protein, 15 aa, Homo Sapiens
DGTQRCEKCSKPCAR

SEQ ID NO: 37572 - protein, 15 aa, Homo Sapiens
GTQRCEKCSKPCARV

SEQ ID NO: 37573 - protein, 15 aa, Homo Sapiens
TQRCEKCSKPCARVC

SEQ ID NO: 37574 - protein, 15 aa, Homo Sapiens
QRCEKCSKPCARVCY

SEQ ID NO: 37575 - protein, 15 aa, Homo Sapiens
RCEKCSKPCARVCYG

SEQ ID NO: 37576 - protein, 15 aa, Homo Sapiens
CEKCSKPCARVCYGL

SEQ ID NO: 37577 - protein, 15 aa, Homo Sapiens
EKCSKPCARVCYGLG

SEQ ID NO: 37578 - protein, 15 aa, Homo Sapiens
KCSKPCARVCYGLGM

SEQ ID NO: 37579 - protein, 15 aa, Homo Sapiens
CSKPCARVCYGLGME

SEQ ID NO: 37580 - protein, 15 aa, Homo Sapiens
SKPCARVCYGLGMEH

SEQ ID NO: 37581 - protein, 15 aa, Homo Sapiens
KPCARVCYGLGMEHL

SEQ ID NO: 37582 - protein, 15 aa, Homo Sapiens
PCARVCYGLGMEHLR

SEQ ID NO: 37583 - protein, 15 aa, Homo Sapiens
CARVCYGLGMEHLRE

SEQ ID NO: 37584 - protein, 15 aa, Homo Sapiens
ARVCYGLGMEHLREV

SEQ ID NO: 37585 - protein, 15 aa, Homo Sapiens
RVCYGLGMEHLREVR

SEQ ID NO: 37586 - protein, 15 aa, Homo Sapiens
VCYGLGMEHLREVRA

SEQ ID NO: 37587 - protein, 15 aa, Homo Sapiens
CYGLGMEHLREVRAV

SEQ ID NO: 37588 - protein, 15 aa, Homo Sapiens
YGLGMEHLREVRAVT

SEQ ID NO: 37589 - protein, 15 aa, Homo Sapiens
GLGMEHLREVRAVTS

SEQ ID NO: 37590 - protein, 15 aa, Homo Sapiens
LGMEHLREVRAVTSA

SEQ ID NO: 37591 - protein, 15 aa, Homo Sapiens
GMEHLREVRAVTSAN

SEQ ID NO: 37592 - protein, 15 aa, Homo Sapiens
MEHLREVRAVTSANI

SEQ ID NO: 37593 - protein, 15 aa, Homo Sapiens
EHLREVRAVTSANIQ

SEQ ID NO: 37594 - protein, 15 aa, Homo Sapiens
HLREVRAVTSANIQE

SEQ ID NO: 37595 - protein, 15 aa, Homo Sapiens
LREVRAVTSANIQEF

SEQ ID NO: 37596 - protein, 15 aa, Homo Sapiens
REVRAVTSANIQEFA

SEQ ID NO: 37597 - protein, 15 aa, Homo Sapiens
EVRAVTSANIQEFAG

SEQ ID NO: 37598 - protein, 15 aa, Homo Sapiens
VRAVTSANIQEFAGC

SEQ ID NO: 37599 - protein, 15 aa, Homo Sapiens
RAVTSANIQEFAGCK

SEQ ID NO: 37600 - protein, 15 aa, Homo Sapiens
AVTSANIQEFAGCKK

SEQ ID NO: 37601 - protein, 15 aa, Homo Sapiens
VTSANIQEFAGCKKI

SEQ ID NO: 37602 - protein, 15 aa, Homo Sapiens
TSANIQEFAGCKKIF

SEQ ID NO: 37603 - protein, 15 aa, Homo Sapiens
SANIQEFAGCKKIFG

SEQ ID NO: 37604 - protein, 15 aa, Homo Sapiens
ANIQEFAGCKKIFGS

SEQ ID NO: 37605 - protein, 15 aa, Homo Sapiens
NIQEFAGCKKIFGSL

SEQ ID NO: 37606 - protein, 15 aa, Homo Sapiens
IQEFAGCKKIFGSLA

SEQ ID NO: 37607 - protein, 15 aa, Homo Sapiens
QEFAGCKKIFGSLAF

SEQ ID NO: 37608 - protein, 15 aa, Homo Sapiens
EFAGCKKIFGSLAFL

SEQ ID NO: 37609 - protein, 15 aa, Homo Sapiens
FAGCKKIFGSLAFLP

SEQ ID NO: 37610 - protein, 15 aa, Homo Sapiens
AGCKKIFGSLAFLPE

SEQ ID NO: 37611 - protein, 15 aa, Homo Sapiens
GCKKIFGSLAFLPES

SEQ ID NO: 37612 - protein, 15 aa, Homo Sapiens
CKKIFGSLAFLPESF

SEQ ID NO: 37613 - protein, 15 aa, Homo Sapiens
KKIFGSLAFLPESFD

SEQ ID NO: 37614 - protein, 15 aa, Homo Sapiens
KIFGSLAFLPESFDG

SEQ ID NO: 37615 - protein, 15 aa, Homo Sapiens
IFGSLAFLPESFDGD

SEQ ID NO: 37616 - protein, 15 aa, Homo Sapiens
FGSLAFLPESFDGDP

SEQ ID NO: 37617 - protein, 15 aa, Homo Sapiens
GSLAFLPESFDGDPA

SEQ ID NO: 37618 - protein, 15 aa, Homo Sapiens
SLAFLPESFDGDPAS

SEQ ID NO: 37619 - protein, 15 aa, Homo Sapiens
LAFLPESFDGDPASN

SEQ ID NO: 37620 - protein, 15 aa, Homo Sapiens
AFLPESFDGDPASNT

SEQ ID NO: 37621 - protein, 15 aa, Homo Sapiens
FLPESFDGDPASNTA

SEQ ID NO: 37622 - protein, 15 aa, Homo Sapiens
LPESFDGDPASNTAP

SEQ ID NO: 37623 - protein, 15 aa, Homo Sapiens
PESFDGDPASNTAPL

SEQ ID NO: 37624 - protein, 15 aa, Homo Sapiens
ESFDGDPASNTAPLQ

SEQ ID NO: 37625 - protein, 15 aa, Homo Sapiens
SFDGDPASNTAPLQP

SEQ ID NO: 37626 - protein, 15 aa, Homo Sapiens
FDGDPASNTAPLQPE

SEQ ID NO: 37627 - protein, 15 aa, Homo Sapiens
DGDPASNTAPLQPEQ

SEQ ID NO: 37628 - protein, 15 aa, Homo Sapiens
GDPASNTAPLQPEQL

SEQ ID NO: 37629 - protein, 15 aa, Homo Sapiens
DPASNTAPLQPEQLQ

SEQ ID NO: 37630 - protein, 15 aa, Homo Sapiens
PASNTAPLQPEQLQV

SEQ ID NO: 37631 - protein, 15 aa, Homo Sapiens
ASNTAPLQPEQLQVF

SEQ ID NO: 37632 - protein, 15 aa, Homo Sapiens
SNTAPLQPEQLQVFE

SEQ ID NO: 37633 - protein, 15 aa, Homo Sapiens
NTAPLQPEQLQVFET

SEQ ID NO: 37634 - protein, 15 aa, Homo Sapiens
TAPLQPEQLQVFETL

SEQ ID NO: 37635 - protein, 15 aa, Homo Sapiens
APLQPEQLQVFETLE

SEQ ID NO: 37636 - protein, 15 aa, Homo Sapiens
PLQPEQLQVFETLEE

SEQ ID NO: 37637 - protein, 15 aa, Homo Sapiens
LQPEQLQVFETLEEI

SEQ ID NO: 37638 - protein, 15 aa, Homo Sapiens
QPEQLQVFETLEEIT

SEQ ID NO: 37639 - protein, 15 aa, Homo Sapiens
PEQLQVFETLEEITG

SEQ ID NO: 37640 - protein, 15 aa, Homo Sapiens
EQLQVFETLEEITGY

SEQ ID NO: 37641 - protein, 15 aa, Homo Sapiens
QLQVFETLEEITGYL

SEQ ID NO: 37642 - protein, 15 aa, Homo Sapiens
LQVFETLEEITGYLY

SEQ ID NO: 37643 - protein, 15 aa, Homo Sapiens
QVFETLEEITGYLYI

SEQ ID NO: 37644 - protein, 15 aa, Homo Sapiens
VFETLEEITGYLYIS

SEQ ID NO: 37645 - protein, 15 aa, Homo Sapiens
FETLEEITGYLYISA

SEQ ID NO: 37646 - protein, 15 aa, Homo Sapiens
ETLEEITGYLYISAW

SEQ ID NO: 37647 - protein, 15 aa, Homo Sapiens
TLEEITGYLYISAWP

SEQ ID NO: 37648 - protein, 15 aa, Homo Sapiens
LEEITGYLYISAWPD

SEQ ID NO: 37649 - protein, 15 aa, Homo Sapiens
EEITGYLYISAWPDS

SEQ ID NO: 37650 - protein, 15 aa, Homo Sapiens
EITGYLYISAWPDSL

SEQ ID NO: 37651 - protein, 15 aa, Homo Sapiens
ITGYLYISAWPDSLP

SEQ ID NO: 37652 - protein, 15 aa, Homo Sapiens
TGYLYISAWPDSLPD

SEQ ID NO: 37653 - protein, 15 aa, Homo Sapiens
GYLYISAWPDSLPDL

SEQ ID NO: 37654 - protein, 15 aa, Homo Sapiens
YLYISAWPDSLPDLS

SEQ ID NO: 37655 - protein, 15 aa, Homo Sapiens
LYISAWPDSLPDLSV

SEQ ID NO: 37656 - protein, 15 aa, Homo Sapiens
YISAWPDSLPDLSVF

SEQ ID NO: 37657 - protein, 15 aa, Homo Sapiens
ISAWPDSLPDLSVFQ

SEQ ID NO: 37658 - protein, 15 aa, Homo Sapiens
SAWPDSLPDLSVFQN

SEQ ID NO: 37659 - protein, 15 aa, Homo Sapiens
AWPDSLPDLSVFQNL

SEQ ID NO: 37660 - protein, 15 aa, Homo Sapiens
WPDSLPDLSVFQNLQ

SEQ ID NO: 37661 - protein, 15 aa, Homo Sapiens
PDSLPDLSVFQNLQV

SEQ ID NO: 37662 - protein, 15 aa, Homo Sapiens
DSLPDLSVFQNLQVI

SEQ ID NO: 37663 - protein, 15 aa, Homo Sapiens
SLPDLSVFQNLQVIR

SEQ ID NO: 37664 - protein, 15 aa, Homo Sapiens
LPDLSVFQNLQVIRG

SEQ ID NO: 37665 - protein, 15 aa, Homo Sapiens
PDLSVFQNLQVIRGR

SEQ ID NO: 37666 - protein, 15 aa, Homo Sapiens
DLSVFQNLQVIRGRI

SEQ ID NO: 37667 - protein, 15 aa, Homo Sapiens
LSVFQNLQVIRGRIL

SEQ ID NO: 37668 - protein, 15 aa, Homo Sapiens
SVFQNLQVIRGRILH

SEQ ID NO: 37669 - protein, 15 aa, Homo Sapiens
VFQNLQVIRGRILHN

SEQ ID NO: 37670 - protein, 15 aa, Homo Sapiens
FQNLQVIRGRILHNG

SEQ ID NO: 37671 - protein, 15 aa, Homo Sapiens
QNLQVIRGRILHNGA

SEQ ID NO: 37672 - protein, 15 aa, Homo Sapiens
NLQVIRGRILHNGAY

SEQ ID NO: 37673 - protein, 15 aa, Homo Sapiens
LQVIRGRILHNGAYS

SEQ ID NO: 37674 - protein, 15 aa, Homo Sapiens
QVIRGRILHNGAYSL

SEQ ID NO: 37675 - protein, 15 aa, Homo Sapiens
VIRGRILHNGAYSLT

SEQ ID NO: 37676 - protein, 15 aa, Homo Sapiens
IRGRILHNGAYSLTL

SEQ ID NO: 37677 - protein, 15 aa, Homo Sapiens
RGRILHNGAYSLTLQ

SEQ ID NO: 37678 - protein, 15 aa, Homo Sapiens
GRILHNGAYSLTLQG

SEQ ID NO: 37679 - protein, 15 aa, Homo Sapiens
RILHNGAYSLTLQGL

SEQ ID NO: 37680 - protein, 15 aa, Homo Sapiens
ILHNGAYSLTLQGLG

SEQ ID NO: 37681 - protein, 15 aa, Homo Sapiens
LHNGAYSLTLQGLGI

SEQ ID NO: 37682 - protein, 15 aa, Homo Sapiens
HNGAYSLTLQGLGIS

SEQ ID NO: 37683 - protein, 15 aa, Homo Sapiens
NGAYSLTLQGLGISW

SEQ ID NO: 37684 - protein, 15 aa, Homo Sapiens
GAYSLTLQGLGISWL

SEQ ID NO: 37685 - protein, 15 aa, Homo Sapiens
AYSLTLQGLGISWLG

SEQ ID NO: 37686 - protein, 15 aa, Homo Sapiens
YSLTLQGLGISWLGL

SEQ ID NO: 37687 - protein, 15 aa, Homo Sapiens
SLTLQGLGISWLGLR

SEQ ID NO: 37688 - protein, 15 aa, Homo Sapiens
LTLQGLGISWLGLRS

SEQ ID NO: 37689 - protein, 15 aa, Homo Sapiens
TLQGLGISWLGLRSL

SEQ ID NO: 37690 - protein, 15 aa, Homo Sapiens
LQGLGISWLGLRSLR

SEQ ID NO: 37691 - protein, 15 aa, Homo Sapiens
QGLGISWLGLRSLRE

SEQ ID NO: 37692 - protein, 15 aa, Homo Sapiens
GLGISWLGLRSLREL

SEQ ID NO: 37693 - protein, 15 aa, Homo Sapiens
LGISWLGLRSLRELG

SEQ ID NO: 37694 - protein, 15 aa, Homo Sapiens
GISWLGLRSLRELGS

SEQ ID NO: 37695 - protein, 15 aa, Homo Sapiens
ISWLGLRSLRELGSG

SEQ ID NO: 37696 - protein, 15 aa, Homo Sapiens
SWLGLRSLRELGSGL

SEQ ID NO: 37697 - protein, 15 aa, Homo Sapiens
WLGLRSLRELGSGLA

SEQ ID NO: 37698 - protein, 15 aa, Homo Sapiens
LGLRSLRELGSGLAL

SEQ ID NO: 37699 - protein, 15 aa, Homo Sapiens
GLRSLRELGSGLALI

SEQ ID NO: 37700 - protein, 15 aa, Homo Sapiens
LRSLRELGSGLALIH

SEQ ID NO: 37701 - protein, 15 aa, Homo Sapiens
RSLRELGSGLALIHH

SEQ ID NO: 37702 - protein, 15 aa, Homo Sapiens
SLRELGSGLALIHHN

SEQ ID NO: 37703 - protein, 15 aa, Homo Sapiens
LRELGSGLALIHHNT

SEQ ID NO: 37704 - protein, 15 aa, Homo Sapiens
RELGSGLALIHHNTH

SEQ ID NO: 37705 - protein, 15 aa, Homo Sapiens
ELGSGLALIHHNTHL

SEQ ID NO: 37706 - protein, 15 aa, Homo Sapiens
LGSGLALIHHNTHLC

SEQ ID NO: 37707 - protein, 15 aa, Homo Sapiens
GSGLALIHHNTHLCF

SEQ ID NO: 37708 - protein, 15 aa, Homo Sapiens
SGLALIHHNTHLCFV

SEQ ID NO: 37709 - protein, 15 aa, Homo Sapiens
GLALIHHNTHLCFVH

SEQ ID NO: 37710 - protein, 15 aa, Homo Sapiens
LALIHHNTHLCFVHT

SEQ ID NO: 37711 - protein, 15 aa, Homo Sapiens
ALIHHNTHLCFVHTV

SEQ ID NO: 37712 - protein, 15 aa, Homo Sapiens
LIHHNTHLCFVHTVP

SEQ ID NO: 37713 - protein, 15 aa, Homo Sapiens
IHHNTHLCFVHTVPW

SEQ ID NO: 37714 - protein, 15 aa, Homo Sapiens
HHNTHLCFVHTVPWD

SEQ ID NO: 37715 - protein, 15 aa, Homo Sapiens
HNTHLCFVHTVPWDQ

SEQ ID NO: 37716 - protein, 15 aa, Homo Sapiens
NTHLCFVHTVPWDQL

SEQ ID NO: 37717 - protein, 15 aa, Homo Sapiens
THLCFVHTVPWDQLF

SEQ ID NO: 37718 - protein, 15 aa, Homo Sapiens
HLCFVHTVPWDQLFR

SEQ ID NO: 37719 - protein, 15 aa, Homo Sapiens
LCFVHTVPWDQLFRN

SEQ ID NO: 37720 - protein, 15 aa, Homo Sapiens
CFVHTVPWDQLFRNP

SEQ ID NO: 37721 - protein, 15 aa, Homo Sapiens
FVHTVPWDQLFRNPH

SEQ ID NO: 37722 - protein, 15 aa, Homo Sapiens
VHTVPWDQLFRNPHQ

SEQ ID NO: 37723 - protein, 15 aa, Homo Sapiens
HTVPWDQLFRNPHQA

SEQ ID NO: 37724 - protein, 15 aa, Homo Sapiens
TVPWDQLFRNPHQAL

SEQ ID NO: 37725 - protein, 15 aa, Homo Sapiens
VPWDQLFRNPHQALL

SEQ ID NO: 37726 - protein, 15 aa, Homo Sapiens
PWDQLFRNPHQALLH

SEQ ID NO: 37727 - protein, 15 aa, Homo Sapiens
WDQLFRNPHQALLHT

SEQ ID NO: 37728 - protein, 15 aa, Homo Sapiens
DQLFRNPHQALLHTA

SEQ ID NO: 37729 - protein, 15 aa, Homo Sapiens
QLFRNPHQALLHTAN

SEQ ID NO: 37730 - protein, 15 aa, Homo Sapiens
LFRNPHQALLHTANR

SEQ ID NO: 37731 - protein, 15 aa, Homo Sapiens
FRNPHQALLHTANRP

SEQ ID NO: 37732 - protein, 15 aa, Homo Sapiens
RNPHQALLHTANRPE

SEQ ID NO: 37733 - protein, 15 aa, Homo Sapiens
NPHQALLHTANRPED

SEQ ID NO: 37734 - protein, 15 aa, Homo Sapiens
PHQALLHTANRPEDE

SEQ ID NO: 37735 - protein, 15 aa, Homo Sapiens
HQALLHTANRPEDEC

SEQ ID NO: 37736 - protein, 15 aa, Homo Sapiens
QALLHTANRPEDECV

SEQ ID NO: 37737 - protein, 15 aa, Homo Sapiens
ALLHTANRPEDECVG

SEQ ID NO: 37738 - protein, 15 aa, Homo Sapiens
LLHTANRPEDECVGE

SEQ ID NO: 37739 - protein, 15 aa, Homo Sapiens
LHTANRPEDECVGEG

SEQ ID NO: 37740 - protein, 15 aa, Homo Sapiens
HTANRPEDECVGEGL

SEQ ID NO: 37741 - protein, 15 aa, Homo Sapiens
TANRPEDECVGEGLA

SEQ ID NO: 37742 - protein, 15 aa, Homo Sapiens
ANRPEDECVGEGLAC

SEQ ID NO: 37743 - protein, 15 aa, Homo Sapiens
NRPEDECVGEGLACH

SEQ ID NO: 37744 - protein, 15 aa, Homo Sapiens
RPEDECVGEGLACHQ

SEQ ID NO: 37745 - protein, 15 aa, Homo Sapiens
PEDECVGEGLACHQL

SEQ ID NO: 37746 - protein, 15 aa, Homo Sapiens
EDECVGEGLACHQLC

SEQ ID NO: 37747 - protein, 15 aa, Homo Sapiens
DECVGEGLACHQLCA

SEQ ID NO: 37748 - protein, 15 aa, Homo Sapiens
ECVGEGLACHQLCAR

SEQ ID NO: 37749 - protein, 15 aa, Homo Sapiens
CVGEGLACHQLCARG

SEQ ID NO: 37750 - protein, 15 aa, Homo Sapiens
VGEGLACHQLCARGH

SEQ ID NO: 37751 - protein, 15 aa, Homo Sapiens
GEGLACHQLCARGHC

SEQ ID NO: 37752 - protein, 15 aa, Homo Sapiens
EGLACHQLCARGHCW

SEQ ID NO: 37753 - protein, 15 aa, Homo Sapiens
GLACHQLCARGHCWG

SEQ ID NO: 37754 - protein, 15 aa, Homo Sapiens
LACHQLCARGHCWGP

SEQ ID NO: 37755 - protein, 15 aa, Homo Sapiens
ACHQLCARGHCWGPG

SEQ ID NO: 37756 - protein, 15 aa, Homo Sapiens
CHQLCARGHCWGPGP

SEQ ID NO: 37757 - protein, 15 aa, Homo Sapiens
HQLCARGHCWGPGPT

SEQ ID NO: 37758 - protein, 15 aa, Homo Sapiens
QLCARGHCWGPGPTQ

SEQ ID NO: 37759 - protein, 15 aa, Homo Sapiens
LCARGHCWGPGPTQC

SEQ ID NO: 37760 - protein, 15 aa, Homo Sapiens
CARGHCWGPGPTQCV

SEQ ID NO: 37761 - protein, 15 aa, Homo Sapiens
ARGHCWGPGPTQCVN

SEQ ID NO: 37762 - protein, 15 aa, Homo Sapiens
RGHCWGPGPTQCVNC

SEQ ID NO: 37763 - protein, 15 aa, Homo Sapiens
GHCWGPGPTQCVNCS

SEQ ID NO: 37764 - protein, 15 aa, Homo Sapiens
HCWGPGPTQCVNCSQ

SEQ ID NO: 37765 - protein, 15 aa, Homo Sapiens
CWGPGPTQCVNCSQF

SEQ ID NO: 37766 - protein, 15 aa, Homo Sapiens
WGPGPTQCVNCSQFL

SEQ ID NO: 37767 - protein, 15 aa, Homo Sapiens
GPGPTQCVNCSQFLR

SEQ ID NO: 37768 - protein, 15 aa, Homo Sapiens
PGPTQCVNCSQFLRG

SEQ ID NO: 37769 - protein, 15 aa, Homo Sapiens
GPTQCVNCSQFLRGQ

SEQ ID NO: 37770 - protein, 15 aa, Homo Sapiens
PTQCVNCSQFLRGQE

SEQ ID NO: 37771 - protein, 15 aa, Homo Sapiens
TQCVNCSQFLRGQEC

SEQ ID NO: 37772 - protein, 15 aa, Homo Sapiens
QCVNCSQFLRGQECV

SEQ ID NO: 37773 - protein, 15 aa, Homo Sapiens
CVNCSQFLRGQECVE

SEQ ID NO: 37774 - protein, 15 aa, Homo Sapiens
VNCSQFLRGQECVEE

SEQ ID NO: 37775 - protein, 15 aa, Homo Sapiens
NCSQFLRGQECVEEC

SEQ ID NO: 37776 - protein, 15 aa, Homo Sapiens
CSQFLRGQECVEECR

SEQ ID NO: 37777 - protein, 15 aa, Homo Sapiens
SQFLRGQECVEECRV

SEQ ID NO: 37778 - protein, 15 aa, Homo Sapiens
QFLRGQECVEECRVL

SEQ ID NO: 37779 - protein, 15 aa, Homo Sapiens
FLRGQECVEECRVLQ

SEQ ID NO: 37780 - protein, 15 aa, Homo Sapiens
LRGQECVEECRVLQG

SEQ ID NO: 37781 - protein, 15 aa, Homo Sapiens
RGQECVEECRVLQGL

SEQ ID NO: 37782 - protein, 15 aa, Homo Sapiens
GQECVEECRVLQGLP

SEQ ID NO: 37783 - protein, 15 aa, Homo Sapiens
QECVEECRVLQGLPR

SEQ ID NO: 37784 - protein, 15 aa, Homo Sapiens
ECVEECRVLQGLPRE

SEQ ID NO: 37785 - protein, 15 aa, Homo Sapiens
CVEECRVLQGLPREY

SEQ ID NO: 37786 - protein, 15 aa, Homo Sapiens
VEECRVLQGLPREYV

SEQ ID NO: 37787 - protein, 15 aa, Homo Sapiens
EECRVLQGLPREYVN

SEQ ID NO: 37788 - protein, 15 aa, Homo Sapiens
ECRVLQGLPREYVNA

SEQ ID NO: 37789 - protein, 15 aa, Homo Sapiens
CRVLQGLPREYVNAR

SEQ ID NO: 37790 - protein, 15 aa, Homo Sapiens
RVLQGLPREYVNARH

SEQ ID NO: 37791 - protein, 15 aa, Homo Sapiens
VLQGLPREYVNARHC

SEQ ID NO: 37792 - protein, 15 aa, Homo Sapiens
LQGLPREYVNARHCL

SEQ ID NO: 37793 - protein, 15 aa, Homo Sapiens
QGLPREYVNARHCLP

SEQ ID NO: 37794 - protein, 15 aa, Homo Sapiens
GLPREYVNARHCLPC

SEQ ID NO: 37795 - protein, 15 aa, Homo Sapiens
LPREYVNARHCLPCH

SEQ ID NO: 37796 - protein, 15 aa, Homo Sapiens
PREYVNARHCLPCHP

SEQ ID NO: 37797 - protein, 15 aa, Homo Sapiens
REYVNARHCLPCHPE

SEQ ID NO: 37798 - protein, 15 aa, Homo Sapiens
EYVNARHCLPCHPEC

SEQ ID NO: 37799 - protein, 15 aa, Homo Sapiens
YVNARHCLPCHPECQ

SEQ ID NO: 37800 - protein, 15 aa, Homo Sapiens
VNARHCLPCHPECQP

SEQ ID NO: 37801 - protein, 15 aa, Homo Sapiens
NARHCLPCHPECQPQ

SEQ ID NO: 37802 - protein, 15 aa, Homo Sapiens
ARHCLPCHPECQPQN

SEQ ID NO: 37803 - protein, 15 aa, Homo Sapiens
RHCLPCHPECQPQNG

SEQ ID NO: 37804 - protein, 15 aa, Homo Sapiens
HCLPCHPECQPQNGS

SEQ ID NO: 37805 - protein, 15 aa, Homo Sapiens
CLPCHPECQPQNGSV

SEQ ID NO: 37806 - protein, 15 aa, Homo Sapiens
LPCHPECQPQNGSVT

SEQ ID NO: 37807 - protein, 15 aa, Homo Sapiens
PCHPECQPQNGSVTC

SEQ ID NO: 37808 - protein, 15 aa, Homo Sapiens
CHPECQPQNGSVTCF

SEQ ID NO: 37809 - protein, 15 aa, Homo Sapiens
HPECQPQNGSVTCFG

SEQ ID NO: 37810 - protein, 15 aa, Homo Sapiens
PECQPQNGSVTCFGP

SEQ ID NO: 37811 - protein, 15 aa, Homo Sapiens
ECQPQNGSVTCFGPE

SEQ ID NO: 37812 - protein, 15 aa, Homo Sapiens
CQPQNGSVTCFGPEA

SEQ ID NO: 37813 - protein, 15 aa, Homo Sapiens
QPQNGSVTCFGPEAD

SEQ ID NO: 37814 - protein, 15 aa, Homo Sapiens
PQNGSVTCFGPEADQ

SEQ ID NO: 37815 - protein, 15 aa, Homo Sapiens
QNGSVTCFGPEADQC

SEQ ID NO: 37816 - protein, 15 aa, Homo Sapiens
NGSVTCFGPEADQCV

SEQ ID NO: 37817 - protein, 15 aa, Homo Sapiens
GSVTCFGPEADQCVA

SEQ ID NO: 37818 - protein, 15 aa, Homo Sapiens
SVTCFGPEADQCVAC

SEQ ID NO: 37819 - protein, 15 aa, Homo Sapiens
VTCFGPEADQCVACA

SEQ ID NO: 37820 - protein, 15 aa, Homo Sapiens
TCFGPEADQCVACAH

SEQ ID NO: 37821 - protein, 15 aa, Homo Sapiens
CFGPEADQCVACAHY

SEQ ID NO: 37822 - protein, 15 aa, Homo Sapiens
FGPEADQCVACAHYK

SEQ ID NO: 37823 - protein, 15 aa, Homo Sapiens
GPEADQCVACAHYKD

SEQ ID NO: 37824 - protein, 15 aa, Homo Sapiens
PEADQCVACAHYKDP

SEQ ID NO: 37825 - protein, 15 aa, Homo Sapiens
EADQCVACAHYKDPP

SEQ ID NO: 37826 - protein, 15 aa, Homo Sapiens
ADQCVACAHYKDPPF

SEQ ID NO: 37827 - protein, 15 aa, Homo Sapiens
DQCVACAHYKDPPFC

SEQ ID NO: 37828 - protein, 15 aa, Homo Sapiens
QCVACAHYKDPPFCV

SEQ ID NO: 37829 - protein, 15 aa, Homo Sapiens
CVACAHYKDPPFCVA

SEQ ID NO: 37830 - protein, 15 aa, Homo Sapiens
VACAHYKDPPFCVAR

SEQ ID NO: 37831 - protein, 15 aa, Homo Sapiens
ACAHYKDPPFCVARC

SEQ ID NO: 37832 - protein, 15 aa, Homo Sapiens
CAHYKDPPFCVARCP

SEQ ID NO: 37833 - protein, 15 aa, Homo Sapiens
AHYKDPPFCVARCPS

SEQ ID NO: 37834 - protein, 15 aa, Homo Sapiens
HYKDPPFCVARCPSG

SEQ ID NO: 37835 - protein, 15 aa, Homo Sapiens
YKDPPFCVARCPSGV

SEQ ID NO: 37836 - protein, 15 aa, Homo Sapiens
KDPPFCVARCPSGVK

SEQ ID NO: 37837 - protein, 15 aa, Homo Sapiens
DPPFCVARCPSGVKP

SEQ ID NO: 37838 - protein, 15 aa, Homo Sapiens
PPFCVARCPSGVKPD

SEQ ID NO: 37839 - protein, 15 aa, Homo Sapiens
PFCVARCPSGVKPDL

SEQ ID NO: 37840 - protein, 15 aa, Homo Sapiens
FCVARCPSGVKPDLS

SEQ ID NO: 37841 - protein, 15 aa, Homo Sapiens
CVARCPSGVKPDLSY

SEQ ID NO: 37842 - protein, 15 aa, Homo Sapiens
VARCPSGVKPDLSYM

SEQ ID NO: 37843 - protein, 15 aa, Homo Sapiens
ARCPSGVKPDLSYMP

SEQ ID NO: 37844 - protein, 15 aa, Homo Sapiens
RCPSGVKPDLSYMPI

SEQ ID NO: 37845 - protein, 15 aa, Homo Sapiens
CPSGVKPDLSYMPIW

SEQ ID NO: 37846 - protein, 15 aa, Homo Sapiens
PSGVKPDLSYMPIWK

SEQ ID NO: 37847 - protein, 15 aa, Homo Sapiens
SGVKPDLSYMPIWKF

SEQ ID NO: 37848 - protein, 15 aa, Homo Sapiens
GVKPDLSYMPIWKFP

SEQ ID NO: 37849 - protein, 15 aa, Homo Sapiens
VKPDLSYMPIWKFPD

SEQ ID NO: 37850 - protein, 15 aa, Homo Sapiens
KPDLSYMPIWKFPDE

SEQ ID NO: 37851 - protein, 15 aa, Homo Sapiens
PDLSYMPIWKFPDEE

SEQ ID NO: 37852 - protein, 15 aa, Homo Sapiens
DLSYMPIWKFPDEEG

SEQ ID NO: 37853 - protein, 15 aa, Homo Sapiens
LSYMPIWKFPDEEGA

SEQ ID NO: 37854 - protein, 15 aa, Homo Sapiens
SYMPIWKFPDEEGAC

SEQ ID NO: 37855 - protein, 15 aa, Homo Sapiens
YMPIWKFPDEEGACQ

SEQ ID NO: 37856 - protein, 15 aa, Homo Sapiens
MPIWKFPDEEGACQP

SEQ ID NO: 37857 - protein, 15 aa, Homo Sapiens
PIWKFPDEEGACQPC

SEQ ID NO: 37858 - protein, 15 aa, Homo Sapiens
IWKFPDEEGACQPCP

SEQ ID NO: 37859 - protein, 15 aa, Homo Sapiens
WKFPDEEGACQPCPI

SEQ ID NO: 37860 - protein, 15 aa, Homo Sapiens
KFPDEEGACQPCPIN

SEQ ID NO: 37861 - protein, 15 aa, Homo Sapiens
FPDEEGACQPCPINC

SEQ ID NO: 37862 - protein, 15 aa, Homo Sapiens
PDEEGACQPCPINCT

SEQ ID NO: 37863 - protein, 15 aa, Homo Sapiens
DEEGACQPCPINCTH

SEQ ID NO: 37864 - protein, 15 aa, Homo Sapiens
EEGACQPCPINCTHS

SEQ ID NO: 37865 - protein, 15 aa, Homo Sapiens
EGACQPCPINCTHSC

SEQ ID NO: 37866 - protein, 15 aa, Homo Sapiens
GACQPCPINCTHSCV

SEQ ID NO: 37867 - protein, 15 aa, Homo Sapiens
ACQPCPINCTHSCVD

SEQ ID NO: 37868 - protein, 15 aa, Homo Sapiens
CQPCPINCTHSCVDL

SEQ ID NO: 37869 - protein, 15 aa, Homo Sapiens
QPCPINCTHSCVDLD

SEQ ID NO: 37870 - protein, 15 aa, Homo Sapiens
PCPINCTHSCVDLDD

SEQ ID NO: 37871 - protein, 15 aa, Homo Sapiens
CPINCTHSCVDLDDK

SEQ ID NO: 37872 - protein, 15 aa, Homo Sapiens
PINCTHSCVDLDDKG

SEQ ID NO: 37873 - protein, 15 aa, Homo Sapiens
INCTHSCVDLDDKGC

SEQ ID NO: 37874 - protein, 15 aa, Homo Sapiens
NCTHSCVDLDDKGCP

SEQ ID NO: 37875 - protein, 15 aa, Homo Sapiens
CTHSCVDLDDKGCPA

SEQ ID NO: 37876 - protein, 15 aa, Homo Sapiens
THSCVDLDDKGCPAE

SEQ ID NO: 37877 - protein, 15 aa, Homo Sapiens
HSCVDLDDKGCPAEQ

SEQ ID NO: 37878 - protein, 15 aa, Homo Sapiens
SCVDLDDKGCPAEQR

SEQ ID NO: 37879 - protein, 15 aa, Homo Sapiens
CVDLDDKGCPAEQRA

SEQ ID NO: 37880 - protein, 15 aa, Homo Sapiens
VDLDDKGCPAEQRAS

SEQ ID NO: 37881 - protein, 15 aa, Homo Sapiens
DLDDKGCPAEQRASP

SEQ ID NO: 37882 - protein, 15 aa, Homo Sapiens
LDDKGCPAEQRASPL

SEQ ID NO: 37883 - protein, 15 aa, Homo Sapiens
DDKGCPAEQRASPLT

SEQ ID NO: 37884 - protein, 15 aa, Homo Sapiens
DKGCPAEQRASPLTS

SEQ ID NO: 37885 - protein, 15 aa, Homo Sapiens
KGCPAEQRASPLTSI

SEQ ID NO: 37886 - protein, 15 aa, Homo Sapiens
GCPAEQRASPLTSII

SEQ ID NO: 37887 - protein, 15 aa, Homo Sapiens
CPAEQRASPLTSIIS

SEQ ID NO: 37888 - protein, 15 aa, Homo Sapiens
PAEQRASPLTSIISA

SEQ ID NO: 37889 - protein, 15 aa, Homo Sapiens
AEQRASPLTSIISAV

SEQ ID NO: 37890 - protein, 15 aa, Homo Sapiens
EQRASPLTSIISAVV

SEQ ID NO: 37891 - protein, 15 aa, Homo Sapiens
QRASPLTSIISAVVG

SEQ ID NO: 37892 - protein, 15 aa, Homo Sapiens
RASPLTSIISAVVGI

SEQ ID NO: 37893 - protein, 15 aa, Homo Sapiens
ASPLTSIISAVVGIL

SEQ ID NO: 37894 - protein, 15 aa, Homo Sapiens
SPLTSIISAVVGILL

SEQ ID NO: 37895 - protein, 15 aa, Homo Sapiens
PLTSIISAVVGILLV

SEQ ID NO: 37896 - protein, 15 aa, Homo Sapiens
LTSIISAVVGILLVV

SEQ ID NO: 37897 - protein, 15 aa, Homo Sapiens
TSIISAVVGILLVVV

SEQ ID NO: 37898 - protein, 15 aa, Homo Sapiens
SIISAVVGILLVVVL

SEQ ID NO: 37899 - protein, 15 aa, Homo Sapiens
IISAVVGILLVVVLG

SEQ ID NO: 37900 - protein, 15 aa, Homo Sapiens
ISAVVGILLVVVLGV

SEQ ID NO: 37901 - protein, 15 aa, Homo Sapiens
SAVVGILLVVVLGVV

SEQ ID NO: 37902 - protein, 15 aa, Homo Sapiens
AVVGILLVVVLGVVF

SEQ ID NO: 37903 - protein, 15 aa, Homo Sapiens
VVGILLVVVLGVVFG

SEQ ID NO: 37904 - protein, 15 aa, Homo Sapiens
VGILLVVVLGVVFGI

SEQ ID NO: 37905 - protein, 15 aa, Homo Sapiens
GILLVVVLGVVFGIL

SEQ ID NO: 37906 - protein, 15 aa, Homo Sapiens
ILLVVVLGVVFGILI

SEQ ID NO: 37907 - protein, 15 aa, Homo Sapiens
LLVVVLGVVFGILIK

SEQ ID NO: 37908 - protein, 15 aa, Homo Sapiens
LVVVLGVVFGILIKR

SEQ ID NO: 37909 - protein, 15 aa, Homo Sapiens
VVVLGVVFGILIKRR

SEQ ID NO: 37910 - protein, 15 aa, Homo Sapiens
VVLGVVFGILIKRRQ

SEQ ID NO: 37911 - protein, 15 aa, Homo Sapiens
VLGVVFGILIKRRQQ

SEQ ID NO: 37912 - protein, 15 aa, Homo Sapiens
LGVVFGILIKRRQQK

SEQ ID NO: 37913 - protein, 15 aa, Homo Sapiens
GVVFGILIKRRQQKI

SEQ ID NO: 37914 - protein, 15 aa, Homo Sapiens
VVFGILIKRRQQKIR

SEQ ID NO: 37915 - protein, 15 aa, Homo Sapiens
VFGILIKRRQQKIRK

SEQ ID NO: 37916 - protein, 15 aa, Homo Sapiens
FGILIKRRQQKIRKY

SEQ ID NO: 37917 - protein, 15 aa, Homo Sapiens
GILIKRRQQKIRKYT

SEQ ID NO: 37918 - protein, 15 aa, Homo Sapiens
ILIKRRQQKIRKYTM

SEQ ID NO: 37919 - protein, 15 aa, Homo Sapiens
LIKRRQQKIRKYTMR

SEQ ID NO: 37920 - protein, 15 aa, Homo Sapiens
IKRRQQKIRKYTMRR

SEQ ID NO: 37921 - protein, 15 aa, Homo Sapiens
KRRQQKIRKYTMRRL

SEQ ID NO: 37922 - protein, 15 aa, Homo Sapiens
RRQQKIRKYTMRRLL

SEQ ID NO: 37923 - protein, 15 aa, Homo Sapiens
RQQKIRKYTMRRLLQ

SEQ ID NO: 37924 - protein, 15 aa, Homo Sapiens
QQKIRKYTMRRLLQE

SEQ ID NO: 37925 - protein, 15 aa, Homo Sapiens
QKIRKYTMRRLLQET

SEQ ID NO: 37926 - protein, 15 aa, Homo Sapiens
KIRKYTMRRLLQETE

SEQ ID NO: 37927 - protein, 15 aa, Homo Sapiens
IRKYTMRRLLQETEL

SEQ ID NO: 37928 - protein, 15 aa, Homo Sapiens
RKYTMRRLLQETELV

SEQ ID NO: 37929 - protein, 15 aa, Homo Sapiens
KYTMRRLLQETELVE

SEQ ID NO: 37930 - protein, 15 aa, Homo Sapiens
YTMRRLLQETELVEP

SEQ ID NO: 37931 - protein, 15 aa, Homo Sapiens
TMRRLLQETELVEPL

SEQ ID NO: 37932 - protein, 15 aa, Homo Sapiens
MRRLLQETELVEPLT

SEQ ID NO: 37933 - protein, 15 aa, Homo Sapiens
RRLLQETELVEPLTP

SEQ ID NO: 37934 - protein, 15 aa, Homo Sapiens
RLLQETELVEPLTPS

SEQ ID NO: 37935 - protein, 15 aa, Homo Sapiens
LLQETELVEPLTPSG

SEQ ID NO: 37936 - protein, 15 aa, Homo Sapiens
LQETELVEPLTPSGA

SEQ ID NO: 37937 - protein, 15 aa, Homo Sapiens
QETELVEPLTPSGAM

SEQ ID NO: 37938 - protein, 15 aa, Homo Sapiens
ETELVEPLTPSGAMP

SEQ ID NO: 37939 - protein, 15 aa, Homo Sapiens
TELVEPLTPSGAMPN

SEQ ID NO: 37940 - protein, 15 aa, Homo Sapiens
ELVEPLTPSGAMPNQ

SEQ ID NO: 37941 - protein, 15 aa, Homo Sapiens
LVEPLTPSGAMPNQA

SEQ ID NO: 37942 - protein, 15 aa, Homo Sapiens
VEPLTPSGAMPNQAQ

SEQ ID NO: 37943 - protein, 15 aa, Homo Sapiens
EPLTPSGAMPNQAQM

SEQ ID NO: 37944 - protein, 15 aa, Homo Sapiens
PLTPSGAMPNQAQMR

SEQ ID NO: 37945 - protein, 15 aa, Homo Sapiens
LTPSGAMPNQAQMRI

SEQ ID NO: 37946 - protein, 15 aa, Homo Sapiens
TPSGAMPNQAQMRIL

SEQ ID NO: 37947 - protein, 15 aa, Homo Sapiens
PSGAMPNQAQMRILK

SEQ ID NO: 37948 - protein, 15 aa, Homo Sapiens
SGAMPNQAQMRILKE

SEQ ID NO: 37949 - protein, 15 aa, Homo Sapiens
GAMPNQAQMRILKET

SEQ ID NO: 37950 - protein, 15 aa, Homo Sapiens
AMPNQAQMRILKETE

SEQ ID NO: 37951 - protein, 15 aa, Homo Sapiens
MPNQAQMRILKETEL

SEQ ID NO: 37952 - protein, 15 aa, Homo Sapiens
PNQAQMRILKETELR

SEQ ID NO: 37953 - protein, 15 aa, Homo Sapiens
NQAQMRILKETELRK

SEQ ID NO: 37954 - protein, 15 aa, Homo Sapiens
QAQMRILKETELRKV

SEQ ID NO: 37955 - protein, 15 aa, Homo Sapiens
AQMRILKETELRKVK

SEQ ID NO: 37956 - protein, 15 aa, Homo Sapiens
QMRILKETELRKVKV

SEQ ID NO: 37957 - protein, 15 aa, Homo Sapiens
MRILKETELRKVKVL

SEQ ID NO: 37958 - protein, 15 aa, Homo Sapiens
RILKETELRKVKVLG

SEQ ID NO: 37959 - protein, 15 aa, Homo Sapiens
ILKETELRKVKVLGS

SEQ ID NO: 37960 - protein, 15 aa, Homo Sapiens
LKETELRKVKVLGSG

SEQ ID NO: 37961 - protein, 15 aa, Homo Sapiens
KETELRKVKVLGSGA

SEQ ID NO: 37962 - protein, 15 aa, Homo Sapiens
ETELRKVKVLGSGAF

SEQ ID NO: 37963 - protein, 15 aa, Homo Sapiens
TELRKVKVLGSGAFG

SEQ ID NO: 37964 - protein, 15 aa, Homo Sapiens
ELRKVKVLGSGAFGT

SEQ ID NO: 37965 - protein, 15 aa, Homo Sapiens
LRKVKVLGSGAFGTV

SEQ ID NO: 37966 - protein, 15 aa, Homo Sapiens
RKVKVLGSGAFGTVY

SEQ ID NO: 37967 - protein, 15 aa, Homo Sapiens
KVKVLGSGAFGTVYK

SEQ ID NO: 37968 - protein, 15 aa, Homo Sapiens
VKVLGSGAFGTVYKG

SEQ ID NO: 37969 - protein, 15 aa, Homo Sapiens
KVLGSGAFGTVYKGI

SEQ ID NO: 37970 - protein, 15 aa, Homo Sapiens
VLGSGAFGTVYKGIW

SEQ ID NO: 37971 - protein, 15 aa, Homo Sapiens
LGSGAFGTVYKGIWI

SEQ ID NO: 37972 - protein, 15 aa, Homo Sapiens
GSGAFGTVYKGIWIP

SEQ ID NO: 37973 - protein, 15 aa, Homo Sapiens
SGAFGTVYKGIWIPD

SEQ ID NO: 37974 - protein, 15 aa, Homo Sapiens
GAFGTVYKGIWIPDG

SEQ ID NO: 37975 - protein, 15 aa, Homo Sapiens
AFGTVYKGIWIPDGE

SEQ ID NO: 37976 - protein, 15 aa, Homo Sapiens
FGTVYKGIWIPDGEN

SEQ ID NO: 37977 - protein, 15 aa, Homo Sapiens
GTVYKGIWIPDGENV

SEQ ID NO: 37978 - protein, 15 aa, Homo Sapiens
TVYKGIWIPDGENVK

SEQ ID NO: 37979 - protein, 15 aa, Homo Sapiens
VYKGIWIPDGENVKI

SEQ ID NO: 37980 - protein, 15 aa, Homo Sapiens
YKGIWIPDGENVKIP

SEQ ID NO: 37981 - protein, 15 aa, Homo Sapiens
KGIWIPDGENVKIPV

SEQ ID NO: 37982 - protein, 15 aa, Homo Sapiens
GIWIPDGENVKIPVA

SEQ ID NO: 37983 - protein, 15 aa, Homo Sapiens
IWIPDGENVKIPVAI

SEQ ID NO: 37984 - protein, 15 aa, Homo Sapiens
WIPDGENVKIPVAIK

SEQ ID NO: 37985 - protein, 15 aa, Homo Sapiens
IPDGENVKIPVAIKV

SEQ ID NO: 37986 - protein, 15 aa, Homo Sapiens
PDGENVKIPVAIKVL

SEQ ID NO: 37987 - protein, 15 aa, Homo Sapiens
DGENVKIPVAIKVLR

SEQ ID NO: 37988 - protein, 15 aa, Homo Sapiens
GENVKIPVAIKVLRE

SEQ ID NO: 37989 - protein, 15 aa, Homo Sapiens
ENVKIPVAIKVLREN

SEQ ID NO: 37990 - protein, 15 aa, Homo Sapiens
NVKIPVAIKVLRENT

SEQ ID NO: 37991 - protein, 15 aa, Homo Sapiens
VKIPVAIKVLRENTS

SEQ ID NO: 37992 - protein, 15 aa, Homo Sapiens
KIPVAIKVLRENTSP

SEQ ID NO: 37993 - protein, 15 aa, Homo Sapiens
IPVAIKVLRENTSPK

SEQ ID NO: 37994 - protein, 15 aa, Homo Sapiens
PVAIKVLRENTSPKA

SEQ ID NO: 37995 - protein, 15 aa, Homo Sapiens
VAIKVLRENTSPKAN

SEQ ID NO: 37996 - protein, 15 aa, Homo Sapiens
AIKVLRENTSPKANK

SEQ ID NO: 37997 - protein, 15 aa, Homo Sapiens
IKVLRENTSPKANKE

SEQ ID NO: 37998 - protein, 15 aa, Homo Sapiens
KVLRENTSPKANKEI

SEQ ID NO: 37999 - protein, 15 aa, Homo Sapiens
VLRENTSPKANKEIL

SEQ ID NO: 38000 - protein, 15 aa, Homo Sapiens
LRENTSPKANKEILD

SEQ ID NO: 38001 - protein, 15 aa, Homo Sapiens
RENTSPKANKEILDE

SEQ ID NO: 38002 - protein, 15 aa, Homo Sapiens
ENTSPKANKEILDEA

SEQ ID NO: 38003 - protein, 15 aa, Homo Sapiens
NTSPKANKEILDEAY

SEQ ID NO: 38004 - protein, 15 aa, Homo Sapiens
TSPKANKEILDEAYV

SEQ ID NO: 38005 - protein, 15 aa, Homo Sapiens
SPKANKEILDEAYVM

SEQ ID NO: 38006 - protein, 15 aa, Homo Sapiens
PKANKEILDEAYVMA

SEQ ID NO: 38007 - protein, 15 aa, Homo Sapiens
KANKEILDEAYVMAG

SEQ ID NO: 38008 - protein, 15 aa, Homo Sapiens
ANKEILDEAYVMAGV

SEQ ID NO: 38009 - protein, 15 aa, Homo Sapiens
NKEILDEAYVMAGVG

SEQ ID NO: 38010 - protein, 15 aa, Homo Sapiens
KEILDEAYVMAGVGS

SEQ ID NO: 38011 - protein, 15 aa, Homo Sapiens
EILDEAYVMAGVGSP

SEQ ID NO: 38012 - protein, 15 aa, Homo Sapiens
ILDEAYVMAGVGSPY

SEQ ID NO: 38013 - protein, 15 aa, Homo Sapiens
LDEAYVMAGVGSPYV

SEQ ID NO: 38014 - protein, 15 aa, Homo Sapiens
DEAYVMAGVGSPYVS

SEQ ID NO: 38015 - protein, 15 aa, Homo Sapiens
EAYVMAGVGSPYVSR

SEQ ID NO: 38016 - protein, 15 aa, Homo Sapiens
AYVMAGVGSPYVSRL

SEQ ID NO: 38017 - protein, 15 aa, Homo Sapiens
YVMAGVGSPYVSRLL

SEQ ID NO: 38018 - protein, 15 aa, Homo Sapiens
VMAGVGSPYVSRLLG

SEQ ID NO: 38019 - protein, 15 aa, Homo Sapiens
MAGVGSPYVSRLLGI

SEQ ID NO: 38020 - protein, 15 aa, Homo Sapiens
AGVGSPYVSRLLGIC

SEQ ID NO: 38021 - protein, 15 aa, Homo Sapiens
GVGSPYVSRLLGICL

SEQ ID NO: 38022 - protein, 15 aa, Homo Sapiens
VGSPYVSRLLGICLT

SEQ ID NO: 38023 - protein, 15 aa, Homo Sapiens
GSPYVSRLLGICLTS

SEQ ID NO: 38024 - protein, 15 aa, Homo Sapiens
SPYVSRLLGICLTST

SEQ ID NO: 38025 - protein, 15 aa, Homo Sapiens
PYVSRLLGICLTSTV

SEQ ID NO: 38026 - protein, 15 aa, Homo Sapiens
YVSRLLGICLTSTVQ

SEQ ID NO: 38027 - protein, 15 aa, Homo Sapiens
VSRLLGICLTSTVQL

SEQ ID NO: 38028 - protein, 15 aa, Homo Sapiens
SRLLGICLTSTVQLV

SEQ ID NO: 38029 - protein, 15 aa, Homo Sapiens
RLLGICLTSTVQLVT

SEQ ID NO: 38030 - protein, 15 aa, Homo Sapiens
LLGICLTSTVQLVTQ

SEQ ID NO: 38031 - protein, 15 aa, Homo Sapiens
LGICLTSTVQLVTQL

SEQ ID NO: 38032 - protein, 15 aa, Homo Sapiens
GICLTSTVQLVTQLM

SEQ ID NO: 38033 - protein, 15 aa, Homo Sapiens
ICLTSTVQLVTQLMP

SEQ ID NO: 38034 - protein, 15 aa, Homo Sapiens
CLTSTVQLVTQLMPY

SEQ ID NO: 38035 - protein, 15 aa, Homo Sapiens
LTSTVQLVTQLMPYG

SEQ ID NO: 38036 - protein, 15 aa, Homo Sapiens
TSTVQLVTQLMPYGC

SEQ ID NO: 38037 - protein, 15 aa, Homo Sapiens
STVQLVTQLMPYGCL

SEQ ID NO: 38038 - protein, 15 aa, Homo Sapiens
TVQLVTQLMPYGCLL

SEQ ID NO: 38039 - protein, 15 aa, Homo Sapiens
VQLVTQLMPYGCLLD

SEQ ID NO: 38040 - protein, 15 aa, Homo Sapiens
QLVTQLMPYGCLLDH

SEQ ID NO: 38041 - protein, 15 aa, Homo Sapiens
LVTQLMPYGCLLDHV

SEQ ID NO: 38042 - protein, 15 aa, Homo Sapiens
VTQLMPYGCLLDHVR

SEQ ID NO: 38043 - protein, 15 aa, Homo Sapiens
TQLMPYGCLLDHVRE

SEQ ID NO: 38044 - protein, 15 aa, Homo Sapiens
QLMPYGCLLDHVREN

SEQ ID NO: 38045 - protein, 15 aa, Homo Sapiens
LMPYGCLLDHVRENR

SEQ ID NO: 38046 - protein, 15 aa, Homo Sapiens
MPYGCLLDHVRENRG

SEQ ID NO: 38047 - protein, 15 aa, Homo Sapiens
PYGCLLDHVRENRGR

SEQ ID NO: 38048 - protein, 15 aa, Homo Sapiens
YGCLLDHVRENRGRL

SEQ ID NO: 38049 - protein, 15 aa, Homo Sapiens
GCLLDHVRENRGRLG

SEQ ID NO: 38050 - protein, 15 aa, Homo Sapiens
CLLDHVRENRGRLGS

SEQ ID NO: 38051 - protein, 15 aa, Homo Sapiens
LLDHVRENRGRLGSQ

SEQ ID NO: 38052 - protein, 15 aa, Homo Sapiens
LDHVRENRGRLGSQD

SEQ ID NO: 38053 - protein, 15 aa, Homo Sapiens
DHVRENRGRLGSQDL

SEQ ID NO: 38054 - protein, 15 aa, Homo Sapiens
HVRENRGRLGSQDLL

SEQ ID NO: 38055 - protein, 15 aa, Homo Sapiens
VRENRGRLGSQDLLN

SEQ ID NO: 38056 - protein, 15 aa, Homo Sapiens
RENRGRLGSQDLLNW

SEQ ID NO: 38057 - protein, 15 aa, Homo Sapiens
ENRGRLGSQDLLNWC

SEQ ID NO: 38058 - protein, 15 aa, Homo Sapiens
NRGRLGSQDLLNWCM

SEQ ID NO: 38059 - protein, 15 aa, Homo Sapiens
RGRLGSQDLLNWCMQ

SEQ ID NO: 38060 - protein, 15 aa, Homo Sapiens
GRLGSQDLLNWCMQI

SEQ ID NO: 38061 - protein, 15 aa, Homo Sapiens
RLGSQDLLNWCMQIA

SEQ ID NO: 38062 - protein, 15 aa, Homo Sapiens
LGSQDLLNWCMQIAK

SEQ ID NO: 38063 - protein, 15 aa, Homo Sapiens
GSQDLLNWCMQIAKG

SEQ ID NO: 38064 - protein, 15 aa, Homo Sapiens
SQDLLNWCMQIAKGM

SEQ ID NO: 38065 - protein, 15 aa, Homo Sapiens
QDLLNWCMQIAKGMS

SEQ ID NO: 38066 - protein, 15 aa, Homo Sapiens
DLLNWCMQIAKGMSY

SEQ ID NO: 38067 - protein, 15 aa, Homo Sapiens
LLNWCMQIAKGMSYL

SEQ ID NO: 38068 - protein, 15 aa, Homo Sapiens
LNWCMQIAKGMSYLE

SEQ ID NO: 38069 - protein, 15 aa, Homo Sapiens
NWCMQIAKGMSYLED

SEQ ID NO: 38070 - protein, 15 aa, Homo Sapiens
WCMQIAKGMSYLEDV

SEQ ID NO: 38071 - protein, 15 aa, Homo Sapiens
CMQIAKGMSYLEDVR

SEQ ID NO: 38072 - protein, 15 aa, Homo Sapiens
MQIAKGMSYLEDVRL

SEQ ID NO: 38073 - protein, 15 aa, Homo Sapiens
QIAKGMSYLEDVRLV

SEQ ID NO: 38074 - protein, 15 aa, Homo Sapiens
IAKGMSYLEDVRLVH

SEQ ID NO: 38075 - protein, 15 aa, Homo Sapiens
AKGMSYLEDVRLVHR

SEQ ID NO: 38076 - protein, 15 aa, Homo Sapiens
KGMSYLEDVRLVHRD

SEQ ID NO: 38077 - protein, 15 aa, Homo Sapiens
GMSYLEDVRLVHRDL

SEQ ID NO: 38078 - protein, 15 aa, Homo Sapiens
MSYLEDVRLVHRDLA

SEQ ID NO: 38079 - protein, 15 aa, Homo Sapiens
SYLEDVRLVHRDLAA

SEQ ID NO: 38080 - protein, 15 aa, Homo Sapiens
YLEDVRLVHRDLAAR

SEQ ID NO: 38081 - protein, 15 aa, Homo Sapiens
LEDVRLVHRDLAARN

SEQ ID NO: 38082 - protein, 15 aa, Homo Sapiens
EDVRLVHRDLAARNV

SEQ ID NO: 38083 - protein, 15 aa, Homo Sapiens
DVRLVHRDLAARNVL

SEQ ID NO: 38084 - protein, 15 aa, Homo Sapiens
VRLVHRDLAARNVLV

SEQ ID NO: 38085 - protein, 15 aa, Homo Sapiens
RLVHRDLAARNVLVK

SEQ ID NO: 38086 - protein, 15 aa, Homo Sapiens
LVHRDLAARNVLVKS

SEQ ID NO: 38087 - protein, 15 aa, Homo Sapiens
VHRDLAARNVLVKSP

SEQ ID NO: 38088 - protein, 15 aa, Homo Sapiens
HRDLAARNVLVKSPN

SEQ ID NO: 38089 - protein, 15 aa, Homo Sapiens
RDLAARNVLVKSPNH

SEQ ID NO: 38090 - protein, 15 aa, Homo Sapiens
DLAARNVLVKSPNHV

SEQ ID NO: 38091 - protein, 15 aa, Homo Sapiens
LAARNVLVKSPNHVK

SEQ ID NO: 38092 - protein, 15 aa, Homo Sapiens
AARNVLVKSPNHVKI

SEQ ID NO: 38093 - protein, 15 aa, Homo Sapiens
ARNVLVKSPNHVKIT

SEQ ID NO: 38094 - protein, 15 aa, Homo Sapiens
RNVLVKSPNHVKITD

SEQ ID NO: 38095 - protein, 15 aa, Homo Sapiens
NVLVKSPNHVKITDF

SEQ ID NO: 38096 - protein, 15 aa, Homo Sapiens
VLVKSPNHVKITDFG

SEQ ID NO: 38097 - protein, 15 aa, Homo Sapiens
LVKSPNHVKITDFGL

SEQ ID NO: 38098 - protein, 15 aa, Homo Sapiens
VKSPNHVKITDFGLA

SEQ ID NO: 38099 - protein, 15 aa, Homo Sapiens
KSPNHVKITDFGLAR

SEQ ID NO: 38100 - protein, 15 aa, Homo Sapiens
SPNHVKITDFGLARL

SEQ ID NO: 38101 - protein, 15 aa, Homo Sapiens
PNHVKITDFGLARLL

SEQ ID NO: 38102 - protein, 15 aa, Homo Sapiens
NHVKITDFGLARLLD

SEQ ID NO: 38103 - protein, 15 aa, Homo Sapiens
HVKITDFGLARLLDI

SEQ ID NO: 38104 - protein, 15 aa, Homo Sapiens
VKITDFGLARLLDID

SEQ ID NO: 38105 - protein, 15 aa, Homo Sapiens
KITDFGLARLLDIDE

SEQ ID NO: 38106 - protein, 15 aa, Homo Sapiens
ITDFGLARLLDIDET

SEQ ID NO: 38107 - protein, 15 aa, Homo Sapiens
TDFGLARLLDIDETE

SEQ ID NO: 38108 - protein, 15 aa, Homo Sapiens
DFGLARLLDIDETEY

SEQ ID NO: 38109 - protein, 15 aa, Homo Sapiens
FGLARLLDIDETEYH

SEQ ID NO: 38110 - protein, 15 aa, Homo Sapiens
GLARLLDIDETEYHA

SEQ ID NO: 38111 - protein, 15 aa, Homo Sapiens
LARLLDIDETEYHAD

SEQ ID NO: 38112 - protein, 15 aa, Homo Sapiens
ARLLDIDETEYHADG

SEQ ID NO: 38113 - protein, 15 aa, Homo Sapiens
RLLDIDETEYHADGG

SEQ ID NO: 38114 - protein, 15 aa, Homo Sapiens
LLDIDETEYHADGGK

SEQ ID NO: 38115 - protein, 15 aa, Homo Sapiens
LDIDETEYHADGGKV

SEQ ID NO: 38116 - protein, 15 aa, Homo Sapiens
DIDETEYHADGGKVP

SEQ ID NO: 38117 - protein, 15 aa, Homo Sapiens
IDETEYHADGGKVPI

SEQ ID NO: 38118 - protein, 15 aa, Homo Sapiens
DETEYHADGGKVPIK

SEQ ID NO: 38119 - protein, 15 aa, Homo Sapiens
ETEYHADGGKVPIKW

SEQ ID NO: 38120 - protein, 15 aa, Homo Sapiens
TEYHADGGKVPIKWM

SEQ ID NO: 38121 - protein, 15 aa, Homo Sapiens
EYHADGGKVPIKWMA

SEQ ID NO: 38122 - protein, 15 aa, Homo Sapiens
YHADGGKVPIKWMAL

SEQ ID NO: 38123 - protein, 15 aa, Homo Sapiens
HADGGKVPIKWMALE

SEQ ID NO: 38124 - protein, 15 aa, Homo Sapiens
ADGGKVPIKWMALES

SEQ ID NO: 38125 - protein, 15 aa, Homo Sapiens
DGGKVPIKWMALESI

SEQ ID NO: 38126 - protein, 15 aa, Homo Sapiens
GGKVPIKWMALESIL

SEQ ID NO: 38127 - protein, 15 aa, Homo Sapiens
GKVPIKWMALESILR

SEQ ID NO: 38128 - protein, 15 aa, Homo Sapiens
KVPIKWMALESILRR

SEQ ID NO: 38129 - protein, 15 aa, Homo Sapiens
VPIKWMALESILRRR

SEQ ID NO: 38130 - protein, 15 aa, Homo Sapiens
PIKWMALESILRRRF

SEQ ID NO: 38131 - protein, 15 aa, Homo Sapiens
IKWMALESILRRRFT

SEQ ID NO: 38132 - protein, 15 aa, Homo Sapiens
KWMALESILRRRFTH

SEQ ID NO: 38133 - protein, 15 aa, Homo Sapiens
WMALESILRRRFTHQ

SEQ ID NO: 38134 - protein, 15 aa, Homo Sapiens
MALESILRRRFTHQS

SEQ ID NO: 38135 - protein, 15 aa, Homo Sapiens
ALESILRRRFTHQSD

SEQ ID NO: 38136 - protein, 15 aa, Homo Sapiens
LESILRRRFTHQSDV

SEQ ID NO: 38137 - protein, 15 aa, Homo Sapiens
ESILRRRFTHQSDVW

SEQ ID NO: 38138 - protein, 15 aa, Homo Sapiens
SILRRRFTHQSDVWS

SEQ ID NO: 38139 - protein, 15 aa, Homo Sapiens
ILRRRFTHQSDVWSY

SEQ ID NO: 38140 - protein, 15 aa, Homo Sapiens
LRRRFTHQSDVWSYG

SEQ ID NO: 38141 - protein, 15 aa, Homo Sapiens
RRRFTHQSDVWSYGV

SEQ ID NO: 38142 - protein, 15 aa, Homo Sapiens
RRFTHQSDVWSYGVT

SEQ ID NO: 38143 - protein, 15 aa, Homo Sapiens
RFTHQSDVWSYGVTV

SEQ ID NO: 38144 - protein, 15 aa, Homo Sapiens
FTHQSDVWSYGVTVW

SEQ ID NO: 38145 - protein, 15 aa, Homo Sapiens
THQSDVWSYGVTVWE

SEQ ID NO: 38146 - protein, 15 aa, Homo Sapiens
HQSDVWSYGVTVWEL

SEQ ID NO: 38147 - protein, 15 aa, Homo Sapiens
QSDVWSYGVTVWELM

SEQ ID NO: 38148 - protein, 15 aa, Homo Sapiens
SDVWSYGVTVWELMT

SEQ ID NO: 38149 - protein, 15 aa, Homo Sapiens
DVWSYGVTVWELMTF

SEQ ID NO: 38150 - protein, 15 aa, Homo Sapiens
VWSYGVTVWELMTFG

SEQ ID NO: 38151 - protein, 15 aa, Homo Sapiens
WSYGVTVWELMTFGA

SEQ ID NO: 38152 - protein, 15 aa, Homo Sapiens
SYGVTVWELMTFGAK

SEQ ID NO: 38153 - protein, 15 aa, Homo Sapiens
YGVTVWELMTFGAKP

SEQ ID NO: 38154 - protein, 15 aa, Homo Sapiens
GVTVWELMTFGAKPY

SEQ ID NO: 38155 - protein, 15 aa, Homo Sapiens
VTVWELMTFGAKPYD

SEQ ID NO: 38156 - protein, 15 aa, Homo Sapiens
TVWELMTFGAKPYDG

SEQ ID NO: 38157 - protein, 15 aa, Homo Sapiens
VWELMTFGAKPYDGI

SEQ ID NO: 38158 - protein, 15 aa, Homo Sapiens
WELMTFGAKPYDGIP

SEQ ID NO: 38159 - protein, 15 aa, Homo Sapiens
ELMTFGAKPYDGIPA

SEQ ID NO: 38160 - protein, 15 aa, Homo Sapiens
LMTFGAKPYDGIPAR

SEQ ID NO: 38161 - protein, 15 aa, Homo Sapiens
MTFGAKPYDGIPARE

SEQ ID NO: 38162 - protein, 15 aa, Homo Sapiens
TFGAKPYDGIPAREI

SEQ ID NO: 38163 - protein, 15 aa, Homo Sapiens
FGAKPYDGIPAREIP

SEQ ID NO: 38164 - protein, 15 aa, Homo Sapiens
GAKPYDGIPAREIPD

SEQ ID NO: 38165 - protein, 15 aa, Homo Sapiens
AKPYDGIPAREIPDL

SEQ ID NO: 38166 - protein, 15 aa, Homo Sapiens
KPYDGIPAREIPDLL

SEQ ID NO: 38167 - protein, 15 aa, Homo Sapiens
PYDGIPAREIPDLLE

SEQ ID NO: 38168 - protein, 15 aa, Homo Sapiens
YDGIPAREIPDLLEK

SEQ ID NO: 38169 - protein, 15 aa, Homo Sapiens
DGIPAREIPDLLEKG

SEQ ID NO: 38170 - protein, 15 aa, Homo Sapiens
GIPAREIPDLLEKGE

SEQ ID NO: 38171 - protein, 15 aa, Homo Sapiens
IPAREIPDLLEKGER

SEQ ID NO: 38172 - protein, 15 aa, Homo Sapiens
PAREIPDLLEKGERL

SEQ ID NO: 38173 - protein, 15 aa, Homo Sapiens
AREIPDLLEKGERLP

SEQ ID NO: 38174 - protein, 15 aa, Homo Sapiens
REIPDLLEKGERLPQ

SEQ ID NO: 38175 - protein, 15 aa, Homo Sapiens
EIPDLLEKGERLPQP

SEQ ID NO: 38176 - protein, 15 aa, Homo Sapiens
IPDLLEKGERLPQPP

SEQ ID NO: 38177 - protein, 15 aa, Homo Sapiens
PDLLEKGERLPQPPI

SEQ ID NO: 38178 - protein, 15 aa, Homo Sapiens
DLLEKGERLPQPPIC

SEQ ID NO: 38179 - protein, 15 aa, Homo Sapiens
LLEKGERLPQPPICT

SEQ ID NO: 38180 - protein, 15 aa, Homo Sapiens
LEKGERLPQPPICTI

SEQ ID NO: 38181 - protein, 15 aa, Homo Sapiens
EKGERLPQPPICTID

SEQ ID NO: 38182 - protein, 15 aa, Homo Sapiens
KGERLPQPPICTIDV

SEQ ID NO: 38183 - protein, 15 aa, Homo Sapiens
GERLPQPPICTIDVY

SEQ ID NO: 38184 - protein, 15 aa, Homo Sapiens
ERLPQPPICTIDVYM

SEQ ID NO: 38185 - protein, 15 aa, Homo Sapiens
RLPQPPICTIDVYMI

SEQ ID NO: 38186 - protein, 15 aa, Homo Sapiens
LPQPPICTIDVYMIM

SEQ ID NO: 38187 - protein, 15 aa, Homo Sapiens
PQPPICTIDVYMIMV

SEQ ID NO: 38188 - protein, 15 aa, Homo Sapiens
QPPICTIDVYMIMVK

SEQ ID NO: 38189 - protein, 15 aa, Homo Sapiens
PPICTIDVYMIMVKC

SEQ ID NO: 38190 - protein, 15 aa, Homo Sapiens
PICTIDVYMIMVKCW

SEQ ID NO: 38191 - protein, 15 aa, Homo Sapiens
ICTIDVYMIMVKCWM

SEQ ID NO: 38192 - protein, 15 aa, Homo Sapiens
CTIDVYMIMVKCWMI

SEQ ID NO: 38193 - protein, 15 aa, Homo Sapiens
TIDVYMIMVKCWMID

SEQ ID NO: 38194 - protein, 15 aa, Homo Sapiens
IDVYMIMVKCWMIDS

SEQ ID NO: 38195 - protein, 15 aa, Homo Sapiens
DVYMIMVKCWMIDSE

SEQ ID NO: 38196 - protein, 15 aa, Homo Sapiens
VYMIMVKCWMIDSEC

SEQ ID NO: 38197 - protein, 15 aa, Homo Sapiens
YMIMVKCWMIDSECR

SEQ ID NO: 38198 - protein, 15 aa, Homo Sapiens
MIMVKCWMIDSECRP

SEQ ID NO: 38199 - protein, 15 aa, Homo Sapiens
IMVKCWMIDSECRPR

SEQ ID NO: 38200 - protein, 15 aa, Homo Sapiens
MVKCWMIDSECRPRF

SEQ ID NO: 38201 - protein, 15 aa, Homo Sapiens
VKCWMIDSECRPRFR

SEQ ID NO: 38202 - protein, 15 aa, Homo Sapiens
KCWMIDSECRPRFRE

SEQ ID NO: 38203 - protein, 15 aa, Homo Sapiens
CWMIDSECRPRFREL

SEQ ID NO: 38204 - protein, 15 aa, Homo Sapiens
WMIDSECRPRFRELV

SEQ ID NO: 38205 - protein, 15 aa, Homo Sapiens
MIDSECRPRFRELVS

SEQ ID NO: 38206 - protein, 15 aa, Homo Sapiens
IDSECRPRFRELVSE

SEQ ID NO: 38207 - protein, 15 aa, Homo Sapiens
DSECRPRFRELVSEF

SEQ ID NO: 38208 - protein, 15 aa, Homo Sapiens
SECRPRFRELVSEFS

SEQ ID NO: 38209 - protein, 15 aa, Homo Sapiens
ECRPRFRELVSEFSR

SEQ ID NO: 38210 - protein, 15 aa, Homo Sapiens
CRPRFRELVSEFSRM

SEQ ID NO: 38211 - protein, 15 aa, Homo Sapiens
RPRFRELVSEFSRMA

SEQ ID NO: 38212 - protein, 15 aa, Homo Sapiens
PRFRELVSEFSRMAR

SEQ ID NO: 38213 - protein, 15 aa, Homo Sapiens
RFRELVSEFSRMARD

SEQ ID NO: 38214 - protein, 15 aa, Homo Sapiens
FRELVSEFSRMARDP

SEQ ID NO: 38215 - protein, 15 aa, Homo Sapiens
RELVSEFSRMARDPQ

SEQ ID NO: 38216 - protein, 15 aa, Homo Sapiens
ELVSEFSRMARDPQR

SEQ ID NO: 38217 - protein, 15 aa, Homo Sapiens
LVSEFSRMARDPQRF

SEQ ID NO: 38218 - protein, 15 aa, Homo Sapiens
VSEFSRMARDPQRFV

SEQ ID NO: 38219 - protein, 15 aa, Homo Sapiens
SEFSRMARDPQRFVV

SEQ ID NO: 38220 - protein, 15 aa, Homo Sapiens
EFSRMARDPQRFVVI

SEQ ID NO: 38221 - protein, 15 aa, Homo Sapiens
FSRMARDPQRFVVIQ

SEQ ID NO: 38222 - protein, 15 aa, Homo Sapiens
SRMARDPQRFVVIQN

SEQ ID NO: 38223 - protein, 15 aa, Homo Sapiens
RMARDPQRFVVIQNE

SEQ ID NO: 38224 - protein, 15 aa, Homo Sapiens
MARDPQRFVVIQNED

SEQ ID NO: 38225 - protein, 15 aa, Homo Sapiens
ARDPQRFVVIQNEDL

SEQ ID NO: 38226 - protein, 15 aa, Homo Sapiens
RDPQRFVVIQNEDLG

SEQ ID NO: 38227 - protein, 15 aa, Homo Sapiens
DPQRFVVIQNEDLGP

SEQ ID NO: 38228 - protein, 15 aa, Homo Sapiens
PQRFVVIQNEDLGPA

SEQ ID NO: 38229 - protein, 15 aa, Homo Sapiens
QRFVVIQNEDLGPAS

SEQ ID NO: 38230 - protein, 15 aa, Homo Sapiens
RFVVIQNEDLGPASP

SEQ ID NO: 38231 - protein, 15 aa, Homo Sapiens
FVVIQNEDLGPASPL

SEQ ID NO: 38232 - protein, 15 aa, Homo Sapiens
VVIQNEDLGPASPLD

SEQ ID NO: 38233 - protein, 15 aa, Homo Sapiens
VIQNEDLGPASPLDS

SEQ ID NO: 38234 - protein, 15 aa, Homo Sapiens
IQNEDLGPASPLDST

SEQ ID NO: 38235 - protein, 15 aa, Homo Sapiens
QNEDLGPASPLDSTF

SEQ ID NO: 38236 - protein, 15 aa, Homo Sapiens
NEDLGPASPLDSTFY

SEQ ID NO: 38237 - protein, 15 aa, Homo Sapiens
EDLGPASPLDSTFYR

SEQ ID NO: 38238 - protein, 15 aa, Homo Sapiens
DLGPASPLDSTFYRS

SEQ ID NO: 38239 - protein, 15 aa, Homo Sapiens
LGPASPLDSTFYRSL

SEQ ID NO: 38240 - protein, 15 aa, Homo Sapiens
GPASPLDSTFYRSLL

SEQ ID NO: 38241 - protein, 15 aa, Homo Sapiens
PASPLDSTFYRSLLE

SEQ ID NO: 38242 - protein, 15 aa, Homo Sapiens
ASPLDSTFYRSLLED

SEQ ID NO: 38243 - protein, 15 aa, Homo Sapiens
SPLDSTFYRSLLEDD

SEQ ID NO: 38244 - protein, 15 aa, Homo Sapiens
PLDSTFYRSLLEDDD

SEQ ID NO: 38245 - protein, 15 aa, Homo Sapiens
LDSTFYRSLLEDDDM

SEQ ID NO: 38246 - protein, 15 aa, Homo Sapiens
DSTFYRSLLEDDDMG

SEQ ID NO: 38247 - protein, 15 aa, Homo Sapiens
STFYRSLLEDDDMGD

SEQ ID NO: 38248 - protein, 15 aa, Homo Sapiens
TFYRSLLEDDDMGDL

SEQ ID NO: 38249 - protein, 15 aa, Homo Sapiens
FYRSLLEDDDMGDLV

SEQ ID NO: 38250 - protein, 15 aa, Homo Sapiens
YRSLLEDDDMGDLVD

SEQ ID NO: 38251 - protein, 15 aa, Homo Sapiens
RSLLEDDDMGDLVDA

SEQ ID NO: 38252 - protein, 15 aa, Homo Sapiens
SLLEDDDMGDLVDAE

SEQ ID NO: 38253 - protein, 15 aa, Homo Sapiens
LLEDDDMGDLVDAEE

SEQ ID NO: 38254 - protein, 15 aa, Homo Sapiens
LEDDDMGDLVDAEEY

SEQ ID NO: 38255 - protein, 15 aa, Homo Sapiens
EDDDMGDLVDAEEYL

SEQ ID NO: 38256 - protein, 15 aa, Homo Sapiens
DDDMGDLVDAEEYLV

SEQ ID NO: 38257 - protein, 15 aa, Homo Sapiens
DDMGDLVDAEEYLVP

SEQ ID NO: 38258 - protein, 15 aa, Homo Sapiens
DMGDLVDAEEYLVPQ

SEQ ID NO: 38259 - protein, 15 aa, Homo Sapiens
MGDLVDAEEYLVPQQ

SEQ ID NO: 38260 - protein, 15 aa, Homo Sapiens
GDLVDAEEYLVPQQG

SEQ ID NO: 38261 - protein, 15 aa, Homo Sapiens
DLVDAEEYLVPQQGF

SEQ ID NO: 38262 - protein, 15 aa, Homo Sapiens
LVDAEEYLVPQQGFF

SEQ ID NO: 38263 - protein, 15 aa, Homo Sapiens
VDAEEYLVPQQGFFC

SEQ ID NO: 38264 - protein, 15 aa, Homo Sapiens
DAEEYLVPQQGFFCP

SEQ ID NO: 38265 - protein, 15 aa, Homo Sapiens
AEEYLVPQQGFFCPD

SEQ ID NO: 38266 - protein, 15 aa, Homo Sapiens
EEYLVPQQGFFCPDP

SEQ ID NO: 38267 - protein, 15 aa, Homo Sapiens
EYLVPQQGFFCPDPA

SEQ ID NO: 38268 - protein, 15 aa, Homo Sapiens
YLVPQQGFFCPDPAP

SEQ ID NO: 38269 - protein, 15 aa, Homo Sapiens
LVPQQGFFCPDPAPG

SEQ ID NO: 38270 - protein, 15 aa, Homo Sapiens
VPQQGFFCPDPAPGA

SEQ ID NO: 38271 - protein, 15 aa, Homo Sapiens
PQQGFFCPDPAPGAG

SEQ ID NO: 38272 - protein, 15 aa, Homo Sapiens
QQGFFCPDPAPGAGG

SEQ ID NO: 38273 - protein, 15 aa, Homo Sapiens
QGFFCPDPAPGAGGM

SEQ ID NO: 38274 - protein, 15 aa, Homo Sapiens
GFFCPDPAPGAGGMV

SEQ ID NO: 38275 - protein, 15 aa, Homo Sapiens
FFCPDPAPGAGGMVH

SEQ ID NO: 38276 - protein, 15 aa, Homo Sapiens
FCPDPAPGAGGMVHH

SEQ ID NO: 38277 - protein, 15 aa, Homo Sapiens
CPDPAPGAGGMVHHR

SEQ ID NO: 38278 - protein, 15 aa, Homo Sapiens
PDPAPGAGGMVHHRH

SEQ ID NO: 38279 - protein, 15 aa, Homo Sapiens
DPAPGAGGMVHHRHR

SEQ ID NO: 38280 - protein, 15 aa, Homo Sapiens
PAPGAGGMVHHRHRS

SEQ ID NO: 38281 - protein, 15 aa, Homo Sapiens
APGAGGMVHHRHRSS

SEQ ID NO: 38282 - protein, 15 aa, Homo Sapiens
PGAGGMVHHRHRSSS

SEQ ID NO: 38283 - protein, 15 aa, Homo Sapiens
GAGGMVHHRHRSSST

SEQ ID NO: 38284 - protein, 15 aa, Homo Sapiens
AGGMVHHRHRSSSTR

SEQ ID NO: 38285 - protein, 15 aa, Homo Sapiens
GGMVHHRHRSSSTRS

SEQ ID NO: 38286 - protein, 15 aa, Homo Sapiens
GMVHHRHRSSSTRSG

SEQ ID NO: 38287 - protein, 15 aa, Homo Sapiens
MVHHRHRSSSTRSGG

SEQ ID NO: 38288 - protein, 15 aa, Homo Sapiens
VHHRHRSSSTRSGGG

SEQ ID NO: 38289 - protein, 15 aa, Homo Sapiens
HHRHRSSSTRSGGGD

SEQ ID NO: 38290 - protein, 15 aa, Homo Sapiens
HRHRSSSTRSGGGDL

SEQ ID NO: 38291 - protein, 15 aa, Homo Sapiens
RHRSSSTRSGGGDLT

SEQ ID NO: 38292 - protein, 15 aa, Homo Sapiens
HRSSSTRSGGGDLTL

SEQ ID NO: 38293 - protein, 15 aa, Homo Sapiens
RSSSTRSGGGDLTLG

SEQ ID NO: 38294 - protein, 15 aa, Homo Sapiens
SSSTRSGGGDLTLGL

SEQ ID NO: 38295 - protein, 15 aa, Homo Sapiens
SSTRSGGGDLTLGLE

SEQ ID NO: 38296 - protein, 15 aa, Homo Sapiens
STRSGGGDLTLGLEP

SEQ ID NO: 38297 - protein, 15 aa, Homo Sapiens
TRSGGGDLTLGLEPS

SEQ ID NO: 38298 - protein, 15 aa, Homo Sapiens
RSGGGDLTLGLEPSE

SEQ ID NO: 38299 - protein, 15 aa, Homo Sapiens
SGGGDLTLGLEPSEE

SEQ ID NO: 38300 - protein, 15 aa, Homo Sapiens
GGGDLTLGLEPSEEE

SEQ ID NO: 38301 - protein, 15 aa, Homo Sapiens
GGDLTLGLEPSEEEA

SEQ ID NO: 38302 - protein, 15 aa, Homo Sapiens
GDLTLGLEPSEEEAP

SEQ ID NO: 38303 - protein, 15 aa, Homo Sapiens
DLTLGLEPSEEEAPR

SEQ ID NO: 38304 - protein, 15 aa, Homo Sapiens
LTLGLEPSEEEAPRS

SEQ ID NO: 38305 - protein, 15 aa, Homo Sapiens
TLGLEPSEEEAPRSP

SEQ ID NO: 38306 - protein, 15 aa, Homo Sapiens
LGLEPSEEEAPRSPL

SEQ ID NO: 38307 - protein, 15 aa, Homo Sapiens
GLEPSEEEAPRSPLA

SEQ ID NO: 38308 - protein, 15 aa, Homo Sapiens
LEPSEEEAPRSPLAP

SEQ ID NO: 38309 - protein, 15 aa, Homo Sapiens
EPSEEEAPRSPLAPS

SEQ ID NO: 38310 - protein, 15 aa, Homo Sapiens
PSEEEAPRSPLAPSE

SEQ ID NO: 38311 - protein, 15 aa, Homo Sapiens
SEEEAPRSPLAPSEG

SEQ ID NO: 38312 - protein, 15 aa, Homo Sapiens
EEEAPRSPLAPSEGA

SEQ ID NO: 38313 - protein, 15 aa, Homo Sapiens
EEAPRSPLAPSEGAG

SEQ ID NO: 38314 - protein, 15 aa, Homo Sapiens
EAPRSPLAPSEGAGS

SEQ ID NO: 38315 - protein, 15 aa, Homo Sapiens
APRSPLAPSEGAGSD

SEQ ID NO: 38316 - protein, 15 aa, Homo Sapiens
PRSPLAPSEGAGSDV

SEQ ID NO: 38317 - protein, 15 aa, Homo Sapiens
RSPLAPSEGAGSDVF

SEQ ID NO: 38318 - protein, 15 aa, Homo Sapiens
SPLAPSEGAGSDVFD

SEQ ID NO: 38319 - protein, 15 aa, Homo Sapiens
PLAPSEGAGSDVFDG

SEQ ID NO: 38320 - protein, 15 aa, Homo Sapiens
LAPSEGAGSDVFDGD

SEQ ID NO: 38321 - protein, 15 aa, Homo Sapiens
APSEGAGSDVFDGDL

SEQ ID NO: 38322 - protein, 15 aa, Homo Sapiens
PSEGAGSDVFDGDLG

SEQ ID NO: 38323 - protein, 15 aa, Homo Sapiens
SEGAGSDVFDGDLGM

SEQ ID NO: 38324 - protein, 15 aa, Homo Sapiens
EGAGSDVFDGDLGMG

SEQ ID NO: 38325 - protein, 15 aa, Homo Sapiens
GAGSDVFDGDLGMGA

SEQ ID NO: 38326 - protein, 15 aa, Homo Sapiens
AGSDVFDGDLGMGAA

SEQ ID NO: 38327 - protein, 15 aa, Homo Sapiens
GSDVFDGDLGMGAAK

SEQ ID NO: 38328 - protein, 15 aa, Homo Sapiens
SDVFDGDLGMGAAKG

SEQ ID NO: 38329 - protein, 15 aa, Homo Sapiens
DVFDGDLGMGAAKGL

SEQ ID NO: 38330 - protein, 15 aa, Homo Sapiens
VFDGDLGMGAAKGLQ

SEQ ID NO: 38331 - protein, 15 aa, Homo Sapiens
FDGDLGMGAAKGLQS

SEQ ID NO: 38332 - protein, 15 aa, Homo Sapiens
DGDLGMGAAKGLQSL

SEQ ID NO: 38333 - protein, 15 aa, Homo Sapiens
GDLGMGAAKGLQSLP

SEQ ID NO: 38334 - protein, 15 aa, Homo Sapiens
DLGMGAAKGLQSLPT

SEQ ID NO: 38335 - protein, 15 aa, Homo Sapiens
LGMGAAKGLQSLPTH

SEQ ID NO: 38336 - protein, 15 aa, Homo Sapiens
GMGAAKGLQSLPTHD

SEQ ID NO: 38337 - protein, 15 aa, Homo Sapiens
MGAAKGLQSLPTHDP

SEQ ID NO: 38338 - protein, 15 aa, Homo Sapiens
GAAKGLQSLPTHDPS

SEQ ID NO: 38339 - protein, 15 aa, Homo Sapiens
AAKGLQSLPTHDPSP

SEQ ID NO: 38340 - protein, 15 aa, Homo Sapiens
AKGLQSLPTHDPSPL

SEQ ID NO: 38341 - protein, 15 aa, Homo Sapiens
KGLQSLPTHDPSPLQ

SEQ ID NO: 38342 - protein, 15 aa, Homo Sapiens
GLQSLPTHDPSPLQR

SEQ ID NO: 38343 - protein, 15 aa, Homo Sapiens
LQSLPTHDPSPLQRY

SEQ ID NO: 38344 - protein, 15 aa, Homo Sapiens
QSLPTHDPSPLQRYS

SEQ ID NO: 38345 - protein, 15 aa, Homo Sapiens
SLPTHDPSPLQRYSE

SEQ ID NO: 38346 - protein, 15 aa, Homo Sapiens
LPTHDPSPLQRYSED

SEQ ID NO: 38347 - protein, 15 aa, Homo Sapiens
PTHDPSPLQRYSEDP

SEQ ID NO: 38348 - protein, 15 aa, Homo Sapiens
THDPSPLQRYSEDPT

SEQ ID NO: 38349 - protein, 15 aa, Homo Sapiens
HDPSPLQRYSEDPTV

SEQ ID NO: 38350 - protein, 15 aa, Homo Sapiens
DPSPLQRYSEDPTVP

SEQ ID NO: 38351 - protein, 15 aa, Homo Sapiens
PSPLQRYSEDPTVPL

SEQ ID NO: 38352 - protein, 15 aa, Homo Sapiens
SPLQRYSEDPTVPLP

SEQ ID NO: 38353 - protein, 15 aa, Homo Sapiens
PLQRYSEDPTVPLPS

SEQ ID NO: 38354 - protein, 15 aa, Homo Sapiens
LQRYSEDPTVPLPSE

SEQ ID NO: 38355 - protein, 15 aa, Homo Sapiens
QRYSEDPTVPLPSET

SEQ ID NO: 38356 - protein, 15 aa, Homo Sapiens
RYSEDPTVPLPSETD

SEQ ID NO: 38357 - protein, 15 aa, Homo Sapiens
YSEDPTVPLPSETDG

SEQ ID NO: 38358 - protein, 15 aa, Homo Sapiens
SEDPTVPLPSETDGY

SEQ ID NO: 38359 - protein, 15 aa, Homo Sapiens
EDPTVPLPSETDGYV

SEQ ID NO: 38360 - protein, 15 aa, Homo Sapiens
DPTVPLPSETDGYVA

SEQ ID NO: 38361 - protein, 15 aa, Homo Sapiens
PTVPLPSETDGYVAP

SEQ ID NO: 38362 - protein, 15 aa, Homo Sapiens
TVPLPSETDGYVAPL

SEQ ID NO: 38363 - protein, 15 aa, Homo Sapiens
VPLPSETDGYVAPLT

SEQ ID NO: 38364 - protein, 15 aa, Homo Sapiens
PLPSETDGYVAPLTC

SEQ ID NO: 38365 - protein, 15 aa, Homo Sapiens
LPSETDGYVAPLTCS

SEQ ID NO: 38366 - protein, 15 aa, Homo Sapiens
PSETDGYVAPLTCSP

SEQ ID NO: 38367 - protein, 15 aa, Homo Sapiens
SETDGYVAPLTCSPQ

SEQ ID NO: 38368 - protein, 15 aa, Homo Sapiens
ETDGYVAPLTCSPQP

SEQ ID NO: 38369 - protein, 15 aa, Homo Sapiens
TDGYVAPLTCSPQPE

SEQ ID NO: 38370 - protein, 15 aa, Homo Sapiens
DGYVAPLTCSPQPEY

SEQ ID NO: 38371 - protein, 15 aa, Homo Sapiens
GYVAPLTCSPQPEYV

SEQ ID NO: 38372 - protein, 15 aa, Homo Sapiens
YVAPLTCSPQPEYVN

SEQ ID NO: 38373 - protein, 15 aa, Homo Sapiens
VAPLTCSPQPEYVNQ

SEQ ID NO: 38374 - protein, 15 aa, Homo Sapiens
APLTCSPQPEYVNQP

SEQ ID NO: 38375 - protein, 15 aa, Homo Sapiens
PLTCSPQPEYVNQPD

SEQ ID NO: 38376 - protein, 15 aa, Homo Sapiens
LTCSPQPEYVNQPDV

SEQ ID NO: 38377 - protein, 15 aa, Homo Sapiens
TCSPQPEYVNQPDVR

SEQ ID NO: 38378 - protein, 15 aa, Homo Sapiens
CSPQPEYVNQPDVRP

SEQ ID NO: 38379 - protein, 15 aa, Homo Sapiens
SPQPEYVNQPDVRPQ

SEQ ID NO: 38380 - protein, 15 aa, Homo Sapiens
PQPEYVNQPDVRPQP

SEQ ID NO: 38381 - protein, 15 aa, Homo Sapiens
QPEYVNQPDVRPQPP

SEQ ID NO: 38382 - protein, 15 aa, Homo Sapiens
PEYVNQPDVRPQPPS

SEQ ID NO: 38383 - protein, 15 aa, Homo Sapiens
EYVNQPDVRPQPPSP

SEQ ID NO: 38384 - protein, 15 aa, Homo Sapiens
YVNQPDVRPQPPSPR

SEQ ID NO: 38385 - protein, 15 aa, Homo Sapiens
VNQPDVRPQPPSPRE

SEQ ID NO: 38386 - protein, 15 aa, Homo Sapiens
NQPDVRPQPPSPREG

SEQ ID NO: 38387 - protein, 15 aa, Homo Sapiens
QPDVRPQPPSPREGP

SEQ ID NO: 38388 - protein, 15 aa, Homo Sapiens
PDVRPQPPSPREGPL

SEQ ID NO: 38389 - protein, 15 aa, Homo Sapiens
DVRPQPPSPREGPLP

SEQ ID NO: 38390 - protein, 15 aa, Homo Sapiens
VRPQPPSPREGPLPA

SEQ ID NO: 38391 - protein, 15 aa, Homo Sapiens
RPQPPSPREGPLPAA

SEQ ID NO: 38392 - protein, 15 aa, Homo Sapiens
PQPPSPREGPLPAAR

SEQ ID NO: 38393 - protein, 15 aa, Homo Sapiens
QPPSPREGPLPAARP

SEQ ID NO: 38394 - protein, 15 aa, Homo Sapiens
PPSPREGPLPAARPA

SEQ ID NO: 38395 - protein, 15 aa, Homo Sapiens
PSPREGPLPAARPAG

SEQ ID NO: 38396 - protein, 15 aa, Homo Sapiens
SPREGPLPAARPAGA

SEQ ID NO: 38397 - protein, 15 aa, Homo Sapiens
PREGPLPAARPAGAT

SEQ ID NO: 38398 - protein, 15 aa, Homo Sapiens
REGPLPAARPAGATL

SEQ ID NO: 38399 - protein, 15 aa, Homo Sapiens
EGPLPAARPAGATLE

SEQ ID NO: 38400 - protein, 15 aa, Homo Sapiens
GPLPAARPAGATLER

SEQ ID NO: 38401 - protein, 15 aa, Homo Sapiens
PLPAARPAGATLERP

SEQ ID NO: 38402 - protein, 15 aa, Homo Sapiens
LPAARPAGATLERPK

SEQ ID NO: 38403 - protein, 15 aa, Homo Sapiens
PAARPAGATLERPKT

SEQ ID NO: 38404 - protein, 15 aa, Homo Sapiens
AARPAGATLERPKTL

SEQ ID NO: 38405 - protein, 15 aa, Homo Sapiens
ARPAGATLERPKTLS

SEQ ID NO: 38406 - protein, 15 aa, Homo Sapiens
RPAGATLERPKTLSP

SEQ ID NO: 38407 - protein, 15 aa, Homo Sapiens
PAGATLERPKTLSPG

SEQ ID NO: 38408 - protein, 15 aa, Homo Sapiens
AGATLERPKTLSPGK

SEQ ID NO: 38409 - protein, 15 aa, Homo Sapiens
GATLERPKTLSPGKN

SEQ ID NO: 38410 - protein, 15 aa, Homo Sapiens
ATLERPKTLSPGKNG

SEQ ID NO: 38411 - protein, 15 aa, Homo Sapiens
TLERPKTLSPGKNGV

SEQ ID NO: 38412 - protein, 15 aa, Homo Sapiens
LERPKTLSPGKNGVV

SEQ ID NO: 38413 - protein, 15 aa, Homo Sapiens
ERPKTLSPGKNGVVK

SEQ ID NO: 38414 - protein, 15 aa, Homo Sapiens
RPKTLSPGKNGVVKD

SEQ ID NO: 38415 - protein, 15 aa, Homo Sapiens
PKTLSPGKNGVVKDV

SEQ ID NO: 38416 - protein, 15 aa, Homo Sapiens
KTLSPGKNGVVKDVF

SEQ ID NO: 38417 - protein, 15 aa, Homo Sapiens
TLSPGKNGVVKDVFA

SEQ ID NO: 38418 - protein, 15 aa, Homo Sapiens
LSPGKNGVVKDVFAF

SEQ ID NO: 38419 - protein, 15 aa, Homo Sapiens
SPGKNGVVKDVFAFG

SEQ ID NO: 38420 - protein, 15 aa, Homo Sapiens
PGKNGVVKDVFAFGG

SEQ ID NO: 38421 - protein, 15 aa, Homo Sapiens
GKNGVVKDVFAFGGA

SEQ ID NO: 38422 - protein, 15 aa, Homo Sapiens
KNGVVKDVFAFGGAV

SEQ ID NO: 38423 - protein, 15 aa, Homo Sapiens
NGVVKDVFAFGGAVE

SEQ ID NO: 38424 - protein, 15 aa, Homo Sapiens
GVVKDVFAFGGAVEN

SEQ ID NO: 38425 - protein, 15 aa, Homo Sapiens
VVKDVFAFGGAVENP

SEQ ID NO: 38426 - protein, 15 aa, Homo Sapiens
VKDVFAFGGAVENPE

SEQ ID NO: 38427 - protein, 15 aa, Homo Sapiens
KDVFAFGGAVENPEY

SEQ ID NO: 38428 - protein, 15 aa, Homo Sapiens
DVFAFGGAVENPEYL

SEQ ID NO: 38429 - protein, 15 aa, Homo Sapiens
VFAFGGAVENPEYLT

SEQ ID NO: 38430 - protein, 15 aa, Homo Sapiens
FAFGGAVENPEYLTP

SEQ ID NO: 38431 - protein, 15 aa, Homo Sapiens
AFGGAVENPEYLTPQ

SEQ ID NO: 38432 - protein, 15 aa, Homo Sapiens
FGGAVENPEYLTPQG

SEQ ID NO: 38433 - protein, 15 aa, Homo Sapiens
GGAVENPEYLTPQGG

SEQ ID NO: 38434 - protein, 15 aa, Homo Sapiens
GAVENPEYLTPQGGA

SEQ ID NO: 38435 - protein, 15 aa, Homo Sapiens
AVENPEYLTPQGGAA

SEQ ID NO: 38436 - protein, 15 aa, Homo Sapiens
VENPEYLTPQGGAAP

SEQ ID NO: 38437 - protein, 15 aa, Homo Sapiens
ENPEYLTPQGGAAPQ

SEQ ID NO: 38438 - protein, 15 aa, Homo Sapiens
NPEYLTPQGGAAPQP

SEQ ID NO: 38439 - protein, 15 aa, Homo Sapiens
PEYLTPQGGAAPQPH

SEQ ID NO: 38440 - protein, 15 aa, Homo Sapiens
EYLTPQGGAAPQPHP

SEQ ID NO: 38441 - protein, 15 aa, Homo Sapiens
YLTPQGGAAPQPHPP

SEQ ID NO: 38442 - protein, 15 aa, Homo Sapiens
LTPQGGAAPQPHPPP

SEQ ID NO: 38443 - protein, 15 aa, Homo Sapiens
TPQGGAAPQPHPPPA

SEQ ID NO: 38444 - protein, 15 aa, Homo Sapiens
PQGGAAPQPHPPPAF

SEQ ID NO: 38445 - protein, 15 aa, Homo Sapiens
QGGAAPQPHPPPAFS

SEQ ID NO: 38446 - protein, 15 aa, Homo Sapiens
GGAAPQPHPPPAFSP

SEQ ID NO: 38447 - protein, 15 aa, Homo Sapiens
GAAPQPHPPPAFSPA

SEQ ID NO: 38448 - protein, 15 aa, Homo Sapiens
AAPQPHPPPAFSPAF

SEQ ID NO: 38449 - protein, 15 aa, Homo Sapiens
APQPHPPPAFSPAFD

SEQ ID NO: 38450 - protein, 15 aa, Homo Sapiens
PQPHPPPAFSPAFDN

SEQ ID NO: 38451 - protein, 15 aa, Homo Sapiens
QPHPPPAFSPAFDNL

SEQ ID NO: 38452 - protein, 15 aa, Homo Sapiens
PHPPPAFSPAFDNLY

SEQ ID NO: 38453 - protein, 15 aa, Homo Sapiens
HPPPAFSPAFDNLYY

SEQ ID NO: 38454 - protein, 15 aa, Homo Sapiens
PPPAFSPAFDNLYYW

SEQ ID NO: 38455 - protein, 15 aa, Homo Sapiens
PPAFSPAFDNLYYWD

SEQ ID NO: 38456 - protein, 15 aa, Homo Sapiens
PAFSPAFDNLYYWDQ

SEQ ID NO: 38457 - protein, 15 aa, Homo Sapiens
AFSPAFDNLYYWDQD

SEQ ID NO: 38458 - protein, 15 aa, Homo Sapiens
FSPAFDNLYYWDQDP

SEQ ID NO: 38459 - protein, 15 aa, Homo Sapiens
SPAFDNLYYWDQDPP

SEQ ID NO: 38460 - protein, 15 aa, Homo Sapiens
PAFDNLYYWDQDPPE

SEQ ID NO: 38461 - protein, 15 aa, Homo Sapiens
AFDNLYYWDQDPPER

SEQ ID NO: 38462 - protein, 15 aa, Homo Sapiens
FDNLYYWDQDPPERG

SEQ ID NO: 38463 - protein, 15 aa, Homo Sapiens
DNLYYWDQDPPERGA

SEQ ID NO: 38464 - protein, 15 aa, Homo Sapiens
NLYYWDQDPPERGAP

SEQ ID NO: 38465 - protein, 15 aa, Homo Sapiens
LYYWDQDPPERGAPP

SEQ ID NO: 38466 - protein, 15 aa, Homo Sapiens
YYWDQDPPERGAPPS

SEQ ID NO: 38467 - protein, 15 aa, Homo Sapiens
YWDQDPPERGAPPST

SEQ ID NO: 38468 - protein, 15 aa, Homo Sapiens
WDQDPPERGAPPSTF

SEQ ID NO: 38469 - protein, 15 aa, Homo Sapiens
DQDPPERGAPPSTFK

SEQ ID NO: 38470 - protein, 15 aa, Homo Sapiens
QDPPERGAPPSTFKG

SEQ ID NO: 38471 - protein, 15 aa, Homo Sapiens
DPPERGAPPSTFKGT

SEQ ID NO: 38472 - protein, 15 aa, Homo Sapiens
PPERGAPPSTFKGTP

SEQ ID NO: 38473 - protein, 15 aa, Homo Sapiens
PERGAPPSTFKGTPT

SEQ ID NO: 38474 - protein, 15 aa, Homo Sapiens
ERGAPPSTFKGTPTA

SEQ ID NO: 38475 - protein, 15 aa, Homo Sapiens
RGAPPSTFKGTPTAE

SEQ ID NO: 38476 - protein, 15 aa, Homo Sapiens
GAPPSTFKGTPTAEN

SEQ ID NO: 38477 - protein, 15 aa, Homo Sapiens
APPSTFKGTPTAENP

SEQ ID NO: 38478 - protein, 15 aa, Homo Sapiens
PPSTFKGTPTAENPE

SEQ ID NO: 38479 - protein, 15 aa, Homo Sapiens
PSTFKGTPTAENPEY

SEQ ID NO: 38480 - protein, 15 aa, Homo Sapiens
STFKGTPTAENPEYL

SEQ ID NO: 38481 - protein, 15 aa, Homo Sapiens
TFKGTPTAENPEYLG

SEQ ID NO: 38482 - protein, 15 aa, Homo Sapiens
FKGTPTAENPEYLGL

SEQ ID NO: 38483 - protein, 15 aa, Homo Sapiens
KGTPTAENPEYLGLD

SEQ ID NO: 38484 - protein, 15 aa, Homo Sapiens
GTPTAENPEYLGLDV

SEQ ID NO: 38485 - protein, 15 aa, Homo Sapiens
TPTAENPEYLGLDVP

SEQ ID NO: 38486 - protein, 15 aa, Homo Sapiens
PTAENPEYLGLDVPV

SEQ ID NO: 38487 - protein, 16 aa, Homo Sapiens
MELAALCRWGLLLALL

SEQ ID NO: 38488 - protein, 16 aa, Homo Sapiens
ELAALCRWGLLLALLP

SEQ ID NO: 38489 - protein, 16 aa, Homo Sapiens
LAALCRWGLLLALLPP

SEQ ID NO: 38490 - protein, 16 aa, Homo Sapiens
AALCRWGLLLALLPPG

SEQ ID NO: 38491 - protein, 16 aa, Homo Sapiens
ALCRWGLLLALLPPGA

SEQ ID NO: 38492 - protein, 16 aa, Homo Sapiens
LCRWGLLLALLPPGAA

SEQ ID NO: 38493 - protein, 16 aa, Homo Sapiens
CRWGLLLALLPPGAAS

SEQ ID NO: 38494 - protein, 16 aa, Homo Sapiens
RWGLLLALLPPGAAST

SEQ ID NO: 38495 - protein, 16 aa, Homo Sapiens
WGLLLALLPPGAASTQ

SEQ ID NO: 38496 - protein, 16 aa, Homo Sapiens
GLLLALLPPGAASTQV

SEQ ID NO: 38497 - protein, 16 aa, Homo Sapiens
LLLALLPPGAASTQVC

SEQ ID NO: 38498 - protein, 16 aa, Homo Sapiens
LLALLPPGAASTQVCT

SEQ ID NO: 38499 - protein, 16 aa, Homo Sapiens
LALLPPGAASTQVCTG

SEQ ID NO: 38500 - protein, 16 aa, Homo Sapiens
ALLPPGAASTQVCTGT

SEQ ID NO: 38501 - protein, 16 aa, Homo Sapiens
LLPPGAASTQVCTGTD

SEQ ID NO: 38502 - protein, 16 aa, Homo Sapiens
LPPGAASTQVCTGTDM

SEQ ID NO: 38503 - protein, 16 aa, Homo Sapiens
PPGAASTQVCTGTDMK

SEQ ID NO: 38504 - protein, 16 aa, Homo Sapiens
PGAASTQVCTGTDMKL

SEQ ID NO: 38505 - protein, 16 aa, Homo Sapiens
GAASTQVCTGTDMKLR

SEQ ID NO: 38506 - protein, 16 aa, Homo Sapiens
AASTQVCTGTDMKLRL

SEQ ID NO: 38507 - protein, 16 aa, Homo Sapiens
ASTQVCTGTDMKLRLP

SEQ ID NO: 38508 - protein, 16 aa, Homo Sapiens
STQVCTGTDMKLRLPA

SEQ ID NO: 38509 - protein, 16 aa, Homo Sapiens
TQVCTGTDMKLRLPAS

SEQ ID NO: 38510 - protein, 16 aa, Homo Sapiens
QVCTGTDMKLRLPASP

SEQ ID NO: 38511 - protein, 16 aa, Homo Sapiens
VCTGTDMKLRLPASPE

SEQ ID NO: 38512 - protein, 16 aa, Homo Sapiens
CTGTDMKLRLPASPET

SEQ ID NO: 38513 - protein, 16 aa, Homo Sapiens
TGTDMKLRLPASPETH

SEQ ID NO: 38514 - protein, 16 aa, Homo Sapiens
GTDMKLRLPASPETHL

SEQ ID NO: 38515 - protein, 16 aa, Homo Sapiens
TDMKLRLPASPETHLD

SEQ ID NO: 38516 - protein, 16 aa, Homo Sapiens
DMKLRLPASPETHLDM

SEQ ID NO: 38517 - protein, 16 aa, Homo Sapiens
MKLRLPASPETHLDML

SEQ ID NO: 38518 - protein, 16 aa, Homo Sapiens
KLRLPASPETHLDMLR

SEQ ID NO: 38519 - protein, 16 aa, Homo Sapiens
LRLPASPETHLDMLRH

SEQ ID NO: 38520 - protein, 16 aa, Homo Sapiens
RLPASPETHLDMLRHL

SEQ ID NO: 38521 - protein, 16 aa, Homo Sapiens
LPASPETHLDMLRHLY

SEQ ID NO: 38522 - protein, 16 aa, Homo Sapiens
PASPETHLDMLRHLYQ

SEQ ID NO: 38523 - protein, 16 aa, Homo Sapiens
ASPETHLDMLRHLYQG

SEQ ID NO: 38524 - protein, 16 aa, Homo Sapiens
SPETHLDMLRHLYQGC

SEQ ID NO: 38525 - protein, 16 aa, Homo Sapiens
PETHLDMLRHLYQGCQ

SEQ ID NO: 38526 - protein, 16 aa, Homo Sapiens
ETHLDMLRHLYQGCQV

SEQ ID NO: 38527 - protein, 16 aa, Homo Sapiens
THLDMLRHLYQGCQVV

SEQ ID NO: 38528 - protein, 16 aa, Homo Sapiens
HLDMLRHLYQGCQVVQ

SEQ ID NO: 38529 - protein, 16 aa, Homo Sapiens
LDMLRHLYQGCQVVQG

SEQ ID NO: 38530 - protein, 16 aa, Homo Sapiens
DMLRHLYQGCQVVQGN

SEQ ID NO: 38531 - protein, 16 aa, Homo Sapiens
MLRHLYQGCQVVQGNL

SEQ ID NO: 38532 - protein, 16 aa, Homo Sapiens
LRHLYQGCQVVQGNLE

SEQ ID NO: 38533 - protein, 16 aa, Homo Sapiens
RHLYQGCQVVQGNLEL

SEQ ID NO: 38534 - protein, 16 aa, Homo Sapiens
HLYQGCQVVQGNLELT

SEQ ID NO: 38535 - protein, 16 aa, Homo Sapiens
LYQGCQVVQGNLELTY

SEQ ID NO: 38536 - protein, 16 aa, Homo Sapiens
YQGCQVVQGNLELTYL

SEQ ID NO: 38537 - protein, 16 aa, Homo Sapiens
QGCQVVQGNLELTYLP

SEQ ID NO: 38538 - protein, 16 aa, Homo Sapiens
GCQVVQGNLELTYLPT

SEQ ID NO: 38539 - protein, 16 aa, Homo Sapiens
CQVVQGNLELTYLPTN

SEQ ID NO: 38540 - protein, 16 aa, Homo Sapiens
QVVQGNLELTYLPTNA

SEQ ID NO: 38541 - protein, 16 aa, Homo Sapiens
VVQGNLELTYLPTNAS

SEQ ID NO: 38542 - protein, 16 aa, Homo Sapiens
VQGNLELTYLPTNASL

SEQ ID NO: 38543 - protein, 16 aa, Homo Sapiens
QGNLELTYLPTNASLS

SEQ ID NO: 38544 - protein, 16 aa, Homo Sapiens
GNLELTYLPTNASLSF

SEQ ID NO: 38545 - protein, 16 aa, Homo Sapiens
NLELTYLPTNASLSFL

SEQ ID NO: 38546 - protein, 16 aa, Homo Sapiens
LELTYLPTNASLSFLQ

SEQ ID NO: 38547 - protein, 16 aa, Homo Sapiens
ELTYLPTNASLSFLQD

SEQ ID NO: 38548 - protein, 16 aa, Homo Sapiens
LTYLPTNASLSFLQDI

SEQ ID NO: 38549 - protein, 16 aa, Homo Sapiens
TYLPTNASLSFLQDIQ

SEQ ID NO: 38550 - protein, 16 aa, Homo Sapiens
YLPTNASLSFLQDIQE

SEQ ID NO: 38551 - protein, 16 aa, Homo Sapiens
LPTNASLSFLQDIQEV

SEQ ID NO: 38552 - protein, 16 aa, Homo Sapiens
PTNASLSFLQDIQEVQ

SEQ ID NO: 38553 - protein, 16 aa, Homo Sapiens
TNASLSFLQDIQEVQG

SEQ ID NO: 38554 - protein, 16 aa, Homo Sapiens
NASLSFLQDIQEVQGY

SEQ ID NO: 38555 - protein, 16 aa, Homo Sapiens
ASLSFLQDIQEVQGYV

SEQ ID NO: 38556 - protein, 16 aa, Homo Sapiens
SLSFLQDIQEVQGYVL

SEQ ID NO: 38557 - protein, 16 aa, Homo Sapiens
LSFLQDIQEVQGYVLI

SEQ ID NO: 38558 - protein, 16 aa, Homo Sapiens
SFLQDIQEVQGYVLIA

SEQ ID NO: 38559 - protein, 16 aa, Homo Sapiens
FLQDIQEVQGYVLIAH

SEQ ID NO: 38560 - protein, 16 aa, Homo Sapiens
LQDIQEVQGYVLIAHN

SEQ ID NO: 38561 - protein, 16 aa, Homo Sapiens
QDIQEVQGYVLIAHNQ

SEQ ID NO: 38562 - protein, 16 aa, Homo Sapiens
DIQEVQGYVLIAHNQV

SEQ ID NO: 38563 - protein, 16 aa, Homo Sapiens
IQEVQGYVLIAHNQVR

SEQ ID NO: 38564 - protein, 16 aa, Homo Sapiens
QEVQGYVLIAHNQVRQ

SEQ ID NO: 38565 - protein, 16 aa, Homo Sapiens
EVQGYVLIAHNQVRQV

SEQ ID NO: 38566 - protein, 16 aa, Homo Sapiens
VQGYVLIAHNQVRQVP

SEQ ID NO: 38567 - protein, 16 aa, Homo Sapiens
QGYVLIAHNQVRQVPL

SEQ ID NO: 38568 - protein, 16 aa, Homo Sapiens
GYVLIAHNQVRQVPLQ

SEQ ID NO: 38569 - protein, 16 aa, Homo Sapiens
YVLIAHNQVRQVPLQR

SEQ ID NO: 38570 - protein, 16 aa, Homo Sapiens
VLIAHNQVRQVPLQRL

SEQ ID NO: 38571 - protein, 16 aa, Homo Sapiens
LIAHNQVRQVPLQRLR

SEQ ID NO: 38572 - protein, 16 aa, Homo Sapiens
IAHNQVRQVPLQRLRI

SEQ ID NO: 38573 - protein, 16 aa, Homo Sapiens
AHNQVRQVPLQRLRIV

SEQ ID NO: 38574 - protein, 16 aa, Homo Sapiens
HNQVRQVPLQRLRIVR

SEQ ID NO: 38575 - protein, 16 aa, Homo Sapiens
NQVRQVPLQRLRIVRG

SEQ ID NO: 38576 - protein, 16 aa, Homo Sapiens
QVRQVPLQRLRIVRGT

SEQ ID NO: 38577 - protein, 16 aa, Homo Sapiens
VRQVPLQRLRIVRGTQ

SEQ ID NO: 38578 - protein, 16 aa, Homo Sapiens
RQVPLQRLRIVRGTQL

SEQ ID NO: 38579 - protein, 16 aa, Homo Sapiens
QVPLQRLRIVRGTQLF

SEQ ID NO: 38580 - protein, 16 aa, Homo Sapiens
VPLQRLRIVRGTQLFE

SEQ ID NO: 38581 - protein, 16 aa, Homo Sapiens
PLQRLRIVRGTQLFED

SEQ ID NO: 38582 - protein, 16 aa, Homo Sapiens
LQRLRIVRGTQLFEDN

SEQ ID NO: 38583 - protein, 16 aa, Homo Sapiens
QRLRIVRGTQLFEDNY

SEQ ID NO: 38584 - protein, 16 aa, Homo Sapiens
RLRIVRGTQLFEDNYA

SEQ ID NO: 38585 - protein, 16 aa, Homo Sapiens
LRIVRGTQLFEDNYAL

SEQ ID NO: 38586 - protein, 16 aa, Homo Sapiens
RIVRGTQLFEDNYALA

SEQ ID NO: 38587 - protein, 16 aa, Homo Sapiens
IVRGTQLFEDNYALAV

SEQ ID NO: 38588 - protein, 16 aa, Homo Sapiens
VRGTQLFEDNYALAVL

SEQ ID NO: 38589 - protein, 16 aa, Homo Sapiens
RGTQLFEDNYALAVLD

SEQ ID NO: 38590 - protein, 16 aa, Homo Sapiens
GTQLFEDNYALAVLDN

SEQ ID NO: 38591 - protein, 16 aa, Homo Sapiens
TQLFEDNYALAVLDNG

SEQ ID NO: 38592 - protein, 16 aa, Homo Sapiens
QLFEDNYALAVLDNGD

SEQ ID NO: 38593 - protein, 16 aa, Homo Sapiens
LFEDNYALAVLDNGDP

SEQ ID NO: 38594 - protein, 16 aa, Homo Sapiens
FEDNYALAVLDNGDPL

SEQ ID NO: 38595 - protein, 16 aa, Homo Sapiens
EDNYALAVLDNGDPLN

SEQ ID NO: 38596 - protein, 16 aa, Homo Sapiens
DNYALAVLDNGDPLNN

SEQ ID NO: 38597 - protein, 16 aa, Homo Sapiens
NYALAVLDNGDPLNNT

SEQ ID NO: 38598 - protein, 16 aa, Homo Sapiens
YALAVLDNGDPLNNTT

SEQ ID NO: 38599 - protein, 16 aa, Homo Sapiens
ALAVLDNGDPLNNTTP

SEQ ID NO: 38600 - protein, 16 aa, Homo Sapiens
LAVLDNGDPLNNTTPV

SEQ ID NO: 38601 - protein, 16 aa, Homo Sapiens
AVLDNGDPLNNTTPVT

SEQ ID NO: 38602 - protein, 16 aa, Homo Sapiens
VLDNGDPLNNTTPVTG

SEQ ID NO: 38603 - protein, 16 aa, Homo Sapiens
LDNGDPLNNTTPVTGA

SEQ ID NO: 38604 - protein, 16 aa, Homo Sapiens
DNGDPLNNTTPVTGAS

SEQ ID NO: 38605 - protein, 16 aa, Homo Sapiens
NGDPLNNTTPVTGASP

SEQ ID NO: 38606 - protein, 16 aa, Homo Sapiens
GDPLNNTTPVTGASPG

SEQ ID NO: 38607 - protein, 16 aa, Homo Sapiens
DPLNNTTPVTGASPGG

SEQ ID NO: 38608 - protein, 16 aa, Homo Sapiens
PLNNTTPVTGASPGGL

SEQ ID NO: 38609 - protein, 16 aa, Homo Sapiens
LNNTTPVTGASPGGLR

SEQ ID NO: 38610 - protein, 16 aa, Homo Sapiens
NNTTPVTGASPGGLRE

SEQ ID NO: 38611 - protein, 16 aa, Homo Sapiens
NTTPVTGASPGGLREL

SEQ ID NO: 38612 - protein, 16 aa, Homo Sapiens
TTPVTGASPGGLRELQ

SEQ ID NO: 38613 - protein, 16 aa, Homo Sapiens
TPVTGASPGGLRELQL

SEQ ID NO: 38614 - protein, 16 aa, Homo Sapiens
PVTGASPGGLRELQLR

SEQ ID NO: 38615 - protein, 16 aa, Homo Sapiens
VTGASPGGLRELQLRS

SEQ ID NO: 38616 - protein, 16 aa, Homo Sapiens
TGASPGGLRELQLRSL

SEQ ID NO: 38617 - protein, 16 aa, Homo Sapiens
GASPGGLRELQLRSLT

SEQ ID NO: 38618 - protein, 16 aa, Homo Sapiens
ASPGGLRELQLRSLTE

SEQ ID NO: 38619 - protein, 16 aa, Homo Sapiens
SPGGLRELQLRSLTEI

SEQ ID NO: 38620 - protein, 16 aa, Homo Sapiens
PGGLRELQLRSLTEIL

SEQ ID NO: 38621 - protein, 16 aa, Homo Sapiens
GGLRELQLRSLTEILK

SEQ ID NO: 38622 - protein, 16 aa, Homo Sapiens
GLRELQLRSLTEILKG

SEQ ID NO: 38623 - protein, 16 aa, Homo Sapiens
LRELQLRSLTEILKGG

SEQ ID NO: 38624 - protein, 16 aa, Homo Sapiens
RELQLRSLTEILKGGV

SEQ ID NO: 38625 - protein, 16 aa, Homo Sapiens
ELQLRSLTEILKGGVL

SEQ ID NO: 38626 - protein, 16 aa, Homo Sapiens
LQLRSLTEILKGGVLI

SEQ ID NO: 38627 - protein, 16 aa, Homo Sapiens
QLRSLTEILKGGVLIQ

SEQ ID NO: 38628 - protein, 16 aa, Homo Sapiens
LRSLTEILKGGVLIQR

SEQ ID NO: 38629 - protein, 16 aa, Homo Sapiens
RSLTEILKGGVLIQRN

SEQ ID NO: 38630 - protein, 16 aa, Homo Sapiens
SLTEILKGGVLIQRNP

SEQ ID NO: 38631 - protein, 16 aa, Homo Sapiens
LTEILKGGVLIQRNPQ

SEQ ID NO: 38632 - protein, 16 aa, Homo Sapiens
TEILKGGVLIQRNPQL

SEQ ID NO: 38633 - protein, 16 aa, Homo Sapiens
EILKGGVLIQRNPQLC

SEQ ID NO: 38634 - protein, 16 aa, Homo Sapiens
ILKGGVLIQRNPQLCY

SEQ ID NO: 38635 - protein, 16 aa, Homo Sapiens
LKGGVLIQRNPQLCYQ

SEQ ID NO: 38636 - protein, 16 aa, Homo Sapiens
KGGVLIQRNPQLCYQD

SEQ ID NO: 38637 - protein, 16 aa, Homo Sapiens
GGVLIQRNPQLCYQDT

SEQ ID NO: 38638 - protein, 16 aa, Homo Sapiens
GVLIQRNPQLCYQDTI

SEQ ID NO: 38639 - protein, 16 aa, Homo Sapiens
VLIQRNPQLCYQDTIL

SEQ ID NO: 38640 - protein, 16 aa, Homo Sapiens
LIQRNPQLCYQDTILW

SEQ ID NO: 38641 - protein, 16 aa, Homo Sapiens
IQRNPQLCYQDTILWK

SEQ ID NO: 38642 - protein, 16 aa, Homo Sapiens
QRNPQLCYQDTILWKD

SEQ ID NO: 38643 - protein, 16 aa, Homo Sapiens
RNPQLCYQDTILWKDI

SEQ ID NO: 38644 - protein, 16 aa, Homo Sapiens
NPQLCYQDTILWKDIF

SEQ ID NO: 38645 - protein, 16 aa, Homo Sapiens
PQLCYQDTILWKDIFH

SEQ ID NO: 38646 - protein, 16 aa, Homo Sapiens
QLCYQDTILWKDIFHK

SEQ ID NO: 38647 - protein, 16 aa, Homo Sapiens
LCYQDTILWKDIFHKN

SEQ ID NO: 38648 - protein, 16 aa, Homo Sapiens
CYQDTILWKDIFHKNN

SEQ ID NO: 38649 - protein, 16 aa, Homo Sapiens
YQDTILWKDIFHKNNQ

SEQ ID NO: 38650 - protein, 16 aa, Homo Sapiens
QDTILWKDIFHKNNQL

SEQ ID NO: 38651 - protein, 16 aa, Homo Sapiens
DTILWKDIFHKNNQLA

SEQ ID NO: 38652 - protein, 16 aa, Homo Sapiens
TILWKDIFHKNNQLAL

SEQ ID NO: 38653 - protein, 16 aa, Homo Sapiens
ILWKDIFHKNNQLALT

SEQ ID NO: 38654 - protein, 16 aa, Homo Sapiens
LWKDIFHKNNQLALTL

SEQ ID NO: 38655 - protein, 16 aa, Homo Sapiens
WKDIFHKNNQLALTLI

SEQ ID NO: 38656 - protein, 16 aa, Homo Sapiens
KDIFHKNNQLALTLID

SEQ ID NO: 38657 - protein, 16 aa, Homo Sapiens
DIFHKNNQLALTLIDT

SEQ ID NO: 38658 - protein, 16 aa, Homo Sapiens
IFHKNNQLALTLIDTN

SEQ ID NO: 38659 - protein, 16 aa, Homo Sapiens
FHKNNQLALTLIDTNR

SEQ ID NO: 38660 - protein, 16 aa, Homo Sapiens
HKNNQLALTLIDTNRS

SEQ ID NO: 38661 - protein, 16 aa, Homo Sapiens
KNNQLALTLIDTNRSR

SEQ ID NO: 38662 - protein, 16 aa, Homo Sapiens
NNQLALTLIDTNRSRA

SEQ ID NO: 38663 - protein, 16 aa, Homo Sapiens
NQLALTLIDTNRSRAC

SEQ ID NO: 38664 - protein, 16 aa, Homo Sapiens
QLALTLIDTNRSRACH

SEQ ID NO: 38665 - protein, 16 aa, Homo Sapiens
LALTLIDTNRSRACHP

SEQ ID NO: 38666 - protein, 16 aa, Homo Sapiens
ALTLIDTNRSRACHPC

SEQ ID NO: 38667 - protein, 16 aa, Homo Sapiens
LTLIDTNRSRACHPCS

SEQ ID NO: 38668 - protein, 16 aa, Homo Sapiens
TLIDTNRSRACHPCSP

SEQ ID NO: 38669 - protein, 16 aa, Homo Sapiens
LIDTNRSRACHPCSPM

SEQ ID NO: 38670 - protein, 16 aa, Homo Sapiens
IDTNRSRACHPCSPMC

SEQ ID NO: 38671 - protein, 16 aa, Homo Sapiens
DTNRSRACHPCSPMCK

SEQ ID NO: 38672 - protein, 16 aa, Homo Sapiens
TNRSRACHPCSPMCKG

SEQ ID NO: 38673 - protein, 16 aa, Homo Sapiens
NRSRACHPCSPMCKGS

SEQ ID NO: 38674 - protein, 16 aa, Homo Sapiens
RSRACHPCSPMCKGSR

SEQ ID NO: 38675 - protein, 16 aa, Homo Sapiens
SRACHPCSPMCKGSRC

SEQ ID NO: 38676 - protein, 16 aa, Homo Sapiens
RACHPCSPMCKGSRCW

SEQ ID NO: 38677 - protein, 16 aa, Homo Sapiens
ACHPCSPMCKGSRCWG

SEQ ID NO: 38678 - protein, 16 aa, Homo Sapiens
CHPCSPMCKGSRCWGE

SEQ ID NO: 38679 - protein, 16 aa, Homo Sapiens
HPCSPMCKGSRCWGES

SEQ ID NO: 38680 - protein, 16 aa, Homo Sapiens
PCSPMCKGSRCWGESS

SEQ ID NO: 38681 - protein, 16 aa, Homo Sapiens
CSPMCKGSRCWGESSE

SEQ ID NO: 38682 - protein, 16 aa, Homo Sapiens
SPMCKGSRCWGESSED

SEQ ID NO: 38683 - protein, 16 aa, Homo Sapiens
PMCKGSRCWGESSEDC

SEQ ID NO: 38684 - protein, 16 aa, Homo Sapiens
MCKGSRCWGESSEDCQ

SEQ ID NO: 38685 - protein, 16 aa, Homo Sapiens
CKGSRCWGESSEDCQS

SEQ ID NO: 38686 - protein, 16 aa, Homo Sapiens
KGSRCWGESSEDCQSL

SEQ ID NO: 38687 - protein, 16 aa, Homo Sapiens
GSRCWGESSEDCQSLT

SEQ ID NO: 38688 - protein, 16 aa, Homo Sapiens
SRCWGESSEDCQSLTR

SEQ ID NO: 38689 - protein, 16 aa, Homo Sapiens
RCWGESSEDCQSLTRT

SEQ ID NO: 38690 - protein, 16 aa, Homo Sapiens
CWGESSEDCQSLTRTV

SEQ ID NO: 38691 - protein, 16 aa, Homo Sapiens
WGESSEDCQSLTRTVC

SEQ ID NO: 38692 - protein, 16 aa, Homo Sapiens
GESSEDCQSLTRTVCA

SEQ ID NO: 38693 - protein, 16 aa, Homo Sapiens
ESSEDCQSLTRTVCAG

SEQ ID NO: 38694 - protein, 16 aa, Homo Sapiens
SSEDCQSLTRTVCAGG

SEQ ID NO: 38695 - protein, 16 aa, Homo Sapiens
SEDCQSLTRTVCAGGC

SEQ ID NO: 38696 - protein, 16 aa, Homo Sapiens
EDCQSLTRTVCAGGCA

SEQ ID NO: 38697 - protein, 16 aa, Homo Sapiens
DCQSLTRTVCAGGCAR

SEQ ID NO: 38698 - protein, 16 aa, Homo Sapiens
CQSLTRTVCAGGCARC

SEQ ID NO: 38699 - protein, 16 aa, Homo Sapiens
QSLTRTVCAGGCARCK

SEQ ID NO: 38700 - protein, 16 aa, Homo Sapiens
SLTRTVCAGGCARCKG

SEQ ID NO: 38701 - protein, 16 aa, Homo Sapiens
LTRTVCAGGCARCKGP

SEQ ID NO: 38702 - protein, 16 aa, Homo Sapiens
TRTVCAGGCARCKGPL

SEQ ID NO: 38703 - protein, 16 aa, Homo Sapiens
RTVCAGGCARCKGPLP

SEQ ID NO: 38704 - protein, 16 aa, Homo Sapiens
TVCAGGCARCKGPLPT

SEQ ID NO: 38705 - protein, 16 aa, Homo Sapiens
VCAGGCARCKGPLPTD

SEQ ID NO: 38706 - protein, 16 aa, Homo Sapiens
CAGGCARCKGPLPTDC

SEQ ID NO: 38707 - protein, 16 aa, Homo Sapiens
AGGCARCKGPLPTDCC

SEQ ID NO: 38708 - protein, 16 aa, Homo Sapiens
GGCARCKGPLPTDCCH

SEQ ID NO: 38709 - protein, 16 aa, Homo Sapiens
GCARCKGPLPTDCCHE

SEQ ID NO: 38710 - protein, 16 aa, Homo Sapiens
CARCKGPLPTDCCHEQ

SEQ ID NO: 38711 - protein, 16 aa, Homo Sapiens
ARCKGPLPTDCCHEQC

SEQ ID NO: 38712 - protein, 16 aa, Homo Sapiens
RCKGPLPTDCCHEQCA

SEQ ID NO: 38713 - protein, 16 aa, Homo Sapiens
CKGPLPTDCCHEQCAA

SEQ ID NO: 38714 - protein, 16 aa, Homo Sapiens
KGPLPTDCCHEQCAAG

SEQ ID NO: 38715 - protein, 16 aa, Homo Sapiens
GPLPTDCCHEQCAAGC

SEQ ID NO: 38716 - protein, 16 aa, Homo Sapiens
PLPTDCCHEQCAAGCT

SEQ ID NO: 38717 - protein, 16 aa, Homo Sapiens
LPTDCCHEQCAAGCTG

SEQ ID NO: 38718 - protein, 16 aa, Homo Sapiens
PTDCCHEQCAAGCTGP

SEQ ID NO: 38719 - protein, 16 aa, Homo Sapiens
TDCCHEQCAAGCTGPK

SEQ ID NO: 38720 - protein, 16 aa, Homo Sapiens
DCCHEQCAAGCTGPKH

SEQ ID NO: 38721 - protein, 16 aa, Homo Sapiens
CCHEQCAAGCTGPKHS

SEQ ID NO: 38722 - protein, 16 aa, Homo Sapiens
CHEQCAAGCTGPKHSD

SEQ ID NO: 38723 - protein, 16 aa, Homo Sapiens
HEQCAAGCTGPKHSDC

SEQ ID NO: 38724 - protein, 16 aa, Homo Sapiens
EQCAAGCTGPKHSDCL

SEQ ID NO: 38725 - protein, 16 aa, Homo Sapiens
QCAAGCTGPKHSDCLA

SEQ ID NO: 38726 - protein, 16 aa, Homo Sapiens
CAAGCTGPKHSDCLAC

SEQ ID NO: 38727 - protein, 16 aa, Homo Sapiens
AAGCTGPKHSDCLACL

SEQ ID NO: 38728 - protein, 16 aa, Homo Sapiens
AGCTGPKHSDCLACLH

SEQ ID NO: 38729 - protein, 16 aa, Homo Sapiens
GCTGPKHSDCLACLHF

SEQ ID NO: 38730 - protein, 16 aa, Homo Sapiens
CTGPKHSDCLACLHFN

SEQ ID NO: 38731 - protein, 16 aa, Homo Sapiens
TGPKHSDCLACLHFNH

SEQ ID NO: 38732 - protein, 16 aa, Homo Sapiens
GPKHSDCLACLHFNHS

SEQ ID NO: 38733 - protein, 16 aa, Homo Sapiens
PKHSDCLACLHFNHSG

SEQ ID NO: 38734 - protein, 16 aa, Homo Sapiens
KHSDCLACLHFNHSGI

SEQ ID NO: 38735 - protein, 16 aa, Homo Sapiens
HSDCLACLHFNHSGIC

SEQ ID NO: 38736 - protein, 16 aa, Homo Sapiens
SDCLACLHFNHSGICE

SEQ ID NO: 38737 - protein, 16 aa, Homo Sapiens
DCLACLHFNHSGICEL

SEQ ID NO: 38738 - protein, 16 aa, Homo Sapiens
CLACLHFNHSGICELH

SEQ ID NO: 38739 - protein, 16 aa, Homo Sapiens
LACLHFNHSGICELHC

SEQ ID NO: 38740 - protein, 16 aa, Homo Sapiens
ACLHFNHSGICELHCP

SEQ ID NO: 38741 - protein, 16 aa, Homo Sapiens
CLHFNHSGICELHCPA

SEQ ID NO: 38742 - protein, 16 aa, Homo Sapiens
LHFNHSGICELHCPAL

SEQ ID NO: 38743 - protein, 16 aa, Homo Sapiens
HFNHSGICELHCPALV

SEQ ID NO: 38744 - protein, 16 aa, Homo Sapiens
FNHSGICELHCPALVT

SEQ ID NO: 38745 - protein, 16 aa, Homo Sapiens
NHSGICELHCPALVTY

SEQ ID NO: 38746 - protein, 16 aa, Homo Sapiens
HSGICELHCPALVTYN

SEQ ID NO: 38747 - protein, 16 aa, Homo Sapiens
SGICELHCPALVTYNT

SEQ ID NO: 38748 - protein, 16 aa, Homo Sapiens
GICELHCPALVTYNTD

SEQ ID NO: 38749 - protein, 16 aa, Homo Sapiens
ICELHCPALVTYNTDT

SEQ ID NO: 38750 - protein, 16 aa, Homo Sapiens
CELHCPALVTYNTDTF

SEQ ID NO: 38751 - protein, 16 aa, Homo Sapiens
ELHCPALVTYNTDTFE

SEQ ID NO: 38752 - protein, 16 aa, Homo Sapiens
LHCPALVTYNTDTFES

SEQ ID NO: 38753 - protein, 16 aa, Homo Sapiens
HCPALVTYNTDTFESM

SEQ ID NO: 38754 - protein, 16 aa, Homo Sapiens
CPALVTYNTDTFESMP

SEQ ID NO: 38755 - protein, 16 aa, Homo Sapiens
PALVTYNTDTFESMPN

SEQ ID NO: 38756 - protein, 16 aa, Homo Sapiens
ALVTYNTDTFESMPNP

SEQ ID NO: 38757 - protein, 16 aa, Homo Sapiens
LVTYNTDTFESMPNPE

SEQ ID NO: 38758 - protein, 16 aa, Homo Sapiens
VTYNTDTFESMPNPEG

SEQ ID NO: 38759 - protein, 16 aa, Homo Sapiens
TYNTDTFESMPNPEGR

SEQ ID NO: 38760 - protein, 16 aa, Homo Sapiens
YNTDTFESMPNPEGRY

SEQ ID NO: 38761 - protein, 16 aa, Homo Sapiens
NTDTFESMPNPEGRYT

SEQ ID NO: 38762 - protein, 16 aa, Homo Sapiens
TDTFESMPNPEGRYTF

SEQ ID NO: 38763 - protein, 16 aa, Homo Sapiens
DTFESMPNPEGRYTFG

SEQ ID NO: 38764 - protein, 16 aa, Homo Sapiens
TFESMPNPEGRYTFGA

SEQ ID NO: 38765 - protein, 16 aa, Homo Sapiens
FESMPNPEGRYTFGAS

SEQ ID NO: 38766 - protein, 16 aa, Homo Sapiens
ESMPNPEGRYTFGASC

SEQ ID NO: 38767 - protein, 16 aa, Homo Sapiens
SMPNPEGRYTFGASCV

SEQ ID NO: 38768 - protein, 16 aa, Homo Sapiens
MPNPEGRYTFGASCVT

SEQ ID NO: 38769 - protein, 16 aa, Homo Sapiens
PNPEGRYTFGASCVTA

SEQ ID NO: 38770 - protein, 16 aa, Homo Sapiens
NPEGRYTFGASCVTAC

SEQ ID NO: 38771 - protein, 16 aa, Homo Sapiens
PEGRYTFGASCVTACP

SEQ ID NO: 38772 - protein, 16 aa, Homo Sapiens
EGRYTFGASCVTACPY

SEQ ID NO: 38773 - protein, 16 aa, Homo Sapiens
GRYTFGASCVTACPYN

SEQ ID NO: 38774 - protein, 16 aa, Homo Sapiens
RYTFGASCVTACPYNY

SEQ ID NO: 38775 - protein, 16 aa, Homo Sapiens
YTFGASCVTACPYNYL

SEQ ID NO: 38776 - protein, 16 aa, Homo Sapiens
TFGASCVTACPYNYLS

SEQ ID NO: 38777 - protein, 16 aa, Homo Sapiens
FGASCVTACPYNYLST

SEQ ID NO: 38778 - protein, 16 aa, Homo Sapiens
GASCVTACPYNYLSTD

SEQ ID NO: 38779 - protein, 16 aa, Homo Sapiens
ASCVTACPYNYLSTDV

SEQ ID NO: 38780 - protein, 16 aa, Homo Sapiens
SCVTACPYNYLSTDVG

SEQ ID NO: 38781 - protein, 16 aa, Homo Sapiens
CVTACPYNYLSTDVGS

SEQ ID NO: 38782 - protein, 16 aa, Homo Sapiens
VTACPYNYLSTDVGSC

SEQ ID NO: 38783 - protein, 16 aa, Homo Sapiens
TACPYNYLSTDVGSCT

SEQ ID NO: 38784 - protein, 16 aa, Homo Sapiens
ACPYNYLSTDVGSCTL

SEQ ID NO: 38785 - protein, 16 aa, Homo Sapiens
CPYNYLSTDVGSCTLV

SEQ ID NO: 38786 - protein, 16 aa, Homo Sapiens
PYNYLSTDVGSCTLVC

SEQ ID NO: 38787 - protein, 16 aa, Homo Sapiens
YNYLSTDVGSCTLVCP

SEQ ID NO: 38788 - protein, 16 aa, Homo Sapiens
NYLSTDVGSCTLVCPL

SEQ ID NO: 38789 - protein, 16 aa, Homo Sapiens
YLSTDVGSCTLVCPLH

SEQ ID NO: 38790 - protein, 16 aa, Homo Sapiens
LSTDVGSCTLVCPLHN

SEQ ID NO: 38791 - protein, 16 aa, Homo Sapiens
STDVGSCTLVCPLHNQ

SEQ ID NO: 38792 - protein, 16 aa, Homo Sapiens
TDVGSCTLVCPLHNQE

SEQ ID NO: 38793 - protein, 16 aa, Homo Sapiens
DVGSCTLVCPLHNQEV

SEQ ID NO: 38794 - protein, 16 aa, Homo Sapiens
VGSCTLVCPLHNQEVT

SEQ ID NO: 38795 - protein, 16 aa, Homo Sapiens
GSCTLVCPLHNQEVTA

SEQ ID NO: 38796 - protein, 16 aa, Homo Sapiens
SCTLVCPLHNQEVTAE

SEQ ID NO: 38797 - protein, 16 aa, Homo Sapiens
CTLVCPLHNQEVTAED

SEQ ID NO: 38798 - protein, 16 aa, Homo Sapiens
TLVCPLHNQEVTAEDG

SEQ ID NO: 38799 - protein, 16 aa, Homo Sapiens
LVCPLHNQEVTAEDGT

SEQ ID NO: 38800 - protein, 16 aa, Homo Sapiens
VCPLHNQEVTAEDGTQ

SEQ ID NO: 38801 - protein, 16 aa, Homo Sapiens
CPLHNQEVTAEDGTQR

SEQ ID NO: 38802 - protein, 16 aa, Homo Sapiens
PLHNQEVTAEDGTQRC

SEQ ID NO: 38803 - protein, 16 aa, Homo Sapiens
LHNQEVTAEDGTQRCE

SEQ ID NO: 38804 - protein, 16 aa, Homo Sapiens
HNQEVTAEDGTQRCEK

SEQ ID NO: 38805 - protein, 16 aa, Homo Sapiens
NQEVTAEDGTQRCEKC

SEQ ID NO: 38806 - protein, 16 aa, Homo Sapiens
QEVTAEDGTQRCEKCS

SEQ ID NO: 38807 - protein, 16 aa, Homo Sapiens
EVTAEDGTQRCEKCSK

SEQ ID NO: 38808 - protein, 16 aa, Homo Sapiens
VTAEDGTQRCEKCSKP

SEQ ID NO: 38809 - protein, 16 aa, Homo Sapiens
TAEDGTQRCEKCSKPC

SEQ ID NO: 38810 - protein, 16 aa, Homo Sapiens
AEDGTQRCEKCSKPCA

SEQ ID NO: 38811 - protein, 16 aa, Homo Sapiens
EDGTQRCEKCSKPCAR

SEQ ID NO: 38812 - protein, 16 aa, Homo Sapiens
DGTQRCEKCSKPCARV

SEQ ID NO: 38813 - protein, 16 aa, Homo Sapiens
GTQRCEKCSKPCARVC

SEQ ID NO: 38814 - protein, 16 aa, Homo Sapiens
TQRCEKCSKPCARVCY

SEQ ID NO: 38815 - protein, 16 aa, Homo Sapiens
QRCEKCSKPCARVCYG

SEQ ID NO: 38816 - protein, 16 aa, Homo Sapiens
RCEKCSKPCARVCYGL

SEQ ID NO: 38817 - protein, 16 aa, Homo Sapiens
CEKCSKPCARVCYGLG

SEQ ID NO: 38818 - protein, 16 aa, Homo Sapiens
EKCSKPCARVCYGLGM

SEQ ID NO: 38819 - protein, 16 aa, Homo Sapiens
KCSKPCARVCYGLGME

SEQ ID NO: 38820 - protein, 16 aa, Homo Sapiens
CSKPCARVCYGLGMEH

SEQ ID NO: 38821 - protein, 16 aa, Homo Sapiens
SKPCARVCYGLGMEHL

SEQ ID NO: 38822 - protein, 16 aa, Homo Sapiens
KPCARVCYGLGMEHLR

SEQ ID NO: 38823 - protein, 16 aa, Homo Sapiens
PCARVCYGLGMEHLRE

SEQ ID NO: 38824 - protein, 16 aa, Homo Sapiens
CARVCYGLGMEHLREV

SEQ ID NO: 38825 - protein, 16 aa, Homo Sapiens
ARVCYGLGMEHLREVR

SEQ ID NO: 38826 - protein, 16 aa, Homo Sapiens
RVCYGLGMEHLREVRA

SEQ ID NO: 38827 - protein, 16 aa, Homo Sapiens
VCYGLGMEHLREVRAV

SEQ ID NO: 38828 - protein, 16 aa, Homo Sapiens
CYGLGMEHLREVRAVT

SEQ ID NO: 38829 - protein, 16 aa, Homo Sapiens
YGLGMEHLREVRAVTS

SEQ ID NO: 38830 - protein, 16 aa, Homo Sapiens
GLGMEHLREVRAVTSA

SEQ ID NO: 38831 - protein, 16 aa, Homo Sapiens
LGMEHLREVRAVTSAN

SEQ ID NO: 38832 - protein, 16 aa, Homo Sapiens
GMEHLREVRAVTSANI

SEQ ID NO: 38833 - protein, 16 aa, Homo Sapiens
MEHLREVRAVTSANIQ

SEQ ID NO: 38834 - protein, 16 aa, Homo Sapiens
EHLREVRAVTSANIQE

SEQ ID NO: 38835 - protein, 16 aa, Homo Sapiens
HLREVRAVTSANIQEF

SEQ ID NO: 38836 - protein, 16 aa, Homo Sapiens
LREVRAVTSANIQEFA

SEQ ID NO: 38837 - protein, 16 aa, Homo Sapiens
REVRAVTSANIQEFAG

SEQ ID NO: 38838 - protein, 16 aa, Homo Sapiens
EVRAVTSANIQEFAGC

SEQ ID NO: 38839 - protein, 16 aa, Homo Sapiens
VRAVTSANIQEFAGCK

SEQ ID NO: 38840 - protein, 16 aa, Homo Sapiens
RAVTSANIQEFAGCKK

SEQ ID NO: 38841 - protein, 16 aa, Homo Sapiens
AVTSANIQEFAGCKKI

SEQ ID NO: 38842 - protein, 16 aa, Homo Sapiens
VTSANIQEFAGCKKIF

SEQ ID NO: 38843 - protein, 16 aa, Homo Sapiens
TSANIQEFAGCKKIFG

SEQ ID NO: 38844 - protein, 16 aa, Homo Sapiens
SANIQEFAGCKKIFGS

SEQ ID NO: 38845 - protein, 16 aa, Homo Sapiens
ANIQEFAGCKKIFGSL

SEQ ID NO: 38846 - protein, 16 aa, Homo Sapiens
NIQEFAGCKKIFGSLA

SEQ ID NO: 38847 - protein, 16 aa, Homo Sapiens
IQEFAGCKKIFGSLAF

SEQ ID NO: 38848 - protein, 16 aa, Homo Sapiens
QEFAGCKKIFGSLAFL

SEQ ID NO: 38849 - protein, 16 aa, Homo Sapiens
EFAGCKKIFGSLAFLP

SEQ ID NO: 38850 - protein, 16 aa, Homo Sapiens
FAGCKKIFGSLAFLPE

SEQ ID NO: 38851 - protein, 16 aa, Homo Sapiens
AGCKKIFGSLAFLPES

SEQ ID NO: 38852 - protein, 16 aa, Homo Sapiens
GCKKIFGSLAFLPESF

SEQ ID NO: 38853 - protein, 16 aa, Homo Sapiens
CKKIFGSLAFLPESFD

SEQ ID NO: 38854 - protein, 16 aa, Homo Sapiens
KKIFGSLAFLPESFDG

SEQ ID NO: 38855 - protein, 16 aa, Homo Sapiens
KIFGSLAFLPESFDGD

SEQ ID NO: 38856 - protein, 16 aa, Homo Sapiens
IFGSLAFLPESFDGDP

SEQ ID NO: 38857 - protein, 16 aa, Homo Sapiens
FGSLAFLPESFDGDPA

SEQ ID NO: 38858 - protein, 16 aa, Homo Sapiens
GSLAFLPESFDGDPAS

SEQ ID NO: 38859 - protein, 16 aa, Homo Sapiens
SLAFLPESFDGDPASN

SEQ ID NO: 38860 - protein, 16 aa, Homo Sapiens
LAFLPESFDGDPASNT

SEQ ID NO: 38861 - protein, 16 aa, Homo Sapiens
AFLPESFDGDPASNTA

SEQ ID NO: 38862 - protein, 16 aa, Homo Sapiens
FLPESFDGDPASNTAP

SEQ ID NO: 38863 - protein, 16 aa, Homo Sapiens
LPESFDGDPASNTAPL

SEQ ID NO: 38864 - protein, 16 aa, Homo Sapiens
PESFDGDPASNTAPLQ

SEQ ID NO: 38865 - protein, 16 aa, Homo Sapiens
ESFDGDPASNTAPLQP

SEQ ID NO: 38866 - protein, 16 aa, Homo Sapiens
SFDGDPASNTAPLQPE

SEQ ID NO: 38867 - protein, 16 aa, Homo Sapiens
FDGDPASNTAPLQPEQ

SEQ ID NO: 38868 - protein, 16 aa, Homo Sapiens
DGDPASNTAPLQPEQL

SEQ ID NO: 38869 - protein, 16 aa, Homo Sapiens
GDPASNTAPLQPEQLQ

SEQ ID NO: 38870 - protein, 16 aa, Homo Sapiens
DPASNTAPLQPEQLQV

SEQ ID NO: 38871 - protein, 16 aa, Homo Sapiens
PASNTAPLQPEQLQVF

SEQ ID NO: 38872 - protein, 16 aa, Homo Sapiens
ASNTAPLQPEQLQVFE

SEQ ID NO: 38873 - protein, 16 aa, Homo Sapiens
SNTAPLQPEQLQVFET

SEQ ID NO: 38874 - protein, 16 aa, Homo Sapiens
NTAPLQPEQLQVFETL

SEQ ID NO: 38875 - protein, 16 aa, Homo Sapiens
TAPLQPEQLQVFETLE

SEQ ID NO: 38876 - protein, 16 aa, Homo Sapiens
APLQPEQLQVFETLEE

SEQ ID NO: 38877 - protein, 16 aa, Homo Sapiens
PLQPEQLQVFETLEEI

SEQ ID NO: 38878 - protein, 16 aa, Homo Sapiens
LQPEQLQVFETLEEIT

SEQ ID NO: 38879 - protein, 16 aa, Homo Sapiens
QPEQLQVFETLEEITG

SEQ ID NO: 38880 - protein, 16 aa, Homo Sapiens
PEQLQVFETLEEITGY

SEQ ID NO: 38881 - protein, 16 aa, Homo Sapiens
EQLQVFETLEEITGYL

SEQ ID NO: 38882 - protein, 16 aa, Homo Sapiens
QLQVFETLEEITGYLY

SEQ ID NO: 38883 - protein, 16 aa, Homo Sapiens
LQVFETLEEITGYLYI

SEQ ID NO: 38884 - protein, 16 aa, Homo Sapiens
QVFETLEEITGYLYIS

SEQ ID NO: 38885 - protein, 16 aa, Homo Sapiens
VFETLEEITGYLYISA

SEQ ID NO: 38886 - protein, 16 aa, Homo Sapiens
FETLEEITGYLYISAW

SEQ ID NO: 38887 - protein, 16 aa, Homo Sapiens
ETLEEITGYLYISAWP

SEQ ID NO: 38888 - protein, 16 aa, Homo Sapiens
TLEEITGYLYISAWPD

SEQ ID NO: 38889 - protein, 16 aa, Homo Sapiens
LEEITGYLYISAWPDS

SEQ ID NO: 38890 - protein, 16 aa, Homo Sapiens
EEITGYLYISAWPDSL

SEQ ID NO: 38891 - protein, 16 aa, Homo Sapiens
EITGYLYISAWPDSLP

SEQ ID NO: 38892 - protein, 16 aa, Homo Sapiens
ITGYLYISAWPDSLPD

SEQ ID NO: 38893 - protein, 16 aa, Homo Sapiens
TGYLYISAWPDSLPDL

SEQ ID NO: 38894 - protein, 16 aa, Homo Sapiens
GYLYISAWPDSLPDLS

SEQ ID NO: 38895 - protein, 16 aa, Homo Sapiens
YLYISAWPDSLPDLSV

SEQ ID NO: 38896 - protein, 16 aa, Homo Sapiens
LYISAWPDSLPDLSVF

SEQ ID NO: 38897 - protein, 16 aa, Homo Sapiens
YISAWPDSLPDLSVFQ

SEQ ID NO: 38898 - protein, 16 aa, Homo Sapiens
ISAWPDSLPDLSVFQN

SEQ ID NO: 38899 - protein, 16 aa, Homo Sapiens
SAWPDSLPDLSVFQNL

SEQ ID NO: 38900 - protein, 16 aa, Homo Sapiens
AWPDSLPDLSVFQNLQ

SEQ ID NO: 38901 - protein, 16 aa, Homo Sapiens
WPDSLPDLSVFQNLQV

SEQ ID NO: 38902 - protein, 16 aa, Homo Sapiens
PDSLPDLSVFQNLQVI

SEQ ID NO: 38903 - protein, 16 aa, Homo Sapiens
DSLPDLSVFQNLQVIR

SEQ ID NO: 38904 - protein, 16 aa, Homo Sapiens
SLPDLSVFQNLQVIRG

SEQ ID NO: 38905 - protein, 16 aa, Homo Sapiens
LPDLSVFQNLQVIRGR

SEQ ID NO: 38906 - protein, 16 aa, Homo Sapiens
PDLSVFQNLQVIRGRI

SEQ ID NO: 38907 - protein, 16 aa, Homo Sapiens
DLSVFQNLQVIRGRIL

SEQ ID NO: 38908 - protein, 16 aa, Homo Sapiens
LSVFQNLQVIRGRILH

SEQ ID NO: 38909 - protein, 16 aa, Homo Sapiens
SVFQNLQVIRGRILHN

SEQ ID NO: 38910 - protein, 16 aa, Homo Sapiens
VFQNLQVIRGRILHNG

SEQ ID NO: 38911 - protein, 16 aa, Homo Sapiens
FQNLQVIRGRILHNGA

SEQ ID NO: 38912 - protein, 16 aa, Homo Sapiens
QNLQVIRGRILHNGAY

SEQ ID NO: 38913 - protein, 16 aa, Homo Sapiens
NLQVIRGRILHNGAYS

SEQ ID NO: 38914 - protein, 16 aa, Homo Sapiens
LQVIRGRILHNGAYSL

SEQ ID NO: 38915 - protein, 16 aa, Homo Sapiens
QVIRGRILHNGAYSLT

SEQ ID NO: 38916 - protein, 16 aa, Homo Sapiens
VIRGRILHNGAYSLTL

SEQ ID NO: 38917 - protein, 16 aa, Homo Sapiens
IRGRILHNGAYSLTLQ

SEQ ID NO: 38918 - protein, 16 aa, Homo Sapiens
RGRILHNGAYSLTLQG

SEQ ID NO: 38919 - protein, 16 aa, Homo Sapiens
GRILHNGAYSLTLQGL

SEQ ID NO: 38920 - protein, 16 aa, Homo Sapiens
RILHNGAYSLTLQGLG

SEQ ID NO: 38921 - protein, 16 aa, Homo Sapiens
ILHNGAYSLTLQGLGI

SEQ ID NO: 38922 - protein, 16 aa, Homo Sapiens
LHNGAYSLTLQGLGIS

SEQ ID NO: 38923 - protein, 16 aa, Homo Sapiens
HNGAYSLTLQGLGISW

SEQ ID NO: 38924 - protein, 16 aa, Homo Sapiens
NGAYSLTLQGLGISWL

SEQ ID NO: 38925 - protein, 16 aa, Homo Sapiens
GAYSLTLQGLGISWLG

SEQ ID NO: 38926 - protein, 16 aa, Homo Sapiens
AYSLTLQGLGISWLGL

SEQ ID NO: 38927 - protein, 16 aa, Homo Sapiens
YSLTLQGLGISWLGLR

SEQ ID NO: 38928 - protein, 16 aa, Homo Sapiens
SLTLQGLGISWLGLRS

SEQ ID NO: 38929 - protein, 16 aa, Homo Sapiens
LTLQGLGISWLGLRSL

SEQ ID NO: 38930 - protein, 16 aa, Homo Sapiens
TLQGLGISWLGLRSLR

SEQ ID NO: 38931 - protein, 16 aa, Homo Sapiens
LQGLGISWLGLRSLRE

SEQ ID NO: 38932 - protein, 16 aa, Homo Sapiens
QGLGISWLGLRSLREL

SEQ ID NO: 38933 - protein, 16 aa, Homo Sapiens
GLGISWLGLRSLRELG

SEQ ID NO: 38934 - protein, 16 aa, Homo Sapiens
LGISWLGLRSLRELGS

SEQ ID NO: 38935 - protein, 16 aa, Homo Sapiens
GISWLGLRSLRELGSG

SEQ ID NO: 38936 - protein, 16 aa, Homo Sapiens
ISWLGLRSLRELGSGL

SEQ ID NO: 38937 - protein, 16 aa, Homo Sapiens
SWLGLRSLRELGSGLA

SEQ ID NO: 38938 - protein, 16 aa, Homo Sapiens
WLGLRSLRELGSGLAL

SEQ ID NO: 38939 - protein, 16 aa, Homo Sapiens
LGLRSLRELGSGLALI

SEQ ID NO: 38940 - protein, 16 aa, Homo Sapiens
GLRSLRELGSGLALIH

SEQ ID NO: 38941 - protein, 16 aa, Homo Sapiens
LRSLRELGSGLALIHH

SEQ ID NO: 38942 - protein, 16 aa, Homo Sapiens
RSLRELGSGLALIHHN

SEQ ID NO: 38943 - protein, 16 aa, Homo Sapiens
SLRELGSGLALIHHNT

SEQ ID NO: 38944 - protein, 16 aa, Homo Sapiens
LRELGSGLALIHHNTH

SEQ ID NO: 38945 - protein, 16 aa, Homo Sapiens
RELGSGLALIHHNTHL

SEQ ID NO: 38946 - protein, 16 aa, Homo Sapiens
ELGSGLALIHHNTHLC

SEQ ID NO: 38947 - protein, 16 aa, Homo Sapiens
LGSGLALIHHNTHLCF

SEQ ID NO: 38948 - protein, 16 aa, Homo Sapiens
GSGLALIHHNTHLCFV

SEQ ID NO: 38949 - protein, 16 aa, Homo Sapiens
SGLALIHHNTHLCFVH

SEQ ID NO: 38950 - protein, 16 aa, Homo Sapiens
GLALIHHNTHLCFVHT

SEQ ID NO: 38951 - protein, 16 aa, Homo Sapiens
LALIHHNTHLCFVHTV

SEQ ID NO: 38952 - protein, 16 aa, Homo Sapiens
ALIHHNTHLCFVHTVP

SEQ ID NO: 38953 - protein, 16 aa, Homo Sapiens
LIHHNTHLCFVHTVPW

SEQ ID NO: 38954 - protein, 16 aa, Homo Sapiens
IHHNTHLCFVHTVPWD

SEQ ID NO: 38955 - protein, 16 aa, Homo Sapiens
HHNTHLCFVHTVPWDQ

SEQ ID NO: 38956 - protein, 16 aa, Homo Sapiens
HNTHLCFVHTVPWDQL

SEQ ID NO: 38957 - protein, 16 aa, Homo Sapiens
NTHLCFVHTVPWDQLF

SEQ ID NO: 38958 - protein, 16 aa, Homo Sapiens
THLCFVHTVPWDQLFR

SEQ ID NO: 38959 - protein, 16 aa, Homo Sapiens
HLCFVHTVPWDQLFRN

SEQ ID NO: 38960 - protein, 16 aa, Homo Sapiens
LCFVHTVPWDQLFRNP

SEQ ID NO: 38961 - protein, 16 aa, Homo Sapiens
CFVHTVPWDQLFRNPH

SEQ ID NO: 38962 - protein, 16 aa, Homo Sapiens
FVHTVPWDQLFRNPHQ

SEQ ID NO: 38963 - protein, 16 aa, Homo Sapiens
VHTVPWDQLFRNPHQA

SEQ ID NO: 38964 - protein, 16 aa, Homo Sapiens
HTVPWDQLFRNPHQAL

SEQ ID NO: 38965 - protein, 16 aa, Homo Sapiens
TVPWDQLFRNPHQALL

SEQ ID NO: 38966 - protein, 16 aa, Homo Sapiens
VPWDQLFRNPHQALLH

SEQ ID NO: 38967 - protein, 16 aa, Homo Sapiens
PWDQLFRNPHQALLHT

SEQ ID NO: 38968 - protein, 16 aa, Homo Sapiens
WDQLFRNPHQALLHTA

SEQ ID NO: 38969 - protein, 16 aa, Homo Sapiens
DQLFRNPHQALLHTAN

SEQ ID NO: 38970 - protein, 16 aa, Homo Sapiens
QLFRNPHQALLHTANR

SEQ ID NO: 38971 - protein, 16 aa, Homo Sapiens
LFRNPHQALLHTANRP

SEQ ID NO: 38972 - protein, 16 aa, Homo Sapiens
FRNPHQALLHTANRPE

SEQ ID NO: 38973 - protein, 16 aa, Homo Sapiens
RNPHQALLHTANRPED

SEQ ID NO: 38974 - protein, 16 aa, Homo Sapiens
NPHQALLHTANRPEDE

SEQ ID NO: 38975 - protein, 16 aa, Homo Sapiens
PHQALLHTANRPEDEC

SEQ ID NO: 38976 - protein, 16 aa, Homo Sapiens
HQALLHTANRPEDECV

SEQ ID NO: 38977 - protein, 16 aa, Homo Sapiens
QALLHTANRPEDECVG

SEQ ID NO: 38978 - protein, 16 aa, Homo Sapiens
ALLHTANRPEDECVGE

SEQ ID NO: 38979 - protein, 16 aa, Homo Sapiens
LLHTANRPEDECVGEG

SEQ ID NO: 38980 - protein, 16 aa, Homo Sapiens
LHTANRPEDECVGEGL

SEQ ID NO: 38981 - protein, 16 aa, Homo Sapiens
HTANRPEDECVGEGLA

SEQ ID NO: 38982 - protein, 16 aa, Homo Sapiens
TANRPEDECVGEGLAC

SEQ ID NO: 38983 - protein, 16 aa, Homo Sapiens
ANRPEDECVGEGLACH

SEQ ID NO: 38984 - protein, 16 aa, Homo Sapiens
NRPEDECVGEGLACHQ

SEQ ID NO: 38985 - protein, 16 aa, Homo Sapiens
RPEDECVGEGLACHQL

SEQ ID NO: 38986 - protein, 16 aa, Homo Sapiens
PEDECVGEGLACHQLC

SEQ ID NO: 38987 - protein, 16 aa, Homo Sapiens
EDECVGEGLACHQLCA

SEQ ID NO: 38988 - protein, 16 aa, Homo Sapiens
DECVGEGLACHQLCAR

SEQ ID NO: 38989 - protein, 16 aa, Homo Sapiens
ECVGEGLACHQLCARG

SEQ ID NO: 38990 - protein, 16 aa, Homo Sapiens
CVGEGLACHQLCARGH

SEQ ID NO: 38991 - protein, 16 aa, Homo Sapiens
VGEGLACHQLCARGHC

SEQ ID NO: 38992 - protein, 16 aa, Homo Sapiens
GEGLACHQLCARGHCW

SEQ ID NO: 38993 - protein, 16 aa, Homo Sapiens
EGLACHQLCARGHCWG

SEQ ID NO: 38994 - protein, 16 aa, Homo Sapiens
GLACHQLCARGHCWGP

SEQ ID NO: 38995 - protein, 16 aa, Homo Sapiens
LACHQLCARGHCWGPG

SEQ ID NO: 38996 - protein, 16 aa, Homo Sapiens
ACHQLCARGHCWGPGP

SEQ ID NO: 38997 - protein, 16 aa, Homo Sapiens
CHQLCARGHCWGPGPT

SEQ ID NO: 38998 - protein, 16 aa, Homo Sapiens
HQLCARGHCWGPGPTQ

SEQ ID NO: 38999 - protein, 16 aa, Homo Sapiens
QLCARGHCWGPGPTQC

SEQ ID NO: 39000 - protein, 16 aa, Homo Sapiens
LCARGHCWGPGPTQCV

SEQ ID NO: 39001 - protein, 16 aa, Homo Sapiens
CARGHCWGPGPTQCVN

SEQ ID NO: 39002 - protein, 16 aa, Homo Sapiens
ARGHCWGPGPTQCVNC

SEQ ID NO: 39003 - protein, 16 aa, Homo Sapiens
RGHCWGPGPTQCVNCS

SEQ ID NO: 39004 - protein, 16 aa, Homo Sapiens
GHCWGPGPTQCVNCSQ

SEQ ID NO: 39005 - protein, 16 aa, Homo Sapiens
HCWGPGPTQCVNCSQF

SEQ ID NO: 39006 - protein, 16 aa, Homo Sapiens
CWGPGPTQCVNCSQFL

SEQ ID NO: 39007 - protein, 16 aa, Homo Sapiens
WGPGPTQCVNCSQFLR

SEQ ID NO: 39008 - protein, 16 aa, Homo Sapiens
GPGPTQCVNCSQFLRG

SEQ ID NO: 39009 - protein, 16 aa, Homo Sapiens
PGPTQCVNCSQFLRGQ

SEQ ID NO: 39010 - protein, 16 aa, Homo Sapiens
GPTQCVNCSQFLRGQE

SEQ ID NO: 39011 - protein, 16 aa, Homo Sapiens
PTQCVNCSQFLRGQEC

SEQ ID NO: 39012 - protein, 16 aa, Homo Sapiens
TQCVNCSQFLRGQECV

SEQ ID NO: 39013 - protein, 16 aa, Homo Sapiens
QCVNCSQFLRGQECVE

SEQ ID NO: 39014 - protein, 16 aa, Homo Sapiens
CVNCSQFLRGQECVEE

SEQ ID NO: 39015 - protein, 16 aa, Homo Sapiens
VNCSQFLRGQECVEEC

SEQ ID NO: 39016 - protein, 16 aa, Homo Sapiens
NCSQFLRGQECVEECR

SEQ ID NO: 39017 - protein, 16 aa, Homo Sapiens
CSQFLRGQECVEECRV

SEQ ID NO: 39018 - protein, 16 aa, Homo Sapiens
SQFLRGQECVEECRVL

SEQ ID NO: 39019 - protein, 16 aa, Homo Sapiens
QFLRGQECVEECRVLQ

SEQ ID NO: 39020 - protein, 16 aa, Homo Sapiens
FLRGQECVEECRVLQG

SEQ ID NO: 39021 - protein, 16 aa, Homo Sapiens
LRGQECVEECRVLQGL

SEQ ID NO: 39022 - protein, 16 aa, Homo Sapiens
RGQECVEECRVLQGLP

SEQ ID NO: 39023 - protein, 16 aa, Homo Sapiens
GQECVEECRVLQGLPR

SEQ ID NO: 39024 - protein, 16 aa, Homo Sapiens
QECVEECRVLQGLPRE

SEQ ID NO: 39025 - protein, 16 aa, Homo Sapiens
ECVEECRVLQGLPREY

SEQ ID NO: 39026 - protein, 16 aa, Homo Sapiens
CVEECRVLQGLPREYV

SEQ ID NO: 39027 - protein, 16 aa, Homo Sapiens
VEECRVLQGLPREYVN

SEQ ID NO: 39028 - protein, 16 aa, Homo Sapiens
EECRVLQGLPREYVNA

SEQ ID NO: 39029 - protein, 16 aa, Homo Sapiens
ECRVLQGLPREYVNAR

SEQ ID NO: 39030 - protein, 16 aa, Homo Sapiens
CRVLQGLPREYVNARH

SEQ ID NO: 39031 - protein, 16 aa, Homo Sapiens
RVLQGLPREYVNARHC

SEQ ID NO: 39032 - protein, 16 aa, Homo Sapiens
VLQGLPREYVNARHCL

SEQ ID NO: 39033 - protein, 16 aa, Homo Sapiens
LQGLPREYVNARHCLP

SEQ ID NO: 39034 - protein, 16 aa, Homo Sapiens
QGLPREYVNARHCLPC

SEQ ID NO: 39035 - protein, 16 aa, Homo Sapiens
GLPREYVNARHCLPCH

SEQ ID NO: 39036 - protein, 16 aa, Homo Sapiens
LPREYVNARHCLPCHP

SEQ ID NO: 39037 - protein, 16 aa, Homo Sapiens
PREYVNARHCLPCHPE

SEQ ID NO: 39038 - protein, 16 aa, Homo Sapiens
REYVNARHCLPCHPEC

SEQ ID NO: 39039 - protein, 16 aa, Homo Sapiens
EYVNARHCLPCHPECQ

SEQ ID NO: 39040 - protein, 16 aa, Homo Sapiens
YVNARHCLPCHPECQP

SEQ ID NO: 39041 - protein, 16 aa, Homo Sapiens
VNARHCLPCHPECQPQ

SEQ ID NO: 39042 - protein, 16 aa, Homo Sapiens
NARHCLPCHPECQPQN

SEQ ID NO: 39043 - protein, 16 aa, Homo Sapiens
ARHCLPCHPECQPQNG

SEQ ID NO: 39044 - protein, 16 aa, Homo Sapiens
RHCLPCHPECQPQNGS

SEQ ID NO: 39045 - protein, 16 aa, Homo Sapiens
HCLPCHPECQPQNGSV

SEQ ID NO: 39046 - protein, 16 aa, Homo Sapiens
CLPCHPECQPQNGSVT

SEQ ID NO: 39047 - protein, 16 aa, Homo Sapiens
LPCHPECQPQNGSVTC

SEQ ID NO: 39048 - protein, 16 aa, Homo Sapiens
PCHPECQPQNGSVTCF

SEQ ID NO: 39049 - protein, 16 aa, Homo Sapiens
CHPECQPQNGSVTCFG

SEQ ID NO: 39050 - protein, 16 aa, Homo Sapiens
HPECQPQNGSVTCFGP

SEQ ID NO: 39051 - protein, 16 aa, Homo Sapiens
PECQPQNGSVTCFGPE

SEQ ID NO: 39052 - protein, 16 aa, Homo Sapiens
ECQPQNGSVTCFGPEA

SEQ ID NO: 39053 - protein, 16 aa, Homo Sapiens
CQPQNGSVTCFGPEAD

SEQ ID NO: 39054 - protein, 16 aa, Homo Sapiens
QPQNGSVTCFGPEADQ

SEQ ID NO: 39055 - protein, 16 aa, Homo Sapiens
PQNGSVTCFGPEADQC

SEQ ID NO: 39056 - protein, 16 aa, Homo Sapiens
QNGSVTCFGPEADQCV

SEQ ID NO: 39057 - protein, 16 aa, Homo Sapiens
NGSVTCFGPEADQCVA

SEQ ID NO: 39058 - protein, 16 aa, Homo Sapiens
GSVTCFGPEADQCVAC

SEQ ID NO: 39059 - protein, 16 aa, Homo Sapiens
SVTCFGPEADQCVACA

SEQ ID NO: 39060 - protein, 16 aa, Homo Sapiens
VTCFGPEADQCVACAH

SEQ ID NO: 39061 - protein, 16 aa, Homo Sapiens
TCFGPEADQCVACAHY

SEQ ID NO: 39062 - protein, 16 aa, Homo Sapiens
CFGPEADQCVACAHYK

SEQ ID NO: 39063 - protein, 16 aa, Homo Sapiens
FGPEADQCVACAHYKD

SEQ ID NO: 39064 - protein, 16 aa, Homo Sapiens
GPEADQCVACAHYKDP

SEQ ID NO: 39065 - protein, 16 aa, Homo Sapiens
PEADQCVACAHYKDPP

SEQ ID NO: 39066 - protein, 16 aa, Homo Sapiens
EADQCVACAHYKDPPF

SEQ ID NO: 39067 - protein, 16 aa, Homo Sapiens
ADQCVACAHYKDPPFC

SEQ ID NO: 39068 - protein, 16 aa, Homo Sapiens
DQCVACAHYKDPPFCV

SEQ ID NO: 39069 - protein, 16 aa, Homo Sapiens
QCVACAHYKDPPFCVA

SEQ ID NO: 39070 - protein, 16 aa, Homo Sapiens
CVACAHYKDPPFCVAR

SEQ ID NO: 39071 - protein, 16 aa, Homo Sapiens
VACAHYKDPPFCVARC

SEQ ID NO: 39072 - protein, 16 aa, Homo Sapiens
ACAHYKDPPFCVARCP

SEQ ID NO: 39073 - protein, 16 aa, Homo Sapiens
CAHYKDPPFCVARCPS

SEQ ID NO: 39074 - protein, 16 aa, Homo Sapiens
AHYKDPPFCVARCPSG

SEQ ID NO: 39075 - protein, 16 aa, Homo Sapiens
HYKDPPFCVARCPSGV

SEQ ID NO: 39076 - protein, 16 aa, Homo Sapiens
YKDPPFCVARCPSGVK

SEQ ID NO: 39077 - protein, 16 aa, Homo Sapiens
KDPPFCVARCPSGVKP

SEQ ID NO: 39078 - protein, 16 aa, Homo Sapiens
DPPFCVARCPSGVKPD

SEQ ID NO: 39079 - protein, 16 aa, Homo Sapiens
PPFCVARCPSGVKPDL

SEQ ID NO: 39080 - protein, 16 aa, Homo Sapiens
PFCVARCPSGVKPDLS

SEQ ID NO: 39081 - protein, 16 aa, Homo Sapiens
FCVARCPSGVKPDLSY

SEQ ID NO: 39082 - protein, 16 aa, Homo Sapiens
CVARCPSGVKPDLSYM

SEQ ID NO: 39083 - protein, 16 aa, Homo Sapiens
VARCPSGVKPDLSYMP

SEQ ID NO: 39084 - protein, 16 aa, Homo Sapiens
ARCPSGVKPDLSYMPI

SEQ ID NO: 39085 - protein, 16 aa, Homo Sapiens
RCPSGVKPDLSYMPIW

SEQ ID NO: 39086 - protein, 16 aa, Homo Sapiens
CPSGVKPDLSYMPIWK

SEQ ID NO: 39087 - protein, 16 aa, Homo Sapiens
PSGVKPDLSYMPIWKF

SEQ ID NO: 39088 - protein, 16 aa, Homo Sapiens
SGVKPDLSYMPIWKFP

SEQ ID NO: 39089 - protein, 16 aa, Homo Sapiens
GVKPDLSYMPIWKFPD

SEQ ID NO: 39090 - protein, 16 aa, Homo Sapiens
VKPDLSYMPIWKFPDE

SEQ ID NO: 39091 - protein, 16 aa, Homo Sapiens
KPDLSYMPIWKFPDEE

SEQ ID NO: 39092 - protein, 16 aa, Homo Sapiens
PDLSYMPIWKFPDEEG

SEQ ID NO: 39093 - protein, 16 aa, Homo Sapiens
DLSYMPIWKFPDEEGA

SEQ ID NO: 39094 - protein, 16 aa, Homo Sapiens
LSYMPIWKFPDEEGAC

SEQ ID NO: 39095 - protein, 16 aa, Homo Sapiens
SYMPIWKFPDEEGACQ

SEQ ID NO: 39096 - protein, 16 aa, Homo Sapiens
YMPIWKFPDEEGACQP

SEQ ID NO: 39097 - protein, 16 aa, Homo Sapiens
MPIWKFPDEEGACQPC

SEQ ID NO: 39098 - protein, 16 aa, Homo Sapiens
PIWKFPDEEGACQPCP

SEQ ID NO: 39099 - protein, 16 aa, Homo Sapiens
IWKFPDEEGACQPCPI

SEQ ID NO: 39100 - protein, 16 aa, Homo Sapiens
WKFPDEEGACQPCPIN

SEQ ID NO: 39101 - protein, 16 aa, Homo Sapiens
KFPDEEGACQPCPINC

SEQ ID NO: 39102 - protein, 16 aa, Homo Sapiens
FPDEEGACQPCPINCT

SEQ ID NO: 39103 - protein, 16 aa, Homo Sapiens
PDEEGACQPCPINCTH

SEQ ID NO: 39104 - protein, 16 aa, Homo Sapiens
DEEGACQPCPINCTHS

SEQ ID NO: 39105 - protein, 16 aa, Homo Sapiens
EEGACQPCPINCTHSC

SEQ ID NO: 39106 - protein, 16 aa, Homo Sapiens
EGACQPCPINCTHSCV

SEQ ID NO: 39107 - protein, 16 aa, Homo Sapiens
GACQPCPINCTHSCVD

SEQ ID NO: 39108 - protein, 16 aa, Homo Sapiens
ACQPCPINCTHSCVDL

SEQ ID NO: 39109 - protein, 16 aa, Homo Sapiens
CQPCPINCTHSCVDLD

SEQ ID NO: 39110 - protein, 16 aa, Homo Sapiens
QPCPINCTHSCVDLDD

SEQ ID NO: 39111 - protein, 16 aa, Homo Sapiens
PCPINCTHSCVDLDDK

SEQ ID NO: 39112 - protein, 16 aa, Homo Sapiens
CPINCTHSCVDLDDKG

SEQ ID NO: 39113 - protein, 16 aa, Homo Sapiens
PINCTHSCVDLDDKGC

SEQ ID NO: 39114 - protein, 16 aa, Homo Sapiens
INCTHSCVDLDDKGCP

SEQ ID NO: 39115 - protein, 16 aa, Homo Sapiens
NCTHSCVDLDDKGCPA

SEQ ID NO: 39116 - protein, 16 aa, Homo Sapiens
CTHSCVDLDDKGCPAE

SEQ ID NO: 39117 - protein, 16 aa, Homo Sapiens
THSCVDLDDKGCPAEQ

SEQ ID NO: 39118 - protein, 16 aa, Homo Sapiens
HSCVDLDDKGCPAEQR

SEQ ID NO: 39119 - protein, 16 aa, Homo Sapiens
SCVDLDDKGCPAEQRA

SEQ ID NO: 39120 - protein, 16 aa, Homo Sapiens
CVDLDDKGCPAEQRAS

SEQ ID NO: 39121 - protein, 16 aa, Homo Sapiens
VDLDDKGCPAEQRASP

SEQ ID NO: 39122 - protein, 16 aa, Homo Sapiens
DLDDKGCPAEQRASPL

SEQ ID NO: 39123 - protein, 16 aa, Homo Sapiens
LDDKGCPAEQRASPLT

SEQ ID NO: 39124 - protein, 16 aa, Homo Sapiens
DDKGCPAEQRASPLTS

SEQ ID NO: 39125 - protein, 16 aa, Homo Sapiens
DKGCPAEQRASPLTSI

SEQ ID NO: 39126 - protein, 16 aa, Homo Sapiens
KGCPAEQRASPLTSII

SEQ ID NO: 39127 - protein, 16 aa, Homo Sapiens
GCPAEQRASPLTSIIS

SEQ ID NO: 39128 - protein, 16 aa, Homo Sapiens
CPAEQRASPLTSIISA

SEQ ID NO: 39129 - protein, 16 aa, Homo Sapiens
PAEQRASPLTSIISAV

SEQ ID NO: 39130 - protein, 16 aa, Homo Sapiens
AEQRASPLTSIISAVV

SEQ ID NO: 39131 - protein, 16 aa, Homo Sapiens
EQRASPLTSIISAVVG

SEQ ID NO: 39132 - protein, 16 aa, Homo Sapiens
QRASPLTSIISAVVGI

SEQ ID NO: 39133 - protein, 16 aa, Homo Sapiens
RASPLTSIISAVVGIL

SEQ ID NO: 39134 - protein, 16 aa, Homo Sapiens
ASPLTSIISAVVGILL

SEQ ID NO: 39135 - protein, 16 aa, Homo Sapiens
SPLTSIISAVVGILLV

SEQ ID NO: 39136 - protein, 16 aa, Homo Sapiens
PLTSIISAVVGILLVV

SEQ ID NO: 39137 - protein, 16 aa, Homo Sapiens
LTSIISAVVGILLVVV

SEQ ID NO: 39138 - protein, 16 aa, Homo Sapiens
TSIISAVVGILLVVVL

SEQ ID NO: 39139 - protein, 16 aa, Homo Sapiens
SIISAVVGILLVVVLG

SEQ ID NO: 39140 - protein, 16 aa, Homo Sapiens
IISAVVGILLVVVLGV

SEQ ID NO: 39141 - protein, 16 aa, Homo Sapiens
ISAVVGILLVVVLGVV

SEQ ID NO: 39142 - protein, 16 aa, Homo Sapiens
SAVVGILLVVVLGVVF

SEQ ID NO: 39143 - protein, 16 aa, Homo Sapiens
AVVGILLVVVLGVVFG

SEQ ID NO: 39144 - protein, 16 aa, Homo Sapiens
VVGILLVVVLGVVFGI

SEQ ID NO: 39145 - protein, 16 aa, Homo Sapiens
VGILLVVVLGVVFGIL

SEQ ID NO: 39146 - protein, 16 aa, Homo Sapiens
GILLVVVLGVVFGILI

SEQ ID NO: 39147 - protein, 16 aa, Homo Sapiens
ILLVVVLGVVFGILIK

SEQ ID NO: 39148 - protein, 16 aa, Homo Sapiens
LLVVVLGVVFGILIKR

SEQ ID NO: 39149 - protein, 16 aa, Homo Sapiens
LVVVLGVVFGILIKRR

SEQ ID NO: 39150 - protein, 16 aa, Homo Sapiens
VVVLGVVFGILIKRRQ

SEQ ID NO: 39151 - protein, 16 aa, Homo Sapiens
VVLGVVFGILIKRRQQ

SEQ ID NO: 39152 - protein, 16 aa, Homo Sapiens
VLGVVFGILIKRRQQK

SEQ ID NO: 39153 - protein, 16 aa, Homo Sapiens
LGVVFGILIKRRQQKI

SEQ ID NO: 39154 - protein, 16 aa, Homo Sapiens
GVVFGILIKRRQQKIR

SEQ ID NO: 39155 - protein, 16 aa, Homo Sapiens
VVFGILIKRRQQKIRK

SEQ ID NO: 39156 - protein, 16 aa, Homo Sapiens
VFGILIKRRQQKIRKY

SEQ ID NO: 39157 - protein, 16 aa, Homo Sapiens
FGILIKRRQQKIRKYT

SEQ ID NO: 39158 - protein, 16 aa, Homo Sapiens
GILIKRRQQKIRKYTM

SEQ ID NO: 39159 - protein, 16 aa, Homo Sapiens
ILIKRRQQKIRKYTMR

SEQ ID NO: 39160 - protein, 16 aa, Homo Sapiens
LIKRRQQKIRKYTMRR

SEQ ID NO: 39161 - protein, 16 aa, Homo Sapiens
IKRRQQKIRKYTMRRL

SEQ ID NO: 39162 - protein, 16 aa, Homo Sapiens
KRRQQKIRKYTMRRLL

SEQ ID NO: 39163 - protein, 16 aa, Homo Sapiens
RRQQKIRKYTMRRLLQ

SEQ ID NO: 39164 - protein, 16 aa, Homo Sapiens
RQQKIRKYTMRRLLQE

SEQ ID NO: 39165 - protein, 16 aa, Homo Sapiens
QQKIRKYTMRRLLQET

SEQ ID NO: 39166 - protein, 16 aa, Homo Sapiens
QKIRKYTMRRLLQETE

SEQ ID NO: 39167 - protein, 16 aa, Homo Sapiens
KIRKYTMRRLLQETEL

SEQ ID NO: 39168 - protein, 16 aa, Homo Sapiens
IRKYTMRRLLQETELV

SEQ ID NO: 39169 - protein, 16 aa, Homo Sapiens
RKYTMRRLLQETELVE

SEQ ID NO: 39170 - protein, 16 aa, Homo Sapiens
KYTMRRLLQETELVEP

SEQ ID NO: 39171 - protein, 16 aa, Homo Sapiens
YTMRRLLQETELVEPL

SEQ ID NO: 39172 - protein, 16 aa, Homo Sapiens
TMRRLLQETELVEPLT

SEQ ID NO: 39173 - protein, 16 aa, Homo Sapiens
MRRLLQETELVEPLTP

SEQ ID NO: 39174 - protein, 16 aa, Homo Sapiens
RRLLQETELVEPLTPS

SEQ ID NO: 39175 - protein, 16 aa, Homo Sapiens
RLLQETELVEPLTPSG

SEQ ID NO: 39176 - protein, 16 aa, Homo Sapiens
LLQETELVEPLTPSGA

SEQ ID NO: 39177 - protein, 16 aa, Homo Sapiens
LQETELVEPLTPSGAM

SEQ ID NO: 39178 - protein, 16 aa, Homo Sapiens
QETELVEPLTPSGAMP

SEQ ID NO: 39179 - protein, 16 aa, Homo Sapiens
ETELVEPLTPSGAMPN

SEQ ID NO: 39180 - protein, 16 aa, Homo Sapiens
TELVEPLTPSGAMPNQ

SEQ ID NO: 39181 - protein, 16 aa, Homo Sapiens
ELVEPLTPSGAMPNQA

SEQ ID NO: 39182 - protein, 16 aa, Homo Sapiens
LVEPLTPSGAMPNQAQ

SEQ ID NO: 39183 - protein, 16 aa, Homo Sapiens
VEPLTPSGAMPNQAQM

SEQ ID NO: 39184 - protein, 16 aa, Homo Sapiens
EPLTPSGAMPNQAQMR

SEQ ID NO: 39185 - protein, 16 aa, Homo Sapiens
PLTPSGAMPNQAQMRI

SEQ ID NO: 39186 - protein, 16 aa, Homo Sapiens
LTPSGAMPNQAQMRIL

SEQ ID NO: 39187 - protein, 16 aa, Homo Sapiens
TPSGAMPNQAQMRILK

SEQ ID NO: 39188 - protein, 16 aa, Homo Sapiens
PSGAMPNQAQMRILKE

SEQ ID NO: 39189 - protein, 16 aa, Homo Sapiens
SGAMPNQAQMRILKET

SEQ ID NO: 39190 - protein, 16 aa, Homo Sapiens
GAMPNQAQMRILKETE

SEQ ID NO: 39191 - protein, 16 aa, Homo Sapiens
AMPNQAQMRILKETEL

SEQ ID NO: 39192 - protein, 16 aa, Homo Sapiens
MPNQAQMRILKETELR

SEQ ID NO: 39193 - protein, 16 aa, Homo Sapiens
PNQAQMRILKETELRK

SEQ ID NO: 39194 - protein, 16 aa, Homo Sapiens
NQAQMRILKETELRKV

SEQ ID NO: 39195 - protein, 16 aa, Homo Sapiens
QAQMRILKETELRKVK

SEQ ID NO: 39196 - protein, 16 aa, Homo Sapiens
AQMRILKETELRKVKV

SEQ ID NO: 39197 - protein, 16 aa, Homo Sapiens
QMRILKETELRKVKVL

SEQ ID NO: 39198 - protein, 16 aa, Homo Sapiens
MRILKETELRKVKVLG

SEQ ID NO: 39199 - protein, 16 aa, Homo Sapiens
RILKETELRKVKVLGS

SEQ ID NO: 39200 - protein, 16 aa, Homo Sapiens
ILKETELRKVKVLGSG

SEQ ID NO: 39201 - protein, 16 aa, Homo Sapiens
LKETELRKVKVLGSGA

SEQ ID NO: 39202 - protein, 16 aa, Homo Sapiens
KETELRKVKVLGSGAF

SEQ ID NO: 39203 - protein, 16 aa, Homo Sapiens
ETELRKVKVLGSGAFG

SEQ ID NO: 39204 - protein, 16 aa, Homo Sapiens
TELRKVKVLGSGAFGT

SEQ ID NO: 39205 - protein, 16 aa, Homo Sapiens
ELRKVKVLGSGAFGTV

SEQ ID NO: 39206 - protein, 16 aa, Homo Sapiens
LRKVKVLGSGAFGTVY

SEQ ID NO: 39207 - protein, 16 aa, Homo Sapiens
RKVKVLGSGAFGTVYK

SEQ ID NO: 39208 - protein, 16 aa, Homo Sapiens
KVKVLGSGAFGTVYKG

SEQ ID NO: 39209 - protein, 16 aa, Homo Sapiens
VKVLGSGAFGTVYKGI

SEQ ID NO: 39210 - protein, 16 aa, Homo Sapiens
KVLGSGAFGTVYKGIW

SEQ ID NO: 39211 - protein, 16 aa, Homo Sapiens
VLGSGAFGTVYKGIWI

SEQ ID NO: 39212 - protein, 16 aa, Homo Sapiens
LGSGAFGTVYKGIWIP

SEQ ID NO: 39213 - protein, 16 aa, Homo Sapiens
GSGAFGTVYKGIWIPD

SEQ ID NO: 39214 - protein, 16 aa, Homo Sapiens
SGAFGTVYKGIWIPDG

SEQ ID NO: 39215 - protein, 16 aa, Homo Sapiens
GAFGTVYKGIWIPDGE

SEQ ID NO: 39216 - protein, 16 aa, Homo Sapiens
AFGTVYKGIWIPDGEN

SEQ ID NO: 39217 - protein, 16 aa, Homo Sapiens
FGTVYKGIWIPDGENV

SEQ ID NO: 39218 - protein, 16 aa, Homo Sapiens
GTVYKGIWIPDGENVK

SEQ ID NO: 39219 - protein, 16 aa, Homo Sapiens
TVYKGIWIPDGENVKI

SEQ ID NO: 39220 - protein, 16 aa, Homo Sapiens
VYKGIWIPDGENVKIP

SEQ ID NO: 39221 - protein, 16 aa, Homo Sapiens
YKGIWIPDGENVKIPV

SEQ ID NO: 39222 - protein, 16 aa, Homo Sapiens
KGIWIPDGENVKIPVA

SEQ ID NO: 39223 - protein, 16 aa, Homo Sapiens
GIWIPDGENVKIPVAI

SEQ ID NO: 39224 - protein, 16 aa, Homo Sapiens
IWIPDGENVKIPVAIK

SEQ ID NO: 39225 - protein, 16 aa, Homo Sapiens
WIPDGENVKIPVAIKV

SEQ ID NO: 39226 - protein, 16 aa, Homo Sapiens
IPDGENVKIPVAIKVL

SEQ ID NO: 39227 - protein, 16 aa, Homo Sapiens
PDGENVKIPVAIKVLR

SEQ ID NO: 39228 - protein, 16 aa, Homo Sapiens
DGENVKIPVAIKVLRE

SEQ ID NO: 39229 - protein, 16 aa, Homo Sapiens
GENVKIPVAIKVLREN

SEQ ID NO: 39230 - protein, 16 aa, Homo Sapiens
ENVKIPVAIKVLRENT

SEQ ID NO: 39231 - protein, 16 aa, Homo Sapiens
NVKIPVAIKVLRENTS

SEQ ID NO: 39232 - protein, 16 aa, Homo Sapiens
VKIPVAIKVLRENTSP

SEQ ID NO: 39233 - protein, 16 aa, Homo Sapiens
KIPVAIKVLRENTSPK

SEQ ID NO: 39234 - protein, 16 aa, Homo Sapiens
IPVAIKVLRENTSPKA

SEQ ID NO: 39235 - protein, 16 aa, Homo Sapiens
PVAIKVLRENTSPKAN

SEQ ID NO: 39236 - protein, 16 aa, Homo Sapiens
VAIKVLRENTSPKANK

SEQ ID NO: 39237 - protein, 16 aa, Homo Sapiens
AIKVLRENTSPKANKE

SEQ ID NO: 39238 - protein, 16 aa, Homo Sapiens
IKVLRENTSPKANKEI

SEQ ID NO: 39239 - protein, 16 aa, Homo Sapiens
KVLRENTSPKANKEIL

SEQ ID NO: 39240 - protein, 16 aa, Homo Sapiens
VLRENTSPKANKEILD

SEQ ID NO: 39241 - protein, 16 aa, Homo Sapiens
LRENTSPKANKEILDE

SEQ ID NO: 39242 - protein, 16 aa, Homo Sapiens
RENTSPKANKEILDEA

SEQ ID NO: 39243 - protein, 16 aa, Homo Sapiens
ENTSPKANKEILDEAY

SEQ ID NO: 39244 - protein, 16 aa, Homo Sapiens
NTSPKANKEILDEAYV

SEQ ID NO: 39245 - protein, 16 aa, Homo Sapiens
TSPKANKEILDEAYVM

SEQ ID NO: 39246 - protein, 16 aa, Homo Sapiens
SPKANKEILDEAYVMA

SEQ ID NO: 39247 - protein, 16 aa, Homo Sapiens
PKANKEILDEAYVMAG

SEQ ID NO: 39248 - protein, 16 aa, Homo Sapiens
KANKEILDEAYVMAGV

SEQ ID NO: 39249 - protein, 16 aa, Homo Sapiens
ANKEILDEAYVMAGVG

SEQ ID NO: 39250 - protein, 16 aa, Homo Sapiens
NKEILDEAYVMAGVGS

SEQ ID NO: 39251 - protein, 16 aa, Homo Sapiens
KEILDEAYVMAGVGSP

SEQ ID NO: 39252 - protein, 16 aa, Homo Sapiens
EILDEAYVMAGVGSPY

SEQ ID NO: 39253 - protein, 16 aa, Homo Sapiens
ILDEAYVMAGVGSPYV

SEQ ID NO: 39254 - protein, 16 aa, Homo Sapiens
LDEAYVMAGVGSPYVS

SEQ ID NO: 39255 - protein, 16 aa, Homo Sapiens
DEAYVMAGVGSPYVSR

SEQ ID NO: 39256 - protein, 16 aa, Homo Sapiens
EAYVMAGVGSPYVSRL

SEQ ID NO: 39257 - protein, 16 aa, Homo Sapiens
AYVMAGVGSPYVSRLL

SEQ ID NO: 39258 - protein, 16 aa, Homo Sapiens
YVMAGVGSPYVSRLLG

SEQ ID NO: 39259 - protein, 16 aa, Homo Sapiens
VMAGVGSPYVSRLLGI

SEQ ID NO: 39260 - protein, 16 aa, Homo Sapiens
MAGVGSPYVSRLLGIC

SEQ ID NO: 39261 - protein, 16 aa, Homo Sapiens
AGVGSPYVSRLLGICL

SEQ ID NO: 39262 - protein, 16 aa, Homo Sapiens
GVGSPYVSRLLGICLT

SEQ ID NO: 39263 - protein, 16 aa, Homo Sapiens
VGSPYVSRLLGICLTS

SEQ ID NO: 39264 - protein, 16 aa, Homo Sapiens
GSPYVSRLLGICLTST

SEQ ID NO: 39265 - protein, 16 aa, Homo Sapiens
SPYVSRLLGICLTSTV

SEQ ID NO: 39266 - protein, 16 aa, Homo Sapiens
PYVSRLLGICLTSTVQ

SEQ ID NO: 39267 - protein, 16 aa, Homo Sapiens
YVSRLLGICLTSTVQL

SEQ ID NO: 39268 - protein, 16 aa, Homo Sapiens
VSRLLGICLTSTVQLV

SEQ ID NO: 39269 - protein, 16 aa, Homo Sapiens
SRLLGICLTSTVQLVT

SEQ ID NO: 39270 - protein, 16 aa, Homo Sapiens
RLLGICLTSTVQLVTQ

SEQ ID NO: 39271 - protein, 16 aa, Homo Sapiens
LLGICLTSTVQLVTQL

SEQ ID NO: 39272 - protein, 16 aa, Homo Sapiens
LGICLTSTVQLVTQLM

SEQ ID NO: 39273 - protein, 16 aa, Homo Sapiens
GICLTSTVQLVTQLMP

SEQ ID NO: 39274 - protein, 16 aa, Homo Sapiens
ICLTSTVQLVTQLMPY

SEQ ID NO: 39275 - protein, 16 aa, Homo Sapiens
CLTSTVQLVTQLMPYG

SEQ ID NO: 39276 - protein, 16 aa, Homo Sapiens
LTSTVQLVTQLMPYGC

SEQ ID NO: 39277 - protein, 16 aa, Homo Sapiens
TSTVQLVTQLMPYGCL

SEQ ID NO: 39278 - protein, 16 aa, Homo Sapiens
STVQLVTQLMPYGCLL

SEQ ID NO: 39279 - protein, 16 aa, Homo Sapiens
TVQLVTQLMPYGCLLD

SEQ ID NO: 39280 - protein, 16 aa, Homo Sapiens
VQLVTQLMPYGCLLDH

SEQ ID NO: 39281 - protein, 16 aa, Homo Sapiens
QLVTQLMPYGCLLDHV

SEQ ID NO: 39282 - protein, 16 aa, Homo Sapiens
LVTQLMPYGCLLDHVR

SEQ ID NO: 39283 - protein, 16 aa, Homo Sapiens
VTQLMPYGCLLDHVRE

SEQ ID NO: 39284 - protein, 16 aa, Homo Sapiens
TQLMPYGCLLDHVREN

SEQ ID NO: 39285 - protein, 16 aa, Homo Sapiens
QLMPYGCLLDHVRENR

SEQ ID NO: 39286 - protein, 16 aa, Homo Sapiens
LMPYGCLLDHVRENRG

SEQ ID NO: 39287 - protein, 16 aa, Homo Sapiens
MPYGCLLDHVRENRGR

SEQ ID NO: 39288 - protein, 16 aa, Homo Sapiens
PYGCLLDHVRENRGRL

SEQ ID NO: 39289 - protein, 16 aa, Homo Sapiens
YGCLLDHVRENRGRLG

SEQ ID NO: 39290 - protein, 16 aa, Homo Sapiens
GCLLDHVRENRGRLGS

SEQ ID NO: 39291 - protein, 16 aa, Homo Sapiens
CLLDHVRENRGRLGSQ

SEQ ID NO: 39292 - protein, 16 aa, Homo Sapiens
LLDHVRENRGRLGSQD

SEQ ID NO: 39293 - protein, 16 aa, Homo Sapiens
LDHVRENRGRLGSQDL

SEQ ID NO: 39294 - protein, 16 aa, Homo Sapiens
DHVRENRGRLGSQDLL

SEQ ID NO: 39295 - protein, 16 aa, Homo Sapiens
HVRENRGRLGSQDLLN

SEQ ID NO: 39296 - protein, 16 aa, Homo Sapiens
VRENRGRLGSQDLLNW

SEQ ID NO: 39297 - protein, 16 aa, Homo Sapiens
RENRGRLGSQDLLNWC

SEQ ID NO: 39298 - protein, 16 aa, Homo Sapiens
ENRGRLGSQDLLNWCM

SEQ ID NO: 39299 - protein, 16 aa, Homo Sapiens
NRGRLGSQDLLNWCMQ

SEQ ID NO: 39300 - protein, 16 aa, Homo Sapiens
RGRLGSQDLLNWCMQI

SEQ ID NO: 39301 - protein, 16 aa, Homo Sapiens
GRLGSQDLLNWCMQIA

SEQ ID NO: 39302 - protein, 16 aa, Homo Sapiens
RLGSQDLLNWCMQIAK

SEQ ID NO: 39303 - protein, 16 aa, Homo Sapiens
LGSQDLLNWCMQIAKG

SEQ ID NO: 39304 - protein, 16 aa, Homo Sapiens
GSQDLLNWCMQIAKGM

SEQ ID NO: 39305 - protein, 16 aa, Homo Sapiens
SQDLLNWCMQIAKGMS

SEQ ID NO: 39306 - protein, 16 aa, Homo Sapiens
QDLLNWCMQIAKGMSY

SEQ ID NO: 39307 - protein, 16 aa, Homo Sapiens
DLLNWCMQIAKGMSYL

SEQ ID NO: 39308 - protein, 16 aa, Homo Sapiens
LLNWCMQIAKGMSYLE

SEQ ID NO: 39309 - protein, 16 aa, Homo Sapiens
LNWCMQIAKGMSYLED

SEQ ID NO: 39310 - protein, 16 aa, Homo Sapiens
NWCMQIAKGMSYLEDV

SEQ ID NO: 39311 - protein, 16 aa, Homo Sapiens
WCMQIAKGMSYLEDVR

SEQ ID NO: 39312 - protein, 16 aa, Homo Sapiens
CMQIAKGMSYLEDVRL

SEQ ID NO: 39313 - protein, 16 aa, Homo Sapiens
MQIAKGMSYLEDVRLV

SEQ ID NO: 39314 - protein, 16 aa, Homo Sapiens
QIAKGMSYLEDVRLVH

SEQ ID NO: 39315 - protein, 16 aa, Homo Sapiens
IAKGMSYLEDVRLVHR

SEQ ID NO: 39316 - protein, 16 aa, Homo Sapiens
AKGMSYLEDVRLVHRD

SEQ ID NO: 39317 - protein, 16 aa, Homo Sapiens
KGMSYLEDVRLVHRDL

SEQ ID NO: 39318 - protein, 16 aa, Homo Sapiens
GMSYLEDVRLVHRDLA

SEQ ID NO: 39319 - protein, 16 aa, Homo Sapiens
MSYLEDVRLVHRDLAA

SEQ ID NO: 39320 - protein, 16 aa, Homo Sapiens
SYLEDVRLVHRDLAAR

SEQ ID NO: 39321 - protein, 16 aa, Homo Sapiens
YLEDVRLVHRDLAARN

SEQ ID NO: 39322 - protein, 16 aa, Homo Sapiens
LEDVRLVHRDLAARNV

SEQ ID NO: 39323 - protein, 16 aa, Homo Sapiens
EDVRLVHRDLAARNVL

SEQ ID NO: 39324 - protein, 16 aa, Homo Sapiens
DVRLVHRDLAARNVLV

SEQ ID NO: 39325 - protein, 16 aa, Homo Sapiens
VRLVHRDLAARNVLVK

SEQ ID NO: 39326 - protein, 16 aa, Homo Sapiens
RLVHRDLAARNVLVKS

SEQ ID NO: 39327 - protein, 16 aa, Homo Sapiens
LVHRDLAARNVLVKSP

SEQ ID NO: 39328 - protein, 16 aa, Homo Sapiens
VHRDLAARNVLVKSPN

SEQ ID NO: 39329 - protein, 16 aa, Homo Sapiens
HRDLAARNVLVKSPNH

SEQ ID NO: 39330 - protein, 16 aa, Homo Sapiens
RDLAARNVLVKSPNHV

SEQ ID NO: 39331 - protein, 16 aa, Homo Sapiens
DLAARNVLVKSPNHVK

SEQ ID NO: 39332 - protein, 16 aa, Homo Sapiens
LAARNVLVKSPNHVKI

SEQ ID NO: 39333 - protein, 16 aa, Homo Sapiens
AARNVLVKSPNHVKIT

SEQ ID NO: 39334 - protein, 16 aa, Homo Sapiens
ARNVLVKSPNHVKITD

SEQ ID NO: 39335 - protein, 16 aa, Homo Sapiens
RNVLVKSPNHVKITDF

SEQ ID NO: 39336 - protein, 16 aa, Homo Sapiens
NVLVKSPNHVKITDFG

SEQ ID NO: 39337 - protein, 16 aa, Homo Sapiens
VLVKSPNHVKITDFGL

SEQ ID NO: 39338 - protein, 16 aa, Homo Sapiens
LVKSPNHVKITDFGLA

SEQ ID NO: 39339 - protein, 16 aa, Homo Sapiens
VKSPNHVKITDFGLAR

SEQ ID NO: 39340 - protein, 16 aa, Homo Sapiens
KSPNHVKITDFGLARL

SEQ ID NO: 39341 - protein, 16 aa, Homo Sapiens
SPNHVKITDFGLARLL

SEQ ID NO: 39342 - protein, 16 aa, Homo Sapiens
PNHVKITDFGLARLLD

SEQ ID NO: 39343 - protein, 16 aa, Homo Sapiens
NHVKITDFGLARLLDI

SEQ ID NO: 39344 - protein, 16 aa, Homo Sapiens
HVKITDFGLARLLDID

SEQ ID NO: 39345 - protein, 16 aa, Homo Sapiens
VKITDFGLARLLDIDE

SEQ ID NO: 39346 - protein, 16 aa, Homo Sapiens
KITDFGLARLLDIDET

SEQ ID NO: 39347 - protein, 16 aa, Homo Sapiens
ITDFGLARLLDIDETE

SEQ ID NO: 39348 - protein, 16 aa, Homo Sapiens
TDFGLARLLDIDETEY

SEQ ID NO: 39349 - protein, 16 aa, Homo Sapiens
DFGLARLLDIDETEYH

SEQ ID NO: 39350 - protein, 16 aa, Homo Sapiens
FGLARLLDIDETEYHA

SEQ ID NO: 39351 - protein, 16 aa, Homo Sapiens
GLARLLDIDETEYHAD

SEQ ID NO: 39352 - protein, 16 aa, Homo Sapiens
LARLLDIDETEYHADG

SEQ ID NO: 39353 - protein, 16 aa, Homo Sapiens
ARLLDIDETEYHADGG

SEQ ID NO: 39354 - protein, 16 aa, Homo Sapiens
RLLDIDETEYHADGGK

SEQ ID NO: 39355 - protein, 16 aa, Homo Sapiens
LLDIDETEYHADGGKV

SEQ ID NO: 39356 - protein, 16 aa, Homo Sapiens
LDIDETEYHADGGKVP

SEQ ID NO: 39357 - protein, 16 aa, Homo Sapiens
DIDETEYHADGGKVPI

SEQ ID NO: 39358 - protein, 16 aa, Homo Sapiens
IDETEYHADGGKVPIK

SEQ ID NO: 39359 - protein, 16 aa, Homo Sapiens
DETEYHADGGKVPIKW

SEQ ID NO: 39360 - protein, 16 aa, Homo Sapiens
ETEYHADGGKVPIKWM

SEQ ID NO: 39361 - protein, 16 aa, Homo Sapiens
TEYHADGGKVPIKWMA

SEQ ID NO: 39362 - protein, 16 aa, Homo Sapiens
EYHADGGKVPIKWMAL

SEQ ID NO: 39363 - protein, 16 aa, Homo Sapiens
YHADGGKVPIKWMALE

SEQ ID NO: 39364 - protein, 16 aa, Homo Sapiens
HADGGKVPIKWMALES

SEQ ID NO: 39365 - protein, 16 aa, Homo Sapiens
ADGGKVPIKWMALESI

SEQ ID NO: 39366 - protein, 16 aa, Homo Sapiens
DGGKVPIKWMALESIL

SEQ ID NO: 39367 - protein, 16 aa, Homo Sapiens
GGKVPIKWMALESILR

SEQ ID NO: 39368 - protein, 16 aa, Homo Sapiens
GKVPIKWMALESILRR

SEQ ID NO: 39369 - protein, 16 aa, Homo Sapiens
KVPIKWMALESILRRR

SEQ ID NO: 39370 - protein, 16 aa, Homo Sapiens
VPIKWMALESILRRRF

SEQ ID NO: 39371 - protein, 16 aa, Homo Sapiens
PIKWMALESILRRRFT

SEQ ID NO: 39372 - protein, 16 aa, Homo Sapiens
IKWMALESILRRRFTH

SEQ ID NO: 39373 - protein, 16 aa, Homo Sapiens
KWMALESILRRRFTHQ

SEQ ID NO: 39374 - protein, 16 aa, Homo Sapiens
WMALESILRRRFTHQS

SEQ ID NO: 39375 - protein, 16 aa, Homo Sapiens
MALESILRRRFTHQSD

SEQ ID NO: 39376 - protein, 16 aa, Homo Sapiens
ALESILRRRFTHQSDV

SEQ ID NO: 39377 - protein, 16 aa, Homo Sapiens
LESILRRRFTHQSDVW

SEQ ID NO: 39378 - protein, 16 aa, Homo Sapiens
ESILRRRFTHQSDVWS

SEQ ID NO: 39379 - protein, 16 aa, Homo Sapiens
SILRRRFTHQSDVWSY

SEQ ID NO: 39380 - protein, 16 aa, Homo Sapiens
ILRRRFTHQSDVWSYG

SEQ ID NO: 39381 - protein, 16 aa, Homo Sapiens
LRRRFTHQSDVWSYGV

SEQ ID NO: 39382 - protein, 16 aa, Homo Sapiens
RRRFTHQSDVWSYGVT

SEQ ID NO: 39383 - protein, 16 aa, Homo Sapiens
RRFTHQSDVWSYGVTV

SEQ ID NO: 39384 - protein, 16 aa, Homo Sapiens
RFTHQSDVWSYGVTVW

SEQ ID NO: 39385 - protein, 16 aa, Homo Sapiens
FTHQSDVWSYGVTVWE

SEQ ID NO: 39386 - protein, 16 aa, Homo Sapiens
THQSDVWSYGVTVWEL

SEQ ID NO: 39387 - protein, 16 aa, Homo Sapiens
HQSDVWSYGVTVWELM

SEQ ID NO: 39388 - protein, 16 aa, Homo Sapiens
QSDVWSYGVTVWELMT

SEQ ID NO: 39389 - protein, 16 aa, Homo Sapiens
SDVWSYGVTVWELMTF

SEQ ID NO: 39390 - protein, 16 aa, Homo Sapiens
DVWSYGVTVWELMTFG

SEQ ID NO: 39391 - protein, 16 aa, Homo Sapiens
VWSYGVTVWELMTFGA

SEQ ID NO: 39392 - protein, 16 aa, Homo Sapiens
WSYGVTVWELMTFGAK

SEQ ID NO: 39393 - protein, 16 aa, Homo Sapiens
SYGVTVWELMTFGAKP

SEQ ID NO: 39394 - protein, 16 aa, Homo Sapiens
YGVTVWELMTFGAKPY

SEQ ID NO: 39395 - protein, 16 aa, Homo Sapiens
GVTVWELMTFGAKPYD

SEQ ID NO: 39396 - protein, 16 aa, Homo Sapiens
VTVWELMTFGAKPYDG

SEQ ID NO: 39397 - protein, 16 aa, Homo Sapiens
TVWELMTFGAKPYDGI

SEQ ID NO: 39398 - protein, 16 aa, Homo Sapiens
VWELMTFGAKPYDGIP

SEQ ID NO: 39399 - protein, 16 aa, Homo Sapiens
WELMTFGAKPYDGIPA

SEQ ID NO: 39400 - protein, 16 aa, Homo Sapiens
ELMTFGAKPYDGIPAR

SEQ ID NO: 39401 - protein, 16 aa, Homo Sapiens
LMTFGAKPYDGIPARE

SEQ ID NO: 39402 - protein, 16 aa, Homo Sapiens
MTFGAKPYDGIPAREI

SEQ ID NO: 39403 - protein, 16 aa, Homo Sapiens
TFGAKPYDGIPAREIP

SEQ ID NO: 39404 - protein, 16 aa, Homo Sapiens
FGAKPYDGIPAREIPD

SEQ ID NO: 39405 - protein, 16 aa, Homo Sapiens
GAKPYDGIPAREIPDL

SEQ ID NO: 39406 - protein, 16 aa, Homo Sapiens
AKPYDGIPAREIPDLL

SEQ ID NO: 39407 - protein, 16 aa, Homo Sapiens
KPYDGIPAREIPDLLE

SEQ ID NO: 39408 - protein, 16 aa, Homo Sapiens
PYDGIPAREIPDLLEK

SEQ ID NO: 39409 - protein, 16 aa, Homo Sapiens
YDGIPAREIPDLLEKG

SEQ ID NO: 39410 - protein, 16 aa, Homo Sapiens
DGIPAREIPDLLEKGE

SEQ ID NO: 39411 - protein, 16 aa, Homo Sapiens
GIPAREIPDLLEKGER

SEQ ID NO: 39412 - protein, 16 aa, Homo Sapiens
IPAREIPDLLEKGERL

SEQ ID NO: 39413 - protein, 16 aa, Homo Sapiens
PAREIPDLLEKGERLP

SEQ ID NO: 39414 - protein, 16 aa, Homo Sapiens
AREIPDLLEKGERLPQ

SEQ ID NO: 39415 - protein, 16 aa, Homo Sapiens
REIPDLLEKGERLPQP

SEQ ID NO: 39416 - protein, 16 aa, Homo Sapiens
EIPDLLEKGERLPQPP

SEQ ID NO: 39417 - protein, 16 aa, Homo Sapiens
IPDLLEKGERLPQPPI

SEQ ID NO: 39418 - protein, 16 aa, Homo Sapiens
PDLLEKGERLPQPPIC

SEQ ID NO: 39419 - protein, 16 aa, Homo Sapiens
DLLEKGERLPQPPICT

SEQ ID NO: 39420 - protein, 16 aa, Homo Sapiens
LLEKGERLPQPPICTI

SEQ ID NO: 39421 - protein, 16 aa, Homo Sapiens
LEKGERLPQPPICTID

SEQ ID NO: 39422 - protein, 16 aa, Homo Sapiens
EKGERLPQPPICTIDV

SEQ ID NO: 39423 - protein, 16 aa, Homo Sapiens
KGERLPQPPICTIDVY

SEQ ID NO: 39424 - protein, 16 aa, Homo Sapiens
GERLPQPPICTIDVYM

SEQ ID NO: 39425 - protein, 16 aa, Homo Sapiens
ERLPQPPICTIDVYMI

SEQ ID NO: 39426 - protein, 16 aa, Homo Sapiens
RLPQPPICTIDVYMIM

SEQ ID NO: 39427 - protein, 16 aa, Homo Sapiens
LPQPPICTIDVYMIMV

SEQ ID NO: 39428 - protein, 16 aa, Homo Sapiens
PQPPICTIDVYMIMVK

SEQ ID NO: 39429 - protein, 16 aa, Homo Sapiens
QPPICTIDVYMIMVKC

SEQ ID NO: 39430 - protein, 16 aa, Homo Sapiens
PPICTIDVYMIMVKCW

SEQ ID NO: 39431 - protein, 16 aa, Homo Sapiens
PICTIDVYMIMVKCWM

SEQ ID NO: 39432 - protein, 16 aa, Homo Sapiens
ICTIDVYMIMVKCWMI

SEQ ID NO: 39433 - protein, 16 aa, Homo Sapiens
CTIDVYMIMVKCWMID

SEQ ID NO: 39434 - protein, 16 aa, Homo Sapiens
TIDVYMIMVKCWMIDS

SEQ ID NO: 39435 - protein, 16 aa, Homo Sapiens
IDVYMIMVKCWMIDSE

SEQ ID NO: 39436 - protein, 16 aa, Homo Sapiens
DVYMIMVKCWMIDSEC

SEQ ID NO: 39437 - protein, 16 aa, Homo Sapiens
VYMIMVKCWMIDSECR

SEQ ID NO: 39438 - protein, 16 aa, Homo Sapiens
YMIMVKCWMIDSECRP

SEQ ID NO: 39439 - protein, 16 aa, Homo Sapiens
MIMVKCWMIDSECRPR

SEQ ID NO: 39440 - protein, 16 aa, Homo Sapiens
IMVKCWMIDSECRPRF

SEQ ID NO: 39441 - protein, 16 aa, Homo Sapiens
MVKCWMIDSECRPRFR

SEQ ID NO: 39442 - protein, 16 aa, Homo Sapiens
VKCWMIDSECRPRFRE

SEQ ID NO: 39443 - protein, 16 aa, Homo Sapiens
KCWMIDSECRPRFREL

SEQ ID NO: 39444 - protein, 16 aa, Homo Sapiens
CWMIDSECRPRFRELV

SEQ ID NO: 39445 - protein, 16 aa, Homo Sapiens
WMIDSECRPRFRELVS

SEQ ID NO: 39446 - protein, 16 aa, Homo Sapiens
MIDSECRPRFRELVSE

SEQ ID NO: 39447 - protein, 16 aa, Homo Sapiens
IDSECRPRFRELVSEF

SEQ ID NO: 39448 - protein, 16 aa, Homo Sapiens
DSECRPRFRELVSEFS

SEQ ID NO: 39449 - protein, 16 aa, Homo Sapiens
SECRPRFRELVSEFSR

SEQ ID NO: 39450 - protein, 16 aa, Homo Sapiens
ECRPRFRELVSEFSRM

SEQ ID NO: 39451 - protein, 16 aa, Homo Sapiens
CRPRFRELVSEFSRMA

SEQ ID NO: 39452 - protein, 16 aa, Homo Sapiens
RPRFRELVSEFSRMAR

SEQ ID NO: 39453 - protein, 16 aa, Homo Sapiens
PRFRELVSEFSRMARD

SEQ ID NO: 39454 - protein, 16 aa, Homo Sapiens
RFRELVSEFSRMARDP

SEQ ID NO: 39455 - protein, 16 aa, Homo Sapiens
FRELVSEFSRMARDPQ

SEQ ID NO: 39456 - protein, 16 aa, Homo Sapiens
RELVSEFSRMARDPQR

SEQ ID NO: 39457 - protein, 16 aa, Homo Sapiens
ELVSEFSRMARDPQRF

SEQ ID NO: 39458 - protein, 16 aa, Homo Sapiens
LVSEFSRMARDPQRFV

SEQ ID NO: 39459 - protein, 16 aa, Homo Sapiens
VSEFSRMARDPQRFVV

SEQ ID NO: 39460 - protein, 16 aa, Homo Sapiens
SEFSRMARDPQRFVVI

SEQ ID NO: 39461 - protein, 16 aa, Homo Sapiens
EFSRMARDPQRFVVIQ

SEQ ID NO: 39462 - protein, 16 aa, Homo Sapiens
FSRMARDPQRFVVIQN

SEQ ID NO: 39463 - protein, 16 aa, Homo Sapiens
SRMARDPQRFVVIQNE

SEQ ID NO: 39464 - protein, 16 aa, Homo Sapiens
RMARDPQRFVVIQNED

SEQ ID NO: 39465 - protein, 16 aa, Homo Sapiens
MARDPQRFVVIQNEDL

SEQ ID NO: 39466 - protein, 16 aa, Homo Sapiens
ARDPQRFVVIQNEDLG

SEQ ID NO: 39467 - protein, 16 aa, Homo Sapiens
RDPQRFVVIQNEDLGP

SEQ ID NO: 39468 - protein, 16 aa, Homo Sapiens
DPQRFVVIQNEDLGPA

SEQ ID NO: 39469 - protein, 16 aa, Homo Sapiens
PQRFVVIQNEDLGPAS

SEQ ID NO: 39470 - protein, 16 aa, Homo Sapiens
QRFVVIQNEDLGPASP

SEQ ID NO: 39471 - protein, 16 aa, Homo Sapiens
RFVVIQNEDLGPASPL

SEQ ID NO: 39472 - protein, 16 aa, Homo Sapiens
FVVIQNEDLGPASPLD

SEQ ID NO: 39473 - protein, 16 aa, Homo Sapiens
VVIQNEDLGPASPLDS

SEQ ID NO: 39474 - protein, 16 aa, Homo Sapiens
VIQNEDLGPASPLDST

SEQ ID NO: 39475 - protein, 16 aa, Homo Sapiens
IQNEDLGPASPLDSTF

SEQ ID NO: 39476 - protein, 16 aa, Homo Sapiens
QNEDLGPASPLDSTFY

SEQ ID NO: 39477 - protein, 16 aa, Homo Sapiens
NEDLGPASPLDSTFYR

SEQ ID NO: 39478 - protein, 16 aa, Homo Sapiens
EDLGPASPLDSTFYRS

SEQ ID NO: 39479 - protein, 16 aa, Homo Sapiens
DLGPASPLDSTFYRSL

SEQ ID NO: 39480 - protein, 16 aa, Homo Sapiens
LGPASPLDSTFYRSLL

SEQ ID NO: 39481 - protein, 16 aa, Homo Sapiens
GPASPLDSTFYRSLLE

SEQ ID NO: 39482 - protein, 16 aa, Homo Sapiens
PASPLDSTFYRSLLED

SEQ ID NO: 39483 - protein, 16 aa, Homo Sapiens
ASPLDSTFYRSLLEDD

SEQ ID NO: 39484 - protein, 16 aa, Homo Sapiens
SPLDSTFYRSLLEDDD

SEQ ID NO: 39485 - protein, 16 aa, Homo Sapiens
PLDSTFYRSLLEDDDM

SEQ ID NO: 39486 - protein, 16 aa, Homo Sapiens
LDSTFYRSLLEDDDMG

SEQ ID NO: 39487 - protein, 16 aa, Homo Sapiens
DSTFYRSLLEDDDMGD

SEQ ID NO: 39488 - protein, 16 aa, Homo Sapiens
STFYRSLLEDDDMGDL

SEQ ID NO: 39489 - protein, 16 aa, Homo Sapiens
TFYRSLLEDDDMGDLV

SEQ ID NO: 39490 - protein, 16 aa, Homo Sapiens
FYRSLLEDDDMGDLVD

SEQ ID NO: 39491 - protein, 16 aa, Homo Sapiens
YRSLLEDDDMGDLVDA

SEQ ID NO: 39492 - protein, 16 aa, Homo Sapiens
RSLLEDDDMGDLVDAE

SEQ ID NO: 39493 - protein, 16 aa, Homo Sapiens
SLLEDDDMGDLVDAEE

SEQ ID NO: 39494 - protein, 16 aa, Homo Sapiens
LLEDDDMGDLVDAEEY

SEQ ID NO: 39495 - protein, 16 aa, Homo Sapiens
LEDDDMGDLVDAEEYL

SEQ ID NO: 39496 - protein, 16 aa, Homo Sapiens
EDDDMGDLVDAEEYLV

SEQ ID NO: 39497 - protein, 16 aa, Homo Sapiens
DDDMGDLVDAEEYLVP

SEQ ID NO: 39498 - protein, 16 aa, Homo Sapiens
DDMGDLVDAEEYLVPQ

SEQ ID NO: 39499 - protein, 16 aa, Homo Sapiens
DMGDLVDAEEYLVPQQ

SEQ ID NO: 39500 - protein, 16 aa, Homo Sapiens
MGDLVDAEEYLVPQQG

SEQ ID NO: 39501 - protein, 16 aa, Homo Sapiens
GDLVDAEEYLVPQQGF

SEQ ID NO: 39502 - protein, 16 aa, Homo Sapiens
DLVDAEEYLVPQQGFF

SEQ ID NO: 39503 - protein, 16 aa, Homo Sapiens
LVDAEEYLVPQQGFFC

SEQ ID NO: 39504 - protein, 16 aa, Homo Sapiens
VDAEEYLVPQQGFFCP

SEQ ID NO: 39505 - protein, 16 aa, Homo Sapiens
DAEEYLVPQQGFFCPD

SEQ ID NO: 39506 - protein, 16 aa, Homo Sapiens
AEEYLVPQQGFFCPDP

SEQ ID NO: 39507 - protein, 16 aa, Homo Sapiens
EEYLVPQQGFFCPDPA

SEQ ID NO: 39508 - protein, 16 aa, Homo Sapiens
EYLVPQQGFFCPDPAP

SEQ ID NO: 39509 - protein, 16 aa, Homo Sapiens
YLVPQQGFFCPDPAPG

SEQ ID NO: 39510 - protein, 16 aa, Homo Sapiens
LVPQQGFFCPDPAPGA

SEQ ID NO: 39511 - protein, 16 aa, Homo Sapiens
VPQQGFFCPDPAPGAG

SEQ ID NO: 39512 - protein, 16 aa, Homo Sapiens
PQQGFFCPDPAPGAGG

SEQ ID NO: 39513 - protein, 16 aa, Homo Sapiens
QQGFFCPDPAPGAGGM

SEQ ID NO: 39514 - protein, 16 aa, Homo Sapiens
QGFFCPDPAPGAGGMV

SEQ ID NO: 39515 - protein, 16 aa, Homo Sapiens
GFFCPDPAPGAGGMVH

SEQ ID NO: 39516 - protein, 16 aa, Homo Sapiens
FFCPDPAPGAGGMVHH

SEQ ID NO: 39517 - protein, 16 aa, Homo Sapiens
FCPDPAPGAGGMVHHR

SEQ ID NO: 39518 - protein, 16 aa, Homo Sapiens
CPDPAPGAGGMVHHRH

SEQ ID NO: 39519 - protein, 16 aa, Homo Sapiens
PDPAPGAGGMVHHRHR

SEQ ID NO: 39520 - protein, 16 aa, Homo Sapiens
DPAPGAGGMVHHRHRS

SEQ ID NO: 39521 - protein, 16 aa, Homo Sapiens
PAPGAGGMVHHRHRSS

SEQ ID NO: 39522 - protein, 16 aa, Homo Sapiens
APGAGGMVHHRHRSSS

SEQ ID NO: 39523 - protein, 16 aa, Homo Sapiens
PGAGGMVHHRHRSSST

SEQ ID NO: 39524 - protein, 16 aa, Homo Sapiens
GAGGMVHHRHRSSSTR

SEQ ID NO: 39525 - protein, 16 aa, Homo Sapiens
AGGMVHHRHRSSSTRS

SEQ ID NO: 39526 - protein, 16 aa, Homo Sapiens
GGMVHHRHRSSSTRSG

SEQ ID NO: 39527 - protein, 16 aa, Homo Sapiens
GMVHHRHRSSSTRSGG

SEQ ID NO: 39528 - protein, 16 aa, Homo Sapiens
MVHHRHRSSSTRSGGG

SEQ ID NO: 39529 - protein, 16 aa, Homo Sapiens
VHHRHRSSSTRSGGGD

SEQ ID NO: 39530 - protein, 16 aa, Homo Sapiens
HHRHRSSSTRSGGGDL

SEQ ID NO: 39531 - protein, 16 aa, Homo Sapiens
HRHRSSSTRSGGGDLT

SEQ ID NO: 39532 - protein, 16 aa, Homo Sapiens
RHRSSSTRSGGGDLTL

SEQ ID NO: 39533 - protein, 16 aa, Homo Sapiens
HRSSSTRSGGGDLTLG

SEQ ID NO: 39534 - protein, 16 aa, Homo Sapiens
RSSSTRSGGGDLTLGL

SEQ ID NO: 39535 - protein, 16 aa, Homo Sapiens
SSSTRSGGGDLTLGLE

SEQ ID NO: 39536 - protein, 16 aa, Homo Sapiens
SSTRSGGGDLTLGLEP

SEQ ID NO: 39537 - protein, 16 aa, Homo Sapiens
STRSGGGDLTLGLEPS

SEQ ID NO: 39538 - protein, 16 aa, Homo Sapiens
TRSGGGDLTLGLEPSE

SEQ ID NO: 39539 - protein, 16 aa, Homo Sapiens
RSGGGDLTLGLEPSEE

SEQ ID NO: 39540 - protein, 16 aa, Homo Sapiens
SGGGDLTLGLEPSEEE

SEQ ID NO: 39541 - protein, 16 aa, Homo Sapiens
GGGDLTLGLEPSEEEA

SEQ ID NO: 39542 - protein, 16 aa, Homo Sapiens
GGDLTLGLEPSEEEAP

SEQ ID NO: 39543 - protein, 16 aa, Homo Sapiens
GDLTLGLEPSEEEAPR

SEQ ID NO: 39544 - protein, 16 aa, Homo Sapiens
DLTLGLEPSEEEAPRS

SEQ ID NO: 39545 - protein, 16 aa, Homo Sapiens
LTLGLEPSEEEAPRSP

SEQ ID NO: 39546 - protein, 16 aa, Homo Sapiens
TLGLEPSEEEAPRSPL

SEQ ID NO: 39547 - protein, 16 aa, Homo Sapiens
LGLEPSEEEAPRSPLA

SEQ ID NO: 39548 - protein, 16 aa, Homo Sapiens
GLEPSEEEAPRSPLAP

SEQ ID NO: 39549 - protein, 16 aa, Homo Sapiens
LEPSEEEAPRSPLAPS

SEQ ID NO: 39550 - protein, 16 aa, Homo Sapiens
EPSEEEAPRSPLAPSE

SEQ ID NO: 39551 - protein, 16 aa, Homo Sapiens
PSEEEAPRSPLAPSEG

SEQ ID NO: 39552 - protein, 16 aa, Homo Sapiens
SEEEAPRSPLAPSEGA

SEQ ID NO: 39553 - protein, 16 aa, Homo Sapiens
EEEAPRSPLAPSEGAG

SEQ ID NO: 39554 - protein, 16 aa, Homo Sapiens
EEAPRSPLAPSEGAGS

SEQ ID NO: 39555 - protein, 16 aa, Homo Sapiens
EAPRSPLAPSEGAGSD

SEQ ID NO: 39556 - protein, 16 aa, Homo Sapiens
APRSPLAPSEGAGSDV

SEQ ID NO: 39557 - protein, 16 aa, Homo Sapiens
PRSPLAPSEGAGSDVF

SEQ ID NO: 39558 - protein, 16 aa, Homo Sapiens
RSPLAPSEGAGSDVFD

SEQ ID NO: 39559 - protein, 16 aa, Homo Sapiens
SPLAPSEGAGSDVFDG

SEQ ID NO: 39560 - protein, 16 aa, Homo Sapiens
PLAPSEGAGSDVFDGD

SEQ ID NO: 39561 - protein, 16 aa, Homo Sapiens
LAPSEGAGSDVFDGDL

SEQ ID NO: 39562 - protein, 16 aa, Homo Sapiens
APSEGAGSDVFDGDLG

SEQ ID NO: 39563 - protein, 16 aa, Homo Sapiens
PSEGAGSDVFDGDLGM

SEQ ID NO: 39564 - protein, 16 aa, Homo Sapiens
SEGAGSDVFDGDLGMG

SEQ ID NO: 39565 - protein, 16 aa, Homo Sapiens
EGAGSDVFDGDLGMGA

SEQ ID NO: 39566 - protein, 16 aa, Homo Sapiens
GAGSDVFDGDLGMGAA

SEQ ID NO: 39567 - protein, 16 aa, Homo Sapiens
AGSDVFDGDLGMGAAK

SEQ ID NO: 39568 - protein, 16 aa, Homo Sapiens
GSDVFDGDLGMGAAKG

SEQ ID NO: 39569 - protein, 16 aa, Homo Sapiens
SDVFDGDLGMGAAKGL

SEQ ID NO: 39570 - protein, 16 aa, Homo Sapiens
DVFDGDLGMGAAKGLQ

SEQ ID NO: 39571 - protein, 16 aa, Homo Sapiens
VFDGDLGMGAAKGLQS

SEQ ID NO: 39572 - protein, 16 aa, Homo Sapiens
FDGDLGMGAAKGLQSL

SEQ ID NO: 39573 - protein, 16 aa, Homo Sapiens
DGDLGMGAAKGLQSLP

SEQ ID NO: 39574 - protein, 16 aa, Homo Sapiens
GDLGMGAAKGLQSLPT

SEQ ID NO: 39575 - protein, 16 aa, Homo Sapiens
DLGMGAAKGLQSLPTH

SEQ ID NO: 39576 - protein, 16 aa, Homo Sapiens
LGMGAAKGLQSLPTHD

SEQ ID NO: 39577 - protein, 16 aa, Homo Sapiens
GMGAAKGLQSLPTHDP

SEQ ID NO: 39578 - protein, 16 aa, Homo Sapiens
MGAAKGLQSLPTHDPS

SEQ ID NO: 39579 - protein, 16 aa, Homo Sapiens
GAAKGLQSLPTHDPSP

SEQ ID NO: 39580 - protein, 16 aa, Homo Sapiens
AAKGLQSLPTHDPSPL

SEQ ID NO: 39581 - protein, 16 aa, Homo Sapiens
AKGLQSLPTHDPSPLQ

SEQ ID NO: 39582 - protein, 16 aa, Homo Sapiens
KGLQSLPTHDPSPLQR

SEQ ID NO: 39583 - protein, 16 aa, Homo Sapiens
GLQSLPTHDPSPLQRY

SEQ ID NO: 39584 - protein, 16 aa, Homo Sapiens
LQSLPTHDPSPLQRYS

SEQ ID NO: 39585 - protein, 16 aa, Homo Sapiens
QSLPTHDPSPLQRYSE

SEQ ID NO: 39586 - protein, 16 aa, Homo Sapiens
SLPTHDPSPLQRYSED

SEQ ID NO: 39587 - protein, 16 aa, Homo Sapiens
LPTHDPSPLQRYSEDP

SEQ ID NO: 39588 - protein, 16 aa, Homo Sapiens
PTHDPSPLQRYSEDPT

SEQ ID NO: 39589 - protein, 16 aa, Homo Sapiens
THDPSPLQRYSEDPTV

SEQ ID NO: 39590 - protein, 16 aa, Homo Sapiens
HDPSPLQRYSEDPTVP

SEQ ID NO: 39591 - protein, 16 aa, Homo Sapiens
DPSPLQRYSEDPTVPL

SEQ ID NO: 39592 - protein, 16 aa, Homo Sapiens
PSPLQRYSEDPTVPLP

SEQ ID NO: 39593 - protein, 16 aa, Homo Sapiens
SPLQRYSEDPTVPLPS

SEQ ID NO: 39594 - protein, 16 aa, Homo Sapiens
PLQRYSEDPTVPLPSE

SEQ ID NO: 39595 - protein, 16 aa, Homo Sapiens
LQRYSEDPTVPLPSET

SEQ ID NO: 39596 - protein, 16 aa, Homo Sapiens
QRYSEDPTVPLPSETD

SEQ ID NO: 39597 - protein, 16 aa, Homo Sapiens
RYSEDPTVPLPSETDG

SEQ ID NO: 39598 - protein, 16 aa, Homo Sapiens
YSEDPTVPLPSETDGY

SEQ ID NO: 39599 - protein, 16 aa, Homo Sapiens
SEDPTVPLPSETDGYV

SEQ ID NO: 39600 - protein, 16 aa, Homo Sapiens
EDPTVPLPSETDGYVA

SEQ ID NO: 39601 - protein, 16 aa, Homo Sapiens
DPTVPLPSETDGYVAP

SEQ ID NO: 39602 - protein, 16 aa, Homo Sapiens
PTVPLPSETDGYVAPL

SEQ ID NO: 39603 - protein, 16 aa, Homo Sapiens
TVPLPSETDGYVAPLT

SEQ ID NO: 39604 - protein, 16 aa, Homo Sapiens
VPLPSETDGYVAPLTC

SEQ ID NO: 39605 - protein, 16 aa, Homo Sapiens
PLPSETDGYVAPLTCS

SEQ ID NO: 39606 - protein, 16 aa, Homo Sapiens
LPSETDGYVAPLTCSP

SEQ ID NO: 39607 - protein, 16 aa, Homo Sapiens
PSETDGYVAPLTCSPQ

SEQ ID NO: 39608 - protein, 16 aa, Homo Sapiens
SETDGYVAPLTCSPQP

SEQ ID NO: 39609 - protein, 16 aa, Homo Sapiens
ETDGYVAPLTCSPQPE

SEQ ID NO: 39610 - protein, 16 aa, Homo Sapiens
TDGYVAPLTCSPQPEY

SEQ ID NO: 39611 - protein, 16 aa, Homo Sapiens
DGYVAPLTCSPQPEYV

SEQ ID NO: 39612 - protein, 16 aa, Homo Sapiens
GYVAPLTCSPQPEYVN

SEQ ID NO: 39613 - protein, 16 aa, Homo Sapiens
YVAPLTCSPQPEYVNQ

SEQ ID NO: 39614 - protein, 16 aa, Homo Sapiens
VAPLTCSPQPEYVNQP

SEQ ID NO: 39615 - protein, 16 aa, Homo Sapiens
APLTCSPQPEYVNQPD

SEQ ID NO: 39616 - protein, 16 aa, Homo Sapiens
PLTCSPQPEYVNQPDV

SEQ ID NO: 39617 - protein, 16 aa, Homo Sapiens
LTCSPQPEYVNQPDVR

SEQ ID NO: 39618 - protein, 16 aa, Homo Sapiens
TCSPQPEYVNQPDVRP

SEQ ID NO: 39619 - protein, 16 aa, Homo Sapiens
CSPQPEYVNQPDVRPQ

SEQ ID NO: 39620 - protein, 16 aa, Homo Sapiens
SPQPEYVNQPDVRPQP

SEQ ID NO: 39621 - protein, 16 aa, Homo Sapiens
PQPEYVNQPDVRPQPP

SEQ ID NO: 39622 - protein, 16 aa, Homo Sapiens
QPEYVNQPDVRPQPPS

SEQ ID NO: 39623 - protein, 16 aa, Homo Sapiens
PEYVNQPDVRPQPPSP

SEQ ID NO: 39624 - protein, 16 aa, Homo Sapiens
EYVNQPDVRPQPPSPR

SEQ ID NO: 39625 - protein, 16 aa, Homo Sapiens
YVNQPDVRPQPPSPRE

SEQ ID NO: 39626 - protein, 16 aa, Homo Sapiens
VNQPDVRPQPPSPREG

SEQ ID NO: 39627 - protein, 16 aa, Homo Sapiens
NQPDVRPQPPSPREGP

SEQ ID NO: 39628 - protein, 16 aa, Homo Sapiens
QPDVRPQPPSPREGPL

SEQ ID NO: 39629 - protein, 16 aa, Homo Sapiens
PDVRPQPPSPREGPLP

SEQ ID NO: 39630 - protein, 16 aa, Homo Sapiens
DVRPQPPSPREGPLPA

SEQ ID NO: 39631 - protein, 16 aa, Homo Sapiens
VRPQPPSPREGPLPAA

SEQ ID NO: 39632 - protein, 16 aa, Homo Sapiens
RPQPPSPREGPLPAAR

SEQ ID NO: 39633 - protein, 16 aa, Homo Sapiens
PQPPSPREGPLPAARP

SEQ ID NO: 39634 - protein, 16 aa, Homo Sapiens
QPPSPREGPLPAARPA

SEQ ID NO: 39635 - protein, 16 aa, Homo Sapiens
PPSPREGPLPAARPAG

SEQ ID NO: 39636 - protein, 16 aa, Homo Sapiens
PSPREGPLPAARPAGA

SEQ ID NO: 39637 - protein, 16 aa, Homo Sapiens
SPREGPLPAARPAGAT

SEQ ID NO: 39638 - protein, 16 aa, Homo Sapiens
PREGPLPAARPAGATL

SEQ ID NO: 39639 - protein, 16 aa, Homo Sapiens
REGPLPAARPAGATLE

SEQ ID NO: 39640 - protein, 16 aa, Homo Sapiens
EGPLPAARPAGATLER

SEQ ID NO: 39641 - protein, 16 aa, Homo Sapiens
GPLPAARPAGATLERP

SEQ ID NO: 39642 - protein, 16 aa, Homo Sapiens
PLPAARPAGATLERPK

SEQ ID NO: 39643 - protein, 16 aa, Homo Sapiens
LPAARPAGATLERPKT

SEQ ID NO: 39644 - protein, 16 aa, Homo Sapiens
PAARPAGATLERPKTL

SEQ ID NO: 39645 - protein, 16 aa, Homo Sapiens
AARPAGATLERPKTLS

SEQ ID NO: 39646 - protein, 16 aa, Homo Sapiens
ARPAGATLERPKTLSP

SEQ ID NO: 39647 - protein, 16 aa, Homo Sapiens
RPAGATLERPKTLSPG

SEQ ID NO: 39648 - protein, 16 aa, Homo Sapiens
PAGATLERPKTLSPGK

SEQ ID NO: 39649 - protein, 16 aa, Homo Sapiens
AGATLERPKTLSPGKN

SEQ ID NO: 39650 - protein, 16 aa, Homo Sapiens
GATLERPKTLSPGKNG

SEQ ID NO: 39651 - protein, 16 aa, Homo Sapiens
ATLERPKTLSPGKNGV

SEQ ID NO: 39652 - protein, 16 aa, Homo Sapiens
TLERPKTLSPGKNGVV

SEQ ID NO: 39653 - protein, 16 aa, Homo Sapiens
LERPKTLSPGKNGVVK

SEQ ID NO: 39654 - protein, 16 aa, Homo Sapiens
ERPKTLSPGKNGVVKD

SEQ ID NO: 39655 - protein, 16 aa, Homo Sapiens
RPKTLSPGKNGVVKDV

SEQ ID NO: 39656 - protein, 16 aa, Homo Sapiens
PKTLSPGKNGVVKDVF

SEQ ID NO: 39657 - protein, 16 aa, Homo Sapiens
KTLSPGKNGVVKDVFA

SEQ ID NO: 39658 - protein, 16 aa, Homo Sapiens
TLSPGKNGVVKDVFAF

SEQ ID NO: 39659 - protein, 16 aa, Homo Sapiens
LSPGKNGVVKDVFAFG

SEQ ID NO: 39660 - protein, 16 aa, Homo Sapiens
SPGKNGVVKDVFAFGG

SEQ ID NO: 39661 - protein, 16 aa, Homo Sapiens
PGKNGVVKDVFAFGGA

SEQ ID NO: 39662 - protein, 16 aa, Homo Sapiens
GKNGVVKDVFAFGGAV

SEQ ID NO: 39663 - protein, 16 aa, Homo Sapiens
KNGVVKDVFAFGGAVE

SEQ ID NO: 39664 - protein, 16 aa, Homo Sapiens
NGVVKDVFAFGGAVEN

SEQ ID NO: 39665 - protein, 16 aa, Homo Sapiens
GVVKDVFAFGGAVENP

SEQ ID NO: 39666 - protein, 16 aa, Homo Sapiens
VVKDVFAFGGAVENPE

SEQ ID NO: 39667 - protein, 16 aa, Homo Sapiens
VKDVFAFGGAVENPEY

SEQ ID NO: 39668 - protein, 16 aa, Homo Sapiens
KDVFAFGGAVENPEYL

SEQ ID NO: 39669 - protein, 16 aa, Homo Sapiens
DVFAFGGAVENPEYLT

SEQ ID NO: 39670 - protein, 16 aa, Homo Sapiens
VFAFGGAVENPEYLTP

SEQ ID NO: 39671 - protein, 16 aa, Homo Sapiens
FAFGGAVENPEYLTPQ

SEQ ID NO: 39672 - protein, 16 aa, Homo Sapiens
AFGGAVENPEYLTPQG

SEQ ID NO: 39673 - protein, 16 aa, Homo Sapiens
FGGAVENPEYLTPQGG

SEQ ID NO: 39674 - protein, 16 aa, Homo Sapiens
GGAVENPEYLTPQGGA

SEQ ID NO: 39675 - protein, 16 aa, Homo Sapiens
GAVENPEYLTPQGGAA

SEQ ID NO: 39676 - protein, 16 aa, Homo Sapiens
AVENPEYLTPQGGAAP

SEQ ID NO: 39677 - protein, 16 aa, Homo Sapiens
VENPEYLTPQGGAAPQ

SEQ ID NO: 39678 - protein, 16 aa, Homo Sapiens
ENPEYLTPQGGAAPQP

SEQ ID NO: 39679 - protein, 16 aa, Homo Sapiens
NPEYLTPQGGAAPQPH

SEQ ID NO: 39680 - protein, 16 aa, Homo Sapiens
PEYLTPQGGAAPQPHP

SEQ ID NO: 39681 - protein, 16 aa, Homo Sapiens
EYLTPQGGAAPQPHPP

SEQ ID NO: 39682 - protein, 16 aa, Homo Sapiens
YLTPQGGAAPQPHPPP

SEQ ID NO: 39683 - protein, 16 aa, Homo Sapiens
LTPQGGAAPQPHPPPA

SEQ ID NO: 39684 - protein, 16 aa, Homo Sapiens
TPQGGAAPQPHPPPAF

SEQ ID NO: 39685 - protein, 16 aa, Homo Sapiens
PQGGAAPQPHPPPAFS

SEQ ID NO: 39686 - protein, 16 aa, Homo Sapiens
QGGAAPQPHPPPAFSP

SEQ ID NO: 39687 - protein, 16 aa, Homo Sapiens
GGAAPQPHPPPAFSPA

SEQ ID NO: 39688 - protein, 16 aa, Homo Sapiens
GAAPQPHPPPAFSPAF

SEQ ID NO: 39689 - protein, 16 aa, Homo Sapiens
AAPQPHPPPAFSPAFD

SEQ ID NO: 39690 - protein, 16 aa, Homo Sapiens
APQPHPPPAFSPAFDN

SEQ ID NO: 39691 - protein, 16 aa, Homo Sapiens
PQPHPPPAFSPAFDNL

SEQ ID NO: 39692 - protein, 16 aa, Homo Sapiens
QPHPPPAFSPAFDNLY

SEQ ID NO: 39693 - protein, 16 aa, Homo Sapiens
PHPPPAFSPAFDNLYY

SEQ ID NO: 39694 - protein, 16 aa, Homo Sapiens
HPPPAFSPAFDNLYYW

SEQ ID NO: 39695 - protein, 16 aa, Homo Sapiens
PPPAFSPAFDNLYYWD

SEQ ID NO: 39696 - protein, 16 aa, Homo Sapiens
PPAFSPAFDNLYYWDQ

SEQ ID NO: 39697 - protein, 16 aa, Homo Sapiens
PAFSPAFDNLYYWDQD

SEQ ID NO: 39698 - protein, 16 aa, Homo Sapiens
AFSPAFDNLYYWDQDP

SEQ ID NO: 39699 - protein, 16 aa, Homo Sapiens
FSPAFDNLYYWDQDPP

SEQ ID NO: 39700 - protein, 16 aa, Homo Sapiens
SPAFDNLYYWDQDPPE

SEQ ID NO: 39701 - protein, 16 aa, Homo Sapiens
PAFDNLYYWDQDPPER

SEQ ID NO: 39702 - protein, 16 aa, Homo Sapiens
AFDNLYYWDQDPPERG

SEQ ID NO: 39703 - protein, 16 aa, Homo Sapiens
FDNLYYWDQDPPERGA

SEQ ID NO: 39704 - protein, 16 aa, Homo Sapiens
DNLYYWDQDPPERGAP

SEQ ID NO: 39705 - protein, 16 aa, Homo Sapiens
NLYYWDQDPPERGAPP

SEQ ID NO: 39706 - protein, 16 aa, Homo Sapiens
LYYWDQDPPERGAPPS

SEQ ID NO: 39707 - protein, 16 aa, Homo Sapiens
YYWDQDPPERGAPPST

SEQ ID NO: 39708 - protein, 16 aa, Homo Sapiens
YWDQDPPERGAPPSTF

SEQ ID NO: 39709 - protein, 16 aa, Homo Sapiens
WDQDPPERGAPPSTFK

SEQ ID NO: 39710 - protein, 16 aa, Homo Sapiens
DQDPPERGAPPSTFKG

SEQ ID NO: 39711 - protein, 16 aa, Homo Sapiens
QDPPERGAPPSTFKGT

SEQ ID NO: 39712 - protein, 16 aa, Homo Sapiens
DPPERGAPPSTFKGTP

SEQ ID NO: 39713 - protein, 16 aa, Homo Sapiens
PPERGAPPSTFKGTPT

SEQ ID NO: 39714 - protein, 16 aa, Homo Sapiens
PERGAPPSTFKGTPTA

SEQ ID NO: 39715 - protein, 16 aa, Homo Sapiens
ERGAPPSTFKGTPTAE

SEQ ID NO: 39716 - protein, 16 aa, Homo Sapiens
RGAPPSTFKGTPTAEN

SEQ ID NO: 39717 - protein, 16 aa, Homo Sapiens
GAPPSTFKGTPTAENP

SEQ ID NO: 39718 - protein, 16 aa, Homo Sapiens
APPSTFKGTPTAENPE

SEQ ID NO: 39719 - protein, 16 aa, Homo Sapiens
PPSTFKGTPTAENPEY

SEQ ID NO: 39720 - protein, 16 aa, Homo Sapiens
PSTFKGTPTAENPEYL

SEQ ID NO: 39721 - protein, 16 aa, Homo Sapiens
STFKGTPTAENPEYLG

SEQ ID NO: 39722 - protein, 16 aa, Homo Sapiens
TFKGTPTAENPEYLGL

SEQ ID NO: 39723 - protein, 16 aa, Homo Sapiens
FKGTPTAENPEYLGLD

SEQ ID NO: 39724 - protein, 16 aa, Homo Sapiens
KGTPTAENPEYLGLDV

SEQ ID NO: 39725 - protein, 16 aa, Homo Sapiens
GTPTAENPEYLGLDVP

SEQ ID NO: 39726 - protein, 16 aa, Homo Sapiens
TPTAENPEYLGLDVPV

SEQ ID NO: 39727 - protein, 1132 aa, Homo Sapiens
MPRAPRCRAVRSLLRSHYREVLPLATFVRRLGPQGWRLVQRGDPAAFRALVAQCLVCVPWDARPPPAAPSFRQVSCLKELVARVLQRLCERGAKNVLAFGFALLDGARGGPPEAFTTSVRSYLPNTVTDALRGSGAWGLLLRRVGDDVLVHLLARCALFVLVAPSCAYQVCGPPLYQLGAATQARPPPHASGPRRRLGCERAWNHSVREAGVPLGLPAPGARRRGGSASRSLPLPKRPRRGAAPEPERTPVGQGSWAHPGRTRGPSDRGFCVVSPARPAEEATSLEGALSGTRHSHPSVGRQHHAGPPSTSRPPRPWDTPCPPVYAETKHFLYSSGDKEQLRPSFLLSSLRPSLTGARRLVETIFLGSRPWMPGTPRRLPRLPQRYWQMRPLFLELLGNHAQCPYGVLLKTHCPLRAAVTPAAGVCAREKPQGSVAAPEEEDTDPRRLVQLLRQHSSPWQVYGFVRACLRRLVPPGLWGSRHNERRFLRNTKKFISLGKHAKLSLQELTWKMSVRDCAWLRRSPGVGCVPAAEHRLREEILAKFLHWLMSVYVVELLRSFFYVTETTFQKNRLFFYRKSVWSKLQSIGIRQHLKRVQLRELSEAEVRQHREARPALLTSRLRFIPKPDGLRPIVNMDYVVGARTFRREKRAERLTSRVKALFSVLNYERARRPGLLGASVLGLDDIHRAWRTFVLRVRAQDPPPELYFVKVDVTGAYDTIPQDRLTEVIASIIKPQNTYCVRRYAVVQKAAHGHVRKAFKSHVSTLTDLQPYMRQFVAHLQETSPLRDAVVIEQSSSLNEASSGLFDVFLRFMCHHAVRIRGKSYVQCQGIPQGSILSTLLCSLCYGDMENKLFAGIRRDGLLLRLVDDFLLVTPHLTHAKTFLRTLVRGVPEYGCVVNLRKTVVNFPVEDEALGGTAFVQMPAHGLFPWCGLLLDTRTLEVQSDYSSYARTSIRASLTFNRGFKAGRNMRRKLFGVLRLKCHSLFLDLQVNSLQTVCTNIYKILLLQAYRFHACVLQLPFHQQVWKNPTFFLRVISDTASLCYSILKAKNAGMSLGAKGAAGPLPSEAVQWLCHQAFLLKLTRHRVTYVPLLGSLRTAQTQLSRKLPGTTLTALEAAANPALPSDFKTILD

SEQ ID NO: 39728 - protein, 8 aa, Homo Sapiens
MPRAPRCR

SEQ ID NO: 39729 - protein, 8 aa, Homo Sapiens
APRCRAVR

SEQ ID NO: 39730 - protein, 8 aa, Homo Sapiens
RCRAVRSL

SEQ ID NO: 39731 - protein, 8 aa, Homo Sapiens
RAVRSLLR

SEQ ID NO: 39732 - protein, 8 aa, Homo Sapiens
RSLLRSHY

SEQ ID NO: 39733 - protein, 8 aa, Homo Sapiens
SLLRSHYR

SEQ ID NO: 39734 - protein, 8 aa, Homo Sapiens
HYREVLPL

SEQ ID NO: 39735 - protein, 8 aa, Homo Sapiens
EVLPLATF

SEQ ID NO: 39736 - protein, 8 aa, Homo Sapiens
VLPLATFV

SEQ ID NO: 39737 - protein, 8 aa, Homo Sapiens
LPLATFVR

SEQ ID NO: 39738 - protein, 8 aa, Homo Sapiens
RRLGPQGW

SEQ ID NO: 39739 - protein, 8 aa, Homo Sapiens
RLGPQGWR

SEQ ID NO: 39740 - protein, 8 aa, Homo Sapiens
QGWRLVQR

SEQ ID NO: 39741 - protein, 8 aa, Homo Sapiens
RGDPAAFR

SEQ ID NO: 39742 - protein, 8 aa, Homo Sapiens
DPAAFRAL

SEQ ID NO: 39743 - protein, 8 aa, Homo Sapiens
ALVAQCLV

SEQ ID NO: 39744 - protein, 8 aa, Homo Sapiens
VPWDARPP

SEQ ID NO: 39745 - protein, 8 aa, Homo Sapiens
AAPSFRQV

SEQ ID NO: 39746 - protein, 8 aa, Homo Sapiens
APSFRQVS

SEQ ID NO: 39747 - protein, 8 aa, Homo Sapiens
QVSCLKEL

SEQ ID NO: 39748 - protein, 8 aa, Homo Sapiens
CLKELVAR

SEQ ID NO: 39749 - protein, 8 aa, Homo Sapiens
KELVARVL

SEQ ID NO: 39750 - protein, 8 aa, Homo Sapiens
LVARVLQR

SEQ ID NO: 39751 - protein, 8 aa, Homo Sapiens
VLQRLCER

SEQ ID NO: 39752 - protein, 8 aa, Homo Sapiens
RLCERGAK

SEQ ID NO: 39753 - protein, 8 aa, Homo Sapiens
NVLAFGFA

SEQ ID NO: 39754 - protein, 8 aa, Homo Sapiens
VLAFGFAL

SEQ ID NO: 39755 - protein, 8 aa, Homo Sapiens
LAFGFALL

SEQ ID NO: 39756 - protein, 8 aa, Homo Sapiens
FALLDGAR

SEQ ID NO: 39757 - protein, 8 aa, Homo Sapiens
ALLDGARG

SEQ ID NO: 39758 - protein, 8 aa, Homo Sapiens
EAFTTSVR

SEQ ID NO: 39759 - protein, 8 aa, Homo Sapiens
FTTSVRSY

SEQ ID NO: 39760 - protein, 8 aa, Homo Sapiens
TTSVRSYL

SEQ ID NO: 39761 - protein, 8 aa, Homo Sapiens
SVRSYLPN

SEQ ID NO: 39762 - protein, 8 aa, Homo Sapiens
SYLPNTVT

SEQ ID NO: 39763 - protein, 8 aa, Homo Sapiens
YLPNTVTD

SEQ ID NO: 39764 - protein, 8 aa, Homo Sapiens
LPNTVTDA

SEQ ID NO: 39765 - protein, 8 aa, Homo Sapiens
NTVTDALR

SEQ ID NO: 39766 - protein, 8 aa, Homo Sapiens
ALRGSGAW

SEQ ID NO: 39767 - protein, 8 aa, Homo Sapiens
SGAWGLLL

SEQ ID NO: 39768 - protein, 8 aa, Homo Sapiens
GAWGLLLR

SEQ ID NO: 39769 - protein, 8 aa, Homo Sapiens
RRVGDDVL

SEQ ID NO: 39770 - protein, 8 aa, Homo Sapiens
RVGDDVLV

SEQ ID NO: 39771 - protein, 8 aa, Homo Sapiens
DVLVHLLA

SEQ ID NO: 39772 - protein, 8 aa, Homo Sapiens
VLVHLLAR

SEQ ID NO: 39773 - protein, 8 aa, Homo Sapiens
HLLARCAL

SEQ ID NO: 39774 - protein, 8 aa, Homo Sapiens
LLARCALF

SEQ ID NO: 39775 - protein, 8 aa, Homo Sapiens
LARCALFV

SEQ ID NO: 39776 - protein, 8 aa, Homo Sapiens
RCALFVLV

SEQ ID NO: 39777 - protein, 8 aa, Homo Sapiens
FVLVAPSC

SEQ ID NO: 39778 - protein, 8 aa, Homo Sapiens
VLVAPSCA

SEQ ID NO: 39779 - protein, 8 aa, Homo Sapiens
LVAPSCAY

SEQ ID NO: 39780 - protein, 8 aa, Homo Sapiens
YQVCGPPL

SEQ ID NO: 39781 - protein, 8 aa, Homo Sapiens
QVCGPPLY

SEQ ID NO: 39782 - protein, 8 aa, Homo Sapiens
PLYQLGAA

SEQ ID NO: 39783 - protein, 8 aa, Homo Sapiens
YQLGAATQ

SEQ ID NO: 39784 - protein, 8 aa, Homo Sapiens
QLGAATQA

SEQ ID NO: 39785 - protein, 8 aa, Homo Sapiens
TQARPPPH

SEQ ID NO: 39786 - protein, 8 aa, Homo Sapiens
HASGPRRR

SEQ ID NO: 39787 - protein, 8 aa, Homo Sapiens
GPRRRLGC

SEQ ID NO: 39788 - protein, 8 aa, Homo Sapiens
ERAWNHSV

SEQ ID NO: 39789 - protein, 8 aa, Homo Sapiens
RAWNHSVR

SEQ ID NO: 39790 - protein, 8 aa, Homo Sapiens
HSVREAGV

SEQ ID NO: 39791 - protein, 8 aa, Homo Sapiens
EAGVPLGL

SEQ ID NO: 39792 - protein, 8 aa, Homo Sapiens
VPLGLPAP

SEQ ID NO: 39793 - protein, 8 aa, Homo Sapiens
RRRGGSAS

SEQ ID NO: 39794 - protein, 8 aa, Homo Sapiens
RRGGSASR

SEQ ID NO: 39795 - protein, 8 aa, Homo Sapiens
SASRSLPL

SEQ ID NO: 39796 - protein, 8 aa, Homo Sapiens
RSLPLPKR

SEQ ID NO: 39797 - protein, 8 aa, Homo Sapiens
RPRRGAAP

SEQ ID NO: 39798 - protein, 8 aa, Homo Sapiens
GAAPEPER

SEQ ID NO: 39799 - protein, 8 aa, Homo Sapiens
TPVGQGSW

SEQ ID NO: 39800 - protein, 8 aa, Homo Sapiens
GSWAHPGR

SEQ ID NO: 39801 - protein, 8 aa, Homo Sapiens
WAHPGRTR

SEQ ID NO: 39802 - protein, 8 aa, Homo Sapiens
RTRGPSDR

SEQ ID NO: 39803 - protein, 8 aa, Homo Sapiens
EGALSGTR

SEQ ID NO: 39804 - protein, 8 aa, Homo Sapiens
GTRHSHPS

SEQ ID NO: 39805 - protein, 8 aa, Homo Sapiens
HSHPSVGR

SEQ ID NO: 39806 - protein, 8 aa, Homo Sapiens
SVGRQHHA

SEQ ID NO: 39807 - protein, 8 aa, Homo Sapiens
PSTSRPPR

SEQ ID NO: 39808 - protein, 8 aa, Homo Sapiens
TSRPPRPW

SEQ ID NO: 39809 - protein, 8 aa, Homo Sapiens
DTPCPPVY

SEQ ID NO: 39810 - protein, 8 aa, Homo Sapiens
TPCPPVYA

SEQ ID NO: 39811 - protein, 8 aa, Homo Sapiens
CPPVYAET

SEQ ID NO: 39812 - protein, 8 aa, Homo Sapiens
VYAETKHF

SEQ ID NO: 39813 - protein, 8 aa, Homo Sapiens
AETKHFLY

SEQ ID NO: 39814 - protein, 8 aa, Homo Sapiens
FLYSSGDK

SEQ ID NO: 39815 - protein, 8 aa, Homo Sapiens
KEQLRPSF

SEQ ID NO: 39816 - protein, 8 aa, Homo Sapiens
QLRPSFLL

SEQ ID NO: 39817 - protein, 8 aa, Homo Sapiens
RPSFLLSS

SEQ ID NO: 39818 - protein, 8 aa, Homo Sapiens
SFLLSSLR

SEQ ID NO: 39819 - protein, 8 aa, Homo Sapiens
RPSLTGAR

SEQ ID NO: 39820 - protein, 8 aa, Homo Sapiens
SLTGARRL

SEQ ID NO: 39821 - protein, 8 aa, Homo Sapiens
RRLVETIF

SEQ ID NO: 39822 - protein, 8 aa, Homo Sapiens
RLVETIFL

SEQ ID NO: 39823 - protein, 8 aa, Homo Sapiens
ETIFLGSR

SEQ ID NO: 39824 - protein, 8 aa, Homo Sapiens
FLGSRPWM

SEQ ID NO: 39825 - protein, 8 aa, Homo Sapiens
MPGTPRRL

SEQ ID NO: 39826 - protein, 8 aa, Homo Sapiens
GTPRRLPR

SEQ ID NO: 39827 - protein, 8 aa, Homo Sapiens
TPRRLPRL

SEQ ID NO: 39828 - protein, 8 aa, Homo Sapiens
RRLPRLPQ

SEQ ID NO: 39829 - protein, 8 aa, Homo Sapiens
RLPRLPQR

SEQ ID NO: 39830 - protein, 8 aa, Homo Sapiens
LPRLPQRY

SEQ ID NO: 39831 - protein, 8 aa, Homo Sapiens
RLPQRYWQ

SEQ ID NO: 39832 - protein, 8 aa, Homo Sapiens
LPQRYWQM

SEQ ID NO: 39833 - protein, 8 aa, Homo Sapiens
PQRYWQMR

SEQ ID NO: 39834 - protein, 8 aa, Homo Sapiens
RYWQMRPL

SEQ ID NO: 39835 - protein, 8 aa, Homo Sapiens
YWQMRPLF

SEQ ID NO: 39836 - protein, 8 aa, Homo Sapiens
WQMRPLFL

SEQ ID NO: 39837 - protein, 8 aa, Homo Sapiens
RPLFLELL

SEQ ID NO: 39838 - protein, 8 aa, Homo Sapiens
ELLGNHAQ

SEQ ID NO: 39839 - protein, 8 aa, Homo Sapiens
LLGNHAQC

SEQ ID NO: 39840 - protein, 8 aa, Homo Sapiens
HAQCPYGV

SEQ ID NO: 39841 - protein, 8 aa, Homo Sapiens
AQCPYGVL

SEQ ID NO: 39842 - protein, 8 aa, Homo Sapiens
CPYGVLLK

SEQ ID NO: 39843 - protein, 8 aa, Homo Sapiens
LLKTHCPL

SEQ ID NO: 39844 - protein, 8 aa, Homo Sapiens
KTHCPLRA

SEQ ID NO: 39845 - protein, 8 aa, Homo Sapiens
HCPLRAAV

SEQ ID NO: 39846 - protein, 8 aa, Homo Sapiens
CPLRAAVT

SEQ ID NO: 39847 - protein, 8 aa, Homo Sapiens
AVTPAAGV

SEQ ID NO: 39848 - protein, 8 aa, Homo Sapiens
TPAAGVCA

SEQ ID NO: 39849 - protein, 8 aa, Homo Sapiens
PAAGVCAR

SEQ ID NO: 39850 - protein, 8 aa, Homo Sapiens
AGVCAREK

SEQ ID NO: 39851 - protein, 8 aa, Homo Sapiens
KPQGSVAA

SEQ ID NO: 39852 - protein, 8 aa, Homo Sapiens
DTDPRRLV

SEQ ID NO: 39853 - protein, 8 aa, Homo Sapiens
RRLVQLLR

SEQ ID NO: 39854 - protein, 8 aa, Homo Sapiens
RLVQLLRQ

SEQ ID NO: 39855 - protein, 8 aa, Homo Sapiens
HSSPWQVY

SEQ ID NO: 39856 - protein, 8 aa, Homo Sapiens
SPWQVYGF

SEQ ID NO: 39857 - protein, 8 aa, Homo Sapiens
WQVYGFVR

SEQ ID NO: 39858 - protein, 8 aa, Homo Sapiens
QVYGFVRA

SEQ ID NO: 39859 - protein, 8 aa, Homo Sapiens
GFVRACLR

SEQ ID NO: 39860 - protein, 8 aa, Homo Sapiens
FVRACLRR

SEQ ID NO: 39861 - protein, 8 aa, Homo Sapiens
RRLVPPGL

SEQ ID NO: 39862 - protein, 8 aa, Homo Sapiens
RLVPPGLW

SEQ ID NO: 39863 - protein, 8 aa, Homo Sapiens
GSRHNERR

SEQ ID NO: 39864 - protein, 8 aa, Homo Sapiens
HNERRFLR

SEQ ID NO: 39865 - protein, 8 aa, Homo Sapiens
RRFLRNTK

SEQ ID NO: 39866 - protein, 8 aa, Homo Sapiens
RFLRNTKK

SEQ ID NO: 39867 - protein, 8 aa, Homo Sapiens
FLRNTKKF

SEQ ID NO: 39868 - protein, 8 aa, Homo Sapiens
NTKKFISL

SEQ ID NO: 39869 - protein, 8 aa, Homo Sapiens
KKFISLGK

SEQ ID NO: 39870 - protein, 8 aa, Homo Sapiens
FISLGKHA

SEQ ID NO: 39871 - protein, 8 aa, Homo Sapiens
ISLGKHAK

SEQ ID NO: 39872 - protein, 8 aa, Homo Sapiens
SLGKHAKL

SEQ ID NO: 39873 - protein, 8 aa, Homo Sapiens
KLSLQELT

SEQ ID NO: 39874 - protein, 8 aa, Homo Sapiens
LSLQELTW

SEQ ID NO: 39875 - protein, 8 aa, Homo Sapiens
SLQELTWK

SEQ ID NO: 39876 - protein, 8 aa, Homo Sapiens
ELTWKMSV

SEQ ID NO: 39877 - protein, 8 aa, Homo Sapiens
LTWKMSVR

SEQ ID NO: 39878 - protein, 8 aa, Homo Sapiens
KMSVRDCA

SEQ ID NO: 39879 - protein, 8 aa, Homo Sapiens
MSVRDCAW

SEQ ID NO: 39880 - protein, 8 aa, Homo Sapiens
SVRDCAWL

SEQ ID NO: 39881 - protein, 8 aa, Homo Sapiens
WLRRSPGV

SEQ ID NO: 39882 - protein, 8 aa, Homo Sapiens
CVPAAEHR

SEQ ID NO: 39883 - protein, 8 aa, Homo Sapiens
VPAAEHRL

SEQ ID NO: 39884 - protein, 8 aa, Homo Sapiens
HRLREEIL

SEQ ID NO: 39885 - protein, 8 aa, Homo Sapiens
RLREEILA

SEQ ID NO: 39886 - protein, 8 aa, Homo Sapiens
EEILAKFL

SEQ ID NO: 39887 - protein, 8 aa, Homo Sapiens
ILAKFLHW

SEQ ID NO: 39888 - protein, 8 aa, Homo Sapiens
LAKFLHWL

SEQ ID NO: 39889 - protein, 8 aa, Homo Sapiens
FLHWLMSV

SEQ ID NO: 39890 - protein, 8 aa, Homo Sapiens
LHWLMSVY

SEQ ID NO: 39891 - protein, 8 aa, Homo Sapiens
WLMSVYVV

SEQ ID NO: 39892 - protein, 8 aa, Homo Sapiens
MSVYVVEL

SEQ ID NO: 39893 - protein, 8 aa, Homo Sapiens
SVYVVELL

SEQ ID NO: 39894 - protein, 8 aa, Homo Sapiens
VYVVELLR

SEQ ID NO: 39895 - protein, 8 aa, Homo Sapiens
VELLRSFF

SEQ ID NO: 39896 - protein, 8 aa, Homo Sapiens
ELLRSFFY

SEQ ID NO: 39897 - protein, 8 aa, Homo Sapiens
LLRSFFYV

SEQ ID NO: 39898 - protein, 8 aa, Homo Sapiens
FYVTETTF

SEQ ID NO: 39899 - protein, 8 aa, Homo Sapiens
YVTETTFQ

SEQ ID NO: 39900 - protein, 8 aa, Homo Sapiens
VTETTFQK

SEQ ID NO: 39901 - protein, 8 aa, Homo Sapiens
ETTFQKNR

SEQ ID NO: 39902 - protein, 8 aa, Homo Sapiens
TTFQKNRL

SEQ ID NO: 39903 - protein, 8 aa, Homo Sapiens
TFQKNRLF

SEQ ID NO: 39904 - protein, 8 aa, Homo Sapiens
FQKNRLFF

SEQ ID NO: 39905 - protein, 8 aa, Homo Sapiens
QKNRLFFY

SEQ ID NO: 39906 - protein, 8 aa, Homo Sapiens
KNRLFFYR

SEQ ID NO: 39907 - protein, 8 aa, Homo Sapiens
NRLFFYRK

SEQ ID NO: 39908 - protein, 8 aa, Homo Sapiens
FFYRKSVW

SEQ ID NO: 39909 - protein, 8 aa, Homo Sapiens
YRKSVWSK

SEQ ID NO: 39910 - protein, 8 aa, Homo Sapiens
VWSKLQSI

SEQ ID NO: 39911 - protein, 8 aa, Homo Sapiens
KLQSIGIR

SEQ ID NO: 39912 - protein, 8 aa, Homo Sapiens
SIGIRQHL

SEQ ID NO: 39913 - protein, 8 aa, Homo Sapiens
IGIRQHLK

SEQ ID NO: 39914 - protein, 8 aa, Homo Sapiens
GIRQHLKR

SEQ ID NO: 39915 - protein, 8 aa, Homo Sapiens
QHLKRVQL

SEQ ID NO: 39916 - protein, 8 aa, Homo Sapiens
HLKRVQLR

SEQ ID NO: 39917 - protein, 8 aa, Homo Sapiens
KRVQLREL

SEQ ID NO: 39918 - protein, 8 aa, Homo Sapiens
QLRELSEA

SEQ ID NO: 39919 - protein, 8 aa, Homo Sapiens
RELSEAEV

SEQ ID NO: 39920 - protein, 8 aa, Homo Sapiens
ELSEAEVR

SEQ ID NO: 39921 - protein, 8 aa, Homo Sapiens
EAEVRQHR

SEQ ID NO: 39922 - protein, 8 aa, Homo Sapiens
HREARPAL

SEQ ID NO: 39923 - protein, 8 aa, Homo Sapiens
REARPALL

SEQ ID NO: 39924 - protein, 8 aa, Homo Sapiens
RPALLTSR

SEQ ID NO: 39925 - protein, 8 aa, Homo Sapiens
ALLTSRLR

SEQ ID NO: 39926 - protein, 8 aa, Homo Sapiens
LTSRLRFI

SEQ ID NO: 39927 - protein, 8 aa, Homo Sapiens
SRLRFIPK

SEQ ID NO: 39928 - protein, 8 aa, Homo Sapiens
FIPKPDGL

SEQ ID NO: 39929 - protein, 8 aa, Homo Sapiens
KPDGLRPI

SEQ ID NO: 39930 - protein, 8 aa, Homo Sapiens
GLRPIVNM

SEQ ID NO: 39931 - protein, 8 aa, Homo Sapiens
RPIVNMDY

SEQ ID NO: 39932 - protein, 8 aa, Homo Sapiens
PIVNMDYV

SEQ ID NO: 39933 - protein, 8 aa, Homo Sapiens
IVNMDYVV

SEQ ID NO: 39934 - protein, 8 aa, Homo Sapiens
NMDYVVGA

SEQ ID NO: 39935 - protein, 8 aa, Homo Sapiens
MDYVVGAR

SEQ ID NO: 39936 - protein, 8 aa, Homo Sapiens
YVVGARTF

SEQ ID NO: 39937 - protein, 8 aa, Homo Sapiens
VVGARTFR

SEQ ID NO: 39938 - protein, 8 aa, Homo Sapiens
RTFRREKR

SEQ ID NO: 39939 - protein, 8 aa, Homo Sapiens
RREKRAER

SEQ ID NO: 39940 - protein, 8 aa, Homo Sapiens
REKRAERL

SEQ ID NO: 39941 - protein, 8 aa, Homo Sapiens
RAERLTSR

SEQ ID NO: 39942 - protein, 8 aa, Homo Sapiens
AERLTSRV

SEQ ID NO: 39943 - protein, 8 aa, Homo Sapiens
RLTSRVKA

SEQ ID NO: 39944 - protein, 8 aa, Homo Sapiens
RVKALFSV

SEQ ID NO: 39945 - protein, 8 aa, Homo Sapiens
ALFSVLNY

SEQ ID NO: 39946 - protein, 8 aa, Homo Sapiens
FSVLNYER

SEQ ID NO: 39947 - protein, 8 aa, Homo Sapiens
SVLNYERA

SEQ ID NO: 39948 - protein, 8 aa, Homo Sapiens
VLNYERAR

SEQ ID NO: 39949 - protein, 8 aa, Homo Sapiens
LNYERARR

SEQ ID NO: 39950 - protein, 8 aa, Homo Sapiens
RARRPGLL

SEQ ID NO: 39951 - protein, 8 aa, Homo Sapiens
RPGLLGAS

SEQ ID NO: 39952 - protein, 8 aa, Homo Sapiens
GLLGASVL

SEQ ID NO: 39953 - protein, 8 aa, Homo Sapiens
LGASVLGL

SEQ ID NO: 39954 - protein, 8 aa, Homo Sapiens
GLDDIHRA

SEQ ID NO: 39955 - protein, 8 aa, Homo Sapiens
DDIHRAWR

SEQ ID NO: 39956 - protein, 8 aa, Homo Sapiens
HRAWRTFV

SEQ ID NO: 39957 - protein, 8 aa, Homo Sapiens
RAWRTFVL

SEQ ID NO: 39958 - protein, 8 aa, Homo Sapiens
AWRTFVLR

SEQ ID NO: 39959 - protein, 8 aa, Homo Sapiens
RTFVLRVR

SEQ ID NO: 39960 - protein, 8 aa, Homo Sapiens
RVRAQDPP

SEQ ID NO: 39961 - protein, 8 aa, Homo Sapiens
AQDPPPEL

SEQ ID NO: 39962 - protein, 8 aa, Homo Sapiens
DPPPELYF

SEQ ID NO: 39963 - protein, 8 aa, Homo Sapiens
PPPELYFV

SEQ ID NO: 39964 - protein, 8 aa, Homo Sapiens
KVDVTGAY

SEQ ID NO: 39965 - protein, 8 aa, Homo Sapiens
DTIPQDRL

SEQ ID NO: 39966 - protein, 8 aa, Homo Sapiens
PQDRLTEV

SEQ ID NO: 39967 - protein, 8 aa, Homo Sapiens
RLTEVIAS

SEQ ID NO: 39968 - protein, 8 aa, Homo Sapiens
LTEVIASI

SEQ ID NO: 39969 - protein, 8 aa, Homo Sapiens
EVIASIIK

SEQ ID NO: 39970 - protein, 8 aa, Homo Sapiens
IIKPQNTY

SEQ ID NO: 39971 - protein, 8 aa, Homo Sapiens
KPQNTYCV

SEQ ID NO: 39972 - protein, 8 aa, Homo Sapiens
PQNTYCVR

SEQ ID NO: 39973 - protein, 8 aa, Homo Sapiens
QNTYCVRR

SEQ ID NO: 39974 - protein, 8 aa, Homo Sapiens
NTYCVRRY

SEQ ID NO: 39975 - protein, 8 aa, Homo Sapiens
YCVRRYAV

SEQ ID NO: 39976 - protein, 8 aa, Homo Sapiens
CVRRYAVV

SEQ ID NO: 39977 - protein, 8 aa, Homo Sapiens
RRYAVVQK

SEQ ID NO: 39978 - protein, 8 aa, Homo Sapiens
YAVVQKAA

SEQ ID NO: 39979 - protein, 8 aa, Homo Sapiens
VQKAAHGH

SEQ ID NO: 39980 - protein, 8 aa, Homo Sapiens
KAAHGHVR

SEQ ID NO: 39981 - protein, 8 aa, Homo Sapiens
AAHGHVRK

SEQ ID NO: 39982 - protein, 8 aa, Homo Sapiens
HGHVRKAF

SEQ ID NO: 39983 - protein, 8 aa, Homo Sapiens
FKSHVSTL

SEQ ID NO: 39984 - protein, 8 aa, Homo Sapiens
KSHVSTLT

SEQ ID NO: 39985 - protein, 8 aa, Homo Sapiens
HVSTLTDL

SEQ ID NO: 39986 - protein, 8 aa, Homo Sapiens
TLTDLQPY

SEQ ID NO: 39987 - protein, 8 aa, Homo Sapiens
LTDLQPYM

SEQ ID NO: 39988 - protein, 8 aa, Homo Sapiens
DLQPYMRQ

SEQ ID NO: 39989 - protein, 8 aa, Homo Sapiens
QPYMRQFV

SEQ ID NO: 39990 - protein, 8 aa, Homo Sapiens
YMRQFVAH

SEQ ID NO: 39991 - protein, 8 aa, Homo Sapiens
FVAHLQET

SEQ ID NO: 39992 - protein, 8 aa, Homo Sapiens
HLQETSPL

SEQ ID NO: 39993 - protein, 8 aa, Homo Sapiens
LQETSPLR

SEQ ID NO: 39994 - protein, 8 aa, Homo Sapiens
ETSPLRDA

SEQ ID NO: 39995 - protein, 8 aa, Homo Sapiens
TSPLRDAV

SEQ ID NO: 39996 - protein, 8 aa, Homo Sapiens
PLRDAVVI

SEQ ID NO: 39997 - protein, 8 aa, Homo Sapiens
VIEQSSSL

SEQ ID NO: 39998 - protein, 8 aa, Homo Sapiens
GLFDVFLR

SEQ ID NO: 39999 - protein, 8 aa, Homo Sapiens
LFDVFLRF

SEQ ID NO: 40000 - protein, 8 aa, Homo Sapiens
RFMCHHAV

SEQ ID NO: 40001 - protein, 8 aa, Homo Sapiens
FMCHHAVR

SEQ ID NO: 40002 - protein, 8 aa, Homo Sapiens
HAVRIRGK

SEQ ID NO: 40003 - protein, 8 aa, Homo Sapiens
RIRGKSYV

SEQ ID NO: 40004 - protein, 8 aa, Homo Sapiens
SYVQCQGI

SEQ ID NO: 40005 - protein, 8 aa, Homo Sapiens
GIPQGSIL

SEQ ID NO: 40006 - protein, 8 aa, Homo Sapiens
SILSTLLC

SEQ ID NO: 40007 - protein, 8 aa, Homo Sapiens
TLLCSLCY

SEQ ID NO: 40008 - protein, 8 aa, Homo Sapiens
CYGDMENK

SEQ ID NO: 40009 - protein, 8 aa, Homo Sapiens
KLFAGIRR

SEQ ID NO: 40010 - protein, 8 aa, Homo Sapiens
RRDGLLLR

SEQ ID NO: 40011 - protein, 8 aa, Homo Sapiens
RLVDDFLL

SEQ ID NO: 40012 - protein, 8 aa, Homo Sapiens
LVDDFLLV

SEQ ID NO: 40013 - protein, 8 aa, Homo Sapiens
FLLVTPHL

SEQ ID NO: 40014 - protein, 8 aa, Homo Sapiens
LLVTPHLT

SEQ ID NO: 40015 - protein, 8 aa, Homo Sapiens
TPHLTHAK

SEQ ID NO: 40016 - protein, 8 aa, Homo Sapiens
LTHAKTFL

SEQ ID NO: 40017 - protein, 8 aa, Homo Sapiens
THAKTFLR

SEQ ID NO: 40018 - protein, 8 aa, Homo Sapiens
KTFLRTLV

SEQ ID NO: 40019 - protein, 8 aa, Homo Sapiens
TFLRTLVR

SEQ ID NO: 40020 - protein, 8 aa, Homo Sapiens
LVRGVPEY

SEQ ID NO: 40021 - protein, 8 aa, Homo Sapiens
GVPEYGCV

SEQ ID NO: 40022 - protein, 8 aa, Homo Sapiens
VPEYGCVV

SEQ ID NO: 40023 - protein, 8 aa, Homo Sapiens
EYGCVVNL

SEQ ID NO: 40024 - protein, 8 aa, Homo Sapiens
YGCVVNLR

SEQ ID NO: 40025 - protein, 8 aa, Homo Sapiens
VVNLRKTV

SEQ ID NO: 40026 - protein, 8 aa, Homo Sapiens
KTVVNFPV

SEQ ID NO: 40027 - protein, 8 aa, Homo Sapiens
FPVEDEAL

SEQ ID NO: 40028 - protein, 8 aa, Homo Sapiens
EALGGTAF

SEQ ID NO: 40029 - protein, 8 aa, Homo Sapiens
ALGGTAFV

SEQ ID NO: 40030 - protein, 8 aa, Homo Sapiens
TAFVQMPA

SEQ ID NO: 40031 - protein, 8 aa, Homo Sapiens
VQMPAHGL

SEQ ID NO: 40032 - protein, 8 aa, Homo Sapiens
QMPAHGLF

SEQ ID NO: 40033 - protein, 8 aa, Homo Sapiens
MPAHGLFP

SEQ ID NO: 40034 - protein, 8 aa, Homo Sapiens
GLFPWCGL

SEQ ID NO: 40035 - protein, 8 aa, Homo Sapiens
LFPWCGLL

SEQ ID NO: 40036 - protein, 8 aa, Homo Sapiens
FPWCGLLL

SEQ ID NO: 40037 - protein, 8 aa, Homo Sapiens
LLLDTRTL

SEQ ID NO: 40038 - protein, 8 aa, Homo Sapiens
TLEVQSDY

SEQ ID NO: 40039 - protein, 8 aa, Homo Sapiens
VQSDYSSY

SEQ ID NO: 40040 - protein, 8 aa, Homo Sapiens
SDYSSYAR

SEQ ID NO: 40041 - protein, 8 aa, Homo Sapiens
SSYARTSI

SEQ ID NO: 40042 - protein, 8 aa, Homo Sapiens
SYARTSIR

SEQ ID NO: 40043 - protein, 8 aa, Homo Sapiens
RTSIRASL

SEQ ID NO: 40044 - protein, 8 aa, Homo Sapiens
SIRASLTF

SEQ ID NO: 40045 - protein, 8 aa, Homo Sapiens
RASLTFNR

SEQ ID NO: 40046 - protein, 8 aa, Homo Sapiens
LTFNRGFK

SEQ ID NO: 40047 - protein, 8 aa, Homo Sapiens
FKAGRNMR

SEQ ID NO: 40048 - protein, 8 aa, Homo Sapiens
KAGRNMRR

SEQ ID NO: 40049 - protein, 8 aa, Homo Sapiens
AGRNMRRK

SEQ ID NO: 40050 - protein, 8 aa, Homo Sapiens
GRNMRRKL

SEQ ID NO: 40051 - protein, 8 aa, Homo Sapiens
RRKLFGVL

SEQ ID NO: 40052 - protein, 8 aa, Homo Sapiens
KLFGVLRL

SEQ ID NO: 40053 - protein, 8 aa, Homo Sapiens
RLKCHSLF

SEQ ID NO: 40054 - protein, 8 aa, Homo Sapiens
SLFLDLQV

SEQ ID NO: 40055 - protein, 8 aa, Homo Sapiens
FLDLQVNS

SEQ ID NO: 40056 - protein, 8 aa, Homo Sapiens
LQVNSLQT

SEQ ID NO: 40057 - protein, 8 aa, Homo Sapiens
QVNSLQTV

SEQ ID NO: 40058 - protein, 8 aa, Homo Sapiens
LQTVCTNI

SEQ ID NO: 40059 - protein, 8 aa, Homo Sapiens
QTVCTNIY

SEQ ID NO: 40060 - protein, 8 aa, Homo Sapiens
TVCTNIYK

SEQ ID NO: 40061 - protein, 8 aa, Homo Sapiens
NIYKILLL

SEQ ID NO: 40062 - protein, 8 aa, Homo Sapiens
KILLLQAY

SEQ ID NO: 40063 - protein, 8 aa, Homo Sapiens
ILLLQAYR

SEQ ID NO: 40064 - protein, 8 aa, Homo Sapiens
LLLQAYRF

SEQ ID NO: 40065 - protein, 8 aa, Homo Sapiens
LQAYRFHA

SEQ ID NO: 40066 - protein, 8 aa, Homo Sapiens
YRFHACVL

SEQ ID NO: 40067 - protein, 8 aa, Homo Sapiens
FHACVLQL

SEQ ID NO: 40068 - protein, 8 aa, Homo Sapiens
QLPFHQQV

SEQ ID NO: 40069 - protein, 8 aa, Homo Sapiens
LPFHQQVW

SEQ ID NO: 40070 - protein, 8 aa, Homo Sapiens
QQVWKNPT

SEQ ID NO: 40071 - protein, 8 aa, Homo Sapiens
QVWKNPTF

SEQ ID NO: 40072 - protein, 8 aa, Homo Sapiens
VWKNPTFF

SEQ ID NO: 40073 - protein, 8 aa, Homo Sapiens
WKNPTFFL

SEQ ID NO: 40074 - protein, 8 aa, Homo Sapiens
KNPTFFLR

SEQ ID NO: 40075 - protein, 8 aa, Homo Sapiens
FLRVISDT

SEQ ID NO: 40076 - protein, 8 aa, Homo Sapiens
VISDTASL

SEQ ID NO: 40077 - protein, 8 aa, Homo Sapiens
DTASLCYS

SEQ ID NO: 40078 - protein, 8 aa, Homo Sapiens
TASLCYSI

SEQ ID NO: 40079 - protein, 8 aa, Homo Sapiens
SLCYSILK

SEQ ID NO: 40080 - protein, 8 aa, Homo Sapiens
CYSILKAK

SEQ ID NO: 40081 - protein, 8 aa, Homo Sapiens
AGMSLGAK

SEQ ID NO: 40082 - protein, 8 aa, Homo Sapiens
SLGAKGAA

SEQ ID NO: 40083 - protein, 8 aa, Homo Sapiens
GPLPSEAV

SEQ ID NO: 40084 - protein, 8 aa, Homo Sapiens
LPSEAVQW

SEQ ID NO: 40085 - protein, 8 aa, Homo Sapiens
VQWLCHQA

SEQ ID NO: 40086 - protein, 8 aa, Homo Sapiens
QWLCHQAF

SEQ ID NO: 40087 - protein, 8 aa, Homo Sapiens
WLCHQAFL

SEQ ID NO: 40088 - protein, 8 aa, Homo Sapiens
HQAFLLKL

SEQ ID NO: 40089 - protein, 8 aa, Homo Sapiens
AFLLKLTR

SEQ ID NO: 40090 - protein, 8 aa, Homo Sapiens
LLKLTRHR

SEQ ID NO: 40091 - protein, 8 aa, Homo Sapiens
LTRHRVTY

SEQ ID NO: 40092 - protein, 8 aa, Homo Sapiens
TRHRVTYV

SEQ ID NO: 40093 - protein, 8 aa, Homo Sapiens
HRVTYVPL

SEQ ID NO: 40094 - protein, 8 aa, Homo Sapiens
YVPLLGSL

SEQ ID NO: 40095 - protein, 8 aa, Homo Sapiens
PLLGSLRT

SEQ ID NO: 40096 - protein, 8 aa, Homo Sapiens
LLGSLRTA

SEQ ID NO: 40097 - protein, 8 aa, Homo Sapiens
SLRTAQTQ

SEQ ID NO: 40098 - protein, 8 aa, Homo Sapiens
TAQTQLSR

SEQ ID NO: 40099 - protein, 8 aa, Homo Sapiens
AQTQLSRK

SEQ ID NO: 40100 - protein, 8 aa, Homo Sapiens
RKLPGTTL

SEQ ID NO: 40101 - protein, 8 aa, Homo Sapiens
KLPGTTLT

SEQ ID NO: 40102 - protein, 8 aa, Homo Sapiens
LPGTTLTA

SEQ ID NO: 40103 - protein, 8 aa, Homo Sapiens
TTLTALEA

SEQ ID NO: 40104 - protein, 8 aa, Homo Sapiens
TLTALEAA

SEQ ID NO: 40105 - protein, 8 aa, Homo Sapiens
LTALEAAA

SEQ ID NO: 40106 - protein, 8 aa, Homo Sapiens
EAAANPAL

SEQ ID NO: 40107 - protein, 8 aa, Homo Sapiens
NPALPSDF

SEQ ID NO: 40108 - protein, 8 aa, Homo Sapiens
ALPSDFKT

SEQ ID NO: 40109 - protein, 8 aa, Homo Sapiens
LPSDFKTI

SEQ ID NO: 40110 - protein, 9 aa, Homo Sapiens
MPRAPRCRA

SEQ ID NO: 40111 - protein, 9 aa, Homo Sapiens
RAPRCRAVR

SEQ ID NO: 40112 - protein, 9 aa, Homo Sapiens
APRCRAVRS

SEQ ID NO: 40113 - protein, 9 aa, Homo Sapiens
RCRAVRSLL

SEQ ID NO: 40114 - protein, 9 aa, Homo Sapiens
RSLLRSHYR

SEQ ID NO: 40115 - protein, 9 aa, Homo Sapiens
SLLRSHYRE

SEQ ID NO: 40116 - protein, 9 aa, Homo Sapiens
LLRSHYREV

SEQ ID NO: 40117 - protein, 9 aa, Homo Sapiens
LRSHYREVL

SEQ ID NO: 40118 - protein, 9 aa, Homo Sapiens
SHYREVLPL

SEQ ID NO: 40119 - protein, 9 aa, Homo Sapiens
REVLPLATF

SEQ ID NO: 40120 - protein, 9 aa, Homo Sapiens
EVLPLATFV

SEQ ID NO: 40121 - protein, 9 aa, Homo Sapiens
VLPLATFVR

SEQ ID NO: 40122 - protein, 9 aa, Homo Sapiens
LPLATFVRR

SEQ ID NO: 40123 - protein, 9 aa, Homo Sapiens
PLATFVRRL

SEQ ID NO: 40124 - protein, 9 aa, Homo Sapiens
RRLGPQGWR

SEQ ID NO: 40125 - protein, 9 aa, Homo Sapiens
RLGPQGWRL

SEQ ID NO: 40126 - protein, 9 aa, Homo Sapiens
PQGWRLVQR

SEQ ID NO: 40127 - protein, 9 aa, Homo Sapiens
RLVQRGDPA

SEQ ID NO: 40128 - protein, 9 aa, Homo Sapiens
LVQRGDPAA

SEQ ID NO: 40129 - protein, 9 aa, Homo Sapiens
VQRGDPAAF

SEQ ID NO: 40130 - protein, 9 aa, Homo Sapiens
DPAAFRALV

SEQ ID NO: 40131 - protein, 9 aa, Homo Sapiens
FRALVAQCL

SEQ ID NO: 40132 - protein, 9 aa, Homo Sapiens
RALVAQCLV

SEQ ID NO: 40133 - protein, 9 aa, Homo Sapiens
LVAQCLVCV

SEQ ID NO: 40134 - protein, 9 aa, Homo Sapiens
CLVCVPWDA

SEQ ID NO: 40135 - protein, 9 aa, Homo Sapiens
LVCVPWDAR

SEQ ID NO: 40136 - protein, 9 aa, Homo Sapiens
VPWDARPPP

SEQ ID NO: 40137 - protein, 9 aa, Homo Sapiens
RPPPAAPSF

SEQ ID NO: 40138 - protein, 9 aa, Homo Sapiens
APSFRQVSC

SEQ ID NO: 40139 - protein, 9 aa, Homo Sapiens
SFRQVSCLK

SEQ ID NO: 40140 - protein, 9 aa, Homo Sapiens
RQVSCLKEL

SEQ ID NO: 40141 - protein, 9 aa, Homo Sapiens
QVSCLKELV

SEQ ID NO: 40142 - protein, 9 aa, Homo Sapiens
CLKELVARV

SEQ ID NO: 40143 - protein, 9 aa, Homo Sapiens
ELVARVLQR

SEQ ID NO: 40144 - protein, 9 aa, Homo Sapiens
LVARVLQRL

SEQ ID NO: 40145 - protein, 9 aa, Homo Sapiens
RVLQRLCER

SEQ ID NO: 40146 - protein, 9 aa, Homo Sapiens
QRLCERGAK

SEQ ID NO: 40147 - protein, 9 aa, Homo Sapiens
CERGAKNVL

SEQ ID NO: 40148 - protein, 9 aa, Homo Sapiens
RGAKNVLAF

SEQ ID NO: 40149 - protein, 9 aa, Homo Sapiens
NVLAFGFAL

SEQ ID NO: 40150 - protein, 9 aa, Homo Sapiens
VLAFGFALL

SEQ ID NO: 40151 - protein, 9 aa, Homo Sapiens
FGFALLDGA

SEQ ID NO: 40152 - protein, 9 aa, Homo Sapiens
GFALLDGAR

SEQ ID NO: 40153 - protein, 9 aa, Homo Sapiens
ALLDGARGG

SEQ ID NO: 40154 - protein, 9 aa, Homo Sapiens
PPEAFTTSV

SEQ ID NO: 40155 - protein, 9 aa, Homo Sapiens
FTTSVRSYL

SEQ ID NO: 40156 - protein, 9 aa, Homo Sapiens
SYLPNTVTD

SEQ ID NO: 40157 - protein, 9 aa, Homo Sapiens
YLPNTVTDA

SEQ ID NO: 40158 - protein, 9 aa, Homo Sapiens
LPNTVTDAL

SEQ ID NO: 40159 - protein, 9 aa, Homo Sapiens
SGAWGLLLR

SEQ ID NO: 40160 - protein, 9 aa, Homo Sapiens
GAWGLLLRR

SEQ ID NO: 40161 - protein, 9 aa, Homo Sapiens
LLRRVGDDV

SEQ ID NO: 40162 - protein, 9 aa, Homo Sapiens
RRVGDDVLV

SEQ ID NO: 40163 - protein, 9 aa, Homo Sapiens
VGDDVLVHL

SEQ ID NO: 40164 - protein, 9 aa, Homo Sapiens
DVLVHLLAR

SEQ ID NO: 40165 - protein, 9 aa, Homo Sapiens
VLVHLLARC

SEQ ID NO: 40166 - protein, 9 aa, Homo Sapiens
VHLLARCAL

SEQ ID NO: 40167 - protein, 9 aa, Homo Sapiens
HLLARCALF

SEQ ID NO: 40168 - protein, 9 aa, Homo Sapiens
LLARCALFV

SEQ ID NO: 40169 - protein, 9 aa, Homo Sapiens
LARCALFVL

SEQ ID NO: 40170 - protein, 9 aa, Homo Sapiens
ALFVLVAPS

SEQ ID NO: 40171 - protein, 9 aa, Homo Sapiens
FVLVAPSCA

SEQ ID NO: 40172 - protein, 9 aa, Homo Sapiens
VLVAPSCAY

SEQ ID NO: 40173 - protein, 9 aa, Homo Sapiens
VAPSCAYQV

SEQ ID NO: 40174 - protein, 9 aa, Homo Sapiens
AYQVCGPPL

SEQ ID NO: 40175 - protein, 9 aa, Homo Sapiens
YQVCGPPLY

SEQ ID NO: 40176 - protein, 9 aa, Homo Sapiens
VCGPPLYQL

SEQ ID NO: 40177 - protein, 9 aa, Homo Sapiens
PPLYQLGAA

SEQ ID NO: 40178 - protein, 9 aa, Homo Sapiens
PLYQLGAAT

SEQ ID NO: 40179 - protein, 9 aa, Homo Sapiens
YQLGAATQA

SEQ ID NO: 40180 - protein, 9 aa, Homo Sapiens
ATQARPPPH

SEQ ID NO: 40181 - protein, 9 aa, Homo Sapiens
RRLGCERAW

SEQ ID NO: 40182 - protein, 9 aa, Homo Sapiens
ERAWNHSVR

SEQ ID NO: 40183 - protein, 9 aa, Homo Sapiens
SVREAGVPL

SEQ ID NO: 40184 - protein, 9 aa, Homo Sapiens
REAGVPLGL

SEQ ID NO: 40185 - protein, 9 aa, Homo Sapiens
VPLGLPAPG

SEQ ID NO: 40186 - protein, 9 aa, Homo Sapiens
GARRRGGSA

SEQ ID NO: 40187 - protein, 9 aa, Homo Sapiens
RRRGGSASR

SEQ ID NO: 40188 - protein, 9 aa, Homo Sapiens
ASRSLPLPK

SEQ ID NO: 40189 - protein, 9 aa, Homo Sapiens
LPKRPRRGA

SEQ ID NO: 40190 - protein, 9 aa, Homo Sapiens
RPRRGAAPE

SEQ ID NO: 40191 - protein, 9 aa, Homo Sapiens
APEPERTPV

SEQ ID NO: 40192 - protein, 9 aa, Homo Sapiens
RTPVGQGSW

SEQ ID NO: 40193 - protein, 9 aa, Homo Sapiens
TPVGQGSWA

SEQ ID NO: 40194 - protein, 9 aa, Homo Sapiens
QGSWAHPGR

SEQ ID NO: 40195 - protein, 9 aa, Homo Sapiens
HPGRTRGPS

SEQ ID NO: 40196 - protein, 9 aa, Homo Sapiens
GPSDRGFCV

SEQ ID NO: 40197 - protein, 9 aa, Homo Sapiens
RGFCVVSPA

SEQ ID NO: 40198 - protein, 9 aa, Homo Sapiens
GFCVVSPAR

SEQ ID NO: 40199 - protein, 9 aa, Homo Sapiens
RPAEEATSL

SEQ ID NO: 40200 - protein, 9 aa, Homo Sapiens
AEEATSLEG

SEQ ID NO: 40201 - protein, 9 aa, Homo Sapiens
EATSLEGAL

SEQ ID NO: 40202 - protein, 9 aa, Homo Sapiens
SLEGALSGT

SEQ ID NO: 40203 - protein, 9 aa, Homo Sapiens
ALSGTRHSH

SEQ ID NO: 40204 - protein, 9 aa, Homo Sapiens
GTRHSHPSV

SEQ ID NO: 40205 - protein, 9 aa, Homo Sapiens
RQHHAGPPS

SEQ ID NO: 40206 - protein, 9 aa, Homo Sapiens
HAGPPSTSR

SEQ ID NO: 40207 - protein, 9 aa, Homo Sapiens
STSRPPRPW

SEQ ID NO: 40208 - protein, 9 aa, Homo Sapiens
RPWDTPCPP

SEQ ID NO: 40209 - protein, 9 aa, Homo Sapiens
WDTPCPPVY

SEQ ID NO: 40210 - protein, 9 aa, Homo Sapiens
DTPCPPVYA

SEQ ID NO: 40211 - protein, 9 aa, Homo Sapiens
VYAETKHFL

SEQ ID NO: 40212 - protein, 9 aa, Homo Sapiens
YAETKHFLY

SEQ ID NO: 40213 - protein, 9 aa, Homo Sapiens
AETKHFLYS

SEQ ID NO: 40214 - protein, 9 aa, Homo Sapiens
SSGDKEQLR

SEQ ID NO: 40215 - protein, 9 aa, Homo Sapiens
KEQLRPSFL

SEQ ID NO: 40216 - protein, 9 aa, Homo Sapiens
EQLRPSFLL

SEQ ID NO: 40217 - protein, 9 aa, Homo Sapiens
RPSFLLSSL

SEQ ID NO: 40218 - protein, 9 aa, Homo Sapiens
PSFLLSSLR

SEQ ID NO: 40219 - protein, 9 aa, Homo Sapiens
FLLSSLRPS

SEQ ID NO: 40220 - protein, 9 aa, Homo Sapiens
LLSSLRPSL

SEQ ID NO: 40221 - protein, 9 aa, Homo Sapiens
SLRPSLTGA

SEQ ID NO: 40222 - protein, 9 aa, Homo Sapiens
SLTGARRLV

SEQ ID NO: 40223 - protein, 9 aa, Homo Sapiens
RRLVETIFL

SEQ ID NO: 40224 - protein, 9 aa, Homo Sapiens
RLVETIFLG

SEQ ID NO: 40225 - protein, 9 aa, Homo Sapiens
FLGSRPWMP

SEQ ID NO: 40226 - protein, 9 aa, Homo Sapiens
RPWMPGTPR

SEQ ID NO: 40227 - protein, 9 aa, Homo Sapiens
WMPGTPRRL

SEQ ID NO: 40228 - protein, 9 aa, Homo Sapiens
MPGTPRRLP

SEQ ID NO: 40229 - protein, 9 aa, Homo Sapiens
GTPRRLPRL

SEQ ID NO: 40230 - protein, 9 aa, Homo Sapiens
RRLPRLPQR

SEQ ID NO: 40231 - protein, 9 aa, Homo Sapiens
RLPRLPQRY

SEQ ID NO: 40232 - protein, 9 aa, Homo Sapiens
LPRLPQRYW

SEQ ID NO: 40233 - protein, 9 aa, Homo Sapiens
RLPQRYWQM

SEQ ID NO: 40234 - protein, 9 aa, Homo Sapiens
QRYWQMRPL

SEQ ID NO: 40235 - protein, 9 aa, Homo Sapiens
RYWQMRPLF

SEQ ID NO: 40236 - protein, 9 aa, Homo Sapiens
YWQMRPLFL

SEQ ID NO: 40237 - protein, 9 aa, Homo Sapiens
WQMRPLFLE

SEQ ID NO: 40238 - protein, 9 aa, Homo Sapiens
QMRPLFLEL

SEQ ID NO: 40239 - protein, 9 aa, Homo Sapiens
FLELLGNHA

SEQ ID NO: 40240 - protein, 9 aa, Homo Sapiens
ELLGNHAQC

SEQ ID NO: 40241 - protein, 9 aa, Homo Sapiens
NHAQCPYGV

SEQ ID NO: 40242 - protein, 9 aa, Homo Sapiens
AQCPYGVLL

SEQ ID NO: 40243 - protein, 9 aa, Homo Sapiens
CPYGVLLKT

SEQ ID NO: 40244 - protein, 9 aa, Homo Sapiens
VLLKTHCPL

SEQ ID NO: 40245 - protein, 9 aa, Homo Sapiens
LLKTHCPLR

SEQ ID NO: 40246 - protein, 9 aa, Homo Sapiens
KTHCPLRAA

SEQ ID NO: 40247 - protein, 9 aa, Homo Sapiens
CPLRAAVTP

SEQ ID NO: 40248 - protein, 9 aa, Homo Sapiens
PLRAAVTPA

SEQ ID NO: 40249 - protein, 9 aa, Homo Sapiens
AAVTPAAGV

SEQ ID NO: 40250 - protein, 9 aa, Homo Sapiens
TPAAGVCAR

SEQ ID NO: 40251 - protein, 9 aa, Homo Sapiens
RRLVQLLRQ

SEQ ID NO: 40252 - protein, 9 aa, Homo Sapiens
LLRQHSSPW

SEQ ID NO: 40253 - protein, 9 aa, Homo Sapiens
RQHSSPWQV

SEQ ID NO: 40254 - protein, 9 aa, Homo Sapiens
SSPWQVYGF

SEQ ID NO: 40255 - protein, 9 aa, Homo Sapiens
SPWQVYGFV

SEQ ID NO: 40256 - protein, 9 aa, Homo Sapiens
PWQVYGFVR

SEQ ID NO: 40257 - protein, 9 aa, Homo Sapiens
WQVYGFVRA

SEQ ID NO: 40258 - protein, 9 aa, Homo Sapiens
VYGFVRACL

SEQ ID NO: 40259 - protein, 9 aa, Homo Sapiens
YGFVRACLR

SEQ ID NO: 40260 - protein, 9 aa, Homo Sapiens
GFVRACLRR

SEQ ID NO: 40261 - protein, 9 aa, Homo Sapiens
FVRACLRRL

SEQ ID NO: 40262 - protein, 9 aa, Homo Sapiens
LVPPGLWGS

SEQ ID NO: 40263 - protein, 9 aa, Homo Sapiens
GLWGSRHNE

SEQ ID NO: 40264 - protein, 9 aa, Homo Sapiens
LWGSRHNER

SEQ ID NO: 40265 - protein, 9 aa, Homo Sapiens
RHNERRFLR

SEQ ID NO: 40266 - protein, 9 aa, Homo Sapiens
ERRFLRNTK

SEQ ID NO: 40267 - protein, 9 aa, Homo Sapiens
RRFLRNTKK

SEQ ID NO: 40268 - protein, 9 aa, Homo Sapiens
RFLRNTKKF

SEQ ID NO: 40269 - protein, 9 aa, Homo Sapiens
FLRNTKKFI

SEQ ID NO: 40270 - protein, 9 aa, Homo Sapiens
TKKFISLGK

SEQ ID NO: 40271 - protein, 9 aa, Homo Sapiens
FISLGKHAK

SEQ ID NO: 40272 - protein, 9 aa, Homo Sapiens
KLSLQELTW

SEQ ID NO: 40273 - protein, 9 aa, Homo Sapiens
LSLQELTWK

SEQ ID NO: 40274 - protein, 9 aa, Homo Sapiens
SLQELTWKM

SEQ ID NO: 40275 - protein, 9 aa, Homo Sapiens
QELTWKMSV

SEQ ID NO: 40276 - protein, 9 aa, Homo Sapiens
ELTWKMSVR

SEQ ID NO: 40277 - protein, 9 aa, Homo Sapiens
KMSVRDCAW

SEQ ID NO: 40278 - protein, 9 aa, Homo Sapiens
MSVRDCAWL

SEQ ID NO: 40279 - protein, 9 aa, Homo Sapiens
SVRDCAWLR

SEQ ID NO: 40280 - protein, 9 aa, Homo Sapiens
SPGVGCVPA

SEQ ID NO: 40281 - protein, 9 aa, Homo Sapiens
CVPAAEHRL

SEQ ID NO: 40282 - protein, 9 aa, Homo Sapiens
AEHRLREEI

SEQ ID NO: 40283 - protein, 9 aa, Homo Sapiens
RLREEILAK

SEQ ID NO: 40284 - protein, 9 aa, Homo Sapiens
LREEILAKF

SEQ ID NO: 40285 - protein, 9 aa, Homo Sapiens
REEILAKFL

SEQ ID NO: 40286 - protein, 9 aa, Homo Sapiens
EEILAKFLH

SEQ ID NO: 40287 - protein, 9 aa, Homo Sapiens
EILAKFLHW

SEQ ID NO: 40288 - protein, 9 aa, Homo Sapiens
ILAKFLHWL

SEQ ID NO: 40289 - protein, 9 aa, Homo Sapiens
KFLHWLMSV

SEQ ID NO: 40290 - protein, 9 aa, Homo Sapiens
FLHWLMSVY

SEQ ID NO: 40291 - protein, 9 aa, Homo Sapiens
LHWLMSVYV

SEQ ID NO: 40292 - protein, 9 aa, Homo Sapiens
LMSVYVVEL

SEQ ID NO: 40293 - protein, 9 aa, Homo Sapiens
MSVYVVELL

SEQ ID NO: 40294 - protein, 9 aa, Homo Sapiens
SVYVVELLR

SEQ ID NO: 40295 - protein, 9 aa, Homo Sapiens
YVVELLRSF

SEQ ID NO: 40296 - protein, 9 aa, Homo Sapiens
VELLRSFFY

SEQ ID NO: 40297 - protein, 9 aa, Homo Sapiens
ELLRSFFYV

SEQ ID NO: 40298 - protein, 9 aa, Homo Sapiens
LLRSFFYVT

SEQ ID NO: 40299 - protein, 9 aa, Homo Sapiens
FFYVTETTF

SEQ ID NO: 40300 - protein, 9 aa, Homo Sapiens
YVTETTFQK

SEQ ID NO: 40301 - protein, 9 aa, Homo Sapiens
ETTFQKNRL

SEQ ID NO: 40302 - protein, 9 aa, Homo Sapiens
TTFQKNRLF

SEQ ID NO: 40303 - protein, 9 aa, Homo Sapiens
TFQKNRLFF

SEQ ID NO: 40304 - protein, 9 aa, Homo Sapiens
FQKNRLFFY

SEQ ID NO: 40305 - protein, 9 aa, Homo Sapiens
QKNRLFFYR

SEQ ID NO: 40306 - protein, 9 aa, Homo Sapiens
KNRLFFYRK

SEQ ID NO: 40307 - protein, 9 aa, Homo Sapiens
RLFFYRKSV

SEQ ID NO: 40308 - protein, 9 aa, Homo Sapiens
FYRKSVWSK

SEQ ID NO: 40309 - protein, 9 aa, Homo Sapiens
YRKSVWSKL

SEQ ID NO: 40310 - protein, 9 aa, Homo Sapiens
SVWSKLQSI

SEQ ID NO: 40311 - protein, 9 aa, Homo Sapiens
KLQSIGIRQ

SEQ ID NO: 40312 - protein, 9 aa, Homo Sapiens
QSIGIRQHL

SEQ ID NO: 40313 - protein, 9 aa, Homo Sapiens
SIGIRQHLK

SEQ ID NO: 40314 - protein, 9 aa, Homo Sapiens
GIRQHLKRV

SEQ ID NO: 40315 - protein, 9 aa, Homo Sapiens
RQHLKRVQL

SEQ ID NO: 40316 - protein, 9 aa, Homo Sapiens
VQLRELSEA

SEQ ID NO: 40317 - protein, 9 aa, Homo Sapiens
ELSEAEVRQ

SEQ ID NO: 40318 - protein, 9 aa, Homo Sapiens
AEVRQHREA

SEQ ID NO: 40319 - protein, 9 aa, Homo Sapiens
EVRQHREAR

SEQ ID NO: 40320 - protein, 9 aa, Homo Sapiens
QHREARPAL

SEQ ID NO: 40321 - protein, 9 aa, Homo Sapiens
HREARPALL

SEQ ID NO: 40322 - protein, 9 aa, Homo Sapiens
RPALLTSRL

SEQ ID NO: 40323 - protein, 9 aa, Homo Sapiens
ALLTSRLRF

SEQ ID NO: 40324 - protein, 9 aa, Homo Sapiens
LLTSRLRFI

SEQ ID NO: 40325 - protein, 9 aa, Homo Sapiens
TSRLRFIPK

SEQ ID NO: 40326 - protein, 9 aa, Homo Sapiens
RFIPKPDGL

SEQ ID NO: 40327 - protein, 9 aa, Homo Sapiens
FIPKPDGLR

SEQ ID NO: 40328 - protein, 9 aa, Homo Sapiens
RPIVNMDYV

SEQ ID NO: 40329 - protein, 9 aa, Homo Sapiens
PIVNMDYVV

SEQ ID NO: 40330 - protein, 9 aa, Homo Sapiens
NMDYVVGAR

SEQ ID NO: 40331 - protein, 9 aa, Homo Sapiens
DYVVGARTF

SEQ ID NO: 40332 - protein, 9 aa, Homo Sapiens
YVVGARTFR

SEQ ID NO: 40333 - protein, 9 aa, Homo Sapiens
VVGARTFRR

SEQ ID NO: 40334 - protein, 9 aa, Homo Sapiens
GARTFRREK

SEQ ID NO: 40335 - protein, 9 aa, Homo Sapiens
FRREKRAER

SEQ ID NO: 40336 - protein, 9 aa, Homo Sapiens
KRAERLTSR

SEQ ID NO: 40337 - protein, 9 aa, Homo Sapiens
RAERLTSRV

SEQ ID NO: 40338 - protein, 9 aa, Homo Sapiens
AERLTSRVK

SEQ ID NO: 40339 - protein, 9 aa, Homo Sapiens
RLTSRVKAL

SEQ ID NO: 40340 - protein, 9 aa, Homo Sapiens
LTSRVKALF

SEQ ID NO: 40341 - protein, 9 aa, Homo Sapiens
SRVKALFSV

SEQ ID NO: 40342 - protein, 9 aa, Homo Sapiens
RVKALFSVL

SEQ ID NO: 40343 - protein, 9 aa, Homo Sapiens
KALFSVLNY

SEQ ID NO: 40344 - protein, 9 aa, Homo Sapiens
ALFSVLNYE

SEQ ID NO: 40345 - protein, 9 aa, Homo Sapiens
LFSVLNYER

SEQ ID NO: 40346 - protein, 9 aa, Homo Sapiens
FSVLNYERA

SEQ ID NO: 40347 - protein, 9 aa, Homo Sapiens
SVLNYERAR

SEQ ID NO: 40348 - protein, 9 aa, Homo Sapiens
VLNYERARR

SEQ ID NO: 40349 - protein, 9 aa, Homo Sapiens
YERARRPGL

SEQ ID NO: 40350 - protein, 9 aa, Homo Sapiens
RPGLLGASV

SEQ ID NO: 40351 - protein, 9 aa, Homo Sapiens
GLLGASVLG

SEQ ID NO: 40352 - protein, 9 aa, Homo Sapiens
LLGASVLGL

SEQ ID NO: 40353 - protein, 9 aa, Homo Sapiens
GLDDIHRAW

SEQ ID NO: 40354 - protein, 9 aa, Homo Sapiens
DIHRAWRTF

SEQ ID NO: 40355 - protein, 9 aa, Homo Sapiens
HRAWRTFVL

SEQ ID NO: 40356 - protein, 9 aa, Homo Sapiens
RAWRTFVLR

SEQ ID NO: 40357 - protein, 9 aa, Homo Sapiens
RTFVLRVRA

SEQ ID NO: 40358 - protein, 9 aa, Homo Sapiens
RVRAQDPPP

SEQ ID NO: 40359 - protein, 9 aa, Homo Sapiens
RAQDPPPEL

SEQ ID NO: 40360 - protein, 9 aa, Homo Sapiens
DPPPELYFV

SEQ ID NO: 40361 - protein, 9 aa, Homo Sapiens
ELYFVKVDV

SEQ ID NO: 40362 - protein, 9 aa, Homo Sapiens
FVKVDVTGA

SEQ ID NO: 40363 - protein, 9 aa, Homo Sapiens
VKVDVTGAY

SEQ ID NO: 40364 - protein, 9 aa, Homo Sapiens
DVTGAYDTI

SEQ ID NO: 40365 - protein, 9 aa, Homo Sapiens
IPQDRLTEV

SEQ ID NO: 40366 - protein, 9 aa, Homo Sapiens
RLTEVIASI

SEQ ID NO: 40367 - protein, 9 aa, Homo Sapiens
SIIKPQNTY

SEQ ID NO: 40368 - protein, 9 aa, Homo Sapiens
KPQNTYCVR

SEQ ID NO: 40369 - protein, 9 aa, Homo Sapiens
PQNTYCVRR

SEQ ID NO: 40370 - protein, 9 aa, Homo Sapiens
NTYCVRRYA

SEQ ID NO: 40371 - protein, 9 aa, Homo Sapiens
TYCVRRYAV

SEQ ID NO: 40372 - protein, 9 aa, Homo Sapiens
YCVRRYAVV

SEQ ID NO: 40373 - protein, 9 aa, Homo Sapiens
VRRYAVVQK

SEQ ID NO: 40374 - protein, 9 aa, Homo Sapiens
RRYAVVQKA

SEQ ID NO: 40375 - protein, 9 aa, Homo Sapiens
YAVVQKAAH

SEQ ID NO: 40376 - protein, 9 aa, Homo Sapiens
VQKAAHGHV

SEQ ID NO: 40377 - protein, 9 aa, Homo Sapiens
KAAHGHVRK

SEQ ID NO: 40378 - protein, 9 aa, Homo Sapiens
HGHVRKAFK

SEQ ID NO: 40379 - protein, 9 aa, Homo Sapiens
KSHVSTLTD

SEQ ID NO: 40380 - protein, 9 aa, Homo Sapiens
STLTDLQPY

SEQ ID NO: 40381 - protein, 9 aa, Homo Sapiens
TLTDLQPYM

SEQ ID NO: 40382 - protein, 9 aa, Homo Sapiens
LTDLQPYMR

SEQ ID NO: 40383 - protein, 9 aa, Homo Sapiens
DLQPYMRQF

SEQ ID NO: 40384 - protein, 9 aa, Homo Sapiens
LQPYMRQFV

SEQ ID NO: 40385 - protein, 9 aa, Homo Sapiens
QPYMRQFVA

SEQ ID NO: 40386 - protein, 9 aa, Homo Sapiens
YMRQFVAHL

SEQ ID NO: 40387 - protein, 9 aa, Homo Sapiens
AHLQETSPL

SEQ ID NO: 40388 - protein, 9 aa, Homo Sapiens
HLQETSPLR

SEQ ID NO: 40389 - protein, 9 aa, Homo Sapiens
ETSPLRDAV

SEQ ID NO: 40390 - protein, 9 aa, Homo Sapiens
TSPLRDAVV

SEQ ID NO: 40391 - protein, 9 aa, Homo Sapiens
SPLRDAVVI

SEQ ID NO: 40392 - protein, 9 aa, Homo Sapiens
VVIEQSSSL

SEQ ID NO: 40393 - protein, 9 aa, Homo Sapiens
SLNEASSGL

SEQ ID NO: 40394 - protein, 9 aa, Homo Sapiens
EASSGLFDV

SEQ ID NO: 40395 - protein, 9 aa, Homo Sapiens
SGLFDVFLR

SEQ ID NO: 40396 - protein, 9 aa, Homo Sapiens
GLFDVFLRF

SEQ ID NO: 40397 - protein, 9 aa, Homo Sapiens
DVFLRFMCH

SEQ ID NO: 40398 - protein, 9 aa, Homo Sapiens
FLRFMCHHA

SEQ ID NO: 40399 - protein, 9 aa, Homo Sapiens
LRFMCHHAV

SEQ ID NO: 40400 - protein, 9 aa, Homo Sapiens
RFMCHHAVR

SEQ ID NO: 40401 - protein, 9 aa, Homo Sapiens
FMCHHAVRI

SEQ ID NO: 40402 - protein, 9 aa, Homo Sapiens
AVRIRGKSY

SEQ ID NO: 40403 - protein, 9 aa, Homo Sapiens
VRIRGKSYV

SEQ ID NO: 40404 - protein, 9 aa, Homo Sapiens
RIRGKSYVQ

SEQ ID NO: 40405 - protein, 9 aa, Homo Sapiens
IPQGSILST

SEQ ID NO: 40406 - protein, 9 aa, Homo Sapiens
ILSTLLCSL

SEQ ID NO: 40407 - protein, 9 aa, Homo Sapiens
STLLCSLCY

SEQ ID NO: 40408 - protein, 9 aa, Homo Sapiens
CYGDMENKL

SEQ ID NO: 40409 - protein, 9 aa, Homo Sapiens
MENKLFAGI

SEQ ID NO: 40410 - protein, 9 aa, Homo Sapiens
ENKLFAGIR

SEQ ID NO: 40411 - protein, 9 aa, Homo Sapiens
RRDGLLLRL

SEQ ID NO: 40412 - protein, 9 aa, Homo Sapiens
LLLRLVDDF

SEQ ID NO: 40413 - protein, 9 aa, Homo Sapiens
LLRLVDDFL

SEQ ID NO: 40414 - protein, 9 aa, Homo Sapiens
RLVDDFLLV

SEQ ID NO: 40415 - protein, 9 aa, Homo Sapiens
LVDDFLLVT

SEQ ID NO: 40416 - protein, 9 aa, Homo Sapiens
DFLLVTPHL

SEQ ID NO: 40417 - protein, 9 aa, Homo Sapiens
FLLVTPHLT

SEQ ID NO: 40418 - protein, 9 aa, Homo Sapiens
LVTPHLTHA

SEQ ID NO: 40419 - protein, 9 aa, Homo Sapiens
VTPHLTHAK

SEQ ID NO: 40420 - protein, 9 aa, Homo Sapiens
HLTHAKTFL

SEQ ID NO: 40421 - protein, 9 aa, Homo Sapiens
LTHAKTFLR

SEQ ID NO: 40422 - protein, 9 aa, Homo Sapiens
KTFLRTLVR

SEQ ID NO: 40423 - protein, 9 aa, Homo Sapiens
FLRTLVRGV

SEQ ID NO: 40424 - protein, 9 aa, Homo Sapiens
TLVRGVPEY

SEQ ID NO: 40425 - protein, 9 aa, Homo Sapiens
GVPEYGCVV

SEQ ID NO: 40426 - protein, 9 aa, Homo Sapiens
PEYGCVVNL

SEQ ID NO: 40427 - protein, 9 aa, Homo Sapiens
EYGCVVNLR

SEQ ID NO: 40428 - protein, 9 aa, Homo Sapiens
CVVNLRKTV

SEQ ID NO: 40429 - protein, 9 aa, Homo Sapiens
VVNLRKTVV

SEQ ID NO: 40430 - protein, 9 aa, Homo Sapiens
NLRKTVVNF

SEQ ID NO: 40431 - protein, 9 aa, Homo Sapiens
RKTVVNFPV

SEQ ID NO: 40432 - protein, 9 aa, Homo Sapiens
FPVEDEALG

SEQ ID NO: 40433 - protein, 9 aa, Homo Sapiens
DEALGGTAF

SEQ ID NO: 40434 - protein, 9 aa, Homo Sapiens
EALGGTAFV

SEQ ID NO: 40435 - protein, 9 aa, Homo Sapiens
ALGGTAFVQ

SEQ ID NO: 40436 - protein, 9 aa, Homo Sapiens
GTAFVQMPA

SEQ ID NO: 40437 - protein, 9 aa, Homo Sapiens
TAFVQMPAH

SEQ ID NO: 40438 - protein, 9 aa, Homo Sapiens
FVQMPAHGL

SEQ ID NO: 40439 - protein, 9 aa, Homo Sapiens
VQMPAHGLF

SEQ ID NO: 40440 - protein, 9 aa, Homo Sapiens
MPAHGLFPW

SEQ ID NO: 40441 - protein, 9 aa, Homo Sapiens
GLFPWCGLL

SEQ ID NO: 40442 - protein, 9 aa, Homo Sapiens
LFPWCGLLL

SEQ ID NO: 40443 - protein, 9 aa, Homo Sapiens
FPWCGLLLD

SEQ ID NO: 40444 - protein, 9 aa, Homo Sapiens
GLLLDTRTL

SEQ ID NO: 40445 - protein, 9 aa, Homo Sapiens
LLLDTRTLE

SEQ ID NO: 40446 - protein, 9 aa, Homo Sapiens
LLDTRTLEV

SEQ ID NO: 40447 - protein, 9 aa, Homo Sapiens
RTLEVQSDY

SEQ ID NO: 40448 - protein, 9 aa, Homo Sapiens
EVQSDYSSY

SEQ ID NO: 40449 - protein, 9 aa, Homo Sapiens
VQSDYSSYA

SEQ ID NO: 40450 - protein, 9 aa, Homo Sapiens
QSDYSSYAR

SEQ ID NO: 40451 - protein, 9 aa, Homo Sapiens
YSSYARTSI

SEQ ID NO: 40452 - protein, 9 aa, Homo Sapiens
SSYARTSIR

SEQ ID NO: 40453 - protein, 9 aa, Homo Sapiens
ARTSIRASL

SEQ ID NO: 40454 - protein, 9 aa, Homo Sapiens
TSIRASLTF

SEQ ID NO: 40455 - protein, 9 aa, Homo Sapiens
IRASLTFNR

SEQ ID NO: 40456 - protein, 9 aa, Homo Sapiens
SLTFNRGFK

SEQ ID NO: 40457 - protein, 9 aa, Homo Sapiens
GFKAGRNMR

SEQ ID NO: 40458 - protein, 9 aa, Homo Sapiens
FKAGRNMRR

SEQ ID NO: 40459 - protein, 9 aa, Homo Sapiens
KAGRNMRRK

SEQ ID NO: 40460 - protein, 9 aa, Homo Sapiens
AGRNMRRKL

SEQ ID NO: 40461 - protein, 9 aa, Homo Sapiens
GRNMRRKLF

SEQ ID NO: 40462 - protein, 9 aa, Homo Sapiens
NMRRKLFGV

SEQ ID NO: 40463 - protein, 9 aa, Homo Sapiens
MRRKLFGVL

SEQ ID NO: 40464 - protein, 9 aa, Homo Sapiens
RRKLFGVLR

SEQ ID NO: 40465 - protein, 9 aa, Homo Sapiens
KLFGVLRLK

SEQ ID NO: 40466 - protein, 9 aa, Homo Sapiens
VLRLKCHSL

SEQ ID NO: 40467 - protein, 9 aa, Homo Sapiens
RLKCHSLFL

SEQ ID NO: 40468 - protein, 9 aa, Homo Sapiens
FLDLQVNSL

SEQ ID NO: 40469 - protein, 9 aa, Homo Sapiens
LQVNSLQTV

SEQ ID NO: 40470 - protein, 9 aa, Homo Sapiens
SLQTVCTNI

SEQ ID NO: 40471 - protein, 9 aa, Homo Sapiens
LQTVCTNIY

SEQ ID NO: 40472 - protein, 9 aa, Homo Sapiens
QTVCTNIYK

SEQ ID NO: 40473 - protein, 9 aa, Homo Sapiens
TVCTNIYKI

SEQ ID NO: 40474 - protein, 9 aa, Homo Sapiens
YKILLLQAY

SEQ ID NO: 40475 - protein, 9 aa, Homo Sapiens
KILLLQAYR

SEQ ID NO: 40476 - protein, 9 aa, Homo Sapiens
ILLLQAYRF

SEQ ID NO: 40477 - protein, 9 aa, Homo Sapiens
LLQAYRFHA

SEQ ID NO: 40478 - protein, 9 aa, Homo Sapiens
LQAYRFHAC

SEQ ID NO: 40479 - protein, 9 aa, Homo Sapiens
QAYRFHACV

SEQ ID NO: 40480 - protein, 9 aa, Homo Sapiens
AYRFHACVL

SEQ ID NO: 40481 - protein, 9 aa, Homo Sapiens
RFHACVLQL

SEQ ID NO: 40482 - protein, 9 aa, Homo Sapiens
HACVLQLPF

SEQ ID NO: 40483 - protein, 9 aa, Homo Sapiens
VLQLPFHQQ

SEQ ID NO: 40484 - protein, 9 aa, Homo Sapiens
LQLPFHQQV

SEQ ID NO: 40485 - protein, 9 aa, Homo Sapiens
QQVWKNPTF

SEQ ID NO: 40486 - protein, 9 aa, Homo Sapiens
QVWKNPTFF

SEQ ID NO: 40487 - protein, 9 aa, Homo Sapiens
VWKNPTFFL

SEQ ID NO: 40488 - protein, 9 aa, Homo Sapiens
WKNPTFFLR

SEQ ID NO: 40489 - protein, 9 aa, Homo Sapiens
NPTFFLRVI

SEQ ID NO: 40490 - protein, 9 aa, Homo Sapiens
FLRVISDTA

SEQ ID NO: 40491 - protein, 9 aa, Homo Sapiens
RVISDTASL

SEQ ID NO: 40492 - protein, 9 aa, Homo Sapiens
ISDTASLCY

SEQ ID NO: 40493 - protein, 9 aa, Homo Sapiens
DTASLCYSI

SEQ ID NO: 40494 - protein, 9 aa, Homo Sapiens
TASLCYSIL

SEQ ID NO: 40495 - protein, 9 aa, Homo Sapiens
ASLCYSILK

SEQ ID NO: 40496 - protein, 9 aa, Homo Sapiens
SLCYSILKA

SEQ ID NO: 40497 - protein, 9 aa, Homo Sapiens
ILKAKNAGM

SEQ ID NO: 40498 - protein, 9 aa, Homo Sapiens
KAKNAGMSL

SEQ ID NO: 40499 - protein, 9 aa, Homo Sapiens
NAGMSLGAK

SEQ ID NO: 40500 - protein, 9 aa, Homo Sapiens
GMSLGAKGA

SEQ ID NO: 40501 - protein, 9 aa, Homo Sapiens
LPSEAVQWL

SEQ ID NO: 40502 - protein, 9 aa, Homo Sapiens
AVQWLCHQA

SEQ ID NO: 40503 - protein, 9 aa, Homo Sapiens
VQWLCHQAF

SEQ ID NO: 40504 - protein, 9 aa, Homo Sapiens
WLCHQAFLL

SEQ ID NO: 40505 - protein, 9 aa, Homo Sapiens
LCHQAFLLK

SEQ ID NO: 40506 - protein, 9 aa, Homo Sapiens
QAFLLKLTR

SEQ ID NO: 40507 - protein, 9 aa, Homo Sapiens
FLLKLTRHR

SEQ ID NO: 40508 - protein, 9 aa, Homo Sapiens
LLKLTRHRV

SEQ ID NO: 40509 - protein, 9 aa, Homo Sapiens
KLTRHRVTY

SEQ ID NO: 40510 - protein, 9 aa, Homo Sapiens
LTRHRVTYV

SEQ ID NO: 40511 - protein, 9 aa, Homo Sapiens
RHRVTYVPL

SEQ ID NO: 40512 - protein, 9 aa, Homo Sapiens
HRVTYVPLL

SEQ ID NO: 40513 - protein, 9 aa, Homo Sapiens
TYVPLLGSL

SEQ ID NO: 40514 - protein, 9 aa, Homo Sapiens
YVPLLGSLR

SEQ ID NO: 40515 - protein, 9 aa, Homo Sapiens
PLLGSLRTA

SEQ ID NO: 40516 - protein, 9 aa, Homo Sapiens
LLGSLRTAQ

SEQ ID NO: 40517 - protein, 9 aa, Homo Sapiens
SLRTAQTQL

SEQ ID NO: 40518 - protein, 9 aa, Homo Sapiens
RTAQTQLSR

SEQ ID NO: 40519 - protein, 9 aa, Homo Sapiens
TAQTQLSRK

SEQ ID NO: 40520 - protein, 9 aa, Homo Sapiens
QLSRKLPGT

SEQ ID NO: 40521 - protein, 9 aa, Homo Sapiens
KLPGTTLTA

SEQ ID NO: 40522 - protein, 9 aa, Homo Sapiens
LPGTTLTAL

SEQ ID NO: 40523 - protein, 9 aa, Homo Sapiens
TTLTALEAA

SEQ ID NO: 40524 - protein, 9 aa, Homo Sapiens
TLTALEAAA

SEQ ID NO: 40525 - protein, 9 aa, Homo Sapiens
ALEAAANPA

SEQ ID NO: 40526 - protein, 9 aa, Homo Sapiens
LEAAANPAL

SEQ ID NO: 40527 - protein, 9 aa, Homo Sapiens
NPALPSDFK

SEQ ID NO: 40528 - protein, 9 aa, Homo Sapiens
ALPSDFKTI

SEQ ID NO: 40529 - protein, 9 aa, Homo Sapiens
LPSDFKTIL

SEQ ID NO: 40530 - protein, 10 aa, Homo Sapiens
MPRAPRCRAV

SEQ ID NO: 40531 - protein, 10 aa, Homo Sapiens
APRCRAVRSL

SEQ ID NO: 40532 - protein, 10 aa, Homo Sapiens
RCRAVRSLLR

SEQ ID NO: 40533 - protein, 10 aa, Homo Sapiens
AVRSLLRSHY

SEQ ID NO: 40534 - protein, 10 aa, Homo Sapiens
VRSLLRSHYR

SEQ ID NO: 40535 - protein, 10 aa, Homo Sapiens
RSLLRSHYRE

SEQ ID NO: 40536 - protein, 10 aa, Homo Sapiens
SLLRSHYREV

SEQ ID NO: 40537 - protein, 10 aa, Homo Sapiens
LLRSHYREVL

SEQ ID NO: 40538 - protein, 10 aa, Homo Sapiens
RSHYREVLPL

SEQ ID NO: 40539 - protein, 10 aa, Homo Sapiens
YREVLPLATF

SEQ ID NO: 40540 - protein, 10 aa, Homo Sapiens
REVLPLATFV

SEQ ID NO: 40541 - protein, 10 aa, Homo Sapiens
EVLPLATFVR

SEQ ID NO: 40542 - protein, 10 aa, Homo Sapiens
VLPLATFVRR

SEQ ID NO: 40543 - protein, 10 aa, Homo Sapiens
LPLATFVRRL

SEQ ID NO: 40544 - protein, 10 aa, Homo Sapiens
RRLGPQGWRL

SEQ ID NO: 40545 - protein, 10 aa, Homo Sapiens
RLGPQGWRLV

SEQ ID NO: 40546 - protein, 10 aa, Homo Sapiens
GPQGWRLVQR

SEQ ID NO: 40547 - protein, 10 aa, Homo Sapiens
RLVQRGDPAA

SEQ ID NO: 40548 - protein, 10 aa, Homo Sapiens
LVQRGDPAAF

SEQ ID NO: 40549 - protein, 10 aa, Homo Sapiens
VQRGDPAAFR

SEQ ID NO: 40550 - protein, 10 aa, Homo Sapiens
FRALVAQCLV

SEQ ID NO: 40551 - protein, 10 aa, Homo Sapiens
ALVAQCLVCV

SEQ ID NO: 40552 - protein, 10 aa, Homo Sapiens
CLVCVPWDAR

SEQ ID NO: 40553 - protein, 10 aa, Homo Sapiens
VPWDARPPPA

SEQ ID NO: 40554 - protein, 10 aa, Homo Sapiens
PPAAPSFRQV

SEQ ID NO: 40555 - protein, 10 aa, Homo Sapiens
APSFRQVSCL

SEQ ID NO: 40556 - protein, 10 aa, Homo Sapiens
PSFRQVSCLK

SEQ ID NO: 40557 - protein, 10 aa, Homo Sapiens
RQVSCLKELV

SEQ ID NO: 40558 - protein, 10 aa, Homo Sapiens
VSCLKELVAR

SEQ ID NO: 40559 - protein, 10 aa, Homo Sapiens
SCLKELVARV

SEQ ID NO: 40560 - protein, 10 aa, Homo Sapiens
CLKELVARVL

SEQ ID NO: 40561 - protein, 10 aa, Homo Sapiens
KELVARVLQR

SEQ ID NO: 40562 - protein, 10 aa, Homo Sapiens
ELVARVLQRL

SEQ ID NO: 40563 - protein, 10 aa, Homo Sapiens
ARVLQRLCER

SEQ ID NO: 40564 - protein, 10 aa, Homo Sapiens
VLQRLCERGA

SEQ ID NO: 40565 - protein, 10 aa, Homo Sapiens
LQRLCERGAK

SEQ ID NO: 40566 - protein, 10 aa, Homo Sapiens
RLCERGAKNV

SEQ ID NO: 40567 - protein, 10 aa, Homo Sapiens
NVLAFGFALL

SEQ ID NO: 40568 - protein, 10 aa, Homo Sapiens
FGFALLDGAR

SEQ ID NO: 40569 - protein, 10 aa, Homo Sapiens
ALLDGARGGP

SEQ ID NO: 40570 - protein, 10 aa, Homo Sapiens
GARGGPPEAF

SEQ ID NO: 40571 - protein, 10 aa, Homo Sapiens
GPPEAFTTSV

SEQ ID NO: 40572 - protein, 10 aa, Homo Sapiens
EAFTTSVRSY

SEQ ID NO: 40573 - protein, 10 aa, Homo Sapiens
AFTTSVRSYL

SEQ ID NO: 40574 - protein, 10 aa, Homo Sapiens
SVRSYLPNTV

SEQ ID NO: 40575 - protein, 10 aa, Homo Sapiens
SYLPNTVTDA

SEQ ID NO: 40576 - protein, 10 aa, Homo Sapiens
YLPNTVTDAL

SEQ ID NO: 40577 - protein, 10 aa, Homo Sapiens
LPNTVTDALR

SEQ ID NO: 40578 - protein, 10 aa, Homo Sapiens
ALRGSGAWGL

SEQ ID NO: 40579 - protein, 10 aa, Homo Sapiens
GSGAWGLLLR

SEQ ID NO: 40580 - protein, 10 aa, Homo Sapiens
GAWGLLLRRV

SEQ ID NO: 40581 - protein, 10 aa, Homo Sapiens
LLLRRVGDDV

SEQ ID NO: 40582 - protein, 10 aa, Homo Sapiens
LLRRVGDDVL

SEQ ID NO: 40583 - protein, 10 aa, Homo Sapiens
RRVGDDVLVH

SEQ ID NO: 40584 - protein, 10 aa, Homo Sapiens
RVGDDVLVHL

SEQ ID NO: 40585 - protein, 10 aa, Homo Sapiens
VGDDVLVHLL

SEQ ID NO: 40586 - protein, 10 aa, Homo Sapiens
VLVHLLARCA

SEQ ID NO: 40587 - protein, 10 aa, Homo Sapiens
LVHLLARCAL

SEQ ID NO: 40588 - protein, 10 aa, Homo Sapiens
VHLLARCALF

SEQ ID NO: 40589 - protein, 10 aa, Homo Sapiens
HLLARCALFV

SEQ ID NO: 40590 - protein, 10 aa, Homo Sapiens
LLARCALFVL

SEQ ID NO: 40591 - protein, 10 aa, Homo Sapiens
LARCALFVLV

SEQ ID NO: 40592 - protein, 10 aa, Homo Sapiens
ALFVLVAPSC

SEQ ID NO: 40593 - protein, 10 aa, Homo Sapiens
FVLVAPSCAY

SEQ ID NO: 40594 - protein, 10 aa, Homo Sapiens
VLVAPSCAYQ

SEQ ID NO: 40595 - protein, 10 aa, Homo Sapiens
LVAPSCAYQV

SEQ ID NO: 40596 - protein, 10 aa, Homo Sapiens
AYQVCGPPLY

SEQ ID NO: 40597 - protein, 10 aa, Homo Sapiens
YQVCGPPLYQ

SEQ ID NO: 40598 - protein, 10 aa, Homo Sapiens
QVCGPPLYQL

SEQ ID NO: 40599 - protein, 10 aa, Homo Sapiens
PPLYQLGAAT

SEQ ID NO: 40600 - protein, 10 aa, Homo Sapiens
PLYQLGAATQ

SEQ ID NO: 40601 - protein, 10 aa, Homo Sapiens
RRLGCERAWN

SEQ ID NO: 40602 - protein, 10 aa, Homo Sapiens
EAGVPLGLPA

SEQ ID NO: 40603 - protein, 10 aa, Homo Sapiens
VPLGLPAPGA

SEQ ID NO: 40604 - protein, 10 aa, Homo Sapiens
APGARRRGGS

SEQ ID NO: 40605 - protein, 10 aa, Homo Sapiens
RRRGGSASRS

SEQ ID NO: 40606 - protein, 10 aa, Homo Sapiens
RRGGSASRSL

SEQ ID NO: 40607 - protein, 10 aa, Homo Sapiens
SASRSLPLPK

SEQ ID NO: 40608 - protein, 10 aa, Homo Sapiens
ASRSLPLPKR

SEQ ID NO: 40609 - protein, 10 aa, Homo Sapiens
RSLPLPKRPR

SEQ ID NO: 40610 - protein, 10 aa, Homo Sapiens
SLPLPKRPRR

SEQ ID NO: 40611 - protein, 10 aa, Homo Sapiens
LPKRPRRGAA

SEQ ID NO: 40612 - protein, 10 aa, Homo Sapiens
RPRRGAAPEP

SEQ ID NO: 40613 - protein, 10 aa, Homo Sapiens
AAPEPERTPV

SEQ ID NO: 40614 - protein, 10 aa, Homo Sapiens
TPVGQGSWAH

SEQ ID NO: 40615 - protein, 10 aa, Homo Sapiens
RTRGPSDRGF

SEQ ID NO: 40616 - protein, 10 aa, Homo Sapiens
GPSDRGFCVV

SEQ ID NO: 40617 - protein, 10 aa, Homo Sapiens
RGFCVVSPAR

SEQ ID NO: 40618 - protein, 10 aa, Homo Sapiens
SPARPAEEAT

SEQ ID NO: 40619 - protein, 10 aa, Homo Sapiens
RPAEEATSLE

SEQ ID NO: 40620 - protein, 10 aa, Homo Sapiens
AEEATSLEGA

SEQ ID NO: 40621 - protein, 10 aa, Homo Sapiens
EEATSLEGAL

SEQ ID NO: 40622 - protein, 10 aa, Homo Sapiens
SGTRHSHPSV

SEQ ID NO: 40623 - protein, 10 aa, Homo Sapiens
HPSVGRQHHA

SEQ ID NO: 40624 - protein, 10 aa, Homo Sapiens
RQHHAGPPST

SEQ ID NO: 40625 - protein, 10 aa, Homo Sapiens
RPWDTPCPPV

SEQ ID NO: 40626 - protein, 10 aa, Homo Sapiens
TPCPPVYAET

SEQ ID NO: 40627 - protein, 10 aa, Homo Sapiens
PPVYAETKHF

SEQ ID NO: 40628 - protein, 10 aa, Homo Sapiens
PVYAETKHFL

SEQ ID NO: 40629 - protein, 10 aa, Homo Sapiens
VYAETKHFLY

SEQ ID NO: 40630 - protein, 10 aa, Homo Sapiens
AETKHFLYSS

SEQ ID NO: 40631 - protein, 10 aa, Homo Sapiens
KHFLYSSGDK

SEQ ID NO: 40632 - protein, 10 aa, Homo Sapiens
FLYSSGDKEQ

SEQ ID NO: 40633 - protein, 10 aa, Homo Sapiens
LYSSGDKEQL

SEQ ID NO: 40634 - protein, 10 aa, Homo Sapiens
YSSGDKEQLR

SEQ ID NO: 40635 - protein, 10 aa, Homo Sapiens
KEQLRPSFLL

SEQ ID NO: 40636 - protein, 10 aa, Homo Sapiens
QLRPSFLLSS

SEQ ID NO: 40637 - protein, 10 aa, Homo Sapiens
RPSFLLSSLR

SEQ ID NO: 40638 - protein, 10 aa, Homo Sapiens
FLLSSLRPSL

SEQ ID NO: 40639 - protein, 10 aa, Homo Sapiens
LLSSLRPSLT

SEQ ID NO: 40640 - protein, 10 aa, Homo Sapiens
SLRPSLTGAR

SEQ ID NO: 40641 - protein, 10 aa, Homo Sapiens
RPSLTGARRL

SEQ ID NO: 40642 - protein, 10 aa, Homo Sapiens
RLVETIFLGS

SEQ ID NO: 40643 - protein, 10 aa, Homo Sapiens
LVETIFLGSR

SEQ ID NO: 40644 - protein, 10 aa, Homo Sapiens
ETIFLGSRPW

SEQ ID NO: 40645 - protein, 10 aa, Homo Sapiens
TIFLGSRPWM

SEQ ID NO: 40646 - protein, 10 aa, Homo Sapiens
FLGSRPWMPG

SEQ ID NO: 40647 - protein, 10 aa, Homo Sapiens
MPGTPRRLPR

SEQ ID NO: 40648 - protein, 10 aa, Homo Sapiens
TPRRLPRLPQ

SEQ ID NO: 40649 - protein, 10 aa, Homo Sapiens
RRLPRLPQRY

SEQ ID NO: 40650 - protein, 10 aa, Homo Sapiens
RLPQRYWQMR

SEQ ID NO: 40651 - protein, 10 aa, Homo Sapiens
QRYWQMRPLF

SEQ ID NO: 40652 - protein, 10 aa, Homo Sapiens
RYWQMRPLFL

SEQ ID NO: 40653 - protein, 10 aa, Homo Sapiens
WQMRPLFLEL

SEQ ID NO: 40654 - protein, 10 aa, Homo Sapiens
QMRPLFLELL

SEQ ID NO: 40655 - protein, 10 aa, Homo Sapiens
FLELLGNHAQ

SEQ ID NO: 40656 - protein, 10 aa, Homo Sapiens
LLGNHAQCPY

SEQ ID NO: 40657 - protein, 10 aa, Homo Sapiens
NHAQCPYGVL

SEQ ID NO: 40658 - protein, 10 aa, Homo Sapiens
AQCPYGVLLK

SEQ ID NO: 40659 - protein, 10 aa, Homo Sapiens
GVLLKTHCPL

SEQ ID NO: 40660 - protein, 10 aa, Homo Sapiens
VLLKTHCPLR

SEQ ID NO: 40661 - protein, 10 aa, Homo Sapiens
LLKTHCPLRA

SEQ ID NO: 40662 - protein, 10 aa, Homo Sapiens
KTHCPLRAAV

SEQ ID NO: 40663 - protein, 10 aa, Homo Sapiens
CPLRAAVTPA

SEQ ID NO: 40664 - protein, 10 aa, Homo Sapiens
PLRAAVTPAA

SEQ ID NO: 40665 - protein, 10 aa, Homo Sapiens
RAAVTPAAGV

SEQ ID NO: 40666 - protein, 10 aa, Homo Sapiens
VTPAAGVCAR

SEQ ID NO: 40667 - protein, 10 aa, Homo Sapiens
CAREKPQGSV

SEQ ID NO: 40668 - protein, 10 aa, Homo Sapiens
DTDPRRLVQL

SEQ ID NO: 40669 - protein, 10 aa, Homo Sapiens
DPRRLVQLLR

SEQ ID NO: 40670 - protein, 10 aa, Homo Sapiens
RRLVQLLRQH

SEQ ID NO: 40671 - protein, 10 aa, Homo Sapiens
LLRQHSSPWQ

SEQ ID NO: 40672 - protein, 10 aa, Homo Sapiens
RQHSSPWQVY

SEQ ID NO: 40673 - protein, 10 aa, Homo Sapiens
HSSPWQVYGF

SEQ ID NO: 40674 - protein, 10 aa, Homo Sapiens
SSPWQVYGFV

SEQ ID NO: 40675 - protein, 10 aa, Homo Sapiens
SPWQVYGFVR

SEQ ID NO: 40676 - protein, 10 aa, Homo Sapiens
WQVYGFVRAC

SEQ ID NO: 40677 - protein, 10 aa, Homo Sapiens
QVYGFVRACL

SEQ ID NO: 40678 - protein, 10 aa, Homo Sapiens
VYGFVRACLR

SEQ ID NO: 40679 - protein, 10 aa, Homo Sapiens
YGFVRACLRR

SEQ ID NO: 40680 - protein, 10 aa, Homo Sapiens
FVRACLRRLV

SEQ ID NO: 40681 - protein, 10 aa, Homo Sapiens
CLRRLVPPGL

SEQ ID NO: 40682 - protein, 10 aa, Homo Sapiens
RLVPPGLWGS

SEQ ID NO: 40683 - protein, 10 aa, Homo Sapiens
LVPPGLWGSR

SEQ ID NO: 40684 - protein, 10 aa, Homo Sapiens
GLWGSRHNER

SEQ ID NO: 40685 - protein, 10 aa, Homo Sapiens
LWGSRHNERR

SEQ ID NO: 40686 - protein, 10 aa, Homo Sapiens
SRHNERRFLR

SEQ ID NO: 40687 - protein, 10 aa, Homo Sapiens
RRFLRNTKKF

SEQ ID NO: 40688 - protein, 10 aa, Homo Sapiens
RFLRNTKKFI

SEQ ID NO: 40689 - protein, 10 aa, Homo Sapiens
NTKKFISLGK

SEQ ID NO: 40690 - protein, 10 aa, Homo Sapiens
KFISLGKHAK

SEQ ID NO: 40691 - protein, 10 aa, Homo Sapiens
FISLGKHAKL

SEQ ID NO: 40692 - protein, 10 aa, Homo Sapiens
SLGKHAKLSL

SEQ ID NO: 40693 - protein, 10 aa, Homo Sapiens
KHAKLSLQEL

SEQ ID NO: 40694 - protein, 10 aa, Homo Sapiens
KLSLQELTWK

SEQ ID NO: 40695 - protein, 10 aa, Homo Sapiens
SLQELTWKMS

SEQ ID NO: 40696 - protein, 10 aa, Homo Sapiens
LQELTWKMSV

SEQ ID NO: 40697 - protein, 10 aa, Homo Sapiens
KMSVRDCAWL

SEQ ID NO: 40698 - protein, 10 aa, Homo Sapiens
MSVRDCAWLR

SEQ ID NO: 40699 - protein, 10 aa, Homo Sapiens
SVRDCAWLRR

SEQ ID NO: 40700 - protein, 10 aa, Homo Sapiens
CAWLRRSPGV

SEQ ID NO: 40701 - protein, 10 aa, Homo Sapiens
SPGVGCVPAA

SEQ ID NO: 40702 - protein, 10 aa, Homo Sapiens
CVPAAEHRLR

SEQ ID NO: 40703 - protein, 10 aa, Homo Sapiens
AEHRLREEIL

SEQ ID NO: 40704 - protein, 10 aa, Homo Sapiens
HRLREEILAK

SEQ ID NO: 40705 - protein, 10 aa, Homo Sapiens
RLREEILAKF

SEQ ID NO: 40706 - protein, 10 aa, Homo Sapiens
EEILAKFLHW

SEQ ID NO: 40707 - protein, 10 aa, Homo Sapiens
EILAKFLHWL

SEQ ID NO: 40708 - protein, 10 aa, Homo Sapiens
ILAKFLHWLM

SEQ ID NO: 40709 - protein, 10 aa, Homo Sapiens
AKFLHWLMSV

SEQ ID NO: 40710 - protein, 10 aa, Homo Sapiens
KFLHWLMSVY

SEQ ID NO: 40711 - protein, 10 aa, Homo Sapiens
FLHWLMSVYV

SEQ ID NO: 40712 - protein, 10 aa, Homo Sapiens
LHWLMSVYVV

SEQ ID NO: 40713 - protein, 10 aa, Homo Sapiens
WLMSVYVVEL

SEQ ID NO: 40714 - protein, 10 aa, Homo Sapiens
LMSVYVVELL

SEQ ID NO: 40715 - protein, 10 aa, Homo Sapiens
MSVYVVELLR

SEQ ID NO: 40716 - protein, 10 aa, Homo Sapiens
VYVVELLRSF

SEQ ID NO: 40717 - protein, 10 aa, Homo Sapiens
YVVELLRSFF

SEQ ID NO: 40718 - protein, 10 aa, Homo Sapiens
VVELLRSFFY

SEQ ID NO: 40719 - protein, 10 aa, Homo Sapiens
VELLRSFFYV

SEQ ID NO: 40720 - protein, 10 aa, Homo Sapiens
ELLRSFFYVT

SEQ ID NO: 40721 - protein, 10 aa, Homo Sapiens
SFFYVTETTF

SEQ ID NO: 40722 - protein, 10 aa, Homo Sapiens
FYVTETTFQK

SEQ ID NO: 40723 - protein, 10 aa, Homo Sapiens
ETTFQKNRLF

SEQ ID NO: 40724 - protein, 10 aa, Homo Sapiens
TTFQKNRLFF

SEQ ID NO: 40725 - protein, 10 aa, Homo Sapiens
TFQKNRLFFY

SEQ ID NO: 40726 - protein, 10 aa, Homo Sapiens
FQKNRLFFYR

SEQ ID NO: 40727 - protein, 10 aa, Homo Sapiens
QKNRLFFYRK

SEQ ID NO: 40728 - protein, 10 aa, Homo Sapiens
RLFFYRKSVW

SEQ ID NO: 40729 - protein, 10 aa, Homo Sapiens
FFYRKSVWSK

SEQ ID NO: 40730 - protein, 10 aa, Homo Sapiens
FYRKSVWSKL

SEQ ID NO: 40731 - protein, 10 aa, Homo Sapiens
VWSKLQSIGI

SEQ ID NO: 40732 - protein, 10 aa, Homo Sapiens
WSKLQSIGIR

SEQ ID NO: 40733 - protein, 10 aa, Homo Sapiens
LQSIGIRQHL

SEQ ID NO: 40734 - protein, 10 aa, Homo Sapiens
QSIGIRQHLK

SEQ ID NO: 40735 - protein, 10 aa, Homo Sapiens
SIGIRQHLKR

SEQ ID NO: 40736 - protein, 10 aa, Homo Sapiens
RQHLKRVQLR

SEQ ID NO: 40737 - protein, 10 aa, Homo Sapiens
HLKRVQLREL

SEQ ID NO: 40738 - protein, 10 aa, Homo Sapiens
QLRELSEAEV

SEQ ID NO: 40739 - protein, 10 aa, Homo Sapiens
LSEAEVRQHR

SEQ ID NO: 40740 - protein, 10 aa, Homo Sapiens
RQHREARPAL

SEQ ID NO: 40741 - protein, 10 aa, Homo Sapiens
EARPALLTSR

SEQ ID NO: 40742 - protein, 10 aa, Homo Sapiens
RPALLTSRLR

SEQ ID NO: 40743 - protein, 10 aa, Homo Sapiens
ALLTSRLRFI

SEQ ID NO: 40744 - protein, 10 aa, Homo Sapiens
LTSRLRFIPK

SEQ ID NO: 40745 - protein, 10 aa, Homo Sapiens
RFIPKPDGLR

SEQ ID NO: 40746 - protein, 10 aa, Homo Sapiens
IPKPDGLRPI

SEQ ID NO: 40747 - protein, 10 aa, Homo Sapiens
GLRPIVNMDY

SEQ ID NO: 40748 - protein, 10 aa, Homo Sapiens
RPIVNMDYVV

SEQ ID NO: 40749 - protein, 10 aa, Homo Sapiens
IVNMDYVVGA

SEQ ID NO: 40750 - protein, 10 aa, Homo Sapiens
MDYVVGARTF

SEQ ID NO: 40751 - protein, 10 aa, Homo Sapiens
DYVVGARTFR

SEQ ID NO: 40752 - protein, 10 aa, Homo Sapiens
YVVGARTFRR

SEQ ID NO: 40753 - protein, 10 aa, Homo Sapiens
GARTFRREKR

SEQ ID NO: 40754 - protein, 10 aa, Homo Sapiens
TFRREKRAER

SEQ ID NO: 40755 - protein, 10 aa, Homo Sapiens
RAERLTSRVK

SEQ ID NO: 40756 - protein, 10 aa, Homo Sapiens
AERLTSRVKA

SEQ ID NO: 40757 - protein, 10 aa, Homo Sapiens
ALFSVLNYER

SEQ ID NO: 40758 - protein, 10 aa, Homo Sapiens
FSVLNYERAR

SEQ ID NO: 40759 - protein, 10 aa, Homo Sapiens
SVLNYERARR

SEQ ID NO: 40760 - protein, 10 aa, Homo Sapiens
NYERARRPGL

SEQ ID NO: 40761 - protein, 10 aa, Homo Sapiens
RARRPGLLGA

SEQ ID NO: 40762 - protein, 10 aa, Homo Sapiens
RRPGLLGASV

SEQ ID NO: 40763 - protein, 10 aa, Homo Sapiens
RPGLLGASVL

SEQ ID NO: 40764 - protein, 10 aa, Homo Sapiens
GLLGASVLGL

SEQ ID NO: 40765 - protein, 10 aa, Homo Sapiens
SVLGLDDIHR

SEQ ID NO: 40766 - protein, 10 aa, Homo Sapiens
VLGLDDIHRA

SEQ ID NO: 40767 - protein, 10 aa, Homo Sapiens
GLDDIHRAWR

SEQ ID NO: 40768 - protein, 10 aa, Homo Sapiens
DIHRAWRTFV

SEQ ID NO: 40769 - protein, 10 aa, Homo Sapiens
IHRAWRTFVL

SEQ ID NO: 40770 - protein, 10 aa, Homo Sapiens
HRAWRTFVLR

SEQ ID NO: 40771 - protein, 10 aa, Homo Sapiens
RAWRTFVLRV

SEQ ID NO: 40772 - protein, 10 aa, Homo Sapiens
AWRTFVLRVR

SEQ ID NO: 40773 - protein, 10 aa, Homo Sapiens
RTFVLRVRAQ

SEQ ID NO: 40774 - protein, 10 aa, Homo Sapiens
RVRAQDPPPE

SEQ ID NO: 40775 - protein, 10 aa, Homo Sapiens
AQDPPPELYF

SEQ ID NO: 40776 - protein, 10 aa, Homo Sapiens
PPPELYFVKV

SEQ ID NO: 40777 - protein, 10 aa, Homo Sapiens
FVKVDVTGAY

SEQ ID NO: 40778 - protein, 10 aa, Homo Sapiens
GAYDTIPQDR

SEQ ID NO: 40779 - protein, 10 aa, Homo Sapiens
AYDTIPQDRL

SEQ ID NO: 40780 - protein, 10 aa, Homo Sapiens
TIPQDRLTEV

SEQ ID NO: 40781 - protein, 10 aa, Homo Sapiens
IPQDRLTEVI

SEQ ID NO: 40782 - protein, 10 aa, Homo Sapiens
RLTEVIASII

SEQ ID NO: 40783 - protein, 10 aa, Homo Sapiens
LTEVIASIIK

SEQ ID NO: 40784 - protein, 10 aa, Homo Sapiens
EVIASIIKPQ

SEQ ID NO: 40785 - protein, 10 aa, Homo Sapiens
ASIIKPQNTY

SEQ ID NO: 40786 - protein, 10 aa, Homo Sapiens
IIKPQNTYCV

SEQ ID NO: 40787 - protein, 10 aa, Homo Sapiens
KPQNTYCVRR

SEQ ID NO: 40788 - protein, 10 aa, Homo Sapiens
NTYCVRRYAV

SEQ ID NO: 40789 - protein, 10 aa, Homo Sapiens
CVRRYAVVQK

SEQ ID NO: 40790 - protein, 10 aa, Homo Sapiens
RRYAVVQKAA

SEQ ID NO: 40791 - protein, 10 aa, Homo Sapiens
VVQKAAHGHV

SEQ ID NO: 40792 - protein, 10 aa, Homo Sapiens
AAHGHVRKAF

SEQ ID NO: 40793 - protein, 10 aa, Homo Sapiens
AHGHVRKAFK

SEQ ID NO: 40794 - protein, 10 aa, Homo Sapiens
HVRKAFKSHV

SEQ ID NO: 40795 - protein, 10 aa, Homo Sapiens
KAFKSHVSTL

SEQ ID NO: 40796 - protein, 10 aa, Homo Sapiens
VSTLTDLQPY

SEQ ID NO: 40797 - protein, 10 aa, Homo Sapiens
STLTDLQPYM

SEQ ID NO: 40798 - protein, 10 aa, Homo Sapiens
TLTDLQPYMR

SEQ ID NO: 40799 - protein, 10 aa, Homo Sapiens
DLQPYMRQFV

SEQ ID NO: 40800 - protein, 10 aa, Homo Sapiens
LQPYMRQFVA

SEQ ID NO: 40801 - protein, 10 aa, Homo Sapiens
QPYMRQFVAH

SEQ ID NO: 40802 - protein, 10 aa, Homo Sapiens
PYMRQFVAHL

SEQ ID NO: 40803 - protein, 10 aa, Homo Sapiens
YMRQFVAHLQ

SEQ ID NO: 40804 - protein, 10 aa, Homo Sapiens
RQFVAHLQET

SEQ ID NO: 40805 - protein, 10 aa, Homo Sapiens
ETSPLRDAVV

SEQ ID NO: 40806 - protein, 10 aa, Homo Sapiens
PLRDAVVIEQ

SEQ ID NO: 40807 - protein, 10 aa, Homo Sapiens
AVVIEQSSSL

SEQ ID NO: 40808 - protein, 10 aa, Homo Sapiens
SSLNEASSGL

SEQ ID NO: 40809 - protein, 10 aa, Homo Sapiens
SLNEASSGLF

SEQ ID NO: 40810 - protein, 10 aa, Homo Sapiens
EASSGLFDVF

SEQ ID NO: 40811 - protein, 10 aa, Homo Sapiens
SSGLFDVFLR

SEQ ID NO: 40812 - protein, 10 aa, Homo Sapiens
GLFDVFLRFM

SEQ ID NO: 40813 - protein, 10 aa, Homo Sapiens
DVFLRFMCHH

SEQ ID NO: 40814 - protein, 10 aa, Homo Sapiens
FLRFMCHHAV

SEQ ID NO: 40815 - protein, 10 aa, Homo Sapiens
LRFMCHHAVR

SEQ ID NO: 40816 - protein, 10 aa, Homo Sapiens
RFMCHHAVRI

SEQ ID NO: 40817 - protein, 10 aa, Homo Sapiens
FMCHHAVRIR

SEQ ID NO: 40818 - protein, 10 aa, Homo Sapiens
HAVRIRGKSY

SEQ ID NO: 40819 - protein, 10 aa, Homo Sapiens
AVRIRGKSYV

SEQ ID NO: 40820 - protein, 10 aa, Homo Sapiens
GIPQGSILST

SEQ ID NO: 40821 - protein, 10 aa, Homo Sapiens
IPQGSILSTL

SEQ ID NO: 40822 - protein, 10 aa, Homo Sapiens
SILSTLLCSL

SEQ ID NO: 40823 - protein, 10 aa, Homo Sapiens
ILSTLLCSLC

SEQ ID NO: 40824 - protein, 10 aa, Homo Sapiens
LSTLLCSLCY

SEQ ID NO: 40825 - protein, 10 aa, Homo Sapiens
LLCSLCYGDM

SEQ ID NO: 40826 - protein, 10 aa, Homo Sapiens
SLCYGDMENK

SEQ ID NO: 40827 - protein, 10 aa, Homo Sapiens
LCYGDMENKL

SEQ ID NO: 40828 - protein, 10 aa, Homo Sapiens
CYGDMENKLF

SEQ ID NO: 40829 - protein, 10 aa, Homo Sapiens
MENKLFAGIR

SEQ ID NO: 40830 - protein, 10 aa, Homo Sapiens
ENKLFAGIRR

SEQ ID NO: 40831 - protein, 10 aa, Homo Sapiens
GIRRDGLLLR

SEQ ID NO: 40832 - protein, 10 aa, Homo Sapiens
RRDGLLLRLV

SEQ ID NO: 40833 - protein, 10 aa, Homo Sapiens
GLLLRLVDDF

SEQ ID NO: 40834 - protein, 10 aa, Homo Sapiens
LLLRLVDDFL

SEQ ID NO: 40835 - protein, 10 aa, Homo Sapiens
LLRLVDDFLL

SEQ ID NO: 40836 - protein, 10 aa, Homo Sapiens
RLVDDFLLVT

SEQ ID NO: 40837 - protein, 10 aa, Homo Sapiens
LVDDFLLVTP

SEQ ID NO: 40838 - protein, 10 aa, Homo Sapiens
LLVTPHLTHA

SEQ ID NO: 40839 - protein, 10 aa, Homo Sapiens
LVTPHLTHAK

SEQ ID NO: 40840 - protein, 10 aa, Homo Sapiens
TPHLTHAKTF

SEQ ID NO: 40841 - protein, 10 aa, Homo Sapiens
HLTHAKTFLR

SEQ ID NO: 40842 - protein, 10 aa, Homo Sapiens
THAKTFLRTL

SEQ ID NO: 40843 - protein, 10 aa, Homo Sapiens
HAKTFLRTLV

SEQ ID NO: 40844 - protein, 10 aa, Homo Sapiens
AKTFLRTLVR

SEQ ID NO: 40845 - protein, 10 aa, Homo Sapiens
RTLVRGVPEY

SEQ ID NO: 40846 - protein, 10 aa, Homo Sapiens
EYGCVVNLRK

SEQ ID NO: 40847 - protein, 10 aa, Homo Sapiens
CVVNLRKTVV

SEQ ID NO: 40848 - protein, 10 aa, Homo Sapiens
FPVEDEALGG

SEQ ID NO: 40849 - protein, 10 aa, Homo Sapiens
DEALGGTAFV

SEQ ID NO: 40850 - protein, 10 aa, Homo Sapiens
ALGGTAFVQM

SEQ ID NO: 40851 - protein, 10 aa, Homo Sapiens
AFVQMPAHGL

SEQ ID NO: 40852 - protein, 10 aa, Homo Sapiens
FVQMPAHGLF

SEQ ID NO: 40853 - protein, 10 aa, Homo Sapiens
VQMPAHGLFP

SEQ ID NO: 40854 - protein, 10 aa, Homo Sapiens
MPAHGLFPWC

SEQ ID NO: 40855 - protein, 10 aa, Homo Sapiens
GLFPWCGLLL

SEQ ID NO: 40856 - protein, 10 aa, Homo Sapiens
FPWCGLLLDT

SEQ ID NO: 40857 - protein, 10 aa, Homo Sapiens
LLLDTRTLEV

SEQ ID NO: 40858 - protein, 10 aa, Homo Sapiens
LLDTRTLEVQ

SEQ ID NO: 40859 - protein, 10 aa, Homo Sapiens
LEVQSDYSSY

SEQ ID NO: 40860 - protein, 10 aa, Homo Sapiens
EVQSDYSSYA

SEQ ID NO: 40861 - protein, 10 aa, Homo Sapiens
VQSDYSSYAR

SEQ ID NO: 40862 - protein, 10 aa, Homo Sapiens
DYSSYARTSI

SEQ ID NO: 40863 - protein, 10 aa, Homo Sapiens
YSSYARTSIR

SEQ ID NO: 40864 - protein, 10 aa, Homo Sapiens
YARTSIRASL

SEQ ID NO: 40865 - protein, 10 aa, Homo Sapiens
RTSIRASLTF

SEQ ID NO: 40866 - protein, 10 aa, Homo Sapiens
SIRASLTFNR

SEQ ID NO: 40867 - protein, 10 aa, Homo Sapiens
ASLTFNRGFK

SEQ ID NO: 40868 - protein, 10 aa, Homo Sapiens
SLTFNRGFKA

SEQ ID NO: 40869 - protein, 10 aa, Homo Sapiens
TFNRGFKAGR

SEQ ID NO: 40870 - protein, 10 aa, Homo Sapiens
RGFKAGRNMR

SEQ ID NO: 40871 - protein, 10 aa, Homo Sapiens
GFKAGRNMRR

SEQ ID NO: 40872 - protein, 10 aa, Homo Sapiens
NMRRKLFGVL

SEQ ID NO: 40873 - protein, 10 aa, Homo Sapiens
MRRKLFGVLR

SEQ ID NO: 40874 - protein, 10 aa, Homo Sapiens
RRKLFGVLRL

SEQ ID NO: 40875 - protein, 10 aa, Homo Sapiens
RKLFGVLRLK

SEQ ID NO: 40876 - protein, 10 aa, Homo Sapiens
KLFGVLRLKC

SEQ ID NO: 40877 - protein, 10 aa, Homo Sapiens
GVLRLKCHSL

SEQ ID NO: 40878 - protein, 10 aa, Homo Sapiens
VLRLKCHSLF

SEQ ID NO: 40879 - protein, 10 aa, Homo Sapiens
SLFLDLQVNS

SEQ ID NO: 40880 - protein, 10 aa, Homo Sapiens
LFLDLQVNSL

SEQ ID NO: 40881 - protein, 10 aa, Homo Sapiens
FLDLQVNSLQ

SEQ ID NO: 40882 - protein, 10 aa, Homo Sapiens
DLQVNSLQTV

SEQ ID NO: 40883 - protein, 10 aa, Homo Sapiens
LQVNSLQTVC

SEQ ID NO: 40884 - protein, 10 aa, Homo Sapiens
SLQTVCTNIY

SEQ ID NO: 40885 - protein, 10 aa, Homo Sapiens
LQTVCTNIYK

SEQ ID NO: 40886 - protein, 10 aa, Homo Sapiens
QTVCTNIYKI

SEQ ID NO: 40887 - protein, 10 aa, Homo Sapiens
NIYKILLLQA

SEQ ID NO: 40888 - protein, 10 aa, Homo Sapiens
IYKILLLQAY

SEQ ID NO: 40889 - protein, 10 aa, Homo Sapiens
YKILLLQAYR

SEQ ID NO: 40890 - protein, 10 aa, Homo Sapiens
LLLQAYRFHA

SEQ ID NO: 40891 - protein, 10 aa, Homo Sapiens
LLQAYRFHAC

SEQ ID NO: 40892 - protein, 10 aa, Homo Sapiens
LQAYRFHACV

SEQ ID NO: 40893 - protein, 10 aa, Homo Sapiens
QAYRFHACVL

SEQ ID NO: 40894 - protein, 10 aa, Homo Sapiens
AYRFHACVLQ

SEQ ID NO: 40895 - protein, 10 aa, Homo Sapiens
YRFHACVLQL

SEQ ID NO: 40896 - protein, 10 aa, Homo Sapiens
VLQLPFHQQV

SEQ ID NO: 40897 - protein, 10 aa, Homo Sapiens
LQLPFHQQVW

SEQ ID NO: 40898 - protein, 10 aa, Homo Sapiens
QLPFHQQVWK

SEQ ID NO: 40899 - protein, 10 aa, Homo Sapiens
HQQVWKNPTF

SEQ ID NO: 40900 - protein, 10 aa, Homo Sapiens
QQVWKNPTFF

SEQ ID NO: 40901 - protein, 10 aa, Homo Sapiens
QVWKNPTFFL

SEQ ID NO: 40902 - protein, 10 aa, Homo Sapiens
VWKNPTFFLR

SEQ ID NO: 40903 - protein, 10 aa, Homo Sapiens
WKNPTFFLRV

SEQ ID NO: 40904 - protein, 10 aa, Homo Sapiens
VISDTASLCY

SEQ ID NO: 40905 - protein, 10 aa, Homo Sapiens
DTASLCYSIL

SEQ ID NO: 40906 - protein, 10 aa, Homo Sapiens
TASLCYSILK

SEQ ID NO: 40907 - protein, 10 aa, Homo Sapiens
SLCYSILKAK

SEQ ID NO: 40908 - protein, 10 aa, Homo Sapiens
GMSLGAKGAA

SEQ ID NO: 40909 - protein, 10 aa, Homo Sapiens
AAGPLPSEAV

SEQ ID NO: 40910 - protein, 10 aa, Homo Sapiens
GPLPSEAVQW

SEQ ID NO: 40911 - protein, 10 aa, Homo Sapiens
PLPSEAVQWL

SEQ ID NO: 40912 - protein, 10 aa, Homo Sapiens
LPSEAVQWLC

SEQ ID NO: 40913 - protein, 10 aa, Homo Sapiens
EAVQWLCHQA

SEQ ID NO: 40914 - protein, 10 aa, Homo Sapiens
AVQWLCHQAF

SEQ ID NO: 40915 - protein, 10 aa, Homo Sapiens
VQWLCHQAFL

SEQ ID NO: 40916 - protein, 10 aa, Homo Sapiens
QWLCHQAFLL

SEQ ID NO: 40917 - protein, 10 aa, Homo Sapiens
WLCHQAFLLK

SEQ ID NO: 40918 - protein, 10 aa, Homo Sapiens
HQAFLLKLTR

SEQ ID NO: 40919 - protein, 10 aa, Homo Sapiens
AFLLKLTRHR

SEQ ID NO: 40920 - protein, 10 aa, Homo Sapiens
FLLKLTRHRV

SEQ ID NO: 40921 - protein, 10 aa, Homo Sapiens
KLTRHRVTYV

SEQ ID NO: 40922 - protein, 10 aa, Homo Sapiens
TRHRVTYVPL

SEQ ID NO: 40923 - protein, 10 aa, Homo Sapiens
VTYVPLLGSL

SEQ ID NO: 40924 - protein, 10 aa, Homo Sapiens
TYVPLLGSLR

SEQ ID NO: 40925 - protein, 10 aa, Homo Sapiens
VPLLGSLRTA

SEQ ID NO: 40926 - protein, 10 aa, Homo Sapiens
PLLGSLRTAQ

SEQ ID NO: 40927 - protein, 10 aa, Homo Sapiens
LLGSLRTAQT

SEQ ID NO: 40928 - protein, 10 aa, Homo Sapiens
RTAQTQLSRK

SEQ ID NO: 40929 - protein, 10 aa, Homo Sapiens
TQLSRKLPGT

SEQ ID NO: 40930 - protein, 10 aa, Homo Sapiens
QLSRKLPGTT

SEQ ID NO: 40931 - protein, 10 aa, Homo Sapiens
RKLPGTTLTA

SEQ ID NO: 40932 - protein, 10 aa, Homo Sapiens
KLPGTTLTAL

SEQ ID NO: 40933 - protein, 10 aa, Homo Sapiens
TTLTALEAAA

SEQ ID NO: 40934 - protein, 10 aa, Homo Sapiens
TALEAAANPA

SEQ ID NO: 40935 - protein, 10 aa, Homo Sapiens
ALEAAANPAL

SEQ ID NO: 40936 - protein, 10 aa, Homo Sapiens
EAAANPALPS

SEQ ID NO: 40937 - protein, 10 aa, Homo Sapiens
ALPSDFKTIL

SEQ ID NO: 40938 - protein, 11 aa, Homo Sapiens
MPRAPRCRAVR

SEQ ID NO: 40939 - protein, 11 aa, Homo Sapiens
RAPRCRAVRSL

SEQ ID NO: 40940 - protein, 11 aa, Homo Sapiens
APRCRAVRSLL

SEQ ID NO: 40941 - protein, 11 aa, Homo Sapiens
RAVRSLLRSHY

SEQ ID NO: 40942 - protein, 11 aa, Homo Sapiens
AVRSLLRSHYR

SEQ ID NO: 40943 - protein, 11 aa, Homo Sapiens
SLLRSHYREVL

SEQ ID NO: 40944 - protein, 11 aa, Homo Sapiens
RSHYREVLPLA

SEQ ID NO: 40945 - protein, 11 aa, Homo Sapiens
HYREVLPLATF

SEQ ID NO: 40946 - protein, 11 aa, Homo Sapiens
REVLPLATFVR

SEQ ID NO: 40947 - protein, 11 aa, Homo Sapiens
EVLPLATFVRR

SEQ ID NO: 40948 - protein, 11 aa, Homo Sapiens
VLPLATFVRRL

SEQ ID NO: 40949 - protein, 11 aa, Homo Sapiens
LPLATFVRRLG

SEQ ID NO: 40950 - protein, 11 aa, Homo Sapiens
FVRRLGPQGWR

SEQ ID NO: 40951 - protein, 11 aa, Homo Sapiens
RRLGPQGWRLV

SEQ ID NO: 40952 - protein, 11 aa, Homo Sapiens
RLGPQGWRLVQ

SEQ ID NO: 40953 - protein, 11 aa, Homo Sapiens
RLVQRGDPAAF

SEQ ID NO: 40954 - protein, 11 aa, Homo Sapiens
LVQRGDPAAFR

SEQ ID NO: 40955 - protein, 11 aa, Homo Sapiens
RGDPAAFRALV

SEQ ID NO: 40956 - protein, 11 aa, Homo Sapiens
RALVAQCLVCV

SEQ ID NO: 40957 - protein, 11 aa, Homo Sapiens
LVAQCLVCVPW

SEQ ID NO: 40958 - protein, 11 aa, Homo Sapiens
VPWDARPPPAA

SEQ ID NO: 40959 - protein, 11 aa, Homo Sapiens
DARPPPAAPSF

SEQ ID NO: 40960 - protein, 11 aa, Homo Sapiens
APSFRQVSCLK

SEQ ID NO: 40961 - protein, 11 aa, Homo Sapiens
SFRQVSCLKEL

SEQ ID NO: 40962 - protein, 11 aa, Homo Sapiens
RQVSCLKELVA

SEQ ID NO: 40963 - protein, 11 aa, Homo Sapiens
QVSCLKELVAR

SEQ ID NO: 40964 - protein, 11 aa, Homo Sapiens
KELVARVLQRL

SEQ ID NO: 40965 - protein, 11 aa, Homo Sapiens
VARVLQRLCER

SEQ ID NO: 40966 - protein, 11 aa, Homo Sapiens
RVLQRLCERGA

SEQ ID NO: 40967 - protein, 11 aa, Homo Sapiens
VLQRLCERGAK

SEQ ID NO: 40968 - protein, 11 aa, Homo Sapiens
RLCERGAKNVL

SEQ ID NO: 40969 - protein, 11 aa, Homo Sapiens
CERGAKNVLAF

SEQ ID NO: 40970 - protein, 11 aa, Homo Sapiens
RGAKNVLAFGF

SEQ ID NO: 40971 - protein, 11 aa, Homo Sapiens
GAKNVLAFGFA

SEQ ID NO: 40972 - protein, 11 aa, Homo Sapiens
LAFGFALLDGA

SEQ ID NO: 40973 - protein, 11 aa, Homo Sapiens
AFGFALLDGAR

SEQ ID NO: 40974 - protein, 11 aa, Homo Sapiens
LLDGARGGPPE

SEQ ID NO: 40975 - protein, 11 aa, Homo Sapiens
GGPPEAFTTSV

SEQ ID NO: 40976 - protein, 11 aa, Homo Sapiens
EAFTTSVRSYL

SEQ ID NO: 40977 - protein, 11 aa, Homo Sapiens
TSVRSYLPNTV

SEQ ID NO: 40978 - protein, 11 aa, Homo Sapiens
SYLPNTVTDAL

SEQ ID NO: 40979 - protein, 11 aa, Homo Sapiens
YLPNTVTDALR

SEQ ID NO: 40980 - protein, 11 aa, Homo Sapiens
TVTDALRGSGA

SEQ ID NO: 40981 - protein, 11 aa, Homo Sapiens
VTDALRGSGAW

SEQ ID NO: 40982 - protein, 11 aa, Homo Sapiens
DALRGSGAWGL

SEQ ID NO: 40983 - protein, 11 aa, Homo Sapiens
ALRGSGAWGLL

SEQ ID NO: 40984 - protein, 11 aa, Homo Sapiens
GSGAWGLLLRR

SEQ ID NO: 40985 - protein, 11 aa, Homo Sapiens
SGAWGLLLRRV

SEQ ID NO: 40986 - protein, 11 aa, Homo Sapiens
GLLLRRVGDDV

SEQ ID NO: 40987 - protein, 11 aa, Homo Sapiens
LLLRRVGDDVL

SEQ ID NO: 40988 - protein, 11 aa, Homo Sapiens
LLRRVGDDVLV

SEQ ID NO: 40989 - protein, 11 aa, Homo Sapiens
RRVGDDVLVHL

SEQ ID NO: 40990 - protein, 11 aa, Homo Sapiens
RVGDDVLVHLL

SEQ ID NO: 40991 - protein, 11 aa, Homo Sapiens
VLVHLLARCAL

SEQ ID NO: 40992 - protein, 11 aa, Homo Sapiens
LVHLLARCALF

SEQ ID NO: 40993 - protein, 11 aa, Homo Sapiens
HLLARCALFVL

SEQ ID NO: 40994 - protein, 11 aa, Homo Sapiens
LLARCALFVLV

SEQ ID NO: 40995 - protein, 11 aa, Homo Sapiens
ALFVLVAPSCA

SEQ ID NO: 40996 - protein, 11 aa, Homo Sapiens
LFVLVAPSCAY

SEQ ID NO: 40997 - protein, 11 aa, Homo Sapiens
VLVAPSCAYQV

SEQ ID NO: 40998 - protein, 11 aa, Homo Sapiens
SCAYQVCGPPL

SEQ ID NO: 40999 - protein, 11 aa, Homo Sapiens
CAYQVCGPPLY

SEQ ID NO: 41000 - protein, 11 aa, Homo Sapiens
YQVCGPPLYQL

SEQ ID NO: 41001 - protein, 11 aa, Homo Sapiens
PLYQLGAATQA

SEQ ID NO: 41002 - protein, 11 aa, Homo Sapiens
LYQLGAATQAR

SEQ ID NO: 41003 - protein, 11 aa, Homo Sapiens
YQLGAATQARP

SEQ ID NO: 41004 - protein, 11 aa, Homo Sapiens
PPHASGPRRRL

SEQ ID NO: 41005 - protein, 11 aa, Homo Sapiens
GPRRRLGCERA

SEQ ID NO: 41006 - protein, 11 aa, Homo Sapiens
RRLGCERAWNH

SEQ ID NO: 41007 - protein, 11 aa, Homo Sapiens
NHSVREAGVPL

SEQ ID NO: 41008 - protein, 11 aa, Homo Sapiens
SVREAGVPLGL

SEQ ID NO: 41009 - protein, 11 aa, Homo Sapiens
GVPLGLPAPGA

SEQ ID NO: 41010 - protein, 11 aa, Homo Sapiens
APGARRRGGSA

SEQ ID NO: 41011 - protein, 11 aa, Homo Sapiens
GARRRGGSASR

SEQ ID NO: 41012 - protein, 11 aa, Homo Sapiens
RRRGGSASRSL

SEQ ID NO: 41013 - protein, 11 aa, Homo Sapiens
GSASRSLPLPK

SEQ ID NO: 41014 - protein, 11 aa, Homo Sapiens
SASRSLPLPKR

SEQ ID NO: 41015 - protein, 11 aa, Homo Sapiens
RSLPLPKRPRR

SEQ ID NO: 41016 - protein, 11 aa, Homo Sapiens
LPLPKRPRRGA

SEQ ID NO: 41017 - protein, 11 aa, Homo Sapiens
RPRRGAAPEPE

SEQ ID NO: 41018 - protein, 11 aa, Homo Sapiens
GAAPEPERTPV

SEQ ID NO: 41019 - protein, 11 aa, Homo Sapiens
VVSPARPAEEA

SEQ ID NO: 41020 - protein, 11 aa, Homo Sapiens
AEEATSLEGAL

SEQ ID NO: 41021 - protein, 11 aa, Homo Sapiens
TSLEGALSGTR

SEQ ID NO: 41022 - protein, 11 aa, Homo Sapiens
ALSGTRHSHPS

SEQ ID NO: 41023 - protein, 11 aa, Homo Sapiens
GTRHSHPSVGR

SEQ ID NO: 41024 - protein, 11 aa, Homo Sapiens
AGPPSTSRPPR

SEQ ID NO: 41025 - protein, 11 aa, Homo Sapiens
RPWDTPCPPVY

SEQ ID NO: 41026 - protein, 11 aa, Homo Sapiens
DTPCPPVYAET

SEQ ID NO: 41027 - protein, 11 aa, Homo Sapiens
TPCPPVYAETK

SEQ ID NO: 41028 - protein, 11 aa, Homo Sapiens
PPVYAETKHFL

SEQ ID NO: 41029 - protein, 11 aa, Homo Sapiens
PVYAETKHFLY

SEQ ID NO: 41030 - protein, 11 aa, Homo Sapiens
FLYSSGDKEQL

SEQ ID NO: 41031 - protein, 11 aa, Homo Sapiens
LYSSGDKEQLR

SEQ ID NO: 41032 - protein, 11 aa, Homo Sapiens
QLRPSFLLSSL

SEQ ID NO: 41033 - protein, 11 aa, Homo Sapiens
FLLSSLRPSLT

SEQ ID NO: 41034 - protein, 11 aa, Homo Sapiens
SSLRPSLTGAR

SEQ ID NO: 41035 - protein, 11 aa, Homo Sapiens
SLRPSLTGARR

SEQ ID NO: 41036 - protein, 11 aa, Homo Sapiens
RPSLTGARRLV

SEQ ID NO: 41037 - protein, 11 aa, Homo Sapiens
SLTGARRLVET

SEQ ID NO: 41038 - protein, 11 aa, Homo Sapiens
RRLVETIFLGS

SEQ ID NO: 41039 - protein, 11 aa, Homo Sapiens
RLVETIFLGSR

SEQ ID NO: 41040 - protein, 11 aa, Homo Sapiens
ETIFLGSRPWM

SEQ ID NO: 41041 - protein, 11 aa, Homo Sapiens
FLGSRPWMPGT

SEQ ID NO: 41042 - protein, 11 aa, Homo Sapiens
GSRPWMPGTPR

SEQ ID NO: 41043 - protein, 11 aa, Homo Sapiens
RPWMPGTPRRL

SEQ ID NO: 41044 - protein, 11 aa, Homo Sapiens
MPGTPRRLPRL

SEQ ID NO: 41045 - protein, 11 aa, Homo Sapiens
RLPRLPQRYWQ

SEQ ID NO: 41046 - protein, 11 aa, Homo Sapiens
LPRLPQRYWQM

SEQ ID NO: 41047 - protein, 11 aa, Homo Sapiens
LPQRYWQMRPL

SEQ ID NO: 41048 - protein, 11 aa, Homo Sapiens
PQRYWQMRPLF

SEQ ID NO: 41049 - protein, 11 aa, Homo Sapiens
QRYWQMRPLFL

SEQ ID NO: 41050 - protein, 11 aa, Homo Sapiens
RYWQMRPLFLE

SEQ ID NO: 41051 - protein, 11 aa, Homo Sapiens
YWQMRPLFLEL

SEQ ID NO: 41052 - protein, 11 aa, Homo Sapiens
WQMRPLFLELL

SEQ ID NO: 41053 - protein, 11 aa, Homo Sapiens
ELLGNHAQCPY

SEQ ID NO: 41054 - protein, 11 aa, Homo Sapiens
LGNHAQCPYGV

SEQ ID NO: 41055 - protein, 11 aa, Homo Sapiens
NHAQCPYGVLL

SEQ ID NO: 41056 - protein, 11 aa, Homo Sapiens
HAQCPYGVLLK

SEQ ID NO: 41057 - protein, 11 aa, Homo Sapiens
AQCPYGVLLKT

SEQ ID NO: 41058 - protein, 11 aa, Homo Sapiens
CPYGVLLKTHC

SEQ ID NO: 41059 - protein, 11 aa, Homo Sapiens
GVLLKTHCPLR

SEQ ID NO: 41060 - protein, 11 aa, Homo Sapiens
VLLKTHCPLRA

SEQ ID NO: 41061 - protein, 11 aa, Homo Sapiens
LLKTHCPLRAA

SEQ ID NO: 41062 - protein, 11 aa, Homo Sapiens
CPLRAAVTPAA

SEQ ID NO: 41063 - protein, 11 aa, Homo Sapiens
LRAAVTPAAGV

SEQ ID NO: 41064 - protein, 11 aa, Homo Sapiens
AVTPAAGVCAR

SEQ ID NO: 41065 - protein, 11 aa, Homo Sapiens
TPAAGVCAREK

SEQ ID NO: 41066 - protein, 11 aa, Homo Sapiens
DTDPRRLVQLL

SEQ ID NO: 41067 - protein, 11 aa, Homo Sapiens
RRLVQLLRQHS

SEQ ID NO: 41068 - protein, 11 aa, Homo Sapiens
RLVQLLRQHSS

SEQ ID NO: 41069 - protein, 11 aa, Homo Sapiens
VQLLRQHSSPW

SEQ ID NO: 41070 - protein, 11 aa, Homo Sapiens
QLLRQHSSPWQ

SEQ ID NO: 41071 - protein, 11 aa, Homo Sapiens
LLRQHSSPWQV

SEQ ID NO: 41072 - protein, 11 aa, Homo Sapiens
HSSPWQVYGFV

SEQ ID NO: 41073 - protein, 11 aa, Homo Sapiens
SSPWQVYGFVR

SEQ ID NO: 41074 - protein, 11 aa, Homo Sapiens
SPWQVYGFVRA

SEQ ID NO: 41075 - protein, 11 aa, Homo Sapiens
WQVYGFVRACL

SEQ ID NO: 41076 - protein, 11 aa, Homo Sapiens
QVYGFVRACLR

SEQ ID NO: 41077 - protein, 11 aa, Homo Sapiens
VYGFVRACLRR

SEQ ID NO: 41078 - protein, 11 aa, Homo Sapiens
RLVPPGLWGSR

SEQ ID NO: 41079 - protein, 11 aa, Homo Sapiens
GLWGSRHNERR

SEQ ID NO: 41080 - protein, 11 aa, Homo Sapiens
LWGSRHNERRF

SEQ ID NO: 41081 - protein, 11 aa, Homo Sapiens
GSRHNERRFLR

SEQ ID NO: 41082 - protein, 11 aa, Homo Sapiens
RRFLRNTKKFI

SEQ ID NO: 41083 - protein, 11 aa, Homo Sapiens
FLRNTKKFISL

SEQ ID NO: 41084 - protein, 11 aa, Homo Sapiens
KKFISLGKHAK

SEQ ID NO: 41085 - protein, 11 aa, Homo Sapiens
SLGKHAKLSLQ

SEQ ID NO: 41086 - protein, 11 aa, Homo Sapiens
HAKLSLQELTW

SEQ ID NO: 41087 - protein, 11 aa, Homo Sapiens
KLSLQELTWKM

SEQ ID NO: 41088 - protein, 11 aa, Homo Sapiens
SLQELTWKMSV

SEQ ID NO: 41089 - protein, 11 aa, Homo Sapiens
LTWKMSVRDCA

SEQ ID NO: 41090 - protein, 11 aa, Homo Sapiens
KMSVRDCAWLR

SEQ ID NO: 41091 - protein, 11 aa, Homo Sapiens
MSVRDCAWLRR

SEQ ID NO: 41092 - protein, 11 aa, Homo Sapiens
DCAWLRRSPGV

SEQ ID NO: 41093 - protein, 11 aa, Homo Sapiens
WLRRSPGVGCV

SEQ ID NO: 41094 - protein, 11 aa, Homo Sapiens
GVGCVPAAEHR

SEQ ID NO: 41095 - protein, 11 aa, Homo Sapiens
AEHRLREEILA

SEQ ID NO: 41096 - protein, 11 aa, Homo Sapiens
HRLREEILAKF

SEQ ID NO: 41097 - protein, 11 aa, Homo Sapiens
RLREEILAKFL

SEQ ID NO: 41098 - protein, 11 aa, Homo Sapiens
EEILAKFLHWL

SEQ ID NO: 41099 - protein, 11 aa, Homo Sapiens
EILAKFLHWLM

SEQ ID NO: 41100 - protein, 11 aa, Homo Sapiens
ILAKFLHWLMS

SEQ ID NO: 41101 - protein, 11 aa, Homo Sapiens
LAKFLHWLMSV

SEQ ID NO: 41102 - protein, 11 aa, Homo Sapiens
KFLHWLMSVYV

SEQ ID NO: 41103 - protein, 11 aa, Homo Sapiens
FLHWLMSVYVV

SEQ ID NO: 41104 - protein, 11 aa, Homo Sapiens
HWLMSVYVVEL

SEQ ID NO: 41105 - protein, 11 aa, Homo Sapiens
WLMSVYVVELL

SEQ ID NO: 41106 - protein, 11 aa, Homo Sapiens
LMSVYVVELLR

SEQ ID NO: 41107 - protein, 11 aa, Homo Sapiens
SVYVVELLRSF

SEQ ID NO: 41108 - protein, 11 aa, Homo Sapiens
VYVVELLRSFF

SEQ ID NO: 41109 - protein, 11 aa, Homo Sapiens
YVVELLRSFFY

SEQ ID NO: 41110 - protein, 11 aa, Homo Sapiens
VVELLRSFFYV

SEQ ID NO: 41111 - protein, 11 aa, Homo Sapiens
LLRSFFYVTET

SEQ ID NO: 41112 - protein, 11 aa, Homo Sapiens
RSFFYVTETTF

SEQ ID NO: 41113 - protein, 11 aa, Homo Sapiens
FFYVTETTFQK

SEQ ID NO: 41114 - protein, 11 aa, Homo Sapiens
YVTETTFQKNR

SEQ ID NO: 41115 - protein, 11 aa, Homo Sapiens
TETTFQKNRLF

SEQ ID NO: 41116 - protein, 11 aa, Homo Sapiens
ETTFQKNRLFF

SEQ ID NO: 41117 - protein, 11 aa, Homo Sapiens
TTFQKNRLFFY

SEQ ID NO: 41118 - protein, 11 aa, Homo Sapiens
TFQKNRLFFYR

SEQ ID NO: 41119 - protein, 11 aa, Homo Sapiens
FQKNRLFFYRK

SEQ ID NO: 41120 - protein, 11 aa, Homo Sapiens
RLFFYRKSVWS

SEQ ID NO: 41121 - protein, 11 aa, Homo Sapiens
LFFYRKSVWSK

SEQ ID NO: 41122 - protein, 11 aa, Homo Sapiens
FFYRKSVWSKL

SEQ ID NO: 41123 - protein, 11 aa, Homo Sapiens
SVWSKLQSIGI

SEQ ID NO: 41124 - protein, 11 aa, Homo Sapiens
KLQSIGIRQHL

SEQ ID NO: 41125 - protein, 11 aa, Homo Sapiens
LQSIGIRQHLK

SEQ ID NO: 41126 - protein, 11 aa, Homo Sapiens
QSIGIRQHLKR

SEQ ID NO: 41127 - protein, 11 aa, Homo Sapiens
SIGIRQHLKRV

SEQ ID NO: 41128 - protein, 11 aa, Homo Sapiens
GIRQHLKRVQL

SEQ ID NO: 41129 - protein, 11 aa, Homo Sapiens
VQLRELSEAEV

SEQ ID NO: 41130 - protein, 11 aa, Homo Sapiens
ELSEAEVRQHR

SEQ ID NO: 41131 - protein, 11 aa, Homo Sapiens
EAEVRQHREAR

SEQ ID NO: 41132 - protein, 11 aa, Homo Sapiens
RQHREARPALL

SEQ ID NO: 41133 - protein, 11 aa, Homo Sapiens
EARPALLTSRL

SEQ ID NO: 41134 - protein, 11 aa, Homo Sapiens
RPALLTSRLRF

SEQ ID NO: 41135 - protein, 11 aa, Homo Sapiens
LLTSRLRFIPK

SEQ ID NO: 41136 - protein, 11 aa, Homo Sapiens
RLRFIPKPDGL

SEQ ID NO: 41137 - protein, 11 aa, Homo Sapiens
FIPKPDGLRPI

SEQ ID NO: 41138 - protein, 11 aa, Homo Sapiens
IPKPDGLRPIV

SEQ ID NO: 41139 - protein, 11 aa, Homo Sapiens
GLRPIVNMDYV

SEQ ID NO: 41140 - protein, 11 aa, Homo Sapiens
IVNMDYVVGAR

SEQ ID NO: 41141 - protein, 11 aa, Homo Sapiens
MDYVVGARTFR

SEQ ID NO: 41142 - protein, 11 aa, Homo Sapiens
DYVVGARTFRR

SEQ ID NO: 41143 - protein, 11 aa, Homo Sapiens
VVGARTFRREK

SEQ ID NO: 41144 - protein, 11 aa, Homo Sapiens
RTFRREKRAER

SEQ ID NO: 41145 - protein, 11 aa, Homo Sapiens
REKRAERLTSR

SEQ ID NO: 41146 - protein, 11 aa, Homo Sapiens
KRAERLTSRVK

SEQ ID NO: 41147 - protein, 11 aa, Homo Sapiens
AERLTSRVKAL

SEQ ID NO: 41148 - protein, 11 aa, Homo Sapiens
ERLTSRVKALF

SEQ ID NO: 41149 - protein, 11 aa, Homo Sapiens
LTSRVKALFSV

SEQ ID NO: 41150 - protein, 11 aa, Homo Sapiens
RVKALFSVLNY

SEQ ID NO: 41151 - protein, 11 aa, Homo Sapiens
KALFSVLNYER

SEQ ID NO: 41152 - protein, 11 aa, Homo Sapiens
ALFSVLNYERA

SEQ ID NO: 41153 - protein, 11 aa, Homo Sapiens
LFSVLNYERAR

SEQ ID NO: 41154 - protein, 11 aa, Homo Sapiens
FSVLNYERARR

SEQ ID NO: 41155 - protein, 11 aa, Homo Sapiens
NYERARRPGLL

SEQ ID NO: 41156 - protein, 11 aa, Homo Sapiens
RRPGLLGASVL

SEQ ID NO: 41157 - protein, 11 aa, Homo Sapiens
SVLGLDDIHRA

SEQ ID NO: 41158 - protein, 11 aa, Homo Sapiens
LGLDDIHRAWR

SEQ ID NO: 41159 - protein, 11 aa, Homo Sapiens
GLDDIHRAWRT

SEQ ID NO: 41160 - protein, 11 aa, Homo Sapiens
DIHRAWRTFVL

SEQ ID NO: 41161 - protein, 11 aa, Homo Sapiens
IHRAWRTFVLR

SEQ ID NO: 41162 - protein, 11 aa, Homo Sapiens
HRAWRTFVLRV

SEQ ID NO: 41163 - protein, 11 aa, Homo Sapiens
RAWRTFVLRVR

SEQ ID NO: 41164 - protein, 11 aa, Homo Sapiens
RVRAQDPPPEL

SEQ ID NO: 41165 - protein, 11 aa, Homo Sapiens
RAQDPPPELYF

SEQ ID NO: 41166 - protein, 11 aa, Homo Sapiens
AQDPPPELYFV

SEQ ID NO: 41167 - protein, 11 aa, Homo Sapiens
DPPPELYFVKV

SEQ ID NO: 41168 - protein, 11 aa, Homo Sapiens
YFVKVDVTGAY

SEQ ID NO: 41169 - protein, 11 aa, Homo Sapiens
KVDVTGAYDTI

SEQ ID NO: 41170 - protein, 11 aa, Homo Sapiens
TGAYDTIPQDR

SEQ ID NO: 41171 - protein, 11 aa, Homo Sapiens
GAYDTIPQDRL

SEQ ID NO: 41172 - protein, 11 aa, Homo Sapiens
DTIPQDRLTEV

SEQ ID NO: 41173 - protein, 11 aa, Homo Sapiens
TIPQDRLTEVI

SEQ ID NO: 41174 - protein, 11 aa, Homo Sapiens
IPQDRLTEVIA

SEQ ID NO: 41175 - protein, 11 aa, Homo Sapiens
RLTEVIASIIK

SEQ ID NO: 41176 - protein, 11 aa, Homo Sapiens
IASIIKPQNTY

SEQ ID NO: 41177 - protein, 11 aa, Homo Sapiens
SIIKPQNTYCV

SEQ ID NO: 41178 - protein, 11 aa, Homo Sapiens
IIKPQNTYCVR

SEQ ID NO: 41179 - protein, 11 aa, Homo Sapiens
NTYCVRRYAVV

SEQ ID NO: 41180 - protein, 11 aa, Homo Sapiens
RRYAVVQKAAH

SEQ ID NO: 41181 - protein, 11 aa, Homo Sapiens
YAVVQKAAHGH

SEQ ID NO: 41182 - protein, 11 aa, Homo Sapiens
AVVQKAAHGHV

SEQ ID NO: 41183 - protein, 11 aa, Homo Sapiens
VVQKAAHGHVR

SEQ ID NO: 41184 - protein, 11 aa, Homo Sapiens
VQKAAHGHVRK

SEQ ID NO: 41185 - protein, 11 aa, Homo Sapiens
KAAHGHVRKAF

SEQ ID NO: 41186 - protein, 11 aa, Homo Sapiens
AAHGHVRKAFK

SEQ ID NO: 41187 - protein, 11 aa, Homo Sapiens
FKSHVSTLTDL

SEQ ID NO: 41188 - protein, 11 aa, Homo Sapiens
KSHVSTLTDLQ

SEQ ID NO: 41189 - protein, 11 aa, Homo Sapiens
HVSTLTDLQPY

SEQ ID NO: 41190 - protein, 11 aa, Homo Sapiens
STLTDLQPYMR

SEQ ID NO: 41191 - protein, 11 aa, Homo Sapiens
TLTDLQPYMRQ

SEQ ID NO: 41192 - protein, 11 aa, Homo Sapiens
LTDLQPYMRQF

SEQ ID NO: 41193 - protein, 11 aa, Homo Sapiens
DLQPYMRQFVA

SEQ ID NO: 41194 - protein, 11 aa, Homo Sapiens
QPYMRQFVAHL

SEQ ID NO: 41195 - protein, 11 aa, Homo Sapiens
FVAHLQETSPL

SEQ ID NO: 41196 - protein, 11 aa, Homo Sapiens
VAHLQETSPLR

SEQ ID NO: 41197 - protein, 11 aa, Homo Sapiens
HLQETSPLRDA

SEQ ID NO: 41198 - protein, 11 aa, Homo Sapiens
LQETSPLRDAV

SEQ ID NO: 41199 - protein, 11 aa, Homo Sapiens
ETSPLRDAVVI

SEQ ID NO: 41200 - protein, 11 aa, Homo Sapiens
DAVVIEQSSSL

SEQ ID NO: 41201 - protein, 11 aa, Homo Sapiens
NEASSGLFDVF

SEQ ID NO: 41202 - protein, 11 aa, Homo Sapiens
EASSGLFDVFL

SEQ ID NO: 41203 - protein, 11 aa, Homo Sapiens
ASSGLFDVFLR

SEQ ID NO: 41204 - protein, 11 aa, Homo Sapiens
GLFDVFLRFMC

SEQ ID NO: 41205 - protein, 11 aa, Homo Sapiens
DVFLRFMCHHA

SEQ ID NO: 41206 - protein, 11 aa, Homo Sapiens
VFLRFMCHHAV

SEQ ID NO: 41207 - protein, 11 aa, Homo Sapiens
FLRFMCHHAVR

SEQ ID NO: 41208 - protein, 11 aa, Homo Sapiens
RFMCHHAVRIR

SEQ ID NO: 41209 - protein, 11 aa, Homo Sapiens
MCHHAVRIRGK

SEQ ID NO: 41210 - protein, 11 aa, Homo Sapiens
HAVRIRGKSYV

SEQ ID NO: 41211 - protein, 11 aa, Homo Sapiens
RIRGKSYVQCQ

SEQ ID NO: 41212 - protein, 11 aa, Homo Sapiens
VQCQGIPQGSI

SEQ ID NO: 41213 - protein, 11 aa, Homo Sapiens
GIPQGSILSTL

SEQ ID NO: 41214 - protein, 11 aa, Homo Sapiens
IPQGSILSTLL

SEQ ID NO: 41215 - protein, 11 aa, Homo Sapiens
ILSTLLCSLCY

SEQ ID NO: 41216 - protein, 11 aa, Homo Sapiens
CSLCYGDMENK

SEQ ID NO: 41217 - protein, 11 aa, Homo Sapiens
SLCYGDMENKL

SEQ ID NO: 41218 - protein, 11 aa, Homo Sapiens
DMENKLFAGIR

SEQ ID NO: 41219 - protein, 11 aa, Homo Sapiens
MENKLFAGIRR

SEQ ID NO: 41220 - protein, 11 aa, Homo Sapiens
KLFAGIRRDGL

SEQ ID NO: 41221 - protein, 11 aa, Homo Sapiens
GLLLRLVDDFL

SEQ ID NO: 41222 - protein, 11 aa, Homo Sapiens
LLLRLVDDFLL

SEQ ID NO: 41223 - protein, 11 aa, Homo Sapiens
LLRLVDDFLLV

SEQ ID NO: 41224 - protein, 11 aa, Homo Sapiens
RLVDDFLLVTP

SEQ ID NO: 41225 - protein, 11 aa, Homo Sapiens
FLLVTPHLTHA

SEQ ID NO: 41226 - protein, 11 aa, Homo Sapiens
LLVTPHLTHAK

SEQ ID NO: 41227 - protein, 11 aa, Homo Sapiens
VTPHLTHAKTF

SEQ ID NO: 41228 - protein, 11 aa, Homo Sapiens
TPHLTHAKTFL

SEQ ID NO: 41229 - protein, 11 aa, Homo Sapiens
HLTHAKTFLRT

SEQ ID NO: 41230 - protein, 11 aa, Homo Sapiens
LTHAKTFLRTL

SEQ ID NO: 41231 - protein, 11 aa, Homo Sapiens
HAKTFLRTLVR

SEQ ID NO: 41232 - protein, 11 aa, Homo Sapiens
KTFLRTLVRGV

SEQ ID NO: 41233 - protein, 11 aa, Homo Sapiens
TLVRGVPEYGC

SEQ ID NO: 41234 - protein, 11 aa, Homo Sapiens
LVRGVPEYGCV

SEQ ID NO: 41235 - protein, 11 aa, Homo Sapiens
GVPEYGCVVNL

SEQ ID NO: 41236 - protein, 11 aa, Homo Sapiens
NLRKTVVNFPV

SEQ ID NO: 41237 - protein, 11 aa, Homo Sapiens
TVVNFPVEDEA

SEQ ID NO: 41238 - protein, 11 aa, Homo Sapiens
FPVEDEALGGT

SEQ ID NO: 41239 - protein, 11 aa, Homo Sapiens
VEDEALGGTAF

SEQ ID NO: 41240 - protein, 11 aa, Homo Sapiens
EALGGTAFVQM

SEQ ID NO: 41241 - protein, 11 aa, Homo Sapiens
ALGGTAFVQMP

SEQ ID NO: 41242 - protein, 11 aa, Homo Sapiens
TAFVQMPAHGL

SEQ ID NO: 41243 - protein, 11 aa, Homo Sapiens
AFVQMPAHGLF

SEQ ID NO: 41244 - protein, 11 aa, Homo Sapiens
VQMPAHGLFPW

SEQ ID NO: 41245 - protein, 11 aa, Homo Sapiens
QMPAHGLFPWC

SEQ ID NO: 41246 - protein, 11 aa, Homo Sapiens
MPAHGLFPWCG

SEQ ID NO: 41247 - protein, 11 aa, Homo Sapiens
GLFPWCGLLLD

SEQ ID NO: 41248 - protein, 11 aa, Homo Sapiens
FPWCGLLLDTR

SEQ ID NO: 41249 - protein, 11 aa, Homo Sapiens
GLLLDTRTLEV

SEQ ID NO: 41250 - protein, 11 aa, Homo Sapiens
LLLDTRTLEVQ

SEQ ID NO: 41251 - protein, 11 aa, Homo Sapiens
LLDTRTLEVQS

SEQ ID NO: 41252 - protein, 11 aa, Homo Sapiens
DTRTLEVQSDY

SEQ ID NO: 41253 - protein, 11 aa, Homo Sapiens
TLEVQSDYSSY

SEQ ID NO: 41254 - protein, 11 aa, Homo Sapiens
EVQSDYSSYAR

SEQ ID NO: 41255 - protein, 11 aa, Homo Sapiens
VQSDYSSYART

SEQ ID NO: 41256 - protein, 11 aa, Homo Sapiens
DYSSYARTSIR

SEQ ID NO: 41257 - protein, 11 aa, Homo Sapiens
YSSYARTSIRA

SEQ ID NO: 41258 - protein, 11 aa, Homo Sapiens
SYARTSIRASL

SEQ ID NO: 41259 - protein, 11 aa, Homo Sapiens
ARTSIRASLTF

SEQ ID NO: 41260 - protein, 11 aa, Homo Sapiens
TSIRASLTFNR

SEQ ID NO: 41261 - protein, 11 aa, Homo Sapiens
RASLTFNRGFK

SEQ ID NO: 41262 - protein, 11 aa, Homo Sapiens
LTFNRGFKAGR

SEQ ID NO: 41263 - protein, 11 aa, Homo Sapiens
RGFKAGRNMRR

SEQ ID NO: 41264 - protein, 11 aa, Homo Sapiens
GFKAGRNMRRK

SEQ ID NO: 41265 - protein, 11 aa, Homo Sapiens
FKAGRNMRRKL

SEQ ID NO: 41266 - protein, 11 aa, Homo Sapiens
NMRRKLFGVLR

SEQ ID NO: 41267 - protein, 11 aa, Homo Sapiens
RRKLFGVLRLK

SEQ ID NO: 41268 - protein, 11 aa, Homo Sapiens
KLFGVLRLKCH

SEQ ID NO: 41269 - protein, 11 aa, Homo Sapiens
GVLRLKCHSLF

SEQ ID NO: 41270 - protein, 11 aa, Homo Sapiens
VLRLKCHSLFL

SEQ ID NO: 41271 - protein, 11 aa, Homo Sapiens
RLKCHSLFLDL

SEQ ID NO: 41272 - protein, 11 aa, Homo Sapiens
KCHSLFLDLQV

SEQ ID NO: 41273 - protein, 11 aa, Homo Sapiens
SLFLDLQVNSL

SEQ ID NO: 41274 - protein, 11 aa, Homo Sapiens
FLDLQVNSLQT

SEQ ID NO: 41275 - protein, 11 aa, Homo Sapiens
LQVNSLQTVCT

SEQ ID NO: 41276 - protein, 11 aa, Homo Sapiens
NSLQTVCTNIY

SEQ ID NO: 41277 - protein, 11 aa, Homo Sapiens
SLQTVCTNIYK

SEQ ID NO: 41278 - protein, 11 aa, Homo Sapiens
LQTVCTNIYKI

SEQ ID NO: 41279 - protein, 11 aa, Homo Sapiens
QTVCTNIYKIL

SEQ ID NO: 41280 - protein, 11 aa, Homo Sapiens
TVCTNIYKILL

SEQ ID NO: 41281 - protein, 11 aa, Homo Sapiens
NIYKILLLQAY

SEQ ID NO: 41282 - protein, 11 aa, Homo Sapiens
IYKILLLQAYR

SEQ ID NO: 41283 - protein, 11 aa, Homo Sapiens
ILLLQAYRFHA

SEQ ID NO: 41284 - protein, 11 aa, Homo Sapiens
LLLQAYRFHAC

SEQ ID NO: 41285 - protein, 11 aa, Homo Sapiens
LLQAYRFHACV

SEQ ID NO: 41286 - protein, 11 aa, Homo Sapiens
LQAYRFHACVL

SEQ ID NO: 41287 - protein, 11 aa, Homo Sapiens
AYRFHACVLQL

SEQ ID NO: 41288 - protein, 11 aa, Homo Sapiens
RFHACVLQLPF

SEQ ID NO: 41289 - protein, 11 aa, Homo Sapiens
CVLQLPFHQQV

SEQ ID NO: 41290 - protein, 11 aa, Homo Sapiens
LQLPFHQQVWK

SEQ ID NO: 41291 - protein, 11 aa, Homo Sapiens
FHQQVWKNPTF

SEQ ID NO: 41292 - protein, 11 aa, Homo Sapiens
HQQVWKNPTFF

SEQ ID NO: 41293 - protein, 11 aa, Homo Sapiens
QQVWKNPTFFL

SEQ ID NO: 41294 - protein, 11 aa, Homo Sapiens
QVWKNPTFFLR

SEQ ID NO: 41295 - protein, 11 aa, Homo Sapiens
FLRVISDTASL

SEQ ID NO: 41296 - protein, 11 aa, Homo Sapiens
RVISDTASLCY

SEQ ID NO: 41297 - protein, 11 aa, Homo Sapiens
DTASLCYSILK

SEQ ID NO: 41298 - protein, 11 aa, Homo Sapiens
ASLCYSILKAK

SEQ ID NO: 41299 - protein, 11 aa, Homo Sapiens
YSILKAKNAGM

SEQ ID NO: 41300 - protein, 11 aa, Homo Sapiens
ILKAKNAGMSL

SEQ ID NO: 41301 - protein, 11 aa, Homo Sapiens
SLGAKGAAGPL

SEQ ID NO: 41302 - protein, 11 aa, Homo Sapiens
GAAGPLPSEAV

SEQ ID NO: 41303 - protein, 11 aa, Homo Sapiens
PLPSEAVQWLC

SEQ ID NO: 41304 - protein, 11 aa, Homo Sapiens
LPSEAVQWLCH

SEQ ID NO: 41305 - protein, 11 aa, Homo Sapiens
EAVQWLCHQAF

SEQ ID NO: 41306 - protein, 11 aa, Homo Sapiens
AVQWLCHQAFL

SEQ ID NO: 41307 - protein, 11 aa, Homo Sapiens
VQWLCHQAFLL

SEQ ID NO: 41308 - protein, 11 aa, Homo Sapiens
QWLCHQAFLLK

SEQ ID NO: 41309 - protein, 11 aa, Homo Sapiens
WLCHQAFLLKL

SEQ ID NO: 41310 - protein, 11 aa, Homo Sapiens
QAFLLKLTRHR

SEQ ID NO: 41311 - protein, 11 aa, Homo Sapiens
AFLLKLTRHRV

SEQ ID NO: 41312 - protein, 11 aa, Homo Sapiens
FLLKLTRHRVT

SEQ ID NO: 41313 - protein, 11 aa, Homo Sapiens
LLKLTRHRVTY

SEQ ID NO: 41314 - protein, 11 aa, Homo Sapiens
LTRHRVTYVPL

SEQ ID NO: 41315 - protein, 11 aa, Homo Sapiens
RVTYVPLLGSL

SEQ ID NO: 41316 - protein, 11 aa, Homo Sapiens
VTYVPLLGSLR

SEQ ID NO: 41317 - protein, 11 aa, Homo Sapiens
YVPLLGSLRTA

SEQ ID NO: 41318 - protein, 11 aa, Homo Sapiens
PLLGSLRTAQT

SEQ ID NO: 41319 - protein, 11 aa, Homo Sapiens
LLGSLRTAQTQ

SEQ ID NO: 41320 - protein, 11 aa, Homo Sapiens
SLRTAQTQLSR

SEQ ID NO: 41321 - protein, 11 aa, Homo Sapiens
QLSRKLPGTTL

SEQ ID NO: 41322 - protein, 11 aa, Homo Sapiens
RKLPGTTLTAL

SEQ ID NO: 41323 - protein, 11 aa, Homo Sapiens
KLPGTTLTALE

SEQ ID NO: 41324 - protein, 11 aa, Homo Sapiens
LPGTTLTALEA

SEQ ID NO: 41325 - protein, 11 aa, Homo Sapiens
LTALEAAANPA

SEQ ID NO: 41326 - protein, 11 aa, Homo Sapiens
TALEAAANPAL

SEQ ID NO: 41327 - protein, 11 aa, Homo Sapiens
AANPALPSDFK

SEQ ID NO: 41328 - protein, 11 aa, Homo Sapiens
NPALPSDFKTI

SEQ ID NO: 41329 - protein, 13 aa, Homo Sapiens
MPRAPRCRAVRSL

SEQ ID NO: 41330 - protein, 13 aa, Homo Sapiens
PRAPRCRAVRSLL

SEQ ID NO: 41331 - protein, 13 aa, Homo Sapiens
RAPRCRAVRSLLR

SEQ ID NO: 41332 - protein, 13 aa, Homo Sapiens
APRCRAVRSLLRS

SEQ ID NO: 41333 - protein, 13 aa, Homo Sapiens
PRCRAVRSLLRSH

SEQ ID NO: 41334 - protein, 13 aa, Homo Sapiens
RCRAVRSLLRSHY

SEQ ID NO: 41335 - protein, 13 aa, Homo Sapiens
CRAVRSLLRSHYR

SEQ ID NO: 41336 - protein, 13 aa, Homo Sapiens
RAVRSLLRSHYRE

SEQ ID NO: 41337 - protein, 13 aa, Homo Sapiens
AVRSLLRSHYREV

SEQ ID NO: 41338 - protein, 13 aa, Homo Sapiens
VRSLLRSHYREVL

SEQ ID NO: 41339 - protein, 13 aa, Homo Sapiens
RSLLRSHYREVLP

SEQ ID NO: 41340 - protein, 13 aa, Homo Sapiens
SLLRSHYREVLPL

SEQ ID NO: 41341 - protein, 13 aa, Homo Sapiens
LLRSHYREVLPLA

SEQ ID NO: 41342 - protein, 13 aa, Homo Sapiens
LRSHYREVLPLAT

SEQ ID NO: 41343 - protein, 13 aa, Homo Sapiens
RSHYREVLPLATF

SEQ ID NO: 41344 - protein, 13 aa, Homo Sapiens
SHYREVLPLATFV

SEQ ID NO: 41345 - protein, 13 aa, Homo Sapiens
HYREVLPLATFVR

SEQ ID NO: 41346 - protein, 13 aa, Homo Sapiens
YREVLPLATFVRR

SEQ ID NO: 41347 - protein, 13 aa, Homo Sapiens
REVLPLATFVRRL

SEQ ID NO: 41348 - protein, 13 aa, Homo Sapiens
EVLPLATFVRRLG

SEQ ID NO: 41349 - protein, 13 aa, Homo Sapiens
VLPLATFVRRLGP

SEQ ID NO: 41350 - protein, 13 aa, Homo Sapiens
LPLATFVRRLGPQ

SEQ ID NO: 41351 - protein, 13 aa, Homo Sapiens
PLATFVRRLGPQG

SEQ ID NO: 41352 - protein, 13 aa, Homo Sapiens
LATFVRRLGPQGW

SEQ ID NO: 41353 - protein, 13 aa, Homo Sapiens
ATFVRRLGPQGWR

SEQ ID NO: 41354 - protein, 13 aa, Homo Sapiens
TFVRRLGPQGWRL

SEQ ID NO: 41355 - protein, 13 aa, Homo Sapiens
FVRRLGPQGWRLV

SEQ ID NO: 41356 - protein, 13 aa, Homo Sapiens
VRRLGPQGWRLVQ

SEQ ID NO: 41357 - protein, 13 aa, Homo Sapiens
RRLGPQGWRLVQR

SEQ ID NO: 41358 - protein, 13 aa, Homo Sapiens
RLGPQGWRLVQRG

SEQ ID NO: 41359 - protein, 13 aa, Homo Sapiens
LGPQGWRLVQRGD

SEQ ID NO: 41360 - protein, 13 aa, Homo Sapiens
GPQGWRLVQRGDP

SEQ ID NO: 41361 - protein, 13 aa, Homo Sapiens
PQGWRLVQRGDPA

SEQ ID NO: 41362 - protein, 13 aa, Homo Sapiens
QGWRLVQRGDPAA

SEQ ID NO: 41363 - protein, 13 aa, Homo Sapiens
GWRLVQRGDPAAF

SEQ ID NO: 41364 - protein, 13 aa, Homo Sapiens
WRLVQRGDPAAFR

SEQ ID NO: 41365 - protein, 13 aa, Homo Sapiens
RLVQRGDPAAFRA

SEQ ID NO: 41366 - protein, 13 aa, Homo Sapiens
LVQRGDPAAFRAL

SEQ ID NO: 41367 - protein, 13 aa, Homo Sapiens
VQRGDPAAFRALV

SEQ ID NO: 41368 - protein, 13 aa, Homo Sapiens
QRGDPAAFRALVA

SEQ ID NO: 41369 - protein, 13 aa, Homo Sapiens
RGDPAAFRALVAQ

SEQ ID NO: 41370 - protein, 13 aa, Homo Sapiens
GDPAAFRALVAQC

SEQ ID NO: 41371 - protein, 13 aa, Homo Sapiens
DPAAFRALVAQCL

SEQ ID NO: 41372 - protein, 13 aa, Homo Sapiens
PAAFRALVAQCLV

SEQ ID NO: 41373 - protein, 13 aa, Homo Sapiens
AAFRALVAQCLVC

SEQ ID NO: 41374 - protein, 13 aa, Homo Sapiens
AFRALVAQCLVCV

SEQ ID NO: 41375 - protein, 13 aa, Homo Sapiens
FRALVAQCLVCVP

SEQ ID NO: 41376 - protein, 13 aa, Homo Sapiens
RALVAQCLVCVPW

SEQ ID NO: 41377 - protein, 13 aa, Homo Sapiens
ALVAQCLVCVPWD

SEQ ID NO: 41378 - protein, 13 aa, Homo Sapiens
LVAQCLVCVPWDA

SEQ ID NO: 41379 - protein, 13 aa, Homo Sapiens
VAQCLVCVPWDAR

SEQ ID NO: 41380 - protein, 13 aa, Homo Sapiens
AQCLVCVPWDARP

SEQ ID NO: 41381 - protein, 13 aa, Homo Sapiens
QCLVCVPWDARPP

SEQ ID NO: 41382 - protein, 13 aa, Homo Sapiens
CLVCVPWDARPPP

SEQ ID NO: 41383 - protein, 13 aa, Homo Sapiens
LVCVPWDARPPPA

SEQ ID NO: 41384 - protein, 13 aa, Homo Sapiens
VCVPWDARPPPAA

SEQ ID NO: 41385 - protein, 13 aa, Homo Sapiens
CVPWDARPPPAAP

SEQ ID NO: 41386 - protein, 13 aa, Homo Sapiens
VPWDARPPPAAPS

SEQ ID NO: 41387 - protein, 13 aa, Homo Sapiens
PWDARPPPAAPSF

SEQ ID NO: 41388 - protein, 13 aa, Homo Sapiens
WDARPPPAAPSFR

SEQ ID NO: 41389 - protein, 13 aa, Homo Sapiens
DARPPPAAPSFRQ

SEQ ID NO: 41390 - protein, 13 aa, Homo Sapiens
ARPPPAAPSFRQV

SEQ ID NO: 41391 - protein, 13 aa, Homo Sapiens
RPPPAAPSFRQVS

SEQ ID NO: 41392 - protein, 13 aa, Homo Sapiens
PPPAAPSFRQVSC

SEQ ID NO: 41393 - protein, 13 aa, Homo Sapiens
PPAAPSFRQVSCL

SEQ ID NO: 41394 - protein, 13 aa, Homo Sapiens
PAAPSFRQVSCLK

SEQ ID NO: 41395 - protein, 13 aa, Homo Sapiens
AAPSFRQVSCLKE

SEQ ID NO: 41396 - protein, 13 aa, Homo Sapiens
APSFRQVSCLKEL

SEQ ID NO: 41397 - protein, 13 aa, Homo Sapiens
PSFRQVSCLKELV

SEQ ID NO: 41398 - protein, 13 aa, Homo Sapiens
SFRQVSCLKELVA

SEQ ID NO: 41399 - protein, 13 aa, Homo Sapiens
FRQVSCLKELVAR

SEQ ID NO: 41400 - protein, 13 aa, Homo Sapiens
RQVSCLKELVARV

SEQ ID NO: 41401 - protein, 13 aa, Homo Sapiens
QVSCLKELVARVL

SEQ ID NO: 41402 - protein, 13 aa, Homo Sapiens
VSCLKELVARVLQ

SEQ ID NO: 41403 - protein, 13 aa, Homo Sapiens
SCLKELVARVLQR

SEQ ID NO: 41404 - protein, 13 aa, Homo Sapiens
CLKELVARVLQRL

SEQ ID NO: 41405 - protein, 13 aa, Homo Sapiens
LKELVARVLQRLC

SEQ ID NO: 41406 - protein, 13 aa, Homo Sapiens
KELVARVLQRLCE

SEQ ID NO: 41407 - protein, 13 aa, Homo Sapiens
ELVARVLQRLCER

SEQ ID NO: 41408 - protein, 13 aa, Homo Sapiens
LVARVLQRLCERG

SEQ ID NO: 41409 - protein, 13 aa, Homo Sapiens
VARVLQRLCERGA

SEQ ID NO: 41410 - protein, 13 aa, Homo Sapiens
ARVLQRLCERGAK

SEQ ID NO: 41411 - protein, 13 aa, Homo Sapiens
RVLQRLCERGAKN

SEQ ID NO: 41412 - protein, 13 aa, Homo Sapiens
VLQRLCERGAKNV

SEQ ID NO: 41413 - protein, 13 aa, Homo Sapiens
LQRLCERGAKNVL

SEQ ID NO: 41414 - protein, 13 aa, Homo Sapiens
QRLCERGAKNVLA

SEQ ID NO: 41415 - protein, 13 aa, Homo Sapiens
RLCERGAKNVLAF

SEQ ID NO: 41416 - protein, 13 aa, Homo Sapiens
LCERGAKNVLAFG

SEQ ID NO: 41417 - protein, 13 aa, Homo Sapiens
CERGAKNVLAFGF

SEQ ID NO: 41418 - protein, 13 aa, Homo Sapiens
ERGAKNVLAFGFA

SEQ ID NO: 41419 - protein, 13 aa, Homo Sapiens
RGAKNVLAFGFAL

SEQ ID NO: 41420 - protein, 13 aa, Homo Sapiens
GAKNVLAFGFALL

SEQ ID NO: 41421 - protein, 13 aa, Homo Sapiens
AKNVLAFGFALLD

SEQ ID NO: 41422 - protein, 13 aa, Homo Sapiens
KNVLAFGFALLDG

SEQ ID NO: 41423 - protein, 13 aa, Homo Sapiens
NVLAFGFALLDGA

SEQ ID NO: 41424 - protein, 13 aa, Homo Sapiens
VLAFGFALLDGAR

SEQ ID NO: 41425 - protein, 13 aa, Homo Sapiens
LAFGFALLDGARG

SEQ ID NO: 41426 - protein, 13 aa, Homo Sapiens
AFGFALLDGARGG

SEQ ID NO: 41427 - protein, 13 aa, Homo Sapiens
FGFALLDGARGGP

SEQ ID NO: 41428 - protein, 13 aa, Homo Sapiens
GFALLDGARGGPP

SEQ ID NO: 41429 - protein, 13 aa, Homo Sapiens
FALLDGARGGPPE

SEQ ID NO: 41430 - protein, 13 aa, Homo Sapiens
ALLDGARGGPPEA

SEQ ID NO: 41431 - protein, 13 aa, Homo Sapiens
LLDGARGGPPEAF

SEQ ID NO: 41432 - protein, 13 aa, Homo Sapiens
LDGARGGPPEAFT

SEQ ID NO: 41433 - protein, 13 aa, Homo Sapiens
DGARGGPPEAFTT

SEQ ID NO: 41434 - protein, 13 aa, Homo Sapiens
GARGGPPEAFTTS

SEQ ID NO: 41435 - protein, 13 aa, Homo Sapiens
ARGGPPEAFTTSV

SEQ ID NO: 41436 - protein, 13 aa, Homo Sapiens
RGGPPEAFTTSVR

SEQ ID NO: 41437 - protein, 13 aa, Homo Sapiens
GGPPEAFTTSVRS

SEQ ID NO: 41438 - protein, 13 aa, Homo Sapiens
GPPEAFTTSVRSY

SEQ ID NO: 41439 - protein, 13 aa, Homo Sapiens
PPEAFTTSVRSYL

SEQ ID NO: 41440 - protein, 13 aa, Homo Sapiens
PEAFTTSVRSYLP

SEQ ID NO: 41441 - protein, 13 aa, Homo Sapiens
EAFTTSVRSYLPN

SEQ ID NO: 41442 - protein, 13 aa, Homo Sapiens
AFTTSVRSYLPNT

SEQ ID NO: 41443 - protein, 13 aa, Homo Sapiens
FTTSVRSYLPNTV

SEQ ID NO: 41444 - protein, 13 aa, Homo Sapiens
TTSVRSYLPNTVT

SEQ ID NO: 41445 - protein, 13 aa, Homo Sapiens
TSVRSYLPNTVTD

SEQ ID NO: 41446 - protein, 13 aa, Homo Sapiens
SVRSYLPNTVTDA

SEQ ID NO: 41447 - protein, 13 aa, Homo Sapiens
VRSYLPNTVTDAL

SEQ ID NO: 41448 - protein, 13 aa, Homo Sapiens
RSYLPNTVTDALR

SEQ ID NO: 41449 - protein, 13 aa, Homo Sapiens
SYLPNTVTDALRG

SEQ ID NO: 41450 - protein, 13 aa, Homo Sapiens
YLPNTVTDALRGS

SEQ ID NO: 41451 - protein, 13 aa, Homo Sapiens
LPNTVTDALRGSG

SEQ ID NO: 41452 - protein, 13 aa, Homo Sapiens
PNTVTDALRGSGA

SEQ ID NO: 41453 - protein, 13 aa, Homo Sapiens
NTVTDALRGSGAW

SEQ ID NO: 41454 - protein, 13 aa, Homo Sapiens
TVTDALRGSGAWG

SEQ ID NO: 41455 - protein, 13 aa, Homo Sapiens
VTDALRGSGAWGL

SEQ ID NO: 41456 - protein, 13 aa, Homo Sapiens
TDALRGSGAWGLL

SEQ ID NO: 41457 - protein, 13 aa, Homo Sapiens
DALRGSGAWGLLL

SEQ ID NO: 41458 - protein, 13 aa, Homo Sapiens
ALRGSGAWGLLLR

SEQ ID NO: 41459 - protein, 13 aa, Homo Sapiens
LRGSGAWGLLLRR

SEQ ID NO: 41460 - protein, 13 aa, Homo Sapiens
RGSGAWGLLLRRV

SEQ ID NO: 41461 - protein, 13 aa, Homo Sapiens
GSGAWGLLLRRVG

SEQ ID NO: 41462 - protein, 13 aa, Homo Sapiens
SGAWGLLLRRVGD

SEQ ID NO: 41463 - protein, 13 aa, Homo Sapiens
GAWGLLLRRVGDD

SEQ ID NO: 41464 - protein, 13 aa, Homo Sapiens
AWGLLLRRVGDDV

SEQ ID NO: 41465 - protein, 13 aa, Homo Sapiens
WGLLLRRVGDDVL

SEQ ID NO: 41466 - protein, 13 aa, Homo Sapiens
GLLLRRVGDDVLV

SEQ ID NO: 41467 - protein, 13 aa, Homo Sapiens
LLLRRVGDDVLVH

SEQ ID NO: 41468 - protein, 13 aa, Homo Sapiens
LLRRVGDDVLVHL

SEQ ID NO: 41469 - protein, 13 aa, Homo Sapiens
LRRVGDDVLVHLL

SEQ ID NO: 41470 - protein, 13 aa, Homo Sapiens
RRVGDDVLVHLLA

SEQ ID NO: 41471 - protein, 13 aa, Homo Sapiens
RVGDDVLVHLLAR

SEQ ID NO: 41472 - protein, 13 aa, Homo Sapiens
VGDDVLVHLLARC

SEQ ID NO: 41473 - protein, 13 aa, Homo Sapiens
GDDVLVHLLARCA

SEQ ID NO: 41474 - protein, 13 aa, Homo Sapiens
DDVLVHLLARCAL

SEQ ID NO: 41475 - protein, 13 aa, Homo Sapiens
DVLVHLLARCALF

SEQ ID NO: 41476 - protein, 13 aa, Homo Sapiens
VLVHLLARCALFV

SEQ ID NO: 41477 - protein, 13 aa, Homo Sapiens
LVHLLARCALFVL

SEQ ID NO: 41478 - protein, 13 aa, Homo Sapiens
VHLLARCALFVLV

SEQ ID NO: 41479 - protein, 13 aa, Homo Sapiens
HLLARCALFVLVA

SEQ ID NO: 41480 - protein, 13 aa, Homo Sapiens
LLARCALFVLVAP

SEQ ID NO: 41481 - protein, 13 aa, Homo Sapiens
LARCALFVLVAPS

SEQ ID NO: 41482 - protein, 13 aa, Homo Sapiens
ARCALFVLVAPSC

SEQ ID NO: 41483 - protein, 13 aa, Homo Sapiens
RCALFVLVAPSCA

SEQ ID NO: 41484 - protein, 13 aa, Homo Sapiens
CALFVLVAPSCAY

SEQ ID NO: 41485 - protein, 13 aa, Homo Sapiens
ALFVLVAPSCAYQ

SEQ ID NO: 41486 - protein, 13 aa, Homo Sapiens
LFVLVAPSCAYQV

SEQ ID NO: 41487 - protein, 13 aa, Homo Sapiens
FVLVAPSCAYQVC

SEQ ID NO: 41488 - protein, 13 aa, Homo Sapiens
VLVAPSCAYQVCG

SEQ ID NO: 41489 - protein, 13 aa, Homo Sapiens
LVAPSCAYQVCGP

SEQ ID NO: 41490 - protein, 13 aa, Homo Sapiens
VAPSCAYQVCGPP

SEQ ID NO: 41491 - protein, 13 aa, Homo Sapiens
APSCAYQVCGPPL

SEQ ID NO: 41492 - protein, 13 aa, Homo Sapiens
PSCAYQVCGPPLY

SEQ ID NO: 41493 - protein, 13 aa, Homo Sapiens
SCAYQVCGPPLYQ

SEQ ID NO: 41494 - protein, 13 aa, Homo Sapiens
CAYQVCGPPLYQL

SEQ ID NO: 41495 - protein, 13 aa, Homo Sapiens
AYQVCGPPLYQLG

SEQ ID NO: 41496 - protein, 13 aa, Homo Sapiens
YQVCGPPLYQLGA

SEQ ID NO: 41497 - protein, 13 aa, Homo Sapiens
QVCGPPLYQLGAA

SEQ ID NO: 41498 - protein, 13 aa, Homo Sapiens
VCGPPLYQLGAAT

SEQ ID NO: 41499 - protein, 13 aa, Homo Sapiens
CGPPLYQLGAATQ

SEQ ID NO: 41500 - protein, 13 aa, Homo Sapiens
GPPLYQLGAATQA

SEQ ID NO: 41501 - protein, 13 aa, Homo Sapiens
PPLYQLGAATQAR

SEQ ID NO: 41502 - protein, 13 aa, Homo Sapiens
PLYQLGAATQARP

SEQ ID NO: 41503 - protein, 13 aa, Homo Sapiens
LYQLGAATQARPP

SEQ ID NO: 41504 - protein, 13 aa, Homo Sapiens
YQLGAATQARPPP

SEQ ID NO: 41505 - protein, 13 aa, Homo Sapiens
QLGAATQARPPPH

SEQ ID NO: 41506 - protein, 13 aa, Homo Sapiens
LGAATQARPPPHA

SEQ ID NO: 41507 - protein, 13 aa, Homo Sapiens
GAATQARPPPHAS

SEQ ID NO: 41508 - protein, 13 aa, Homo Sapiens
AATQARPPPHASG

SEQ ID NO: 41509 - protein, 13 aa, Homo Sapiens
ATQARPPPHASGP

SEQ ID NO: 41510 - protein, 13 aa, Homo Sapiens
TQARPPPHASGPR

SEQ ID NO: 41511 - protein, 13 aa, Homo Sapiens
QARPPPHASGPRR

SEQ ID NO: 41512 - protein, 13 aa, Homo Sapiens
ARPPPHASGPRRR

SEQ ID NO: 41513 - protein, 13 aa, Homo Sapiens
RPPPHASGPRRRL

SEQ ID NO: 41514 - protein, 13 aa, Homo Sapiens
PPPHASGPRRRLG

SEQ ID NO: 41515 - protein, 13 aa, Homo Sapiens
PPHASGPRRRLGC

SEQ ID NO: 41516 - protein, 13 aa, Homo Sapiens
PHASGPRRRLGCE

SEQ ID NO: 41517 - protein, 13 aa, Homo Sapiens
HASGPRRRLGCER

SEQ ID NO: 41518 - protein, 13 aa, Homo Sapiens
ASGPRRRLGCERA

SEQ ID NO: 41519 - protein, 13 aa, Homo Sapiens
SGPRRRLGCERAW

SEQ ID NO: 41520 - protein, 13 aa, Homo Sapiens
GPRRRLGCERAWN

SEQ ID NO: 41521 - protein, 13 aa, Homo Sapiens
PRRRLGCERAWNH

SEQ ID NO: 41522 - protein, 13 aa, Homo Sapiens
RRRLGCERAWNHS

SEQ ID NO: 41523 - protein, 13 aa, Homo Sapiens
RRLGCERAWNHSV

SEQ ID NO: 41524 - protein, 13 aa, Homo Sapiens
RLGCERAWNHSVR

SEQ ID NO: 41525 - protein, 13 aa, Homo Sapiens
LGCERAWNHSVRE

SEQ ID NO: 41526 - protein, 13 aa, Homo Sapiens
GCERAWNHSVREA

SEQ ID NO: 41527 - protein, 13 aa, Homo Sapiens
CERAWNHSVREAG

SEQ ID NO: 41528 - protein, 13 aa, Homo Sapiens
ERAWNHSVREAGV

SEQ ID NO: 41529 - protein, 13 aa, Homo Sapiens
RAWNHSVREAGVP

SEQ ID NO: 41530 - protein, 13 aa, Homo Sapiens
AWNHSVREAGVPL

SEQ ID NO: 41531 - protein, 13 aa, Homo Sapiens
WNHSVREAGVPLG

SEQ ID NO: 41532 - protein, 13 aa, Homo Sapiens
NHSVREAGVPLGL

SEQ ID NO: 41533 - protein, 13 aa, Homo Sapiens
HSVREAGVPLGLP

SEQ ID NO: 41534 - protein, 13 aa, Homo Sapiens
SVREAGVPLGLPA

SEQ ID NO: 41535 - protein, 13 aa, Homo Sapiens
VREAGVPLGLPAP

SEQ ID NO: 41536 - protein, 13 aa, Homo Sapiens
REAGVPLGLPAPG

SEQ ID NO: 41537 - protein, 13 aa, Homo Sapiens
EAGVPLGLPAPGA

SEQ ID NO: 41538 - protein, 13 aa, Homo Sapiens
AGVPLGLPAPGAR

SEQ ID NO: 41539 - protein, 13 aa, Homo Sapiens
GVPLGLPAPGARR

SEQ ID NO: 41540 - protein, 13 aa, Homo Sapiens
VPLGLPAPGARRR

SEQ ID NO: 41541 - protein, 13 aa, Homo Sapiens
PLGLPAPGARRRG

SEQ ID NO: 41542 - protein, 13 aa, Homo Sapiens
LGLPAPGARRRGG

SEQ ID NO: 41543 - protein, 13 aa, Homo Sapiens
GLPAPGARRRGGS

SEQ ID NO: 41544 - protein, 13 aa, Homo Sapiens
LPAPGARRRGGSA

SEQ ID NO: 41545 - protein, 13 aa, Homo Sapiens
PAPGARRRGGSAS

SEQ ID NO: 41546 - protein, 13 aa, Homo Sapiens
APGARRRGGSASR

SEQ ID NO: 41547 - protein, 13 aa, Homo Sapiens
PGARRRGGSASRS

SEQ ID NO: 41548 - protein, 13 aa, Homo Sapiens
GARRRGGSASRSL

SEQ ID NO: 41549 - protein, 13 aa, Homo Sapiens
ARRRGGSASRSLP

SEQ ID NO: 41550 - protein, 13 aa, Homo Sapiens
RRRGGSASRSLPL

SEQ ID NO: 41551 - protein, 13 aa, Homo Sapiens
RRGGSASRSLPLP

SEQ ID NO: 41552 - protein, 13 aa, Homo Sapiens
RGGSASRSLPLPK

SEQ ID NO: 41553 - protein, 13 aa, Homo Sapiens
GGSASRSLPLPKR

SEQ ID NO: 41554 - protein, 13 aa, Homo Sapiens
GSASRSLPLPKRP

SEQ ID NO: 41555 - protein, 13 aa, Homo Sapiens
SASRSLPLPKRPR

SEQ ID NO: 41556 - protein, 13 aa, Homo Sapiens
ASRSLPLPKRPRR

SEQ ID NO: 41557 - protein, 13 aa, Homo Sapiens
SRSLPLPKRPRRG

SEQ ID NO: 41558 - protein, 13 aa, Homo Sapiens
RSLPLPKRPRRGA

SEQ ID NO: 41559 - protein, 13 aa, Homo Sapiens
SLPLPKRPRRGAA

SEQ ID NO: 41560 - protein, 13 aa, Homo Sapiens
LPLPKRPRRGAAP

SEQ ID NO: 41561 - protein, 13 aa, Homo Sapiens
PLPKRPRRGAAPE

SEQ ID NO: 41562 - protein, 13 aa, Homo Sapiens
LPKRPRRGAAPEP

SEQ ID NO: 41563 - protein, 13 aa, Homo Sapiens
PKRPRRGAAPEPE

SEQ ID NO: 41564 - protein, 13 aa, Homo Sapiens
KRPRRGAAPEPER

SEQ ID NO: 41565 - protein, 13 aa, Homo Sapiens
RPRRGAAPEPERT

SEQ ID NO: 41566 - protein, 13 aa, Homo Sapiens
PRRGAAPEPERTP

SEQ ID NO: 41567 - protein, 13 aa, Homo Sapiens
RRGAAPEPERTPV

SEQ ID NO: 41568 - protein, 13 aa, Homo Sapiens
RGAAPEPERTPVG

SEQ ID NO: 41569 - protein, 13 aa, Homo Sapiens
GAAPEPERTPVGQ

SEQ ID NO: 41570 - protein, 13 aa, Homo Sapiens
AAPEPERTPVGQG

SEQ ID NO: 41571 - protein, 13 aa, Homo Sapiens
APEPERTPVGQGS

SEQ ID NO: 41572 - protein, 13 aa, Homo Sapiens
PEPERTPVGQGSW

SEQ ID NO: 41573 - protein, 13 aa, Homo Sapiens
EPERTPVGQGSWA

SEQ ID NO: 41574 - protein, 13 aa, Homo Sapiens
PERTPVGQGSWAH

SEQ ID NO: 41575 - protein, 13 aa, Homo Sapiens
ERTPVGQGSWAHP

SEQ ID NO: 41576 - protein, 13 aa, Homo Sapiens
RTPVGQGSWAHPG

SEQ ID NO: 41577 - protein, 13 aa, Homo Sapiens
TPVGQGSWAHPGR

SEQ ID NO: 41578 - protein, 13 aa, Homo Sapiens
PVGQGSWAHPGRT

SEQ ID NO: 41579 - protein, 13 aa, Homo Sapiens
VGQGSWAHPGRTR

SEQ ID NO: 41580 - protein, 13 aa, Homo Sapiens
GQGSWAHPGRTRG

SEQ ID NO: 41581 - protein, 13 aa, Homo Sapiens
QGSWAHPGRTRGP

SEQ ID NO: 41582 - protein, 13 aa, Homo Sapiens
GSWAHPGRTRGPS

SEQ ID NO: 41583 - protein, 13 aa, Homo Sapiens
SWAHPGRTRGPSD

SEQ ID NO: 41584 - protein, 13 aa, Homo Sapiens
WAHPGRTRGPSDR

SEQ ID NO: 41585 - protein, 13 aa, Homo Sapiens
AHPGRTRGPSDRG

SEQ ID NO: 41586 - protein, 13 aa, Homo Sapiens
HPGRTRGPSDRGF

SEQ ID NO: 41587 - protein, 13 aa, Homo Sapiens
PGRTRGPSDRGFC

SEQ ID NO: 41588 - protein, 13 aa, Homo Sapiens
GRTRGPSDRGFCV

SEQ ID NO: 41589 - protein, 13 aa, Homo Sapiens
RTRGPSDRGFCVV

SEQ ID NO: 41590 - protein, 13 aa, Homo Sapiens
TRGPSDRGFCVVS

SEQ ID NO: 41591 - protein, 13 aa, Homo Sapiens
RGPSDRGFCVVSP

SEQ ID NO: 41592 - protein, 13 aa, Homo Sapiens
GPSDRGFCVVSPA

SEQ ID NO: 41593 - protein, 13 aa, Homo Sapiens
PSDRGFCVVSPAR

SEQ ID NO: 41594 - protein, 13 aa, Homo Sapiens
SDRGFCVVSPARP

SEQ ID NO: 41595 - protein, 13 aa, Homo Sapiens
DRGFCVVSPARPA

SEQ ID NO: 41596 - protein, 13 aa, Homo Sapiens
RGFCVVSPARPAE

SEQ ID NO: 41597 - protein, 13 aa, Homo Sapiens
GFCVVSPARPAEE

SEQ ID NO: 41598 - protein, 13 aa, Homo Sapiens
FCVVSPARPAEEA

SEQ ID NO: 41599 - protein, 13 aa, Homo Sapiens
CVVSPARPAEEAT

SEQ ID NO: 41600 - protein, 13 aa, Homo Sapiens
VVSPARPAEEATS

SEQ ID NO: 41601 - protein, 13 aa, Homo Sapiens
VSPARPAEEATSL

SEQ ID NO: 41602 - protein, 13 aa, Homo Sapiens
SPARPAEEATSLE

SEQ ID NO: 41603 - protein, 13 aa, Homo Sapiens
PARPAEEATSLEG

SEQ ID NO: 41604 - protein, 13 aa, Homo Sapiens
ARPAEEATSLEGA

SEQ ID NO: 41605 - protein, 13 aa, Homo Sapiens
RPAEEATSLEGAL

SEQ ID NO: 41606 - protein, 13 aa, Homo Sapiens
PAEEATSLEGALS

SEQ ID NO: 41607 - protein, 13 aa, Homo Sapiens
AEEATSLEGALSG

SEQ ID NO: 41608 - protein, 13 aa, Homo Sapiens
EEATSLEGALSGT

SEQ ID NO: 41609 - protein, 13 aa, Homo Sapiens
EATSLEGALSGTR

SEQ ID NO: 41610 - protein, 13 aa, Homo Sapiens
ATSLEGALSGTRH

SEQ ID NO: 41611 - protein, 13 aa, Homo Sapiens
TSLEGALSGTRHS

SEQ ID NO: 41612 - protein, 13 aa, Homo Sapiens
SLEGALSGTRHSH

SEQ ID NO: 41613 - protein, 13 aa, Homo Sapiens
LEGALSGTRHSHP

SEQ ID NO: 41614 - protein, 13 aa, Homo Sapiens
EGALSGTRHSHPS

SEQ ID NO: 41615 - protein, 13 aa, Homo Sapiens
GALSGTRHSHPSV

SEQ ID NO: 41616 - protein, 13 aa, Homo Sapiens
ALSGTRHSHPSVG

SEQ ID NO: 41617 - protein, 13 aa, Homo Sapiens
LSGTRHSHPSVGR

SEQ ID NO: 41618 - protein, 13 aa, Homo Sapiens
SGTRHSHPSVGRQ

SEQ ID NO: 41619 - protein, 13 aa, Homo Sapiens
GTRHSHPSVGRQH

SEQ ID NO: 41620 - protein, 13 aa, Homo Sapiens
TRHSHPSVGRQHH

SEQ ID NO: 41621 - protein, 13 aa, Homo Sapiens
RHSHPSVGRQHHA

SEQ ID NO: 41622 - protein, 13 aa, Homo Sapiens
HSHPSVGRQHHAG

SEQ ID NO: 41623 - protein, 13 aa, Homo Sapiens
SHPSVGRQHHAGP

SEQ ID NO: 41624 - protein, 13 aa, Homo Sapiens
HPSVGRQHHAGPP

SEQ ID NO: 41625 - protein, 13 aa, Homo Sapiens
PSVGRQHHAGPPS

SEQ ID NO: 41626 - protein, 13 aa, Homo Sapiens
SVGRQHHAGPPST

SEQ ID NO: 41627 - protein, 13 aa, Homo Sapiens
VGRQHHAGPPSTS

SEQ ID NO: 41628 - protein, 13 aa, Homo Sapiens
GRQHHAGPPSTSR

SEQ ID NO: 41629 - protein, 13 aa, Homo Sapiens
RQHHAGPPSTSRP

SEQ ID NO: 41630 - protein, 13 aa, Homo Sapiens
QHHAGPPSTSRPP

SEQ ID NO: 41631 - protein, 13 aa, Homo Sapiens
HHAGPPSTSRPPR

SEQ ID NO: 41632 - protein, 13 aa, Homo Sapiens
HAGPPSTSRPPRP

SEQ ID NO: 41633 - protein, 13 aa, Homo Sapiens
AGPPSTSRPPRPW

SEQ ID NO: 41634 - protein, 13 aa, Homo Sapiens
GPPSTSRPPRPWD

SEQ ID NO: 41635 - protein, 13 aa, Homo Sapiens
PPSTSRPPRPWDT

SEQ ID NO: 41636 - protein, 13 aa, Homo Sapiens
PSTSRPPRPWDTP

SEQ ID NO: 41637 - protein, 13 aa, Homo Sapiens
STSRPPRPWDTPC

SEQ ID NO: 41638 - protein, 13 aa, Homo Sapiens
TSRPPRPWDTPCP

SEQ ID NO: 41639 - protein, 13 aa, Homo Sapiens
SRPPRPWDTPCPP

SEQ ID NO: 41640 - protein, 13 aa, Homo Sapiens
RPPRPWDTPCPPV

SEQ ID NO: 41641 - protein, 13 aa, Homo Sapiens
PPRPWDTPCPPVY

SEQ ID NO: 41642 - protein, 13 aa, Homo Sapiens
PRPWDTPCPPVYA

SEQ ID NO: 41643 - protein, 13 aa, Homo Sapiens
RPWDTPCPPVYAE

SEQ ID NO: 41644 - protein, 13 aa, Homo Sapiens
PWDTPCPPVYAET

SEQ ID NO: 41645 - protein, 13 aa, Homo Sapiens
WDTPCPPVYAETK

SEQ ID NO: 41646 - protein, 13 aa, Homo Sapiens
DTPCPPVYAETKH

SEQ ID NO: 41647 - protein, 13 aa, Homo Sapiens
TPCPPVYAETKHF

SEQ ID NO: 41648 - protein, 13 aa, Homo Sapiens
PCPPVYAETKHFL

SEQ ID NO: 41649 - protein, 13 aa, Homo Sapiens
CPPVYAETKHFLY

SEQ ID NO: 41650 - protein, 13 aa, Homo Sapiens
PPVYAETKHFLYS

SEQ ID NO: 41651 - protein, 13 aa, Homo Sapiens
PVYAETKHFLYSS

SEQ ID NO: 41652 - protein, 13 aa, Homo Sapiens
VYAETKHFLYSSG

SEQ ID NO: 41653 - protein, 13 aa, Homo Sapiens
YAETKHFLYSSGD

SEQ ID NO: 41654 - protein, 13 aa, Homo Sapiens
AETKHFLYSSGDK

SEQ ID NO: 41655 - protein, 13 aa, Homo Sapiens
ETKHFLYSSGDKE

SEQ ID NO: 41656 - protein, 13 aa, Homo Sapiens
TKHFLYSSGDKEQ

SEQ ID NO: 41657 - protein, 13 aa, Homo Sapiens
KHFLYSSGDKEQL

SEQ ID NO: 41658 - protein, 13 aa, Homo Sapiens
HFLYSSGDKEQLR

SEQ ID NO: 41659 - protein, 13 aa, Homo Sapiens
FLYSSGDKEQLRP

SEQ ID NO: 41660 - protein, 13 aa, Homo Sapiens
LYSSGDKEQLRPS

SEQ ID NO: 41661 - protein, 13 aa, Homo Sapiens
YSSGDKEQLRPSF

SEQ ID NO: 41662 - protein, 13 aa, Homo Sapiens
SSGDKEQLRPSFL

SEQ ID NO: 41663 - protein, 13 aa, Homo Sapiens
SGDKEQLRPSFLL

SEQ ID NO: 41664 - protein, 13 aa, Homo Sapiens
GDKEQLRPSFLLS

SEQ ID NO: 41665 - protein, 13 aa, Homo Sapiens
DKEQLRPSFLLSS

SEQ ID NO: 41666 - protein, 13 aa, Homo Sapiens
KEQLRPSFLLSSL

SEQ ID NO: 41667 - protein, 13 aa, Homo Sapiens
EQLRPSFLLSSLR

SEQ ID NO: 41668 - protein, 13 aa, Homo Sapiens
QLRPSFLLSSLRP

SEQ ID NO: 41669 - protein, 13 aa, Homo Sapiens
LRPSFLLSSLRPS

SEQ ID NO: 41670 - protein, 13 aa, Homo Sapiens
RPSFLLSSLRPSL

SEQ ID NO: 41671 - protein, 13 aa, Homo Sapiens
PSFLLSSLRPSLT

SEQ ID NO: 41672 - protein, 13 aa, Homo Sapiens
SFLLSSLRPSLTG

SEQ ID NO: 41673 - protein, 13 aa, Homo Sapiens
FLLSSLRPSLTGA

SEQ ID NO: 41674 - protein, 13 aa, Homo Sapiens
LLSSLRPSLTGAR

SEQ ID NO: 41675 - protein, 13 aa, Homo Sapiens
LSSLRPSLTGARR

SEQ ID NO: 41676 - protein, 13 aa, Homo Sapiens
SSLRPSLTGARRL

SEQ ID NO: 41677 - protein, 13 aa, Homo Sapiens
SLRPSLTGARRLV

SEQ ID NO: 41678 - protein, 13 aa, Homo Sapiens
LRPSLTGARRLVE

SEQ ID NO: 41679 - protein, 13 aa, Homo Sapiens
RPSLTGARRLVET

SEQ ID NO: 41680 - protein, 13 aa, Homo Sapiens
PSLTGARRLVETI

SEQ ID NO: 41681 - protein, 13 aa, Homo Sapiens
SLTGARRLVETIF

SEQ ID NO: 41682 - protein, 13 aa, Homo Sapiens
LTGARRLVETIFL

SEQ ID NO: 41683 - protein, 13 aa, Homo Sapiens
TGARRLVETIFLG

SEQ ID NO: 41684 - protein, 13 aa, Homo Sapiens
GARRLVETIFLGS

SEQ ID NO: 41685 - protein, 13 aa, Homo Sapiens
ARRLVETIFLGSR

SEQ ID NO: 41686 - protein, 13 aa, Homo Sapiens
RRLVETIFLGSRP

SEQ ID NO: 41687 - protein, 13 aa, Homo Sapiens
RLVETIFLGSRPW

SEQ ID NO: 41688 - protein, 13 aa, Homo Sapiens
LVETIFLGSRPWM

SEQ ID NO: 41689 - protein, 13 aa, Homo Sapiens
VETIFLGSRPWMP

SEQ ID NO: 41690 - protein, 13 aa, Homo Sapiens
ETIFLGSRPWMPG

SEQ ID NO: 41691 - protein, 13 aa, Homo Sapiens
TIFLGSRPWMPGT

SEQ ID NO: 41692 - protein, 13 aa, Homo Sapiens
IFLGSRPWMPGTP

SEQ ID NO: 41693 - protein, 13 aa, Homo Sapiens
FLGSRPWMPGTPR

SEQ ID NO: 41694 - protein, 13 aa, Homo Sapiens
LGSRPWMPGTPRR

SEQ ID NO: 41695 - protein, 13 aa, Homo Sapiens
GSRPWMPGTPRRL

SEQ ID NO: 41696 - protein, 13 aa, Homo Sapiens
SRPWMPGTPRRLP

SEQ ID NO: 41697 - protein, 13 aa, Homo Sapiens
RPWMPGTPRRLPR

SEQ ID NO: 41698 - protein, 13 aa, Homo Sapiens
PWMPGTPRRLPRL

SEQ ID NO: 41699 - protein, 13 aa, Homo Sapiens
WMPGTPRRLPRLP

SEQ ID NO: 41700 - protein, 13 aa, Homo Sapiens
MPGTPRRLPRLPQ

SEQ ID NO: 41701 - protein, 13 aa, Homo Sapiens
PGTPRRLPRLPQR

SEQ ID NO: 41702 - protein, 13 aa, Homo Sapiens
GTPRRLPRLPQRY

SEQ ID NO: 41703 - protein, 13 aa, Homo Sapiens
TPRRLPRLPQRYW

SEQ ID NO: 41704 - protein, 13 aa, Homo Sapiens
PRRLPRLPQRYWQ

SEQ ID NO: 41705 - protein, 13 aa, Homo Sapiens
RRLPRLPQRYWQM

SEQ ID NO: 41706 - protein, 13 aa, Homo Sapiens
RLPRLPQRYWQMR

SEQ ID NO: 41707 - protein, 13 aa, Homo Sapiens
LPRLPQRYWQMRP

SEQ ID NO: 41708 - protein, 13 aa, Homo Sapiens
PRLPQRYWQMRPL

SEQ ID NO: 41709 - protein, 13 aa, Homo Sapiens
RLPQRYWQMRPLF

SEQ ID NO: 41710 - protein, 13 aa, Homo Sapiens
LPQRYWQMRPLFL

SEQ ID NO: 41711 - protein, 13 aa, Homo Sapiens
PQRYWQMRPLFLE

SEQ ID NO: 41712 - protein, 13 aa, Homo Sapiens
QRYWQMRPLFLEL

SEQ ID NO: 41713 - protein, 13 aa, Homo Sapiens
RYWQMRPLFLELL

SEQ ID NO: 41714 - protein, 13 aa, Homo Sapiens
YWQMRPLFLELLG

SEQ ID NO: 41715 - protein, 13 aa, Homo Sapiens
WQMRPLFLELLGN

SEQ ID NO: 41716 - protein, 13 aa, Homo Sapiens
QMRPLFLELLGNH

SEQ ID NO: 41717 - protein, 13 aa, Homo Sapiens
MRPLFLELLGNHA

SEQ ID NO: 41718 - protein, 13 aa, Homo Sapiens
RPLFLELLGNHAQ

SEQ ID NO: 41719 - protein, 13 aa, Homo Sapiens
PLFLELLGNHAQC

SEQ ID NO: 41720 - protein, 13 aa, Homo Sapiens
LFLELLGNHAQCP

SEQ ID NO: 41721 - protein, 13 aa, Homo Sapiens
FLELLGNHAQCPY

SEQ ID NO: 41722 - protein, 13 aa, Homo Sapiens
LELLGNHAQCPYG

SEQ ID NO: 41723 - protein, 13 aa, Homo Sapiens
ELLGNHAQCPYGV

SEQ ID NO: 41724 - protein, 13 aa, Homo Sapiens
LLGNHAQCPYGVL

SEQ ID NO: 41725 - protein, 13 aa, Homo Sapiens
LGNHAQCPYGVLL

SEQ ID NO: 41726 - protein, 13 aa, Homo Sapiens
GNHAQCPYGVLLK

SEQ ID NO: 41727 - protein, 13 aa, Homo Sapiens
NHAQCPYGVLLKT

SEQ ID NO: 41728 - protein, 13 aa, Homo Sapiens
HAQCPYGVLLKTH

SEQ ID NO: 41729 - protein, 13 aa, Homo Sapiens
AQCPYGVLLKTHC

SEQ ID NO: 41730 - protein, 13 aa, Homo Sapiens
QCPYGVLLKTHCP

SEQ ID NO: 41731 - protein, 13 aa, Homo Sapiens
CPYGVLLKTHCPL

SEQ ID NO: 41732 - protein, 13 aa, Homo Sapiens
PYGVLLKTHCPLR

SEQ ID NO: 41733 - protein, 13 aa, Homo Sapiens
YGVLLKTHCPLRA

SEQ ID NO: 41734 - protein, 13 aa, Homo Sapiens
GVLLKTHCPLRAA

SEQ ID NO: 41735 - protein, 13 aa, Homo Sapiens
VLLKTHCPLRAAV

SEQ ID NO: 41736 - protein, 13 aa, Homo Sapiens
LLKTHCPLRAAVT

SEQ ID NO: 41737 - protein, 13 aa, Homo Sapiens
LKTHCPLRAAVTP

SEQ ID NO: 41738 - protein, 13 aa, Homo Sapiens
KTHCPLRAAVTPA

SEQ ID NO: 41739 - protein, 13 aa, Homo Sapiens
THCPLRAAVTPAA

SEQ ID NO: 41740 - protein, 13 aa, Homo Sapiens
HCPLRAAVTPAAG

SEQ ID NO: 41741 - protein, 13 aa, Homo Sapiens
CPLRAAVTPAAGV

SEQ ID NO: 41742 - protein, 13 aa, Homo Sapiens
PLRAAVTPAAGVC

SEQ ID NO: 41743 - protein, 13 aa, Homo Sapiens
LRAAVTPAAGVCA

SEQ ID NO: 41744 - protein, 13 aa, Homo Sapiens
RAAVTPAAGVCAR

SEQ ID NO: 41745 - protein, 13 aa, Homo Sapiens
AAVTPAAGVCARE

SEQ ID NO: 41746 - protein, 13 aa, Homo Sapiens
AVTPAAGVCAREK

SEQ ID NO: 41747 - protein, 13 aa, Homo Sapiens
VTPAAGVCAREKP

SEQ ID NO: 41748 - protein, 13 aa, Homo Sapiens
TPAAGVCAREKPQ

SEQ ID NO: 41749 - protein, 13 aa, Homo Sapiens
PAAGVCAREKPQG

SEQ ID NO: 41750 - protein, 13 aa, Homo Sapiens
AAGVCAREKPQGS

SEQ ID NO: 41751 - protein, 13 aa, Homo Sapiens
AGVCAREKPQGSV

SEQ ID NO: 41752 - protein, 13 aa, Homo Sapiens
GVCAREKPQGSVA

SEQ ID NO: 41753 - protein, 13 aa, Homo Sapiens
VCAREKPQGSVAA

SEQ ID NO: 41754 - protein, 13 aa, Homo Sapiens
CAREKPQGSVAAP

SEQ ID NO: 41755 - protein, 13 aa, Homo Sapiens
AREKPQGSVAAPE

SEQ ID NO: 41756 - protein, 13 aa, Homo Sapiens
REKPQGSVAAPEE

SEQ ID NO: 41757 - protein, 13 aa, Homo Sapiens
EKPQGSVAAPEEE

SEQ ID NO: 41758 - protein, 13 aa, Homo Sapiens
KPQGSVAAPEEED

SEQ ID NO: 41759 - protein, 13 aa, Homo Sapiens
PQGSVAAPEEEDT

SEQ ID NO: 41760 - protein, 13 aa, Homo Sapiens
QGSVAAPEEEDTD

SEQ ID NO: 41761 - protein, 13 aa, Homo Sapiens
GSVAAPEEEDTDP

SEQ ID NO: 41762 - protein, 13 aa, Homo Sapiens
SVAAPEEEDTDPR

SEQ ID NO: 41763 - protein, 13 aa, Homo Sapiens
VAAPEEEDTDPRR

SEQ ID NO: 41764 - protein, 13 aa, Homo Sapiens
AAPEEEDTDPRRL

SEQ ID NO: 41765 - protein, 13 aa, Homo Sapiens
APEEEDTDPRRLV

SEQ ID NO: 41766 - protein, 13 aa, Homo Sapiens
PEEEDTDPRRLVQ

SEQ ID NO: 41767 - protein, 13 aa, Homo Sapiens
EEEDTDPRRLVQL

SEQ ID NO: 41768 - protein, 13 aa, Homo Sapiens
EEDTDPRRLVQLL

SEQ ID NO: 41769 - protein, 13 aa, Homo Sapiens
EDTDPRRLVQLLR

SEQ ID NO: 41770 - protein, 13 aa, Homo Sapiens
DTDPRRLVQLLRQ

SEQ ID NO: 41771 - protein, 13 aa, Homo Sapiens
TDPRRLVQLLRQH

SEQ ID NO: 41772 - protein, 13 aa, Homo Sapiens
DPRRLVQLLRQHS

SEQ ID NO: 41773 - protein, 13 aa, Homo Sapiens
PRRLVQLLRQHSS

SEQ ID NO: 41774 - protein, 13 aa, Homo Sapiens
RRLVQLLRQHSSP

SEQ ID NO: 41775 - protein, 13 aa, Homo Sapiens
RLVQLLRQHSSPW

SEQ ID NO: 41776 - protein, 13 aa, Homo Sapiens
LVQLLRQHSSPWQ

SEQ ID NO: 41777 - protein, 13 aa, Homo Sapiens
VQLLRQHSSPWQV

SEQ ID NO: 41778 - protein, 13 aa, Homo Sapiens
QLLRQHSSPWQVY

SEQ ID NO: 41779 - protein, 13 aa, Homo Sapiens
LLRQHSSPWQVYG

SEQ ID NO: 41780 - protein, 13 aa, Homo Sapiens
LRQHSSPWQVYGF

SEQ ID NO: 41781 - protein, 13 aa, Homo Sapiens
RQHSSPWQVYGFV

SEQ ID NO: 41782 - protein, 13 aa, Homo Sapiens
QHSSPWQVYGFVR

SEQ ID NO: 41783 - protein, 13 aa, Homo Sapiens
HSSPWQVYGFVRA

SEQ ID NO: 41784 - protein, 13 aa, Homo Sapiens
SSPWQVYGFVRAC

SEQ ID NO: 41785 - protein, 13 aa, Homo Sapiens
SPWQVYGFVRACL

SEQ ID NO: 41786 - protein, 13 aa, Homo Sapiens
PWQVYGFVRACLR

SEQ ID NO: 41787 - protein, 13 aa, Homo Sapiens
WQVYGFVRACLRR

SEQ ID NO: 41788 - protein, 13 aa, Homo Sapiens
QVYGFVRACLRRL

SEQ ID NO: 41789 - protein, 13 aa, Homo Sapiens
VYGFVRACLRRLV

SEQ ID NO: 41790 - protein, 13 aa, Homo Sapiens
YGFVRACLRRLVP

SEQ ID NO: 41791 - protein, 13 aa, Homo Sapiens
GFVRACLRRLVPP

SEQ ID NO: 41792 - protein, 13 aa, Homo Sapiens
FVRACLRRLVPPG

SEQ ID NO: 41793 - protein, 13 aa, Homo Sapiens
VRACLRRLVPPGL

SEQ ID NO: 41794 - protein, 13 aa, Homo Sapiens
RACLRRLVPPGLW

SEQ ID NO: 41795 - protein, 13 aa, Homo Sapiens
ACLRRLVPPGLWG

SEQ ID NO: 41796 - protein, 13 aa, Homo Sapiens
CLRRLVPPGLWGS

SEQ ID NO: 41797 - protein, 13 aa, Homo Sapiens
LRRLVPPGLWGSR

SEQ ID NO: 41798 - protein, 13 aa, Homo Sapiens
RRLVPPGLWGSRH

SEQ ID NO: 41799 - protein, 13 aa, Homo Sapiens
RLVPPGLWGSRHN

SEQ ID NO: 41800 - protein, 13 aa, Homo Sapiens
LVPPGLWGSRHNE

SEQ ID NO: 41801 - protein, 13 aa, Homo Sapiens
VPPGLWGSRHNER

SEQ ID NO: 41802 - protein, 13 aa, Homo Sapiens
PPGLWGSRHNERR

SEQ ID NO: 41803 - protein, 13 aa, Homo Sapiens
PGLWGSRHNERRF

SEQ ID NO: 41804 - protein, 13 aa, Homo Sapiens
GLWGSRHNERRFL

SEQ ID NO: 41805 - protein, 13 aa, Homo Sapiens
LWGSRHNERRFLR

SEQ ID NO: 41806 - protein, 13 aa, Homo Sapiens
WGSRHNERRFLRN

SEQ ID NO: 41807 - protein, 13 aa, Homo Sapiens
GSRHNERRFLRNT

SEQ ID NO: 41808 - protein, 13 aa, Homo Sapiens
SRHNERRFLRNTK

SEQ ID NO: 41809 - protein, 13 aa, Homo Sapiens
RHNERRFLRNTKK

SEQ ID NO: 41810 - protein, 13 aa, Homo Sapiens
HNERRFLRNTKKF

SEQ ID NO: 41811 - protein, 13 aa, Homo Sapiens
NERRFLRNTKKFI

SEQ ID NO: 41812 - protein, 13 aa, Homo Sapiens
ERRFLRNTKKFIS

SEQ ID NO: 41813 - protein, 13 aa, Homo Sapiens
RRFLRNTKKFISL

SEQ ID NO: 41814 - protein, 13 aa, Homo Sapiens
RFLRNTKKFISLG

SEQ ID NO: 41815 - protein, 13 aa, Homo Sapiens
FLRNTKKFISLGK

SEQ ID NO: 41816 - protein, 13 aa, Homo Sapiens
LRNTKKFISLGKH

SEQ ID NO: 41817 - protein, 13 aa, Homo Sapiens
RNTKKFISLGKHA

SEQ ID NO: 41818 - protein, 13 aa, Homo Sapiens
NTKKFISLGKHAK

SEQ ID NO: 41819 - protein, 13 aa, Homo Sapiens
TKKFISLGKHAKL

SEQ ID NO: 41820 - protein, 13 aa, Homo Sapiens
KKFISLGKHAKLS

SEQ ID NO: 41821 - protein, 13 aa, Homo Sapiens
KFISLGKHAKLSL

SEQ ID NO: 41822 - protein, 13 aa, Homo Sapiens
FISLGKHAKLSLQ

SEQ ID NO: 41823 - protein, 13 aa, Homo Sapiens
ISLGKHAKLSLQE

SEQ ID NO: 41824 - protein, 13 aa, Homo Sapiens
SLGKHAKLSLQEL

SEQ ID NO: 41825 - protein, 13 aa, Homo Sapiens
LGKHAKLSLQELT

SEQ ID NO: 41826 - protein, 13 aa, Homo Sapiens
GKHAKLSLQELTW

SEQ ID NO: 41827 - protein, 13 aa, Homo Sapiens
KHAKLSLQELTWK

SEQ ID NO: 41828 - protein, 13 aa, Homo Sapiens
HAKLSLQELTWKM

SEQ ID NO: 41829 - protein, 13 aa, Homo Sapiens
AKLSLQELTWKMS

SEQ ID NO: 41830 - protein, 13 aa, Homo Sapiens
KLSLQELTWKMSV

SEQ ID NO: 41831 - protein, 13 aa, Homo Sapiens
LSLQELTWKMSVR

SEQ ID NO: 41832 - protein, 13 aa, Homo Sapiens
SLQELTWKMSVRD

SEQ ID NO: 41833 - protein, 13 aa, Homo Sapiens
LQELTWKMSVRDC

SEQ ID NO: 41834 - protein, 13 aa, Homo Sapiens
QELTWKMSVRDCA

SEQ ID NO: 41835 - protein, 13 aa, Homo Sapiens
ELTWKMSVRDCAW

SEQ ID NO: 41836 - protein, 13 aa, Homo Sapiens
LTWKMSVRDCAWL

SEQ ID NO: 41837 - protein, 13 aa, Homo Sapiens
TWKMSVRDCAWLR

SEQ ID NO: 41838 - protein, 13 aa, Homo Sapiens
WKMSVRDCAWLRR

SEQ ID NO: 41839 - protein, 13 aa, Homo Sapiens
KMSVRDCAWLRRS

SEQ ID NO: 41840 - protein, 13 aa, Homo Sapiens
MSVRDCAWLRRSP

SEQ ID NO: 41841 - protein, 13 aa, Homo Sapiens
SVRDCAWLRRSPG

SEQ ID NO: 41842 - protein, 13 aa, Homo Sapiens
VRDCAWLRRSPGV

SEQ ID NO: 41843 - protein, 13 aa, Homo Sapiens
RDCAWLRRSPGVG

SEQ ID NO: 41844 - protein, 13 aa, Homo Sapiens
DCAWLRRSPGVGC

SEQ ID NO: 41845 - protein, 13 aa, Homo Sapiens
CAWLRRSPGVGCV

SEQ ID NO: 41846 - protein, 13 aa, Homo Sapiens
AWLRRSPGVGCVP

SEQ ID NO: 41847 - protein, 13 aa, Homo Sapiens
WLRRSPGVGCVPA

SEQ ID NO: 41848 - protein, 13 aa, Homo Sapiens
LRRSPGVGCVPAA

SEQ ID NO: 41849 - protein, 13 aa, Homo Sapiens
RRSPGVGCVPAAE

SEQ ID NO: 41850 - protein, 13 aa, Homo Sapiens
RSPGVGCVPAAEH

SEQ ID NO: 41851 - protein, 13 aa, Homo Sapiens
SPGVGCVPAAEHR

SEQ ID NO: 41852 - protein, 13 aa, Homo Sapiens
PGVGCVPAAEHRL

SEQ ID NO: 41853 - protein, 13 aa, Homo Sapiens
GVGCVPAAEHRLR

SEQ ID NO: 41854 - protein, 13 aa, Homo Sapiens
VGCVPAAEHRLRE

SEQ ID NO: 41855 - protein, 13 aa, Homo Sapiens
GCVPAAEHRLREE

SEQ ID NO: 41856 - protein, 13 aa, Homo Sapiens
CVPAAEHRLREEI

SEQ ID NO: 41857 - protein, 13 aa, Homo Sapiens
VPAAEHRLREEIL

SEQ ID NO: 41858 - protein, 13 aa, Homo Sapiens
PAAEHRLREEILA

SEQ ID NO: 41859 - protein, 13 aa, Homo Sapiens
AAEHRLREEILAK

SEQ ID NO: 41860 - protein, 13 aa, Homo Sapiens
AEHRLREEILAKF

SEQ ID NO: 41861 - protein, 13 aa, Homo Sapiens
EHRLREEILAKFL

SEQ ID NO: 41862 - protein, 13 aa, Homo Sapiens
HRLREEILAKFLH

SEQ ID NO: 41863 - protein, 13 aa, Homo Sapiens
RLREEILAKFLHW

SEQ ID NO: 41864 - protein, 13 aa, Homo Sapiens
LREEILAKFLHWL

SEQ ID NO: 41865 - protein, 13 aa, Homo Sapiens
REEILAKFLHWLM

SEQ ID NO: 41866 - protein, 13 aa, Homo Sapiens
EEILAKFLHWLMS

SEQ ID NO: 41867 - protein, 13 aa, Homo Sapiens
EILAKFLHWLMSV

SEQ ID NO: 41868 - protein, 13 aa, Homo Sapiens
ILAKFLHWLMSVY

SEQ ID NO: 41869 - protein, 13 aa, Homo Sapiens
LAKFLHWLMSVYV

SEQ ID NO: 41870 - protein, 13 aa, Homo Sapiens
AKFLHWLMSVYVV

SEQ ID NO: 41871 - protein, 13 aa, Homo Sapiens
KFLHWLMSVYVVE

SEQ ID NO: 41872 - protein, 13 aa, Homo Sapiens
FLHWLMSVYVVEL

SEQ ID NO: 41873 - protein, 13 aa, Homo Sapiens
LHWLMSVYVVELL

SEQ ID NO: 41874 - protein, 13 aa, Homo Sapiens
HWLMSVYVVELLR

SEQ ID NO: 41875 - protein, 13 aa, Homo Sapiens
WLMSVYVVELLRS

SEQ ID NO: 41876 - protein, 13 aa, Homo Sapiens
LMSVYVVELLRSF

SEQ ID NO: 41877 - protein, 13 aa, Homo Sapiens
MSVYVVELLRSFF

SEQ ID NO: 41878 - protein, 13 aa, Homo Sapiens
SVYVVELLRSFFY

SEQ ID NO: 41879 - protein, 13 aa, Homo Sapiens
VYVVELLRSFFYV

SEQ ID NO: 41880 - protein, 13 aa, Homo Sapiens
YVVELLRSFFYVT

SEQ ID NO: 41881 - protein, 13 aa, Homo Sapiens
VVELLRSFFYVTE

SEQ ID NO: 41882 - protein, 13 aa, Homo Sapiens
VELLRSFFYVTET

SEQ ID NO: 41883 - protein, 13 aa, Homo Sapiens
ELLRSFFYVTETT

SEQ ID NO: 41884 - protein, 13 aa, Homo Sapiens
LLRSFFYVTETTF

SEQ ID NO: 41885 - protein, 13 aa, Homo Sapiens
LRSFFYVTETTFQ

SEQ ID NO: 41886 - protein, 13 aa, Homo Sapiens
RSFFYVTETTFQK

SEQ ID NO: 41887 - protein, 13 aa, Homo Sapiens
SFFYVTETTFQKN

SEQ ID NO: 41888 - protein, 13 aa, Homo Sapiens
FFYVTETTFQKNR

SEQ ID NO: 41889 - protein, 13 aa, Homo Sapiens
FYVTETTFQKNRL

SEQ ID NO: 41890 - protein, 13 aa, Homo Sapiens
YVTETTFQKNRLF

SEQ ID NO: 41891 - protein, 13 aa, Homo Sapiens
VTETTFQKNRLFF

SEQ ID NO: 41892 - protein, 13 aa, Homo Sapiens
TETTFQKNRLFFY

SEQ ID NO: 41893 - protein, 13 aa, Homo Sapiens
ETTFQKNRLFFYR

SEQ ID NO: 41894 - protein, 13 aa, Homo Sapiens
TTFQKNRLFFYRK

SEQ ID NO: 41895 - protein, 13 aa, Homo Sapiens
TFQKNRLFFYRKS

SEQ ID NO: 41896 - protein, 13 aa, Homo Sapiens
FQKNRLFFYRKSV

SEQ ID NO: 41897 - protein, 13 aa, Homo Sapiens
QKNRLFFYRKSVW

SEQ ID NO: 41898 - protein, 13 aa, Homo Sapiens
KNRLFFYRKSVWS

SEQ ID NO: 41899 - protein, 13 aa, Homo Sapiens
NRLFFYRKSVWSK

SEQ ID NO: 41900 - protein, 13 aa, Homo Sapiens
RLFFYRKSVWSKL

SEQ ID NO: 41901 - protein, 13 aa, Homo Sapiens
LFFYRKSVWSKLQ

SEQ ID NO: 41902 - protein, 13 aa, Homo Sapiens
FFYRKSVWSKLQS

SEQ ID NO: 41903 - protein, 13 aa, Homo Sapiens
FYRKSVWSKLQSI

SEQ ID NO: 41904 - protein, 13 aa, Homo Sapiens
YRKSVWSKLQSIG

SEQ ID NO: 41905 - protein, 13 aa, Homo Sapiens
RKSVWSKLQSIGI

SEQ ID NO: 41906 - protein, 13 aa, Homo Sapiens
KSVWSKLQSIGIR

SEQ ID NO: 41907 - protein, 13 aa, Homo Sapiens
SVWSKLQSIGIRQ

SEQ ID NO: 41908 - protein, 13 aa, Homo Sapiens
VWSKLQSIGIRQH

SEQ ID NO: 41909 - protein, 13 aa, Homo Sapiens
WSKLQSIGIRQHL

SEQ ID NO: 41910 - protein, 13 aa, Homo Sapiens
SKLQSIGIRQHLK

SEQ ID NO: 41911 - protein, 13 aa, Homo Sapiens
KLQSIGIRQHLKR

SEQ ID NO: 41912 - protein, 13 aa, Homo Sapiens
LQSIGIRQHLKRV

SEQ ID NO: 41913 - protein, 13 aa, Homo Sapiens
QSIGIRQHLKRVQ

SEQ ID NO: 41914 - protein, 13 aa, Homo Sapiens
SIGIRQHLKRVQL

SEQ ID NO: 41915 - protein, 13 aa, Homo Sapiens
IGIRQHLKRVQLR

SEQ ID NO: 41916 - protein, 13 aa, Homo Sapiens
GIRQHLKRVQLRE

SEQ ID NO: 41917 - protein, 13 aa, Homo Sapiens
IRQHLKRVQLREL

SEQ ID NO: 41918 - protein, 13 aa, Homo Sapiens
RQHLKRVQLRELS

SEQ ID NO: 41919 - protein, 13 aa, Homo Sapiens
QHLKRVQLRELSE

SEQ ID NO: 41920 - protein, 13 aa, Homo Sapiens
HLKRVQLRELSEA

SEQ ID NO: 41921 - protein, 13 aa, Homo Sapiens
LKRVQLRELSEAE

SEQ ID NO: 41922 - protein, 13 aa, Homo Sapiens
KRVQLRELSEAEV

SEQ ID NO: 41923 - protein, 13 aa, Homo Sapiens
RVQLRELSEAEVR

SEQ ID NO: 41924 - protein, 13 aa, Homo Sapiens
VQLRELSEAEVRQ

SEQ ID NO: 41925 - protein, 13 aa, Homo Sapiens
QLRELSEAEVRQH

SEQ ID NO: 41926 - protein, 13 aa, Homo Sapiens
LRELSEAEVRQHR

SEQ ID NO: 41927 - protein, 13 aa, Homo Sapiens
RELSEAEVRQHRE

SEQ ID NO: 41928 - protein, 13 aa, Homo Sapiens
ELSEAEVRQHREA

SEQ ID NO: 41929 - protein, 13 aa, Homo Sapiens
LSEAEVRQHREAR

SEQ ID NO: 41930 - protein, 13 aa, Homo Sapiens
SEAEVRQHREARP

SEQ ID NO: 41931 - protein, 13 aa, Homo Sapiens
EAEVRQHREARPA

SEQ ID NO: 41932 - protein, 13 aa, Homo Sapiens
AEVRQHREARPAL

SEQ ID NO: 41933 - protein, 13 aa, Homo Sapiens
EVRQHREARPALL

SEQ ID NO: 41934 - protein, 13 aa, Homo Sapiens
VRQHREARPALLT

SEQ ID NO: 41935 - protein, 13 aa, Homo Sapiens
RQHREARPALLTS

SEQ ID NO: 41936 - protein, 13 aa, Homo Sapiens
QHREARPALLTSR

SEQ ID NO: 41937 - protein, 13 aa, Homo Sapiens
HREARPALLTSRL

SEQ ID NO: 41938 - protein, 13 aa, Homo Sapiens
REARPALLTSRLR

SEQ ID NO: 41939 - protein, 13 aa, Homo Sapiens
EARPALLTSRLRF

SEQ ID NO: 41940 - protein, 13 aa, Homo Sapiens
ARPALLTSRLRFI

SEQ ID NO: 41941 - protein, 13 aa, Homo Sapiens
RPALLTSRLRFIP

SEQ ID NO: 41942 - protein, 13 aa, Homo Sapiens
PALLTSRLRFIPK

SEQ ID NO: 41943 - protein, 13 aa, Homo Sapiens
ALLTSRLRFIPKP

SEQ ID NO: 41944 - protein, 13 aa, Homo Sapiens
LLTSRLRFIPKPD

SEQ ID NO: 41945 - protein, 13 aa, Homo Sapiens
LTSRLRFIPKPDG

SEQ ID NO: 41946 - protein, 13 aa, Homo Sapiens
TSRLRFIPKPDGL

SEQ ID NO: 41947 - protein, 13 aa, Homo Sapiens
SRLRFIPKPDGLR

SEQ ID NO: 41948 - protein, 13 aa, Homo Sapiens
RLRFIPKPDGLRP

SEQ ID NO: 41949 - protein, 13 aa, Homo Sapiens
LRFIPKPDGLRPI

SEQ ID NO: 41950 - protein, 13 aa, Homo Sapiens
RFIPKPDGLRPIV

SEQ ID NO: 41951 - protein, 13 aa, Homo Sapiens
FIPKPDGLRPIVN

SEQ ID NO: 41952 - protein, 13 aa, Homo Sapiens
IPKPDGLRPIVNM

SEQ ID NO: 41953 - protein, 13 aa, Homo Sapiens
PKPDGLRPIVNMD

SEQ ID NO: 41954 - protein, 13 aa, Homo Sapiens
KPDGLRPIVNMDY

SEQ ID NO: 41955 - protein, 13 aa, Homo Sapiens
PDGLRPIVNMDYV

SEQ ID NO: 41956 - protein, 13 aa, Homo Sapiens
DGLRPIVNMDYVV

SEQ ID NO: 41957 - protein, 13 aa, Homo Sapiens
GLRPIVNMDYVVG

SEQ ID NO: 41958 - protein, 13 aa, Homo Sapiens
LRPIVNMDYVVGA

SEQ ID NO: 41959 - protein, 13 aa, Homo Sapiens
RPIVNMDYVVGAR

SEQ ID NO: 41960 - protein, 13 aa, Homo Sapiens
PIVNMDYVVGART

SEQ ID NO: 41961 - protein, 13 aa, Homo Sapiens
IVNMDYVVGARTF

SEQ ID NO: 41962 - protein, 13 aa, Homo Sapiens
VNMDYVVGARTFR

SEQ ID NO: 41963 - protein, 13 aa, Homo Sapiens
NMDYVVGARTFRR

SEQ ID NO: 41964 - protein, 13 aa, Homo Sapiens
MDYVVGARTFRRE

SEQ ID NO: 41965 - protein, 13 aa, Homo Sapiens
DYVVGARTFRREK

SEQ ID NO: 41966 - protein, 13 aa, Homo Sapiens
YVVGARTFRREKR

SEQ ID NO: 41967 - protein, 13 aa, Homo Sapiens
VVGARTFRREKRA

SEQ ID NO: 41968 - protein, 13 aa, Homo Sapiens
VGARTFRREKRAE

SEQ ID NO: 41969 - protein, 13 aa, Homo Sapiens
GARTFRREKRAER

SEQ ID NO: 41970 - protein, 13 aa, Homo Sapiens
ARTFRREKRAERL

SEQ ID NO: 41971 - protein, 13 aa, Homo Sapiens
RTFRREKRAERLT

SEQ ID NO: 41972 - protein, 13 aa, Homo Sapiens
TFRREKRAERLTS

SEQ ID NO: 41973 - protein, 13 aa, Homo Sapiens
FRREKRAERLTSR

SEQ ID NO: 41974 - protein, 13 aa, Homo Sapiens
RREKRAERLTSRV

SEQ ID NO: 41975 - protein, 13 aa, Homo Sapiens
REKRAERLTSRVK

SEQ ID NO: 41976 - protein, 13 aa, Homo Sapiens
EKRAERLTSRVKA

SEQ ID NO: 41977 - protein, 13 aa, Homo Sapiens
KRAERLTSRVKAL

SEQ ID NO: 41978 - protein, 13 aa, Homo Sapiens
RAERLTSRVKALF

SEQ ID NO: 41979 - protein, 13 aa, Homo Sapiens
AERLTSRVKALFS

SEQ ID NO: 41980 - protein, 13 aa, Homo Sapiens
ERLTSRVKALFSV

SEQ ID NO: 41981 - protein, 13 aa, Homo Sapiens
RLTSRVKALFSVL

SEQ ID NO: 41982 - protein, 13 aa, Homo Sapiens
LTSRVKALFSVLN

SEQ ID NO: 41983 - protein, 13 aa, Homo Sapiens
TSRVKALFSVLNY

SEQ ID NO: 41984 - protein, 13 aa, Homo Sapiens
SRVKALFSVLNYE

SEQ ID NO: 41985 - protein, 13 aa, Homo Sapiens
RVKALFSVLNYER

SEQ ID NO: 41986 - protein, 13 aa, Homo Sapiens
VKALFSVLNYERA

SEQ ID NO: 41987 - protein, 13 aa, Homo Sapiens
KALFSVLNYERAR

SEQ ID NO: 41988 - protein, 13 aa, Homo Sapiens
ALFSVLNYERARR

SEQ ID NO: 41989 - protein, 13 aa, Homo Sapiens
LFSVLNYERARRP

SEQ ID NO: 41990 - protein, 13 aa, Homo Sapiens
FSVLNYERARRPG

SEQ ID NO: 41991 - protein, 13 aa, Homo Sapiens
SVLNYERARRPGL

SEQ ID NO: 41992 - protein, 13 aa, Homo Sapiens
VLNYERARRPGLL

SEQ ID NO: 41993 - protein, 13 aa, Homo Sapiens
LNYERARRPGLLG

SEQ ID NO: 41994 - protein, 13 aa, Homo Sapiens
NYERARRPGLLGA

SEQ ID NO: 41995 - protein, 13 aa, Homo Sapiens
YERARRPGLLGAS

SEQ ID NO: 41996 - protein, 13 aa, Homo Sapiens
ERARRPGLLGASV

SEQ ID NO: 41997 - protein, 13 aa, Homo Sapiens
RARRPGLLGASVL

SEQ ID NO: 41998 - protein, 13 aa, Homo Sapiens
ARRPGLLGASVLG

SEQ ID NO: 41999 - protein, 13 aa, Homo Sapiens
RRPGLLGASVLGL

SEQ ID NO: 42000 - protein, 13 aa, Homo Sapiens
RPGLLGASVLGLD

SEQ ID NO: 42001 - protein, 13 aa, Homo Sapiens
PGLLGASVLGLDD

SEQ ID NO: 42002 - protein, 13 aa, Homo Sapiens
GLLGASVLGLDDI

SEQ ID NO: 42003 - protein, 13 aa, Homo Sapiens
LLGASVLGLDDIH

SEQ ID NO: 42004 - protein, 13 aa, Homo Sapiens
LGASVLGLDDIHR

SEQ ID NO: 42005 - protein, 13 aa, Homo Sapiens
GASVLGLDDIHRA

SEQ ID NO: 42006 - protein, 13 aa, Homo Sapiens
ASVLGLDDIHRAW

SEQ ID NO: 42007 - protein, 13 aa, Homo Sapiens
SVLGLDDIHRAWR

SEQ ID NO: 42008 - protein, 13 aa, Homo Sapiens
VLGLDDIHRAWRT

SEQ ID NO: 42009 - protein, 13 aa, Homo Sapiens
LGLDDIHRAWRTF

SEQ ID NO: 42010 - protein, 13 aa, Homo Sapiens
GLDDIHRAWRTFV

SEQ ID NO: 42011 - protein, 13 aa, Homo Sapiens
LDDIHRAWRTFVL

SEQ ID NO: 42012 - protein, 13 aa, Homo Sapiens
DDIHRAWRTFVLR

SEQ ID NO: 42013 - protein, 13 aa, Homo Sapiens
DIHRAWRTFVLRV

SEQ ID NO: 42014 - protein, 13 aa, Homo Sapiens
IHRAWRTFVLRVR

SEQ ID NO: 42015 - protein, 13 aa, Homo Sapiens
HRAWRTFVLRVRA

SEQ ID NO: 42016 - protein, 13 aa, Homo Sapiens
RAWRTFVLRVRAQ

SEQ ID NO: 42017 - protein, 13 aa, Homo Sapiens
AWRTFVLRVRAQD

SEQ ID NO: 42018 - protein, 13 aa, Homo Sapiens
WRTFVLRVRAQDP

SEQ ID NO: 42019 - protein, 13 aa, Homo Sapiens
RTFVLRVRAQDPP

SEQ ID NO: 42020 - protein, 13 aa, Homo Sapiens
TFVLRVRAQDPPP

SEQ ID NO: 42021 - protein, 13 aa, Homo Sapiens
FVLRVRAQDPPPE

SEQ ID NO: 42022 - protein, 13 aa, Homo Sapiens
VLRVRAQDPPPEL

SEQ ID NO: 42023 - protein, 13 aa, Homo Sapiens
LRVRAQDPPPELY

SEQ ID NO: 42024 - protein, 13 aa, Homo Sapiens
RVRAQDPPPELYF

SEQ ID NO: 42025 - protein, 13 aa, Homo Sapiens
VRAQDPPPELYFV

SEQ ID NO: 42026 - protein, 13 aa, Homo Sapiens
RAQDPPPELYFVK

SEQ ID NO: 42027 - protein, 13 aa, Homo Sapiens
AQDPPPELYFVKV

SEQ ID NO: 42028 - protein, 13 aa, Homo Sapiens
QDPPPELYFVKVD

SEQ ID NO: 42029 - protein, 13 aa, Homo Sapiens
DPPPELYFVKVDV

SEQ ID NO: 42030 - protein, 13 aa, Homo Sapiens
PPPELYFVKVDVT

SEQ ID NO: 42031 - protein, 13 aa, Homo Sapiens
PPELYFVKVDVTG

SEQ ID NO: 42032 - protein, 13 aa, Homo Sapiens
PELYFVKVDVTGA

SEQ ID NO: 42033 - protein, 13 aa, Homo Sapiens
ELYFVKVDVTGAY

SEQ ID NO: 42034 - protein, 13 aa, Homo Sapiens
LYFVKVDVTGAYD

SEQ ID NO: 42035 - protein, 13 aa, Homo Sapiens
YFVKVDVTGAYDT

SEQ ID NO: 42036 - protein, 13 aa, Homo Sapiens
FVKVDVTGAYDTI

SEQ ID NO: 42037 - protein, 13 aa, Homo Sapiens
VKVDVTGAYDTIP

SEQ ID NO: 42038 - protein, 13 aa, Homo Sapiens
KVDVTGAYDTIPQ

SEQ ID NO: 42039 - protein, 13 aa, Homo Sapiens
VDVTGAYDTIPQD

SEQ ID NO: 42040 - protein, 13 aa, Homo Sapiens
DVTGAYDTIPQDR

SEQ ID NO: 42041 - protein, 13 aa, Homo Sapiens
VTGAYDTIPQDRL

SEQ ID NO: 42042 - protein, 13 aa, Homo Sapiens
TGAYDTIPQDRLT

SEQ ID NO: 42043 - protein, 13 aa, Homo Sapiens
GAYDTIPQDRLTE

SEQ ID NO: 42044 - protein, 13 aa, Homo Sapiens
AYDTIPQDRLTEV

SEQ ID NO: 42045 - protein, 13 aa, Homo Sapiens
YDTIPQDRLTEVI

SEQ ID NO: 42046 - protein, 13 aa, Homo Sapiens
DTIPQDRLTEVIA

SEQ ID NO: 42047 - protein, 13 aa, Homo Sapiens
TIPQDRLTEVIAS

SEQ ID NO: 42048 - protein, 13 aa, Homo Sapiens
IPQDRLTEVIASI

SEQ ID NO: 42049 - protein, 13 aa, Homo Sapiens
PQDRLTEVIASII

SEQ ID NO: 42050 - protein, 13 aa, Homo Sapiens
QDRLTEVIASIIK

SEQ ID NO: 42051 - protein, 13 aa, Homo Sapiens
DRLTEVIASIIKP

SEQ ID NO: 42052 - protein, 13 aa, Homo Sapiens
RLTEVIASIIKPQ

SEQ ID NO: 42053 - protein, 13 aa, Homo Sapiens
LTEVIASIIKPQN

SEQ ID NO: 42054 - protein, 13 aa, Homo Sapiens
TEVIASIIKPQNT

SEQ ID NO: 42055 - protein, 13 aa, Homo Sapiens
EVIASIIKPQNTY

SEQ ID NO: 42056 - protein, 13 aa, Homo Sapiens
VIASIIKPQNTYC

SEQ ID NO: 42057 - protein, 13 aa, Homo Sapiens
IASIIKPQNTYCV

SEQ ID NO: 42058 - protein, 13 aa, Homo Sapiens
ASIIKPQNTYCVR

SEQ ID NO: 42059 - protein, 13 aa, Homo Sapiens
SIIKPQNTYCVRR

SEQ ID NO: 42060 - protein, 13 aa, Homo Sapiens
IIKPQNTYCVRRY

SEQ ID NO: 42061 - protein, 13 aa, Homo Sapiens
IKPQNTYCVRRYA

SEQ ID NO: 42062 - protein, 13 aa, Homo Sapiens
KPQNTYCVRRYAV

SEQ ID NO: 42063 - protein, 13 aa, Homo Sapiens
PQNTYCVRRYAVV

SEQ ID NO: 42064 - protein, 13 aa, Homo Sapiens
QNTYCVRRYAVVQ

SEQ ID NO: 42065 - protein, 13 aa, Homo Sapiens
NTYCVRRYAVVQK

SEQ ID NO: 42066 - protein, 13 aa, Homo Sapiens
TYCVRRYAVVQKA

SEQ ID NO: 42067 - protein, 13 aa, Homo Sapiens
YCVRRYAVVQKAA

SEQ ID NO: 42068 - protein, 13 aa, Homo Sapiens
CVRRYAVVQKAAH

SEQ ID NO: 42069 - protein, 13 aa, Homo Sapiens
VRRYAVVQKAAHG

SEQ ID NO: 42070 - protein, 13 aa, Homo Sapiens
RRYAVVQKAAHGH

SEQ ID NO: 42071 - protein, 13 aa, Homo Sapiens
RYAVVQKAAHGHV

SEQ ID NO: 42072 - protein, 13 aa, Homo Sapiens
YAVVQKAAHGHVR

SEQ ID NO: 42073 - protein, 13 aa, Homo Sapiens
AVVQKAAHGHVRK

SEQ ID NO: 42074 - protein, 13 aa, Homo Sapiens
VVQKAAHGHVRKA

SEQ ID NO: 42075 - protein, 13 aa, Homo Sapiens
VQKAAHGHVRKAF

SEQ ID NO: 42076 - protein, 13 aa, Homo Sapiens
QKAAHGHVRKAFK

SEQ ID NO: 42077 - protein, 13 aa, Homo Sapiens
KAAHGHVRKAFKS

SEQ ID NO: 42078 - protein, 13 aa, Homo Sapiens
AAHGHVRKAFKSH

SEQ ID NO: 42079 - protein, 13 aa, Homo Sapiens
AHGHVRKAFKSHV

SEQ ID NO: 42080 - protein, 13 aa, Homo Sapiens
HGHVRKAFKSHVS

SEQ ID NO: 42081 - protein, 13 aa, Homo Sapiens
GHVRKAFKSHVST

SEQ ID NO: 42082 - protein, 13 aa, Homo Sapiens
HVRKAFKSHVSTL

SEQ ID NO: 42083 - protein, 13 aa, Homo Sapiens
VRKAFKSHVSTLT

SEQ ID NO: 42084 - protein, 13 aa, Homo Sapiens
RKAFKSHVSTLTD

SEQ ID NO: 42085 - protein, 13 aa, Homo Sapiens
KAFKSHVSTLTDL

SEQ ID NO: 42086 - protein, 13 aa, Homo Sapiens
AFKSHVSTLTDLQ

SEQ ID NO: 42087 - protein, 13 aa, Homo Sapiens
FKSHVSTLTDLQP

SEQ ID NO: 42088 - protein, 13 aa, Homo Sapiens
KSHVSTLTDLQPY

SEQ ID NO: 42089 - protein, 13 aa, Homo Sapiens
SHVSTLTDLQPYM

SEQ ID NO: 42090 - protein, 13 aa, Homo Sapiens
HVSTLTDLQPYMR

SEQ ID NO: 42091 - protein, 13 aa, Homo Sapiens
VSTLTDLQPYMRQ

SEQ ID NO: 42092 - protein, 13 aa, Homo Sapiens
STLTDLQPYMRQF

SEQ ID NO: 42093 - protein, 13 aa, Homo Sapiens
TLTDLQPYMRQFV

SEQ ID NO: 42094 - protein, 13 aa, Homo Sapiens
LTDLQPYMRQFVA

SEQ ID NO: 42095 - protein, 13 aa, Homo Sapiens
TDLQPYMRQFVAH

SEQ ID NO: 42096 - protein, 13 aa, Homo Sapiens
DLQPYMRQFVAHL

SEQ ID NO: 42097 - protein, 13 aa, Homo Sapiens
LQPYMRQFVAHLQ

SEQ ID NO: 42098 - protein, 13 aa, Homo Sapiens
QPYMRQFVAHLQE

SEQ ID NO: 42099 - protein, 13 aa, Homo Sapiens
PYMRQFVAHLQET

SEQ ID NO: 42100 - protein, 13 aa, Homo Sapiens
YMRQFVAHLQETS

SEQ ID NO: 42101 - protein, 13 aa, Homo Sapiens
MRQFVAHLQETSP

SEQ ID NO: 42102 - protein, 13 aa, Homo Sapiens
RQFVAHLQETSPL

SEQ ID NO: 42103 - protein, 13 aa, Homo Sapiens
QFVAHLQETSPLR

SEQ ID NO: 42104 - protein, 13 aa, Homo Sapiens
FVAHLQETSPLRD

SEQ ID NO: 42105 - protein, 13 aa, Homo Sapiens
VAHLQETSPLRDA

SEQ ID NO: 42106 - protein, 13 aa, Homo Sapiens
AHLQETSPLRDAV

SEQ ID NO: 42107 - protein, 13 aa, Homo Sapiens
HLQETSPLRDAVV

SEQ ID NO: 42108 - protein, 13 aa, Homo Sapiens
LQETSPLRDAVVI

SEQ ID NO: 42109 - protein, 13 aa, Homo Sapiens
QETSPLRDAVVIE

SEQ ID NO: 42110 - protein, 13 aa, Homo Sapiens
ETSPLRDAVVIEQ

SEQ ID NO: 42111 - protein, 13 aa, Homo Sapiens
TSPLRDAVVIEQS

SEQ ID NO: 42112 - protein, 13 aa, Homo Sapiens
SPLRDAVVIEQSS

SEQ ID NO: 42113 - protein, 13 aa, Homo Sapiens
PLRDAVVIEQSSS

SEQ ID NO: 42114 - protein, 13 aa, Homo Sapiens
LRDAVVIEQSSSL

SEQ ID NO: 42115 - protein, 13 aa, Homo Sapiens
RDAVVIEQSSSLN

SEQ ID NO: 42116 - protein, 13 aa, Homo Sapiens
DAVVIEQSSSLNE

SEQ ID NO: 42117 - protein, 13 aa, Homo Sapiens
AVVIEQSSSLNEA

SEQ ID NO: 42118 - protein, 13 aa, Homo Sapiens
VVIEQSSSLNEAS

SEQ ID NO: 42119 - protein, 13 aa, Homo Sapiens
VIEQSSSLNEASS

SEQ ID NO: 42120 - protein, 13 aa, Homo Sapiens
IEQSSSLNEASSG

SEQ ID NO: 42121 - protein, 13 aa, Homo Sapiens
EQSSSLNEASSGL

SEQ ID NO: 42122 - protein, 13 aa, Homo Sapiens
QSSSLNEASSGLF

SEQ ID NO: 42123 - protein, 13 aa, Homo Sapiens
SSSLNEASSGLFD

SEQ ID NO: 42124 - protein, 13 aa, Homo Sapiens
SSLNEASSGLFDV

SEQ ID NO: 42125 - protein, 13 aa, Homo Sapiens
SLNEASSGLFDVF

SEQ ID NO: 42126 - protein, 13 aa, Homo Sapiens
LNEASSGLFDVFL

SEQ ID NO: 42127 - protein, 13 aa, Homo Sapiens
NEASSGLFDVFLR

SEQ ID NO: 42128 - protein, 13 aa, Homo Sapiens
EASSGLFDVFLRF

SEQ ID NO: 42129 - protein, 13 aa, Homo Sapiens
ASSGLFDVFLRFM

SEQ ID NO: 42130 - protein, 13 aa, Homo Sapiens
SSGLFDVFLRFMC

SEQ ID NO: 42131 - protein, 13 aa, Homo Sapiens
SGLFDVFLRFMCH

SEQ ID NO: 42132 - protein, 13 aa, Homo Sapiens
GLFDVFLRFMCHH

SEQ ID NO: 42133 - protein, 13 aa, Homo Sapiens
LFDVFLRFMCHHA

SEQ ID NO: 42134 - protein, 13 aa, Homo Sapiens
FDVFLRFMCHHAV

SEQ ID NO: 42135 - protein, 13 aa, Homo Sapiens
DVFLRFMCHHAVR

SEQ ID NO: 42136 - protein, 13 aa, Homo Sapiens
VFLRFMCHHAVRI

SEQ ID NO: 42137 - protein, 13 aa, Homo Sapiens
FLRFMCHHAVRIR

SEQ ID NO: 42138 - protein, 13 aa, Homo Sapiens
LRFMCHHAVRIRG

SEQ ID NO: 42139 - protein, 13 aa, Homo Sapiens
RFMCHHAVRIRGK

SEQ ID NO: 42140 - protein, 13 aa, Homo Sapiens
FMCHHAVRIRGKS

SEQ ID NO: 42141 - protein, 13 aa, Homo Sapiens
MCHHAVRIRGKSY

SEQ ID NO: 42142 - protein, 13 aa, Homo Sapiens
CHHAVRIRGKSYV

SEQ ID NO: 42143 - protein, 13 aa, Homo Sapiens
HHAVRIRGKSYVQ

SEQ ID NO: 42144 - protein, 13 aa, Homo Sapiens
HAVRIRGKSYVQC

SEQ ID NO: 42145 - protein, 13 aa, Homo Sapiens
AVRIRGKSYVQCQ

SEQ ID NO: 42146 - protein, 13 aa, Homo Sapiens
VRIRGKSYVQCQG

SEQ ID NO: 42147 - protein, 13 aa, Homo Sapiens
RIRGKSYVQCQGI

SEQ ID NO: 42148 - protein, 13 aa, Homo Sapiens
IRGKSYVQCQGIP

SEQ ID NO: 42149 - protein, 13 aa, Homo Sapiens
RGKSYVQCQGIPQ

SEQ ID NO: 42150 - protein, 13 aa, Homo Sapiens
GKSYVQCQGIPQG

SEQ ID NO: 42151 - protein, 13 aa, Homo Sapiens
KSYVQCQGIPQGS

SEQ ID NO: 42152 - protein, 13 aa, Homo Sapiens
SYVQCQGIPQGSI

SEQ ID NO: 42153 - protein, 13 aa, Homo Sapiens
YVQCQGIPQGSIL

SEQ ID NO: 42154 - protein, 13 aa, Homo Sapiens
VQCQGIPQGSILS

SEQ ID NO: 42155 - protein, 13 aa, Homo Sapiens
QCQGIPQGSILST

SEQ ID NO: 42156 - protein, 13 aa, Homo Sapiens
CQGIPQGSILSTL

SEQ ID NO: 42157 - protein, 13 aa, Homo Sapiens
QGIPQGSILSTLL

SEQ ID NO: 42158 - protein, 13 aa, Homo Sapiens
GIPQGSILSTLLC

SEQ ID NO: 42159 - protein, 13 aa, Homo Sapiens
IPQGSILSTLLCS

SEQ ID NO: 42160 - protein, 13 aa, Homo Sapiens
PQGSILSTLLCSL

SEQ ID NO: 42161 - protein, 13 aa, Homo Sapiens
QGSILSTLLCSLC

SEQ ID NO: 42162 - protein, 13 aa, Homo Sapiens
GSILSTLLCSLCY

SEQ ID NO: 42163 - protein, 13 aa, Homo Sapiens
SILSTLLCSLCYG

SEQ ID NO: 42164 - protein, 13 aa, Homo Sapiens
ILSTLLCSLCYGD

SEQ ID NO: 42165 - protein, 13 aa, Homo Sapiens
LSTLLCSLCYGDM

SEQ ID NO: 42166 - protein, 13 aa, Homo Sapiens
STLLCSLCYGDME

SEQ ID NO: 42167 - protein, 13 aa, Homo Sapiens
TLLCSLCYGDMEN

SEQ ID NO: 42168 - protein, 13 aa, Homo Sapiens
LLCSLCYGDMENK

SEQ ID NO: 42169 - protein, 13 aa, Homo Sapiens
LCSLCYGDMENKL

SEQ ID NO: 42170 - protein, 13 aa, Homo Sapiens
CSLCYGDMENKLF

SEQ ID NO: 42171 - protein, 13 aa, Homo Sapiens
SLCYGDMENKLFA

SEQ ID NO: 42172 - protein, 13 aa, Homo Sapiens
LCYGDMENKLFAG

SEQ ID NO: 42173 - protein, 13 aa, Homo Sapiens
CYGDMENKLFAGI

SEQ ID NO: 42174 - protein, 13 aa, Homo Sapiens
YGDMENKLFAGIR

SEQ ID NO: 42175 - protein, 13 aa, Homo Sapiens
GDMENKLFAGIRR

SEQ ID NO: 42176 - protein, 13 aa, Homo Sapiens
DMENKLFAGIRRD

SEQ ID NO: 42177 - protein, 13 aa, Homo Sapiens
MENKLFAGIRRDG

SEQ ID NO: 42178 - protein, 13 aa, Homo Sapiens
ENKLFAGIRRDGL

SEQ ID NO: 42179 - protein, 13 aa, Homo Sapiens
NKLFAGIRRDGLL

SEQ ID NO: 42180 - protein, 13 aa, Homo Sapiens
KLFAGIRRDGLLL

SEQ ID NO: 42181 - protein, 13 aa, Homo Sapiens
LFAGIRRDGLLLR

SEQ ID NO: 42182 - protein, 13 aa, Homo Sapiens
FAGIRRDGLLLRL

SEQ ID NO: 42183 - protein, 13 aa, Homo Sapiens
AGIRRDGLLLRLV

SEQ ID NO: 42184 - protein, 13 aa, Homo Sapiens
GIRRDGLLLRLVD

SEQ ID NO: 42185 - protein, 13 aa, Homo Sapiens
IRRDGLLLRLVDD

SEQ ID NO: 42186 - protein, 13 aa, Homo Sapiens
RRDGLLLRLVDDF

SEQ ID NO: 42187 - protein, 13 aa, Homo Sapiens
RDGLLLRLVDDFL

SEQ ID NO: 42188 - protein, 13 aa, Homo Sapiens
DGLLLRLVDDFLL

SEQ ID NO: 42189 - protein, 13 aa, Homo Sapiens
GLLLRLVDDFLLV

SEQ ID NO: 42190 - protein, 13 aa, Homo Sapiens
LLLRLVDDFLLVT

SEQ ID NO: 42191 - protein, 13 aa, Homo Sapiens
LLRLVDDFLLVTP

SEQ ID NO: 42192 - protein, 13 aa, Homo Sapiens
LRLVDDFLLVTPH

SEQ ID NO: 42193 - protein, 13 aa, Homo Sapiens
RLVDDFLLVTPHL

SEQ ID NO: 42194 - protein, 13 aa, Homo Sapiens
LVDDFLLVTPHLT

SEQ ID NO: 42195 - protein, 13 aa, Homo Sapiens
VDDFLLVTPHLTH

SEQ ID NO: 42196 - protein, 13 aa, Homo Sapiens
DDFLLVTPHLTHA

SEQ ID NO: 42197 - protein, 13 aa, Homo Sapiens
DFLLVTPHLTHAK

SEQ ID NO: 42198 - protein, 13 aa, Homo Sapiens
FLLVTPHLTHAKT

SEQ ID NO: 42199 - protein, 13 aa, Homo Sapiens
LLVTPHLTHAKTF

SEQ ID NO: 42200 - protein, 13 aa, Homo Sapiens
LVTPHLTHAKTFL

SEQ ID NO: 42201 - protein, 13 aa, Homo Sapiens
VTPHLTHAKTFLR

SEQ ID NO: 42202 - protein, 13 aa, Homo Sapiens
TPHLTHAKTFLRT

SEQ ID NO: 42203 - protein, 13 aa, Homo Sapiens
PHLTHAKTFLRTL

SEQ ID NO: 42204 - protein, 13 aa, Homo Sapiens
HLTHAKTFLRTLV

SEQ ID NO: 42205 - protein, 13 aa, Homo Sapiens
LTHAKTFLRTLVR

SEQ ID NO: 42206 - protein, 13 aa, Homo Sapiens
THAKTFLRTLVRG

SEQ ID NO: 42207 - protein, 13 aa, Homo Sapiens
HAKTFLRTLVRGV

SEQ ID NO: 42208 - protein, 13 aa, Homo Sapiens
AKTFLRTLVRGVP

SEQ ID NO: 42209 - protein, 13 aa, Homo Sapiens
KTFLRTLVRGVPE

SEQ ID NO: 42210 - protein, 13 aa, Homo Sapiens
TFLRTLVRGVPEY

SEQ ID NO: 42211 - protein, 13 aa, Homo Sapiens
FLRTLVRGVPEYG

SEQ ID NO: 42212 - protein, 13 aa, Homo Sapiens
LRTLVRGVPEYGC

SEQ ID NO: 42213 - protein, 13 aa, Homo Sapiens
RTLVRGVPEYGCV

SEQ ID NO: 42214 - protein, 13 aa, Homo Sapiens
TLVRGVPEYGCVV

SEQ ID NO: 42215 - protein, 13 aa, Homo Sapiens
LVRGVPEYGCVVN

SEQ ID NO: 42216 - protein, 13 aa, Homo Sapiens
VRGVPEYGCVVNL

SEQ ID NO: 42217 - protein, 13 aa, Homo Sapiens
RGVPEYGCVVNLR

SEQ ID NO: 42218 - protein, 13 aa, Homo Sapiens
GVPEYGCVVNLRK

SEQ ID NO: 42219 - protein, 13 aa, Homo Sapiens
VPEYGCVVNLRKT

SEQ ID NO: 42220 - protein, 13 aa, Homo Sapiens
PEYGCVVNLRKTV

SEQ ID NO: 42221 - protein, 13 aa, Homo Sapiens
EYGCVVNLRKTVV

SEQ ID NO: 42222 - protein, 13 aa, Homo Sapiens
YGCVVNLRKTVVN

SEQ ID NO: 42223 - protein, 13 aa, Homo Sapiens
GCVVNLRKTVVNF

SEQ ID NO: 42224 - protein, 13 aa, Homo Sapiens
CVVNLRKTVVNFP

SEQ ID NO: 42225 - protein, 13 aa, Homo Sapiens
VVNLRKTVVNFPV

SEQ ID NO: 42226 - protein, 13 aa, Homo Sapiens
VNLRKTVVNFPVE

SEQ ID NO: 42227 - protein, 13 aa, Homo Sapiens
NLRKTVVNFPVED

SEQ ID NO: 42228 - protein, 13 aa, Homo Sapiens
LRKTVVNFPVEDE

SEQ ID NO: 42229 - protein, 13 aa, Homo Sapiens
RKTVVNFPVEDEA

SEQ ID NO: 42230 - protein, 13 aa, Homo Sapiens
KTVVNFPVEDEAL

SEQ ID NO: 42231 - protein, 13 aa, Homo Sapiens
TVVNFPVEDEALG

SEQ ID NO: 42232 - protein, 13 aa, Homo Sapiens
VVNFPVEDEALGG

SEQ ID NO: 42233 - protein, 13 aa, Homo Sapiens
VNFPVEDEALGGT

SEQ ID NO: 42234 - protein, 13 aa, Homo Sapiens
NFPVEDEALGGTA

SEQ ID NO: 42235 - protein, 13 aa, Homo Sapiens
FPVEDEALGGTAF

SEQ ID NO: 42236 - protein, 13 aa, Homo Sapiens
PVEDEALGGTAFV

SEQ ID NO: 42237 - protein, 13 aa, Homo Sapiens
VEDEALGGTAFVQ

SEQ ID NO: 42238 - protein, 13 aa, Homo Sapiens
EDEALGGTAFVQM

SEQ ID NO: 42239 - protein, 13 aa, Homo Sapiens
DEALGGTAFVQMP

SEQ ID NO: 42240 - protein, 13 aa, Homo Sapiens
EALGGTAFVQMPA

SEQ ID NO: 42241 - protein, 13 aa, Homo Sapiens
ALGGTAFVQMPAH

SEQ ID NO: 42242 - protein, 13 aa, Homo Sapiens
LGGTAFVQMPAHG

SEQ ID NO: 42243 - protein, 13 aa, Homo Sapiens
GGTAFVQMPAHGL

SEQ ID NO: 42244 - protein, 13 aa, Homo Sapiens
GTAFVQMPAHGLF

SEQ ID NO: 42245 - protein, 13 aa, Homo Sapiens
TAFVQMPAHGLFP

SEQ ID NO: 42246 - protein, 13 aa, Homo Sapiens
AFVQMPAHGLFPW

SEQ ID NO: 42247 - protein, 13 aa, Homo Sapiens
FVQMPAHGLFPWC

SEQ ID NO: 42248 - protein, 13 aa, Homo Sapiens
VQMPAHGLFPWCG

SEQ ID NO: 42249 - protein, 13 aa, Homo Sapiens
QMPAHGLFPWCGL

SEQ ID NO: 42250 - protein, 13 aa, Homo Sapiens
MPAHGLFPWCGLL

SEQ ID NO: 42251 - protein, 13 aa, Homo Sapiens
PAHGLFPWCGLLL

SEQ ID NO: 42252 - protein, 13 aa, Homo Sapiens
AHGLFPWCGLLLD

SEQ ID NO: 42253 - protein, 13 aa, Homo Sapiens
HGLFPWCGLLLDT

SEQ ID NO: 42254 - protein, 13 aa, Homo Sapiens
GLFPWCGLLLDTR

SEQ ID NO: 42255 - protein, 13 aa, Homo Sapiens
LFPWCGLLLDTRT

SEQ ID NO: 42256 - protein, 13 aa, Homo Sapiens
FPWCGLLLDTRTL

SEQ ID NO: 42257 - protein, 13 aa, Homo Sapiens
PWCGLLLDTRTLE

SEQ ID NO: 42258 - protein, 13 aa, Homo Sapiens
WCGLLLDTRTLEV

SEQ ID NO: 42259 - protein, 13 aa, Homo Sapiens
CGLLLDTRTLEVQ

SEQ ID NO: 42260 - protein, 13 aa, Homo Sapiens
GLLLDTRTLEVQS

SEQ ID NO: 42261 - protein, 13 aa, Homo Sapiens
LLLDTRTLEVQSD

SEQ ID NO: 42262 - protein, 13 aa, Homo Sapiens
LLDTRTLEVQSDY

SEQ ID NO: 42263 - protein, 13 aa, Homo Sapiens
LDTRTLEVQSDYS

SEQ ID NO: 42264 - protein, 13 aa, Homo Sapiens
DTRTLEVQSDYSS

SEQ ID NO: 42265 - protein, 13 aa, Homo Sapiens
TRTLEVQSDYSSY

SEQ ID NO: 42266 - protein, 13 aa, Homo Sapiens
RTLEVQSDYSSYA

SEQ ID NO: 42267 - protein, 13 aa, Homo Sapiens
TLEVQSDYSSYAR

SEQ ID NO: 42268 - protein, 13 aa, Homo Sapiens
LEVQSDYSSYART

SEQ ID NO: 42269 - protein, 13 aa, Homo Sapiens
EVQSDYSSYARTS

SEQ ID NO: 42270 - protein, 13 aa, Homo Sapiens
VQSDYSSYARTSI

SEQ ID NO: 42271 - protein, 13 aa, Homo Sapiens
QSDYSSYARTSIR

SEQ ID NO: 42272 - protein, 13 aa, Homo Sapiens
SDYSSYARTSIRA

SEQ ID NO: 42273 - protein, 13 aa, Homo Sapiens
DYSSYARTSIRAS

SEQ ID NO: 42274 - protein, 13 aa, Homo Sapiens
YSSYARTSIRASL

SEQ ID NO: 42275 - protein, 13 aa, Homo Sapiens
SSYARTSIRASLT

SEQ ID NO: 42276 - protein, 13 aa, Homo Sapiens
SYARTSIRASLTF

SEQ ID NO: 42277 - protein, 13 aa, Homo Sapiens
YARTSIRASLTFN

SEQ ID NO: 42278 - protein, 13 aa, Homo Sapiens
ARTSIRASLTFNR

SEQ ID NO: 42279 - protein, 13 aa, Homo Sapiens
RTSIRASLTFNRG

SEQ ID NO: 42280 - protein, 13 aa, Homo Sapiens
TSIRASLTFNRGF

SEQ ID NO: 42281 - protein, 13 aa, Homo Sapiens
SIRASLTFNRGFK

SEQ ID NO: 42282 - protein, 13 aa, Homo Sapiens
IRASLTFNRGFKA

SEQ ID NO: 42283 - protein, 13 aa, Homo Sapiens
RASLTFNRGFKAG

SEQ ID NO: 42284 - protein, 13 aa, Homo Sapiens
ASLTFNRGFKAGR

SEQ ID NO: 42285 - protein, 13 aa, Homo Sapiens
SLTFNRGFKAGRN

SEQ ID NO: 42286 - protein, 13 aa, Homo Sapiens
LTFNRGFKAGRNM

SEQ ID NO: 42287 - protein, 13 aa, Homo Sapiens
TFNRGFKAGRNMR

SEQ ID NO: 42288 - protein, 13 aa, Homo Sapiens
FNRGFKAGRNMRR

SEQ ID NO: 42289 - protein, 13 aa, Homo Sapiens
NRGFKAGRNMRRK

SEQ ID NO: 42290 - protein, 13 aa, Homo Sapiens
RGFKAGRNMRRKL

SEQ ID NO: 42291 - protein, 13 aa, Homo Sapiens
GFKAGRNMRRKLF

SEQ ID NO: 42292 - protein, 13 aa, Homo Sapiens
FKAGRNMRRKLFG

SEQ ID NO: 42293 - protein, 13 aa, Homo Sapiens
KAGRNMRRKLFGV

SEQ ID NO: 42294 - protein, 13 aa, Homo Sapiens
AGRNMRRKLFGVL

SEQ ID NO: 42295 - protein, 13 aa, Homo Sapiens
GRNMRRKLFGVLR

SEQ ID NO: 42296 - protein, 13 aa, Homo Sapiens
RNMRRKLFGVLRL

SEQ ID NO: 42297 - protein, 13 aa, Homo Sapiens
NMRRKLFGVLRLK

SEQ ID NO: 42298 - protein, 13 aa, Homo Sapiens
MRRKLFGVLRLKC

SEQ ID NO: 42299 - protein, 13 aa, Homo Sapiens
RRKLFGVLRLKCH

SEQ ID NO: 42300 - protein, 13 aa, Homo Sapiens
RKLFGVLRLKCHS

SEQ ID NO: 42301 - protein, 13 aa, Homo Sapiens
KLFGVLRLKCHSL

SEQ ID NO: 42302 - protein, 13 aa, Homo Sapiens
LFGVLRLKCHSLF

SEQ ID NO: 42303 - protein, 13 aa, Homo Sapiens
FGVLRLKCHSLFL

SEQ ID NO: 42304 - protein, 13 aa, Homo Sapiens
GVLRLKCHSLFLD

SEQ ID NO: 42305 - protein, 13 aa, Homo Sapiens
VLRLKCHSLFLDL

SEQ ID NO: 42306 - protein, 13 aa, Homo Sapiens
LRLKCHSLFLDLQ

SEQ ID NO: 42307 - protein, 13 aa, Homo Sapiens
RLKCHSLFLDLQV

SEQ ID NO: 42308 - protein, 13 aa, Homo Sapiens
LKCHSLFLDLQVN

SEQ ID NO: 42309 - protein, 13 aa, Homo Sapiens
KCHSLFLDLQVNS

SEQ ID NO: 42310 - protein, 13 aa, Homo Sapiens
CHSLFLDLQVNSL

SEQ ID NO: 42311 - protein, 13 aa, Homo Sapiens
HSLFLDLQVNSLQ

SEQ ID NO: 42312 - protein, 13 aa, Homo Sapiens
SLFLDLQVNSLQT

SEQ ID NO: 42313 - protein, 13 aa, Homo Sapiens
LFLDLQVNSLQTV

SEQ ID NO: 42314 - protein, 13 aa, Homo Sapiens
FLDLQVNSLQTVC

SEQ ID NO: 42315 - protein, 13 aa, Homo Sapiens
LDLQVNSLQTVCT

SEQ ID NO: 42316 - protein, 13 aa, Homo Sapiens
DLQVNSLQTVCTN

SEQ ID NO: 42317 - protein, 13 aa, Homo Sapiens
LQVNSLQTVCTNI

SEQ ID NO: 42318 - protein, 13 aa, Homo Sapiens
QVNSLQTVCTNIY

SEQ ID NO: 42319 - protein, 13 aa, Homo Sapiens
VNSLQTVCTNIYK

SEQ ID NO: 42320 - protein, 13 aa, Homo Sapiens
NSLQTVCTNIYKI

SEQ ID NO: 42321 - protein, 13 aa, Homo Sapiens
SLQTVCTNIYKIL

SEQ ID NO: 42322 - protein, 13 aa, Homo Sapiens
LQTVCTNIYKILL

SEQ ID NO: 42323 - protein, 13 aa, Homo Sapiens
QTVCTNIYKILLL

SEQ ID NO: 42324 - protein, 13 aa, Homo Sapiens
TVCTNIYKILLLQ

SEQ ID NO: 42325 - protein, 13 aa, Homo Sapiens
VCTNIYKILLLQA

SEQ ID NO: 42326 - protein, 13 aa, Homo Sapiens
CTNIYKILLLQAY

SEQ ID NO: 42327 - protein, 13 aa, Homo Sapiens
TNIYKILLLQAYR

SEQ ID NO: 42328 - protein, 13 aa, Homo Sapiens
NIYKILLLQAYRF

SEQ ID NO: 42329 - protein, 13 aa, Homo Sapiens
IYKILLLQAYRFH

SEQ ID NO: 42330 - protein, 13 aa, Homo Sapiens
YKILLLQAYRFHA

SEQ ID NO: 42331 - protein, 13 aa, Homo Sapiens
KILLLQAYRFHAC

SEQ ID NO: 42332 - protein, 13 aa, Homo Sapiens
ILLLQAYRFHACV

SEQ ID NO: 42333 - protein, 13 aa, Homo Sapiens
LLLQAYRFHACVL

SEQ ID NO: 42334 - protein, 13 aa, Homo Sapiens
LLQAYRFHACVLQ

SEQ ID NO: 42335 - protein, 13 aa, Homo Sapiens
LQAYRFHACVLQL

SEQ ID NO: 42336 - protein, 13 aa, Homo Sapiens
QAYRFHACVLQLP

SEQ ID NO: 42337 - protein, 13 aa, Homo Sapiens
AYRFHACVLQLPF

SEQ ID NO: 42338 - protein, 13 aa, Homo Sapiens
YRFHACVLQLPFH

SEQ ID NO: 42339 - protein, 13 aa, Homo Sapiens
RFHACVLQLPFHQ

SEQ ID NO: 42340 - protein, 13 aa, Homo Sapiens
FHACVLQLPFHQQ

SEQ ID NO: 42341 - protein, 13 aa, Homo Sapiens
HACVLQLPFHQQV

SEQ ID NO: 42342 - protein, 13 aa, Homo Sapiens
ACVLQLPFHQQVW

SEQ ID NO: 42343 - protein, 13 aa, Homo Sapiens
CVLQLPFHQQVWK

SEQ ID NO: 42344 - protein, 13 aa, Homo Sapiens
VLQLPFHQQVWKN

SEQ ID NO: 42345 - protein, 13 aa, Homo Sapiens
LQLPFHQQVWKNP

SEQ ID NO: 42346 - protein, 13 aa, Homo Sapiens
QLPFHQQVWKNPT

SEQ ID NO: 42347 - protein, 13 aa, Homo Sapiens
LPFHQQVWKNPTF

SEQ ID NO: 42348 - protein, 13 aa, Homo Sapiens
PFHQQVWKNPTFF

SEQ ID NO: 42349 - protein, 13 aa, Homo Sapiens
FHQQVWKNPTFFL

SEQ ID NO: 42350 - protein, 13 aa, Homo Sapiens
HQQVWKNPTFFLR

SEQ ID NO: 42351 - protein, 13 aa, Homo Sapiens
QQVWKNPTFFLRV

SEQ ID NO: 42352 - protein, 13 aa, Homo Sapiens
QVWKNPTFFLRVI

SEQ ID NO: 42353 - protein, 13 aa, Homo Sapiens
VWKNPTFFLRVIS

SEQ ID NO: 42354 - protein, 13 aa, Homo Sapiens
WKNPTFFLRVISD

SEQ ID NO: 42355 - protein, 13 aa, Homo Sapiens
KNPTFFLRVISDT

SEQ ID NO: 42356 - protein, 13 aa, Homo Sapiens
NPTFFLRVISDTA

SEQ ID NO: 42357 - protein, 13 aa, Homo Sapiens
PTFFLRVISDTAS

SEQ ID NO: 42358 - protein, 13 aa, Homo Sapiens
TFFLRVISDTASL

SEQ ID NO: 42359 - protein, 13 aa, Homo Sapiens
FFLRVISDTASLC

SEQ ID NO: 42360 - protein, 13 aa, Homo Sapiens
FLRVISDTASLCY

SEQ ID NO: 42361 - protein, 13 aa, Homo Sapiens
LRVISDTASLCYS

SEQ ID NO: 42362 - protein, 13 aa, Homo Sapiens
RVISDTASLCYSI

SEQ ID NO: 42363 - protein, 13 aa, Homo Sapiens
VISDTASLCYSIL

SEQ ID NO: 42364 - protein, 13 aa, Homo Sapiens
ISDTASLCYSILK

SEQ ID NO: 42365 - protein, 13 aa, Homo Sapiens
SDTASLCYSILKA

SEQ ID NO: 42366 - protein, 13 aa, Homo Sapiens
DTASLCYSILKAK

SEQ ID NO: 42367 - protein, 13 aa, Homo Sapiens
TASLCYSILKAKN

SEQ ID NO: 42368 - protein, 13 aa, Homo Sapiens
ASLCYSILKAKNA

SEQ ID NO: 42369 - protein, 13 aa, Homo Sapiens
SLCYSILKAKNAG

SEQ ID NO: 42370 - protein, 13 aa, Homo Sapiens
LCYSILKAKNAGM

SEQ ID NO: 42371 - protein, 13 aa, Homo Sapiens
CYSILKAKNAGMS

SEQ ID NO: 42372 - protein, 13 aa, Homo Sapiens
YSILKAKNAGMSL

SEQ ID NO: 42373 - protein, 13 aa, Homo Sapiens
SILKAKNAGMSLG

SEQ ID NO: 42374 - protein, 13 aa, Homo Sapiens
ILKAKNAGMSLGA

SEQ ID NO: 42375 - protein, 13 aa, Homo Sapiens
LKAKNAGMSLGAK

SEQ ID NO: 42376 - protein, 13 aa, Homo Sapiens
KAKNAGMSLGAKG

SEQ ID NO: 42377 - protein, 13 aa, Homo Sapiens
AKNAGMSLGAKGA

SEQ ID NO: 42378 - protein, 13 aa, Homo Sapiens
KNAGMSLGAKGAA

SEQ ID NO: 42379 - protein, 13 aa, Homo Sapiens
NAGMSLGAKGAAG

SEQ ID NO: 42380 - protein, 13 aa, Homo Sapiens
AGMSLGAKGAAGP

SEQ ID NO: 42381 - protein, 13 aa, Homo Sapiens
GMSLGAKGAAGPL

SEQ ID NO: 42382 - protein, 13 aa, Homo Sapiens
MSLGAKGAAGPLP

SEQ ID NO: 42383 - protein, 13 aa, Homo Sapiens
SLGAKGAAGPLPS

SEQ ID NO: 42384 - protein, 13 aa, Homo Sapiens
LGAKGAAGPLPSE

SEQ ID NO: 42385 - protein, 13 aa, Homo Sapiens
GAKGAAGPLPSEA

SEQ ID NO: 42386 - protein, 13 aa, Homo Sapiens
AKGAAGPLPSEAV

SEQ ID NO: 42387 - protein, 13 aa, Homo Sapiens
KGAAGPLPSEAVQ

SEQ ID NO: 42388 - protein, 13 aa, Homo Sapiens
GAAGPLPSEAVQW

SEQ ID NO: 42389 - protein, 13 aa, Homo Sapiens
AAGPLPSEAVQWL

SEQ ID NO: 42390 - protein, 13 aa, Homo Sapiens
AGPLPSEAVQWLC

SEQ ID NO: 42391 - protein, 13 aa, Homo Sapiens
GPLPSEAVQWLCH

SEQ ID NO: 42392 - protein, 13 aa, Homo Sapiens
PLPSEAVQWLCHQ

SEQ ID NO: 42393 - protein, 13 aa, Homo Sapiens
LPSEAVQWLCHQA

SEQ ID NO: 42394 - protein, 13 aa, Homo Sapiens
PSEAVQWLCHQAF

SEQ ID NO: 42395 - protein, 13 aa, Homo Sapiens
SEAVQWLCHQAFL

SEQ ID NO: 42396 - protein, 13 aa, Homo Sapiens
EAVQWLCHQAFLL

SEQ ID NO: 42397 - protein, 13 aa, Homo Sapiens
AVQWLCHQAFLLK

SEQ ID NO: 42398 - protein, 13 aa, Homo Sapiens
VQWLCHQAFLLKL

SEQ ID NO: 42399 - protein, 13 aa, Homo Sapiens
QWLCHQAFLLKLT

SEQ ID NO: 42400 - protein, 13 aa, Homo Sapiens
WLCHQAFLLKLTR

SEQ ID NO: 42401 - protein, 13 aa, Homo Sapiens
LCHQAFLLKLTRH

SEQ ID NO: 42402 - protein, 13 aa, Homo Sapiens
CHQAFLLKLTRHR

SEQ ID NO: 42403 - protein, 13 aa, Homo Sapiens
HQAFLLKLTRHRV

SEQ ID NO: 42404 - protein, 13 aa, Homo Sapiens
QAFLLKLTRHRVT

SEQ ID NO: 42405 - protein, 13 aa, Homo Sapiens
AFLLKLTRHRVTY

SEQ ID NO: 42406 - protein, 13 aa, Homo Sapiens
FLLKLTRHRVTYV

SEQ ID NO: 42407 - protein, 13 aa, Homo Sapiens
LLKLTRHRVTYVP

SEQ ID NO: 42408 - protein, 13 aa, Homo Sapiens
LKLTRHRVTYVPL

SEQ ID NO: 42409 - protein, 13 aa, Homo Sapiens
KLTRHRVTYVPLL

SEQ ID NO: 42410 - protein, 13 aa, Homo Sapiens
LTRHRVTYVPLLG

SEQ ID NO: 42411 - protein, 13 aa, Homo Sapiens
TRHRVTYVPLLGS

SEQ ID NO: 42412 - protein, 13 aa, Homo Sapiens
RHRVTYVPLLGSL

SEQ ID NO: 42413 - protein, 13 aa, Homo Sapiens
HRVTYVPLLGSLR

SEQ ID NO: 42414 - protein, 13 aa, Homo Sapiens
RVTYVPLLGSLRT

SEQ ID NO: 42415 - protein, 13 aa, Homo Sapiens
VTYVPLLGSLRTA

SEQ ID NO: 42416 - protein, 13 aa, Homo Sapiens
TYVPLLGSLRTAQ

SEQ ID NO: 42417 - protein, 13 aa, Homo Sapiens
YVPLLGSLRTAQT

SEQ ID NO: 42418 - protein, 13 aa, Homo Sapiens
VPLLGSLRTAQTQ

SEQ ID NO: 42419 - protein, 13 aa, Homo Sapiens
PLLGSLRTAQTQL

SEQ ID NO: 42420 - protein, 13 aa, Homo Sapiens
LLGSLRTAQTQLS

SEQ ID NO: 42421 - protein, 13 aa, Homo Sapiens
LGSLRTAQTQLSR

SEQ ID NO: 42422 - protein, 13 aa, Homo Sapiens
GSLRTAQTQLSRK

SEQ ID NO: 42423 - protein, 13 aa, Homo Sapiens
SLRTAQTQLSRKL

SEQ ID NO: 42424 - protein, 13 aa, Homo Sapiens
LRTAQTQLSRKLP

SEQ ID NO: 42425 - protein, 13 aa, Homo Sapiens
RTAQTQLSRKLPG

SEQ ID NO: 42426 - protein, 13 aa, Homo Sapiens
TAQTQLSRKLPGT

SEQ ID NO: 42427 - protein, 13 aa, Homo Sapiens
AQTQLSRKLPGTT

SEQ ID NO: 42428 - protein, 13 aa, Homo Sapiens
QTQLSRKLPGTTL

SEQ ID NO: 42429 - protein, 13 aa, Homo Sapiens
TQLSRKLPGTTLT

SEQ ID NO: 42430 - protein, 13 aa, Homo Sapiens
QLSRKLPGTTLTA

SEQ ID NO: 42431 - protein, 13 aa, Homo Sapiens
LSRKLPGTTLTAL

SEQ ID NO: 42432 - protein, 13 aa, Homo Sapiens
SRKLPGTTLTALE

SEQ ID NO: 42433 - protein, 13 aa, Homo Sapiens
RKLPGTTLTALEA

SEQ ID NO: 42434 - protein, 13 aa, Homo Sapiens
KLPGTTLTALEAA

SEQ ID NO: 42435 - protein, 13 aa, Homo Sapiens
LPGTTLTALEAAA

SEQ ID NO: 42436 - protein, 13 aa, Homo Sapiens
PGTTLTALEAAAN

SEQ ID NO: 42437 - protein, 13 aa, Homo Sapiens
GTTLTALEAAANP

SEQ ID NO: 42438 - protein, 13 aa, Homo Sapiens
TTLTALEAAANPA

SEQ ID NO: 42439 - protein, 13 aa, Homo Sapiens
TLTALEAAANPAL

SEQ ID NO: 42440 - protein, 13 aa, Homo Sapiens
LTALEAAANPALP

SEQ ID NO: 42441 - protein, 13 aa, Homo Sapiens
TALEAAANPALPS

SEQ ID NO: 42442 - protein, 13 aa, Homo Sapiens
ALEAAANPALPSD

SEQ ID NO: 42443 - protein, 13 aa, Homo Sapiens
LEAAANPALPSDF

SEQ ID NO: 42444 - protein, 13 aa, Homo Sapiens
EAAANPALPSDFK

SEQ ID NO: 42445 - protein, 13 aa, Homo Sapiens
AAANPALPSDFKT

SEQ ID NO: 42446 - protein, 13 aa, Homo Sapiens
AANPALPSDFKTI

SEQ ID NO: 42447 - protein, 13 aa, Homo Sapiens
ANPALPSDFKTIL

SEQ ID NO: 42448 - protein, 13 aa, Homo Sapiens
NPALPSDFKTILD

SEQ ID NO: 42449 - protein, 14 aa, Homo Sapiens
MPRAPRCRAVRSLL

SEQ ID NO: 42450 - protein, 14 aa, Homo Sapiens
PRAPRCRAVRSLLR

SEQ ID NO: 42451 - protein, 14 aa, Homo Sapiens
RAPRCRAVRSLLRS

SEQ ID NO: 42452 - protein, 14 aa, Homo Sapiens
APRCRAVRSLLRSH

SEQ ID NO: 42453 - protein, 14 aa, Homo Sapiens
PRCRAVRSLLRSHY

SEQ ID NO: 42454 - protein, 14 aa, Homo Sapiens
RCRAVRSLLRSHYR

SEQ ID NO: 42455 - protein, 14 aa, Homo Sapiens
CRAVRSLLRSHYRE

SEQ ID NO: 42456 - protein, 14 aa, Homo Sapiens
RAVRSLLRSHYREV

SEQ ID NO: 42457 - protein, 14 aa, Homo Sapiens
AVRSLLRSHYREVL

SEQ ID NO: 42458 - protein, 14 aa, Homo Sapiens
VRSLLRSHYREVLP

SEQ ID NO: 42459 - protein, 14 aa, Homo Sapiens
RSLLRSHYREVLPL

SEQ ID NO: 42460 - protein, 14 aa, Homo Sapiens
SLLRSHYREVLPLA

SEQ ID NO: 42461 - protein, 14 aa, Homo Sapiens
LLRSHYREVLPLAT

SEQ ID NO: 42462 - protein, 14 aa, Homo Sapiens
LRSHYREVLPLATF

SEQ ID NO: 42463 - protein, 14 aa, Homo Sapiens
RSHYREVLPLATFV

SEQ ID NO: 42464 - protein, 14 aa, Homo Sapiens
SHYREVLPLATFVR

SEQ ID NO: 42465 - protein, 14 aa, Homo Sapiens
HYREVLPLATFVRR

SEQ ID NO: 42466 - protein, 14 aa, Homo Sapiens
YREVLPLATFVRRL

SEQ ID NO: 42467 - protein, 14 aa, Homo Sapiens
REVLPLATFVRRLG

SEQ ID NO: 42468 - protein, 14 aa, Homo Sapiens
EVLPLATFVRRLGP

SEQ ID NO: 42469 - protein, 14 aa, Homo Sapiens
VLPLATFVRRLGPQ

SEQ ID NO: 42470 - protein, 14 aa, Homo Sapiens
LPLATFVRRLGPQG

SEQ ID NO: 42471 - protein, 14 aa, Homo Sapiens
PLATFVRRLGPQGW

SEQ ID NO: 42472 - protein, 14 aa, Homo Sapiens
LATFVRRLGPQGWR

SEQ ID NO: 42473 - protein, 14 aa, Homo Sapiens
ATFVRRLGPQGWRL

SEQ ID NO: 42474 - protein, 14 aa, Homo Sapiens
TFVRRLGPQGWRLV

SEQ ID NO: 42475 - protein, 14 aa, Homo Sapiens
FVRRLGPQGWRLVQ

SEQ ID NO: 42476 - protein, 14 aa, Homo Sapiens
VRRLGPQGWRLVQR

SEQ ID NO: 42477 - protein, 14 aa, Homo Sapiens
RRLGPQGWRLVQRG

SEQ ID NO: 42478 - protein, 14 aa, Homo Sapiens
RLGPQGWRLVQRGD

SEQ ID NO: 42479 - protein, 14 aa, Homo Sapiens
LGPQGWRLVQRGDP

SEQ ID NO: 42480 - protein, 14 aa, Homo Sapiens
GPQGWRLVQRGDPA

SEQ ID NO: 42481 - protein, 14 aa, Homo Sapiens
PQGWRLVQRGDPAA

SEQ ID NO: 42482 - protein, 14 aa, Homo Sapiens
QGWRLVQRGDPAAF

SEQ ID NO: 42483 - protein, 14 aa, Homo Sapiens
GWRLVQRGDPAAFR

SEQ ID NO: 42484 - protein, 14 aa, Homo Sapiens
WRLVQRGDPAAFRA

SEQ ID NO: 42485 - protein, 14 aa, Homo Sapiens
RLVQRGDPAAFRAL

SEQ ID NO: 42486 - protein, 14 aa, Homo Sapiens
LVQRGDPAAFRALV

SEQ ID NO: 42487 - protein, 14 aa, Homo Sapiens
VQRGDPAAFRALVA

SEQ ID NO: 42488 - protein, 14 aa, Homo Sapiens
QRGDPAAFRALVAQ

SEQ ID NO: 42489 - protein, 14 aa, Homo Sapiens
RGDPAAFRALVAQC

SEQ ID NO: 42490 - protein, 14 aa, Homo Sapiens
GDPAAFRALVAQCL

SEQ ID NO: 42491 - protein, 14 aa, Homo Sapiens
DPAAFRALVAQCLV

SEQ ID NO: 42492 - protein, 14 aa, Homo Sapiens
PAAFRALVAQCLVC

SEQ ID NO: 42493 - protein, 14 aa, Homo Sapiens
AAFRALVAQCLVCV

SEQ ID NO: 42494 - protein, 14 aa, Homo Sapiens
AFRALVAQCLVCVP

SEQ ID NO: 42495 - protein, 14 aa, Homo Sapiens
FRALVAQCLVCVPW

SEQ ID NO: 42496 - protein, 14 aa, Homo Sapiens
RALVAQCLVCVPWD

SEQ ID NO: 42497 - protein, 14 aa, Homo Sapiens
ALVAQCLVCVPWDA

SEQ ID NO: 42498 - protein, 14 aa, Homo Sapiens
LVAQCLVCVPWDAR

SEQ ID NO: 42499 - protein, 14 aa, Homo Sapiens
VAQCLVCVPWDARP

SEQ ID NO: 42500 - protein, 14 aa, Homo Sapiens
AQCLVCVPWDARPP

SEQ ID NO: 42501 - protein, 14 aa, Homo Sapiens
QCLVCVPWDARPPP

SEQ ID NO: 42502 - protein, 14 aa, Homo Sapiens
CLVCVPWDARPPPA

SEQ ID NO: 42503 - protein, 14 aa, Homo Sapiens
LVCVPWDARPPPAA

SEQ ID NO: 42504 - protein, 14 aa, Homo Sapiens
VCVPWDARPPPAAP

SEQ ID NO: 42505 - protein, 14 aa, Homo Sapiens
CVPWDARPPPAAPS

SEQ ID NO: 42506 - protein, 14 aa, Homo Sapiens
VPWDARPPPAAPSF

SEQ ID NO: 42507 - protein, 14 aa, Homo Sapiens
PWDARPPPAAPSFR

SEQ ID NO: 42508 - protein, 14 aa, Homo Sapiens
WDARPPPAAPSFRQ

SEQ ID NO: 42509 - protein, 14 aa, Homo Sapiens
DARPPPAAPSFRQV

SEQ ID NO: 42510 - protein, 14 aa, Homo Sapiens
ARPPPAAPSFRQVS

SEQ ID NO: 42511 - protein, 14 aa, Homo Sapiens
RPPPAAPSFRQVSC

SEQ ID NO: 42512 - protein, 14 aa, Homo Sapiens
PPPAAPSFRQVSCL

SEQ ID NO: 42513 - protein, 14 aa, Homo Sapiens
PPAAPSFRQVSCLK

SEQ ID NO: 42514 - protein, 14 aa, Homo Sapiens
PAAPSFRQVSCLKE

SEQ ID NO: 42515 - protein, 14 aa, Homo Sapiens
AAPSFRQVSCLKEL

SEQ ID NO: 42516 - protein, 14 aa, Homo Sapiens
APSFRQVSCLKELV

SEQ ID NO: 42517 - protein, 14 aa, Homo Sapiens
PSFRQVSCLKELVA

SEQ ID NO: 42518 - protein, 14 aa, Homo Sapiens
SFRQVSCLKELVAR

SEQ ID NO: 42519 - protein, 14 aa, Homo Sapiens
FRQVSCLKELVARV

SEQ ID NO: 42520 - protein, 14 aa, Homo Sapiens
RQVSCLKELVARVL

SEQ ID NO: 42521 - protein, 14 aa, Homo Sapiens
QVSCLKELVARVLQ

SEQ ID NO: 42522 - protein, 14 aa, Homo Sapiens
VSCLKELVARVLQR

SEQ ID NO: 42523 - protein, 14 aa, Homo Sapiens
SCLKELVARVLQRL

SEQ ID NO: 42524 - protein, 14 aa, Homo Sapiens
CLKELVARVLQRLC

SEQ ID NO: 42525 - protein, 14 aa, Homo Sapiens
LKELVARVLQRLCE

SEQ ID NO: 42526 - protein, 14 aa, Homo Sapiens
KELVARVLQRLCER

SEQ ID NO: 42527 - protein, 14 aa, Homo Sapiens
ELVARVLQRLCERG

SEQ ID NO: 42528 - protein, 14 aa, Homo Sapiens
LVARVLQRLCERGA

SEQ ID NO: 42529 - protein, 14 aa, Homo Sapiens
VARVLQRLCERGAK

SEQ ID NO: 42530 - protein, 14 aa, Homo Sapiens
ARVLQRLCERGAKN

SEQ ID NO: 42531 - protein, 14 aa, Homo Sapiens
RVLQRLCERGAKNV

SEQ ID NO: 42532 - protein, 14 aa, Homo Sapiens
VLQRLCERGAKNVL

SEQ ID NO: 42533 - protein, 14 aa, Homo Sapiens
LQRLCERGAKNVLA

SEQ ID NO: 42534 - protein, 14 aa, Homo Sapiens
QRLCERGAKNVLAF

SEQ ID NO: 42535 - protein, 14 aa, Homo Sapiens
RLCERGAKNVLAFG

SEQ ID NO: 42536 - protein, 14 aa, Homo Sapiens
LCERGAKNVLAFGF

SEQ ID NO: 42537 - protein, 14 aa, Homo Sapiens
CERGAKNVLAFGFA

SEQ ID NO: 42538 - protein, 14 aa, Homo Sapiens
ERGAKNVLAFGFAL

SEQ ID NO: 42539 - protein, 14 aa, Homo Sapiens
RGAKNVLAFGFALL

SEQ ID NO: 42540 - protein, 14 aa, Homo Sapiens
GAKNVLAFGFALLD

SEQ ID NO: 42541 - protein, 14 aa, Homo Sapiens
AKNVLAFGFALLDG

SEQ ID NO: 42542 - protein, 14 aa, Homo Sapiens
KNVLAFGFALLDGA

SEQ ID NO: 42543 - protein, 14 aa, Homo Sapiens
NVLAFGFALLDGAR

SEQ ID NO: 42544 - protein, 14 aa, Homo Sapiens
VLAFGFALLDGARG

SEQ ID NO: 42545 - protein, 14 aa, Homo Sapiens
LAFGFALLDGARGG

SEQ ID NO: 42546 - protein, 14 aa, Homo Sapiens
AFGFALLDGARGGP

SEQ ID NO: 42547 - protein, 14 aa, Homo Sapiens
FGFALLDGARGGPP

SEQ ID NO: 42548 - protein, 14 aa, Homo Sapiens
GFALLDGARGGPPE

SEQ ID NO: 42549 - protein, 14 aa, Homo Sapiens
FALLDGARGGPPEA

SEQ ID NO: 42550 - protein, 14 aa, Homo Sapiens
ALLDGARGGPPEAF

SEQ ID NO: 42551 - protein, 14 aa, Homo Sapiens
LLDGARGGPPEAFT

SEQ ID NO: 42552 - protein, 14 aa, Homo Sapiens
LDGARGGPPEAFTT

SEQ ID NO: 42553 - protein, 14 aa, Homo Sapiens
DGARGGPPEAFTTS

SEQ ID NO: 42554 - protein, 14 aa, Homo Sapiens
GARGGPPEAFTTSV

SEQ ID NO: 42555 - protein, 14 aa, Homo Sapiens
ARGGPPEAFTTSVR

SEQ ID NO: 42556 - protein, 14 aa, Homo Sapiens
RGGPPEAFTTSVRS

SEQ ID NO: 42557 - protein, 14 aa, Homo Sapiens
GGPPEAFTTSVRSY

SEQ ID NO: 42558 - protein, 14 aa, Homo Sapiens
GPPEAFTTSVRSYL

SEQ ID NO: 42559 - protein, 14 aa, Homo Sapiens
PPEAFTTSVRSYLP

SEQ ID NO: 42560 - protein, 14 aa, Homo Sapiens
PEAFTTSVRSYLPN

SEQ ID NO: 42561 - protein, 14 aa, Homo Sapiens
EAFTTSVRSYLPNT

SEQ ID NO: 42562 - protein, 14 aa, Homo Sapiens
AFTTSVRSYLPNTV

SEQ ID NO: 42563 - protein, 14 aa, Homo Sapiens
FTTSVRSYLPNTVT

SEQ ID NO: 42564 - protein, 14 aa, Homo Sapiens
TTSVRSYLPNTVTD

SEQ ID NO: 42565 - protein, 14 aa, Homo Sapiens
TSVRSYLPNTVTDA

SEQ ID NO: 42566 - protein, 14 aa, Homo Sapiens
SVRSYLPNTVTDAL

SEQ ID NO: 42567 - protein, 14 aa, Homo Sapiens
VRSYLPNTVTDALR

SEQ ID NO: 42568 - protein, 14 aa, Homo Sapiens
RSYLPNTVTDALRG

SEQ ID NO: 42569 - protein, 14 aa, Homo Sapiens
SYLPNTVTDALRGS

SEQ ID NO: 42570 - protein, 14 aa, Homo Sapiens
YLPNTVTDALRGSG

SEQ ID NO: 42571 - protein, 14 aa, Homo Sapiens
LPNTVTDALRGSGA

SEQ ID NO: 42572 - protein, 14 aa, Homo Sapiens
PNTVTDALRGSGAW

SEQ ID NO: 42573 - protein, 14 aa, Homo Sapiens
NTVTDALRGSGAWG

SEQ ID NO: 42574 - protein, 14 aa, Homo Sapiens
TVTDALRGSGAWGL

SEQ ID NO: 42575 - protein, 14 aa, Homo Sapiens
VTDALRGSGAWGLL

SEQ ID NO: 42576 - protein, 14 aa, Homo Sapiens
TDALRGSGAWGLLL

SEQ ID NO: 42577 - protein, 14 aa, Homo Sapiens
DALRGSGAWGLLLR

SEQ ID NO: 42578 - protein, 14 aa, Homo Sapiens
ALRGSGAWGLLLRR

SEQ ID NO: 42579 - protein, 14 aa, Homo Sapiens
LRGSGAWGLLLRRV

SEQ ID NO: 42580 - protein, 14 aa, Homo Sapiens
RGSGAWGLLLRRVG

SEQ ID NO: 42581 - protein, 14 aa, Homo Sapiens
GSGAWGLLLRRVGD

SEQ ID NO: 42582 - protein, 14 aa, Homo Sapiens
SGAWGLLLRRVGDD

SEQ ID NO: 42583 - protein, 14 aa, Homo Sapiens
GAWGLLLRRVGDDV

SEQ ID NO: 42584 - protein, 14 aa, Homo Sapiens
AWGLLLRRVGDDVL

SEQ ID NO: 42585 - protein, 14 aa, Homo Sapiens
WGLLLRRVGDDVLV

SEQ ID NO: 42586 - protein, 14 aa, Homo Sapiens
GLLLRRVGDDVLVH

SEQ ID NO: 42587 - protein, 14 aa, Homo Sapiens
LLLRRVGDDVLVHL

SEQ ID NO: 42588 - protein, 14 aa, Homo Sapiens
LLRRVGDDVLVHLL

SEQ ID NO: 42589 - protein, 14 aa, Homo Sapiens
LRRVGDDVLVHLLA

SEQ ID NO: 42590 - protein, 14 aa, Homo Sapiens
RRVGDDVLVHLLAR

SEQ ID NO: 42591 - protein, 14 aa, Homo Sapiens
RVGDDVLVHLLARC

SEQ ID NO: 42592 - protein, 14 aa, Homo Sapiens
VGDDVLVHLLARCA

SEQ ID NO: 42593 - protein, 14 aa, Homo Sapiens
GDDVLVHLLARCAL

SEQ ID NO: 42594 - protein, 14 aa, Homo Sapiens
DDVLVHLLARCALF

SEQ ID NO: 42595 - protein, 14 aa, Homo Sapiens
DVLVHLLARCALFV

SEQ ID NO: 42596 - protein, 14 aa, Homo Sapiens
VLVHLLARCALFVL

SEQ ID NO: 42597 - protein, 14 aa, Homo Sapiens
LVHLLARCALFVLV

SEQ ID NO: 42598 - protein, 14 aa, Homo Sapiens
VHLLARCALFVLVA

SEQ ID NO: 42599 - protein, 14 aa, Homo Sapiens
HLLARCALFVLVAP

SEQ ID NO: 42600 - protein, 14 aa, Homo Sapiens
LLARCALFVLVAPS

SEQ ID NO: 42601 - protein, 14 aa, Homo Sapiens
LARCALFVLVAPSC

SEQ ID NO: 42602 - protein, 14 aa, Homo Sapiens
ARCALFVLVAPSCA

SEQ ID NO: 42603 - protein, 14 aa, Homo Sapiens
RCALFVLVAPSCAY

SEQ ID NO: 42604 - protein, 14 aa, Homo Sapiens
CALFVLVAPSCAYQ

SEQ ID NO: 42605 - protein, 14 aa, Homo Sapiens
ALFVLVAPSCAYQV

SEQ ID NO: 42606 - protein, 14 aa, Homo Sapiens
LFVLVAPSCAYQVC

SEQ ID NO: 42607 - protein, 14 aa, Homo Sapiens
FVLVAPSCAYQVCG

SEQ ID NO: 42608 - protein, 14 aa, Homo Sapiens
VLVAPSCAYQVCGP

SEQ ID NO: 42609 - protein, 14 aa, Homo Sapiens
LVAPSCAYQVCGPP

SEQ ID NO: 42610 - protein, 14 aa, Homo Sapiens
VAPSCAYQVCGPPL

SEQ ID NO: 42611 - protein, 14 aa, Homo Sapiens
APSCAYQVCGPPLY

SEQ ID NO: 42612 - protein, 14 aa, Homo Sapiens
PSCAYQVCGPPLYQ

SEQ ID NO: 42613 - protein, 14 aa, Homo Sapiens
SCAYQVCGPPLYQL

SEQ ID NO: 42614 - protein, 14 aa, Homo Sapiens
CAYQVCGPPLYQLG

SEQ ID NO: 42615 - protein, 14 aa, Homo Sapiens
AYQVCGPPLYQLGA

SEQ ID NO: 42616 - protein, 14 aa, Homo Sapiens
YQVCGPPLYQLGAA

SEQ ID NO: 42617 - protein, 14 aa, Homo Sapiens
QVCGPPLYQLGAAT

SEQ ID NO: 42618 - protein, 14 aa, Homo Sapiens
VCGPPLYQLGAATQ

SEQ ID NO: 42619 - protein, 14 aa, Homo Sapiens
CGPPLYQLGAATQA

SEQ ID NO: 42620 - protein, 14 aa, Homo Sapiens
GPPLYQLGAATQAR

SEQ ID NO: 42621 - protein, 14 aa, Homo Sapiens
PPLYQLGAATQARP

SEQ ID NO: 42622 - protein, 14 aa, Homo Sapiens
PLYQLGAATQARPP

SEQ ID NO: 42623 - protein, 14 aa, Homo Sapiens
LYQLGAATQARPPP

SEQ ID NO: 42624 - protein, 14 aa, Homo Sapiens
YQLGAATQARPPPH

SEQ ID NO: 42625 - protein, 14 aa, Homo Sapiens
QLGAATQARPPPHA

SEQ ID NO: 42626 - protein, 14 aa, Homo Sapiens
LGAATQARPPPHAS

SEQ ID NO: 42627 - protein, 14 aa, Homo Sapiens
GAATQARPPPHASG

SEQ ID NO: 42628 - protein, 14 aa, Homo Sapiens
AATQARPPPHASGP

SEQ ID NO: 42629 - protein, 14 aa, Homo Sapiens
ATQARPPPHASGPR

SEQ ID NO: 42630 - protein, 14 aa, Homo Sapiens
TQARPPPHASGPRR

SEQ ID NO: 42631 - protein, 14 aa, Homo Sapiens
QARPPPHASGPRRR

SEQ ID NO: 42632 - protein, 14 aa, Homo Sapiens
ARPPPHASGPRRRL

SEQ ID NO: 42633 - protein, 14 aa, Homo Sapiens
RPPPHASGPRRRLG

SEQ ID NO: 42634 - protein, 14 aa, Homo Sapiens
PPPHASGPRRRLGC

SEQ ID NO: 42635 - protein, 14 aa, Homo Sapiens
PPHASGPRRRLGCE

SEQ ID NO: 42636 - protein, 14 aa, Homo Sapiens
PHASGPRRRLGCER

SEQ ID NO: 42637 - protein, 14 aa, Homo Sapiens
HASGPRRRLGCERA

SEQ ID NO: 42638 - protein, 14 aa, Homo Sapiens
ASGPRRRLGCERAW

SEQ ID NO: 42639 - protein, 14 aa, Homo Sapiens
SGPRRRLGCERAWN

SEQ ID NO: 42640 - protein, 14 aa, Homo Sapiens
GPRRRLGCERAWNH

SEQ ID NO: 42641 - protein, 14 aa, Homo Sapiens
PRRRLGCERAWNHS

SEQ ID NO: 42642 - protein, 14 aa, Homo Sapiens
RRRLGCERAWNHSV

SEQ ID NO: 42643 - protein, 14 aa, Homo Sapiens
RRLGCERAWNHSVR

SEQ ID NO: 42644 - protein, 14 aa, Homo Sapiens
RLGCERAWNHSVRE

SEQ ID NO: 42645 - protein, 14 aa, Homo Sapiens
LGCERAWNHSVREA

SEQ ID NO: 42646 - protein, 14 aa, Homo Sapiens
GCERAWNHSVREAG

SEQ ID NO: 42647 - protein, 14 aa, Homo Sapiens
CERAWNHSVREAGV

SEQ ID NO: 42648 - protein, 14 aa, Homo Sapiens
ERAWNHSVREAGVP

SEQ ID NO: 42649 - protein, 14 aa, Homo Sapiens
RAWNHSVREAGVPL

SEQ ID NO: 42650 - protein, 14 aa, Homo Sapiens
AWNHSVREAGVPLG

SEQ ID NO: 42651 - protein, 14 aa, Homo Sapiens
WNHSVREAGVPLGL

SEQ ID NO: 42652 - protein, 14 aa, Homo Sapiens
NHSVREAGVPLGLP

SEQ ID NO: 42653 - protein, 14 aa, Homo Sapiens
HSVREAGVPLGLPA

SEQ ID NO: 42654 - protein, 14 aa, Homo Sapiens
SVREAGVPLGLPAP

SEQ ID NO: 42655 - protein, 14 aa, Homo Sapiens
VREAGVPLGLPAPG

SEQ ID NO: 42656 - protein, 14 aa, Homo Sapiens
REAGVPLGLPAPGA

SEQ ID NO: 42657 - protein, 14 aa, Homo Sapiens
EAGVPLGLPAPGAR

SEQ ID NO: 42658 - protein, 14 aa, Homo Sapiens
AGVPLGLPAPGARR

SEQ ID NO: 42659 - protein, 14 aa, Homo Sapiens
GVPLGLPAPGARRR

SEQ ID NO: 42660 - protein, 14 aa, Homo Sapiens
VPLGLPAPGARRRG

SEQ ID NO: 42661 - protein, 14 aa, Homo Sapiens
PLGLPAPGARRRGG

SEQ ID NO: 42662 - protein, 14 aa, Homo Sapiens
LGLPAPGARRRGGS

SEQ ID NO: 42663 - protein, 14 aa, Homo Sapiens
GLPAPGARRRGGSA

SEQ ID NO: 42664 - protein, 14 aa, Homo Sapiens
LPAPGARRRGGSAS

SEQ ID NO: 42665 - protein, 14 aa, Homo Sapiens
PAPGARRRGGSASR

SEQ ID NO: 42666 - protein, 14 aa, Homo Sapiens
APGARRRGGSASRS

SEQ ID NO: 42667 - protein, 14 aa, Homo Sapiens
PGARRRGGSASRSL

SEQ ID NO: 42668 - protein, 14 aa, Homo Sapiens
GARRRGGSASRSLP

SEQ ID NO: 42669 - protein, 14 aa, Homo Sapiens
ARRRGGSASRSLPL

SEQ ID NO: 42670 - protein, 14 aa, Homo Sapiens
RRRGGSASRSLPLP

SEQ ID NO: 42671 - protein, 14 aa, Homo Sapiens
RRGGSASRSLPLPK

SEQ ID NO: 42672 - protein, 14 aa, Homo Sapiens
RGGSASRSLPLPKR

SEQ ID NO: 42673 - protein, 14 aa, Homo Sapiens
GGSASRSLPLPKRP

SEQ ID NO: 42674 - protein, 14 aa, Homo Sapiens
GSASRSLPLPKRPR

SEQ ID NO: 42675 - protein, 14 aa, Homo Sapiens
SASRSLPLPKRPRR

SEQ ID NO: 42676 - protein, 14 aa, Homo Sapiens
ASRSLPLPKRPRRG

SEQ ID NO: 42677 - protein, 14 aa, Homo Sapiens
SRSLPLPKRPRRGA

SEQ ID NO: 42678 - protein, 14 aa, Homo Sapiens
RSLPLPKRPRRGAA

SEQ ID NO: 42679 - protein, 14 aa, Homo Sapiens
SLPLPKRPRRGAAP

SEQ ID NO: 42680 - protein, 14 aa, Homo Sapiens
LPLPKRPRRGAAPE

SEQ ID NO: 42681 - protein, 14 aa, Homo Sapiens
PLPKRPRRGAAPEP

SEQ ID NO: 42682 - protein, 14 aa, Homo Sapiens
LPKRPRRGAAPEPE

SEQ ID NO: 42683 - protein, 14 aa, Homo Sapiens
PKRPRRGAAPEPER

SEQ ID NO: 42684 - protein, 14 aa, Homo Sapiens
KRPRRGAAPEPERT

SEQ ID NO: 42685 - protein, 14 aa, Homo Sapiens
RPRRGAAPEPERTP

SEQ ID NO: 42686 - protein, 14 aa, Homo Sapiens
PRRGAAPEPERTPV

SEQ ID NO: 42687 - protein, 14 aa, Homo Sapiens
RRGAAPEPERTPVG

SEQ ID NO: 42688 - protein, 14 aa, Homo Sapiens
RGAAPEPERTPVGQ

SEQ ID NO: 42689 - protein, 14 aa, Homo Sapiens
GAAPEPERTPVGQG

SEQ ID NO: 42690 - protein, 14 aa, Homo Sapiens
AAPEPERTPVGQGS

SEQ ID NO: 42691 - protein, 14 aa, Homo Sapiens
APEPERTPVGQGSW

SEQ ID NO: 42692 - protein, 14 aa, Homo Sapiens
PEPERTPVGQGSWA

SEQ ID NO: 42693 - protein, 14 aa, Homo Sapiens
EPERTPVGQGSWAH

SEQ ID NO: 42694 - protein, 14 aa, Homo Sapiens
PERTPVGQGSWAHP

SEQ ID NO: 42695 - protein, 14 aa, Homo Sapiens
ERTPVGQGSWAHPG

SEQ ID NO: 42696 - protein, 14 aa, Homo Sapiens
RTPVGQGSWAHPGR

SEQ ID NO: 42697 - protein, 14 aa, Homo Sapiens
TPVGQGSWAHPGRT

SEQ ID NO: 42698 - protein, 14 aa, Homo Sapiens
PVGQGSWAHPGRTR

SEQ ID NO: 42699 - protein, 14 aa, Homo Sapiens
VGQGSWAHPGRTRG

SEQ ID NO: 42700 - protein, 14 aa, Homo Sapiens
GQGSWAHPGRTRGP

SEQ ID NO: 42701 - protein, 14 aa, Homo Sapiens
QGSWAHPGRTRGPS

SEQ ID NO: 42702 - protein, 14 aa, Homo Sapiens
GSWAHPGRTRGPSD

SEQ ID NO: 42703 - protein, 14 aa, Homo Sapiens
SWAHPGRTRGPSDR

SEQ ID NO: 42704 - protein, 14 aa, Homo Sapiens
WAHPGRTRGPSDRG

SEQ ID NO: 42705 - protein, 14 aa, Homo Sapiens
AHPGRTRGPSDRGF

SEQ ID NO: 42706 - protein, 14 aa, Homo Sapiens
HPGRTRGPSDRGFC

SEQ ID NO: 42707 - protein, 14 aa, Homo Sapiens
PGRTRGPSDRGFCV

SEQ ID NO: 42708 - protein, 14 aa, Homo Sapiens
GRTRGPSDRGFCVV

SEQ ID NO: 42709 - protein, 14 aa, Homo Sapiens
RTRGPSDRGFCVVS

SEQ ID NO: 42710 - protein, 14 aa, Homo Sapiens
TRGPSDRGFCVVSP

SEQ ID NO: 42711 - protein, 14 aa, Homo Sapiens
RGPSDRGFCVVSPA

SEQ ID NO: 42712 - protein, 14 aa, Homo Sapiens
GPSDRGFCVVSPAR

SEQ ID NO: 42713 - protein, 14 aa, Homo Sapiens
PSDRGFCVVSPARP

SEQ ID NO: 42714 - protein, 14 aa, Homo Sapiens
SDRGFCVVSPARPA

SEQ ID NO: 42715 - protein, 14 aa, Homo Sapiens
DRGFCVVSPARPAE

SEQ ID NO: 42716 - protein, 14 aa, Homo Sapiens
RGFCVVSPARPAEE

SEQ ID NO: 42717 - protein, 14 aa, Homo Sapiens
GFCVVSPARPAEEA

SEQ ID NO: 42718 - protein, 14 aa, Homo Sapiens
FCVVSPARPAEEAT

SEQ ID NO: 42719 - protein, 14 aa, Homo Sapiens
CVVSPARPAEEATS

SEQ ID NO: 42720 - protein, 14 aa, Homo Sapiens
VVSPARPAEEATSL

SEQ ID NO: 42721 - protein, 14 aa, Homo Sapiens
VSPARPAEEATSLE

SEQ ID NO: 42722 - protein, 14 aa, Homo Sapiens
SPARPAEEATSLEG

SEQ ID NO: 42723 - protein, 14 aa, Homo Sapiens
PARPAEEATSLEGA

SEQ ID NO: 42724 - protein, 14 aa, Homo Sapiens
ARPAEEATSLEGAL

SEQ ID NO: 42725 - protein, 14 aa, Homo Sapiens
RPAEEATSLEGALS

SEQ ID NO: 42726 - protein, 14 aa, Homo Sapiens
PAEEATSLEGALSG

SEQ ID NO: 42727 - protein, 14 aa, Homo Sapiens
AEEATSLEGALSGT

SEQ ID NO: 42728 - protein, 14 aa, Homo Sapiens
EEATSLEGALSGTR

SEQ ID NO: 42729 - protein, 14 aa, Homo Sapiens
EATSLEGALSGTRH

SEQ ID NO: 42730 - protein, 14 aa, Homo Sapiens
ATSLEGALSGTRHS

SEQ ID NO: 42731 - protein, 14 aa, Homo Sapiens
TSLEGALSGTRHSH

SEQ ID NO: 42732 - protein, 14 aa, Homo Sapiens
SLEGALSGTRHSHP

SEQ ID NO: 42733 - protein, 14 aa, Homo Sapiens
LEGALSGTRHSHPS

SEQ ID NO: 42734 - protein, 14 aa, Homo Sapiens
EGALSGTRHSHPSV

SEQ ID NO: 42735 - protein, 14 aa, Homo Sapiens
GALSGTRHSHPSVG

SEQ ID NO: 42736 - protein, 14 aa, Homo Sapiens
ALSGTRHSHPSVGR

SEQ ID NO: 42737 - protein, 14 aa, Homo Sapiens
LSGTRHSHPSVGRQ

SEQ ID NO: 42738 - protein, 14 aa, Homo Sapiens
SGTRHSHPSVGRQH

SEQ ID NO: 42739 - protein, 14 aa, Homo Sapiens
GTRHSHPSVGRQHH

SEQ ID NO: 42740 - protein, 14 aa, Homo Sapiens
TRHSHPSVGRQHHA

SEQ ID NO: 42741 - protein, 14 aa, Homo Sapiens
RHSHPSVGRQHHAG

SEQ ID NO: 42742 - protein, 14 aa, Homo Sapiens
HSHPSVGRQHHAGP

SEQ ID NO: 42743 - protein, 14 aa, Homo Sapiens
SHPSVGRQHHAGPP

SEQ ID NO: 42744 - protein, 14 aa, Homo Sapiens
HPSVGRQHHAGPPS

SEQ ID NO: 42745 - protein, 14 aa, Homo Sapiens
PSVGRQHHAGPPST

SEQ ID NO: 42746 - protein, 14 aa, Homo Sapiens
SVGRQHHAGPPSTS

SEQ ID NO: 42747 - protein, 14 aa, Homo Sapiens
VGRQHHAGPPSTSR

SEQ ID NO: 42748 - protein, 14 aa, Homo Sapiens
GRQHHAGPPSTSRP

SEQ ID NO: 42749 - protein, 14 aa, Homo Sapiens
RQHHAGPPSTSRPP

SEQ ID NO: 42750 - protein, 14 aa, Homo Sapiens
QHHAGPPSTSRPPR

SEQ ID NO: 42751 - protein, 14 aa, Homo Sapiens
HHAGPPSTSRPPRP

SEQ ID NO: 42752 - protein, 14 aa, Homo Sapiens
HAGPPSTSRPPRPW

SEQ ID NO: 42753 - protein, 14 aa, Homo Sapiens
AGPPSTSRPPRPWD

SEQ ID NO: 42754 - protein, 14 aa, Homo Sapiens
GPPSTSRPPRPWDT

SEQ ID NO: 42755 - protein, 14 aa, Homo Sapiens
PPSTSRPPRPWDTP

SEQ ID NO: 42756 - protein, 14 aa, Homo Sapiens
PSTSRPPRPWDTPC

SEQ ID NO: 42757 - protein, 14 aa, Homo Sapiens
STSRPPRPWDTPCP

SEQ ID NO: 42758 - protein, 14 aa, Homo Sapiens
TSRPPRPWDTPCPP

SEQ ID NO: 42759 - protein, 14 aa, Homo Sapiens
SRPPRPWDTPCPPV

SEQ ID NO: 42760 - protein, 14 aa, Homo Sapiens
RPPRPWDTPCPPVY

SEQ ID NO: 42761 - protein, 14 aa, Homo Sapiens
PPRPWDTPCPPVYA

SEQ ID NO: 42762 - protein, 14 aa, Homo Sapiens
PRPWDTPCPPVYAE

SEQ ID NO: 42763 - protein, 14 aa, Homo Sapiens
RPWDTPCPPVYAET

SEQ ID NO: 42764 - protein, 14 aa, Homo Sapiens
PWDTPCPPVYAETK

SEQ ID NO: 42765 - protein, 14 aa, Homo Sapiens
WDTPCPPVYAETKH

SEQ ID NO: 42766 - protein, 14 aa, Homo Sapiens
DTPCPPVYAETKHF

SEQ ID NO: 42767 - protein, 14 aa, Homo Sapiens
TPCPPVYAETKHFL

SEQ ID NO: 42768 - protein, 14 aa, Homo Sapiens
PCPPVYAETKHFLY

SEQ ID NO: 42769 - protein, 14 aa, Homo Sapiens
CPPVYAETKHFLYS

SEQ ID NO: 42770 - protein, 14 aa, Homo Sapiens
PPVYAETKHFLYSS

SEQ ID NO: 42771 - protein, 14 aa, Homo Sapiens
PVYAETKHFLYSSG

SEQ ID NO: 42772 - protein, 14 aa, Homo Sapiens
VYAETKHFLYSSGD

SEQ ID NO: 42773 - protein, 14 aa, Homo Sapiens
YAETKHFLYSSGDK

SEQ ID NO: 42774 - protein, 14 aa, Homo Sapiens
AETKHFLYSSGDKE

SEQ ID NO: 42775 - protein, 14 aa, Homo Sapiens
ETKHFLYSSGDKEQ

SEQ ID NO: 42776 - protein, 14 aa, Homo Sapiens
TKHFLYSSGDKEQL

SEQ ID NO: 42777 - protein, 14 aa, Homo Sapiens
KHFLYSSGDKEQLR

SEQ ID NO: 42778 - protein, 14 aa, Homo Sapiens
HFLYSSGDKEQLRP

SEQ ID NO: 42779 - protein, 14 aa, Homo Sapiens
FLYSSGDKEQLRPS

SEQ ID NO: 42780 - protein, 14 aa, Homo Sapiens
LYSSGDKEQLRPSF

SEQ ID NO: 42781 - protein, 14 aa, Homo Sapiens
YSSGDKEQLRPSFL

SEQ ID NO: 42782 - protein, 14 aa, Homo Sapiens
SSGDKEQLRPSFLL

SEQ ID NO: 42783 - protein, 14 aa, Homo Sapiens
SGDKEQLRPSFLLS

SEQ ID NO: 42784 - protein, 14 aa, Homo Sapiens
GDKEQLRPSFLLSS

SEQ ID NO: 42785 - protein, 14 aa, Homo Sapiens
DKEQLRPSFLLSSL

SEQ ID NO: 42786 - protein, 14 aa, Homo Sapiens
KEQLRPSFLLSSLR

SEQ ID NO: 42787 - protein, 14 aa, Homo Sapiens
EQLRPSFLLSSLRP

SEQ ID NO: 42788 - protein, 14 aa, Homo Sapiens
QLRPSFLLSSLRPS

SEQ ID NO: 42789 - protein, 14 aa, Homo Sapiens
LRPSFLLSSLRPSL

SEQ ID NO: 42790 - protein, 14 aa, Homo Sapiens
RPSFLLSSLRPSLT

SEQ ID NO: 42791 - protein, 14 aa, Homo Sapiens
PSFLLSSLRPSLTG

SEQ ID NO: 42792 - protein, 14 aa, Homo Sapiens
SFLLSSLRPSLTGA

SEQ ID NO: 42793 - protein, 14 aa, Homo Sapiens
FLLSSLRPSLTGAR

SEQ ID NO: 42794 - protein, 14 aa, Homo Sapiens
LLSSLRPSLTGARR

SEQ ID NO: 42795 - protein, 14 aa, Homo Sapiens
LSSLRPSLTGARRL

SEQ ID NO: 42796 - protein, 14 aa, Homo Sapiens
SSLRPSLTGARRLV

SEQ ID NO: 42797 - protein, 14 aa, Homo Sapiens
SLRPSLTGARRLVE

SEQ ID NO: 42798 - protein, 14 aa, Homo Sapiens
LRPSLTGARRLVET

SEQ ID NO: 42799 - protein, 14 aa, Homo Sapiens
RPSLTGARRLVETI

SEQ ID NO: 42800 - protein, 14 aa, Homo Sapiens
PSLTGARRLVETIF

SEQ ID NO: 42801 - protein, 14 aa, Homo Sapiens
SLTGARRLVETIFL

SEQ ID NO: 42802 - protein, 14 aa, Homo Sapiens
LTGARRLVETIFLG

SEQ ID NO: 42803 - protein, 14 aa, Homo Sapiens
TGARRLVETIFLGS

SEQ ID NO: 42804 - protein, 14 aa, Homo Sapiens
GARRLVETIFLGSR

SEQ ID NO: 42805 - protein, 14 aa, Homo Sapiens
ARRLVETIFLGSRP

SEQ ID NO: 42806 - protein, 14 aa, Homo Sapiens
RRLVETIFLGSRPW

SEQ ID NO: 42807 - protein, 14 aa, Homo Sapiens
RLVETIFLGSRPWM

SEQ ID NO: 42808 - protein, 14 aa, Homo Sapiens
LVETIFLGSRPWMP

SEQ ID NO: 42809 - protein, 14 aa, Homo Sapiens
VETIFLGSRPWMPG

SEQ ID NO: 42810 - protein, 14 aa, Homo Sapiens
ETIFLGSRPWMPGT

SEQ ID NO: 42811 - protein, 14 aa, Homo Sapiens
TIFLGSRPWMPGTP

SEQ ID NO: 42812 - protein, 14 aa, Homo Sapiens
IFLGSRPWMPGTPR

SEQ ID NO: 42813 - protein, 14 aa, Homo Sapiens
FLGSRPWMPGTPRR

SEQ ID NO: 42814 - protein, 14 aa, Homo Sapiens
LGSRPWMPGTPRRL

SEQ ID NO: 42815 - protein, 14 aa, Homo Sapiens
GSRPWMPGTPRRLP

SEQ ID NO: 42816 - protein, 14 aa, Homo Sapiens
SRPWMPGTPRRLPR

SEQ ID NO: 42817 - protein, 14 aa, Homo Sapiens
RPWMPGTPRRLPRL

SEQ ID NO: 42818 - protein, 14 aa, Homo Sapiens
PWMPGTPRRLPRLP

SEQ ID NO: 42819 - protein, 14 aa, Homo Sapiens
WMPGTPRRLPRLPQ

SEQ ID NO: 42820 - protein, 14 aa, Homo Sapiens
MPGTPRRLPRLPQR

SEQ ID NO: 42821 - protein, 14 aa, Homo Sapiens
PGTPRRLPRLPQRY

SEQ ID NO: 42822 - protein, 14 aa, Homo Sapiens
GTPRRLPRLPQRYW

SEQ ID NO: 42823 - protein, 14 aa, Homo Sapiens
TPRRLPRLPQRYWQ

SEQ ID NO: 42824 - protein, 14 aa, Homo Sapiens
PRRLPRLPQRYWQM

SEQ ID NO: 42825 - protein, 14 aa, Homo Sapiens
RRLPRLPQRYWQMR

SEQ ID NO: 42826 - protein, 14 aa, Homo Sapiens
RLPRLPQRYWQMRP

SEQ ID NO: 42827 - protein, 14 aa, Homo Sapiens
LPRLPQRYWQMRPL

SEQ ID NO: 42828 - protein, 14 aa, Homo Sapiens
PRLPQRYWQMRPLF

SEQ ID NO: 42829 - protein, 14 aa, Homo Sapiens
RLPQRYWQMRPLFL

SEQ ID NO: 42830 - protein, 14 aa, Homo Sapiens
LPQRYWQMRPLFLE

SEQ ID NO: 42831 - protein, 14 aa, Homo Sapiens
PQRYWQMRPLFLEL

SEQ ID NO: 42832 - protein, 14 aa, Homo Sapiens
QRYWQMRPLFLELL

SEQ ID NO: 42833 - protein, 14 aa, Homo Sapiens
RYWQMRPLFLELLG

SEQ ID NO: 42834 - protein, 14 aa, Homo Sapiens
YWQMRPLFLELLGN

SEQ ID NO: 42835 - protein, 14 aa, Homo Sapiens
WQMRPLFLELLGNH

SEQ ID NO: 42836 - protein, 14 aa, Homo Sapiens
QMRPLFLELLGNHA

SEQ ID NO: 42837 - protein, 14 aa, Homo Sapiens
MRPLFLELLGNHAQ

SEQ ID NO: 42838 - protein, 14 aa, Homo Sapiens
RPLFLELLGNHAQC

SEQ ID NO: 42839 - protein, 14 aa, Homo Sapiens
PLFLELLGNHAQCP

SEQ ID NO: 42840 - protein, 14 aa, Homo Sapiens
LFLELLGNHAQCPY

SEQ ID NO: 42841 - protein, 14 aa, Homo Sapiens
FLELLGNHAQCPYG

SEQ ID NO: 42842 - protein, 14 aa, Homo Sapiens
LELLGNHAQCPYGV

SEQ ID NO: 42843 - protein, 14 aa, Homo Sapiens
ELLGNHAQCPYGVL

SEQ ID NO: 42844 - protein, 14 aa, Homo Sapiens
LLGNHAQCPYGVLL

SEQ ID NO: 42845 - protein, 14 aa, Homo Sapiens
LGNHAQCPYGVLLK

SEQ ID NO: 42846 - protein, 14 aa, Homo Sapiens
GNHAQCPYGVLLKT

SEQ ID NO: 42847 - protein, 14 aa, Homo Sapiens
NHAQCPYGVLLKTH

SEQ ID NO: 42848 - protein, 14 aa, Homo Sapiens
HAQCPYGVLLKTHC

SEQ ID NO: 42849 - protein, 14 aa, Homo Sapiens
AQCPYGVLLKTHCP

SEQ ID NO: 42850 - protein, 14 aa, Homo Sapiens
QCPYGVLLKTHCPL

SEQ ID NO: 42851 - protein, 14 aa, Homo Sapiens
CPYGVLLKTHCPLR

SEQ ID NO: 42852 - protein, 14 aa, Homo Sapiens
PYGVLLKTHCPLRA

SEQ ID NO: 42853 - protein, 14 aa, Homo Sapiens
YGVLLKTHCPLRAA

SEQ ID NO: 42854 - protein, 14 aa, Homo Sapiens
GVLLKTHCPLRAAV

SEQ ID NO: 42855 - protein, 14 aa, Homo Sapiens
VLLKTHCPLRAAVT

SEQ ID NO: 42856 - protein, 14 aa, Homo Sapiens
LLKTHCPLRAAVTP

SEQ ID NO: 42857 - protein, 14 aa, Homo Sapiens
LKTHCPLRAAVTPA

SEQ ID NO: 42858 - protein, 14 aa, Homo Sapiens
KTHCPLRAAVTPAA

SEQ ID NO: 42859 - protein, 14 aa, Homo Sapiens
THCPLRAAVTPAAG

SEQ ID NO: 42860 - protein, 14 aa, Homo Sapiens
HCPLRAAVTPAAGV

SEQ ID NO: 42861 - protein, 14 aa, Homo Sapiens
CPLRAAVTPAAGVC

SEQ ID NO: 42862 - protein, 14 aa, Homo Sapiens
PLRAAVTPAAGVCA

SEQ ID NO: 42863 - protein, 14 aa, Homo Sapiens
LRAAVTPAAGVCAR

SEQ ID NO: 42864 - protein, 14 aa, Homo Sapiens
RAAVTPAAGVCARE

SEQ ID NO: 42865 - protein, 14 aa, Homo Sapiens
AAVTPAAGVCAREK

SEQ ID NO: 42866 - protein, 14 aa, Homo Sapiens
AVTPAAGVCAREKP

SEQ ID NO: 42867 - protein, 14 aa, Homo Sapiens
VTPAAGVCAREKPQ

SEQ ID NO: 42868 - protein, 14 aa, Homo Sapiens
TPAAGVCAREKPQG

SEQ ID NO: 42869 - protein, 14 aa, Homo Sapiens
PAAGVCAREKPQGS

SEQ ID NO: 42870 - protein, 14 aa, Homo Sapiens
AAGVCAREKPQGSV

SEQ ID NO: 42871 - protein, 14 aa, Homo Sapiens
AGVCAREKPQGSVA

SEQ ID NO: 42872 - protein, 14 aa, Homo Sapiens
GVCAREKPQGSVAA

SEQ ID NO: 42873 - protein, 14 aa, Homo Sapiens
VCAREKPQGSVAAP

SEQ ID NO: 42874 - protein, 14 aa, Homo Sapiens
CAREKPQGSVAAPE

SEQ ID NO: 42875 - protein, 14 aa, Homo Sapiens
AREKPQGSVAAPEE

SEQ ID NO: 42876 - protein, 14 aa, Homo Sapiens
REKPQGSVAAPEEE

SEQ ID NO: 42877 - protein, 14 aa, Homo Sapiens
EKPQGSVAAPEEED

SEQ ID NO: 42878 - protein, 14 aa, Homo Sapiens
KPQGSVAAPEEEDT

SEQ ID NO: 42879 - protein, 14 aa, Homo Sapiens
PQGSVAAPEEEDTD

SEQ ID NO: 42880 - protein, 14 aa, Homo Sapiens
QGSVAAPEEEDTDP

SEQ ID NO: 42881 - protein, 14 aa, Homo Sapiens
GSVAAPEEEDTDPR

SEQ ID NO: 42882 - protein, 14 aa, Homo Sapiens
SVAAPEEEDTDPRR

SEQ ID NO: 42883 - protein, 14 aa, Homo Sapiens
VAAPEEEDTDPRRL

SEQ ID NO: 42884 - protein, 14 aa, Homo Sapiens
AAPEEEDTDPRRLV

SEQ ID NO: 42885 - protein, 14 aa, Homo Sapiens
APEEEDTDPRRLVQ

SEQ ID NO: 42886 - protein, 14 aa, Homo Sapiens
PEEEDTDPRRLVQL

SEQ ID NO: 42887 - protein, 14 aa, Homo Sapiens
EEEDTDPRRLVQLL

SEQ ID NO: 42888 - protein, 14 aa, Homo Sapiens
EEDTDPRRLVQLLR

SEQ ID NO: 42889 - protein, 14 aa, Homo Sapiens
EDTDPRRLVQLLRQ

SEQ ID NO: 42890 - protein, 14 aa, Homo Sapiens
DTDPRRLVQLLRQH

SEQ ID NO: 42891 - protein, 14 aa, Homo Sapiens
TDPRRLVQLLRQHS

SEQ ID NO: 42892 - protein, 14 aa, Homo Sapiens
DPRRLVQLLRQHSS

SEQ ID NO: 42893 - protein, 14 aa, Homo Sapiens
PRRLVQLLRQHSSP

SEQ ID NO: 42894 - protein, 14 aa, Homo Sapiens
RRLVQLLRQHSSPW

SEQ ID NO: 42895 - protein, 14 aa, Homo Sapiens
RLVQLLRQHSSPWQ

SEQ ID NO: 42896 - protein, 14 aa, Homo Sapiens
LVQLLRQHSSPWQV

SEQ ID NO: 42897 - protein, 14 aa, Homo Sapiens
VQLLRQHSSPWQVY

SEQ ID NO: 42898 - protein, 14 aa, Homo Sapiens
QLLRQHSSPWQVYG

SEQ ID NO: 42899 - protein, 14 aa, Homo Sapiens
LLRQHSSPWQVYGF

SEQ ID NO: 42900 - protein, 14 aa, Homo Sapiens
LRQHSSPWQVYGFV

SEQ ID NO: 42901 - protein, 14 aa, Homo Sapiens
RQHSSPWQVYGFVR

SEQ ID NO: 42902 - protein, 14 aa, Homo Sapiens
QHSSPWQVYGFVRA

SEQ ID NO: 42903 - protein, 14 aa, Homo Sapiens
HSSPWQVYGFVRAC

SEQ ID NO: 42904 - protein, 14 aa, Homo Sapiens
SSPWQVYGFVRACL

SEQ ID NO: 42905 - protein, 14 aa, Homo Sapiens
SPWQVYGFVRACLR

SEQ ID NO: 42906 - protein, 14 aa, Homo Sapiens
PWQVYGFVRACLRR

SEQ ID NO: 42907 - protein, 14 aa, Homo Sapiens
WQVYGFVRACLRRL

SEQ ID NO: 42908 - protein, 14 aa, Homo Sapiens
QVYGFVRACLRRLV

SEQ ID NO: 42909 - protein, 14 aa, Homo Sapiens
VYGFVRACLRRLVP

SEQ ID NO: 42910 - protein, 14 aa, Homo Sapiens
YGFVRACLRRLVPP

SEQ ID NO: 42911 - protein, 14 aa, Homo Sapiens
GFVRACLRRLVPPG

SEQ ID NO: 42912 - protein, 14 aa, Homo Sapiens
FVRACLRRLVPPGL

SEQ ID NO: 42913 - protein, 14 aa, Homo Sapiens
VRACLRRLVPPGLW

SEQ ID NO: 42914 - protein, 14 aa, Homo Sapiens
RACLRRLVPPGLWG

SEQ ID NO: 42915 - protein, 14 aa, Homo Sapiens
ACLRRLVPPGLWGS

SEQ ID NO: 42916 - protein, 14 aa, Homo Sapiens
CLRRLVPPGLWGSR

SEQ ID NO: 42917 - protein, 14 aa, Homo Sapiens
LRRLVPPGLWGSRH

SEQ ID NO: 42918 - protein, 14 aa, Homo Sapiens
RRLVPPGLWGSRHN

SEQ ID NO: 42919 - protein, 14 aa, Homo Sapiens
RLVPPGLWGSRHNE

SEQ ID NO: 42920 - protein, 14 aa, Homo Sapiens
LVPPGLWGSRHNER

SEQ ID NO: 42921 - protein, 14 aa, Homo Sapiens
VPPGLWGSRHNERR

SEQ ID NO: 42922 - protein, 14 aa, Homo Sapiens
PPGLWGSRHNERRF

SEQ ID NO: 42923 - protein, 14 aa, Homo Sapiens
PGLWGSRHNERRFL

SEQ ID NO: 42924 - protein, 14 aa, Homo Sapiens
GLWGSRHNERRFLR

SEQ ID NO: 42925 - protein, 14 aa, Homo Sapiens
LWGSRHNERRFLRN

SEQ ID NO: 42926 - protein, 14 aa, Homo Sapiens
WGSRHNERRFLRNT

SEQ ID NO: 42927 - protein, 14 aa, Homo Sapiens
GSRHNERRFLRNTK

SEQ ID NO: 42928 - protein, 14 aa, Homo Sapiens
SRHNERRFLRNTKK

SEQ ID NO: 42929 - protein, 14 aa, Homo Sapiens
RHNERRFLRNTKKF

SEQ ID NO: 42930 - protein, 14 aa, Homo Sapiens
HNERRFLRNTKKFI

SEQ ID NO: 42931 - protein, 14 aa, Homo Sapiens
NERRFLRNTKKFIS

SEQ ID NO: 42932 - protein, 14 aa, Homo Sapiens
ERRFLRNTKKFISL

SEQ ID NO: 42933 - protein, 14 aa, Homo Sapiens
RRFLRNTKKFISLG

SEQ ID NO: 42934 - protein, 14 aa, Homo Sapiens
RFLRNTKKFISLGK

SEQ ID NO: 42935 - protein, 14 aa, Homo Sapiens
FLRNTKKFISLGKH

SEQ ID NO: 42936 - protein, 14 aa, Homo Sapiens
LRNTKKFISLGKHA

SEQ ID NO: 42937 - protein, 14 aa, Homo Sapiens
RNTKKFISLGKHAK

SEQ ID NO: 42938 - protein, 14 aa, Homo Sapiens
NTKKFISLGKHAKL

SEQ ID NO: 42939 - protein, 14 aa, Homo Sapiens
TKKFISLGKHAKLS

SEQ ID NO: 42940 - protein, 14 aa, Homo Sapiens
KKFISLGKHAKLSL

SEQ ID NO: 42941 - protein, 14 aa, Homo Sapiens
KFISLGKHAKLSLQ

SEQ ID NO: 42942 - protein, 14 aa, Homo Sapiens
FISLGKHAKLSLQE

SEQ ID NO: 42943 - protein, 14 aa, Homo Sapiens
ISLGKHAKLSLQEL

SEQ ID NO: 42944 - protein, 14 aa, Homo Sapiens
SLGKHAKLSLQELT

SEQ ID NO: 42945 - protein, 14 aa, Homo Sapiens
LGKHAKLSLQELTW

SEQ ID NO: 42946 - protein, 14 aa, Homo Sapiens
GKHAKLSLQELTWK

SEQ ID NO: 42947 - protein, 14 aa, Homo Sapiens
KHAKLSLQELTWKM

SEQ ID NO: 42948 - protein, 14 aa, Homo Sapiens
HAKLSLQELTWKMS

SEQ ID NO: 42949 - protein, 14 aa, Homo Sapiens
AKLSLQELTWKMSV

SEQ ID NO: 42950 - protein, 14 aa, Homo Sapiens
KLSLQELTWKMSVR

SEQ ID NO: 42951 - protein, 14 aa, Homo Sapiens
LSLQELTWKMSVRD

SEQ ID NO: 42952 - protein, 14 aa, Homo Sapiens
SLQELTWKMSVRDC

SEQ ID NO: 42953 - protein, 14 aa, Homo Sapiens
LQELTWKMSVRDCA

SEQ ID NO: 42954 - protein, 14 aa, Homo Sapiens
QELTWKMSVRDCAW

SEQ ID NO: 42955 - protein, 14 aa, Homo Sapiens
ELTWKMSVRDCAWL

SEQ ID NO: 42956 - protein, 14 aa, Homo Sapiens
LTWKMSVRDCAWLR

SEQ ID NO: 42957 - protein, 14 aa, Homo Sapiens
TWKMSVRDCAWLRR

SEQ ID NO: 42958 - protein, 14 aa, Homo Sapiens
WKMSVRDCAWLRRS

SEQ ID NO: 42959 - protein, 14 aa, Homo Sapiens
KMSVRDCAWLRRSP

SEQ ID NO: 42960 - protein, 14 aa, Homo Sapiens
MSVRDCAWLRRSPG

SEQ ID NO: 42961 - protein, 14 aa, Homo Sapiens
SVRDCAWLRRSPGV

SEQ ID NO: 42962 - protein, 14 aa, Homo Sapiens
VRDCAWLRRSPGVG

SEQ ID NO: 42963 - protein, 14 aa, Homo Sapiens
RDCAWLRRSPGVGC

SEQ ID NO: 42964 - protein, 14 aa, Homo Sapiens
DCAWLRRSPGVGCV

SEQ ID NO: 42965 - protein, 14 aa, Homo Sapiens
CAWLRRSPGVGCVP

SEQ ID NO: 42966 - protein, 14 aa, Homo Sapiens
AWLRRSPGVGCVPA

SEQ ID NO: 42967 - protein, 14 aa, Homo Sapiens
WLRRSPGVGCVPAA

SEQ ID NO: 42968 - protein, 14 aa, Homo Sapiens
LRRSPGVGCVPAAE

SEQ ID NO: 42969 - protein, 14 aa, Homo Sapiens
RRSPGVGCVPAAEH

SEQ ID NO: 42970 - protein, 14 aa, Homo Sapiens
RSPGVGCVPAAEHR

SEQ ID NO: 42971 - protein, 14 aa, Homo Sapiens
SPGVGCVPAAEHRL

SEQ ID NO: 42972 - protein, 14 aa, Homo Sapiens
PGVGCVPAAEHRLR

SEQ ID NO: 42973 - protein, 14 aa, Homo Sapiens
GVGCVPAAEHRLRE

SEQ ID NO: 42974 - protein, 14 aa, Homo Sapiens
VGCVPAAEHRLREE

SEQ ID NO: 42975 - protein, 14 aa, Homo Sapiens
GCVPAAEHRLREEI

SEQ ID NO: 42976 - protein, 14 aa, Homo Sapiens
CVPAAEHRLREEIL

SEQ ID NO: 42977 - protein, 14 aa, Homo Sapiens
VPAAEHRLREEILA

SEQ ID NO: 42978 - protein, 14 aa, Homo Sapiens
PAAEHRLREEILAK

SEQ ID NO: 42979 - protein, 14 aa, Homo Sapiens
AAEHRLREEILAKF

SEQ ID NO: 42980 - protein, 14 aa, Homo Sapiens
AEHRLREEILAKFL

SEQ ID NO: 42981 - protein, 14 aa, Homo Sapiens
EHRLREEILAKFLH

SEQ ID NO: 42982 - protein, 14 aa, Homo Sapiens
HRLREEILAKFLHW

SEQ ID NO: 42983 - protein, 14 aa, Homo Sapiens
RLREEILAKFLHWL

SEQ ID NO: 42984 - protein, 14 aa, Homo Sapiens
LREEILAKFLHWLM

SEQ ID NO: 42985 - protein, 14 aa, Homo Sapiens
REEILAKFLHWLMS

SEQ ID NO: 42986 - protein, 14 aa, Homo Sapiens
EEILAKFLHWLMSV

SEQ ID NO: 42987 - protein, 14 aa, Homo Sapiens
EILAKFLHWLMSVY

SEQ ID NO: 42988 - protein, 14 aa, Homo Sapiens
ILAKFLHWLMSVYV

SEQ ID NO: 42989 - protein, 14 aa, Homo Sapiens
LAKFLHWLMSVYVV

SEQ ID NO: 42990 - protein, 14 aa, Homo Sapiens
AKFLHWLMSVYVVE

SEQ ID NO: 42991 - protein, 14 aa, Homo Sapiens
KFLHWLMSVYVVEL

SEQ ID NO: 42992 - protein, 14 aa, Homo Sapiens
FLHWLMSVYVVELL

SEQ ID NO: 42993 - protein, 14 aa, Homo Sapiens
LHWLMSVYVVELLR

SEQ ID NO: 42994 - protein, 14 aa, Homo Sapiens
HWLMSVYVVELLRS

SEQ ID NO: 42995 - protein, 14 aa, Homo Sapiens
WLMSVYVVELLRSF

SEQ ID NO: 42996 - protein, 14 aa, Homo Sapiens
LMSVYVVELLRSFF

SEQ ID NO: 42997 - protein, 14 aa, Homo Sapiens
MSVYVVELLRSFFY

SEQ ID NO: 42998 - protein, 14 aa, Homo Sapiens
SVYVVELLRSFFYV

SEQ ID NO: 42999 - protein, 14 aa, Homo Sapiens
VYVVELLRSFFYVT

SEQ ID NO: 43000 - protein, 14 aa, Homo Sapiens
YVVELLRSFFYVTE

SEQ ID NO: 43001 - protein, 14 aa, Homo Sapiens
VVELLRSFFYVTET

SEQ ID NO: 43002 - protein, 14 aa, Homo Sapiens
VELLRSFFYVTETT

SEQ ID NO: 43003 - protein, 14 aa, Homo Sapiens
ELLRSFFYVTETTF

SEQ ID NO: 43004 - protein, 14 aa, Homo Sapiens
LLRSFFYVTETTFQ

SEQ ID NO: 43005 - protein, 14 aa, Homo Sapiens
LRSFFYVTETTFQK

SEQ ID NO: 43006 - protein, 14 aa, Homo Sapiens
RSFFYVTETTFQKN

SEQ ID NO: 43007 - protein, 14 aa, Homo Sapiens
SFFYVTETTFQKNR

SEQ ID NO: 43008 - protein, 14 aa, Homo Sapiens
FFYVTETTFQKNRL

SEQ ID NO: 43009 - protein, 14 aa, Homo Sapiens
FYVTETTFQKNRLF

SEQ ID NO: 43010 - protein, 14 aa, Homo Sapiens
YVTETTFQKNRLFF

SEQ ID NO: 43011 - protein, 14 aa, Homo Sapiens
VTETTFQKNRLFFY

SEQ ID NO: 43012 - protein, 14 aa, Homo Sapiens
TETTFQKNRLFFYR

SEQ ID NO: 43013 - protein, 14 aa, Homo Sapiens
ETTFQKNRLFFYRK

SEQ ID NO: 43014 - protein, 14 aa, Homo Sapiens
TTFQKNRLFFYRKS

SEQ ID NO: 43015 - protein, 14 aa, Homo Sapiens
TFQKNRLFFYRKSV

SEQ ID NO: 43016 - protein, 14 aa, Homo Sapiens
FQKNRLFFYRKSVW

SEQ ID NO: 43017 - protein, 14 aa, Homo Sapiens
QKNRLFFYRKSVWS

SEQ ID NO: 43018 - protein, 14 aa, Homo Sapiens
KNRLFFYRKSVWSK

SEQ ID NO: 43019 - protein, 14 aa, Homo Sapiens
NRLFFYRKSVWSKL

SEQ ID NO: 43020 - protein, 14 aa, Homo Sapiens
RLFFYRKSVWSKLQ

SEQ ID NO: 43021 - protein, 14 aa, Homo Sapiens
LFFYRKSVWSKLQS

SEQ ID NO: 43022 - protein, 14 aa, Homo Sapiens
FFYRKSVWSKLQSI

SEQ ID NO: 43023 - protein, 14 aa, Homo Sapiens
FYRKSVWSKLQSIG

SEQ ID NO: 43024 - protein, 14 aa, Homo Sapiens
YRKSVWSKLQSIGI

SEQ ID NO: 43025 - protein, 14 aa, Homo Sapiens
RKSVWSKLQSIGIR

SEQ ID NO: 43026 - protein, 14 aa, Homo Sapiens
KSVWSKLQSIGIRQ

SEQ ID NO: 43027 - protein, 14 aa, Homo Sapiens
SVWSKLQSIGIRQH

SEQ ID NO: 43028 - protein, 14 aa, Homo Sapiens
VWSKLQSIGIRQHL

SEQ ID NO: 43029 - protein, 14 aa, Homo Sapiens
WSKLQSIGIRQHLK

SEQ ID NO: 43030 - protein, 14 aa, Homo Sapiens
SKLQSIGIRQHLKR

SEQ ID NO: 43031 - protein, 14 aa, Homo Sapiens
KLQSIGIRQHLKRV

SEQ ID NO: 43032 - protein, 14 aa, Homo Sapiens
LQSIGIRQHLKRVQ

SEQ ID NO: 43033 - protein, 14 aa, Homo Sapiens
QSIGIRQHLKRVQL

SEQ ID NO: 43034 - protein, 14 aa, Homo Sapiens
SIGIRQHLKRVQLR

SEQ ID NO: 43035 - protein, 14 aa, Homo Sapiens
IGIRQHLKRVQLRE

SEQ ID NO: 43036 - protein, 14 aa, Homo Sapiens
GIRQHLKRVQLREL

SEQ ID NO: 43037 - protein, 14 aa, Homo Sapiens
IRQHLKRVQLRELS

SEQ ID NO: 43038 - protein, 14 aa, Homo Sapiens
RQHLKRVQLRELSE

SEQ ID NO: 43039 - protein, 14 aa, Homo Sapiens
QHLKRVQLRELSEA

SEQ ID NO: 43040 - protein, 14 aa, Homo Sapiens
HLKRVQLRELSEAE

SEQ ID NO: 43041 - protein, 14 aa, Homo Sapiens
LKRVQLRELSEAEV

SEQ ID NO: 43042 - protein, 14 aa, Homo Sapiens
KRVQLRELSEAEVR

SEQ ID NO: 43043 - protein, 14 aa, Homo Sapiens
RVQLRELSEAEVRQ

SEQ ID NO: 43044 - protein, 14 aa, Homo Sapiens
VQLRELSEAEVRQH

SEQ ID NO: 43045 - protein, 14 aa, Homo Sapiens
QLRELSEAEVRQHR

SEQ ID NO: 43046 - protein, 14 aa, Homo Sapiens
LRELSEAEVRQHRE

SEQ ID NO: 43047 - protein, 14 aa, Homo Sapiens
RELSEAEVRQHREA

SEQ ID NO: 43048 - protein, 14 aa, Homo Sapiens
ELSEAEVRQHREAR

SEQ ID NO: 43049 - protein, 14 aa, Homo Sapiens
LSEAEVRQHREARP

SEQ ID NO: 43050 - protein, 14 aa, Homo Sapiens
SEAEVRQHREARPA

SEQ ID NO: 43051 - protein, 14 aa, Homo Sapiens
EAEVRQHREARPAL

SEQ ID NO: 43052 - protein, 14 aa, Homo Sapiens
AEVRQHREARPALL

SEQ ID NO: 43053 - protein, 14 aa, Homo Sapiens
EVRQHREARPALLT

SEQ ID NO: 43054 - protein, 14 aa, Homo Sapiens
VRQHREARPALLTS

SEQ ID NO: 43055 - protein, 14 aa, Homo Sapiens
RQHREARPALLTSR

SEQ ID NO: 43056 - protein, 14 aa, Homo Sapiens
QHREARPALLTSRL

SEQ ID NO: 43057 - protein, 14 aa, Homo Sapiens
HREARPALLTSRLR

SEQ ID NO: 43058 - protein, 14 aa, Homo Sapiens
REARPALLTSRLRF

SEQ ID NO: 43059 - protein, 14 aa, Homo Sapiens
EARPALLTSRLRFI

SEQ ID NO: 43060 - protein, 14 aa, Homo Sapiens
ARPALLTSRLRFIP

SEQ ID NO: 43061 - protein, 14 aa, Homo Sapiens
RPALLTSRLRFIPK

SEQ ID NO: 43062 - protein, 14 aa, Homo Sapiens
PALLTSRLRFIPKP

SEQ ID NO: 43063 - protein, 14 aa, Homo Sapiens
ALLTSRLRFIPKPD

SEQ ID NO: 43064 - protein, 14 aa, Homo Sapiens
LLTSRLRFIPKPDG

SEQ ID NO: 43065 - protein, 14 aa, Homo Sapiens
LTSRLRFIPKPDGL

SEQ ID NO: 43066 - protein, 14 aa, Homo Sapiens
TSRLRFIPKPDGLR

SEQ ID NO: 43067 - protein, 14 aa, Homo Sapiens
SRLRFIPKPDGLRP

SEQ ID NO: 43068 - protein, 14 aa, Homo Sapiens
RLRFIPKPDGLRPI

SEQ ID NO: 43069 - protein, 14 aa, Homo Sapiens
LRFIPKPDGLRPIV

SEQ ID NO: 43070 - protein, 14 aa, Homo Sapiens
RFIPKPDGLRPIVN

SEQ ID NO: 43071 - protein, 14 aa, Homo Sapiens
FIPKPDGLRPIVNM

SEQ ID NO: 43072 - protein, 14 aa, Homo Sapiens
IPKPDGLRPIVNMD

SEQ ID NO: 43073 - protein, 14 aa, Homo Sapiens
PKPDGLRPIVNMDY

SEQ ID NO: 43074 - protein, 14 aa, Homo Sapiens
KPDGLRPIVNMDYV

SEQ ID NO: 43075 - protein, 14 aa, Homo Sapiens
PDGLRPIVNMDYVV

SEQ ID NO: 43076 - protein, 14 aa, Homo Sapiens
DGLRPIVNMDYVVG

SEQ ID NO: 43077 - protein, 14 aa, Homo Sapiens
GLRPIVNMDYVVGA

SEQ ID NO: 43078 - protein, 14 aa, Homo Sapiens
LRPIVNMDYVVGAR

SEQ ID NO: 43079 - protein, 14 aa, Homo Sapiens
RPIVNMDYVVGART

SEQ ID NO: 43080 - protein, 14 aa, Homo Sapiens
PIVNMDYVVGARTF

SEQ ID NO: 43081 - protein, 14 aa, Homo Sapiens
IVNMDYVVGARTFR

SEQ ID NO: 43082 - protein, 14 aa, Homo Sapiens
VNMDYVVGARTFRR

SEQ ID NO: 43083 - protein, 14 aa, Homo Sapiens
NMDYVVGARTFRRE

SEQ ID NO: 43084 - protein, 14 aa, Homo Sapiens
MDYVVGARTFRREK

SEQ ID NO: 43085 - protein, 14 aa, Homo Sapiens
DYVVGARTFRREKR

SEQ ID NO: 43086 - protein, 14 aa, Homo Sapiens
YVVGARTFRREKRA

SEQ ID NO: 43087 - protein, 14 aa, Homo Sapiens
VVGARTFRREKRAE

SEQ ID NO: 43088 - protein, 14 aa, Homo Sapiens
VGARTFRREKRAER

SEQ ID NO: 43089 - protein, 14 aa, Homo Sapiens
GARTFRREKRAERL

SEQ ID NO: 43090 - protein, 14 aa, Homo Sapiens
ARTFRREKRAERLT

SEQ ID NO: 43091 - protein, 14 aa, Homo Sapiens
RTFRREKRAERLTS

SEQ ID NO: 43092 - protein, 14 aa, Homo Sapiens
TFRREKRAERLTSR

SEQ ID NO: 43093 - protein, 14 aa, Homo Sapiens
FRREKRAERLTSRV

SEQ ID NO: 43094 - protein, 14 aa, Homo Sapiens
RREKRAERLTSRVK

SEQ ID NO: 43095 - protein, 14 aa, Homo Sapiens
REKRAERLTSRVKA

SEQ ID NO: 43096 - protein, 14 aa, Homo Sapiens
EKRAERLTSRVKAL

SEQ ID NO: 43097 - protein, 14 aa, Homo Sapiens
KRAERLTSRVKALF

SEQ ID NO: 43098 - protein, 14 aa, Homo Sapiens
RAERLTSRVKALFS

SEQ ID NO: 43099 - protein, 14 aa, Homo Sapiens
AERLTSRVKALFSV

SEQ ID NO: 43100 - protein, 14 aa, Homo Sapiens
ERLTSRVKALFSVL

SEQ ID NO: 43101 - protein, 14 aa, Homo Sapiens
RLTSRVKALFSVLN

SEQ ID NO: 43102 - protein, 14 aa, Homo Sapiens
LTSRVKALFSVLNY

SEQ ID NO: 43103 - protein, 14 aa, Homo Sapiens
TSRVKALFSVLNYE

SEQ ID NO: 43104 - protein, 14 aa, Homo Sapiens
SRVKALFSVLNYER

SEQ ID NO: 43105 - protein, 14 aa, Homo Sapiens
RVKALFSVLNYERA

SEQ ID NO: 43106 - protein, 14 aa, Homo Sapiens
VKALFSVLNYERAR

SEQ ID NO: 43107 - protein, 14 aa, Homo Sapiens
KALFSVLNYERARR

SEQ ID NO: 43108 - protein, 14 aa, Homo Sapiens
ALFSVLNYERARRP

SEQ ID NO: 43109 - protein, 14 aa, Homo Sapiens
LFSVLNYERARRPG

SEQ ID NO: 43110 - protein, 14 aa, Homo Sapiens
FSVLNYERARRPGL

SEQ ID NO: 43111 - protein, 14 aa, Homo Sapiens
SVLNYERARRPGLL

SEQ ID NO: 43112 - protein, 14 aa, Homo Sapiens
VLNYERARRPGLLG

SEQ ID NO: 43113 - protein, 14 aa, Homo Sapiens
LNYERARRPGLLGA

SEQ ID NO: 43114 - protein, 14 aa, Homo Sapiens
NYERARRPGLLGAS

SEQ ID NO: 43115 - protein, 14 aa, Homo Sapiens
YERARRPGLLGASV

SEQ ID NO: 43116 - protein, 14 aa, Homo Sapiens
ERARRPGLLGASVL

SEQ ID NO: 43117 - protein, 14 aa, Homo Sapiens
RARRPGLLGASVLG

SEQ ID NO: 43118 - protein, 14 aa, Homo Sapiens
ARRPGLLGASVLGL

SEQ ID NO: 43119 - protein, 14 aa, Homo Sapiens
RRPGLLGASVLGLD

SEQ ID NO: 43120 - protein, 14 aa, Homo Sapiens
RPGLLGASVLGLDD

SEQ ID NO: 43121 - protein, 14 aa, Homo Sapiens
PGLLGASVLGLDDI

SEQ ID NO: 43122 - protein, 14 aa, Homo Sapiens
GLLGASVLGLDDIH

SEQ ID NO: 43123 - protein, 14 aa, Homo Sapiens
LLGASVLGLDDIHR

SEQ ID NO: 43124 - protein, 14 aa, Homo Sapiens
LGASVLGLDDIHRA

SEQ ID NO: 43125 - protein, 14 aa, Homo Sapiens
GASVLGLDDIHRAW

SEQ ID NO: 43126 - protein, 14 aa, Homo Sapiens
ASVLGLDDIHRAWR

SEQ ID NO: 43127 - protein, 14 aa, Homo Sapiens
SVLGLDDIHRAWRT

SEQ ID NO: 43128 - protein, 14 aa, Homo Sapiens
VLGLDDIHRAWRTF

SEQ ID NO: 43129 - protein, 14 aa, Homo Sapiens
LGLDDIHRAWRTFV

SEQ ID NO: 43130 - protein, 14 aa, Homo Sapiens
GLDDIHRAWRTFVL

SEQ ID NO: 43131 - protein, 14 aa, Homo Sapiens
LDDIHRAWRTFVLR

SEQ ID NO: 43132 - protein, 14 aa, Homo Sapiens
DDIHRAWRTFVLRV

SEQ ID NO: 43133 - protein, 14 aa, Homo Sapiens
DIHRAWRTFVLRVR

SEQ ID NO: 43134 - protein, 14 aa, Homo Sapiens
IHRAWRTFVLRVRA

SEQ ID NO: 43135 - protein, 14 aa, Homo Sapiens
HRAWRTFVLRVRAQ

SEQ ID NO: 43136 - protein, 14 aa, Homo Sapiens
RAWRTFVLRVRAQD

SEQ ID NO: 43137 - protein, 14 aa, Homo Sapiens
AWRTFVLRVRAQDP

SEQ ID NO: 43138 - protein, 14 aa, Homo Sapiens
WRTFVLRVRAQDPP

SEQ ID NO: 43139 - protein, 14 aa, Homo Sapiens
RTFVLRVRAQDPPP

SEQ ID NO: 43140 - protein, 14 aa, Homo Sapiens
TFVLRVRAQDPPPE

SEQ ID NO: 43141 - protein, 14 aa, Homo Sapiens
FVLRVRAQDPPPEL

SEQ ID NO: 43142 - protein, 14 aa, Homo Sapiens
VLRVRAQDPPPELY

SEQ ID NO: 43143 - protein, 14 aa, Homo Sapiens
LRVRAQDPPPELYF

SEQ ID NO: 43144 - protein, 14 aa, Homo Sapiens
RVRAQDPPPELYFV

SEQ ID NO: 43145 - protein, 14 aa, Homo Sapiens
VRAQDPPPELYFVK

SEQ ID NO: 43146 - protein, 14 aa, Homo Sapiens
RAQDPPPELYFVKV

SEQ ID NO: 43147 - protein, 14 aa, Homo Sapiens
AQDPPPELYFVKVD

SEQ ID NO: 43148 - protein, 14 aa, Homo Sapiens
QDPPPELYFVKVDV

SEQ ID NO: 43149 - protein, 14 aa, Homo Sapiens
DPPPELYFVKVDVT

SEQ ID NO: 43150 - protein, 14 aa, Homo Sapiens
PPPELYFVKVDVTG

SEQ ID NO: 43151 - protein, 14 aa, Homo Sapiens
PPELYFVKVDVTGA

SEQ ID NO: 43152 - protein, 14 aa, Homo Sapiens
PELYFVKVDVTGAY

SEQ ID NO: 43153 - protein, 14 aa, Homo Sapiens
ELYFVKVDVTGAYD

SEQ ID NO: 43154 - protein, 14 aa, Homo Sapiens
LYFVKVDVTGAYDT

SEQ ID NO: 43155 - protein, 14 aa, Homo Sapiens
YFVKVDVTGAYDTI

SEQ ID NO: 43156 - protein, 14 aa, Homo Sapiens
FVKVDVTGAYDTIP

SEQ ID NO: 43157 - protein, 14 aa, Homo Sapiens
VKVDVTGAYDTIPQ

SEQ ID NO: 43158 - protein, 14 aa, Homo Sapiens
KVDVTGAYDTIPQD

SEQ ID NO: 43159 - protein, 14 aa, Homo Sapiens
VDVTGAYDTIPQDR

SEQ ID NO: 43160 - protein, 14 aa, Homo Sapiens
DVTGAYDTIPQDRL

SEQ ID NO: 43161 - protein, 14 aa, Homo Sapiens
VTGAYDTIPQDRLT

SEQ ID NO: 43162 - protein, 14 aa, Homo Sapiens
TGAYDTIPQDRLTE

SEQ ID NO: 43163 - protein, 14 aa, Homo Sapiens
GAYDTIPQDRLTEV

SEQ ID NO: 43164 - protein, 14 aa, Homo Sapiens
AYDTIPQDRLTEVI

SEQ ID NO: 43165 - protein, 14 aa, Homo Sapiens
YDTIPQDRLTEVIA

SEQ ID NO: 43166 - protein, 14 aa, Homo Sapiens
DTIPQDRLTEVIAS

SEQ ID NO: 43167 - protein, 14 aa, Homo Sapiens
TIPQDRLTEVIASI

SEQ ID NO: 43168 - protein, 14 aa, Homo Sapiens
IPQDRLTEVIASII

SEQ ID NO: 43169 - protein, 14 aa, Homo Sapiens
PQDRLTEVIASIIK

SEQ ID NO: 43170 - protein, 14 aa, Homo Sapiens
QDRLTEVIASIIKP

SEQ ID NO: 43171 - protein, 14 aa, Homo Sapiens
DRLTEVIASIIKPQ

SEQ ID NO: 43172 - protein, 14 aa, Homo Sapiens
RLTEVIASIIKPQN

SEQ ID NO: 43173 - protein, 14 aa, Homo Sapiens
LTEVIASIIKPQNT

SEQ ID NO: 43174 - protein, 14 aa, Homo Sapiens
TEVIASIIKPQNTY

SEQ ID NO: 43175 - protein, 14 aa, Homo Sapiens
EVIASIIKPQNTYC

SEQ ID NO: 43176 - protein, 14 aa, Homo Sapiens
VIASIIKPQNTYCV

SEQ ID NO: 43177 - protein, 14 aa, Homo Sapiens
IASIIKPQNTYCVR

SEQ ID NO: 43178 - protein, 14 aa, Homo Sapiens
ASIIKPQNTYCVRR

SEQ ID NO: 43179 - protein, 14 aa, Homo Sapiens
SIIKPQNTYCVRRY

SEQ ID NO: 43180 - protein, 14 aa, Homo Sapiens
IIKPQNTYCVRRYA

SEQ ID NO: 43181 - protein, 14 aa, Homo Sapiens
IKPQNTYCVRRYAV

SEQ ID NO: 43182 - protein, 14 aa, Homo Sapiens
KPQNTYCVRRYAVV

SEQ ID NO: 43183 - protein, 14 aa, Homo Sapiens
PQNTYCVRRYAVVQ

SEQ ID NO: 43184 - protein, 14 aa, Homo Sapiens
QNTYCVRRYAVVQK

SEQ ID NO: 43185 - protein, 14 aa, Homo Sapiens
NTYCVRRYAVVQKA

SEQ ID NO: 43186 - protein, 14 aa, Homo Sapiens
TYCVRRYAVVQKAA

SEQ ID NO: 43187 - protein, 14 aa, Homo Sapiens
YCVRRYAVVQKAAH

SEQ ID NO: 43188 - protein, 14 aa, Homo Sapiens
CVRRYAVVQKAAHG

SEQ ID NO: 43189 - protein, 14 aa, Homo Sapiens
VRRYAVVQKAAHGH

SEQ ID NO: 43190 - protein, 14 aa, Homo Sapiens
RRYAVVQKAAHGHV

SEQ ID NO: 43191 - protein, 14 aa, Homo Sapiens
RYAVVQKAAHGHVR

SEQ ID NO: 43192 - protein, 14 aa, Homo Sapiens
YAVVQKAAHGHVRK

SEQ ID NO: 43193 - protein, 14 aa, Homo Sapiens
AVVQKAAHGHVRKA

SEQ ID NO: 43194 - protein, 14 aa, Homo Sapiens
VVQKAAHGHVRKAF

SEQ ID NO: 43195 - protein, 14 aa, Homo Sapiens
VQKAAHGHVRKAFK

SEQ ID NO: 43196 - protein, 14 aa, Homo Sapiens
QKAAHGHVRKAFKS

SEQ ID NO: 43197 - protein, 14 aa, Homo Sapiens
KAAHGHVRKAFKSH

SEQ ID NO: 43198 - protein, 14 aa, Homo Sapiens
AAHGHVRKAFKSHV

SEQ ID NO: 43199 - protein, 14 aa, Homo Sapiens
AHGHVRKAFKSHVS

SEQ ID NO: 43200 - protein, 14 aa, Homo Sapiens
HGHVRKAFKSHVST

SEQ ID NO: 43201 - protein, 14 aa, Homo Sapiens
GHVRKAFKSHVSTL

SEQ ID NO: 43202 - protein, 14 aa, Homo Sapiens
HVRKAFKSHVSTLT

SEQ ID NO: 43203 - protein, 14 aa, Homo Sapiens
VRKAFKSHVSTLTD

SEQ ID NO: 43204 - protein, 14 aa, Homo Sapiens
RKAFKSHVSTLTDL

SEQ ID NO: 43205 - protein, 14 aa, Homo Sapiens
KAFKSHVSTLTDLQ

SEQ ID NO: 43206 - protein, 14 aa, Homo Sapiens
AFKSHVSTLTDLQP

SEQ ID NO: 43207 - protein, 14 aa, Homo Sapiens
FKSHVSTLTDLQPY

SEQ ID NO: 43208 - protein, 14 aa, Homo Sapiens
KSHVSTLTDLQPYM

SEQ ID NO: 43209 - protein, 14 aa, Homo Sapiens
SHVSTLTDLQPYMR

SEQ ID NO: 43210 - protein, 14 aa, Homo Sapiens
HVSTLTDLQPYMRQ

SEQ ID NO: 43211 - protein, 14 aa, Homo Sapiens
VSTLTDLQPYMRQF

SEQ ID NO: 43212 - protein, 14 aa, Homo Sapiens
STLTDLQPYMRQFV

SEQ ID NO: 43213 - protein, 14 aa, Homo Sapiens
TLTDLQPYMRQFVA

SEQ ID NO: 43214 - protein, 14 aa, Homo Sapiens
LTDLQPYMRQFVAH

SEQ ID NO: 43215 - protein, 14 aa, Homo Sapiens
TDLQPYMRQFVAHL

SEQ ID NO: 43216 - protein, 14 aa, Homo Sapiens
DLQPYMRQFVAHLQ

SEQ ID NO: 43217 - protein, 14 aa, Homo Sapiens
LQPYMRQFVAHLQE

SEQ ID NO: 43218 - protein, 14 aa, Homo Sapiens
QPYMRQFVAHLQET

SEQ ID NO: 43219 - protein, 14 aa, Homo Sapiens
PYMRQFVAHLQETS

SEQ ID NO: 43220 - protein, 14 aa, Homo Sapiens
YMRQFVAHLQETSP

SEQ ID NO: 43221 - protein, 14 aa, Homo Sapiens
MRQFVAHLQETSPL

SEQ ID NO: 43222 - protein, 14 aa, Homo Sapiens
RQFVAHLQETSPLR

SEQ ID NO: 43223 - protein, 14 aa, Homo Sapiens
QFVAHLQETSPLRD

SEQ ID NO: 43224 - protein, 14 aa, Homo Sapiens
FVAHLQETSPLRDA

SEQ ID NO: 43225 - protein, 14 aa, Homo Sapiens
VAHLQETSPLRDAV

SEQ ID NO: 43226 - protein, 14 aa, Homo Sapiens
AHLQETSPLRDAVV

SEQ ID NO: 43227 - protein, 14 aa, Homo Sapiens
HLQETSPLRDAVVI

SEQ ID NO: 43228 - protein, 14 aa, Homo Sapiens
LQETSPLRDAVVIE

SEQ ID NO: 43229 - protein, 14 aa, Homo Sapiens
QETSPLRDAVVIEQ

SEQ ID NO: 43230 - protein, 14 aa, Homo Sapiens
ETSPLRDAVVIEQS

SEQ ID NO: 43231 - protein, 14 aa, Homo Sapiens
TSPLRDAVVIEQSS

SEQ ID NO: 43232 - protein, 14 aa, Homo Sapiens
SPLRDAVVIEQSSS

SEQ ID NO: 43233 - protein, 14 aa, Homo Sapiens
PLRDAVVIEQSSSL

SEQ ID NO: 43234 - protein, 14 aa, Homo Sapiens
LRDAVVIEQSSSLN

SEQ ID NO: 43235 - protein, 14 aa, Homo Sapiens
RDAVVIEQSSSLNE

SEQ ID NO: 43236 - protein, 14 aa, Homo Sapiens
DAVVIEQSSSLNEA

SEQ ID NO: 43237 - protein, 14 aa, Homo Sapiens
AVVIEQSSSLNEAS

SEQ ID NO: 43238 - protein, 14 aa, Homo Sapiens
VVIEQSSSLNEASS

SEQ ID NO: 43239 - protein, 14 aa, Homo Sapiens
VIEQSSSLNEASSG

SEQ ID NO: 43240 - protein, 14 aa, Homo Sapiens
IEQSSSLNEASSGL

SEQ ID NO: 43241 - protein, 14 aa, Homo Sapiens
EQSSSLNEASSGLF

SEQ ID NO: 43242 - protein, 14 aa, Homo Sapiens
QSSSLNEASSGLFD

SEQ ID NO: 43243 - protein, 14 aa, Homo Sapiens
SSSLNEASSGLFDV

SEQ ID NO: 43244 - protein, 14 aa, Homo Sapiens
SSLNEASSGLFDVF

SEQ ID NO: 43245 - protein, 14 aa, Homo Sapiens
SLNEASSGLFDVFL

SEQ ID NO: 43246 - protein, 14 aa, Homo Sapiens
LNEASSGLFDVFLR

SEQ ID NO: 43247 - protein, 14 aa, Homo Sapiens
NEASSGLFDVFLRF

SEQ ID NO: 43248 - protein, 14 aa, Homo Sapiens
EASSGLFDVFLRFM

SEQ ID NO: 43249 - protein, 14 aa, Homo Sapiens
ASSGLFDVFLRFMC

SEQ ID NO: 43250 - protein, 14 aa, Homo Sapiens
SSGLFDVFLRFMCH

SEQ ID NO: 43251 - protein, 14 aa, Homo Sapiens
SGLFDVFLRFMCHH

SEQ ID NO: 43252 - protein, 14 aa, Homo Sapiens
GLFDVFLRFMCHHA

SEQ ID NO: 43253 - protein, 14 aa, Homo Sapiens
LFDVFLRFMCHHAV

SEQ ID NO: 43254 - protein, 14 aa, Homo Sapiens
FDVFLRFMCHHAVR

SEQ ID NO: 43255 - protein, 14 aa, Homo Sapiens
DVFLRFMCHHAVRI

SEQ ID NO: 43256 - protein, 14 aa, Homo Sapiens
VFLRFMCHHAVRIR

SEQ ID NO: 43257 - protein, 14 aa, Homo Sapiens
FLRFMCHHAVRIRG

SEQ ID NO: 43258 - protein, 14 aa, Homo Sapiens
LRFMCHHAVRIRGK

SEQ ID NO: 43259 - protein, 14 aa, Homo Sapiens
RFMCHHAVRIRGKS

SEQ ID NO: 43260 - protein, 14 aa, Homo Sapiens
FMCHHAVRIRGKSY

SEQ ID NO: 43261 - protein, 14 aa, Homo Sapiens
MCHHAVRIRGKSYV

SEQ ID NO: 43262 - protein, 14 aa, Homo Sapiens
CHHAVRIRGKSYVQ

SEQ ID NO: 43263 - protein, 14 aa, Homo Sapiens
HHAVRIRGKSYVQC

SEQ ID NO: 43264 - protein, 14 aa, Homo Sapiens
HAVRIRGKSYVQCQ

SEQ ID NO: 43265 - protein, 14 aa, Homo Sapiens
AVRIRGKSYVQCQG

SEQ ID NO: 43266 - protein, 14 aa, Homo Sapiens
VRIRGKSYVQCQGI

SEQ ID NO: 43267 - protein, 14 aa, Homo Sapiens
RIRGKSYVQCQGIP

SEQ ID NO: 43268 - protein, 14 aa, Homo Sapiens
IRGKSYVQCQGIPQ

SEQ ID NO: 43269 - protein, 14 aa, Homo Sapiens
RGKSYVQCQGIPQG

SEQ ID NO: 43270 - protein, 14 aa, Homo Sapiens
GKSYVQCQGIPQGS

SEQ ID NO: 43271 - protein, 14 aa, Homo Sapiens
KSYVQCQGIPQGSI

SEQ ID NO: 43272 - protein, 14 aa, Homo Sapiens
SYVQCQGIPQGSIL

SEQ ID NO: 43273 - protein, 14 aa, Homo Sapiens
YVQCQGIPQGSILS

SEQ ID NO: 43274 - protein, 14 aa, Homo Sapiens
VQCQGIPQGSILST

SEQ ID NO: 43275 - protein, 14 aa, Homo Sapiens
QCQGIPQGSILSTL

SEQ ID NO: 43276 - protein, 14 aa, Homo Sapiens
CQGIPQGSILSTLL

SEQ ID NO: 43277 - protein, 14 aa, Homo Sapiens
QGIPQGSILSTLLC

SEQ ID NO: 43278 - protein, 14 aa, Homo Sapiens
GIPQGSILSTLLCS

SEQ ID NO: 43279 - protein, 14 aa, Homo Sapiens
IPQGSILSTLLCSL

SEQ ID NO: 43280 - protein, 14 aa, Homo Sapiens
PQGSILSTLLCSLC

SEQ ID NO: 43281 - protein, 14 aa, Homo Sapiens
QGSILSTLLCSLCY

SEQ ID NO: 43282 - protein, 14 aa, Homo Sapiens
GSILSTLLCSLCYG

SEQ ID NO: 43283 - protein, 14 aa, Homo Sapiens
SILSTLLCSLCYGD

SEQ ID NO: 43284 - protein, 14 aa, Homo Sapiens
ILSTLLCSLCYGDM

SEQ ID NO: 43285 - protein, 14 aa, Homo Sapiens
LSTLLCSLCYGDME

SEQ ID NO: 43286 - protein, 14 aa, Homo Sapiens
STLLCSLCYGDMEN

SEQ ID NO: 43287 - protein, 14 aa, Homo Sapiens
TLLCSLCYGDMENK

SEQ ID NO: 43288 - protein, 14 aa, Homo Sapiens
LLCSLCYGDMENKL

SEQ ID NO: 43289 - protein, 14 aa, Homo Sapiens
LCSLCYGDMENKLF

SEQ ID NO: 43290 - protein, 14 aa, Homo Sapiens
CSLCYGDMENKLFA

SEQ ID NO: 43291 - protein, 14 aa, Homo Sapiens
SLCYGDMENKLFAG

SEQ ID NO: 43292 - protein, 14 aa, Homo Sapiens
LCYGDMENKLFAGI

SEQ ID NO: 43293 - protein, 14 aa, Homo Sapiens
CYGDMENKLFAGIR

SEQ ID NO: 43294 - protein, 14 aa, Homo Sapiens
YGDMENKLFAGIRR

SEQ ID NO: 43295 - protein, 14 aa, Homo Sapiens
GDMENKLFAGIRRD

SEQ ID NO: 43296 - protein, 14 aa, Homo Sapiens
DMENKLFAGIRRDG

SEQ ID NO: 43297 - protein, 14 aa, Homo Sapiens
MENKLFAGIRRDGL

SEQ ID NO: 43298 - protein, 14 aa, Homo Sapiens
ENKLFAGIRRDGLL

SEQ ID NO: 43299 - protein, 14 aa, Homo Sapiens
NKLFAGIRRDGLLL

SEQ ID NO: 43300 - protein, 14 aa, Homo Sapiens
KLFAGIRRDGLLLR

SEQ ID NO: 43301 - protein, 14 aa, Homo Sapiens
LFAGIRRDGLLLRL

SEQ ID NO: 43302 - protein, 14 aa, Homo Sapiens
FAGIRRDGLLLRLV

SEQ ID NO: 43303 - protein, 14 aa, Homo Sapiens
AGIRRDGLLLRLVD

SEQ ID NO: 43304 - protein, 14 aa, Homo Sapiens
GIRRDGLLLRLVDD

SEQ ID NO: 43305 - protein, 14 aa, Homo Sapiens
IRRDGLLLRLVDDF

SEQ ID NO: 43306 - protein, 14 aa, Homo Sapiens
RRDGLLLRLVDDFL

SEQ ID NO: 43307 - protein, 14 aa, Homo Sapiens
RDGLLLRLVDDFLL

SEQ ID NO: 43308 - protein, 14 aa, Homo Sapiens
DGLLLRLVDDFLLV

SEQ ID NO: 43309 - protein, 14 aa, Homo Sapiens
GLLLRLVDDFLLVT

SEQ ID NO: 43310 - protein, 14 aa, Homo Sapiens
LLLRLVDDFLLVTP

SEQ ID NO: 43311 - protein, 14 aa, Homo Sapiens
LLRLVDDFLLVTPH

SEQ ID NO: 43312 - protein, 14 aa, Homo Sapiens
LRLVDDFLLVTPHL

SEQ ID NO: 43313 - protein, 14 aa, Homo Sapiens
RLVDDFLLVTPHLT

SEQ ID NO: 43314 - protein, 14 aa, Homo Sapiens
LVDDFLLVTPHLTH

SEQ ID NO: 43315 - protein, 14 aa, Homo Sapiens
VDDFLLVTPHLTHA

SEQ ID NO: 43316 - protein, 14 aa, Homo Sapiens
DDFLLVTPHLTHAK

SEQ ID NO: 43317 - protein, 14 aa, Homo Sapiens
DFLLVTPHLTHAKT

SEQ ID NO: 43318 - protein, 14 aa, Homo Sapiens
FLLVTPHLTHAKTF

SEQ ID NO: 43319 - protein, 14 aa, Homo Sapiens
LLVTPHLTHAKTFL

SEQ ID NO: 43320 - protein, 14 aa, Homo Sapiens
LVTPHLTHAKTFLR

SEQ ID NO: 43321 - protein, 14 aa, Homo Sapiens
VTPHLTHAKTFLRT

SEQ ID NO: 43322 - protein, 14 aa, Homo Sapiens
TPHLTHAKTFLRTL

SEQ ID NO: 43323 - protein, 14 aa, Homo Sapiens
PHLTHAKTFLRTLV

SEQ ID NO: 43324 - protein, 14 aa, Homo Sapiens
HLTHAKTFLRTLVR

SEQ ID NO: 43325 - protein, 14 aa, Homo Sapiens
LTHAKTFLRTLVRG

SEQ ID NO: 43326 - protein, 14 aa, Homo Sapiens
THAKTFLRTLVRGV

SEQ ID NO: 43327 - protein, 14 aa, Homo Sapiens
HAKTFLRTLVRGVP

SEQ ID NO: 43328 - protein, 14 aa, Homo Sapiens
AKTFLRTLVRGVPE

SEQ ID NO: 43329 - protein, 14 aa, Homo Sapiens
KTFLRTLVRGVPEY

SEQ ID NO: 43330 - protein, 14 aa, Homo Sapiens
TFLRTLVRGVPEYG

SEQ ID NO: 43331 - protein, 14 aa, Homo Sapiens
FLRTLVRGVPEYGC

SEQ ID NO: 43332 - protein, 14 aa, Homo Sapiens
LRTLVRGVPEYGCV

SEQ ID NO: 43333 - protein, 14 aa, Homo Sapiens
RTLVRGVPEYGCVV

SEQ ID NO: 43334 - protein, 14 aa, Homo Sapiens
TLVRGVPEYGCVVN

SEQ ID NO: 43335 - protein, 14 aa, Homo Sapiens
LVRGVPEYGCVVNL

SEQ ID NO: 43336 - protein, 14 aa, Homo Sapiens
VRGVPEYGCVVNLR

SEQ ID NO: 43337 - protein, 14 aa, Homo Sapiens
RGVPEYGCVVNLRK

SEQ ID NO: 43338 - protein, 14 aa, Homo Sapiens
GVPEYGCVVNLRKT

SEQ ID NO: 43339 - protein, 14 aa, Homo Sapiens
VPEYGCVVNLRKTV

SEQ ID NO: 43340 - protein, 14 aa, Homo Sapiens
PEYGCVVNLRKTVV

SEQ ID NO: 43341 - protein, 14 aa, Homo Sapiens
EYGCVVNLRKTVVN

SEQ ID NO: 43342 - protein, 14 aa, Homo Sapiens
YGCVVNLRKTVVNF

SEQ ID NO: 43343 - protein, 14 aa, Homo Sapiens
GCVVNLRKTVVNFP

SEQ ID NO: 43344 - protein, 14 aa, Homo Sapiens
CVVNLRKTVVNFPV

SEQ ID NO: 43345 - protein, 14 aa, Homo Sapiens
VVNLRKTVVNFPVE

SEQ ID NO: 43346 - protein, 14 aa, Homo Sapiens
VNLRKTVVNFPVED

SEQ ID NO: 43347 - protein, 14 aa, Homo Sapiens
NLRKTVVNFPVEDE

SEQ ID NO: 43348 - protein, 14 aa, Homo Sapiens
LRKTVVNFPVEDEA

SEQ ID NO: 43349 - protein, 14 aa, Homo Sapiens
RKTVVNFPVEDEAL

SEQ ID NO: 43350 - protein, 14 aa, Homo Sapiens
KTVVNFPVEDEALG

SEQ ID NO: 43351 - protein, 14 aa, Homo Sapiens
TVVNFPVEDEALGG

SEQ ID NO: 43352 - protein, 14 aa, Homo Sapiens
VVNFPVEDEALGGT

SEQ ID NO: 43353 - protein, 14 aa, Homo Sapiens
VNFPVEDEALGGTA

SEQ ID NO: 43354 - protein, 14 aa, Homo Sapiens
NFPVEDEALGGTAF

SEQ ID NO: 43355 - protein, 14 aa, Homo Sapiens
FPVEDEALGGTAFV

SEQ ID NO: 43356 - protein, 14 aa, Homo Sapiens
PVEDEALGGTAFVQ

SEQ ID NO: 43357 - protein, 14 aa, Homo Sapiens
VEDEALGGTAFVQM

SEQ ID NO: 43358 - protein, 14 aa, Homo Sapiens
EDEALGGTAFVQMP

SEQ ID NO: 43359 - protein, 14 aa, Homo Sapiens
DEALGGTAFVQMPA

SEQ ID NO: 43360 - protein, 14 aa, Homo Sapiens
EALGGTAFVQMPAH

SEQ ID NO: 43361 - protein, 14 aa, Homo Sapiens
ALGGTAFVQMPAHG

SEQ ID NO: 43362 - protein, 14 aa, Homo Sapiens
LGGTAFVQMPAHGL

SEQ ID NO: 43363 - protein, 14 aa, Homo Sapiens
GGTAFVQMPAHGLF

SEQ ID NO: 43364 - protein, 14 aa, Homo Sapiens
GTAFVQMPAHGLFP

SEQ ID NO: 43365 - protein, 14 aa, Homo Sapiens
TAFVQMPAHGLFPW

SEQ ID NO: 43366 - protein, 14 aa, Homo Sapiens
AFVQMPAHGLFPWC

SEQ ID NO: 43367 - protein, 14 aa, Homo Sapiens
FVQMPAHGLFPWCG

SEQ ID NO: 43368 - protein, 14 aa, Homo Sapiens
VQMPAHGLFPWCGL

SEQ ID NO: 43369 - protein, 14 aa, Homo Sapiens
QMPAHGLFPWCGLL

SEQ ID NO: 43370 - protein, 14 aa, Homo Sapiens
MPAHGLFPWCGLLL

SEQ ID NO: 43371 - protein, 14 aa, Homo Sapiens
PAHGLFPWCGLLLD

SEQ ID NO: 43372 - protein, 14 aa, Homo Sapiens
AHGLFPWCGLLLDT

SEQ ID NO: 43373 - protein, 14 aa, Homo Sapiens
HGLFPWCGLLLDTR

SEQ ID NO: 43374 - protein, 14 aa, Homo Sapiens
GLFPWCGLLLDTRT

SEQ ID NO: 43375 - protein, 14 aa, Homo Sapiens
LFPWCGLLLDTRTL

SEQ ID NO: 43376 - protein, 14 aa, Homo Sapiens
FPWCGLLLDTRTLE

SEQ ID NO: 43377 - protein, 14 aa, Homo Sapiens
PWCGLLLDTRTLEV

SEQ ID NO: 43378 - protein, 14 aa, Homo Sapiens
WCGLLLDTRTLEVQ

SEQ ID NO: 43379 - protein, 14 aa, Homo Sapiens
CGLLLDTRTLEVQS

SEQ ID NO: 43380 - protein, 14 aa, Homo Sapiens
GLLLDTRTLEVQSD

SEQ ID NO: 43381 - protein, 14 aa, Homo Sapiens
LLLDTRTLEVQSDY

SEQ ID NO: 43382 - protein, 14 aa, Homo Sapiens
LLDTRTLEVQSDYS

SEQ ID NO: 43383 - protein, 14 aa, Homo Sapiens
LDTRTLEVQSDYSS

SEQ ID NO: 43384 - protein, 14 aa, Homo Sapiens
DTRTLEVQSDYSSY

SEQ ID NO: 43385 - protein, 14 aa, Homo Sapiens
TRTLEVQSDYSSYA

SEQ ID NO: 43386 - protein, 14 aa, Homo Sapiens
RTLEVQSDYSSYAR

SEQ ID NO: 43387 - protein, 14 aa, Homo Sapiens
TLEVQSDYSSYART

SEQ ID NO: 43388 - protein, 14 aa, Homo Sapiens
LEVQSDYSSYARTS

SEQ ID NO: 43389 - protein, 14 aa, Homo Sapiens
EVQSDYSSYARTSI

SEQ ID NO: 43390 - protein, 14 aa, Homo Sapiens
VQSDYSSYARTSIR

SEQ ID NO: 43391 - protein, 14 aa, Homo Sapiens
QSDYSSYARTSIRA

SEQ ID NO: 43392 - protein, 14 aa, Homo Sapiens
SDYSSYARTSIRAS

SEQ ID NO: 43393 - protein, 14 aa, Homo Sapiens
DYSSYARTSIRASL

SEQ ID NO: 43394 - protein, 14 aa, Homo Sapiens
YSSYARTSIRASLT

SEQ ID NO: 43395 - protein, 14 aa, Homo Sapiens
SSYARTSIRASLTF

SEQ ID NO: 43396 - protein, 14 aa, Homo Sapiens
SYARTSIRASLTFN

SEQ ID NO: 43397 - protein, 14 aa, Homo Sapiens
YARTSIRASLTFNR

SEQ ID NO: 43398 - protein, 14 aa, Homo Sapiens
ARTSIRASLTFNRG

SEQ ID NO: 43399 - protein, 14 aa, Homo Sapiens
RTSIRASLTFNRGF

SEQ ID NO: 43400 - protein, 14 aa, Homo Sapiens
TSIRASLTFNRGFK

SEQ ID NO: 43401 - protein, 14 aa, Homo Sapiens
SIRASLTFNRGFKA

SEQ ID NO: 43402 - protein, 14 aa, Homo Sapiens
IRASLTFNRGFKAG

SEQ ID NO: 43403 - protein, 14 aa, Homo Sapiens
RASLTFNRGFKAGR

SEQ ID NO: 43404 - protein, 14 aa, Homo Sapiens
ASLTFNRGFKAGRN

SEQ ID NO: 43405 - protein, 14 aa, Homo Sapiens
SLTFNRGFKAGRNM

SEQ ID NO: 43406 - protein, 14 aa, Homo Sapiens
LTFNRGFKAGRNMR

SEQ ID NO: 43407 - protein, 14 aa, Homo Sapiens
TFNRGFKAGRNMRR

SEQ ID NO: 43408 - protein, 14 aa, Homo Sapiens
FNRGFKAGRNMRRK

SEQ ID NO: 43409 - protein, 14 aa, Homo Sapiens
NRGFKAGRNMRRKL

SEQ ID NO: 43410 - protein, 14 aa, Homo Sapiens
RGFKAGRNMRRKLF

SEQ ID NO: 43411 - protein, 14 aa, Homo Sapiens
GFKAGRNMRRKLFG

SEQ ID NO: 43412 - protein, 14 aa, Homo Sapiens
FKAGRNMRRKLFGV

SEQ ID NO: 43413 - protein, 14 aa, Homo Sapiens
KAGRNMRRKLFGVL

SEQ ID NO: 43414 - protein, 14 aa, Homo Sapiens
AGRNMRRKLFGVLR

SEQ ID NO: 43415 - protein, 14 aa, Homo Sapiens
GRNMRRKLFGVLRL

SEQ ID NO: 43416 - protein, 14 aa, Homo Sapiens
RNMRRKLFGVLRLK

SEQ ID NO: 43417 - protein, 14 aa, Homo Sapiens
NMRRKLFGVLRLKC

SEQ ID NO: 43418 - protein, 14 aa, Homo Sapiens
MRRKLFGVLRLKCH

SEQ ID NO: 43419 - protein, 14 aa, Homo Sapiens
RRKLFGVLRLKCHS

SEQ ID NO: 43420 - protein, 14 aa, Homo Sapiens
RKLFGVLRLKCHSL

SEQ ID NO: 43421 - protein, 14 aa, Homo Sapiens
KLFGVLRLKCHSLF

SEQ ID NO: 43422 - protein, 14 aa, Homo Sapiens
LFGVLRLKCHSLFL

SEQ ID NO: 43423 - protein, 14 aa, Homo Sapiens
FGVLRLKCHSLFLD

SEQ ID NO: 43424 - protein, 14 aa, Homo Sapiens
GVLRLKCHSLFLDL

SEQ ID NO: 43425 - protein, 14 aa, Homo Sapiens
VLRLKCHSLFLDLQ

SEQ ID NO: 43426 - protein, 14 aa, Homo Sapiens
LRLKCHSLFLDLQV

SEQ ID NO: 43427 - protein, 14 aa, Homo Sapiens
RLKCHSLFLDLQVN

SEQ ID NO: 43428 - protein, 14 aa, Homo Sapiens
LKCHSLFLDLQVNS

SEQ ID NO: 43429 - protein, 14 aa, Homo Sapiens
KCHSLFLDLQVNSL

SEQ ID NO: 43430 - protein, 14 aa, Homo Sapiens
CHSLFLDLQVNSLQ

SEQ ID NO: 43431 - protein, 14 aa, Homo Sapiens
HSLFLDLQVNSLQT

SEQ ID NO: 43432 - protein, 14 aa, Homo Sapiens
SLFLDLQVNSLQTV

SEQ ID NO: 43433 - protein, 14 aa, Homo Sapiens
LFLDLQVNSLQTVC

SEQ ID NO: 43434 - protein, 14 aa, Homo Sapiens
FLDLQVNSLQTVCT

SEQ ID NO: 43435 - protein, 14 aa, Homo Sapiens
LDLQVNSLQTVCTN

SEQ ID NO: 43436 - protein, 14 aa, Homo Sapiens
DLQVNSLQTVCTNI

SEQ ID NO: 43437 - protein, 14 aa, Homo Sapiens
LQVNSLQTVCTNIY

SEQ ID NO: 43438 - protein, 14 aa, Homo Sapiens
QVNSLQTVCTNIYK

SEQ ID NO: 43439 - protein, 14 aa, Homo Sapiens
VNSLQTVCTNIYKI

SEQ ID NO: 43440 - protein, 14 aa, Homo Sapiens
NSLQTVCTNIYKIL

SEQ ID NO: 43441 - protein, 14 aa, Homo Sapiens
SLQTVCTNIYKILL

SEQ ID NO: 43442 - protein, 14 aa, Homo Sapiens
LQTVCTNIYKILLL

SEQ ID NO: 43443 - protein, 14 aa, Homo Sapiens
QTVCTNIYKILLLQ

SEQ ID NO: 43444 - protein, 14 aa, Homo Sapiens
TVCTNIYKILLLQA

SEQ ID NO: 43445 - protein, 14 aa, Homo Sapiens
VCTNIYKILLLQAY

SEQ ID NO: 43446 - protein, 14 aa, Homo Sapiens
CTNIYKILLLQAYR

SEQ ID NO: 43447 - protein, 14 aa, Homo Sapiens
TNIYKILLLQAYRF

SEQ ID NO: 43448 - protein, 14 aa, Homo Sapiens
NIYKILLLQAYRFH

SEQ ID NO: 43449 - protein, 14 aa, Homo Sapiens
IYKILLLQAYRFHA

SEQ ID NO: 43450 - protein, 14 aa, Homo Sapiens
YKILLLQAYRFHAC

SEQ ID NO: 43451 - protein, 14 aa, Homo Sapiens
KILLLQAYRFHACV

SEQ ID NO: 43452 - protein, 14 aa, Homo Sapiens
ILLLQAYRFHACVL

SEQ ID NO: 43453 - protein, 14 aa, Homo Sapiens
LLLQAYRFHACVLQ

SEQ ID NO: 43454 - protein, 14 aa, Homo Sapiens
LLQAYRFHACVLQL

SEQ ID NO: 43455 - protein, 14 aa, Homo Sapiens
LQAYRFHACVLQLP

SEQ ID NO: 43456 - protein, 14 aa, Homo Sapiens
QAYRFHACVLQLPF

SEQ ID NO: 43457 - protein, 14 aa, Homo Sapiens
AYRFHACVLQLPFH

SEQ ID NO: 43458 - protein, 14 aa, Homo Sapiens
YRFHACVLQLPFHQ

SEQ ID NO: 43459 - protein, 14 aa, Homo Sapiens
RFHACVLQLPFHQQ

SEQ ID NO: 43460 - protein, 14 aa, Homo Sapiens
FHACVLQLPFHQQV

SEQ ID NO: 43461 - protein, 14 aa, Homo Sapiens
HACVLQLPFHQQVW

SEQ ID NO: 43462 - protein, 14 aa, Homo Sapiens
ACVLQLPFHQQVWK

SEQ ID NO: 43463 - protein, 14 aa, Homo Sapiens
CVLQLPFHQQVWKN

SEQ ID NO: 43464 - protein, 14 aa, Homo Sapiens
VLQLPFHQQVWKNP

SEQ ID NO: 43465 - protein, 14 aa, Homo Sapiens
LQLPFHQQVWKNPT

SEQ ID NO: 43466 - protein, 14 aa, Homo Sapiens
QLPFHQQVWKNPTF

SEQ ID NO: 43467 - protein, 14 aa, Homo Sapiens
LPFHQQVWKNPTFF

SEQ ID NO: 43468 - protein, 14 aa, Homo Sapiens
PFHQQVWKNPTFFL

SEQ ID NO: 43469 - protein, 14 aa, Homo Sapiens
FHQQVWKNPTFFLR

SEQ ID NO: 43470 - protein, 14 aa, Homo Sapiens
HQQVWKNPTFFLRV

SEQ ID NO: 43471 - protein, 14 aa, Homo Sapiens
QQVWKNPTFFLRVI

SEQ ID NO: 43472 - protein, 14 aa, Homo Sapiens
QVWKNPTFFLRVIS

SEQ ID NO: 43473 - protein, 14 aa, Homo Sapiens
VWKNPTFFLRVISD

SEQ ID NO: 43474 - protein, 14 aa, Homo Sapiens
WKNPTFFLRVISDT

SEQ ID NO: 43475 - protein, 14 aa, Homo Sapiens
KNPTFFLRVISDTA

SEQ ID NO: 43476 - protein, 14 aa, Homo Sapiens
NPTFFLRVISDTAS

SEQ ID NO: 43477 - protein, 14 aa, Homo Sapiens
PTFFLRVISDTASL

SEQ ID NO: 43478 - protein, 14 aa, Homo Sapiens
TFFLRVISDTASLC

SEQ ID NO: 43479 - protein, 14 aa, Homo Sapiens
FFLRVISDTASLCY

SEQ ID NO: 43480 - protein, 14 aa, Homo Sapiens
FLRVISDTASLCYS

SEQ ID NO: 43481 - protein, 14 aa, Homo Sapiens
LRVISDTASLCYSI

SEQ ID NO: 43482 - protein, 14 aa, Homo Sapiens
RVISDTASLCYSIL

SEQ ID NO: 43483 - protein, 14 aa, Homo Sapiens
VISDTASLCYSILK

SEQ ID NO: 43484 - protein, 14 aa, Homo Sapiens
ISDTASLCYSILKA

SEQ ID NO: 43485 - protein, 14 aa, Homo Sapiens
SDTASLCYSILKAK

SEQ ID NO: 43486 - protein, 14 aa, Homo Sapiens
DTASLCYSILKAKN

SEQ ID NO: 43487 - protein, 14 aa, Homo Sapiens
TASLCYSILKAKNA

SEQ ID NO: 43488 - protein, 14 aa, Homo Sapiens
ASLCYSILKAKNAG

SEQ ID NO: 43489 - protein, 14 aa, Homo Sapiens
SLCYSILKAKNAGM

SEQ ID NO: 43490 - protein, 14 aa, Homo Sapiens
LCYSILKAKNAGMS

SEQ ID NO: 43491 - protein, 14 aa, Homo Sapiens
CYSILKAKNAGMSL

SEQ ID NO: 43492 - protein, 14 aa, Homo Sapiens
YSILKAKNAGMSLG

SEQ ID NO: 43493 - protein, 14 aa, Homo Sapiens
SILKAKNAGMSLGA

SEQ ID NO: 43494 - protein, 14 aa, Homo Sapiens
ILKAKNAGMSLGAK

SEQ ID NO: 43495 - protein, 14 aa, Homo Sapiens
LKAKNAGMSLGAKG

SEQ ID NO: 43496 - protein, 14 aa, Homo Sapiens
KAKNAGMSLGAKGA

SEQ ID NO: 43497 - protein, 14 aa, Homo Sapiens
AKNAGMSLGAKGAA

SEQ ID NO: 43498 - protein, 14 aa, Homo Sapiens
KNAGMSLGAKGAAG

SEQ ID NO: 43499 - protein, 14 aa, Homo Sapiens
NAGMSLGAKGAAGP

SEQ ID NO: 43500 - protein, 14 aa, Homo Sapiens
AGMSLGAKGAAGPL

SEQ ID NO: 43501 - protein, 14 aa, Homo Sapiens
GMSLGAKGAAGPLP

SEQ ID NO: 43502 - protein, 14 aa, Homo Sapiens
MSLGAKGAAGPLPS

SEQ ID NO: 43503 - protein, 14 aa, Homo Sapiens
SLGAKGAAGPLPSE

SEQ ID NO: 43504 - protein, 14 aa, Homo Sapiens
LGAKGAAGPLPSEA

SEQ ID NO: 43505 - protein, 14 aa, Homo Sapiens
GAKGAAGPLPSEAV

SEQ ID NO: 43506 - protein, 14 aa, Homo Sapiens
AKGAAGPLPSEAVQ

SEQ ID NO: 43507 - protein, 14 aa, Homo Sapiens
KGAAGPLPSEAVQW

SEQ ID NO: 43508 - protein, 14 aa, Homo Sapiens
GAAGPLPSEAVQWL

SEQ ID NO: 43509 - protein, 14 aa, Homo Sapiens
AAGPLPSEAVQWLC

SEQ ID NO: 43510 - protein, 14 aa, Homo Sapiens
AGPLPSEAVQWLCH

SEQ ID NO: 43511 - protein, 14 aa, Homo Sapiens
GPLPSEAVQWLCHQ

SEQ ID NO: 43512 - protein, 14 aa, Homo Sapiens
PLPSEAVQWLCHQA

SEQ ID NO: 43513 - protein, 14 aa, Homo Sapiens
LPSEAVQWLCHQAF

SEQ ID NO: 43514 - protein, 14 aa, Homo Sapiens
PSEAVQWLCHQAFL

SEQ ID NO: 43515 - protein, 14 aa, Homo Sapiens
SEAVQWLCHQAFLL

SEQ ID NO: 43516 - protein, 14 aa, Homo Sapiens
EAVQWLCHQAFLLK

SEQ ID NO: 43517 - protein, 14 aa, Homo Sapiens
AVQWLCHQAFLLKL

SEQ ID NO: 43518 - protein, 14 aa, Homo Sapiens
VQWLCHQAFLLKLT

SEQ ID NO: 43519 - protein, 14 aa, Homo Sapiens
QWLCHQAFLLKLTR

SEQ ID NO: 43520 - protein, 14 aa, Homo Sapiens
WLCHQAFLLKLTRH

SEQ ID NO: 43521 - protein, 14 aa, Homo Sapiens
LCHQAFLLKLTRHR

SEQ ID NO: 43522 - protein, 14 aa, Homo Sapiens
CHQAFLLKLTRHRV

SEQ ID NO: 43523 - protein, 14 aa, Homo Sapiens
HQAFLLKLTRHRVT

SEQ ID NO: 43524 - protein, 14 aa, Homo Sapiens
QAFLLKLTRHRVTY

SEQ ID NO: 43525 - protein, 14 aa, Homo Sapiens
AFLLKLTRHRVTYV

SEQ ID NO: 43526 - protein, 14 aa, Homo Sapiens
FLLKLTRHRVTYVP

SEQ ID NO: 43527 - protein, 14 aa, Homo Sapiens
LLKLTRHRVTYVPL

SEQ ID NO: 43528 - protein, 14 aa, Homo Sapiens
LKLTRHRVTYVPLL

SEQ ID NO: 43529 - protein, 14 aa, Homo Sapiens
KLTRHRVTYVPLLG

SEQ ID NO: 43530 - protein, 14 aa, Homo Sapiens
LTRHRVTYVPLLGS

SEQ ID NO: 43531 - protein, 14 aa, Homo Sapiens
TRHRVTYVPLLGSL

SEQ ID NO: 43532 - protein, 14 aa, Homo Sapiens
RHRVTYVPLLGSLR

SEQ ID NO: 43533 - protein, 14 aa, Homo Sapiens
HRVTYVPLLGSLRT

SEQ ID NO: 43534 - protein, 14 aa, Homo Sapiens
RVTYVPLLGSLRTA

SEQ ID NO: 43535 - protein, 14 aa, Homo Sapiens
VTYVPLLGSLRTAQ

SEQ ID NO: 43536 - protein, 14 aa, Homo Sapiens
TYVPLLGSLRTAQT

SEQ ID NO: 43537 - protein, 14 aa, Homo Sapiens
YVPLLGSLRTAQTQ

SEQ ID NO: 43538 - protein, 14 aa, Homo Sapiens
VPLLGSLRTAQTQL

SEQ ID NO: 43539 - protein, 14 aa, Homo Sapiens
PLLGSLRTAQTQLS

SEQ ID NO: 43540 - protein, 14 aa, Homo Sapiens
LLGSLRTAQTQLSR

SEQ ID NO: 43541 - protein, 14 aa, Homo Sapiens
LGSLRTAQTQLSRK

SEQ ID NO: 43542 - protein, 14 aa, Homo Sapiens
GSLRTAQTQLSRKL

SEQ ID NO: 43543 - protein, 14 aa, Homo Sapiens
SLRTAQTQLSRKLP

SEQ ID NO: 43544 - protein, 14 aa, Homo Sapiens
LRTAQTQLSRKLPG

SEQ ID NO: 43545 - protein, 14 aa, Homo Sapiens
RTAQTQLSRKLPGT

SEQ ID NO: 43546 - protein, 14 aa, Homo Sapiens
TAQTQLSRKLPGTT

SEQ ID NO: 43547 - protein, 14 aa, Homo Sapiens
AQTQLSRKLPGTTL

SEQ ID NO: 43548 - protein, 14 aa, Homo Sapiens
QTQLSRKLPGTTLT

SEQ ID NO: 43549 - protein, 14 aa, Homo Sapiens
TQLSRKLPGTTLTA

SEQ ID NO: 43550 - protein, 14 aa, Homo Sapiens
QLSRKLPGTTLTAL

SEQ ID NO: 43551 - protein, 14 aa, Homo Sapiens
LSRKLPGTTLTALE

SEQ ID NO: 43552 - protein, 14 aa, Homo Sapiens
SRKLPGTTLTALEA

SEQ ID NO: 43553 - protein, 14 aa, Homo Sapiens
RKLPGTTLTALEAA

SEQ ID NO: 43554 - protein, 14 aa, Homo Sapiens
KLPGTTLTALEAAA

SEQ ID NO: 43555 - protein, 14 aa, Homo Sapiens
LPGTTLTALEAAAN

SEQ ID NO: 43556 - protein, 14 aa, Homo Sapiens
PGTTLTALEAAANP

SEQ ID NO: 43557 - protein, 14 aa, Homo Sapiens
GTTLTALEAAANPA

SEQ ID NO: 43558 - protein, 14 aa, Homo Sapiens
TTLTALEAAANPAL

SEQ ID NO: 43559 - protein, 14 aa, Homo Sapiens
TLTALEAAANPALP

SEQ ID NO: 43560 - protein, 14 aa, Homo Sapiens
LTALEAAANPALPS

SEQ ID NO: 43561 - protein, 14 aa, Homo Sapiens
TALEAAANPALPSD

SEQ ID NO: 43562 - protein, 14 aa, Homo Sapiens
ALEAAANPALPSDF

SEQ ID NO: 43563 - protein, 14 aa, Homo Sapiens
LEAAANPALPSDFK

SEQ ID NO: 43564 - protein, 14 aa, Homo Sapiens
EAAANPALPSDFKT

SEQ ID NO: 43565 - protein, 14 aa, Homo Sapiens
AAANPALPSDFKTI

SEQ ID NO: 43566 - protein, 14 aa, Homo Sapiens
AANPALPSDFKTIL

SEQ ID NO: 43567 - protein, 14 aa, Homo Sapiens
ANPALPSDFKTILD

SEQ ID NO: 43568 - protein, 15 aa, Homo Sapiens
MPRAPRCRAVRSLLR

SEQ ID NO: 43569 - protein, 15 aa, Homo Sapiens
PRAPRCRAVRSLLRS

SEQ ID NO: 43570 - protein, 15 aa, Homo Sapiens
RAPRCRAVRSLLRSH

SEQ ID NO: 43571 - protein, 15 aa, Homo Sapiens
APRCRAVRSLLRSHY

SEQ ID NO: 43572 - protein, 15 aa, Homo Sapiens
PRCRAVRSLLRSHYR

SEQ ID NO: 43573 - protein, 15 aa, Homo Sapiens
RCRAVRSLLRSHYRE

SEQ ID NO: 43574 - protein, 15 aa, Homo Sapiens
CRAVRSLLRSHYREV

SEQ ID NO: 43575 - protein, 15 aa, Homo Sapiens
RAVRSLLRSHYREVL

SEQ ID NO: 43576 - protein, 15 aa, Homo Sapiens
AVRSLLRSHYREVLP

SEQ ID NO: 43577 - protein, 15 aa, Homo Sapiens
VRSLLRSHYREVLPL

SEQ ID NO: 43578 - protein, 15 aa, Homo Sapiens
RSLLRSHYREVLPLA

SEQ ID NO: 43579 - protein, 15 aa, Homo Sapiens
SLLRSHYREVLPLAT

SEQ ID NO: 43580 - protein, 15 aa, Homo Sapiens
LLRSHYREVLPLATF

SEQ ID NO: 43581 - protein, 15 aa, Homo Sapiens
LRSHYREVLPLATFV

SEQ ID NO: 43582 - protein, 15 aa, Homo Sapiens
RSHYREVLPLATFVR

SEQ ID NO: 43583 - protein, 15 aa, Homo Sapiens
SHYREVLPLATFVRR

SEQ ID NO: 43584 - protein, 15 aa, Homo Sapiens
HYREVLPLATFVRRL

SEQ ID NO: 43585 - protein, 15 aa, Homo Sapiens
YREVLPLATFVRRLG

SEQ ID NO: 43586 - protein, 15 aa, Homo Sapiens
REVLPLATFVRRLGP

SEQ ID NO: 43587 - protein, 15 aa, Homo Sapiens
EVLPLATFVRRLGPQ

SEQ ID NO: 43588 - protein, 15 aa, Homo Sapiens
VLPLATFVRRLGPQG

SEQ ID NO: 43589 - protein, 15 aa, Homo Sapiens
LPLATFVRRLGPQGW

SEQ ID NO: 43590 - protein, 15 aa, Homo Sapiens
PLATFVRRLGPQGWR

SEQ ID NO: 43591 - protein, 15 aa, Homo Sapiens
LATFVRRLGPQGWRL

SEQ ID NO: 43592 - protein, 15 aa, Homo Sapiens
ATFVRRLGPQGWRLV

SEQ ID NO: 43593 - protein, 15 aa, Homo Sapiens
TFVRRLGPQGWRLVQ

SEQ ID NO: 43594 - protein, 15 aa, Homo Sapiens
FVRRLGPQGWRLVQR

SEQ ID NO: 43595 - protein, 15 aa, Homo Sapiens
VRRLGPQGWRLVQRG

SEQ ID NO: 43596 - protein, 15 aa, Homo Sapiens
RRLGPQGWRLVQRGD

SEQ ID NO: 43597 - protein, 15 aa, Homo Sapiens
RLGPQGWRLVQRGDP

SEQ ID NO: 43598 - protein, 15 aa, Homo Sapiens
LGPQGWRLVQRGDPA

SEQ ID NO: 43599 - protein, 15 aa, Homo Sapiens
GPQGWRLVQRGDPAA

SEQ ID NO: 43600 - protein, 15 aa, Homo Sapiens
PQGWRLVQRGDPAAF

SEQ ID NO: 43601 - protein, 15 aa, Homo Sapiens
QGWRLVQRGDPAAFR

SEQ ID NO: 43602 - protein, 15 aa, Homo Sapiens
GWRLVQRGDPAAFRA

SEQ ID NO: 43603 - protein, 15 aa, Homo Sapiens
WRLVQRGDPAAFRAL

SEQ ID NO: 43604 - protein, 15 aa, Homo Sapiens
RLVQRGDPAAFRALV

SEQ ID NO: 43605 - protein, 15 aa, Homo Sapiens
LVQRGDPAAFRALVA

SEQ ID NO: 43606 - protein, 15 aa, Homo Sapiens
VQRGDPAAFRALVAQ

SEQ ID NO: 43607 - protein, 15 aa, Homo Sapiens
QRGDPAAFRALVAQC

SEQ ID NO: 43608 - protein, 15 aa, Homo Sapiens
RGDPAAFRALVAQCL

SEQ ID NO: 43609 - protein, 15 aa, Homo Sapiens
GDPAAFRALVAQCLV

SEQ ID NO: 43610 - protein, 15 aa, Homo Sapiens
DPAAFRALVAQCLVC

SEQ ID NO: 43611 - protein, 15 aa, Homo Sapiens
PAAFRALVAQCLVCV

SEQ ID NO: 43612 - protein, 15 aa, Homo Sapiens
AAFRALVAQCLVCVP

SEQ ID NO: 43613 - protein, 15 aa, Homo Sapiens
AFRALVAQCLVCVPW

SEQ ID NO: 43614 - protein, 15 aa, Homo Sapiens
FRALVAQCLVCVPWD

SEQ ID NO: 43615 - protein, 15 aa, Homo Sapiens
RALVAQCLVCVPWDA

SEQ ID NO: 43616 - protein, 15 aa, Homo Sapiens
ALVAQCLVCVPWDAR

SEQ ID NO: 43617 - protein, 15 aa, Homo Sapiens
LVAQCLVCVPWDARP

SEQ ID NO: 43618 - protein, 15 aa, Homo Sapiens
VAQCLVCVPWDARPP

SEQ ID NO: 43619 - protein, 15 aa, Homo Sapiens
AQCLVCVPWDARPPP

SEQ ID NO: 43620 - protein, 15 aa, Homo Sapiens
QCLVCVPWDARPPPA

SEQ ID NO: 43621 - protein, 15 aa, Homo Sapiens
CLVCVPWDARPPPAA

SEQ ID NO: 43622 - protein, 15 aa, Homo Sapiens
LVCVPWDARPPPAAP

SEQ ID NO: 43623 - protein, 15 aa, Homo Sapiens
VCVPWDARPPPAAPS

SEQ ID NO: 43624 - protein, 15 aa, Homo Sapiens
CVPWDARPPPAAPSF

SEQ ID NO: 43625 - protein, 15 aa, Homo Sapiens
VPWDARPPPAAPSFR

SEQ ID NO: 43626 - protein, 15 aa, Homo Sapiens
PWDARPPPAAPSFRQ

SEQ ID NO: 43627 - protein, 15 aa, Homo Sapiens
WDARPPPAAPSFRQV

SEQ ID NO: 43628 - protein, 15 aa, Homo Sapiens
DARPPPAAPSFRQVS

SEQ ID NO: 43629 - protein, 15 aa, Homo Sapiens
ARPPPAAPSFRQVSC

SEQ ID NO: 43630 - protein, 15 aa, Homo Sapiens
RPPPAAPSFRQVSCL

SEQ ID NO: 43631 - protein, 15 aa, Homo Sapiens
PPPAAPSFRQVSCLK

SEQ ID NO: 43632 - protein, 15 aa, Homo Sapiens
PPAAPSFRQVSCLKE

SEQ ID NO: 43633 - protein, 15 aa, Homo Sapiens
PAAPSFRQVSCLKEL

SEQ ID NO: 43634 - protein, 15 aa, Homo Sapiens
AAPSFRQVSCLKELV

SEQ ID NO: 43635 - protein, 15 aa, Homo Sapiens
APSFRQVSCLKELVA

SEQ ID NO: 43636 - protein, 15 aa, Homo Sapiens
PSFRQVSCLKELVAR

SEQ ID NO: 43637 - protein, 15 aa, Homo Sapiens
SFRQVSCLKELVARV

SEQ ID NO: 43638 - protein, 15 aa, Homo Sapiens
FRQVSCLKELVARVL

SEQ ID NO: 43639 - protein, 15 aa, Homo Sapiens
RQVSCLKELVARVLQ

SEQ ID NO: 43640 - protein, 15 aa, Homo Sapiens
QVSCLKELVARVLQR

SEQ ID NO: 43641 - protein, 15 aa, Homo Sapiens
VSCLKELVARVLQRL

SEQ ID NO: 43642 - protein, 15 aa, Homo Sapiens
SCLKELVARVLQRLC

SEQ ID NO: 43643 - protein, 15 aa, Homo Sapiens
CLKELVARVLQRLCE

SEQ ID NO: 43644 - protein, 15 aa, Homo Sapiens
LKELVARVLQRLCER

SEQ ID NO: 43645 - protein, 15 aa, Homo Sapiens
KELVARVLQRLCERG

SEQ ID NO: 43646 - protein, 15 aa, Homo Sapiens
ELVARVLQRLCERGA

SEQ ID NO: 43647 - protein, 15 aa, Homo Sapiens
LVARVLQRLCERGAK

SEQ ID NO: 43648 - protein, 15 aa, Homo Sapiens
VARVLQRLCERGAKN

SEQ ID NO: 43649 - protein, 15 aa, Homo Sapiens
ARVLQRLCERGAKNV

SEQ ID NO: 43650 - protein, 15 aa, Homo Sapiens
RVLQRLCERGAKNVL

SEQ ID NO: 43651 - protein, 15 aa, Homo Sapiens
VLQRLCERGAKNVLA

SEQ ID NO: 43652 - protein, 15 aa, Homo Sapiens
LQRLCERGAKNVLAF

SEQ ID NO: 43653 - protein, 15 aa, Homo Sapiens
QRLCERGAKNVLAFG

SEQ ID NO: 43654 - protein, 15 aa, Homo Sapiens
RLCERGAKNVLAFGF

SEQ ID NO: 43655 - protein, 15 aa, Homo Sapiens
LCERGAKNVLAFGFA

SEQ ID NO: 43656 - protein, 15 aa, Homo Sapiens
CERGAKNVLAFGFAL

SEQ ID NO: 43657 - protein, 15 aa, Homo Sapiens
ERGAKNVLAFGFALL

SEQ ID NO: 43658 - protein, 15 aa, Homo Sapiens
RGAKNVLAFGFALLD

SEQ ID NO: 43659 - protein, 15 aa, Homo Sapiens
GAKNVLAFGFALLDG

SEQ ID NO: 43660 - protein, 15 aa, Homo Sapiens
AKNVLAFGFALLDGA

SEQ ID NO: 43661 - protein, 15 aa, Homo Sapiens
KNVLAFGFALLDGAR

SEQ ID NO: 43662 - protein, 15 aa, Homo Sapiens
NVLAFGFALLDGARG

SEQ ID NO: 43663 - protein, 15 aa, Homo Sapiens
VLAFGFALLDGARGG

SEQ ID NO: 43664 - protein, 15 aa, Homo Sapiens
LAFGFALLDGARGGP

SEQ ID NO: 43665 - protein, 15 aa, Homo Sapiens
AFGFALLDGARGGPP

SEQ ID NO: 43666 - protein, 15 aa, Homo Sapiens
FGFALLDGARGGPPE

SEQ ID NO: 43667 - protein, 15 aa, Homo Sapiens
GFALLDGARGGPPEA

SEQ ID NO: 43668 - protein, 15 aa, Homo Sapiens
FALLDGARGGPPEAF

SEQ ID NO: 43669 - protein, 15 aa, Homo Sapiens
ALLDGARGGPPEAFT

SEQ ID NO: 43670 - protein, 15 aa, Homo Sapiens
LLDGARGGPPEAFTT

SEQ ID NO: 43671 - protein, 15 aa, Homo Sapiens
LDGARGGPPEAFTTS

SEQ ID NO: 43672 - protein, 15 aa, Homo Sapiens
DGARGGPPEAFTTSV

SEQ ID NO: 43673 - protein, 15 aa, Homo Sapiens
GARGGPPEAFTTSVR

SEQ ID NO: 43674 - protein, 15 aa, Homo Sapiens
ARGGPPEAFTTSVRS

SEQ ID NO: 43675 - protein, 15 aa, Homo Sapiens
RGGPPEAFTTSVRSY

SEQ ID NO: 43676 - protein, 15 aa, Homo Sapiens
GGPPEAFTTSVRSYL

SEQ ID NO: 43677 - protein, 15 aa, Homo Sapiens
GPPEAFTTSVRSYLP

SEQ ID NO: 43678 - protein, 15 aa, Homo Sapiens
PPEAFTTSVRSYLPN

SEQ ID NO: 43679 - protein, 15 aa, Homo Sapiens
PEAFTTSVRSYLPNT

SEQ ID NO: 43680 - protein, 15 aa, Homo Sapiens
EAFTTSVRSYLPNTV

SEQ ID NO: 43681 - protein, 15 aa, Homo Sapiens
AFTTSVRSYLPNTVT

SEQ ID NO: 43682 - protein, 15 aa, Homo Sapiens
FTTSVRSYLPNTVTD

SEQ ID NO: 43683 - protein, 15 aa, Homo Sapiens
TTSVRSYLPNTVTDA

SEQ ID NO: 43684 - protein, 15 aa, Homo Sapiens
TSVRSYLPNTVTDAL

SEQ ID NO: 43685 - protein, 15 aa, Homo Sapiens
SVRSYLPNTVTDALR

SEQ ID NO: 43686 - protein, 15 aa, Homo Sapiens
VRSYLPNTVTDALRG

SEQ ID NO: 43687 - protein, 15 aa, Homo Sapiens
RSYLPNTVTDALRGS

SEQ ID NO: 43688 - protein, 15 aa, Homo Sapiens
SYLPNTVTDALRGSG

SEQ ID NO: 43689 - protein, 15 aa, Homo Sapiens
YLPNTVTDALRGSGA

SEQ ID NO: 43690 - protein, 15 aa, Homo Sapiens
LPNTVTDALRGSGAW

SEQ ID NO: 43691 - protein, 15 aa, Homo Sapiens
PNTVTDALRGSGAWG

SEQ ID NO: 43692 - protein, 15 aa, Homo Sapiens
NTVTDALRGSGAWGL

SEQ ID NO: 43693 - protein, 15 aa, Homo Sapiens
TVTDALRGSGAWGLL

SEQ ID NO: 43694 - protein, 15 aa, Homo Sapiens
VTDALRGSGAWGLLL

SEQ ID NO: 43695 - protein, 15 aa, Homo Sapiens
TDALRGSGAWGLLLR

SEQ ID NO: 43696 - protein, 15 aa, Homo Sapiens
DALRGSGAWGLLLRR

SEQ ID NO: 43697 - protein, 15 aa, Homo Sapiens
ALRGSGAWGLLLRRV

SEQ ID NO: 43698 - protein, 15 aa, Homo Sapiens
LRGSGAWGLLLRRVG

SEQ ID NO: 43699 - protein, 15 aa, Homo Sapiens
RGSGAWGLLLRRVGD

SEQ ID NO: 43700 - protein, 15 aa, Homo Sapiens
GSGAWGLLLRRVGDD

SEQ ID NO: 43701 - protein, 15 aa, Homo Sapiens
SGAWGLLLRRVGDDV

SEQ ID NO: 43702 - protein, 15 aa, Homo Sapiens
GAWGLLLRRVGDDVL

SEQ ID NO: 43703 - protein, 15 aa, Homo Sapiens
AWGLLLRRVGDDVLV

SEQ ID NO: 43704 - protein, 15 aa, Homo Sapiens
WGLLLRRVGDDVLVH

SEQ ID NO: 43705 - protein, 15 aa, Homo Sapiens
GLLLRRVGDDVLVHL

SEQ ID NO: 43706 - protein, 15 aa, Homo Sapiens
LLLRRVGDDVLVHLL

SEQ ID NO: 43707 - protein, 15 aa, Homo Sapiens
LLRRVGDDVLVHLLA

SEQ ID NO: 43708 - protein, 15 aa, Homo Sapiens
LRRVGDDVLVHLLAR

SEQ ID NO: 43709 - protein, 15 aa, Homo Sapiens
RRVGDDVLVHLLARC

SEQ ID NO: 43710 - protein, 15 aa, Homo Sapiens
RVGDDVLVHLLARCA

SEQ ID NO: 43711 - protein, 15 aa, Homo Sapiens
VGDDVLVHLLARCAL

SEQ ID NO: 43712 - protein, 15 aa, Homo Sapiens
GDDVLVHLLARCALF

SEQ ID NO: 43713 - protein, 15 aa, Homo Sapiens
DDVLVHLLARCALFV

SEQ ID NO: 43714 - protein, 15 aa, Homo Sapiens
DVLVHLLARCALFVL

SEQ ID NO: 43715 - protein, 15 aa, Homo Sapiens
VLVHLLARCALFVLV

SEQ ID NO: 43716 - protein, 15 aa, Homo Sapiens
LVHLLARCALFVLVA

SEQ ID NO: 43717 - protein, 15 aa, Homo Sapiens
VHLLARCALFVLVAP

SEQ ID NO: 43718 - protein, 15 aa, Homo Sapiens
HLLARCALFVLVAPS

SEQ ID NO: 43719 - protein, 15 aa, Homo Sapiens
LLARCALFVLVAPSC

SEQ ID NO: 43720 - protein, 15 aa, Homo Sapiens
LARCALFVLVAPSCA

SEQ ID NO: 43721 - protein, 15 aa, Homo Sapiens
ARCALFVLVAPSCAY

SEQ ID NO: 43722 - protein, 15 aa, Homo Sapiens
RCALFVLVAPSCAYQ

SEQ ID NO: 43723 - protein, 15 aa, Homo Sapiens
CALFVLVAPSCAYQV

SEQ ID NO: 43724 - protein, 15 aa, Homo Sapiens
ALFVLVAPSCAYQVC

SEQ ID NO: 43725 - protein, 15 aa, Homo Sapiens
LFVLVAPSCAYQVCG

SEQ ID NO: 43726 - protein, 15 aa, Homo Sapiens
FVLVAPSCAYQVCGP

SEQ ID NO: 43727 - protein, 15 aa, Homo Sapiens
VLVAPSCAYQVCGPP

SEQ ID NO: 43728 - protein, 15 aa, Homo Sapiens
LVAPSCAYQVCGPPL

SEQ ID NO: 43729 - protein, 15 aa, Homo Sapiens
VAPSCAYQVCGPPLY

SEQ ID NO: 43730 - protein, 15 aa, Homo Sapiens
APSCAYQVCGPPLYQ

SEQ ID NO: 43731 - protein, 15 aa, Homo Sapiens
PSCAYQVCGPPLYQL

SEQ ID NO: 43732 - protein, 15 aa, Homo Sapiens
SCAYQVCGPPLYQLG

SEQ ID NO: 43733 - protein, 15 aa, Homo Sapiens
CAYQVCGPPLYQLGA

SEQ ID NO: 43734 - protein, 15 aa, Homo Sapiens
AYQVCGPPLYQLGAA

SEQ ID NO: 43735 - protein, 15 aa, Homo Sapiens
YQVCGPPLYQLGAAT

SEQ ID NO: 43736 - protein, 15 aa, Homo Sapiens
QVCGPPLYQLGAATQ

SEQ ID NO: 43737 - protein, 15 aa, Homo Sapiens
VCGPPLYQLGAATQA

SEQ ID NO: 43738 - protein, 15 aa, Homo Sapiens
CGPPLYQLGAATQAR

SEQ ID NO: 43739 - protein, 15 aa, Homo Sapiens
GPPLYQLGAATQARP

SEQ ID NO: 43740 - protein, 15 aa, Homo Sapiens
PPLYQLGAATQARPP

SEQ ID NO: 43741 - protein, 15 aa, Homo Sapiens
PLYQLGAATQARPPP

SEQ ID NO: 43742 - protein, 15 aa, Homo Sapiens
LYQLGAATQARPPPH

SEQ ID NO: 43743 - protein, 15 aa, Homo Sapiens
YQLGAATQARPPPHA

SEQ ID NO: 43744 - protein, 15 aa, Homo Sapiens
QLGAATQARPPPHAS

SEQ ID NO: 43745 - protein, 15 aa, Homo Sapiens
LGAATQARPPPHASG

SEQ ID NO: 43746 - protein, 15 aa, Homo Sapiens
GAATQARPPPHASGP

SEQ ID NO: 43747 - protein, 15 aa, Homo Sapiens
AATQARPPPHASGPR

SEQ ID NO: 43748 - protein, 15 aa, Homo Sapiens
ATQARPPPHASGPRR

SEQ ID NO: 43749 - protein, 15 aa, Homo Sapiens
TQARPPPHASGPRRR

SEQ ID NO: 43750 - protein, 15 aa, Homo Sapiens
QARPPPHASGPRRRL

SEQ ID NO: 43751 - protein, 15 aa, Homo Sapiens
ARPPPHASGPRRRLG

SEQ ID NO: 43752 - protein, 15 aa, Homo Sapiens
RPPPHASGPRRRLGC

SEQ ID NO: 43753 - protein, 15 aa, Homo Sapiens
PPPHASGPRRRLGCE

SEQ ID NO: 43754 - protein, 15 aa, Homo Sapiens
PPHASGPRRRLGCER

SEQ ID NO: 43755 - protein, 15 aa, Homo Sapiens
PHASGPRRRLGCERA

SEQ ID NO: 43756 - protein, 15 aa, Homo Sapiens
HASGPRRRLGCERAW

SEQ ID NO: 43757 - protein, 15 aa, Homo Sapiens
ASGPRRRLGCERAWN

SEQ ID NO: 43758 - protein, 15 aa, Homo Sapiens
SGPRRRLGCERAWNH

SEQ ID NO: 43759 - protein, 15 aa, Homo Sapiens
GPRRRLGCERAWNHS

SEQ ID NO: 43760 - protein, 15 aa, Homo Sapiens
PRRRLGCERAWNHSV

SEQ ID NO: 43761 - protein, 15 aa, Homo Sapiens
RRRLGCERAWNHSVR

SEQ ID NO: 43762 - protein, 15 aa, Homo Sapiens
RRLGCERAWNHSVRE

SEQ ID NO: 43763 - protein, 15 aa, Homo Sapiens
RLGCERAWNHSVREA

SEQ ID NO: 43764 - protein, 15 aa, Homo Sapiens
LGCERAWNHSVREAG

SEQ ID NO: 43765 - protein, 15 aa, Homo Sapiens
GCERAWNHSVREAGV

SEQ ID NO: 43766 - protein, 15 aa, Homo Sapiens
CERAWNHSVREAGVP

SEQ ID NO: 43767 - protein, 15 aa, Homo Sapiens
ERAWNHSVREAGVPL

SEQ ID NO: 43768 - protein, 15 aa, Homo Sapiens
RAWNHSVREAGVPLG

SEQ ID NO: 43769 - protein, 15 aa, Homo Sapiens
AWNHSVREAGVPLGL

SEQ ID NO: 43770 - protein, 15 aa, Homo Sapiens
WNHSVREAGVPLGLP

SEQ ID NO: 43771 - protein, 15 aa, Homo Sapiens
NHSVREAGVPLGLPA

SEQ ID NO: 43772 - protein, 15 aa, Homo Sapiens
HSVREAGVPLGLPAP

SEQ ID NO: 43773 - protein, 15 aa, Homo Sapiens
SVREAGVPLGLPAPG

SEQ ID NO: 43774 - protein, 15 aa, Homo Sapiens
VREAGVPLGLPAPGA

SEQ ID NO: 43775 - protein, 15 aa, Homo Sapiens
REAGVPLGLPAPGAR

SEQ ID NO: 43776 - protein, 15 aa, Homo Sapiens
EAGVPLGLPAPGARR

SEQ ID NO: 43777 - protein, 15 aa, Homo Sapiens
AGVPLGLPAPGARRR

SEQ ID NO: 43778 - protein, 15 aa, Homo Sapiens
GVPLGLPAPGARRRG

SEQ ID NO: 43779 - protein, 15 aa, Homo Sapiens
VPLGLPAPGARRRGG

SEQ ID NO: 43780 - protein, 15 aa, Homo Sapiens
PLGLPAPGARRRGGS

SEQ ID NO: 43781 - protein, 15 aa, Homo Sapiens
LGLPAPGARRRGGSA

SEQ ID NO: 43782 - protein, 15 aa, Homo Sapiens
GLPAPGARRRGGSAS

SEQ ID NO: 43783 - protein, 15 aa, Homo Sapiens
LPAPGARRRGGSASR

SEQ ID NO: 43784 - protein, 15 aa, Homo Sapiens
PAPGARRRGGSASRS

SEQ ID NO: 43785 - protein, 15 aa, Homo Sapiens
APGARRRGGSASRSL

SEQ ID NO: 43786 - protein, 15 aa, Homo Sapiens
PGARRRGGSASRSLP

SEQ ID NO: 43787 - protein, 15 aa, Homo Sapiens
GARRRGGSASRSLPL

SEQ ID NO: 43788 - protein, 15 aa, Homo Sapiens
ARRRGGSASRSLPLP

SEQ ID NO: 43789 - protein, 15 aa, Homo Sapiens
RRRGGSASRSLPLPK

SEQ ID NO: 43790 - protein, 15 aa, Homo Sapiens
RRGGSASRSLPLPKR

SEQ ID NO: 43791 - protein, 15 aa, Homo Sapiens
RGGSASRSLPLPKRP

SEQ ID NO: 43792 - protein, 15 aa, Homo Sapiens
GGSASRSLPLPKRPR

SEQ ID NO: 43793 - protein, 15 aa, Homo Sapiens
GSASRSLPLPKRPRR

SEQ ID NO: 43794 - protein, 15 aa, Homo Sapiens
SASRSLPLPKRPRRG

SEQ ID NO: 43795 - protein, 15 aa, Homo Sapiens
ASRSLPLPKRPRRGA

SEQ ID NO: 43796 - protein, 15 aa, Homo Sapiens
SRSLPLPKRPRRGAA

SEQ ID NO: 43797 - protein, 15 aa, Homo Sapiens
RSLPLPKRPRRGAAP

SEQ ID NO: 43798 - protein, 15 aa, Homo Sapiens
SLPLPKRPRRGAAPE

SEQ ID NO: 43799 - protein, 15 aa, Homo Sapiens
LPLPKRPRRGAAPEP

SEQ ID NO: 43800 - protein, 15 aa, Homo Sapiens
PLPKRPRRGAAPEPE

SEQ ID NO: 43801 - protein, 15 aa, Homo Sapiens
LPKRPRRGAAPEPER

SEQ ID NO: 43802 - protein, 15 aa, Homo Sapiens
PKRPRRGAAPEPERT

SEQ ID NO: 43803 - protein, 15 aa, Homo Sapiens
KRPRRGAAPEPERTP

SEQ ID NO: 43804 - protein, 15 aa, Homo Sapiens
RPRRGAAPEPERTPV

SEQ ID NO: 43805 - protein, 15 aa, Homo Sapiens
PRRGAAPEPERTPVG

SEQ ID NO: 43806 - protein, 15 aa, Homo Sapiens
RRGAAPEPERTPVGQ

SEQ ID NO: 43807 - protein, 15 aa, Homo Sapiens
RGAAPEPERTPVGQG

SEQ ID NO: 43808 - protein, 15 aa, Homo Sapiens
GAAPEPERTPVGQGS

SEQ ID NO: 43809 - protein, 15 aa, Homo Sapiens
AAPEPERTPVGQGSW

SEQ ID NO: 43810 - protein, 15 aa, Homo Sapiens
APEPERTPVGQGSWA

SEQ ID NO: 43811 - protein, 15 aa, Homo Sapiens
PEPERTPVGQGSWAH

SEQ ID NO: 43812 - protein, 15 aa, Homo Sapiens
EPERTPVGQGSWAHP

SEQ ID NO: 43813 - protein, 15 aa, Homo Sapiens
PERTPVGQGSWAHPG

SEQ ID NO: 43814 - protein, 15 aa, Homo Sapiens
ERTPVGQGSWAHPGR

SEQ ID NO: 43815 - protein, 15 aa, Homo Sapiens
RTPVGQGSWAHPGRT

SEQ ID NO: 43816 - protein, 15 aa, Homo Sapiens
TPVGQGSWAHPGRTR

SEQ ID NO: 43817 - protein, 15 aa, Homo Sapiens
PVGQGSWAHPGRTRG

SEQ ID NO: 43818 - protein, 15 aa, Homo Sapiens
VGQGSWAHPGRTRGP

SEQ ID NO: 43819 - protein, 15 aa, Homo Sapiens
GQGSWAHPGRTRGPS

SEQ ID NO: 43820 - protein, 15 aa, Homo Sapiens
QGSWAHPGRTRGPSD

SEQ ID NO: 43821 - protein, 15 aa, Homo Sapiens
GSWAHPGRTRGPSDR

SEQ ID NO: 43822 - protein, 15 aa, Homo Sapiens
SWAHPGRTRGPSDRG

SEQ ID NO: 43823 - protein, 15 aa, Homo Sapiens
WAHPGRTRGPSDRGF

SEQ ID NO: 43824 - protein, 15 aa, Homo Sapiens
AHPGRTRGPSDRGFC

SEQ ID NO: 43825 - protein, 15 aa, Homo Sapiens
HPGRTRGPSDRGFCV

SEQ ID NO: 43826 - protein, 15 aa, Homo Sapiens
PGRTRGPSDRGFCVV

SEQ ID NO: 43827 - protein, 15 aa, Homo Sapiens
GRTRGPSDRGFCVVS

SEQ ID NO: 43828 - protein, 15 aa, Homo Sapiens
RTRGPSDRGFCVVSP

SEQ ID NO: 43829 - protein, 15 aa, Homo Sapiens
TRGPSDRGFCVVSPA

SEQ ID NO: 43830 - protein, 15 aa, Homo Sapiens
RGPSDRGFCVVSPAR

SEQ ID NO: 43831 - protein, 15 aa, Homo Sapiens
GPSDRGFCVVSPARP

SEQ ID NO: 43832 - protein, 15 aa, Homo Sapiens
PSDRGFCVVSPARPA

SEQ ID NO: 43833 - protein, 15 aa, Homo Sapiens
SDRGFCVVSPARPAE

SEQ ID NO: 43834 - protein, 15 aa, Homo Sapiens
DRGFCVVSPARPAEE

SEQ ID NO: 43835 - protein, 15 aa, Homo Sapiens
RGFCVVSPARPAEEA

SEQ ID NO: 43836 - protein, 15 aa, Homo Sapiens
GFCVVSPARPAEEAT

SEQ ID NO: 43837 - protein, 15 aa, Homo Sapiens
FCVVSPARPAEEATS

SEQ ID NO: 43838 - protein, 15 aa, Homo Sapiens
CVVSPARPAEEATSL

SEQ ID NO: 43839 - protein, 15 aa, Homo Sapiens
VVSPARPAEEATSLE

SEQ ID NO: 43840 - protein, 15 aa, Homo Sapiens
VSPARPAEEATSLEG

SEQ ID NO: 43841 - protein, 15 aa, Homo Sapiens
SPARPAEEATSLEGA

SEQ ID NO: 43842 - protein, 15 aa, Homo Sapiens
PARPAEEATSLEGAL

SEQ ID NO: 43843 - protein, 15 aa, Homo Sapiens
ARPAEEATSLEGALS

SEQ ID NO: 43844 - protein, 15 aa, Homo Sapiens
RPAEEATSLEGALSG

SEQ ID NO: 43845 - protein, 15 aa, Homo Sapiens
PAEEATSLEGALSGT

SEQ ID NO: 43846 - protein, 15 aa, Homo Sapiens
AEEATSLEGALSGTR

SEQ ID NO: 43847 - protein, 15 aa, Homo Sapiens
EEATSLEGALSGTRH

SEQ ID NO: 43848 - protein, 15 aa, Homo Sapiens
EATSLEGALSGTRHS

SEQ ID NO: 43849 - protein, 15 aa, Homo Sapiens
ATSLEGALSGTRHSH

SEQ ID NO: 43850 - protein, 15 aa, Homo Sapiens
TSLEGALSGTRHSHP

SEQ ID NO: 43851 - protein, 15 aa, Homo Sapiens
SLEGALSGTRHSHPS

SEQ ID NO: 43852 - protein, 15 aa, Homo Sapiens
LEGALSGTRHSHPSV

SEQ ID NO: 43853 - protein, 15 aa, Homo Sapiens
EGALSGTRHSHPSVG

SEQ ID NO: 43854 - protein, 15 aa, Homo Sapiens
GALSGTRHSHPSVGR

SEQ ID NO: 43855 - protein, 15 aa, Homo Sapiens
ALSGTRHSHPSVGRQ

SEQ ID NO: 43856 - protein, 15 aa, Homo Sapiens
LSGTRHSHPSVGRQH

SEQ ID NO: 43857 - protein, 15 aa, Homo Sapiens
SGTRHSHPSVGRQHH

SEQ ID NO: 43858 - protein, 15 aa, Homo Sapiens
GTRHSHPSVGRQHHA

SEQ ID NO: 43859 - protein, 15 aa, Homo Sapiens
TRHSHPSVGRQHHAG

SEQ ID NO: 43860 - protein, 15 aa, Homo Sapiens
RHSHPSVGRQHHAGP

SEQ ID NO: 43861 - protein, 15 aa, Homo Sapiens
HSHPSVGRQHHAGPP

SEQ ID NO: 43862 - protein, 15 aa, Homo Sapiens
SHPSVGRQHHAGPPS

SEQ ID NO: 43863 - protein, 15 aa, Homo Sapiens
HPSVGRQHHAGPPST

SEQ ID NO: 43864 - protein, 15 aa, Homo Sapiens
PSVGRQHHAGPPSTS

SEQ ID NO: 43865 - protein, 15 aa, Homo Sapiens
SVGRQHHAGPPSTSR

SEQ ID NO: 43866 - protein, 15 aa, Homo Sapiens
VGRQHHAGPPSTSRP

SEQ ID NO: 43867 - protein, 15 aa, Homo Sapiens
GRQHHAGPPSTSRPP

SEQ ID NO: 43868 - protein, 15 aa, Homo Sapiens
RQHHAGPPSTSRPPR

SEQ ID NO: 43869 - protein, 15 aa, Homo Sapiens
QHHAGPPSTSRPPRP

SEQ ID NO: 43870 - protein, 15 aa, Homo Sapiens
HHAGPPSTSRPPRPW

SEQ ID NO: 43871 - protein, 15 aa, Homo Sapiens
HAGPPSTSRPPRPWD

SEQ ID NO: 43872 - protein, 15 aa, Homo Sapiens
AGPPSTSRPPRPWDT

SEQ ID NO: 43873 - protein, 15 aa, Homo Sapiens
GPPSTSRPPRPWDTP

SEQ ID NO: 43874 - protein, 15 aa, Homo Sapiens
PPSTSRPPRPWDTPC

SEQ ID NO: 43875 - protein, 15 aa, Homo Sapiens
PSTSRPPRPWDTPCP

SEQ ID NO: 43876 - protein, 15 aa, Homo Sapiens
STSRPPRPWDTPCPP

SEQ ID NO: 43877 - protein, 15 aa, Homo Sapiens
TSRPPRPWDTPCPPV

SEQ ID NO: 43878 - protein, 15 aa, Homo Sapiens
SRPPRPWDTPCPPVY

SEQ ID NO: 43879 - protein, 15 aa, Homo Sapiens
RPPRPWDTPCPPVYA

SEQ ID NO: 43880 - protein, 15 aa, Homo Sapiens
PPRPWDTPCPPVYAE

SEQ ID NO: 43881 - protein, 15 aa, Homo Sapiens
PRPWDTPCPPVYAET

SEQ ID NO: 43882 - protein, 15 aa, Homo Sapiens
RPWDTPCPPVYAETK

SEQ ID NO: 43883 - protein, 15 aa, Homo Sapiens
PWDTPCPPVYAETKH

SEQ ID NO: 43884 - protein, 15 aa, Homo Sapiens
WDTPCPPVYAETKHF

SEQ ID NO: 43885 - protein, 15 aa, Homo Sapiens
DTPCPPVYAETKHFL

SEQ ID NO: 43886 - protein, 15 aa, Homo Sapiens
TPCPPVYAETKHFLY

SEQ ID NO: 43887 - protein, 15 aa, Homo Sapiens
PCPPVYAETKHFLYS

SEQ ID NO: 43888 - protein, 15 aa, Homo Sapiens
CPPVYAETKHFLYSS

SEQ ID NO: 43889 - protein, 15 aa, Homo Sapiens
PPVYAETKHFLYSSG

SEQ ID NO: 43890 - protein, 15 aa, Homo Sapiens
PVYAETKHFLYSSGD

SEQ ID NO: 43891 - protein, 15 aa, Homo Sapiens
VYAETKHFLYSSGDK

SEQ ID NO: 43892 - protein, 15 aa, Homo Sapiens
YAETKHFLYSSGDKE

SEQ ID NO: 43893 - protein, 15 aa, Homo Sapiens
AETKHFLYSSGDKEQ

SEQ ID NO: 43894 - protein, 15 aa, Homo Sapiens
ETKHFLYSSGDKEQL

SEQ ID NO: 43895 - protein, 15 aa, Homo Sapiens
TKHFLYSSGDKEQLR

SEQ ID NO: 43896 - protein, 15 aa, Homo Sapiens
KHFLYSSGDKEQLRP

SEQ ID NO: 43897 - protein, 15 aa, Homo Sapiens
HFLYSSGDKEQLRPS

SEQ ID NO: 43898 - protein, 15 aa, Homo Sapiens
FLYSSGDKEQLRPSF

SEQ ID NO: 43899 - protein, 15 aa, Homo Sapiens
LYSSGDKEQLRPSFL

SEQ ID NO: 43900 - protein, 15 aa, Homo Sapiens
YSSGDKEQLRPSFLL

SEQ ID NO: 43901 - protein, 15 aa, Homo Sapiens
SSGDKEQLRPSFLLS

SEQ ID NO: 43902 - protein, 15 aa, Homo Sapiens
SGDKEQLRPSFLLSS

SEQ ID NO: 43903 - protein, 15 aa, Homo Sapiens
GDKEQLRPSFLLSSL

SEQ ID NO: 43904 - protein, 15 aa, Homo Sapiens
DKEQLRPSFLLSSLR

SEQ ID NO: 43905 - protein, 15 aa, Homo Sapiens
KEQLRPSFLLSSLRP

SEQ ID NO: 43906 - protein, 15 aa, Homo Sapiens
EQLRPSFLLSSLRPS

SEQ ID NO: 43907 - protein, 15 aa, Homo Sapiens
QLRPSFLLSSLRPSL

SEQ ID NO: 43908 - protein, 15 aa, Homo Sapiens
LRPSFLLSSLRPSLT

SEQ ID NO: 43909 - protein, 15 aa, Homo Sapiens
RPSFLLSSLRPSLTG

SEQ ID NO: 43910 - protein, 15 aa, Homo Sapiens
PSFLLSSLRPSLTGA

SEQ ID NO: 43911 - protein, 15 aa, Homo Sapiens
SFLLSSLRPSLTGAR

SEQ ID NO: 43912 - protein, 15 aa, Homo Sapiens
FLLSSLRPSLTGARR

SEQ ID NO: 43913 - protein, 15 aa, Homo Sapiens
LLSSLRPSLTGARRL

SEQ ID NO: 43914 - protein, 15 aa, Homo Sapiens
LSSLRPSLTGARRLV

SEQ ID NO: 43915 - protein, 15 aa, Homo Sapiens
SSLRPSLTGARRLVE

SEQ ID NO: 43916 - protein, 15 aa, Homo Sapiens
SLRPSLTGARRLVET

SEQ ID NO: 43917 - protein, 15 aa, Homo Sapiens
LRPSLTGARRLVETI

SEQ ID NO: 43918 - protein, 15 aa, Homo Sapiens
RPSLTGARRLVETIF

SEQ ID NO: 43919 - protein, 15 aa, Homo Sapiens
PSLTGARRLVETIFL

SEQ ID NO: 43920 - protein, 15 aa, Homo Sapiens
SLTGARRLVETIFLG

SEQ ID NO: 43921 - protein, 15 aa, Homo Sapiens
LTGARRLVETIFLGS

SEQ ID NO: 43922 - protein, 15 aa, Homo Sapiens
TGARRLVETIFLGSR

SEQ ID NO: 43923 - protein, 15 aa, Homo Sapiens
GARRLVETIFLGSRP

SEQ ID NO: 43924 - protein, 15 aa, Homo Sapiens
ARRLVETIFLGSRPW

SEQ ID NO: 43925 - protein, 15 aa, Homo Sapiens
RRLVETIFLGSRPWM

SEQ ID NO: 43926 - protein, 15 aa, Homo Sapiens
RLVETIFLGSRPWMP

SEQ ID NO: 43927 - protein, 15 aa, Homo Sapiens
LVETIFLGSRPWMPG

SEQ ID NO: 43928 - protein, 15 aa, Homo Sapiens
VETIFLGSRPWMPGT

SEQ ID NO: 43929 - protein, 15 aa, Homo Sapiens
ETIFLGSRPWMPGTP

SEQ ID NO: 43930 - protein, 15 aa, Homo Sapiens
TIFLGSRPWMPGTPR

SEQ ID NO: 43931 - protein, 15 aa, Homo Sapiens
IFLGSRPWMPGTPRR

SEQ ID NO: 43932 - protein, 15 aa, Homo Sapiens
FLGSRPWMPGTPRRL

SEQ ID NO: 43933 - protein, 15 aa, Homo Sapiens
LGSRPWMPGTPRRLP

SEQ ID NO: 43934 - protein, 15 aa, Homo Sapiens
GSRPWMPGTPRRLPR

SEQ ID NO: 43935 - protein, 15 aa, Homo Sapiens
SRPWMPGTPRRLPRL

SEQ ID NO: 43936 - protein, 15 aa, Homo Sapiens
RPWMPGTPRRLPRLP

SEQ ID NO: 43937 - protein, 15 aa, Homo Sapiens
PWMPGTPRRLPRLPQ

SEQ ID NO: 43938 - protein, 15 aa, Homo Sapiens
WMPGTPRRLPRLPQR

SEQ ID NO: 43939 - protein, 15 aa, Homo Sapiens
MPGTPRRLPRLPQRY

SEQ ID NO: 43940 - protein, 15 aa, Homo Sapiens
PGTPRRLPRLPQRYW

SEQ ID NO: 43941 - protein, 15 aa, Homo Sapiens
GTPRRLPRLPQRYWQ

SEQ ID NO: 43942 - protein, 15 aa, Homo Sapiens
TPRRLPRLPQRYWQM

SEQ ID NO: 43943 - protein, 15 aa, Homo Sapiens
PRRLPRLPQRYWQMR

SEQ ID NO: 43944 - protein, 15 aa, Homo Sapiens
RRLPRLPQRYWQMRP

SEQ ID NO: 43945 - protein, 15 aa, Homo Sapiens
RLPRLPQRYWQMRPL

SEQ ID NO: 43946 - protein, 15 aa, Homo Sapiens
LPRLPQRYWQMRPLF

SEQ ID NO: 43947 - protein, 15 aa, Homo Sapiens
PRLPQRYWQMRPLFL

SEQ ID NO: 43948 - protein, 15 aa, Homo Sapiens
RLPQRYWQMRPLFLE

SEQ ID NO: 43949 - protein, 15 aa, Homo Sapiens
LPQRYWQMRPLFLEL

SEQ ID NO: 43950 - protein, 15 aa, Homo Sapiens
PQRYWQMRPLFLELL

SEQ ID NO: 43951 - protein, 15 aa, Homo Sapiens
QRYWQMRPLFLELLG

SEQ ID NO: 43952 - protein, 15 aa, Homo Sapiens
RYWQMRPLFLELLGN

SEQ ID NO: 43953 - protein, 15 aa, Homo Sapiens
YWQMRPLFLELLGNH

SEQ ID NO: 43954 - protein, 15 aa, Homo Sapiens
WQMRPLFLELLGNHA

SEQ ID NO: 43955 - protein, 15 aa, Homo Sapiens
QMRPLFLELLGNHAQ

SEQ ID NO: 43956 - protein, 15 aa, Homo Sapiens
MRPLFLELLGNHAQC

SEQ ID NO: 43957 - protein, 15 aa, Homo Sapiens
RPLFLELLGNHAQCP

SEQ ID NO: 43958 - protein, 15 aa, Homo Sapiens
PLFLELLGNHAQCPY

SEQ ID NO: 43959 - protein, 15 aa, Homo Sapiens
LFLELLGNHAQCPYG

SEQ ID NO: 43960 - protein, 15 aa, Homo Sapiens
FLELLGNHAQCPYGV

SEQ ID NO: 43961 - protein, 15 aa, Homo Sapiens
LELLGNHAQCPYGVL

SEQ ID NO: 43962 - protein, 15 aa, Homo Sapiens
ELLGNHAQCPYGVLL

SEQ ID NO: 43963 - protein, 15 aa, Homo Sapiens
LLGNHAQCPYGVLLK

SEQ ID NO: 43964 - protein, 15 aa, Homo Sapiens
LGNHAQCPYGVLLKT

SEQ ID NO: 43965 - protein, 15 aa, Homo Sapiens
GNHAQCPYGVLLKTH

SEQ ID NO: 43966 - protein, 15 aa, Homo Sapiens
NHAQCPYGVLLKTHC

SEQ ID NO: 43967 - protein, 15 aa, Homo Sapiens
HAQCPYGVLLKTHCP

SEQ ID NO: 43968 - protein, 15 aa, Homo Sapiens
AQCPYGVLLKTHCPL

SEQ ID NO: 43969 - protein, 15 aa, Homo Sapiens
QCPYGVLLKTHCPLR

SEQ ID NO: 43970 - protein, 15 aa, Homo Sapiens
CPYGVLLKTHCPLRA

SEQ ID NO: 43971 - protein, 15 aa, Homo Sapiens
PYGVLLKTHCPLRAA

SEQ ID NO: 43972 - protein, 15 aa, Homo Sapiens
YGVLLKTHCPLRAAV

SEQ ID NO: 43973 - protein, 15 aa, Homo Sapiens
GVLLKTHCPLRAAVT

SEQ ID NO: 43974 - protein, 15 aa, Homo Sapiens
VLLKTHCPLRAAVTP

SEQ ID NO: 43975 - protein, 15 aa, Homo Sapiens
LLKTHCPLRAAVTPA

SEQ ID NO: 43976 - protein, 15 aa, Homo Sapiens
LKTHCPLRAAVTPAA

SEQ ID NO: 43977 - protein, 15 aa, Homo Sapiens
KTHCPLRAAVTPAAG

SEQ ID NO: 43978 - protein, 15 aa, Homo Sapiens
THCPLRAAVTPAAGV

SEQ ID NO: 43979 - protein, 15 aa, Homo Sapiens
HCPLRAAVTPAAGVC

SEQ ID NO: 43980 - protein, 15 aa, Homo Sapiens
CPLRAAVTPAAGVCA

SEQ ID NO: 43981 - protein, 15 aa, Homo Sapiens
PLRAAVTPAAGVCAR

SEQ ID NO: 43982 - protein, 15 aa, Homo Sapiens
LRAAVTPAAGVCARE

SEQ ID NO: 43983 - protein, 15 aa, Homo Sapiens
RAAVTPAAGVCAREK

SEQ ID NO: 43984 - protein, 15 aa, Homo Sapiens
AAVTPAAGVCAREKP

SEQ ID NO: 43985 - protein, 15 aa, Homo Sapiens
AVTPAAGVCAREKPQ

SEQ ID NO: 43986 - protein, 15 aa, Homo Sapiens
VTPAAGVCAREKPQG

SEQ ID NO: 43987 - protein, 15 aa, Homo Sapiens
TPAAGVCAREKPQGS

SEQ ID NO: 43988 - protein, 15 aa, Homo Sapiens
PAAGVCAREKPQGSV

SEQ ID NO: 43989 - protein, 15 aa, Homo Sapiens
AAGVCAREKPQGSVA

SEQ ID NO: 43990 - protein, 15 aa, Homo Sapiens
AGVCAREKPQGSVAA

SEQ ID NO: 43991 - protein, 15 aa, Homo Sapiens
GVCAREKPQGSVAAP

SEQ ID NO: 43992 - protein, 15 aa, Homo Sapiens
VCAREKPQGSVAAPE

SEQ ID NO: 43993 - protein, 15 aa, Homo Sapiens
CAREKPQGSVAAPEE

SEQ ID NO: 43994 - protein, 15 aa, Homo Sapiens
AREKPQGSVAAPEEE

SEQ ID NO: 43995 - protein, 15 aa, Homo Sapiens
REKPQGSVAAPEEED

SEQ ID NO: 43996 - protein, 15 aa, Homo Sapiens
EKPQGSVAAPEEEDT

SEQ ID NO: 43997 - protein, 15 aa, Homo Sapiens
KPQGSVAAPEEEDTD

SEQ ID NO: 43998 - protein, 15 aa, Homo Sapiens
PQGSVAAPEEEDTDP

SEQ ID NO: 43999 - protein, 15 aa, Homo Sapiens
QGSVAAPEEEDTDPR

SEQ ID NO: 44000 - protein, 15 aa, Homo Sapiens
GSVAAPEEEDTDPRR

SEQ ID NO: 44001 - protein, 15 aa, Homo Sapiens
SVAAPEEEDTDPRRL

SEQ ID NO: 44002 - protein, 15 aa, Homo Sapiens
VAAPEEEDTDPRRLV

SEQ ID NO: 44003 - protein, 15 aa, Homo Sapiens
AAPEEEDTDPRRLVQ

SEQ ID NO: 44004 - protein, 15 aa, Homo Sapiens
APEEEDTDPRRLVQL

SEQ ID NO: 44005 - protein, 15 aa, Homo Sapiens
PEEEDTDPRRLVQLL

SEQ ID NO: 44006 - protein, 15 aa, Homo Sapiens
EEEDTDPRRLVQLLR

SEQ ID NO: 44007 - protein, 15 aa, Homo Sapiens
EEDTDPRRLVQLLRQ

SEQ ID NO: 44008 - protein, 15 aa, Homo Sapiens
EDTDPRRLVQLLRQH

SEQ ID NO: 44009 - protein, 15 aa, Homo Sapiens
DTDPRRLVQLLRQHS

SEQ ID NO: 44010 - protein, 15 aa, Homo Sapiens
TDPRRLVQLLRQHSS

SEQ ID NO: 44011 - protein, 15 aa, Homo Sapiens
DPRRLVQLLRQHSSP

SEQ ID NO: 44012 - protein, 15 aa, Homo Sapiens
PRRLVQLLRQHSSPW

SEQ ID NO: 44013 - protein, 15 aa, Homo Sapiens
RRLVQLLRQHSSPWQ

SEQ ID NO: 44014 - protein, 15 aa, Homo Sapiens
RLVQLLRQHSSPWQV

SEQ ID NO: 44015 - protein, 15 aa, Homo Sapiens
LVQLLRQHSSPWQVY

SEQ ID NO: 44016 - protein, 15 aa, Homo Sapiens
VQLLRQHSSPWQVYG

SEQ ID NO: 44017 - protein, 15 aa, Homo Sapiens
QLLRQHSSPWQVYGF

SEQ ID NO: 44018 - protein, 15 aa, Homo Sapiens
LLRQHSSPWQVYGFV

SEQ ID NO: 44019 - protein, 15 aa, Homo Sapiens
LRQHSSPWQVYGFVR

SEQ ID NO: 44020 - protein, 15 aa, Homo Sapiens
RQHSSPWQVYGFVRA

SEQ ID NO: 44021 - protein, 15 aa, Homo Sapiens
QHSSPWQVYGFVRAC

SEQ ID NO: 44022 - protein, 15 aa, Homo Sapiens
HSSPWQVYGFVRACL

SEQ ID NO: 44023 - protein, 15 aa, Homo Sapiens
SSPWQVYGFVRACLR

SEQ ID NO: 44024 - protein, 15 aa, Homo Sapiens
SPWQVYGFVRACLRR

SEQ ID NO: 44025 - protein, 15 aa, Homo Sapiens
PWQVYGFVRACLRRL

SEQ ID NO: 44026 - protein, 15 aa, Homo Sapiens
WQVYGFVRACLRRLV

SEQ ID NO: 44027 - protein, 15 aa, Homo Sapiens
QVYGFVRACLRRLVP

SEQ ID NO: 44028 - protein, 15 aa, Homo Sapiens
VYGFVRACLRRLVPP

SEQ ID NO: 44029 - protein, 15 aa, Homo Sapiens
YGFVRACLRRLVPPG

SEQ ID NO: 44030 - protein, 15 aa, Homo Sapiens
GFVRACLRRLVPPGL

SEQ ID NO: 44031 - protein, 15 aa, Homo Sapiens
FVRACLRRLVPPGLW

SEQ ID NO: 44032 - protein, 15 aa, Homo Sapiens
VRACLRRLVPPGLWG

SEQ ID NO: 44033 - protein, 15 aa, Homo Sapiens
RACLRRLVPPGLWGS

SEQ ID NO: 44034 - protein, 15 aa, Homo Sapiens
ACLRRLVPPGLWGSR

SEQ ID NO: 44035 - protein, 15 aa, Homo Sapiens
CLRRLVPPGLWGSRH

SEQ ID NO: 44036 - protein, 15 aa, Homo Sapiens
LRRLVPPGLWGSRHN

SEQ ID NO: 44037 - protein, 15 aa, Homo Sapiens
RRLVPPGLWGSRHNE

SEQ ID NO: 44038 - protein, 15 aa, Homo Sapiens
RLVPPGLWGSRHNER

SEQ ID NO: 44039 - protein, 15 aa, Homo Sapiens
LVPPGLWGSRHNERR

SEQ ID NO: 44040 - protein, 15 aa, Homo Sapiens
VPPGLWGSRHNERRF

SEQ ID NO: 44041 - protein, 15 aa, Homo Sapiens
PPGLWGSRHNERRFL

SEQ ID NO: 44042 - protein, 15 aa, Homo Sapiens
PGLWGSRHNERRFLR

SEQ ID NO: 44043 - protein, 15 aa, Homo Sapiens
GLWGSRHNERRFLRN

SEQ ID NO: 44044 - protein, 15 aa, Homo Sapiens
LWGSRHNERRFLRNT

SEQ ID NO: 44045 - protein, 15 aa, Homo Sapiens
WGSRHNERRFLRNTK

SEQ ID NO: 44046 - protein, 15 aa, Homo Sapiens
GSRHNERRFLRNTKK

SEQ ID NO: 44047 - protein, 15 aa, Homo Sapiens
SRHNERRFLRNTKKF

SEQ ID NO: 44048 - protein, 15 aa, Homo Sapiens
RHNERRFLRNTKKFI

SEQ ID NO: 44049 - protein, 15 aa, Homo Sapiens
HNERRFLRNTKKFIS

SEQ ID NO: 44050 - protein, 15 aa, Homo Sapiens
NERRFLRNTKKFISL

SEQ ID NO: 44051 - protein, 15 aa, Homo Sapiens
ERRFLRNTKKFISLG

SEQ ID NO: 44052 - protein, 15 aa, Homo Sapiens
RRFLRNTKKFISLGK

SEQ ID NO: 44053 - protein, 15 aa, Homo Sapiens
RFLRNTKKFISLGKH

SEQ ID NO: 44054 - protein, 15 aa, Homo Sapiens
FLRNTKKFISLGKHA

SEQ ID NO: 44055 - protein, 15 aa, Homo Sapiens
LRNTKKFISLGKHAK

SEQ ID NO: 44056 - protein, 15 aa, Homo Sapiens
RNTKKFISLGKHAKL

SEQ ID NO: 44057 - protein, 15 aa, Homo Sapiens
NTKKFISLGKHAKLS

SEQ ID NO: 44058 - protein, 15 aa, Homo Sapiens
TKKFISLGKHAKLSL

SEQ ID NO: 44059 - protein, 15 aa, Homo Sapiens
KKFISLGKHAKLSLQ

SEQ ID NO: 44060 - protein, 15 aa, Homo Sapiens
KFISLGKHAKLSLQE

SEQ ID NO: 44061 - protein, 15 aa, Homo Sapiens
FISLGKHAKLSLQEL

SEQ ID NO: 44062 - protein, 15 aa, Homo Sapiens
ISLGKHAKLSLQELT

SEQ ID NO: 44063 - protein, 15 aa, Homo Sapiens
SLGKHAKLSLQELTW

SEQ ID NO: 44064 - protein, 15 aa, Homo Sapiens
LGKHAKLSLQELTWK

SEQ ID NO: 44065 - protein, 15 aa, Homo Sapiens
GKHAKLSLQELTWKM

SEQ ID NO: 44066 - protein, 15 aa, Homo Sapiens
KHAKLSLQELTWKMS

SEQ ID NO: 44067 - protein, 15 aa, Homo Sapiens
HAKLSLQELTWKMSV

SEQ ID NO: 44068 - protein, 15 aa, Homo Sapiens
AKLSLQELTWKMSVR

SEQ ID NO: 44069 - protein, 15 aa, Homo Sapiens
KLSLQELTWKMSVRD

SEQ ID NO: 44070 - protein, 15 aa, Homo Sapiens
LSLQELTWKMSVRDC

SEQ ID NO: 44071 - protein, 15 aa, Homo Sapiens
SLQELTWKMSVRDCA

SEQ ID NO: 44072 - protein, 15 aa, Homo Sapiens
LQELTWKMSVRDCAW

SEQ ID NO: 44073 - protein, 15 aa, Homo Sapiens
QELTWKMSVRDCAWL

SEQ ID NO: 44074 - protein, 15 aa, Homo Sapiens
ELTWKMSVRDCAWLR

SEQ ID NO: 44075 - protein, 15 aa, Homo Sapiens
LTWKMSVRDCAWLRR

SEQ ID NO: 44076 - protein, 15 aa, Homo Sapiens
TWKMSVRDCAWLRRS

SEQ ID NO: 44077 - protein, 15 aa, Homo Sapiens
WKMSVRDCAWLRRSP

SEQ ID NO: 44078 - protein, 15 aa, Homo Sapiens
KMSVRDCAWLRRSPG

SEQ ID NO: 44079 - protein, 15 aa, Homo Sapiens
MSVRDCAWLRRSPGV

SEQ ID NO: 44080 - protein, 15 aa, Homo Sapiens
SVRDCAWLRRSPGVG

SEQ ID NO: 44081 - protein, 15 aa, Homo Sapiens
VRDCAWLRRSPGVGC

SEQ ID NO: 44082 - protein, 15 aa, Homo Sapiens
RDCAWLRRSPGVGCV

SEQ ID NO: 44083 - protein, 15 aa, Homo Sapiens
DCAWLRRSPGVGCVP

SEQ ID NO: 44084 - protein, 15 aa, Homo Sapiens
CAWLRRSPGVGCVPA

SEQ ID NO: 44085 - protein, 15 aa, Homo Sapiens
AWLRRSPGVGCVPAA

SEQ ID NO: 44086 - protein, 15 aa, Homo Sapiens
WLRRSPGVGCVPAAE

SEQ ID NO: 44087 - protein, 15 aa, Homo Sapiens
LRRSPGVGCVPAAEH

SEQ ID NO: 44088 - protein, 15 aa, Homo Sapiens
RRSPGVGCVPAAEHR

SEQ ID NO: 44089 - protein, 15 aa, Homo Sapiens
RSPGVGCVPAAEHRL

SEQ ID NO: 44090 - protein, 15 aa, Homo Sapiens
SPGVGCVPAAEHRLR

SEQ ID NO: 44091 - protein, 15 aa, Homo Sapiens
PGVGCVPAAEHRLRE

SEQ ID NO: 44092 - protein, 15 aa, Homo Sapiens
GVGCVPAAEHRLREE

SEQ ID NO: 44093 - protein, 15 aa, Homo Sapiens
VGCVPAAEHRLREEI

SEQ ID NO: 44094 - protein, 15 aa, Homo Sapiens
GCVPAAEHRLREEIL

SEQ ID NO: 44095 - protein, 15 aa, Homo Sapiens
CVPAAEHRLREEILA

SEQ ID NO: 44096 - protein, 15 aa, Homo Sapiens
VPAAEHRLREEILAK

SEQ ID NO: 44097 - protein, 15 aa, Homo Sapiens
PAAEHRLREEILAKF

SEQ ID NO: 44098 - protein, 15 aa, Homo Sapiens
AAEHRLREEILAKFL

SEQ ID NO: 44099 - protein, 15 aa, Homo Sapiens
AEHRLREEILAKFLH

SEQ ID NO: 44100 - protein, 15 aa, Homo Sapiens
EHRLREEILAKFLHW

SEQ ID NO: 44101 - protein, 15 aa, Homo Sapiens
HRLREEILAKFLHWL

SEQ ID NO: 44102 - protein, 15 aa, Homo Sapiens
RLREEILAKFLHWLM

SEQ ID NO: 44103 - protein, 15 aa, Homo Sapiens
LREEILAKFLHWLMS

SEQ ID NO: 44104 - protein, 15 aa, Homo Sapiens
REEILAKFLHWLMSV

SEQ ID NO: 44105 - protein, 15 aa, Homo Sapiens
EEILAKFLHWLMSVY

SEQ ID NO: 44106 - protein, 15 aa, Homo Sapiens
EILAKFLHWLMSVYV

SEQ ID NO: 44107 - protein, 15 aa, Homo Sapiens
ILAKFLHWLMSVYVV

SEQ ID NO: 44108 - protein, 15 aa, Homo Sapiens
LAKFLHWLMSVYVVE

SEQ ID NO: 44109 - protein, 15 aa, Homo Sapiens
AKFLHWLMSVYVVEL

SEQ ID NO: 44110 - protein, 15 aa, Homo Sapiens
KFLHWLMSVYVVELL

SEQ ID NO: 44111 - protein, 15 aa, Homo Sapiens
FLHWLMSVYVVELLR

SEQ ID NO: 44112 - protein, 15 aa, Homo Sapiens
LHWLMSVYVVELLRS

SEQ ID NO: 44113 - protein, 15 aa, Homo Sapiens
HWLMSVYVVELLRSF

SEQ ID NO: 44114 - protein, 15 aa, Homo Sapiens
WLMSVYVVELLRSFF

SEQ ID NO: 44115 - protein, 15 aa, Homo Sapiens
LMSVYVVELLRSFFY

SEQ ID NO: 44116 - protein, 15 aa, Homo Sapiens
MSVYVVELLRSFFYV

SEQ ID NO: 44117 - protein, 15 aa, Homo Sapiens
SVYVVELLRSFFYVT

SEQ ID NO: 44118 - protein, 15 aa, Homo Sapiens
VYVVELLRSFFYVTE

SEQ ID NO: 44119 - protein, 15 aa, Homo Sapiens
YVVELLRSFFYVTET

SEQ ID NO: 44120 - protein, 15 aa, Homo Sapiens
VVELLRSFFYVTETT

SEQ ID NO: 44121 - protein, 15 aa, Homo Sapiens
VELLRSFFYVTETTF

SEQ ID NO: 44122 - protein, 15 aa, Homo Sapiens
ELLRSFFYVTETTFQ

SEQ ID NO: 44123 - protein, 15 aa, Homo Sapiens
LLRSFFYVTETTFQK

SEQ ID NO: 44124 - protein, 15 aa, Homo Sapiens
LRSFFYVTETTFQKN

SEQ ID NO: 44125 - protein, 15 aa, Homo Sapiens
RSFFYVTETTFQKNR

SEQ ID NO: 44126 - protein, 15 aa, Homo Sapiens
SFFYVTETTFQKNRL

SEQ ID NO: 44127 - protein, 15 aa, Homo Sapiens
FFYVTETTFQKNRLF

SEQ ID NO: 44128 - protein, 15 aa, Homo Sapiens
FYVTETTFQKNRLFF

SEQ ID NO: 44129 - protein, 15 aa, Homo Sapiens
YVTETTFQKNRLFFY

SEQ ID NO: 44130 - protein, 15 aa, Homo Sapiens
VTETTFQKNRLFFYR

SEQ ID NO: 44131 - protein, 15 aa, Homo Sapiens
TETTFQKNRLFFYRK

SEQ ID NO: 44132 - protein, 15 aa, Homo Sapiens
ETTFQKNRLFFYRKS

SEQ ID NO: 44133 - protein, 15 aa, Homo Sapiens
TTFQKNRLFFYRKSV

SEQ ID NO: 44134 - protein, 15 aa, Homo Sapiens
TFQKNRLFFYRKSVW

SEQ ID NO: 44135 - protein, 15 aa, Homo Sapiens
FQKNRLFFYRKSVWS

SEQ ID NO: 44136 - protein, 15 aa, Homo Sapiens
QKNRLFFYRKSVWSK

SEQ ID NO: 44137 - protein, 15 aa, Homo Sapiens
KNRLFFYRKSVWSKL

SEQ ID NO: 44138 - protein, 15 aa, Homo Sapiens
NRLFFYRKSVWSKLQ

SEQ ID NO: 44139 - protein, 15 aa, Homo Sapiens
RLFFYRKSVWSKLQS

SEQ ID NO: 44140 - protein, 15 aa, Homo Sapiens
LFFYRKSVWSKLQSI

SEQ ID NO: 44141 - protein, 15 aa, Homo Sapiens
FFYRKSVWSKLQSIG

SEQ ID NO: 44142 - protein, 15 aa, Homo Sapiens
FYRKSVWSKLQSIGI

SEQ ID NO: 44143 - protein, 15 aa, Homo Sapiens
YRKSVWSKLQSIGIR

SEQ ID NO: 44144 - protein, 15 aa, Homo Sapiens
RKSVWSKLQSIGIRQ

SEQ ID NO: 44145 - protein, 15 aa, Homo Sapiens
KSVWSKLQSIGIRQH

SEQ ID NO: 44146 - protein, 15 aa, Homo Sapiens
SVWSKLQSIGIRQHL

SEQ ID NO: 44147 - protein, 15 aa, Homo Sapiens
VWSKLQSIGIRQHLK

SEQ ID NO: 44148 - protein, 15 aa, Homo Sapiens
WSKLQSIGIRQHLKR

SEQ ID NO: 44149 - protein, 15 aa, Homo Sapiens
SKLQSIGIRQHLKRV

SEQ ID NO: 44150 - protein, 15 aa, Homo Sapiens
KLQSIGIRQHLKRVQ

SEQ ID NO: 44151 - protein, 15 aa, Homo Sapiens
LQSIGIRQHLKRVQL

SEQ ID NO: 44152 - protein, 15 aa, Homo Sapiens
QSIGIRQHLKRVQLR

SEQ ID NO: 44153 - protein, 15 aa, Homo Sapiens
SIGIRQHLKRVQLRE

SEQ ID NO: 44154 - protein, 15 aa, Homo Sapiens
IGIRQHLKRVQLREL

SEQ ID NO: 44155 - protein, 15 aa, Homo Sapiens
GIRQHLKRVQLRELS

SEQ ID NO: 44156 - protein, 15 aa, Homo Sapiens
IRQHLKRVQLRELSE

SEQ ID NO: 44157 - protein, 15 aa, Homo Sapiens
RQHLKRVQLRELSEA

SEQ ID NO: 44158 - protein, 15 aa, Homo Sapiens
QHLKRVQLRELSEAE

SEQ ID NO: 44159 - protein, 15 aa, Homo Sapiens
HLKRVQLRELSEAEV

SEQ ID NO: 44160 - protein, 15 aa, Homo Sapiens
LKRVQLRELSEAEVR

SEQ ID NO: 44161 - protein, 15 aa, Homo Sapiens
KRVQLRELSEAEVRQ

SEQ ID NO: 44162 - protein, 15 aa, Homo Sapiens
RVQLRELSEAEVRQH

SEQ ID NO: 44163 - protein, 15 aa, Homo Sapiens
VQLRELSEAEVRQHR

SEQ ID NO: 44164 - protein, 15 aa, Homo Sapiens
QLRELSEAEVRQHRE

SEQ ID NO: 44165 - protein, 15 aa, Homo Sapiens
LRELSEAEVRQHREA

SEQ ID NO: 44166 - protein, 15 aa, Homo Sapiens
RELSEAEVRQHREAR

SEQ ID NO: 44167 - protein, 15 aa, Homo Sapiens
ELSEAEVRQHREARP

SEQ ID NO: 44168 - protein, 15 aa, Homo Sapiens
LSEAEVRQHREARPA

SEQ ID NO: 44169 - protein, 15 aa, Homo Sapiens
SEAEVRQHREARPAL

SEQ ID NO: 44170 - protein, 15 aa, Homo Sapiens
EAEVRQHREARPALL

SEQ ID NO: 44171 - protein, 15 aa, Homo Sapiens
AEVRQHREARPALLT

SEQ ID NO: 44172 - protein, 15 aa, Homo Sapiens
EVRQHREARPALLTS

SEQ ID NO: 44173 - protein, 15 aa, Homo Sapiens
VRQHREARPALLTSR

SEQ ID NO: 44174 - protein, 15 aa, Homo Sapiens
RQHREARPALLTSRL

SEQ ID NO: 44175 - protein, 15 aa, Homo Sapiens
QHREARPALLTSRLR

SEQ ID NO: 44176 - protein, 15 aa, Homo Sapiens
HREARPALLTSRLRF

SEQ ID NO: 44177 - protein, 15 aa, Homo Sapiens
REARPALLTSRLRFI

SEQ ID NO: 44178 - protein, 15 aa, Homo Sapiens
EARPALLTSRLRFIP

SEQ ID NO: 44179 - protein, 15 aa, Homo Sapiens
ARPALLTSRLRFIPK

SEQ ID NO: 44180 - protein, 15 aa, Homo Sapiens
RPALLTSRLRFIPKP

SEQ ID NO: 44181 - protein, 15 aa, Homo Sapiens
PALLTSRLRFIPKPD

SEQ ID NO: 44182 - protein, 15 aa, Homo Sapiens
ALLTSRLRFIPKPDG

SEQ ID NO: 44183 - protein, 15 aa, Homo Sapiens
LLTSRLRFIPKPDGL

SEQ ID NO: 44184 - protein, 15 aa, Homo Sapiens
LTSRLRFIPKPDGLR

SEQ ID NO: 44185 - protein, 15 aa, Homo Sapiens
TSRLRFIPKPDGLRP

SEQ ID NO: 44186 - protein, 15 aa, Homo Sapiens
SRLRFIPKPDGLRPI

SEQ ID NO: 44187 - protein, 15 aa, Homo Sapiens
RLRFIPKPDGLRPIV

SEQ ID NO: 44188 - protein, 15 aa, Homo Sapiens
LRFIPKPDGLRPIVN

SEQ ID NO: 44189 - protein, 15 aa, Homo Sapiens
RFIPKPDGLRPIVNM

SEQ ID NO: 44190 - protein, 15 aa, Homo Sapiens
FIPKPDGLRPIVNMD

SEQ ID NO: 44191 - protein, 15 aa, Homo Sapiens
IPKPDGLRPIVNMDY

SEQ ID NO: 44192 - protein, 15 aa, Homo Sapiens
PKPDGLRPIVNMDYV

SEQ ID NO: 44193 - protein, 15 aa, Homo Sapiens
KPDGLRPIVNMDYVV

SEQ ID NO: 44194 - protein, 15 aa, Homo Sapiens
PDGLRPIVNMDYVVG

SEQ ID NO: 44195 - protein, 15 aa, Homo Sapiens
DGLRPIVNMDYVVGA

SEQ ID NO: 44196 - protein, 15 aa, Homo Sapiens
GLRPIVNMDYVVGAR

SEQ ID NO: 44197 - protein, 15 aa, Homo Sapiens
LRPIVNMDYVVGART

SEQ ID NO: 44198 - protein, 15 aa, Homo Sapiens
RPIVNMDYVVGARTF

SEQ ID NO: 44199 - protein, 15 aa, Homo Sapiens
PIVNMDYVVGARTFR

SEQ ID NO: 44200 - protein, 15 aa, Homo Sapiens
IVNMDYVVGARTFRR

SEQ ID NO: 44201 - protein, 15 aa, Homo Sapiens
VNMDYVVGARTFRRE

SEQ ID NO: 44202 - protein, 15 aa, Homo Sapiens
NMDYVVGARTFRREK

SEQ ID NO: 44203 - protein, 15 aa, Homo Sapiens
MDYVVGARTFRREKR

SEQ ID NO: 44204 - protein, 15 aa, Homo Sapiens
DYVVGARTFRREKRA

SEQ ID NO: 44205 - protein, 15 aa, Homo Sapiens
YVVGARTFRREKRAE

SEQ ID NO: 44206 - protein, 15 aa, Homo Sapiens
VVGARTFRREKRAER

SEQ ID NO: 44207 - protein, 15 aa, Homo Sapiens
VGARTFRREKRAERL

SEQ ID NO: 44208 - protein, 15 aa, Homo Sapiens
GARTFRREKRAERLT

SEQ ID NO: 44209 - protein, 15 aa, Homo Sapiens
ARTFRREKRAERLTS

SEQ ID NO: 44210 - protein, 15 aa, Homo Sapiens
RTFRREKRAERLTSR

SEQ ID NO: 44211 - protein, 15 aa, Homo Sapiens
TFRREKRAERLTSRV

SEQ ID NO: 44212 - protein, 15 aa, Homo Sapiens
FRREKRAERLTSRVK

SEQ ID NO: 44213 - protein, 15 aa, Homo Sapiens
RREKRAERLTSRVKA

SEQ ID NO: 44214 - protein, 15 aa, Homo Sapiens
REKRAERLTSRVKAL

SEQ ID NO: 44215 - protein, 15 aa, Homo Sapiens
EKRAERLTSRVKALF

SEQ ID NO: 44216 - protein, 15 aa, Homo Sapiens
KRAERLTSRVKALFS

SEQ ID NO: 44217 - protein, 15 aa, Homo Sapiens
RAERLTSRVKALFSV

SEQ ID NO: 44218 - protein, 15 aa, Homo Sapiens
AERLTSRVKALFSVL

SEQ ID NO: 44219 - protein, 15 aa, Homo Sapiens
ERLTSRVKALFSVLN

SEQ ID NO: 44220 - protein, 15 aa, Homo Sapiens
RLTSRVKALFSVLNY

SEQ ID NO: 44221 - protein, 15 aa, Homo Sapiens
LTSRVKALFSVLNYE

SEQ ID NO: 44222 - protein, 15 aa, Homo Sapiens
TSRVKALFSVLNYER

SEQ ID NO: 44223 - protein, 15 aa, Homo Sapiens
SRVKALFSVLNYERA

SEQ ID NO: 44224 - protein, 15 aa, Homo Sapiens
RVKALFSVLNYERAR

SEQ ID NO: 44225 - protein, 15 aa, Homo Sapiens
VKALFSVLNYERARR

SEQ ID NO: 44226 - protein, 15 aa, Homo Sapiens
KALFSVLNYERARRP

SEQ ID NO: 44227 - protein, 15 aa, Homo Sapiens
ALFSVLNYERARRPG

SEQ ID NO: 44228 - protein, 15 aa, Homo Sapiens
LFSVLNYERARRPGL

SEQ ID NO: 44229 - protein, 15 aa, Homo Sapiens
FSVLNYERARRPGLL

SEQ ID NO: 44230 - protein, 15 aa, Homo Sapiens
SVLNYERARRPGLLG

SEQ ID NO: 44231 - protein, 15 aa, Homo Sapiens
VLNYERARRPGLLGA

SEQ ID NO: 44232 - protein, 15 aa, Homo Sapiens
LNYERARRPGLLGAS

SEQ ID NO: 44233 - protein, 15 aa, Homo Sapiens
NYERARRPGLLGASV

SEQ ID NO: 44234 - protein, 15 aa, Homo Sapiens
YERARRPGLLGASVL

SEQ ID NO: 44235 - protein, 15 aa, Homo Sapiens
ERARRPGLLGASVLG

SEQ ID NO: 44236 - protein, 15 aa, Homo Sapiens
RARRPGLLGASVLGL

SEQ ID NO: 44237 - protein, 15 aa, Homo Sapiens
ARRPGLLGASVLGLD

SEQ ID NO: 44238 - protein, 15 aa, Homo Sapiens
RRPGLLGASVLGLDD

SEQ ID NO: 44239 - protein, 15 aa, Homo Sapiens
RPGLLGASVLGLDDI

SEQ ID NO: 44240 - protein, 15 aa, Homo Sapiens
PGLLGASVLGLDDIH

SEQ ID NO: 44241 - protein, 15 aa, Homo Sapiens
GLLGASVLGLDDIHR

SEQ ID NO: 44242 - protein, 15 aa, Homo Sapiens
LLGASVLGLDDIHRA

SEQ ID NO: 44243 - protein, 15 aa, Homo Sapiens
LGASVLGLDDIHRAW

SEQ ID NO: 44244 - protein, 15 aa, Homo Sapiens
GASVLGLDDIHRAWR

SEQ ID NO: 44245 - protein, 15 aa, Homo Sapiens
ASVLGLDDIHRAWRT

SEQ ID NO: 44246 - protein, 15 aa, Homo Sapiens
SVLGLDDIHRAWRTF

SEQ ID NO: 44247 - protein, 15 aa, Homo Sapiens
VLGLDDIHRAWRTFV

SEQ ID NO: 44248 - protein, 15 aa, Homo Sapiens
LGLDDIHRAWRTFVL

SEQ ID NO: 44249 - protein, 15 aa, Homo Sapiens
GLDDIHRAWRTFVLR

SEQ ID NO: 44250 - protein, 15 aa, Homo Sapiens
LDDIHRAWRTFVLRV

SEQ ID NO: 44251 - protein, 15 aa, Homo Sapiens
DDIHRAWRTFVLRVR

SEQ ID NO: 44252 - protein, 15 aa, Homo Sapiens
DIHRAWRTFVLRVRA

SEQ ID NO: 44253 - protein, 15 aa, Homo Sapiens
IHRAWRTFVLRVRAQ

SEQ ID NO: 44254 - protein, 15 aa, Homo Sapiens
HRAWRTFVLRVRAQD

SEQ ID NO: 44255 - protein, 15 aa, Homo Sapiens
RAWRTFVLRVRAQDP

SEQ ID NO: 44256 - protein, 15 aa, Homo Sapiens
AWRTFVLRVRAQDPP

SEQ ID NO: 44257 - protein, 15 aa, Homo Sapiens
WRTFVLRVRAQDPPP

SEQ ID NO: 44258 - protein, 15 aa, Homo Sapiens
RTFVLRVRAQDPPPE

SEQ ID NO: 44259 - protein, 15 aa, Homo Sapiens
TFVLRVRAQDPPPEL

SEQ ID NO: 44260 - protein, 15 aa, Homo Sapiens
FVLRVRAQDPPPELY

SEQ ID NO: 44261 - protein, 15 aa, Homo Sapiens
VLRVRAQDPPPELYF

SEQ ID NO: 44262 - protein, 15 aa, Homo Sapiens
LRVRAQDPPPELYFV

SEQ ID NO: 44263 - protein, 15 aa, Homo Sapiens
RVRAQDPPPELYFVK

SEQ ID NO: 44264 - protein, 15 aa, Homo Sapiens
VRAQDPPPELYFVKV

SEQ ID NO: 44265 - protein, 15 aa, Homo Sapiens
RAQDPPPELYFVKVD

SEQ ID NO: 44266 - protein, 15 aa, Homo Sapiens
AQDPPPELYFVKVDV

SEQ ID NO: 44267 - protein, 15 aa, Homo Sapiens
QDPPPELYFVKVDVT

SEQ ID NO: 44268 - protein, 15 aa, Homo Sapiens
DPPPELYFVKVDVTG

SEQ ID NO: 44269 - protein, 15 aa, Homo Sapiens
PPPELYFVKVDVTGA

SEQ ID NO: 44270 - protein, 15 aa, Homo Sapiens
PPELYFVKVDVTGAY

SEQ ID NO: 44271 - protein, 15 aa, Homo Sapiens
PELYFVKVDVTGAYD

SEQ ID NO: 44272 - protein, 15 aa, Homo Sapiens
ELYFVKVDVTGAYDT

SEQ ID NO: 44273 - protein, 15 aa, Homo Sapiens
LYFVKVDVTGAYDTI

SEQ ID NO: 44274 - protein, 15 aa, Homo Sapiens
YFVKVDVTGAYDTIP

SEQ ID NO: 44275 - protein, 15 aa, Homo Sapiens
FVKVDVTGAYDTIPQ

SEQ ID NO: 44276 - protein, 15 aa, Homo Sapiens
VKVDVTGAYDTIPQD

SEQ ID NO: 44277 - protein, 15 aa, Homo Sapiens
KVDVTGAYDTIPQDR

SEQ ID NO: 44278 - protein, 15 aa, Homo Sapiens
VDVTGAYDTIPQDRL

SEQ ID NO: 44279 - protein, 15 aa, Homo Sapiens
DVTGAYDTIPQDRLT

SEQ ID NO: 44280 - protein, 15 aa, Homo Sapiens
VTGAYDTIPQDRLTE

SEQ ID NO: 44281 - protein, 15 aa, Homo Sapiens
TGAYDTIPQDRLTEV

SEQ ID NO: 44282 - protein, 15 aa, Homo Sapiens
GAYDTIPQDRLTEVI

SEQ ID NO: 44283 - protein, 15 aa, Homo Sapiens
AYDTIPQDRLTEVIA

SEQ ID NO: 44284 - protein, 15 aa, Homo Sapiens
YDTIPQDRLTEVIAS

SEQ ID NO: 44285 - protein, 15 aa, Homo Sapiens
DTIPQDRLTEVIASI

SEQ ID NO: 44286 - protein, 15 aa, Homo Sapiens
TIPQDRLTEVIASII

SEQ ID NO: 44287 - protein, 15 aa, Homo Sapiens
IPQDRLTEVIASIIK

SEQ ID NO: 44288 - protein, 15 aa, Homo Sapiens
PQDRLTEVIASIIKP

SEQ ID NO: 44289 - protein, 15 aa, Homo Sapiens
QDRLTEVIASIIKPQ

SEQ ID NO: 44290 - protein, 15 aa, Homo Sapiens
DRLTEVIASIIKPQN

SEQ ID NO: 44291 - protein, 15 aa, Homo Sapiens
RLTEVIASIIKPQNT

SEQ ID NO: 44292 - protein, 15 aa, Homo Sapiens
LTEVIASIIKPQNTY

SEQ ID NO: 44293 - protein, 15 aa, Homo Sapiens
TEVIASIIKPQNTYC

SEQ ID NO: 44294 - protein, 15 aa, Homo Sapiens
EVIASIIKPQNTYCV

SEQ ID NO: 44295 - protein, 15 aa, Homo Sapiens
VIASIIKPQNTYCVR

SEQ ID NO: 44296 - protein, 15 aa, Homo Sapiens
IASIIKPQNTYCVRR

SEQ ID NO: 44297 - protein, 15 aa, Homo Sapiens
ASIIKPQNTYCVRRY

SEQ ID NO: 44298 - protein, 15 aa, Homo Sapiens
SIIKPQNTYCVRRYA

SEQ ID NO: 44299 - protein, 15 aa, Homo Sapiens
IIKPQNTYCVRRYAV

SEQ ID NO: 44300 - protein, 15 aa, Homo Sapiens
IKPQNTYCVRRYAVV

SEQ ID NO: 44301 - protein, 15 aa, Homo Sapiens
KPQNTYCVRRYAVVQ

SEQ ID NO: 44302 - protein, 15 aa, Homo Sapiens
PQNTYCVRRYAVVQK

SEQ ID NO: 44303 - protein, 15 aa, Homo Sapiens
QNTYCVRRYAVVQKA

SEQ ID NO: 44304 - protein, 15 aa, Homo Sapiens
NTYCVRRYAVVQKAA

SEQ ID NO: 44305 - protein, 15 aa, Homo Sapiens
TYCVRRYAVVQKAAH

SEQ ID NO: 44306 - protein, 15 aa, Homo Sapiens
YCVRRYAVVQKAAHG

SEQ ID NO: 44307 - protein, 15 aa, Homo Sapiens
CVRRYAVVQKAAHGH

SEQ ID NO: 44308 - protein, 15 aa, Homo Sapiens
VRRYAVVQKAAHGHV

SEQ ID NO: 44309 - protein, 15 aa, Homo Sapiens
RRYAVVQKAAHGHVR

SEQ ID NO: 44310 - protein, 15 aa, Homo Sapiens
RYAVVQKAAHGHVRK

SEQ ID NO: 44311 - protein, 15 aa, Homo Sapiens
YAVVQKAAHGHVRKA

SEQ ID NO: 44312 - protein, 15 aa, Homo Sapiens
AVVQKAAHGHVRKAF

SEQ ID NO: 44313 - protein, 15 aa, Homo Sapiens
VVQKAAHGHVRKAFK

SEQ ID NO: 44314 - protein, 15 aa, Homo Sapiens
VQKAAHGHVRKAFKS

SEQ ID NO: 44315 - protein, 15 aa, Homo Sapiens
QKAAHGHVRKAFKSH

SEQ ID NO: 44316 - protein, 15 aa, Homo Sapiens
KAAHGHVRKAFKSHV

SEQ ID NO: 44317 - protein, 15 aa, Homo Sapiens
AAHGHVRKAFKSHVS

SEQ ID NO: 44318 - protein, 15 aa, Homo Sapiens
AHGHVRKAFKSHVST

SEQ ID NO: 44319 - protein, 15 aa, Homo Sapiens
HGHVRKAFKSHVSTL

SEQ ID NO: 44320 - protein, 15 aa, Homo Sapiens
GHVRKAFKSHVSTLT

SEQ ID NO: 44321 - protein, 15 aa, Homo Sapiens
HVRKAFKSHVSTLTD

SEQ ID NO: 44322 - protein, 15 aa, Homo Sapiens
VRKAFKSHVSTLTDL

SEQ ID NO: 44323 - protein, 15 aa, Homo Sapiens
RKAFKSHVSTLTDLQ

SEQ ID NO: 44324 - protein, 15 aa, Homo Sapiens
KAFKSHVSTLTDLQP

SEQ ID NO: 44325 - protein, 15 aa, Homo Sapiens
AFKSHVSTLTDLQPY

SEQ ID NO: 44326 - protein, 15 aa, Homo Sapiens
FKSHVSTLTDLQPYM

SEQ ID NO: 44327 - protein, 15 aa, Homo Sapiens
KSHVSTLTDLQPYMR

SEQ ID NO: 44328 - protein, 15 aa, Homo Sapiens
SHVSTLTDLQPYMRQ

SEQ ID NO: 44329 - protein, 15 aa, Homo Sapiens
HVSTLTDLQPYMRQF

SEQ ID NO: 44330 - protein, 15 aa, Homo Sapiens
VSTLTDLQPYMRQFV

SEQ ID NO: 44331 - protein, 15 aa, Homo Sapiens
STLTDLQPYMRQFVA

SEQ ID NO: 44332 - protein, 15 aa, Homo Sapiens
TLTDLQPYMRQFVAH

SEQ ID NO: 44333 - protein, 15 aa, Homo Sapiens
LTDLQPYMRQFVAHL

SEQ ID NO: 44334 - protein, 15 aa, Homo Sapiens
TDLQPYMRQFVAHLQ

SEQ ID NO: 44335 - protein, 15 aa, Homo Sapiens
DLQPYMRQFVAHLQE

SEQ ID NO: 44336 - protein, 15 aa, Homo Sapiens
LQPYMRQFVAHLQET

SEQ ID NO: 44337 - protein, 15 aa, Homo Sapiens
QPYMRQFVAHLQETS

SEQ ID NO: 44338 - protein, 15 aa, Homo Sapiens
PYMRQFVAHLQETSP

SEQ ID NO: 44339 - protein, 15 aa, Homo Sapiens
YMRQFVAHLQETSPL

SEQ ID NO: 44340 - protein, 15 aa, Homo Sapiens
MRQFVAHLQETSPLR

SEQ ID NO: 44341 - protein, 15 aa, Homo Sapiens
RQFVAHLQETSPLRD

SEQ ID NO: 44342 - protein, 15 aa, Homo Sapiens
QFVAHLQETSPLRDA

SEQ ID NO: 44343 - protein, 15 aa, Homo Sapiens
FVAHLQETSPLRDAV

SEQ ID NO: 44344 - protein, 15 aa, Homo Sapiens
VAHLQETSPLRDAVV

SEQ ID NO: 44345 - protein, 15 aa, Homo Sapiens
AHLQETSPLRDAVVI

SEQ ID NO: 44346 - protein, 15 aa, Homo Sapiens
HLQETSPLRDAVVIE

SEQ ID NO: 44347 - protein, 15 aa, Homo Sapiens
LQETSPLRDAVVIEQ

SEQ ID NO: 44348 - protein, 15 aa, Homo Sapiens
QETSPLRDAVVIEQS

SEQ ID NO: 44349 - protein, 15 aa, Homo Sapiens
ETSPLRDAVVIEQSS

SEQ ID NO: 44350 - protein, 15 aa, Homo Sapiens
TSPLRDAVVIEQSSS

SEQ ID NO: 44351 - protein, 15 aa, Homo Sapiens
SPLRDAVVIEQSSSL

SEQ ID NO: 44352 - protein, 15 aa, Homo Sapiens
PLRDAVVIEQSSSLN

SEQ ID NO: 44353 - protein, 15 aa, Homo Sapiens
LRDAVVIEQSSSLNE

SEQ ID NO: 44354 - protein, 15 aa, Homo Sapiens
RDAVVIEQSSSLNEA

SEQ ID NO: 44355 - protein, 15 aa, Homo Sapiens
DAVVIEQSSSLNEAS

SEQ ID NO: 44356 - protein, 15 aa, Homo Sapiens
AVVIEQSSSLNEASS

SEQ ID NO: 44357 - protein, 15 aa, Homo Sapiens
VVIEQSSSLNEASSG

SEQ ID NO: 44358 - protein, 15 aa, Homo Sapiens
VIEQSSSLNEASSGL

SEQ ID NO: 44359 - protein, 15 aa, Homo Sapiens
IEQSSSLNEASSGLF

SEQ ID NO: 44360 - protein, 15 aa, Homo Sapiens
EQSSSLNEASSGLFD

SEQ ID NO: 44361 - protein, 15 aa, Homo Sapiens
QSSSLNEASSGLFDV

SEQ ID NO: 44362 - protein, 15 aa, Homo Sapiens
SSSLNEASSGLFDVF

SEQ ID NO: 44363 - protein, 15 aa, Homo Sapiens
SSLNEASSGLFDVFL

SEQ ID NO: 44364 - protein, 15 aa, Homo Sapiens
SLNEASSGLFDVFLR

SEQ ID NO: 44365 - protein, 15 aa, Homo Sapiens
LNEASSGLFDVFLRF

SEQ ID NO: 44366 - protein, 15 aa, Homo Sapiens
NEASSGLFDVFLRFM

SEQ ID NO: 44367 - protein, 15 aa, Homo Sapiens
EASSGLFDVFLRFMC

SEQ ID NO: 44368 - protein, 15 aa, Homo Sapiens
ASSGLFDVFLRFMCH

SEQ ID NO: 44369 - protein, 15 aa, Homo Sapiens
SSGLFDVFLRFMCHH

SEQ ID NO: 44370 - protein, 15 aa, Homo Sapiens
SGLFDVFLRFMCHHA

SEQ ID NO: 44371 - protein, 15 aa, Homo Sapiens
GLFDVFLRFMCHHAV

SEQ ID NO: 44372 - protein, 15 aa, Homo Sapiens
LFDVFLRFMCHHAVR

SEQ ID NO: 44373 - protein, 15 aa, Homo Sapiens
FDVFLRFMCHHAVRI

SEQ ID NO: 44374 - protein, 15 aa, Homo Sapiens
DVFLRFMCHHAVRIR

SEQ ID NO: 44375 - protein, 15 aa, Homo Sapiens
VFLRFMCHHAVRIRG

SEQ ID NO: 44376 - protein, 15 aa, Homo Sapiens
FLRFMCHHAVRIRGK

SEQ ID NO: 44377 - protein, 15 aa, Homo Sapiens
LRFMCHHAVRIRGKS

SEQ ID NO: 44378 - protein, 15 aa, Homo Sapiens
RFMCHHAVRIRGKSY

SEQ ID NO: 44379 - protein, 15 aa, Homo Sapiens
FMCHHAVRIRGKSYV

SEQ ID NO: 44380 - protein, 15 aa, Homo Sapiens
MCHHAVRIRGKSYVQ

SEQ ID NO: 44381 - protein, 15 aa, Homo Sapiens
CHHAVRIRGKSYVQC

SEQ ID NO: 44382 - protein, 15 aa, Homo Sapiens
HHAVRIRGKSYVQCQ

SEQ ID NO: 44383 - protein, 15 aa, Homo Sapiens
HAVRIRGKSYVQCQG

SEQ ID NO: 44384 - protein, 15 aa, Homo Sapiens
AVRIRGKSYVQCQGI

SEQ ID NO: 44385 - protein, 15 aa, Homo Sapiens
VRIRGKSYVQCQGIP

SEQ ID NO: 44386 - protein, 15 aa, Homo Sapiens
RIRGKSYVQCQGIPQ

SEQ ID NO: 44387 - protein, 15 aa, Homo Sapiens
IRGKSYVQCQGIPQG

SEQ ID NO: 44388 - protein, 15 aa, Homo Sapiens
RGKSYVQCQGIPQGS

SEQ ID NO: 44389 - protein, 15 aa, Homo Sapiens
GKSYVQCQGIPQGSI

SEQ ID NO: 44390 - protein, 15 aa, Homo Sapiens
KSYVQCQGIPQGSIL

SEQ ID NO: 44391 - protein, 15 aa, Homo Sapiens
SYVQCQGIPQGSILS

SEQ ID NO: 44392 - protein, 15 aa, Homo Sapiens
YVQCQGIPQGSILST

SEQ ID NO: 44393 - protein, 15 aa, Homo Sapiens
VQCQGIPQGSILSTL

SEQ ID NO: 44394 - protein, 15 aa, Homo Sapiens
QCQGIPQGSILSTLL

SEQ ID NO: 44395 - protein, 15 aa, Homo Sapiens
CQGIPQGSILSTLLC

SEQ ID NO: 44396 - protein, 15 aa, Homo Sapiens
QGIPQGSILSTLLCS

SEQ ID NO: 44397 - protein, 15 aa, Homo Sapiens
GIPQGSILSTLLCSL

SEQ ID NO: 44398 - protein, 15 aa, Homo Sapiens
IPQGSILSTLLCSLC

SEQ ID NO: 44399 - protein, 15 aa, Homo Sapiens
PQGSILSTLLCSLCY

SEQ ID NO: 44400 - protein, 15 aa, Homo Sapiens
QGSILSTLLCSLCYG

SEQ ID NO: 44401 - protein, 15 aa, Homo Sapiens
GSILSTLLCSLCYGD

SEQ ID NO: 44402 - protein, 15 aa, Homo Sapiens
SILSTLLCSLCYGDM

SEQ ID NO: 44403 - protein, 15 aa, Homo Sapiens
ILSTLLCSLCYGDME

SEQ ID NO: 44404 - protein, 15 aa, Homo Sapiens
LSTLLCSLCYGDMEN

SEQ ID NO: 44405 - protein, 15 aa, Homo Sapiens
STLLCSLCYGDMENK

SEQ ID NO: 44406 - protein, 15 aa, Homo Sapiens
TLLCSLCYGDMENKL

SEQ ID NO: 44407 - protein, 15 aa, Homo Sapiens
LLCSLCYGDMENKLF

SEQ ID NO: 44408 - protein, 15 aa, Homo Sapiens
LCSLCYGDMENKLFA

SEQ ID NO: 44409 - protein, 15 aa, Homo Sapiens
CSLCYGDMENKLFAG

SEQ ID NO: 44410 - protein, 15 aa, Homo Sapiens
SLCYGDMENKLFAGI

SEQ ID NO: 44411 - protein, 15 aa, Homo Sapiens
LCYGDMENKLFAGIR

SEQ ID NO: 44412 - protein, 15 aa, Homo Sapiens
CYGDMENKLFAGIRR

SEQ ID NO: 44413 - protein, 15 aa, Homo Sapiens
YGDMENKLFAGIRRD

SEQ ID NO: 44414 - protein, 15 aa, Homo Sapiens
GDMENKLFAGIRRDG

SEQ ID NO: 44415 - protein, 15 aa, Homo Sapiens
DMENKLFAGIRRDGL

SEQ ID NO: 44416 - protein, 15 aa, Homo Sapiens
MENKLFAGIRRDGLL

SEQ ID NO: 44417 - protein, 15 aa, Homo Sapiens
ENKLFAGIRRDGLLL

SEQ ID NO: 44418 - protein, 15 aa, Homo Sapiens
NKLFAGIRRDGLLLR

SEQ ID NO: 44419 - protein, 15 aa, Homo Sapiens
KLFAGIRRDGLLLRL

SEQ ID NO: 44420 - protein, 15 aa, Homo Sapiens
LFAGIRRDGLLLRLV

SEQ ID NO: 44421 - protein, 15 aa, Homo Sapiens
FAGIRRDGLLLRLVD

SEQ ID NO: 44422 - protein, 15 aa, Homo Sapiens
AGIRRDGLLLRLVDD

SEQ ID NO: 44423 - protein, 15 aa, Homo Sapiens
GIRRDGLLLRLVDDF

SEQ ID NO: 44424 - protein, 15 aa, Homo Sapiens
IRRDGLLLRLVDDFL

SEQ ID NO: 44425 - protein, 15 aa, Homo Sapiens
RRDGLLLRLVDDFLL

SEQ ID NO: 44426 - protein, 15 aa, Homo Sapiens
RDGLLLRLVDDFLLV

SEQ ID NO: 44427 - protein, 15 aa, Homo Sapiens
DGLLLRLVDDFLLVT

SEQ ID NO: 44428 - protein, 15 aa, Homo Sapiens
GLLLRLVDDFLLVTP

SEQ ID NO: 44429 - protein, 15 aa, Homo Sapiens
LLLRLVDDFLLVTPH

SEQ ID NO: 44430 - protein, 15 aa, Homo Sapiens
LLRLVDDFLLVTPHL

SEQ ID NO: 44431 - protein, 15 aa, Homo Sapiens
LRLVDDFLLVTPHLT

SEQ ID NO: 44432 - protein, 15 aa, Homo Sapiens
RLVDDFLLVTPHLTH

SEQ ID NO: 44433 - protein, 15 aa, Homo Sapiens
LVDDFLLVTPHLTHA

SEQ ID NO: 44434 - protein, 15 aa, Homo Sapiens
VDDFLLVTPHLTHAK

SEQ ID NO: 44435 - protein, 15 aa, Homo Sapiens
DDFLLVTPHLTHAKT

SEQ ID NO: 44436 - protein, 15 aa, Homo Sapiens
DFLLVTPHLTHAKTF

SEQ ID NO: 44437 - protein, 15 aa, Homo Sapiens
FLLVTPHLTHAKTFL

SEQ ID NO: 44438 - protein, 15 aa, Homo Sapiens
LLVTPHLTHAKTFLR

SEQ ID NO: 44439 - protein, 15 aa, Homo Sapiens
LVTPHLTHAKTFLRT

SEQ ID NO: 44440 - protein, 15 aa, Homo Sapiens
VTPHLTHAKTFLRTL

SEQ ID NO: 44441 - protein, 15 aa, Homo Sapiens
TPHLTHAKTFLRTLV

SEQ ID NO: 44442 - protein, 15 aa, Homo Sapiens
PHLTHAKTFLRTLVR

SEQ ID NO: 44443 - protein, 15 aa, Homo Sapiens
HLTHAKTFLRTLVRG

SEQ ID NO: 44444 - protein, 15 aa, Homo Sapiens
LTHAKTFLRTLVRGV

SEQ ID NO: 44445 - protein, 15 aa, Homo Sapiens
THAKTFLRTLVRGVP

SEQ ID NO: 44446 - protein, 15 aa, Homo Sapiens
HAKTFLRTLVRGVPE

SEQ ID NO: 44447 - protein, 15 aa, Homo Sapiens
AKTFLRTLVRGVPEY

SEQ ID NO: 44448 - protein, 15 aa, Homo Sapiens
KTFLRTLVRGVPEYG

SEQ ID NO: 44449 - protein, 15 aa, Homo Sapiens
TFLRTLVRGVPEYGC

SEQ ID NO: 44450 - protein, 15 aa, Homo Sapiens
FLRTLVRGVPEYGCV

SEQ ID NO: 44451 - protein, 15 aa, Homo Sapiens
LRTLVRGVPEYGCVV

SEQ ID NO: 44452 - protein, 15 aa, Homo Sapiens
RTLVRGVPEYGCVVN

SEQ ID NO: 44453 - protein, 15 aa, Homo Sapiens
TLVRGVPEYGCVVNL

SEQ ID NO: 44454 - protein, 15 aa, Homo Sapiens
LVRGVPEYGCVVNLR

SEQ ID NO: 44455 - protein, 15 aa, Homo Sapiens
VRGVPEYGCVVNLRK

SEQ ID NO: 44456 - protein, 15 aa, Homo Sapiens
RGVPEYGCVVNLRKT

SEQ ID NO: 44457 - protein, 15 aa, Homo Sapiens
GVPEYGCVVNLRKTV

SEQ ID NO: 44458 - protein, 15 aa, Homo Sapiens
VPEYGCVVNLRKTVV

SEQ ID NO: 44459 - protein, 15 aa, Homo Sapiens
PEYGCVVNLRKTVVN

SEQ ID NO: 44460 - protein, 15 aa, Homo Sapiens
EYGCVVNLRKTVVNF

SEQ ID NO: 44461 - protein, 15 aa, Homo Sapiens
YGCVVNLRKTVVNFP

SEQ ID NO: 44462 - protein, 15 aa, Homo Sapiens
GCVVNLRKTVVNFPV

SEQ ID NO: 44463 - protein, 15 aa, Homo Sapiens
CVVNLRKTVVNFPVE

SEQ ID NO: 44464 - protein, 15 aa, Homo Sapiens
VVNLRKTVVNFPVED

SEQ ID NO: 44465 - protein, 15 aa, Homo Sapiens
VNLRKTVVNFPVEDE

SEQ ID NO: 44466 - protein, 15 aa, Homo Sapiens
NLRKTVVNFPVEDEA

SEQ ID NO: 44467 - protein, 15 aa, Homo Sapiens
LRKTVVNFPVEDEAL

SEQ ID NO: 44468 - protein, 15 aa, Homo Sapiens
RKTVVNFPVEDEALG

SEQ ID NO: 44469 - protein, 15 aa, Homo Sapiens
KTVVNFPVEDEALGG

SEQ ID NO: 44470 - protein, 15 aa, Homo Sapiens
TVVNFPVEDEALGGT

SEQ ID NO: 44471 - protein, 15 aa, Homo Sapiens
VVNFPVEDEALGGTA

SEQ ID NO: 44472 - protein, 15 aa, Homo Sapiens
VNFPVEDEALGGTAF

SEQ ID NO: 44473 - protein, 15 aa, Homo Sapiens
NFPVEDEALGGTAFV

SEQ ID NO: 44474 - protein, 15 aa, Homo Sapiens
FPVEDEALGGTAFVQ

SEQ ID NO: 44475 - protein, 15 aa, Homo Sapiens
PVEDEALGGTAFVQM

SEQ ID NO: 44476 - protein, 15 aa, Homo Sapiens
VEDEALGGTAFVQMP

SEQ ID NO: 44477 - protein, 15 aa, Homo Sapiens
EDEALGGTAFVQMPA

SEQ ID NO: 44478 - protein, 15 aa, Homo Sapiens
DEALGGTAFVQMPAH

SEQ ID NO: 44479 - protein, 15 aa, Homo Sapiens
EALGGTAFVQMPAHG

SEQ ID NO: 44480 - protein, 15 aa, Homo Sapiens
ALGGTAFVQMPAHGL

SEQ ID NO: 44481 - protein, 15 aa, Homo Sapiens
LGGTAFVQMPAHGLF

SEQ ID NO: 44482 - protein, 15 aa, Homo Sapiens
GGTAFVQMPAHGLFP

SEQ ID NO: 44483 - protein, 15 aa, Homo Sapiens
GTAFVQMPAHGLFPW

SEQ ID NO: 44484 - protein, 15 aa, Homo Sapiens
TAFVQMPAHGLFPWC

SEQ ID NO: 44485 - protein, 15 aa, Homo Sapiens
AFVQMPAHGLFPWCG

SEQ ID NO: 44486 - protein, 15 aa, Homo Sapiens
FVQMPAHGLFPWCGL

SEQ ID NO: 44487 - protein, 15 aa, Homo Sapiens
VQMPAHGLFPWCGLL

SEQ ID NO: 44488 - protein, 15 aa, Homo Sapiens
QMPAHGLFPWCGLLL

SEQ ID NO: 44489 - protein, 15 aa, Homo Sapiens
MPAHGLFPWCGLLLD

SEQ ID NO: 44490 - protein, 15 aa, Homo Sapiens
PAHGLFPWCGLLLDT

SEQ ID NO: 44491 - protein, 15 aa, Homo Sapiens
AHGLFPWCGLLLDTR

SEQ ID NO: 44492 - protein, 15 aa, Homo Sapiens
HGLFPWCGLLLDTRT

SEQ ID NO: 44493 - protein, 15 aa, Homo Sapiens
GLFPWCGLLLDTRTL

SEQ ID NO: 44494 - protein, 15 aa, Homo Sapiens
LFPWCGLLLDTRTLE

SEQ ID NO: 44495 - protein, 15 aa, Homo Sapiens
FPWCGLLLDTRTLEV

SEQ ID NO: 44496 - protein, 15 aa, Homo Sapiens
PWCGLLLDTRTLEVQ

SEQ ID NO: 44497 - protein, 15 aa, Homo Sapiens
WCGLLLDTRTLEVQS

SEQ ID NO: 44498 - protein, 15 aa, Homo Sapiens
CGLLLDTRTLEVQSD

SEQ ID NO: 44499 - protein, 15 aa, Homo Sapiens
GLLLDTRTLEVQSDY

SEQ ID NO: 44500 - protein, 15 aa, Homo Sapiens
LLLDTRTLEVQSDYS

SEQ ID NO: 44501 - protein, 15 aa, Homo Sapiens
LLDTRTLEVQSDYSS

SEQ ID NO: 44502 - protein, 15 aa, Homo Sapiens
LDTRTLEVQSDYSSY

SEQ ID NO: 44503 - protein, 15 aa, Homo Sapiens
DTRTLEVQSDYSSYA

SEQ ID NO: 44504 - protein, 15 aa, Homo Sapiens
TRTLEVQSDYSSYAR

SEQ ID NO: 44505 - protein, 15 aa, Homo Sapiens
RTLEVQSDYSSYART

SEQ ID NO: 44506 - protein, 15 aa, Homo Sapiens
TLEVQSDYSSYARTS

SEQ ID NO: 44507 - protein, 15 aa, Homo Sapiens
LEVQSDYSSYARTSI

SEQ ID NO: 44508 - protein, 15 aa, Homo Sapiens
EVQSDYSSYARTSIR

SEQ ID NO: 44509 - protein, 15 aa, Homo Sapiens
VQSDYSSYARTSIRA

SEQ ID NO: 44510 - protein, 15 aa, Homo Sapiens
QSDYSSYARTSIRAS

SEQ ID NO: 44511 - protein, 15 aa, Homo Sapiens
SDYSSYARTSIRASL

SEQ ID NO: 44512 - protein, 15 aa, Homo Sapiens
DYSSYARTSIRASLT

SEQ ID NO: 44513 - protein, 15 aa, Homo Sapiens
YSSYARTSIRASLTF

SEQ ID NO: 44514 - protein, 15 aa, Homo Sapiens
SSYARTSIRASLTFN

SEQ ID NO: 44515 - protein, 15 aa, Homo Sapiens
SYARTSIRASLTFNR

SEQ ID NO: 44516 - protein, 15 aa, Homo Sapiens
YARTSIRASLTFNRG

SEQ ID NO: 44517 - protein, 15 aa, Homo Sapiens
ARTSIRASLTFNRGF

SEQ ID NO: 44518 - protein, 15 aa, Homo Sapiens
RTSIRASLTFNRGFK

SEQ ID NO: 44519 - protein, 15 aa, Homo Sapiens
TSIRASLTFNRGFKA

SEQ ID NO: 44520 - protein, 15 aa, Homo Sapiens
SIRASLTFNRGFKAG

SEQ ID NO: 44521 - protein, 15 aa, Homo Sapiens
IRASLTFNRGFKAGR

SEQ ID NO: 44522 - protein, 15 aa, Homo Sapiens
RASLTFNRGFKAGRN

SEQ ID NO: 44523 - protein, 15 aa, Homo Sapiens
ASLTFNRGFKAGRNM

SEQ ID NO: 44524 - protein, 15 aa, Homo Sapiens
SLTFNRGFKAGRNMR

SEQ ID NO: 44525 - protein, 15 aa, Homo Sapiens
LTFNRGFKAGRNMRR

SEQ ID NO: 44526 - protein, 15 aa, Homo Sapiens
TFNRGFKAGRNMRRK

SEQ ID NO: 44527 - protein, 15 aa, Homo Sapiens
FNRGFKAGRNMRRKL

SEQ ID NO: 44528 - protein, 15 aa, Homo Sapiens
NRGFKAGRNMRRKLF

SEQ ID NO: 44529 - protein, 15 aa, Homo Sapiens
RGFKAGRNMRRKLFG

SEQ ID NO: 44530 - protein, 15 aa, Homo Sapiens
GFKAGRNMRRKLFGV

SEQ ID NO: 44531 - protein, 15 aa, Homo Sapiens
FKAGRNMRRKLFGVL

SEQ ID NO: 44532 - protein, 15 aa, Homo Sapiens
KAGRNMRRKLFGVLR

SEQ ID NO: 44533 - protein, 15 aa, Homo Sapiens
AGRNMRRKLFGVLRL

SEQ ID NO: 44534 - protein, 15 aa, Homo Sapiens
GRNMRRKLFGVLRLK

SEQ ID NO: 44535 - protein, 15 aa, Homo Sapiens
RNMRRKLFGVLRLKC

SEQ ID NO: 44536 - protein, 15 aa, Homo Sapiens
NMRRKLFGVLRLKCH

SEQ ID NO: 44537 - protein, 15 aa, Homo Sapiens
MRRKLFGVLRLKCHS

SEQ ID NO: 44538 - protein, 15 aa, Homo Sapiens
RRKLFGVLRLKCHSL

SEQ ID NO: 44539 - protein, 15 aa, Homo Sapiens
RKLFGVLRLKCHSLF

SEQ ID NO: 44540 - protein, 15 aa, Homo Sapiens
KLFGVLRLKCHSLFL

SEQ ID NO: 44541 - protein, 15 aa, Homo Sapiens
LFGVLRLKCHSLFLD

SEQ ID NO: 44542 - protein, 15 aa, Homo Sapiens
FGVLRLKCHSLFLDL

SEQ ID NO: 44543 - protein, 15 aa, Homo Sapiens
GVLRLKCHSLFLDLQ

SEQ ID NO: 44544 - protein, 15 aa, Homo Sapiens
VLRLKCHSLFLDLQV

SEQ ID NO: 44545 - protein, 15 aa, Homo Sapiens
LRLKCHSLFLDLQVN

SEQ ID NO: 44546 - protein, 15 aa, Homo Sapiens
RLKCHSLFLDLQVNS

SEQ ID NO: 44547 - protein, 15 aa, Homo Sapiens
LKCHSLFLDLQVNSL

SEQ ID NO: 44548 - protein, 15 aa, Homo Sapiens
KCHSLFLDLQVNSLQ

SEQ ID NO: 44549 - protein, 15 aa, Homo Sapiens
CHSLFLDLQVNSLQT

SEQ ID NO: 44550 - protein, 15 aa, Homo Sapiens
HSLFLDLQVNSLQTV

SEQ ID NO: 44551 - protein, 15 aa, Homo Sapiens
SLFLDLQVNSLQTVC

SEQ ID NO: 44552 - protein, 15 aa, Homo Sapiens
LFLDLQVNSLQTVCT

SEQ ID NO: 44553 - protein, 15 aa, Homo Sapiens
FLDLQVNSLQTVCTN

SEQ ID NO: 44554 - protein, 15 aa, Homo Sapiens
LDLQVNSLQTVCTNI

SEQ ID NO: 44555 - protein, 15 aa, Homo Sapiens
DLQVNSLQTVCTNIY

SEQ ID NO: 44556 - protein, 15 aa, Homo Sapiens
LQVNSLQTVCTNIYK

SEQ ID NO: 44557 - protein, 15 aa, Homo Sapiens
QVNSLQTVCTNIYKI

SEQ ID NO: 44558 - protein, 15 aa, Homo Sapiens
VNSLQTVCTNIYKIL

SEQ ID NO: 44559 - protein, 15 aa, Homo Sapiens
NSLQTVCTNIYKILL

SEQ ID NO: 44560 - protein, 15 aa, Homo Sapiens
SLQTVCTNIYKILLL

SEQ ID NO: 44561 - protein, 15 aa, Homo Sapiens
LQTVCTNIYKILLLQ

SEQ ID NO: 44562 - protein, 15 aa, Homo Sapiens
QTVCTNIYKILLLQA

SEQ ID NO: 44563 - protein, 15 aa, Homo Sapiens
TVCTNIYKILLLQAY

SEQ ID NO: 44564 - protein, 15 aa, Homo Sapiens
VCTNIYKILLLQAYR

SEQ ID NO: 44565 - protein, 15 aa, Homo Sapiens
CTNIYKILLLQAYRF

SEQ ID NO: 44566 - protein, 15 aa, Homo Sapiens
TNIYKILLLQAYRFH

SEQ ID NO: 44567 - protein, 15 aa, Homo Sapiens
NIYKILLLQAYRFHA

SEQ ID NO: 44568 - protein, 15 aa, Homo Sapiens
IYKILLLQAYRFHAC

SEQ ID NO: 44569 - protein, 15 aa, Homo Sapiens
YKILLLQAYRFHACV

SEQ ID NO: 44570 - protein, 15 aa, Homo Sapiens
KILLLQAYRFHACVL

SEQ ID NO: 44571 - protein, 15 aa, Homo Sapiens
ILLLQAYRFHACVLQ

SEQ ID NO: 44572 - protein, 15 aa, Homo Sapiens
LLLQAYRFHACVLQL

SEQ ID NO: 44573 - protein, 15 aa, Homo Sapiens
LLQAYRFHACVLQLP

SEQ ID NO: 44574 - protein, 15 aa, Homo Sapiens
LQAYRFHACVLQLPF

SEQ ID NO: 44575 - protein, 15 aa, Homo Sapiens
QAYRFHACVLQLPFH

SEQ ID NO: 44576 - protein, 15 aa, Homo Sapiens
AYRFHACVLQLPFHQ

SEQ ID NO: 44577 - protein, 15 aa, Homo Sapiens
YRFHACVLQLPFHQQ

SEQ ID NO: 44578 - protein, 15 aa, Homo Sapiens
RFHACVLQLPFHQQV

SEQ ID NO: 44579 - protein, 15 aa, Homo Sapiens
FHACVLQLPFHQQVW

SEQ ID NO: 44580 - protein, 15 aa, Homo Sapiens
HACVLQLPFHQQVWK

SEQ ID NO: 44581 - protein, 15 aa, Homo Sapiens
ACVLQLPFHQQVWKN

SEQ ID NO: 44582 - protein, 15 aa, Homo Sapiens
CVLQLPFHQQVWKNP

SEQ ID NO: 44583 - protein, 15 aa, Homo Sapiens
VLQLPFHQQVWKNPT

SEQ ID NO: 44584 - protein, 15 aa, Homo Sapiens
LQLPFHQQVWKNPTF

SEQ ID NO: 44585 - protein, 15 aa, Homo Sapiens
QLPFHQQVWKNPTFF

SEQ ID NO: 44586 - protein, 15 aa, Homo Sapiens
LPFHQQVWKNPTFFL

SEQ ID NO: 44587 - protein, 15 aa, Homo Sapiens
PFHQQVWKNPTFFLR

SEQ ID NO: 44588 - protein, 15 aa, Homo Sapiens
FHQQVWKNPTFFLRV

SEQ ID NO: 44589 - protein, 15 aa, Homo Sapiens
HQQVWKNPTFFLRVI

SEQ ID NO: 44590 - protein, 15 aa, Homo Sapiens
QQVWKNPTFFLRVIS

SEQ ID NO: 44591 - protein, 15 aa, Homo Sapiens
QVWKNPTFFLRVISD

SEQ ID NO: 44592 - protein, 15 aa, Homo Sapiens
VWKNPTFFLRVISDT

SEQ ID NO: 44593 - protein, 15 aa, Homo Sapiens
WKNPTFFLRVISDTA

SEQ ID NO: 44594 - protein, 15 aa, Homo Sapiens
KNPTFFLRVISDTAS

SEQ ID NO: 44595 - protein, 15 aa, Homo Sapiens
NPTFFLRVISDTASL

SEQ ID NO: 44596 - protein, 15 aa, Homo Sapiens
PTFFLRVISDTASLC

SEQ ID NO: 44597 - protein, 15 aa, Homo Sapiens
TFFLRVISDTASLCY

SEQ ID NO: 44598 - protein, 15 aa, Homo Sapiens
FFLRVISDTASLCYS

SEQ ID NO: 44599 - protein, 15 aa, Homo Sapiens
FLRVISDTASLCYSI

SEQ ID NO: 44600 - protein, 15 aa, Homo Sapiens
LRVISDTASLCYSIL

SEQ ID NO: 44601 - protein, 15 aa, Homo Sapiens
RVISDTASLCYSILK

SEQ ID NO: 44602 - protein, 15 aa, Homo Sapiens
VISDTASLCYSILKA

SEQ ID NO: 44603 - protein, 15 aa, Homo Sapiens
ISDTASLCYSILKAK

SEQ ID NO: 44604 - protein, 15 aa, Homo Sapiens
SDTASLCYSILKAKN

SEQ ID NO: 44605 - protein, 15 aa, Homo Sapiens
DTASLCYSILKAKNA

SEQ ID NO: 44606 - protein, 15 aa, Homo Sapiens
TASLCYSILKAKNAG

SEQ ID NO: 44607 - protein, 15 aa, Homo Sapiens
ASLCYSILKAKNAGM

SEQ ID NO: 44608 - protein, 15 aa, Homo Sapiens
SLCYSILKAKNAGMS

SEQ ID NO: 44609 - protein, 15 aa, Homo Sapiens
LCYSILKAKNAGMSL

SEQ ID NO: 44610 - protein, 15 aa, Homo Sapiens
CYSILKAKNAGMSLG

SEQ ID NO: 44611 - protein, 15 aa, Homo Sapiens
YSILKAKNAGMSLGA

SEQ ID NO: 44612 - protein, 15 aa, Homo Sapiens
SILKAKNAGMSLGAK

SEQ ID NO: 44613 - protein, 15 aa, Homo Sapiens
ILKAKNAGMSLGAKG

SEQ ID NO: 44614 - protein, 15 aa, Homo Sapiens
LKAKNAGMSLGAKGA

SEQ ID NO: 44615 - protein, 15 aa, Homo Sapiens
KAKNAGMSLGAKGAA

SEQ ID NO: 44616 - protein, 15 aa, Homo Sapiens
AKNAGMSLGAKGAAG

SEQ ID NO: 44617 - protein, 15 aa, Homo Sapiens
KNAGMSLGAKGAAGP

SEQ ID NO: 44618 - protein, 15 aa, Homo Sapiens
NAGMSLGAKGAAGPL

SEQ ID NO: 44619 - protein, 15 aa, Homo Sapiens
AGMSLGAKGAAGPLP

SEQ ID NO: 44620 - protein, 15 aa, Homo Sapiens
GMSLGAKGAAGPLPS

SEQ ID NO: 44621 - protein, 15 aa, Homo Sapiens
MSLGAKGAAGPLPSE

SEQ ID NO: 44622 - protein, 15 aa, Homo Sapiens
SLGAKGAAGPLPSEA

SEQ ID NO: 44623 - protein, 15 aa, Homo Sapiens
LGAKGAAGPLPSEAV

SEQ ID NO: 44624 - protein, 15 aa, Homo Sapiens
GAKGAAGPLPSEAVQ

SEQ ID NO: 44625 - protein, 15 aa, Homo Sapiens
AKGAAGPLPSEAVQW

SEQ ID NO: 44626 - protein, 15 aa, Homo Sapiens
KGAAGPLPSEAVQWL

SEQ ID NO: 44627 - protein, 15 aa, Homo Sapiens
GAAGPLPSEAVQWLC

SEQ ID NO: 44628 - protein, 15 aa, Homo Sapiens
AAGPLPSEAVQWLCH

SEQ ID NO: 44629 - protein, 15 aa, Homo Sapiens
AGPLPSEAVQWLCHQ

SEQ ID NO: 44630 - protein, 15 aa, Homo Sapiens
GPLPSEAVQWLCHQA

SEQ ID NO: 44631 - protein, 15 aa, Homo Sapiens
PLPSEAVQWLCHQAF

SEQ ID NO: 44632 - protein, 15 aa, Homo Sapiens
LPSEAVQWLCHQAFL

SEQ ID NO: 44633 - protein, 15 aa, Homo Sapiens
PSEAVQWLCHQAFLL

SEQ ID NO: 44634 - protein, 15 aa, Homo Sapiens
SEAVQWLCHQAFLLK

SEQ ID NO: 44635 - protein, 15 aa, Homo Sapiens
EAVQWLCHQAFLLKL

SEQ ID NO: 44636 - protein, 15 aa, Homo Sapiens
AVQWLCHQAFLLKLT

SEQ ID NO: 44637 - protein, 15 aa, Homo Sapiens
VQWLCHQAFLLKLTR

SEQ ID NO: 44638 - protein, 15 aa, Homo Sapiens
QWLCHQAFLLKLTRH

SEQ ID NO: 44639 - protein, 15 aa, Homo Sapiens
WLCHQAFLLKLTRHR

SEQ ID NO: 44640 - protein, 15 aa, Homo Sapiens
LCHQAFLLKLTRHRV

SEQ ID NO: 44641 - protein, 15 aa, Homo Sapiens
CHQAFLLKLTRHRVT

SEQ ID NO: 44642 - protein, 15 aa, Homo Sapiens
HQAFLLKLTRHRVTY

SEQ ID NO: 44643 - protein, 15 aa, Homo Sapiens
QAFLLKLTRHRVTYV

SEQ ID NO: 44644 - protein, 15 aa, Homo Sapiens
AFLLKLTRHRVTYVP

SEQ ID NO: 44645 - protein, 15 aa, Homo Sapiens
FLLKLTRHRVTYVPL

SEQ ID NO: 44646 - protein, 15 aa, Homo Sapiens
LLKLTRHRVTYVPLL

SEQ ID NO: 44647 - protein, 15 aa, Homo Sapiens
LKLTRHRVTYVPLLG

SEQ ID NO: 44648 - protein, 15 aa, Homo Sapiens
KLTRHRVTYVPLLGS

SEQ ID NO: 44649 - protein, 15 aa, Homo Sapiens
LTRHRVTYVPLLGSL

SEQ ID NO: 44650 - protein, 15 aa, Homo Sapiens
TRHRVTYVPLLGSLR

SEQ ID NO: 44651 - protein, 15 aa, Homo Sapiens
RHRVTYVPLLGSLRT

SEQ ID NO: 44652 - protein, 15 aa, Homo Sapiens
HRVTYVPLLGSLRTA

SEQ ID NO: 44653 - protein, 15 aa, Homo Sapiens
RVTYVPLLGSLRTAQ

SEQ ID NO: 44654 - protein, 15 aa, Homo Sapiens
VTYVPLLGSLRTAQT

SEQ ID NO: 44655 - protein, 15 aa, Homo Sapiens
TYVPLLGSLRTAQTQ

SEQ ID NO: 44656 - protein, 15 aa, Homo Sapiens
YVPLLGSLRTAQTQL

SEQ ID NO: 44657 - protein, 15 aa, Homo Sapiens
VPLLGSLRTAQTQLS

SEQ ID NO: 44658 - protein, 15 aa, Homo Sapiens
PLLGSLRTAQTQLSR

SEQ ID NO: 44659 - protein, 15 aa, Homo Sapiens
LLGSLRTAQTQLSRK

SEQ ID NO: 44660 - protein, 15 aa, Homo Sapiens
LGSLRTAQTQLSRKL

SEQ ID NO: 44661 - protein, 15 aa, Homo Sapiens
GSLRTAQTQLSRKLP

SEQ ID NO: 44662 - protein, 15 aa, Homo Sapiens
SLRTAQTQLSRKLPG

SEQ ID NO: 44663 - protein, 15 aa, Homo Sapiens
LRTAQTQLSRKLPGT

SEQ ID NO: 44664 - protein, 15 aa, Homo Sapiens
RTAQTQLSRKLPGTT

SEQ ID NO: 44665 - protein, 15 aa, Homo Sapiens
TAQTQLSRKLPGTTL

SEQ ID NO: 44666 - protein, 15 aa, Homo Sapiens
AQTQLSRKLPGTTLT

SEQ ID NO: 44667 - protein, 15 aa, Homo Sapiens
QTQLSRKLPGTTLTA

SEQ ID NO: 44668 - protein, 15 aa, Homo Sapiens
TQLSRKLPGTTLTAL

SEQ ID NO: 44669 - protein, 15 aa, Homo Sapiens
QLSRKLPGTTLTALE

SEQ ID NO: 44670 - protein, 15 aa, Homo Sapiens
LSRKLPGTTLTALEA

SEQ ID NO: 44671 - protein, 15 aa, Homo Sapiens
SRKLPGTTLTALEAA

SEQ ID NO: 44672 - protein, 15 aa, Homo Sapiens
RKLPGTTLTALEAAA

SEQ ID NO: 44673 - protein, 15 aa, Homo Sapiens
KLPGTTLTALEAAAN

SEQ ID NO: 44674 - protein, 15 aa, Homo Sapiens
LPGTTLTALEAAANP

SEQ ID NO: 44675 - protein, 15 aa, Homo Sapiens
PGTTLTALEAAANPA

SEQ ID NO: 44676 - protein, 15 aa, Homo Sapiens
GTTLTALEAAANPAL

SEQ ID NO: 44677 - protein, 15 aa, Homo Sapiens
TTLTALEAAANPALP

SEQ ID NO: 44678 - protein, 15 aa, Homo Sapiens
TLTALEAAANPALPS

SEQ ID NO: 44679 - protein, 15 aa, Homo Sapiens
LTALEAAANPALPSD

SEQ ID NO: 44680 - protein, 15 aa, Homo Sapiens
TALEAAANPALPSDF

SEQ ID NO: 44681 - protein, 15 aa, Homo Sapiens
ALEAAANPALPSDFK

SEQ ID NO: 44682 - protein, 15 aa, Homo Sapiens
LEAAANPALPSDFKT

SEQ ID NO: 44683 - protein, 15 aa, Homo Sapiens
EAAANPALPSDFKTI

SEQ ID NO: 44684 - protein, 15 aa, Homo Sapiens
AAANPALPSDFKTIL

SEQ ID NO: 44685 - protein, 15 aa, Homo Sapiens
AANPALPSDFKTILD

SEQ ID NO: 44686 - protein, 16 aa, Homo Sapiens
MPRAPRCRAVRSLLRS

SEQ ID NO: 44687 - protein, 16 aa, Homo Sapiens
PRAPRCRAVRSLLRSH

SEQ ID NO: 44688 - protein, 16 aa, Homo Sapiens
RAPRCRAVRSLLRSHY

SEQ ID NO: 44689 - protein, 16 aa, Homo Sapiens
APRCRAVRSLLRSHYR

SEQ ID NO: 44690 - protein, 16 aa, Homo Sapiens
PRCRAVRSLLRSHYRE

SEQ ID NO: 44691 - protein, 16 aa, Homo Sapiens
RCRAVRSLLRSHYREV

SEQ ID NO: 44692 - protein, 16 aa, Homo Sapiens
CRAVRSLLRSHYREVL

SEQ ID NO: 44693 - protein, 16 aa, Homo Sapiens
RAVRSLLRSHYREVLP

SEQ ID NO: 44694 - protein, 16 aa, Homo Sapiens
AVRSLLRSHYREVLPL

SEQ ID NO: 44695 - protein, 16 aa, Homo Sapiens
VRSLLRSHYREVLPLA

SEQ ID NO: 44696 - protein, 16 aa, Homo Sapiens
RSLLRSHYREVLPLAT

SEQ ID NO: 44697 - protein, 16 aa, Homo Sapiens
SLLRSHYREVLPLATF

SEQ ID NO: 44698 - protein, 16 aa, Homo Sapiens
LLRSHYREVLPLATFV

SEQ ID NO: 44699 - protein, 16 aa, Homo Sapiens
LRSHYREVLPLATFVR

SEQ ID NO: 44700 - protein, 16 aa, Homo Sapiens
RSHYREVLPLATFVRR

SEQ ID NO: 44701 - protein, 16 aa, Homo Sapiens
SHYREVLPLATFVRRL

SEQ ID NO: 44702 - protein, 16 aa, Homo Sapiens
HYREVLPLATFVRRLG

SEQ ID NO: 44703 - protein, 16 aa, Homo Sapiens
YREVLPLATFVRRLGP

SEQ ID NO: 44704 - protein, 16 aa, Homo Sapiens
REVLPLATFVRRLGPQ

SEQ ID NO: 44705 - protein, 16 aa, Homo Sapiens
EVLPLATFVRRLGPQG

SEQ ID NO: 44706 - protein, 16 aa, Homo Sapiens
VLPLATFVRRLGPQGW

SEQ ID NO: 44707 - protein, 16 aa, Homo Sapiens
LPLATFVRRLGPQGWR

SEQ ID NO: 44708 - protein, 16 aa, Homo Sapiens
PLATFVRRLGPQGWRL

SEQ ID NO: 44709 - protein, 16 aa, Homo Sapiens
LATFVRRLGPQGWRLV

SEQ ID NO: 44710 - protein, 16 aa, Homo Sapiens
ATFVRRLGPQGWRLVQ

SEQ ID NO: 44711 - protein, 16 aa, Homo Sapiens
TFVRRLGPQGWRLVQR

SEQ ID NO: 44712 - protein, 16 aa, Homo Sapiens
FVRRLGPQGWRLVQRG

SEQ ID NO: 44713 - protein, 16 aa, Homo Sapiens
VRRLGPQGWRLVQRGD

SEQ ID NO: 44714 - protein, 16 aa, Homo Sapiens
RRLGPQGWRLVQRGDP

SEQ ID NO: 44715 - protein, 16 aa, Homo Sapiens
RLGPQGWRLVQRGDPA

SEQ ID NO: 44716 - protein, 16 aa, Homo Sapiens
LGPQGWRLVQRGDPAA

SEQ ID NO: 44717 - protein, 16 aa, Homo Sapiens
GPQGWRLVQRGDPAAF

SEQ ID NO: 44718 - protein, 16 aa, Homo Sapiens
PQGWRLVQRGDPAAFR

SEQ ID NO: 44719 - protein, 16 aa, Homo Sapiens
QGWRLVQRGDPAAFRA

SEQ ID NO: 44720 - protein, 16 aa, Homo Sapiens
GWRLVQRGDPAAFRAL

SEQ ID NO: 44721 - protein, 16 aa, Homo Sapiens
WRLVQRGDPAAFRALV

SEQ ID NO: 44722 - protein, 16 aa, Homo Sapiens
RLVQRGDPAAFRALVA

SEQ ID NO: 44723 - protein, 16 aa, Homo Sapiens
LVQRGDPAAFRALVAQ

SEQ ID NO: 44724 - protein, 16 aa, Homo Sapiens
VQRGDPAAFRALVAQC

SEQ ID NO: 44725 - protein, 16 aa, Homo Sapiens
QRGDPAAFRALVAQCL

SEQ ID NO: 44726 - protein, 16 aa, Homo Sapiens
RGDPAAFRALVAQCLV

SEQ ID NO: 44727 - protein, 16 aa, Homo Sapiens
GDPAAFRALVAQCLVC

SEQ ID NO: 44728 - protein, 16 aa, Homo Sapiens
DPAAFRALVAQCLVCV

SEQ ID NO: 44729 - protein, 16 aa, Homo Sapiens
PAAFRALVAQCLVCVP

SEQ ID NO: 44730 - protein, 16 aa, Homo Sapiens
AAFRALVAQCLVCVPW

SEQ ID NO: 44731 - protein, 16 aa, Homo Sapiens
AFRALVAQCLVCVPWD

SEQ ID NO: 44732 - protein, 16 aa, Homo Sapiens
FRALVAQCLVCVPWDA

SEQ ID NO: 44733 - protein, 16 aa, Homo Sapiens
RALVAQCLVCVPWDAR

SEQ ID NO: 44734 - protein, 16 aa, Homo Sapiens
ALVAQCLVCVPWDARP

SEQ ID NO: 44735 - protein, 16 aa, Homo Sapiens
LVAQCLVCVPWDARPP

SEQ ID NO: 44736 - protein, 16 aa, Homo Sapiens
VAQCLVCVPWDARPPP

SEQ ID NO: 44737 - protein, 16 aa, Homo Sapiens
AQCLVCVPWDARPPPA

SEQ ID NO: 44738 - protein, 16 aa, Homo Sapiens
QCLVCVPWDARPPPAA

SEQ ID NO: 44739 - protein, 16 aa, Homo Sapiens
CLVCVPWDARPPPAAP

SEQ ID NO: 44740 - protein, 16 aa, Homo Sapiens
LVCVPWDARPPPAAPS

SEQ ID NO: 44741 - protein, 16 aa, Homo Sapiens
VCVPWDARPPPAAPSF

SEQ ID NO: 44742 - protein, 16 aa, Homo Sapiens
CVPWDARPPPAAPSFR

SEQ ID NO: 44743 - protein, 16 aa, Homo Sapiens
VPWDARPPPAAPSFRQ

SEQ ID NO: 44744 - protein, 16 aa, Homo Sapiens
PWDARPPPAAPSFRQV

SEQ ID NO: 44745 - protein, 16 aa, Homo Sapiens
WDARPPPAAPSFRQVS

SEQ ID NO: 44746 - protein, 16 aa, Homo Sapiens
DARPPPAAPSFRQVSC

SEQ ID NO: 44747 - protein, 16 aa, Homo Sapiens
ARPPPAAPSFRQVSCL

SEQ ID NO: 44748 - protein, 16 aa, Homo Sapiens
RPPPAAPSFRQVSCLK

SEQ ID NO: 44749 - protein, 16 aa, Homo Sapiens
PPPAAPSFRQVSCLKE

SEQ ID NO: 44750 - protein, 16 aa, Homo Sapiens
PPAAPSFRQVSCLKEL

SEQ ID NO: 44751 - protein, 16 aa, Homo Sapiens
PAAPSFRQVSCLKELV

SEQ ID NO: 44752 - protein, 16 aa, Homo Sapiens
AAPSFRQVSCLKELVA

SEQ ID NO: 44753 - protein, 16 aa, Homo Sapiens
APSFRQVSCLKELVAR

SEQ ID NO: 44754 - protein, 16 aa, Homo Sapiens
PSFRQVSCLKELVARV

SEQ ID NO: 44755 - protein, 16 aa, Homo Sapiens
SFRQVSCLKELVARVL

SEQ ID NO: 44756 - protein, 16 aa, Homo Sapiens
FRQVSCLKELVARVLQ

SEQ ID NO: 44757 - protein, 16 aa, Homo Sapiens
RQVSCLKELVARVLQR

SEQ ID NO: 44758 - protein, 16 aa, Homo Sapiens
QVSCLKELVARVLQRL

SEQ ID NO: 44759 - protein, 16 aa, Homo Sapiens
VSCLKELVARVLQRLC

SEQ ID NO: 44760 - protein, 16 aa, Homo Sapiens
SCLKELVARVLQRLCE

SEQ ID NO: 44761 - protein, 16 aa, Homo Sapiens
CLKELVARVLQRLCER

SEQ ID NO: 44762 - protein, 16 aa, Homo Sapiens
LKELVARVLQRLCERG

SEQ ID NO: 44763 - protein, 16 aa, Homo Sapiens
KELVARVLQRLCERGA

SEQ ID NO: 44764 - protein, 16 aa, Homo Sapiens
ELVARVLQRLCERGAK

SEQ ID NO: 44765 - protein, 16 aa, Homo Sapiens
LVARVLQRLCERGAKN

SEQ ID NO: 44766 - protein, 16 aa, Homo Sapiens
VARVLQRLCERGAKNV

SEQ ID NO: 44767 - protein, 16 aa, Homo Sapiens
ARVLQRLCERGAKNVL

SEQ ID NO: 44768 - protein, 16 aa, Homo Sapiens
RVLQRLCERGAKNVLA

SEQ ID NO: 44769 - protein, 16 aa, Homo Sapiens
VLQRLCERGAKNVLAF

SEQ ID NO: 44770 - protein, 16 aa, Homo Sapiens
LQRLCERGAKNVLAFG

SEQ ID NO: 44771 - protein, 16 aa, Homo Sapiens
QRLCERGAKNVLAFGF

SEQ ID NO: 44772 - protein, 16 aa, Homo Sapiens
RLCERGAKNVLAFGFA

SEQ ID NO: 44773 - protein, 16 aa, Homo Sapiens
LCERGAKNVLAFGFAL

SEQ ID NO: 44774 - protein, 16 aa, Homo Sapiens
CERGAKNVLAFGFALL

SEQ ID NO: 44775 - protein, 16 aa, Homo Sapiens
ERGAKNVLAFGFALLD

SEQ ID NO: 44776 - protein, 16 aa, Homo Sapiens
RGAKNVLAFGFALLDG

SEQ ID NO: 44777 - protein, 16 aa, Homo Sapiens
GAKNVLAFGFALLDGA

SEQ ID NO: 44778 - protein, 16 aa, Homo Sapiens
AKNVLAFGFALLDGAR

SEQ ID NO: 44779 - protein, 16 aa, Homo Sapiens
KNVLAFGFALLDGARG

SEQ ID NO: 44780 - protein, 16 aa, Homo Sapiens
NVLAFGFALLDGARGG

SEQ ID NO: 44781 - protein, 16 aa, Homo Sapiens
VLAFGFALLDGARGGP

SEQ ID NO: 44782 - protein, 16 aa, Homo Sapiens
LAFGFALLDGARGGPP

SEQ ID NO: 44783 - protein, 16 aa, Homo Sapiens
AFGFALLDGARGGPPE

SEQ ID NO: 44784 - protein, 16 aa, Homo Sapiens
FGFALLDGARGGPPEA

SEQ ID NO: 44785 - protein, 16 aa, Homo Sapiens
GFALLDGARGGPPEAF

SEQ ID NO: 44786 - protein, 16 aa, Homo Sapiens
FALLDGARGGPPEAFT

SEQ ID NO: 44787 - protein, 16 aa, Homo Sapiens
ALLDGARGGPPEAFTT

SEQ ID NO: 44788 - protein, 16 aa, Homo Sapiens
LLDGARGGPPEAFTTS

SEQ ID NO: 44789 - protein, 16 aa, Homo Sapiens
LDGARGGPPEAFTTSV

SEQ ID NO: 44790 - protein, 16 aa, Homo Sapiens
DGARGGPPEAFTTSVR

SEQ ID NO: 44791 - protein, 16 aa, Homo Sapiens
GARGGPPEAFTTSVRS

SEQ ID NO: 44792 - protein, 16 aa, Homo Sapiens
ARGGPPEAFTTSVRSY

SEQ ID NO: 44793 - protein, 16 aa, Homo Sapiens
RGGPPEAFTTSVRSYL

SEQ ID NO: 44794 - protein, 16 aa, Homo Sapiens
GGPPEAFTTSVRSYLP

SEQ ID NO: 44795 - protein, 16 aa, Homo Sapiens
GPPEAFTTSVRSYLPN

SEQ ID NO: 44796 - protein, 16 aa, Homo Sapiens
PPEAFTTSVRSYLPNT

SEQ ID NO: 44797 - protein, 16 aa, Homo Sapiens
PEAFTTSVRSYLPNTV

SEQ ID NO: 44798 - protein, 16 aa, Homo Sapiens
EAFTTSVRSYLPNTVT

SEQ ID NO: 44799 - protein, 16 aa, Homo Sapiens
AFTTSVRSYLPNTVTD

SEQ ID NO: 44800 - protein, 16 aa, Homo Sapiens
FTTSVRSYLPNTVTDA

SEQ ID NO: 44801 - protein, 16 aa, Homo Sapiens
TTSVRSYLPNTVTDAL

SEQ ID NO: 44802 - protein, 16 aa, Homo Sapiens
TSVRSYLPNTVTDALR

SEQ ID NO: 44803 - protein, 16 aa, Homo Sapiens
SVRSYLPNTVTDALRG

SEQ ID NO: 44804 - protein, 16 aa, Homo Sapiens
VRSYLPNTVTDALRGS

SEQ ID NO: 44805 - protein, 16 aa, Homo Sapiens
RSYLPNTVTDALRGSG

SEQ ID NO: 44806 - protein, 16 aa, Homo Sapiens
SYLPNTVTDALRGSGA

SEQ ID NO: 44807 - protein, 16 aa, Homo Sapiens
YLPNTVTDALRGSGAW

SEQ ID NO: 44808 - protein, 16 aa, Homo Sapiens
LPNTVTDALRGSGAWG

SEQ ID NO: 44809 - protein, 16 aa, Homo Sapiens
PNTVTDALRGSGAWGL

SEQ ID NO: 44810 - protein, 16 aa, Homo Sapiens
NTVTDALRGSGAWGLL

SEQ ID NO: 44811 - protein, 16 aa, Homo Sapiens
TVTDALRGSGAWGLLL

SEQ ID NO: 44812 - protein, 16 aa, Homo Sapiens
VTDALRGSGAWGLLLR

SEQ ID NO: 44813 - protein, 16 aa, Homo Sapiens
TDALRGSGAWGLLLRR

SEQ ID NO: 44814 - protein, 16 aa, Homo Sapiens
DALRGSGAWGLLLRRV

SEQ ID NO: 44815 - protein, 16 aa, Homo Sapiens
ALRGSGAWGLLLRRVG

SEQ ID NO: 44816 - protein, 16 aa, Homo Sapiens
LRGSGAWGLLLRRVGD

SEQ ID NO: 44817 - protein, 16 aa, Homo Sapiens
RGSGAWGLLLRRVGDD

SEQ ID NO: 44818 - protein, 16 aa, Homo Sapiens
GSGAWGLLLRRVGDDV

SEQ ID NO: 44819 - protein, 16 aa, Homo Sapiens
SGAWGLLLRRVGDDVL

SEQ ID NO: 44820 - protein, 16 aa, Homo Sapiens
GAWGLLLRRVGDDVLV

SEQ ID NO: 44821 - protein, 16 aa, Homo Sapiens
AWGLLLRRVGDDVLVH

SEQ ID NO: 44822 - protein, 16 aa, Homo Sapiens
WGLLLRRVGDDVLVHL

SEQ ID NO: 44823 - protein, 16 aa, Homo Sapiens
GLLLRRVGDDVLVHLL

SEQ ID NO: 44824 - protein, 16 aa, Homo Sapiens
LLLRRVGDDVLVHLLA

SEQ ID NO: 44825 - protein, 16 aa, Homo Sapiens
LLRRVGDDVLVHLLAR

SEQ ID NO: 44826 - protein, 16 aa, Homo Sapiens
LRRVGDDVLVHLLARC

SEQ ID NO: 44827 - protein, 16 aa, Homo Sapiens
RRVGDDVLVHLLARCA

SEQ ID NO: 44828 - protein, 16 aa, Homo Sapiens
RVGDDVLVHLLARCAL

SEQ ID NO: 44829 - protein, 16 aa, Homo Sapiens
VGDDVLVHLLARCALF

SEQ ID NO: 44830 - protein, 16 aa, Homo Sapiens
GDDVLVHLLARCALFV

SEQ ID NO: 44831 - protein, 16 aa, Homo Sapiens
DDVLVHLLARCALFVL

SEQ ID NO: 44832 - protein, 16 aa, Homo Sapiens
DVLVHLLARCALFVLV

SEQ ID NO: 44833 - protein, 16 aa, Homo Sapiens
VLVHLLARCALFVLVA

SEQ ID NO: 44834 - protein, 16 aa, Homo Sapiens
LVHLLARCALFVLVAP

SEQ ID NO: 44835 - protein, 16 aa, Homo Sapiens
VHLLARCALFVLVAPS

SEQ ID NO: 44836 - protein, 16 aa, Homo Sapiens
HLLARCALFVLVAPSC

SEQ ID NO: 44837 - protein, 16 aa, Homo Sapiens
LLARCALFVLVAPSCA

SEQ ID NO: 44838 - protein, 16 aa, Homo Sapiens
LARCALFVLVAPSCAY

SEQ ID NO: 44839 - protein, 16 aa, Homo Sapiens
ARCALFVLVAPSCAYQ

SEQ ID NO: 44840 - protein, 16 aa, Homo Sapiens
RCALFVLVAPSCAYQV

SEQ ID NO: 44841 - protein, 16 aa, Homo Sapiens
CALFVLVAPSCAYQVC

SEQ ID NO: 44842 - protein, 16 aa, Homo Sapiens
ALFVLVAPSCAYQVCG

SEQ ID NO: 44843 - protein, 16 aa, Homo Sapiens
LFVLVAPSCAYQVCGP

SEQ ID NO: 44844 - protein, 16 aa, Homo Sapiens
FVLVAPSCAYQVCGPP

SEQ ID NO: 44845 - protein, 16 aa, Homo Sapiens
VLVAPSCAYQVCGPPL

SEQ ID NO: 44846 - protein, 16 aa, Homo Sapiens
LVAPSCAYQVCGPPLY

SEQ ID NO: 44847 - protein, 16 aa, Homo Sapiens
VAPSCAYQVCGPPLYQ

SEQ ID NO: 44848 - protein, 16 aa, Homo Sapiens
APSCAYQVCGPPLYQL

SEQ ID NO: 44849 - protein, 16 aa, Homo Sapiens
PSCAYQVCGPPLYQLG

SEQ ID NO: 44850 - protein, 16 aa, Homo Sapiens
SCAYQVCGPPLYQLGA

SEQ ID NO: 44851 - protein, 16 aa, Homo Sapiens
CAYQVCGPPLYQLGAA

SEQ ID NO: 44852 - protein, 16 aa, Homo Sapiens
AYQVCGPPLYQLGAAT

SEQ ID NO: 44853 - protein, 16 aa, Homo Sapiens
YQVCGPPLYQLGAATQ

SEQ ID NO: 44854 - protein, 16 aa, Homo Sapiens
QVCGPPLYQLGAATQA

SEQ ID NO: 44855 - protein, 16 aa, Homo Sapiens
VCGPPLYQLGAATQAR

SEQ ID NO: 44856 - protein, 16 aa, Homo Sapiens
CGPPLYQLGAATQARP

SEQ ID NO: 44857 - protein, 16 aa, Homo Sapiens
GPPLYQLGAATQARPP

SEQ ID NO: 44858 - protein, 16 aa, Homo Sapiens
PPLYQLGAATQARPPP

SEQ ID NO: 44859 - protein, 16 aa, Homo Sapiens
PLYQLGAATQARPPPH

SEQ ID NO: 44860 - protein, 16 aa, Homo Sapiens
LYQLGAATQARPPPHA

SEQ ID NO: 44861 - protein, 16 aa, Homo Sapiens
YQLGAATQARPPPHAS

SEQ ID NO: 44862 - protein, 16 aa, Homo Sapiens
QLGAATQARPPPHASG

SEQ ID NO: 44863 - protein, 16 aa, Homo Sapiens
LGAATQARPPPHASGP

SEQ ID NO: 44864 - protein, 16 aa, Homo Sapiens
GAATQARPPPHASGPR

SEQ ID NO: 44865 - protein, 16 aa, Homo Sapiens
AATQARPPPHASGPRR

SEQ ID NO: 44866 - protein, 16 aa, Homo Sapiens
ATQARPPPHASGPRRR

SEQ ID NO: 44867 - protein, 16 aa, Homo Sapiens
TQARPPPHASGPRRRL

SEQ ID NO: 44868 - protein, 16 aa, Homo Sapiens
QARPPPHASGPRRRLG

SEQ ID NO: 44869 - protein, 16 aa, Homo Sapiens
ARPPPHASGPRRRLGC

SEQ ID NO: 44870 - protein, 16 aa, Homo Sapiens
RPPPHASGPRRRLGCE

SEQ ID NO: 44871 - protein, 16 aa, Homo Sapiens
PPPHASGPRRRLGCER

SEQ ID NO: 44872 - protein, 16 aa, Homo Sapiens
PPHASGPRRRLGCERA

SEQ ID NO: 44873 - protein, 16 aa, Homo Sapiens
PHASGPRRRLGCERAW

SEQ ID NO: 44874 - protein, 16 aa, Homo Sapiens
HASGPRRRLGCERAWN

SEQ ID NO: 44875 - protein, 16 aa, Homo Sapiens
ASGPRRRLGCERAWNH

SEQ ID NO: 44876 - protein, 16 aa, Homo Sapiens
SGPRRRLGCERAWNHS

SEQ ID NO: 44877 - protein, 16 aa, Homo Sapiens
GPRRRLGCERAWNHSV

SEQ ID NO: 44878 - protein, 16 aa, Homo Sapiens
PRRRLGCERAWNHSVR

SEQ ID NO: 44879 - protein, 16 aa, Homo Sapiens
RRRLGCERAWNHSVRE

SEQ ID NO: 44880 - protein, 16 aa, Homo Sapiens
RRLGCERAWNHSVREA

SEQ ID NO: 44881 - protein, 16 aa, Homo Sapiens
RLGCERAWNHSVREAG

SEQ ID NO: 44882 - protein, 16 aa, Homo Sapiens
LGCERAWNHSVREAGV

SEQ ID NO: 44883 - protein, 16 aa, Homo Sapiens
GCERAWNHSVREAGVP

SEQ ID NO: 44884 - protein, 16 aa, Homo Sapiens
CERAWNHSVREAGVPL

SEQ ID NO: 44885 - protein, 16 aa, Homo Sapiens
ERAWNHSVREAGVPLG

SEQ ID NO: 44886 - protein, 16 aa, Homo Sapiens
RAWNHSVREAGVPLGL

SEQ ID NO: 44887 - protein, 16 aa, Homo Sapiens
AWNHSVREAGVPLGLP

SEQ ID NO: 44888 - protein, 16 aa, Homo Sapiens
WNHSVREAGVPLGLPA

SEQ ID NO: 44889 - protein, 16 aa, Homo Sapiens
NHSVREAGVPLGLPAP

SEQ ID NO: 44890 - protein, 16 aa, Homo Sapiens
HSVREAGVPLGLPAPG

SEQ ID NO: 44891 - protein, 16 aa, Homo Sapiens
SVREAGVPLGLPAPGA

SEQ ID NO: 44892 - protein, 16 aa, Homo Sapiens
VREAGVPLGLPAPGAR

SEQ ID NO: 44893 - protein, 16 aa, Homo Sapiens
REAGVPLGLPAPGARR

SEQ ID NO: 44894 - protein, 16 aa, Homo Sapiens
EAGVPLGLPAPGARRR

SEQ ID NO: 44895 - protein, 16 aa, Homo Sapiens
AGVPLGLPAPGARRRG

SEQ ID NO: 44896 - protein, 16 aa, Homo Sapiens
GVPLGLPAPGARRRGG

SEQ ID NO: 44897 - protein, 16 aa, Homo Sapiens
VPLGLPAPGARRRGGS

SEQ ID NO: 44898 - protein, 16 aa, Homo Sapiens
PLGLPAPGARRRGGSA

SEQ ID NO: 44899 - protein, 16 aa, Homo Sapiens
LGLPAPGARRRGGSAS

SEQ ID NO: 44900 - protein, 16 aa, Homo Sapiens
GLPAPGARRRGGSASR

SEQ ID NO: 44901 - protein, 16 aa, Homo Sapiens
LPAPGARRRGGSASRS

SEQ ID NO: 44902 - protein, 16 aa, Homo Sapiens
PAPGARRRGGSASRSL

SEQ ID NO: 44903 - protein, 16 aa, Homo Sapiens
APGARRRGGSASRSLP

SEQ ID NO: 44904 - protein, 16 aa, Homo Sapiens
PGARRRGGSASRSLPL

SEQ ID NO: 44905 - protein, 16 aa, Homo Sapiens
GARRRGGSASRSLPLP

SEQ ID NO: 44906 - protein, 16 aa, Homo Sapiens
ARRRGGSASRSLPLPK

SEQ ID NO: 44907 - protein, 16 aa, Homo Sapiens
RRRGGSASRSLPLPKR

SEQ ID NO: 44908 - protein, 16 aa, Homo Sapiens
RRGGSASRSLPLPKRP

SEQ ID NO: 44909 - protein, 16 aa, Homo Sapiens
RGGSASRSLPLPKRPR

SEQ ID NO: 44910 - protein, 16 aa, Homo Sapiens
GGSASRSLPLPKRPRR

SEQ ID NO: 44911 - protein, 16 aa, Homo Sapiens
GSASRSLPLPKRPRRG

SEQ ID NO: 44912 - protein, 16 aa, Homo Sapiens
SASRSLPLPKRPRRGA

SEQ ID NO: 44913 - protein, 16 aa, Homo Sapiens
ASRSLPLPKRPRRGAA

SEQ ID NO: 44914 - protein, 16 aa, Homo Sapiens
SRSLPLPKRPRRGAAP

SEQ ID NO: 44915 - protein, 16 aa, Homo Sapiens
RSLPLPKRPRRGAAPE

SEQ ID NO: 44916 - protein, 16 aa, Homo Sapiens
SLPLPKRPRRGAAPEP

SEQ ID NO: 44917 - protein, 16 aa, Homo Sapiens
LPLPKRPRRGAAPEPE

SEQ ID NO: 44918 - protein, 16 aa, Homo Sapiens
PLPKRPRRGAAPEPER

SEQ ID NO: 44919 - protein, 16 aa, Homo Sapiens
LPKRPRRGAAPEPERT

SEQ ID NO: 44920 - protein, 16 aa, Homo Sapiens
PKRPRRGAAPEPERTP

SEQ ID NO: 44921 - protein, 16 aa, Homo Sapiens
KRPRRGAAPEPERTPV

SEQ ID NO: 44922 - protein, 16 aa, Homo Sapiens
RPRRGAAPEPERTPVG

SEQ ID NO: 44923 - protein, 16 aa, Homo Sapiens
PRRGAAPEPERTPVGQ

SEQ ID NO: 44924 - protein, 16 aa, Homo Sapiens
RRGAAPEPERTPVGQG

SEQ ID NO: 44925 - protein, 16 aa, Homo Sapiens
RGAAPEPERTPVGQGS

SEQ ID NO: 44926 - protein, 16 aa, Homo Sapiens
GAAPEPERTPVGQGSW

SEQ ID NO: 44927 - protein, 16 aa, Homo Sapiens
AAPEPERTPVGQGSWA

SEQ ID NO: 44928 - protein, 16 aa, Homo Sapiens
APEPERTPVGQGSWAH

SEQ ID NO: 44929 - protein, 16 aa, Homo Sapiens
PEPERTPVGQGSWAHP

SEQ ID NO: 44930 - protein, 16 aa, Homo Sapiens
EPERTPVGQGSWAHPG

SEQ ID NO: 44931 - protein, 16 aa, Homo Sapiens
PERTPVGQGSWAHPGR

SEQ ID NO: 44932 - protein, 16 aa, Homo Sapiens
ERTPVGQGSWAHPGRT

SEQ ID NO: 44933 - protein, 16 aa, Homo Sapiens
RTPVGQGSWAHPGRTR

SEQ ID NO: 44934 - protein, 16 aa, Homo Sapiens
TPVGQGSWAHPGRTRG

SEQ ID NO: 44935 - protein, 16 aa, Homo Sapiens
PVGQGSWAHPGRTRGP

SEQ ID NO: 44936 - protein, 16 aa, Homo Sapiens
VGQGSWAHPGRTRGPS

SEQ ID NO: 44937 - protein, 16 aa, Homo Sapiens
GQGSWAHPGRTRGPSD

SEQ ID NO: 44938 - protein, 16 aa, Homo Sapiens
QGSWAHPGRTRGPSDR

SEQ ID NO: 44939 - protein, 16 aa, Homo Sapiens
GSWAHPGRTRGPSDRG

SEQ ID NO: 44940 - protein, 16 aa, Homo Sapiens
SWAHPGRTRGPSDRGF

SEQ ID NO: 44941 - protein, 16 aa, Homo Sapiens
WAHPGRTRGPSDRGFC

SEQ ID NO: 44942 - protein, 16 aa, Homo Sapiens
AHPGRTRGPSDRGFCV

SEQ ID NO: 44943 - protein, 16 aa, Homo Sapiens
HPGRTRGPSDRGFCVV

SEQ ID NO: 44944 - protein, 16 aa, Homo Sapiens
PGRTRGPSDRGFCVVS

SEQ ID NO: 44945 - protein, 16 aa, Homo Sapiens
GRTRGPSDRGFCVVSP

SEQ ID NO: 44946 - protein, 16 aa, Homo Sapiens
RTRGPSDRGFCVVSPA

SEQ ID NO: 44947 - protein, 16 aa, Homo Sapiens
TRGPSDRGFCVVSPAR

SEQ ID NO: 44948 - protein, 16 aa, Homo Sapiens
RGPSDRGFCVVSPARP

SEQ ID NO: 44949 - protein, 16 aa, Homo Sapiens
GPSDRGFCVVSPARPA

SEQ ID NO: 44950 - protein, 16 aa, Homo Sapiens
PSDRGFCVVSPARPAE

SEQ ID NO: 44951 - protein, 16 aa, Homo Sapiens
SDRGFCVVSPARPAEE

SEQ ID NO: 44952 - protein, 16 aa, Homo Sapiens
DRGFCVVSPARPAEEA

SEQ ID NO: 44953 - protein, 16 aa, Homo Sapiens
RGFCVVSPARPAEEAT

SEQ ID NO: 44954 - protein, 16 aa, Homo Sapiens
GFCVVSPARPAEEATS

SEQ ID NO: 44955 - protein, 16 aa, Homo Sapiens
FCVVSPARPAEEATSL

SEQ ID NO: 44956 - protein, 16 aa, Homo Sapiens
CVVSPARPAEEATSLE

SEQ ID NO: 44957 - protein, 16 aa, Homo Sapiens
VVSPARPAEEATSLEG

SEQ ID NO: 44958 - protein, 16 aa, Homo Sapiens
VSPARPAEEATSLEGA

SEQ ID NO: 44959 - protein, 16 aa, Homo Sapiens
SPARPAEEATSLEGAL

SEQ ID NO: 44960 - protein, 16 aa, Homo Sapiens
PARPAEEATSLEGALS

SEQ ID NO: 44961 - protein, 16 aa, Homo Sapiens
ARPAEEATSLEGALSG

SEQ ID NO: 44962 - protein, 16 aa, Homo Sapiens
RPAEEATSLEGALSGT

SEQ ID NO: 44963 - protein, 16 aa, Homo Sapiens
PAEEATSLEGALSGTR

SEQ ID NO: 44964 - protein, 16 aa, Homo Sapiens
AEEATSLEGALSGTRH

SEQ ID NO: 44965 - protein, 16 aa, Homo Sapiens
EEATSLEGALSGTRHS

SEQ ID NO: 44966 - protein, 16 aa, Homo Sapiens
EATSLEGALSGTRHSH

SEQ ID NO: 44967 - protein, 16 aa, Homo Sapiens
ATSLEGALSGTRHSHP

SEQ ID NO: 44968 - protein, 16 aa, Homo Sapiens
TSLEGALSGTRHSHPS

SEQ ID NO: 44969 - protein, 16 aa, Homo Sapiens
SLEGALSGTRHSHPSV

SEQ ID NO: 44970 - protein, 16 aa, Homo Sapiens
LEGALSGTRHSHPSVG

SEQ ID NO: 44971 - protein, 16 aa, Homo Sapiens
EGALSGTRHSHPSVGR

SEQ ID NO: 44972 - protein, 16 aa, Homo Sapiens
GALSGTRHSHPSVGRQ

SEQ ID NO: 44973 - protein, 16 aa, Homo Sapiens
ALSGTRHSHPSVGRQH

SEQ ID NO: 44974 - protein, 16 aa, Homo Sapiens
LSGTRHSHPSVGRQHH

SEQ ID NO: 44975 - protein, 16 aa, Homo Sapiens
SGTRHSHPSVGRQHHA

SEQ ID NO: 44976 - protein, 16 aa, Homo Sapiens
GTRHSHPSVGRQHHAG

SEQ ID NO: 44977 - protein, 16 aa, Homo Sapiens
TRHSHPSVGRQHHAGP

SEQ ID NO: 44978 - protein, 16 aa, Homo Sapiens
RHSHPSVGRQHHAGPP

SEQ ID NO: 44979 - protein, 16 aa, Homo Sapiens
HSHPSVGRQHHAGPPS

SEQ ID NO: 44980 - protein, 16 aa, Homo Sapiens
SHPSVGRQHHAGPPST

SEQ ID NO: 44981 - protein, 16 aa, Homo Sapiens
HPSVGRQHHAGPPSTS

SEQ ID NO: 44982 - protein, 16 aa, Homo Sapiens
PSVGRQHHAGPPSTSR

SEQ ID NO: 44983 - protein, 16 aa, Homo Sapiens
SVGRQHHAGPPSTSRP

SEQ ID NO: 44984 - protein, 16 aa, Homo Sapiens
VGRQHHAGPPSTSRPP

SEQ ID NO: 44985 - protein, 16 aa, Homo Sapiens
GRQHHAGPPSTSRPPR

SEQ ID NO: 44986 - protein, 16 aa, Homo Sapiens
RQHHAGPPSTSRPPRP

SEQ ID NO: 44987 - protein, 16 aa, Homo Sapiens
QHHAGPPSTSRPPRPW

SEQ ID NO: 44988 - protein, 16 aa, Homo Sapiens
HHAGPPSTSRPPRPWD

SEQ ID NO: 44989 - protein, 16 aa, Homo Sapiens
HAGPPSTSRPPRPWDT

SEQ ID NO: 44990 - protein, 16 aa, Homo Sapiens
AGPPSTSRPPRPWDTP

SEQ ID NO: 44991 - protein, 16 aa, Homo Sapiens
GPPSTSRPPRPWDTPC

SEQ ID NO: 44992 - protein, 16 aa, Homo Sapiens
PPSTSRPPRPWDTPCP

SEQ ID NO: 44993 - protein, 16 aa, Homo Sapiens
PSTSRPPRPWDTPCPP

SEQ ID NO: 44994 - protein, 16 aa, Homo Sapiens
STSRPPRPWDTPCPPV

SEQ ID NO: 44995 - protein, 16 aa, Homo Sapiens
TSRPPRPWDTPCPPVY

SEQ ID NO: 44996 - protein, 16 aa, Homo Sapiens
SRPPRPWDTPCPPVYA

SEQ ID NO: 44997 - protein, 16 aa, Homo Sapiens
RPPRPWDTPCPPVYAE

SEQ ID NO: 44998 - protein, 16 aa, Homo Sapiens
PPRPWDTPCPPVYAET

SEQ ID NO: 44999 - protein, 16 aa, Homo Sapiens
PRPWDTPCPPVYAETK

SEQ ID NO: 45000 - protein, 16 aa, Homo Sapiens
RPWDTPCPPVYAETKH

SEQ ID NO: 45001 - protein, 16 aa, Homo Sapiens
PWDTPCPPVYAETKHF

SEQ ID NO: 45002 - protein, 16 aa, Homo Sapiens
WDTPCPPVYAETKHFL

SEQ ID NO: 45003 - protein, 16 aa, Homo Sapiens
DTPCPPVYAETKHFLY

SEQ ID NO: 45004 - protein, 16 aa, Homo Sapiens
TPCPPVYAETKHFLYS

SEQ ID NO: 45005 - protein, 16 aa, Homo Sapiens
PCPPVYAETKHFLYSS

SEQ ID NO: 45006 - protein, 16 aa, Homo Sapiens
CPPVYAETKHFLYSSG

SEQ ID NO: 45007 - protein, 16 aa, Homo Sapiens
PPVYAETKHFLYSSGD

SEQ ID NO: 45008 - protein, 16 aa, Homo Sapiens
PVYAETKHFLYSSGDK

SEQ ID NO: 45009 - protein, 16 aa, Homo Sapiens
VYAETKHFLYSSGDKE

SEQ ID NO: 45010 - protein, 16 aa, Homo Sapiens
YAETKHFLYSSGDKEQ

SEQ ID NO: 45011 - protein, 16 aa, Homo Sapiens
AETKHFLYSSGDKEQL

SEQ ID NO: 45012 - protein, 16 aa, Homo Sapiens
ETKHFLYSSGDKEQLR

SEQ ID NO: 45013 - protein, 16 aa, Homo Sapiens
TKHFLYSSGDKEQLRP

SEQ ID NO: 45014 - protein, 16 aa, Homo Sapiens
KHFLYSSGDKEQLRPS

SEQ ID NO: 45015 - protein, 16 aa, Homo Sapiens
HFLYSSGDKEQLRPSF

SEQ ID NO: 45016 - protein, 16 aa, Homo Sapiens
FLYSSGDKEQLRPSFL

SEQ ID NO: 45017 - protein, 16 aa, Homo Sapiens
LYSSGDKEQLRPSFLL

SEQ ID NO: 45018 - protein, 16 aa, Homo Sapiens
YSSGDKEQLRPSFLLS

SEQ ID NO: 45019 - protein, 16 aa, Homo Sapiens
SSGDKEQLRPSFLLSS

SEQ ID NO: 45020 - protein, 16 aa, Homo Sapiens
SGDKEQLRPSFLLSSL

SEQ ID NO: 45021 - protein, 16 aa, Homo Sapiens
GDKEQLRPSFLLSSLR

SEQ ID NO: 45022 - protein, 16 aa, Homo Sapiens
DKEQLRPSFLLSSLRP

SEQ ID NO: 45023 - protein, 16 aa, Homo Sapiens
KEQLRPSFLLSSLRPS

SEQ ID NO: 45024 - protein, 16 aa, Homo Sapiens
EQLRPSFLLSSLRPSL

SEQ ID NO: 45025 - protein, 16 aa, Homo Sapiens
QLRPSFLLSSLRPSLT

SEQ ID NO: 45026 - protein, 16 aa, Homo Sapiens
LRPSFLLSSLRPSLTG

SEQ ID NO: 45027 - protein, 16 aa, Homo Sapiens
RPSFLLSSLRPSLTGA

SEQ ID NO: 45028 - protein, 16 aa, Homo Sapiens
PSFLLSSLRPSLTGAR

SEQ ID NO: 45029 - protein, 16 aa, Homo Sapiens
SFLLSSLRPSLTGARR

SEQ ID NO: 45030 - protein, 16 aa, Homo Sapiens
FLLSSLRPSLTGARRL

SEQ ID NO: 45031 - protein, 16 aa, Homo Sapiens
LLSSLRPSLTGARRLV

SEQ ID NO: 45032 - protein, 16 aa, Homo Sapiens
LSSLRPSLTGARRLVE

SEQ ID NO: 45033 - protein, 16 aa, Homo Sapiens
SSLRPSLTGARRLVET

SEQ ID NO: 45034 - protein, 16 aa, Homo Sapiens
SLRPSLTGARRLVETI

SEQ ID NO: 45035 - protein, 16 aa, Homo Sapiens
LRPSLTGARRLVETIF

SEQ ID NO: 45036 - protein, 16 aa, Homo Sapiens
RPSLTGARRLVETIFL

SEQ ID NO: 45037 - protein, 16 aa, Homo Sapiens
PSLTGARRLVETIFLG

SEQ ID NO: 45038 - protein, 16 aa, Homo Sapiens
SLTGARRLVETIFLGS

SEQ ID NO: 45039 - protein, 16 aa, Homo Sapiens
LTGARRLVETIFLGSR

SEQ ID NO: 45040 - protein, 16 aa, Homo Sapiens
TGARRLVETIFLGSRP

SEQ ID NO: 45041 - protein, 16 aa, Homo Sapiens
GARRLVETIFLGSRPW

SEQ ID NO: 45042 - protein, 16 aa, Homo Sapiens
ARRLVETIFLGSRPWM

SEQ ID NO: 45043 - protein, 16 aa, Homo Sapiens
RRLVETIFLGSRPWMP

SEQ ID NO: 45044 - protein, 16 aa, Homo Sapiens
RLVETIFLGSRPWMPG

SEQ ID NO: 45045 - protein, 16 aa, Homo Sapiens
LVETIFLGSRPWMPGT

SEQ ID NO: 45046 - protein, 16 aa, Homo Sapiens
VETIFLGSRPWMPGTP

SEQ ID NO: 45047 - protein, 16 aa, Homo Sapiens
ETIFLGSRPWMPGTPR

SEQ ID NO: 45048 - protein, 16 aa, Homo Sapiens
TIFLGSRPWMPGTPRR

SEQ ID NO: 45049 - protein, 16 aa, Homo Sapiens
IFLGSRPWMPGTPRRL

SEQ ID NO: 45050 - protein, 16 aa, Homo Sapiens
FLGSRPWMPGTPRRLP

SEQ ID NO: 45051 - protein, 16 aa, Homo Sapiens
LGSRPWMPGTPRRLPR

SEQ ID NO: 45052 - protein, 16 aa, Homo Sapiens
GSRPWMPGTPRRLPRL

SEQ ID NO: 45053 - protein, 16 aa, Homo Sapiens
SRPWMPGTPRRLPRLP

SEQ ID NO: 45054 - protein, 16 aa, Homo Sapiens
RPWMPGTPRRLPRLPQ

SEQ ID NO: 45055 - protein, 16 aa, Homo Sapiens
PWMPGTPRRLPRLPQR

SEQ ID NO: 45056 - protein, 16 aa, Homo Sapiens
WMPGTPRRLPRLPQRY

SEQ ID NO: 45057 - protein, 16 aa, Homo Sapiens
MPGTPRRLPRLPQRYW

SEQ ID NO: 45058 - protein, 16 aa, Homo Sapiens
PGTPRRLPRLPQRYWQ

SEQ ID NO: 45059 - protein, 16 aa, Homo Sapiens
GTPRRLPRLPQRYWQM

SEQ ID NO: 45060 - protein, 16 aa, Homo Sapiens
TPRRLPRLPQRYWQMR

SEQ ID NO: 45061 - protein, 16 aa, Homo Sapiens
PRRLPRLPQRYWQMRP

SEQ ID NO: 45062 - protein, 16 aa, Homo Sapiens
RRLPRLPQRYWQMRPL

SEQ ID NO: 45063 - protein, 16 aa, Homo Sapiens
RLPRLPQRYWQMRPLF

SEQ ID NO: 45064 - protein, 16 aa, Homo Sapiens
LPRLPQRYWQMRPLFL

SEQ ID NO: 45065 - protein, 16 aa, Homo Sapiens
PRLPQRYWQMRPLFLE

SEQ ID NO: 45066 - protein, 16 aa, Homo Sapiens
RLPQRYWQMRPLFLEL

SEQ ID NO: 45067 - protein, 16 aa, Homo Sapiens
LPQRYWQMRPLFLELL

SEQ ID NO: 45068 - protein, 16 aa, Homo Sapiens
PQRYWQMRPLFLELLG

SEQ ID NO: 45069 - protein, 16 aa, Homo Sapiens
QRYWQMRPLFLELLGN

SEQ ID NO: 45070 - protein, 16 aa, Homo Sapiens
RYWQMRPLFLELLGNH

SEQ ID NO: 45071 - protein, 16 aa, Homo Sapiens
YWQMRPLFLELLGNHA

SEQ ID NO: 45072 - protein, 16 aa, Homo Sapiens
WQMRPLFLELLGNHAQ

SEQ ID NO: 45073 - protein, 16 aa, Homo Sapiens
QMRPLFLELLGNHAQC

SEQ ID NO: 45074 - protein, 16 aa, Homo Sapiens
MRPLFLELLGNHAQCP

SEQ ID NO: 45075 - protein, 16 aa, Homo Sapiens
RPLFLELLGNHAQCPY

SEQ ID NO: 45076 - protein, 16 aa, Homo Sapiens
PLFLELLGNHAQCPYG

SEQ ID NO: 45077 - protein, 16 aa, Homo Sapiens
LFLELLGNHAQCPYGV

SEQ ID NO: 45078 - protein, 16 aa, Homo Sapiens
FLELLGNHAQCPYGVL

SEQ ID NO: 45079 - protein, 16 aa, Homo Sapiens
LELLGNHAQCPYGVLL

SEQ ID NO: 45080 - protein, 16 aa, Homo Sapiens
ELLGNHAQCPYGVLLK

SEQ ID NO: 45081 - protein, 16 aa, Homo Sapiens
LLGNHAQCPYGVLLKT

SEQ ID NO: 45082 - protein, 16 aa, Homo Sapiens
LGNHAQCPYGVLLKTH

SEQ ID NO: 45083 - protein, 16 aa, Homo Sapiens
GNHAQCPYGVLLKTHC

SEQ ID NO: 45084 - protein, 16 aa, Homo Sapiens
NHAQCPYGVLLKTHCP

SEQ ID NO: 45085 - protein, 16 aa, Homo Sapiens
HAQCPYGVLLKTHCPL

SEQ ID NO: 45086 - protein, 16 aa, Homo Sapiens
AQCPYGVLLKTHCPLR

SEQ ID NO: 45087 - protein, 16 aa, Homo Sapiens
QCPYGVLLKTHCPLRA

SEQ ID NO: 45088 - protein, 16 aa, Homo Sapiens
CPYGVLLKTHCPLRAA

SEQ ID NO: 45089 - protein, 16 aa, Homo Sapiens
PYGVLLKTHCPLRAAV

SEQ ID NO: 45090 - protein, 16 aa, Homo Sapiens
YGVLLKTHCPLRAAVT

SEQ ID NO: 45091 - protein, 16 aa, Homo Sapiens
GVLLKTHCPLRAAVTP

SEQ ID NO: 45092 - protein, 16 aa, Homo Sapiens
VLLKTHCPLRAAVTPA

SEQ ID NO: 45093 - protein, 16 aa, Homo Sapiens
LLKTHCPLRAAVTPAA

SEQ ID NO: 45094 - protein, 16 aa, Homo Sapiens
LKTHCPLRAAVTPAAG

SEQ ID NO: 45095 - protein, 16 aa, Homo Sapiens
KTHCPLRAAVTPAAGV

SEQ ID NO: 45096 - protein, 16 aa, Homo Sapiens
THCPLRAAVTPAAGVC

SEQ ID NO: 45097 - protein, 16 aa, Homo Sapiens
HCPLRAAVTPAAGVCA

SEQ ID NO: 45098 - protein, 16 aa, Homo Sapiens
CPLRAAVTPAAGVCAR

SEQ ID NO: 45099 - protein, 16 aa, Homo Sapiens
PLRAAVTPAAGVCARE

SEQ ID NO: 45100 - protein, 16 aa, Homo Sapiens
LRAAVTPAAGVCAREK

SEQ ID NO: 45101 - protein, 16 aa, Homo Sapiens
RAAVTPAAGVCAREKP

SEQ ID NO: 45102 - protein, 16 aa, Homo Sapiens
AAVTPAAGVCAREKPQ

SEQ ID NO: 45103 - protein, 16 aa, Homo Sapiens
AVTPAAGVCAREKPQG

SEQ ID NO: 45104 - protein, 16 aa, Homo Sapiens
VTPAAGVCAREKPQGS

SEQ ID NO: 45105 - protein, 16 aa, Homo Sapiens
TPAAGVCAREKPQGSV

SEQ ID NO: 45106 - protein, 16 aa, Homo Sapiens
PAAGVCAREKPQGSVA

SEQ ID NO: 45107 - protein, 16 aa, Homo Sapiens
AAGVCAREKPQGSVAA

SEQ ID NO: 45108 - protein, 16 aa, Homo Sapiens
AGVCAREKPQGSVAAP

SEQ ID NO: 45109 - protein, 16 aa, Homo Sapiens
GVCAREKPQGSVAAPE

SEQ ID NO: 45110 - protein, 16 aa, Homo Sapiens
VCAREKPQGSVAAPEE

SEQ ID NO: 45111 - protein, 16 aa, Homo Sapiens
CAREKPQGSVAAPEEE

SEQ ID NO: 45112 - protein, 16 aa, Homo Sapiens
AREKPQGSVAAPEEED

SEQ ID NO: 45113 - protein, 16 aa, Homo Sapiens
REKPQGSVAAPEEEDT

SEQ ID NO: 45114 - protein, 16 aa, Homo Sapiens
EKPQGSVAAPEEEDTD

SEQ ID NO: 45115 - protein, 16 aa, Homo Sapiens
KPQGSVAAPEEEDTDP

SEQ ID NO: 45116 - protein, 16 aa, Homo Sapiens
PQGSVAAPEEEDTDPR

SEQ ID NO: 45117 - protein, 16 aa, Homo Sapiens
QGSVAAPEEEDTDPRR

SEQ ID NO: 45118 - protein, 16 aa, Homo Sapiens
GSVAAPEEEDTDPRRL

SEQ ID NO: 45119 - protein, 16 aa, Homo Sapiens
SVAAPEEEDTDPRRLV

SEQ ID NO: 45120 - protein, 16 aa, Homo Sapiens
VAAPEEEDTDPRRLVQ

SEQ ID NO: 45121 - protein, 16 aa, Homo Sapiens
AAPEEEDTDPRRLVQL

SEQ ID NO: 45122 - protein, 16 aa, Homo Sapiens
APEEEDTDPRRLVQLL

SEQ ID NO: 45123 - protein, 16 aa, Homo Sapiens
PEEEDTDPRRLVQLLR

SEQ ID NO: 45124 - protein, 16 aa, Homo Sapiens
EEEDTDPRRLVQLLRQ

SEQ ID NO: 45125 - protein, 16 aa, Homo Sapiens
EEDTDPRRLVQLLRQH

SEQ ID NO: 45126 - protein, 16 aa, Homo Sapiens
EDTDPRRLVQLLRQHS

SEQ ID NO: 45127 - protein, 16 aa, Homo Sapiens
DTDPRRLVQLLRQHSS

SEQ ID NO: 45128 - protein, 16 aa, Homo Sapiens
TDPRRLVQLLRQHSSP

SEQ ID NO: 45129 - protein, 16 aa, Homo Sapiens
DPRRLVQLLRQHSSPW

SEQ ID NO: 45130 - protein, 16 aa, Homo Sapiens
PRRLVQLLRQHSSPWQ

SEQ ID NO: 45131 - protein, 16 aa, Homo Sapiens
RRLVQLLRQHSSPWQV

SEQ ID NO: 45132 - protein, 16 aa, Homo Sapiens
RLVQLLRQHSSPWQVY

SEQ ID NO: 45133 - protein, 16 aa, Homo Sapiens
LVQLLRQHSSPWQVYG

SEQ ID NO: 45134 - protein, 16 aa, Homo Sapiens
VQLLRQHSSPWQVYGF

SEQ ID NO: 45135 - protein, 16 aa, Homo Sapiens
QLLRQHSSPWQVYGFV

SEQ ID NO: 45136 - protein, 16 aa, Homo Sapiens
LLRQHSSPWQVYGFVR

SEQ ID NO: 45137 - protein, 16 aa, Homo Sapiens
LRQHSSPWQVYGFVRA

SEQ ID NO: 45138 - protein, 16 aa, Homo Sapiens
RQHSSPWQVYGFVRAC

SEQ ID NO: 45139 - protein, 16 aa, Homo Sapiens
QHSSPWQVYGFVRACL

SEQ ID NO: 45140 - protein, 16 aa, Homo Sapiens
HSSPWQVYGFVRACLR

SEQ ID NO: 45141 - protein, 16 aa, Homo Sapiens
SSPWQVYGFVRACLRR

SEQ ID NO: 45142 - protein, 16 aa, Homo Sapiens
SPWQVYGFVRACLRRL

SEQ ID NO: 45143 - protein, 16 aa, Homo Sapiens
PWQVYGFVRACLRRLV

SEQ ID NO: 45144 - protein, 16 aa, Homo Sapiens
WQVYGFVRACLRRLVP

SEQ ID NO: 45145 - protein, 16 aa, Homo Sapiens
QVYGFVRACLRRLVPP

SEQ ID NO: 45146 - protein, 16 aa, Homo Sapiens
VYGFVRACLRRLVPPG

SEQ ID NO: 45147 - protein, 16 aa, Homo Sapiens
YGFVRACLRRLVPPGL

SEQ ID NO: 45148 - protein, 16 aa, Homo Sapiens
GFVRACLRRLVPPGLW

SEQ ID NO: 45149 - protein, 16 aa, Homo Sapiens
FVRACLRRLVPPGLWG

SEQ ID NO: 45150 - protein, 16 aa, Homo Sapiens
VRACLRRLVPPGLWGS

SEQ ID NO: 45151 - protein, 16 aa, Homo Sapiens
RACLRRLVPPGLWGSR

SEQ ID NO: 45152 - protein, 16 aa, Homo Sapiens
ACLRRLVPPGLWGSRH

SEQ ID NO: 45153 - protein, 16 aa, Homo Sapiens
CLRRLVPPGLWGSRHN

SEQ ID NO: 45154 - protein, 16 aa, Homo Sapiens
LRRLVPPGLWGSRHNE

SEQ ID NO: 45155 - protein, 16 aa, Homo Sapiens
RRLVPPGLWGSRHNER

SEQ ID NO: 45156 - protein, 16 aa, Homo Sapiens
RLVPPGLWGSRHNERR

SEQ ID NO: 45157 - protein, 16 aa, Homo Sapiens
LVPPGLWGSRHNERRF

SEQ ID NO: 45158 - protein, 16 aa, Homo Sapiens
VPPGLWGSRHNERRFL

SEQ ID NO: 45159 - protein, 16 aa, Homo Sapiens
PPGLWGSRHNERRFLR

SEQ ID NO: 45160 - protein, 16 aa, Homo Sapiens
PGLWGSRHNERRFLRN

SEQ ID NO: 45161 - protein, 16 aa, Homo Sapiens
GLWGSRHNERRFLRNT

SEQ ID NO: 45162 - protein, 16 aa, Homo Sapiens
LWGSRHNERRFLRNTK

SEQ ID NO: 45163 - protein, 16 aa, Homo Sapiens
WGSRHNERRFLRNTKK

SEQ ID NO: 45164 - protein, 16 aa, Homo Sapiens
GSRHNERRFLRNTKKF

SEQ ID NO: 45165 - protein, 16 aa, Homo Sapiens
SRHNERRFLRNTKKFI

SEQ ID NO: 45166 - protein, 16 aa, Homo Sapiens
RHNERRFLRNTKKFIS

SEQ ID NO: 45167 - protein, 16 aa, Homo Sapiens
HNERRFLRNTKKFISL

SEQ ID NO: 45168 - protein, 16 aa, Homo Sapiens
NERRFLRNTKKFISLG

SEQ ID NO: 45169 - protein, 16 aa, Homo Sapiens
ERRFLRNTKKFISLGK

SEQ ID NO: 45170 - protein, 16 aa, Homo Sapiens
RRFLRNTKKFISLGKH

SEQ ID NO: 45171 - protein, 16 aa, Homo Sapiens
RFLRNTKKFISLGKHA

SEQ ID NO: 45172 - protein, 16 aa, Homo Sapiens
FLRNTKKFISLGKHAK

SEQ ID NO: 45173 - protein, 16 aa, Homo Sapiens
LRNTKKFISLGKHAKL

SEQ ID NO: 45174 - protein, 16 aa, Homo Sapiens
RNTKKFISLGKHAKLS

SEQ ID NO: 45175 - protein, 16 aa, Homo Sapiens
NTKKFISLGKHAKLSL

SEQ ID NO: 45176 - protein, 16 aa, Homo Sapiens
TKKFISLGKHAKLSLQ

SEQ ID NO: 45177 - protein, 16 aa, Homo Sapiens
KKFISLGKHAKLSLQE

SEQ ID NO: 45178 - protein, 16 aa, Homo Sapiens
KFISLGKHAKLSLQEL

SEQ ID NO: 45179 - protein, 16 aa, Homo Sapiens
FISLGKHAKLSLQELT

SEQ ID NO: 45180 - protein, 16 aa, Homo Sapiens
ISLGKHAKLSLQELTW

SEQ ID NO: 45181 - protein, 16 aa, Homo Sapiens
SLGKHAKLSLQELTWK

SEQ ID NO: 45182 - protein, 16 aa, Homo Sapiens
LGKHAKLSLQELTWKM

SEQ ID NO: 45183 - protein, 16 aa, Homo Sapiens
GKHAKLSLQELTWKMS

SEQ ID NO: 45184 - protein, 16 aa, Homo Sapiens
KHAKLSLQELTWKMSV

SEQ ID NO: 45185 - protein, 16 aa, Homo Sapiens
HAKLSLQELTWKMSVR

SEQ ID NO: 45186 - protein, 16 aa, Homo Sapiens
AKLSLQELTWKMSVRD

SEQ ID NO: 45187 - protein, 16 aa, Homo Sapiens
KLSLQELTWKMSVRDC

SEQ ID NO: 45188 - protein, 16 aa, Homo Sapiens
LSLQELTWKMSVRDCA

SEQ ID NO: 45189 - protein, 16 aa, Homo Sapiens
SLQELTWKMSVRDCAW

SEQ ID NO: 45190 - protein, 16 aa, Homo Sapiens
LQELTWKMSVRDCAWL

SEQ ID NO: 45191 - protein, 16 aa, Homo Sapiens
QELTWKMSVRDCAWLR

SEQ ID NO: 45192 - protein, 16 aa, Homo Sapiens
ELTWKMSVRDCAWLRR

SEQ ID NO: 45193 - protein, 16 aa, Homo Sapiens
LTWKMSVRDCAWLRRS

SEQ ID NO: 45194 - protein, 16 aa, Homo Sapiens
TWKMSVRDCAWLRRSP

SEQ ID NO: 45195 - protein, 16 aa, Homo Sapiens
WKMSVRDCAWLRRSPG

SEQ ID NO: 45196 - protein, 16 aa, Homo Sapiens
KMSVRDCAWLRRSPGV

SEQ ID NO: 45197 - protein, 16 aa, Homo Sapiens
MSVRDCAWLRRSPGVG

SEQ ID NO: 45198 - protein, 16 aa, Homo Sapiens
SVRDCAWLRRSPGVGC

SEQ ID NO: 45199 - protein, 16 aa, Homo Sapiens
VRDCAWLRRSPGVGCV

SEQ ID NO: 45200 - protein, 16 aa, Homo Sapiens
RDCAWLRRSPGVGCVP

SEQ ID NO: 45201 - protein, 16 aa, Homo Sapiens
DCAWLRRSPGVGCVPA

SEQ ID NO: 45202 - protein, 16 aa, Homo Sapiens
CAWLRRSPGVGCVPAA

SEQ ID NO: 45203 - protein, 16 aa, Homo Sapiens
AWLRRSPGVGCVPAAE

SEQ ID NO: 45204 - protein, 16 aa, Homo Sapiens
WLRRSPGVGCVPAAEH

SEQ ID NO: 45205 - protein, 16 aa, Homo Sapiens
LRRSPGVGCVPAAEHR

SEQ ID NO: 45206 - protein, 16 aa, Homo Sapiens
RRSPGVGCVPAAEHRL

SEQ ID NO: 45207 - protein, 16 aa, Homo Sapiens
RSPGVGCVPAAEHRLR

SEQ ID NO: 45208 - protein, 16 aa, Homo Sapiens
SPGVGCVPAAEHRLRE

SEQ ID NO: 45209 - protein, 16 aa, Homo Sapiens
PGVGCVPAAEHRLREE

SEQ ID NO: 45210 - protein, 16 aa, Homo Sapiens
GVGCVPAAEHRLREEI

SEQ ID NO: 45211 - protein, 16 aa, Homo Sapiens
VGCVPAAEHRLREEIL

SEQ ID NO: 45212 - protein, 16 aa, Homo Sapiens
GCVPAAEHRLREEILA

SEQ ID NO: 45213 - protein, 16 aa, Homo Sapiens
CVPAAEHRLREEILAK

SEQ ID NO: 45214 - protein, 16 aa, Homo Sapiens
VPAAEHRLREEILAKF

SEQ ID NO: 45215 - protein, 16 aa, Homo Sapiens
PAAEHRLREEILAKFL

SEQ ID NO: 45216 - protein, 16 aa, Homo Sapiens
AAEHRLREEILAKFLH

SEQ ID NO: 45217 - protein, 16 aa, Homo Sapiens
AEHRLREEILAKFLHW

SEQ ID NO: 45218 - protein, 16 aa, Homo Sapiens
EHRLREEILAKFLHWL

SEQ ID NO: 45219 - protein, 16 aa, Homo Sapiens
HRLREEILAKFLHWLM

SEQ ID NO: 45220 - protein, 16 aa, Homo Sapiens
RLREEILAKFLHWLMS

SEQ ID NO: 45221 - protein, 16 aa, Homo Sapiens
LREEILAKFLHWLMSV

SEQ ID NO: 45222 - protein, 16 aa, Homo Sapiens
REEILAKFLHWLMSVY

SEQ ID NO: 45223 - protein, 16 aa, Homo Sapiens
EEILAKFLHWLMSVYV

SEQ ID NO: 45224 - protein, 16 aa, Homo Sapiens
EILAKFLHWLMSVYVV

SEQ ID NO: 45225 - protein, 16 aa, Homo Sapiens
ILAKFLHWLMSVYVVE

SEQ ID NO: 45226 - protein, 16 aa, Homo Sapiens
LAKFLHWLMSVYVVEL

SEQ ID NO: 45227 - protein, 16 aa, Homo Sapiens
AKFLHWLMSVYVVELL

SEQ ID NO: 45228 - protein, 16 aa, Homo Sapiens
KFLHWLMSVYVVELLR

SEQ ID NO: 45229 - protein, 16 aa, Homo Sapiens
FLHWLMSVYVVELLRS

SEQ ID NO: 45230 - protein, 16 aa, Homo Sapiens
LHWLMSVYVVELLRSF

SEQ ID NO: 45231 - protein, 16 aa, Homo Sapiens
HWLMSVYVVELLRSFF

SEQ ID NO: 45232 - protein, 16 aa, Homo Sapiens
WLMSVYVVELLRSFFY

SEQ ID NO: 45233 - protein, 16 aa, Homo Sapiens
LMSVYVVELLRSFFYV

SEQ ID NO: 45234 - protein, 16 aa, Homo Sapiens
MSVYVVELLRSFFYVT

SEQ ID NO: 45235 - protein, 16 aa, Homo Sapiens
SVYVVELLRSFFYVTE

SEQ ID NO: 45236 - protein, 16 aa, Homo Sapiens
VYVVELLRSFFYVTET

SEQ ID NO: 45237 - protein, 16 aa, Homo Sapiens
YVVELLRSFFYVTETT

SEQ ID NO: 45238 - protein, 16 aa, Homo Sapiens
VVELLRSFFYVTETTF

SEQ ID NO: 45239 - protein, 16 aa, Homo Sapiens
VELLRSFFYVTETTFQ

SEQ ID NO: 45240 - protein, 16 aa, Homo Sapiens
ELLRSFFYVTETTFQK

SEQ ID NO: 45241 - protein, 16 aa, Homo Sapiens
LLRSFFYVTETTFQKN

SEQ ID NO: 45242 - protein, 16 aa, Homo Sapiens
LRSFFYVTETTFQKNR

SEQ ID NO: 45243 - protein, 16 aa, Homo Sapiens
RSFFYVTETTFQKNRL

SEQ ID NO: 45244 - protein, 16 aa, Homo Sapiens
SFFYVTETTFQKNRLF

SEQ ID NO: 45245 - protein, 16 aa, Homo Sapiens
FFYVTETTFQKNRLFF

SEQ ID NO: 45246 - protein, 16 aa, Homo Sapiens
FYVTETTFQKNRLFFY

SEQ ID NO: 45247 - protein, 16 aa, Homo Sapiens
YVTETTFQKNRLFFYR

SEQ ID NO: 45248 - protein, 16 aa, Homo Sapiens
VTETTFQKNRLFFYRK

SEQ ID NO: 45249 - protein, 16 aa, Homo Sapiens
TETTFQKNRLFFYRKS

SEQ ID NO: 45250 - protein, 16 aa, Homo Sapiens
ETTFQKNRLFFYRKSV

SEQ ID NO: 45251 - protein, 16 aa, Homo Sapiens
TTFQKNRLFFYRKSVW

SEQ ID NO: 45252 - protein, 16 aa, Homo Sapiens
TFQKNRLFFYRKSVWS

SEQ ID NO: 45253 - protein, 16 aa, Homo Sapiens
FQKNRLFFYRKSVWSK

SEQ ID NO: 45254 - protein, 16 aa, Homo Sapiens
QKNRLFFYRKSVWSKL

SEQ ID NO: 45255 - protein, 16 aa, Homo Sapiens
KNRLFFYRKSVWSKLQ

SEQ ID NO: 45256 - protein, 16 aa, Homo Sapiens
NRLFFYRKSVWSKLQS

SEQ ID NO: 45257 - protein, 16 aa, Homo Sapiens
RLFFYRKSVWSKLQSI

SEQ ID NO: 45258 - protein, 16 aa, Homo Sapiens
LFFYRKSVWSKLQSIG

SEQ ID NO: 45259 - protein, 16 aa, Homo Sapiens
FFYRKSVWSKLQSIGI

SEQ ID NO: 45260 - protein, 16 aa, Homo Sapiens
FYRKSVWSKLQSIGIR

SEQ ID NO: 45261 - protein, 16 aa, Homo Sapiens
YRKSVWSKLQSIGIRQ

SEQ ID NO: 45262 - protein, 16 aa, Homo Sapiens
RKSVWSKLQSIGIRQH

SEQ ID NO: 45263 - protein, 16 aa, Homo Sapiens
KSVWSKLQSIGIRQHL

SEQ ID NO: 45264 - protein, 16 aa, Homo Sapiens
SVWSKLQSIGIRQHLK

SEQ ID NO: 45265 - protein, 16 aa, Homo Sapiens
VWSKLQSIGIRQHLKR

SEQ ID NO: 45266 - protein, 16 aa, Homo Sapiens
WSKLQSIGIRQHLKRV

SEQ ID NO: 45267 - protein, 16 aa, Homo Sapiens
SKLQSIGIRQHLKRVQ

SEQ ID NO: 45268 - protein, 16 aa, Homo Sapiens
KLQSIGIRQHLKRVQL

SEQ ID NO: 45269 - protein, 16 aa, Homo Sapiens
LQSIGIRQHLKRVQLR

SEQ ID NO: 45270 - protein, 16 aa, Homo Sapiens
QSIGIRQHLKRVQLRE

SEQ ID NO: 45271 - protein, 16 aa, Homo Sapiens
SIGIRQHLKRVQLREL

SEQ ID NO: 45272 - protein, 16 aa, Homo Sapiens
IGIRQHLKRVQLRELS

SEQ ID NO: 45273 - protein, 16 aa, Homo Sapiens
GIRQHLKRVQLRELSE

SEQ ID NO: 45274 - protein, 16 aa, Homo Sapiens
IRQHLKRVQLRELSEA

SEQ ID NO: 45275 - protein, 16 aa, Homo Sapiens
RQHLKRVQLRELSEAE

SEQ ID NO: 45276 - protein, 16 aa, Homo Sapiens
QHLKRVQLRELSEAEV

SEQ ID NO: 45277 - protein, 16 aa, Homo Sapiens
HLKRVQLRELSEAEVR

SEQ ID NO: 45278 - protein, 16 aa, Homo Sapiens
LKRVQLRELSEAEVRQ

SEQ ID NO: 45279 - protein, 16 aa, Homo Sapiens
KRVQLRELSEAEVRQH

SEQ ID NO: 45280 - protein, 16 aa, Homo Sapiens
RVQLRELSEAEVRQHR

SEQ ID NO: 45281 - protein, 16 aa, Homo Sapiens
VQLRELSEAEVRQHRE

SEQ ID NO: 45282 - protein, 16 aa, Homo Sapiens
QLRELSEAEVRQHREA

SEQ ID NO: 45283 - protein, 16 aa, Homo Sapiens
LRELSEAEVRQHREAR

SEQ ID NO: 45284 - protein, 16 aa, Homo Sapiens
RELSEAEVRQHREARP

SEQ ID NO: 45285 - protein, 16 aa, Homo Sapiens
ELSEAEVRQHREARPA

SEQ ID NO: 45286 - protein, 16 aa, Homo Sapiens
LSEAEVRQHREARPAL

SEQ ID NO: 45287 - protein, 16 aa, Homo Sapiens
SEAEVRQHREARPALL

SEQ ID NO: 45288 - protein, 16 aa, Homo Sapiens
EAEVRQHREARPALLT

SEQ ID NO: 45289 - protein, 16 aa, Homo Sapiens
AEVRQHREARPALLTS

SEQ ID NO: 45290 - protein, 16 aa, Homo Sapiens
EVRQHREARPALLTSR

SEQ ID NO: 45291 - protein, 16 aa, Homo Sapiens
VRQHREARPALLTSRL

SEQ ID NO: 45292 - protein, 16 aa, Homo Sapiens
RQHREARPALLTSRLR

SEQ ID NO: 45293 - protein, 16 aa, Homo Sapiens
QHREARPALLTSRLRF

SEQ ID NO: 45294 - protein, 16 aa, Homo Sapiens
HREARPALLTSRLRFI

SEQ ID NO: 45295 - protein, 16 aa, Homo Sapiens
REARPALLTSRLRFIP

SEQ ID NO: 45296 - protein, 16 aa, Homo Sapiens
EARPALLTSRLRFIPK

SEQ ID NO: 45297 - protein, 16 aa, Homo Sapiens
ARPALLTSRLRFIPKP

SEQ ID NO: 45298 - protein, 16 aa, Homo Sapiens
RPALLTSRLRFIPKPD

SEQ ID NO: 45299 - protein, 16 aa, Homo Sapiens
PALLTSRLRFIPKPDG

SEQ ID NO: 45300 - protein, 16 aa, Homo Sapiens
ALLTSRLRFIPKPDGL

SEQ ID NO: 45301 - protein, 16 aa, Homo Sapiens
LLTSRLRFIPKPDGLR

SEQ ID NO: 45302 - protein, 16 aa, Homo Sapiens
LTSRLRFIPKPDGLRP

SEQ ID NO: 45303 - protein, 16 aa, Homo Sapiens
TSRLRFIPKPDGLRPI

SEQ ID NO: 45304 - protein, 16 aa, Homo Sapiens
SRLRFIPKPDGLRPIV

SEQ ID NO: 45305 - protein, 16 aa, Homo Sapiens
RLRFIPKPDGLRPIVN

SEQ ID NO: 45306 - protein, 16 aa, Homo Sapiens
LRFIPKPDGLRPIVNM

SEQ ID NO: 45307 - protein, 16 aa, Homo Sapiens
RFIPKPDGLRPIVNMD

SEQ ID NO: 45308 - protein, 16 aa, Homo Sapiens
FIPKPDGLRPIVNMDY

SEQ ID NO: 45309 - protein, 16 aa, Homo Sapiens
IPKPDGLRPIVNMDYV

SEQ ID NO: 45310 - protein, 16 aa, Homo Sapiens
PKPDGLRPIVNMDYVV

SEQ ID NO: 45311 - protein, 16 aa, Homo Sapiens
KPDGLRPIVNMDYVVG

SEQ ID NO: 45312 - protein, 16 aa, Homo Sapiens
PDGLRPIVNMDYVVGA

SEQ ID NO: 45313 - protein, 16 aa, Homo Sapiens
DGLRPIVNMDYVVGAR

SEQ ID NO: 45314 - protein, 16 aa, Homo Sapiens
GLRPIVNMDYVVGART

SEQ ID NO: 45315 - protein, 16 aa, Homo Sapiens
LRPIVNMDYVVGARTF

SEQ ID NO: 45316 - protein, 16 aa, Homo Sapiens
RPIVNMDYVVGARTFR

SEQ ID NO: 45317 - protein, 16 aa, Homo Sapiens
PIVNMDYVVGARTFRR

SEQ ID NO: 45318 - protein, 16 aa, Homo Sapiens
IVNMDYVVGARTFRRE

SEQ ID NO: 45319 - protein, 16 aa, Homo Sapiens
VNMDYVVGARTFRREK

SEQ ID NO: 45320 - protein, 16 aa, Homo Sapiens
NMDYVVGARTFRREKR

SEQ ID NO: 45321 - protein, 16 aa, Homo Sapiens
MDYVVGARTFRREKRA

SEQ ID NO: 45322 - protein, 16 aa, Homo Sapiens
DYVVGARTFRREKRAE

SEQ ID NO: 45323 - protein, 16 aa, Homo Sapiens
YVVGARTFRREKRAER

SEQ ID NO: 45324 - protein, 16 aa, Homo Sapiens
VVGARTFRREKRAERL

SEQ ID NO: 45325 - protein, 16 aa, Homo Sapiens
VGARTFRREKRAERLT

SEQ ID NO: 45326 - protein, 16 aa, Homo Sapiens
GARTFRREKRAERLTS

SEQ ID NO: 45327 - protein, 16 aa, Homo Sapiens
ARTFRREKRAERLTSR

SEQ ID NO: 45328 - protein, 16 aa, Homo Sapiens
RTFRREKRAERLTSRV

SEQ ID NO: 45329 - protein, 16 aa, Homo Sapiens
TFRREKRAERLTSRVK

SEQ ID NO: 45330 - protein, 16 aa, Homo Sapiens
FRREKRAERLTSRVKA

SEQ ID NO: 45331 - protein, 16 aa, Homo Sapiens
RREKRAERLTSRVKAL

SEQ ID NO: 45332 - protein, 16 aa, Homo Sapiens
REKRAERLTSRVKALF

SEQ ID NO: 45333 - protein, 16 aa, Homo Sapiens
EKRAERLTSRVKALFS

SEQ ID NO: 45334 - protein, 16 aa, Homo Sapiens
KRAERLTSRVKALFSV

SEQ ID NO: 45335 - protein, 16 aa, Homo Sapiens
RAERLTSRVKALFSVL

SEQ ID NO: 45336 - protein, 16 aa, Homo Sapiens
AERLTSRVKALFSVLN

SEQ ID NO: 45337 - protein, 16 aa, Homo Sapiens
ERLTSRVKALFSVLNY

SEQ ID NO: 45338 - protein, 16 aa, Homo Sapiens
RLTSRVKALFSVLNYE

SEQ ID NO: 45339 - protein, 16 aa, Homo Sapiens
LTSRVKALFSVLNYER

SEQ ID NO: 45340 - protein, 16 aa, Homo Sapiens
TSRVKALFSVLNYERA

SEQ ID NO: 45341 - protein, 16 aa, Homo Sapiens
SRVKALFSVLNYERAR

SEQ ID NO: 45342 - protein, 16 aa, Homo Sapiens
RVKALFSVLNYERARR

SEQ ID NO: 45343 - protein, 16 aa, Homo Sapiens
VKALFSVLNYERARRP

SEQ ID NO: 45344 - protein, 16 aa, Homo Sapiens
KALFSVLNYERARRPG

SEQ ID NO: 45345 - protein, 16 aa, Homo Sapiens
ALFSVLNYERARRPGL

SEQ ID NO: 45346 - protein, 16 aa, Homo Sapiens
LFSVLNYERARRPGLL

SEQ ID NO: 45347 - protein, 16 aa, Homo Sapiens
FSVLNYERARRPGLLG

SEQ ID NO: 45348 - protein, 16 aa, Homo Sapiens
SVLNYERARRPGLLGA

SEQ ID NO: 45349 - protein, 16 aa, Homo Sapiens
VLNYERARRPGLLGAS

SEQ ID NO: 45350 - protein, 16 aa, Homo Sapiens
LNYERARRPGLLGASV

SEQ ID NO: 45351 - protein, 16 aa, Homo Sapiens
NYERARRPGLLGASVL

SEQ ID NO: 45352 - protein, 16 aa, Homo Sapiens
YERARRPGLLGASVLG

SEQ ID NO: 45353 - protein, 16 aa, Homo Sapiens
ERARRPGLLGASVLGL

SEQ ID NO: 45354 - protein, 16 aa, Homo Sapiens
RARRPGLLGASVLGLD

SEQ ID NO: 45355 - protein, 16 aa, Homo Sapiens
ARRPGLLGASVLGLDD

SEQ ID NO: 45356 - protein, 16 aa, Homo Sapiens
RRPGLLGASVLGLDDI

SEQ ID NO: 45357 - protein, 16 aa, Homo Sapiens
RPGLLGASVLGLDDIH

SEQ ID NO: 45358 - protein, 16 aa, Homo Sapiens
PGLLGASVLGLDDIHR

SEQ ID NO: 45359 - protein, 16 aa, Homo Sapiens
GLLGASVLGLDDIHRA

SEQ ID NO: 45360 - protein, 16 aa, Homo Sapiens
LLGASVLGLDDIHRAW

SEQ ID NO: 45361 - protein, 16 aa, Homo Sapiens
LGASVLGLDDIHRAWR

SEQ ID NO: 45362 - protein, 16 aa, Homo Sapiens
GASVLGLDDIHRAWRT

SEQ ID NO: 45363 - protein, 16 aa, Homo Sapiens
ASVLGLDDIHRAWRTF

SEQ ID NO: 45364 - protein, 16 aa, Homo Sapiens
SVLGLDDIHRAWRTFV

SEQ ID NO: 45365 - protein, 16 aa, Homo Sapiens
VLGLDDIHRAWRTFVL

SEQ ID NO: 45366 - protein, 16 aa, Homo Sapiens
LGLDDIHRAWRTFVLR

SEQ ID NO: 45367 - protein, 16 aa, Homo Sapiens
GLDDIHRAWRTFVLRV

SEQ ID NO: 45368 - protein, 16 aa, Homo Sapiens
LDDIHRAWRTFVLRVR

SEQ ID NO: 45369 - protein, 16 aa, Homo Sapiens
DDIHRAWRTFVLRVRA

SEQ ID NO: 45370 - protein, 16 aa, Homo Sapiens
DIHRAWRTFVLRVRAQ

SEQ ID NO: 45371 - protein, 16 aa, Homo Sapiens
IHRAWRTFVLRVRAQD

SEQ ID NO: 45372 - protein, 16 aa, Homo Sapiens
HRAWRTFVLRVRAQDP

SEQ ID NO: 45373 - protein, 16 aa, Homo Sapiens
RAWRTFVLRVRAQDPP

SEQ ID NO: 45374 - protein, 16 aa, Homo Sapiens
AWRTFVLRVRAQDPPP

SEQ ID NO: 45375 - protein, 16 aa, Homo Sapiens
WRTFVLRVRAQDPPPE

SEQ ID NO: 45376 - protein, 16 aa, Homo Sapiens
RTFVLRVRAQDPPPEL

SEQ ID NO: 45377 - protein, 16 aa, Homo Sapiens
TFVLRVRAQDPPPELY

SEQ ID NO: 45378 - protein, 16 aa, Homo Sapiens
FVLRVRAQDPPPELYF

SEQ ID NO: 45379 - protein, 16 aa, Homo Sapiens
VLRVRAQDPPPELYFV

SEQ ID NO: 45380 - protein, 16 aa, Homo Sapiens
LRVRAQDPPPELYFVK

SEQ ID NO: 45381 - protein, 16 aa, Homo Sapiens
RVRAQDPPPELYFVKV

SEQ ID NO: 45382 - protein, 16 aa, Homo Sapiens
VRAQDPPPELYFVKVD

SEQ ID NO: 45383 - protein, 16 aa, Homo Sapiens
RAQDPPPELYFVKVDV

SEQ ID NO: 45384 - protein, 16 aa, Homo Sapiens
AQDPPPELYFVKVDVT

SEQ ID NO: 45385 - protein, 16 aa, Homo Sapiens
QDPPPELYFVKVDVTG

SEQ ID NO: 45386 - protein, 16 aa, Homo Sapiens
DPPPELYFVKVDVTGA

SEQ ID NO: 45387 - protein, 16 aa, Homo Sapiens
PPPELYFVKVDVTGAY

SEQ ID NO: 45388 - protein, 16 aa, Homo Sapiens
PPELYFVKVDVTGAYD

SEQ ID NO: 45389 - protein, 16 aa, Homo Sapiens
PELYFVKVDVTGAYDT

SEQ ID NO: 45390 - protein, 16 aa, Homo Sapiens
ELYFVKVDVTGAYDTI

SEQ ID NO: 45391 - protein, 16 aa, Homo Sapiens
LYFVKVDVTGAYDTIP

SEQ ID NO: 45392 - protein, 16 aa, Homo Sapiens
YFVKVDVTGAYDTIPQ

SEQ ID NO: 45393 - protein, 16 aa, Homo Sapiens
FVKVDVTGAYDTIPQD

SEQ ID NO: 45394 - protein, 16 aa, Homo Sapiens
VKVDVTGAYDTIPQDR

SEQ ID NO: 45395 - protein, 16 aa, Homo Sapiens
KVDVTGAYDTIPQDRL

SEQ ID NO: 45396 - protein, 16 aa, Homo Sapiens
VDVTGAYDTIPQDRLT

SEQ ID NO: 45397 - protein, 16 aa, Homo Sapiens
DVTGAYDTIPQDRLTE

SEQ ID NO: 45398 - protein, 16 aa, Homo Sapiens
VTGAYDTIPQDRLTEV

SEQ ID NO: 45399 - protein, 16 aa, Homo Sapiens
TGAYDTIPQDRLTEVI

SEQ ID NO: 45400 - protein, 16 aa, Homo Sapiens
GAYDTIPQDRLTEVIA

SEQ ID NO: 45401 - protein, 16 aa, Homo Sapiens
AYDTIPQDRLTEVIAS

SEQ ID NO: 45402 - protein, 16 aa, Homo Sapiens
YDTIPQDRLTEVIASI

SEQ ID NO: 45403 - protein, 16 aa, Homo Sapiens
DTIPQDRLTEVIASII

SEQ ID NO: 45404 - protein, 16 aa, Homo Sapiens
TIPQDRLTEVIASIIK

SEQ ID NO: 45405 - protein, 16 aa, Homo Sapiens
IPQDRLTEVIASIIKP

SEQ ID NO: 45406 - protein, 16 aa, Homo Sapiens
PQDRLTEVIASIIKPQ

SEQ ID NO: 45407 - protein, 16 aa, Homo Sapiens
QDRLTEVIASIIKPQN

SEQ ID NO: 45408 - protein, 16 aa, Homo Sapiens
DRLTEVIASIIKPQNT

SEQ ID NO: 45409 - protein, 16 aa, Homo Sapiens
RLTEVIASIIKPQNTY

SEQ ID NO: 45410 - protein, 16 aa, Homo Sapiens
LTEVIASIIKPQNTYC

SEQ ID NO: 45411 - protein, 16 aa, Homo Sapiens
TEVIASIIKPQNTYCV

SEQ ID NO: 45412 - protein, 16 aa, Homo Sapiens
EVIASIIKPQNTYCVR

SEQ ID NO: 45413 - protein, 16 aa, Homo Sapiens
VIASIIKPQNTYCVRR

SEQ ID NO: 45414 - protein, 16 aa, Homo Sapiens
IASIIKPQNTYCVRRY

SEQ ID NO: 45415 - protein, 16 aa, Homo Sapiens
ASIIKPQNTYCVRRYA

SEQ ID NO: 45416 - protein, 16 aa, Homo Sapiens
SIIKPQNTYCVRRYAV

SEQ ID NO: 45417 - protein, 16 aa, Homo Sapiens
IIKPQNTYCVRRYAVV

SEQ ID NO: 45418 - protein, 16 aa, Homo Sapiens
IKPQNTYCVRRYAVVQ

SEQ ID NO: 45419 - protein, 16 aa, Homo Sapiens
KPQNTYCVRRYAVVQK

SEQ ID NO: 45420 - protein, 16 aa, Homo Sapiens
PQNTYCVRRYAVVQKA

SEQ ID NO: 45421 - protein, 16 aa, Homo Sapiens
QNTYCVRRYAVVQKAA

SEQ ID NO: 45422 - protein, 16 aa, Homo Sapiens
NTYCVRRYAVVQKAAH

SEQ ID NO: 45423 - protein, 16 aa, Homo Sapiens
TYCVRRYAVVQKAAHG

SEQ ID NO: 45424 - protein, 16 aa, Homo Sapiens
YCVRRYAVVQKAAHGH

SEQ ID NO: 45425 - protein, 16 aa, Homo Sapiens
CVRRYAVVQKAAHGHV

SEQ ID NO: 45426 - protein, 16 aa, Homo Sapiens
VRRYAVVQKAAHGHVR

SEQ ID NO: 45427 - protein, 16 aa, Homo Sapiens
RRYAVVQKAAHGHVRK

SEQ ID NO: 45428 - protein, 16 aa, Homo Sapiens
RYAVVQKAAHGHVRKA

SEQ ID NO: 45429 - protein, 16 aa, Homo Sapiens
YAVVQKAAHGHVRKAF

SEQ ID NO: 45430 - protein, 16 aa, Homo Sapiens
AVVQKAAHGHVRKAFK

SEQ ID NO: 45431 - protein, 16 aa, Homo Sapiens
VVQKAAHGHVRKAFKS

SEQ ID NO: 45432 - protein, 16 aa, Homo Sapiens
VQKAAHGHVRKAFKSH

SEQ ID NO: 45433 - protein, 16 aa, Homo Sapiens
QKAAHGHVRKAFKSHV

SEQ ID NO: 45434 - protein, 16 aa, Homo Sapiens
KAAHGHVRKAFKSHVS

SEQ ID NO: 45435 - protein, 16 aa, Homo Sapiens
AAHGHVRKAFKSHVST

SEQ ID NO: 45436 - protein, 16 aa, Homo Sapiens
AHGHVRKAFKSHVSTL

SEQ ID NO: 45437 - protein, 16 aa, Homo Sapiens
HGHVRKAFKSHVSTLT

SEQ ID NO: 45438 - protein, 16 aa, Homo Sapiens
GHVRKAFKSHVSTLTD

SEQ ID NO: 45439 - protein, 16 aa, Homo Sapiens
HVRKAFKSHVSTLTDL

SEQ ID NO: 45440 - protein, 16 aa, Homo Sapiens
VRKAFKSHVSTLTDLQ

SEQ ID NO: 45441 - protein, 16 aa, Homo Sapiens
RKAFKSHVSTLTDLQP

SEQ ID NO: 45442 - protein, 16 aa, Homo Sapiens
KAFKSHVSTLTDLQPY

SEQ ID NO: 45443 - protein, 16 aa, Homo Sapiens
AFKSHVSTLTDLQPYM

SEQ ID NO: 45444 - protein, 16 aa, Homo Sapiens
FKSHVSTLTDLQPYMR

SEQ ID NO: 45445 - protein, 16 aa, Homo Sapiens
KSHVSTLTDLQPYMRQ

SEQ ID NO: 45446 - protein, 16 aa, Homo Sapiens
SHVSTLTDLQPYMRQF

SEQ ID NO: 45447 - protein, 16 aa, Homo Sapiens
HVSTLTDLQPYMRQFV

SEQ ID NO: 45448 - protein, 16 aa, Homo Sapiens
VSTLTDLQPYMRQFVA

SEQ ID NO: 45449 - protein, 16 aa, Homo Sapiens
STLTDLQPYMRQFVAH

SEQ ID NO: 45450 - protein, 16 aa, Homo Sapiens
TLTDLQPYMRQFVAHL

SEQ ID NO: 45451 - protein, 16 aa, Homo Sapiens
LTDLQPYMRQFVAHLQ

SEQ ID NO: 45452 - protein, 16 aa, Homo Sapiens
TDLQPYMRQFVAHLQE

SEQ ID NO: 45453 - protein, 16 aa, Homo Sapiens
DLQPYMRQFVAHLQET

SEQ ID NO: 45454 - protein, 16 aa, Homo Sapiens
LQPYMRQFVAHLQETS

SEQ ID NO: 45455 - protein, 16 aa, Homo Sapiens
QPYMRQFVAHLQETSP

SEQ ID NO: 45456 - protein, 16 aa, Homo Sapiens
PYMRQFVAHLQETSPL

SEQ ID NO: 45457 - protein, 16 aa, Homo Sapiens
YMRQFVAHLQETSPLR

SEQ ID NO: 45458 - protein, 16 aa, Homo Sapiens
MRQFVAHLQETSPLRD

SEQ ID NO: 45459 - protein, 16 aa, Homo Sapiens
RQFVAHLQETSPLRDA

SEQ ID NO: 45460 - protein, 16 aa, Homo Sapiens
QFVAHLQETSPLRDAV

SEQ ID NO: 45461 - protein, 16 aa, Homo Sapiens
FVAHLQETSPLRDAVV

SEQ ID NO: 45462 - protein, 16 aa, Homo Sapiens
VAHLQETSPLRDAVVI

SEQ ID NO: 45463 - protein, 16 aa, Homo Sapiens
AHLQETSPLRDAVVIE

SEQ ID NO: 45464 - protein, 16 aa, Homo Sapiens
HLQETSPLRDAVVIEQ

SEQ ID NO: 45465 - protein, 16 aa, Homo Sapiens
LQETSPLRDAVVIEQS

SEQ ID NO: 45466 - protein, 16 aa, Homo Sapiens
QETSPLRDAVVIEQSS

SEQ ID NO: 45467 - protein, 16 aa, Homo Sapiens
ETSPLRDAVVIEQSSS

SEQ ID NO: 45468 - protein, 16 aa, Homo Sapiens
TSPLRDAVVIEQSSSL

SEQ ID NO: 45469 - protein, 16 aa, Homo Sapiens
SPLRDAVVIEQSSSLN

SEQ ID NO: 45470 - protein, 16 aa, Homo Sapiens
PLRDAVVIEQSSSLNE

SEQ ID NO: 45471 - protein, 16 aa, Homo Sapiens
LRDAVVIEQSSSLNEA

SEQ ID NO: 45472 - protein, 16 aa, Homo Sapiens
RDAVVIEQSSSLNEAS

SEQ ID NO: 45473 - protein, 16 aa, Homo Sapiens
DAVVIEQSSSLNEASS

SEQ ID NO: 45474 - protein, 16 aa, Homo Sapiens
AVVIEQSSSLNEASSG

SEQ ID NO: 45475 - protein, 16 aa, Homo Sapiens
VVIEQSSSLNEASSGL

SEQ ID NO: 45476 - protein, 16 aa, Homo Sapiens
VIEQSSSLNEASSGLF

SEQ ID NO: 45477 - protein, 16 aa, Homo Sapiens
IEQSSSLNEASSGLFD

SEQ ID NO: 45478 - protein, 16 aa, Homo Sapiens
EQSSSLNEASSGLFDV

SEQ ID NO: 45479 - protein, 16 aa, Homo Sapiens
QSSSLNEASSGLFDVF

SEQ ID NO: 45480 - protein, 16 aa, Homo Sapiens
SSSLNEASSGLFDVFL

SEQ ID NO: 45481 - protein, 16 aa, Homo Sapiens
SSLNEASSGLFDVFLR

SEQ ID NO: 45482 - protein, 16 aa, Homo Sapiens
SLNEASSGLFDVFLRF

SEQ ID NO: 45483 - protein, 16 aa, Homo Sapiens
LNEASSGLFDVFLRFM

SEQ ID NO: 45484 - protein, 16 aa, Homo Sapiens
NEASSGLFDVFLRFMC

SEQ ID NO: 45485 - protein, 16 aa, Homo Sapiens
EASSGLFDVFLRFMCH

SEQ ID NO: 45486 - protein, 16 aa, Homo Sapiens
ASSGLFDVFLRFMCHH

SEQ ID NO: 45487 - protein, 16 aa, Homo Sapiens
SSGLFDVFLRFMCHHA

SEQ ID NO: 45488 - protein, 16 aa, Homo Sapiens
SGLFDVFLRFMCHHAV

SEQ ID NO: 45489 - protein, 16 aa, Homo Sapiens
GLFDVFLRFMCHHAVR

SEQ ID NO: 45490 - protein, 16 aa, Homo Sapiens
LFDVFLRFMCHHAVRI

SEQ ID NO: 45491 - protein, 16 aa, Homo Sapiens
FDVFLRFMCHHAVRIR

SEQ ID NO: 45492 - protein, 16 aa, Homo Sapiens
DVFLRFMCHHAVRIRG

SEQ ID NO: 45493 - protein, 16 aa, Homo Sapiens
VFLRFMCHHAVRIRGK

SEQ ID NO: 45494 - protein, 16 aa, Homo Sapiens
FLRFMCHHAVRIRGKS

SEQ ID NO: 45495 - protein, 16 aa, Homo Sapiens
LRFMCHHAVRIRGKSY

SEQ ID NO: 45496 - protein, 16 aa, Homo Sapiens
RFMCHHAVRIRGKSYV

SEQ ID NO: 45497 - protein, 16 aa, Homo Sapiens
FMCHHAVRIRGKSYVQ

SEQ ID NO: 45498 - protein, 16 aa, Homo Sapiens
MCHHAVRIRGKSYVQC

SEQ ID NO: 45499 - protein, 16 aa, Homo Sapiens
CHHAVRIRGKSYVQCQ

SEQ ID NO: 45500 - protein, 16 aa, Homo Sapiens
HHAVRIRGKSYVQCQG

SEQ ID NO: 45501 - protein, 16 aa, Homo Sapiens
HAVRIRGKSYVQCQGI

SEQ ID NO: 45502 - protein, 16 aa, Homo Sapiens
AVRIRGKSYVQCQGIP

SEQ ID NO: 45503 - protein, 16 aa, Homo Sapiens
VRIRGKSYVQCQGIPQ

SEQ ID NO: 45504 - protein, 16 aa, Homo Sapiens
RIRGKSYVQCQGIPQG

SEQ ID NO: 45505 - protein, 16 aa, Homo Sapiens
IRGKSYVQCQGIPQGS

SEQ ID NO: 45506 - protein, 16 aa, Homo Sapiens
RGKSYVQCQGIPQGSI

SEQ ID NO: 45507 - protein, 16 aa, Homo Sapiens
GKSYVQCQGIPQGSIL

SEQ ID NO: 45508 - protein, 16 aa, Homo Sapiens
KSYVQCQGIPQGSILS

SEQ ID NO: 45509 - protein, 16 aa, Homo Sapiens
SYVQCQGIPQGSILST

SEQ ID NO: 45510 - protein, 16 aa, Homo Sapiens
YVQCQGIPQGSILSTL

SEQ ID NO: 45511 - protein, 16 aa, Homo Sapiens
VQCQGIPQGSILSTLL

SEQ ID NO: 45512 - protein, 16 aa, Homo Sapiens
QCQGIPQGSILSTLLC

SEQ ID NO: 45513 - protein, 16 aa, Homo Sapiens
CQGIPQGSILSTLLCS

SEQ ID NO: 45514 - protein, 16 aa, Homo Sapiens
QGIPQGSILSTLLCSL

SEQ ID NO: 45515 - protein, 16 aa, Homo Sapiens
GIPQGSILSTLLCSLC

SEQ ID NO: 45516 - protein, 16 aa, Homo Sapiens
IPQGSILSTLLCSLCY

SEQ ID NO: 45517 - protein, 16 aa, Homo Sapiens
PQGSILSTLLCSLCYG

SEQ ID NO: 45518 - protein, 16 aa, Homo Sapiens
QGSILSTLLCSLCYGD

SEQ ID NO: 45519 - protein, 16 aa, Homo Sapiens
GSILSTLLCSLCYGDM

SEQ ID NO: 45520 - protein, 16 aa, Homo Sapiens
SILSTLLCSLCYGDME

SEQ ID NO: 45521 - protein, 16 aa, Homo Sapiens
ILSTLLCSLCYGDMEN

SEQ ID NO: 45522 - protein, 16 aa, Homo Sapiens
LSTLLCSLCYGDMENK

SEQ ID NO: 45523 - protein, 16 aa, Homo Sapiens
STLLCSLCYGDMENKL

SEQ ID NO: 45524 - protein, 16 aa, Homo Sapiens
TLLCSLCYGDMENKLF

SEQ ID NO: 45525 - protein, 16 aa, Homo Sapiens
LLCSLCYGDMENKLFA

SEQ ID NO: 45526 - protein, 16 aa, Homo Sapiens
LCSLCYGDMENKLFAG

SEQ ID NO: 45527 - protein, 16 aa, Homo Sapiens
CSLCYGDMENKLFAGI

SEQ ID NO: 45528 - protein, 16 aa, Homo Sapiens
SLCYGDMENKLFAGIR

SEQ ID NO: 45529 - protein, 16 aa, Homo Sapiens
LCYGDMENKLFAGIRR

SEQ ID NO: 45530 - protein, 16 aa, Homo Sapiens
CYGDMENKLFAGIRRD

SEQ ID NO: 45531 - protein, 16 aa, Homo Sapiens
YGDMENKLFAGIRRDG

SEQ ID NO: 45532 - protein, 16 aa, Homo Sapiens
GDMENKLFAGIRRDGL

SEQ ID NO: 45533 - protein, 16 aa, Homo Sapiens
DMENKLFAGIRRDGLL

SEQ ID NO: 45534 - protein, 16 aa, Homo Sapiens
MENKLFAGIRRDGLLL

SEQ ID NO: 45535 - protein, 16 aa, Homo Sapiens
ENKLFAGIRRDGLLLR

SEQ ID NO: 45536 - protein, 16 aa, Homo Sapiens
NKLFAGIRRDGLLLRL

SEQ ID NO: 45537 - protein, 16 aa, Homo Sapiens
KLFAGIRRDGLLLRLV

SEQ ID NO: 45538 - protein, 16 aa, Homo Sapiens
LFAGIRRDGLLLRLVD

SEQ ID NO: 45539 - protein, 16 aa, Homo Sapiens
FAGIRRDGLLLRLVDD

SEQ ID NO: 45540 - protein, 16 aa, Homo Sapiens
AGIRRDGLLLRLVDDF

SEQ ID NO: 45541 - protein, 16 aa, Homo Sapiens
GIRRDGLLLRLVDDFL

SEQ ID NO: 45542 - protein, 16 aa, Homo Sapiens
IRRDGLLLRLVDDFLL

SEQ ID NO: 45543 - protein, 16 aa, Homo Sapiens
RRDGLLLRLVDDFLLV

SEQ ID NO: 45544 - protein, 16 aa, Homo Sapiens
RDGLLLRLVDDFLLVT

SEQ ID NO: 45545 - protein, 16 aa, Homo Sapiens
DGLLLRLVDDFLLVTP

SEQ ID NO: 45546 - protein, 16 aa, Homo Sapiens
GLLLRLVDDFLLVTPH

SEQ ID NO: 45547 - protein, 16 aa, Homo Sapiens
LLLRLVDDFLLVTPHL

SEQ ID NO: 45548 - protein, 16 aa, Homo Sapiens
LLRLVDDFLLVTPHLT

SEQ ID NO: 45549 - protein, 16 aa, Homo Sapiens
LRLVDDFLLVTPHLTH

SEQ ID NO: 45550 - protein, 16 aa, Homo Sapiens
RLVDDFLLVTPHLTHA

SEQ ID NO: 45551 - protein, 16 aa, Homo Sapiens
LVDDFLLVTPHLTHAK

SEQ ID NO: 45552 - protein, 16 aa, Homo Sapiens
VDDFLLVTPHLTHAKT

SEQ ID NO: 45553 - protein, 16 aa, Homo Sapiens
DDFLLVTPHLTHAKTF

SEQ ID NO: 45554 - protein, 16 aa, Homo Sapiens
DFLLVTPHLTHAKTFL

SEQ ID NO: 45555 - protein, 16 aa, Homo Sapiens
FLLVTPHLTHAKTFLR

SEQ ID NO: 45556 - protein, 16 aa, Homo Sapiens
LLVTPHLTHAKTFLRT

SEQ ID NO: 45557 - protein, 16 aa, Homo Sapiens
LVTPHLTHAKTFLRTL

SEQ ID NO: 45558 - protein, 16 aa, Homo Sapiens
VTPHLTHAKTFLRTLV

SEQ ID NO: 45559 - protein, 16 aa, Homo Sapiens
TPHLTHAKTFLRTLVR

SEQ ID NO: 45560 - protein, 16 aa, Homo Sapiens
PHLTHAKTFLRTLVRG

SEQ ID NO: 45561 - protein, 16 aa, Homo Sapiens
HLTHAKTFLRTLVRGV

SEQ ID NO: 45562 - protein, 16 aa, Homo Sapiens
LTHAKTFLRTLVRGVP

SEQ ID NO: 45563 - protein, 16 aa, Homo Sapiens
THAKTFLRTLVRGVPE

SEQ ID NO: 45564 - protein, 16 aa, Homo Sapiens
HAKTFLRTLVRGVPEY

SEQ ID NO: 45565 - protein, 16 aa, Homo Sapiens
AKTFLRTLVRGVPEYG

SEQ ID NO: 45566 - protein, 16 aa, Homo Sapiens
KTFLRTLVRGVPEYGC

SEQ ID NO: 45567 - protein, 16 aa, Homo Sapiens
TFLRTLVRGVPEYGCV

SEQ ID NO: 45568 - protein, 16 aa, Homo Sapiens
FLRTLVRGVPEYGCVV

SEQ ID NO: 45569 - protein, 16 aa, Homo Sapiens
LRTLVRGVPEYGCVVN

SEQ ID NO: 45570 - protein, 16 aa, Homo Sapiens
RTLVRGVPEYGCVVNL

SEQ ID NO: 45571 - protein, 16 aa, Homo Sapiens
TLVRGVPEYGCVVNLR

SEQ ID NO: 45572 - protein, 16 aa, Homo Sapiens
LVRGVPEYGCVVNLRK

SEQ ID NO: 45573 - protein, 16 aa, Homo Sapiens
VRGVPEYGCVVNLRKT

SEQ ID NO: 45574 - protein, 16 aa, Homo Sapiens
RGVPEYGCVVNLRKTV

SEQ ID NO: 45575 - protein, 16 aa, Homo Sapiens
GVPEYGCVVNLRKTVV

SEQ ID NO: 45576 - protein, 16 aa, Homo Sapiens
VPEYGCVVNLRKTVVN

SEQ ID NO: 45577 - protein, 16 aa, Homo Sapiens
PEYGCVVNLRKTVVNF

SEQ ID NO: 45578 - protein, 16 aa, Homo Sapiens
EYGCVVNLRKTVVNFP

SEQ ID NO: 45579 - protein, 16 aa, Homo Sapiens
YGCVVNLRKTVVNFPV

SEQ ID NO: 45580 - protein, 16 aa, Homo Sapiens
GCVVNLRKTVVNFPVE

SEQ ID NO: 45581 - protein, 16 aa, Homo Sapiens
CVVNLRKTVVNFPVED

SEQ ID NO: 45582 - protein, 16 aa, Homo Sapiens
VVNLRKTVVNFPVEDE

SEQ ID NO: 45583 - protein, 16 aa, Homo Sapiens
VNLRKTVVNFPVEDEA

SEQ ID NO: 45584 - protein, 16 aa, Homo Sapiens
NLRKTVVNFPVEDEAL

SEQ ID NO: 45585 - protein, 16 aa, Homo Sapiens
LRKTVVNFPVEDEALG

SEQ ID NO: 45586 - protein, 16 aa, Homo Sapiens
RKTVVNFPVEDEALGG

SEQ ID NO: 45587 - protein, 16 aa, Homo Sapiens
KTVVNFPVEDEALGGT

SEQ ID NO: 45588 - protein, 16 aa, Homo Sapiens
TVVNFPVEDEALGGTA

SEQ ID NO: 45589 - protein, 16 aa, Homo Sapiens
VVNFPVEDEALGGTAF

SEQ ID NO: 45590 - protein, 16 aa, Homo Sapiens
VNFPVEDEALGGTAFV

SEQ ID NO: 45591 - protein, 16 aa, Homo Sapiens
NFPVEDEALGGTAFVQ

SEQ ID NO: 45592 - protein, 16 aa, Homo Sapiens
FPVEDEALGGTAFVQM

SEQ ID NO: 45593 - protein, 16 aa, Homo Sapiens
PVEDEALGGTAFVQMP

SEQ ID NO: 45594 - protein, 16 aa, Homo Sapiens
VEDEALGGTAFVQMPA

SEQ ID NO: 45595 - protein, 16 aa, Homo Sapiens
EDEALGGTAFVQMPAH

SEQ ID NO: 45596 - protein, 16 aa, Homo Sapiens
DEALGGTAFVQMPAHG

SEQ ID NO: 45597 - protein, 16 aa, Homo Sapiens
EALGGTAFVQMPAHGL

SEQ ID NO: 45598 - protein, 16 aa, Homo Sapiens
ALGGTAFVQMPAHGLF

SEQ ID NO: 45599 - protein, 16 aa, Homo Sapiens
LGGTAFVQMPAHGLFP

SEQ ID NO: 45600 - protein, 16 aa, Homo Sapiens
GGTAFVQMPAHGLFPW

SEQ ID NO: 45601 - protein, 16 aa, Homo Sapiens
GTAFVQMPAHGLFPWC

SEQ ID NO: 45602 - protein, 16 aa, Homo Sapiens
TAFVQMPAHGLFPWCG

SEQ ID NO: 45603 - protein, 16 aa, Homo Sapiens
AFVQMPAHGLFPWCGL

SEQ ID NO: 45604 - protein, 16 aa, Homo Sapiens
FVQMPAHGLFPWCGLL

SEQ ID NO: 45605 - protein, 16 aa, Homo Sapiens
VQMPAHGLFPWCGLLL

SEQ ID NO: 45606 - protein, 16 aa, Homo Sapiens
QMPAHGLFPWCGLLLD

SEQ ID NO: 45607 - protein, 16 aa, Homo Sapiens
MPAHGLFPWCGLLLDT

SEQ ID NO: 45608 - protein, 16 aa, Homo Sapiens
PAHGLFPWCGLLLDTR

SEQ ID NO: 45609 - protein, 16 aa, Homo Sapiens
AHGLFPWCGLLLDTRT

SEQ ID NO: 45610 - protein, 16 aa, Homo Sapiens
HGLFPWCGLLLDTRTL

SEQ ID NO: 45611 - protein, 16 aa, Homo Sapiens
GLFPWCGLLLDTRTLE

SEQ ID NO: 45612 - protein, 16 aa, Homo Sapiens
LFPWCGLLLDTRTLEV

SEQ ID NO: 45613 - protein, 16 aa, Homo Sapiens
FPWCGLLLDTRTLEVQ

SEQ ID NO: 45614 - protein, 16 aa, Homo Sapiens
PWCGLLLDTRTLEVQS

SEQ ID NO: 45615 - protein, 16 aa, Homo Sapiens
WCGLLLDTRTLEVQSD

SEQ ID NO: 45616 - protein, 16 aa, Homo Sapiens
CGLLLDTRTLEVQSDY

SEQ ID NO: 45617 - protein, 16 aa, Homo Sapiens
GLLLDTRTLEVQSDYS

SEQ ID NO: 45618 - protein, 16 aa, Homo Sapiens
LLLDTRTLEVQSDYSS

SEQ ID NO: 45619 - protein, 16 aa, Homo Sapiens
LLDTRTLEVQSDYSSY

SEQ ID NO: 45620 - protein, 16 aa, Homo Sapiens
LDTRTLEVQSDYSSYA

SEQ ID NO: 45621 - protein, 16 aa, Homo Sapiens
DTRTLEVQSDYSSYAR

SEQ ID NO: 45622 - protein, 16 aa, Homo Sapiens
TRTLEVQSDYSSYART

SEQ ID NO: 45623 - protein, 16 aa, Homo Sapiens
RTLEVQSDYSSYARTS

SEQ ID NO: 45624 - protein, 16 aa, Homo Sapiens
TLEVQSDYSSYARTSI

SEQ ID NO: 45625 - protein, 16 aa, Homo Sapiens
LEVQSDYSSYARTSIR

SEQ ID NO: 45626 - protein, 16 aa, Homo Sapiens
EVQSDYSSYARTSIRA

SEQ ID NO: 45627 - protein, 16 aa, Homo Sapiens
VQSDYSSYARTSIRAS

SEQ ID NO: 45628 - protein, 16 aa, Homo Sapiens
QSDYSSYARTSIRASL

SEQ ID NO: 45629 - protein, 16 aa, Homo Sapiens
SDYSSYARTSIRASLT

SEQ ID NO: 45630 - protein, 16 aa, Homo Sapiens
DYSSYARTSIRASLTF

SEQ ID NO: 45631 - protein, 16 aa, Homo Sapiens
YSSYARTSIRASLTFN

SEQ ID NO: 45632 - protein, 16 aa, Homo Sapiens
SSYARTSIRASLTFNR

SEQ ID NO: 45633 - protein, 16 aa, Homo Sapiens
SYARTSIRASLTFNRG

SEQ ID NO: 45634 - protein, 16 aa, Homo Sapiens
YARTSIRASLTFNRGF

SEQ ID NO: 45635 - protein, 16 aa, Homo Sapiens
ARTSIRASLTFNRGFK

SEQ ID NO: 45636 - protein, 16 aa, Homo Sapiens
RTSIRASLTFNRGFKA

SEQ ID NO: 45637 - protein, 16 aa, Homo Sapiens
TSIRASLTFNRGFKAG

SEQ ID NO: 45638 - protein, 16 aa, Homo Sapiens
SIRASLTFNRGFKAGR

SEQ ID NO: 45639 - protein, 16 aa, Homo Sapiens
IRASLTFNRGFKAGRN

SEQ ID NO: 45640 - protein, 16 aa, Homo Sapiens
RASLTFNRGFKAGRNM

SEQ ID NO: 45641 - protein, 16 aa, Homo Sapiens
ASLTFNRGFKAGRNMR

SEQ ID NO: 45642 - protein, 16 aa, Homo Sapiens
SLTFNRGFKAGRNMRR

SEQ ID NO: 45643 - protein, 16 aa, Homo Sapiens
LTFNRGFKAGRNMRRK

SEQ ID NO: 45644 - protein, 16 aa, Homo Sapiens
TFNRGFKAGRNMRRKL

SEQ ID NO: 45645 - protein, 16 aa, Homo Sapiens
FNRGFKAGRNMRRKLF

SEQ ID NO: 45646 - protein, 16 aa, Homo Sapiens
NRGFKAGRNMRRKLFG

SEQ ID NO: 45647 - protein, 16 aa, Homo Sapiens
RGFKAGRNMRRKLFGV

SEQ ID NO: 45648 - protein, 16 aa, Homo Sapiens
GFKAGRNMRRKLFGVL

SEQ ID NO: 45649 - protein, 16 aa, Homo Sapiens
FKAGRNMRRKLFGVLR

SEQ ID NO: 45650 - protein, 16 aa, Homo Sapiens
KAGRNMRRKLFGVLRL

SEQ ID NO: 45651 - protein, 16 aa, Homo Sapiens
AGRNMRRKLFGVLRLK

SEQ ID NO: 45652 - protein, 16 aa, Homo Sapiens
GRNMRRKLFGVLRLKC

SEQ ID NO: 45653 - protein, 16 aa, Homo Sapiens
RNMRRKLFGVLRLKCH

SEQ ID NO: 45654 - protein, 16 aa, Homo Sapiens
NMRRKLFGVLRLKCHS

SEQ ID NO: 45655 - protein, 16 aa, Homo Sapiens
MRRKLFGVLRLKCHSL

SEQ ID NO: 45656 - protein, 16 aa, Homo Sapiens
RRKLFGVLRLKCHSLF

SEQ ID NO: 45657 - protein, 16 aa, Homo Sapiens
RKLFGVLRLKCHSLFL

SEQ ID NO: 45658 - protein, 16 aa, Homo Sapiens
KLFGVLRLKCHSLFLD

SEQ ID NO: 45659 - protein, 16 aa, Homo Sapiens
LFGVLRLKCHSLFLDL

SEQ ID NO: 45660 - protein, 16 aa, Homo Sapiens
FGVLRLKCHSLFLDLQ

SEQ ID NO: 45661 - protein, 16 aa, Homo Sapiens
GVLRLKCHSLFLDLQV

SEQ ID NO: 45662 - protein, 16 aa, Homo Sapiens
VLRLKCHSLFLDLQVN

SEQ ID NO: 45663 - protein, 16 aa, Homo Sapiens
LRLKCHSLFLDLQVNS

SEQ ID NO: 45664 - protein, 16 aa, Homo Sapiens
RLKCHSLFLDLQVNSL

SEQ ID NO: 45665 - protein, 16 aa, Homo Sapiens
LKCHSLFLDLQVNSLQ

SEQ ID NO: 45666 - protein, 16 aa, Homo Sapiens
KCHSLFLDLQVNSLQT

SEQ ID NO: 45667 - protein, 16 aa, Homo Sapiens
CHSLFLDLQVNSLQTV

SEQ ID NO: 45668 - protein, 16 aa, Homo Sapiens
HSLFLDLQVNSLQTVC

SEQ ID NO: 45669 - protein, 16 aa, Homo Sapiens
SLFLDLQVNSLQTVCT

SEQ ID NO: 45670 - protein, 16 aa, Homo Sapiens
LFLDLQVNSLQTVCTN

SEQ ID NO: 45671 - protein, 16 aa, Homo Sapiens
FLDLQVNSLQTVCTNI

SEQ ID NO: 45672 - protein, 16 aa, Homo Sapiens
LDLQVNSLQTVCTNIY

SEQ ID NO: 45673 - protein, 16 aa, Homo Sapiens
DLQVNSLQTVCTNIYK

SEQ ID NO: 45674 - protein, 16 aa, Homo Sapiens
LQVNSLQTVCTNIYKI

SEQ ID NO: 45675 - protein, 16 aa, Homo Sapiens
QVNSLQTVCTNIYKIL

SEQ ID NO: 45676 - protein, 16 aa, Homo Sapiens
VNSLQTVCTNIYKILL

SEQ ID NO: 45677 - protein, 16 aa, Homo Sapiens
NSLQTVCTNIYKILLL

SEQ ID NO: 45678 - protein, 16 aa, Homo Sapiens
SLQTVCTNIYKILLLQ

SEQ ID NO: 45679 - protein, 16 aa, Homo Sapiens
LQTVCTNIYKILLLQA

SEQ ID NO: 45680 - protein, 16 aa, Homo Sapiens
QTVCTNIYKILLLQAY

SEQ ID NO: 45681 - protein, 16 aa, Homo Sapiens
TVCTNIYKILLLQAYR

SEQ ID NO: 45682 - protein, 16 aa, Homo Sapiens
VCTNIYKILLLQAYRF

SEQ ID NO: 45683 - protein, 16 aa, Homo Sapiens
CTNIYKILLLQAYRFH

SEQ ID NO: 45684 - protein, 16 aa, Homo Sapiens
TNIYKILLLQAYRFHA

SEQ ID NO: 45685 - protein, 16 aa, Homo Sapiens
NIYKILLLQAYRFHAC

SEQ ID NO: 45686 - protein, 16 aa, Homo Sapiens
IYKILLLQAYRFHACV

SEQ ID NO: 45687 - protein, 16 aa, Homo Sapiens
YKILLLQAYRFHACVL

SEQ ID NO: 45688 - protein, 16 aa, Homo Sapiens
KILLLQAYRFHACVLQ

SEQ ID NO: 45689 - protein, 16 aa, Homo Sapiens
ILLLQAYRFHACVLQL

SEQ ID NO: 45690 - protein, 16 aa, Homo Sapiens
LLLQAYRFHACVLQLP

SEQ ID NO: 45691 - protein, 16 aa, Homo Sapiens
LLQAYRFHACVLQLPF

SEQ ID NO: 45692 - protein, 16 aa, Homo Sapiens
LQAYRFHACVLQLPFH

SEQ ID NO: 45693 - protein, 16 aa, Homo Sapiens
QAYRFHACVLQLPFHQ

SEQ ID NO: 45694 - protein, 16 aa, Homo Sapiens
AYRFHACVLQLPFHQQ

SEQ ID NO: 45695 - protein, 16 aa, Homo Sapiens
YRFHACVLQLPFHQQV

SEQ ID NO: 45696 - protein, 16 aa, Homo Sapiens
RFHACVLQLPFHQQVW

SEQ ID NO: 45697 - protein, 16 aa, Homo Sapiens
FHACVLQLPFHQQVWK

SEQ ID NO: 45698 - protein, 16 aa, Homo Sapiens
HACVLQLPFHQQVWKN

SEQ ID NO: 45699 - protein, 16 aa, Homo Sapiens
ACVLQLPFHQQVWKNP

SEQ ID NO: 45700 - protein, 16 aa, Homo Sapiens
CVLQLPFHQQVWKNPT

SEQ ID NO: 45701 - protein, 16 aa, Homo Sapiens
VLQLPFHQQVWKNPTF

SEQ ID NO: 45702 - protein, 16 aa, Homo Sapiens
LQLPFHQQVWKNPTFF

SEQ ID NO: 45703 - protein, 16 aa, Homo Sapiens
QLPFHQQVWKNPTFFL

SEQ ID NO: 45704 - protein, 16 aa, Homo Sapiens
LPFHQQVWKNPTFFLR

SEQ ID NO: 45705 - protein, 16 aa, Homo Sapiens
PFHQQVWKNPTFFLRV

SEQ ID NO: 45706 - protein, 16 aa, Homo Sapiens
FHQQVWKNPTFFLRVI

SEQ ID NO: 45707 - protein, 16 aa, Homo Sapiens
HQQVWKNPTFFLRVIS

SEQ ID NO: 45708 - protein, 16 aa, Homo Sapiens
QQVWKNPTFFLRVISD

SEQ ID NO: 45709 - protein, 16 aa, Homo Sapiens
QVWKNPTFFLRVISDT

SEQ ID NO: 45710 - protein, 16 aa, Homo Sapiens
VWKNPTFFLRVISDTA

SEQ ID NO: 45711 - protein, 16 aa, Homo Sapiens
WKNPTFFLRVISDTAS

SEQ ID NO: 45712 - protein, 16 aa, Homo Sapiens
KNPTFFLRVISDTASL

SEQ ID NO: 45713 - protein, 16 aa, Homo Sapiens
NPTFFLRVISDTASLC

SEQ ID NO: 45714 - protein, 16 aa, Homo Sapiens
PTFFLRVISDTASLCY

SEQ ID NO: 45715 - protein, 16 aa, Homo Sapiens
TFFLRVISDTASLCYS

SEQ ID NO: 45716 - protein, 16 aa, Homo Sapiens
FFLRVISDTASLCYSI

SEQ ID NO: 45717 - protein, 16 aa, Homo Sapiens
FLRVISDTASLCYSIL

SEQ ID NO: 45718 - protein, 16 aa, Homo Sapiens
LRVISDTASLCYSILK

SEQ ID NO: 45719 - protein, 16 aa, Homo Sapiens
RVISDTASLCYSILKA

SEQ ID NO: 45720 - protein, 16 aa, Homo Sapiens
VISDTASLCYSILKAK

SEQ ID NO: 45721 - protein, 16 aa, Homo Sapiens
ISDTASLCYSILKAKN

SEQ ID NO: 45722 - protein, 16 aa, Homo Sapiens
SDTASLCYSILKAKNA

SEQ ID NO: 45723 - protein, 16 aa, Homo Sapiens
DTASLCYSILKAKNAG

SEQ ID NO: 45724 - protein, 16 aa, Homo Sapiens
TASLCYSILKAKNAGM

SEQ ID NO: 45725 - protein, 16 aa, Homo Sapiens
ASLCYSILKAKNAGMS

SEQ ID NO: 45726 - protein, 16 aa, Homo Sapiens
SLCYSILKAKNAGMSL

SEQ ID NO: 45727 - protein, 16 aa, Homo Sapiens
LCYSILKAKNAGMSLG

SEQ ID NO: 45728 - protein, 16 aa, Homo Sapiens
CYSILKAKNAGMSLGA

SEQ ID NO: 45729 - protein, 16 aa, Homo Sapiens
YSILKAKNAGMSLGAK

SEQ ID NO: 45730 - protein, 16 aa, Homo Sapiens
SILKAKNAGMSLGAKG

SEQ ID NO: 45731 - protein, 16 aa, Homo Sapiens
ILKAKNAGMSLGAKGA

SEQ ID NO: 45732 - protein, 16 aa, Homo Sapiens
LKAKNAGMSLGAKGAA

SEQ ID NO: 45733 - protein, 16 aa, Homo Sapiens
KAKNAGMSLGAKGAAG

SEQ ID NO: 45734 - protein, 16 aa, Homo Sapiens
AKNAGMSLGAKGAAGP

SEQ ID NO: 45735 - protein, 16 aa, Homo Sapiens
KNAGMSLGAKGAAGPL

SEQ ID NO: 45736 - protein, 16 aa, Homo Sapiens
NAGMSLGAKGAAGPLP

SEQ ID NO: 45737 - protein, 16 aa, Homo Sapiens
AGMSLGAKGAAGPLPS

SEQ ID NO: 45738 - protein, 16 aa, Homo Sapiens
GMSLGAKGAAGPLPSE

SEQ ID NO: 45739 - protein, 16 aa, Homo Sapiens
MSLGAKGAAGPLPSEA

SEQ ID NO: 45740 - protein, 16 aa, Homo Sapiens
SLGAKGAAGPLPSEAV

SEQ ID NO: 45741 - protein, 16 aa, Homo Sapiens
LGAKGAAGPLPSEAVQ

SEQ ID NO: 45742 - protein, 16 aa, Homo Sapiens
GAKGAAGPLPSEAVQW

SEQ ID NO: 45743 - protein, 16 aa, Homo Sapiens
AKGAAGPLPSEAVQWL

SEQ ID NO: 45744 - protein, 16 aa, Homo Sapiens
KGAAGPLPSEAVQWLC

SEQ ID NO: 45745 - protein, 16 aa, Homo Sapiens
GAAGPLPSEAVQWLCH

SEQ ID NO: 45746 - protein, 16 aa, Homo Sapiens
AAGPLPSEAVQWLCHQ

SEQ ID NO: 45747 - protein, 16 aa, Homo Sapiens
AGPLPSEAVQWLCHQA

SEQ ID NO: 45748 - protein, 16 aa, Homo Sapiens
GPLPSEAVQWLCHQAF

SEQ ID NO: 45749 - protein, 16 aa, Homo Sapiens
PLPSEAVQWLCHQAFL

SEQ ID NO: 45750 - protein, 16 aa, Homo Sapiens
LPSEAVQWLCHQAFLL

SEQ ID NO: 45751 - protein, 16 aa, Homo Sapiens
PSEAVQWLCHQAFLLK

SEQ ID NO: 45752 - protein, 16 aa, Homo Sapiens
SEAVQWLCHQAFLLKL

SEQ ID NO: 45753 - protein, 16 aa, Homo Sapiens
EAVQWLCHQAFLLKLT

SEQ ID NO: 45754 - protein, 16 aa, Homo Sapiens
AVQWLCHQAFLLKLTR

SEQ ID NO: 45755 - protein, 16 aa, Homo Sapiens
VQWLCHQAFLLKLTRH

SEQ ID NO: 45756 - protein, 16 aa, Homo Sapiens
QWLCHQAFLLKLTRHR

SEQ ID NO: 45757 - protein, 16 aa, Homo Sapiens
WLCHQAFLLKLTRHRV

SEQ ID NO: 45758 - protein, 16 aa, Homo Sapiens
LCHQAFLLKLTRHRVT

SEQ ID NO: 45759 - protein, 16 aa, Homo Sapiens
CHQAFLLKLTRHRVTY

SEQ ID NO: 45760 - protein, 16 aa, Homo Sapiens
HQAFLLKLTRHRVTYV

SEQ ID NO: 45761 - protein, 16 aa, Homo Sapiens
QAFLLKLTRHRVTYVP

SEQ ID NO: 45762 - protein, 16 aa, Homo Sapiens
AFLLKLTRHRVTYVPL

SEQ ID NO: 45763 - protein, 16 aa, Homo Sapiens
FLLKLTRHRVTYVPLL

SEQ ID NO: 45764 - protein, 16 aa, Homo Sapiens
LLKLTRHRVTYVPLLG

SEQ ID NO: 45765 - protein, 16 aa, Homo Sapiens
LKLTRHRVTYVPLLGS

SEQ ID NO: 45766 - protein, 16 aa, Homo Sapiens
KLTRHRVTYVPLLGSL

SEQ ID NO: 45767 - protein, 16 aa, Homo Sapiens
LTRHRVTYVPLLGSLR

SEQ ID NO: 45768 - protein, 16 aa, Homo Sapiens
TRHRVTYVPLLGSLRT

SEQ ID NO: 45769 - protein, 16 aa, Homo Sapiens
RHRVTYVPLLGSLRTA

SEQ ID NO: 45770 - protein, 16 aa, Homo Sapiens
HRVTYVPLLGSLRTAQ

SEQ ID NO: 45771 - protein, 16 aa, Homo Sapiens
RVTYVPLLGSLRTAQT

SEQ ID NO: 45772 - protein, 16 aa, Homo Sapiens
VTYVPLLGSLRTAQTQ

SEQ ID NO: 45773 - protein, 16 aa, Homo Sapiens
TYVPLLGSLRTAQTQL

SEQ ID NO: 45774 - protein, 16 aa, Homo Sapiens
YVPLLGSLRTAQTQLS

SEQ ID NO: 45775 - protein, 16 aa, Homo Sapiens
VPLLGSLRTAQTQLSR

SEQ ID NO: 45776 - protein, 16 aa, Homo Sapiens
PLLGSLRTAQTQLSRK

SEQ ID NO: 45777 - protein, 16 aa, Homo Sapiens
LLGSLRTAQTQLSRKL

SEQ ID NO: 45778 - protein, 16 aa, Homo Sapiens
LGSLRTAQTQLSRKLP

SEQ ID NO: 45779 - protein, 16 aa, Homo Sapiens
GSLRTAQTQLSRKLPG

SEQ ID NO: 45780 - protein, 16 aa, Homo Sapiens
SLRTAQTQLSRKLPGT

SEQ ID NO: 45781 - protein, 16 aa, Homo Sapiens
LRTAQTQLSRKLPGTT

SEQ ID NO: 45782 - protein, 16 aa, Homo Sapiens
RTAQTQLSRKLPGTTL

SEQ ID NO: 45783 - protein, 16 aa, Homo Sapiens
TAQTQLSRKLPGTTLT

SEQ ID NO: 45784 - protein, 16 aa, Homo Sapiens
AQTQLSRKLPGTTLTA

SEQ ID NO: 45785 - protein, 16 aa, Homo Sapiens
QTQLSRKLPGTTLTAL

SEQ ID NO: 45786 - protein, 16 aa, Homo Sapiens
TQLSRKLPGTTLTALE

SEQ ID NO: 45787 - protein, 16 aa, Homo Sapiens
QLSRKLPGTTLTALEA

SEQ ID NO: 45788 - protein, 16 aa, Homo Sapiens
LSRKLPGTTLTALEAA

SEQ ID NO: 45789 - protein, 16 aa, Homo Sapiens
SRKLPGTTLTALEAAA

SEQ ID NO: 45790 - protein, 16 aa, Homo Sapiens
RKLPGTTLTALEAAAN

SEQ ID NO: 45791 - protein, 16 aa, Homo Sapiens
KLPGTTLTALEAAANP

SEQ ID NO: 45792 - protein, 16 aa, Homo Sapiens
LPGTTLTALEAAANPA

SEQ ID NO: 45793 - protein, 16 aa, Homo Sapiens
PGTTLTALEAAANPAL

SEQ ID NO: 45794 - protein, 16 aa, Homo Sapiens
GTTLTALEAAANPALP

SEQ ID NO: 45795 - protein, 16 aa, Homo Sapiens
TTLTALEAAANPALPS

SEQ ID NO: 45796 - protein, 16 aa, Homo Sapiens
TLTALEAAANPALPSD

SEQ ID NO: 45797 - protein, 16 aa, Homo Sapiens
LTALEAAANPALPSDF

SEQ ID NO: 45798 - protein, 16 aa, Homo Sapiens
TALEAAANPALPSDFK

SEQ ID NO: 45799 - protein, 16 aa, Homo Sapiens
ALEAAANPALPSDFKT

SEQ ID NO: 45800 - protein, 16 aa, Homo Sapiens
LEAAANPALPSDFKTI

SEQ ID NO: 45801 - protein, 16 aa, Homo Sapiens
EAAANPALPSDFKTIL

SEQ ID NO: 45802 - protein, 16 aa, Homo Sapiens
AAANPALPSDFKTILD

SEQ ID NO: 45803 - protein, 309 aa, Homo Sapiens
MSLEQRSLHCKPEEALEAQQEALGLVCVQAATSSSSPLVLGTLEEVPTAGSTDPPQSPQGASAFPTTINFTRQRQPSEGSSSREEEGPSTSCILESLFRAVITKKVADLVGFLLLKYRAREPVTKAEMLESVIKNYKHCFPEIFGKASESLQLVFGIDVKEADPTGHSYVLVTCLGLSYDGLLGDNQIMPKTGFLIIVLVMIAMEGGHAPEEEIWEELSVMEVYDGREHSAYGEPRKLLTQDLVQEKYLEYRQVPDSDPARYEFLWGPRALAETSYVKVLEYVIKVSARVRFFFPSLREAALREEEEGV

SEQ ID NO: 45804 - protein, 8 aa, Homo Sapiens
ALEAQQEA

SEQ ID NO: 45805 - protein, 8 aa, Homo Sapiens
LEAQQEAL

SEQ ID NO: 45806 - protein, 8 aa, Homo Sapiens
AQQEALGL

SEQ ID NO: 45807 - protein, 8 aa, Homo Sapiens
QQEALGLV

SEQ ID NO: 45808 - protein, 8 aa, Homo Sapiens
EALGLVCV

SEQ ID NO: 45809 - protein, 8 aa, Homo Sapiens
ALGLVCVQ

SEQ ID NO: 45810 - protein, 8 aa, Homo Sapiens
GLVCVQAA

SEQ ID NO: 45811 - protein, 8 aa, Homo Sapiens
VQAATSSS

SEQ ID NO: 45812 - protein, 8 aa, Homo Sapiens
ATSSSSPL

SEQ ID NO: 45813 - protein, 8 aa, Homo Sapiens
TSSSSPLV

SEQ ID NO: 45814 - protein, 8 aa, Homo Sapiens
SPLVLGTL

SEQ ID NO: 45815 - protein, 8 aa, Homo Sapiens
VLGTLEEV

SEQ ID NO: 45816 - protein, 8 aa, Homo Sapiens
TLEEVPTA

SEQ ID NO: 45817 - protein, 8 aa, Homo Sapiens
EEVPTAGS

SEQ ID NO: 45818 - protein, 8 aa, Homo Sapiens
SPQGASAF

SEQ ID NO: 45819 - protein, 8 aa, Homo Sapiens
AFPTTINF

SEQ ID NO: 45820 - protein, 8 aa, Homo Sapiens
FPTTINFT

SEQ ID NO: 45821 - protein, 8 aa, Homo Sapiens
PTTINFTR

SEQ ID NO: 45822 - protein, 8 aa, Homo Sapiens
TTINFTRQ

SEQ ID NO: 45823 - protein, 8 aa, Homo Sapiens
TINFTRQR

SEQ ID NO: 45824 - protein, 8 aa, Homo Sapiens
GPSTSCIL

SEQ ID NO: 45825 - protein, 8 aa, Homo Sapiens
STSCILES

SEQ ID NO: 45826 - protein, 8 aa, Homo Sapiens
CILESLFR

SEQ ID NO: 45827 - protein, 8 aa, Homo Sapiens
ILESLFRA

SEQ ID NO: 45828 - protein, 8 aa, Homo Sapiens
SLFRAVIT

SEQ ID NO: 45829 - protein, 8 aa, Homo Sapiens
LFRAVITK

SEQ ID NO: 45830 - protein, 8 aa, Homo Sapiens
FRAVITKK

SEQ ID NO: 45831 - protein, 8 aa, Homo Sapiens
KVADLVGF

SEQ ID NO: 45832 - protein, 8 aa, Homo Sapiens
DLVGFLLL

SEQ ID NO: 45833 - protein, 8 aa, Homo Sapiens
LVGFLLLK

SEQ ID NO: 45834 - protein, 8 aa, Homo Sapiens
VGFLLLKY

SEQ ID NO: 45835 - protein, 8 aa, Homo Sapiens
GFLLLKYR

SEQ ID NO: 45836 - protein, 8 aa, Homo Sapiens
FLLLKYRA

SEQ ID NO: 45837 - protein, 8 aa, Homo Sapiens
LLLKYRAR

SEQ ID NO: 45838 - protein, 8 aa, Homo Sapiens
KYRAREPV

SEQ ID NO: 45839 - protein, 8 aa, Homo Sapiens
RAREPVTK

SEQ ID NO: 45840 - protein, 8 aa, Homo Sapiens
EPVTKAEM

SEQ ID NO: 45841 - protein, 8 aa, Homo Sapiens
KAEMLESV

SEQ ID NO: 45842 - protein, 8 aa, Homo Sapiens
AEMLESVI

SEQ ID NO: 45843 - protein, 8 aa, Homo Sapiens
EMLESVIK

SEQ ID NO: 45844 - protein, 8 aa, Homo Sapiens
LESVIKNY

SEQ ID NO: 45845 - protein, 8 aa, Homo Sapiens
ESVIKNYK

SEQ ID NO: 45846 - protein, 8 aa, Homo Sapiens
CFPEIFGK

SEQ ID NO: 45847 - protein, 8 aa, Homo Sapiens
FPEIFGKA

SEQ ID NO: 45848 - protein, 8 aa, Homo Sapiens
KASESLQL

SEQ ID NO: 45849 - protein, 8 aa, Homo Sapiens
SESLQLVF

SEQ ID NO: 45850 - protein, 8 aa, Homo Sapiens
SLQLVFGI

SEQ ID NO: 45851 - protein, 8 aa, Homo Sapiens
QLVFGIDV

SEQ ID NO: 45852 - protein, 8 aa, Homo Sapiens
LVFGIDVK

SEQ ID NO: 45853 - protein, 8 aa, Homo Sapiens
TGHSYVLV

SEQ ID NO: 45854 - protein, 8 aa, Homo Sapiens
SYVLVTCL

SEQ ID NO: 45855 - protein, 8 aa, Homo Sapiens
VLVTCLGL

SEQ ID NO: 45856 - protein, 8 aa, Homo Sapiens
VTCLGLSY

SEQ ID NO: 45857 - protein, 8 aa, Homo Sapiens
GLSYDGLL

SEQ ID NO: 45858 - protein, 8 aa, Homo Sapiens
GLLGDNQI

SEQ ID NO: 45859 - protein, 8 aa, Homo Sapiens
LLGDNQIM

SEQ ID NO: 45860 - protein, 8 aa, Homo Sapiens
QIMPKTGF

SEQ ID NO: 45861 - protein, 8 aa, Homo Sapiens
IMPKTGFL

SEQ ID NO: 45862 - protein, 8 aa, Homo Sapiens
MPKTGFLI

SEQ ID NO: 45863 - protein, 8 aa, Homo Sapiens
KTGFLIIV

SEQ ID NO: 45864 - protein, 8 aa, Homo Sapiens
TGFLIIVL

SEQ ID NO: 45865 - protein, 8 aa, Homo Sapiens
GFLIIVLV

SEQ ID NO: 45866 - protein, 8 aa, Homo Sapiens
FLIIVLVM

SEQ ID NO: 45867 - protein, 8 aa, Homo Sapiens
LIIVLVMI

SEQ ID NO: 45868 - protein, 8 aa, Homo Sapiens
IVLVMIAM

SEQ ID NO: 45869 - protein, 8 aa, Homo Sapiens
HAPEEEIW

SEQ ID NO: 45870 - protein, 8 aa, Homo Sapiens
EEEIWEEL

SEQ ID NO: 45871 - protein, 8 aa, Homo Sapiens
EEIWEELS

SEQ ID NO: 45872 - protein, 8 aa, Homo Sapiens
EIWEELSV

SEQ ID NO: 45873 - protein, 8 aa, Homo Sapiens
EELSVMEV

SEQ ID NO: 45874 - protein, 8 aa, Homo Sapiens
ELSVMEVY

SEQ ID NO: 45875 - protein, 8 aa, Homo Sapiens
VMEVYDGR

SEQ ID NO: 45876 - protein, 8 aa, Homo Sapiens
DGREHSAY

SEQ ID NO: 45877 - protein, 8 aa, Homo Sapiens
HSAYGEPR

SEQ ID NO: 45878 - protein, 8 aa, Homo Sapiens
SAYGEPRK

SEQ ID NO: 45879 - protein, 8 aa, Homo Sapiens
AYGEPRKL

SEQ ID NO: 45880 - protein, 8 aa, Homo Sapiens
KLLTQDLV

SEQ ID NO: 45881 - protein, 8 aa, Homo Sapiens
LLTQDLVQ

SEQ ID NO: 45882 - protein, 8 aa, Homo Sapiens
TQDLVQEK

SEQ ID NO: 45883 - protein, 8 aa, Homo Sapiens
DLVQEKYL

SEQ ID NO: 45884 - protein, 8 aa, Homo Sapiens
VQEKYLEY

SEQ ID NO: 45885 - protein, 8 aa, Homo Sapiens
KYLEYRQV

SEQ ID NO: 45886 - protein, 8 aa, Homo Sapiens
QVPDSDPA

SEQ ID NO: 45887 - protein, 8 aa, Homo Sapiens
YEFLWGPR

SEQ ID NO: 45888 - protein, 8 aa, Homo Sapiens
FLWGPRAL

SEQ ID NO: 45889 - protein, 8 aa, Homo Sapiens
RALAETSY

SEQ ID NO: 45890 - protein, 8 aa, Homo Sapiens
ALAETSYV

SEQ ID NO: 45891 - protein, 8 aa, Homo Sapiens
LAETSYVK

SEQ ID NO: 45892 - protein, 8 aa, Homo Sapiens
AETSYVKV

SEQ ID NO: 45893 - protein, 8 aa, Homo Sapiens
ETSYVKVL

SEQ ID NO: 45894 - protein, 8 aa, Homo Sapiens
SYVKVLEY

SEQ ID NO: 45895 - protein, 8 aa, Homo Sapiens
YVKVLEYV

SEQ ID NO: 45896 - protein, 8 aa, Homo Sapiens
KVLEYVIK

SEQ ID NO: 45897 - protein, 8 aa, Homo Sapiens
VLEYVIKV

SEQ ID NO: 45898 - protein, 8 aa, Homo Sapiens
YVIKVSAR

SEQ ID NO: 45899 - protein, 8 aa, Homo Sapiens
VIKVSARV

SEQ ID NO: 45900 - protein, 8 aa, Homo Sapiens
KVSARVRF

SEQ ID NO: 45901 - protein, 8 aa, Homo Sapiens
VSARVRFF

SEQ ID NO: 45902 - protein, 8 aa, Homo Sapiens
SARVRFFF

SEQ ID NO: 45903 - protein, 8 aa, Homo Sapiens
RVRFFFPS

SEQ ID NO: 45904 - protein, 8 aa, Homo Sapiens
VRFFFPSL

SEQ ID NO: 45905 - protein, 8 aa, Homo Sapiens
RFFFPSLR

SEQ ID NO: 45906 - protein, 8 aa, Homo Sapiens
FPSLREAA

SEQ ID NO: 45907 - protein, 8 aa, Homo Sapiens
SLREAALR

SEQ ID NO: 45908 - protein, 9 aa, Homo Sapiens
SLHCKPEEA

SEQ ID NO: 45909 - protein, 9 aa, Homo Sapiens
EALEAQQEA

SEQ ID NO: 45910 - protein, 9 aa, Homo Sapiens
ALEAQQEAL

SEQ ID NO: 45911 - protein, 9 aa, Homo Sapiens
AQQEALGLV

SEQ ID NO: 45912 - protein, 9 aa, Homo Sapiens
QEALGLVCV

SEQ ID NO: 45913 - protein, 9 aa, Homo Sapiens
ALGLVCVQA

SEQ ID NO: 45914 - protein, 9 aa, Homo Sapiens
GLVCVQAAT

SEQ ID NO: 45915 - protein, 9 aa, Homo Sapiens
VQAATSSSS

SEQ ID NO: 45916 - protein, 9 aa, Homo Sapiens
AATSSSSPL

SEQ ID NO: 45917 - protein, 9 aa, Homo Sapiens
ATSSSSPLV

SEQ ID NO: 45918 - protein, 9 aa, Homo Sapiens
TSSSSPLVL

SEQ ID NO: 45919 - protein, 9 aa, Homo Sapiens
LVLGTLEEV

SEQ ID NO: 45920 - protein, 9 aa, Homo Sapiens
GTLEEVPTA

SEQ ID NO: 45921 - protein, 9 aa, Homo Sapiens
QSPQGASAF

SEQ ID NO: 45922 - protein, 9 aa, Homo Sapiens
GASAFPTTI

SEQ ID NO: 45923 - protein, 9 aa, Homo Sapiens
SAFPTTINF

SEQ ID NO: 45924 - protein, 9 aa, Homo Sapiens
FPTTINFTR

SEQ ID NO: 45925 - protein, 9 aa, Homo Sapiens
TTINFTRQR

SEQ ID NO: 45926 - protein, 9 aa, Homo Sapiens
EEGPSTSCI

SEQ ID NO: 45927 - protein, 9 aa, Homo Sapiens
STSCILESL

SEQ ID NO: 45928 - protein, 9 aa, Homo Sapiens
CILESLFRA

SEQ ID NO: 45929 - protein, 9 aa, Homo Sapiens
ILESLFRAV

SEQ ID NO: 45930 - protein, 9 aa, Homo Sapiens
LESLFRAVI

SEQ ID NO: 45931 - protein, 9 aa, Homo Sapiens
SLFRAVITK

SEQ ID NO: 45932 - protein, 9 aa, Homo Sapiens
LFRAVITKK

SEQ ID NO: 45933 - protein, 9 aa, Homo Sapiens
FRAVITKKV

SEQ ID NO: 45934 - protein, 9 aa, Homo Sapiens
KVADLVGFL

SEQ ID NO: 45935 - protein, 9 aa, Homo Sapiens
DLVGFLLLK

SEQ ID NO: 45936 - protein, 9 aa, Homo Sapiens
LVGFLLLKY

SEQ ID NO: 45937 - protein, 9 aa, Homo Sapiens
VGFLLLKYR

SEQ ID NO: 45938 - protein, 9 aa, Homo Sapiens
FLLLKYRAR

SEQ ID NO: 45939 - protein, 9 aa, Homo Sapiens
YRAREPVTK

SEQ ID NO: 45940 - protein, 9 aa, Homo Sapiens
EPVTKAEML

SEQ ID NO: 45941 - protein, 9 aa, Homo Sapiens
TKAEMLESV

SEQ ID NO: 45942 - protein, 9 aa, Homo Sapiens
NYKHCFPEI

SEQ ID NO: 45943 - protein, 9 aa, Homo Sapiens
FPEIFGKAS

SEQ ID NO: 45944 - protein, 9 aa, Homo Sapiens
KASESLQLV

SEQ ID NO: 45945 - protein, 9 aa, Homo Sapiens
ESLQLVFGI

SEQ ID NO: 45946 - protein, 9 aa, Homo Sapiens
LQLVFGIDV

SEQ ID NO: 45947 - protein, 9 aa, Homo Sapiens
QLVFGIDVK

SEQ ID NO: 45948 - protein, 9 aa, Homo Sapiens
EADPTGHSY

SEQ ID NO: 45949 - protein, 9 aa, Homo Sapiens
DPTGHSYVL

SEQ ID NO: 45950 - protein, 9 aa, Homo Sapiens
PTGHSYVLV

SEQ ID NO: 45951 - protein, 9 aa, Homo Sapiens
YVLVTCLGL

SEQ ID NO: 45952 - protein, 9 aa, Homo Sapiens
VLVTCLGLS

SEQ ID NO: 45953 - protein, 9 aa, Homo Sapiens
LVTCLGLSY

SEQ ID NO: 45954 - protein, 9 aa, Homo Sapiens
CLGLSYDGL

SEQ ID NO: 45955 - protein, 9 aa, Homo Sapiens
GLLGDNQIM

SEQ ID NO: 45956 - protein, 9 aa, Homo Sapiens
LLGDNQIMP

SEQ ID NO: 45957 - protein, 9 aa, Homo Sapiens
NQIMPKTGF

SEQ ID NO: 45958 - protein, 9 aa, Homo Sapiens
QIMPKTGFL

SEQ ID NO: 45959 - protein, 9 aa, Homo Sapiens
IMPKTGFLI

SEQ ID NO: 45960 - protein, 9 aa, Homo Sapiens
MPKTGFLII

SEQ ID NO: 45961 - protein, 9 aa, Homo Sapiens
TGFLIIVLV

SEQ ID NO: 45962 - protein, 9 aa, Homo Sapiens
FLIIVLVMI

SEQ ID NO: 45963 - protein, 9 aa, Homo Sapiens
LIIVLVMIA

SEQ ID NO: 45964 - protein, 9 aa, Homo Sapiens
IIVLVMIAM

SEQ ID NO: 45965 - protein, 9 aa, Homo Sapiens
MIAMEGGHA

SEQ ID NO: 45966 - protein, 9 aa, Homo Sapiens
PEEEIWEEL

SEQ ID NO: 45967 - protein, 9 aa, Homo Sapiens
EEEIWEELS

SEQ ID NO: 45968 - protein, 9 aa, Homo Sapiens
EEIWEELSV

SEQ ID NO: 45969 - protein, 9 aa, Homo Sapiens
EIWEELSVM

SEQ ID NO: 45970 - protein, 9 aa, Homo Sapiens
WEELSVMEV

SEQ ID NO: 45971 - protein, 9 aa, Homo Sapiens
EELSVMEVY

SEQ ID NO: 45972 - protein, 9 aa, Homo Sapiens
SVMEVYDGR

SEQ ID NO: 45973 - protein, 9 aa, Homo Sapiens
VYDGREHSA

SEQ ID NO: 45974 - protein, 9 aa, Homo Sapiens
HSAYGEPRK

SEQ ID NO: 45975 - protein, 9 aa, Homo Sapiens
AYGEPRKLL

SEQ ID NO: 45976 - protein, 9 aa, Homo Sapiens
KLLTQDLVQ

SEQ ID NO: 45977 - protein, 9 aa, Homo Sapiens
LTQDLVQEK

SEQ ID NO: 45978 - protein, 9 aa, Homo Sapiens
TQDLVQEKY

SEQ ID NO: 45979 - protein, 9 aa, Homo Sapiens
LVQEKYLEY

SEQ ID NO: 45980 - protein, 9 aa, Homo Sapiens
VQEKYLEYR

SEQ ID NO: 45981 - protein, 9 aa, Homo Sapiens
RQVPDSDPA

SEQ ID NO: 45982 - protein, 9 aa, Homo Sapiens
QVPDSDPAR

SEQ ID NO: 45983 - protein, 9 aa, Homo Sapiens
VPDSDPARY

SEQ ID NO: 45984 - protein, 9 aa, Homo Sapiens
DSDPARYEF

SEQ ID NO: 45985 - protein, 9 aa, Homo Sapiens
DPARYEFLW

SEQ ID NO: 45986 - protein, 9 aa, Homo Sapiens
RYEFLWGPR

SEQ ID NO: 45987 - protein, 9 aa, Homo Sapiens
EFLWGPRAL

SEQ ID NO: 45988 - protein, 9 aa, Homo Sapiens
FLWGPRALA

SEQ ID NO: 45989 - protein, 9 aa, Homo Sapiens
RALAETSYV

SEQ ID NO: 45990 - protein, 9 aa, Homo Sapiens
ALAETSYVK

SEQ ID NO: 45991 - protein, 9 aa, Homo Sapiens
AETSYVKVL

SEQ ID NO: 45992 - protein, 9 aa, Homo Sapiens
ETSYVKVLE

SEQ ID NO: 45993 - protein, 9 aa, Homo Sapiens
TSYVKVLEY

SEQ ID NO: 45994 - protein, 9 aa, Homo Sapiens
SYVKVLEYV

SEQ ID NO: 45995 - protein, 9 aa, Homo Sapiens
YVKVLEYVI

SEQ ID NO: 45996 - protein, 9 aa, Homo Sapiens
KVLEYVIKV

SEQ ID NO: 45997 - protein, 9 aa, Homo Sapiens
EYVIKVSAR

SEQ ID NO: 45998 - protein, 9 aa, Homo Sapiens
YVIKVSARV

SEQ ID NO: 45999 - protein, 9 aa, Homo Sapiens
VIKVSARVR

SEQ ID NO: 46000 - protein, 9 aa, Homo Sapiens
KVSARVRFF

SEQ ID NO: 46001 - protein, 9 aa, Homo Sapiens
VSARVRFFF

SEQ ID NO: 46002 - protein, 9 aa, Homo Sapiens
RVRFFFPSL

SEQ ID NO: 46003 - protein, 9 aa, Homo Sapiens
VRFFFPSLR

SEQ ID NO: 46004 - protein, 9 aa, Homo Sapiens
FPSLREAAL

SEQ ID NO: 46005 - protein, 9 aa, Homo Sapiens
ALREEEEGV

SEQ ID NO: 46006 - protein, 10 aa, Homo Sapiens
SLEQRSLHCK

SEQ ID NO: 46007 - protein, 10 aa, Homo Sapiens
SLHCKPEEAL

SEQ ID NO: 46008 - protein, 10 aa, Homo Sapiens
EEALEAQQEA

SEQ ID NO: 46009 - protein, 10 aa, Homo Sapiens
EALEAQQEAL

SEQ ID NO: 46010 - protein, 10 aa, Homo Sapiens
LEAQQEALGL

SEQ ID NO: 46011 - protein, 10 aa, Homo Sapiens
EAQQEALGLV

SEQ ID NO: 46012 - protein, 10 aa, Homo Sapiens
AQQEALGLVC

SEQ ID NO: 46013 - protein, 10 aa, Homo Sapiens
QQEALGLVCV

SEQ ID NO: 46014 - protein, 10 aa, Homo Sapiens
EALGLVCVQA

SEQ ID NO: 46015 - protein, 10 aa, Homo Sapiens
ALGLVCVQAA

SEQ ID NO: 46016 - protein, 10 aa, Homo Sapiens
QAATSSSSPL

SEQ ID NO: 46017 - protein, 10 aa, Homo Sapiens
AATSSSSPLV

SEQ ID NO: 46018 - protein, 10 aa, Homo Sapiens
PLVLGTLEEV

SEQ ID NO: 46019 - protein, 10 aa, Homo Sapiens
VLGTLEEVPT

SEQ ID NO: 46020 - protein, 10 aa, Homo Sapiens
PQSPQGASAF

SEQ ID NO: 46021 - protein, 10 aa, Homo Sapiens
SPQGASAFPT

SEQ ID NO: 46022 - protein, 10 aa, Homo Sapiens
QGASAFPTTI

SEQ ID NO: 46023 - protein, 10 aa, Homo Sapiens
SAFPTTINFT

SEQ ID NO: 46024 - protein, 10 aa, Homo Sapiens
AFPTTINFTR

SEQ ID NO: 46025 - protein, 10 aa, Homo Sapiens
FPTTINFTRQ

SEQ ID NO: 46026 - protein, 10 aa, Homo Sapiens
PTTINFTRQR

SEQ ID NO: 46027 - protein, 10 aa, Homo Sapiens
TTINFTRQRQ

SEQ ID NO: 46028 - protein, 10 aa, Homo Sapiens
EEGPSTSCIL

SEQ ID NO: 46029 - protein, 10 aa, Homo Sapiens
STSCILESLF

SEQ ID NO: 46030 - protein, 10 aa, Homo Sapiens
TSCILESLFR

SEQ ID NO: 46031 - protein, 10 aa, Homo Sapiens
CILESLFRAV

SEQ ID NO: 46032 - protein, 10 aa, Homo Sapiens
ILESLFRAVI

SEQ ID NO: 46033 - protein, 10 aa, Homo Sapiens
ESLFRAVITK

SEQ ID NO: 46034 - protein, 10 aa, Homo Sapiens
SLFRAVITKK

SEQ ID NO: 46035 - protein, 10 aa, Homo Sapiens
AVITKKVADL

SEQ ID NO: 46036 - protein, 10 aa, Homo Sapiens
VITKKVADLV

SEQ ID NO: 46037 - protein, 10 aa, Homo Sapiens
KVADLVGFLL

SEQ ID NO: 46038 - protein, 10 aa, Homo Sapiens
VADLVGFLLL

SEQ ID NO: 46039 - protein, 10 aa, Homo Sapiens
ADLVGFLLLK

SEQ ID NO: 46040 - protein, 10 aa, Homo Sapiens
DLVGFLLLKY

SEQ ID NO: 46041 - protein, 10 aa, Homo Sapiens
LVGFLLLKYR

SEQ ID NO: 46042 - protein, 10 aa, Homo Sapiens
GFLLLKYRAR

SEQ ID NO: 46043 - protein, 10 aa, Homo Sapiens
LLKYRAREPV

SEQ ID NO: 46044 - protein, 10 aa, Homo Sapiens
KYRAREPVTK

SEQ ID NO: 46045 - protein, 10 aa, Homo Sapiens
REPVTKAEML

SEQ ID NO: 46046 - protein, 10 aa, Homo Sapiens
VTKAEMLESV

SEQ ID NO: 46047 - protein, 10 aa, Homo Sapiens
KAEMLESVIK

SEQ ID NO: 46048 - protein, 10 aa, Homo Sapiens
AEMLESVIKN

SEQ ID NO: 46049 - protein, 10 aa, Homo Sapiens
EMLESVIKNY

SEQ ID NO: 46050 - protein, 10 aa, Homo Sapiens
MLESVIKNYK

SEQ ID NO: 46051 - protein, 10 aa, Homo Sapiens
SVIKNYKHCF

SEQ ID NO: 46052 - protein, 10 aa, Homo Sapiens
NYKHCFPEIF

SEQ ID NO: 46053 - protein, 10 aa, Homo Sapiens
KHCFPEIFGK

SEQ ID NO: 46054 - protein, 10 aa, Homo Sapiens
HCFPEIFGKA

SEQ ID NO: 46055 - protein, 10 aa, Homo Sapiens
EIFGKASESL

SEQ ID NO: 46056 - protein, 10 aa, Homo Sapiens
KASESLQLVF

SEQ ID NO: 46057 - protein, 10 aa, Homo Sapiens
SESLQLVFGI

SEQ ID NO: 46058 - protein, 10 aa, Homo Sapiens
SLQLVFGIDV

SEQ ID NO: 46059 - protein, 10 aa, Homo Sapiens
LQLVFGIDVK

SEQ ID NO: 46060 - protein, 10 aa, Homo Sapiens
LVFGIDVKEA

SEQ ID NO: 46061 - protein, 10 aa, Homo Sapiens
KEADPTGHSY

SEQ ID NO: 46062 - protein, 10 aa, Homo Sapiens
EADPTGHSYV

SEQ ID NO: 46063 - protein, 10 aa, Homo Sapiens
DPTGHSYVLV

SEQ ID NO: 46064 - protein, 10 aa, Homo Sapiens
SYVLVTCLGL

SEQ ID NO: 46065 - protein, 10 aa, Homo Sapiens
VLVTCLGLSY

SEQ ID NO: 46066 - protein, 10 aa, Homo Sapiens
CLGLSYDGLL

SEQ ID NO: 46067 - protein, 10 aa, Homo Sapiens
GLLGDNQIMP

SEQ ID NO: 46068 - protein, 10 aa, Homo Sapiens
LLGDNQIMPK

SEQ ID NO: 46069 - protein, 10 aa, Homo Sapiens
NQIMPKTGFL

SEQ ID NO: 46070 - protein, 10 aa, Homo Sapiens
QIMPKTGFLI

SEQ ID NO: 46071 - protein, 10 aa, Homo Sapiens
IMPKTGFLII

SEQ ID NO: 46072 - protein, 10 aa, Homo Sapiens
MPKTGFLIIV

SEQ ID NO: 46073 - protein, 10 aa, Homo Sapiens
KTGFLIIVLV

SEQ ID NO: 46074 - protein, 10 aa, Homo Sapiens
GFLIIVLVMI

SEQ ID NO: 46075 - protein, 10 aa, Homo Sapiens
FLIIVLVMIA

SEQ ID NO: 46076 - protein, 10 aa, Homo Sapiens
LIIVLVMIAM

SEQ ID NO: 46077 - protein, 10 aa, Homo Sapiens
VMIAMEGGHA

SEQ ID NO: 46078 - protein, 10 aa, Homo Sapiens
EEEIWEELSV

SEQ ID NO: 46079 - protein, 10 aa, Homo Sapiens
EEIWEELSVM

SEQ ID NO: 46080 - protein, 10 aa, Homo Sapiens
WEELSVMEVY

SEQ ID NO: 46081 - protein, 10 aa, Homo Sapiens
LSVMEVYDGR

SEQ ID NO: 46082 - protein, 10 aa, Homo Sapiens
EVYDGREHSA

SEQ ID NO: 46083 - protein, 10 aa, Homo Sapiens
REHSAYGEPR

SEQ ID NO: 46084 - protein, 10 aa, Homo Sapiens
EPRKLLTQDL

SEQ ID NO: 46085 - protein, 10 aa, Homo Sapiens
LLTQDLVQEK

SEQ ID NO: 46086 - protein, 10 aa, Homo Sapiens
LTQDLVQEKY

SEQ ID NO: 46087 - protein, 10 aa, Homo Sapiens
DLVQEKYLEY

SEQ ID NO: 46088 - protein, 10 aa, Homo Sapiens
LVQEKYLEYR

SEQ ID NO: 46089 - protein, 10 aa, Homo Sapiens
QVPDSDPARY

SEQ ID NO: 46090 - protein, 10 aa, Homo Sapiens
ARYEFLWGPR

SEQ ID NO: 46091 - protein, 10 aa, Homo Sapiens
YEFLWGPRAL

SEQ ID NO: 46092 - protein, 10 aa, Homo Sapiens
FLWGPRALAE

SEQ ID NO: 46093 - protein, 10 aa, Homo Sapiens
RALAETSYVK

SEQ ID NO: 46094 - protein, 10 aa, Homo Sapiens
ALAETSYVKV

SEQ ID NO: 46095 - protein, 10 aa, Homo Sapiens
ETSYVKVLEY

SEQ ID NO: 46096 - protein, 10 aa, Homo Sapiens
TSYVKVLEYV

SEQ ID NO: 46097 - protein, 10 aa, Homo Sapiens
SYVKVLEYVI

SEQ ID NO: 46098 - protein, 10 aa, Homo Sapiens
YVKVLEYVIK

SEQ ID NO: 46099 - protein, 10 aa, Homo Sapiens
VLEYVIKVSA

SEQ ID NO: 46100 - protein, 10 aa, Homo Sapiens
LEYVIKVSAR

SEQ ID NO: 46101 - protein, 10 aa, Homo Sapiens
EYVIKVSARV

SEQ ID NO: 46102 - protein, 10 aa, Homo Sapiens
YVIKVSARVR

SEQ ID NO: 46103 - protein, 10 aa, Homo Sapiens
KVSARVRFFF

SEQ ID NO: 46104 - protein, 10 aa, Homo Sapiens
SARVRFFFPS

SEQ ID NO: 46105 - protein, 10 aa, Homo Sapiens
ARVRFFFPSL

SEQ ID NO: 46106 - protein, 10 aa, Homo Sapiens
RVRFFFPSLR

SEQ ID NO: 46107 - protein, 10 aa, Homo Sapiens
FFPSLREAAL

SEQ ID NO: 46108 - protein, 10 aa, Homo Sapiens
FPSLREAALR

SEQ ID NO: 46109 - protein, 10 aa, Homo Sapiens
AALREEEEGV

SEQ ID NO: 46110 - protein, 11 aa, Homo Sapiens
MSLEQRSLHCK

SEQ ID NO: 46111 - protein, 11 aa, Homo Sapiens
EEALEAQQEAL

SEQ ID NO: 46112 - protein, 11 aa, Homo Sapiens
ALEAQQEALGL

SEQ ID NO: 46113 - protein, 11 aa, Homo Sapiens
AQQEALGLVCV

SEQ ID NO: 46114 - protein, 11 aa, Homo Sapiens
EALGLVCVQAA

SEQ ID NO: 46115 - protein, 11 aa, Homo Sapiens
ALGLVCVQAAT

SEQ ID NO: 46116 - protein, 11 aa, Homo Sapiens
VQAATSSSSPL

SEQ ID NO: 46117 - protein, 11 aa, Homo Sapiens
QAATSSSSPLV

SEQ ID NO: 46118 - protein, 11 aa, Homo Sapiens
AATSSSSPLVL

SEQ ID NO: 46119 - protein, 11 aa, Homo Sapiens
SPLVLGTLEEV

SEQ ID NO: 46120 - protein, 11 aa, Homo Sapiens
VLGTLEEVPTA

SEQ ID NO: 46121 - protein, 11 aa, Homo Sapiens
STDPPQSPQGA

SEQ ID NO: 46122 - protein, 11 aa, Homo Sapiens
PPQSPQGASAF

SEQ ID NO: 46123 - protein, 11 aa, Homo Sapiens
SPQGASAFPTT

SEQ ID NO: 46124 - protein, 11 aa, Homo Sapiens
GASAFPTTINF

SEQ ID NO: 46125 - protein, 11 aa, Homo Sapiens
SAFPTTINFTR

SEQ ID NO: 46126 - protein, 11 aa, Homo Sapiens
FPTTINFTRQR

SEQ ID NO: 46127 - protein, 11 aa, Homo Sapiens
REEEGPSTSCI

SEQ ID NO: 46128 - protein, 11 aa, Homo Sapiens
EEEGPSTSCIL

SEQ ID NO: 46129 - protein, 11 aa, Homo Sapiens
GPSTSCILESL

SEQ ID NO: 46130 - protein, 11 aa, Homo Sapiens
STSCILESLFR

SEQ ID NO: 46131 - protein, 11 aa, Homo Sapiens
SCILESLFRAV

SEQ ID NO: 46132 - protein, 11 aa, Homo Sapiens
CILESLFRAVI

SEQ ID NO: 46133 - protein, 11 aa, Homo Sapiens
ESLFRAVITKK

SEQ ID NO: 46134 - protein, 11 aa, Homo Sapiens
SLFRAVITKKV

SEQ ID NO: 46135 - protein, 11 aa, Homo Sapiens
AVITKKVADLV

SEQ ID NO: 46136 - protein, 11 aa, Homo Sapiens
ITKKVADLVGF

SEQ ID NO: 46137 - protein, 11 aa, Homo Sapiens
KKVADLVGFLL

SEQ ID NO: 46138 - protein, 11 aa, Homo Sapiens
KVADLVGFLLL

SEQ ID NO: 46139 - protein, 11 aa, Homo Sapiens
VADLVGFLLLK

SEQ ID NO: 46140 - protein, 11 aa, Homo Sapiens
DLVGFLLLKYR

SEQ ID NO: 46141 - protein, 11 aa, Homo Sapiens
LLLKYRAREPV

SEQ ID NO: 46142 - protein, 11 aa, Homo Sapiens
RAREPVTKAEM

SEQ ID NO: 46143 - protein, 11 aa, Homo Sapiens
PVTKAEMLESV

SEQ ID NO: 46144 - protein, 11 aa, Homo Sapiens
AEMLESVIKNY

SEQ ID NO: 46145 - protein, 11 aa, Homo Sapiens
EMLESVIKNYK

SEQ ID NO: 46146 - protein, 11 aa, Homo Sapiens
ESVIKNYKHCF

SEQ ID NO: 46147 - protein, 11 aa, Homo Sapiens
YKHCFPEIFGK

SEQ ID NO: 46148 - protein, 11 aa, Homo Sapiens
FPEIFGKASES

SEQ ID NO: 46149 - protein, 11 aa, Homo Sapiens
PEIFGKASESL

SEQ ID NO: 46150 - protein, 11 aa, Homo Sapiens
EIFGKASESLQ

SEQ ID NO: 46151 - protein, 11 aa, Homo Sapiens
IFGKASESLQL

SEQ ID NO: 46152 - protein, 11 aa, Homo Sapiens
ESLQLVFGIDV

SEQ ID NO: 46153 - protein, 11 aa, Homo Sapiens
SLQLVFGIDVK

SEQ ID NO: 46154 - protein, 11 aa, Homo Sapiens
QLVFGIDVKEA

SEQ ID NO: 46155 - protein, 11 aa, Homo Sapiens
KEADPTGHSYV

SEQ ID NO: 46156 - protein, 11 aa, Homo Sapiens
EADPTGHSYVL

SEQ ID NO: 46157 - protein, 11 aa, Homo Sapiens
YVLVTCLGLSY

SEQ ID NO: 46158 - protein, 11 aa, Homo Sapiens
SYDGLLGDNQI

SEQ ID NO: 46159 - protein, 11 aa, Homo Sapiens
GLLGDNQIMPK

SEQ ID NO: 46160 - protein, 11 aa, Homo Sapiens
LLGDNQIMPKT

SEQ ID NO: 46161 - protein, 11 aa, Homo Sapiens
NQIMPKTGFLI

SEQ ID NO: 46162 - protein, 11 aa, Homo Sapiens
QIMPKTGFLII

SEQ ID NO: 46163 - protein, 11 aa, Homo Sapiens
IMPKTGFLIIV

SEQ ID NO: 46164 - protein, 11 aa, Homo Sapiens
MPKTGFLIIVL

SEQ ID NO: 46165 - protein, 11 aa, Homo Sapiens
PKTGFLIIVLV

SEQ ID NO: 46166 - protein, 11 aa, Homo Sapiens
TGFLIIVLVMI

SEQ ID NO: 46167 - protein, 11 aa, Homo Sapiens
FLIIVLVMIAM

SEQ ID NO: 46168 - protein, 11 aa, Homo Sapiens
MEGGHAPEEEI

SEQ ID NO: 46169 - protein, 11 aa, Homo Sapiens
EEEIWEELSVM

SEQ ID NO: 46170 - protein, 11 aa, Homo Sapiens
EEIWEELSVME

SEQ ID NO: 46171 - protein, 11 aa, Homo Sapiens
EIWEELSVMEV

SEQ ID NO: 46172 - protein, 11 aa, Homo Sapiens
IWEELSVMEVY

SEQ ID NO: 46173 - protein, 11 aa, Homo Sapiens
ELSVMEVYDGR

SEQ ID NO: 46174 - protein, 11 aa, Homo Sapiens
EVYDGREHSAY

SEQ ID NO: 46175 - protein, 11 aa, Homo Sapiens
REHSAYGEPRK

SEQ ID NO: 46176 - protein, 11 aa, Homo Sapiens
GEPRKLLTQDL

SEQ ID NO: 46177 - protein, 11 aa, Homo Sapiens
KLLTQDLVQEK

SEQ ID NO: 46178 - protein, 11 aa, Homo Sapiens
LLTQDLVQEKY

SEQ ID NO: 46179 - protein, 11 aa, Homo Sapiens
LTQDLVQEKYL

SEQ ID NO: 46180 - protein, 11 aa, Homo Sapiens
DLVQEKYLEYR

SEQ ID NO: 46181 - protein, 11 aa, Homo Sapiens
VQEKYLEYRQV

SEQ ID NO: 46182 - protein, 11 aa, Homo Sapiens
RQVPDSDPARY

SEQ ID NO: 46183 - protein, 11 aa, Homo Sapiens
VPDSDPARYEF

SEQ ID NO: 46184 - protein, 11 aa, Homo Sapiens
DSDPARYEFLW

SEQ ID NO: 46185 - protein, 11 aa, Homo Sapiens
RYEFLWGPRAL

SEQ ID NO: 46186 - protein, 11 aa, Homo Sapiens
FLWGPRALAET

SEQ ID NO: 46187 - protein, 11 aa, Homo Sapiens
WGPRALAETSY

SEQ ID NO: 46188 - protein, 11 aa, Homo Sapiens
GPRALAETSYV

SEQ ID NO: 46189 - protein, 11 aa, Homo Sapiens
RALAETSYVKV

SEQ ID NO: 46190 - protein, 11 aa, Homo Sapiens
ALAETSYVKVL

SEQ ID NO: 46191 - protein, 11 aa, Homo Sapiens
AETSYVKVLEY

SEQ ID NO: 46192 - protein, 11 aa, Homo Sapiens
ETSYVKVLEYV

SEQ ID NO: 46193 - protein, 11 aa, Homo Sapiens
SYVKVLEYVIK

SEQ ID NO: 46194 - protein, 11 aa, Homo Sapiens
YVKVLEYVIKV

SEQ ID NO: 46195 - protein, 11 aa, Homo Sapiens
KVLEYVIKVSA

SEQ ID NO: 46196 - protein, 11 aa, Homo Sapiens
VLEYVIKVSAR

SEQ ID NO: 46197 - protein, 11 aa, Homo Sapiens
LEYVIKVSARV

SEQ ID NO: 46198 - protein, 11 aa, Homo Sapiens
EYVIKVSARVR

SEQ ID NO: 46199 - protein, 11 aa, Homo Sapiens
YVIKVSARVRF

SEQ ID NO: 46200 - protein, 11 aa, Homo Sapiens
VIKVSARVRFF

SEQ ID NO: 46201 - protein, 11 aa, Homo Sapiens
VSARVRFFFPS

SEQ ID NO: 46202 - protein, 11 aa, Homo Sapiens
SARVRFFFPSL

SEQ ID NO: 46203 - protein, 11 aa, Homo Sapiens
RVRFFFPSLRE

SEQ ID NO: 46204 - protein, 11 aa, Homo Sapiens
FFFPSLREAAL

SEQ ID NO: 46205 - protein, 11 aa, Homo Sapiens
FFPSLREAALR

SEQ ID NO: 46206 - protein, 11 aa, Homo Sapiens
EAALREEEEGV

SEQ ID NO: 46207 - protein, 13 aa, Homo Sapiens
MSLEQRSLHCKPE

SEQ ID NO: 46208 - protein, 13 aa, Homo Sapiens
SLEQRSLHCKPEE

SEQ ID NO: 46209 - protein, 13 aa, Homo Sapiens
LEQRSLHCKPEEA

SEQ ID NO: 46210 - protein, 13 aa, Homo Sapiens
EQRSLHCKPEEAL

SEQ ID NO: 46211 - protein, 13 aa, Homo Sapiens
QRSLHCKPEEALE

SEQ ID NO: 46212 - protein, 13 aa, Homo Sapiens
RSLHCKPEEALEA

SEQ ID NO: 46213 - protein, 13 aa, Homo Sapiens
SLHCKPEEALEAQ

SEQ ID NO: 46214 - protein, 13 aa, Homo Sapiens
LHCKPEEALEAQQ

SEQ ID NO: 46215 - protein, 13 aa, Homo Sapiens
HCKPEEALEAQQE

SEQ ID NO: 46216 - protein, 13 aa, Homo Sapiens
CKPEEALEAQQEA

SEQ ID NO: 46217 - protein, 13 aa, Homo Sapiens
KPEEALEAQQEAL

SEQ ID NO: 46218 - protein, 13 aa, Homo Sapiens
PEEALEAQQEALG

SEQ ID NO: 46219 - protein, 13 aa, Homo Sapiens
EEALEAQQEALGL

SEQ ID NO: 46220 - protein, 13 aa, Homo Sapiens
EALEAQQEALGLV

SEQ ID NO: 46221 - protein, 13 aa, Homo Sapiens
ALEAQQEALGLVC

SEQ ID NO: 46222 - protein, 13 aa, Homo Sapiens
LEAQQEALGLVCV

SEQ ID NO: 46223 - protein, 13 aa, Homo Sapiens
EAQQEALGLVCVQ

SEQ ID NO: 46224 - protein, 13 aa, Homo Sapiens
AQQEALGLVCVQA

SEQ ID NO: 46225 - protein, 13 aa, Homo Sapiens
QQEALGLVCVQAA

SEQ ID NO: 46226 - protein, 13 aa, Homo Sapiens
QEALGLVCVQAAT

SEQ ID NO: 46227 - protein, 13 aa, Homo Sapiens
EALGLVCVQAATS

SEQ ID NO: 46228 - protein, 13 aa, Homo Sapiens
ALGLVCVQAATSS

SEQ ID NO: 46229 - protein, 13 aa, Homo Sapiens
LGLVCVQAATSSS

SEQ ID NO: 46230 - protein, 13 aa, Homo Sapiens
GLVCVQAATSSSS

SEQ ID NO: 46231 - protein, 13 aa, Homo Sapiens
LVCVQAATSSSSP

SEQ ID NO: 46232 - protein, 13 aa, Homo Sapiens
VCVQAATSSSSPL

SEQ ID NO: 46233 - protein, 13 aa, Homo Sapiens
CVQAATSSSSPLV

SEQ ID NO: 46234 - protein, 13 aa, Homo Sapiens
VQAATSSSSPLVL

SEQ ID NO: 46235 - protein, 13 aa, Homo Sapiens
QAATSSSSPLVLG

SEQ ID NO: 46236 - protein, 13 aa, Homo Sapiens
AATSSSSPLVLGT

SEQ ID NO: 46237 - protein, 13 aa, Homo Sapiens
ATSSSSPLVLGTL

SEQ ID NO: 46238 - protein, 13 aa, Homo Sapiens
TSSSSPLVLGTLE

SEQ ID NO: 46239 - protein, 13 aa, Homo Sapiens
SSSSPLVLGTLEE

SEQ ID NO: 46240 - protein, 13 aa, Homo Sapiens
SSSPLVLGTLEEV

SEQ ID NO: 46241 - protein, 13 aa, Homo Sapiens
SSPLVLGTLEEVP

SEQ ID NO: 46242 - protein, 13 aa, Homo Sapiens
SPLVLGTLEEVPT

SEQ ID NO: 46243 - protein, 13 aa, Homo Sapiens
PLVLGTLEEVPTA

SEQ ID NO: 46244 - protein, 13 aa, Homo Sapiens
LVLGTLEEVPTAG

SEQ ID NO: 46245 - protein, 13 aa, Homo Sapiens
VLGTLEEVPTAGS

SEQ ID NO: 46246 - protein, 13 aa, Homo Sapiens
LGTLEEVPTAGST

SEQ ID NO: 46247 - protein, 13 aa, Homo Sapiens
GTLEEVPTAGSTD

SEQ ID NO: 46248 - protein, 13 aa, Homo Sapiens
TLEEVPTAGSTDP

SEQ ID NO: 46249 - protein, 13 aa, Homo Sapiens
LEEVPTAGSTDPP

SEQ ID NO: 46250 - protein, 13 aa, Homo Sapiens
EEVPTAGSTDPPQ

SEQ ID NO: 46251 - protein, 13 aa, Homo Sapiens
EVPTAGSTDPPQS

SEQ ID NO: 46252 - protein, 13 aa, Homo Sapiens
VPTAGSTDPPQSP

SEQ ID NO: 46253 - protein, 13 aa, Homo Sapiens
PTAGSTDPPQSPQ

SEQ ID NO: 46254 - protein, 13 aa, Homo Sapiens
TAGSTDPPQSPQG

SEQ ID NO: 46255 - protein, 13 aa, Homo Sapiens
AGSTDPPQSPQGA

SEQ ID NO: 46256 - protein, 13 aa, Homo Sapiens
GSTDPPQSPQGAS

SEQ ID NO: 46257 - protein, 13 aa, Homo Sapiens
STDPPQSPQGASA

SEQ ID NO: 46258 - protein, 13 aa, Homo Sapiens
TDPPQSPQGASAF

SEQ ID NO: 46259 - protein, 13 aa, Homo Sapiens
DPPQSPQGASAFP

SEQ ID NO: 46260 - protein, 13 aa, Homo Sapiens
PPQSPQGASAFPT

SEQ ID NO: 46261 - protein, 13 aa, Homo Sapiens
PQSPQGASAFPTT

SEQ ID NO: 46262 - protein, 13 aa, Homo Sapiens
QSPQGASAFPTTI

SEQ ID NO: 46263 - protein, 13 aa, Homo Sapiens
SPQGASAFPTTIN

SEQ ID NO: 46264 - protein, 13 aa, Homo Sapiens
PQGASAFPTTINF

SEQ ID NO: 46265 - protein, 13 aa, Homo Sapiens
QGASAFPTTINFT

SEQ ID NO: 46266 - protein, 13 aa, Homo Sapiens
GASAFPTTINFTR

SEQ ID NO: 46267 - protein, 13 aa, Homo Sapiens
ASAFPTTINFTRQ

SEQ ID NO: 46268 - protein, 13 aa, Homo Sapiens
SAFPTTINFTRQR

SEQ ID NO: 46269 - protein, 13 aa, Homo Sapiens
AFPTTINFTRQRQ

SEQ ID NO: 46270 - protein, 13 aa, Homo Sapiens
FPTTINFTRQRQP

SEQ ID NO: 46271 - protein, 13 aa, Homo Sapiens
PTTINFTRQRQPS

SEQ ID NO: 46272 - protein, 13 aa, Homo Sapiens
TTINFTRQRQPSE

SEQ ID NO: 46273 - protein, 13 aa, Homo Sapiens
TINFTRQRQPSEG

SEQ ID NO: 46274 - protein, 13 aa, Homo Sapiens
INFTRQRQPSEGS

SEQ ID NO: 46275 - protein, 13 aa, Homo Sapiens
NFTRQRQPSEGSS

SEQ ID NO: 46276 - protein, 13 aa, Homo Sapiens
FTRQRQPSEGSSS

SEQ ID NO: 46277 - protein, 13 aa, Homo Sapiens
TRQRQPSEGSSSR

SEQ ID NO: 46278 - protein, 13 aa, Homo Sapiens
RQRQPSEGSSSRE

SEQ ID NO: 46279 - protein, 13 aa, Homo Sapiens
QRQPSEGSSSREE

SEQ ID NO: 46280 - protein, 13 aa, Homo Sapiens
RQPSEGSSSREEE

SEQ ID NO: 46281 - protein, 13 aa, Homo Sapiens
QPSEGSSSREEEG

SEQ ID NO: 46282 - protein, 13 aa, Homo Sapiens
PSEGSSSREEEGP

SEQ ID NO: 46283 - protein, 13 aa, Homo Sapiens
SEGSSSREEEGPS

SEQ ID NO: 46284 - protein, 13 aa, Homo Sapiens
EGSSSREEEGPST

SEQ ID NO: 46285 - protein, 13 aa, Homo Sapiens
GSSSREEEGPSTS

SEQ ID NO: 46286 - protein, 13 aa, Homo Sapiens
SSSREEEGPSTSC

SEQ ID NO: 46287 - protein, 13 aa, Homo Sapiens
SSREEEGPSTSCI

SEQ ID NO: 46288 - protein, 13 aa, Homo Sapiens
SREEEGPSTSCIL

SEQ ID NO: 46289 - protein, 13 aa, Homo Sapiens
REEEGPSTSCILE

SEQ ID NO: 46290 - protein, 13 aa, Homo Sapiens
EEEGPSTSCILES

SEQ ID NO: 46291 - protein, 13 aa, Homo Sapiens
EEGPSTSCILESL

SEQ ID NO: 46292 - protein, 13 aa, Homo Sapiens
EGPSTSCILESLF

SEQ ID NO: 46293 - protein, 13 aa, Homo Sapiens
GPSTSCILESLFR

SEQ ID NO: 46294 - protein, 13 aa, Homo Sapiens
PSTSCILESLFRA

SEQ ID NO: 46295 - protein, 13 aa, Homo Sapiens
STSCILESLFRAV

SEQ ID NO: 46296 - protein, 13 aa, Homo Sapiens
TSCILESLFRAVI

SEQ ID NO: 46297 - protein, 13 aa, Homo Sapiens
SCILESLFRAVIT

SEQ ID NO: 46298 - protein, 13 aa, Homo Sapiens
CILESLFRAVITK

SEQ ID NO: 46299 - protein, 13 aa, Homo Sapiens
ILESLFRAVITKK

SEQ ID NO: 46300 - protein, 13 aa, Homo Sapiens
LESLFRAVITKKV

SEQ ID NO: 46301 - protein, 13 aa, Homo Sapiens
ESLFRAVITKKVA

SEQ ID NO: 46302 - protein, 13 aa, Homo Sapiens
SLFRAVITKKVAD

SEQ ID NO: 46303 - protein, 13 aa, Homo Sapiens
LFRAVITKKVADL

SEQ ID NO: 46304 - protein, 13 aa, Homo Sapiens
FRAVITKKVADLV

SEQ ID NO: 46305 - protein, 13 aa, Homo Sapiens
RAVITKKVADLVG

SEQ ID NO: 46306 - protein, 13 aa, Homo Sapiens
AVITKKVADLVGF

SEQ ID NO: 46307 - protein, 13 aa, Homo Sapiens
VITKKVADLVGFL

SEQ ID NO: 46308 - protein, 13 aa, Homo Sapiens
ITKKVADLVGFLL

SEQ ID NO: 46309 - protein, 13 aa, Homo Sapiens
TKKVADLVGFLLL

SEQ ID NO: 46310 - protein, 13 aa, Homo Sapiens
KKVADLVGFLLLK

SEQ ID NO: 46311 - protein, 13 aa, Homo Sapiens
KVADLVGFLLLKY

SEQ ID NO: 46312 - protein, 13 aa, Homo Sapiens
VADLVGFLLLKYR

SEQ ID NO: 46313 - protein, 13 aa, Homo Sapiens
ADLVGFLLLKYRA

SEQ ID NO: 46314 - protein, 13 aa, Homo Sapiens
DLVGFLLLKYRAR

SEQ ID NO: 46315 - protein, 13 aa, Homo Sapiens
LVGFLLLKYRARE

SEQ ID NO: 46316 - protein, 13 aa, Homo Sapiens
VGFLLLKYRAREP

SEQ ID NO: 46317 - protein, 13 aa, Homo Sapiens
GFLLLKYRAREPV

SEQ ID NO: 46318 - protein, 13 aa, Homo Sapiens
FLLLKYRAREPVT

SEQ ID NO: 46319 - protein, 13 aa, Homo Sapiens
LLLKYRAREPVTK

SEQ ID NO: 46320 - protein, 13 aa, Homo Sapiens
LLKYRAREPVTKA

SEQ ID NO: 46321 - protein, 13 aa, Homo Sapiens
LKYRAREPVTKAE

SEQ ID NO: 46322 - protein, 13 aa, Homo Sapiens
KYRAREPVTKAEM

SEQ ID NO: 46323 - protein, 13 aa, Homo Sapiens
YRAREPVTKAEML

SEQ ID NO: 46324 - protein, 13 aa, Homo Sapiens
RAREPVTKAEMLE

SEQ ID NO: 46325 - protein, 13 aa, Homo Sapiens
AREPVTKAEMLES

SEQ ID NO: 46326 - protein, 13 aa, Homo Sapiens
REPVTKAEMLESV

SEQ ID NO: 46327 - protein, 13 aa, Homo Sapiens
EPVTKAEMLESVI

SEQ ID NO: 46328 - protein, 13 aa, Homo Sapiens
PVTKAEMLESVIK

SEQ ID NO: 46329 - protein, 13 aa, Homo Sapiens
VTKAEMLESVIKN

SEQ ID NO: 46330 - protein, 13 aa, Homo Sapiens
TKAEMLESVIKNY

SEQ ID NO: 46331 - protein, 13 aa, Homo Sapiens
KAEMLESVIKNYK

SEQ ID NO: 46332 - protein, 13 aa, Homo Sapiens
AEMLESVIKNYKH

SEQ ID NO: 46333 - protein, 13 aa, Homo Sapiens
EMLESVIKNYKHC

SEQ ID NO: 46334 - protein, 13 aa, Homo Sapiens
MLESVIKNYKHCF

SEQ ID NO: 46335 - protein, 13 aa, Homo Sapiens
LESVIKNYKHCFP

SEQ ID NO: 46336 - protein, 13 aa, Homo Sapiens
ESVIKNYKHCFPE

SEQ ID NO: 46337 - protein, 13 aa, Homo Sapiens
SVIKNYKHCFPEI

SEQ ID NO: 46338 - protein, 13 aa, Homo Sapiens
VIKNYKHCFPEIF

SEQ ID NO: 46339 - protein, 13 aa, Homo Sapiens
IKNYKHCFPEIFG

SEQ ID NO: 46340 - protein, 13 aa, Homo Sapiens
KNYKHCFPEIFGK

SEQ ID NO: 46341 - protein, 13 aa, Homo Sapiens
NYKHCFPEIFGKA

SEQ ID NO: 46342 - protein, 13 aa, Homo Sapiens
YKHCFPEIFGKAS

SEQ ID NO: 46343 - protein, 13 aa, Homo Sapiens
KHCFPEIFGKASE

SEQ ID NO: 46344 - protein, 13 aa, Homo Sapiens
HCFPEIFGKASES

SEQ ID NO: 46345 - protein, 13 aa, Homo Sapiens
CFPEIFGKASESL

SEQ ID NO: 46346 - protein, 13 aa, Homo Sapiens
FPEIFGKASESLQ

SEQ ID NO: 46347 - protein, 13 aa, Homo Sapiens
PEIFGKASESLQL

SEQ ID NO: 46348 - protein, 13 aa, Homo Sapiens
EIFGKASESLQLV

SEQ ID NO: 46349 - protein, 13 aa, Homo Sapiens
IFGKASESLQLVF

SEQ ID NO: 46350 - protein, 13 aa, Homo Sapiens
FGKASESLQLVFG

SEQ ID NO: 46351 - protein, 13 aa, Homo Sapiens
GKASESLQLVFGI

SEQ ID NO: 46352 - protein, 13 aa, Homo Sapiens
KASESLQLVFGID

SEQ ID NO: 46353 - protein, 13 aa, Homo Sapiens
ASESLQLVFGIDV

SEQ ID NO: 46354 - protein, 13 aa, Homo Sapiens
SESLQLVFGIDVK

SEQ ID NO: 46355 - protein, 13 aa, Homo Sapiens
ESLQLVFGIDVKE

SEQ ID NO: 46356 - protein, 13 aa, Homo Sapiens
SLQLVFGIDVKEA

SEQ ID NO: 46357 - protein, 13 aa, Homo Sapiens
LQLVFGIDVKEAD

SEQ ID NO: 46358 - protein, 13 aa, Homo Sapiens
QLVFGIDVKEADP

SEQ ID NO: 46359 - protein, 13 aa, Homo Sapiens
LVFGIDVKEADPT

SEQ ID NO: 46360 - protein, 13 aa, Homo Sapiens
VFGIDVKEADPTG

SEQ ID NO: 46361 - protein, 13 aa, Homo Sapiens
FGIDVKEADPTGH

SEQ ID NO: 46362 - protein, 13 aa, Homo Sapiens
GIDVKEADPTGHS

SEQ ID NO: 46363 - protein, 13 aa, Homo Sapiens
IDVKEADPTGHSY

SEQ ID NO: 46364 - protein, 13 aa, Homo Sapiens
DVKEADPTGHSYV

SEQ ID NO: 46365 - protein, 13 aa, Homo Sapiens
VKEADPTGHSYVL

SEQ ID NO: 46366 - protein, 13 aa, Homo Sapiens
KEADPTGHSYVLV

SEQ ID NO: 46367 - protein, 13 aa, Homo Sapiens
EADPTGHSYVLVT

SEQ ID NO: 46368 - protein, 13 aa, Homo Sapiens
ADPTGHSYVLVTC

SEQ ID NO: 46369 - protein, 13 aa, Homo Sapiens
DPTGHSYVLVTCL

SEQ ID NO: 46370 - protein, 13 aa, Homo Sapiens
PTGHSYVLVTCLG

SEQ ID NO: 46371 - protein, 13 aa, Homo Sapiens
TGHSYVLVTCLGL

SEQ ID NO: 46372 - protein, 13 aa, Homo Sapiens
GHSYVLVTCLGLS

SEQ ID NO: 46373 - protein, 13 aa, Homo Sapiens
HSYVLVTCLGLSY

SEQ ID NO: 46374 - protein, 13 aa, Homo Sapiens
SYVLVTCLGLSYD

SEQ ID NO: 46375 - protein, 13 aa, Homo Sapiens
YVLVTCLGLSYDG

SEQ ID NO: 46376 - protein, 13 aa, Homo Sapiens
VLVTCLGLSYDGL

SEQ ID NO: 46377 - protein, 13 aa, Homo Sapiens
LVTCLGLSYDGLL

SEQ ID NO: 46378 - protein, 13 aa, Homo Sapiens
VTCLGLSYDGLLG

SEQ ID NO: 46379 - protein, 13 aa, Homo Sapiens
TCLGLSYDGLLGD

SEQ ID NO: 46380 - protein, 13 aa, Homo Sapiens
CLGLSYDGLLGDN

SEQ ID NO: 46381 - protein, 13 aa, Homo Sapiens
LGLSYDGLLGDNQ

SEQ ID NO: 46382 - protein, 13 aa, Homo Sapiens
GLSYDGLLGDNQI

SEQ ID NO: 46383 - protein, 13 aa, Homo Sapiens
LSYDGLLGDNQIM

SEQ ID NO: 46384 - protein, 13 aa, Homo Sapiens
SYDGLLGDNQIMP

SEQ ID NO: 46385 - protein, 13 aa, Homo Sapiens
YDGLLGDNQIMPK

SEQ ID NO: 46386 - protein, 13 aa, Homo Sapiens
DGLLGDNQIMPKT

SEQ ID NO: 46387 - protein, 13 aa, Homo Sapiens
GLLGDNQIMPKTG

SEQ ID NO: 46388 - protein, 13 aa, Homo Sapiens
LLGDNQIMPKTGF

SEQ ID NO: 46389 - protein, 13 aa, Homo Sapiens
LGDNQIMPKTGFL

SEQ ID NO: 46390 - protein, 13 aa, Homo Sapiens
GDNQIMPKTGFLI

SEQ ID NO: 46391 - protein, 13 aa, Homo Sapiens
DNQIMPKTGFLII

SEQ ID NO: 46392 - protein, 13 aa, Homo Sapiens
NQIMPKTGFLIIV

SEQ ID NO: 46393 - protein, 13 aa, Homo Sapiens
QIMPKTGFLIIVL

SEQ ID NO: 46394 - protein, 13 aa, Homo Sapiens
IMPKTGFLIIVLV

SEQ ID NO: 46395 - protein, 13 aa, Homo Sapiens
MPKTGFLIIVLVM

SEQ ID NO: 46396 - protein, 13 aa, Homo Sapiens
PKTGFLIIVLVMI

SEQ ID NO: 46397 - protein, 13 aa, Homo Sapiens
KTGFLIIVLVMIA

SEQ ID NO: 46398 - protein, 13 aa, Homo Sapiens
TGFLIIVLVMIAM

SEQ ID NO: 46399 - protein, 13 aa, Homo Sapiens
GFLIIVLVMIAME

SEQ ID NO: 46400 - protein, 13 aa, Homo Sapiens
FLIIVLVMIAMEG

SEQ ID NO: 46401 - protein, 13 aa, Homo Sapiens
LIIVLVMIAMEGG

SEQ ID NO: 46402 - protein, 13 aa, Homo Sapiens
IIVLVMIAMEGGH

SEQ ID NO: 46403 - protein, 13 aa, Homo Sapiens
IVLVMIAMEGGHA

SEQ ID NO: 46404 - protein, 13 aa, Homo Sapiens
VLVMIAMEGGHAP

SEQ ID NO: 46405 - protein, 13 aa, Homo Sapiens
LVMIAMEGGHAPE

SEQ ID NO: 46406 - protein, 13 aa, Homo Sapiens
VMIAMEGGHAPEE

SEQ ID NO: 46407 - protein, 13 aa, Homo Sapiens
MIAMEGGHAPEEE

SEQ ID NO: 46408 - protein, 13 aa, Homo Sapiens
IAMEGGHAPEEEI

SEQ ID NO: 46409 - protein, 13 aa, Homo Sapiens
AMEGGHAPEEEIW

SEQ ID NO: 46410 - protein, 13 aa, Homo Sapiens
MEGGHAPEEEIWE

SEQ ID NO: 46411 - protein, 13 aa, Homo Sapiens
EGGHAPEEEIWEE

SEQ ID NO: 46412 - protein, 13 aa, Homo Sapiens
GGHAPEEEIWEEL

SEQ ID NO: 46413 - protein, 13 aa, Homo Sapiens
GHAPEEEIWEELS

SEQ ID NO: 46414 - protein, 13 aa, Homo Sapiens
HAPEEEIWEELSV

SEQ ID NO: 46415 - protein, 13 aa, Homo Sapiens
APEEEIWEELSVM

SEQ ID NO: 46416 - protein, 13 aa, Homo Sapiens
PEEEIWEELSVME

SEQ ID NO: 46417 - protein, 13 aa, Homo Sapiens
EEEIWEELSVMEV

SEQ ID NO: 46418 - protein, 13 aa, Homo Sapiens
EEIWEELSVMEVY

SEQ ID NO: 46419 - protein, 13 aa, Homo Sapiens
EIWEELSVMEVYD

SEQ ID NO: 46420 - protein, 13 aa, Homo Sapiens
IWEELSVMEVYDG

SEQ ID NO: 46421 - protein, 13 aa, Homo Sapiens
WEELSVMEVYDGR

SEQ ID NO: 46422 - protein, 13 aa, Homo Sapiens
EELSVMEVYDGRE

SEQ ID NO: 46423 - protein, 13 aa, Homo Sapiens
ELSVMEVYDGREH

SEQ ID NO: 46424 - protein, 13 aa, Homo Sapiens
LSVMEVYDGREHS

SEQ ID NO: 46425 - protein, 13 aa, Homo Sapiens
SVMEVYDGREHSA

SEQ ID NO: 46426 - protein, 13 aa, Homo Sapiens
VMEVYDGREHSAY

SEQ ID NO: 46427 - protein, 13 aa, Homo Sapiens
MEVYDGREHSAYG

SEQ ID NO: 46428 - protein, 13 aa, Homo Sapiens
EVYDGREHSAYGE

SEQ ID NO: 46429 - protein, 13 aa, Homo Sapiens
VYDGREHSAYGEP

SEQ ID NO: 46430 - protein, 13 aa, Homo Sapiens
YDGREHSAYGEPR

SEQ ID NO: 46431 - protein, 13 aa, Homo Sapiens
DGREHSAYGEPRK

SEQ ID NO: 46432 - protein, 13 aa, Homo Sapiens
GREHSAYGEPRKL

SEQ ID NO: 46433 - protein, 13 aa, Homo Sapiens
REHSAYGEPRKLL

SEQ ID NO: 46434 - protein, 13 aa, Homo Sapiens
EHSAYGEPRKLLT

SEQ ID NO: 46435 - protein, 13 aa, Homo Sapiens
HSAYGEPRKLLTQ

SEQ ID NO: 46436 - protein, 13 aa, Homo Sapiens
SAYGEPRKLLTQD

SEQ ID NO: 46437 - protein, 13 aa, Homo Sapiens
AYGEPRKLLTQDL

SEQ ID NO: 46438 - protein, 13 aa, Homo Sapiens
YGEPRKLLTQDLV

SEQ ID NO: 46439 - protein, 13 aa, Homo Sapiens
GEPRKLLTQDLVQ

SEQ ID NO: 46440 - protein, 13 aa, Homo Sapiens
EPRKLLTQDLVQE

SEQ ID NO: 46441 - protein, 13 aa, Homo Sapiens
PRKLLTQDLVQEK

SEQ ID NO: 46442 - protein, 13 aa, Homo Sapiens
RKLLTQDLVQEKY

SEQ ID NO: 46443 - protein, 13 aa, Homo Sapiens
KLLTQDLVQEKYL

SEQ ID NO: 46444 - protein, 13 aa, Homo Sapiens
LLTQDLVQEKYLE

SEQ ID NO: 46445 - protein, 13 aa, Homo Sapiens
LTQDLVQEKYLEY

SEQ ID NO: 46446 - protein, 13 aa, Homo Sapiens
TQDLVQEKYLEYR

SEQ ID NO: 46447 - protein, 13 aa, Homo Sapiens
QDLVQEKYLEYRQ

SEQ ID NO: 46448 - protein, 13 aa, Homo Sapiens
DLVQEKYLEYRQV

SEQ ID NO: 46449 - protein, 13 aa, Homo Sapiens
LVQEKYLEYRQVP

SEQ ID NO: 46450 - protein, 13 aa, Homo Sapiens
VQEKYLEYRQVPD

SEQ ID NO: 46451 - protein, 13 aa, Homo Sapiens
QEKYLEYRQVPDS

SEQ ID NO: 46452 - protein, 13 aa, Homo Sapiens
EKYLEYRQVPDSD

SEQ ID NO: 46453 - protein, 13 aa, Homo Sapiens
KYLEYRQVPDSDP

SEQ ID NO: 46454 - protein, 13 aa, Homo Sapiens
YLEYRQVPDSDPA

SEQ ID NO: 46455 - protein, 13 aa, Homo Sapiens
LEYRQVPDSDPAR

SEQ ID NO: 46456 - protein, 13 aa, Homo Sapiens
EYRQVPDSDPARY

SEQ ID NO: 46457 - protein, 13 aa, Homo Sapiens
YRQVPDSDPARYE

SEQ ID NO: 46458 - protein, 13 aa, Homo Sapiens
RQVPDSDPARYEF

SEQ ID NO: 46459 - protein, 13 aa, Homo Sapiens
QVPDSDPARYEFL

SEQ ID NO: 46460 - protein, 13 aa, Homo Sapiens
VPDSDPARYEFLW

SEQ ID NO: 46461 - protein, 13 aa, Homo Sapiens
PDSDPARYEFLWG

SEQ ID NO: 46462 - protein, 13 aa, Homo Sapiens
DSDPARYEFLWGP

SEQ ID NO: 46463 - protein, 13 aa, Homo Sapiens
SDPARYEFLWGPR

SEQ ID NO: 46464 - protein, 13 aa, Homo Sapiens
DPARYEFLWGPRA

SEQ ID NO: 46465 - protein, 13 aa, Homo Sapiens
PARYEFLWGPRAL

SEQ ID NO: 46466 - protein, 13 aa, Homo Sapiens
ARYEFLWGPRALA

SEQ ID NO: 46467 - protein, 13 aa, Homo Sapiens
RYEFLWGPRALAE

SEQ ID NO: 46468 - protein, 13 aa, Homo Sapiens
YEFLWGPRALAET

SEQ ID NO: 46469 - protein, 13 aa, Homo Sapiens
EFLWGPRALAETS

SEQ ID NO: 46470 - protein, 13 aa, Homo Sapiens
FLWGPRALAETSY

SEQ ID NO: 46471 - protein, 13 aa, Homo Sapiens
LWGPRALAETSYV

SEQ ID NO: 46472 - protein, 13 aa, Homo Sapiens
WGPRALAETSYVK

SEQ ID NO: 46473 - protein, 13 aa, Homo Sapiens
GPRALAETSYVKV

SEQ ID NO: 46474 - protein, 13 aa, Homo Sapiens
PRALAETSYVKVL

SEQ ID NO: 46475 - protein, 13 aa, Homo Sapiens
RALAETSYVKVLE

SEQ ID NO: 46476 - protein, 13 aa, Homo Sapiens
ALAETSYVKVLEY

SEQ ID NO: 46477 - protein, 13 aa, Homo Sapiens
LAETSYVKVLEYV

SEQ ID NO: 46478 - protein, 13 aa, Homo Sapiens
AETSYVKVLEYVI

SEQ ID NO: 46479 - protein, 13 aa, Homo Sapiens
ETSYVKVLEYVIK

SEQ ID NO: 46480 - protein, 13 aa, Homo Sapiens
TSYVKVLEYVIKV

SEQ ID NO: 46481 - protein, 13 aa, Homo Sapiens
SYVKVLEYVIKVS

SEQ ID NO: 46482 - protein, 13 aa, Homo Sapiens
YVKVLEYVIKVSA

SEQ ID NO: 46483 - protein, 13 aa, Homo Sapiens
VKVLEYVIKVSAR

SEQ ID NO: 46484 - protein, 13 aa, Homo Sapiens
KVLEYVIKVSARV

SEQ ID NO: 46485 - protein, 13 aa, Homo Sapiens
VLEYVIKVSARVR

SEQ ID NO: 46486 - protein, 13 aa, Homo Sapiens
LEYVIKVSARVRF

SEQ ID NO: 46487 - protein, 13 aa, Homo Sapiens
EYVIKVSARVRFF

SEQ ID NO: 46488 - protein, 13 aa, Homo Sapiens
YVIKVSARVRFFF

SEQ ID NO: 46489 - protein, 13 aa, Homo Sapiens
VIKVSARVRFFFP

SEQ ID NO: 46490 - protein, 13 aa, Homo Sapiens
IKVSARVRFFFPS

SEQ ID NO: 46491 - protein, 13 aa, Homo Sapiens
KVSARVRFFFPSL

SEQ ID NO: 46492 - protein, 13 aa, Homo Sapiens
VSARVRFFFPSLR

SEQ ID NO: 46493 - protein, 13 aa, Homo Sapiens
SARVRFFFPSLRE

SEQ ID NO: 46494 - protein, 13 aa, Homo Sapiens
ARVRFFFPSLREA

SEQ ID NO: 46495 - protein, 13 aa, Homo Sapiens
RVRFFFPSLREAA

SEQ ID NO: 46496 - protein, 13 aa, Homo Sapiens
VRFFFPSLREAAL

SEQ ID NO: 46497 - protein, 13 aa, Homo Sapiens
RFFFPSLREAALR

SEQ ID NO: 46498 - protein, 13 aa, Homo Sapiens
FFFPSLREAALRE

SEQ ID NO: 46499 - protein, 13 aa, Homo Sapiens
FFPSLREAALREE

SEQ ID NO: 46500 - protein, 13 aa, Homo Sapiens
FPSLREAALREEE

SEQ ID NO: 46501 - protein, 13 aa, Homo Sapiens
PSLREAALREEEE

SEQ ID NO: 46502 - protein, 13 aa, Homo Sapiens
SLREAALREEEEG

SEQ ID NO: 46503 - protein, 13 aa, Homo Sapiens
LREAALREEEEGV

SEQ ID NO: 46504 - protein, 14 aa, Homo Sapiens
MSLEQRSLHCKPEE

SEQ ID NO: 46505 - protein, 14 aa, Homo Sapiens
SLEQRSLHCKPEEA

SEQ ID NO: 46506 - protein, 14 aa, Homo Sapiens
LEQRSLHCKPEEAL

SEQ ID NO: 46507 - protein, 14 aa, Homo Sapiens
EQRSLHCKPEEALE

SEQ ID NO: 46508 - protein, 14 aa, Homo Sapiens
QRSLHCKPEEALEA

SEQ ID NO: 46509 - protein, 14 aa, Homo Sapiens
RSLHCKPEEALEAQ

SEQ ID NO: 46510 - protein, 14 aa, Homo Sapiens
SLHCKPEEALEAQQ

SEQ ID NO: 46511 - protein, 14 aa, Homo Sapiens
LHCKPEEALEAQQE

SEQ ID NO: 46512 - protein, 14 aa, Homo Sapiens
HCKPEEALEAQQEA

SEQ ID NO: 46513 - protein, 14 aa, Homo Sapiens
CKPEEALEAQQEAL

SEQ ID NO: 46514 - protein, 14 aa, Homo Sapiens
KPEEALEAQQEALG

SEQ ID NO: 46515 - protein, 14 aa, Homo Sapiens
PEEALEAQQEALGL

SEQ ID NO: 46516 - protein, 14 aa, Homo Sapiens
EEALEAQQEALGLV

SEQ ID NO: 46517 - protein, 14 aa, Homo Sapiens
EALEAQQEALGLVC

SEQ ID NO: 46518 - protein, 14 aa, Homo Sapiens
ALEAQQEALGLVCV

SEQ ID NO: 46519 - protein, 14 aa, Homo Sapiens
LEAQQEALGLVCVQ

SEQ ID NO: 46520 - protein, 14 aa, Homo Sapiens
EAQQEALGLVCVQA

SEQ ID NO: 46521 - protein, 14 aa, Homo Sapiens
AQQEALGLVCVQAA

SEQ ID NO: 46522 - protein, 14 aa, Homo Sapiens
QQEALGLVCVQAAT

SEQ ID NO: 46523 - protein, 14 aa, Homo Sapiens
QEALGLVCVQAATS

SEQ ID NO: 46524 - protein, 14 aa, Homo Sapiens
EALGLVCVQAATSS

SEQ ID NO: 46525 - protein, 14 aa, Homo Sapiens
ALGLVCVQAATSSS

SEQ ID NO: 46526 - protein, 14 aa, Homo Sapiens
LGLVCVQAATSSSS

SEQ ID NO: 46527 - protein, 14 aa, Homo Sapiens
GLVCVQAATSSSSP

SEQ ID NO: 46528 - protein, 14 aa, Homo Sapiens
LVCVQAATSSSSPL

SEQ ID NO: 46529 - protein, 14 aa, Homo Sapiens
VCVQAATSSSSPLV

SEQ ID NO: 46530 - protein, 14 aa, Homo Sapiens
CVQAATSSSSPLVL

SEQ ID NO: 46531 - protein, 14 aa, Homo Sapiens
VQAATSSSSPLVLG

SEQ ID NO: 46532 - protein, 14 aa, Homo Sapiens
QAATSSSSPLVLGT

SEQ ID NO: 46533 - protein, 14 aa, Homo Sapiens
AATSSSSPLVLGTL

SEQ ID NO: 46534 - protein, 14 aa, Homo Sapiens
ATSSSSPLVLGTLE

SEQ ID NO: 46535 - protein, 14 aa, Homo Sapiens
TSSSSPLVLGTLEE

SEQ ID NO: 46536 - protein, 14 aa, Homo Sapiens
SSSSPLVLGTLEEV

SEQ ID NO: 46537 - protein, 14 aa, Homo Sapiens
SSSPLVLGTLEEVP

SEQ ID NO: 46538 - protein, 14 aa, Homo Sapiens
SSPLVLGTLEEVPT

SEQ ID NO: 46539 - protein, 14 aa, Homo Sapiens
SPLVLGTLEEVPTA

SEQ ID NO: 46540 - protein, 14 aa, Homo Sapiens
PLVLGTLEEVPTAG

SEQ ID NO: 46541 - protein, 14 aa, Homo Sapiens
LVLGTLEEVPTAGS

SEQ ID NO: 46542 - protein, 14 aa, Homo Sapiens
VLGTLEEVPTAGST

SEQ ID NO: 46543 - protein, 14 aa, Homo Sapiens
LGTLEEVPTAGSTD

SEQ ID NO: 46544 - protein, 14 aa, Homo Sapiens
GTLEEVPTAGSTDP

SEQ ID NO: 46545 - protein, 14 aa, Homo Sapiens
TLEEVPTAGSTDPP

SEQ ID NO: 46546 - protein, 14 aa, Homo Sapiens
LEEVPTAGSTDPPQ

SEQ ID NO: 46547 - protein, 14 aa, Homo Sapiens
EEVPTAGSTDPPQS

SEQ ID NO: 46548 - protein, 14 aa, Homo Sapiens
EVPTAGSTDPPQSP

SEQ ID NO: 46549 - protein, 14 aa, Homo Sapiens
VPTAGSTDPPQSPQ

SEQ ID NO: 46550 - protein, 14 aa, Homo Sapiens
PTAGSTDPPQSPQG

SEQ ID NO: 46551 - protein, 14 aa, Homo Sapiens
TAGSTDPPQSPQGA

SEQ ID NO: 46552 - protein, 14 aa, Homo Sapiens
AGSTDPPQSPQGAS

SEQ ID NO: 46553 - protein, 14 aa, Homo Sapiens
GSTDPPQSPQGASA

SEQ ID NO: 46554 - protein, 14 aa, Homo Sapiens
STDPPQSPQGASAF

SEQ ID NO: 46555 - protein, 14 aa, Homo Sapiens
TDPPQSPQGASAFP

SEQ ID NO: 46556 - protein, 14 aa, Homo Sapiens
DPPQSPQGASAFPT

SEQ ID NO: 46557 - protein, 14 aa, Homo Sapiens
PPQSPQGASAFPTT

SEQ ID NO: 46558 - protein, 14 aa, Homo Sapiens
PQSPQGASAFPTTI

SEQ ID NO: 46559 - protein, 14 aa, Homo Sapiens
QSPQGASAFPTTIN

SEQ ID NO: 46560 - protein, 14 aa, Homo Sapiens
SPQGASAFPTTINF

SEQ ID NO: 46561 - protein, 14 aa, Homo Sapiens
PQGASAFPTTINFT

SEQ ID NO: 46562 - protein, 14 aa, Homo Sapiens
QGASAFPTTINFTR

SEQ ID NO: 46563 - protein, 14 aa, Homo Sapiens
GASAFPTTINFTRQ

SEQ ID NO: 46564 - protein, 14 aa, Homo Sapiens
ASAFPTTINFTRQR

SEQ ID NO: 46565 - protein, 14 aa, Homo Sapiens
SAFPTTINFTRQRQ

SEQ ID NO: 46566 - protein, 14 aa, Homo Sapiens
AFPTTINFTRQRQP

SEQ ID NO: 46567 - protein, 14 aa, Homo Sapiens
FPTTINFTRQRQPS

SEQ ID NO: 46568 - protein, 14 aa, Homo Sapiens
PTTINFTRQRQPSE

SEQ ID NO: 46569 - protein, 14 aa, Homo Sapiens
TTINFTRQRQPSEG

SEQ ID NO: 46570 - protein, 14 aa, Homo Sapiens
TINFTRQRQPSEGS

SEQ ID NO: 46571 - protein, 14 aa, Homo Sapiens
INFTRQRQPSEGSS

SEQ ID NO: 46572 - protein, 14 aa, Homo Sapiens
NFTRQRQPSEGSSS

SEQ ID NO: 46573 - protein, 14 aa, Homo Sapiens
FTRQRQPSEGSSSR

SEQ ID NO: 46574 - protein, 14 aa, Homo Sapiens
TRQRQPSEGSSSRE

SEQ ID NO: 46575 - protein, 14 aa, Homo Sapiens
RQRQPSEGSSSREE

SEQ ID NO: 46576 - protein, 14 aa, Homo Sapiens
QRQPSEGSSSREEE

SEQ ID NO: 46577 - protein, 14 aa, Homo Sapiens
RQPSEGSSSREEEG

SEQ ID NO: 46578 - protein, 14 aa, Homo Sapiens
QPSEGSSSREEEGP

SEQ ID NO: 46579 - protein, 14 aa, Homo Sapiens
PSEGSSSREEEGPS

SEQ ID NO: 46580 - protein, 14 aa, Homo Sapiens
SEGSSSREEEGPST

SEQ ID NO: 46581 - protein, 14 aa, Homo Sapiens
EGSSSREEEGPSTS

SEQ ID NO: 46582 - protein, 14 aa, Homo Sapiens
GSSSREEEGPSTSC

SEQ ID NO: 46583 - protein, 14 aa, Homo Sapiens
SSSREEEGPSTSCI

SEQ ID NO: 46584 - protein, 14 aa, Homo Sapiens
SSREEEGPSTSCIL

SEQ ID NO: 46585 - protein, 14 aa, Homo Sapiens
SREEEGPSTSCILE

SEQ ID NO: 46586 - protein, 14 aa, Homo Sapiens
REEEGPSTSCILES

SEQ ID NO: 46587 - protein, 14 aa, Homo Sapiens
EEEGPSTSCILESL

SEQ ID NO: 46588 - protein, 14 aa, Homo Sapiens
EEGPSTSCILESLF

SEQ ID NO: 46589 - protein, 14 aa, Homo Sapiens
EGPSTSCILESLFR

SEQ ID NO: 46590 - protein, 14 aa, Homo Sapiens
GPSTSCILESLFRA

SEQ ID NO: 46591 - protein, 14 aa, Homo Sapiens
PSTSCILESLFRAV

SEQ ID NO: 46592 - protein, 14 aa, Homo Sapiens
STSCILESLFRAVI

SEQ ID NO: 46593 - protein, 14 aa, Homo Sapiens
TSCILESLFRAVIT

SEQ ID NO: 46594 - protein, 14 aa, Homo Sapiens
SCILESLFRAVITK

SEQ ID NO: 46595 - protein, 14 aa, Homo Sapiens
CILESLFRAVITKK

SEQ ID NO: 46596 - protein, 14 aa, Homo Sapiens
ILESLFRAVITKKV

SEQ ID NO: 46597 - protein, 14 aa, Homo Sapiens
LESLFRAVITKKVA

SEQ ID NO: 46598 - protein, 14 aa, Homo Sapiens
ESLFRAVITKKVAD

SEQ ID NO: 46599 - protein, 14 aa, Homo Sapiens
SLFRAVITKKVADL

SEQ ID NO: 46600 - protein, 14 aa, Homo Sapiens
LFRAVITKKVADLV

SEQ ID NO: 46601 - protein, 14 aa, Homo Sapiens
FRAVITKKVADLVG

SEQ ID NO: 46602 - protein, 14 aa, Homo Sapiens
RAVITKKVADLVGF

SEQ ID NO: 46603 - protein, 14 aa, Homo Sapiens
AVITKKVADLVGFL

SEQ ID NO: 46604 - protein, 14 aa, Homo Sapiens
VITKKVADLVGFLL

SEQ ID NO: 46605 - protein, 14 aa, Homo Sapiens
ITKKVADLVGFLLL

SEQ ID NO: 46606 - protein, 14 aa, Homo Sapiens
TKKVADLVGFLLLK

SEQ ID NO: 46607 - protein, 14 aa, Homo Sapiens
KKVADLVGFLLLKY

SEQ ID NO: 46608 - protein, 14 aa, Homo Sapiens
KVADLVGFLLLKYR

SEQ ID NO: 46609 - protein, 14 aa, Homo Sapiens
VADLVGFLLLKYRA

SEQ ID NO: 46610 - protein, 14 aa, Homo Sapiens
ADLVGFLLLKYRAR

SEQ ID NO: 46611 - protein, 14 aa, Homo Sapiens
DLVGFLLLKYRARE

SEQ ID NO: 46612 - protein, 14 aa, Homo Sapiens
LVGFLLLKYRAREP

SEQ ID NO: 46613 - protein, 14 aa, Homo Sapiens
VGFLLLKYRAREPV

SEQ ID NO: 46614 - protein, 14 aa, Homo Sapiens
GFLLLKYRAREPVT

SEQ ID NO: 46615 - protein, 14 aa, Homo Sapiens
FLLLKYRAREPVTK

SEQ ID NO: 46616 - protein, 14 aa, Homo Sapiens
LLLKYRAREPVTKA

SEQ ID NO: 46617 - protein, 14 aa, Homo Sapiens
LLKYRAREPVTKAE

SEQ ID NO: 46618 - protein, 14 aa, Homo Sapiens
LKYRAREPVTKAEM

SEQ ID NO: 46619 - protein, 14 aa, Homo Sapiens
KYRAREPVTKAEML

SEQ ID NO: 46620 - protein, 14 aa, Homo Sapiens
YRAREPVTKAEMLE

SEQ ID NO: 46621 - protein, 14 aa, Homo Sapiens
RAREPVTKAEMLES

SEQ ID NO: 46622 - protein, 14 aa, Homo Sapiens
AREPVTKAEMLESV

SEQ ID NO: 46623 - protein, 14 aa, Homo Sapiens
REPVTKAEMLESVI

SEQ ID NO: 46624 - protein, 14 aa, Homo Sapiens
EPVTKAEMLESVIK

SEQ ID NO: 46625 - protein, 14 aa, Homo Sapiens
PVTKAEMLESVIKN

SEQ ID NO: 46626 - protein, 14 aa, Homo Sapiens
VTKAEMLESVIKNY

SEQ ID NO: 46627 - protein, 14 aa, Homo Sapiens
TKAEMLESVIKNYK

SEQ ID NO: 46628 - protein, 14 aa, Homo Sapiens
KAEMLESVIKNYKH

SEQ ID NO: 46629 - protein, 14 aa, Homo Sapiens
AEMLESVIKNYKHC

SEQ ID NO: 46630 - protein, 14 aa, Homo Sapiens
EMLESVIKNYKHCF

SEQ ID NO: 46631 - protein, 14 aa, Homo Sapiens
MLESVIKNYKHCFP

SEQ ID NO: 46632 - protein, 14 aa, Homo Sapiens
LESVIKNYKHCFPE

SEQ ID NO: 46633 - protein, 14 aa, Homo Sapiens
ESVIKNYKHCFPEI

SEQ ID NO: 46634 - protein, 14 aa, Homo Sapiens
SVIKNYKHCFPEIF

SEQ ID NO: 46635 - protein, 14 aa, Homo Sapiens
VIKNYKHCFPEIFG

SEQ ID NO: 46636 - protein, 14 aa, Homo Sapiens
IKNYKHCFPEIFGK

SEQ ID NO: 46637 - protein, 14 aa, Homo Sapiens
KNYKHCFPEIFGKA

SEQ ID NO: 46638 - protein, 14 aa, Homo Sapiens
NYKHCFPEIFGKAS

SEQ ID NO: 46639 - protein, 14 aa, Homo Sapiens
YKHCFPEIFGKASE

SEQ ID NO: 46640 - protein, 14 aa, Homo Sapiens
KHCFPEIFGKASES

SEQ ID NO: 46641 - protein, 14 aa, Homo Sapiens
HCFPEIFGKASESL

SEQ ID NO: 46642 - protein, 14 aa, Homo Sapiens
CFPEIFGKASESLQ

SEQ ID NO: 46643 - protein, 14 aa, Homo Sapiens
FPEIFGKASESLQL

SEQ ID NO: 46644 - protein, 14 aa, Homo Sapiens
PEIFGKASESLQLV

SEQ ID NO: 46645 - protein, 14 aa, Homo Sapiens
EIFGKASESLQLVF

SEQ ID NO: 46646 - protein, 14 aa, Homo Sapiens
IFGKASESLQLVFG

SEQ ID NO: 46647 - protein, 14 aa, Homo Sapiens
FGKASESLQLVFGI

SEQ ID NO: 46648 - protein, 14 aa, Homo Sapiens
GKASESLQLVFGID

SEQ ID NO: 46649 - protein, 14 aa, Homo Sapiens
KASESLQLVFGIDV

SEQ ID NO: 46650 - protein, 14 aa, Homo Sapiens
ASESLQLVFGIDVK

SEQ ID NO: 46651 - protein, 14 aa, Homo Sapiens
SESLQLVFGIDVKE

SEQ ID NO: 46652 - protein, 14 aa, Homo Sapiens
ESLQLVFGIDVKEA

SEQ ID NO: 46653 - protein, 14 aa, Homo Sapiens
SLQLVFGIDVKEAD

SEQ ID NO: 46654 - protein, 14 aa, Homo Sapiens
LQLVFGIDVKEADP

SEQ ID NO: 46655 - protein, 14 aa, Homo Sapiens
QLVFGIDVKEADPT

SEQ ID NO: 46656 - protein, 14 aa, Homo Sapiens
LVFGIDVKEADPTG

SEQ ID NO: 46657 - protein, 14 aa, Homo Sapiens
VFGIDVKEADPTGH

SEQ ID NO: 46658 - protein, 14 aa, Homo Sapiens
FGIDVKEADPTGHS

SEQ ID NO: 46659 - protein, 14 aa, Homo Sapiens
GIDVKEADPTGHSY

SEQ ID NO: 46660 - protein, 14 aa, Homo Sapiens
IDVKEADPTGHSYV

SEQ ID NO: 46661 - protein, 14 aa, Homo Sapiens
DVKEADPTGHSYVL

SEQ ID NO: 46662 - protein, 14 aa, Homo Sapiens
VKEADPTGHSYVLV

SEQ ID NO: 46663 - protein, 14 aa, Homo Sapiens
KEADPTGHSYVLVT

SEQ ID NO: 46664 - protein, 14 aa, Homo Sapiens
EADPTGHSYVLVTC

SEQ ID NO: 46665 - protein, 14 aa, Homo Sapiens
ADPTGHSYVLVTCL

SEQ ID NO: 46666 - protein, 14 aa, Homo Sapiens
DPTGHSYVLVTCLG

SEQ ID NO: 46667 - protein, 14 aa, Homo Sapiens
PTGHSYVLVTCLGL

SEQ ID NO: 46668 - protein, 14 aa, Homo Sapiens
TGHSYVLVTCLGLS

SEQ ID NO: 46669 - protein, 14 aa, Homo Sapiens
GHSYVLVTCLGLSY

SEQ ID NO: 46670 - protein, 14 aa, Homo Sapiens
HSYVLVTCLGLSYD

SEQ ID NO: 46671 - protein, 14 aa, Homo Sapiens
SYVLVTCLGLSYDG

SEQ ID NO: 46672 - protein, 14 aa, Homo Sapiens
YVLVTCLGLSYDGL

SEQ ID NO: 46673 - protein, 14 aa, Homo Sapiens
VLVTCLGLSYDGLL

SEQ ID NO: 46674 - protein, 14 aa, Homo Sapiens
LVTCLGLSYDGLLG

SEQ ID NO: 46675 - protein, 14 aa, Homo Sapiens
VTCLGLSYDGLLGD

SEQ ID NO: 46676 - protein, 14 aa, Homo Sapiens
TCLGLSYDGLLGDN

SEQ ID NO: 46677 - protein, 14 aa, Homo Sapiens
CLGLSYDGLLGDNQ

SEQ ID NO: 46678 - protein, 14 aa, Homo Sapiens
LGLSYDGLLGDNQI

SEQ ID NO: 46679 - protein, 14 aa, Homo Sapiens
GLSYDGLLGDNQIM

SEQ ID NO: 46680 - protein, 14 aa, Homo Sapiens
LSYDGLLGDNQIMP

SEQ ID NO: 46681 - protein, 14 aa, Homo Sapiens
SYDGLLGDNQIMPK

SEQ ID NO: 46682 - protein, 14 aa, Homo Sapiens
YDGLLGDNQIMPKT

SEQ ID NO: 46683 - protein, 14 aa, Homo Sapiens
DGLLGDNQIMPKTG

SEQ ID NO: 46684 - protein, 14 aa, Homo Sapiens
GLLGDNQIMPKTGF

SEQ ID NO: 46685 - protein, 14 aa, Homo Sapiens
LLGDNQIMPKTGFL

SEQ ID NO: 46686 - protein, 14 aa, Homo Sapiens
LGDNQIMPKTGFLI

SEQ ID NO: 46687 - protein, 14 aa, Homo Sapiens
GDNQIMPKTGFLII

SEQ ID NO: 46688 - protein, 14 aa, Homo Sapiens
DNQIMPKTGFLIIV

SEQ ID NO: 46689 - protein, 14 aa, Homo Sapiens
NQIMPKTGFLIIVL

SEQ ID NO: 46690 - protein, 14 aa, Homo Sapiens
QIMPKTGFLIIVLV

SEQ ID NO: 46691 - protein, 14 aa, Homo Sapiens
IMPKTGFLIIVLVM

SEQ ID NO: 46692 - protein, 14 aa, Homo Sapiens
MPKTGFLIIVLVMI

SEQ ID NO: 46693 - protein, 14 aa, Homo Sapiens
PKTGFLIIVLVMIA

SEQ ID NO: 46694 - protein, 14 aa, Homo Sapiens
KTGFLIIVLVMIAM

SEQ ID NO: 46695 - protein, 14 aa, Homo Sapiens
TGFLIIVLVMIAME

SEQ ID NO: 46696 - protein, 14 aa, Homo Sapiens
GFLIIVLVMIAMEG

SEQ ID NO: 46697 - protein, 14 aa, Homo Sapiens
FLIIVLVMIAMEGG

SEQ ID NO: 46698 - protein, 14 aa, Homo Sapiens
LIIVLVMIAMEGGH

SEQ ID NO: 46699 - protein, 14 aa, Homo Sapiens
IIVLVMIAMEGGHA

SEQ ID NO: 46700 - protein, 14 aa, Homo Sapiens
IVLVMIAMEGGHAP

SEQ ID NO: 46701 - protein, 14 aa, Homo Sapiens
VLVMIAMEGGHAPE

SEQ ID NO: 46702 - protein, 14 aa, Homo Sapiens
LVMIAMEGGHAPEE

SEQ ID NO: 46703 - protein, 14 aa, Homo Sapiens
VMIAMEGGHAPEEE

SEQ ID NO: 46704 - protein, 14 aa, Homo Sapiens
MIAMEGGHAPEEEI

SEQ ID NO: 46705 - protein, 14 aa, Homo Sapiens
IAMEGGHAPEEEIW

SEQ ID NO: 46706 - protein, 14 aa, Homo Sapiens
AMEGGHAPEEEIWE

SEQ ID NO: 46707 - protein, 14 aa, Homo Sapiens
MEGGHAPEEEIWEE

SEQ ID NO: 46708 - protein, 14 aa, Homo Sapiens
EGGHAPEEEIWEEL

SEQ ID NO: 46709 - protein, 14 aa, Homo Sapiens
GGHAPEEEIWEELS

SEQ ID NO: 46710 - protein, 14 aa, Homo Sapiens
GHAPEEEIWEELSV

SEQ ID NO: 46711 - protein, 14 aa, Homo Sapiens
HAPEEEIWEELSVM

SEQ ID NO: 46712 - protein, 14 aa, Homo Sapiens
APEEEIWEELSVME

SEQ ID NO: 46713 - protein, 14 aa, Homo Sapiens
PEEEIWEELSVMEV

SEQ ID NO: 46714 - protein, 14 aa, Homo Sapiens
EEEIWEELSVMEVY

SEQ ID NO: 46715 - protein, 14 aa, Homo Sapiens
EEIWEELSVMEVYD

SEQ ID NO: 46716 - protein, 14 aa, Homo Sapiens
EIWEELSVMEVYDG

SEQ ID NO: 46717 - protein, 14 aa, Homo Sapiens
IWEELSVMEVYDGR

SEQ ID NO: 46718 - protein, 14 aa, Homo Sapiens
WEELSVMEVYDGRE

SEQ ID NO: 46719 - protein, 14 aa, Homo Sapiens
EELSVMEVYDGREH

SEQ ID NO: 46720 - protein, 14 aa, Homo Sapiens
ELSVMEVYDGREHS

SEQ ID NO: 46721 - protein, 14 aa, Homo Sapiens
LSVMEVYDGREHSA

SEQ ID NO: 46722 - protein, 14 aa, Homo Sapiens
SVMEVYDGREHSAY

SEQ ID NO: 46723 - protein, 14 aa, Homo Sapiens
VMEVYDGREHSAYG

SEQ ID NO: 46724 - protein, 14 aa, Homo Sapiens
MEVYDGREHSAYGE

SEQ ID NO: 46725 - protein, 14 aa, Homo Sapiens
EVYDGREHSAYGEP

SEQ ID NO: 46726 - protein, 14 aa, Homo Sapiens
VYDGREHSAYGEPR

SEQ ID NO: 46727 - protein, 14 aa, Homo Sapiens
YDGREHSAYGEPRK

SEQ ID NO: 46728 - protein, 14 aa, Homo Sapiens
DGREHSAYGEPRKL

SEQ ID NO: 46729 - protein, 14 aa, Homo Sapiens
GREHSAYGEPRKLL

SEQ ID NO: 46730 - protein, 14 aa, Homo Sapiens
REHSAYGEPRKLLT

SEQ ID NO: 46731 - protein, 14 aa, Homo Sapiens
EHSAYGEPRKLLTQ

SEQ ID NO: 46732 - protein, 14 aa, Homo Sapiens
HSAYGEPRKLLTQD

SEQ ID NO: 46733 - protein, 14 aa, Homo Sapiens
SAYGEPRKLLTQDL

SEQ ID NO: 46734 - protein, 14 aa, Homo Sapiens
AYGEPRKLLTQDLV

SEQ ID NO: 46735 - protein, 14 aa, Homo Sapiens
YGEPRKLLTQDLVQ

SEQ ID NO: 46736 - protein, 14 aa, Homo Sapiens
GEPRKLLTQDLVQE

SEQ ID NO: 46737 - protein, 14 aa, Homo Sapiens
EPRKLLTQDLVQEK

SEQ ID NO: 46738 - protein, 14 aa, Homo Sapiens
PRKLLTQDLVQEKY

SEQ ID NO: 46739 - protein, 14 aa, Homo Sapiens
RKLLTQDLVQEKYL

SEQ ID NO: 46740 - protein, 14 aa, Homo Sapiens
KLLTQDLVQEKYLE

SEQ ID NO: 46741 - protein, 14 aa, Homo Sapiens
LLTQDLVQEKYLEY

SEQ ID NO: 46742 - protein, 14 aa, Homo Sapiens
LTQDLVQEKYLEYR

SEQ ID NO: 46743 - protein, 14 aa, Homo Sapiens
TQDLVQEKYLEYRQ

SEQ ID NO: 46744 - protein, 14 aa, Homo Sapiens
QDLVQEKYLEYRQV

SEQ ID NO: 46745 - protein, 14 aa, Homo Sapiens
DLVQEKYLEYRQVP

SEQ ID NO: 46746 - protein, 14 aa, Homo Sapiens
LVQEKYLEYRQVPD

SEQ ID NO: 46747 - protein, 14 aa, Homo Sapiens
VQEKYLEYRQVPDS

SEQ ID NO: 46748 - protein, 14 aa, Homo Sapiens
QEKYLEYRQVPDSD

SEQ ID NO: 46749 - protein, 14 aa, Homo Sapiens
EKYLEYRQVPDSDP

SEQ ID NO: 46750 - protein, 14 aa, Homo Sapiens
KYLEYRQVPDSDPA

SEQ ID NO: 46751 - protein, 14 aa, Homo Sapiens
YLEYRQVPDSDPAR

SEQ ID NO: 46752 - protein, 14 aa, Homo Sapiens
LEYRQVPDSDPARY

SEQ ID NO: 46753 - protein, 14 aa, Homo Sapiens
EYRQVPDSDPARYE

SEQ ID NO: 46754 - protein, 14 aa, Homo Sapiens
YRQVPDSDPARYEF

SEQ ID NO: 46755 - protein, 14 aa, Homo Sapiens
RQVPDSDPARYEFL

SEQ ID NO: 46756 - protein, 14 aa, Homo Sapiens
QVPDSDPARYEFLW

SEQ ID NO: 46757 - protein, 14 aa, Homo Sapiens
VPDSDPARYEFLWG

SEQ ID NO: 46758 - protein, 14 aa, Homo Sapiens
PDSDPARYEFLWGP

SEQ ID NO: 46759 - protein, 14 aa, Homo Sapiens
DSDPARYEFLWGPR

SEQ ID NO: 46760 - protein, 14 aa, Homo Sapiens
SDPARYEFLWGPRA

SEQ ID NO: 46761 - protein, 14 aa, Homo Sapiens
DPARYEFLWGPRAL

SEQ ID NO: 46762 - protein, 14 aa, Homo Sapiens
PARYEFLWGPRALA

SEQ ID NO: 46763 - protein, 14 aa, Homo Sapiens
ARYEFLWGPRALAE

SEQ ID NO: 46764 - protein, 14 aa, Homo Sapiens
RYEFLWGPRALAET

SEQ ID NO: 46765 - protein, 14 aa, Homo Sapiens
YEFLWGPRALAETS

SEQ ID NO: 46766 - protein, 14 aa, Homo Sapiens
EFLWGPRALAETSY

SEQ ID NO: 46767 - protein, 14 aa, Homo Sapiens
FLWGPRALAETSYV

SEQ ID NO: 46768 - protein, 14 aa, Homo Sapiens
LWGPRALAETSYVK

SEQ ID NO: 46769 - protein, 14 aa, Homo Sapiens
WGPRALAETSYVKV

SEQ ID NO: 46770 - protein, 14 aa, Homo Sapiens
GPRALAETSYVKVL

SEQ ID NO: 46771 - protein, 14 aa, Homo Sapiens
PRALAETSYVKVLE

SEQ ID NO: 46772 - protein, 14 aa, Homo Sapiens
RALAETSYVKVLEY

SEQ ID NO: 46773 - protein, 14 aa, Homo Sapiens
ALAETSYVKVLEYV

SEQ ID NO: 46774 - protein, 14 aa, Homo Sapiens
LAETSYVKVLEYVI

SEQ ID NO: 46775 - protein, 14 aa, Homo Sapiens
AETSYVKVLEYVIK

SEQ ID NO: 46776 - protein, 14 aa, Homo Sapiens
ETSYVKVLEYVIKV

SEQ ID NO: 46777 - protein, 14 aa, Homo Sapiens
TSYVKVLEYVIKVS

SEQ ID NO: 46778 - protein, 14 aa, Homo Sapiens
SYVKVLEYVIKVSA

SEQ ID NO: 46779 - protein, 14 aa, Homo Sapiens
YVKVLEYVIKVSAR

SEQ ID NO: 46780 - protein, 14 aa, Homo Sapiens
VKVLEYVIKVSARV

SEQ ID NO: 46781 - protein, 14 aa, Homo Sapiens
KVLEYVIKVSARVR

SEQ ID NO: 46782 - protein, 14 aa, Homo Sapiens
VLEYVIKVSARVRF

SEQ ID NO: 46783 - protein, 14 aa, Homo Sapiens
LEYVIKVSARVRFF

SEQ ID NO: 46784 - protein, 14 aa, Homo Sapiens
EYVIKVSARVRFFF

SEQ ID NO: 46785 - protein, 14 aa, Homo Sapiens
YVIKVSARVRFFFP

SEQ ID NO: 46786 - protein, 14 aa, Homo Sapiens
VIKVSARVRFFFPS

SEQ ID NO: 46787 - protein, 14 aa, Homo Sapiens
IKVSARVRFFFPSL

SEQ ID NO: 46788 - protein, 14 aa, Homo Sapiens
KVSARVRFFFPSLR

SEQ ID NO: 46789 - protein, 14 aa, Homo Sapiens
VSARVRFFFPSLRE

SEQ ID NO: 46790 - protein, 14 aa, Homo Sapiens
SARVRFFFPSLREA

SEQ ID NO: 46791 - protein, 14 aa, Homo Sapiens
ARVRFFFPSLREAA

SEQ ID NO: 46792 - protein, 14 aa, Homo Sapiens
RVRFFFPSLREAAL

SEQ ID NO: 46793 - protein, 14 aa, Homo Sapiens
VRFFFPSLREAALR

SEQ ID NO: 46794 - protein, 14 aa, Homo Sapiens
RFFFPSLREAALRE

SEQ ID NO: 46795 - protein, 14 aa, Homo Sapiens
FFFPSLREAALREE

SEQ ID NO: 46796 - protein, 14 aa, Homo Sapiens
FFPSLREAALREEE

SEQ ID NO: 46797 - protein, 14 aa, Homo Sapiens
FPSLREAALREEEE

SEQ ID NO: 46798 - protein, 14 aa, Homo Sapiens
PSLREAALREEEEG

SEQ ID NO: 46799 - protein, 14 aa, Homo Sapiens
SLREAALREEEEGV

SEQ ID NO: 46800 - protein, 15 aa, Homo Sapiens
MSLEQRSLHCKPEEA

SEQ ID NO: 46801 - protein, 15 aa, Homo Sapiens
SLEQRSLHCKPEEAL

SEQ ID NO: 46802 - protein, 15 aa, Homo Sapiens
LEQRSLHCKPEEALE

SEQ ID NO: 46803 - protein, 15 aa, Homo Sapiens
EQRSLHCKPEEALEA

SEQ ID NO: 46804 - protein, 15 aa, Homo Sapiens
QRSLHCKPEEALEAQ

SEQ ID NO: 46805 - protein, 15 aa, Homo Sapiens
RSLHCKPEEALEAQQ

SEQ ID NO: 46806 - protein, 15 aa, Homo Sapiens
SLHCKPEEALEAQQE

SEQ ID NO: 46807 - protein, 15 aa, Homo Sapiens
LHCKPEEALEAQQEA

SEQ ID NO: 46808 - protein, 15 aa, Homo Sapiens
HCKPEEALEAQQEAL

SEQ ID NO: 46809 - protein, 15 aa, Homo Sapiens
CKPEEALEAQQEALG

SEQ ID NO: 46810 - protein, 15 aa, Homo Sapiens
KPEEALEAQQEALGL

SEQ ID NO: 46811 - protein, 15 aa, Homo Sapiens
PEEALEAQQEALGLV

SEQ ID NO: 46812 - protein, 15 aa, Homo Sapiens
EEALEAQQEALGLVC

SEQ ID NO: 46813 - protein, 15 aa, Homo Sapiens
EALEAQQEALGLVCV

SEQ ID NO: 46814 - protein, 15 aa, Homo Sapiens
ALEAQQEALGLVCVQ

SEQ ID NO: 46815 - protein, 15 aa, Homo Sapiens
LEAQQEALGLVCVQA

SEQ ID NO: 46816 - protein, 15 aa, Homo Sapiens
EAQQEALGLVCVQAA

SEQ ID NO: 46817 - protein, 15 aa, Homo Sapiens
AQQEALGLVCVQAAT

SEQ ID NO: 46818 - protein, 15 aa, Homo Sapiens
QQEALGLVCVQAATS

SEQ ID NO: 46819 - protein, 15 aa, Homo Sapiens
QEALGLVCVQAATSS

SEQ ID NO: 46820 - protein, 15 aa, Homo Sapiens
EALGLVCVQAATSSS

SEQ ID NO: 46821 - protein, 15 aa, Homo Sapiens
ALGLVCVQAATSSSS

SEQ ID NO: 46822 - protein, 15 aa, Homo Sapiens
LGLVCVQAATSSSSP

SEQ ID NO: 46823 - protein, 15 aa, Homo Sapiens
GLVCVQAATSSSSPL

SEQ ID NO: 46824 - protein, 15 aa, Homo Sapiens
LVCVQAATSSSSPLV

SEQ ID NO: 46825 - protein, 15 aa, Homo Sapiens
VCVQAATSSSSPLVL

SEQ ID NO: 46826 - protein, 15 aa, Homo Sapiens
CVQAATSSSSPLVLG

SEQ ID NO: 46827 - protein, 15 aa, Homo Sapiens
VQAATSSSSPLVLGT

SEQ ID NO: 46828 - protein, 15 aa, Homo Sapiens
QAATSSSSPLVLGTL

SEQ ID NO: 46829 - protein, 15 aa, Homo Sapiens
AATSSSSPLVLGTLE

SEQ ID NO: 46830 - protein, 15 aa, Homo Sapiens
ATSSSSPLVLGTLEE

SEQ ID NO: 46831 - protein, 15 aa, Homo Sapiens
TSSSSPLVLGTLEEV

SEQ ID NO: 46832 - protein, 15 aa, Homo Sapiens
SSSSPLVLGTLEEVP

SEQ ID NO: 46833 - protein, 15 aa, Homo Sapiens
SSSPLVLGTLEEVPT

SEQ ID NO: 46834 - protein, 15 aa, Homo Sapiens
SSPLVLGTLEEVPTA

SEQ ID NO: 46835 - protein, 15 aa, Homo Sapiens
SPLVLGTLEEVPTAG

SEQ ID NO: 46836 - protein, 15 aa, Homo Sapiens
PLVLGTLEEVPTAGS

SEQ ID NO: 46837 - protein, 15 aa, Homo Sapiens
LVLGTLEEVPTAGST

SEQ ID NO: 46838 - protein, 15 aa, Homo Sapiens
VLGTLEEVPTAGSTD

SEQ ID NO: 46839 - protein, 15 aa, Homo Sapiens
LGTLEEVPTAGSTDP

SEQ ID NO: 46840 - protein, 15 aa, Homo Sapiens
GTLEEVPTAGSTDPP

SEQ ID NO: 46841 - protein, 15 aa, Homo Sapiens
TLEEVPTAGSTDPPQ

SEQ ID NO: 46842 - protein, 15 aa, Homo Sapiens
LEEVPTAGSTDPPQS

SEQ ID NO: 46843 - protein, 15 aa, Homo Sapiens
EEVPTAGSTDPPQSP

SEQ ID NO: 46844 - protein, 15 aa, Homo Sapiens
EVPTAGSTDPPQSPQ

SEQ ID NO: 46845 - protein, 15 aa, Homo Sapiens
VPTAGSTDPPQSPQG

SEQ ID NO: 46846 - protein, 15 aa, Homo Sapiens
PTAGSTDPPQSPQGA

SEQ ID NO: 46847 - protein, 15 aa, Homo Sapiens
TAGSTDPPQSPQGAS

SEQ ID NO: 46848 - protein, 15 aa, Homo Sapiens
AGSTDPPQSPQGASA

SEQ ID NO: 46849 - protein, 15 aa, Homo Sapiens
GSTDPPQSPQGASAF

SEQ ID NO: 46850 - protein, 15 aa, Homo Sapiens
STDPPQSPQGASAFP

SEQ ID NO: 46851 - protein, 15 aa, Homo Sapiens
TDPPQSPQGASAFPT

SEQ ID NO: 46852 - protein, 15 aa, Homo Sapiens
DPPQSPQGASAFPTT

SEQ ID NO: 46853 - protein, 15 aa, Homo Sapiens
PPQSPQGASAFPTTI

SEQ ID NO: 46854 - protein, 15 aa, Homo Sapiens
PQSPQGASAFPTTIN

SEQ ID NO: 46855 - protein, 15 aa, Homo Sapiens
QSPQGASAFPTTINF

SEQ ID NO: 46856 - protein, 15 aa, Homo Sapiens
SPQGASAFPTTINFT

SEQ ID NO: 46857 - protein, 15 aa, Homo Sapiens
PQGASAFPTTINFTR

SEQ ID NO: 46858 - protein, 15 aa, Homo Sapiens
QGASAFPTTINFTRQ

SEQ ID NO: 46859 - protein, 15 aa, Homo Sapiens
GASAFPTTINFTRQR

SEQ ID NO: 46860 - protein, 15 aa, Homo Sapiens
ASAFPTTINFTRQRQ

SEQ ID NO: 46861 - protein, 15 aa, Homo Sapiens
SAFPTTINFTRQRQP

SEQ ID NO: 46862 - protein, 15 aa, Homo Sapiens
AFPTTINFTRQRQPS

SEQ ID NO: 46863 - protein, 15 aa, Homo Sapiens
FPTTINFTRQRQPSE

SEQ ID NO: 46864 - protein, 15 aa, Homo Sapiens
PTTINFTRQRQPSEG

SEQ ID NO: 46865 - protein, 15 aa, Homo Sapiens
TTINFTRQRQPSEGS

SEQ ID NO: 46866 - protein, 15 aa, Homo Sapiens
TINFTRQRQPSEGSS

SEQ ID NO: 46867 - protein, 15 aa, Homo Sapiens
INFTRQRQPSEGSSS

SEQ ID NO: 46868 - protein, 15 aa, Homo Sapiens
NFTRQRQPSEGSSSR

SEQ ID NO: 46869 - protein, 15 aa, Homo Sapiens
FTRQRQPSEGSSSRE

SEQ ID NO: 46870 - protein, 15 aa, Homo Sapiens
TRQRQPSEGSSSREE

SEQ ID NO: 46871 - protein, 15 aa, Homo Sapiens
RQRQPSEGSSSREEE

SEQ ID NO: 46872 - protein, 15 aa, Homo Sapiens
QRQPSEGSSSREEEG

SEQ ID NO: 46873 - protein, 15 aa, Homo Sapiens
RQPSEGSSSREEEGP

SEQ ID NO: 46874 - protein, 15 aa, Homo Sapiens
QPSEGSSSREEEGPS

SEQ ID NO: 46875 - protein, 15 aa, Homo Sapiens
PSEGSSSREEEGPST

SEQ ID NO: 46876 - protein, 15 aa, Homo Sapiens
SEGSSSREEEGPSTS

SEQ ID NO: 46877 - protein, 15 aa, Homo Sapiens
EGSSSREEEGPSTSC

SEQ ID NO: 46878 - protein, 15 aa, Homo Sapiens
GSSSREEEGPSTSCI

SEQ ID NO: 46879 - protein, 15 aa, Homo Sapiens
SSSREEEGPSTSCIL

SEQ ID NO: 46880 - protein, 15 aa, Homo Sapiens
SSREEEGPSTSCILE

SEQ ID NO: 46881 - protein, 15 aa, Homo Sapiens
SREEEGPSTSCILES

SEQ ID NO: 46882 - protein, 15 aa, Homo Sapiens
REEEGPSTSCILESL

SEQ ID NO: 46883 - protein, 15 aa, Homo Sapiens
EEEGPSTSCILESLF

SEQ ID NO: 46884 - protein, 15 aa, Homo Sapiens
EEGPSTSCILESLFR

SEQ ID NO: 46885 - protein, 15 aa, Homo Sapiens
EGPSTSCILESLFRA

SEQ ID NO: 46886 - protein, 15 aa, Homo Sapiens
GPSTSCILESLFRAV

SEQ ID NO: 46887 - protein, 15 aa, Homo Sapiens
PSTSCILESLFRAVI

SEQ ID NO: 46888 - protein, 15 aa, Homo Sapiens
STSCILESLFRAVIT

SEQ ID NO: 46889 - protein, 15 aa, Homo Sapiens
TSCILESLFRAVITK

SEQ ID NO: 46890 - protein, 15 aa, Homo Sapiens
SCILESLFRAVITKK

SEQ ID NO: 46891 - protein, 15 aa, Homo Sapiens
CILESLFRAVITKKV

SEQ ID NO: 46892 - protein, 15 aa, Homo Sapiens
ILESLFRAVITKKVA

SEQ ID NO: 46893 - protein, 15 aa, Homo Sapiens
LESLFRAVITKKVAD

SEQ ID NO: 46894 - protein, 15 aa, Homo Sapiens
ESLFRAVITKKVADL

SEQ ID NO: 46895 - protein, 15 aa, Homo Sapiens
SLFRAVITKKVADLV

SEQ ID NO: 46896 - protein, 15 aa, Homo Sapiens
LFRAVITKKVADLVG

SEQ ID NO: 46897 - protein, 15 aa, Homo Sapiens
FRAVITKKVADLVGF

SEQ ID NO: 46898 - protein, 15 aa, Homo Sapiens
RAVITKKVADLVGFL

SEQ ID NO: 46899 - protein, 15 aa, Homo Sapiens
AVITKKVADLVGFLL

SEQ ID NO: 46900 - protein, 15 aa, Homo Sapiens
VITKKVADLVGFLLL

SEQ ID NO: 46901 - protein, 15 aa, Homo Sapiens
ITKKVADLVGFLLLK

SEQ ID NO: 46902 - protein, 15 aa, Homo Sapiens
TKKVADLVGFLLLKY

SEQ ID NO: 46903 - protein, 15 aa, Homo Sapiens
KKVADLVGFLLLKYR

SEQ ID NO: 46904 - protein, 15 aa, Homo Sapiens
KVADLVGFLLLKYRA

SEQ ID NO: 46905 - protein, 15 aa, Homo Sapiens
VADLVGFLLLKYRAR

SEQ ID NO: 46906 - protein, 15 aa, Homo Sapiens
ADLVGFLLLKYRARE

SEQ ID NO: 46907 - protein, 15 aa, Homo Sapiens
DLVGFLLLKYRAREP

SEQ ID NO: 46908 - protein, 15 aa, Homo Sapiens
LVGFLLLKYRAREPV

SEQ ID NO: 46909 - protein, 15 aa, Homo Sapiens
VGFLLLKYRAREPVT

SEQ ID NO: 46910 - protein, 15 aa, Homo Sapiens
GFLLLKYRAREPVTK

SEQ ID NO: 46911 - protein, 15 aa, Homo Sapiens
FLLLKYRAREPVTKA

SEQ ID NO: 46912 - protein, 15 aa, Homo Sapiens
LLLKYRAREPVTKAE

SEQ ID NO: 46913 - protein, 15 aa, Homo Sapiens
LLKYRAREPVTKAEM

SEQ ID NO: 46914 - protein, 15 aa, Homo Sapiens
LKYRAREPVTKAEML

SEQ ID NO: 46915 - protein, 15 aa, Homo Sapiens
KYRAREPVTKAEMLE

SEQ ID NO: 46916 - protein, 15 aa, Homo Sapiens
YRAREPVTKAEMLES

SEQ ID NO: 46917 - protein, 15 aa, Homo Sapiens
RAREPVTKAEMLESV

SEQ ID NO: 46918 - protein, 15 aa, Homo Sapiens
AREPVTKAEMLESVI

SEQ ID NO: 46919 - protein, 15 aa, Homo Sapiens
REPVTKAEMLESVIK

SEQ ID NO: 46920 - protein, 15 aa, Homo Sapiens
EPVTKAEMLESVIKN

SEQ ID NO: 46921 - protein, 15 aa, Homo Sapiens
PVTKAEMLESVIKNY

SEQ ID NO: 46922 - protein, 15 aa, Homo Sapiens
VTKAEMLESVIKNYK

SEQ ID NO: 46923 - protein, 15 aa, Homo Sapiens
TKAEMLESVIKNYKH

SEQ ID NO: 46924 - protein, 15 aa, Homo Sapiens
KAEMLESVIKNYKHC

SEQ ID NO: 46925 - protein, 15 aa, Homo Sapiens
AEMLESVIKNYKHCF

SEQ ID NO: 46926 - protein, 15 aa, Homo Sapiens
EMLESVIKNYKHCFP

SEQ ID NO: 46927 - protein, 15 aa, Homo Sapiens
MLESVIKNYKHCFPE

SEQ ID NO: 46928 - protein, 15 aa, Homo Sapiens
LESVIKNYKHCFPEI

SEQ ID NO: 46929 - protein, 15 aa, Homo Sapiens
ESVIKNYKHCFPEIF

SEQ ID NO: 46930 - protein, 15 aa, Homo Sapiens
SVIKNYKHCFPEIFG

SEQ ID NO: 46931 - protein, 15 aa, Homo Sapiens
VIKNYKHCFPEIFGK

SEQ ID NO: 46932 - protein, 15 aa, Homo Sapiens
IKNYKHCFPEIFGKA

SEQ ID NO: 46933 - protein, 15 aa, Homo Sapiens
KNYKHCFPEIFGKAS

SEQ ID NO: 46934 - protein, 15 aa, Homo Sapiens
NYKHCFPEIFGKASE

SEQ ID NO: 46935 - protein, 15 aa, Homo Sapiens
YKHCFPEIFGKASES

SEQ ID NO: 46936 - protein, 15 aa, Homo Sapiens
KHCFPEIFGKASESL

SEQ ID NO: 46937 - protein, 15 aa, Homo Sapiens
HCFPEIFGKASESLQ

SEQ ID NO: 46938 - protein, 15 aa, Homo Sapiens
CFPEIFGKASESLQL

SEQ ID NO: 46939 - protein, 15 aa, Homo Sapiens
FPEIFGKASESLQLV

SEQ ID NO: 46940 - protein, 15 aa, Homo Sapiens
PEIFGKASESLQLVF

SEQ ID NO: 46941 - protein, 15 aa, Homo Sapiens
EIFGKASESLQLVFG

SEQ ID NO: 46942 - protein, 15 aa, Homo Sapiens
IFGKASESLQLVFGI

SEQ ID NO: 46943 - protein, 15 aa, Homo Sapiens
FGKASESLQLVFGID

SEQ ID NO: 46944 - protein, 15 aa, Homo Sapiens
GKASESLQLVFGIDV

SEQ ID NO: 46945 - protein, 15 aa, Homo Sapiens
KASESLQLVFGIDVK

SEQ ID NO: 46946 - protein, 15 aa, Homo Sapiens
ASESLQLVFGIDVKE

SEQ ID NO: 46947 - protein, 15 aa, Homo Sapiens
SESLQLVFGIDVKEA

SEQ ID NO: 46948 - protein, 15 aa, Homo Sapiens
ESLQLVFGIDVKEAD

SEQ ID NO: 46949 - protein, 15 aa, Homo Sapiens
SLQLVFGIDVKEADP

SEQ ID NO: 46950 - protein, 15 aa, Homo Sapiens
LQLVFGIDVKEADPT

SEQ ID NO: 46951 - protein, 15 aa, Homo Sapiens
QLVFGIDVKEADPTG

SEQ ID NO: 46952 - protein, 15 aa, Homo Sapiens
LVFGIDVKEADPTGH

SEQ ID NO: 46953 - protein, 15 aa, Homo Sapiens
VFGIDVKEADPTGHS

SEQ ID NO: 46954 - protein, 15 aa, Homo Sapiens
FGIDVKEADPTGHSY

SEQ ID NO: 46955 - protein, 15 aa, Homo Sapiens
GIDVKEADPTGHSYV

SEQ ID NO: 46956 - protein, 15 aa, Homo Sapiens
IDVKEADPTGHSYVL

SEQ ID NO: 46957 - protein, 15 aa, Homo Sapiens
DVKEADPTGHSYVLV

SEQ ID NO: 46958 - protein, 15 aa, Homo Sapiens
VKEADPTGHSYVLVT

SEQ ID NO: 46959 - protein, 15 aa, Homo Sapiens
KEADPTGHSYVLVTC

SEQ ID NO: 46960 - protein, 15 aa, Homo Sapiens
EADPTGHSYVLVTCL

SEQ ID NO: 46961 - protein, 15 aa, Homo Sapiens
ADPTGHSYVLVTCLG

SEQ ID NO: 46962 - protein, 15 aa, Homo Sapiens
DPTGHSYVLVTCLGL

SEQ ID NO: 46963 - protein, 15 aa, Homo Sapiens
PTGHSYVLVTCLGLS

SEQ ID NO: 46964 - protein, 15 aa, Homo Sapiens
TGHSYVLVTCLGLSY

SEQ ID NO: 46965 - protein, 15 aa, Homo Sapiens
GHSYVLVTCLGLSYD

SEQ ID NO: 46966 - protein, 15 aa, Homo Sapiens
HSYVLVTCLGLSYDG

SEQ ID NO: 46967 - protein, 15 aa, Homo Sapiens
SYVLVTCLGLSYDGL

SEQ ID NO: 46968 - protein, 15 aa, Homo Sapiens
YVLVTCLGLSYDGLL

SEQ ID NO: 46969 - protein, 15 aa, Homo Sapiens
VLVTCLGLSYDGLLG

SEQ ID NO: 46970 - protein, 15 aa, Homo Sapiens
LVTCLGLSYDGLLGD

SEQ ID NO: 46971 - protein, 15 aa, Homo Sapiens
VTCLGLSYDGLLGDN

SEQ ID NO: 46972 - protein, 15 aa, Homo Sapiens
TCLGLSYDGLLGDNQ

SEQ ID NO: 46973 - protein, 15 aa, Homo Sapiens
CLGLSYDGLLGDNQI

SEQ ID NO: 46974 - protein, 15 aa, Homo Sapiens
LGLSYDGLLGDNQIM

SEQ ID NO: 46975 - protein, 15 aa, Homo Sapiens
GLSYDGLLGDNQIMP

SEQ ID NO: 46976 - protein, 15 aa, Homo Sapiens
LSYDGLLGDNQIMPK

SEQ ID NO: 46977 - protein, 15 aa, Homo Sapiens
SYDGLLGDNQIMPKT

SEQ ID NO: 46978 - protein, 15 aa, Homo Sapiens
YDGLLGDNQIMPKTG

SEQ ID NO: 46979 - protein, 15 aa, Homo Sapiens
DGLLGDNQIMPKTGF

SEQ ID NO: 46980 - protein, 15 aa, Homo Sapiens
GLLGDNQIMPKTGFL

SEQ ID NO: 46981 - protein, 15 aa, Homo Sapiens
LLGDNQIMPKTGFLI

SEQ ID NO: 46982 - protein, 15 aa, Homo Sapiens
LGDNQIMPKTGFLII

SEQ ID NO: 46983 - protein, 15 aa, Homo Sapiens
GDNQIMPKTGFLIIV

SEQ ID NO: 46984 - protein, 15 aa, Homo Sapiens
DNQIMPKTGFLIIVL

SEQ ID NO: 46985 - protein, 15 aa, Homo Sapiens
NQIMPKTGFLIIVLV

SEQ ID NO: 46986 - protein, 15 aa, Homo Sapiens
QIMPKTGFLIIVLVM

SEQ ID NO: 46987 - protein, 15 aa, Homo Sapiens
IMPKTGFLIIVLVMI

SEQ ID NO: 46988 - protein, 15 aa, Homo Sapiens
MPKTGFLIIVLVMIA

SEQ ID NO: 46989 - protein, 15 aa, Homo Sapiens
PKTGFLIIVLVMIAM

SEQ ID NO: 46990 - protein, 15 aa, Homo Sapiens
KTGFLIIVLVMIAME

SEQ ID NO: 46991 - protein, 15 aa, Homo Sapiens
TGFLIIVLVMIAMEG

SEQ ID NO: 46992 - protein, 15 aa, Homo Sapiens
GFLIIVLVMIAMEGG

SEQ ID NO: 46993 - protein, 15 aa, Homo Sapiens
FLIIVLVMIAMEGGH

SEQ ID NO: 46994 - protein, 15 aa, Homo Sapiens
LIIVLVMIAMEGGHA

SEQ ID NO: 46995 - protein, 15 aa, Homo Sapiens
IIVLVMIAMEGGHAP

SEQ ID NO: 46996 - protein, 15 aa, Homo Sapiens
IVLVMIAMEGGHAPE

SEQ ID NO: 46997 - protein, 15 aa, Homo Sapiens
VLVMIAMEGGHAPEE

SEQ ID NO: 46998 - protein, 15 aa, Homo Sapiens
LVMIAMEGGHAPEEE

SEQ ID NO: 46999 - protein, 15 aa, Homo Sapiens
VMIAMEGGHAPEEEI

SEQ ID NO: 47000 - protein, 15 aa, Homo Sapiens
MIAMEGGHAPEEEIW

SEQ ID NO: 47001 - protein, 15 aa, Homo Sapiens
IAMEGGHAPEEEIWE

SEQ ID NO: 47002 - protein, 15 aa, Homo Sapiens
AMEGGHAPEEEIWEE

SEQ ID NO: 47003 - protein, 15 aa, Homo Sapiens
MEGGHAPEEEIWEEL

SEQ ID NO: 47004 - protein, 15 aa, Homo Sapiens
EGGHAPEEEIWEELS

SEQ ID NO: 47005 - protein, 15 aa, Homo Sapiens
GGHAPEEEIWEELSV

SEQ ID NO: 47006 - protein, 15 aa, Homo Sapiens
GHAPEEEIWEELSVM

SEQ ID NO: 47007 - protein, 15 aa, Homo Sapiens
HAPEEEIWEELSVME

SEQ ID NO: 47008 - protein, 15 aa, Homo Sapiens
APEEEIWEELSVMEV

SEQ ID NO: 47009 - protein, 15 aa, Homo Sapiens
PEEEIWEELSVMEVY

SEQ ID NO: 47010 - protein, 15 aa, Homo Sapiens
EEEIWEELSVMEVYD

SEQ ID NO: 47011 - protein, 15 aa, Homo Sapiens
EEIWEELSVMEVYDG

SEQ ID NO: 47012 - protein, 15 aa, Homo Sapiens
EIWEELSVMEVYDGR

SEQ ID NO: 47013 - protein, 15 aa, Homo Sapiens
IWEELSVMEVYDGRE

SEQ ID NO: 47014 - protein, 15 aa, Homo Sapiens
WEELSVMEVYDGREH

SEQ ID NO: 47015 - protein, 15 aa, Homo Sapiens
EELSVMEVYDGREHS

SEQ ID NO: 47016 - protein, 15 aa, Homo Sapiens
ELSVMEVYDGREHSA

SEQ ID NO: 47017 - protein, 15 aa, Homo Sapiens
LSVMEVYDGREHSAY

SEQ ID NO: 47018 - protein, 15 aa, Homo Sapiens
SVMEVYDGREHSAYG

SEQ ID NO: 47019 - protein, 15 aa, Homo Sapiens
VMEVYDGREHSAYGE

SEQ ID NO: 47020 - protein, 15 aa, Homo Sapiens
MEVYDGREHSAYGEP

SEQ ID NO: 47021 - protein, 15 aa, Homo Sapiens
EVYDGREHSAYGEPR

SEQ ID NO: 47022 - protein, 15 aa, Homo Sapiens
VYDGREHSAYGEPRK

SEQ ID NO: 47023 - protein, 15 aa, Homo Sapiens
YDGREHSAYGEPRKL

SEQ ID NO: 47024 - protein, 15 aa, Homo Sapiens
DGREHSAYGEPRKLL

SEQ ID NO: 47025 - protein, 15 aa, Homo Sapiens
GREHSAYGEPRKLLT

SEQ ID NO: 47026 - protein, 15 aa, Homo Sapiens
REHSAYGEPRKLLTQ

SEQ ID NO: 47027 - protein, 15 aa, Homo Sapiens
EHSAYGEPRKLLTQD

SEQ ID NO: 47028 - protein, 15 aa, Homo Sapiens
HSAYGEPRKLLTQDL

SEQ ID NO: 47029 - protein, 15 aa, Homo Sapiens
SAYGEPRKLLTQDLV

SEQ ID NO: 47030 - protein, 15 aa, Homo Sapiens
AYGEPRKLLTQDLVQ

SEQ ID NO: 47031 - protein, 15 aa, Homo Sapiens
YGEPRKLLTQDLVQE

SEQ ID NO: 47032 - protein, 15 aa, Homo Sapiens
GEPRKLLTQDLVQEK

SEQ ID NO: 47033 - protein, 15 aa, Homo Sapiens
EPRKLLTQDLVQEKY

SEQ ID NO: 47034 - protein, 15 aa, Homo Sapiens
PRKLLTQDLVQEKYL

SEQ ID NO: 47035 - protein, 15 aa, Homo Sapiens
RKLLTQDLVQEKYLE

SEQ ID NO: 47036 - protein, 15 aa, Homo Sapiens
KLLTQDLVQEKYLEY

SEQ ID NO: 47037 - protein, 15 aa, Homo Sapiens
LLTQDLVQEKYLEYR

SEQ ID NO: 47038 - protein, 15 aa, Homo Sapiens
LTQDLVQEKYLEYRQ

SEQ ID NO: 47039 - protein, 15 aa, Homo Sapiens
TQDLVQEKYLEYRQV

SEQ ID NO: 47040 - protein, 15 aa, Homo Sapiens
QDLVQEKYLEYRQVP

SEQ ID NO: 47041 - protein, 15 aa, Homo Sapiens
DLVQEKYLEYRQVPD

SEQ ID NO: 47042 - protein, 15 aa, Homo Sapiens
LVQEKYLEYRQVPDS

SEQ ID NO: 47043 - protein, 15 aa, Homo Sapiens
VQEKYLEYRQVPDSD

SEQ ID NO: 47044 - protein, 15 aa, Homo Sapiens
QEKYLEYRQVPDSDP

SEQ ID NO: 47045 - protein, 15 aa, Homo Sapiens
EKYLEYRQVPDSDPA

SEQ ID NO: 47046 - protein, 15 aa, Homo Sapiens
KYLEYRQVPDSDPAR

SEQ ID NO: 47047 - protein, 15 aa, Homo Sapiens
YLEYRQVPDSDPARY

SEQ ID NO: 47048 - protein, 15 aa, Homo Sapiens
LEYRQVPDSDPARYE

SEQ ID NO: 47049 - protein, 15 aa, Homo Sapiens
EYRQVPDSDPARYEF

SEQ ID NO: 47050 - protein, 15 aa, Homo Sapiens
YRQVPDSDPARYEFL

SEQ ID NO: 47051 - protein, 15 aa, Homo Sapiens
RQVPDSDPARYEFLW

SEQ ID NO: 47052 - protein, 15 aa, Homo Sapiens
QVPDSDPARYEFLWG

SEQ ID NO: 47053 - protein, 15 aa, Homo Sapiens
VPDSDPARYEFLWGP

SEQ ID NO: 47054 - protein, 15 aa, Homo Sapiens
PDSDPARYEFLWGPR

SEQ ID NO: 47055 - protein, 15 aa, Homo Sapiens
DSDPARYEFLWGPRA

SEQ ID NO: 47056 - protein, 15 aa, Homo Sapiens
SDPARYEFLWGPRAL

SEQ ID NO: 47057 - protein, 15 aa, Homo Sapiens
DPARYEFLWGPRALA

SEQ ID NO: 47058 - protein, 15 aa, Homo Sapiens
PARYEFLWGPRALAE

SEQ ID NO: 47059 - protein, 15 aa, Homo Sapiens
ARYEFLWGPRALAET

SEQ ID NO: 47060 - protein, 15 aa, Homo Sapiens
RYEFLWGPRALAETS

SEQ ID NO: 47061 - protein, 15 aa, Homo Sapiens
YEFLWGPRALAETSY

SEQ ID NO: 47062 - protein, 15 aa, Homo Sapiens
EFLWGPRALAETSYV

SEQ ID NO: 47063 - protein, 15 aa, Homo Sapiens
FLWGPRALAETSYVK

SEQ ID NO: 47064 - protein, 15 aa, Homo Sapiens
LWGPRALAETSYVKV

SEQ ID NO: 47065 - protein, 15 aa, Homo Sapiens
WGPRALAETSYVKVL

SEQ ID NO: 47066 - protein, 15 aa, Homo Sapiens
GPRALAETSYVKVLE

SEQ ID NO: 47067 - protein, 15 aa, Homo Sapiens
PRALAETSYVKVLEY

SEQ ID NO: 47068 - protein, 15 aa, Homo Sapiens
RALAETSYVKVLEYV

SEQ ID NO: 47069 - protein, 15 aa, Homo Sapiens
ALAETSYVKVLEYVI

SEQ ID NO: 47070 - protein, 15 aa, Homo Sapiens
LAETSYVKVLEYVIK

SEQ ID NO: 47071 - protein, 15 aa, Homo Sapiens
AETSYVKVLEYVIKV

SEQ ID NO: 47072 - protein, 15 aa, Homo Sapiens
ETSYVKVLEYVIKVS

SEQ ID NO: 47073 - protein, 15 aa, Homo Sapiens
TSYVKVLEYVIKVSA

SEQ ID NO: 47074 - protein, 15 aa, Homo Sapiens
SYVKVLEYVIKVSAR

SEQ ID NO: 47075 - protein, 15 aa, Homo Sapiens
YVKVLEYVIKVSARV

SEQ ID NO: 47076 - protein, 15 aa, Homo Sapiens
VKVLEYVIKVSARVR

SEQ ID NO: 47077 - protein, 15 aa, Homo Sapiens
KVLEYVIKVSARVRF

SEQ ID NO: 47078 - protein, 15 aa, Homo Sapiens
VLEYVIKVSARVRFF

SEQ ID NO: 47079 - protein, 15 aa, Homo Sapiens
LEYVIKVSARVRFFF

SEQ ID NO: 47080 - protein, 15 aa, Homo Sapiens
EYVIKVSARVRFFFP

SEQ ID NO: 47081 - protein, 15 aa, Homo Sapiens
YVIKVSARVRFFFPS

SEQ ID NO: 47082 - protein, 15 aa, Homo Sapiens
VIKVSARVRFFFPSL

SEQ ID NO: 47083 - protein, 15 aa, Homo Sapiens
IKVSARVRFFFPSLR

SEQ ID NO: 47084 - protein, 15 aa, Homo Sapiens
KVSARVRFFFPSLRE

SEQ ID NO: 47085 - protein, 15 aa, Homo Sapiens
VSARVRFFFPSLREA

SEQ ID NO: 47086 - protein, 15 aa, Homo Sapiens
SARVRFFFPSLREAA

SEQ ID NO: 47087 - protein, 15 aa, Homo Sapiens
ARVRFFFPSLREAAL

SEQ ID NO: 47088 - protein, 15 aa, Homo Sapiens
RVRFFFPSLREAALR

SEQ ID NO: 47089 - protein, 15 aa, Homo Sapiens
VRFFFPSLREAALRE

SEQ ID NO: 47090 - protein, 15 aa, Homo Sapiens
RFFFPSLREAALREE

SEQ ID NO: 47091 - protein, 15 aa, Homo Sapiens
FFFPSLREAALREEE

SEQ ID NO: 47092 - protein, 15 aa, Homo Sapiens
FFPSLREAALREEEE

SEQ ID NO: 47093 - protein, 15 aa, Homo Sapiens
FPSLREAALREEEEG

SEQ ID NO: 47094 - protein, 15 aa, Homo Sapiens
PSLREAALREEEEGV

SEQ ID NO: 47095 - protein, 16 aa, Homo Sapiens
MSLEQRSLHCKPEEAL

SEQ ID NO: 47096 - protein, 16 aa, Homo Sapiens
SLEQRSLHCKPEEALE

SEQ ID NO: 47097 - protein, 16 aa, Homo Sapiens
LEQRSLHCKPEEALEA

SEQ ID NO: 47098 - protein, 16 aa, Homo Sapiens
EQRSLHCKPEEALEAQ

SEQ ID NO: 47099 - protein, 16 aa, Homo Sapiens
QRSLHCKPEEALEAQQ

SEQ ID NO: 47100 - protein, 16 aa, Homo Sapiens
RSLHCKPEEALEAQQE

SEQ ID NO: 47101 - protein, 16 aa, Homo Sapiens
SLHCKPEEALEAQQEA

SEQ ID NO: 47102 - protein, 16 aa, Homo Sapiens
LHCKPEEALEAQQEAL

SEQ ID NO: 47103 - protein, 16 aa, Homo Sapiens
HCKPEEALEAQQEALG

SEQ ID NO: 47104 - protein, 16 aa, Homo Sapiens
CKPEEALEAQQEALGL

SEQ ID NO: 47105 - protein, 16 aa, Homo Sapiens
KPEEALEAQQEALGLV

SEQ ID NO: 47106 - protein, 16 aa, Homo Sapiens
PEEALEAQQEALGLVC

SEQ ID NO: 47107 - protein, 16 aa, Homo Sapiens
EEALEAQQEALGLVCV

SEQ ID NO: 47108 - protein, 16 aa, Homo Sapiens
EALEAQQEALGLVCVQ

SEQ ID NO: 47109 - protein, 16 aa, Homo Sapiens
ALEAQQEALGLVCVQA

SEQ ID NO: 47110 - protein, 16 aa, Homo Sapiens
LEAQQEALGLVCVQAA

SEQ ID NO: 47111 - protein, 16 aa, Homo Sapiens
EAQQEALGLVCVQAAT

SEQ ID NO: 47112 - protein, 16 aa, Homo Sapiens
AQQEALGLVCVQAATS

SEQ ID NO: 47113 - protein, 16 aa, Homo Sapiens
QQEALGLVCVQAATSS

SEQ ID NO: 47114 - protein, 16 aa, Homo Sapiens
QEALGLVCVQAATSSS

SEQ ID NO: 47115 - protein, 16 aa, Homo Sapiens
EALGLVCVQAATSSSS

SEQ ID NO: 47116 - protein, 16 aa, Homo Sapiens
ALGLVCVQAATSSSSP

SEQ ID NO: 47117 - protein, 16 aa, Homo Sapiens
LGLVCVQAATSSSSPL

SEQ ID NO: 47118 - protein, 16 aa, Homo Sapiens
GLVCVQAATSSSSPLV

SEQ ID NO: 47119 - protein, 16 aa, Homo Sapiens
LVCVQAATSSSSPLVL

SEQ ID NO: 47120 - protein, 16 aa, Homo Sapiens
VCVQAATSSSSPLVLG

SEQ ID NO: 47121 - protein, 16 aa, Homo Sapiens
CVQAATSSSSPLVLGT

SEQ ID NO: 47122 - protein, 16 aa, Homo Sapiens
VQAATSSSSPLVLGTL

SEQ ID NO: 47123 - protein, 16 aa, Homo Sapiens
QAATSSSSPLVLGTLE

SEQ ID NO: 47124 - protein, 16 aa, Homo Sapiens
AATSSSSPLVLGTLEE

SEQ ID NO: 47125 - protein, 16 aa, Homo Sapiens
ATSSSSPLVLGTLEEV

SEQ ID NO: 47126 - protein, 16 aa, Homo Sapiens
TSSSSPLVLGTLEEVP

SEQ ID NO: 47127 - protein, 16 aa, Homo Sapiens
SSSSPLVLGTLEEVPT

SEQ ID NO: 47128 - protein, 16 aa, Homo Sapiens
SSSPLVLGTLEEVPTA

SEQ ID NO: 47129 - protein, 16 aa, Homo Sapiens
SSPLVLGTLEEVPTAG

SEQ ID NO: 47130 - protein, 16 aa, Homo Sapiens
SPLVLGTLEEVPTAGS

SEQ ID NO: 47131 - protein, 16 aa, Homo Sapiens
PLVLGTLEEVPTAGST

SEQ ID NO: 47132 - protein, 16 aa, Homo Sapiens
LVLGTLEEVPTAGSTD

SEQ ID NO: 47133 - protein, 16 aa, Homo Sapiens
VLGTLEEVPTAGSTDP

SEQ ID NO: 47134 - protein, 16 aa, Homo Sapiens
LGTLEEVPTAGSTDPP

SEQ ID NO: 47135 - protein, 16 aa, Homo Sapiens
GTLEEVPTAGSTDPPQ

SEQ ID NO: 47136 - protein, 16 aa, Homo Sapiens
TLEEVPTAGSTDPPQS

SEQ ID NO: 47137 - protein, 16 aa, Homo Sapiens
LEEVPTAGSTDPPQSP

SEQ ID NO: 47138 - protein, 16 aa, Homo Sapiens
EEVPTAGSTDPPQSPQ

SEQ ID NO: 47139 - protein, 16 aa, Homo Sapiens
EVPTAGSTDPPQSPQG

SEQ ID NO: 47140 - protein, 16 aa, Homo Sapiens
VPTAGSTDPPQSPQGA

SEQ ID NO: 47141 - protein, 16 aa, Homo Sapiens
PTAGSTDPPQSPQGAS

SEQ ID NO: 47142 - protein, 16 aa, Homo Sapiens
TAGSTDPPQSPQGASA

SEQ ID NO: 47143 - protein, 16 aa, Homo Sapiens
AGSTDPPQSPQGASAF

SEQ ID NO: 47144 - protein, 16 aa, Homo Sapiens
GSTDPPQSPQGASAFP

SEQ ID NO: 47145 - protein, 16 aa, Homo Sapiens
STDPPQSPQGASAFPT

SEQ ID NO: 47146 - protein, 16 aa, Homo Sapiens
TDPPQSPQGASAFPTT

SEQ ID NO: 47147 - protein, 16 aa, Homo Sapiens
DPPQSPQGASAFPTTI

SEQ ID NO: 47148 - protein, 16 aa, Homo Sapiens
PPQSPQGASAFPTTIN

SEQ ID NO: 47149 - protein, 16 aa, Homo Sapiens
PQSPQGASAFPTTINF

SEQ ID NO: 47150 - protein, 16 aa, Homo Sapiens
QSPQGASAFPTTINFT

SEQ ID NO: 47151 - protein, 16 aa, Homo Sapiens
SPQGASAFPTTINFTR

SEQ ID NO: 47152 - protein, 16 aa, Homo Sapiens
PQGASAFPTTINFTRQ

SEQ ID NO: 47153 - protein, 16 aa, Homo Sapiens
QGASAFPTTINFTRQR

SEQ ID NO: 47154 - protein, 16 aa, Homo Sapiens
GASAFPTTINFTRQRQ

SEQ ID NO: 47155 - protein, 16 aa, Homo Sapiens
ASAFPTTINFTRQRQP

SEQ ID NO: 47156 - protein, 16 aa, Homo Sapiens
SAFPTTINFTRQRQPS

SEQ ID NO: 47157 - protein, 16 aa, Homo Sapiens
AFPTTINFTRQRQPSE

SEQ ID NO: 47158 - protein, 16 aa, Homo Sapiens
FPTTINFTRQRQPSEG

SEQ ID NO: 47159 - protein, 16 aa, Homo Sapiens
PTTINFTRQRQPSEGS

SEQ ID NO: 47160 - protein, 16 aa, Homo Sapiens
TTINFTRQRQPSEGSS

SEQ ID NO: 47161 - protein, 16 aa, Homo Sapiens
TINFTRQRQPSEGSSS

SEQ ID NO: 47162 - protein, 16 aa, Homo Sapiens
INFTRQRQPSEGSSSR

SEQ ID NO: 47163 - protein, 16 aa, Homo Sapiens
NFTRQRQPSEGSSSRE

SEQ ID NO: 47164 - protein, 16 aa, Homo Sapiens
FTRQRQPSEGSSSREE

SEQ ID NO: 47165 - protein, 16 aa, Homo Sapiens
TRQRQPSEGSSSREEE

SEQ ID NO: 47166 - protein, 16 aa, Homo Sapiens
RQRQPSEGSSSREEEG

SEQ ID NO: 47167 - protein, 16 aa, Homo Sapiens
QRQPSEGSSSREEEGP

SEQ ID NO: 47168 - protein, 16 aa, Homo Sapiens
RQPSEGSSSREEEGPS

SEQ ID NO: 47169 - protein, 16 aa, Homo Sapiens
QPSEGSSSREEEGPST

SEQ ID NO: 47170 - protein, 16 aa, Homo Sapiens
PSEGSSSREEEGPSTS

SEQ ID NO: 47171 - protein, 16 aa, Homo Sapiens
SEGSSSREEEGPSTSC

SEQ ID NO: 47172 - protein, 16 aa, Homo Sapiens
EGSSSREEEGPSTSCI

SEQ ID NO: 47173 - protein, 16 aa, Homo Sapiens
GSSSREEEGPSTSCIL

SEQ ID NO: 47174 - protein, 16 aa, Homo Sapiens
SSSREEEGPSTSCILE

SEQ ID NO: 47175 - protein, 16 aa, Homo Sapiens
SSREEEGPSTSCILES

SEQ ID NO: 47176 - protein, 16 aa, Homo Sapiens
SREEEGPSTSCILESL

SEQ ID NO: 47177 - protein, 16 aa, Homo Sapiens
REEEGPSTSCILESLF

SEQ ID NO: 47178 - protein, 16 aa, Homo Sapiens
EEEGPSTSCILESLFR

SEQ ID NO: 47179 - protein, 16 aa, Homo Sapiens
EEGPSTSCILESLFRA

SEQ ID NO: 47180 - protein, 16 aa, Homo Sapiens
EGPSTSCILESLFRAV

SEQ ID NO: 47181 - protein, 16 aa, Homo Sapiens
GPSTSCILESLFRAVI

SEQ ID NO: 47182 - protein, 16 aa, Homo Sapiens
PSTSCILESLFRAVIT

SEQ ID NO: 47183 - protein, 16 aa, Homo Sapiens
STSCILESLFRAVITK

SEQ ID NO: 47184 - protein, 16 aa, Homo Sapiens
TSCILESLFRAVITKK

SEQ ID NO: 47185 - protein, 16 aa, Homo Sapiens
SCILESLFRAVITKKV

SEQ ID NO: 47186 - protein, 16 aa, Homo Sapiens
CILESLFRAVITKKVA

SEQ ID NO: 47187 - protein, 16 aa, Homo Sapiens
ILESLFRAVITKKVAD

SEQ ID NO: 47188 - protein, 16 aa, Homo Sapiens
LESLFRAVITKKVADL

SEQ ID NO: 47189 - protein, 16 aa, Homo Sapiens
ESLFRAVITKKVADLV

SEQ ID NO: 47190 - protein, 16 aa, Homo Sapiens
SLFRAVITKKVADLVG

SEQ ID NO: 47191 - protein, 16 aa, Homo Sapiens
LFRAVITKKVADLVGF

SEQ ID NO: 47192 - protein, 16 aa, Homo Sapiens
FRAVITKKVADLVGFL

SEQ ID NO: 47193 - protein, 16 aa, Homo Sapiens
RAVITKKVADLVGFLL

SEQ ID NO: 47194 - protein, 16 aa, Homo Sapiens
AVITKKVADLVGFLLL

SEQ ID NO: 47195 - protein, 16 aa, Homo Sapiens
VITKKVADLVGFLLLK

SEQ ID NO: 47196 - protein, 16 aa, Homo Sapiens
ITKKVADLVGFLLLKY

SEQ ID NO: 47197 - protein, 16 aa, Homo Sapiens
TKKVADLVGFLLLKYR

SEQ ID NO: 47198 - protein, 16 aa, Homo Sapiens
KKVADLVGFLLLKYRA

SEQ ID NO: 47199 - protein, 16 aa, Homo Sapiens
KVADLVGFLLLKYRAR

SEQ ID NO: 47200 - protein, 16 aa, Homo Sapiens
VADLVGFLLLKYRARE

SEQ ID NO: 47201 - protein, 16 aa, Homo Sapiens
ADLVGFLLLKYRAREP

SEQ ID NO: 47202 - protein, 16 aa, Homo Sapiens
DLVGFLLLKYRAREPV

SEQ ID NO: 47203 - protein, 16 aa, Homo Sapiens
LVGFLLLKYRAREPVT

SEQ ID NO: 47204 - protein, 16 aa, Homo Sapiens
VGFLLLKYRAREPVTK

SEQ ID NO: 47205 - protein, 16 aa, Homo Sapiens
GFLLLKYRAREPVTKA

SEQ ID NO: 47206 - protein, 16 aa, Homo Sapiens
FLLLKYRAREPVTKAE

SEQ ID NO: 47207 - protein, 16 aa, Homo Sapiens
LLLKYRAREPVTKAEM

SEQ ID NO: 47208 - protein, 16 aa, Homo Sapiens
LLKYRAREPVTKAEML

SEQ ID NO: 47209 - protein, 16 aa, Homo Sapiens
LKYRAREPVTKAEMLE

SEQ ID NO: 47210 - protein, 16 aa, Homo Sapiens
KYRAREPVTKAEMLES

SEQ ID NO: 47211 - protein, 16 aa, Homo Sapiens
YRAREPVTKAEMLESV

SEQ ID NO: 47212 - protein, 16 aa, Homo Sapiens
RAREPVTKAEMLESVI

SEQ ID NO: 47213 - protein, 16 aa, Homo Sapiens
AREPVTKAEMLESVIK

SEQ ID NO: 47214 - protein, 16 aa, Homo Sapiens
REPVTKAEMLESVIKN

SEQ ID NO: 47215 - protein, 16 aa, Homo Sapiens
EPVTKAEMLESVIKNY

SEQ ID NO: 47216 - protein, 16 aa, Homo Sapiens
PVTKAEMLESVIKNYK

SEQ ID NO: 47217 - protein, 16 aa, Homo Sapiens
VTKAEMLESVIKNYKH

SEQ ID NO: 47218 - protein, 16 aa, Homo Sapiens
TKAEMLESVIKNYKHC

SEQ ID NO: 47219 - protein, 16 aa, Homo Sapiens
KAEMLESVIKNYKHCF

SEQ ID NO: 47220 - protein, 16 aa, Homo Sapiens
AEMLESVIKNYKHCFP

SEQ ID NO: 47221 - protein, 16 aa, Homo Sapiens
EMLESVIKNYKHCFPE

SEQ ID NO: 47222 - protein, 16 aa, Homo Sapiens
MLESVIKNYKHCFPEI

SEQ ID NO: 47223 - protein, 16 aa, Homo Sapiens
LESVIKNYKHCFPEIF

SEQ ID NO: 47224 - protein, 16 aa, Homo Sapiens
ESVIKNYKHCFPEIFG

SEQ ID NO: 47225 - protein, 16 aa, Homo Sapiens
SVIKNYKHCFPEIFGK

SEQ ID NO: 47226 - protein, 16 aa, Homo Sapiens
VIKNYKHCFPEIFGKA

SEQ ID NO: 47227 - protein, 16 aa, Homo Sapiens
IKNYKHCFPEIFGKAS

SEQ ID NO: 47228 - protein, 16 aa, Homo Sapiens
KNYKHCFPEIFGKASE

SEQ ID NO: 47229 - protein, 16 aa, Homo Sapiens
NYKHCFPEIFGKASES

SEQ ID NO: 47230 - protein, 16 aa, Homo Sapiens
YKHCFPEIFGKASESL

SEQ ID NO: 47231 - protein, 16 aa, Homo Sapiens
KHCFPEIFGKASESLQ

SEQ ID NO: 47232 - protein, 16 aa, Homo Sapiens
HCFPEIFGKASESLQL

SEQ ID NO: 47233 - protein, 16 aa, Homo Sapiens
CFPEIFGKASESLQLV

SEQ ID NO: 47234 - protein, 16 aa, Homo Sapiens
FPEIFGKASESLQLVF

SEQ ID NO: 47235 - protein, 16 aa, Homo Sapiens
PEIFGKASESLQLVFG

SEQ ID NO: 47236 - protein, 16 aa, Homo Sapiens
EIFGKASESLQLVFGI

SEQ ID NO: 47237 - protein, 16 aa, Homo Sapiens
IFGKASESLQLVFGID

SEQ ID NO: 47238 - protein, 16 aa, Homo Sapiens
FGKASESLQLVFGIDV

SEQ ID NO: 47239 - protein, 16 aa, Homo Sapiens
GKASESLQLVFGIDVK

SEQ ID NO: 47240 - protein, 16 aa, Homo Sapiens
KASESLQLVFGIDVKE

SEQ ID NO: 47241 - protein, 16 aa, Homo Sapiens
ASESLQLVFGIDVKEA

SEQ ID NO: 47242 - protein, 16 aa, Homo Sapiens
SESLQLVFGIDVKEAD

SEQ ID NO: 47243 - protein, 16 aa, Homo Sapiens
ESLQLVFGIDVKEADP

SEQ ID NO: 47244 - protein, 16 aa, Homo Sapiens
SLQLVFGIDVKEADPT

SEQ ID NO: 47245 - protein, 16 aa, Homo Sapiens
LQLVFGIDVKEADPTG

SEQ ID NO: 47246 - protein, 16 aa, Homo Sapiens
QLVFGIDVKEADPTGH

SEQ ID NO: 47247 - protein, 16 aa, Homo Sapiens
LVFGIDVKEADPTGHS

SEQ ID NO: 47248 - protein, 16 aa, Homo Sapiens
VFGIDVKEADPTGHSY

SEQ ID NO: 47249 - protein, 16 aa, Homo Sapiens
FGIDVKEADPTGHSYV

SEQ ID NO: 47250 - protein, 16 aa, Homo Sapiens
GIDVKEADPTGHSYVL

SEQ ID NO: 47251 - protein, 16 aa, Homo Sapiens
IDVKEADPTGHSYVLV

SEQ ID NO: 47252 - protein, 16 aa, Homo Sapiens
DVKEADPTGHSYVLVT

SEQ ID NO: 47253 - protein, 16 aa, Homo Sapiens
VKEADPTGHSYVLVTC

SEQ ID NO: 47254 - protein, 16 aa, Homo Sapiens
KEADPTGHSYVLVTCL

SEQ ID NO: 47255 - protein, 16 aa, Homo Sapiens
EADPTGHSYVLVTCLG

SEQ ID NO: 47256 - protein, 16 aa, Homo Sapiens
ADPTGHSYVLVTCLGL

SEQ ID NO: 47257 - protein, 16 aa, Homo Sapiens
DPTGHSYVLVTCLGLS

SEQ ID NO: 47258 - protein, 16 aa, Homo Sapiens
PTGHSYVLVTCLGLSY

SEQ ID NO: 47259 - protein, 16 aa, Homo Sapiens
TGHSYVLVTCLGLSYD

SEQ ID NO: 47260 - protein, 16 aa, Homo Sapiens
GHSYVLVTCLGLSYDG

SEQ ID NO: 47261 - protein, 16 aa, Homo Sapiens
HSYVLVTCLGLSYDGL

SEQ ID NO: 47262 - protein, 16 aa, Homo Sapiens
SYVLVTCLGLSYDGLL

SEQ ID NO: 47263 - protein, 16 aa, Homo Sapiens
YVLVTCLGLSYDGLLG

SEQ ID NO: 47264 - protein, 16 aa, Homo Sapiens
VLVTCLGLSYDGLLGD

SEQ ID NO: 47265 - protein, 16 aa, Homo Sapiens
LVTCLGLSYDGLLGDN

SEQ ID NO: 47266 - protein, 16 aa, Homo Sapiens
VTCLGLSYDGLLGDNQ

SEQ ID NO: 47267 - protein, 16 aa, Homo Sapiens
TCLGLSYDGLLGDNQI

SEQ ID NO: 47268 - protein, 16 aa, Homo Sapiens
CLGLSYDGLLGDNQIM

SEQ ID NO: 47269 - protein, 16 aa, Homo Sapiens
LGLSYDGLLGDNQIMP

SEQ ID NO: 47270 - protein, 16 aa, Homo Sapiens
GLSYDGLLGDNQIMPK

SEQ ID NO: 47271 - protein, 16 aa, Homo Sapiens
LSYDGLLGDNQIMPKT

SEQ ID NO: 47272 - protein, 16 aa, Homo Sapiens
SYDGLLGDNQIMPKTG

SEQ ID NO: 47273 - protein, 16 aa, Homo Sapiens
YDGLLGDNQIMPKTGF

SEQ ID NO: 47274 - protein, 16 aa, Homo Sapiens
DGLLGDNQIMPKTGFL

SEQ ID NO: 47275 - protein, 16 aa, Homo Sapiens
GLLGDNQIMPKTGFLI

SEQ ID NO: 47276 - protein, 16 aa, Homo Sapiens
LLGDNQIMPKTGFLII

SEQ ID NO: 47277 - protein, 16 aa, Homo Sapiens
LGDNQIMPKTGFLIIV

SEQ ID NO: 47278 - protein, 16 aa, Homo Sapiens
GDNQIMPKTGFLIIVL

SEQ ID NO: 47279 - protein, 16 aa, Homo Sapiens
DNQIMPKTGFLIIVLV

SEQ ID NO: 47280 - protein, 16 aa, Homo Sapiens
NQIMPKTGFLIIVLVM

SEQ ID NO: 47281 - protein, 16 aa, Homo Sapiens
QIMPKTGFLIIVLVMI

SEQ ID NO: 47282 - protein, 16 aa, Homo Sapiens
IMPKTGFLIIVLVMIA

SEQ ID NO: 47283 - protein, 16 aa, Homo Sapiens
MPKTGFLIIVLVMIAM

SEQ ID NO: 47284 - protein, 16 aa, Homo Sapiens
PKTGFLIIVLVMIAME

SEQ ID NO: 47285 - protein, 16 aa, Homo Sapiens
KTGFLIIVLVMIAMEG

SEQ ID NO: 47286 - protein, 16 aa, Homo Sapiens
TGFLIIVLVMIAMEGG

SEQ ID NO: 47287 - protein, 16 aa, Homo Sapiens
GFLIIVLVMIAMEGGH

SEQ ID NO: 47288 - protein, 16 aa, Homo Sapiens
FLIIVLVMIAMEGGHA

SEQ ID NO: 47289 - protein, 16 aa, Homo Sapiens
LIIVLVMIAMEGGHAP

SEQ ID NO: 47290 - protein, 16 aa, Homo Sapiens
IIVLVMIAMEGGHAPE

SEQ ID NO: 47291 - protein, 16 aa, Homo Sapiens
IVLVMIAMEGGHAPEE

SEQ ID NO: 47292 - protein, 16 aa, Homo Sapiens
VLVMIAMEGGHAPEEE

SEQ ID NO: 47293 - protein, 16 aa, Homo Sapiens
LVMIAMEGGHAPEEEI

SEQ ID NO: 47294 - protein, 16 aa, Homo Sapiens
VMIAMEGGHAPEEEIW

SEQ ID NO: 47295 - protein, 16 aa, Homo Sapiens
MIAMEGGHAPEEEIWE

SEQ ID NO: 47296 - protein, 16 aa, Homo Sapiens
IAMEGGHAPEEEIWEE

SEQ ID NO: 47297 - protein, 16 aa, Homo Sapiens
AMEGGHAPEEEIWEEL

SEQ ID NO: 47298 - protein, 16 aa, Homo Sapiens
MEGGHAPEEEIWEELS

SEQ ID NO: 47299 - protein, 16 aa, Homo Sapiens
EGGHAPEEEIWEELSV

SEQ ID NO: 47300 - protein, 16 aa, Homo Sapiens
GGHAPEEEIWEELSVM

SEQ ID NO: 47301 - protein, 16 aa, Homo Sapiens
GHAPEEEIWEELSVME

SEQ ID NO: 47302 - protein, 16 aa, Homo Sapiens
HAPEEEIWEELSVMEV

SEQ ID NO: 47303 - protein, 16 aa, Homo Sapiens
APEEEIWEELSVMEVY

SEQ ID NO: 47304 - protein, 16 aa, Homo Sapiens
PEEEIWEELSVMEVYD

SEQ ID NO: 47305 - protein, 16 aa, Homo Sapiens
EEEIWEELSVMEVYDG

SEQ ID NO: 47306 - protein, 16 aa, Homo Sapiens
EEIWEELSVMEVYDGR

SEQ ID NO: 47307 - protein, 16 aa, Homo Sapiens
EIWEELSVMEVYDGRE

SEQ ID NO: 47308 - protein, 16 aa, Homo Sapiens
IWEELSVMEVYDGREH

SEQ ID NO: 47309 - protein, 16 aa, Homo Sapiens
WEELSVMEVYDGREHS

SEQ ID NO: 47310 - protein, 16 aa, Homo Sapiens
EELSVMEVYDGREHSA

SEQ ID NO: 47311 - protein, 16 aa, Homo Sapiens
ELSVMEVYDGREHSAY

SEQ ID NO: 47312 - protein, 16 aa, Homo Sapiens
LSVMEVYDGREHSAYG

SEQ ID NO: 47313 - protein, 16 aa, Homo Sapiens
SVMEVYDGREHSAYGE

SEQ ID NO: 47314 - protein, 16 aa, Homo Sapiens
VMEVYDGREHSAYGEP

SEQ ID NO: 47315 - protein, 16 aa, Homo Sapiens
MEVYDGREHSAYGEPR

SEQ ID NO: 47316 - protein, 16 aa, Homo Sapiens
EVYDGREHSAYGEPRK

SEQ ID NO: 47317 - protein, 16 aa, Homo Sapiens
VYDGREHSAYGEPRKL

SEQ ID NO: 47318 - protein, 16 aa, Homo Sapiens
YDGREHSAYGEPRKLL

SEQ ID NO: 47319 - protein, 16 aa, Homo Sapiens
DGREHSAYGEPRKLLT

SEQ ID NO: 47320 - protein, 16 aa, Homo Sapiens
GREHSAYGEPRKLLTQ

SEQ ID NO: 47321 - protein, 16 aa, Homo Sapiens
REHSAYGEPRKLLTQD

SEQ ID NO: 47322 - protein, 16 aa, Homo Sapiens
EHSAYGEPRKLLTQDL

SEQ ID NO: 47323 - protein, 16 aa, Homo Sapiens
HSAYGEPRKLLTQDLV

SEQ ID NO: 47324 - protein, 16 aa, Homo Sapiens
SAYGEPRKLLTQDLVQ

SEQ ID NO: 47325 - protein, 16 aa, Homo Sapiens
AYGEPRKLLTQDLVQE

SEQ ID NO: 47326 - protein, 16 aa, Homo Sapiens
YGEPRKLLTQDLVQEK

SEQ ID NO: 47327 - protein, 16 aa, Homo Sapiens
GEPRKLLTQDLVQEKY

SEQ ID NO: 47328 - protein, 16 aa, Homo Sapiens
EPRKLLTQDLVQEKYL

SEQ ID NO: 47329 - protein, 16 aa, Homo Sapiens
PRKLLTQDLVQEKYLE

SEQ ID NO: 47330 - protein, 16 aa, Homo Sapiens
RKLLTQDLVQEKYLEY

SEQ ID NO: 47331 - protein, 16 aa, Homo Sapiens
KLLTQDLVQEKYLEYR

SEQ ID NO: 47332 - protein, 16 aa, Homo Sapiens
LLTQDLVQEKYLEYRQ

SEQ ID NO: 47333 - protein, 16 aa, Homo Sapiens
LTQDLVQEKYLEYRQV

SEQ ID NO: 47334 - protein, 16 aa, Homo Sapiens
TQDLVQEKYLEYRQVP

SEQ ID NO: 47335 - protein, 16 aa, Homo Sapiens
QDLVQEKYLEYRQVPD

SEQ ID NO: 47336 - protein, 16 aa, Homo Sapiens
DLVQEKYLEYRQVPDS

SEQ ID NO: 47337 - protein, 16 aa, Homo Sapiens
LVQEKYLEYRQVPDSD

SEQ ID NO: 47338 - protein, 16 aa, Homo Sapiens
VQEKYLEYRQVPDSDP

SEQ ID NO: 47339 - protein, 16 aa, Homo Sapiens
QEKYLEYRQVPDSDPA

SEQ ID NO: 47340 - protein, 16 aa, Homo Sapiens
EKYLEYRQVPDSDPAR

SEQ ID NO: 47341 - protein, 16 aa, Homo Sapiens
KYLEYRQVPDSDPARY

SEQ ID NO: 47342 - protein, 16 aa, Homo Sapiens
YLEYRQVPDSDPARYE

SEQ ID NO: 47343 - protein, 16 aa, Homo Sapiens
LEYRQVPDSDPARYEF

SEQ ID NO: 47344 - protein, 16 aa, Homo Sapiens
EYRQVPDSDPARYEFL

SEQ ID NO: 47345 - protein, 16 aa, Homo Sapiens
YRQVPDSDPARYEFLW

SEQ ID NO: 47346 - protein, 16 aa, Homo Sapiens
RQVPDSDPARYEFLWG

SEQ ID NO: 47347 - protein, 16 aa, Homo Sapiens
QVPDSDPARYEFLWGP

SEQ ID NO: 47348 - protein, 16 aa, Homo Sapiens
VPDSDPARYEFLWGPR

SEQ ID NO: 47349 - protein, 16 aa, Homo Sapiens
PDSDPARYEFLWGPRA

SEQ ID NO: 47350 - protein, 16 aa, Homo Sapiens
DSDPARYEFLWGPRAL

SEQ ID NO: 47351 - protein, 16 aa, Homo Sapiens
SDPARYEFLWGPRALA

SEQ ID NO: 47352 - protein, 16 aa, Homo Sapiens
DPARYEFLWGPRALAE

SEQ ID NO: 47353 - protein, 16 aa, Homo Sapiens
PARYEFLWGPRALAET

SEQ ID NO: 47354 - protein, 16 aa, Homo Sapiens
ARYEFLWGPRALAETS

SEQ ID NO: 47355 - protein, 16 aa, Homo Sapiens
RYEFLWGPRALAETSY

SEQ ID NO: 47356 - protein, 16 aa, Homo Sapiens
YEFLWGPRALAETSYV

SEQ ID NO: 47357 - protein, 16 aa, Homo Sapiens
EFLWGPRALAETSYVK

SEQ ID NO: 47358 - protein, 16 aa, Homo Sapiens
FLWGPRALAETSYVKV

SEQ ID NO: 47359 - protein, 16 aa, Homo Sapiens
LWGPRALAETSYVKVL

SEQ ID NO: 47360 - protein, 16 aa, Homo Sapiens
WGPRALAETSYVKVLE

SEQ ID NO: 47361 - protein, 16 aa, Homo Sapiens
GPRALAETSYVKVLEY

SEQ ID NO: 47362 - protein, 16 aa, Homo Sapiens
PRALAETSYVKVLEYV

SEQ ID NO: 47363 - protein, 16 aa, Homo Sapiens
RALAETSYVKVLEYVI

SEQ ID NO: 47364 - protein, 16 aa, Homo Sapiens
ALAETSYVKVLEYVIK

SEQ ID NO: 47365 - protein, 16 aa, Homo Sapiens
LAETSYVKVLEYVIKV

SEQ ID NO: 47366 - protein, 16 aa, Homo Sapiens
AETSYVKVLEYVIKVS

SEQ ID NO: 47367 - protein, 16 aa, Homo Sapiens
ETSYVKVLEYVIKVSA

SEQ ID NO: 47368 - protein, 16 aa, Homo Sapiens
TSYVKVLEYVIKVSAR

SEQ ID NO: 47369 - protein, 16 aa, Homo Sapiens
SYVKVLEYVIKVSARV

SEQ ID NO: 47370 - protein, 16 aa, Homo Sapiens
YVKVLEYVIKVSARVR

SEQ ID NO: 47371 - protein, 16 aa, Homo Sapiens
VKVLEYVIKVSARVRF

SEQ ID NO: 47372 - protein, 16 aa, Homo Sapiens
KVLEYVIKVSARVRFF

SEQ ID NO: 47373 - protein, 16 aa, Homo Sapiens
VLEYVIKVSARVRFFF

SEQ ID NO: 47374 - protein, 16 aa, Homo Sapiens
LEYVIKVSARVRFFFP

SEQ ID NO: 47375 - protein, 16 aa, Homo Sapiens
EYVIKVSARVRFFFPS

SEQ ID NO: 47376 - protein, 16 aa, Homo Sapiens
YVIKVSARVRFFFPSL

SEQ ID NO: 47377 - protein, 16 aa, Homo Sapiens
VIKVSARVRFFFPSLR

SEQ ID NO: 47378 - protein, 16 aa, Homo Sapiens
IKVSARVRFFFPSLRE

SEQ ID NO: 47379 - protein, 16 aa, Homo Sapiens
KVSARVRFFFPSLREA

SEQ ID NO: 47380 - protein, 16 aa, Homo Sapiens
VSARVRFFFPSLREAA

SEQ ID NO: 47381 - protein, 16 aa, Homo Sapiens
SARVRFFFPSLREAAL

SEQ ID NO: 47382 - protein, 16 aa, Homo Sapiens
ARVRFFFPSLREAALR

SEQ ID NO: 47383 - protein, 16 aa, Homo Sapiens
RVRFFFPSLREAALRE

SEQ ID NO: 47384 - protein, 16 aa, Homo Sapiens
VRFFFPSLREAALREE

SEQ ID NO: 47385 - protein, 16 aa, Homo Sapiens
RFFFPSLREAALREEE

SEQ ID NO: 47386 - protein, 16 aa, Homo Sapiens
FFFPSLREAALREEEE

SEQ ID NO: 47387 - protein, 16 aa, Homo Sapiens
FFPSLREAALREEEEG

SEQ ID NO: 47388 - protein, 16 aa, Homo Sapiens
FPSLREAALREEEEGV

SEQ ID NO: 47389 - protein, 314 aa, Homo Sapiens
MPLEQRSQHCKPEEGLEARGEALGLVGAQAPATEEQQTASSSSTLVEVTLGEVPAADSPSPPHSPQGASSFSTTINYTLWRQSDEGSSNQEEEGPRMFPDLESEFQAAISRKMVELVHFLLLKYRAREPVTKAEMLESVLRNCQDFFPVIFSKASEYLQLVFGIEVVEVVPISHLYILVTCLGLSYDGLLGDNQVMPKTGLLIIVLAIIAIEGDCAPEEKIWEELSMLEVFEGREDSVFAHPRKLLMQDLVQENYLEYRQVPGSDPACYEFLWGPRALIETSYVKVLHHTLKIGGEPHISYPPLHERALREGEE

SEQ ID NO: 47390 - protein, 8 aa, Homo Sapiens
EQRSQHCK

SEQ ID NO: 47391 - protein, 8 aa, Homo Sapiens
LEARGEAL

SEQ ID NO: 47392 - protein, 8 aa, Homo Sapiens
EALGLVGA

SEQ ID NO: 47393 - protein, 8 aa, Homo Sapiens
AQAPATEE

SEQ ID NO: 47394 - protein, 8 aa, Homo Sapiens
QTASSSST

SEQ ID NO: 47395 - protein, 8 aa, Homo Sapiens
TASSSSTL

SEQ ID NO: 47396 - protein, 8 aa, Homo Sapiens
ASSSSTLV

SEQ ID NO: 47397 - protein, 8 aa, Homo Sapiens
SSSTLVEV

SEQ ID NO: 47398 - protein, 8 aa, Homo Sapiens
STLVEVTL

SEQ ID NO: 47399 - protein, 8 aa, Homo Sapiens
VEVTLGEV

SEQ ID NO: 47400 - protein, 8 aa, Homo Sapiens
TLGEVPAA

SEQ ID NO: 47401 - protein, 8 aa, Homo Sapiens
SPQGASSF

SEQ ID NO: 47402 - protein, 8 aa, Homo Sapiens
SFSTTINY

SEQ ID NO: 47403 - protein, 8 aa, Homo Sapiens
FSTTINYT

SEQ ID NO: 47404 - protein, 8 aa, Homo Sapiens
STTINYTL

SEQ ID NO: 47405 - protein, 8 aa, Homo Sapiens
TTINYTLW

SEQ ID NO: 47406 - protein, 8 aa, Homo Sapiens
TINYTLWR

SEQ ID NO: 47407 - protein, 8 aa, Homo Sapiens
GPRMFPDL

SEQ ID NO: 47408 - protein, 8 aa, Homo Sapiens
RMFPDLES

SEQ ID NO: 47409 - protein, 8 aa, Homo Sapiens
FPDLESEF

SEQ ID NO: 47410 - protein, 8 aa, Homo Sapiens
DLESEFQA

SEQ ID NO: 47411 - protein, 8 aa, Homo Sapiens
SEFQAAIS

SEQ ID NO: 47412 - protein, 8 aa, Homo Sapiens
EFQAAISR

SEQ ID NO: 47413 - protein, 8 aa, Homo Sapiens
FQAAISRK

SEQ ID NO: 47414 - protein, 8 aa, Homo Sapiens
KMVELVHF

SEQ ID NO: 47415 - protein, 8 aa, Homo Sapiens
MVELVHFL

SEQ ID NO: 47416 - protein, 8 aa, Homo Sapiens
VELVHFLL

SEQ ID NO: 47417 - protein, 8 aa, Homo Sapiens
ELVHFLLL

SEQ ID NO: 47418 - protein, 8 aa, Homo Sapiens
LVHFLLLK

SEQ ID NO: 47419 - protein, 8 aa, Homo Sapiens
VHFLLLKY

SEQ ID NO: 47420 - protein, 8 aa, Homo Sapiens
HFLLLKYR

SEQ ID NO: 47421 - protein, 8 aa, Homo Sapiens
FLLLKYRA

SEQ ID NO: 47422 - protein, 8 aa, Homo Sapiens
LLLKYRAR

SEQ ID NO: 47423 - protein, 8 aa, Homo Sapiens
KYRAREPV

SEQ ID NO: 47424 - protein, 8 aa, Homo Sapiens
RAREPVTK

SEQ ID NO: 47425 - protein, 8 aa, Homo Sapiens
EPVTKAEM

SEQ ID NO: 47426 - protein, 8 aa, Homo Sapiens
KAEMLESV

SEQ ID NO: 47427 - protein, 8 aa, Homo Sapiens
AEMLESVL

SEQ ID NO: 47428 - protein, 8 aa, Homo Sapiens
EMLESVLR

SEQ ID NO: 47429 - protein, 8 aa, Homo Sapiens
VLRNCQDF

SEQ ID NO: 47430 - protein, 8 aa, Homo Sapiens
NCQDFFPV

SEQ ID NO: 47431 - protein, 8 aa, Homo Sapiens
CQDFFPVI

SEQ ID NO: 47432 - protein, 8 aa, Homo Sapiens
DFFPVIFS

SEQ ID NO: 47433 - protein, 8 aa, Homo Sapiens
FFPVIFSK

SEQ ID NO: 47434 - protein, 8 aa, Homo Sapiens
FPVIFSKA

SEQ ID NO: 47435 - protein, 8 aa, Homo Sapiens
IFSKASEY

SEQ ID NO: 47436 - protein, 8 aa, Homo Sapiens
FSKASEYL

SEQ ID NO: 47437 - protein, 8 aa, Homo Sapiens
KASEYLQL

SEQ ID NO: 47438 - protein, 8 aa, Homo Sapiens
SEYLQLVF

SEQ ID NO: 47439 - protein, 8 aa, Homo Sapiens
YLQLVFGI

SEQ ID NO: 47440 - protein, 8 aa, Homo Sapiens
QLVFGIEV

SEQ ID NO: 47441 - protein, 8 aa, Homo Sapiens
LVFGIEVV

SEQ ID NO: 47442 - protein, 8 aa, Homo Sapiens
FGIEVVEV

SEQ ID NO: 47443 - protein, 8 aa, Homo Sapiens
GIEVVEVV

SEQ ID NO: 47444 - protein, 8 aa, Homo Sapiens
EVVEVVPI

SEQ ID NO: 47445 - protein, 8 aa, Homo Sapiens
EVVPISHL

SEQ ID NO: 47446 - protein, 8 aa, Homo Sapiens
VVPISHLY

SEQ ID NO: 47447 - protein, 8 aa, Homo Sapiens
VPISHLYI

SEQ ID NO: 47448 - protein, 8 aa, Homo Sapiens
PISHLYIL

SEQ ID NO: 47449 - protein, 8 aa, Homo Sapiens
HLYILVTC

SEQ ID NO: 47450 - protein, 8 aa, Homo Sapiens
LYILVTCL

SEQ ID NO: 47451 - protein, 8 aa, Homo Sapiens
ILVTCLGL

SEQ ID NO: 47452 - protein, 8 aa, Homo Sapiens
VTCLGLSY

SEQ ID NO: 47453 - protein, 8 aa, Homo Sapiens
GLSYDGLL

SEQ ID NO: 47454 - protein, 8 aa, Homo Sapiens
GLLGDNQV

SEQ ID NO: 47455 - protein, 8 aa, Homo Sapiens
LLGDNQVM

SEQ ID NO: 47456 - protein, 8 aa, Homo Sapiens
QVMPKTGL

SEQ ID NO: 47457 - protein, 8 aa, Homo Sapiens
VMPKTGLL

SEQ ID NO: 47458 - protein, 8 aa, Homo Sapiens
MPKTGLLI

SEQ ID NO: 47459 - protein, 8 aa, Homo Sapiens
KTGLLIIV

SEQ ID NO: 47460 - protein, 8 aa, Homo Sapiens
GLLIIVLA

SEQ ID NO: 47461 - protein, 8 aa, Homo Sapiens
LLIIVLAI

SEQ ID NO: 47462 - protein, 8 aa, Homo Sapiens
LIIVLAII

SEQ ID NO: 47463 - protein, 8 aa, Homo Sapiens
IVLAIIAI

SEQ ID NO: 47464 - protein, 8 aa, Homo Sapiens
EEKIWEEL

SEQ ID NO: 47465 - protein, 8 aa, Homo Sapiens
KIWEELSM

SEQ ID NO: 47466 - protein, 8 aa, Homo Sapiens
EELSMLEV

SEQ ID NO: 47467 - protein, 8 aa, Homo Sapiens
ELSMLEVF

SEQ ID NO: 47468 - protein, 8 aa, Homo Sapiens
SMLEVFEG

SEQ ID NO: 47469 - protein, 8 aa, Homo Sapiens
MLEVFEGR

SEQ ID NO: 47470 - protein, 8 aa, Homo Sapiens
DSVFAHPR

SEQ ID NO: 47471 - protein, 8 aa, Homo Sapiens
SVFAHPRK

SEQ ID NO: 47472 - protein, 8 aa, Homo Sapiens
FAHPRKLL

SEQ ID NO: 47473 - protein, 8 aa, Homo Sapiens
HPRKLLMQ

SEQ ID NO: 47474 - protein, 8 aa, Homo Sapiens
KLLMQDLV

SEQ ID NO: 47475 - protein, 8 aa, Homo Sapiens
LLMQDLVQ

SEQ ID NO: 47476 - protein, 8 aa, Homo Sapiens
LMQDLVQE

SEQ ID NO: 47477 - protein, 8 aa, Homo Sapiens
DLVQENYL

SEQ ID NO: 47478 - protein, 8 aa, Homo Sapiens
VQENYLEY

SEQ ID NO: 47479 - protein, 8 aa, Homo Sapiens
NYLEYRQV

SEQ ID NO: 47480 - protein, 8 aa, Homo Sapiens
QVPGSDPA

SEQ ID NO: 47481 - protein, 8 aa, Homo Sapiens
DPACYEFL

SEQ ID NO: 47482 - protein, 8 aa, Homo Sapiens
YEFLWGPR

SEQ ID NO: 47483 - protein, 8 aa, Homo Sapiens
FLWGPRAL

SEQ ID NO: 47484 - protein, 8 aa, Homo Sapiens
LWGPRALI

SEQ ID NO: 47485 - protein, 8 aa, Homo Sapiens
RALIETSY

SEQ ID NO: 47486 - protein, 8 aa, Homo Sapiens
ALIETSYV

SEQ ID NO: 47487 - protein, 8 aa, Homo Sapiens
LIETSYVK

SEQ ID NO: 47488 - protein, 8 aa, Homo Sapiens
ETSYVKVL

SEQ ID NO: 47489 - protein, 8 aa, Homo Sapiens
KVLHHTLK

SEQ ID NO: 47490 - protein, 8 aa, Homo Sapiens
VLHHTLKI

SEQ ID NO: 47491 - protein, 8 aa, Homo Sapiens
KIGGEPHI

SEQ ID NO: 47492 - protein, 8 aa, Homo Sapiens
SYPPLHER

SEQ ID NO: 47493 - protein, 8 aa, Homo Sapiens
YPPLHERA

SEQ ID NO: 47494 - protein, 8 aa, Homo Sapiens
PPLHERAL

SEQ ID NO: 47495 - protein, 9 aa, Homo Sapiens
MPLEQRSQH

SEQ ID NO: 47496 - protein, 9 aa, Homo Sapiens
GLEARGEAL

SEQ ID NO: 47497 - protein, 9 aa, Homo Sapiens
ALGLVGAQA

SEQ ID NO: 47498 - protein, 9 aa, Homo Sapiens
GLVGAQAPA

SEQ ID NO: 47499 - protein, 9 aa, Homo Sapiens
AQAPATEEQ

SEQ ID NO: 47500 - protein, 9 aa, Homo Sapiens
QTASSSSTL

SEQ ID NO: 47501 - protein, 9 aa, Homo Sapiens
TASSSSTLV

SEQ ID NO: 47502 - protein, 9 aa, Homo Sapiens
SSSSTLVEV

SEQ ID NO: 47503 - protein, 9 aa, Homo Sapiens
TLVEVTLGE

SEQ ID NO: 47504 - protein, 9 aa, Homo Sapiens
LVEVTLGEV

SEQ ID NO: 47505 - protein, 9 aa, Homo Sapiens
EVTLGEVPA

SEQ ID NO: 47506 - protein, 9 aa, Homo Sapiens
EVPAADSPS

SEQ ID NO: 47507 - protein, 9 aa, Homo Sapiens
SPSPPHSPQ

SEQ ID NO: 47508 - protein, 9 aa, Homo Sapiens
SSFSTTINY

SEQ ID NO: 47509 - protein, 9 aa, Homo Sapiens
FSTTINYTL

SEQ ID NO: 47510 - protein, 9 aa, Homo Sapiens
STTINYTLW

SEQ ID NO: 47511 - protein, 9 aa, Homo Sapiens
TTINYTLWR

SEQ ID NO: 47512 - protein, 9 aa, Homo Sapiens
RMFPDLESE

SEQ ID NO: 47513 - protein, 9 aa, Homo Sapiens
MFPDLESEF

SEQ ID NO: 47514 - protein, 9 aa, Homo Sapiens
LESEFQAAI

SEQ ID NO: 47515 - protein, 9 aa, Homo Sapiens
SEFQAAISR

SEQ ID NO: 47516 - protein, 9 aa, Homo Sapiens
EFQAAISRK

SEQ ID NO: 47517 - protein, 9 aa, Homo Sapiens
FQAAISRKM

SEQ ID NO: 47518 - protein, 9 aa, Homo Sapiens
AISRKMVEL

SEQ ID NO: 47519 - protein, 9 aa, Homo Sapiens
KMVELVHFL

SEQ ID NO: 47520 - protein, 9 aa, Homo Sapiens
MVELVHFLL

SEQ ID NO: 47521 - protein, 9 aa, Homo Sapiens
VELVHFLLL

SEQ ID NO: 47522 - protein, 9 aa, Homo Sapiens
ELVHFLLLK

SEQ ID NO: 47523 - protein, 9 aa, Homo Sapiens
LVHFLLLKY

SEQ ID NO: 47524 - protein, 9 aa, Homo Sapiens
FLLLKYRAR

SEQ ID NO: 47525 - protein, 9 aa, Homo Sapiens
YRAREPVTK

SEQ ID NO: 47526 - protein, 9 aa, Homo Sapiens
EPVTKAEML

SEQ ID NO: 47527 - protein, 9 aa, Homo Sapiens
TKAEMLESV

SEQ ID NO: 47528 - protein, 9 aa, Homo Sapiens
AEMLESVLR

SEQ ID NO: 47529 - protein, 9 aa, Homo Sapiens
SVLRNCQDF

SEQ ID NO: 47530 - protein, 9 aa, Homo Sapiens
DFFPVIFSK

SEQ ID NO: 47531 - protein, 9 aa, Homo Sapiens
FPVIFSKAS

SEQ ID NO: 47532 - protein, 9 aa, Homo Sapiens
VIFSKASEY

SEQ ID NO: 47533 - protein, 9 aa, Homo Sapiens
IFSKASEYL

SEQ ID NO: 47534 - protein, 9 aa, Homo Sapiens
KASEYLQLV

SEQ ID NO: 47535 - protein, 9 aa, Homo Sapiens
EYLQLVFGI

SEQ ID NO: 47536 - protein, 9 aa, Homo Sapiens
LQLVFGIEV

SEQ ID NO: 47537 - protein, 9 aa, Homo Sapiens
QLVFGIEVV

SEQ ID NO: 47538 - protein, 9 aa, Homo Sapiens
FGIEVVEVV

SEQ ID NO: 47539 - protein, 9 aa, Homo Sapiens
IEVVEVVPI

SEQ ID NO: 47540 - protein, 9 aa, Homo Sapiens
VEVVPISHL

SEQ ID NO: 47541 - protein, 9 aa, Homo Sapiens
EVVPISHLY

SEQ ID NO: 47542 - protein, 9 aa, Homo Sapiens
VPISHLYIL

SEQ ID NO: 47543 - protein, 9 aa, Homo Sapiens
PISHLYILV

SEQ ID NO: 47544 - protein, 9 aa, Homo Sapiens
HLYILVTCL

SEQ ID NO: 47545 - protein, 9 aa, Homo Sapiens
YILVTCLGL

SEQ ID NO: 47546 - protein, 9 aa, Homo Sapiens
ILVTCLGLS

SEQ ID NO: 47547 - protein, 9 aa, Homo Sapiens
LVTCLGLSY

SEQ ID NO: 47548 - protein, 9 aa, Homo Sapiens
CLGLSYDGL

SEQ ID NO: 47549 - protein, 9 aa, Homo Sapiens
GLLGDNQVM

SEQ ID NO: 47550 - protein, 9 aa, Homo Sapiens
LLGDNQVMP

SEQ ID NO: 47551 - protein, 9 aa, Homo Sapiens
NQVMPKTGL

SEQ ID NO: 47552 - protein, 9 aa, Homo Sapiens
QVMPKTGLL

SEQ ID NO: 47553 - protein, 9 aa, Homo Sapiens
VMPKTGLLI

SEQ ID NO: 47554 - protein, 9 aa, Homo Sapiens
MPKTGLLII

SEQ ID NO: 47555 - protein, 9 aa, Homo Sapiens
GLLIIVLAI

SEQ ID NO: 47556 - protein, 9 aa, Homo Sapiens
LLIIVLAII

SEQ ID NO: 47557 - protein, 9 aa, Homo Sapiens
IIVLAIIAI

SEQ ID NO: 47558 - protein, 9 aa, Homo Sapiens
PEEKIWEEL

SEQ ID NO: 47559 - protein, 9 aa, Homo Sapiens
EEKIWEELS

SEQ ID NO: 47560 - protein, 9 aa, Homo Sapiens
KIWEELSML

SEQ ID NO: 47561 - protein, 9 aa, Homo Sapiens
WEELSMLEV

SEQ ID NO: 47562 - protein, 9 aa, Homo Sapiens
EELSMLEVF

SEQ ID NO: 47563 - protein, 9 aa, Homo Sapiens
SMLEVFEGR

SEQ ID NO: 47564 - protein, 9 aa, Homo Sapiens
EDSVFAHPR

SEQ ID NO: 47565 - protein, 9 aa, Homo Sapiens
DSVFAHPRK

SEQ ID NO: 47566 - protein, 9 aa, Homo Sapiens
SVFAHPRKL

SEQ ID NO: 47567 - protein, 9 aa, Homo Sapiens
FAHPRKLLM

SEQ ID NO: 47568 - protein, 9 aa, Homo Sapiens
KLLMQDLVQ

SEQ ID NO: 47569 - protein, 9 aa, Homo Sapiens
LMQDLVQEN

SEQ ID NO: 47570 - protein, 9 aa, Homo Sapiens
MQDLVQENY

SEQ ID NO: 47571 - protein, 9 aa, Homo Sapiens
LVQENYLEY

SEQ ID NO: 47572 - protein, 9 aa, Homo Sapiens
VQENYLEYR

SEQ ID NO: 47573 - protein, 9 aa, Homo Sapiens
RQVPGSDPA

SEQ ID NO: 47574 - protein, 9 aa, Homo Sapiens
VPGSDPACY

SEQ ID NO: 47575 - protein, 9 aa, Homo Sapiens
GSDPACYEF

SEQ ID NO: 47576 - protein, 9 aa, Homo Sapiens
DPACYEFLW

SEQ ID NO: 47577 - protein, 9 aa, Homo Sapiens
CYEFLWGPR

SEQ ID NO: 47578 - protein, 9 aa, Homo Sapiens
EFLWGPRAL

SEQ ID NO: 47579 - protein, 9 aa, Homo Sapiens
FLWGPRALI

SEQ ID NO: 47580 - protein, 9 aa, Homo Sapiens
RALIETSYV

SEQ ID NO: 47581 - protein, 9 aa, Homo Sapiens
ALIETSYVK

SEQ ID NO: 47582 - protein, 9 aa, Homo Sapiens
LIETSYVKV

SEQ ID NO: 47583 - protein, 9 aa, Homo Sapiens
IETSYVKVL

SEQ ID NO: 47584 - protein, 9 aa, Homo Sapiens
ETSYVKVLH

SEQ ID NO: 47585 - protein, 9 aa, Homo Sapiens
YVKVLHHTL

SEQ ID NO: 47586 - protein, 9 aa, Homo Sapiens
KVLHHTLKI

SEQ ID NO: 47587 - protein, 9 aa, Homo Sapiens
EPHISYPPL

SEQ ID NO: 47588 - protein, 9 aa, Homo Sapiens
ISYPPLHER

SEQ ID NO: 47589 - protein, 9 aa, Homo Sapiens
YPPLHERAL

SEQ ID NO: 47590 - protein, 10 aa, Homo Sapiens
MPLEQRSQHC

SEQ ID NO: 47591 - protein, 10 aa, Homo Sapiens
EEGLEARGEA

SEQ ID NO: 47592 - protein, 10 aa, Homo Sapiens
LEARGEALGL

SEQ ID NO: 47593 - protein, 10 aa, Homo Sapiens
EALGLVGAQA

SEQ ID NO: 47594 - protein, 10 aa, Homo Sapiens
GLVGAQAPAT

SEQ ID NO: 47595 - protein, 10 aa, Homo Sapiens
QQTASSSSTL

SEQ ID NO: 47596 - protein, 10 aa, Homo Sapiens
QTASSSSTLV

SEQ ID NO: 47597 - protein, 10 aa, Homo Sapiens
TLVEVTLGEV

SEQ ID NO: 47598 - protein, 10 aa, Homo Sapiens
SPQGASSFST

SEQ ID NO: 47599 - protein, 10 aa, Homo Sapiens
QGASSFSTTI

SEQ ID NO: 47600 - protein, 10 aa, Homo Sapiens
ASSFSTTINY

SEQ ID NO: 47601 - protein, 10 aa, Homo Sapiens
SFSTTINYTL

SEQ ID NO: 47602 - protein, 10 aa, Homo Sapiens
FSTTINYTLW

SEQ ID NO: 47603 - protein, 10 aa, Homo Sapiens
STTINYTLWR

SEQ ID NO: 47604 - protein, 10 aa, Homo Sapiens
TTINYTLWRQ

SEQ ID NO: 47605 - protein, 10 aa, Homo Sapiens
SSNQEEEGPR

SEQ ID NO: 47606 - protein, 10 aa, Homo Sapiens
EEGPRMFPDL

SEQ ID NO: 47607 - protein, 10 aa, Homo Sapiens
RMFPDLESEF

SEQ ID NO: 47608 - protein, 10 aa, Homo Sapiens
FPDLESEFQA

SEQ ID NO: 47609 - protein, 10 aa, Homo Sapiens
DLESEFQAAI

SEQ ID NO: 47610 - protein, 10 aa, Homo Sapiens
ESEFQAAISR

SEQ ID NO: 47611 - protein, 10 aa, Homo Sapiens
SEFQAAISRK

SEQ ID NO: 47612 - protein, 10 aa, Homo Sapiens
FQAAISRKMV

SEQ ID NO: 47613 - protein, 10 aa, Homo Sapiens
AAISRKMVEL

SEQ ID NO: 47614 - protein, 10 aa, Homo Sapiens
AISRKMVELV

SEQ ID NO: 47615 - protein, 10 aa, Homo Sapiens
KMVELVHFLL

SEQ ID NO: 47616 - protein, 10 aa, Homo Sapiens
MVELVHFLLL

SEQ ID NO: 47617 - protein, 10 aa, Homo Sapiens
VELVHFLLLK

SEQ ID NO: 47618 - protein, 10 aa, Homo Sapiens
ELVHFLLLKY

SEQ ID NO: 47619 - protein, 10 aa, Homo Sapiens
LVHFLLLKYR

SEQ ID NO: 47620 - protein, 10 aa, Homo Sapiens
HFLLLKYRAR

SEQ ID NO: 47621 - protein, 10 aa, Homo Sapiens
LLKYRAREPV

SEQ ID NO: 47622 - protein, 10 aa, Homo Sapiens
KYRAREPVTK

SEQ ID NO: 47623 - protein, 10 aa, Homo Sapiens
REPVTKAEML

SEQ ID NO: 47624 - protein, 10 aa, Homo Sapiens
VTKAEMLESV

SEQ ID NO: 47625 - protein, 10 aa, Homo Sapiens
KAEMLESVLR

SEQ ID NO: 47626 - protein, 10 aa, Homo Sapiens
AEMLESVLRN

SEQ ID NO: 47627 - protein, 10 aa, Homo Sapiens
SVLRNCQDFF

SEQ ID NO: 47628 - protein, 10 aa, Homo Sapiens
LRNCQDFFPV

SEQ ID NO: 47629 - protein, 10 aa, Homo Sapiens
QDFFPVIFSK

SEQ ID NO: 47630 - protein, 10 aa, Homo Sapiens
FPVIFSKASE

SEQ ID NO: 47631 - protein, 10 aa, Homo Sapiens
PVIFSKASEY

SEQ ID NO: 47632 - protein, 10 aa, Homo Sapiens
VIFSKASEYL

SEQ ID NO: 47633 - protein, 10 aa, Homo Sapiens
FSKASEYLQL

SEQ ID NO: 47634 - protein, 10 aa, Homo Sapiens
SKASEYLQLV

SEQ ID NO: 47635 - protein, 10 aa, Homo Sapiens
KASEYLQLVF

SEQ ID NO: 47636 - protein, 10 aa, Homo Sapiens
SEYLQLVFGI

SEQ ID NO: 47637 - protein, 10 aa, Homo Sapiens
YLQLVFGIEV

SEQ ID NO: 47638 - protein, 10 aa, Homo Sapiens
LQLVFGIEVV

SEQ ID NO: 47639 - protein, 10 aa, Homo Sapiens
LVFGIEVVEV

SEQ ID NO: 47640 - protein, 10 aa, Homo Sapiens
EVVEVVPISH

SEQ ID NO: 47641 - protein, 10 aa, Homo Sapiens
VEVVPISHLY

SEQ ID NO: 47642 - protein, 10 aa, Homo Sapiens
EVVPISHLYI

SEQ ID NO: 47643 - protein, 10 aa, Homo Sapiens
VVPISHLYIL

SEQ ID NO: 47644 - protein, 10 aa, Homo Sapiens
VPISHLYILV

SEQ ID NO: 47645 - protein, 10 aa, Homo Sapiens
HLYILVTCLG

SEQ ID NO: 47646 - protein, 10 aa, Homo Sapiens
LYILVTCLGL

SEQ ID NO: 47647 - protein, 10 aa, Homo Sapiens
ILVTCLGLSY

SEQ ID NO: 47648 - protein, 10 aa, Homo Sapiens
CLGLSYDGLL

SEQ ID NO: 47649 - protein, 10 aa, Homo Sapiens
GLLGDNQVMP

SEQ ID NO: 47650 - protein, 10 aa, Homo Sapiens
LLGDNQVMPK

SEQ ID NO: 47651 - protein, 10 aa, Homo Sapiens
NQVMPKTGLL

SEQ ID NO: 47652 - protein, 10 aa, Homo Sapiens
QVMPKTGLLI

SEQ ID NO: 47653 - protein, 10 aa, Homo Sapiens
VMPKTGLLII

SEQ ID NO: 47654 - protein, 10 aa, Homo Sapiens
MPKTGLLIIV

SEQ ID NO: 47655 - protein, 10 aa, Homo Sapiens
GLLIIVLAII

SEQ ID NO: 47656 - protein, 10 aa, Homo Sapiens
LLIIVLAIIA

SEQ ID NO: 47657 - protein, 10 aa, Homo Sapiens
LIIVLAIIAI

SEQ ID NO: 47658 - protein, 10 aa, Homo Sapiens
APEEKIWEEL

SEQ ID NO: 47659 - protein, 10 aa, Homo Sapiens
EEKIWEELSM

SEQ ID NO: 47660 - protein, 10 aa, Homo Sapiens
WEELSMLEVF

SEQ ID NO: 47661 - protein, 10 aa, Homo Sapiens
LSMLEVFEGR

SEQ ID NO: 47662 - protein, 10 aa, Homo Sapiens
EVFEGREDSV

SEQ ID NO: 47663 - protein, 10 aa, Homo Sapiens
VFEGREDSVF

SEQ ID NO: 47664 - protein, 10 aa, Homo Sapiens
EDSVFAHPRK

SEQ ID NO: 47665 - protein, 10 aa, Homo Sapiens
SVFAHPRKLL

SEQ ID NO: 47666 - protein, 10 aa, Homo Sapiens
HPRKLLMQDL

SEQ ID NO: 47667 - protein, 10 aa, Homo Sapiens
LMQDLVQENY

SEQ ID NO: 47668 - protein, 10 aa, Homo Sapiens
MQDLVQENYL

SEQ ID NO: 47669 - protein, 10 aa, Homo Sapiens
DLVQENYLEY

SEQ ID NO: 47670 - protein, 10 aa, Homo Sapiens
LVQENYLEYR

SEQ ID NO: 47671 - protein, 10 aa, Homo Sapiens
RQVPGSDPAC

SEQ ID NO: 47672 - protein, 10 aa, Homo Sapiens
QVPGSDPACY

SEQ ID NO: 47673 - protein, 10 aa, Homo Sapiens
YEFLWGPRAL

SEQ ID NO: 47674 - protein, 10 aa, Homo Sapiens
EFLWGPRALI

SEQ ID NO: 47675 - protein, 10 aa, Homo Sapiens
FLWGPRALIE

SEQ ID NO: 47676 - protein, 10 aa, Homo Sapiens
GPRALIETSY

SEQ ID NO: 47677 - protein, 10 aa, Homo Sapiens
RALIETSYVK

SEQ ID NO: 47678 - protein, 10 aa, Homo Sapiens
ALIETSYVKV

SEQ ID NO: 47679 - protein, 10 aa, Homo Sapiens
ETSYVKVLHH

SEQ ID NO: 47680 - protein, 10 aa, Homo Sapiens
SYVKVLHHTL

SEQ ID NO: 47681 - protein, 10 aa, Homo Sapiens
YVKVLHHTLK

SEQ ID NO: 47682 - protein, 10 aa, Homo Sapiens
TLKIGGEPHI

SEQ ID NO: 47683 - protein, 10 aa, Homo Sapiens
KIGGEPHISY

SEQ ID NO: 47684 - protein, 10 aa, Homo Sapiens
GEPHISYPPL

SEQ ID NO: 47685 - protein, 10 aa, Homo Sapiens
HISYPPLHER

SEQ ID NO: 47686 - protein, 10 aa, Homo Sapiens
SYPPLHERAL

SEQ ID NO: 47687 - protein, 11 aa, Homo Sapiens
EEGLEARGEAL

SEQ ID NO: 47688 - protein, 11 aa, Homo Sapiens
GLEARGEALGL

SEQ ID NO: 47689 - protein, 11 aa, Homo Sapiens
ALGLVGAQAPA

SEQ ID NO: 47690 - protein, 11 aa, Homo Sapiens
AQAPATEEQQT

SEQ ID NO: 47691 - protein, 11 aa, Homo Sapiens
QQTASSSSTLV

SEQ ID NO: 47692 - protein, 11 aa, Homo Sapiens
TASSSSTLVEV

SEQ ID NO: 47693 - protein, 11 aa, Homo Sapiens
STLVEVTLGEV

SEQ ID NO: 47694 - protein, 11 aa, Homo Sapiens
VPAADSPSPPH

SEQ ID NO: 47695 - protein, 11 aa, Homo Sapiens
SPSPPHSPQGA

SEQ ID NO: 47696 - protein, 11 aa, Homo Sapiens
PPHSPQGASSF

SEQ ID NO: 47697 - protein, 11 aa, Homo Sapiens
SPQGASSFSTT

SEQ ID NO: 47698 - protein, 11 aa, Homo Sapiens
GASSFSTTINY

SEQ ID NO: 47699 - protein, 11 aa, Homo Sapiens
SSFSTTINYTL

SEQ ID NO: 47700 - protein, 11 aa, Homo Sapiens
SFSTTINYTLW

SEQ ID NO: 47701 - protein, 11 aa, Homo Sapiens
FSTTINYTLWR

SEQ ID NO: 47702 - protein, 11 aa, Homo Sapiens
EEEGPRMFPDL

SEQ ID NO: 47703 - protein, 11 aa, Homo Sapiens
RMFPDLESEFQ

SEQ ID NO: 47704 - protein, 11 aa, Homo Sapiens
FPDLESEFQAA

SEQ ID NO: 47705 - protein, 11 aa, Homo Sapiens
ESEFQAAISRK

SEQ ID NO: 47706 - protein, 11 aa, Homo Sapiens
SEFQAAISRKM

SEQ ID NO: 47707 - protein, 11 aa, Homo Sapiens
FQAAISRKMVE

SEQ ID NO: 47708 - protein, 11 aa, Homo Sapiens
QAAISRKMVEL

SEQ ID NO: 47709 - protein, 11 aa, Homo Sapiens
AAISRKMVELV

SEQ ID NO: 47710 - protein, 11 aa, Homo Sapiens
ISRKMVELVHF

SEQ ID NO: 47711 - protein, 11 aa, Homo Sapiens
KMVELVHFLLL

SEQ ID NO: 47712 - protein, 11 aa, Homo Sapiens
MVELVHFLLLK

SEQ ID NO: 47713 - protein, 11 aa, Homo Sapiens
VELVHFLLLKY

SEQ ID NO: 47714 - protein, 11 aa, Homo Sapiens
ELVHFLLLKYR

SEQ ID NO: 47715 - protein, 11 aa, Homo Sapiens
LLLKYRAREPV

SEQ ID NO: 47716 - protein, 11 aa, Homo Sapiens
RAREPVTKAEM

SEQ ID NO: 47717 - protein, 11 aa, Homo Sapiens
PVTKAEMLESV

SEQ ID NO: 47718 - protein, 11 aa, Homo Sapiens
TKAEMLESVLR

SEQ ID NO: 47719 - protein, 11 aa, Homo Sapiens
AEMLESVLRNC

SEQ ID NO: 47720 - protein, 11 aa, Homo Sapiens
EMLESVLRNCQ

SEQ ID NO: 47721 - protein, 11 aa, Homo Sapiens
ESVLRNCQDFF

SEQ ID NO: 47722 - protein, 11 aa, Homo Sapiens
VLRNCQDFFPV

SEQ ID NO: 47723 - protein, 11 aa, Homo Sapiens
CQDFFPVIFSK

SEQ ID NO: 47724 - protein, 11 aa, Homo Sapiens
FPVIFSKASEY

SEQ ID NO: 47725 - protein, 11 aa, Homo Sapiens
PVIFSKASEYL

SEQ ID NO: 47726 - protein, 11 aa, Homo Sapiens
IFSKASEYLQL

SEQ ID NO: 47727 - protein, 11 aa, Homo Sapiens
FSKASEYLQLV

SEQ ID NO: 47728 - protein, 11 aa, Homo Sapiens
EYLQLVFGIEV

SEQ ID NO: 47729 - protein, 11 aa, Homo Sapiens
YLQLVFGIEVV

SEQ ID NO: 47730 - protein, 11 aa, Homo Sapiens
QLVFGIEVVEV

SEQ ID NO: 47731 - protein, 11 aa, Homo Sapiens
LVFGIEVVEVV

SEQ ID NO: 47732 - protein, 11 aa, Homo Sapiens
FGIEVVEVVPI

SEQ ID NO: 47733 - protein, 11 aa, Homo Sapiens
EVVEVVPISHL

SEQ ID NO: 47734 - protein, 11 aa, Homo Sapiens
VVEVVPISHLY

SEQ ID NO: 47735 - protein, 11 aa, Homo Sapiens
VEVVPISHLYI

SEQ ID NO: 47736 - protein, 11 aa, Homo Sapiens
EVVPISHLYIL

SEQ ID NO: 47737 - protein, 11 aa, Homo Sapiens
VVPISHLYILV

SEQ ID NO: 47738 - protein, 11 aa, Homo Sapiens
VPISHLYILVT

SEQ ID NO: 47739 - protein, 11 aa, Homo Sapiens
HLYILVTCLGL

SEQ ID NO: 47740 - protein, 11 aa, Homo Sapiens
YILVTCLGLSY

SEQ ID NO: 47741 - protein, 11 aa, Homo Sapiens
SYDGLLGDNQV

SEQ ID NO: 47742 - protein, 11 aa, Homo Sapiens
GLLGDNQVMPK

SEQ ID NO: 47743 - protein, 11 aa, Homo Sapiens
LLGDNQVMPKT

SEQ ID NO: 47744 - protein, 11 aa, Homo Sapiens
NQVMPKTGLLI

SEQ ID NO: 47745 - protein, 11 aa, Homo Sapiens
QVMPKTGLLII

SEQ ID NO: 47746 - protein, 11 aa, Homo Sapiens
VMPKTGLLIIV

SEQ ID NO: 47747 - protein, 11 aa, Homo Sapiens
MPKTGLLIIVL

SEQ ID NO: 47748 - protein, 11 aa, Homo Sapiens
GLLIIVLAIIA

SEQ ID NO: 47749 - protein, 11 aa, Homo Sapiens
LLIIVLAIIAI

SEQ ID NO: 47750 - protein, 11 aa, Homo Sapiens
AIEGDCAPEEK

SEQ ID NO: 47751 - protein, 11 aa, Homo Sapiens
PEEKIWEELSM

SEQ ID NO: 47752 - protein, 11 aa, Homo Sapiens
EEKIWEELSML

SEQ ID NO: 47753 - protein, 11 aa, Homo Sapiens
KIWEELSMLEV

SEQ ID NO: 47754 - protein, 11 aa, Homo Sapiens
IWEELSMLEVF

SEQ ID NO: 47755 - protein, 11 aa, Homo Sapiens
ELSMLEVFEGR

SEQ ID NO: 47756 - protein, 11 aa, Homo Sapiens
EVFEGREDSVF

SEQ ID NO: 47757 - protein, 11 aa, Homo Sapiens
SVFAHPRKLLM

SEQ ID NO: 47758 - protein, 11 aa, Homo Sapiens
HPRKLLMQDLV

SEQ ID NO: 47759 - protein, 11 aa, Homo Sapiens
LLMQDLVQENY

SEQ ID NO: 47760 - protein, 11 aa, Homo Sapiens
LMQDLVQENYL

SEQ ID NO: 47761 - protein, 11 aa, Homo Sapiens
DLVQENYLEYR

SEQ ID NO: 47762 - protein, 11 aa, Homo Sapiens
VQENYLEYRQV

SEQ ID NO: 47763 - protein, 11 aa, Homo Sapiens
RQVPGSDPACY

SEQ ID NO: 47764 - protein, 11 aa, Homo Sapiens
VPGSDPACYEF

SEQ ID NO: 47765 - protein, 11 aa, Homo Sapiens
GSDPACYEFLW

SEQ ID NO: 47766 - protein, 11 aa, Homo Sapiens
YEFLWGPRALI

SEQ ID NO: 47767 - protein, 11 aa, Homo Sapiens
FLWGPRALIET

SEQ ID NO: 47768 - protein, 11 aa, Homo Sapiens
GPRALIETSYV

SEQ ID NO: 47769 - protein, 11 aa, Homo Sapiens
RALIETSYVKV

SEQ ID NO: 47770 - protein, 11 aa, Homo Sapiens
ALIETSYVKVL

SEQ ID NO: 47771 - protein, 11 aa, Homo Sapiens
ETSYVKVLHHT

SEQ ID NO: 47772 - protein, 11 aa, Homo Sapiens
TSYVKVLHHTL

SEQ ID NO: 47773 - protein, 11 aa, Homo Sapiens
SYVKVLHHTLK

SEQ ID NO: 47774 - protein, 11 aa, Homo Sapiens
YVKVLHHTLKI

SEQ ID NO: 47775 - protein, 11 aa, Homo Sapiens
HTLKIGGEPHI

SEQ ID NO: 47776 - protein, 11 aa, Homo Sapiens
HISYPPLHERA

SEQ ID NO: 47777 - protein, 11 aa, Homo Sapiens
SYPPLHERALR

SEQ ID NO: 47778 - protein, 13 aa, Homo Sapiens
MPLEQRSQHCKPE

SEQ ID NO: 47779 - protein, 13 aa, Homo Sapiens
PLEQRSQHCKPEE

SEQ ID NO: 47780 - protein, 13 aa, Homo Sapiens
LEQRSQHCKPEEG

SEQ ID NO: 47781 - protein, 13 aa, Homo Sapiens
EQRSQHCKPEEGL

SEQ ID NO: 47782 - protein, 13 aa, Homo Sapiens
QRSQHCKPEEGLE

SEQ ID NO: 47783 - protein, 13 aa, Homo Sapiens
RSQHCKPEEGLEA

SEQ ID NO: 47784 - protein, 13 aa, Homo Sapiens
SQHCKPEEGLEAR

SEQ ID NO: 47785 - protein, 13 aa, Homo Sapiens
QHCKPEEGLEARG

SEQ ID NO: 47786 - protein, 13 aa, Homo Sapiens
HCKPEEGLEARGE

SEQ ID NO: 47787 - protein, 13 aa, Homo Sapiens
CKPEEGLEARGEA

SEQ ID NO: 47788 - protein, 13 aa, Homo Sapiens
KPEEGLEARGEAL

SEQ ID NO: 47789 - protein, 13 aa, Homo Sapiens
PEEGLEARGEALG

SEQ ID NO: 47790 - protein, 13 aa, Homo Sapiens
EEGLEARGEALGL

SEQ ID NO: 47791 - protein, 13 aa, Homo Sapiens
EGLEARGEALGLV

SEQ ID NO: 47792 - protein, 13 aa, Homo Sapiens
GLEARGEALGLVG

SEQ ID NO: 47793 - protein, 13 aa, Homo Sapiens
LEARGEALGLVGA

SEQ ID NO: 47794 - protein, 13 aa, Homo Sapiens
EARGEALGLVGAQ

SEQ ID NO: 47795 - protein, 13 aa, Homo Sapiens
ARGEALGLVGAQA

SEQ ID NO: 47796 - protein, 13 aa, Homo Sapiens
RGEALGLVGAQAP

SEQ ID NO: 47797 - protein, 13 aa, Homo Sapiens
GEALGLVGAQAPA

SEQ ID NO: 47798 - protein, 13 aa, Homo Sapiens
EALGLVGAQAPAT

SEQ ID NO: 47799 - protein, 13 aa, Homo Sapiens
ALGLVGAQAPATE

SEQ ID NO: 47800 - protein, 13 aa, Homo Sapiens
LGLVGAQAPATEE

SEQ ID NO: 47801 - protein, 13 aa, Homo Sapiens
GLVGAQAPATEEQ

SEQ ID NO: 47802 - protein, 13 aa, Homo Sapiens
LVGAQAPATEEQQ

SEQ ID NO: 47803 - protein, 13 aa, Homo Sapiens
VGAQAPATEEQQT

SEQ ID NO: 47804 - protein, 13 aa, Homo Sapiens
GAQAPATEEQQTA

SEQ ID NO: 47805 - protein, 13 aa, Homo Sapiens
AQAPATEEQQTAS

SEQ ID NO: 47806 - protein, 13 aa, Homo Sapiens
QAPATEEQQTASS

SEQ ID NO: 47807 - protein, 13 aa, Homo Sapiens
APATEEQQTASSS

SEQ ID NO: 47808 - protein, 13 aa, Homo Sapiens
PATEEQQTASSSS

SEQ ID NO: 47809 - protein, 13 aa, Homo Sapiens
ATEEQQTASSSST

SEQ ID NO: 47810 - protein, 13 aa, Homo Sapiens
TEEQQTASSSSTL

SEQ ID NO: 47811 - protein, 13 aa, Homo Sapiens
EEQQTASSSSTLV

SEQ ID NO: 47812 - protein, 13 aa, Homo Sapiens
EQQTASSSSTLVE

SEQ ID NO: 47813 - protein, 13 aa, Homo Sapiens
QQTASSSSTLVEV

SEQ ID NO: 47814 - protein, 13 aa, Homo Sapiens
QTASSSSTLVEVT

SEQ ID NO: 47815 - protein, 13 aa, Homo Sapiens
TASSSSTLVEVTL

SEQ ID NO: 47816 - protein, 13 aa, Homo Sapiens
ASSSSTLVEVTLG

SEQ ID NO: 47817 - protein, 13 aa, Homo Sapiens
SSSSTLVEVTLGE

SEQ ID NO: 47818 - protein, 13 aa, Homo Sapiens
SSSTLVEVTLGEV

SEQ ID NO: 47819 - protein, 13 aa, Homo Sapiens
SSTLVEVTLGEVP

SEQ ID NO: 47820 - protein, 13 aa, Homo Sapiens
STLVEVTLGEVPA

SEQ ID NO: 47821 - protein, 13 aa, Homo Sapiens
TLVEVTLGEVPAA

SEQ ID NO: 47822 - protein, 13 aa, Homo Sapiens
LVEVTLGEVPAAD

SEQ ID NO: 47823 - protein, 13 aa, Homo Sapiens
VEVTLGEVPAADS

SEQ ID NO: 47824 - protein, 13 aa, Homo Sapiens
EVTLGEVPAADSP

SEQ ID NO: 47825 - protein, 13 aa, Homo Sapiens
VTLGEVPAADSPS

SEQ ID NO: 47826 - protein, 13 aa, Homo Sapiens
TLGEVPAADSPSP

SEQ ID NO: 47827 - protein, 13 aa, Homo Sapiens
LGEVPAADSPSPP

SEQ ID NO: 47828 - protein, 13 aa, Homo Sapiens
GEVPAADSPSPPH

SEQ ID NO: 47829 - protein, 13 aa, Homo Sapiens
EVPAADSPSPPHS

SEQ ID NO: 47830 - protein, 13 aa, Homo Sapiens
VPAADSPSPPHSP

SEQ ID NO: 47831 - protein, 13 aa, Homo Sapiens
PAADSPSPPHSPQ

SEQ ID NO: 47832 - protein, 13 aa, Homo Sapiens
AADSPSPPHSPQG

SEQ ID NO: 47833 - protein, 13 aa, Homo Sapiens
ADSPSPPHSPQGA

SEQ ID NO: 47834 - protein, 13 aa, Homo Sapiens
DSPSPPHSPQGAS

SEQ ID NO: 47835 - protein, 13 aa, Homo Sapiens
SPSPPHSPQGASS

SEQ ID NO: 47836 - protein, 13 aa, Homo Sapiens
PSPPHSPQGASSF

SEQ ID NO: 47837 - protein, 13 aa, Homo Sapiens
SPPHSPQGASSFS

SEQ ID NO: 47838 - protein, 13 aa, Homo Sapiens
PPHSPQGASSFST

SEQ ID NO: 47839 - protein, 13 aa, Homo Sapiens
PHSPQGASSFSTT

SEQ ID NO: 47840 - protein, 13 aa, Homo Sapiens
HSPQGASSFSTTI

SEQ ID NO: 47841 - protein, 13 aa, Homo Sapiens
SPQGASSFSTTIN

SEQ ID NO: 47842 - protein, 13 aa, Homo Sapiens
PQGASSFSTTINY

SEQ ID NO: 47843 - protein, 13 aa, Homo Sapiens
QGASSFSTTINYT

SEQ ID NO: 47844 - protein, 13 aa, Homo Sapiens
GASSFSTTINYTL

SEQ ID NO: 47845 - protein, 13 aa, Homo Sapiens
ASSFSTTINYTLW

SEQ ID NO: 47846 - protein, 13 aa, Homo Sapiens
SSFSTTINYTLWR

SEQ ID NO: 47847 - protein, 13 aa, Homo Sapiens
SFSTTINYTLWRQ

SEQ ID NO: 47848 - protein, 13 aa, Homo Sapiens
FSTTINYTLWRQS

SEQ ID NO: 47849 - protein, 13 aa, Homo Sapiens
STTINYTLWRQSD

SEQ ID NO: 47850 - protein, 13 aa, Homo Sapiens
TTINYTLWRQSDE

SEQ ID NO: 47851 - protein, 13 aa, Homo Sapiens
TINYTLWRQSDEG

SEQ ID NO: 47852 - protein, 13 aa, Homo Sapiens
INYTLWRQSDEGS

SEQ ID NO: 47853 - protein, 13 aa, Homo Sapiens
NYTLWRQSDEGSS

SEQ ID NO: 47854 - protein, 13 aa, Homo Sapiens
YTLWRQSDEGSSN

SEQ ID NO: 47855 - protein, 13 aa, Homo Sapiens
TLWRQSDEGSSNQ

SEQ ID NO: 47856 - protein, 13 aa, Homo Sapiens
LWRQSDEGSSNQE

SEQ ID NO: 47857 - protein, 13 aa, Homo Sapiens
WRQSDEGSSNQEE

SEQ ID NO: 47858 - protein, 13 aa, Homo Sapiens
RQSDEGSSNQEEE

SEQ ID NO: 47859 - protein, 13 aa, Homo Sapiens
QSDEGSSNQEEEG

SEQ ID NO: 47860 - protein, 13 aa, Homo Sapiens
SDEGSSNQEEEGP

SEQ ID NO: 47861 - protein, 13 aa, Homo Sapiens
DEGSSNQEEEGPR

SEQ ID NO: 47862 - protein, 13 aa, Homo Sapiens
EGSSNQEEEGPRM

SEQ ID NO: 47863 - protein, 13 aa, Homo Sapiens
GSSNQEEEGPRMF

SEQ ID NO: 47864 - protein, 13 aa, Homo Sapiens
SSNQEEEGPRMFP

SEQ ID NO: 47865 - protein, 13 aa, Homo Sapiens
SNQEEEGPRMFPD

SEQ ID NO: 47866 - protein, 13 aa, Homo Sapiens
NQEEEGPRMFPDL

SEQ ID NO: 47867 - protein, 13 aa, Homo Sapiens
QEEEGPRMFPDLE

SEQ ID NO: 47868 - protein, 13 aa, Homo Sapiens
EEEGPRMFPDLES

SEQ ID NO: 47869 - protein, 13 aa, Homo Sapiens
EEGPRMFPDLESE

SEQ ID NO: 47870 - protein, 13 aa, Homo Sapiens
EGPRMFPDLESEF

SEQ ID NO: 47871 - protein, 13 aa, Homo Sapiens
GPRMFPDLESEFQ

SEQ ID NO: 47872 - protein, 13 aa, Homo Sapiens
PRMFPDLESEFQA

SEQ ID NO: 47873 - protein, 13 aa, Homo Sapiens
RMFPDLESEFQAA

SEQ ID NO: 47874 - protein, 13 aa, Homo Sapiens
MFPDLESEFQAAI

SEQ ID NO: 47875 - protein, 13 aa, Homo Sapiens
FPDLESEFQAAIS

SEQ ID NO: 47876 - protein, 13 aa, Homo Sapiens
PDLESEFQAAISR

SEQ ID NO: 47877 - protein, 13 aa, Homo Sapiens
DLESEFQAAISRK

SEQ ID NO: 47878 - protein, 13 aa, Homo Sapiens
LESEFQAAISRKM

SEQ ID NO: 47879 - protein, 13 aa, Homo Sapiens
ESEFQAAISRKMV

SEQ ID NO: 47880 - protein, 13 aa, Homo Sapiens
SEFQAAISRKMVE

SEQ ID NO: 47881 - protein, 13 aa, Homo Sapiens
EFQAAISRKMVEL

SEQ ID NO: 47882 - protein, 13 aa, Homo Sapiens
FQAAISRKMVELV

SEQ ID NO: 47883 - protein, 13 aa, Homo Sapiens
QAAISRKMVELVH

SEQ ID NO: 47884 - protein, 13 aa, Homo Sapiens
AAISRKMVELVHF

SEQ ID NO: 47885 - protein, 13 aa, Homo Sapiens
AISRKMVELVHFL

SEQ ID NO: 47886 - protein, 13 aa, Homo Sapiens
ISRKMVELVHFLL

SEQ ID NO: 47887 - protein, 13 aa, Homo Sapiens
SRKMVELVHFLLL

SEQ ID NO: 47888 - protein, 13 aa, Homo Sapiens
RKMVELVHFLLLK

SEQ ID NO: 47889 - protein, 13 aa, Homo Sapiens
KMVELVHFLLLKY

SEQ ID NO: 47890 - protein, 13 aa, Homo Sapiens
MVELVHFLLLKYR

SEQ ID NO: 47891 - protein, 13 aa, Homo Sapiens
VELVHFLLLKYRA

SEQ ID NO: 47892 - protein, 13 aa, Homo Sapiens
ELVHFLLLKYRAR

SEQ ID NO: 47893 - protein, 13 aa, Homo Sapiens
LVHFLLLKYRARE

SEQ ID NO: 47894 - protein, 13 aa, Homo Sapiens
VHFLLLKYRAREP

SEQ ID NO: 47895 - protein, 13 aa, Homo Sapiens
HFLLLKYRAREPV

SEQ ID NO: 47896 - protein, 13 aa, Homo Sapiens
FLLLKYRAREPVT

SEQ ID NO: 47897 - protein, 13 aa, Homo Sapiens
LLLKYRAREPVTK

SEQ ID NO: 47898 - protein, 13 aa, Homo Sapiens
LLKYRAREPVTKA

SEQ ID NO: 47899 - protein, 13 aa, Homo Sapiens
LKYRAREPVTKAE

SEQ ID NO: 47900 - protein, 13 aa, Homo Sapiens
KYRAREPVTKAEM

SEQ ID NO: 47901 - protein, 13 aa, Homo Sapiens
YRAREPVTKAEML

SEQ ID NO: 47902 - protein, 13 aa, Homo Sapiens
RAREPVTKAEMLE

SEQ ID NO: 47903 - protein, 13 aa, Homo Sapiens
AREPVTKAEMLES

SEQ ID NO: 47904 - protein, 13 aa, Homo Sapiens
REPVTKAEMLESV

SEQ ID NO: 47905 - protein, 13 aa, Homo Sapiens
EPVTKAEMLESVL

SEQ ID NO: 47906 - protein, 13 aa, Homo Sapiens
PVTKAEMLESVLR

SEQ ID NO: 47907 - protein, 13 aa, Homo Sapiens
VTKAEMLESVLRN

SEQ ID NO: 47908 - protein, 13 aa, Homo Sapiens
TKAEMLESVLRNC

SEQ ID NO: 47909 - protein, 13 aa, Homo Sapiens
KAEMLESVLRNCQ

SEQ ID NO: 47910 - protein, 13 aa, Homo Sapiens
AEMLESVLRNCQD

SEQ ID NO: 47911 - protein, 13 aa, Homo Sapiens
EMLESVLRNCQDF

SEQ ID NO: 47912 - protein, 13 aa, Homo Sapiens
MLESVLRNCQDFF

SEQ ID NO: 47913 - protein, 13 aa, Homo Sapiens
LESVLRNCQDFFP

SEQ ID NO: 47914 - protein, 13 aa, Homo Sapiens
ESVLRNCQDFFPV

SEQ ID NO: 47915 - protein, 13 aa, Homo Sapiens
SVLRNCQDFFPVI

SEQ ID NO: 47916 - protein, 13 aa, Homo Sapiens
VLRNCQDFFPVIF

SEQ ID NO: 47917 - protein, 13 aa, Homo Sapiens
LRNCQDFFPVIFS

SEQ ID NO: 47918 - protein, 13 aa, Homo Sapiens
RNCQDFFPVIFSK

SEQ ID NO: 47919 - protein, 13 aa, Homo Sapiens
NCQDFFPVIFSKA

SEQ ID NO: 47920 - protein, 13 aa, Homo Sapiens
CQDFFPVIFSKAS

SEQ ID NO: 47921 - protein, 13 aa, Homo Sapiens
QDFFPVIFSKASE

SEQ ID NO: 47922 - protein, 13 aa, Homo Sapiens
DFFPVIFSKASEY

SEQ ID NO: 47923 - protein, 13 aa, Homo Sapiens
FFPVIFSKASEYL

SEQ ID NO: 47924 - protein, 13 aa, Homo Sapiens
FPVIFSKASEYLQ

SEQ ID NO: 47925 - protein, 13 aa, Homo Sapiens
PVIFSKASEYLQL

SEQ ID NO: 47926 - protein, 13 aa, Homo Sapiens
VIFSKASEYLQLV

SEQ ID NO: 47927 - protein, 13 aa, Homo Sapiens
IFSKASEYLQLVF

SEQ ID NO: 47928 - protein, 13 aa, Homo Sapiens
FSKASEYLQLVFG

SEQ ID NO: 47929 - protein, 13 aa, Homo Sapiens
SKASEYLQLVFGI

SEQ ID NO: 47930 - protein, 13 aa, Homo Sapiens
KASEYLQLVFGIE

SEQ ID NO: 47931 - protein, 13 aa, Homo Sapiens
ASEYLQLVFGIEV

SEQ ID NO: 47932 - protein, 13 aa, Homo Sapiens
SEYLQLVFGIEVV

SEQ ID NO: 47933 - protein, 13 aa, Homo Sapiens
EYLQLVFGIEVVE

SEQ ID NO: 47934 - protein, 13 aa, Homo Sapiens
YLQLVFGIEVVEV

SEQ ID NO: 47935 - protein, 13 aa, Homo Sapiens
LQLVFGIEVVEVV

SEQ ID NO: 47936 - protein, 13 aa, Homo Sapiens
QLVFGIEVVEVVP

SEQ ID NO: 47937 - protein, 13 aa, Homo Sapiens
LVFGIEVVEVVPI

SEQ ID NO: 47938 - protein, 13 aa, Homo Sapiens
VFGIEVVEVVPIS

SEQ ID NO: 47939 - protein, 13 aa, Homo Sapiens
FGIEVVEVVPISH

SEQ ID NO: 47940 - protein, 13 aa, Homo Sapiens
GIEVVEVVPISHL

SEQ ID NO: 47941 - protein, 13 aa, Homo Sapiens
IEVVEVVPISHLY

SEQ ID NO: 47942 - protein, 13 aa, Homo Sapiens
EVVEVVPISHLYI

SEQ ID NO: 47943 - protein, 13 aa, Homo Sapiens
VVEVVPISHLYIL

SEQ ID NO: 47944 - protein, 13 aa, Homo Sapiens
VEVVPISHLYILV

SEQ ID NO: 47945 - protein, 13 aa, Homo Sapiens
EVVPISHLYILVT

SEQ ID NO: 47946 - protein, 13 aa, Homo Sapiens
VVPISHLYILVTC

SEQ ID NO: 47947 - protein, 13 aa, Homo Sapiens
VPISHLYILVTCL

SEQ ID NO: 47948 - protein, 13 aa, Homo Sapiens
PISHLYILVTCLG

SEQ ID NO: 47949 - protein, 13 aa, Homo Sapiens
ISHLYILVTCLGL

SEQ ID NO: 47950 - protein, 13 aa, Homo Sapiens
SHLYILVTCLGLS

SEQ ID NO: 47951 - protein, 13 aa, Homo Sapiens
HLYILVTCLGLSY

SEQ ID NO: 47952 - protein, 13 aa, Homo Sapiens
LYILVTCLGLSYD

SEQ ID NO: 47953 - protein, 13 aa, Homo Sapiens
YILVTCLGLSYDG

SEQ ID NO: 47954 - protein, 13 aa, Homo Sapiens
ILVTCLGLSYDGL

SEQ ID NO: 47955 - protein, 13 aa, Homo Sapiens
LVTCLGLSYDGLL

SEQ ID NO: 47956 - protein, 13 aa, Homo Sapiens
VTCLGLSYDGLLG

SEQ ID NO: 47957 - protein, 13 aa, Homo Sapiens
TCLGLSYDGLLGD

SEQ ID NO: 47958 - protein, 13 aa, Homo Sapiens
CLGLSYDGLLGDN

SEQ ID NO: 47959 - protein, 13 aa, Homo Sapiens
LGLSYDGLLGDNQ

SEQ ID NO: 47960 - protein, 13 aa, Homo Sapiens
GLSYDGLLGDNQV

SEQ ID NO: 47961 - protein, 13 aa, Homo Sapiens
LSYDGLLGDNQVM

SEQ ID NO: 47962 - protein, 13 aa, Homo Sapiens
SYDGLLGDNQVMP

SEQ ID NO: 47963 - protein, 13 aa, Homo Sapiens
YDGLLGDNQVMPK

SEQ ID NO: 47964 - protein, 13 aa, Homo Sapiens
DGLLGDNQVMPKT

SEQ ID NO: 47965 - protein, 13 aa, Homo Sapiens
GLLGDNQVMPKTG

SEQ ID NO: 47966 - protein, 13 aa, Homo Sapiens
LLGDNQVMPKTGL

SEQ ID NO: 47967 - protein, 13 aa, Homo Sapiens
LGDNQVMPKTGLL

SEQ ID NO: 47968 - protein, 13 aa, Homo Sapiens
GDNQVMPKTGLLI

SEQ ID NO: 47969 - protein, 13 aa, Homo Sapiens
DNQVMPKTGLLII

SEQ ID NO: 47970 - protein, 13 aa, Homo Sapiens
NQVMPKTGLLIIV

SEQ ID NO: 47971 - protein, 13 aa, Homo Sapiens
QVMPKTGLLIIVL

SEQ ID NO: 47972 - protein, 13 aa, Homo Sapiens
VMPKTGLLIIVLA

SEQ ID NO: 47973 - protein, 13 aa, Homo Sapiens
MPKTGLLIIVLAI

SEQ ID NO: 47974 - protein, 13 aa, Homo Sapiens
PKTGLLIIVLAII

SEQ ID NO: 47975 - protein, 13 aa, Homo Sapiens
KTGLLIIVLAIIA

SEQ ID NO: 47976 - protein, 13 aa, Homo Sapiens
TGLLIIVLAIIAI

SEQ ID NO: 47977 - protein, 13 aa, Homo Sapiens
GLLIIVLAIIAIE

SEQ ID NO: 47978 - protein, 13 aa, Homo Sapiens
LLIIVLAIIAIEG

SEQ ID NO: 47979 - protein, 13 aa, Homo Sapiens
LIIVLAIIAIEGD

SEQ ID NO: 47980 - protein, 13 aa, Homo Sapiens
IIVLAIIAIEGDC

SEQ ID NO: 47981 - protein, 13 aa, Homo Sapiens
IVLAIIAIEGDCA

SEQ ID NO: 47982 - protein, 13 aa, Homo Sapiens
VLAIIAIEGDCAP

SEQ ID NO: 47983 - protein, 13 aa, Homo Sapiens
LAIIAIEGDCAPE

SEQ ID NO: 47984 - protein, 13 aa, Homo Sapiens
AIIAIEGDCAPEE

SEQ ID NO: 47985 - protein, 13 aa, Homo Sapiens
IIAIEGDCAPEEK

SEQ ID NO: 47986 - protein, 13 aa, Homo Sapiens
IAIEGDCAPEEKI

SEQ ID NO: 47987 - protein, 13 aa, Homo Sapiens
AIEGDCAPEEKIW

SEQ ID NO: 47988 - protein, 13 aa, Homo Sapiens
IEGDCAPEEKIWE

SEQ ID NO: 47989 - protein, 13 aa, Homo Sapiens
EGDCAPEEKIWEE

SEQ ID NO: 47990 - protein, 13 aa, Homo Sapiens
GDCAPEEKIWEEL

SEQ ID NO: 47991 - protein, 13 aa, Homo Sapiens
DCAPEEKIWEELS

SEQ ID NO: 47992 - protein, 13 aa, Homo Sapiens
CAPEEKIWEELSM

SEQ ID NO: 47993 - protein, 13 aa, Homo Sapiens
APEEKIWEELSML

SEQ ID NO: 47994 - protein, 13 aa, Homo Sapiens
PEEKIWEELSMLE

SEQ ID NO: 47995 - protein, 13 aa, Homo Sapiens
EEKIWEELSMLEV

SEQ ID NO: 47996 - protein, 13 aa, Homo Sapiens
EKIWEELSMLEVF

SEQ ID NO: 47997 - protein, 13 aa, Homo Sapiens
KIWEELSMLEVFE

SEQ ID NO: 47998 - protein, 13 aa, Homo Sapiens
IWEELSMLEVFEG

SEQ ID NO: 47999 - protein, 13 aa, Homo Sapiens
WEELSMLEVFEGR

SEQ ID NO: 48000 - protein, 13 aa, Homo Sapiens
EELSMLEVFEGRE

SEQ ID NO: 48001 - protein, 13 aa, Homo Sapiens
ELSMLEVFEGRED

SEQ ID NO: 48002 - protein, 13 aa, Homo Sapiens
LSMLEVFEGREDS

SEQ ID NO: 48003 - protein, 13 aa, Homo Sapiens
SMLEVFEGREDSV

SEQ ID NO: 48004 - protein, 13 aa, Homo Sapiens
MLEVFEGREDSVF

SEQ ID NO: 48005 - protein, 13 aa, Homo Sapiens
LEVFEGREDSVFA

SEQ ID NO: 48006 - protein, 13 aa, Homo Sapiens
EVFEGREDSVFAH

SEQ ID NO: 48007 - protein, 13 aa, Homo Sapiens
VFEGREDSVFAHP

SEQ ID NO: 48008 - protein, 13 aa, Homo Sapiens
FEGREDSVFAHPR

SEQ ID NO: 48009 - protein, 13 aa, Homo Sapiens
EGREDSVFAHPRK

SEQ ID NO: 48010 - protein, 13 aa, Homo Sapiens
GREDSVFAHPRKL

SEQ ID NO: 48011 - protein, 13 aa, Homo Sapiens
REDSVFAHPRKLL

SEQ ID NO: 48012 - protein, 13 aa, Homo Sapiens
EDSVFAHPRKLLM

SEQ ID NO: 48013 - protein, 13 aa, Homo Sapiens
DSVFAHPRKLLMQ

SEQ ID NO: 48014 - protein, 13 aa, Homo Sapiens
SVFAHPRKLLMQD

SEQ ID NO: 48015 - protein, 13 aa, Homo Sapiens
VFAHPRKLLMQDL

SEQ ID NO: 48016 - protein, 13 aa, Homo Sapiens
FAHPRKLLMQDLV

SEQ ID NO: 48017 - protein, 13 aa, Homo Sapiens
AHPRKLLMQDLVQ

SEQ ID NO: 48018 - protein, 13 aa, Homo Sapiens
HPRKLLMQDLVQE

SEQ ID NO: 48019 - protein, 13 aa, Homo Sapiens
PRKLLMQDLVQEN

SEQ ID NO: 48020 - protein, 13 aa, Homo Sapiens
RKLLMQDLVQENY

SEQ ID NO: 48021 - protein, 13 aa, Homo Sapiens
KLLMQDLVQENYL

SEQ ID NO: 48022 - protein, 13 aa, Homo Sapiens
LLMQDLVQENYLE

SEQ ID NO: 48023 - protein, 13 aa, Homo Sapiens
LMQDLVQENYLEY

SEQ ID NO: 48024 - protein, 13 aa, Homo Sapiens
MQDLVQENYLEYR

SEQ ID NO: 48025 - protein, 13 aa, Homo Sapiens
QDLVQENYLEYRQ

SEQ ID NO: 48026 - protein, 13 aa, Homo Sapiens
DLVQENYLEYRQV

SEQ ID NO: 48027 - protein, 13 aa, Homo Sapiens
LVQENYLEYRQVP

SEQ ID NO: 48028 - protein, 13 aa, Homo Sapiens
VQENYLEYRQVPG

SEQ ID NO: 48029 - protein, 13 aa, Homo Sapiens
QENYLEYRQVPGS

SEQ ID NO: 48030 - protein, 13 aa, Homo Sapiens
ENYLEYRQVPGSD

SEQ ID NO: 48031 - protein, 13 aa, Homo Sapiens
NYLEYRQVPGSDP

SEQ ID NO: 48032 - protein, 13 aa, Homo Sapiens
YLEYRQVPGSDPA

SEQ ID NO: 48033 - protein, 13 aa, Homo Sapiens
LEYRQVPGSDPAC

SEQ ID NO: 48034 - protein, 13 aa, Homo Sapiens
EYRQVPGSDPACY

SEQ ID NO: 48035 - protein, 13 aa, Homo Sapiens
YRQVPGSDPACYE

SEQ ID NO: 48036 - protein, 13 aa, Homo Sapiens
RQVPGSDPACYEF

SEQ ID NO: 48037 - protein, 13 aa, Homo Sapiens
QVPGSDPACYEFL

SEQ ID NO: 48038 - protein, 13 aa, Homo Sapiens
VPGSDPACYEFLW

SEQ ID NO: 48039 - protein, 13 aa, Homo Sapiens
PGSDPACYEFLWG

SEQ ID NO: 48040 - protein, 13 aa, Homo Sapiens
GSDPACYEFLWGP

SEQ ID NO: 48041 - protein, 13 aa, Homo Sapiens
SDPACYEFLWGPR

SEQ ID NO: 48042 - protein, 13 aa, Homo Sapiens
DPACYEFLWGPRA

SEQ ID NO: 48043 - protein, 13 aa, Homo Sapiens
PACYEFLWGPRAL

SEQ ID NO: 48044 - protein, 13 aa, Homo Sapiens
ACYEFLWGPRALI

SEQ ID NO: 48045 - protein, 13 aa, Homo Sapiens
CYEFLWGPRALIE

SEQ ID NO: 48046 - protein, 13 aa, Homo Sapiens
YEFLWGPRALIET

SEQ ID NO: 48047 - protein, 13 aa, Homo Sapiens
EFLWGPRALIETS

SEQ ID NO: 48048 - protein, 13 aa, Homo Sapiens
FLWGPRALIETSY

SEQ ID NO: 48049 - protein, 13 aa, Homo Sapiens
LWGPRALIETSYV

SEQ ID NO: 48050 - protein, 13 aa, Homo Sapiens
WGPRALIETSYVK

SEQ ID NO: 48051 - protein, 13 aa, Homo Sapiens
GPRALIETSYVKV

SEQ ID NO: 48052 - protein, 13 aa, Homo Sapiens
PRALIETSYVKVL

SEQ ID NO: 48053 - protein, 13 aa, Homo Sapiens
RALIETSYVKVLH

SEQ ID NO: 48054 - protein, 13 aa, Homo Sapiens
ALIETSYVKVLHH

SEQ ID NO: 48055 - protein, 13 aa, Homo Sapiens
LIETSYVKVLHHT

SEQ ID NO: 48056 - protein, 13 aa, Homo Sapiens
IETSYVKVLHHTL

SEQ ID NO: 48057 - protein, 13 aa, Homo Sapiens
ETSYVKVLHHTLK

SEQ ID NO: 48058 - protein, 13 aa, Homo Sapiens
TSYVKVLHHTLKI

SEQ ID NO: 48059 - protein, 13 aa, Homo Sapiens
SYVKVLHHTLKIG

SEQ ID NO: 48060 - protein, 13 aa, Homo Sapiens
YVKVLHHTLKIGG

SEQ ID NO: 48061 - protein, 13 aa, Homo Sapiens
VKVLHHTLKIGGE

SEQ ID NO: 48062 - protein, 13 aa, Homo Sapiens
KVLHHTLKIGGEP

SEQ ID NO: 48063 - protein, 13 aa, Homo Sapiens
VLHHTLKIGGEPH

SEQ ID NO: 48064 - protein, 13 aa, Homo Sapiens
LHHTLKIGGEPHI

SEQ ID NO: 48065 - protein, 13 aa, Homo Sapiens
HHTLKIGGEPHIS

SEQ ID NO: 48066 - protein, 13 aa, Homo Sapiens
HTLKIGGEPHISY

SEQ ID NO: 48067 - protein, 13 aa, Homo Sapiens
TLKIGGEPHISYP

SEQ ID NO: 48068 - protein, 13 aa, Homo Sapiens
LKIGGEPHISYPP

SEQ ID NO: 48069 - protein, 13 aa, Homo Sapiens
KIGGEPHISYPPL

SEQ ID NO: 48070 - protein, 13 aa, Homo Sapiens
IGGEPHISYPPLH

SEQ ID NO: 48071 - protein, 13 aa, Homo Sapiens
GGEPHISYPPLHE

SEQ ID NO: 48072 - protein, 13 aa, Homo Sapiens
GEPHISYPPLHER

SEQ ID NO: 48073 - protein, 13 aa, Homo Sapiens
EPHISYPPLHERA

SEQ ID NO: 48074 - protein, 13 aa, Homo Sapiens
PHISYPPLHERAL

SEQ ID NO: 48075 - protein, 13 aa, Homo Sapiens
HISYPPLHERALR

SEQ ID NO: 48076 - protein, 13 aa, Homo Sapiens
ISYPPLHERALRE

SEQ ID NO: 48077 - protein, 13 aa, Homo Sapiens
SYPPLHERALREG

SEQ ID NO: 48078 - protein, 13 aa, Homo Sapiens
YPPLHERALREGE

SEQ ID NO: 48079 - protein, 13 aa, Homo Sapiens
PPLHERALREGEE

SEQ ID NO: 48080 - protein, 14 aa, Homo Sapiens
MPLEQRSQHCKPEE

SEQ ID NO: 48081 - protein, 14 aa, Homo Sapiens
PLEQRSQHCKPEEG

SEQ ID NO: 48082 - protein, 14 aa, Homo Sapiens
LEQRSQHCKPEEGL

SEQ ID NO: 48083 - protein, 14 aa, Homo Sapiens
EQRSQHCKPEEGLE

SEQ ID NO: 48084 - protein, 14 aa, Homo Sapiens
QRSQHCKPEEGLEA

SEQ ID NO: 48085 - protein, 14 aa, Homo Sapiens
RSQHCKPEEGLEAR

SEQ ID NO: 48086 - protein, 14 aa, Homo Sapiens
SQHCKPEEGLEARG

SEQ ID NO: 48087 - protein, 14 aa, Homo Sapiens
QHCKPEEGLEARGE

SEQ ID NO: 48088 - protein, 14 aa, Homo Sapiens
HCKPEEGLEARGEA

SEQ ID NO: 48089 - protein, 14 aa, Homo Sapiens
CKPEEGLEARGEAL

SEQ ID NO: 48090 - protein, 14 aa, Homo Sapiens
KPEEGLEARGEALG

SEQ ID NO: 48091 - protein, 14 aa, Homo Sapiens
PEEGLEARGEALGL

SEQ ID NO: 48092 - protein, 14 aa, Homo Sapiens
EEGLEARGEALGLV

SEQ ID NO: 48093 - protein, 14 aa, Homo Sapiens
EGLEARGEALGLVG

SEQ ID NO: 48094 - protein, 14 aa, Homo Sapiens
GLEARGEALGLVGA

SEQ ID NO: 48095 - protein, 14 aa, Homo Sapiens
LEARGEALGLVGAQ

SEQ ID NO: 48096 - protein, 14 aa, Homo Sapiens
EARGEALGLVGAQA

SEQ ID NO: 48097 - protein, 14 aa, Homo Sapiens
ARGEALGLVGAQAP

SEQ ID NO: 48098 - protein, 14 aa, Homo Sapiens
RGEALGLVGAQAPA

SEQ ID NO: 48099 - protein, 14 aa, Homo Sapiens
GEALGLVGAQAPAT

SEQ ID NO: 48100 - protein, 14 aa, Homo Sapiens
EALGLVGAQAPATE

SEQ ID NO: 48101 - protein, 14 aa, Homo Sapiens
ALGLVGAQAPATEE

SEQ ID NO: 48102 - protein, 14 aa, Homo Sapiens
LGLVGAQAPATEEQ

SEQ ID NO: 48103 - protein, 14 aa, Homo Sapiens
GLVGAQAPATEEQQ

SEQ ID NO: 48104 - protein, 14 aa, Homo Sapiens
LVGAQAPATEEQQT

SEQ ID NO: 48105 - protein, 14 aa, Homo Sapiens
VGAQAPATEEQQTA

SEQ ID NO: 48106 - protein, 14 aa, Homo Sapiens
GAQAPATEEQQTAS

SEQ ID NO: 48107 - protein, 14 aa, Homo Sapiens
AQAPATEEQQTASS

SEQ ID NO: 48108 - protein, 14 aa, Homo Sapiens
QAPATEEQQTASSS

SEQ ID NO: 48109 - protein, 14 aa, Homo Sapiens
APATEEQQTASSSS

SEQ ID NO: 48110 - protein, 14 aa, Homo Sapiens
PATEEQQTASSSST

SEQ ID NO: 48111 - protein, 14 aa, Homo Sapiens
ATEEQQTASSSSTL

SEQ ID NO: 48112 - protein, 14 aa, Homo Sapiens
TEEQQTASSSSTLV

SEQ ID NO: 48113 - protein, 14 aa, Homo Sapiens
EEQQTASSSSTLVE

SEQ ID NO: 48114 - protein, 14 aa, Homo Sapiens
EQQTASSSSTLVEV

SEQ ID NO: 48115 - protein, 14 aa, Homo Sapiens
QQTASSSSTLVEVT

SEQ ID NO: 48116 - protein, 14 aa, Homo Sapiens
QTASSSSTLVEVTL

SEQ ID NO: 48117 - protein, 14 aa, Homo Sapiens
TASSSSTLVEVTLG

SEQ ID NO: 48118 - protein, 14 aa, Homo Sapiens
ASSSSTLVEVTLGE

SEQ ID NO: 48119 - protein, 14 aa, Homo Sapiens
SSSSTLVEVTLGEV

SEQ ID NO: 48120 - protein, 14 aa, Homo Sapiens
SSSTLVEVTLGEVP

SEQ ID NO: 48121 - protein, 14 aa, Homo Sapiens
SSTLVEVTLGEVPA

SEQ ID NO: 48122 - protein, 14 aa, Homo Sapiens
STLVEVTLGEVPAA

SEQ ID NO: 48123 - protein, 14 aa, Homo Sapiens
TLVEVTLGEVPAAD

SEQ ID NO: 48124 - protein, 14 aa, Homo Sapiens
LVEVTLGEVPAADS

SEQ ID NO: 48125 - protein, 14 aa, Homo Sapiens
VEVTLGEVPAADSP

SEQ ID NO: 48126 - protein, 14 aa, Homo Sapiens
EVTLGEVPAADSPS

SEQ ID NO: 48127 - protein, 14 aa, Homo Sapiens
VTLGEVPAADSPSP

SEQ ID NO: 48128 - protein, 14 aa, Homo Sapiens
TLGEVPAADSPSPP

SEQ ID NO: 48129 - protein, 14 aa, Homo Sapiens
LGEVPAADSPSPPH

SEQ ID NO: 48130 - protein, 14 aa, Homo Sapiens
GEVPAADSPSPPHS

SEQ ID NO: 48131 - protein, 14 aa, Homo Sapiens
EVPAADSPSPPHSP

SEQ ID NO: 48132 - protein, 14 aa, Homo Sapiens
VPAADSPSPPHSPQ

SEQ ID NO: 48133 - protein, 14 aa, Homo Sapiens
PAADSPSPPHSPQG

SEQ ID NO: 48134 - protein, 14 aa, Homo Sapiens
AADSPSPPHSPQGA

SEQ ID NO: 48135 - protein, 14 aa, Homo Sapiens
ADSPSPPHSPQGAS

SEQ ID NO: 48136 - protein, 14 aa, Homo Sapiens
DSPSPPHSPQGASS

SEQ ID NO: 48137 - protein, 14 aa, Homo Sapiens
SPSPPHSPQGASSF

SEQ ID NO: 48138 - protein, 14 aa, Homo Sapiens
PSPPHSPQGASSFS

SEQ ID NO: 48139 - protein, 14 aa, Homo Sapiens
SPPHSPQGASSFST

SEQ ID NO: 48140 - protein, 14 aa, Homo Sapiens
PPHSPQGASSFSTT

SEQ ID NO: 48141 - protein, 14 aa, Homo Sapiens
PHSPQGASSFSTTI

SEQ ID NO: 48142 - protein, 14 aa, Homo Sapiens
HSPQGASSFSTTIN

SEQ ID NO: 48143 - protein, 14 aa, Homo Sapiens
SPQGASSFSTTINY

SEQ ID NO: 48144 - protein, 14 aa, Homo Sapiens
PQGASSFSTTINYT

SEQ ID NO: 48145 - protein, 14 aa, Homo Sapiens
QGASSFSTTINYTL

SEQ ID NO: 48146 - protein, 14 aa, Homo Sapiens
GASSFSTTINYTLW

SEQ ID NO: 48147 - protein, 14 aa, Homo Sapiens
ASSFSTTINYTLWR

SEQ ID NO: 48148 - protein, 14 aa, Homo Sapiens
SSFSTTINYTLWRQ

SEQ ID NO: 48149 - protein, 14 aa, Homo Sapiens
SFSTTINYTLWRQS

SEQ ID NO: 48150 - protein, 14 aa, Homo Sapiens
FSTTINYTLWRQSD

SEQ ID NO: 48151 - protein, 14 aa, Homo Sapiens
STTINYTLWRQSDE

SEQ ID NO: 48152 - protein, 14 aa, Homo Sapiens
TTINYTLWRQSDEG

SEQ ID NO: 48153 - protein, 14 aa, Homo Sapiens
TINYTLWRQSDEGS

SEQ ID NO: 48154 - protein, 14 aa, Homo Sapiens
INYTLWRQSDEGSS

SEQ ID NO: 48155 - protein, 14 aa, Homo Sapiens
NYTLWRQSDEGSSN

SEQ ID NO: 48156 - protein, 14 aa, Homo Sapiens
YTLWRQSDEGSSNQ

SEQ ID NO: 48157 - protein, 14 aa, Homo Sapiens
TLWRQSDEGSSNQE

SEQ ID NO: 48158 - protein, 14 aa, Homo Sapiens
LWRQSDEGSSNQEE

SEQ ID NO: 48159 - protein, 14 aa, Homo Sapiens
WRQSDEGSSNQEEE

SEQ ID NO: 48160 - protein, 14 aa, Homo Sapiens
RQSDEGSSNQEEEG

SEQ ID NO: 48161 - protein, 14 aa, Homo Sapiens
QSDEGSSNQEEEGP

SEQ ID NO: 48162 - protein, 14 aa, Homo Sapiens
SDEGSSNQEEEGPR

SEQ ID NO: 48163 - protein, 14 aa, Homo Sapiens
DEGSSNQEEEGPRM

SEQ ID NO: 48164 - protein, 14 aa, Homo Sapiens
EGSSNQEEEGPRMF

SEQ ID NO: 48165 - protein, 14 aa, Homo Sapiens
GSSNQEEEGPRMFP

SEQ ID NO: 48166 - protein, 14 aa, Homo Sapiens
SSNQEEEGPRMFPD

SEQ ID NO: 48167 - protein, 14 aa, Homo Sapiens
SNQEEEGPRMFPDL

SEQ ID NO: 48168 - protein, 14 aa, Homo Sapiens
NQEEEGPRMFPDLE

SEQ ID NO: 48169 - protein, 14 aa, Homo Sapiens
QEEEGPRMFPDLES

SEQ ID NO: 48170 - protein, 14 aa, Homo Sapiens
EEEGPRMFPDLESE

SEQ ID NO: 48171 - protein, 14 aa, Homo Sapiens
EEGPRMFPDLESEF

SEQ ID NO: 48172 - protein, 14 aa, Homo Sapiens
EGPRMFPDLESEFQ

SEQ ID NO: 48173 - protein, 14 aa, Homo Sapiens
GPRMFPDLESEFQA

SEQ ID NO: 48174 - protein, 14 aa, Homo Sapiens
PRMFPDLESEFQAA

SEQ ID NO: 48175 - protein, 14 aa, Homo Sapiens
RMFPDLESEFQAAI

SEQ ID NO: 48176 - protein, 14 aa, Homo Sapiens
MFPDLESEFQAAIS

SEQ ID NO: 48177 - protein, 14 aa, Homo Sapiens
FPDLESEFQAAISR

SEQ ID NO: 48178 - protein, 14 aa, Homo Sapiens
PDLESEFQAAISRK

SEQ ID NO: 48179 - protein, 14 aa, Homo Sapiens
DLESEFQAAISRKM

SEQ ID NO: 48180 - protein, 14 aa, Homo Sapiens
LESEFQAAISRKMV

SEQ ID NO: 48181 - protein, 14 aa, Homo Sapiens
ESEFQAAISRKMVE

SEQ ID NO: 48182 - protein, 14 aa, Homo Sapiens
SEFQAAISRKMVEL

SEQ ID NO: 48183 - protein, 14 aa, Homo Sapiens
EFQAAISRKMVELV

SEQ ID NO: 48184 - protein, 14 aa, Homo Sapiens
FQAAISRKMVELVH

SEQ ID NO: 48185 - protein, 14 aa, Homo Sapiens
QAAISRKMVELVHF

SEQ ID NO: 48186 - protein, 14 aa, Homo Sapiens
AAISRKMVELVHFL

SEQ ID NO: 48187 - protein, 14 aa, Homo Sapiens
AISRKMVELVHFLL

SEQ ID NO: 48188 - protein, 14 aa, Homo Sapiens
ISRKMVELVHFLLL

SEQ ID NO: 48189 - protein, 14 aa, Homo Sapiens
SRKMVELVHFLLLK

SEQ ID NO: 48190 - protein, 14 aa, Homo Sapiens
RKMVELVHFLLLKY

SEQ ID NO: 48191 - protein, 14 aa, Homo Sapiens
KMVELVHFLLLKYR

SEQ ID NO: 48192 - protein, 14 aa, Homo Sapiens
MVELVHFLLLKYRA

SEQ ID NO: 48193 - protein, 14 aa, Homo Sapiens
VELVHFLLLKYRAR

SEQ ID NO: 48194 - protein, 14 aa, Homo Sapiens
ELVHFLLLKYRARE

SEQ ID NO: 48195 - protein, 14 aa, Homo Sapiens
LVHFLLLKYRAREP

SEQ ID NO: 48196 - protein, 14 aa, Homo Sapiens
VHFLLLKYRAREPV

SEQ ID NO: 48197 - protein, 14 aa, Homo Sapiens
HFLLLKYRAREPVT

SEQ ID NO: 48198 - protein, 14 aa, Homo Sapiens
FLLLKYRAREPVTK

SEQ ID NO: 48199 - protein, 14 aa, Homo Sapiens
LLLKYRAREPVTKA

SEQ ID NO: 48200 - protein, 14 aa, Homo Sapiens
LLKYRAREPVTKAE

SEQ ID NO: 48201 - protein, 14 aa, Homo Sapiens
LKYRAREPVTKAEM

SEQ ID NO: 48202 - protein, 14 aa, Homo Sapiens
KYRAREPVTKAEML

SEQ ID NO: 48203 - protein, 14 aa, Homo Sapiens
YRAREPVTKAEMLE

SEQ ID NO: 48204 - protein, 14 aa, Homo Sapiens
RAREPVTKAEMLES

SEQ ID NO: 48205 - protein, 14 aa, Homo Sapiens
AREPVTKAEMLESV

SEQ ID NO: 48206 - protein, 14 aa, Homo Sapiens
REPVTKAEMLESVL

SEQ ID NO: 48207 - protein, 14 aa, Homo Sapiens
EPVTKAEMLESVLR

SEQ ID NO: 48208 - protein, 14 aa, Homo Sapiens
PVTKAEMLESVLRN

SEQ ID NO: 48209 - protein, 14 aa, Homo Sapiens
VTKAEMLESVLRNC

SEQ ID NO: 48210 - protein, 14 aa, Homo Sapiens
TKAEMLESVLRNCQ

SEQ ID NO: 48211 - protein, 14 aa, Homo Sapiens
KAEMLESVLRNCQD

SEQ ID NO: 48212 - protein, 14 aa, Homo Sapiens
AEMLESVLRNCQDF

SEQ ID NO: 48213 - protein, 14 aa, Homo Sapiens
EMLESVLRNCQDFF

SEQ ID NO: 48214 - protein, 14 aa, Homo Sapiens
MLESVLRNCQDFFP

SEQ ID NO: 48215 - protein, 14 aa, Homo Sapiens
LESVLRNCQDFFPV

SEQ ID NO: 48216 - protein, 14 aa, Homo Sapiens
ESVLRNCQDFFPVI

SEQ ID NO: 48217 - protein, 14 aa, Homo Sapiens
SVLRNCQDFFPVIF

SEQ ID NO: 48218 - protein, 14 aa, Homo Sapiens
VLRNCQDFFPVIFS

SEQ ID NO: 48219 - protein, 14 aa, Homo Sapiens
LRNCQDFFPVIFSK

SEQ ID NO: 48220 - protein, 14 aa, Homo Sapiens
RNCQDFFPVIFSKA

SEQ ID NO: 48221 - protein, 14 aa, Homo Sapiens
NCQDFFPVIFSKAS

SEQ ID NO: 48222 - protein, 14 aa, Homo Sapiens
CQDFFPVIFSKASE

SEQ ID NO: 48223 - protein, 14 aa, Homo Sapiens
QDFFPVIFSKASEY

SEQ ID NO: 48224 - protein, 14 aa, Homo Sapiens
DFFPVIFSKASEYL

SEQ ID NO: 48225 - protein, 14 aa, Homo Sapiens
FFPVIFSKASEYLQ

SEQ ID NO: 48226 - protein, 14 aa, Homo Sapiens
FPVIFSKASEYLQL

SEQ ID NO: 48227 - protein, 14 aa, Homo Sapiens
PVIFSKASEYLQLV

SEQ ID NO: 48228 - protein, 14 aa, Homo Sapiens
VIFSKASEYLQLVF

SEQ ID NO: 48229 - protein, 14 aa, Homo Sapiens
IFSKASEYLQLVFG

SEQ ID NO: 48230 - protein, 14 aa, Homo Sapiens
FSKASEYLQLVFGI

SEQ ID NO: 48231 - protein, 14 aa, Homo Sapiens
SKASEYLQLVFGIE

SEQ ID NO: 48232 - protein, 14 aa, Homo Sapiens
KASEYLQLVFGIEV

SEQ ID NO: 48233 - protein, 14 aa, Homo Sapiens
ASEYLQLVFGIEVV

SEQ ID NO: 48234 - protein, 14 aa, Homo Sapiens
SEYLQLVFGIEVVE

SEQ ID NO: 48235 - protein, 14 aa, Homo Sapiens
EYLQLVFGIEVVEV

SEQ ID NO: 48236 - protein, 14 aa, Homo Sapiens
YLQLVFGIEVVEVV

SEQ ID NO: 48237 - protein, 14 aa, Homo Sapiens
LQLVFGIEVVEVVP

SEQ ID NO: 48238 - protein, 14 aa, Homo Sapiens
QLVFGIEVVEVVPI

SEQ ID NO: 48239 - protein, 14 aa, Homo Sapiens
LVFGIEVVEVVPIS

SEQ ID NO: 48240 - protein, 14 aa, Homo Sapiens
VFGIEVVEVVPISH

SEQ ID NO: 48241 - protein, 14 aa, Homo Sapiens
FGIEVVEVVPISHL

SEQ ID NO: 48242 - protein, 14 aa, Homo Sapiens
GIEVVEVVPISHLY

SEQ ID NO: 48243 - protein, 14 aa, Homo Sapiens
IEVVEVVPISHLYI

SEQ ID NO: 48244 - protein, 14 aa, Homo Sapiens
EVVEVVPISHLYIL

SEQ ID NO: 48245 - protein, 14 aa, Homo Sapiens
VVEVVPISHLYILV

SEQ ID NO: 48246 - protein, 14 aa, Homo Sapiens
VEVVPISHLYILVT

SEQ ID NO: 48247 - protein, 14 aa, Homo Sapiens
EVVPISHLYILVTC

SEQ ID NO: 48248 - protein, 14 aa, Homo Sapiens
VVPISHLYILVTCL

SEQ ID NO: 48249 - protein, 14 aa, Homo Sapiens
VPISHLYILVTCLG

SEQ ID NO: 48250 - protein, 14 aa, Homo Sapiens
PISHLYILVTCLGL

SEQ ID NO: 48251 - protein, 14 aa, Homo Sapiens
ISHLYILVTCLGLS

SEQ ID NO: 48252 - protein, 14 aa, Homo Sapiens
SHLYILVTCLGLSY

SEQ ID NO: 48253 - protein, 14 aa, Homo Sapiens
HLYILVTCLGLSYD

SEQ ID NO: 48254 - protein, 14 aa, Homo Sapiens
LYILVTCLGLSYDG

SEQ ID NO: 48255 - protein, 14 aa, Homo Sapiens
YILVTCLGLSYDGL

SEQ ID NO: 48256 - protein, 14 aa, Homo Sapiens
ILVTCLGLSYDGLL

SEQ ID NO: 48257 - protein, 14 aa, Homo Sapiens
LVTCLGLSYDGLLG

SEQ ID NO: 48258 - protein, 14 aa, Homo Sapiens
VTCLGLSYDGLLGD

SEQ ID NO: 48259 - protein, 14 aa, Homo Sapiens
TCLGLSYDGLLGDN

SEQ ID NO: 48260 - protein, 14 aa, Homo Sapiens
CLGLSYDGLLGDNQ

SEQ ID NO: 48261 - protein, 14 aa, Homo Sapiens
LGLSYDGLLGDNQV

SEQ ID NO: 48262 - protein, 14 aa, Homo Sapiens
GLSYDGLLGDNQVM

SEQ ID NO: 48263 - protein, 14 aa, Homo Sapiens
LSYDGLLGDNQVMP

SEQ ID NO: 48264 - protein, 14 aa, Homo Sapiens
SYDGLLGDNQVMPK

SEQ ID NO: 48265 - protein, 14 aa, Homo Sapiens
YDGLLGDNQVMPKT

SEQ ID NO: 48266 - protein, 14 aa, Homo Sapiens
DGLLGDNQVMPKTG

SEQ ID NO: 48267 - protein, 14 aa, Homo Sapiens
GLLGDNQVMPKTGL

SEQ ID NO: 48268 - protein, 14 aa, Homo Sapiens
LLGDNQVMPKTGLL

SEQ ID NO: 48269 - protein, 14 aa, Homo Sapiens
LGDNQVMPKTGLLI

SEQ ID NO: 48270 - protein, 14 aa, Homo Sapiens
GDNQVMPKTGLLII

SEQ ID NO: 48271 - protein, 14 aa, Homo Sapiens
DNQVMPKTGLLIIV

SEQ ID NO: 48272 - protein, 14 aa, Homo Sapiens
NQVMPKTGLLIIVL

SEQ ID NO: 48273 - protein, 14 aa, Homo Sapiens
QVMPKTGLLIIVLA

SEQ ID NO: 48274 - protein, 14 aa, Homo Sapiens
VMPKTGLLIIVLAI

SEQ ID NO: 48275 - protein, 14 aa, Homo Sapiens
MPKTGLLIIVLAII

SEQ ID NO: 48276 - protein, 14 aa, Homo Sapiens
PKTGLLIIVLAIIA

SEQ ID NO: 48277 - protein, 14 aa, Homo Sapiens
KTGLLIIVLAIIAI

SEQ ID NO: 48278 - protein, 14 aa, Homo Sapiens
TGLLIIVLAIIAIE

SEQ ID NO: 48279 - protein, 14 aa, Homo Sapiens
GLLIIVLAIIAIEG

SEQ ID NO: 48280 - protein, 14 aa, Homo Sapiens
LLIIVLAIIAIEGD

SEQ ID NO: 48281 - protein, 14 aa, Homo Sapiens
LIIVLAIIAIEGDC

SEQ ID NO: 48282 - protein, 14 aa, Homo Sapiens
IIVLAIIAIEGDCA

SEQ ID NO: 48283 - protein, 14 aa, Homo Sapiens
IVLAIIAIEGDCAP

SEQ ID NO: 48284 - protein, 14 aa, Homo Sapiens
VLAIIAIEGDCAPE

SEQ ID NO: 48285 - protein, 14 aa, Homo Sapiens
LAIIAIEGDCAPEE

SEQ ID NO: 48286 - protein, 14 aa, Homo Sapiens
AIIAIEGDCAPEEK

SEQ ID NO: 48287 - protein, 14 aa, Homo Sapiens
IIAIEGDCAPEEKI

SEQ ID NO: 48288 - protein, 14 aa, Homo Sapiens
IAIEGDCAPEEKIW

SEQ ID NO: 48289 - protein, 14 aa, Homo Sapiens
AIEGDCAPEEKIWE

SEQ ID NO: 48290 - protein, 14 aa, Homo Sapiens
IEGDCAPEEKIWEE

SEQ ID NO: 48291 - protein, 14 aa, Homo Sapiens
EGDCAPEEKIWEEL

SEQ ID NO: 48292 - protein, 14 aa, Homo Sapiens
GDCAPEEKIWEELS

SEQ ID NO: 48293 - protein, 14 aa, Homo Sapiens
DCAPEEKIWEELSM

SEQ ID NO: 48294 - protein, 14 aa, Homo Sapiens
CAPEEKIWEELSML

SEQ ID NO: 48295 - protein, 14 aa, Homo Sapiens
APEEKIWEELSMLE

SEQ ID NO: 48296 - protein, 14 aa, Homo Sapiens
PEEKIWEELSMLEV

SEQ ID NO: 48297 - protein, 14 aa, Homo Sapiens
EEKIWEELSMLEVF

SEQ ID NO: 48298 - protein, 14 aa, Homo Sapiens
EKIWEELSMLEVFE

SEQ ID NO: 48299 - protein, 14 aa, Homo Sapiens
KIWEELSMLEVFEG

SEQ ID NO: 48300 - protein, 14 aa, Homo Sapiens
IWEELSMLEVFEGR

SEQ ID NO: 48301 - protein, 14 aa, Homo Sapiens
WEELSMLEVFEGRE

SEQ ID NO: 48302 - protein, 14 aa, Homo Sapiens
EELSMLEVFEGRED

SEQ ID NO: 48303 - protein, 14 aa, Homo Sapiens
ELSMLEVFEGREDS

SEQ ID NO: 48304 - protein, 14 aa, Homo Sapiens
LSMLEVFEGREDSV

SEQ ID NO: 48305 - protein, 14 aa, Homo Sapiens
SMLEVFEGREDSVF

SEQ ID NO: 48306 - protein, 14 aa, Homo Sapiens
MLEVFEGREDSVFA

SEQ ID NO: 48307 - protein, 14 aa, Homo Sapiens
LEVFEGREDSVFAH

SEQ ID NO: 48308 - protein, 14 aa, Homo Sapiens
EVFEGREDSVFAHP

SEQ ID NO: 48309 - protein, 14 aa, Homo Sapiens
VFEGREDSVFAHPR

SEQ ID NO: 48310 - protein, 14 aa, Homo Sapiens
FEGREDSVFAHPRK

SEQ ID NO: 48311 - protein, 14 aa, Homo Sapiens
EGREDSVFAHPRKL

SEQ ID NO: 48312 - protein, 14 aa, Homo Sapiens
GREDSVFAHPRKLL

SEQ ID NO: 48313 - protein, 14 aa, Homo Sapiens
REDSVFAHPRKLLM

SEQ ID NO: 48314 - protein, 14 aa, Homo Sapiens
EDSVFAHPRKLLMQ

SEQ ID NO: 48315 - protein, 14 aa, Homo Sapiens
DSVFAHPRKLLMQD

SEQ ID NO: 48316 - protein, 14 aa, Homo Sapiens
SVFAHPRKLLMQDL

SEQ ID NO: 48317 - protein, 14 aa, Homo Sapiens
VFAHPRKLLMQDLV

SEQ ID NO: 48318 - protein, 14 aa, Homo Sapiens
FAHPRKLLMQDLVQ

SEQ ID NO: 48319 - protein, 14 aa, Homo Sapiens
AHPRKLLMQDLVQE

SEQ ID NO: 48320 - protein, 14 aa, Homo Sapiens
HPRKLLMQDLVQEN

SEQ ID NO: 48321 - protein, 14 aa, Homo Sapiens
PRKLLMQDLVQENY

SEQ ID NO: 48322 - protein, 14 aa, Homo Sapiens
RKLLMQDLVQENYL

SEQ ID NO: 48323 - protein, 14 aa, Homo Sapiens
KLLMQDLVQENYLE

SEQ ID NO: 48324 - protein, 14 aa, Homo Sapiens
LLMQDLVQENYLEY

SEQ ID NO: 48325 - protein, 14 aa, Homo Sapiens
LMQDLVQENYLEYR

SEQ ID NO: 48326 - protein, 14 aa, Homo Sapiens
MQDLVQENYLEYRQ

SEQ ID NO: 48327 - protein, 14 aa, Homo Sapiens
QDLVQENYLEYRQV

SEQ ID NO: 48328 - protein, 14 aa, Homo Sapiens
DLVQENYLEYRQVP

SEQ ID NO: 48329 - protein, 14 aa, Homo Sapiens
LVQENYLEYRQVPG

SEQ ID NO: 48330 - protein, 14 aa, Homo Sapiens
VQENYLEYRQVPGS

SEQ ID NO: 48331 - protein, 14 aa, Homo Sapiens
QENYLEYRQVPGSD

SEQ ID NO: 48332 - protein, 14 aa, Homo Sapiens
ENYLEYRQVPGSDP

SEQ ID NO: 48333 - protein, 14 aa, Homo Sapiens
NYLEYRQVPGSDPA

SEQ ID NO: 48334 - protein, 14 aa, Homo Sapiens
YLEYRQVPGSDPAC

SEQ ID NO: 48335 - protein, 14 aa, Homo Sapiens
LEYRQVPGSDPACY

SEQ ID NO: 48336 - protein, 14 aa, Homo Sapiens
EYRQVPGSDPACYE

SEQ ID NO: 48337 - protein, 14 aa, Homo Sapiens
YRQVPGSDPACYEF

SEQ ID NO: 48338 - protein, 14 aa, Homo Sapiens
RQVPGSDPACYEFL

SEQ ID NO: 48339 - protein, 14 aa, Homo Sapiens
QVPGSDPACYEFLW

SEQ ID NO: 48340 - protein, 14 aa, Homo Sapiens
VPGSDPACYEFLWG

SEQ ID NO: 48341 - protein, 14 aa, Homo Sapiens
PGSDPACYEFLWGP

SEQ ID NO: 48342 - protein, 14 aa, Homo Sapiens
GSDPACYEFLWGPR

SEQ ID NO: 48343 - protein, 14 aa, Homo Sapiens
SDPACYEFLWGPRA

SEQ ID NO: 48344 - protein, 14 aa, Homo Sapiens
DPACYEFLWGPRAL

SEQ ID NO: 48345 - protein, 14 aa, Homo Sapiens
PACYEFLWGPRALI

SEQ ID NO: 48346 - protein, 14 aa, Homo Sapiens
ACYEFLWGPRALIE

SEQ ID NO: 48347 - protein, 14 aa, Homo Sapiens
CYEFLWGPRALIET

SEQ ID NO: 48348 - protein, 14 aa, Homo Sapiens
YEFLWGPRALIETS

SEQ ID NO: 48349 - protein, 14 aa, Homo Sapiens
EFLWGPRALIETSY

SEQ ID NO: 48350 - protein, 14 aa, Homo Sapiens
FLWGPRALIETSYV

SEQ ID NO: 48351 - protein, 14 aa, Homo Sapiens
LWGPRALIETSYVK

SEQ ID NO: 48352 - protein, 14 aa, Homo Sapiens
WGPRALIETSYVKV

SEQ ID NO: 48353 - protein, 14 aa, Homo Sapiens
GPRALIETSYVKVL

SEQ ID NO: 48354 - protein, 14 aa, Homo Sapiens
PRALIETSYVKVLH

SEQ ID NO: 48355 - protein, 14 aa, Homo Sapiens
RALIETSYVKVLHH

SEQ ID NO: 48356 - protein, 14 aa, Homo Sapiens
ALIETSYVKVLHHT

SEQ ID NO: 48357 - protein, 14 aa, Homo Sapiens
LIETSYVKVLHHTL

SEQ ID NO: 48358 - protein, 14 aa, Homo Sapiens
IETSYVKVLHHTLK

SEQ ID NO: 48359 - protein, 14 aa, Homo Sapiens
ETSYVKVLHHTLKI

SEQ ID NO: 48360 - protein, 14 aa, Homo Sapiens
TSYVKVLHHTLKIG

SEQ ID NO: 48361 - protein, 14 aa, Homo Sapiens
SYVKVLHHTLKIGG

SEQ ID NO: 48362 - protein, 14 aa, Homo Sapiens
YVKVLHHTLKIGGE

SEQ ID NO: 48363 - protein, 14 aa, Homo Sapiens
VKVLHHTLKIGGEP

SEQ ID NO: 48364 - protein, 14 aa, Homo Sapiens
KVLHHTLKIGGEPH

SEQ ID NO: 48365 - protein, 14 aa, Homo Sapiens
VLHHTLKIGGEPHI

SEQ ID NO: 48366 - protein, 14 aa, Homo Sapiens
LHHTLKIGGEPHIS

SEQ ID NO: 48367 - protein, 14 aa, Homo Sapiens
HHTLKIGGEPHISY

SEQ ID NO: 48368 - protein, 14 aa, Homo Sapiens
HTLKIGGEPHISYP

SEQ ID NO: 48369 - protein, 14 aa, Homo Sapiens
TLKIGGEPHISYPP

SEQ ID NO: 48370 - protein, 14 aa, Homo Sapiens
LKIGGEPHISYPPL

SEQ ID NO: 48371 - protein, 14 aa, Homo Sapiens
KIGGEPHISYPPLH

SEQ ID NO: 48372 - protein, 14 aa, Homo Sapiens
IGGEPHISYPPLHE

SEQ ID NO: 48373 - protein, 14 aa, Homo Sapiens
GGEPHISYPPLHER

SEQ ID NO: 48374 - protein, 14 aa, Homo Sapiens
GEPHISYPPLHERA

SEQ ID NO: 48375 - protein, 14 aa, Homo Sapiens
EPHISYPPLHERAL

SEQ ID NO: 48376 - protein, 14 aa, Homo Sapiens
PHISYPPLHERALR

SEQ ID NO: 48377 - protein, 14 aa, Homo Sapiens
HISYPPLHERALRE

SEQ ID NO: 48378 - protein, 14 aa, Homo Sapiens
ISYPPLHERALREG

SEQ ID NO: 48379 - protein, 14 aa, Homo Sapiens
SYPPLHERALREGE

SEQ ID NO: 48380 - protein, 14 aa, Homo Sapiens
YPPLHERALREGEE

SEQ ID NO: 48381 - protein, 15 aa, Homo Sapiens
MPLEQRSQHCKPEEG

SEQ ID NO: 48382 - protein, 15 aa, Homo Sapiens
PLEQRSQHCKPEEGL

SEQ ID NO: 48383 - protein, 15 aa, Homo Sapiens
LEQRSQHCKPEEGLE

SEQ ID NO: 48384 - protein, 15 aa, Homo Sapiens
EQRSQHCKPEEGLEA

SEQ ID NO: 48385 - protein, 15 aa, Homo Sapiens
QRSQHCKPEEGLEAR

SEQ ID NO: 48386 - protein, 15 aa, Homo Sapiens
RSQHCKPEEGLEARG

SEQ ID NO: 48387 - protein, 15 aa, Homo Sapiens
SQHCKPEEGLEARGE

SEQ ID NO: 48388 - protein, 15 aa, Homo Sapiens
QHCKPEEGLEARGEA

SEQ ID NO: 48389 - protein, 15 aa, Homo Sapiens
HCKPEEGLEARGEAL

SEQ ID NO: 48390 - protein, 15 aa, Homo Sapiens
CKPEEGLEARGEALG

SEQ ID NO: 48391 - protein, 15 aa, Homo Sapiens
KPEEGLEARGEALGL

SEQ ID NO: 48392 - protein, 15 aa, Homo Sapiens
PEEGLEARGEALGLV

SEQ ID NO: 48393 - protein, 15 aa, Homo Sapiens
EEGLEARGEALGLVG

SEQ ID NO: 48394 - protein, 15 aa, Homo Sapiens
EGLEARGEALGLVGA

SEQ ID NO: 48395 - protein, 15 aa, Homo Sapiens
GLEARGEALGLVGAQ

SEQ ID NO: 48396 - protein, 15 aa, Homo Sapiens
LEARGEALGLVGAQA

SEQ ID NO: 48397 - protein, 15 aa, Homo Sapiens
EARGEALGLVGAQAP

SEQ ID NO: 48398 - protein, 15 aa, Homo Sapiens
ARGEALGLVGAQAPA

SEQ ID NO: 48399 - protein, 15 aa, Homo Sapiens
RGEALGLVGAQAPAT

SEQ ID NO: 48400 - protein, 15 aa, Homo Sapiens
GEALGLVGAQAPATE

SEQ ID NO: 48401 - protein, 15 aa, Homo Sapiens
EALGLVGAQAPATEE

SEQ ID NO: 48402 - protein, 15 aa, Homo Sapiens
ALGLVGAQAPATEEQ

SEQ ID NO: 48403 - protein, 15 aa, Homo Sapiens
LGLVGAQAPATEEQQ

SEQ ID NO: 48404 - protein, 15 aa, Homo Sapiens
GLVGAQAPATEEQQT

SEQ ID NO: 48405 - protein, 15 aa, Homo Sapiens
LVGAQAPATEEQQTA

SEQ ID NO: 48406 - protein, 15 aa, Homo Sapiens
VGAQAPATEEQQTAS

SEQ ID NO: 48407 - protein, 15 aa, Homo Sapiens
GAQAPATEEQQTASS

SEQ ID NO: 48408 - protein, 15 aa, Homo Sapiens
AQAPATEEQQTASSS

SEQ ID NO: 48409 - protein, 15 aa, Homo Sapiens
QAPATEEQQTASSSS

SEQ ID NO: 48410 - protein, 15 aa, Homo Sapiens
APATEEQQTASSSST

SEQ ID NO: 48411 - protein, 15 aa, Homo Sapiens
PATEEQQTASSSSTL

SEQ ID NO: 48412 - protein, 15 aa, Homo Sapiens
ATEEQQTASSSSTLV

SEQ ID NO: 48413 - protein, 15 aa, Homo Sapiens
TEEQQTASSSSTLVE

SEQ ID NO: 48414 - protein, 15 aa, Homo Sapiens
EEQQTASSSSTLVEV

SEQ ID NO: 48415 - protein, 15 aa, Homo Sapiens
EQQTASSSSTLVEVT

SEQ ID NO: 48416 - protein, 15 aa, Homo Sapiens
QQTASSSSTLVEVTL

SEQ ID NO: 48417 - protein, 15 aa, Homo Sapiens
QTASSSSTLVEVTLG

SEQ ID NO: 48418 - protein, 15 aa, Homo Sapiens
TASSSSTLVEVTLGE

SEQ ID NO: 48419 - protein, 15 aa, Homo Sapiens
ASSSSTLVEVTLGEV

SEQ ID NO: 48420 - protein, 15 aa, Homo Sapiens
SSSSTLVEVTLGEVP

SEQ ID NO: 48421 - protein, 15 aa, Homo Sapiens
SSSTLVEVTLGEVPA

SEQ ID NO: 48422 - protein, 15 aa, Homo Sapiens
SSTLVEVTLGEVPAA

SEQ ID NO: 48423 - protein, 15 aa, Homo Sapiens
STLVEVTLGEVPAAD

SEQ ID NO: 48424 - protein, 15 aa, Homo Sapiens
TLVEVTLGEVPAADS

SEQ ID NO: 48425 - protein, 15 aa, Homo Sapiens
LVEVTLGEVPAADSP

SEQ ID NO: 48426 - protein, 15 aa, Homo Sapiens
VEVTLGEVPAADSPS

SEQ ID NO: 48427 - protein, 15 aa, Homo Sapiens
EVTLGEVPAADSPSP

SEQ ID NO: 48428 - protein, 15 aa, Homo Sapiens
VTLGEVPAADSPSPP

SEQ ID NO: 48429 - protein, 15 aa, Homo Sapiens
TLGEVPAADSPSPPH

SEQ ID NO: 48430 - protein, 15 aa, Homo Sapiens
LGEVPAADSPSPPHS

SEQ ID NO: 48431 - protein, 15 aa, Homo Sapiens
GEVPAADSPSPPHSP

SEQ ID NO: 48432 - protein, 15 aa, Homo Sapiens
EVPAADSPSPPHSPQ

SEQ ID NO: 48433 - protein, 15 aa, Homo Sapiens
VPAADSPSPPHSPQG

SEQ ID NO: 48434 - protein, 15 aa, Homo Sapiens
PAADSPSPPHSPQGA

SEQ ID NO: 48435 - protein, 15 aa, Homo Sapiens
AADSPSPPHSPQGAS

SEQ ID NO: 48436 - protein, 15 aa, Homo Sapiens
ADSPSPPHSPQGASS

SEQ ID NO: 48437 - protein, 15 aa, Homo Sapiens
DSPSPPHSPQGASSF

SEQ ID NO: 48438 - protein, 15 aa, Homo Sapiens
SPSPPHSPQGASSFS

SEQ ID NO: 48439 - protein, 15 aa, Homo Sapiens
PSPPHSPQGASSFST

SEQ ID NO: 48440 - protein, 15 aa, Homo Sapiens
SPPHSPQGASSFSTT

SEQ ID NO: 48441 - protein, 15 aa, Homo Sapiens
PPHSPQGASSFSTTI

SEQ ID NO: 48442 - protein, 15 aa, Homo Sapiens
PHSPQGASSFSTTIN

SEQ ID NO: 48443 - protein, 15 aa, Homo Sapiens
HSPQGASSFSTTINY

SEQ ID NO: 48444 - protein, 15 aa, Homo Sapiens
SPQGASSFSTTINYT

SEQ ID NO: 48445 - protein, 15 aa, Homo Sapiens
PQGASSFSTTINYTL

SEQ ID NO: 48446 - protein, 15 aa, Homo Sapiens
QGASSFSTTINYTLW

SEQ ID NO: 48447 - protein, 15 aa, Homo Sapiens
GASSFSTTINYTLWR

SEQ ID NO: 48448 - protein, 15 aa, Homo Sapiens
ASSFSTTINYTLWRQ

SEQ ID NO: 48449 - protein, 15 aa, Homo Sapiens
SSFSTTINYTLWRQS

SEQ ID NO: 48450 - protein, 15 aa, Homo Sapiens
SFSTTINYTLWRQSD

SEQ ID NO: 48451 - protein, 15 aa, Homo Sapiens
FSTTINYTLWRQSDE

SEQ ID NO: 48452 - protein, 15 aa, Homo Sapiens
STTINYTLWRQSDEG

SEQ ID NO: 48453 - protein, 15 aa, Homo Sapiens
TTINYTLWRQSDEGS

SEQ ID NO: 48454 - protein, 15 aa, Homo Sapiens
TINYTLWRQSDEGSS

SEQ ID NO: 48455 - protein, 15 aa, Homo Sapiens
INYTLWRQSDEGSSN

SEQ ID NO: 48456 - protein, 15 aa, Homo Sapiens
NYTLWRQSDEGSSNQ

SEQ ID NO: 48457 - protein, 15 aa, Homo Sapiens
YTLWRQSDEGSSNQE

SEQ ID NO: 48458 - protein, 15 aa, Homo Sapiens
TLWRQSDEGSSNQEE

SEQ ID NO: 48459 - protein, 15 aa, Homo Sapiens
LWRQSDEGSSNQEEE

SEQ ID NO: 48460 - protein, 15 aa, Homo Sapiens
WRQSDEGSSNQEEEG

SEQ ID NO: 48461 - protein, 15 aa, Homo Sapiens
RQSDEGSSNQEEEGP

SEQ ID NO: 48462 - protein, 15 aa, Homo Sapiens
QSDEGSSNQEEEGPR

SEQ ID NO: 48463 - protein, 15 aa, Homo Sapiens
SDEGSSNQEEEGPRM

SEQ ID NO: 48464 - protein, 15 aa, Homo Sapiens
DEGSSNQEEEGPRMF

SEQ ID NO: 48465 - protein, 15 aa, Homo Sapiens
EGSSNQEEEGPRMFP

SEQ ID NO: 48466 - protein, 15 aa, Homo Sapiens
GSSNQEEEGPRMFPD

SEQ ID NO: 48467 - protein, 15 aa, Homo Sapiens
SSNQEEEGPRMFPDL

SEQ ID NO: 48468 - protein, 15 aa, Homo Sapiens
SNQEEEGPRMFPDLE

SEQ ID NO: 48469 - protein, 15 aa, Homo Sapiens
NQEEEGPRMFPDLES

SEQ ID NO: 48470 - protein, 15 aa, Homo Sapiens
QEEEGPRMFPDLESE

SEQ ID NO: 48471 - protein, 15 aa, Homo Sapiens
EEEGPRMFPDLESEF

SEQ ID NO: 48472 - protein, 15 aa, Homo Sapiens
EEGPRMFPDLESEFQ

SEQ ID NO: 48473 - protein, 15 aa, Homo Sapiens
EGPRMFPDLESEFQA

SEQ ID NO: 48474 - protein, 15 aa, Homo Sapiens
GPRMFPDLESEFQAA

SEQ ID NO: 48475 - protein, 15 aa, Homo Sapiens
PRMFPDLESEFQAAI

SEQ ID NO: 48476 - protein, 15 aa, Homo Sapiens
RMFPDLESEFQAAIS

SEQ ID NO: 48477 - protein, 15 aa, Homo Sapiens
MFPDLESEFQAAISR

SEQ ID NO: 48478 - protein, 15 aa, Homo Sapiens
FPDLESEFQAAISRK

SEQ ID NO: 48479 - protein, 15 aa, Homo Sapiens
PDLESEFQAAISRKM

SEQ ID NO: 48480 - protein, 15 aa, Homo Sapiens
DLESEFQAAISRKMV

SEQ ID NO: 48481 - protein, 15 aa, Homo Sapiens
LESEFQAAISRKMVE

SEQ ID NO: 48482 - protein, 15 aa, Homo Sapiens
ESEFQAAISRKMVEL

SEQ ID NO: 48483 - protein, 15 aa, Homo Sapiens
SEFQAAISRKMVELV

SEQ ID NO: 48484 - protein, 15 aa, Homo Sapiens
EFQAAISRKMVELVH

SEQ ID NO: 48485 - protein, 15 aa, Homo Sapiens
FQAAISRKMVELVHF

SEQ ID NO: 48486 - protein, 15 aa, Homo Sapiens
QAAISRKMVELVHFL

SEQ ID NO: 48487 - protein, 15 aa, Homo Sapiens
AAISRKMVELVHFLL

SEQ ID NO: 48488 - protein, 15 aa, Homo Sapiens
AISRKMVELVHFLLL

SEQ ID NO: 48489 - protein, 15 aa, Homo Sapiens
ISRKMVELVHFLLLK

SEQ ID NO: 48490 - protein, 15 aa, Homo Sapiens
SRKMVELVHFLLLKY

SEQ ID NO: 48491 - protein, 15 aa, Homo Sapiens
RKMVELVHFLLLKYR

SEQ ID NO: 48492 - protein, 15 aa, Homo Sapiens
KMVELVHFLLLKYRA

SEQ ID NO: 48493 - protein, 15 aa, Homo Sapiens
MVELVHFLLLKYRAR

SEQ ID NO: 48494 - protein, 15 aa, Homo Sapiens
VELVHFLLLKYRARE

SEQ ID NO: 48495 - protein, 15 aa, Homo Sapiens
ELVHFLLLKYRAREP

SEQ ID NO: 48496 - protein, 15 aa, Homo Sapiens
LVHFLLLKYRAREPV

SEQ ID NO: 48497 - protein, 15 aa, Homo Sapiens
VHFLLLKYRAREPVT

SEQ ID NO: 48498 - protein, 15 aa, Homo Sapiens
HFLLLKYRAREPVTK

SEQ ID NO: 48499 - protein, 15 aa, Homo Sapiens
FLLLKYRAREPVTKA

SEQ ID NO: 48500 - protein, 15 aa, Homo Sapiens
LLLKYRAREPVTKAE

SEQ ID NO: 48501 - protein, 15 aa, Homo Sapiens
LLKYRAREPVTKAEM

SEQ ID NO: 48502 - protein, 15 aa, Homo Sapiens
LKYRAREPVTKAEML

SEQ ID NO: 48503 - protein, 15 aa, Homo Sapiens
KYRAREPVTKAEMLE

SEQ ID NO: 48504 - protein, 15 aa, Homo Sapiens
YRAREPVTKAEMLES

SEQ ID NO: 48505 - protein, 15 aa, Homo Sapiens
RAREPVTKAEMLESV

SEQ ID NO: 48506 - protein, 15 aa, Homo Sapiens
AREPVTKAEMLESVL

SEQ ID NO: 48507 - protein, 15 aa, Homo Sapiens
REPVTKAEMLESVLR

SEQ ID NO: 48508 - protein, 15 aa, Homo Sapiens
EPVTKAEMLESVLRN

SEQ ID NO: 48509 - protein, 15 aa, Homo Sapiens
PVTKAEMLESVLRNC

SEQ ID NO: 48510 - protein, 15 aa, Homo Sapiens
VTKAEMLESVLRNCQ

SEQ ID NO: 48511 - protein, 15 aa, Homo Sapiens
TKAEMLESVLRNCQD

SEQ ID NO: 48512 - protein, 15 aa, Homo Sapiens
KAEMLESVLRNCQDF

SEQ ID NO: 48513 - protein, 15 aa, Homo Sapiens
AEMLESVLRNCQDFF

SEQ ID NO: 48514 - protein, 15 aa, Homo Sapiens
EMLESVLRNCQDFFP

SEQ ID NO: 48515 - protein, 15 aa, Homo Sapiens
MLESVLRNCQDFFPV

SEQ ID NO: 48516 - protein, 15 aa, Homo Sapiens
LESVLRNCQDFFPVI

SEQ ID NO: 48517 - protein, 15 aa, Homo Sapiens
ESVLRNCQDFFPVIF

SEQ ID NO: 48518 - protein, 15 aa, Homo Sapiens
SVLRNCQDFFPVIFS

SEQ ID NO: 48519 - protein, 15 aa, Homo Sapiens
VLRNCQDFFPVIFSK

SEQ ID NO: 48520 - protein, 15 aa, Homo Sapiens
LRNCQDFFPVIFSKA

SEQ ID NO: 48521 - protein, 15 aa, Homo Sapiens
RNCQDFFPVIFSKAS

SEQ ID NO: 48522 - protein, 15 aa, Homo Sapiens
NCQDFFPVIFSKASE

SEQ ID NO: 48523 - protein, 15 aa, Homo Sapiens
CQDFFPVIFSKASEY

SEQ ID NO: 48524 - protein, 15 aa, Homo Sapiens
QDFFPVIFSKASEYL

SEQ ID NO: 48525 - protein, 15 aa, Homo Sapiens
DFFPVIFSKASEYLQ

SEQ ID NO: 48526 - protein, 15 aa, Homo Sapiens
FFPVIFSKASEYLQL

SEQ ID NO: 48527 - protein, 15 aa, Homo Sapiens
FPVIFSKASEYLQLV

SEQ ID NO: 48528 - protein, 15 aa, Homo Sapiens
PVIFSKASEYLQLVF

SEQ ID NO: 48529 - protein, 15 aa, Homo Sapiens
VIFSKASEYLQLVFG

SEQ ID NO: 48530 - protein, 15 aa, Homo Sapiens
IFSKASEYLQLVFGI

SEQ ID NO: 48531 - protein, 15 aa, Homo Sapiens
FSKASEYLQLVFGIE

SEQ ID NO: 48532 - protein, 15 aa, Homo Sapiens
SKASEYLQLVFGIEV

SEQ ID NO: 48533 - protein, 15 aa, Homo Sapiens
KASEYLQLVFGIEVV

SEQ ID NO: 48534 - protein, 15 aa, Homo Sapiens
ASEYLQLVFGIEVVE

SEQ ID NO: 48535 - protein, 15 aa, Homo Sapiens
SEYLQLVFGIEVVEV

SEQ ID NO: 48536 - protein, 15 aa, Homo Sapiens
EYLQLVFGIEVVEVV

SEQ ID NO: 48537 - protein, 15 aa, Homo Sapiens
YLQLVFGIEVVEVVP

SEQ ID NO: 48538 - protein, 15 aa, Homo Sapiens
LQLVFGIEVVEVVPI

SEQ ID NO: 48539 - protein, 15 aa, Homo Sapiens
QLVFGIEVVEVVPIS

SEQ ID NO: 48540 - protein, 15 aa, Homo Sapiens
LVFGIEVVEVVPISH

SEQ ID NO: 48541 - protein, 15 aa, Homo Sapiens
VFGIEVVEVVPISHL

SEQ ID NO: 48542 - protein, 15 aa, Homo Sapiens
FGIEVVEVVPISHLY

SEQ ID NO: 48543 - protein, 15 aa, Homo Sapiens
GIEVVEVVPISHLYI

SEQ ID NO: 48544 - protein, 15 aa, Homo Sapiens
IEVVEVVPISHLYIL

SEQ ID NO: 48545 - protein, 15 aa, Homo Sapiens
EVVEVVPISHLYILV

SEQ ID NO: 48546 - protein, 15 aa, Homo Sapiens
VVEVVPISHLYILVT

SEQ ID NO: 48547 - protein, 15 aa, Homo Sapiens
VEVVPISHLYILVTC

SEQ ID NO: 48548 - protein, 15 aa, Homo Sapiens
EVVPISHLYILVTCL

SEQ ID NO: 48549 - protein, 15 aa, Homo Sapiens
VVPISHLYILVTCLG

SEQ ID NO: 48550 - protein, 15 aa, Homo Sapiens
VPISHLYILVTCLGL

SEQ ID NO: 48551 - protein, 15 aa, Homo Sapiens
PISHLYILVTCLGLS

SEQ ID NO: 48552 - protein, 15 aa, Homo Sapiens
ISHLYILVTCLGLSY

SEQ ID NO: 48553 - protein, 15 aa, Homo Sapiens
SHLYILVTCLGLSYD

SEQ ID NO: 48554 - protein, 15 aa, Homo Sapiens
HLYILVTCLGLSYDG

SEQ ID NO: 48555 - protein, 15 aa, Homo Sapiens
LYILVTCLGLSYDGL

SEQ ID NO: 48556 - protein, 15 aa, Homo Sapiens
YILVTCLGLSYDGLL

SEQ ID NO: 48557 - protein, 15 aa, Homo Sapiens
ILVTCLGLSYDGLLG

SEQ ID NO: 48558 - protein, 15 aa, Homo Sapiens
LVTCLGLSYDGLLGD

SEQ ID NO: 48559 - protein, 15 aa, Homo Sapiens
VTCLGLSYDGLLGDN

SEQ ID NO: 48560 - protein, 15 aa, Homo Sapiens
TCLGLSYDGLLGDNQ

SEQ ID NO: 48561 - protein, 15 aa, Homo Sapiens
CLGLSYDGLLGDNQV

SEQ ID NO: 48562 - protein, 15 aa, Homo Sapiens
LGLSYDGLLGDNQVM

SEQ ID NO: 48563 - protein, 15 aa, Homo Sapiens
GLSYDGLLGDNQVMP

SEQ ID NO: 48564 - protein, 15 aa, Homo Sapiens
LSYDGLLGDNQVMPK

SEQ ID NO: 48565 - protein, 15 aa, Homo Sapiens
SYDGLLGDNQVMPKT

SEQ ID NO: 48566 - protein, 15 aa, Homo Sapiens
YDGLLGDNQVMPKTG

SEQ ID NO: 48567 - protein, 15 aa, Homo Sapiens
DGLLGDNQVMPKTGL

SEQ ID NO: 48568 - protein, 15 aa, Homo Sapiens
GLLGDNQVMPKTGLL

SEQ ID NO: 48569 - protein, 15 aa, Homo Sapiens
LLGDNQVMPKTGLLI

SEQ ID NO: 48570 - protein, 15 aa, Homo Sapiens
LGDNQVMPKTGLLII

SEQ ID NO: 48571 - protein, 15 aa, Homo Sapiens
GDNQVMPKTGLLIIV

SEQ ID NO: 48572 - protein, 15 aa, Homo Sapiens
DNQVMPKTGLLIIVL

SEQ ID NO: 48573 - protein, 15 aa, Homo Sapiens
NQVMPKTGLLIIVLA

SEQ ID NO: 48574 - protein, 15 aa, Homo Sapiens
QVMPKTGLLIIVLAI

SEQ ID NO: 48575 - protein, 15 aa, Homo Sapiens
VMPKTGLLIIVLAII

SEQ ID NO: 48576 - protein, 15 aa, Homo Sapiens
MPKTGLLIIVLAIIA

SEQ ID NO: 48577 - protein, 15 aa, Homo Sapiens
PKTGLLIIVLAIIAI

SEQ ID NO: 48578 - protein, 15 aa, Homo Sapiens
KTGLLIIVLAIIAIE

SEQ ID NO: 48579 - protein, 15 aa, Homo Sapiens
TGLLIIVLAIIAIEG

SEQ ID NO: 48580 - protein, 15 aa, Homo Sapiens
GLLIIVLAIIAIEGD

SEQ ID NO: 48581 - protein, 15 aa, Homo Sapiens
LLIIVLAIIAIEGDC

SEQ ID NO: 48582 - protein, 15 aa, Homo Sapiens
LIIVLAIIAIEGDCA

SEQ ID NO: 48583 - protein, 15 aa, Homo Sapiens
IIVLAIIAIEGDCAP

SEQ ID NO: 48584 - protein, 15 aa, Homo Sapiens
IVLAIIAIEGDCAPE

SEQ ID NO: 48585 - protein, 15 aa, Homo Sapiens
VLAIIAIEGDCAPEE

SEQ ID NO: 48586 - protein, 15 aa, Homo Sapiens
LAIIAIEGDCAPEEK

SEQ ID NO: 48587 - protein, 15 aa, Homo Sapiens
AIIAIEGDCAPEEKI

SEQ ID NO: 48588 - protein, 15 aa, Homo Sapiens
IIAIEGDCAPEEKIW

SEQ ID NO: 48589 - protein, 15 aa, Homo Sapiens
IAIEGDCAPEEKIWE

SEQ ID NO: 48590 - protein, 15 aa, Homo Sapiens
AIEGDCAPEEKIWEE

SEQ ID NO: 48591 - protein, 15 aa, Homo Sapiens
IEGDCAPEEKIWEEL

SEQ ID NO: 48592 - protein, 15 aa, Homo Sapiens
EGDCAPEEKIWEELS

SEQ ID NO: 48593 - protein, 15 aa, Homo Sapiens
GDCAPEEKIWEELSM

SEQ ID NO: 48594 - protein, 15 aa, Homo Sapiens
DCAPEEKIWEELSML

SEQ ID NO: 48595 - protein, 15 aa, Homo Sapiens
CAPEEKIWEELSMLE

SEQ ID NO: 48596 - protein, 15 aa, Homo Sapiens
APEEKIWEELSMLEV

SEQ ID NO: 48597 - protein, 15 aa, Homo Sapiens
PEEKIWEELSMLEVF

SEQ ID NO: 48598 - protein, 15 aa, Homo Sapiens
EEKIWEELSMLEVFE

SEQ ID NO: 48599 - protein, 15 aa, Homo Sapiens
EKIWEELSMLEVFEG

SEQ ID NO: 48600 - protein, 15 aa, Homo Sapiens
KIWEELSMLEVFEGR

SEQ ID NO: 48601 - protein, 15 aa, Homo Sapiens
IWEELSMLEVFEGRE

SEQ ID NO: 48602 - protein, 15 aa, Homo Sapiens
WEELSMLEVFEGRED

SEQ ID NO: 48603 - protein, 15 aa, Homo Sapiens
EELSMLEVFEGREDS

SEQ ID NO: 48604 - protein, 15 aa, Homo Sapiens
ELSMLEVFEGREDSV

SEQ ID NO: 48605 - protein, 15 aa, Homo Sapiens
LSMLEVFEGREDSVF

SEQ ID NO: 48606 - protein, 15 aa, Homo Sapiens
SMLEVFEGREDSVFA

SEQ ID NO: 48607 - protein, 15 aa, Homo Sapiens
MLEVFEGREDSVFAH

SEQ ID NO: 48608 - protein, 15 aa, Homo Sapiens
LEVFEGREDSVFAHP

SEQ ID NO: 48609 - protein, 15 aa, Homo Sapiens
EVFEGREDSVFAHPR

SEQ ID NO: 48610 - protein, 15 aa, Homo Sapiens
VFEGREDSVFAHPRK

SEQ ID NO: 48611 - protein, 15 aa, Homo Sapiens
FEGREDSVFAHPRKL

SEQ ID NO: 48612 - protein, 15 aa, Homo Sapiens
EGREDSVFAHPRKLL

SEQ ID NO: 48613 - protein, 15 aa, Homo Sapiens
GREDSVFAHPRKLLM

SEQ ID NO: 48614 - protein, 15 aa, Homo Sapiens
REDSVFAHPRKLLMQ

SEQ ID NO: 48615 - protein, 15 aa, Homo Sapiens
EDSVFAHPRKLLMQD

SEQ ID NO: 48616 - protein, 15 aa, Homo Sapiens
DSVFAHPRKLLMQDL

SEQ ID NO: 48617 - protein, 15 aa, Homo Sapiens
SVFAHPRKLLMQDLV

SEQ ID NO: 48618 - protein, 15 aa, Homo Sapiens
VFAHPRKLLMQDLVQ

SEQ ID NO: 48619 - protein, 15 aa, Homo Sapiens
FAHPRKLLMQDLVQE

SEQ ID NO: 48620 - protein, 15 aa, Homo Sapiens
AHPRKLLMQDLVQEN

SEQ ID NO: 48621 - protein, 15 aa, Homo Sapiens
HPRKLLMQDLVQENY

SEQ ID NO: 48622 - protein, 15 aa, Homo Sapiens
PRKLLMQDLVQENYL

SEQ ID NO: 48623 - protein, 15 aa, Homo Sapiens
RKLLMQDLVQENYLE

SEQ ID NO: 48624 - protein, 15 aa, Homo Sapiens
KLLMQDLVQENYLEY

SEQ ID NO: 48625 - protein, 15 aa, Homo Sapiens
LLMQDLVQENYLEYR

SEQ ID NO: 48626 - protein, 15 aa, Homo Sapiens
LMQDLVQENYLEYRQ

SEQ ID NO: 48627 - protein, 15 aa, Homo Sapiens
MQDLVQENYLEYRQV

SEQ ID NO: 48628 - protein, 15 aa, Homo Sapiens
QDLVQENYLEYRQVP

SEQ ID NO: 48629 - protein, 15 aa, Homo Sapiens
DLVQENYLEYRQVPG

SEQ ID NO: 48630 - protein, 15 aa, Homo Sapiens
LVQENYLEYRQVPGS

SEQ ID NO: 48631 - protein, 15 aa, Homo Sapiens
VQENYLEYRQVPGSD

SEQ ID NO: 48632 - protein, 15 aa, Homo Sapiens
QENYLEYRQVPGSDP

SEQ ID NO: 48633 - protein, 15 aa, Homo Sapiens
ENYLEYRQVPGSDPA

SEQ ID NO: 48634 - protein, 15 aa, Homo Sapiens
NYLEYRQVPGSDPAC

SEQ ID NO: 48635 - protein, 15 aa, Homo Sapiens
YLEYRQVPGSDPACY

SEQ ID NO: 48636 - protein, 15 aa, Homo Sapiens
LEYRQVPGSDPACYE

SEQ ID NO: 48637 - protein, 15 aa, Homo Sapiens
EYRQVPGSDPACYEF

SEQ ID NO: 48638 - protein, 15 aa, Homo Sapiens
YRQVPGSDPACYEFL

SEQ ID NO: 48639 - protein, 15 aa, Homo Sapiens
RQVPGSDPACYEFLW

SEQ ID NO: 48640 - protein, 15 aa, Homo Sapiens
QVPGSDPACYEFLWG

SEQ ID NO: 48641 - protein, 15 aa, Homo Sapiens
VPGSDPACYEFLWGP

SEQ ID NO: 48642 - protein, 15 aa, Homo Sapiens
PGSDPACYEFLWGPR

SEQ ID NO: 48643 - protein, 15 aa, Homo Sapiens
GSDPACYEFLWGPRA

SEQ ID NO: 48644 - protein, 15 aa, Homo Sapiens
SDPACYEFLWGPRAL

SEQ ID NO: 48645 - protein, 15 aa, Homo Sapiens
DPACYEFLWGPRALI

SEQ ID NO: 48646 - protein, 15 aa, Homo Sapiens
PACYEFLWGPRALIE

SEQ ID NO: 48647 - protein, 15 aa, Homo Sapiens
ACYEFLWGPRALIET

SEQ ID NO: 48648 - protein, 15 aa, Homo Sapiens
CYEFLWGPRALIETS

SEQ ID NO: 48649 - protein, 15 aa, Homo Sapiens
YEFLWGPRALIETSY

SEQ ID NO: 48650 - protein, 15 aa, Homo Sapiens
EFLWGPRALIETSYV

SEQ ID NO: 48651 - protein, 15 aa, Homo Sapiens
FLWGPRALIETSYVK

SEQ ID NO: 48652 - protein, 15 aa, Homo Sapiens
LWGPRALIETSYVKV

SEQ ID NO: 48653 - protein, 15 aa, Homo Sapiens
WGPRALIETSYVKVL

SEQ ID NO: 48654 - protein, 15 aa, Homo Sapiens
GPRALIETSYVKVLH

SEQ ID NO: 48655 - protein, 15 aa, Homo Sapiens
PRALIETSYVKVLHH

SEQ ID NO: 48656 - protein, 15 aa, Homo Sapiens
RALIETSYVKVLHHT

SEQ ID NO: 48657 - protein, 15 aa, Homo Sapiens
ALIETSYVKVLHHTL

SEQ ID NO: 48658 - protein, 15 aa, Homo Sapiens
LIETSYVKVLHHTLK

SEQ ID NO: 48659 - protein, 15 aa, Homo Sapiens
IETSYVKVLHHTLKI

SEQ ID NO: 48660 - protein, 15 aa, Homo Sapiens
ETSYVKVLHHTLKIG

SEQ ID NO: 48661 - protein, 15 aa, Homo Sapiens
TSYVKVLHHTLKIGG

SEQ ID NO: 48662 - protein, 15 aa, Homo Sapiens
SYVKVLHHTLKIGGE

SEQ ID NO: 48663 - protein, 15 aa, Homo Sapiens
YVKVLHHTLKIGGEP

SEQ ID NO: 48664 - protein, 15 aa, Homo Sapiens
VKVLHHTLKIGGEPH

SEQ ID NO: 48665 - protein, 15 aa, Homo Sapiens
KVLHHTLKIGGEPHI

SEQ ID NO: 48666 - protein, 15 aa, Homo Sapiens
VLHHTLKIGGEPHIS

SEQ ID NO: 48667 - protein, 15 aa, Homo Sapiens
LHHTLKIGGEPHISY

SEQ ID NO: 48668 - protein, 15 aa, Homo Sapiens
HHTLKIGGEPHISYP

SEQ ID NO: 48669 - protein, 15 aa, Homo Sapiens
HTLKIGGEPHISYPP

SEQ ID NO: 48670 - protein, 15 aa, Homo Sapiens
TLKIGGEPHISYPPL

SEQ ID NO: 48671 - protein, 15 aa, Homo Sapiens
LKIGGEPHISYPPLH

SEQ ID NO: 48672 - protein, 15 aa, Homo Sapiens
KIGGEPHISYPPLHE

SEQ ID NO: 48673 - protein, 15 aa, Homo Sapiens
IGGEPHISYPPLHER

SEQ ID NO: 48674 - protein, 15 aa, Homo Sapiens
GGEPHISYPPLHERA

SEQ ID NO: 48675 - protein, 15 aa, Homo Sapiens
GEPHISYPPLHERAL

SEQ ID NO: 48676 - protein, 15 aa, Homo Sapiens
EPHISYPPLHERALR

SEQ ID NO: 48677 - protein, 15 aa, Homo Sapiens
PHISYPPLHERALRE

SEQ ID NO: 48678 - protein, 15 aa, Homo Sapiens
HISYPPLHERALREG

SEQ ID NO: 48679 - protein, 15 aa, Homo Sapiens
ISYPPLHERALREGE

SEQ ID NO: 48680 - protein, 15 aa, Homo Sapiens
SYPPLHERALREGEE

SEQ ID NO: 48681 - protein, 16 aa, Homo Sapiens
MPLEQRSQHCKPEEGL

SEQ ID NO: 48682 - protein, 16 aa, Homo Sapiens
PLEQRSQHCKPEEGLE

SEQ ID NO: 48683 - protein, 16 aa, Homo Sapiens
LEQRSQHCKPEEGLEA

SEQ ID NO: 48684 - protein, 16 aa, Homo Sapiens
EQRSQHCKPEEGLEAR

SEQ ID NO: 48685 - protein, 16 aa, Homo Sapiens
QRSQHCKPEEGLEARG

SEQ ID NO: 48686 - protein, 16 aa, Homo Sapiens
RSQHCKPEEGLEARGE

SEQ ID NO: 48687 - protein, 16 aa, Homo Sapiens
SQHCKPEEGLEARGEA

SEQ ID NO: 48688 - protein, 16 aa, Homo Sapiens
QHCKPEEGLEARGEAL

SEQ ID NO: 48689 - protein, 16 aa, Homo Sapiens
HCKPEEGLEARGEALG

SEQ ID NO: 48690 - protein, 16 aa, Homo Sapiens
CKPEEGLEARGEALGL

SEQ ID NO: 48691 - protein, 16 aa, Homo Sapiens
KPEEGLEARGEALGLV

SEQ ID NO: 48692 - protein, 16 aa, Homo Sapiens
PEEGLEARGEALGLVG

SEQ ID NO: 48693 - protein, 16 aa, Homo Sapiens
EEGLEARGEALGLVGA

SEQ ID NO: 48694 - protein, 16 aa, Homo Sapiens
EGLEARGEALGLVGAQ

SEQ ID NO: 48695 - protein, 16 aa, Homo Sapiens
GLEARGEALGLVGAQA

SEQ ID NO: 48696 - protein, 16 aa, Homo Sapiens
LEARGEALGLVGAQAP

SEQ ID NO: 48697 - protein, 16 aa, Homo Sapiens
EARGEALGLVGAQAPA

SEQ ID NO: 48698 - protein, 16 aa, Homo Sapiens
ARGEALGLVGAQAPAT

SEQ ID NO: 48699 - protein, 16 aa, Homo Sapiens
RGEALGLVGAQAPATE

SEQ ID NO: 48700 - protein, 16 aa, Homo Sapiens
GEALGLVGAQAPATEE

SEQ ID NO: 48701 - protein, 16 aa, Homo Sapiens
EALGLVGAQAPATEEQ

SEQ ID NO: 48702 - protein, 16 aa, Homo Sapiens
ALGLVGAQAPATEEQQ

SEQ ID NO: 48703 - protein, 16 aa, Homo Sapiens
LGLVGAQAPATEEQQT

SEQ ID NO: 48704 - protein, 16 aa, Homo Sapiens
GLVGAQAPATEEQQTA

SEQ ID NO: 48705 - protein, 16 aa, Homo Sapiens
LVGAQAPATEEQQTAS

SEQ ID NO: 48706 - protein, 16 aa, Homo Sapiens
VGAQAPATEEQQTASS

SEQ ID NO: 48707 - protein, 16 aa, Homo Sapiens
GAQAPATEEQQTASSS

SEQ ID NO: 48708 - protein, 16 aa, Homo Sapiens
AQAPATEEQQTASSSS

SEQ ID NO: 48709 - protein, 16 aa, Homo Sapiens
QAPATEEQQTASSSST

SEQ ID NO: 48710 - protein, 16 aa, Homo Sapiens
APATEEQQTASSSSTL

SEQ ID NO: 48711 - protein, 16 aa, Homo Sapiens
PATEEQQTASSSSTLV

SEQ ID NO: 48712 - protein, 16 aa, Homo Sapiens
ATEEQQTASSSSTLVE

SEQ ID NO: 48713 - protein, 16 aa, Homo Sapiens
TEEQQTASSSSTLVEV

SEQ ID NO: 48714 - protein, 16 aa, Homo Sapiens
EEQQTASSSSTLVEVT

SEQ ID NO: 48715 - protein, 16 aa, Homo Sapiens
EQQTASSSSTLVEVTL

SEQ ID NO: 48716 - protein, 16 aa, Homo Sapiens
QQTASSSSTLVEVTLG

SEQ ID NO: 48717 - protein, 16 aa, Homo Sapiens
QTASSSSTLVEVTLGE

SEQ ID NO: 48718 - protein, 16 aa, Homo Sapiens
TASSSSTLVEVTLGEV

SEQ ID NO: 48719 - protein, 16 aa, Homo Sapiens
ASSSSTLVEVTLGEVP

SEQ ID NO: 48720 - protein, 16 aa, Homo Sapiens
SSSSTLVEVTLGEVPA

SEQ ID NO: 48721 - protein, 16 aa, Homo Sapiens
SSSTLVEVTLGEVPAA

SEQ ID NO: 48722 - protein, 16 aa, Homo Sapiens
SSTLVEVTLGEVPAAD

SEQ ID NO: 48723 - protein, 16 aa, Homo Sapiens
STLVEVTLGEVPAADS

SEQ ID NO: 48724 - protein, 16 aa, Homo Sapiens
TLVEVTLGEVPAADSP

SEQ ID NO: 48725 - protein, 16 aa, Homo Sapiens
LVEVTLGEVPAADSPS

SEQ ID NO: 48726 - protein, 16 aa, Homo Sapiens
VEVTLGEVPAADSPSP

SEQ ID NO: 48727 - protein, 16 aa, Homo Sapiens
EVTLGEVPAADSPSPP

SEQ ID NO: 48728 - protein, 16 aa, Homo Sapiens
VTLGEVPAADSPSPPH

SEQ ID NO: 48729 - protein, 16 aa, Homo Sapiens
TLGEVPAADSPSPPHS

SEQ ID NO: 48730 - protein, 16 aa, Homo Sapiens
LGEVPAADSPSPPHSP

SEQ ID NO: 48731 - protein, 16 aa, Homo Sapiens
GEVPAADSPSPPHSPQ

SEQ ID NO: 48732 - protein, 16 aa, Homo Sapiens
EVPAADSPSPPHSPQG

SEQ ID NO: 48733 - protein, 16 aa, Homo Sapiens
VPAADSPSPPHSPQGA

SEQ ID NO: 48734 - protein, 16 aa, Homo Sapiens
PAADSPSPPHSPQGAS

SEQ ID NO: 48735 - protein, 16 aa, Homo Sapiens
AADSPSPPHSPQGASS

SEQ ID NO: 48736 - protein, 16 aa, Homo Sapiens
ADSPSPPHSPQGASSF

SEQ ID NO: 48737 - protein, 16 aa, Homo Sapiens
DSPSPPHSPQGASSFS

SEQ ID NO: 48738 - protein, 16 aa, Homo Sapiens
SPSPPHSPQGASSFST

SEQ ID NO: 48739 - protein, 16 aa, Homo Sapiens
PSPPHSPQGASSFSTT

SEQ ID NO: 48740 - protein, 16 aa, Homo Sapiens
SPPHSPQGASSFSTTI

SEQ ID NO: 48741 - protein, 16 aa, Homo Sapiens
PPHSPQGASSFSTTIN

SEQ ID NO: 48742 - protein, 16 aa, Homo Sapiens
PHSPQGASSFSTTINY

SEQ ID NO: 48743 - protein, 16 aa, Homo Sapiens
HSPQGASSFSTTINYT

SEQ ID NO: 48744 - protein, 16 aa, Homo Sapiens
SPQGASSFSTTINYTL

SEQ ID NO: 48745 - protein, 16 aa, Homo Sapiens
PQGASSFSTTINYTLW

SEQ ID NO: 48746 - protein, 16 aa, Homo Sapiens
QGASSFSTTINYTLWR

SEQ ID NO: 48747 - protein, 16 aa, Homo Sapiens
GASSFSTTINYTLWRQ

SEQ ID NO: 48748 - protein, 16 aa, Homo Sapiens
ASSFSTTINYTLWRQS

SEQ ID NO: 48749 - protein, 16 aa, Homo Sapiens
SSFSTTINYTLWRQSD

SEQ ID NO: 48750 - protein, 16 aa, Homo Sapiens
SFSTTINYTLWRQSDE

SEQ ID NO: 48751 - protein, 16 aa, Homo Sapiens
FSTTINYTLWRQSDEG

SEQ ID NO: 48752 - protein, 16 aa, Homo Sapiens
STTINYTLWRQSDEGS

SEQ ID NO: 48753 - protein, 16 aa, Homo Sapiens
TTINYTLWRQSDEGSS

SEQ ID NO: 48754 - protein, 16 aa, Homo Sapiens
TINYTLWRQSDEGSSN

SEQ ID NO: 48755 - protein, 16 aa, Homo Sapiens
INYTLWRQSDEGSSNQ

SEQ ID NO: 48756 - protein, 16 aa, Homo Sapiens
NYTLWRQSDEGSSNQE

SEQ ID NO: 48757 - protein, 16 aa, Homo Sapiens
YTLWRQSDEGSSNQEE

SEQ ID NO: 48758 - protein, 16 aa, Homo Sapiens
TLWRQSDEGSSNQEEE

SEQ ID NO: 48759 - protein, 16 aa, Homo Sapiens
LWRQSDEGSSNQEEEG

SEQ ID NO: 48760 - protein, 16 aa, Homo Sapiens
WRQSDEGSSNQEEEGP

SEQ ID NO: 48761 - protein, 16 aa, Homo Sapiens
RQSDEGSSNQEEEGPR

SEQ ID NO: 48762 - protein, 16 aa, Homo Sapiens
QSDEGSSNQEEEGPRM

SEQ ID NO: 48763 - protein, 16 aa, Homo Sapiens
SDEGSSNQEEEGPRMF

SEQ ID NO: 48764 - protein, 16 aa, Homo Sapiens
DEGSSNQEEEGPRMFP

SEQ ID NO: 48765 - protein, 16 aa, Homo Sapiens
EGSSNQEEEGPRMFPD

SEQ ID NO: 48766 - protein, 16 aa, Homo Sapiens
GSSNQEEEGPRMFPDL

SEQ ID NO: 48767 - protein, 16 aa, Homo Sapiens
SSNQEEEGPRMFPDLE

SEQ ID NO: 48768 - protein, 16 aa, Homo Sapiens
SNQEEEGPRMFPDLES

SEQ ID NO: 48769 - protein, 16 aa, Homo Sapiens
NQEEEGPRMFPDLESE

SEQ ID NO: 48770 - protein, 16 aa, Homo Sapiens
QEEEGPRMFPDLESEF

SEQ ID NO: 48771 - protein, 16 aa, Homo Sapiens
EEEGPRMFPDLESEFQ

SEQ ID NO: 48772 - protein, 16 aa, Homo Sapiens
EEGPRMFPDLESEFQA

SEQ ID NO: 48773 - protein, 16 aa, Homo Sapiens
EGPRMFPDLESEFQAA

SEQ ID NO: 48774 - protein, 16 aa, Homo Sapiens
GPRMFPDLESEFQAAI

SEQ ID NO: 48775 - protein, 16 aa, Homo Sapiens
PRMFPDLESEFQAAIS

SEQ ID NO: 48776 - protein, 16 aa, Homo Sapiens
RMFPDLESEFQAAISR

SEQ ID NO: 48777 - protein, 16 aa, Homo Sapiens
MFPDLESEFQAAISRK

SEQ ID NO: 48778 - protein, 16 aa, Homo Sapiens
FPDLESEFQAAISRKM

SEQ ID NO: 48779 - protein, 16 aa, Homo Sapiens
PDLESEFQAAISRKMV

SEQ ID NO: 48780 - protein, 16 aa, Homo Sapiens
DLESEFQAAISRKMVE

SEQ ID NO: 48781 - protein, 16 aa, Homo Sapiens
LESEFQAAISRKMVEL

SEQ ID NO: 48782 - protein, 16 aa, Homo Sapiens
ESEFQAAISRKMVELV

SEQ ID NO: 48783 - protein, 16 aa, Homo Sapiens
SEFQAAISRKMVELVH

SEQ ID NO: 48784 - protein, 16 aa, Homo Sapiens
EFQAAISRKMVELVHF

SEQ ID NO: 48785 - protein, 16 aa, Homo Sapiens
FQAAISRKMVELVHFL

SEQ ID NO: 48786 - protein, 16 aa, Homo Sapiens
QAAISRKMVELVHFLL

SEQ ID NO: 48787 - protein, 16 aa, Homo Sapiens
AAISRKMVELVHFLLL

SEQ ID NO: 48788 - protein, 16 aa, Homo Sapiens
AISRKMVELVHFLLLK

SEQ ID NO: 48789 - protein, 16 aa, Homo Sapiens
ISRKMVELVHFLLLKY

SEQ ID NO: 48790 - protein, 16 aa, Homo Sapiens
SRKMVELVHFLLLKYR

SEQ ID NO: 48791 - protein, 16 aa, Homo Sapiens
RKMVELVHFLLLKYRA

SEQ ID NO: 48792 - protein, 16 aa, Homo Sapiens
KMVELVHFLLLKYRAR

SEQ ID NO: 48793 - protein, 16 aa, Homo Sapiens
MVELVHFLLLKYRARE

SEQ ID NO: 48794 - protein, 16 aa, Homo Sapiens
VELVHFLLLKYRAREP

SEQ ID NO: 48795 - protein, 16 aa, Homo Sapiens
ELVHFLLLKYRAREPV

SEQ ID NO: 48796 - protein, 16 aa, Homo Sapiens
LVHFLLLKYRAREPVT

SEQ ID NO: 48797 - protein, 16 aa, Homo Sapiens
VHFLLLKYRAREPVTK

SEQ ID NO: 48798 - protein, 16 aa, Homo Sapiens
HFLLLKYRAREPVTKA

SEQ ID NO: 48799 - protein, 16 aa, Homo Sapiens
FLLLKYRAREPVTKAE

SEQ ID NO: 48800 - protein, 16 aa, Homo Sapiens
LLLKYRAREPVTKAEM

SEQ ID NO: 48801 - protein, 16 aa, Homo Sapiens
LLKYRAREPVTKAEML

SEQ ID NO: 48802 - protein, 16 aa, Homo Sapiens
LKYRAREPVTKAEMLE

SEQ ID NO: 48803 - protein, 16 aa, Homo Sapiens
KYRAREPVTKAEMLES

SEQ ID NO: 48804 - protein, 16 aa, Homo Sapiens
YRAREPVTKAEMLESV

SEQ ID NO: 48805 - protein, 16 aa, Homo Sapiens
RAREPVTKAEMLESVL

SEQ ID NO: 48806 - protein, 16 aa, Homo Sapiens
AREPVTKAEMLESVLR

SEQ ID NO: 48807 - protein, 16 aa, Homo Sapiens
REPVTKAEMLESVLRN

SEQ ID NO: 48808 - protein, 16 aa, Homo Sapiens
EPVTKAEMLESVLRNC

SEQ ID NO: 48809 - protein, 16 aa, Homo Sapiens
PVTKAEMLESVLRNCQ

SEQ ID NO: 48810 - protein, 16 aa, Homo Sapiens
VTKAEMLESVLRNCQD

SEQ ID NO: 48811 - protein, 16 aa, Homo Sapiens
TKAEMLESVLRNCQDF

SEQ ID NO: 48812 - protein, 16 aa, Homo Sapiens
KAEMLESVLRNCQDFF

SEQ ID NO: 48813 - protein, 16 aa, Homo Sapiens
AEMLESVLRNCQDFFP

SEQ ID NO: 48814 - protein, 16 aa, Homo Sapiens
EMLESVLRNCQDFFPV

SEQ ID NO: 48815 - protein, 16 aa, Homo Sapiens
MLESVLRNCQDFFPVI

SEQ ID NO: 48816 - protein, 16 aa, Homo Sapiens
LESVLRNCQDFFPVIF

SEQ ID NO: 48817 - protein, 16 aa, Homo Sapiens
ESVLRNCQDFFPVIFS

SEQ ID NO: 48818 - protein, 16 aa, Homo Sapiens
SVLRNCQDFFPVIFSK

SEQ ID NO: 48819 - protein, 16 aa, Homo Sapiens
VLRNCQDFFPVIFSKA

SEQ ID NO: 48820 - protein, 16 aa, Homo Sapiens
LRNCQDFFPVIFSKAS

SEQ ID NO: 48821 - protein, 16 aa, Homo Sapiens
RNCQDFFPVIFSKASE

SEQ ID NO: 48822 - protein, 16 aa, Homo Sapiens
NCQDFFPVIFSKASEY

SEQ ID NO: 48823 - protein, 16 aa, Homo Sapiens
CQDFFPVIFSKASEYL

SEQ ID NO: 48824 - protein, 16 aa, Homo Sapiens
QDFFPVIFSKASEYLQ

SEQ ID NO: 48825 - protein, 16 aa, Homo Sapiens
DFFPVIFSKASEYLQL

SEQ ID NO: 48826 - protein, 16 aa, Homo Sapiens
FFPVIFSKASEYLQLV

SEQ ID NO: 48827 - protein, 16 aa, Homo Sapiens
FPVIFSKASEYLQLVF

SEQ ID NO: 48828 - protein, 16 aa, Homo Sapiens
PVIFSKASEYLQLVFG

SEQ ID NO: 48829 - protein, 16 aa, Homo Sapiens
VIFSKASEYLQLVFGI

SEQ ID NO: 48830 - protein, 16 aa, Homo Sapiens
IFSKASEYLQLVFGIE

SEQ ID NO: 48831 - protein, 16 aa, Homo Sapiens
FSKASEYLQLVFGIEV

SEQ ID NO: 48832 - protein, 16 aa, Homo Sapiens
SKASEYLQLVFGIEVV

SEQ ID NO: 48833 - protein, 16 aa, Homo Sapiens
KASEYLQLVFGIEVVE

SEQ ID NO: 48834 - protein, 16 aa, Homo Sapiens
ASEYLQLVFGIEVVEV

SEQ ID NO: 48835 - protein, 16 aa, Homo Sapiens
SEYLQLVFGIEVVEVV

SEQ ID NO: 48836 - protein, 16 aa, Homo Sapiens
EYLQLVFGIEVVEVVP

SEQ ID NO: 48837 - protein, 16 aa, Homo Sapiens
YLQLVFGIEVVEVVPI

SEQ ID NO: 48838 - protein, 16 aa, Homo Sapiens
LQLVFGIEVVEVVPIS

SEQ ID NO: 48839 - protein, 16 aa, Homo Sapiens
QLVFGIEVVEVVPISH

SEQ ID NO: 48840 - protein, 16 aa, Homo Sapiens
LVFGIEVVEVVPISHL

SEQ ID NO: 48841 - protein, 16 aa, Homo Sapiens
VFGIEVVEVVPISHLY

SEQ ID NO: 48842 - protein, 16 aa, Homo Sapiens
FGIEVVEVVPISHLYI

SEQ ID NO: 48843 - protein, 16 aa, Homo Sapiens
GIEVVEVVPISHLYIL

SEQ ID NO: 48844 - protein, 16 aa, Homo Sapiens
IEVVEVVPISHLYILV

SEQ ID NO: 48845 - protein, 16 aa, Homo Sapiens
EVVEVVPISHLYILVT

SEQ ID NO: 48846 - protein, 16 aa, Homo Sapiens
VVEVVPISHLYILVTC

SEQ ID NO: 48847 - protein, 16 aa, Homo Sapiens
VEVVPISHLYILVTCL

SEQ ID NO: 48848 - protein, 16 aa, Homo Sapiens
EVVPISHLYILVTCLG

SEQ ID NO: 48849 - protein, 16 aa, Homo Sapiens
VVPISHLYILVTCLGL

SEQ ID NO: 48850 - protein, 16 aa, Homo Sapiens
VPISHLYILVTCLGLS

SEQ ID NO: 48851 - protein, 16 aa, Homo Sapiens
PISHLYILVTCLGLSY

SEQ ID NO: 48852 - protein, 16 aa, Homo Sapiens
ISHLYILVTCLGLSYD

SEQ ID NO: 48853 - protein, 16 aa, Homo Sapiens
SHLYILVTCLGLSYDG

SEQ ID NO: 48854 - protein, 16 aa, Homo Sapiens
HLYILVTCLGLSYDGL

SEQ ID NO: 48855 - protein, 16 aa, Homo Sapiens
LYILVTCLGLSYDGLL

SEQ ID NO: 48856 - protein, 16 aa, Homo Sapiens
YILVTCLGLSYDGLLG

SEQ ID NO: 48857 - protein, 16 aa, Homo Sapiens
ILVTCLGLSYDGLLGD

SEQ ID NO: 48858 - protein, 16 aa, Homo Sapiens
LVTCLGLSYDGLLGDN

SEQ ID NO: 48859 - protein, 16 aa, Homo Sapiens
VTCLGLSYDGLLGDNQ

SEQ ID NO: 48860 - protein, 16 aa, Homo Sapiens
TCLGLSYDGLLGDNQV

SEQ ID NO: 48861 - protein, 16 aa, Homo Sapiens
CLGLSYDGLLGDNQVM

SEQ ID NO: 48862 - protein, 16 aa, Homo Sapiens
LGLSYDGLLGDNQVMP

SEQ ID NO: 48863 - protein, 16 aa, Homo Sapiens
GLSYDGLLGDNQVMPK

SEQ ID NO: 48864 - protein, 16 aa, Homo Sapiens
LSYDGLLGDNQVMPKT

SEQ ID NO: 48865 - protein, 16 aa, Homo Sapiens
SYDGLLGDNQVMPKTG

SEQ ID NO: 48866 - protein, 16 aa, Homo Sapiens
YDGLLGDNQVMPKTGL

SEQ ID NO: 48867 - protein, 16 aa, Homo Sapiens
DGLLGDNQVMPKTGLL

SEQ ID NO: 48868 - protein, 16 aa, Homo Sapiens
GLLGDNQVMPKTGLLI

SEQ ID NO: 48869 - protein, 16 aa, Homo Sapiens
LLGDNQVMPKTGLLII

SEQ ID NO: 48870 - protein, 16 aa, Homo Sapiens
LGDNQVMPKTGLLIIV

SEQ ID NO: 48871 - protein, 16 aa, Homo Sapiens
GDNQVMPKTGLLIIVL

SEQ ID NO: 48872 - protein, 16 aa, Homo Sapiens
DNQVMPKTGLLIIVLA

SEQ ID NO: 48873 - protein, 16 aa, Homo Sapiens
NQVMPKTGLLIIVLAI

SEQ ID NO: 48874 - protein, 16 aa, Homo Sapiens
QVMPKTGLLIIVLAII

SEQ ID NO: 48875 - protein, 16 aa, Homo Sapiens
VMPKTGLLIIVLAIIA

SEQ ID NO: 48876 - protein, 16 aa, Homo Sapiens
MPKTGLLIIVLAIIAI

SEQ ID NO: 48877 - protein, 16 aa, Homo Sapiens
PKTGLLIIVLAIIAIE

SEQ ID NO: 48878 - protein, 16 aa, Homo Sapiens
KTGLLIIVLAIIAIEG

SEQ ID NO: 48879 - protein, 16 aa, Homo Sapiens
TGLLIIVLAIIAIEGD

SEQ ID NO: 48880 - protein, 16 aa, Homo Sapiens
GLLIIVLAIIAIEGDC

SEQ ID NO: 48881 - protein, 16 aa, Homo Sapiens
LLIIVLAIIAIEGDCA

SEQ ID NO: 48882 - protein, 16 aa, Homo Sapiens
LIIVLAIIAIEGDCAP

SEQ ID NO: 48883 - protein, 16 aa, Homo Sapiens
IIVLAIIAIEGDCAPE

SEQ ID NO: 48884 - protein, 16 aa, Homo Sapiens
IVLAIIAIEGDCAPEE

SEQ ID NO: 48885 - protein, 16 aa, Homo Sapiens
VLAIIAIEGDCAPEEK

SEQ ID NO: 48886 - protein, 16 aa, Homo Sapiens
LAIIAIEGDCAPEEKI

SEQ ID NO: 48887 - protein, 16 aa, Homo Sapiens
AIIAIEGDCAPEEKIW

SEQ ID NO: 48888 - protein, 16 aa, Homo Sapiens
IIAIEGDCAPEEKIWE

SEQ ID NO: 48889 - protein, 16 aa, Homo Sapiens
IAIEGDCAPEEKIWEE

SEQ ID NO: 48890 - protein, 16 aa, Homo Sapiens
AIEGDCAPEEKIWEEL

SEQ ID NO: 48891 - protein, 16 aa, Homo Sapiens
IEGDCAPEEKIWEELS

SEQ ID NO: 48892 - protein, 16 aa, Homo Sapiens
EGDCAPEEKIWEELSM

SEQ ID NO: 48893 - protein, 16 aa, Homo Sapiens
GDCAPEEKIWEELSML

SEQ ID NO: 48894 - protein, 16 aa, Homo Sapiens
DCAPEEKIWEELSMLE

SEQ ID NO: 48895 - protein, 16 aa, Homo Sapiens
CAPEEKIWEELSMLEV

SEQ ID NO: 48896 - protein, 16 aa, Homo Sapiens
APEEKIWEELSMLEVF

SEQ ID NO: 48897 - protein, 16 aa, Homo Sapiens
PEEKIWEELSMLEVFE

SEQ ID NO: 48898 - protein, 16 aa, Homo Sapiens
EEKIWEELSMLEVFEG

SEQ ID NO: 48899 - protein, 16 aa, Homo Sapiens
EKIWEELSMLEVFEGR

SEQ ID NO: 48900 - protein, 16 aa, Homo Sapiens
KIWEELSMLEVFEGRE

SEQ ID NO: 48901 - protein, 16 aa, Homo Sapiens
IWEELSMLEVFEGRED

SEQ ID NO: 48902 - protein, 16 aa, Homo Sapiens
WEELSMLEVFEGREDS

SEQ ID NO: 48903 - protein, 16 aa, Homo Sapiens
EELSMLEVFEGREDSV

SEQ ID NO: 48904 - protein, 16 aa, Homo Sapiens
ELSMLEVFEGREDSVF

SEQ ID NO: 48905 - protein, 16 aa, Homo Sapiens
LSMLEVFEGREDSVFA

SEQ ID NO: 48906 - protein, 16 aa, Homo Sapiens
SMLEVFEGREDSVFAH

SEQ ID NO: 48907 - protein, 16 aa, Homo Sapiens
MLEVFEGREDSVFAHP

SEQ ID NO: 48908 - protein, 16 aa, Homo Sapiens
LEVFEGREDSVFAHPR

SEQ ID NO: 48909 - protein, 16 aa, Homo Sapiens
EVFEGREDSVFAHPRK

SEQ ID NO: 48910 - protein, 16 aa, Homo Sapiens
VFEGREDSVFAHPRKL

SEQ ID NO: 48911 - protein, 16 aa, Homo Sapiens
FEGREDSVFAHPRKLL

SEQ ID NO: 48912 - protein, 16 aa, Homo Sapiens
EGREDSVFAHPRKLLM

SEQ ID NO: 48913 - protein, 16 aa, Homo Sapiens
GREDSVFAHPRKLLMQ

SEQ ID NO: 48914 - protein, 16 aa, Homo Sapiens
REDSVFAHPRKLLMQD

SEQ ID NO: 48915 - protein, 16 aa, Homo Sapiens
EDSVFAHPRKLLMQDL

SEQ ID NO: 48916 - protein, 16 aa, Homo Sapiens
DSVFAHPRKLLMQDLV

SEQ ID NO: 48917 - protein, 16 aa, Homo Sapiens
SVFAHPRKLLMQDLVQ

SEQ ID NO: 48918 - protein, 16 aa, Homo Sapiens
VFAHPRKLLMQDLVQE

SEQ ID NO: 48919 - protein, 16 aa, Homo Sapiens
FAHPRKLLMQDLVQEN

SEQ ID NO: 48920 - protein, 16 aa, Homo Sapiens
AHPRKLLMQDLVQENY

SEQ ID NO: 48921 - protein, 16 aa, Homo Sapiens
HPRKLLMQDLVQENYL

SEQ ID NO: 48922 - protein, 16 aa, Homo Sapiens
PRKLLMQDLVQENYLE

SEQ ID NO: 48923 - protein, 16 aa, Homo Sapiens
RKLLMQDLVQENYLEY

SEQ ID NO: 48924 - protein, 16 aa, Homo Sapiens
KLLMQDLVQENYLEYR

SEQ ID NO: 48925 - protein, 16 aa, Homo Sapiens
LLMQDLVQENYLEYRQ

SEQ ID NO: 48926 - protein, 16 aa, Homo Sapiens
LMQDLVQENYLEYRQV

SEQ ID NO: 48927 - protein, 16 aa, Homo Sapiens
MQDLVQENYLEYRQVP

SEQ ID NO: 48928 - protein, 16 aa, Homo Sapiens
QDLVQENYLEYRQVPG

SEQ ID NO: 48929 - protein, 16 aa, Homo Sapiens
DLVQENYLEYRQVPGS

SEQ ID NO: 48930 - protein, 16 aa, Homo Sapiens
LVQENYLEYRQVPGSD

SEQ ID NO: 48931 - protein, 16 aa, Homo Sapiens
VQENYLEYRQVPGSDP

SEQ ID NO: 48932 - protein, 16 aa, Homo Sapiens
QENYLEYRQVPGSDPA

SEQ ID NO: 48933 - protein, 16 aa, Homo Sapiens
ENYLEYRQVPGSDPAC

SEQ ID NO: 48934 - protein, 16 aa, Homo Sapiens
NYLEYRQVPGSDPACY

SEQ ID NO: 48935 - protein, 16 aa, Homo Sapiens
YLEYRQVPGSDPACYE

SEQ ID NO: 48936 - protein, 16 aa, Homo Sapiens
LEYRQVPGSDPACYEF

SEQ ID NO: 48937 - protein, 16 aa, Homo Sapiens
EYRQVPGSDPACYEFL

SEQ ID NO: 48938 - protein, 16 aa, Homo Sapiens
YRQVPGSDPACYEFLW

SEQ ID NO: 48939 - protein, 16 aa, Homo Sapiens
RQVPGSDPACYEFLWG

SEQ ID NO: 48940 - protein, 16 aa, Homo Sapiens
QVPGSDPACYEFLWGP

SEQ ID NO: 48941 - protein, 16 aa, Homo Sapiens
VPGSDPACYEFLWGPR

SEQ ID NO: 48942 - protein, 16 aa, Homo Sapiens
PGSDPACYEFLWGPRA

SEQ ID NO: 48943 - protein, 16 aa, Homo Sapiens
GSDPACYEFLWGPRAL

SEQ ID NO: 48944 - protein, 16 aa, Homo Sapiens
SDPACYEFLWGPRALI

SEQ ID NO: 48945 - protein, 16 aa, Homo Sapiens
DPACYEFLWGPRALIE

SEQ ID NO: 48946 - protein, 16 aa, Homo Sapiens
PACYEFLWGPRALIET

SEQ ID NO: 48947 - protein, 16 aa, Homo Sapiens
ACYEFLWGPRALIETS

SEQ ID NO: 48948 - protein, 16 aa, Homo Sapiens
CYEFLWGPRALIETSY

SEQ ID NO: 48949 - protein, 16 aa, Homo Sapiens
YEFLWGPRALIETSYV

SEQ ID NO: 48950 - protein, 16 aa, Homo Sapiens
EFLWGPRALIETSYVK

SEQ ID NO: 48951 - protein, 16 aa, Homo Sapiens
FLWGPRALIETSYVKV

SEQ ID NO: 48952 - protein, 16 aa, Homo Sapiens
LWGPRALIETSYVKVL

SEQ ID NO: 48953 - protein, 16 aa, Homo Sapiens
WGPRALIETSYVKVLH

SEQ ID NO: 48954 - protein, 16 aa, Homo Sapiens
GPRALIETSYVKVLHH

SEQ ID NO: 48955 - protein, 16 aa, Homo Sapiens
PRALIETSYVKVLHHT

SEQ ID NO: 48956 - protein, 16 aa, Homo Sapiens
RALIETSYVKVLHHTL

SEQ ID NO: 48957 - protein, 16 aa, Homo Sapiens
ALIETSYVKVLHHTLK

SEQ ID NO: 48958 - protein, 16 aa, Homo Sapiens
LIETSYVKVLHHTLKI

SEQ ID NO: 48959 - protein, 16 aa, Homo Sapiens
IETSYVKVLHHTLKIG

SEQ ID NO: 48960 - protein, 16 aa, Homo Sapiens
ETSYVKVLHHTLKIGG

SEQ ID NO: 48961 - protein, 16 aa, Homo Sapiens
TSYVKVLHHTLKIGGE

SEQ ID NO: 48962 - protein, 16 aa, Homo Sapiens
SYVKVLHHTLKIGGEP

SEQ ID NO: 48963 - protein, 16 aa, Homo Sapiens
YVKVLHHTLKIGGEPH

SEQ ID NO: 48964 - protein, 16 aa, Homo Sapiens
VKVLHHTLKIGGEPHI

SEQ ID NO: 48965 - protein, 16 aa, Homo Sapiens
KVLHHTLKIGGEPHIS

SEQ ID NO: 48966 - protein, 16 aa, Homo Sapiens
VLHHTLKIGGEPHISY

SEQ ID NO: 48967 - protein, 16 aa, Homo Sapiens
LHHTLKIGGEPHISYP

SEQ ID NO: 48968 - protein, 16 aa, Homo Sapiens
HHTLKIGGEPHISYPP

SEQ ID NO: 48969 - protein, 16 aa, Homo Sapiens
HTLKIGGEPHISYPPL

SEQ ID NO: 48970 - protein, 16 aa, Homo Sapiens
TLKIGGEPHISYPPLH

SEQ ID NO: 48971 - protein, 16 aa, Homo Sapiens
LKIGGEPHISYPPLHE

SEQ ID NO: 48972 - protein, 16 aa, Homo Sapiens
KIGGEPHISYPPLHER

SEQ ID NO: 48973 - protein, 16 aa, Homo Sapiens
IGGEPHISYPPLHERA

SEQ ID NO: 48974 - protein, 16 aa, Homo Sapiens
GGEPHISYPPLHERAL

SEQ ID NO: 48975 - protein, 16 aa, Homo Sapiens
GEPHISYPPLHERALR

SEQ ID NO: 48976 - protein, 16 aa, Homo Sapiens
EPHISYPPLHERALRE

SEQ ID NO: 48977 - protein, 16 aa, Homo Sapiens
PHISYPPLHERALREG

SEQ ID NO: 48978 - protein, 16 aa, Homo Sapiens
HISYPPLHERALREGE

SEQ ID NO: 48979 - protein, 16 aa, Homo Sapiens
ISYPPLHERALREGEE

SEQ ID NO: 48980 - protein, 314 aa, Homo Sapiens
MPLEQRSQHCKPEEGLEARGEALGLVGAQAPATEEQEAASSSSTLVEVTLGEVPAAESPDPPQSPQGASSLPTTMNYPLWSQSYEDSSNQEEEGPSTFPDLESEFQAALSRKVAELVHFLLLKYRAREPVTKAEMLGSVVGNWQYFFPVIFSKASSSLQLVFGIELMEVDPIGHLYIFATCLGLSYDGLLGDNQIMPKAGLLIIVLAIIAREGDCAPEEKIWEELSVLEVFEGREDSILGDPKKLLTQHFVQENYLEYRQVPGSDPACYEFLWGPRALVETSYVKVLHHMVKISGGPHISYPPLHEWVLREGEE

SEQ ID NO: 48981 - protein, 8 aa, Homo Sapiens
EQRSQHCK

SEQ ID NO: 48982 - protein, 8 aa, Homo Sapiens
LEARGEAL

SEQ ID NO: 48983 - protein, 8 aa, Homo Sapiens
EALGLVGA

SEQ ID NO: 48984 - protein, 8 aa, Homo Sapiens
AQAPATEE

SEQ ID NO: 48985 - protein, 8 aa, Homo Sapiens
EAASSSST

SEQ ID NO: 48986 - protein, 8 aa, Homo Sapiens
AASSSSTL

SEQ ID NO: 48987 - protein, 8 aa, Homo Sapiens
ASSSSTLV

SEQ ID NO: 48988 - protein, 8 aa, Homo Sapiens
SSSTLVEV

SEQ ID NO: 48989 - protein, 8 aa, Homo Sapiens
STLVEVTL

SEQ ID NO: 48990 - protein, 8 aa, Homo Sapiens
VEVTLGEV

SEQ ID NO: 48991 - protein, 8 aa, Homo Sapiens
TLGEVPAA

SEQ ID NO: 48992 - protein, 8 aa, Homo Sapiens
SPQGASSL

SEQ ID NO: 48993 - protein, 8 aa, Homo Sapiens
SLPTTMNY

SEQ ID NO: 48994 - protein, 8 aa, Homo Sapiens
LPTTMNYP

SEQ ID NO: 48995 - protein, 8 aa, Homo Sapiens
TTMNYPLW

SEQ ID NO: 48996 - protein, 8 aa, Homo Sapiens
YPLWSQSY

SEQ ID NO: 48997 - protein, 8 aa, Homo Sapiens
EEEGPSTF

SEQ ID NO: 48998 - protein, 8 aa, Homo Sapiens
FPDLESEF

SEQ ID NO: 48999 - protein, 8 aa, Homo Sapiens
DLESEFQA

SEQ ID NO: 49000 - protein, 8 aa, Homo Sapiens
SEFQAALS

SEQ ID NO: 49001 - protein, 8 aa, Homo Sapiens
EFQAALSR

SEQ ID NO: 49002 - protein, 8 aa, Homo Sapiens
FQAALSRK

SEQ ID NO: 49003 - protein, 8 aa, Homo Sapiens
QAALSRKV

SEQ ID NO: 49004 - protein, 8 aa, Homo Sapiens
KVAELVHF

SEQ ID NO: 49005 - protein, 8 aa, Homo Sapiens
AELVHFLL

SEQ ID NO: 49006 - protein, 8 aa, Homo Sapiens
ELVHFLLL

SEQ ID NO: 49007 - protein, 8 aa, Homo Sapiens
LVHFLLLK

SEQ ID NO: 49008 - protein, 8 aa, Homo Sapiens
VHFLLLKY

SEQ ID NO: 49009 - protein, 8 aa, Homo Sapiens
HFLLLKYR

SEQ ID NO: 49010 - protein, 8 aa, Homo Sapiens
FLLLKYRA

SEQ ID NO: 49011 - protein, 8 aa, Homo Sapiens
LLLKYRAR

SEQ ID NO: 49012 - protein, 8 aa, Homo Sapiens
KYRAREPV

SEQ ID NO: 49013 - protein, 8 aa, Homo Sapiens
RAREPVTK

SEQ ID NO: 49014 - protein, 8 aa, Homo Sapiens
EPVTKAEM

SEQ ID NO: 49015 - protein, 8 aa, Homo Sapiens
AEMLGSVV

SEQ ID NO: 49016 - protein, 8 aa, Homo Sapiens
LGSVVGNW

SEQ ID NO: 49017 - protein, 8 aa, Homo Sapiens
SVVGNWQY

SEQ ID NO: 49018 - protein, 8 aa, Homo Sapiens
NWQYFFPV

SEQ ID NO: 49019 - protein, 8 aa, Homo Sapiens
WQYFFPVI

SEQ ID NO: 49020 - protein, 8 aa, Homo Sapiens
QYFFPVIF

SEQ ID NO: 49021 - protein, 8 aa, Homo Sapiens
FFPVIFSK

SEQ ID NO: 49022 - protein, 8 aa, Homo Sapiens
FPVIFSKA

SEQ ID NO: 49023 - protein, 8 aa, Homo Sapiens
KASSSLQL

SEQ ID NO: 49024 - protein, 8 aa, Homo Sapiens
ASSSLQLV

SEQ ID NO: 49025 - protein, 8 aa, Homo Sapiens
SSSLQLVF

SEQ ID NO: 49026 - protein, 8 aa, Homo Sapiens
SLQLVFGI

SEQ ID NO: 49027 - protein, 8 aa, Homo Sapiens
QLVFGIEL

SEQ ID NO: 49028 - protein, 8 aa, Homo Sapiens
LVFGIELM

SEQ ID NO: 49029 - protein, 8 aa, Homo Sapiens
FGIELMEV

SEQ ID NO: 49030 - protein, 8 aa, Homo Sapiens
ELMEVDPI

SEQ ID NO: 49031 - protein, 8 aa, Homo Sapiens
EVDPIGHL

SEQ ID NO: 49032 - protein, 8 aa, Homo Sapiens
DPIGHLYI

SEQ ID NO: 49033 - protein, 8 aa, Homo Sapiens
HLYIFATC

SEQ ID NO: 49034 - protein, 8 aa, Homo Sapiens
LYIFATCL

SEQ ID NO: 49035 - protein, 8 aa, Homo Sapiens
ATCLGLSY

SEQ ID NO: 49036 - protein, 8 aa, Homo Sapiens
GLSYDGLL

SEQ ID NO: 49037 - protein, 8 aa, Homo Sapiens
GLLGDNQI

SEQ ID NO: 49038 - protein, 8 aa, Homo Sapiens
LLGDNQIM

SEQ ID NO: 49039 - protein, 8 aa, Homo Sapiens
QIMPKAGL

SEQ ID NO: 49040 - protein, 8 aa, Homo Sapiens
IMPKAGLL

SEQ ID NO: 49041 - protein, 8 aa, Homo Sapiens
MPKAGLLI

SEQ ID NO: 49042 - protein, 8 aa, Homo Sapiens
KAGLLIIV

SEQ ID NO: 49043 - protein, 8 aa, Homo Sapiens
GLLIIVLA

SEQ ID NO: 49044 - protein, 8 aa, Homo Sapiens
LLIIVLAI

SEQ ID NO: 49045 - protein, 8 aa, Homo Sapiens
LIIVLAII

SEQ ID NO: 49046 - protein, 8 aa, Homo Sapiens
IVLAIIAR

SEQ ID NO: 49047 - protein, 8 aa, Homo Sapiens
EEKIWEEL

SEQ ID NO: 49048 - protein, 8 aa, Homo Sapiens
KIWEELSV

SEQ ID NO: 49049 - protein, 8 aa, Homo Sapiens
EELSVLEV

SEQ ID NO: 49050 - protein, 8 aa, Homo Sapiens
ELSVLEVF

SEQ ID NO: 49051 - protein, 8 aa, Homo Sapiens
DSILGDPK

SEQ ID NO: 49052 - protein, 8 aa, Homo Sapiens
SILGDPKK

SEQ ID NO: 49053 - protein, 8 aa, Homo Sapiens
ILGDPKKL

SEQ ID NO: 49054 - protein, 8 aa, Homo Sapiens
KLLTQHFV

SEQ ID NO: 49055 - protein, 8 aa, Homo Sapiens
LLTQHFVQ

SEQ ID NO: 49056 - protein, 8 aa, Homo Sapiens
HFVQENYL

SEQ ID NO: 49057 - protein, 8 aa, Homo Sapiens
VQENYLEY

SEQ ID NO: 49058 - protein, 8 aa, Homo Sapiens
NYLEYRQV

SEQ ID NO: 49059 - protein, 8 aa, Homo Sapiens
QVPGSDPA

SEQ ID NO: 49060 - protein, 8 aa, Homo Sapiens
DPACYEFL

SEQ ID NO: 49061 - protein, 8 aa, Homo Sapiens
YEFLWGPR

SEQ ID NO: 49062 - protein, 8 aa, Homo Sapiens
FLWGPRAL

SEQ ID NO: 49063 - protein, 8 aa, Homo Sapiens
RALVETSY

SEQ ID NO: 49064 - protein, 8 aa, Homo Sapiens
ALVETSYV

SEQ ID NO: 49065 - protein, 8 aa, Homo Sapiens
LVETSYVK

SEQ ID NO: 49066 - protein, 8 aa, Homo Sapiens
ETSYVKVL

SEQ ID NO: 49067 - protein, 8 aa, Homo Sapiens
YVKVLHHM

SEQ ID NO: 49068 - protein, 8 aa, Homo Sapiens
KVLHHMVK

SEQ ID NO: 49069 - protein, 8 aa, Homo Sapiens
VLHHMVKI

SEQ ID NO: 49070 - protein, 8 aa, Homo Sapiens
KISGGPHI

SEQ ID NO: 49071 - protein, 8 aa, Homo Sapiens
SYPPLHEW

SEQ ID NO: 49072 - protein, 8 aa, Homo Sapiens
YPPLHEWV

SEQ ID NO: 49073 - protein, 9 aa, Homo Sapiens
MPLEQRSQH

SEQ ID NO: 49074 - protein, 9 aa, Homo Sapiens
GLEARGEAL

SEQ ID NO: 49075 - protein, 9 aa, Homo Sapiens
ALGLVGAQA

SEQ ID NO: 49076 - protein, 9 aa, Homo Sapiens
GLVGAQAPA

SEQ ID NO: 49077 - protein, 9 aa, Homo Sapiens
AQAPATEEQ

SEQ ID NO: 49078 - protein, 9 aa, Homo Sapiens
EAASSSSTL

SEQ ID NO: 49079 - protein, 9 aa, Homo Sapiens
AASSSSTLV

SEQ ID NO: 49080 - protein, 9 aa, Homo Sapiens
SSSSTLVEV

SEQ ID NO: 49081 - protein, 9 aa, Homo Sapiens
TLVEVTLGE

SEQ ID NO: 49082 - protein, 9 aa, Homo Sapiens
LVEVTLGEV

SEQ ID NO: 49083 - protein, 9 aa, Homo Sapiens
EVTLGEVPA

SEQ ID NO: 49084 - protein, 9 aa, Homo Sapiens
TLGEVPAAE

SEQ ID NO: 49085 - protein, 9 aa, Homo Sapiens
SSLPTTMNY

SEQ ID NO: 49086 - protein, 9 aa, Homo Sapiens
LPTTMNYPL

SEQ ID NO: 49087 - protein, 9 aa, Homo Sapiens
TMNYPLWSQ

SEQ ID NO: 49088 - protein, 9 aa, Homo Sapiens
NYPLWSQSY

SEQ ID NO: 49089 - protein, 9 aa, Homo Sapiens
QEEEGPSTF

SEQ ID NO: 49090 - protein, 9 aa, Homo Sapiens
TFPDLESEF

SEQ ID NO: 49091 - protein, 9 aa, Homo Sapiens
LESEFQAAL

SEQ ID NO: 49092 - protein, 9 aa, Homo Sapiens
SEFQAALSR

SEQ ID NO: 49093 - protein, 9 aa, Homo Sapiens
EFQAALSRK

SEQ ID NO: 49094 - protein, 9 aa, Homo Sapiens
FQAALSRKV

SEQ ID NO: 49095 - protein, 9 aa, Homo Sapiens
ALSRKVAEL

SEQ ID NO: 49096 - protein, 9 aa, Homo Sapiens
KVAELVHFL

SEQ ID NO: 49097 - protein, 9 aa, Homo Sapiens
AELVHFLLL

SEQ ID NO: 49098 - protein, 9 aa, Homo Sapiens
ELVHFLLLK

SEQ ID NO: 49099 - protein, 9 aa, Homo Sapiens
LVHFLLLKY

SEQ ID NO: 49100 - protein, 9 aa, Homo Sapiens
FLLLKYRAR

SEQ ID NO: 49101 - protein, 9 aa, Homo Sapiens
YRAREPVTK

SEQ ID NO: 49102 - protein, 9 aa, Homo Sapiens
EPVTKAEML

SEQ ID NO: 49103 - protein, 9 aa, Homo Sapiens
TKAEMLGSV

SEQ ID NO: 49104 - protein, 9 aa, Homo Sapiens
AEMLGSVVG

SEQ ID NO: 49105 - protein, 9 aa, Homo Sapiens
GSVVGNWQY

SEQ ID NO: 49106 - protein, 9 aa, Homo Sapiens
SVVGNWQYF

SEQ ID NO: 49107 - protein, 9 aa, Homo Sapiens
VVGNWQYFF

SEQ ID NO: 49108 - protein, 9 aa, Homo Sapiens
GNWQYFFPV

SEQ ID NO: 49109 - protein, 9 aa, Homo Sapiens
NWQYFFPVI

SEQ ID NO: 49110 - protein, 9 aa, Homo Sapiens
WQYFFPVIF

SEQ ID NO: 49111 - protein, 9 aa, Homo Sapiens
YFFPVIFSK

SEQ ID NO: 49112 - protein, 9 aa, Homo Sapiens
FPVIFSKAS

SEQ ID NO: 49113 - protein, 9 aa, Homo Sapiens
IFSKASSSL

SEQ ID NO: 49114 - protein, 9 aa, Homo Sapiens
KASSSLQLV

SEQ ID NO: 49115 - protein, 9 aa, Homo Sapiens
ASSSLQLVF

SEQ ID NO: 49116 - protein, 9 aa, Homo Sapiens
LQLVFGIEL

SEQ ID NO: 49117 - protein, 9 aa, Homo Sapiens
QLVFGIELM

SEQ ID NO: 49118 - protein, 9 aa, Homo Sapiens
MEVDPIGHL

SEQ ID NO: 49119 - protein, 9 aa, Homo Sapiens
EVDPIGHLY

SEQ ID NO: 49120 - protein, 9 aa, Homo Sapiens
DPIGHLYIF

SEQ ID NO: 49121 - protein, 9 aa, Homo Sapiens
HLYIFATCL

SEQ ID NO: 49122 - protein, 9 aa, Homo Sapiens
YIFATCLGL

SEQ ID NO: 49123 - protein, 9 aa, Homo Sapiens
FATCLGLSY

SEQ ID NO: 49124 - protein, 9 aa, Homo Sapiens
CLGLSYDGL

SEQ ID NO: 49125 - protein, 9 aa, Homo Sapiens
GLLGDNQIM

SEQ ID NO: 49126 - protein, 9 aa, Homo Sapiens
LLGDNQIMP

SEQ ID NO: 49127 - protein, 9 aa, Homo Sapiens
NQIMPKAGL

SEQ ID NO: 49128 - protein, 9 aa, Homo Sapiens
QIMPKAGLL

SEQ ID NO: 49129 - protein, 9 aa, Homo Sapiens
IMPKAGLLI

SEQ ID NO: 49130 - protein, 9 aa, Homo Sapiens
MPKAGLLII

SEQ ID NO: 49131 - protein, 9 aa, Homo Sapiens
GLLIIVLAI

SEQ ID NO: 49132 - protein, 9 aa, Homo Sapiens
LLIIVLAII

SEQ ID NO: 49133 - protein, 9 aa, Homo Sapiens
IIVLAIIAR

SEQ ID NO: 49134 - protein, 9 aa, Homo Sapiens
PEEKIWEEL

SEQ ID NO: 49135 - protein, 9 aa, Homo Sapiens
EEKIWEELS

SEQ ID NO: 49136 - protein, 9 aa, Homo Sapiens
KIWEELSVL

SEQ ID NO: 49137 - protein, 9 aa, Homo Sapiens
WEELSVLEV

SEQ ID NO: 49138 - protein, 9 aa, Homo Sapiens
EELSVLEVF

SEQ ID NO: 49139 - protein, 9 aa, Homo Sapiens
SVLEVFEGR

SEQ ID NO: 49140 - protein, 9 aa, Homo Sapiens
FEGREDSIL

SEQ ID NO: 49141 - protein, 9 aa, Homo Sapiens
DSILGDPKK

SEQ ID NO: 49142 - protein, 9 aa, Homo Sapiens
SILGDPKKL

SEQ ID NO: 49143 - protein, 9 aa, Homo Sapiens
ILGDPKKLL

SEQ ID NO: 49144 - protein, 9 aa, Homo Sapiens
KKLLTQHFV

SEQ ID NO: 49145 - protein, 9 aa, Homo Sapiens
KLLTQHFVQ

SEQ ID NO: 49146 - protein, 9 aa, Homo Sapiens
TQHFVQENY

SEQ ID NO: 49147 - protein, 9 aa, Homo Sapiens
FVQENYLEY

SEQ ID NO: 49148 - protein, 9 aa, Homo Sapiens
VQENYLEYR

SEQ ID NO: 49149 - protein, 9 aa, Homo Sapiens
RQVPGSDPA

SEQ ID NO: 49150 - protein, 9 aa, Homo Sapiens
VPGSDPACY

SEQ ID NO: 49151 - protein, 9 aa, Homo Sapiens
GSDPACYEF

SEQ ID NO: 49152 - protein, 9 aa, Homo Sapiens
DPACYEFLW

SEQ ID NO: 49153 - protein, 9 aa, Homo Sapiens
CYEFLWGPR

SEQ ID NO: 49154 - protein, 9 aa, Homo Sapiens
EFLWGPRAL

SEQ ID NO: 49155 - protein, 9 aa, Homo Sapiens
FLWGPRALV

SEQ ID NO: 49156 - protein, 9 aa, Homo Sapiens
RALVETSYV

SEQ ID NO: 49157 - protein, 9 aa, Homo Sapiens
ALVETSYVK

SEQ ID NO: 49158 - protein, 9 aa, Homo Sapiens
LVETSYVKV

SEQ ID NO: 49159 - protein, 9 aa, Homo Sapiens
VETSYVKVL

SEQ ID NO: 49160 - protein, 9 aa, Homo Sapiens
ETSYVKVLH

SEQ ID NO: 49161 - protein, 9 aa, Homo Sapiens
SYVKVLHHM

SEQ ID NO: 49162 - protein, 9 aa, Homo Sapiens
YVKVLHHMV

SEQ ID NO: 49163 - protein, 9 aa, Homo Sapiens
KVLHHMVKI

SEQ ID NO: 49164 - protein, 9 aa, Homo Sapiens
ISGGPHISY

SEQ ID NO: 49165 - protein, 9 aa, Homo Sapiens
GPHISYPPL

SEQ ID NO: 49166 - protein, 9 aa, Homo Sapiens
ISYPPLHEW

SEQ ID NO: 49167 - protein, 9 aa, Homo Sapiens
SYPPLHEWV

SEQ ID NO: 49168 - protein, 9 aa, Homo Sapiens
YPPLHEWVL

SEQ ID NO: 49169 - protein, 10 aa, Homo Sapiens
MPLEQRSQHC

SEQ ID NO: 49170 - protein, 10 aa, Homo Sapiens
EEGLEARGEA

SEQ ID NO: 49171 - protein, 10 aa, Homo Sapiens
LEARGEALGL

SEQ ID NO: 49172 - protein, 10 aa, Homo Sapiens
EALGLVGAQA

SEQ ID NO: 49173 - protein, 10 aa, Homo Sapiens
GLVGAQAPAT

SEQ ID NO: 49174 - protein, 10 aa, Homo Sapiens
APATEEQEAA

SEQ ID NO: 49175 - protein, 10 aa, Homo Sapiens
QEAASSSSTL

SEQ ID NO: 49176 - protein, 10 aa, Homo Sapiens
EAASSSSTLV

SEQ ID NO: 49177 - protein, 10 aa, Homo Sapiens
TLVEVTLGEV

SEQ ID NO: 49178 - protein, 10 aa, Homo Sapiens
TLGEVPAAES

SEQ ID NO: 49179 - protein, 10 aa, Homo Sapiens
SPQGASSLPT

SEQ ID NO: 49180 - protein, 10 aa, Homo Sapiens
ASSLPTTMNY

SEQ ID NO: 49181 - protein, 10 aa, Homo Sapiens
SLPTTMNYPL

SEQ ID NO: 49182 - protein, 10 aa, Homo Sapiens
LPTTMNYPLW

SEQ ID NO: 49183 - protein, 10 aa, Homo Sapiens
TTMNYPLWSQ

SEQ ID NO: 49184 - protein, 10 aa, Homo Sapiens
MNYPLWSQSY

SEQ ID NO: 49185 - protein, 10 aa, Homo Sapiens
NQEEEGPSTF

SEQ ID NO: 49186 - protein, 10 aa, Homo Sapiens
EEGPSTFPDL

SEQ ID NO: 49187 - protein, 10 aa, Homo Sapiens
STFPDLESEF

SEQ ID NO: 49188 - protein, 10 aa, Homo Sapiens
FPDLESEFQA

SEQ ID NO: 49189 - protein, 10 aa, Homo Sapiens
DLESEFQAAL

SEQ ID NO: 49190 - protein, 10 aa, Homo Sapiens
ESEFQAALSR

SEQ ID NO: 49191 - protein, 10 aa, Homo Sapiens
SEFQAALSRK

SEQ ID NO: 49192 - protein, 10 aa, Homo Sapiens
FQAALSRKVA

SEQ ID NO: 49193 - protein, 10 aa, Homo Sapiens
ALSRKVAELV

SEQ ID NO: 49194 - protein, 10 aa, Homo Sapiens
RKVAELVHFL

SEQ ID NO: 49195 - protein, 10 aa, Homo Sapiens
KVAELVHFLL

SEQ ID NO: 49196 - protein, 10 aa, Homo Sapiens
AELVHFLLLK

SEQ ID NO: 49197 - protein, 10 aa, Homo Sapiens
ELVHFLLLKY

SEQ ID NO: 49198 - protein, 10 aa, Homo Sapiens
LVHFLLLKYR

SEQ ID NO: 49199 - protein, 10 aa, Homo Sapiens
HFLLLKYRAR

SEQ ID NO: 49200 - protein, 10 aa, Homo Sapiens
LLKYRAREPV

SEQ ID NO: 49201 - protein, 10 aa, Homo Sapiens
KYRAREPVTK

SEQ ID NO: 49202 - protein, 10 aa, Homo Sapiens
REPVTKAEML

SEQ ID NO: 49203 - protein, 10 aa, Homo Sapiens
VTKAEMLGSV

SEQ ID NO: 49204 - protein, 10 aa, Homo Sapiens
TKAEMLGSVV

SEQ ID NO: 49205 - protein, 10 aa, Homo Sapiens
MLGSVVGNWQ

SEQ ID NO: 49206 - protein, 10 aa, Homo Sapiens
GSVVGNWQYF

SEQ ID NO: 49207 - protein, 10 aa, Homo Sapiens
SVVGNWQYFF

SEQ ID NO: 49208 - protein, 10 aa, Homo Sapiens
VGNWQYFFPV

SEQ ID NO: 49209 - protein, 10 aa, Homo Sapiens
NWQYFFPVIF

SEQ ID NO: 49210 - protein, 10 aa, Homo Sapiens
QYFFPVIFSK

SEQ ID NO: 49211 - protein, 10 aa, Homo Sapiens
YFFPVIFSKA

SEQ ID NO: 49212 - protein, 10 aa, Homo Sapiens
FPVIFSKASS

SEQ ID NO: 49213 - protein, 10 aa, Homo Sapiens
VIFSKASSSL

SEQ ID NO: 49214 - protein, 10 aa, Homo Sapiens
SKASSSLQLV

SEQ ID NO: 49215 - protein, 10 aa, Homo Sapiens
KASSSLQLVF

SEQ ID NO: 49216 - protein, 10 aa, Homo Sapiens
SSSLQLVFGI

SEQ ID NO: 49217 - protein, 10 aa, Homo Sapiens
SLQLVFGIEL

SEQ ID NO: 49218 - protein, 10 aa, Homo Sapiens
LQLVFGIELM

SEQ ID NO: 49219 - protein, 10 aa, Homo Sapiens
LVFGIELMEV

SEQ ID NO: 49220 - protein, 10 aa, Homo Sapiens
LMEVDPIGHL

SEQ ID NO: 49221 - protein, 10 aa, Homo Sapiens
MEVDPIGHLY

SEQ ID NO: 49222 - protein, 10 aa, Homo Sapiens
EVDPIGHLYI

SEQ ID NO: 49223 - protein, 10 aa, Homo Sapiens
DPIGHLYIFA

SEQ ID NO: 49224 - protein, 10 aa, Homo Sapiens
HLYIFATCLG

SEQ ID NO: 49225 - protein, 10 aa, Homo Sapiens
LYIFATCLGL

SEQ ID NO: 49226 - protein, 10 aa, Homo Sapiens
IFATCLGLSY

SEQ ID NO: 49227 - protein, 10 aa, Homo Sapiens
CLGLSYDGLL

SEQ ID NO: 49228 - protein, 10 aa, Homo Sapiens
GLLGDNQIMP

SEQ ID NO: 49229 - protein, 10 aa, Homo Sapiens
LLGDNQIMPK

SEQ ID NO: 49230 - protein, 10 aa, Homo Sapiens
NQIMPKAGLL

SEQ ID NO: 49231 - protein, 10 aa, Homo Sapiens
QIMPKAGLLI

SEQ ID NO: 49232 - protein, 10 aa, Homo Sapiens
IMPKAGLLII

SEQ ID NO: 49233 - protein, 10 aa, Homo Sapiens
MPKAGLLIIV

SEQ ID NO: 49234 - protein, 10 aa, Homo Sapiens
GLLIIVLAII

SEQ ID NO: 49235 - protein, 10 aa, Homo Sapiens
LLIIVLAIIA

SEQ ID NO: 49236 - protein, 10 aa, Homo Sapiens
LIIVLAIIAR

SEQ ID NO: 49237 - protein, 10 aa, Homo Sapiens
APEEKIWEEL

SEQ ID NO: 49238 - protein, 10 aa, Homo Sapiens
EEKIWEELSV

SEQ ID NO: 49239 - protein, 10 aa, Homo Sapiens
WEELSVLEVF

SEQ ID NO: 49240 - protein, 10 aa, Homo Sapiens
LSVLEVFEGR

SEQ ID NO: 49241 - protein, 10 aa, Homo Sapiens
EVFEGREDSI

SEQ ID NO: 49242 - protein, 10 aa, Homo Sapiens
SILGDPKKLL

SEQ ID NO: 49243 - protein, 10 aa, Homo Sapiens
ILGDPKKLLT

SEQ ID NO: 49244 - protein, 10 aa, Homo Sapiens
LTQHFVQENY

SEQ ID NO: 49245 - protein, 10 aa, Homo Sapiens
HFVQENYLEY

SEQ ID NO: 49246 - protein, 10 aa, Homo Sapiens
FVQENYLEYR

SEQ ID NO: 49247 - protein, 10 aa, Homo Sapiens
RQVPGSDPAC

SEQ ID NO: 49248 - protein, 10 aa, Homo Sapiens
QVPGSDPACY

SEQ ID NO: 49249 - protein, 10 aa, Homo Sapiens
YEFLWGPRAL

SEQ ID NO: 49250 - protein, 10 aa, Homo Sapiens
EFLWGPRALV

SEQ ID NO: 49251 - protein, 10 aa, Homo Sapiens
FLWGPRALVE

SEQ ID NO: 49252 - protein, 10 aa, Homo Sapiens
RALVETSYVK

SEQ ID NO: 49253 - protein, 10 aa, Homo Sapiens
ALVETSYVKV

SEQ ID NO: 49254 - protein, 10 aa, Homo Sapiens
ETSYVKVLHH

SEQ ID NO: 49255 - protein, 10 aa, Homo Sapiens
TSYVKVLHHM

SEQ ID NO: 49256 - protein, 10 aa, Homo Sapiens
SYVKVLHHMV

SEQ ID NO: 49257 - protein, 10 aa, Homo Sapiens
YVKVLHHMVK

SEQ ID NO: 49258 - protein, 10 aa, Homo Sapiens
HMVKISGGPH

SEQ ID NO: 49259 - protein, 10 aa, Homo Sapiens
MVKISGGPHI

SEQ ID NO: 49260 - protein, 10 aa, Homo Sapiens
KISGGPHISY

SEQ ID NO: 49261 - protein, 10 aa, Homo Sapiens
HISYPPLHEW

SEQ ID NO: 49262 - protein, 10 aa, Homo Sapiens
ISYPPLHEWV

SEQ ID NO: 49263 - protein, 10 aa, Homo Sapiens
SYPPLHEWVL

SEQ ID NO: 49264 - protein, 11 aa, Homo Sapiens
EEGLEARGEAL

SEQ ID NO: 49265 - protein, 11 aa, Homo Sapiens
GLEARGEALGL

SEQ ID NO: 49266 - protein, 11 aa, Homo Sapiens
ALGLVGAQAPA

SEQ ID NO: 49267 - protein, 11 aa, Homo Sapiens
AQAPATEEQEA

SEQ ID NO: 49268 - protein, 11 aa, Homo Sapiens
APATEEQEAAS

SEQ ID NO: 49269 - protein, 11 aa, Homo Sapiens
EEQEAASSSST

SEQ ID NO: 49270 - protein, 11 aa, Homo Sapiens
EQEAASSSSTL

SEQ ID NO: 49271 - protein, 11 aa, Homo Sapiens
QEAASSSSTLV

SEQ ID NO: 49272 - protein, 11 aa, Homo Sapiens
AASSSSTLVEV

SEQ ID NO: 49273 - protein, 11 aa, Homo Sapiens
STLVEVTLGEV

SEQ ID NO: 49274 - protein, 11 aa, Homo Sapiens
PPQSPQGASSL

SEQ ID NO: 49275 - protein, 11 aa, Homo Sapiens
GASSLPTTMNY

SEQ ID NO: 49276 - protein, 11 aa, Homo Sapiens
SSLPTTMNYPL

SEQ ID NO: 49277 - protein, 11 aa, Homo Sapiens
LPTTMNYPLWS

SEQ ID NO: 49278 - protein, 11 aa, Homo Sapiens
TTMNYPLWSQS

SEQ ID NO: 49279 - protein, 11 aa, Homo Sapiens
TMNYPLWSQSY

SEQ ID NO: 49280 - protein, 11 aa, Homo Sapiens
EEEGPSTFPDL

SEQ ID NO: 49281 - protein, 11 aa, Homo Sapiens
STFPDLESEFQ

SEQ ID NO: 49282 - protein, 11 aa, Homo Sapiens
FPDLESEFQAA

SEQ ID NO: 49283 - protein, 11 aa, Homo Sapiens
ESEFQAALSRK

SEQ ID NO: 49284 - protein, 11 aa, Homo Sapiens
SEFQAALSRKV

SEQ ID NO: 49285 - protein, 11 aa, Homo Sapiens
FQAALSRKVAE

SEQ ID NO: 49286 - protein, 11 aa, Homo Sapiens
QAALSRKVAEL

SEQ ID NO: 49287 - protein, 11 aa, Homo Sapiens
AALSRKVAELV

SEQ ID NO: 49288 - protein, 11 aa, Homo Sapiens
LSRKVAELVHF

SEQ ID NO: 49289 - protein, 11 aa, Homo Sapiens
RKVAELVHFLL

SEQ ID NO: 49290 - protein, 11 aa, Homo Sapiens
KVAELVHFLLL

SEQ ID NO: 49291 - protein, 11 aa, Homo Sapiens
VAELVHFLLLK

SEQ ID NO: 49292 - protein, 11 aa, Homo Sapiens
AELVHFLLLKY

SEQ ID NO: 49293 - protein, 11 aa, Homo Sapiens
ELVHFLLLKYR

SEQ ID NO: 49294 - protein, 11 aa, Homo Sapiens
LLLKYRAREPV

SEQ ID NO: 49295 - protein, 11 aa, Homo Sapiens
RAREPVTKAEM

SEQ ID NO: 49296 - protein, 11 aa, Homo Sapiens
PVTKAEMLGSV

SEQ ID NO: 49297 - protein, 11 aa, Homo Sapiens
VTKAEMLGSVV

SEQ ID NO: 49298 - protein, 11 aa, Homo Sapiens
AEMLGSVVGNW

SEQ ID NO: 49299 - protein, 11 aa, Homo Sapiens
EMLGSVVGNWQ

SEQ ID NO: 49300 - protein, 11 aa, Homo Sapiens
MLGSVVGNWQY

SEQ ID NO: 49301 - protein, 11 aa, Homo Sapiens
GSVVGNWQYFF

SEQ ID NO: 49302 - protein, 11 aa, Homo Sapiens
VVGNWQYFFPV

SEQ ID NO: 49303 - protein, 11 aa, Homo Sapiens
WQYFFPVIFSK

SEQ ID NO: 49304 - protein, 11 aa, Homo Sapiens
FPVIFSKASSS

SEQ ID NO: 49305 - protein, 11 aa, Homo Sapiens
IFSKASSSLQL

SEQ ID NO: 49306 - protein, 11 aa, Homo Sapiens
FSKASSSLQLV

SEQ ID NO: 49307 - protein, 11 aa, Homo Sapiens
SLQLVFGIELM

SEQ ID NO: 49308 - protein, 11 aa, Homo Sapiens
QLVFGIELMEV

SEQ ID NO: 49309 - protein, 11 aa, Homo Sapiens
FGIELMEVDPI

SEQ ID NO: 49310 - protein, 11 aa, Homo Sapiens
ELMEVDPIGHL

SEQ ID NO: 49311 - protein, 11 aa, Homo Sapiens
LMEVDPIGHLY

SEQ ID NO: 49312 - protein, 11 aa, Homo Sapiens
MEVDPIGHLYI

SEQ ID NO: 49313 - protein, 11 aa, Homo Sapiens
EVDPIGHLYIF

SEQ ID NO: 49314 - protein, 11 aa, Homo Sapiens
DPIGHLYIFAT

SEQ ID NO: 49315 - protein, 11 aa, Homo Sapiens
HLYIFATCLGL

SEQ ID NO: 49316 - protein, 11 aa, Homo Sapiens
YIFATCLGLSY

SEQ ID NO: 49317 - protein, 11 aa, Homo Sapiens
SYDGLLGDNQI

SEQ ID NO: 49318 - protein, 11 aa, Homo Sapiens
GLLGDNQIMPK

SEQ ID NO: 49319 - protein, 11 aa, Homo Sapiens
LLGDNQIMPKA

SEQ ID NO: 49320 - protein, 11 aa, Homo Sapiens
NQIMPKAGLLI

SEQ ID NO: 49321 - protein, 11 aa, Homo Sapiens
QIMPKAGLLII

SEQ ID NO: 49322 - protein, 11 aa, Homo Sapiens
IMPKAGLLIIV

SEQ ID NO: 49323 - protein, 11 aa, Homo Sapiens
MPKAGLLIIVL

SEQ ID NO: 49324 - protein, 11 aa, Homo Sapiens
GLLIIVLAIIA

SEQ ID NO: 49325 - protein, 11 aa, Homo Sapiens
LLIIVLAIIAR

SEQ ID NO: 49326 - protein, 11 aa, Homo Sapiens
PEEKIWEELSV

SEQ ID NO: 49327 - protein, 11 aa, Homo Sapiens
EEKIWEELSVL

SEQ ID NO: 49328 - protein, 11 aa, Homo Sapiens
KIWEELSVLEV

SEQ ID NO: 49329 - protein, 11 aa, Homo Sapiens
IWEELSVLEVF

SEQ ID NO: 49330 - protein, 11 aa, Homo Sapiens
ELSVLEVFEGR

SEQ ID NO: 49331 - protein, 11 aa, Homo Sapiens
EVFEGREDSIL

SEQ ID NO: 49332 - protein, 11 aa, Homo Sapiens
SILGDPKKLLT

SEQ ID NO: 49333 - protein, 11 aa, Homo Sapiens
ILGDPKKLLTQ

SEQ ID NO: 49334 - protein, 11 aa, Homo Sapiens
LTQHFVQENYL

SEQ ID NO: 49335 - protein, 11 aa, Homo Sapiens
HFVQENYLEYR

SEQ ID NO: 49336 - protein, 11 aa, Homo Sapiens
FVQENYLEYRQ

SEQ ID NO: 49337 - protein, 11 aa, Homo Sapiens
VQENYLEYRQV

SEQ ID NO: 49338 - protein, 11 aa, Homo Sapiens
RQVPGSDPACY

SEQ ID NO: 49339 - protein, 11 aa, Homo Sapiens
VPGSDPACYEF

SEQ ID NO: 49340 - protein, 11 aa, Homo Sapiens
GSDPACYEFLW

SEQ ID NO: 49341 - protein, 11 aa, Homo Sapiens
YEFLWGPRALV

SEQ ID NO: 49342 - protein, 11 aa, Homo Sapiens
FLWGPRALVET

SEQ ID NO: 49343 - protein, 11 aa, Homo Sapiens
GPRALVETSYV

SEQ ID NO: 49344 - protein, 11 aa, Homo Sapiens
RALVETSYVKV

SEQ ID NO: 49345 - protein, 11 aa, Homo Sapiens
ALVETSYVKVL

SEQ ID NO: 49346 - protein, 11 aa, Homo Sapiens
ETSYVKVLHHM

SEQ ID NO: 49347 - protein, 11 aa, Homo Sapiens
TSYVKVLHHMV

SEQ ID NO: 49348 - protein, 11 aa, Homo Sapiens
SYVKVLHHMVK

SEQ ID NO: 49349 - protein, 11 aa, Homo Sapiens
YVKVLHHMVKI

SEQ ID NO: 49350 - protein, 11 aa, Homo Sapiens
HMVKISGGPHI

SEQ ID NO: 49351 - protein, 11 aa, Homo Sapiens
HISYPPLHEWV

SEQ ID NO: 49352 - protein, 11 aa, Homo Sapiens
ISYPPLHEWVL

SEQ ID NO: 49353 - protein, 11 aa, Homo Sapiens
SYPPLHEWVLR

SEQ ID NO: 49354 - protein, 13 aa, Homo Sapiens
MPLEQRSQHCKPE

SEQ ID NO: 49355 - protein, 13 aa, Homo Sapiens
PLEQRSQHCKPEE

SEQ ID NO: 49356 - protein, 13 aa, Homo Sapiens
LEQRSQHCKPEEG

SEQ ID NO: 49357 - protein, 13 aa, Homo Sapiens
EQRSQHCKPEEGL

SEQ ID NO: 49358 - protein, 13 aa, Homo Sapiens
QRSQHCKPEEGLE

SEQ ID NO: 49359 - protein, 13 aa, Homo Sapiens
RSQHCKPEEGLEA

SEQ ID NO: 49360 - protein, 13 aa, Homo Sapiens
SQHCKPEEGLEAR

SEQ ID NO: 49361 - protein, 13 aa, Homo Sapiens
QHCKPEEGLEARG

SEQ ID NO: 49362 - protein, 13 aa, Homo Sapiens
HCKPEEGLEARGE

SEQ ID NO: 49363 - protein, 13 aa, Homo Sapiens
CKPEEGLEARGEA

SEQ ID NO: 49364 - protein, 13 aa, Homo Sapiens
KPEEGLEARGEAL

SEQ ID NO: 49365 - protein, 13 aa, Homo Sapiens
PEEGLEARGEALG

SEQ ID NO: 49366 - protein, 13 aa, Homo Sapiens
EEGLEARGEALGL

SEQ ID NO: 49367 - protein, 13 aa, Homo Sapiens
EGLEARGEALGLV

SEQ ID NO: 49368 - protein, 13 aa, Homo Sapiens
GLEARGEALGLVG

SEQ ID NO: 49369 - protein, 13 aa, Homo Sapiens
LEARGEALGLVGA

SEQ ID NO: 49370 - protein, 13 aa, Homo Sapiens
EARGEALGLVGAQ

SEQ ID NO: 49371 - protein, 13 aa, Homo Sapiens
ARGEALGLVGAQA

SEQ ID NO: 49372 - protein, 13 aa, Homo Sapiens
RGEALGLVGAQAP

SEQ ID NO: 49373 - protein, 13 aa, Homo Sapiens
GEALGLVGAQAPA

SEQ ID NO: 49374 - protein, 13 aa, Homo Sapiens
EALGLVGAQAPAT

SEQ ID NO: 49375 - protein, 13 aa, Homo Sapiens
ALGLVGAQAPATE

SEQ ID NO: 49376 - protein, 13 aa, Homo Sapiens
LGLVGAQAPATEE

SEQ ID NO: 49377 - protein, 13 aa, Homo Sapiens
GLVGAQAPATEEQ

SEQ ID NO: 49378 - protein, 13 aa, Homo Sapiens
LVGAQAPATEEQE

SEQ ID NO: 49379 - protein, 13 aa, Homo Sapiens
VGAQAPATEEQEA

SEQ ID NO: 49380 - protein, 13 aa, Homo Sapiens
GAQAPATEEQEAA

SEQ ID NO: 49381 - protein, 13 aa, Homo Sapiens
AQAPATEEQEAAS

SEQ ID NO: 49382 - protein, 13 aa, Homo Sapiens
QAPATEEQEAASS

SEQ ID NO: 49383 - protein, 13 aa, Homo Sapiens
APATEEQEAASSS

SEQ ID NO: 49384 - protein, 13 aa, Homo Sapiens
PATEEQEAASSSS

SEQ ID NO: 49385 - protein, 13 aa, Homo Sapiens
ATEEQEAASSSST

SEQ ID NO: 49386 - protein, 13 aa, Homo Sapiens
TEEQEAASSSSTL

SEQ ID NO: 49387 - protein, 13 aa, Homo Sapiens
EEQEAASSSSTLV

SEQ ID NO: 49388 - protein, 13 aa, Homo Sapiens
EQEAASSSSTLVE

SEQ ID NO: 49389 - protein, 13 aa, Homo Sapiens
QEAASSSSTLVEV

SEQ ID NO: 49390 - protein, 13 aa, Homo Sapiens
EAASSSSTLVEVT

SEQ ID NO: 49391 - protein, 13 aa, Homo Sapiens
AASSSSTLVEVTL

SEQ ID NO: 49392 - protein, 13 aa, Homo Sapiens
ASSSSTLVEVTLG

SEQ ID NO: 49393 - protein, 13 aa, Homo Sapiens
SSSSTLVEVTLGE

SEQ ID NO: 49394 - protein, 13 aa, Homo Sapiens
SSSTLVEVTLGEV

SEQ ID NO: 49395 - protein, 13 aa, Homo Sapiens
SSTLVEVTLGEVP

SEQ ID NO: 49396 - protein, 13 aa, Homo Sapiens
STLVEVTLGEVPA

SEQ ID NO: 49397 - protein, 13 aa, Homo Sapiens
TLVEVTLGEVPAA

SEQ ID NO: 49398 - protein, 13 aa, Homo Sapiens
LVEVTLGEVPAAE

SEQ ID NO: 49399 - protein, 13 aa, Homo Sapiens
VEVTLGEVPAAES

SEQ ID NO: 49400 - protein, 13 aa, Homo Sapiens
EVTLGEVPAAESP

SEQ ID NO: 49401 - protein, 13 aa, Homo Sapiens
VTLGEVPAAESPD

SEQ ID NO: 49402 - protein, 13 aa, Homo Sapiens
TLGEVPAAESPDP

SEQ ID NO: 49403 - protein, 13 aa, Homo Sapiens
LGEVPAAESPDPP

SEQ ID NO: 49404 - protein, 13 aa, Homo Sapiens
GEVPAAESPDPPQ

SEQ ID NO: 49405 - protein, 13 aa, Homo Sapiens
EVPAAESPDPPQS

SEQ ID NO: 49406 - protein, 13 aa, Homo Sapiens
VPAAESPDPPQSP

SEQ ID NO: 49407 - protein, 13 aa, Homo Sapiens
PAAESPDPPQSPQ

SEQ ID NO: 49408 - protein, 13 aa, Homo Sapiens
AAESPDPPQSPQG

SEQ ID NO: 49409 - protein, 13 aa, Homo Sapiens
AESPDPPQSPQGA

SEQ ID NO: 49410 - protein, 13 aa, Homo Sapiens
ESPDPPQSPQGAS

SEQ ID NO: 49411 - protein, 13 aa, Homo Sapiens
SPDPPQSPQGASS

SEQ ID NO: 49412 - protein, 13 aa, Homo Sapiens
PDPPQSPQGASSL

SEQ ID NO: 49413 - protein, 13 aa, Homo Sapiens
DPPQSPQGASSLP

SEQ ID NO: 49414 - protein, 13 aa, Homo Sapiens
PPQSPQGASSLPT

SEQ ID NO: 49415 - protein, 13 aa, Homo Sapiens
PQSPQGASSLPTT

SEQ ID NO: 49416 - protein, 13 aa, Homo Sapiens
QSPQGASSLPTTM

SEQ ID NO: 49417 - protein, 13 aa, Homo Sapiens
SPQGASSLPTTMN

SEQ ID NO: 49418 - protein, 13 aa, Homo Sapiens
PQGASSLPTTMNY

SEQ ID NO: 49419 - protein, 13 aa, Homo Sapiens
QGASSLPTTMNYP

SEQ ID NO: 49420 - protein, 13 aa, Homo Sapiens
GASSLPTTMNYPL

SEQ ID NO: 49421 - protein, 13 aa, Homo Sapiens
ASSLPTTMNYPLW

SEQ ID NO: 49422 - protein, 13 aa, Homo Sapiens
SSLPTTMNYPLWS

SEQ ID NO: 49423 - protein, 13 aa, Homo Sapiens
SLPTTMNYPLWSQ

SEQ ID NO: 49424 - protein, 13 aa, Homo Sapiens
LPTTMNYPLWSQS

SEQ ID NO: 49425 - protein, 13 aa, Homo Sapiens
PTTMNYPLWSQSY

SEQ ID NO: 49426 - protein, 13 aa, Homo Sapiens
TTMNYPLWSQSYE

SEQ ID NO: 49427 - protein, 13 aa, Homo Sapiens
TMNYPLWSQSYED

SEQ ID NO: 49428 - protein, 13 aa, Homo Sapiens
MNYPLWSQSYEDS

SEQ ID NO: 49429 - protein, 13 aa, Homo Sapiens
NYPLWSQSYEDSS

SEQ ID NO: 49430 - protein, 13 aa, Homo Sapiens
YPLWSQSYEDSSN

SEQ ID NO: 49431 - protein, 13 aa, Homo Sapiens
PLWSQSYEDSSNQ

SEQ ID NO: 49432 - protein, 13 aa, Homo Sapiens
LWSQSYEDSSNQE

SEQ ID NO: 49433 - protein, 13 aa, Homo Sapiens
WSQSYEDSSNQEE

SEQ ID NO: 49434 - protein, 13 aa, Homo Sapiens
SQSYEDSSNQEEE

SEQ ID NO: 49435 - protein, 13 aa, Homo Sapiens
QSYEDSSNQEEEG

SEQ ID NO: 49436 - protein, 13 aa, Homo Sapiens
SYEDSSNQEEEGP

SEQ ID NO: 49437 - protein, 13 aa, Homo Sapiens
YEDSSNQEEEGPS

SEQ ID NO: 49438 - protein, 13 aa, Homo Sapiens
EDSSNQEEEGPST

SEQ ID NO: 49439 - protein, 13 aa, Homo Sapiens
DSSNQEEEGPSTF

SEQ ID NO: 49440 - protein, 13 aa, Homo Sapiens
SSNQEEEGPSTFP

SEQ ID NO: 49441 - protein, 13 aa, Homo Sapiens
SNQEEEGPSTFPD

SEQ ID NO: 49442 - protein, 13 aa, Homo Sapiens
NQEEEGPSTFPDL

SEQ ID NO: 49443 - protein, 13 aa, Homo Sapiens
QEEEGPSTFPDLE

SEQ ID NO: 49444 - protein, 13 aa, Homo Sapiens
EEEGPSTFPDLES

SEQ ID NO: 49445 - protein, 13 aa, Homo Sapiens
EEGPSTFPDLESE

SEQ ID NO: 49446 - protein, 13 aa, Homo Sapiens
EGPSTFPDLESEF

SEQ ID NO: 49447 - protein, 13 aa, Homo Sapiens
GPSTFPDLESEFQ

SEQ ID NO: 49448 - protein, 13 aa, Homo Sapiens
PSTFPDLESEFQA

SEQ ID NO: 49449 - protein, 13 aa, Homo Sapiens
STFPDLESEFQAA

SEQ ID NO: 49450 - protein, 13 aa, Homo Sapiens
TFPDLESEFQAAL

SEQ ID NO: 49451 - protein, 13 aa, Homo Sapiens
FPDLESEFQAALS

SEQ ID NO: 49452 - protein, 13 aa, Homo Sapiens
PDLESEFQAALSR

SEQ ID NO: 49453 - protein, 13 aa, Homo Sapiens
DLESEFQAALSRK

SEQ ID NO: 49454 - protein, 13 aa, Homo Sapiens
LESEFQAALSRKV

SEQ ID NO: 49455 - protein, 13 aa, Homo Sapiens
ESEFQAALSRKVA

SEQ ID NO: 49456 - protein, 13 aa, Homo Sapiens
SEFQAALSRKVAE

SEQ ID NO: 49457 - protein, 13 aa, Homo Sapiens
EFQAALSRKVAEL

SEQ ID NO: 49458 - protein, 13 aa, Homo Sapiens
FQAALSRKVAELV

SEQ ID NO: 49459 - protein, 13 aa, Homo Sapiens
QAALSRKVAELVH

SEQ ID NO: 49460 - protein, 13 aa, Homo Sapiens
AALSRKVAELVHF

SEQ ID NO: 49461 - protein, 13 aa, Homo Sapiens
ALSRKVAELVHFL

SEQ ID NO: 49462 - protein, 13 aa, Homo Sapiens
LSRKVAELVHFLL

SEQ ID NO: 49463 - protein, 13 aa, Homo Sapiens
SRKVAELVHFLLL

SEQ ID NO: 49464 - protein, 13 aa, Homo Sapiens
RKVAELVHFLLLK

SEQ ID NO: 49465 - protein, 13 aa, Homo Sapiens
KVAELVHFLLLKY

SEQ ID NO: 49466 - protein, 13 aa, Homo Sapiens
VAELVHFLLLKYR

SEQ ID NO: 49467 - protein, 13 aa, Homo Sapiens
AELVHFLLLKYRA

SEQ ID NO: 49468 - protein, 13 aa, Homo Sapiens
ELVHFLLLKYRAR

SEQ ID NO: 49469 - protein, 13 aa, Homo Sapiens
LVHFLLLKYRARE

SEQ ID NO: 49470 - protein, 13 aa, Homo Sapiens
VHFLLLKYRAREP

SEQ ID NO: 49471 - protein, 13 aa, Homo Sapiens
HFLLLKYRAREPV

SEQ ID NO: 49472 - protein, 13 aa, Homo Sapiens
FLLLKYRAREPVT

SEQ ID NO: 49473 - protein, 13 aa, Homo Sapiens
LLLKYRAREPVTK

SEQ ID NO: 49474 - protein, 13 aa, Homo Sapiens
LLKYRAREPVTKA

SEQ ID NO: 49475 - protein, 13 aa, Homo Sapiens
LKYRAREPVTKAE

SEQ ID NO: 49476 - protein, 13 aa, Homo Sapiens
KYRAREPVTKAEM

SEQ ID NO: 49477 - protein, 13 aa, Homo Sapiens
YRAREPVTKAEML

SEQ ID NO: 49478 - protein, 13 aa, Homo Sapiens
RAREPVTKAEMLG

SEQ ID NO: 49479 - protein, 13 aa, Homo Sapiens
AREPVTKAEMLGS

SEQ ID NO: 49480 - protein, 13 aa, Homo Sapiens
REPVTKAEMLGSV

SEQ ID NO: 49481 - protein, 13 aa, Homo Sapiens
EPVTKAEMLGSVV

SEQ ID NO: 49482 - protein, 13 aa, Homo Sapiens
PVTKAEMLGSVVG

SEQ ID NO: 49483 - protein, 13 aa, Homo Sapiens
VTKAEMLGSVVGN

SEQ ID NO: 49484 - protein, 13 aa, Homo Sapiens
TKAEMLGSVVGNW

SEQ ID NO: 49485 - protein, 13 aa, Homo Sapiens
KAEMLGSVVGNWQ

SEQ ID NO: 49486 - protein, 13 aa, Homo Sapiens
AEMLGSVVGNWQY

SEQ ID NO: 49487 - protein, 13 aa, Homo Sapiens
EMLGSVVGNWQYF

SEQ ID NO: 49488 - protein, 13 aa, Homo Sapiens
MLGSVVGNWQYFF

SEQ ID NO: 49489 - protein, 13 aa, Homo Sapiens
LGSVVGNWQYFFP

SEQ ID NO: 49490 - protein, 13 aa, Homo Sapiens
GSVVGNWQYFFPV

SEQ ID NO: 49491 - protein, 13 aa, Homo Sapiens
SVVGNWQYFFPVI

SEQ ID NO: 49492 - protein, 13 aa, Homo Sapiens
VVGNWQYFFPVIF

SEQ ID NO: 49493 - protein, 13 aa, Homo Sapiens
VGNWQYFFPVIFS

SEQ ID NO: 49494 - protein, 13 aa, Homo Sapiens
GNWQYFFPVIFSK

SEQ ID NO: 49495 - protein, 13 aa, Homo Sapiens
NWQYFFPVIFSKA

SEQ ID NO: 49496 - protein, 13 aa, Homo Sapiens
WQYFFPVIFSKAS

SEQ ID NO: 49497 - protein, 13 aa, Homo Sapiens
QYFFPVIFSKASS

SEQ ID NO: 49498 - protein, 13 aa, Homo Sapiens
YFFPVIFSKASSS

SEQ ID NO: 49499 - protein, 13 aa, Homo Sapiens
FFPVIFSKASSSL

SEQ ID NO: 49500 - protein, 13 aa, Homo Sapiens
FPVIFSKASSSLQ

SEQ ID NO: 49501 - protein, 13 aa, Homo Sapiens
PVIFSKASSSLQL

SEQ ID NO: 49502 - protein, 13 aa, Homo Sapiens
VIFSKASSSLQLV

SEQ ID NO: 49503 - protein, 13 aa, Homo Sapiens
IFSKASSSLQLVF

SEQ ID NO: 49504 - protein, 13 aa, Homo Sapiens
FSKASSSLQLVFG

SEQ ID NO: 49505 - protein, 13 aa, Homo Sapiens
SKASSSLQLVFGI

SEQ ID NO: 49506 - protein, 13 aa, Homo Sapiens
KASSSLQLVFGIE

SEQ ID NO: 49507 - protein, 13 aa, Homo Sapiens
ASSSLQLVFGIEL

SEQ ID NO: 49508 - protein, 13 aa, Homo Sapiens
SSSLQLVFGIELM

SEQ ID NO: 49509 - protein, 13 aa, Homo Sapiens
SSLQLVFGIELME

SEQ ID NO: 49510 - protein, 13 aa, Homo Sapiens
SLQLVFGIELMEV

SEQ ID NO: 49511 - protein, 13 aa, Homo Sapiens
LQLVFGIELMEVD

SEQ ID NO: 49512 - protein, 13 aa, Homo Sapiens
QLVFGIELMEVDP

SEQ ID NO: 49513 - protein, 13 aa, Homo Sapiens
LVFGIELMEVDPI

SEQ ID NO: 49514 - protein, 13 aa, Homo Sapiens
VFGIELMEVDPIG

SEQ ID NO: 49515 - protein, 13 aa, Homo Sapiens
FGIELMEVDPIGH

SEQ ID NO: 49516 - protein, 13 aa, Homo Sapiens
GIELMEVDPIGHL

SEQ ID NO: 49517 - protein, 13 aa, Homo Sapiens
IELMEVDPIGHLY

SEQ ID NO: 49518 - protein, 13 aa, Homo Sapiens
ELMEVDPIGHLYI

SEQ ID NO: 49519 - protein, 13 aa, Homo Sapiens
LMEVDPIGHLYIF

SEQ ID NO: 49520 - protein, 13 aa, Homo Sapiens
MEVDPIGHLYIFA

SEQ ID NO: 49521 - protein, 13 aa, Homo Sapiens
EVDPIGHLYIFAT

SEQ ID NO: 49522 - protein, 13 aa, Homo Sapiens
VDPIGHLYIFATC

SEQ ID NO: 49523 - protein, 13 aa, Homo Sapiens
DPIGHLYIFATCL

SEQ ID NO: 49524 - protein, 13 aa, Homo Sapiens
PIGHLYIFATCLG

SEQ ID NO: 49525 - protein, 13 aa, Homo Sapiens
IGHLYIFATCLGL

SEQ ID NO: 49526 - protein, 13 aa, Homo Sapiens
GHLYIFATCLGLS

SEQ ID NO: 49527 - protein, 13 aa, Homo Sapiens
HLYIFATCLGLSY

SEQ ID NO: 49528 - protein, 13 aa, Homo Sapiens
LYIFATCLGLSYD

SEQ ID NO: 49529 - protein, 13 aa, Homo Sapiens
YIFATCLGLSYDG

SEQ ID NO: 49530 - protein, 13 aa, Homo Sapiens
IFATCLGLSYDGL

SEQ ID NO: 49531 - protein, 13 aa, Homo Sapiens
FATCLGLSYDGLL

SEQ ID NO: 49532 - protein, 13 aa, Homo Sapiens
ATCLGLSYDGLLG

SEQ ID NO: 49533 - protein, 13 aa, Homo Sapiens
TCLGLSYDGLLGD

SEQ ID NO: 49534 - protein, 13 aa, Homo Sapiens
CLGLSYDGLLGDN

SEQ ID NO: 49535 - protein, 13 aa, Homo Sapiens
LGLSYDGLLGDNQ

SEQ ID NO: 49536 - protein, 13 aa, Homo Sapiens
GLSYDGLLGDNQI

SEQ ID NO: 49537 - protein, 13 aa, Homo Sapiens
LSYDGLLGDNQIM

SEQ ID NO: 49538 - protein, 13 aa, Homo Sapiens
SYDGLLGDNQIMP

SEQ ID NO: 49539 - protein, 13 aa, Homo Sapiens
YDGLLGDNQIMPK

SEQ ID NO: 49540 - protein, 13 aa, Homo Sapiens
DGLLGDNQIMPKA

SEQ ID NO: 49541 - protein, 13 aa, Homo Sapiens
GLLGDNQIMPKAG

SEQ ID NO: 49542 - protein, 13 aa, Homo Sapiens
LLGDNQIMPKAGL

SEQ ID NO: 49543 - protein, 13 aa, Homo Sapiens
LGDNQIMPKAGLL

SEQ ID NO: 49544 - protein, 13 aa, Homo Sapiens
GDNQIMPKAGLLI

SEQ ID NO: 49545 - protein, 13 aa, Homo Sapiens
DNQIMPKAGLLII

SEQ ID NO: 49546 - protein, 13 aa, Homo Sapiens
NQIMPKAGLLIIV

SEQ ID NO: 49547 - protein, 13 aa, Homo Sapiens
QIMPKAGLLIIVL

SEQ ID NO: 49548 - protein, 13 aa, Homo Sapiens
IMPKAGLLIIVLA

SEQ ID NO: 49549 - protein, 13 aa, Homo Sapiens
MPKAGLLIIVLAI

SEQ ID NO: 49550 - protein, 13 aa, Homo Sapiens
PKAGLLIIVLAII

SEQ ID NO: 49551 - protein, 13 aa, Homo Sapiens
KAGLLIIVLAIIA

SEQ ID NO: 49552 - protein, 13 aa, Homo Sapiens
AGLLIIVLAIIAR

SEQ ID NO: 49553 - protein, 13 aa, Homo Sapiens
GLLIIVLAIIARE

SEQ ID NO: 49554 - protein, 13 aa, Homo Sapiens
LLIIVLAIIAREG

SEQ ID NO: 49555 - protein, 13 aa, Homo Sapiens
LIIVLAIIAREGD

SEQ ID NO: 49556 - protein, 13 aa, Homo Sapiens
IIVLAIIAREGDC

SEQ ID NO: 49557 - protein, 13 aa, Homo Sapiens
IVLAIIAREGDCA

SEQ ID NO: 49558 - protein, 13 aa, Homo Sapiens
VLAIIAREGDCAP

SEQ ID NO: 49559 - protein, 13 aa, Homo Sapiens
LAIIAREGDCAPE

SEQ ID NO: 49560 - protein, 13 aa, Homo Sapiens
AIIAREGDCAPEE

SEQ ID NO: 49561 - protein, 13 aa, Homo Sapiens
IIAREGDCAPEEK

SEQ ID NO: 49562 - protein, 13 aa, Homo Sapiens
IAREGDCAPEEKI

SEQ ID NO: 49563 - protein, 13 aa, Homo Sapiens
AREGDCAPEEKIW

SEQ ID NO: 49564 - protein, 13 aa, Homo Sapiens
REGDCAPEEKIWE

SEQ ID NO: 49565 - protein, 13 aa, Homo Sapiens
EGDCAPEEKIWEE

SEQ ID NO: 49566 - protein, 13 aa, Homo Sapiens
GDCAPEEKIWEEL

SEQ ID NO: 49567 - protein, 13 aa, Homo Sapiens
DCAPEEKIWEELS

SEQ ID NO: 49568 - protein, 13 aa, Homo Sapiens
CAPEEKIWEELSV

SEQ ID NO: 49569 - protein, 13 aa, Homo Sapiens
APEEKIWEELSVL

SEQ ID NO: 49570 - protein, 13 aa, Homo Sapiens
PEEKIWEELSVLE

SEQ ID NO: 49571 - protein, 13 aa, Homo Sapiens
EEKIWEELSVLEV

SEQ ID NO: 49572 - protein, 13 aa, Homo Sapiens
EKIWEELSVLEVF

SEQ ID NO: 49573 - protein, 13 aa, Homo Sapiens
KIWEELSVLEVFE

SEQ ID NO: 49574 - protein, 13 aa, Homo Sapiens
IWEELSVLEVFEG

SEQ ID NO: 49575 - protein, 13 aa, Homo Sapiens
WEELSVLEVFEGR

SEQ ID NO: 49576 - protein, 13 aa, Homo Sapiens
EELSVLEVFEGRE

SEQ ID NO: 49577 - protein, 13 aa, Homo Sapiens
ELSVLEVFEGRED

SEQ ID NO: 49578 - protein, 13 aa, Homo Sapiens
LSVLEVFEGREDS

SEQ ID NO: 49579 - protein, 13 aa, Homo Sapiens
SVLEVFEGREDSI

SEQ ID NO: 49580 - protein, 13 aa, Homo Sapiens
VLEVFEGREDSIL

SEQ ID NO: 49581 - protein, 13 aa, Homo Sapiens
LEVFEGREDSILG

SEQ ID NO: 49582 - protein, 13 aa, Homo Sapiens
EVFEGREDSILGD

SEQ ID NO: 49583 - protein, 13 aa, Homo Sapiens
VFEGREDSILGDP

SEQ ID NO: 49584 - protein, 13 aa, Homo Sapiens
FEGREDSILGDPK

SEQ ID NO: 49585 - protein, 13 aa, Homo Sapiens
EGREDSILGDPKK

SEQ ID NO: 49586 - protein, 13 aa, Homo Sapiens
GREDSILGDPKKL

SEQ ID NO: 49587 - protein, 13 aa, Homo Sapiens
REDSILGDPKKLL

SEQ ID NO: 49588 - protein, 13 aa, Homo Sapiens
EDSILGDPKKLLT

SEQ ID NO: 49589 - protein, 13 aa, Homo Sapiens
DSILGDPKKLLTQ

SEQ ID NO: 49590 - protein, 13 aa, Homo Sapiens
SILGDPKKLLTQH

SEQ ID NO: 49591 - protein, 13 aa, Homo Sapiens
ILGDPKKLLTQHF

SEQ ID NO: 49592 - protein, 13 aa, Homo Sapiens
LGDPKKLLTQHFV

SEQ ID NO: 49593 - protein, 13 aa, Homo Sapiens
GDPKKLLTQHFVQ

SEQ ID NO: 49594 - protein, 13 aa, Homo Sapiens
DPKKLLTQHFVQE

SEQ ID NO: 49595 - protein, 13 aa, Homo Sapiens
PKKLLTQHFVQEN

SEQ ID NO: 49596 - protein, 13 aa, Homo Sapiens
KKLLTQHFVQENY

SEQ ID NO: 49597 - protein, 13 aa, Homo Sapiens
KLLTQHFVQENYL

SEQ ID NO: 49598 - protein, 13 aa, Homo Sapiens
LLTQHFVQENYLE

SEQ ID NO: 49599 - protein, 13 aa, Homo Sapiens
LTQHFVQENYLEY

SEQ ID NO: 49600 - protein, 13 aa, Homo Sapiens
TQHFVQENYLEYR

SEQ ID NO: 49601 - protein, 13 aa, Homo Sapiens
QHFVQENYLEYRQ

SEQ ID NO: 49602 - protein, 13 aa, Homo Sapiens
HFVQENYLEYRQV

SEQ ID NO: 49603 - protein, 13 aa, Homo Sapiens
FVQENYLEYRQVP

SEQ ID NO: 49604 - protein, 13 aa, Homo Sapiens
VQENYLEYRQVPG

SEQ ID NO: 49605 - protein, 13 aa, Homo Sapiens
QENYLEYRQVPGS

SEQ ID NO: 49606 - protein, 13 aa, Homo Sapiens
ENYLEYRQVPGSD

SEQ ID NO: 49607 - protein, 13 aa, Homo Sapiens
NYLEYRQVPGSDP

SEQ ID NO: 49608 - protein, 13 aa, Homo Sapiens
YLEYRQVPGSDPA

SEQ ID NO: 49609 - protein, 13 aa, Homo Sapiens
LEYRQVPGSDPAC

SEQ ID NO: 49610 - protein, 13 aa, Homo Sapiens
EYRQVPGSDPACY

SEQ ID NO: 49611 - protein, 13 aa, Homo Sapiens
YRQVPGSDPACYE

SEQ ID NO: 49612 - protein, 13 aa, Homo Sapiens
RQVPGSDPACYEF

SEQ ID NO: 49613 - protein, 13 aa, Homo Sapiens
QVPGSDPACYEFL

SEQ ID NO: 49614 - protein, 13 aa, Homo Sapiens
VPGSDPACYEFLW

SEQ ID NO: 49615 - protein, 13 aa, Homo Sapiens
PGSDPACYEFLWG

SEQ ID NO: 49616 - protein, 13 aa, Homo Sapiens
GSDPACYEFLWGP

SEQ ID NO: 49617 - protein, 13 aa, Homo Sapiens
SDPACYEFLWGPR

SEQ ID NO: 49618 - protein, 13 aa, Homo Sapiens
DPACYEFLWGPRA

SEQ ID NO: 49619 - protein, 13 aa, Homo Sapiens
PACYEFLWGPRAL

SEQ ID NO: 49620 - protein, 13 aa, Homo Sapiens
ACYEFLWGPRALV

SEQ ID NO: 49621 - protein, 13 aa, Homo Sapiens
CYEFLWGPRALVE

SEQ ID NO: 49622 - protein, 13 aa, Homo Sapiens
YEFLWGPRALVET

SEQ ID NO: 49623 - protein, 13 aa, Homo Sapiens
EFLWGPRALVETS

SEQ ID NO: 49624 - protein, 13 aa, Homo Sapiens
FLWGPRALVETSY

SEQ ID NO: 49625 - protein, 13 aa, Homo Sapiens
LWGPRALVETSYV

SEQ ID NO: 49626 - protein, 13 aa, Homo Sapiens
WGPRALVETSYVK

SEQ ID NO: 49627 - protein, 13 aa, Homo Sapiens
GPRALVETSYVKV

SEQ ID NO: 49628 - protein, 13 aa, Homo Sapiens
PRALVETSYVKVL

SEQ ID NO: 49629 - protein, 13 aa, Homo Sapiens
RALVETSYVKVLH

SEQ ID NO: 49630 - protein, 13 aa, Homo Sapiens
ALVETSYVKVLHH

SEQ ID NO: 49631 - protein, 13 aa, Homo Sapiens
LVETSYVKVLHHM

SEQ ID NO: 49632 - protein, 13 aa, Homo Sapiens
VETSYVKVLHHMV

SEQ ID NO: 49633 - protein, 13 aa, Homo Sapiens
ETSYVKVLHHMVK

SEQ ID NO: 49634 - protein, 13 aa, Homo Sapiens
TSYVKVLHHMVKI

SEQ ID NO: 49635 - protein, 13 aa, Homo Sapiens
SYVKVLHHMVKIS

SEQ ID NO: 49636 - protein, 13 aa, Homo Sapiens
YVKVLHHMVKISG

SEQ ID NO: 49637 - protein, 13 aa, Homo Sapiens
VKVLHHMVKISGG

SEQ ID NO: 49638 - protein, 13 aa, Homo Sapiens
KVLHHMVKISGGP

SEQ ID NO: 49639 - protein, 13 aa, Homo Sapiens
VLHHMVKISGGPH

SEQ ID NO: 49640 - protein, 13 aa, Homo Sapiens
LHHMVKISGGPHI

SEQ ID NO: 49641 - protein, 13 aa, Homo Sapiens
HHMVKISGGPHIS

SEQ ID NO: 49642 - protein, 13 aa, Homo Sapiens
HMVKISGGPHISY

SEQ ID NO: 49643 - protein, 13 aa, Homo Sapiens
MVKISGGPHISYP

SEQ ID NO: 49644 - protein, 13 aa, Homo Sapiens
VKISGGPHISYPP

SEQ ID NO: 49645 - protein, 13 aa, Homo Sapiens
KISGGPHISYPPL

SEQ ID NO: 49646 - protein, 13 aa, Homo Sapiens
ISGGPHISYPPLH

SEQ ID NO: 49647 - protein, 13 aa, Homo Sapiens
SGGPHISYPPLHE

SEQ ID NO: 49648 - protein, 13 aa, Homo Sapiens
GGPHISYPPLHEW

SEQ ID NO: 49649 - protein, 13 aa, Homo Sapiens
GPHISYPPLHEWV

SEQ ID NO: 49650 - protein, 13 aa, Homo Sapiens
PHISYPPLHEWVL

SEQ ID NO: 49651 - protein, 13 aa, Homo Sapiens
HISYPPLHEWVLR

SEQ ID NO: 49652 - protein, 13 aa, Homo Sapiens
ISYPPLHEWVLRE

SEQ ID NO: 49653 - protein, 13 aa, Homo Sapiens
SYPPLHEWVLREG

SEQ ID NO: 49654 - protein, 13 aa, Homo Sapiens
YPPLHEWVLREGE

SEQ ID NO: 49655 - protein, 13 aa, Homo Sapiens
PPLHEWVLREGEE

SEQ ID NO: 49656 - protein, 14 aa, Homo Sapiens
MPLEQRSQHCKPEE

SEQ ID NO: 49657 - protein, 14 aa, Homo Sapiens
PLEQRSQHCKPEEG

SEQ ID NO: 49658 - protein, 14 aa, Homo Sapiens
LEQRSQHCKPEEGL

SEQ ID NO: 49659 - protein, 14 aa, Homo Sapiens
EQRSQHCKPEEGLE

SEQ ID NO: 49660 - protein, 14 aa, Homo Sapiens
QRSQHCKPEEGLEA

SEQ ID NO: 49661 - protein, 14 aa, Homo Sapiens
RSQHCKPEEGLEAR

SEQ ID NO: 49662 - protein, 14 aa, Homo Sapiens
SQHCKPEEGLEARG

SEQ ID NO: 49663 - protein, 14 aa, Homo Sapiens
QHCKPEEGLEARGE

SEQ ID NO: 49664 - protein, 14 aa, Homo Sapiens
HCKPEEGLEARGEA

SEQ ID NO: 49665 - protein, 14 aa, Homo Sapiens
CKPEEGLEARGEAL

SEQ ID NO: 49666 - protein, 14 aa, Homo Sapiens
KPEEGLEARGEALG

SEQ ID NO: 49667 - protein, 14 aa, Homo Sapiens
PEEGLEARGEALGL

SEQ ID NO: 49668 - protein, 14 aa, Homo Sapiens
EEGLEARGEALGLV

SEQ ID NO: 49669 - protein, 14 aa, Homo Sapiens
EGLEARGEALGLVG

SEQ ID NO: 49670 - protein, 14 aa, Homo Sapiens
GLEARGEALGLVGA

SEQ ID NO: 49671 - protein, 14 aa, Homo Sapiens
LEARGEALGLVGAQ

SEQ ID NO: 49672 - protein, 14 aa, Homo Sapiens
EARGEALGLVGAQA

SEQ ID NO: 49673 - protein, 14 aa, Homo Sapiens
ARGEALGLVGAQAP

SEQ ID NO: 49674 - protein, 14 aa, Homo Sapiens
RGEALGLVGAQAPA

SEQ ID NO: 49675 - protein, 14 aa, Homo Sapiens
GEALGLVGAQAPAT

SEQ ID NO: 49676 - protein, 14 aa, Homo Sapiens
EALGLVGAQAPATE

SEQ ID NO: 49677 - protein, 14 aa, Homo Sapiens
ALGLVGAQAPATEE

SEQ ID NO: 49678 - protein, 14 aa, Homo Sapiens
LGLVGAQAPATEEQ

SEQ ID NO: 49679 - protein, 14 aa, Homo Sapiens
GLVGAQAPATEEQE

SEQ ID NO: 49680 - protein, 14 aa, Homo Sapiens
LVGAQAPATEEQEA

SEQ ID NO: 49681 - protein, 14 aa, Homo Sapiens
VGAQAPATEEQEAA

SEQ ID NO: 49682 - protein, 14 aa, Homo Sapiens
GAQAPATEEQEAAS

SEQ ID NO: 49683 - protein, 14 aa, Homo Sapiens
AQAPATEEQEAASS

SEQ ID NO: 49684 - protein, 14 aa, Homo Sapiens
QAPATEEQEAASSS

SEQ ID NO: 49685 - protein, 14 aa, Homo Sapiens
APATEEQEAASSSS

SEQ ID NO: 49686 - protein, 14 aa, Homo Sapiens
PATEEQEAASSSST

SEQ ID NO: 49687 - protein, 14 aa, Homo Sapiens
ATEEQEAASSSSTL

SEQ ID NO: 49688 - protein, 14 aa, Homo Sapiens
TEEQEAASSSSTLV

SEQ ID NO: 49689 - protein, 14 aa, Homo Sapiens
EEQEAASSSSTLVE

SEQ ID NO: 49690 - protein, 14 aa, Homo Sapiens
EQEAASSSSTLVEV

SEQ ID NO: 49691 - protein, 14 aa, Homo Sapiens
QEAASSSSTLVEVT

SEQ ID NO: 49692 - protein, 14 aa, Homo Sapiens
EAASSSSTLVEVTL

SEQ ID NO: 49693 - protein, 14 aa, Homo Sapiens
AASSSSTLVEVTLG

SEQ ID NO: 49694 - protein, 14 aa, Homo Sapiens
ASSSSTLVEVTLGE

SEQ ID NO: 49695 - protein, 14 aa, Homo Sapiens
SSSSTLVEVTLGEV

SEQ ID NO: 49696 - protein, 14 aa, Homo Sapiens
SSSTLVEVTLGEVP

SEQ ID NO: 49697 - protein, 14 aa, Homo Sapiens
SSTLVEVTLGEVPA

SEQ ID NO: 49698 - protein, 14 aa, Homo Sapiens
STLVEVTLGEVPAA

SEQ ID NO: 49699 - protein, 14 aa, Homo Sapiens
TLVEVTLGEVPAAE

SEQ ID NO: 49700 - protein, 14 aa, Homo Sapiens
LVEVTLGEVPAAES

SEQ ID NO: 49701 - protein, 14 aa, Homo Sapiens
VEVTLGEVPAAESP

SEQ ID NO: 49702 - protein, 14 aa, Homo Sapiens
EVTLGEVPAAESPD

SEQ ID NO: 49703 - protein, 14 aa, Homo Sapiens
VTLGEVPAAESPDP

SEQ ID NO: 49704 - protein, 14 aa, Homo Sapiens
TLGEVPAAESPDPP

SEQ ID NO: 49705 - protein, 14 aa, Homo Sapiens
LGEVPAAESPDPPQ

SEQ ID NO: 49706 - protein, 14 aa, Homo Sapiens
GEVPAAESPDPPQS

SEQ ID NO: 49707 - protein, 14 aa, Homo Sapiens
EVPAAESPDPPQSP

SEQ ID NO: 49708 - protein, 14 aa, Homo Sapiens
VPAAESPDPPQSPQ

SEQ ID NO: 49709 - protein, 14 aa, Homo Sapiens
PAAESPDPPQSPQG

SEQ ID NO: 49710 - protein, 14 aa, Homo Sapiens
AAESPDPPQSPQGA

SEQ ID NO: 49711 - protein, 14 aa, Homo Sapiens
AESPDPPQSPQGAS

SEQ ID NO: 49712 - protein, 14 aa, Homo Sapiens
ESPDPPQSPQGASS

SEQ ID NO: 49713 - protein, 14 aa, Homo Sapiens
SPDPPQSPQGASSL

SEQ ID NO: 49714 - protein, 14 aa, Homo Sapiens
PDPPQSPQGASSLP

SEQ ID NO: 49715 - protein, 14 aa, Homo Sapiens
DPPQSPQGASSLPT

SEQ ID NO: 49716 - protein, 14 aa, Homo Sapiens
PPQSPQGASSLPTT

SEQ ID NO: 49717 - protein, 14 aa, Homo Sapiens
PQSPQGASSLPTTM

SEQ ID NO: 49718 - protein, 14 aa, Homo Sapiens
QSPQGASSLPTTMN

SEQ ID NO: 49719 - protein, 14 aa, Homo Sapiens
SPQGASSLPTTMNY

SEQ ID NO: 49720 - protein, 14 aa, Homo Sapiens
PQGASSLPTTMNYP

SEQ ID NO: 49721 - protein, 14 aa, Homo Sapiens
QGASSLPTTMNYPL

SEQ ID NO: 49722 - protein, 14 aa, Homo Sapiens
GASSLPTTMNYPLW

SEQ ID NO: 49723 - protein, 14 aa, Homo Sapiens
ASSLPTTMNYPLWS

SEQ ID NO: 49724 - protein, 14 aa, Homo Sapiens
SSLPTTMNYPLWSQ

SEQ ID NO: 49725 - protein, 14 aa, Homo Sapiens
SLPTTMNYPLWSQS

SEQ ID NO: 49726 - protein, 14 aa, Homo Sapiens
LPTTMNYPLWSQSY

SEQ ID NO: 49727 - protein, 14 aa, Homo Sapiens
PTTMNYPLWSQSYE

SEQ ID NO: 49728 - protein, 14 aa, Homo Sapiens
TTMNYPLWSQSYED

SEQ ID NO: 49729 - protein, 14 aa, Homo Sapiens
TMNYPLWSQSYEDS

SEQ ID NO: 49730 - protein, 14 aa, Homo Sapiens
MNYPLWSQSYEDSS

SEQ ID NO: 49731 - protein, 14 aa, Homo Sapiens
NYPLWSQSYEDSSN

SEQ ID NO: 49732 - protein, 14 aa, Homo Sapiens
YPLWSQSYEDSSNQ

SEQ ID NO: 49733 - protein, 14 aa, Homo Sapiens
PLWSQSYEDSSNQE

SEQ ID NO: 49734 - protein, 14 aa, Homo Sapiens
LWSQSYEDSSNQEE

SEQ ID NO: 49735 - protein, 14 aa, Homo Sapiens
WSQSYEDSSNQEEE

SEQ ID NO: 49736 - protein, 14 aa, Homo Sapiens
SQSYEDSSNQEEEG

SEQ ID NO: 49737 - protein, 14 aa, Homo Sapiens
QSYEDSSNQEEEGP

SEQ ID NO: 49738 - protein, 14 aa, Homo Sapiens
SYEDSSNQEEEGPS

SEQ ID NO: 49739 - protein, 14 aa, Homo Sapiens
YEDSSNQEEEGPST

SEQ ID NO: 49740 - protein, 14 aa, Homo Sapiens
EDSSNQEEEGPSTF

SEQ ID NO: 49741 - protein, 14 aa, Homo Sapiens
DSSNQEEEGPSTFP

SEQ ID NO: 49742 - protein, 14 aa, Homo Sapiens
SSNQEEEGPSTFPD

SEQ ID NO: 49743 - protein, 14 aa, Homo Sapiens
SNQEEEGPSTFPDL

SEQ ID NO: 49744 - protein, 14 aa, Homo Sapiens
NQEEEGPSTFPDLE

SEQ ID NO: 49745 - protein, 14 aa, Homo Sapiens
QEEEGPSTFPDLES

SEQ ID NO: 49746 - protein, 14 aa, Homo Sapiens
EEEGPSTFPDLESE

SEQ ID NO: 49747 - protein, 14 aa, Homo Sapiens
EEGPSTFPDLESEF

SEQ ID NO: 49748 - protein, 14 aa, Homo Sapiens
EGPSTFPDLESEFQ

SEQ ID NO: 49749 - protein, 14 aa, Homo Sapiens
GPSTFPDLESEFQA

SEQ ID NO: 49750 - protein, 14 aa, Homo Sapiens
PSTFPDLESEFQAA

SEQ ID NO: 49751 - protein, 14 aa, Homo Sapiens
STFPDLESEFQAAL

SEQ ID NO: 49752 - protein, 14 aa, Homo Sapiens
TFPDLESEFQAALS

SEQ ID NO: 49753 - protein, 14 aa, Homo Sapiens
FPDLESEFQAALSR

SEQ ID NO: 49754 - protein, 14 aa, Homo Sapiens
PDLESEFQAALSRK

SEQ ID NO: 49755 - protein, 14 aa, Homo Sapiens
DLESEFQAALSRKV

SEQ ID NO: 49756 - protein, 14 aa, Homo Sapiens
LESEFQAALSRKVA

SEQ ID NO: 49757 - protein, 14 aa, Homo Sapiens
ESEFQAALSRKVAE

SEQ ID NO: 49758 - protein, 14 aa, Homo Sapiens
SEFQAALSRKVAEL

SEQ ID NO: 49759 - protein, 14 aa, Homo Sapiens
EFQAALSRKVAELV

SEQ ID NO: 49760 - protein, 14 aa, Homo Sapiens
FQAALSRKVAELVH

SEQ ID NO: 49761 - protein, 14 aa, Homo Sapiens
QAALSRKVAELVHF

SEQ ID NO: 49762 - protein, 14 aa, Homo Sapiens
AALSRKVAELVHFL

SEQ ID NO: 49763 - protein, 14 aa, Homo Sapiens
ALSRKVAELVHFLL

SEQ ID NO: 49764 - protein, 14 aa, Homo Sapiens
LSRKVAELVHFLLL

SEQ ID NO: 49765 - protein, 14 aa, Homo Sapiens
SRKVAELVHFLLLK

SEQ ID NO: 49766 - protein, 14 aa, Homo Sapiens
RKVAELVHFLLLKY

SEQ ID NO: 49767 - protein, 14 aa, Homo Sapiens
KVAELVHFLLLKYR

SEQ ID NO: 49768 - protein, 14 aa, Homo Sapiens
VAELVHFLLLKYRA

SEQ ID NO: 49769 - protein, 14 aa, Homo Sapiens
AELVHFLLLKYRAR

SEQ ID NO: 49770 - protein, 14 aa, Homo Sapiens
ELVHFLLLKYRARE

SEQ ID NO: 49771 - protein, 14 aa, Homo Sapiens
LVHFLLLKYRAREP

SEQ ID NO: 49772 - protein, 14 aa, Homo Sapiens
VHFLLLKYRAREPV

SEQ ID NO: 49773 - protein, 14 aa, Homo Sapiens
HFLLLKYRAREPVT

SEQ ID NO: 49774 - protein, 14 aa, Homo Sapiens
FLLLKYRAREPVTK

SEQ ID NO: 49775 - protein, 14 aa, Homo Sapiens
LLLKYRAREPVTKA

SEQ ID NO: 49776 - protein, 14 aa, Homo Sapiens
LLKYRAREPVTKAE

SEQ ID NO: 49777 - protein, 14 aa, Homo Sapiens
LKYRAREPVTKAEM

SEQ ID NO: 49778 - protein, 14 aa, Homo Sapiens
KYRAREPVTKAEML

SEQ ID NO: 49779 - protein, 14 aa, Homo Sapiens
YRAREPVTKAEMLG

SEQ ID NO: 49780 - protein, 14 aa, Homo Sapiens
RAREPVTKAEMLGS

SEQ ID NO: 49781 - protein, 14 aa, Homo Sapiens
AREPVTKAEMLGSV

SEQ ID NO: 49782 - protein, 14 aa, Homo Sapiens
REPVTKAEMLGSVV

SEQ ID NO: 49783 - protein, 14 aa, Homo Sapiens
EPVTKAEMLGSVVG

SEQ ID NO: 49784 - protein, 14 aa, Homo Sapiens
PVTKAEMLGSVVGN

SEQ ID NO: 49785 - protein, 14 aa, Homo Sapiens
VTKAEMLGSVVGNW

SEQ ID NO: 49786 - protein, 14 aa, Homo Sapiens
TKAEMLGSVVGNWQ

SEQ ID NO: 49787 - protein, 14 aa, Homo Sapiens
KAEMLGSVVGNWQY

SEQ ID NO: 49788 - protein, 14 aa, Homo Sapiens
AEMLGSVVGNWQYF

SEQ ID NO: 49789 - protein, 14 aa, Homo Sapiens
EMLGSVVGNWQYFF

SEQ ID NO: 49790 - protein, 14 aa, Homo Sapiens
MLGSVVGNWQYFFP

SEQ ID NO: 49791 - protein, 14 aa, Homo Sapiens
LGSVVGNWQYFFPV

SEQ ID NO: 49792 - protein, 14 aa, Homo Sapiens
GSVVGNWQYFFPVI

SEQ ID NO: 49793 - protein, 14 aa, Homo Sapiens
SVVGNWQYFFPVIF

SEQ ID NO: 49794 - protein, 14 aa, Homo Sapiens
VVGNWQYFFPVIFS

SEQ ID NO: 49795 - protein, 14 aa, Homo Sapiens
VGNWQYFFPVIFSK

SEQ ID NO: 49796 - protein, 14 aa, Homo Sapiens
GNWQYFFPVIFSKA

SEQ ID NO: 49797 - protein, 14 aa, Homo Sapiens
NWQYFFPVIFSKAS

SEQ ID NO: 49798 - protein, 14 aa, Homo Sapiens
WQYFFPVIFSKASS

SEQ ID NO: 49799 - protein, 14 aa, Homo Sapiens
QYFFPVIFSKASSS

SEQ ID NO: 49800 - protein, 14 aa, Homo Sapiens
YFFPVIFSKASSSL

SEQ ID NO: 49801 - protein, 14 aa, Homo Sapiens
FFPVIFSKASSSLQ

SEQ ID NO: 49802 - protein, 14 aa, Homo Sapiens
FPVIFSKASSSLQL

SEQ ID NO: 49803 - protein, 14 aa, Homo Sapiens
PVIFSKASSSLQLV

SEQ ID NO: 49804 - protein, 14 aa, Homo Sapiens
VIFSKASSSLQLVF

SEQ ID NO: 49805 - protein, 14 aa, Homo Sapiens
IFSKASSSLQLVFG

SEQ ID NO: 49806 - protein, 14 aa, Homo Sapiens
FSKASSSLQLVFGI

SEQ ID NO: 49807 - protein, 14 aa, Homo Sapiens
SKASSSLQLVFGIE

SEQ ID NO: 49808 - protein, 14 aa, Homo Sapiens
KASSSLQLVFGIEL

SEQ ID NO: 49809 - protein, 14 aa, Homo Sapiens
ASSSLQLVFGIELM

SEQ ID NO: 49810 - protein, 14 aa, Homo Sapiens
SSSLQLVFGIELME

SEQ ID NO: 49811 - protein, 14 aa, Homo Sapiens
SSLQLVFGIELMEV

SEQ ID NO: 49812 - protein, 14 aa, Homo Sapiens
SLQLVFGIELMEVD

SEQ ID NO: 49813 - protein, 14 aa, Homo Sapiens
LQLVFGIELMEVDP

SEQ ID NO: 49814 - protein, 14 aa, Homo Sapiens
QLVFGIELMEVDPI

SEQ ID NO: 49815 - protein, 14 aa, Homo Sapiens
LVFGIELMEVDPIG

SEQ ID NO: 49816 - protein, 14 aa, Homo Sapiens
VFGIELMEVDPIGH

SEQ ID NO: 49817 - protein, 14 aa, Homo Sapiens
FGIELMEVDPIGHL

SEQ ID NO: 49818 - protein, 14 aa, Homo Sapiens
GIELMEVDPIGHLY

SEQ ID NO: 49819 - protein, 14 aa, Homo Sapiens
IELMEVDPIGHLYI

SEQ ID NO: 49820 - protein, 14 aa, Homo Sapiens
ELMEVDPIGHLYIF

SEQ ID NO: 49821 - protein, 14 aa, Homo Sapiens
LMEVDPIGHLYIFA

SEQ ID NO: 49822 - protein, 14 aa, Homo Sapiens
MEVDPIGHLYIFAT

SEQ ID NO: 49823 - protein, 14 aa, Homo Sapiens
EVDPIGHLYIFATC

SEQ ID NO: 49824 - protein, 14 aa, Homo Sapiens
VDPIGHLYIFATCL

SEQ ID NO: 49825 - protein, 14 aa, Homo Sapiens
DPIGHLYIFATCLG

SEQ ID NO: 49826 - protein, 14 aa, Homo Sapiens
PIGHLYIFATCLGL

SEQ ID NO: 49827 - protein, 14 aa, Homo Sapiens
IGHLYIFATCLGLS

SEQ ID NO: 49828 - protein, 14 aa, Homo Sapiens
GHLYIFATCLGLSY

SEQ ID NO: 49829 - protein, 14 aa, Homo Sapiens
HLYIFATCLGLSYD

SEQ ID NO: 49830 - protein, 14 aa, Homo Sapiens
LYIFATCLGLSYDG

SEQ ID NO: 49831 - protein, 14 aa, Homo Sapiens
YIFATCLGLSYDGL

SEQ ID NO: 49832 - protein, 14 aa, Homo Sapiens
IFATCLGLSYDGLL

SEQ ID NO: 49833 - protein, 14 aa, Homo Sapiens
FATCLGLSYDGLLG

SEQ ID NO: 49834 - protein, 14 aa, Homo Sapiens
ATCLGLSYDGLLGD

SEQ ID NO: 49835 - protein, 14 aa, Homo Sapiens
TCLGLSYDGLLGDN

SEQ ID NO: 49836 - protein, 14 aa, Homo Sapiens
CLGLSYDGLLGDNQ

SEQ ID NO: 49837 - protein, 14 aa, Homo Sapiens
LGLSYDGLLGDNQI

SEQ ID NO: 49838 - protein, 14 aa, Homo Sapiens
GLSYDGLLGDNQIM

SEQ ID NO: 49839 - protein, 14 aa, Homo Sapiens
LSYDGLLGDNQIMP

SEQ ID NO: 49840 - protein, 14 aa, Homo Sapiens
SYDGLLGDNQIMPK

SEQ ID NO: 49841 - protein, 14 aa, Homo Sapiens
YDGLLGDNQIMPKA

SEQ ID NO: 49842 - protein, 14 aa, Homo Sapiens
DGLLGDNQIMPKAG

SEQ ID NO: 49843 - protein, 14 aa, Homo Sapiens
GLLGDNQIMPKAGL

SEQ ID NO: 49844 - protein, 14 aa, Homo Sapiens
LLGDNQIMPKAGLL

SEQ ID NO: 49845 - protein, 14 aa, Homo Sapiens
LGDNQIMPKAGLLI

SEQ ID NO: 49846 - protein, 14 aa, Homo Sapiens
GDNQIMPKAGLLII

SEQ ID NO: 49847 - protein, 14 aa, Homo Sapiens
DNQIMPKAGLLIIV

SEQ ID NO: 49848 - protein, 14 aa, Homo Sapiens
NQIMPKAGLLIIVL

SEQ ID NO: 49849 - protein, 14 aa, Homo Sapiens
QIMPKAGLLIIVLA

SEQ ID NO: 49850 - protein, 14 aa, Homo Sapiens
IMPKAGLLIIVLAI

SEQ ID NO: 49851 - protein, 14 aa, Homo Sapiens
MPKAGLLIIVLAII

SEQ ID NO: 49852 - protein, 14 aa, Homo Sapiens
PKAGLLIIVLAIIA

SEQ ID NO: 49853 - protein, 14 aa, Homo Sapiens
KAGLLIIVLAIIAR

SEQ ID NO: 49854 - protein, 14 aa, Homo Sapiens
AGLLIIVLAIIARE

SEQ ID NO: 49855 - protein, 14 aa, Homo Sapiens
GLLIIVLAIIAREG

SEQ ID NO: 49856 - protein, 14 aa, Homo Sapiens
LLIIVLAIIAREGD

SEQ ID NO: 49857 - protein, 14 aa, Homo Sapiens
LIIVLAIIAREGDC

SEQ ID NO: 49858 - protein, 14 aa, Homo Sapiens
IIVLAIIAREGDCA

SEQ ID NO: 49859 - protein, 14 aa, Homo Sapiens
IVLAIIAREGDCAP

SEQ ID NO: 49860 - protein, 14 aa, Homo Sapiens
VLAIIAREGDCAPE

SEQ ID NO: 49861 - protein, 14 aa, Homo Sapiens
LAIIAREGDCAPEE

SEQ ID NO: 49862 - protein, 14 aa, Homo Sapiens
AIIAREGDCAPEEK

SEQ ID NO: 49863 - protein, 14 aa, Homo Sapiens
IIAREGDCAPEEKI

SEQ ID NO: 49864 - protein, 14 aa, Homo Sapiens
IAREGDCAPEEKIW

SEQ ID NO: 49865 - protein, 14 aa, Homo Sapiens
AREGDCAPEEKIWE

SEQ ID NO: 49866 - protein, 14 aa, Homo Sapiens
REGDCAPEEKIWEE

SEQ ID NO: 49867 - protein, 14 aa, Homo Sapiens
EGDCAPEEKIWEEL

SEQ ID NO: 49868 - protein, 14 aa, Homo Sapiens
GDCAPEEKIWEELS

SEQ ID NO: 49869 - protein, 14 aa, Homo Sapiens
DCAPEEKIWEELSV

SEQ ID NO: 49870 - protein, 14 aa, Homo Sapiens
CAPEEKIWEELSVL

SEQ ID NO: 49871 - protein, 14 aa, Homo Sapiens
APEEKIWEELSVLE

SEQ ID NO: 49872 - protein, 14 aa, Homo Sapiens
PEEKIWEELSVLEV

SEQ ID NO: 49873 - protein, 14 aa, Homo Sapiens
EEKIWEELSVLEVF

SEQ ID NO: 49874 - protein, 14 aa, Homo Sapiens
EKIWEELSVLEVFE

SEQ ID NO: 49875 - protein, 14 aa, Homo Sapiens
KIWEELSVLEVFEG

SEQ ID NO: 49876 - protein, 14 aa, Homo Sapiens
IWEELSVLEVFEGR

SEQ ID NO: 49877 - protein, 14 aa, Homo Sapiens
WEELSVLEVFEGRE

SEQ ID NO: 49878 - protein, 14 aa, Homo Sapiens
EELSVLEVFEGRED

SEQ ID NO: 49879 - protein, 14 aa, Homo Sapiens
ELSVLEVFEGREDS

SEQ ID NO: 49880 - protein, 14 aa, Homo Sapiens
LSVLEVFEGREDSI

SEQ ID NO: 49881 - protein, 14 aa, Homo Sapiens
SVLEVFEGREDSIL

SEQ ID NO: 49882 - protein, 14 aa, Homo Sapiens
VLEVFEGREDSILG

SEQ ID NO: 49883 - protein, 14 aa, Homo Sapiens
LEVFEGREDSILGD

SEQ ID NO: 49884 - protein, 14 aa, Homo Sapiens
EVFEGREDSILGDP

SEQ ID NO: 49885 - protein, 14 aa, Homo Sapiens
VFEGREDSILGDPK

SEQ ID NO: 49886 - protein, 14 aa, Homo Sapiens
FEGREDSILGDPKK

SEQ ID NO: 49887 - protein, 14 aa, Homo Sapiens
EGREDSILGDPKKL

SEQ ID NO: 49888 - protein, 14 aa, Homo Sapiens
GREDSILGDPKKLL

SEQ ID NO: 49889 - protein, 14 aa, Homo Sapiens
REDSILGDPKKLLT

SEQ ID NO: 49890 - protein, 14 aa, Homo Sapiens
EDSILGDPKKLLTQ

SEQ ID NO: 49891 - protein, 14 aa, Homo Sapiens
DSILGDPKKLLTQH

SEQ ID NO: 49892 - protein, 14 aa, Homo Sapiens
SILGDPKKLLTQHF

SEQ ID NO: 49893 - protein, 14 aa, Homo Sapiens
ILGDPKKLLTQHFV

SEQ ID NO: 49894 - protein, 14 aa, Homo Sapiens
LGDPKKLLTQHFVQ

SEQ ID NO: 49895 - protein, 14 aa, Homo Sapiens
GDPKKLLTQHFVQE

SEQ ID NO: 49896 - protein, 14 aa, Homo Sapiens
DPKKLLTQHFVQEN

SEQ ID NO: 49897 - protein, 14 aa, Homo Sapiens
PKKLLTQHFVQENY

SEQ ID NO: 49898 - protein, 14 aa, Homo Sapiens
KKLLTQHFVQENYL

SEQ ID NO: 49899 - protein, 14 aa, Homo Sapiens
KLLTQHFVQENYLE

SEQ ID NO: 49900 - protein, 14 aa, Homo Sapiens
LLTQHFVQENYLEY

SEQ ID NO: 49901 - protein, 14 aa, Homo Sapiens
LTQHFVQENYLEYR

SEQ ID NO: 49902 - protein, 14 aa, Homo Sapiens
TQHFVQENYLEYRQ

SEQ ID NO: 49903 - protein, 14 aa, Homo Sapiens
QHFVQENYLEYRQV

SEQ ID NO: 49904 - protein, 14 aa, Homo Sapiens
HFVQENYLEYRQVP

SEQ ID NO: 49905 - protein, 14 aa, Homo Sapiens
FVQENYLEYRQVPG

SEQ ID NO: 49906 - protein, 14 aa, Homo Sapiens
VQENYLEYRQVPGS

SEQ ID NO: 49907 - protein, 14 aa, Homo Sapiens
QENYLEYRQVPGSD

SEQ ID NO: 49908 - protein, 14 aa, Homo Sapiens
ENYLEYRQVPGSDP

SEQ ID NO: 49909 - protein, 14 aa, Homo Sapiens
NYLEYRQVPGSDPA

SEQ ID NO: 49910 - protein, 14 aa, Homo Sapiens
YLEYRQVPGSDPAC

SEQ ID NO: 49911 - protein, 14 aa, Homo Sapiens
LEYRQVPGSDPACY

SEQ ID NO: 49912 - protein, 14 aa, Homo Sapiens
EYRQVPGSDPACYE

SEQ ID NO: 49913 - protein, 14 aa, Homo Sapiens
YRQVPGSDPACYEF

SEQ ID NO: 49914 - protein, 14 aa, Homo Sapiens
RQVPGSDPACYEFL

SEQ ID NO: 49915 - protein, 14 aa, Homo Sapiens
QVPGSDPACYEFLW

SEQ ID NO: 49916 - protein, 14 aa, Homo Sapiens
VPGSDPACYEFLWG

SEQ ID NO: 49917 - protein, 14 aa, Homo Sapiens
PGSDPACYEFLWGP

SEQ ID NO: 49918 - protein, 14 aa, Homo Sapiens
GSDPACYEFLWGPR

SEQ ID NO: 49919 - protein, 14 aa, Homo Sapiens
SDPACYEFLWGPRA

SEQ ID NO: 49920 - protein, 14 aa, Homo Sapiens
DPACYEFLWGPRAL

SEQ ID NO: 49921 - protein, 14 aa, Homo Sapiens
PACYEFLWGPRALV

SEQ ID NO: 49922 - protein, 14 aa, Homo Sapiens
ACYEFLWGPRALVE

SEQ ID NO: 49923 - protein, 14 aa, Homo Sapiens
CYEFLWGPRALVET

SEQ ID NO: 49924 - protein, 14 aa, Homo Sapiens
YEFLWGPRALVETS

SEQ ID NO: 49925 - protein, 14 aa, Homo Sapiens
EFLWGPRALVETSY

SEQ ID NO: 49926 - protein, 14 aa, Homo Sapiens
FLWGPRALVETSYV

SEQ ID NO: 49927 - protein, 14 aa, Homo Sapiens
LWGPRALVETSYVK

SEQ ID NO: 49928 - protein, 14 aa, Homo Sapiens
WGPRALVETSYVKV

SEQ ID NO: 49929 - protein, 14 aa, Homo Sapiens
GPRALVETSYVKVL

SEQ ID NO: 49930 - protein, 14 aa, Homo Sapiens
PRALVETSYVKVLH

SEQ ID NO: 49931 - protein, 14 aa, Homo Sapiens
RALVETSYVKVLHH

SEQ ID NO: 49932 - protein, 14 aa, Homo Sapiens
ALVETSYVKVLHHM

SEQ ID NO: 49933 - protein, 14 aa, Homo Sapiens
LVETSYVKVLHHMV

SEQ ID NO: 49934 - protein, 14 aa, Homo Sapiens
VETSYVKVLHHMVK

SEQ ID NO: 49935 - protein, 14 aa, Homo Sapiens
ETSYVKVLHHMVKI

SEQ ID NO: 49936 - protein, 14 aa, Homo Sapiens
TSYVKVLHHMVKIS

SEQ ID NO: 49937 - protein, 14 aa, Homo Sapiens
SYVKVLHHMVKISG

SEQ ID NO: 49938 - protein, 14 aa, Homo Sapiens
YVKVLHHMVKISGG

SEQ ID NO: 49939 - protein, 14 aa, Homo Sapiens
VKVLHHMVKISGGP

SEQ ID NO: 49940 - protein, 14 aa, Homo Sapiens
KVLHHMVKISGGPH

SEQ ID NO: 49941 - protein, 14 aa, Homo Sapiens
VLHHMVKISGGPHI

SEQ ID NO: 49942 - protein, 14 aa, Homo Sapiens
LHHMVKISGGPHIS

SEQ ID NO: 49943 - protein, 14 aa, Homo Sapiens
HHMVKISGGPHISY

SEQ ID NO: 49944 - protein, 14 aa, Homo Sapiens
HMVKISGGPHISYP

SEQ ID NO: 49945 - protein, 14 aa, Homo Sapiens
MVKISGGPHISYPP

SEQ ID NO: 49946 - protein, 14 aa, Homo Sapiens
VKISGGPHISYPPL

SEQ ID NO: 49947 - protein, 14 aa, Homo Sapiens
KISGGPHISYPPLH

SEQ ID NO: 49948 - protein, 14 aa, Homo Sapiens
ISGGPHISYPPLHE

SEQ ID NO: 49949 - protein, 14 aa, Homo Sapiens
SGGPHISYPPLHEW

SEQ ID NO: 49950 - protein, 14 aa, Homo Sapiens
GGPHISYPPLHEWV

SEQ ID NO: 49951 - protein, 14 aa, Homo Sapiens
GPHISYPPLHEWVL

SEQ ID NO: 49952 - protein, 14 aa, Homo Sapiens
PHISYPPLHEWVLR

SEQ ID NO: 49953 - protein, 14 aa, Homo Sapiens
HISYPPLHEWVLRE

SEQ ID NO: 49954 - protein, 14 aa, Homo Sapiens
ISYPPLHEWVLREG

SEQ ID NO: 49955 - protein, 14 aa, Homo Sapiens
SYPPLHEWVLREGE

SEQ ID NO: 49956 - protein, 14 aa, Homo Sapiens
YPPLHEWVLREGEE

SEQ ID NO: 49957 - protein, 15 aa, Homo Sapiens
MPLEQRSQHCKPEEG

SEQ ID NO: 49958 - protein, 15 aa, Homo Sapiens
PLEQRSQHCKPEEGL

SEQ ID NO: 49959 - protein, 15 aa, Homo Sapiens
LEQRSQHCKPEEGLE

SEQ ID NO: 49960 - protein, 15 aa, Homo Sapiens
EQRSQHCKPEEGLEA

SEQ ID NO: 49961 - protein, 15 aa, Homo Sapiens
QRSQHCKPEEGLEAR

SEQ ID NO: 49962 - protein, 15 aa, Homo Sapiens
RSQHCKPEEGLEARG

SEQ ID NO: 49963 - protein, 15 aa, Homo Sapiens
SQHCKPEEGLEARGE

SEQ ID NO: 49964 - protein, 15 aa, Homo Sapiens
QHCKPEEGLEARGEA

SEQ ID NO: 49965 - protein, 15 aa, Homo Sapiens
HCKPEEGLEARGEAL

SEQ ID NO: 49966 - protein, 15 aa, Homo Sapiens
CKPEEGLEARGEALG

SEQ ID NO: 49967 - protein, 15 aa, Homo Sapiens
KPEEGLEARGEALGL

SEQ ID NO: 49968 - protein, 15 aa, Homo Sapiens
PEEGLEARGEALGLV

SEQ ID NO: 49969 - protein, 15 aa, Homo Sapiens
EEGLEARGEALGLVG

SEQ ID NO: 49970 - protein, 15 aa, Homo Sapiens
EGLEARGEALGLVGA

SEQ ID NO: 49971 - protein, 15 aa, Homo Sapiens
GLEARGEALGLVGAQ

SEQ ID NO: 49972 - protein, 15 aa, Homo Sapiens
LEARGEALGLVGAQA

SEQ ID NO: 49973 - protein, 15 aa, Homo Sapiens
EARGEALGLVGAQAP

SEQ ID NO: 49974 - protein, 15 aa, Homo Sapiens
ARGEALGLVGAQAPA

SEQ ID NO: 49975 - protein, 15 aa, Homo Sapiens
RGEALGLVGAQAPAT

SEQ ID NO: 49976 - protein, 15 aa, Homo Sapiens
GEALGLVGAQAPATE

SEQ ID NO: 49977 - protein, 15 aa, Homo Sapiens
EALGLVGAQAPATEE

SEQ ID NO: 49978 - protein, 15 aa, Homo Sapiens
ALGLVGAQAPATEEQ

SEQ ID NO: 49979 - protein, 15 aa, Homo Sapiens
LGLVGAQAPATEEQE

SEQ ID NO: 49980 - protein, 15 aa, Homo Sapiens
GLVGAQAPATEEQEA

SEQ ID NO: 49981 - protein, 15 aa, Homo Sapiens
LVGAQAPATEEQEAA

SEQ ID NO: 49982 - protein, 15 aa, Homo Sapiens
VGAQAPATEEQEAAS

SEQ ID NO: 49983 - protein, 15 aa, Homo Sapiens
GAQAPATEEQEAASS

SEQ ID NO: 49984 - protein, 15 aa, Homo Sapiens
AQAPATEEQEAASSS

SEQ ID NO: 49985 - protein, 15 aa, Homo Sapiens
QAPATEEQEAASSSS

SEQ ID NO: 49986 - protein, 15 aa, Homo Sapiens
APATEEQEAASSSST

SEQ ID NO: 49987 - protein, 15 aa, Homo Sapiens
PATEEQEAASSSSTL

SEQ ID NO: 49988 - protein, 15 aa, Homo Sapiens
ATEEQEAASSSSTLV

SEQ ID NO: 49989 - protein, 15 aa, Homo Sapiens
TEEQEAASSSSTLVE

SEQ ID NO: 49990 - protein, 15 aa, Homo Sapiens
EEQEAASSSSTLVEV

SEQ ID NO: 49991 - protein, 15 aa, Homo Sapiens
EQEAASSSSTLVEVT

SEQ ID NO: 49992 - protein, 15 aa, Homo Sapiens
QEAASSSSTLVEVTL

SEQ ID NO: 49993 - protein, 15 aa, Homo Sapiens
EAASSSSTLVEVTLG

SEQ ID NO: 49994 - protein, 15 aa, Homo Sapiens
AASSSSTLVEVTLGE

SEQ ID NO: 49995 - protein, 15 aa, Homo Sapiens
ASSSSTLVEVTLGEV

SEQ ID NO: 49996 - protein, 15 aa, Homo Sapiens
SSSSTLVEVTLGEVP

SEQ ID NO: 49997 - protein, 15 aa, Homo Sapiens
SSSTLVEVTLGEVPA

SEQ ID NO: 49998 - protein, 15 aa, Homo Sapiens
SSTLVEVTLGEVPAA

SEQ ID NO: 49999 - protein, 15 aa, Homo Sapiens
STLVEVTLGEVPAAE

SEQ ID NO: 50000 - protein, 15 aa, Homo Sapiens
TLVEVTLGEVPAAES

SEQ ID NO: 50001 - protein, 15 aa, Homo Sapiens
LVEVTLGEVPAAESP

SEQ ID NO: 50002 - protein, 15 aa, Homo Sapiens
VEVTLGEVPAAESPD

SEQ ID NO: 50003 - protein, 15 aa, Homo Sapiens
EVTLGEVPAAESPDP

SEQ ID NO: 50004 - protein, 15 aa, Homo Sapiens
VTLGEVPAAESPDPP

SEQ ID NO: 50005 - protein, 15 aa, Homo Sapiens
TLGEVPAAESPDPPQ

SEQ ID NO: 50006 - protein, 15 aa, Homo Sapiens
LGEVPAAESPDPPQS

SEQ ID NO: 50007 - protein, 15 aa, Homo Sapiens
GEVPAAESPDPPQSP

SEQ ID NO: 50008 - protein, 15 aa, Homo Sapiens
EVPAAESPDPPQSPQ

SEQ ID NO: 50009 - protein, 15 aa, Homo Sapiens
VPAAESPDPPQSPQG

SEQ ID NO: 50010 - protein, 15 aa, Homo Sapiens
PAAESPDPPQSPQGA

SEQ ID NO: 50011 - protein, 15 aa, Homo Sapiens
AAESPDPPQSPQGAS

SEQ ID NO: 50012 - protein, 15 aa, Homo Sapiens
AESPDPPQSPQGASS

SEQ ID NO: 50013 - protein, 15 aa, Homo Sapiens
ESPDPPQSPQGASSL

SEQ ID NO: 50014 - protein, 15 aa, Homo Sapiens
SPDPPQSPQGASSLP

SEQ ID NO: 50015 - protein, 15 aa, Homo Sapiens
PDPPQSPQGASSLPT

SEQ ID NO: 50016 - protein, 15 aa, Homo Sapiens
DPPQSPQGASSLPTT

SEQ ID NO: 50017 - protein, 15 aa, Homo Sapiens
PPQSPQGASSLPTTM

SEQ ID NO: 50018 - protein, 15 aa, Homo Sapiens
PQSPQGASSLPTTMN

SEQ ID NO: 50019 - protein, 15 aa, Homo Sapiens
QSPQGASSLPTTMNY

SEQ ID NO: 50020 - protein, 15 aa, Homo Sapiens
SPQGASSLPTTMNYP

SEQ ID NO: 50021 - protein, 15 aa, Homo Sapiens
PQGASSLPTTMNYPL

SEQ ID NO: 50022 - protein, 15 aa, Homo Sapiens
QGASSLPTTMNYPLW

SEQ ID NO: 50023 - protein, 15 aa, Homo Sapiens
GASSLPTTMNYPLWS

SEQ ID NO: 50024 - protein, 15 aa, Homo Sapiens
ASSLPTTMNYPLWSQ

SEQ ID NO: 50025 - protein, 15 aa, Homo Sapiens
SSLPTTMNYPLWSQS

SEQ ID NO: 50026 - protein, 15 aa, Homo Sapiens
SLPTTMNYPLWSQSY

SEQ ID NO: 50027 - protein, 15 aa, Homo Sapiens
LPTTMNYPLWSQSYE

SEQ ID NO: 50028 - protein, 15 aa, Homo Sapiens
PTTMNYPLWSQSYED

SEQ ID NO: 50029 - protein, 15 aa, Homo Sapiens
TTMNYPLWSQSYEDS

SEQ ID NO: 50030 - protein, 15 aa, Homo Sapiens
TMNYPLWSQSYEDSS

SEQ ID NO: 50031 - protein, 15 aa, Homo Sapiens
MNYPLWSQSYEDSSN

SEQ ID NO: 50032 - protein, 15 aa, Homo Sapiens
NYPLWSQSYEDSSNQ

SEQ ID NO: 50033 - protein, 15 aa, Homo Sapiens
YPLWSQSYEDSSNQE

SEQ ID NO: 50034 - protein, 15 aa, Homo Sapiens
PLWSQSYEDSSNQEE

SEQ ID NO: 50035 - protein, 15 aa, Homo Sapiens
LWSQSYEDSSNQEEE

SEQ ID NO: 50036 - protein, 15 aa, Homo Sapiens
WSQSYEDSSNQEEEG

SEQ ID NO: 50037 - protein, 15 aa, Homo Sapiens
SQSYEDSSNQEEEGP

SEQ ID NO: 50038 - protein, 15 aa, Homo Sapiens
QSYEDSSNQEEEGPS

SEQ ID NO: 50039 - protein, 15 aa, Homo Sapiens
SYEDSSNQEEEGPST

SEQ ID NO: 50040 - protein, 15 aa, Homo Sapiens
YEDSSNQEEEGPSTF

SEQ ID NO: 50041 - protein, 15 aa, Homo Sapiens
EDSSNQEEEGPSTFP

SEQ ID NO: 50042 - protein, 15 aa, Homo Sapiens
DSSNQEEEGPSTFPD

SEQ ID NO: 50043 - protein, 15 aa, Homo Sapiens
SSNQEEEGPSTFPDL

SEQ ID NO: 50044 - protein, 15 aa, Homo Sapiens
SNQEEEGPSTFPDLE

SEQ ID NO: 50045 - protein, 15 aa, Homo Sapiens
NQEEEGPSTFPDLES

SEQ ID NO: 50046 - protein, 15 aa, Homo Sapiens
QEEEGPSTFPDLESE

SEQ ID NO: 50047 - protein, 15 aa, Homo Sapiens
EEEGPSTFPDLESEF

SEQ ID NO: 50048 - protein, 15 aa, Homo Sapiens
EEGPSTFPDLESEFQ

SEQ ID NO: 50049 - protein, 15 aa, Homo Sapiens
EGPSTFPDLESEFQA

SEQ ID NO: 50050 - protein, 15 aa, Homo Sapiens
GPSTFPDLESEFQAA

SEQ ID NO: 50051 - protein, 15 aa, Homo Sapiens
PSTFPDLESEFQAAL

SEQ ID NO: 50052 - protein, 15 aa, Homo Sapiens
STFPDLESEFQAALS

SEQ ID NO: 50053 - protein, 15 aa, Homo Sapiens
TFPDLESEFQAALSR

SEQ ID NO: 50054 - protein, 15 aa, Homo Sapiens
FPDLESEFQAALSRK

SEQ ID NO: 50055 - protein, 15 aa, Homo Sapiens
PDLESEFQAALSRKV

SEQ ID NO: 50056 - protein, 15 aa, Homo Sapiens
DLESEFQAALSRKVA

SEQ ID NO: 50057 - protein, 15 aa, Homo Sapiens
LESEFQAALSRKVAE

SEQ ID NO: 50058 - protein, 15 aa, Homo Sapiens
ESEFQAALSRKVAEL

SEQ ID NO: 50059 - protein, 15 aa, Homo Sapiens
SEFQAALSRKVAELV

SEQ ID NO: 50060 - protein, 15 aa, Homo Sapiens
EFQAALSRKVAELVH

SEQ ID NO: 50061 - protein, 15 aa, Homo Sapiens
FQAALSRKVAELVHF

SEQ ID NO: 50062 - protein, 15 aa, Homo Sapiens
QAALSRKVAELVHFL

SEQ ID NO: 50063 - protein, 15 aa, Homo Sapiens
AALSRKVAELVHFLL

SEQ ID NO: 50064 - protein, 15 aa, Homo Sapiens
ALSRKVAELVHFLLL

SEQ ID NO: 50065 - protein, 15 aa, Homo Sapiens
LSRKVAELVHFLLLK

SEQ ID NO: 50066 - protein, 15 aa, Homo Sapiens
SRKVAELVHFLLLKY

SEQ ID NO: 50067 - protein, 15 aa, Homo Sapiens
RKVAELVHFLLLKYR

SEQ ID NO: 50068 - protein, 15 aa, Homo Sapiens
KVAELVHFLLLKYRA

SEQ ID NO: 50069 - protein, 15 aa, Homo Sapiens
VAELVHFLLLKYRAR

SEQ ID NO: 50070 - protein, 15 aa, Homo Sapiens
AELVHFLLLKYRARE

SEQ ID NO: 50071 - protein, 15 aa, Homo Sapiens
ELVHFLLLKYRAREP

SEQ ID NO: 50072 - protein, 15 aa, Homo Sapiens
LVHFLLLKYRAREPV

SEQ ID NO: 50073 - protein, 15 aa, Homo Sapiens
VHFLLLKYRAREPVT

SEQ ID NO: 50074 - protein, 15 aa, Homo Sapiens
HFLLLKYRAREPVTK

SEQ ID NO: 50075 - protein, 15 aa, Homo Sapiens
FLLLKYRAREPVTKA

SEQ ID NO: 50076 - protein, 15 aa, Homo Sapiens
LLLKYRAREPVTKAE

SEQ ID NO: 50077 - protein, 15 aa, Homo Sapiens
LLKYRAREPVTKAEM

SEQ ID NO: 50078 - protein, 15 aa, Homo Sapiens
LKYRAREPVTKAEML

SEQ ID NO: 50079 - protein, 15 aa, Homo Sapiens
KYRAREPVTKAEMLG

SEQ ID NO: 50080 - protein, 15 aa, Homo Sapiens
YRAREPVTKAEMLGS

SEQ ID NO: 50081 - protein, 15 aa, Homo Sapiens
RAREPVTKAEMLGSV

SEQ ID NO: 50082 - protein, 15 aa, Homo Sapiens
AREPVTKAEMLGSVV

SEQ ID NO: 50083 - protein, 15 aa, Homo Sapiens
REPVTKAEMLGSVVG

SEQ ID NO: 50084 - protein, 15 aa, Homo Sapiens
EPVTKAEMLGSVVGN

SEQ ID NO: 50085 - protein, 15 aa, Homo Sapiens
PVTKAEMLGSVVGNW

SEQ ID NO: 50086 - protein, 15 aa, Homo Sapiens
VTKAEMLGSVVGNWQ

SEQ ID NO: 50087 - protein, 15 aa, Homo Sapiens
TKAEMLGSVVGNWQY

SEQ ID NO: 50088 - protein, 15 aa, Homo Sapiens
KAEMLGSVVGNWQYF

SEQ ID NO: 50089 - protein, 15 aa, Homo Sapiens
AEMLGSVVGNWQYFF

SEQ ID NO: 50090 - protein, 15 aa, Homo Sapiens
EMLGSVVGNWQYFFP

SEQ ID NO: 50091 - protein, 15 aa, Homo Sapiens
MLGSVVGNWQYFFPV

SEQ ID NO: 50092 - protein, 15 aa, Homo Sapiens
LGSVVGNWQYFFPVI

SEQ ID NO: 50093 - protein, 15 aa, Homo Sapiens
GSVVGNWQYFFPVIF

SEQ ID NO: 50094 - protein, 15 aa, Homo Sapiens
SVVGNWQYFFPVIFS

SEQ ID NO: 50095 - protein, 15 aa, Homo Sapiens
VVGNWQYFFPVIFSK

SEQ ID NO: 50096 - protein, 15 aa, Homo Sapiens
VGNWQYFFPVIFSKA

SEQ ID NO: 50097 - protein, 15 aa, Homo Sapiens
GNWQYFFPVIFSKAS

SEQ ID NO: 50098 - protein, 15 aa, Homo Sapiens
NWQYFFPVIFSKASS

SEQ ID NO: 50099 - protein, 15 aa, Homo Sapiens
WQYFFPVIFSKASSS

SEQ ID NO: 50100 - protein, 15 aa, Homo Sapiens
QYFFPVIFSKASSSL

SEQ ID NO: 50101 - protein, 15 aa, Homo Sapiens
YFFPVIFSKASSSLQ

SEQ ID NO: 50102 - protein, 15 aa, Homo Sapiens
FFPVIFSKASSSLQL

SEQ ID NO: 50103 - protein, 15 aa, Homo Sapiens
FPVIFSKASSSLQLV

SEQ ID NO: 50104 - protein, 15 aa, Homo Sapiens
PVIFSKASSSLQLVF

SEQ ID NO: 50105 - protein, 15 aa, Homo Sapiens
VIFSKASSSLQLVFG

SEQ ID NO: 50106 - protein, 15 aa, Homo Sapiens
IFSKASSSLQLVFGI

SEQ ID NO: 50107 - protein, 15 aa, Homo Sapiens
FSKASSSLQLVFGIE

SEQ ID NO: 50108 - protein, 15 aa, Homo Sapiens
SKASSSLQLVFGIEL

SEQ ID NO: 50109 - protein, 15 aa, Homo Sapiens
KASSSLQLVFGIELM

SEQ ID NO: 50110 - protein, 15 aa, Homo Sapiens
ASSSLQLVFGIELME

SEQ ID NO: 50111 - protein, 15 aa, Homo Sapiens
SSSLQLVFGIELMEV

SEQ ID NO: 50112 - protein, 15 aa, Homo Sapiens
SSLQLVFGIELMEVD

SEQ ID NO: 50113 - protein, 15 aa, Homo Sapiens
SLQLVFGIELMEVDP

SEQ ID NO: 50114 - protein, 15 aa, Homo Sapiens
LQLVFGIELMEVDPI

SEQ ID NO: 50115 - protein, 15 aa, Homo Sapiens
QLVFGIELMEVDPIG

SEQ ID NO: 50116 - protein, 15 aa, Homo Sapiens
LVFGIELMEVDPIGH

SEQ ID NO: 50117 - protein, 15 aa, Homo Sapiens
VFGIELMEVDPIGHL

SEQ ID NO: 50118 - protein, 15 aa, Homo Sapiens
FGIELMEVDPIGHLY

SEQ ID NO: 50119 - protein, 15 aa, Homo Sapiens
GIELMEVDPIGHLYI

SEQ ID NO: 50120 - protein, 15 aa, Homo Sapiens
IELMEVDPIGHLYIF

SEQ ID NO: 50121 - protein, 15 aa, Homo Sapiens
ELMEVDPIGHLYIFA

SEQ ID NO: 50122 - protein, 15 aa, Homo Sapiens
LMEVDPIGHLYIFAT

SEQ ID NO: 50123 - protein, 15 aa, Homo Sapiens
MEVDPIGHLYIFATC

SEQ ID NO: 50124 - protein, 15 aa, Homo Sapiens
EVDPIGHLYIFATCL

SEQ ID NO: 50125 - protein, 15 aa, Homo Sapiens
VDPIGHLYIFATCLG

SEQ ID NO: 50126 - protein, 15 aa, Homo Sapiens
DPIGHLYIFATCLGL

SEQ ID NO: 50127 - protein, 15 aa, Homo Sapiens
PIGHLYIFATCLGLS

SEQ ID NO: 50128 - protein, 15 aa, Homo Sapiens
IGHLYIFATCLGLSY

SEQ ID NO: 50129 - protein, 15 aa, Homo Sapiens
GHLYIFATCLGLSYD

SEQ ID NO: 50130 - protein, 15 aa, Homo Sapiens
HLYIFATCLGLSYDG

SEQ ID NO: 50131 - protein, 15 aa, Homo Sapiens
LYIFATCLGLSYDGL

SEQ ID NO: 50132 - protein, 15 aa, Homo Sapiens
YIFATCLGLSYDGLL

SEQ ID NO: 50133 - protein, 15 aa, Homo Sapiens
IFATCLGLSYDGLLG

SEQ ID NO: 50134 - protein, 15 aa, Homo Sapiens
FATCLGLSYDGLLGD

SEQ ID NO: 50135 - protein, 15 aa, Homo Sapiens
ATCLGLSYDGLLGDN

SEQ ID NO: 50136 - protein, 15 aa, Homo Sapiens
TCLGLSYDGLLGDNQ

SEQ ID NO: 50137 - protein, 15 aa, Homo Sapiens
CLGLSYDGLLGDNQI

SEQ ID NO: 50138 - protein, 15 aa, Homo Sapiens
LGLSYDGLLGDNQIM

SEQ ID NO: 50139 - protein, 15 aa, Homo Sapiens
GLSYDGLLGDNQIMP

SEQ ID NO: 50140 - protein, 15 aa, Homo Sapiens
LSYDGLLGDNQIMPK

SEQ ID NO: 50141 - protein, 15 aa, Homo Sapiens
SYDGLLGDNQIMPKA

SEQ ID NO: 50142 - protein, 15 aa, Homo Sapiens
YDGLLGDNQIMPKAG

SEQ ID NO: 50143 - protein, 15 aa, Homo Sapiens
DGLLGDNQIMPKAGL

SEQ ID NO: 50144 - protein, 15 aa, Homo Sapiens
GLLGDNQIMPKAGLL

SEQ ID NO: 50145 - protein, 15 aa, Homo Sapiens
LLGDNQIMPKAGLLI

SEQ ID NO: 50146 - protein, 15 aa, Homo Sapiens
LGDNQIMPKAGLLII

SEQ ID NO: 50147 - protein, 15 aa, Homo Sapiens
GDNQIMPKAGLLIIV

SEQ ID NO: 50148 - protein, 15 aa, Homo Sapiens
DNQIMPKAGLLIIVL

SEQ ID NO: 50149 - protein, 15 aa, Homo Sapiens
NQIMPKAGLLIIVLA

SEQ ID NO: 50150 - protein, 15 aa, Homo Sapiens
QIMPKAGLLIIVLAI

SEQ ID NO: 50151 - protein, 15 aa, Homo Sapiens
IMPKAGLLIIVLAII

SEQ ID NO: 50152 - protein, 15 aa, Homo Sapiens
MPKAGLLIIVLAIIA

SEQ ID NO: 50153 - protein, 15 aa, Homo Sapiens
PKAGLLIIVLAIIAR

SEQ ID NO: 50154 - protein, 15 aa, Homo Sapiens
KAGLLIIVLAIIARE

SEQ ID NO: 50155 - protein, 15 aa, Homo Sapiens
AGLLIIVLAIIAREG

SEQ ID NO: 50156 - protein, 15 aa, Homo Sapiens
GLLIIVLAIIAREGD

SEQ ID NO: 50157 - protein, 15 aa, Homo Sapiens
LLIIVLAIIAREGDC

SEQ ID NO: 50158 - protein, 15 aa, Homo Sapiens
LIIVLAIIAREGDCA

SEQ ID NO: 50159 - protein, 15 aa, Homo Sapiens
IIVLAIIAREGDCAP

SEQ ID NO: 50160 - protein, 15 aa, Homo Sapiens
IVLAIIAREGDCAPE

SEQ ID NO: 50161 - protein, 15 aa, Homo Sapiens
VLAIIAREGDCAPEE

SEQ ID NO: 50162 - protein, 15 aa, Homo Sapiens
LAIIAREGDCAPEEK

SEQ ID NO: 50163 - protein, 15 aa, Homo Sapiens
AIIAREGDCAPEEKI

SEQ ID NO: 50164 - protein, 15 aa, Homo Sapiens
IIAREGDCAPEEKIW

SEQ ID NO: 50165 - protein, 15 aa, Homo Sapiens
IAREGDCAPEEKIWE

SEQ ID NO: 50166 - protein, 15 aa, Homo Sapiens
AREGDCAPEEKIWEE

SEQ ID NO: 50167 - protein, 15 aa, Homo Sapiens
REGDCAPEEKIWEEL

SEQ ID NO: 50168 - protein, 15 aa, Homo Sapiens
EGDCAPEEKIWEELS

SEQ ID NO: 50169 - protein, 15 aa, Homo Sapiens
GDCAPEEKIWEELSV

SEQ ID NO: 50170 - protein, 15 aa, Homo Sapiens
DCAPEEKIWEELSVL

SEQ ID NO: 50171 - protein, 15 aa, Homo Sapiens
CAPEEKIWEELSVLE

SEQ ID NO: 50172 - protein, 15 aa, Homo Sapiens
APEEKIWEELSVLEV

SEQ ID NO: 50173 - protein, 15 aa, Homo Sapiens
PEEKIWEELSVLEVF

SEQ ID NO: 50174 - protein, 15 aa, Homo Sapiens
EEKIWEELSVLEVFE

SEQ ID NO: 50175 - protein, 15 aa, Homo Sapiens
EKIWEELSVLEVFEG

SEQ ID NO: 50176 - protein, 15 aa, Homo Sapiens
KIWEELSVLEVFEGR

SEQ ID NO: 50177 - protein, 15 aa, Homo Sapiens
IWEELSVLEVFEGRE

SEQ ID NO: 50178 - protein, 15 aa, Homo Sapiens
WEELSVLEVFEGRED

SEQ ID NO: 50179 - protein, 15 aa, Homo Sapiens
EELSVLEVFEGREDS

SEQ ID NO: 50180 - protein, 15 aa, Homo Sapiens
ELSVLEVFEGREDSI

SEQ ID NO: 50181 - protein, 15 aa, Homo Sapiens
LSVLEVFEGREDSIL

SEQ ID NO: 50182 - protein, 15 aa, Homo Sapiens
SVLEVFEGREDSILG

SEQ ID NO: 50183 - protein, 15 aa, Homo Sapiens
VLEVFEGREDSILGD

SEQ ID NO: 50184 - protein, 15 aa, Homo Sapiens
LEVFEGREDSILGDP

SEQ ID NO: 50185 - protein, 15 aa, Homo Sapiens
EVFEGREDSILGDPK

SEQ ID NO: 50186 - protein, 15 aa, Homo Sapiens
VFEGREDSILGDPKK

SEQ ID NO: 50187 - protein, 15 aa, Homo Sapiens
FEGREDSILGDPKKL

SEQ ID NO: 50188 - protein, 15 aa, Homo Sapiens
EGREDSILGDPKKLL

SEQ ID NO: 50189 - protein, 15 aa, Homo Sapiens
GREDSILGDPKKLLT

SEQ ID NO: 50190 - protein, 15 aa, Homo Sapiens
REDSILGDPKKLLTQ

SEQ ID NO: 50191 - protein, 15 aa, Homo Sapiens
EDSILGDPKKLLTQH

SEQ ID NO: 50192 - protein, 15 aa, Homo Sapiens
DSILGDPKKLLTQHF

SEQ ID NO: 50193 - protein, 15 aa, Homo Sapiens
SILGDPKKLLTQHFV

SEQ ID NO: 50194 - protein, 15 aa, Homo Sapiens
ILGDPKKLLTQHFVQ

SEQ ID NO: 50195 - protein, 15 aa, Homo Sapiens
LGDPKKLLTQHFVQE

SEQ ID NO: 50196 - protein, 15 aa, Homo Sapiens
GDPKKLLTQHFVQEN

SEQ ID NO: 50197 - protein, 15 aa, Homo Sapiens
DPKKLLTQHFVQENY

SEQ ID NO: 50198 - protein, 15 aa, Homo Sapiens
PKKLLTQHFVQENYL

SEQ ID NO: 50199 - protein, 15 aa, Homo Sapiens
KKLLTQHFVQENYLE

SEQ ID NO: 50200 - protein, 15 aa, Homo Sapiens
KLLTQHFVQENYLEY

SEQ ID NO: 50201 - protein, 15 aa, Homo Sapiens
LLTQHFVQENYLEYR

SEQ ID NO: 50202 - protein, 15 aa, Homo Sapiens
LTQHFVQENYLEYRQ

SEQ ID NO: 50203 - protein, 15 aa, Homo Sapiens
TQHFVQENYLEYRQV

SEQ ID NO: 50204 - protein, 15 aa, Homo Sapiens
QHFVQENYLEYRQVP

SEQ ID NO: 50205 - protein, 15 aa, Homo Sapiens
HFVQENYLEYRQVPG

SEQ ID NO: 50206 - protein, 15 aa, Homo Sapiens
FVQENYLEYRQVPGS

SEQ ID NO: 50207 - protein, 15 aa, Homo Sapiens
VQENYLEYRQVPGSD

SEQ ID NO: 50208 - protein, 15 aa, Homo Sapiens
QENYLEYRQVPGSDP

SEQ ID NO: 50209 - protein, 15 aa, Homo Sapiens
ENYLEYRQVPGSDPA

SEQ ID NO: 50210 - protein, 15 aa, Homo Sapiens
NYLEYRQVPGSDPAC

SEQ ID NO: 50211 - protein, 15 aa, Homo Sapiens
YLEYRQVPGSDPACY

SEQ ID NO: 50212 - protein, 15 aa, Homo Sapiens
LEYRQVPGSDPACYE

SEQ ID NO: 50213 - protein, 15 aa, Homo Sapiens
EYRQVPGSDPACYEF

SEQ ID NO: 50214 - protein, 15 aa, Homo Sapiens
YRQVPGSDPACYEFL

SEQ ID NO: 50215 - protein, 15 aa, Homo Sapiens
RQVPGSDPACYEFLW

SEQ ID NO: 50216 - protein, 15 aa, Homo Sapiens
QVPGSDPACYEFLWG

SEQ ID NO: 50217 - protein, 15 aa, Homo Sapiens
VPGSDPACYEFLWGP

SEQ ID NO: 50218 - protein, 15 aa, Homo Sapiens
PGSDPACYEFLWGPR

SEQ ID NO: 50219 - protein, 15 aa, Homo Sapiens
GSDPACYEFLWGPRA

SEQ ID NO: 50220 - protein, 15 aa, Homo Sapiens
SDPACYEFLWGPRAL

SEQ ID NO: 50221 - protein, 15 aa, Homo Sapiens
DPACYEFLWGPRALV

SEQ ID NO: 50222 - protein, 15 aa, Homo Sapiens
PACYEFLWGPRALVE

SEQ ID NO: 50223 - protein, 15 aa, Homo Sapiens
ACYEFLWGPRALVET

SEQ ID NO: 50224 - protein, 15 aa, Homo Sapiens
CYEFLWGPRALVETS

SEQ ID NO: 50225 - protein, 15 aa, Homo Sapiens
YEFLWGPRALVETSY

SEQ ID NO: 50226 - protein, 15 aa, Homo Sapiens
EFLWGPRALVETSYV

SEQ ID NO: 50227 - protein, 15 aa, Homo Sapiens
FLWGPRALVETSYVK

SEQ ID NO: 50228 - protein, 15 aa, Homo Sapiens
LWGPRALVETSYVKV

SEQ ID NO: 50229 - protein, 15 aa, Homo Sapiens
WGPRALVETSYVKVL

SEQ ID NO: 50230 - protein, 15 aa, Homo Sapiens
GPRALVETSYVKVLH

SEQ ID NO: 50231 - protein, 15 aa, Homo Sapiens
PRALVETSYVKVLHH

SEQ ID NO: 50232 - protein, 15 aa, Homo Sapiens
RALVETSYVKVLHHM

SEQ ID NO: 50233 - protein, 15 aa, Homo Sapiens
ALVETSYVKVLHHMV

SEQ ID NO: 50234 - protein, 15 aa, Homo Sapiens
LVETSYVKVLHHMVK

SEQ ID NO: 50235 - protein, 15 aa, Homo Sapiens
VETSYVKVLHHMVKI

SEQ ID NO: 50236 - protein, 15 aa, Homo Sapiens
ETSYVKVLHHMVKIS

SEQ ID NO: 50237 - protein, 15 aa, Homo Sapiens
TSYVKVLHHMVKISG

SEQ ID NO: 50238 - protein, 15 aa, Homo Sapiens
SYVKVLHHMVKISGG

SEQ ID NO: 50239 - protein, 15 aa, Homo Sapiens
YVKVLHHMVKISGGP

SEQ ID NO: 50240 - protein, 15 aa, Homo Sapiens
VKVLHHMVKISGGPH

SEQ ID NO: 50241 - protein, 15 aa, Homo Sapiens
KVLHHMVKISGGPHI

SEQ ID NO: 50242 - protein, 15 aa, Homo Sapiens
VLHHMVKISGGPHIS

SEQ ID NO: 50243 - protein, 15 aa, Homo Sapiens
LHHMVKISGGPHISY

SEQ ID NO: 50244 - protein, 15 aa, Homo Sapiens
HHMVKISGGPHISYP

SEQ ID NO: 50245 - protein, 15 aa, Homo Sapiens
HMVKISGGPHISYPP

SEQ ID NO: 50246 - protein, 15 aa, Homo Sapiens
MVKISGGPHISYPPL

SEQ ID NO: 50247 - protein, 15 aa, Homo Sapiens
VKISGGPHISYPPLH

SEQ ID NO: 50248 - protein, 15 aa, Homo Sapiens
KISGGPHISYPPLHE

SEQ ID NO: 50249 - protein, 15 aa, Homo Sapiens
ISGGPHISYPPLHEW

SEQ ID NO: 50250 - protein, 15 aa, Homo Sapiens
SGGPHISYPPLHEWV

SEQ ID NO: 50251 - protein, 15 aa, Homo Sapiens
GGPHISYPPLHEWVL

SEQ ID NO: 50252 - protein, 15 aa, Homo Sapiens
GPHISYPPLHEWVLR

SEQ ID NO: 50253 - protein, 15 aa, Homo Sapiens
PHISYPPLHEWVLRE

SEQ ID NO: 50254 - protein, 15 aa, Homo Sapiens
HISYPPLHEWVLREG

SEQ ID NO: 50255 - protein, 15 aa, Homo Sapiens
ISYPPLHEWVLREGE

SEQ ID NO: 50256 - protein, 15 aa, Homo Sapiens
SYPPLHEWVLREGEE

SEQ ID NO: 50257 - protein, 16 aa, Homo Sapiens
MPLEQRSQHCKPEEGL

SEQ ID NO: 50258 - protein, 16 aa, Homo Sapiens
PLEQRSQHCKPEEGLE

SEQ ID NO: 50259 - protein, 16 aa, Homo Sapiens
LEQRSQHCKPEEGLEA

SEQ ID NO: 50260 - protein, 16 aa, Homo Sapiens
EQRSQHCKPEEGLEAR

SEQ ID NO: 50261 - protein, 16 aa, Homo Sapiens
QRSQHCKPEEGLEARG

SEQ ID NO: 50262 - protein, 16 aa, Homo Sapiens
RSQHCKPEEGLEARGE

SEQ ID NO: 50263 - protein, 16 aa, Homo Sapiens
SQHCKPEEGLEARGEA

SEQ ID NO: 50264 - protein, 16 aa, Homo Sapiens
QHCKPEEGLEARGEAL

SEQ ID NO: 50265 - protein, 16 aa, Homo Sapiens
HCKPEEGLEARGEALG

SEQ ID NO: 50266 - protein, 16 aa, Homo Sapiens
CKPEEGLEARGEALGL

SEQ ID NO: 50267 - protein, 16 aa, Homo Sapiens
KPEEGLEARGEALGLV

SEQ ID NO: 50268 - protein, 16 aa, Homo Sapiens
PEEGLEARGEALGLVG

SEQ ID NO: 50269 - protein, 16 aa, Homo Sapiens
EEGLEARGEALGLVGA

SEQ ID NO: 50270 - protein, 16 aa, Homo Sapiens
EGLEARGEALGLVGAQ

SEQ ID NO: 50271 - protein, 16 aa, Homo Sapiens
GLEARGEALGLVGAQA

SEQ ID NO: 50272 - protein, 16 aa, Homo Sapiens
LEARGEALGLVGAQAP

SEQ ID NO: 50273 - protein, 16 aa, Homo Sapiens
EARGEALGLVGAQAPA

SEQ ID NO: 50274 - protein, 16 aa, Homo Sapiens
ARGEALGLVGAQAPAT

SEQ ID NO: 50275 - protein, 16 aa, Homo Sapiens
RGEALGLVGAQAPATE

SEQ ID NO: 50276 - protein, 16 aa, Homo Sapiens
GEALGLVGAQAPATEE

SEQ ID NO: 50277 - protein, 16 aa, Homo Sapiens
EALGLVGAQAPATEEQ

SEQ ID NO: 50278 - protein, 16 aa, Homo Sapiens
ALGLVGAQAPATEEQE

SEQ ID NO: 50279 - protein, 16 aa, Homo Sapiens
LGLVGAQAPATEEQEA

SEQ ID NO: 50280 - protein, 16 aa, Homo Sapiens
GLVGAQAPATEEQEAA

SEQ ID NO: 50281 - protein, 16 aa, Homo Sapiens
LVGAQAPATEEQEAAS

SEQ ID NO: 50282 - protein, 16 aa, Homo Sapiens
VGAQAPATEEQEAASS

SEQ ID NO: 50283 - protein, 16 aa, Homo Sapiens
GAQAPATEEQEAASSS

SEQ ID NO: 50284 - protein, 16 aa, Homo Sapiens
AQAPATEEQEAASSSS

SEQ ID NO: 50285 - protein, 16 aa, Homo Sapiens
QAPATEEQEAASSSST

SEQ ID NO: 50286 - protein, 16 aa, Homo Sapiens
APATEEQEAASSSSTL

SEQ ID NO: 50287 - protein, 16 aa, Homo Sapiens
PATEEQEAASSSSTLV

SEQ ID NO: 50288 - protein, 16 aa, Homo Sapiens
ATEEQEAASSSSTLVE

SEQ ID NO: 50289 - protein, 16 aa, Homo Sapiens
TEEQEAASSSSTLVEV

SEQ ID NO: 50290 - protein, 16 aa, Homo Sapiens
EEQEAASSSSTLVEVT

SEQ ID NO: 50291 - protein, 16 aa, Homo Sapiens
EQEAASSSSTLVEVTL

SEQ ID NO: 50292 - protein, 16 aa, Homo Sapiens
QEAASSSSTLVEVTLG

SEQ ID NO: 50293 - protein, 16 aa, Homo Sapiens
EAASSSSTLVEVTLGE

SEQ ID NO: 50294 - protein, 16 aa, Homo Sapiens
AASSSSTLVEVTLGEV

SEQ ID NO: 50295 - protein, 16 aa, Homo Sapiens
ASSSSTLVEVTLGEVP

SEQ ID NO: 50296 - protein, 16 aa, Homo Sapiens
SSSSTLVEVTLGEVPA

SEQ ID NO: 50297 - protein, 16 aa, Homo Sapiens
SSSTLVEVTLGEVPAA

SEQ ID NO: 50298 - protein, 16 aa, Homo Sapiens
SSTLVEVTLGEVPAAE

SEQ ID NO: 50299 - protein, 16 aa, Homo Sapiens
STLVEVTLGEVPAAES

SEQ ID NO: 50300 - protein, 16 aa, Homo Sapiens
TLVEVTLGEVPAAESP

SEQ ID NO: 50301 - protein, 16 aa, Homo Sapiens
LVEVTLGEVPAAESPD

SEQ ID NO: 50302 - protein, 16 aa, Homo Sapiens
VEVTLGEVPAAESPDP

SEQ ID NO: 50303 - protein, 16 aa, Homo Sapiens
EVTLGEVPAAESPDPP

SEQ ID NO: 50304 - protein, 16 aa, Homo Sapiens
VTLGEVPAAESPDPPQ

SEQ ID NO: 50305 - protein, 16 aa, Homo Sapiens
TLGEVPAAESPDPPQS

SEQ ID NO: 50306 - protein, 16 aa, Homo Sapiens
LGEVPAAESPDPPQSP

SEQ ID NO: 50307 - protein, 16 aa, Homo Sapiens
GEVPAAESPDPPQSPQ

SEQ ID NO: 50308 - protein, 16 aa, Homo Sapiens
EVPAAESPDPPQSPQG

SEQ ID NO: 50309 - protein, 16 aa, Homo Sapiens
VPAAESPDPPQSPQGA

SEQ ID NO: 50310 - protein, 16 aa, Homo Sapiens
PAAESPDPPQSPQGAS

SEQ ID NO: 50311 - protein, 16 aa, Homo Sapiens
AAESPDPPQSPQGASS

SEQ ID NO: 50312 - protein, 16 aa, Homo Sapiens
AESPDPPQSPQGASSL

SEQ ID NO: 50313 - protein, 16 aa, Homo Sapiens
ESPDPPQSPQGASSLP

SEQ ID NO: 50314 - protein, 16 aa, Homo Sapiens
SPDPPQSPQGASSLPT

SEQ ID NO: 50315 - protein, 16 aa, Homo Sapiens
PDPPQSPQGASSLPTT

SEQ ID NO: 50316 - protein, 16 aa, Homo Sapiens
DPPQSPQGASSLPTTM

SEQ ID NO: 50317 - protein, 16 aa, Homo Sapiens
PPQSPQGASSLPTTMN

SEQ ID NO: 50318 - protein, 16 aa, Homo Sapiens
PQSPQGASSLPTTMNY

SEQ ID NO: 50319 - protein, 16 aa, Homo Sapiens
QSPQGASSLPTTMNYP

SEQ ID NO: 50320 - protein, 16 aa, Homo Sapiens
SPQGASSLPTTMNYPL

SEQ ID NO: 50321 - protein, 16 aa, Homo Sapiens
PQGASSLPTTMNYPLW

SEQ ID NO: 50322 - protein, 16 aa, Homo Sapiens
QGASSLPTTMNYPLWS

SEQ ID NO: 50323 - protein, 16 aa, Homo Sapiens
GASSLPTTMNYPLWSQ

SEQ ID NO: 50324 - protein, 16 aa, Homo Sapiens
ASSLPTTMNYPLWSQS

SEQ ID NO: 50325 - protein, 16 aa, Homo Sapiens
SSLPTTMNYPLWSQSY

SEQ ID NO: 50326 - protein, 16 aa, Homo Sapiens
SLPTTMNYPLWSQSYE

SEQ ID NO: 50327 - protein, 16 aa, Homo Sapiens
LPTTMNYPLWSQSYED

SEQ ID NO: 50328 - protein, 16 aa, Homo Sapiens
PTTMNYPLWSQSYEDS

SEQ ID NO: 50329 - protein, 16 aa, Homo Sapiens
TTMNYPLWSQSYEDSS

SEQ ID NO: 50330 - protein, 16 aa, Homo Sapiens
TMNYPLWSQSYEDSSN

SEQ ID NO: 50331 - protein, 16 aa, Homo Sapiens
MNYPLWSQSYEDSSNQ

SEQ ID NO: 50332 - protein, 16 aa, Homo Sapiens
NYPLWSQSYEDSSNQE

SEQ ID NO: 50333 - protein, 16 aa, Homo Sapiens
YPLWSQSYEDSSNQEE

SEQ ID NO: 50334 - protein, 16 aa, Homo Sapiens
PLWSQSYEDSSNQEEE

SEQ ID NO: 50335 - protein, 16 aa, Homo Sapiens
LWSQSYEDSSNQEEEG

SEQ ID NO: 50336 - protein, 16 aa, Homo Sapiens
WSQSYEDSSNQEEEGP

SEQ ID NO: 50337 - protein, 16 aa, Homo Sapiens
SQSYEDSSNQEEEGPS

SEQ ID NO: 50338 - protein, 16 aa, Homo Sapiens
QSYEDSSNQEEEGPST

SEQ ID NO: 50339 - protein, 16 aa, Homo Sapiens
SYEDSSNQEEEGPSTF

SEQ ID NO: 50340 - protein, 16 aa, Homo Sapiens
YEDSSNQEEEGPSTFP

SEQ ID NO: 50341 - protein, 16 aa, Homo Sapiens
EDSSNQEEEGPSTFPD

SEQ ID NO: 50342 - protein, 16 aa, Homo Sapiens
DSSNQEEEGPSTFPDL

SEQ ID NO: 50343 - protein, 16 aa, Homo Sapiens
SSNQEEEGPSTFPDLE

SEQ ID NO: 50344 - protein, 16 aa, Homo Sapiens
SNQEEEGPSTFPDLES

SEQ ID NO: 50345 - protein, 16 aa, Homo Sapiens
NQEEEGPSTFPDLESE

SEQ ID NO: 50346 - protein, 16 aa, Homo Sapiens
QEEEGPSTFPDLESEF

SEQ ID NO: 50347 - protein, 16 aa, Homo Sapiens
EEEGPSTFPDLESEFQ

SEQ ID NO: 50348 - protein, 16 aa, Homo Sapiens
EEGPSTFPDLESEFQA

SEQ ID NO: 50349 - protein, 16 aa, Homo Sapiens
EGPSTFPDLESEFQAA

SEQ ID NO: 50350 - protein, 16 aa, Homo Sapiens
GPSTFPDLESEFQAAL

SEQ ID NO: 50351 - protein, 16 aa, Homo Sapiens
PSTFPDLESEFQAALS

SEQ ID NO: 50352 - protein, 16 aa, Homo Sapiens
STFPDLESEFQAALSR

SEQ ID NO: 50353 - protein, 16 aa, Homo Sapiens
TFPDLESEFQAALSRK

SEQ ID NO: 50354 - protein, 16 aa, Homo Sapiens
FPDLESEFQAALSRKV

SEQ ID NO: 50355 - protein, 16 aa, Homo Sapiens
PDLESEFQAALSRKVA

SEQ ID NO: 50356 - protein, 16 aa, Homo Sapiens
DLESEFQAALSRKVAE

SEQ ID NO: 50357 - protein, 16 aa, Homo Sapiens
LESEFQAALSRKVAEL

SEQ ID NO: 50358 - protein, 16 aa, Homo Sapiens
ESEFQAALSRKVAELV

SEQ ID NO: 50359 - protein, 16 aa, Homo Sapiens
SEFQAALSRKVAELVH

SEQ ID NO: 50360 - protein, 16 aa, Homo Sapiens
EFQAALSRKVAELVHF

SEQ ID NO: 50361 - protein, 16 aa, Homo Sapiens
FQAALSRKVAELVHFL

SEQ ID NO: 50362 - protein, 16 aa, Homo Sapiens
QAALSRKVAELVHFLL

SEQ ID NO: 50363 - protein, 16 aa, Homo Sapiens
AALSRKVAELVHFLLL

SEQ ID NO: 50364 - protein, 16 aa, Homo Sapiens
ALSRKVAELVHFLLLK

SEQ ID NO: 50365 - protein, 16 aa, Homo Sapiens
LSRKVAELVHFLLLKY

SEQ ID NO: 50366 - protein, 16 aa, Homo Sapiens
SRKVAELVHFLLLKYR

SEQ ID NO: 50367 - protein, 16 aa, Homo Sapiens
RKVAELVHFLLLKYRA

SEQ ID NO: 50368 - protein, 16 aa, Homo Sapiens
KVAELVHFLLLKYRAR

SEQ ID NO: 50369 - protein, 16 aa, Homo Sapiens
VAELVHFLLLKYRARE

SEQ ID NO: 50370 - protein, 16 aa, Homo Sapiens
AELVHFLLLKYRAREP

SEQ ID NO: 50371 - protein, 16 aa, Homo Sapiens
ELVHFLLLKYRAREPV

SEQ ID NO: 50372 - protein, 16 aa, Homo Sapiens
LVHFLLLKYRAREPVT

SEQ ID NO: 50373 - protein, 16 aa, Homo Sapiens
VHFLLLKYRAREPVTK

SEQ ID NO: 50374 - protein, 16 aa, Homo Sapiens
HFLLLKYRAREPVTKA

SEQ ID NO: 50375 - protein, 16 aa, Homo Sapiens
FLLLKYRAREPVTKAE

SEQ ID NO: 50376 - protein, 16 aa, Homo Sapiens
LLLKYRAREPVTKAEM

SEQ ID NO: 50377 - protein, 16 aa, Homo Sapiens
LLKYRAREPVTKAEML

SEQ ID NO: 50378 - protein, 16 aa, Homo Sapiens
LKYRAREPVTKAEMLG

SEQ ID NO: 50379 - protein, 16 aa, Homo Sapiens
KYRAREPVTKAEMLGS

SEQ ID NO: 50380 - protein, 16 aa, Homo Sapiens
YRAREPVTKAEMLGSV

SEQ ID NO: 50381 - protein, 16 aa, Homo Sapiens
RAREPVTKAEMLGSVV

SEQ ID NO: 50382 - protein, 16 aa, Homo Sapiens
AREPVTKAEMLGSVVG

SEQ ID NO: 50383 - protein, 16 aa, Homo Sapiens
REPVTKAEMLGSVVGN

SEQ ID NO: 50384 - protein, 16 aa, Homo Sapiens
EPVTKAEMLGSVVGNW

SEQ ID NO: 50385 - protein, 16 aa, Homo Sapiens
PVTKAEMLGSVVGNWQ

SEQ ID NO: 50386 - protein, 16 aa, Homo Sapiens
VTKAEMLGSVVGNWQY

SEQ ID NO: 50387 - protein, 16 aa, Homo Sapiens
TKAEMLGSVVGNWQYF

SEQ ID NO: 50388 - protein, 16 aa, Homo Sapiens
KAEMLGSVVGNWQYFF

SEQ ID NO: 50389 - protein, 16 aa, Homo Sapiens
AEMLGSVVGNWQYFFP

SEQ ID NO: 50390 - protein, 16 aa, Homo Sapiens
EMLGSVVGNWQYFFPV

SEQ ID NO: 50391 - protein, 16 aa, Homo Sapiens
MLGSVVGNWQYFFPVI

SEQ ID NO: 50392 - protein, 16 aa, Homo Sapiens
LGSVVGNWQYFFPVIF

SEQ ID NO: 50393 - protein, 16 aa, Homo Sapiens
GSVVGNWQYFFPVIFS

SEQ ID NO: 50394 - protein, 16 aa, Homo Sapiens
SVVGNWQYFFPVIFSK

SEQ ID NO: 50395 - protein, 16 aa, Homo Sapiens
VVGNWQYFFPVIFSKA

SEQ ID NO: 50396 - protein, 16 aa, Homo Sapiens
VGNWQYFFPVIFSKAS

SEQ ID NO: 50397 - protein, 16 aa, Homo Sapiens
GNWQYFFPVIFSKASS

SEQ ID NO: 50398 - protein, 16 aa, Homo Sapiens
NWQYFFPVIFSKASSS

SEQ ID NO: 50399 - protein, 16 aa, Homo Sapiens
WQYFFPVIFSKASSSL

SEQ ID NO: 50400 - protein, 16 aa, Homo Sapiens
QYFFPVIFSKASSSLQ

SEQ ID NO: 50401 - protein, 16 aa, Homo Sapiens
YFFPVIFSKASSSLQL

SEQ ID NO: 50402 - protein, 16 aa, Homo Sapiens
FFPVIFSKASSSLQLV

SEQ ID NO: 50403 - protein, 16 aa, Homo Sapiens
FPVIFSKASSSLQLVF

SEQ ID NO: 50404 - protein, 16 aa, Homo Sapiens
PVIFSKASSSLQLVFG

SEQ ID NO: 50405 - protein, 16 aa, Homo Sapiens
VIFSKASSSLQLVFGI

SEQ ID NO: 50406 - protein, 16 aa, Homo Sapiens
IFSKASSSLQLVFGIE

SEQ ID NO: 50407 - protein, 16 aa, Homo Sapiens
FSKASSSLQLVFGIEL

SEQ ID NO: 50408 - protein, 16 aa, Homo Sapiens
SKASSSLQLVFGIELM

SEQ ID NO: 50409 - protein, 16 aa, Homo Sapiens
KASSSLQLVFGIELME

SEQ ID NO: 50410 - protein, 16 aa, Homo Sapiens
ASSSLQLVFGIELMEV

SEQ ID NO: 50411 - protein, 16 aa, Homo Sapiens
SSSLQLVFGIELMEVD

SEQ ID NO: 50412 - protein, 16 aa, Homo Sapiens
SSLQLVFGIELMEVDP

SEQ ID NO: 50413 - protein, 16 aa, Homo Sapiens
SLQLVFGIELMEVDPI

SEQ ID NO: 50414 - protein, 16 aa, Homo Sapiens
LQLVFGIELMEVDPIG

SEQ ID NO: 50415 - protein, 16 aa, Homo Sapiens
QLVFGIELMEVDPIGH

SEQ ID NO: 50416 - protein, 16 aa, Homo Sapiens
LVFGIELMEVDPIGHL

SEQ ID NO: 50417 - protein, 16 aa, Homo Sapiens
VFGIELMEVDPIGHLY

SEQ ID NO: 50418 - protein, 16 aa, Homo Sapiens
FGIELMEVDPIGHLYI

SEQ ID NO: 50419 - protein, 16 aa, Homo Sapiens
GIELMEVDPIGHLYIF

SEQ ID NO: 50420 - protein, 16 aa, Homo Sapiens
IELMEVDPIGHLYIFA

SEQ ID NO: 50421 - protein, 16 aa, Homo Sapiens
ELMEVDPIGHLYIFAT

SEQ ID NO: 50422 - protein, 16 aa, Homo Sapiens
LMEVDPIGHLYIFATC

SEQ ID NO: 50423 - protein, 16 aa, Homo Sapiens
MEVDPIGHLYIFATCL

SEQ ID NO: 50424 - protein, 16 aa, Homo Sapiens
EVDPIGHLYIFATCLG

SEQ ID NO: 50425 - protein, 16 aa, Homo Sapiens
VDPIGHLYIFATCLGL

SEQ ID NO: 50426 - protein, 16 aa, Homo Sapiens
DPIGHLYIFATCLGLS

SEQ ID NO: 50427 - protein, 16 aa, Homo Sapiens
PIGHLYIFATCLGLSY

SEQ ID NO: 50428 - protein, 16 aa, Homo Sapiens
IGHLYIFATCLGLSYD

SEQ ID NO: 50429 - protein, 16 aa, Homo Sapiens
GHLYIFATCLGLSYDG

SEQ ID NO: 50430 - protein, 16 aa, Homo Sapiens
HLYIFATCLGLSYDGL

SEQ ID NO: 50431 - protein, 16 aa, Homo Sapiens
LYIFATCLGLSYDGLL

SEQ ID NO: 50432 - protein, 16 aa, Homo Sapiens
YIFATCLGLSYDGLLG

SEQ ID NO: 50433 - protein, 16 aa, Homo Sapiens
IFATCLGLSYDGLLGD

SEQ ID NO: 50434 - protein, 16 aa, Homo Sapiens
FATCLGLSYDGLLGDN

SEQ ID NO: 50435 - protein, 16 aa, Homo Sapiens
ATCLGLSYDGLLGDNQ

SEQ ID NO: 50436 - protein, 16 aa, Homo Sapiens
TCLGLSYDGLLGDNQI

SEQ ID NO: 50437 - protein, 16 aa, Homo Sapiens
CLGLSYDGLLGDNQIM

SEQ ID NO: 50438 - protein, 16 aa, Homo Sapiens
LGLSYDGLLGDNQIMP

SEQ ID NO: 50439 - protein, 16 aa, Homo Sapiens
GLSYDGLLGDNQIMPK

SEQ ID NO: 50440 - protein, 16 aa, Homo Sapiens
LSYDGLLGDNQIMPKA

SEQ ID NO: 50441 - protein, 16 aa, Homo Sapiens
SYDGLLGDNQIMPKAG

SEQ ID NO: 50442 - protein, 16 aa, Homo Sapiens
YDGLLGDNQIMPKAGL

SEQ ID NO: 50443 - protein, 16 aa, Homo Sapiens
DGLLGDNQIMPKAGLL

SEQ ID NO: 50444 - protein, 16 aa, Homo Sapiens
GLLGDNQIMPKAGLLI

SEQ ID NO: 50445 - protein, 16 aa, Homo Sapiens
LLGDNQIMPKAGLLII

SEQ ID NO: 50446 - protein, 16 aa, Homo Sapiens
LGDNQIMPKAGLLIIV

SEQ ID NO: 50447 - protein, 16 aa, Homo Sapiens
GDNQIMPKAGLLIIVL

SEQ ID NO: 50448 - protein, 16 aa, Homo Sapiens
DNQIMPKAGLLIIVLA

SEQ ID NO: 50449 - protein, 16 aa, Homo Sapiens
NQIMPKAGLLIIVLAI

SEQ ID NO: 50450 - protein, 16 aa, Homo Sapiens
QIMPKAGLLIIVLAII

SEQ ID NO: 50451 - protein, 16 aa, Homo Sapiens
IMPKAGLLIIVLAIIA

SEQ ID NO: 50452 - protein, 16 aa, Homo Sapiens
MPKAGLLIIVLAIIAR

SEQ ID NO: 50453 - protein, 16 aa, Homo Sapiens
PKAGLLIIVLAIIARE

SEQ ID NO: 50454 - protein, 16 aa, Homo Sapiens
KAGLLIIVLAIIAREG

SEQ ID NO: 50455 - protein, 16 aa, Homo Sapiens
AGLLIIVLAIIAREGD

SEQ ID NO: 50456 - protein, 16 aa, Homo Sapiens
GLLIIVLAIIAREGDC

SEQ ID NO: 50457 - protein, 16 aa, Homo Sapiens
LLIIVLAIIAREGDCA

SEQ ID NO: 50458 - protein, 16 aa, Homo Sapiens
LIIVLAIIAREGDCAP

SEQ ID NO: 50459 - protein, 16 aa, Homo Sapiens
IIVLAIIAREGDCAPE

SEQ ID NO: 50460 - protein, 16 aa, Homo Sapiens
IVLAIIAREGDCAPEE

SEQ ID NO: 50461 - protein, 16 aa, Homo Sapiens
VLAIIAREGDCAPEEK

SEQ ID NO: 50462 - protein, 16 aa, Homo Sapiens
LAIIAREGDCAPEEKI

SEQ ID NO: 50463 - protein, 16 aa, Homo Sapiens
AIIAREGDCAPEEKIW

SEQ ID NO: 50464 - protein, 16 aa, Homo Sapiens
IIAREGDCAPEEKIWE

SEQ ID NO: 50465 - protein, 16 aa, Homo Sapiens
IAREGDCAPEEKIWEE

SEQ ID NO: 50466 - protein, 16 aa, Homo Sapiens
AREGDCAPEEKIWEEL

SEQ ID NO: 50467 - protein, 16 aa, Homo Sapiens
REGDCAPEEKIWEELS

SEQ ID NO: 50468 - protein, 16 aa, Homo Sapiens
EGDCAPEEKIWEELSV

SEQ ID NO: 50469 - protein, 16 aa, Homo Sapiens
GDCAPEEKIWEELSVL

SEQ ID NO: 50470 - protein, 16 aa, Homo Sapiens
DCAPEEKIWEELSVLE

SEQ ID NO: 50471 - protein, 16 aa, Homo Sapiens
CAPEEKIWEELSVLEV

SEQ ID NO: 50472 - protein, 16 aa, Homo Sapiens
APEEKIWEELSVLEVF

SEQ ID NO: 50473 - protein, 16 aa, Homo Sapiens
PEEKIWEELSVLEVFE

SEQ ID NO: 50474 - protein, 16 aa, Homo Sapiens
EEKIWEELSVLEVFEG

SEQ ID NO: 50475 - protein, 16 aa, Homo Sapiens
EKIWEELSVLEVFEGR

SEQ ID NO: 50476 - protein, 16 aa, Homo Sapiens
KIWEELSVLEVFEGRE

SEQ ID NO: 50477 - protein, 16 aa, Homo Sapiens
IWEELSVLEVFEGRED

SEQ ID NO: 50478 - protein, 16 aa, Homo Sapiens
WEELSVLEVFEGREDS

SEQ ID NO: 50479 - protein, 16 aa, Homo Sapiens
EELSVLEVFEGREDSI

SEQ ID NO: 50480 - protein, 16 aa, Homo Sapiens
ELSVLEVFEGREDSIL

SEQ ID NO: 50481 - protein, 16 aa, Homo Sapiens
LSVLEVFEGREDSILG

SEQ ID NO: 50482 - protein, 16 aa, Homo Sapiens
SVLEVFEGREDSILGD

SEQ ID NO: 50483 - protein, 16 aa, Homo Sapiens
VLEVFEGREDSILGDP

SEQ ID NO: 50484 - protein, 16 aa, Homo Sapiens
LEVFEGREDSILGDPK

SEQ ID NO: 50485 - protein, 16 aa, Homo Sapiens
EVFEGREDSILGDPKK

SEQ ID NO: 50486 - protein, 16 aa, Homo Sapiens
VFEGREDSILGDPKKL

SEQ ID NO: 50487 - protein, 16 aa, Homo Sapiens
FEGREDSILGDPKKLL

SEQ ID NO: 50488 - protein, 16 aa, Homo Sapiens
EGREDSILGDPKKLLT

SEQ ID NO: 50489 - protein, 16 aa, Homo Sapiens
GREDSILGDPKKLLTQ

SEQ ID NO: 50490 - protein, 16 aa, Homo Sapiens
REDSILGDPKKLLTQH

SEQ ID NO: 50491 - protein, 16 aa, Homo Sapiens
EDSILGDPKKLLTQHF

SEQ ID NO: 50492 - protein, 16 aa, Homo Sapiens
DSILGDPKKLLTQHFV

SEQ ID NO: 50493 - protein, 16 aa, Homo Sapiens
SILGDPKKLLTQHFVQ

SEQ ID NO: 50494 - protein, 16 aa, Homo Sapiens
ILGDPKKLLTQHFVQE

SEQ ID NO: 50495 - protein, 16 aa, Homo Sapiens
LGDPKKLLTQHFVQEN

SEQ ID NO: 50496 - protein, 16 aa, Homo Sapiens
GDPKKLLTQHFVQENY

SEQ ID NO: 50497 - protein, 16 aa, Homo Sapiens
DPKKLLTQHFVQENYL

SEQ ID NO: 50498 - protein, 16 aa, Homo Sapiens
PKKLLTQHFVQENYLE

SEQ ID NO: 50499 - protein, 16 aa, Homo Sapiens
KKLLTQHFVQENYLEY

SEQ ID NO: 50500 - protein, 16 aa, Homo Sapiens
KLLTQHFVQENYLEYR

SEQ ID NO: 50501 - protein, 16 aa, Homo Sapiens
LLTQHFVQENYLEYRQ

SEQ ID NO: 50502 - protein, 16 aa, Homo Sapiens
LTQHFVQENYLEYRQV

SEQ ID NO: 50503 - protein, 16 aa, Homo Sapiens
TQHFVQENYLEYRQVP

SEQ ID NO: 50504 - protein, 16 aa, Homo Sapiens
QHFVQENYLEYRQVPG

SEQ ID NO: 50505 - protein, 16 aa, Homo Sapiens
HFVQENYLEYRQVPGS

SEQ ID NO: 50506 - protein, 16 aa, Homo Sapiens
FVQENYLEYRQVPGSD

SEQ ID NO: 50507 - protein, 16 aa, Homo Sapiens
VQENYLEYRQVPGSDP

SEQ ID NO: 50508 - protein, 16 aa, Homo Sapiens
QENYLEYRQVPGSDPA

SEQ ID NO: 50509 - protein, 16 aa, Homo Sapiens
ENYLEYRQVPGSDPAC

SEQ ID NO: 50510 - protein, 16 aa, Homo Sapiens
NYLEYRQVPGSDPACY

SEQ ID NO: 50511 - protein, 16 aa, Homo Sapiens
YLEYRQVPGSDPACYE

SEQ ID NO: 50512 - protein, 16 aa, Homo Sapiens
LEYRQVPGSDPACYEF

SEQ ID NO: 50513 - protein, 16 aa, Homo Sapiens
EYRQVPGSDPACYEFL

SEQ ID NO: 50514 - protein, 16 aa, Homo Sapiens
YRQVPGSDPACYEFLW

SEQ ID NO: 50515 - protein, 16 aa, Homo Sapiens
RQVPGSDPACYEFLWG

SEQ ID NO: 50516 - protein, 16 aa, Homo Sapiens
QVPGSDPACYEFLWGP

SEQ ID NO: 50517 - protein, 16 aa, Homo Sapiens
VPGSDPACYEFLWGPR

SEQ ID NO: 50518 - protein, 16 aa, Homo Sapiens
PGSDPACYEFLWGPRA

SEQ ID NO: 50519 - protein, 16 aa, Homo Sapiens
GSDPACYEFLWGPRAL

SEQ ID NO: 50520 - protein, 16 aa, Homo Sapiens
SDPACYEFLWGPRALV

SEQ ID NO: 50521 - protein, 16 aa, Homo Sapiens
DPACYEFLWGPRALVE

SEQ ID NO: 50522 - protein, 16 aa, Homo Sapiens
PACYEFLWGPRALVET

SEQ ID NO: 50523 - protein, 16 aa, Homo Sapiens
ACYEFLWGPRALVETS

SEQ ID NO: 50524 - protein, 16 aa, Homo Sapiens
CYEFLWGPRALVETSY

SEQ ID NO: 50525 - protein, 16 aa, Homo Sapiens
YEFLWGPRALVETSYV

SEQ ID NO: 50526 - protein, 16 aa, Homo Sapiens
EFLWGPRALVETSYVK

SEQ ID NO: 50527 - protein, 16 aa, Homo Sapiens
FLWGPRALVETSYVKV

SEQ ID NO: 50528 - protein, 16 aa, Homo Sapiens
LWGPRALVETSYVKVL

SEQ ID NO: 50529 - protein, 16 aa, Homo Sapiens
WGPRALVETSYVKVLH

SEQ ID NO: 50530 - protein, 16 aa, Homo Sapiens
GPRALVETSYVKVLHH

SEQ ID NO: 50531 - protein, 16 aa, Homo Sapiens
PRALVETSYVKVLHHM

SEQ ID NO: 50532 - protein, 16 aa, Homo Sapiens
RALVETSYVKVLHHMV

SEQ ID NO: 50533 - protein, 16 aa, Homo Sapiens
ALVETSYVKVLHHMVK

SEQ ID NO: 50534 - protein, 16 aa, Homo Sapiens
LVETSYVKVLHHMVKI

SEQ ID NO: 50535 - protein, 16 aa, Homo Sapiens
VETSYVKVLHHMVKIS

SEQ ID NO: 50536 - protein, 16 aa, Homo Sapiens
ETSYVKVLHHMVKISG

SEQ ID NO: 50537 - protein, 16 aa, Homo Sapiens
TSYVKVLHHMVKISGG

SEQ ID NO: 50538 - protein, 16 aa, Homo Sapiens
SYVKVLHHMVKISGGP

SEQ ID NO: 50539 - protein, 16 aa, Homo Sapiens
YVKVLHHMVKISGGPH

SEQ ID NO: 50540 - protein, 16 aa, Homo Sapiens
VKVLHHMVKISGGPHI

SEQ ID NO: 50541 - protein, 16 aa, Homo Sapiens
KVLHHMVKISGGPHIS

SEQ ID NO: 50542 - protein, 16 aa, Homo Sapiens
VLHHMVKISGGPHISY

SEQ ID NO: 50543 - protein, 16 aa, Homo Sapiens
LHHMVKISGGPHISYP

SEQ ID NO: 50544 - protein, 16 aa, Homo Sapiens
HHMVKISGGPHISYPP

SEQ ID NO: 50545 - protein, 16 aa, Homo Sapiens
HMVKISGGPHISYPPL

SEQ ID NO: 50546 - protein, 16 aa, Homo Sapiens
MVKISGGPHISYPPLH

SEQ ID NO: 50547 - protein, 16 aa, Homo Sapiens
VKISGGPHISYPPLHE

SEQ ID NO: 50548 - protein, 16 aa, Homo Sapiens
KISGGPHISYPPLHEW

SEQ ID NO: 50549 - protein, 16 aa, Homo Sapiens
ISGGPHISYPPLHEWV

SEQ ID NO: 50550 - protein, 16 aa, Homo Sapiens
SGGPHISYPPLHEWVL

SEQ ID NO: 50551 - protein, 16 aa, Homo Sapiens
GGPHISYPPLHEWVLR

SEQ ID NO: 50552 - protein, 16 aa, Homo Sapiens
GPHISYPPLHEWVLRE

SEQ ID NO: 50553 - protein, 16 aa, Homo Sapiens
PHISYPPLHEWVLREG

SEQ ID NO: 50554 - protein, 16 aa, Homo Sapiens
HISYPPLHEWVLREGE

SEQ ID NO: 50555 - protein, 16 aa, Homo Sapiens
ISYPPLHEWVLREGEE

SEQ ID NO: 50556 - protein, 317 aa, Homo Sapiens
MSSEQKSQHCKPEEGVEAQEEALGLVGAQAPTTEEQEAAVSSSSPLVPGTLEEVPAAESAGPPQSPQGASALPTTISFTCWRQPNEGSSSQEEEGPSTSPDAESLFREALSNKVDELAHFLLRKYRAKELVTKAEMLERVIKNYKRCFPVIFGKASESLKMIFGIDVKEVDPASNTYTLVTCLGLSYDGLLGNNQIFPKTGLLIIVLGTIAMEGDSASEEEIWEELGVMGVYDGREHTVYGEPRKLLTQDWVQENYLEYRQVPGSNPARYEFLWGPRALAETSYVKVLEHVVRVNARVRIAYPSLREAALLEEEEGV

SEQ ID NO: 50557 - protein, 8 aa, Homo Sapiens
VEAQEEAL

SEQ ID NO: 50558 - protein, 8 aa, Homo Sapiens
AQEEALGL

SEQ ID NO: 50559 - protein, 8 aa, Homo Sapiens
EALGLVGA

SEQ ID NO: 50560 - protein, 8 aa, Homo Sapiens
AQAPTTEE

SEQ ID NO: 50561 - protein, 8 aa, Homo Sapiens
EAAVSSSS

SEQ ID NO: 50562 - protein, 8 aa, Homo Sapiens
AVSSSSPL

SEQ ID NO: 50563 - protein, 8 aa, Homo Sapiens
SPLVPGTL

SEQ ID NO: 50564 - protein, 8 aa, Homo Sapiens
VPGTLEEV

SEQ ID NO: 50565 - protein, 8 aa, Homo Sapiens
TLEEVPAA

SEQ ID NO: 50566 - protein, 8 aa, Homo Sapiens
EEVPAAES

SEQ ID NO: 50567 - protein, 8 aa, Homo Sapiens
EVPAAESA

SEQ ID NO: 50568 - protein, 8 aa, Homo Sapiens
AESAGPPQ

SEQ ID NO: 50569 - protein, 8 aa, Homo Sapiens
SPQGASAL

SEQ ID NO: 50570 - protein, 8 aa, Homo Sapiens
ALPTTISF

SEQ ID NO: 50571 - protein, 8 aa, Homo Sapiens
LPTTISFT

SEQ ID NO: 50572 - protein, 8 aa, Homo Sapiens
TTISFTCW

SEQ ID NO: 50573 - protein, 8 aa, Homo Sapiens
TISFTCWR

SEQ ID NO: 50574 - protein, 8 aa, Homo Sapiens
TSPDAESL

SEQ ID NO: 50575 - protein, 8 aa, Homo Sapiens
SPDAESLF

SEQ ID NO: 50576 - protein, 8 aa, Homo Sapiens
AESLFREA

SEQ ID NO: 50577 - protein, 8 aa, Homo Sapiens
SLFREALS

SEQ ID NO: 50578 - protein, 8 aa, Homo Sapiens
REALSNKV

SEQ ID NO: 50579 - protein, 8 aa, Homo Sapiens
KVDELAHF

SEQ ID NO: 50580 - protein, 8 aa, Homo Sapiens
DELAHFLL

SEQ ID NO: 50581 - protein, 8 aa, Homo Sapiens
ELAHFLLR

SEQ ID NO: 50582 - protein, 8 aa, Homo Sapiens
LAHFLLRK

SEQ ID NO: 50583 - protein, 8 aa, Homo Sapiens
HFLLRKYR

SEQ ID NO: 50584 - protein, 8 aa, Homo Sapiens
FLLRKYRA

SEQ ID NO: 50585 - protein, 8 aa, Homo Sapiens
LLRKYRAK

SEQ ID NO: 50586 - protein, 8 aa, Homo Sapiens
RAKELVTK

SEQ ID NO: 50587 - protein, 8 aa, Homo Sapiens
ELVTKAEM

SEQ ID NO: 50588 - protein, 8 aa, Homo Sapiens
TKAEMLER

SEQ ID NO: 50589 - protein, 8 aa, Homo Sapiens
AEMLERVI

SEQ ID NO: 50590 - protein, 8 aa, Homo Sapiens
EMLERVIK

SEQ ID NO: 50591 - protein, 8 aa, Homo Sapiens
LERVIKNY

SEQ ID NO: 50592 - protein, 8 aa, Homo Sapiens
RVIKNYKR

SEQ ID NO: 50593 - protein, 8 aa, Homo Sapiens
NYKRCFPV

SEQ ID NO: 50594 - protein, 8 aa, Homo Sapiens
CFPVIFGK

SEQ ID NO: 50595 - protein, 8 aa, Homo Sapiens
FPVIFGKA

SEQ ID NO: 50596 - protein, 8 aa, Homo Sapiens
KASESLKM

SEQ ID NO: 50597 - protein, 8 aa, Homo Sapiens
SESLKMIF

SEQ ID NO: 50598 - protein, 8 aa, Homo Sapiens
SLKMIFGI

SEQ ID NO: 50599 - protein, 8 aa, Homo Sapiens
KMIFGIDV

SEQ ID NO: 50600 - protein, 8 aa, Homo Sapiens
MIFGIDVK

SEQ ID NO: 50601 - protein, 8 aa, Homo Sapiens
FGIDVKEV

SEQ ID NO: 50602 - protein, 8 aa, Homo Sapiens
ASNTYTLV

SEQ ID NO: 50603 - protein, 8 aa, Homo Sapiens
TYTLVTCL

SEQ ID NO: 50604 - protein, 8 aa, Homo Sapiens
TLVTCLGL

SEQ ID NO: 50605 - protein, 8 aa, Homo Sapiens
VTCLGLSY

SEQ ID NO: 50606 - protein, 8 aa, Homo Sapiens
GLSYDGLL

SEQ ID NO: 50607 - protein, 8 aa, Homo Sapiens
GLLGNNQI

SEQ ID NO: 50608 - protein, 8 aa, Homo Sapiens
GNNQIFPK

SEQ ID NO: 50609 - protein, 8 aa, Homo Sapiens
QIFPKTGL

SEQ ID NO: 50610 - protein, 8 aa, Homo Sapiens
IFPKTGLL

SEQ ID NO: 50611 - protein, 8 aa, Homo Sapiens
FPKTGLLI

SEQ ID NO: 50612 - protein, 8 aa, Homo Sapiens
KTGLLIIV

SEQ ID NO: 50613 - protein, 8 aa, Homo Sapiens
LLIIVLGT

SEQ ID NO: 50614 - protein, 8 aa, Homo Sapiens
LIIVLGTI

SEQ ID NO: 50615 - protein, 8 aa, Homo Sapiens
IVLGTIAM

SEQ ID NO: 50616 - protein, 8 aa, Homo Sapiens
IAMEGDSA

SEQ ID NO: 50617 - protein, 8 aa, Homo Sapiens
SASEEEIW

SEQ ID NO: 50618 - protein, 8 aa, Homo Sapiens
EEEIWEEL

SEQ ID NO: 50619 - protein, 8 aa, Homo Sapiens
EEIWEELG

SEQ ID NO: 50620 - protein, 8 aa, Homo Sapiens
EIWEELGV

SEQ ID NO: 50621 - protein, 8 aa, Homo Sapiens
EELGVMGV

SEQ ID NO: 50622 - protein, 8 aa, Homo Sapiens
ELGVMGVY

SEQ ID NO: 50623 - protein, 8 aa, Homo Sapiens
VMGVYDGR

SEQ ID NO: 50624 - protein, 8 aa, Homo Sapiens
DGREHTVY

SEQ ID NO: 50625 - protein, 8 aa, Homo Sapiens
HTVYGEPR

SEQ ID NO: 50626 - protein, 8 aa, Homo Sapiens
TVYGEPRK

SEQ ID NO: 50627 - protein, 8 aa, Homo Sapiens
VYGEPRKL

SEQ ID NO: 50628 - protein, 8 aa, Homo Sapiens
KLLTQDWV

SEQ ID NO: 50629 - protein, 8 aa, Homo Sapiens
LLTQDWVQ

SEQ ID NO: 50630 - protein, 8 aa, Homo Sapiens
VQENYLEY

SEQ ID NO: 50631 - protein, 8 aa, Homo Sapiens
NYLEYRQV

SEQ ID NO: 50632 - protein, 8 aa, Homo Sapiens
QVPGSNPA

SEQ ID NO: 50633 - protein, 8 aa, Homo Sapiens
NPARYEFL

SEQ ID NO: 50634 - protein, 8 aa, Homo Sapiens
YEFLWGPR

SEQ ID NO: 50635 - protein, 8 aa, Homo Sapiens
FLWGPRAL

SEQ ID NO: 50636 - protein, 8 aa, Homo Sapiens
RALAETSY

SEQ ID NO: 50637 - protein, 8 aa, Homo Sapiens
ALAETSYV

SEQ ID NO: 50638 - protein, 8 aa, Homo Sapiens
LAETSYVK

SEQ ID NO: 50639 - protein, 8 aa, Homo Sapiens
AETSYVKV

SEQ ID NO: 50640 - protein, 8 aa, Homo Sapiens
ETSYVKVL

SEQ ID NO: 50641 - protein, 8 aa, Homo Sapiens
YVKVLEHV

SEQ ID NO: 50642 - protein, 8 aa, Homo Sapiens
KVLEHVVR

SEQ ID NO: 50643 - protein, 8 aa, Homo Sapiens
VLEHVVRV

SEQ ID NO: 50644 - protein, 8 aa, Homo Sapiens
HVVRVNAR

SEQ ID NO: 50645 - protein, 8 aa, Homo Sapiens
VVRVNARV

SEQ ID NO: 50646 - protein, 8 aa, Homo Sapiens
RVNARVRI

SEQ ID NO: 50647 - protein, 8 aa, Homo Sapiens
NARVRIAY

SEQ ID NO: 50648 - protein, 8 aa, Homo Sapiens
RVRIAYPS

SEQ ID NO: 50649 - protein, 8 aa, Homo Sapiens
RIAYPSLR

SEQ ID NO: 50650 - protein, 8 aa, Homo Sapiens
YPSLREAA

SEQ ID NO: 50651 - protein, 8 aa, Homo Sapiens
SLREAALL

SEQ ID NO: 50652 - protein, 8 aa, Homo Sapiens
LLEEEEGV

SEQ ID NO: 50653 - protein, 9 aa, Homo Sapiens
EGVEAQEEA

SEQ ID NO: 50654 - protein, 9 aa, Homo Sapiens
AQEEALGLV

SEQ ID NO: 50655 - protein, 9 aa, Homo Sapiens
ALGLVGAQA

SEQ ID NO: 50656 - protein, 9 aa, Homo Sapiens
GLVGAQAPT

SEQ ID NO: 50657 - protein, 9 aa, Homo Sapiens
AQAPTTEEQ

SEQ ID NO: 50658 - protein, 9 aa, Homo Sapiens
TTEEQEAAV

SEQ ID NO: 50659 - protein, 9 aa, Homo Sapiens
EEQEAAVSS

SEQ ID NO: 50660 - protein, 9 aa, Homo Sapiens
AAVSSSSPL

SEQ ID NO: 50661 - protein, 9 aa, Homo Sapiens
AVSSSSPLV

SEQ ID NO: 50662 - protein, 9 aa, Homo Sapiens
PLVPGTLEE

SEQ ID NO: 50663 - protein, 9 aa, Homo Sapiens
LVPGTLEEV

SEQ ID NO: 50664 - protein, 9 aa, Homo Sapiens
GTLEEVPAA

SEQ ID NO: 50665 - protein, 9 aa, Homo Sapiens
EEVPAAESA

SEQ ID NO: 50666 - protein, 9 aa, Homo Sapiens
AESAGPPQS

SEQ ID NO: 50667 - protein, 9 aa, Homo Sapiens
GASALPTTI

SEQ ID NO: 50668 - protein, 9 aa, Homo Sapiens
SALPTTISF

SEQ ID NO: 50669 - protein, 9 aa, Homo Sapiens
ALPTTISFT

SEQ ID NO: 50670 - protein, 9 aa, Homo Sapiens
LPTTISFTC

SEQ ID NO: 50671 - protein, 9 aa, Homo Sapiens
PTTISFTCW

SEQ ID NO: 50672 - protein, 9 aa, Homo Sapiens
TTISFTCWR

SEQ ID NO: 50673 - protein, 9 aa, Homo Sapiens
SQEEEGPST

SEQ ID NO: 50674 - protein, 9 aa, Homo Sapiens
STSPDAESL

SEQ ID NO: 50675 - protein, 9 aa, Homo Sapiens
AESLFREAL

SEQ ID NO: 50676 - protein, 9 aa, Homo Sapiens
LFREALSNK

SEQ ID NO: 50677 - protein, 9 aa, Homo Sapiens
ALSNKVDEL

SEQ ID NO: 50678 - protein, 9 aa, Homo Sapiens
KVDELAHFL

SEQ ID NO: 50679 - protein, 9 aa, Homo Sapiens
DELAHFLLR

SEQ ID NO: 50680 - protein, 9 aa, Homo Sapiens
ELAHFLLRK

SEQ ID NO: 50681 - protein, 9 aa, Homo Sapiens
AHFLLRKYR

SEQ ID NO: 50682 - protein, 9 aa, Homo Sapiens
FLLRKYRAK

SEQ ID NO: 50683 - protein, 9 aa, Homo Sapiens
YRAKELVTK

SEQ ID NO: 50684 - protein, 9 aa, Homo Sapiens
RAKELVTKA

SEQ ID NO: 50685 - protein, 9 aa, Homo Sapiens
ELVTKAEML

SEQ ID NO: 50686 - protein, 9 aa, Homo Sapiens
VTKAEMLER

SEQ ID NO: 50687 - protein, 9 aa, Homo Sapiens
TKAEMLERV

SEQ ID NO: 50688 - protein, 9 aa, Homo Sapiens
LERVIKNYK

SEQ ID NO: 50689 - protein, 9 aa, Homo Sapiens
NYKRCFPVI

SEQ ID NO: 50690 - protein, 9 aa, Homo Sapiens
YKRCFPVIF

SEQ ID NO: 50691 - protein, 9 aa, Homo Sapiens
RCFPVIFGK

SEQ ID NO: 50692 - protein, 9 aa, Homo Sapiens
FPVIFGKAS

SEQ ID NO: 50693 - protein, 9 aa, Homo Sapiens
ESLKMIFGI

SEQ ID NO: 50694 - protein, 9 aa, Homo Sapiens
KMIFGIDVK

SEQ ID NO: 50695 - protein, 9 aa, Homo Sapiens
MIFGIDVKE

SEQ ID NO: 50696 - protein, 9 aa, Homo Sapiens
EVDPASNTY

SEQ ID NO: 50697 - protein, 9 aa, Homo Sapiens
DPASNTYTL

SEQ ID NO: 50698 - protein, 9 aa, Homo Sapiens
NTYTLVTCL

SEQ ID NO: 50699 - protein, 9 aa, Homo Sapiens
YTLVTCLGL

SEQ ID NO: 50700 - protein, 9 aa, Homo Sapiens
LVTCLGLSY

SEQ ID NO: 50701 - protein, 9 aa, Homo Sapiens
CLGLSYDGL

SEQ ID NO: 50702 - protein, 9 aa, Homo Sapiens
GLLGNNQIF

SEQ ID NO: 50703 - protein, 9 aa, Homo Sapiens
LGNNQIFPK

SEQ ID NO: 50704 - protein, 9 aa, Homo Sapiens
NQIFPKTGL

SEQ ID NO: 50705 - protein, 9 aa, Homo Sapiens
QIFPKTGLL

SEQ ID NO: 50706 - protein, 9 aa, Homo Sapiens
IFPKTGLLI

SEQ ID NO: 50707 - protein, 9 aa, Homo Sapiens
FPKTGLLII

SEQ ID NO: 50708 - protein, 9 aa, Homo Sapiens
GLLIIVLGT

SEQ ID NO: 50709 - protein, 9 aa, Homo Sapiens
LLIIVLGTI

SEQ ID NO: 50710 - protein, 9 aa, Homo Sapiens
IIVLGTIAM

SEQ ID NO: 50711 - protein, 9 aa, Homo Sapiens
IAMEGDSAS

SEQ ID NO: 50712 - protein, 9 aa, Homo Sapiens
DSASEEEIW

SEQ ID NO: 50713 - protein, 9 aa, Homo Sapiens
SEEEIWEEL

SEQ ID NO: 50714 - protein, 9 aa, Homo Sapiens
EEIWEELGV

SEQ ID NO: 50715 - protein, 9 aa, Homo Sapiens
EIWEELGVM

SEQ ID NO: 50716 - protein, 9 aa, Homo Sapiens
WEELGVMGV

SEQ ID NO: 50717 - protein, 9 aa, Homo Sapiens
EELGVMGVY

SEQ ID NO: 50718 - protein, 9 aa, Homo Sapiens
GVMGVYDGR

SEQ ID NO: 50719 - protein, 9 aa, Homo Sapiens
GVYDGREHT

SEQ ID NO: 50720 - protein, 9 aa, Homo Sapiens
VYDGREHTV

SEQ ID NO: 50721 - protein, 9 aa, Homo Sapiens
HTVYGEPRK

SEQ ID NO: 50722 - protein, 9 aa, Homo Sapiens
VYGEPRKLL

SEQ ID NO: 50723 - protein, 9 aa, Homo Sapiens
KLLTQDWVQ

SEQ ID NO: 50724 - protein, 9 aa, Homo Sapiens
TQDWVQENY

SEQ ID NO: 50725 - protein, 9 aa, Homo Sapiens
WVQENYLEY

SEQ ID NO: 50726 - protein, 9 aa, Homo Sapiens
VQENYLEYR

SEQ ID NO: 50727 - protein, 9 aa, Homo Sapiens
RQVPGSNPA

SEQ ID NO: 50728 - protein, 9 aa, Homo Sapiens
QVPGSNPAR

SEQ ID NO: 50729 - protein, 9 aa, Homo Sapiens
VPGSNPARY

SEQ ID NO: 50730 - protein, 9 aa, Homo Sapiens
GSNPARYEF

SEQ ID NO: 50731 - protein, 9 aa, Homo Sapiens
NPARYEFLW

SEQ ID NO: 50732 - protein, 9 aa, Homo Sapiens
RYEFLWGPR

SEQ ID NO: 50733 - protein, 9 aa, Homo Sapiens
EFLWGPRAL

SEQ ID NO: 50734 - protein, 9 aa, Homo Sapiens
FLWGPRALA

SEQ ID NO: 50735 - protein, 9 aa, Homo Sapiens
RALAETSYV

SEQ ID NO: 50736 - protein, 9 aa, Homo Sapiens
ALAETSYVK

SEQ ID NO: 50737 - protein, 9 aa, Homo Sapiens
AETSYVKVL

SEQ ID NO: 50738 - protein, 9 aa, Homo Sapiens
ETSYVKVLE

SEQ ID NO: 50739 - protein, 9 aa, Homo Sapiens
SYVKVLEHV

SEQ ID NO: 50740 - protein, 9 aa, Homo Sapiens
YVKVLEHVV

SEQ ID NO: 50741 - protein, 9 aa, Homo Sapiens
KVLEHVVRV

SEQ ID NO: 50742 - protein, 9 aa, Homo Sapiens
EHVVRVNAR

SEQ ID NO: 50743 - protein, 9 aa, Homo Sapiens
HVVRVNARV

SEQ ID NO: 50744 - protein, 9 aa, Homo Sapiens
VVRVNARVR

SEQ ID NO: 50745 - protein, 9 aa, Homo Sapiens
RVNARVRIA

SEQ ID NO: 50746 - protein, 9 aa, Homo Sapiens
RVRIAYPSL

SEQ ID NO: 50747 - protein, 9 aa, Homo Sapiens
IAYPSLREA

SEQ ID NO: 50748 - protein, 9 aa, Homo Sapiens
YPSLREAAL

SEQ ID NO: 50749 - protein, 9 aa, Homo Sapiens
ALLEEEEGV

SEQ ID NO: 50750 - protein, 10 aa, Homo Sapiens
SSEQKSQHCK

SEQ ID NO: 50751 - protein, 10 aa, Homo Sapiens
SQHCKPEEGV

SEQ ID NO: 50752 - protein, 10 aa, Homo Sapiens
EEGVEAQEEA

SEQ ID NO: 50753 - protein, 10 aa, Homo Sapiens
EGVEAQEEAL

SEQ ID NO: 50754 - protein, 10 aa, Homo Sapiens
VEAQEEALGL

SEQ ID NO: 50755 - protein, 10 aa, Homo Sapiens
EAQEEALGLV

SEQ ID NO: 50756 - protein, 10 aa, Homo Sapiens
EALGLVGAQA

SEQ ID NO: 50757 - protein, 10 aa, Homo Sapiens
GLVGAQAPTT

SEQ ID NO: 50758 - protein, 10 aa, Homo Sapiens
PTTEEQEAAV

SEQ ID NO: 50759 - protein, 10 aa, Homo Sapiens
EAAVSSSSPL

SEQ ID NO: 50760 - protein, 10 aa, Homo Sapiens
AAVSSSSPLV

SEQ ID NO: 50761 - protein, 10 aa, Homo Sapiens
PLVPGTLEEV

SEQ ID NO: 50762 - protein, 10 aa, Homo Sapiens
VPGTLEEVPA

SEQ ID NO: 50763 - protein, 10 aa, Homo Sapiens
ESAGPPQSPQ

SEQ ID NO: 50764 - protein, 10 aa, Homo Sapiens
SPQGASALPT

SEQ ID NO: 50765 - protein, 10 aa, Homo Sapiens
ASALPTTISF

SEQ ID NO: 50766 - protein, 10 aa, Homo Sapiens
ALPTTISFTC

SEQ ID NO: 50767 - protein, 10 aa, Homo Sapiens
LPTTISFTCW

SEQ ID NO: 50768 - protein, 10 aa, Homo Sapiens
PTTISFTCWR

SEQ ID NO: 50769 - protein, 10 aa, Homo Sapiens
TTISFTCWRQ

SEQ ID NO: 50770 - protein, 10 aa, Homo Sapiens
EEGPSTSPDA

SEQ ID NO: 50771 - protein, 10 aa, Homo Sapiens
STSPDAESLF

SEQ ID NO: 50772 - protein, 10 aa, Homo Sapiens
TSPDAESLFR

SEQ ID NO: 50773 - protein, 10 aa, Homo Sapiens
AESLFREALS

SEQ ID NO: 50774 - protein, 10 aa, Homo Sapiens
SLFREALSNK

SEQ ID NO: 50775 - protein, 10 aa, Homo Sapiens
EALSNKVDEL

SEQ ID NO: 50776 - protein, 10 aa, Homo Sapiens
ALSNKVDELA

SEQ ID NO: 50777 - protein, 10 aa, Homo Sapiens
KVDELAHFLL

SEQ ID NO: 50778 - protein, 10 aa, Homo Sapiens
ELAHFLLRKY

SEQ ID NO: 50779 - protein, 10 aa, Homo Sapiens
LAHFLLRKYR

SEQ ID NO: 50780 - protein, 10 aa, Homo Sapiens
HFLLRKYRAK

SEQ ID NO: 50781 - protein, 10 aa, Homo Sapiens
FLLRKYRAKE

SEQ ID NO: 50782 - protein, 10 aa, Homo Sapiens
LLRKYRAKEL

SEQ ID NO: 50783 - protein, 10 aa, Homo Sapiens
KYRAKELVTK

SEQ ID NO: 50784 - protein, 10 aa, Homo Sapiens
KELVTKAEML

SEQ ID NO: 50785 - protein, 10 aa, Homo Sapiens
LVTKAEMLER

SEQ ID NO: 50786 - protein, 10 aa, Homo Sapiens
VTKAEMLERV

SEQ ID NO: 50787 - protein, 10 aa, Homo Sapiens
KAEMLERVIK

SEQ ID NO: 50788 - protein, 10 aa, Homo Sapiens
AEMLERVIKN

SEQ ID NO: 50789 - protein, 10 aa, Homo Sapiens
EMLERVIKNY

SEQ ID NO: 50790 - protein, 10 aa, Homo Sapiens
MLERVIKNYK

SEQ ID NO: 50791 - protein, 10 aa, Homo Sapiens
LERVIKNYKR

SEQ ID NO: 50792 - protein, 10 aa, Homo Sapiens
RVIKNYKRCF

SEQ ID NO: 50793 - protein, 10 aa, Homo Sapiens
NYKRCFPVIF

SEQ ID NO: 50794 - protein, 10 aa, Homo Sapiens
KRCFPVIFGK

SEQ ID NO: 50795 - protein, 10 aa, Homo Sapiens
RCFPVIFGKA

SEQ ID NO: 50796 - protein, 10 aa, Homo Sapiens
FPVIFGKASE

SEQ ID NO: 50797 - protein, 10 aa, Homo Sapiens
VIFGKASESL

SEQ ID NO: 50798 - protein, 10 aa, Homo Sapiens
IFGKASESLK

SEQ ID NO: 50799 - protein, 10 aa, Homo Sapiens
KASESLKMIF

SEQ ID NO: 50800 - protein, 10 aa, Homo Sapiens
SLKMIFGIDV

SEQ ID NO: 50801 - protein, 10 aa, Homo Sapiens
MIFGIDVKEV

SEQ ID NO: 50802 - protein, 10 aa, Homo Sapiens
KEVDPASNTY

SEQ ID NO: 50803 - protein, 10 aa, Homo Sapiens
EVDPASNTYT

SEQ ID NO: 50804 - protein, 10 aa, Homo Sapiens
DPASNTYTLV

SEQ ID NO: 50805 - protein, 10 aa, Homo Sapiens
TYTLVTCLGL

SEQ ID NO: 50806 - protein, 10 aa, Homo Sapiens
TLVTCLGLSY

SEQ ID NO: 50807 - protein, 10 aa, Homo Sapiens
CLGLSYDGLL

SEQ ID NO: 50808 - protein, 10 aa, Homo Sapiens
GLLGNNQIFP

SEQ ID NO: 50809 - protein, 10 aa, Homo Sapiens
LLGNNQIFPK

SEQ ID NO: 50810 - protein, 10 aa, Homo Sapiens
NQIFPKTGLL

SEQ ID NO: 50811 - protein, 10 aa, Homo Sapiens
QIFPKTGLLI

SEQ ID NO: 50812 - protein, 10 aa, Homo Sapiens
IFPKTGLLII

SEQ ID NO: 50813 - protein, 10 aa, Homo Sapiens
FPKTGLLIIV

SEQ ID NO: 50814 - protein, 10 aa, Homo Sapiens
GLLIIVLGTI

SEQ ID NO: 50815 - protein, 10 aa, Homo Sapiens
LLIIVLGTIA

SEQ ID NO: 50816 - protein, 10 aa, Homo Sapiens
LIIVLGTIAM

SEQ ID NO: 50817 - protein, 10 aa, Homo Sapiens
EEEIWEELGV

SEQ ID NO: 50818 - protein, 10 aa, Homo Sapiens
EEIWEELGVM

SEQ ID NO: 50819 - protein, 10 aa, Homo Sapiens
WEELGVMGVY

SEQ ID NO: 50820 - protein, 10 aa, Homo Sapiens
GVYDGREHTV

SEQ ID NO: 50821 - protein, 10 aa, Homo Sapiens
VYDGREHTVY

SEQ ID NO: 50822 - protein, 10 aa, Homo Sapiens
REHTVYGEPR

SEQ ID NO: 50823 - protein, 10 aa, Homo Sapiens
TVYGEPRKLL

SEQ ID NO: 50824 - protein, 10 aa, Homo Sapiens
EPRKLLTQDW

SEQ ID NO: 50825 - protein, 10 aa, Homo Sapiens
LTQDWVQENY

SEQ ID NO: 50826 - protein, 10 aa, Homo Sapiens
TQDWVQENYL

SEQ ID NO: 50827 - protein, 10 aa, Homo Sapiens
DWVQENYLEY

SEQ ID NO: 50828 - protein, 10 aa, Homo Sapiens
WVQENYLEYR

SEQ ID NO: 50829 - protein, 10 aa, Homo Sapiens
RQVPGSNPAR

SEQ ID NO: 50830 - protein, 10 aa, Homo Sapiens
QVPGSNPARY

SEQ ID NO: 50831 - protein, 10 aa, Homo Sapiens
ARYEFLWGPR

SEQ ID NO: 50832 - protein, 10 aa, Homo Sapiens
YEFLWGPRAL

SEQ ID NO: 50833 - protein, 10 aa, Homo Sapiens
FLWGPRALAE

SEQ ID NO: 50834 - protein, 10 aa, Homo Sapiens
RALAETSYVK

SEQ ID NO: 50835 - protein, 10 aa, Homo Sapiens
ALAETSYVKV

SEQ ID NO: 50836 - protein, 10 aa, Homo Sapiens
ETSYVKVLEH

SEQ ID NO: 50837 - protein, 10 aa, Homo Sapiens
TSYVKVLEHV

SEQ ID NO: 50838 - protein, 10 aa, Homo Sapiens
SYVKVLEHVV

SEQ ID NO: 50839 - protein, 10 aa, Homo Sapiens
YVKVLEHVVR

SEQ ID NO: 50840 - protein, 10 aa, Homo Sapiens
VLEHVVRVNA

SEQ ID NO: 50841 - protein, 10 aa, Homo Sapiens
LEHVVRVNAR

SEQ ID NO: 50842 - protein, 10 aa, Homo Sapiens
HVVRVNARVR

SEQ ID NO: 50843 - protein, 10 aa, Homo Sapiens
VVRVNARVRI

SEQ ID NO: 50844 - protein, 10 aa, Homo Sapiens
RVNARVRIAY

SEQ ID NO: 50845 - protein, 10 aa, Homo Sapiens
ARVRIAYPSL

SEQ ID NO: 50846 - protein, 10 aa, Homo Sapiens
RVRIAYPSLR

SEQ ID NO: 50847 - protein, 10 aa, Homo Sapiens
RIAYPSLREA

SEQ ID NO: 50848 - protein, 10 aa, Homo Sapiens
AYPSLREAAL

SEQ ID NO: 50849 - protein, 10 aa, Homo Sapiens
YPSLREAALL

SEQ ID NO: 50850 - protein, 10 aa, Homo Sapiens
AALLEEEEGV

SEQ ID NO: 50851 - protein, 11 aa, Homo Sapiens
MSSEQKSQHCK

SEQ ID NO: 50852 - protein, 11 aa, Homo Sapiens
EEGVEAQEEAL

SEQ ID NO: 50853 - protein, 11 aa, Homo Sapiens
AQEEALGLVGA

SEQ ID NO: 50854 - protein, 11 aa, Homo Sapiens
ALGLVGAQAPT

SEQ ID NO: 50855 - protein, 11 aa, Homo Sapiens
AQAPTTEEQEA

SEQ ID NO: 50856 - protein, 11 aa, Homo Sapiens
APTTEEQEAAV

SEQ ID NO: 50857 - protein, 11 aa, Homo Sapiens
QEAAVSSSSPL

SEQ ID NO: 50858 - protein, 11 aa, Homo Sapiens
EAAVSSSSPLV

SEQ ID NO: 50859 - protein, 11 aa, Homo Sapiens
SPLVPGTLEEV

SEQ ID NO: 50860 - protein, 11 aa, Homo Sapiens
VPGTLEEVPAA

SEQ ID NO: 50861 - protein, 11 aa, Homo Sapiens
TLEEVPAAESA

SEQ ID NO: 50862 - protein, 11 aa, Homo Sapiens
PPQSPQGASAL

SEQ ID NO: 50863 - protein, 11 aa, Homo Sapiens
GASALPTTISF

SEQ ID NO: 50864 - protein, 11 aa, Homo Sapiens
SALPTTISFTC

SEQ ID NO: 50865 - protein, 11 aa, Homo Sapiens
LPTTISFTCWR

SEQ ID NO: 50866 - protein, 11 aa, Homo Sapiens
GPSTSPDAESL

SEQ ID NO: 50867 - protein, 11 aa, Homo Sapiens
STSPDAESLFR

SEQ ID NO: 50868 - protein, 11 aa, Homo Sapiens
AESLFREALSN

SEQ ID NO: 50869 - protein, 11 aa, Homo Sapiens
ESLFREALSNK

SEQ ID NO: 50870 - protein, 11 aa, Homo Sapiens
SLFREALSNKV

SEQ ID NO: 50871 - protein, 11 aa, Homo Sapiens
REALSNKVDEL

SEQ ID NO: 50872 - protein, 11 aa, Homo Sapiens
LSNKVDELAHF

SEQ ID NO: 50873 - protein, 11 aa, Homo Sapiens
KVDELAHFLLR

SEQ ID NO: 50874 - protein, 11 aa, Homo Sapiens
DELAHFLLRKY

SEQ ID NO: 50875 - protein, 11 aa, Homo Sapiens
ELAHFLLRKYR

SEQ ID NO: 50876 - protein, 11 aa, Homo Sapiens
FLLRKYRAKEL

SEQ ID NO: 50877 - protein, 11 aa, Homo Sapiens
LLRKYRAKELV

SEQ ID NO: 50878 - protein, 11 aa, Homo Sapiens
RKYRAKELVTK

SEQ ID NO: 50879 - protein, 11 aa, Homo Sapiens
ELVTKAEMLER

SEQ ID NO: 50880 - protein, 11 aa, Homo Sapiens
LVTKAEMLERV

SEQ ID NO: 50881 - protein, 11 aa, Homo Sapiens
AEMLERVIKNY

SEQ ID NO: 50882 - protein, 11 aa, Homo Sapiens
EMLERVIKNYK

SEQ ID NO: 50883 - protein, 11 aa, Homo Sapiens
MLERVIKNYKR

SEQ ID NO: 50884 - protein, 11 aa, Homo Sapiens
VIKNYKRCFPV

SEQ ID NO: 50885 - protein, 11 aa, Homo Sapiens
YKRCFPVIFGK

SEQ ID NO: 50886 - protein, 11 aa, Homo Sapiens
FPVIFGKASES

SEQ ID NO: 50887 - protein, 11 aa, Homo Sapiens
VIFGKASESLK

SEQ ID NO: 50888 - protein, 11 aa, Homo Sapiens
ESLKMIFGIDV

SEQ ID NO: 50889 - protein, 11 aa, Homo Sapiens
SLKMIFGIDVK

SEQ ID NO: 50890 - protein, 11 aa, Homo Sapiens
KMIFGIDVKEV

SEQ ID NO: 50891 - protein, 11 aa, Homo Sapiens
FGIDVKEVDPA

SEQ ID NO: 50892 - protein, 11 aa, Homo Sapiens
EVDPASNTYTL

SEQ ID NO: 50893 - protein, 11 aa, Homo Sapiens
DPASNTYTLVT

SEQ ID NO: 50894 - protein, 11 aa, Homo Sapiens
NTYTLVTCLGL

SEQ ID NO: 50895 - protein, 11 aa, Homo Sapiens
YTLVTCLGLSY

SEQ ID NO: 50896 - protein, 11 aa, Homo Sapiens
SYDGLLGNNQI

SEQ ID NO: 50897 - protein, 11 aa, Homo Sapiens
GLLGNNQIFPK

SEQ ID NO: 50898 - protein, 11 aa, Homo Sapiens
LLGNNQIFPKT

SEQ ID NO: 50899 - protein, 11 aa, Homo Sapiens
NQIFPKTGLLI

SEQ ID NO: 50900 - protein, 11 aa, Homo Sapiens
QIFPKTGLLII

SEQ ID NO: 50901 - protein, 11 aa, Homo Sapiens
FPKTGLLIIVL

SEQ ID NO: 50902 - protein, 11 aa, Homo Sapiens
GLLIIVLGTIA

SEQ ID NO: 50903 - protein, 11 aa, Homo Sapiens
LLIIVLGTIAM

SEQ ID NO: 50904 - protein, 11 aa, Homo Sapiens
MEGDSASEEEI

SEQ ID NO: 50905 - protein, 11 aa, Homo Sapiens
SASEEEIWEEL

SEQ ID NO: 50906 - protein, 11 aa, Homo Sapiens
SEEEIWEELGV

SEQ ID NO: 50907 - protein, 11 aa, Homo Sapiens
EEEIWEELGVM

SEQ ID NO: 50908 - protein, 11 aa, Homo Sapiens
EEIWEELGVMG

SEQ ID NO: 50909 - protein, 11 aa, Homo Sapiens
EIWEELGVMGV

SEQ ID NO: 50910 - protein, 11 aa, Homo Sapiens
IWEELGVMGVY

SEQ ID NO: 50911 - protein, 11 aa, Homo Sapiens
ELGVMGVYDGR

SEQ ID NO: 50912 - protein, 11 aa, Homo Sapiens
GVYDGREHTVY

SEQ ID NO: 50913 - protein, 11 aa, Homo Sapiens
REHTVYGEPRK

SEQ ID NO: 50914 - protein, 11 aa, Homo Sapiens
HTVYGEPRKLL

SEQ ID NO: 50915 - protein, 11 aa, Homo Sapiens
GEPRKLLTQDW

SEQ ID NO: 50916 - protein, 11 aa, Homo Sapiens
LTQDWVQENYL

SEQ ID NO: 50917 - protein, 11 aa, Homo Sapiens
QDWVQENYLEY

SEQ ID NO: 50918 - protein, 11 aa, Homo Sapiens
DWVQENYLEYR

SEQ ID NO: 50919 - protein, 11 aa, Homo Sapiens
VQENYLEYRQV

SEQ ID NO: 50920 - protein, 11 aa, Homo Sapiens
RQVPGSNPARY

SEQ ID NO: 50921 - protein, 11 aa, Homo Sapiens
VPGSNPARYEF

SEQ ID NO: 50922 - protein, 11 aa, Homo Sapiens
GSNPARYEFLW

SEQ ID NO: 50923 - protein, 11 aa, Homo Sapiens
RYEFLWGPRAL

SEQ ID NO: 50924 - protein, 11 aa, Homo Sapiens
FLWGPRALAET

SEQ ID NO: 50925 - protein, 11 aa, Homo Sapiens
WGPRALAETSY

SEQ ID NO: 50926 - protein, 11 aa, Homo Sapiens
GPRALAETSYV

SEQ ID NO: 50927 - protein, 11 aa, Homo Sapiens
RALAETSYVKV

SEQ ID NO: 50928 - protein, 11 aa, Homo Sapiens
ALAETSYVKVL

SEQ ID NO: 50929 - protein, 11 aa, Homo Sapiens
ETSYVKVLEHV

SEQ ID NO: 50930 - protein, 11 aa, Homo Sapiens
SYVKVLEHVVR

SEQ ID NO: 50931 - protein, 11 aa, Homo Sapiens
YVKVLEHVVRV

SEQ ID NO: 50932 - protein, 11 aa, Homo Sapiens
KVLEHVVRVNA

SEQ ID NO: 50933 - protein, 11 aa, Homo Sapiens
HVVRVNARVRI

SEQ ID NO: 50934 - protein, 11 aa, Homo Sapiens
VRVNARVRIAY

SEQ ID NO: 50935 - protein, 11 aa, Homo Sapiens
NARVRIAYPSL

SEQ ID NO: 50936 - protein, 11 aa, Homo Sapiens
RVRIAYPSLRE

SEQ ID NO: 50937 - protein, 11 aa, Homo Sapiens
RIAYPSLREAA

SEQ ID NO: 50938 - protein, 11 aa, Homo Sapiens
IAYPSLREAAL

SEQ ID NO: 50939 - protein, 11 aa, Homo Sapiens
AYPSLREAALL

SEQ ID NO: 50940 - protein, 11 aa, Homo Sapiens
EAALLEEEEGV

SEQ ID NO: 50941 - protein, 13 aa, Homo Sapiens
MSSEQKSQHCKPE

SEQ ID NO: 50942 - protein, 13 aa, Homo Sapiens
SSEQKSQHCKPEE

SEQ ID NO: 50943 - protein, 13 aa, Homo Sapiens
SEQKSQHCKPEEG

SEQ ID NO: 50944 - protein, 13 aa, Homo Sapiens
EQKSQHCKPEEGV

SEQ ID NO: 50945 - protein, 13 aa, Homo Sapiens
QKSQHCKPEEGVE

SEQ ID NO: 50946 - protein, 13 aa, Homo Sapiens
KSQHCKPEEGVEA

SEQ ID NO: 50947 - protein, 13 aa, Homo Sapiens
SQHCKPEEGVEAQ

SEQ ID NO: 50948 - protein, 13 aa, Homo Sapiens
QHCKPEEGVEAQE

SEQ ID NO: 50949 - protein, 13 aa, Homo Sapiens
HCKPEEGVEAQEE

SEQ ID NO: 50950 - protein, 13 aa, Homo Sapiens
CKPEEGVEAQEEA

SEQ ID NO: 50951 - protein, 13 aa, Homo Sapiens
KPEEGVEAQEEAL

SEQ ID NO: 50952 - protein, 13 aa, Homo Sapiens
PEEGVEAQEEALG

SEQ ID NO: 50953 - protein, 13 aa, Homo Sapiens
EEGVEAQEEALGL

SEQ ID NO: 50954 - protein, 13 aa, Homo Sapiens
EGVEAQEEALGLV

SEQ ID NO: 50955 - protein, 13 aa, Homo Sapiens
GVEAQEEALGLVG

SEQ ID NO: 50956 - protein, 13 aa, Homo Sapiens
VEAQEEALGLVGA

SEQ ID NO: 50957 - protein, 13 aa, Homo Sapiens
EAQEEALGLVGAQ

SEQ ID NO: 50958 - protein, 13 aa, Homo Sapiens
AQEEALGLVGAQA

SEQ ID NO: 50959 - protein, 13 aa, Homo Sapiens
QEEALGLVGAQAP

SEQ ID NO: 50960 - protein, 13 aa, Homo Sapiens
EEALGLVGAQAPT

SEQ ID NO: 50961 - protein, 13 aa, Homo Sapiens
EALGLVGAQAPTT

SEQ ID NO: 50962 - protein, 13 aa, Homo Sapiens
ALGLVGAQAPTTE

SEQ ID NO: 50963 - protein, 13 aa, Homo Sapiens
LGLVGAQAPTTEE

SEQ ID NO: 50964 - protein, 13 aa, Homo Sapiens
GLVGAQAPTTEEQ

SEQ ID NO: 50965 - protein, 13 aa, Homo Sapiens
LVGAQAPTTEEQE

SEQ ID NO: 50966 - protein, 13 aa, Homo Sapiens
VGAQAPTTEEQEA

SEQ ID NO: 50967 - protein, 13 aa, Homo Sapiens
GAQAPTTEEQEAA

SEQ ID NO: 50968 - protein, 13 aa, Homo Sapiens
AQAPTTEEQEAAV

SEQ ID NO: 50969 - protein, 13 aa, Homo Sapiens
QAPTTEEQEAAVS

SEQ ID NO: 50970 - protein, 13 aa, Homo Sapiens
APTTEEQEAAVSS

SEQ ID NO: 50971 - protein, 13 aa, Homo Sapiens
PTTEEQEAAVSSS

SEQ ID NO: 50972 - protein, 13 aa, Homo Sapiens
TTEEQEAAVSSSS

SEQ ID NO: 50973 - protein, 13 aa, Homo Sapiens
TEEQEAAVSSSSP

SEQ ID NO: 50974 - protein, 13 aa, Homo Sapiens
EEQEAAVSSSSPL

SEQ ID NO: 50975 - protein, 13 aa, Homo Sapiens
EQEAAVSSSSPLV

SEQ ID NO: 50976 - protein, 13 aa, Homo Sapiens
QEAAVSSSSPLVP

SEQ ID NO: 50977 - protein, 13 aa, Homo Sapiens
EAAVSSSSPLVPG

SEQ ID NO: 50978 - protein, 13 aa, Homo Sapiens
AAVSSSSPLVPGT

SEQ ID NO: 50979 - protein, 13 aa, Homo Sapiens
AVSSSSPLVPGTL

SEQ ID NO: 50980 - protein, 13 aa, Homo Sapiens
VSSSSPLVPGTLE

SEQ ID NO: 50981 - protein, 13 aa, Homo Sapiens
SSSSPLVPGTLEE

SEQ ID NO: 50982 - protein, 13 aa, Homo Sapiens
SSSPLVPGTLEEV

SEQ ID NO: 50983 - protein, 13 aa, Homo Sapiens
SSPLVPGTLEEVP

SEQ ID NO: 50984 - protein, 13 aa, Homo Sapiens
SPLVPGTLEEVPA

SEQ ID NO: 50985 - protein, 13 aa, Homo Sapiens
PLVPGTLEEVPAA

SEQ ID NO: 50986 - protein, 13 aa, Homo Sapiens
LVPGTLEEVPAAE

SEQ ID NO: 50987 - protein, 13 aa, Homo Sapiens
VPGTLEEVPAAES

SEQ ID NO: 50988 - protein, 13 aa, Homo Sapiens
PGTLEEVPAAESA

SEQ ID NO: 50989 - protein, 13 aa, Homo Sapiens
GTLEEVPAAESAG

SEQ ID NO: 50990 - protein, 13 aa, Homo Sapiens
TLEEVPAAESAGP

SEQ ID NO: 50991 - protein, 13 aa, Homo Sapiens
LEEVPAAESAGPP

SEQ ID NO: 50992 - protein, 13 aa, Homo Sapiens
EEVPAAESAGPPQ

SEQ ID NO: 50993 - protein, 13 aa, Homo Sapiens
EVPAAESAGPPQS

SEQ ID NO: 50994 - protein, 13 aa, Homo Sapiens
VPAAESAGPPQSP

SEQ ID NO: 50995 - protein, 13 aa, Homo Sapiens
PAAESAGPPQSPQ

SEQ ID NO: 50996 - protein, 13 aa, Homo Sapiens
AAESAGPPQSPQG

SEQ ID NO: 50997 - protein, 13 aa, Homo Sapiens
AESAGPPQSPQGA

SEQ ID NO: 50998 - protein, 13 aa, Homo Sapiens
ESAGPPQSPQGAS

SEQ ID NO: 50999 - protein, 13 aa, Homo Sapiens
SAGPPQSPQGASA

SEQ ID NO: 51000 - protein, 13 aa, Homo Sapiens
AGPPQSPQGASAL

SEQ ID NO: 51001 - protein, 13 aa, Homo Sapiens
GPPQSPQGASALP

SEQ ID NO: 51002 - protein, 13 aa, Homo Sapiens
PPQSPQGASALPT

SEQ ID NO: 51003 - protein, 13 aa, Homo Sapiens
PQSPQGASALPTT

SEQ ID NO: 51004 - protein, 13 aa, Homo Sapiens
QSPQGASALPTTI

SEQ ID NO: 51005 - protein, 13 aa, Homo Sapiens
SPQGASALPTTIS

SEQ ID NO: 51006 - protein, 13 aa, Homo Sapiens
PQGASALPTTISF

SEQ ID NO: 51007 - protein, 13 aa, Homo Sapiens
QGASALPTTISFT

SEQ ID NO: 51008 - protein, 13 aa, Homo Sapiens
GASALPTTISFTC

SEQ ID NO: 51009 - protein, 13 aa, Homo Sapiens
ASALPTTISFTCW

SEQ ID NO: 51010 - protein, 13 aa, Homo Sapiens
SALPTTISFTCWR

SEQ ID NO: 51011 - protein, 13 aa, Homo Sapiens
ALPTTISFTCWRQ

SEQ ID NO: 51012 - protein, 13 aa, Homo Sapiens
LPTTISFTCWRQP

SEQ ID NO: 51013 - protein, 13 aa, Homo Sapiens
PTTISFTCWRQPN

SEQ ID NO: 51014 - protein, 13 aa, Homo Sapiens
TTISFTCWRQPNE

SEQ ID NO: 51015 - protein, 13 aa, Homo Sapiens
TISFTCWRQPNEG

SEQ ID NO: 51016 - protein, 13 aa, Homo Sapiens
ISFTCWRQPNEGS

SEQ ID NO: 51017 - protein, 13 aa, Homo Sapiens
SFTCWRQPNEGSS

SEQ ID NO: 51018 - protein, 13 aa, Homo Sapiens
FTCWRQPNEGSSS

SEQ ID NO: 51019 - protein, 13 aa, Homo Sapiens
TCWRQPNEGSSSQ

SEQ ID NO: 51020 - protein, 13 aa, Homo Sapiens
CWRQPNEGSSSQE

SEQ ID NO: 51021 - protein, 13 aa, Homo Sapiens
WRQPNEGSSSQEE

SEQ ID NO: 51022 - protein, 13 aa, Homo Sapiens
RQPNEGSSSQEEE

SEQ ID NO: 51023 - protein, 13 aa, Homo Sapiens
QPNEGSSSQEEEG

SEQ ID NO: 51024 - protein, 13 aa, Homo Sapiens
PNEGSSSQEEEGP

SEQ ID NO: 51025 - protein, 13 aa, Homo Sapiens
NEGSSSQEEEGPS

SEQ ID NO: 51026 - protein, 13 aa, Homo Sapiens
EGSSSQEEEGPST

SEQ ID NO: 51027 - protein, 13 aa, Homo Sapiens
GSSSQEEEGPSTS

SEQ ID NO: 51028 - protein, 13 aa, Homo Sapiens
SSSQEEEGPSTSP

SEQ ID NO: 51029 - protein, 13 aa, Homo Sapiens
SSQEEEGPSTSPD

SEQ ID NO: 51030 - protein, 13 aa, Homo Sapiens
SQEEEGPSTSPDA

SEQ ID NO: 51031 - protein, 13 aa, Homo Sapiens
QEEEGPSTSPDAE

SEQ ID NO: 51032 - protein, 13 aa, Homo Sapiens
EEEGPSTSPDAES

SEQ ID NO: 51033 - protein, 13 aa, Homo Sapiens
EEGPSTSPDAESL

SEQ ID NO: 51034 - protein, 13 aa, Homo Sapiens
EGPSTSPDAESLF

SEQ ID NO: 51035 - protein, 13 aa, Homo Sapiens
GPSTSPDAESLFR

SEQ ID NO: 51036 - protein, 13 aa, Homo Sapiens
PSTSPDAESLFRE

SEQ ID NO: 51037 - protein, 13 aa, Homo Sapiens
STSPDAESLFREA

SEQ ID NO: 51038 - protein, 13 aa, Homo Sapiens
TSPDAESLFREAL

SEQ ID NO: 51039 - protein, 13 aa, Homo Sapiens
SPDAESLFREALS

SEQ ID NO: 51040 - protein, 13 aa, Homo Sapiens
PDAESLFREALSN

SEQ ID NO: 51041 - protein, 13 aa, Homo Sapiens
DAESLFREALSNK

SEQ ID NO: 51042 - protein, 13 aa, Homo Sapiens
AESLFREALSNKV

SEQ ID NO: 51043 - protein, 13 aa, Homo Sapiens
ESLFREALSNKVD

SEQ ID NO: 51044 - protein, 13 aa, Homo Sapiens
SLFREALSNKVDE

SEQ ID NO: 51045 - protein, 13 aa, Homo Sapiens
LFREALSNKVDEL

SEQ ID NO: 51046 - protein, 13 aa, Homo Sapiens
FREALSNKVDELA

SEQ ID NO: 51047 - protein, 13 aa, Homo Sapiens
REALSNKVDELAH

SEQ ID NO: 51048 - protein, 13 aa, Homo Sapiens
EALSNKVDELAHF

SEQ ID NO: 51049 - protein, 13 aa, Homo Sapiens
ALSNKVDELAHFL

SEQ ID NO: 51050 - protein, 13 aa, Homo Sapiens
LSNKVDELAHFLL

SEQ ID NO: 51051 - protein, 13 aa, Homo Sapiens
SNKVDELAHFLLR

SEQ ID NO: 51052 - protein, 13 aa, Homo Sapiens
NKVDELAHFLLRK

SEQ ID NO: 51053 - protein, 13 aa, Homo Sapiens
KVDELAHFLLRKY

SEQ ID NO: 51054 - protein, 13 aa, Homo Sapiens
VDELAHFLLRKYR

SEQ ID NO: 51055 - protein, 13 aa, Homo Sapiens
DELAHFLLRKYRA

SEQ ID NO: 51056 - protein, 13 aa, Homo Sapiens
ELAHFLLRKYRAK

SEQ ID NO: 51057 - protein, 13 aa, Homo Sapiens
LAHFLLRKYRAKE

SEQ ID NO: 51058 - protein, 13 aa, Homo Sapiens
AHFLLRKYRAKEL

SEQ ID NO: 51059 - protein, 13 aa, Homo Sapiens
HFLLRKYRAKELV

SEQ ID NO: 51060 - protein, 13 aa, Homo Sapiens
FLLRKYRAKELVT

SEQ ID NO: 51061 - protein, 13 aa, Homo Sapiens
LLRKYRAKELVTK

SEQ ID NO: 51062 - protein, 13 aa, Homo Sapiens
LRKYRAKELVTKA

SEQ ID NO: 51063 - protein, 13 aa, Homo Sapiens
RKYRAKELVTKAE

SEQ ID NO: 51064 - protein, 13 aa, Homo Sapiens
KYRAKELVTKAEM

SEQ ID NO: 51065 - protein, 13 aa, Homo Sapiens
YRAKELVTKAEML

SEQ ID NO: 51066 - protein, 13 aa, Homo Sapiens
RAKELVTKAEMLE

SEQ ID NO: 51067 - protein, 13 aa, Homo Sapiens
AKELVTKAEMLER

SEQ ID NO: 51068 - protein, 13 aa, Homo Sapiens
KELVTKAEMLERV

SEQ ID NO: 51069 - protein, 13 aa, Homo Sapiens
ELVTKAEMLERVI

SEQ ID NO: 51070 - protein, 13 aa, Homo Sapiens
LVTKAEMLERVIK

SEQ ID NO: 51071 - protein, 13 aa, Homo Sapiens
VTKAEMLERVIKN

SEQ ID NO: 51072 - protein, 13 aa, Homo Sapiens
TKAEMLERVIKNY

SEQ ID NO: 51073 - protein, 13 aa, Homo Sapiens
KAEMLERVIKNYK

SEQ ID NO: 51074 - protein, 13 aa, Homo Sapiens
AEMLERVIKNYKR

SEQ ID NO: 51075 - protein, 13 aa, Homo Sapiens
EMLERVIKNYKRC

SEQ ID NO: 51076 - protein, 13 aa, Homo Sapiens
MLERVIKNYKRCF

SEQ ID NO: 51077 - protein, 13 aa, Homo Sapiens
LERVIKNYKRCFP

SEQ ID NO: 51078 - protein, 13 aa, Homo Sapiens
ERVIKNYKRCFPV

SEQ ID NO: 51079 - protein, 13 aa, Homo Sapiens
RVIKNYKRCFPVI

SEQ ID NO: 51080 - protein, 13 aa, Homo Sapiens
VIKNYKRCFPVIF

SEQ ID NO: 51081 - protein, 13 aa, Homo Sapiens
IKNYKRCFPVIFG

SEQ ID NO: 51082 - protein, 13 aa, Homo Sapiens
KNYKRCFPVIFGK

SEQ ID NO: 51083 - protein, 13 aa, Homo Sapiens
NYKRCFPVIFGKA

SEQ ID NO: 51084 - protein, 13 aa, Homo Sapiens
YKRCFPVIFGKAS

SEQ ID NO: 51085 - protein, 13 aa, Homo Sapiens
KRCFPVIFGKASE

SEQ ID NO: 51086 - protein, 13 aa, Homo Sapiens
RCFPVIFGKASES

SEQ ID NO: 51087 - protein, 13 aa, Homo Sapiens
CFPVIFGKASESL

SEQ ID NO: 51088 - protein, 13 aa, Homo Sapiens
FPVIFGKASESLK

SEQ ID NO: 51089 - protein, 13 aa, Homo Sapiens
PVIFGKASESLKM

SEQ ID NO: 51090 - protein, 13 aa, Homo Sapiens
VIFGKASESLKMI

SEQ ID NO: 51091 - protein, 13 aa, Homo Sapiens
IFGKASESLKMIF

SEQ ID NO: 51092 - protein, 13 aa, Homo Sapiens
FGKASESLKMIFG

SEQ ID NO: 51093 - protein, 13 aa, Homo Sapiens
GKASESLKMIFGI

SEQ ID NO: 51094 - protein, 13 aa, Homo Sapiens
KASESLKMIFGID

SEQ ID NO: 51095 - protein, 13 aa, Homo Sapiens
ASESLKMIFGIDV

SEQ ID NO: 51096 - protein, 13 aa, Homo Sapiens
SESLKMIFGIDVK

SEQ ID NO: 51097 - protein, 13 aa, Homo Sapiens
ESLKMIFGIDVKE

SEQ ID NO: 51098 - protein, 13 aa, Homo Sapiens
SLKMIFGIDVKEV

SEQ ID NO: 51099 - protein, 13 aa, Homo Sapiens
LKMIFGIDVKEVD

SEQ ID NO: 51100 - protein, 13 aa, Homo Sapiens
KMIFGIDVKEVDP

SEQ ID NO: 51101 - protein, 13 aa, Homo Sapiens
MIFGIDVKEVDPA

SEQ ID NO: 51102 - protein, 13 aa, Homo Sapiens
IFGIDVKEVDPAS

SEQ ID NO: 51103 - protein, 13 aa, Homo Sapiens
FGIDVKEVDPASN

SEQ ID NO: 51104 - protein, 13 aa, Homo Sapiens
GIDVKEVDPASNT

SEQ ID NO: 51105 - protein, 13 aa, Homo Sapiens
IDVKEVDPASNTY

SEQ ID NO: 51106 - protein, 13 aa, Homo Sapiens
DVKEVDPASNTYT

SEQ ID NO: 51107 - protein, 13 aa, Homo Sapiens
VKEVDPASNTYTL

SEQ ID NO: 51108 - protein, 13 aa, Homo Sapiens
KEVDPASNTYTLV

SEQ ID NO: 51109 - protein, 13 aa, Homo Sapiens
EVDPASNTYTLVT

SEQ ID NO: 51110 - protein, 13 aa, Homo Sapiens
VDPASNTYTLVTC

SEQ ID NO: 51111 - protein, 13 aa, Homo Sapiens
DPASNTYTLVTCL

SEQ ID NO: 51112 - protein, 13 aa, Homo Sapiens
PASNTYTLVTCLG

SEQ ID NO: 51113 - protein, 13 aa, Homo Sapiens
ASNTYTLVTCLGL

SEQ ID NO: 51114 - protein, 13 aa, Homo Sapiens
SNTYTLVTCLGLS

SEQ ID NO: 51115 - protein, 13 aa, Homo Sapiens
NTYTLVTCLGLSY

SEQ ID NO: 51116 - protein, 13 aa, Homo Sapiens
TYTLVTCLGLSYD

SEQ ID NO: 51117 - protein, 13 aa, Homo Sapiens
YTLVTCLGLSYDG

SEQ ID NO: 51118 - protein, 13 aa, Homo Sapiens
TLVTCLGLSYDGL

SEQ ID NO: 51119 - protein, 13 aa, Homo Sapiens
LVTCLGLSYDGLL

SEQ ID NO: 51120 - protein, 13 aa, Homo Sapiens
VTCLGLSYDGLLG

SEQ ID NO: 51121 - protein, 13 aa, Homo Sapiens
TCLGLSYDGLLGN

SEQ ID NO: 51122 - protein, 13 aa, Homo Sapiens
CLGLSYDGLLGNN

SEQ ID NO: 51123 - protein, 13 aa, Homo Sapiens
LGLSYDGLLGNNQ

SEQ ID NO: 51124 - protein, 13 aa, Homo Sapiens
GLSYDGLLGNNQI

SEQ ID NO: 51125 - protein, 13 aa, Homo Sapiens
LSYDGLLGNNQIF

SEQ ID NO: 51126 - protein, 13 aa, Homo Sapiens
SYDGLLGNNQIFP

SEQ ID NO: 51127 - protein, 13 aa, Homo Sapiens
YDGLLGNNQIFPK

SEQ ID NO: 51128 - protein, 13 aa, Homo Sapiens
DGLLGNNQIFPKT

SEQ ID NO: 51129 - protein, 13 aa, Homo Sapiens
GLLGNNQIFPKTG

SEQ ID NO: 51130 - protein, 13 aa, Homo Sapiens
LLGNNQIFPKTGL

SEQ ID NO: 51131 - protein, 13 aa, Homo Sapiens
LGNNQIFPKTGLL

SEQ ID NO: 51132 - protein, 13 aa, Homo Sapiens
GNNQIFPKTGLLI

SEQ ID NO: 51133 - protein, 13 aa, Homo Sapiens
NNQIFPKTGLLII

SEQ ID NO: 51134 - protein, 13 aa, Homo Sapiens
NQIFPKTGLLIIV

SEQ ID NO: 51135 - protein, 13 aa, Homo Sapiens
QIFPKTGLLIIVL

SEQ ID NO: 51136 - protein, 13 aa, Homo Sapiens
IFPKTGLLIIVLG

SEQ ID NO: 51137 - protein, 13 aa, Homo Sapiens
FPKTGLLIIVLGT

SEQ ID NO: 51138 - protein, 13 aa, Homo Sapiens
PKTGLLIIVLGTI

SEQ ID NO: 51139 - protein, 13 aa, Homo Sapiens
KTGLLIIVLGTIA

SEQ ID NO: 51140 - protein, 13 aa, Homo Sapiens
TGLLIIVLGTIAM

SEQ ID NO: 51141 - protein, 13 aa, Homo Sapiens
GLLIIVLGTIAME

SEQ ID NO: 51142 - protein, 13 aa, Homo Sapiens
LLIIVLGTIAMEG

SEQ ID NO: 51143 - protein, 13 aa, Homo Sapiens
LIIVLGTIAMEGD

SEQ ID NO: 51144 - protein, 13 aa, Homo Sapiens
IIVLGTIAMEGDS

SEQ ID NO: 51145 - protein, 13 aa, Homo Sapiens
IVLGTIAMEGDSA

SEQ ID NO: 51146 - protein, 13 aa, Homo Sapiens
VLGTIAMEGDSAS

SEQ ID NO: 51147 - protein, 13 aa, Homo Sapiens
LGTIAMEGDSASE

SEQ ID NO: 51148 - protein, 13 aa, Homo Sapiens
GTIAMEGDSASEE

SEQ ID NO: 51149 - protein, 13 aa, Homo Sapiens
TIAMEGDSASEEE

SEQ ID NO: 51150 - protein, 13 aa, Homo Sapiens
IAMEGDSASEEEI

SEQ ID NO: 51151 - protein, 13 aa, Homo Sapiens
AMEGDSASEEEIW

SEQ ID NO: 51152 - protein, 13 aa, Homo Sapiens
MEGDSASEEEIWE

SEQ ID NO: 51153 - protein, 13 aa, Homo Sapiens
EGDSASEEEIWEE

SEQ ID NO: 51154 - protein, 13 aa, Homo Sapiens
GDSASEEEIWEEL

SEQ ID NO: 51155 - protein, 13 aa, Homo Sapiens
DSASEEEIWEELG

SEQ ID NO: 51156 - protein, 13 aa, Homo Sapiens
SASEEEIWEELGV

SEQ ID NO: 51157 - protein, 13 aa, Homo Sapiens
ASEEEIWEELGVM

SEQ ID NO: 51158 - protein, 13 aa, Homo Sapiens
SEEEIWEELGVMG

SEQ ID NO: 51159 - protein, 13 aa, Homo Sapiens
EEEIWEELGVMGV

SEQ ID NO: 51160 - protein, 13 aa, Homo Sapiens
EEIWEELGVMGVY

SEQ ID NO: 51161 - protein, 13 aa, Homo Sapiens
EIWEELGVMGVYD

SEQ ID NO: 51162 - protein, 13 aa, Homo Sapiens
IWEELGVMGVYDG

SEQ ID NO: 51163 - protein, 13 aa, Homo Sapiens
WEELGVMGVYDGR

SEQ ID NO: 51164 - protein, 13 aa, Homo Sapiens
EELGVMGVYDGRE

SEQ ID NO: 51165 - protein, 13 aa, Homo Sapiens
ELGVMGVYDGREH

SEQ ID NO: 51166 - protein, 13 aa, Homo Sapiens
LGVMGVYDGREHT

SEQ ID NO: 51167 - protein, 13 aa, Homo Sapiens
GVMGVYDGREHTV

SEQ ID NO: 51168 - protein, 13 aa, Homo Sapiens
VMGVYDGREHTVY

SEQ ID NO: 51169 - protein, 13 aa, Homo Sapiens
MGVYDGREHTVYG

SEQ ID NO: 51170 - protein, 13 aa, Homo Sapiens
GVYDGREHTVYGE

SEQ ID NO: 51171 - protein, 13 aa, Homo Sapiens
VYDGREHTVYGEP

SEQ ID NO: 51172 - protein, 13 aa, Homo Sapiens
YDGREHTVYGEPR

SEQ ID NO: 51173 - protein, 13 aa, Homo Sapiens
DGREHTVYGEPRK

SEQ ID NO: 51174 - protein, 13 aa, Homo Sapiens
GREHTVYGEPRKL

SEQ ID NO: 51175 - protein, 13 aa, Homo Sapiens
REHTVYGEPRKLL

SEQ ID NO: 51176 - protein, 13 aa, Homo Sapiens
EHTVYGEPRKLLT

SEQ ID NO: 51177 - protein, 13 aa, Homo Sapiens
HTVYGEPRKLLTQ

SEQ ID NO: 51178 - protein, 13 aa, Homo Sapiens
TVYGEPRKLLTQD

SEQ ID NO: 51179 - protein, 13 aa, Homo Sapiens
VYGEPRKLLTQDW

SEQ ID NO: 51180 - protein, 13 aa, Homo Sapiens
YGEPRKLLTQDWV

SEQ ID NO: 51181 - protein, 13 aa, Homo Sapiens
GEPRKLLTQDWVQ

SEQ ID NO: 51182 - protein, 13 aa, Homo Sapiens
EPRKLLTQDWVQE

SEQ ID NO: 51183 - protein, 13 aa, Homo Sapiens
PRKLLTQDWVQEN

SEQ ID NO: 51184 - protein, 13 aa, Homo Sapiens
RKLLTQDWVQENY

SEQ ID NO: 51185 - protein, 13 aa, Homo Sapiens
KLLTQDWVQENYL

SEQ ID NO: 51186 - protein, 13 aa, Homo Sapiens
LLTQDWVQENYLE

SEQ ID NO: 51187 - protein, 13 aa, Homo Sapiens
LTQDWVQENYLEY

SEQ ID NO: 51188 - protein, 13 aa, Homo Sapiens
TQDWVQENYLEYR

SEQ ID NO: 51189 - protein, 13 aa, Homo Sapiens
QDWVQENYLEYRQ

SEQ ID NO: 51190 - protein, 13 aa, Homo Sapiens
DWVQENYLEYRQV

SEQ ID NO: 51191 - protein, 13 aa, Homo Sapiens
WVQENYLEYRQVP

SEQ ID NO: 51192 - protein, 13 aa, Homo Sapiens
VQENYLEYRQVPG

SEQ ID NO: 51193 - protein, 13 aa, Homo Sapiens
QENYLEYRQVPGS

SEQ ID NO: 51194 - protein, 13 aa, Homo Sapiens
ENYLEYRQVPGSN

SEQ ID NO: 51195 - protein, 13 aa, Homo Sapiens
NYLEYRQVPGSNP

SEQ ID NO: 51196 - protein, 13 aa, Homo Sapiens
YLEYRQVPGSNPA

SEQ ID NO: 51197 - protein, 13 aa, Homo Sapiens
LEYRQVPGSNPAR

SEQ ID NO: 51198 - protein, 13 aa, Homo Sapiens
EYRQVPGSNPARY

SEQ ID NO: 51199 - protein, 13 aa, Homo Sapiens
YRQVPGSNPARYE

SEQ ID NO: 51200 - protein, 13 aa, Homo Sapiens
RQVPGSNPARYEF

SEQ ID NO: 51201 - protein, 13 aa, Homo Sapiens
QVPGSNPARYEFL

SEQ ID NO: 51202 - protein, 13 aa, Homo Sapiens
VPGSNPARYEFLW

SEQ ID NO: 51203 - protein, 13 aa, Homo Sapiens
PGSNPARYEFLWG

SEQ ID NO: 51204 - protein, 13 aa, Homo Sapiens
GSNPARYEFLWGP

SEQ ID NO: 51205 - protein, 13 aa, Homo Sapiens
SNPARYEFLWGPR

SEQ ID NO: 51206 - protein, 13 aa, Homo Sapiens
NPARYEFLWGPRA

SEQ ID NO: 51207 - protein, 13 aa, Homo Sapiens
PARYEFLWGPRAL

SEQ ID NO: 51208 - protein, 13 aa, Homo Sapiens
ARYEFLWGPRALA

SEQ ID NO: 51209 - protein, 13 aa, Homo Sapiens
RYEFLWGPRALAE

SEQ ID NO: 51210 - protein, 13 aa, Homo Sapiens
YEFLWGPRALAET

SEQ ID NO: 51211 - protein, 13 aa, Homo Sapiens
EFLWGPRALAETS

SEQ ID NO: 51212 - protein, 13 aa, Homo Sapiens
FLWGPRALAETSY

SEQ ID NO: 51213 - protein, 13 aa, Homo Sapiens
LWGPRALAETSYV

SEQ ID NO: 51214 - protein, 13 aa, Homo Sapiens
WGPRALAETSYVK

SEQ ID NO: 51215 - protein, 13 aa, Homo Sapiens
GPRALAETSYVKV

SEQ ID NO: 51216 - protein, 13 aa, Homo Sapiens
PRALAETSYVKVL

SEQ ID NO: 51217 - protein, 13 aa, Homo Sapiens
RALAETSYVKVLE

SEQ ID NO: 51218 - protein, 13 aa, Homo Sapiens
ALAETSYVKVLEH

SEQ ID NO: 51219 - protein, 13 aa, Homo Sapiens
LAETSYVKVLEHV

SEQ ID NO: 51220 - protein, 13 aa, Homo Sapiens
AETSYVKVLEHVV

SEQ ID NO: 51221 - protein, 13 aa, Homo Sapiens
ETSYVKVLEHVVR

SEQ ID NO: 51222 - protein, 13 aa, Homo Sapiens
TSYVKVLEHVVRV

SEQ ID NO: 51223 - protein, 13 aa, Homo Sapiens
SYVKVLEHVVRVN

SEQ ID NO: 51224 - protein, 13 aa, Homo Sapiens
YVKVLEHVVRVNA

SEQ ID NO: 51225 - protein, 13 aa, Homo Sapiens
VKVLEHVVRVNAR

SEQ ID NO: 51226 - protein, 13 aa, Homo Sapiens
KVLEHVVRVNARV

SEQ ID NO: 51227 - protein, 13 aa, Homo Sapiens
VLEHVVRVNARVR

SEQ ID NO: 51228 - protein, 13 aa, Homo Sapiens
LEHVVRVNARVRI

SEQ ID NO: 51229 - protein, 13 aa, Homo Sapiens
EHVVRVNARVRIA

SEQ ID NO: 51230 - protein, 13 aa, Homo Sapiens
HVVRVNARVRIAY

SEQ ID NO: 51231 - protein, 13 aa, Homo Sapiens
VVRVNARVRIAYP

SEQ ID NO: 51232 - protein, 13 aa, Homo Sapiens
VRVNARVRIAYPS

SEQ ID NO: 51233 - protein, 13 aa, Homo Sapiens
RVNARVRIAYPSL

SEQ ID NO: 51234 - protein, 13 aa, Homo Sapiens
VNARVRIAYPSLR

SEQ ID NO: 51235 - protein, 13 aa, Homo Sapiens
NARVRIAYPSLRE

SEQ ID NO: 51236 - protein, 13 aa, Homo Sapiens
ARVRIAYPSLREA

SEQ ID NO: 51237 - protein, 13 aa, Homo Sapiens
RVRIAYPSLREAA

SEQ ID NO: 51238 - protein, 13 aa, Homo Sapiens
VRIAYPSLREAAL

SEQ ID NO: 51239 - protein, 13 aa, Homo Sapiens
RIAYPSLREAALL

SEQ ID NO: 51240 - protein, 13 aa, Homo Sapiens
IAYPSLREAALLE

SEQ ID NO: 51241 - protein, 13 aa, Homo Sapiens
AYPSLREAALLEE

SEQ ID NO: 51242 - protein, 13 aa, Homo Sapiens
YPSLREAALLEEE

SEQ ID NO: 51243 - protein, 13 aa, Homo Sapiens
PSLREAALLEEEE

SEQ ID NO: 51244 - protein, 13 aa, Homo Sapiens
SLREAALLEEEEG

SEQ ID NO: 51245 - protein, 13 aa, Homo Sapiens
LREAALLEEEEGV

SEQ ID NO: 51246 - protein, 14 aa, Homo Sapiens
MSSEQKSQHCKPEE

SEQ ID NO: 51247 - protein, 14 aa, Homo Sapiens
SSEQKSQHCKPEEG

SEQ ID NO: 51248 - protein, 14 aa, Homo Sapiens
SEQKSQHCKPEEGV

SEQ ID NO: 51249 - protein, 14 aa, Homo Sapiens
EQKSQHCKPEEGVE

SEQ ID NO: 51250 - protein, 14 aa, Homo Sapiens
QKSQHCKPEEGVEA

SEQ ID NO: 51251 - protein, 14 aa, Homo Sapiens
KSQHCKPEEGVEAQ

SEQ ID NO: 51252 - protein, 14 aa, Homo Sapiens
SQHCKPEEGVEAQE

SEQ ID NO: 51253 - protein, 14 aa, Homo Sapiens
QHCKPEEGVEAQEE

SEQ ID NO: 51254 - protein, 14 aa, Homo Sapiens
HCKPEEGVEAQEEA

SEQ ID NO: 51255 - protein, 14 aa, Homo Sapiens
CKPEEGVEAQEEAL

SEQ ID NO: 51256 - protein, 14 aa, Homo Sapiens
KPEEGVEAQEEALG

SEQ ID NO: 51257 - protein, 14 aa, Homo Sapiens
PEEGVEAQEEALGL

SEQ ID NO: 51258 - protein, 14 aa, Homo Sapiens
EEGVEAQEEALGLV

SEQ ID NO: 51259 - protein, 14 aa, Homo Sapiens
EGVEAQEEALGLVG

SEQ ID NO: 51260 - protein, 14 aa, Homo Sapiens
GVEAQEEALGLVGA

SEQ ID NO: 51261 - protein, 14 aa, Homo Sapiens
VEAQEEALGLVGAQ

SEQ ID NO: 51262 - protein, 14 aa, Homo Sapiens
EAQEEALGLVGAQA

SEQ ID NO: 51263 - protein, 14 aa, Homo Sapiens
AQEEALGLVGAQAP

SEQ ID NO: 51264 - protein, 14 aa, Homo Sapiens
QEEALGLVGAQAPT

SEQ ID NO: 51265 - protein, 14 aa, Homo Sapiens
EEALGLVGAQAPTT

SEQ ID NO: 51266 - protein, 14 aa, Homo Sapiens
EALGLVGAQAPTTE

SEQ ID NO: 51267 - protein, 14 aa, Homo Sapiens
ALGLVGAQAPTTEE

SEQ ID NO: 51268 - protein, 14 aa, Homo Sapiens
LGLVGAQAPTTEEQ

SEQ ID NO: 51269 - protein, 14 aa, Homo Sapiens
GLVGAQAPTTEEQE

SEQ ID NO: 51270 - protein, 14 aa, Homo Sapiens
LVGAQAPTTEEQEA

SEQ ID NO: 51271 - protein, 14 aa, Homo Sapiens
VGAQAPTTEEQEAA

SEQ ID NO: 51272 - protein, 14 aa, Homo Sapiens
GAQAPTTEEQEAAV

SEQ ID NO: 51273 - protein, 14 aa, Homo Sapiens
AQAPTTEEQEAAVS

SEQ ID NO: 51274 - protein, 14 aa, Homo Sapiens
QAPTTEEQEAAVSS

SEQ ID NO: 51275 - protein, 14 aa, Homo Sapiens
APTTEEQEAAVSSS

SEQ ID NO: 51276 - protein, 14 aa, Homo Sapiens
PTTEEQEAAVSSSS

SEQ ID NO: 51277 - protein, 14 aa, Homo Sapiens
TTEEQEAAVSSSSP

SEQ ID NO: 51278 - protein, 14 aa, Homo Sapiens
TEEQEAAVSSSSPL

SEQ ID NO: 51279 - protein, 14 aa, Homo Sapiens
EEQEAAVSSSSPLV

SEQ ID NO: 51280 - protein, 14 aa, Homo Sapiens
EQEAAVSSSSPLVP

SEQ ID NO: 51281 - protein, 14 aa, Homo Sapiens
QEAAVSSSSPLVPG

SEQ ID NO: 51282 - protein, 14 aa, Homo Sapiens
EAAVSSSSPLVPGT

SEQ ID NO: 51283 - protein, 14 aa, Homo Sapiens
AAVSSSSPLVPGTL

SEQ ID NO: 51284 - protein, 14 aa, Homo Sapiens
AVSSSSPLVPGTLE

SEQ ID NO: 51285 - protein, 14 aa, Homo Sapiens
VSSSSPLVPGTLEE

SEQ ID NO: 51286 - protein, 14 aa, Homo Sapiens
SSSSPLVPGTLEEV

SEQ ID NO: 51287 - protein, 14 aa, Homo Sapiens
SSSPLVPGTLEEVP

SEQ ID NO: 51288 - protein, 14 aa, Homo Sapiens
SSPLVPGTLEEVPA

SEQ ID NO: 51289 - protein, 14 aa, Homo Sapiens
SPLVPGTLEEVPAA

SEQ ID NO: 51290 - protein, 14 aa, Homo Sapiens
PLVPGTLEEVPAAE

SEQ ID NO: 51291 - protein, 14 aa, Homo Sapiens
LVPGTLEEVPAAES

SEQ ID NO: 51292 - protein, 14 aa, Homo Sapiens
VPGTLEEVPAAESA

SEQ ID NO: 51293 - protein, 14 aa, Homo Sapiens
PGTLEEVPAAESAG

SEQ ID NO: 51294 - protein, 14 aa, Homo Sapiens
GTLEEVPAAESAGP

SEQ ID NO: 51295 - protein, 14 aa, Homo Sapiens
TLEEVPAAESAGPP

SEQ ID NO: 51296 - protein, 14 aa, Homo Sapiens
LEEVPAAESAGPPQ

SEQ ID NO: 51297 - protein, 14 aa, Homo Sapiens
EEVPAAESAGPPQS

SEQ ID NO: 51298 - protein, 14 aa, Homo Sapiens
EVPAAESAGPPQSP

SEQ ID NO: 51299 - protein, 14 aa, Homo Sapiens
VPAAESAGPPQSPQ

SEQ ID NO: 51300 - protein, 14 aa, Homo Sapiens
PAAESAGPPQSPQG

SEQ ID NO: 51301 - protein, 14 aa, Homo Sapiens
AAESAGPPQSPQGA

SEQ ID NO: 51302 - protein, 14 aa, Homo Sapiens
AESAGPPQSPQGAS

SEQ ID NO: 51303 - protein, 14 aa, Homo Sapiens
ESAGPPQSPQGASA

SEQ ID NO: 51304 - protein, 14 aa, Homo Sapiens
SAGPPQSPQGASAL

SEQ ID NO: 51305 - protein, 14 aa, Homo Sapiens
AGPPQSPQGASALP

SEQ ID NO: 51306 - protein, 14 aa, Homo Sapiens
GPPQSPQGASALPT

SEQ ID NO: 51307 - protein, 14 aa, Homo Sapiens
PPQSPQGASALPTT

SEQ ID NO: 51308 - protein, 14 aa, Homo Sapiens
PQSPQGASALPTTI

SEQ ID NO: 51309 - protein, 14 aa, Homo Sapiens
QSPQGASALPTTIS

SEQ ID NO: 51310 - protein, 14 aa, Homo Sapiens
SPQGASALPTTISF

SEQ ID NO: 51311 - protein, 14 aa, Homo Sapiens
PQGASALPTTISFT

SEQ ID NO: 51312 - protein, 14 aa, Homo Sapiens
QGASALPTTISFTC

SEQ ID NO: 51313 - protein, 14 aa, Homo Sapiens
GASALPTTISFTCW

SEQ ID NO: 51314 - protein, 14 aa, Homo Sapiens
ASALPTTISFTCWR

SEQ ID NO: 51315 - protein, 14 aa, Homo Sapiens
SALPTTISFTCWRQ

SEQ ID NO: 51316 - protein, 14 aa, Homo Sapiens
ALPTTISFTCWRQP

SEQ ID NO: 51317 - protein, 14 aa, Homo Sapiens
LPTTISFTCWRQPN

SEQ ID NO: 51318 - protein, 14 aa, Homo Sapiens
PTTISFTCWRQPNE

SEQ ID NO: 51319 - protein, 14 aa, Homo Sapiens
TTISFTCWRQPNEG

SEQ ID NO: 51320 - protein, 14 aa, Homo Sapiens
TISFTCWRQPNEGS

SEQ ID NO: 51321 - protein, 14 aa, Homo Sapiens
ISFTCWRQPNEGSS

SEQ ID NO: 51322 - protein, 14 aa, Homo Sapiens
SFTCWRQPNEGSSS

SEQ ID NO: 51323 - protein, 14 aa, Homo Sapiens
FTCWRQPNEGSSSQ

SEQ ID NO: 51324 - protein, 14 aa, Homo Sapiens
TCWRQPNEGSSSQE

SEQ ID NO: 51325 - protein, 14 aa, Homo Sapiens
CWRQPNEGSSSQEE

SEQ ID NO: 51326 - protein, 14 aa, Homo Sapiens
WRQPNEGSSSQEEE

SEQ ID NO: 51327 - protein, 14 aa, Homo Sapiens
RQPNEGSSSQEEEG

SEQ ID NO: 51328 - protein, 14 aa, Homo Sapiens
QPNEGSSSQEEEGP

SEQ ID NO: 51329 - protein, 14 aa, Homo Sapiens
PNEGSSSQEEEGPS

SEQ ID NO: 51330 - protein, 14 aa, Homo Sapiens
NEGSSSQEEEGPST

SEQ ID NO: 51331 - protein, 14 aa, Homo Sapiens
EGSSSQEEEGPSTS

SEQ ID NO: 51332 - protein, 14 aa, Homo Sapiens
GSSSQEEEGPSTSP

SEQ ID NO: 51333 - protein, 14 aa, Homo Sapiens
SSSQEEEGPSTSPD

SEQ ID NO: 51334 - protein, 14 aa, Homo Sapiens
SSQEEEGPSTSPDA

SEQ ID NO: 51335 - protein, 14 aa, Homo Sapiens
SQEEEGPSTSPDAE

SEQ ID NO: 51336 - protein, 14 aa, Homo Sapiens
QEEEGPSTSPDAES

SEQ ID NO: 51337 - protein, 14 aa, Homo Sapiens
EEEGPSTSPDAESL

SEQ ID NO: 51338 - protein, 14 aa, Homo Sapiens
EEGPSTSPDAESLF

SEQ ID NO: 51339 - protein, 14 aa, Homo Sapiens
EGPSTSPDAESLFR

SEQ ID NO: 51340 - protein, 14 aa, Homo Sapiens
GPSTSPDAESLFRE

SEQ ID NO: 51341 - protein, 14 aa, Homo Sapiens
PSTSPDAESLFREA

SEQ ID NO: 51342 - protein, 14 aa, Homo Sapiens
STSPDAESLFREAL

SEQ ID NO: 51343 - protein, 14 aa, Homo Sapiens
TSPDAESLFREALS

SEQ ID NO: 51344 - protein, 14 aa, Homo Sapiens
SPDAESLFREALSN

SEQ ID NO: 51345 - protein, 14 aa, Homo Sapiens
PDAESLFREALSNK

SEQ ID NO: 51346 - protein, 14 aa, Homo Sapiens
DAESLFREALSNKV

SEQ ID NO: 51347 - protein, 14 aa, Homo Sapiens
AESLFREALSNKVD

SEQ ID NO: 51348 - protein, 14 aa, Homo Sapiens
ESLFREALSNKVDE

SEQ ID NO: 51349 - protein, 14 aa, Homo Sapiens
SLFREALSNKVDEL

SEQ ID NO: 51350 - protein, 14 aa, Homo Sapiens
LFREALSNKVDELA

SEQ ID NO: 51351 - protein, 14 aa, Homo Sapiens
FREALSNKVDELAH

SEQ ID NO: 51352 - protein, 14 aa, Homo Sapiens
REALSNKVDELAHF

SEQ ID NO: 51353 - protein, 14 aa, Homo Sapiens
EALSNKVDELAHFL

SEQ ID NO: 51354 - protein, 14 aa, Homo Sapiens
ALSNKVDELAHFLL

SEQ ID NO: 51355 - protein, 14 aa, Homo Sapiens
LSNKVDELAHFLLR

SEQ ID NO: 51356 - protein, 14 aa, Homo Sapiens
SNKVDELAHFLLRK

SEQ ID NO: 51357 - protein, 14 aa, Homo Sapiens
NKVDELAHFLLRKY

SEQ ID NO: 51358 - protein, 14 aa, Homo Sapiens
KVDELAHFLLRKYR

SEQ ID NO: 51359 - protein, 14 aa, Homo Sapiens
VDELAHFLLRKYRA

SEQ ID NO: 51360 - protein, 14 aa, Homo Sapiens
DELAHFLLRKYRAK

SEQ ID NO: 51361 - protein, 14 aa, Homo Sapiens
ELAHFLLRKYRAKE

SEQ ID NO: 51362 - protein, 14 aa, Homo Sapiens
LAHFLLRKYRAKEL

SEQ ID NO: 51363 - protein, 14 aa, Homo Sapiens
AHFLLRKYRAKELV

SEQ ID NO: 51364 - protein, 14 aa, Homo Sapiens
HFLLRKYRAKELVT

SEQ ID NO: 51365 - protein, 14 aa, Homo Sapiens
FLLRKYRAKELVTK

SEQ ID NO: 51366 - protein, 14 aa, Homo Sapiens
LLRKYRAKELVTKA

SEQ ID NO: 51367 - protein, 14 aa, Homo Sapiens
LRKYRAKELVTKAE

SEQ ID NO: 51368 - protein, 14 aa, Homo Sapiens
RKYRAKELVTKAEM

SEQ ID NO: 51369 - protein, 14 aa, Homo Sapiens
KYRAKELVTKAEML

SEQ ID NO: 51370 - protein, 14 aa, Homo Sapiens
YRAKELVTKAEMLE

SEQ ID NO: 51371 - protein, 14 aa, Homo Sapiens
RAKELVTKAEMLER

SEQ ID NO: 51372 - protein, 14 aa, Homo Sapiens
AKELVTKAEMLERV

SEQ ID NO: 51373 - protein, 14 aa, Homo Sapiens
KELVTKAEMLERVI

SEQ ID NO: 51374 - protein, 14 aa, Homo Sapiens
ELVTKAEMLERVIK

SEQ ID NO: 51375 - protein, 14 aa, Homo Sapiens
LVTKAEMLERVIKN

SEQ ID NO: 51376 - protein, 14 aa, Homo Sapiens
VTKAEMLERVIKNY

SEQ ID NO: 51377 - protein, 14 aa, Homo Sapiens
TKAEMLERVIKNYK

SEQ ID NO: 51378 - protein, 14 aa, Homo Sapiens
KAEMLERVIKNYKR

SEQ ID NO: 51379 - protein, 14 aa, Homo Sapiens
AEMLERVIKNYKRC

SEQ ID NO: 51380 - protein, 14 aa, Homo Sapiens
EMLERVIKNYKRCF

SEQ ID NO: 51381 - protein, 14 aa, Homo Sapiens
MLERVIKNYKRCFP

SEQ ID NO: 51382 - protein, 14 aa, Homo Sapiens
LERVIKNYKRCFPV

SEQ ID NO: 51383 - protein, 14 aa, Homo Sapiens
ERVIKNYKRCFPVI

SEQ ID NO: 51384 - protein, 14 aa, Homo Sapiens
RVIKNYKRCFPVIF

SEQ ID NO: 51385 - protein, 14 aa, Homo Sapiens
VIKNYKRCFPVIFG

SEQ ID NO: 51386 - protein, 14 aa, Homo Sapiens
IKNYKRCFPVIFGK

SEQ ID NO: 51387 - protein, 14 aa, Homo Sapiens
KNYKRCFPVIFGKA

SEQ ID NO: 51388 - protein, 14 aa, Homo Sapiens
NYKRCFPVIFGKAS

SEQ ID NO: 51389 - protein, 14 aa, Homo Sapiens
YKRCFPVIFGKASE

SEQ ID NO: 51390 - protein, 14 aa, Homo Sapiens
KRCFPVIFGKASES

SEQ ID NO: 51391 - protein, 14 aa, Homo Sapiens
RCFPVIFGKASESL

SEQ ID NO: 51392 - protein, 14 aa, Homo Sapiens
CFPVIFGKASESLK

SEQ ID NO: 51393 - protein, 14 aa, Homo Sapiens
FPVIFGKASESLKM

SEQ ID NO: 51394 - protein, 14 aa, Homo Sapiens
PVIFGKASESLKMI

SEQ ID NO: 51395 - protein, 14 aa, Homo Sapiens
VIFGKASESLKMIF

SEQ ID NO: 51396 - protein, 14 aa, Homo Sapiens
IFGKASESLKMIFG

SEQ ID NO: 51397 - protein, 14 aa, Homo Sapiens
FGKASESLKMIFGI

SEQ ID NO: 51398 - protein, 14 aa, Homo Sapiens
GKASESLKMIFGID

SEQ ID NO: 51399 - protein, 14 aa, Homo Sapiens
KASESLKMIFGIDV

SEQ ID NO: 51400 - protein, 14 aa, Homo Sapiens
ASESLKMIFGIDVK

SEQ ID NO: 51401 - protein, 14 aa, Homo Sapiens
SESLKMIFGIDVKE

SEQ ID NO: 51402 - protein, 14 aa, Homo Sapiens
ESLKMIFGIDVKEV

SEQ ID NO: 51403 - protein, 14 aa, Homo Sapiens
SLKMIFGIDVKEVD

SEQ ID NO: 51404 - protein, 14 aa, Homo Sapiens
LKMIFGIDVKEVDP

SEQ ID NO: 51405 - protein, 14 aa, Homo Sapiens
KMIFGIDVKEVDPA

SEQ ID NO: 51406 - protein, 14 aa, Homo Sapiens
MIFGIDVKEVDPAS

SEQ ID NO: 51407 - protein, 14 aa, Homo Sapiens
IFGIDVKEVDPASN

SEQ ID NO: 51408 - protein, 14 aa, Homo Sapiens
FGIDVKEVDPASNT

SEQ ID NO: 51409 - protein, 14 aa, Homo Sapiens
GIDVKEVDPASNTY

SEQ ID NO: 51410 - protein, 14 aa, Homo Sapiens
IDVKEVDPASNTYT

SEQ ID NO: 51411 - protein, 14 aa, Homo Sapiens
DVKEVDPASNTYTL

SEQ ID NO: 51412 - protein, 14 aa, Homo Sapiens
VKEVDPASNTYTLV

SEQ ID NO: 51413 - protein, 14 aa, Homo Sapiens
KEVDPASNTYTLVT

SEQ ID NO: 51414 - protein, 14 aa, Homo Sapiens
EVDPASNTYTLVTC

SEQ ID NO: 51415 - protein, 14 aa, Homo Sapiens
VDPASNTYTLVTCL

SEQ ID NO: 51416 - protein, 14 aa, Homo Sapiens
DPASNTYTLVTCLG

SEQ ID NO: 51417 - protein, 14 aa, Homo Sapiens
PASNTYTLVTCLGL

SEQ ID NO: 51418 - protein, 14 aa, Homo Sapiens
ASNTYTLVTCLGLS

SEQ ID NO: 51419 - protein, 14 aa, Homo Sapiens
SNTYTLVTCLGLSY

SEQ ID NO: 51420 - protein, 14 aa, Homo Sapiens
NTYTLVTCLGLSYD

SEQ ID NO: 51421 - protein, 14 aa, Homo Sapiens
TYTLVTCLGLSYDG

SEQ ID NO: 51422 - protein, 14 aa, Homo Sapiens
YTLVTCLGLSYDGL

SEQ ID NO: 51423 - protein, 14 aa, Homo Sapiens
TLVTCLGLSYDGLL

SEQ ID NO: 51424 - protein, 14 aa, Homo Sapiens
LVTCLGLSYDGLLG

SEQ ID NO: 51425 - protein, 14 aa, Homo Sapiens
VTCLGLSYDGLLGN

SEQ ID NO: 51426 - protein, 14 aa, Homo Sapiens
TCLGLSYDGLLGNN

SEQ ID NO: 51427 - protein, 14 aa, Homo Sapiens
CLGLSYDGLLGNNQ

SEQ ID NO: 51428 - protein, 14 aa, Homo Sapiens
LGLSYDGLLGNNQI

SEQ ID NO: 51429 - protein, 14 aa, Homo Sapiens
GLSYDGLLGNNQIF

SEQ ID NO: 51430 - protein, 14 aa, Homo Sapiens
LSYDGLLGNNQIFP

SEQ ID NO: 51431 - protein, 14 aa, Homo Sapiens
SYDGLLGNNQIFPK

SEQ ID NO: 51432 - protein, 14 aa, Homo Sapiens
YDGLLGNNQIFPKT

SEQ ID NO: 51433 - protein, 14 aa, Homo Sapiens
DGLLGNNQIFPKTG

SEQ ID NO: 51434 - protein, 14 aa, Homo Sapiens
GLLGNNQIFPKTGL

SEQ ID NO: 51435 - protein, 14 aa, Homo Sapiens
LLGNNQIFPKTGLL

SEQ ID NO: 51436 - protein, 14 aa, Homo Sapiens
LGNNQIFPKTGLLI

SEQ ID NO: 51437 - protein, 14 aa, Homo Sapiens
GNNQIFPKTGLLII

SEQ ID NO: 51438 - protein, 14 aa, Homo Sapiens
NNQIFPKTGLLIIV

SEQ ID NO: 51439 - protein, 14 aa, Homo Sapiens
NQIFPKTGLLIIVL

SEQ ID NO: 51440 - protein, 14 aa, Homo Sapiens
QIFPKTGLLIIVLG

SEQ ID NO: 51441 - protein, 14 aa, Homo Sapiens
IFPKTGLLIIVLGT

SEQ ID NO: 51442 - protein, 14 aa, Homo Sapiens
FPKTGLLIIVLGTI

SEQ ID NO: 51443 - protein, 14 aa, Homo Sapiens
PKTGLLIIVLGTIA

SEQ ID NO: 51444 - protein, 14 aa, Homo Sapiens
KTGLLIIVLGTIAM

SEQ ID NO: 51445 - protein, 14 aa, Homo Sapiens
TGLLIIVLGTIAME

SEQ ID NO: 51446 - protein, 14 aa, Homo Sapiens
GLLIIVLGTIAMEG

SEQ ID NO: 51447 - protein, 14 aa, Homo Sapiens
LLIIVLGTIAMEGD

SEQ ID NO: 51448 - protein, 14 aa, Homo Sapiens
LIIVLGTIAMEGDS

SEQ ID NO: 51449 - protein, 14 aa, Homo Sapiens
IIVLGTIAMEGDSA

SEQ ID NO: 51450 - protein, 14 aa, Homo Sapiens
IVLGTIAMEGDSAS

SEQ ID NO: 51451 - protein, 14 aa, Homo Sapiens
VLGTIAMEGDSASE

SEQ ID NO: 51452 - protein, 14 aa, Homo Sapiens
LGTIAMEGDSASEE

SEQ ID NO: 51453 - protein, 14 aa, Homo Sapiens
GTIAMEGDSASEEE

SEQ ID NO: 51454 - protein, 14 aa, Homo Sapiens
TIAMEGDSASEEEI

SEQ ID NO: 51455 - protein, 14 aa, Homo Sapiens
IAMEGDSASEEEIW

SEQ ID NO: 51456 - protein, 14 aa, Homo Sapiens
AMEGDSASEEEIWE

SEQ ID NO: 51457 - protein, 14 aa, Homo Sapiens
MEGDSASEEEIWEE

SEQ ID NO: 51458 - protein, 14 aa, Homo Sapiens
EGDSASEEEIWEEL

SEQ ID NO: 51459 - protein, 14 aa, Homo Sapiens
GDSASEEEIWEELG

SEQ ID NO: 51460 - protein, 14 aa, Homo Sapiens
DSASEEEIWEELGV

SEQ ID NO: 51461 - protein, 14 aa, Homo Sapiens
SASEEEIWEELGVM

SEQ ID NO: 51462 - protein, 14 aa, Homo Sapiens
ASEEEIWEELGVMG

SEQ ID NO: 51463 - protein, 14 aa, Homo Sapiens
SEEEIWEELGVMGV

SEQ ID NO: 51464 - protein, 14 aa, Homo Sapiens
EEEIWEELGVMGVY

SEQ ID NO: 51465 - protein, 14 aa, Homo Sapiens
EEIWEELGVMGVYD

SEQ ID NO: 51466 - protein, 14 aa, Homo Sapiens
EIWEELGVMGVYDG

SEQ ID NO: 51467 - protein, 14 aa, Homo Sapiens
IWEELGVMGVYDGR

SEQ ID NO: 51468 - protein, 14 aa, Homo Sapiens
WEELGVMGVYDGRE

SEQ ID NO: 51469 - protein, 14 aa, Homo Sapiens
EELGVMGVYDGREH

SEQ ID NO: 51470 - protein, 14 aa, Homo Sapiens
ELGVMGVYDGREHT

SEQ ID NO: 51471 - protein, 14 aa, Homo Sapiens
LGVMGVYDGREHTV

SEQ ID NO: 51472 - protein, 14 aa, Homo Sapiens
GVMGVYDGREHTVY

SEQ ID NO: 51473 - protein, 14 aa, Homo Sapiens
VMGVYDGREHTVYG

SEQ ID NO: 51474 - protein, 14 aa, Homo Sapiens
MGVYDGREHTVYGE

SEQ ID NO: 51475 - protein, 14 aa, Homo Sapiens
GVYDGREHTVYGEP

SEQ ID NO: 51476 - protein, 14 aa, Homo Sapiens
VYDGREHTVYGEPR

SEQ ID NO: 51477 - protein, 14 aa, Homo Sapiens
YDGREHTVYGEPRK

SEQ ID NO: 51478 - protein, 14 aa, Homo Sapiens
DGREHTVYGEPRKL

SEQ ID NO: 51479 - protein, 14 aa, Homo Sapiens
GREHTVYGEPRKLL

SEQ ID NO: 51480 - protein, 14 aa, Homo Sapiens
REHTVYGEPRKLLT

SEQ ID NO: 51481 - protein, 14 aa, Homo Sapiens
EHTVYGEPRKLLTQ

SEQ ID NO: 51482 - protein, 14 aa, Homo Sapiens
HTVYGEPRKLLTQD

SEQ ID NO: 51483 - protein, 14 aa, Homo Sapiens
TVYGEPRKLLTQDW

SEQ ID NO: 51484 - protein, 14 aa, Homo Sapiens
VYGEPRKLLTQDWV

SEQ ID NO: 51485 - protein, 14 aa, Homo Sapiens
YGEPRKLLTQDWVQ

SEQ ID NO: 51486 - protein, 14 aa, Homo Sapiens
GEPRKLLTQDWVQE

SEQ ID NO: 51487 - protein, 14 aa, Homo Sapiens
EPRKLLTQDWVQEN

SEQ ID NO: 51488 - protein, 14 aa, Homo Sapiens
PRKLLTQDWVQENY

SEQ ID NO: 51489 - protein, 14 aa, Homo Sapiens
RKLLTQDWVQENYL

SEQ ID NO: 51490 - protein, 14 aa, Homo Sapiens
KLLTQDWVQENYLE

SEQ ID NO: 51491 - protein, 14 aa, Homo Sapiens
LLTQDWVQENYLEY

SEQ ID NO: 51492 - protein, 14 aa, Homo Sapiens
LTQDWVQENYLEYR

SEQ ID NO: 51493 - protein, 14 aa, Homo Sapiens
TQDWVQENYLEYRQ

SEQ ID NO: 51494 - protein, 14 aa, Homo Sapiens
QDWVQENYLEYRQV

SEQ ID NO: 51495 - protein, 14 aa, Homo Sapiens
DWVQENYLEYRQVP

SEQ ID NO: 51496 - protein, 14 aa, Homo Sapiens
WVQENYLEYRQVPG

SEQ ID NO: 51497 - protein, 14 aa, Homo Sapiens
VQENYLEYRQVPGS

SEQ ID NO: 51498 - protein, 14 aa, Homo Sapiens
QENYLEYRQVPGSN

SEQ ID NO: 51499 - protein, 14 aa, Homo Sapiens
ENYLEYRQVPGSNP

SEQ ID NO: 51500 - protein, 14 aa, Homo Sapiens
NYLEYRQVPGSNPA

SEQ ID NO: 51501 - protein, 14 aa, Homo Sapiens
YLEYRQVPGSNPAR

SEQ ID NO: 51502 - protein, 14 aa, Homo Sapiens
LEYRQVPGSNPARY

SEQ ID NO: 51503 - protein, 14 aa, Homo Sapiens
EYRQVPGSNPARYE

SEQ ID NO: 51504 - protein, 14 aa, Homo Sapiens
YRQVPGSNPARYEF

SEQ ID NO: 51505 - protein, 14 aa, Homo Sapiens
RQVPGSNPARYEFL

SEQ ID NO: 51506 - protein, 14 aa, Homo Sapiens
QVPGSNPARYEFLW

SEQ ID NO: 51507 - protein, 14 aa, Homo Sapiens
VPGSNPARYEFLWG

SEQ ID NO: 51508 - protein, 14 aa, Homo Sapiens
PGSNPARYEFLWGP

SEQ ID NO: 51509 - protein, 14 aa, Homo Sapiens
GSNPARYEFLWGPR

SEQ ID NO: 51510 - protein, 14 aa, Homo Sapiens
SNPARYEFLWGPRA

SEQ ID NO: 51511 - protein, 14 aa, Homo Sapiens
NPARYEFLWGPRAL

SEQ ID NO: 51512 - protein, 14 aa, Homo Sapiens
PARYEFLWGPRALA

SEQ ID NO: 51513 - protein, 14 aa, Homo Sapiens
ARYEFLWGPRALAE

SEQ ID NO: 51514 - protein, 14 aa, Homo Sapiens
RYEFLWGPRALAET

SEQ ID NO: 51515 - protein, 14 aa, Homo Sapiens
YEFLWGPRALAETS

SEQ ID NO: 51516 - protein, 14 aa, Homo Sapiens
EFLWGPRALAETSY

SEQ ID NO: 51517 - protein, 14 aa, Homo Sapiens
FLWGPRALAETSYV

SEQ ID NO: 51518 - protein, 14 aa, Homo Sapiens
LWGPRALAETSYVK

SEQ ID NO: 51519 - protein, 14 aa, Homo Sapiens
WGPRALAETSYVKV

SEQ ID NO: 51520 - protein, 14 aa, Homo Sapiens
GPRALAETSYVKVL

SEQ ID NO: 51521 - protein, 14 aa, Homo Sapiens
PRALAETSYVKVLE

SEQ ID NO: 51522 - protein, 14 aa, Homo Sapiens
RALAETSYVKVLEH

SEQ ID NO: 51523 - protein, 14 aa, Homo Sapiens
ALAETSYVKVLEHV

SEQ ID NO: 51524 - protein, 14 aa, Homo Sapiens
LAETSYVKVLEHVV

SEQ ID NO: 51525 - protein, 14 aa, Homo Sapiens
AETSYVKVLEHVVR

SEQ ID NO: 51526 - protein, 14 aa, Homo Sapiens
ETSYVKVLEHVVRV

SEQ ID NO: 51527 - protein, 14 aa, Homo Sapiens
TSYVKVLEHVVRVN

SEQ ID NO: 51528 - protein, 14 aa, Homo Sapiens
SYVKVLEHVVRVNA

SEQ ID NO: 51529 - protein, 14 aa, Homo Sapiens
YVKVLEHVVRVNAR

SEQ ID NO: 51530 - protein, 14 aa, Homo Sapiens
VKVLEHVVRVNARV

SEQ ID NO: 51531 - protein, 14 aa, Homo Sapiens
KVLEHVVRVNARVR

SEQ ID NO: 51532 - protein, 14 aa, Homo Sapiens
VLEHVVRVNARVRI

SEQ ID NO: 51533 - protein, 14 aa, Homo Sapiens
LEHVVRVNARVRIA

SEQ ID NO: 51534 - protein, 14 aa, Homo Sapiens
EHVVRVNARVRIAY

SEQ ID NO: 51535 - protein, 14 aa, Homo Sapiens
HVVRVNARVRIAYP

SEQ ID NO: 51536 - protein, 14 aa, Homo Sapiens
VVRVNARVRIAYPS

SEQ ID NO: 51537 - protein, 14 aa, Homo Sapiens
VRVNARVRIAYPSL

SEQ ID NO: 51538 - protein, 14 aa, Homo Sapiens
RVNARVRIAYPSLR

SEQ ID NO: 51539 - protein, 14 aa, Homo Sapiens
VNARVRIAYPSLRE

SEQ ID NO: 51540 - protein, 14 aa, Homo Sapiens
NARVRIAYPSLREA

SEQ ID NO: 51541 - protein, 14 aa, Homo Sapiens
ARVRIAYPSLREAA

SEQ ID NO: 51542 - protein, 14 aa, Homo Sapiens
RVRIAYPSLREAAL

SEQ ID NO: 51543 - protein, 14 aa, Homo Sapiens
VRIAYPSLREAALL

SEQ ID NO: 51544 - protein, 14 aa, Homo Sapiens
RIAYPSLREAALLE

SEQ ID NO: 51545 - protein, 14 aa, Homo Sapiens
IAYPSLREAALLEE

SEQ ID NO: 51546 - protein, 14 aa, Homo Sapiens
AYPSLREAALLEEE

SEQ ID NO: 51547 - protein, 14 aa, Homo Sapiens
YPSLREAALLEEEE

SEQ ID NO: 51548 - protein, 14 aa, Homo Sapiens
PSLREAALLEEEEG

SEQ ID NO: 51549 - protein, 14 aa, Homo Sapiens
SLREAALLEEEEGV

SEQ ID NO: 51550 - protein, 15 aa, Homo Sapiens
MSSEQKSQHCKPEEG

SEQ ID NO: 51551 - protein, 15 aa, Homo Sapiens
SSEQKSQHCKPEEGV

SEQ ID NO: 51552 - protein, 15 aa, Homo Sapiens
SEQKSQHCKPEEGVE

SEQ ID NO: 51553 - protein, 15 aa, Homo Sapiens
EQKSQHCKPEEGVEA

SEQ ID NO: 51554 - protein, 15 aa, Homo Sapiens
QKSQHCKPEEGVEAQ

SEQ ID NO: 51555 - protein, 15 aa, Homo Sapiens
KSQHCKPEEGVEAQE

SEQ ID NO: 51556 - protein, 15 aa, Homo Sapiens
SQHCKPEEGVEAQEE

SEQ ID NO: 51557 - protein, 15 aa, Homo Sapiens
QHCKPEEGVEAQEEA

SEQ ID NO: 51558 - protein, 15 aa, Homo Sapiens
HCKPEEGVEAQEEAL

SEQ ID NO: 51559 - protein, 15 aa, Homo Sapiens
CKPEEGVEAQEEALG

SEQ ID NO: 51560 - protein, 15 aa, Homo Sapiens
KPEEGVEAQEEALGL

SEQ ID NO: 51561 - protein, 15 aa, Homo Sapiens
PEEGVEAQEEALGLV

SEQ ID NO: 51562 - protein, 15 aa, Homo Sapiens
EEGVEAQEEALGLVG

SEQ ID NO: 51563 - protein, 15 aa, Homo Sapiens
EGVEAQEEALGLVGA

SEQ ID NO: 51564 - protein, 15 aa, Homo Sapiens
GVEAQEEALGLVGAQ

SEQ ID NO: 51565 - protein, 15 aa, Homo Sapiens
VEAQEEALGLVGAQA

SEQ ID NO: 51566 - protein, 15 aa, Homo Sapiens
EAQEEALGLVGAQAP

SEQ ID NO: 51567 - protein, 15 aa, Homo Sapiens
AQEEALGLVGAQAPT

SEQ ID NO: 51568 - protein, 15 aa, Homo Sapiens
QEEALGLVGAQAPTT

SEQ ID NO: 51569 - protein, 15 aa, Homo Sapiens
EEALGLVGAQAPTTE

SEQ ID NO: 51570 - protein, 15 aa, Homo Sapiens
EALGLVGAQAPTTEE

SEQ ID NO: 51571 - protein, 15 aa, Homo Sapiens
ALGLVGAQAPTTEEQ

SEQ ID NO: 51572 - protein, 15 aa, Homo Sapiens
LGLVGAQAPTTEEQE

SEQ ID NO: 51573 - protein, 15 aa, Homo Sapiens
GLVGAQAPTTEEQEA

SEQ ID NO: 51574 - protein, 15 aa, Homo Sapiens
LVGAQAPTTEEQEAA

SEQ ID NO: 51575 - protein, 15 aa, Homo Sapiens
VGAQAPTTEEQEAAV

SEQ ID NO: 51576 - protein, 15 aa, Homo Sapiens
GAQAPTTEEQEAAVS

SEQ ID NO: 51577 - protein, 15 aa, Homo Sapiens
AQAPTTEEQEAAVSS

SEQ ID NO: 51578 - protein, 15 aa, Homo Sapiens
QAPTTEEQEAAVSSS

SEQ ID NO: 51579 - protein, 15 aa, Homo Sapiens
APTTEEQEAAVSSSS

SEQ ID NO: 51580 - protein, 15 aa, Homo Sapiens
PTTEEQEAAVSSSSP

SEQ ID NO: 51581 - protein, 15 aa, Homo Sapiens
TTEEQEAAVSSSSPL

SEQ ID NO: 51582 - protein, 15 aa, Homo Sapiens
TEEQEAAVSSSSPLV

SEQ ID NO: 51583 - protein, 15 aa, Homo Sapiens
EEQEAAVSSSSPLVP

SEQ ID NO: 51584 - protein, 15 aa, Homo Sapiens
EQEAAVSSSSPLVPG

SEQ ID NO: 51585 - protein, 15 aa, Homo Sapiens
QEAAVSSSSPLVPGT

SEQ ID NO: 51586 - protein, 15 aa, Homo Sapiens
EAAVSSSSPLVPGTL

SEQ ID NO: 51587 - protein, 15 aa, Homo Sapiens
AAVSSSSPLVPGTLE

SEQ ID NO: 51588 - protein, 15 aa, Homo Sapiens
AVSSSSPLVPGTLEE

SEQ ID NO: 51589 - protein, 15 aa, Homo Sapiens
VSSSSPLVPGTLEEV

SEQ ID NO: 51590 - protein, 15 aa, Homo Sapiens
SSSSPLVPGTLEEVP

SEQ ID NO: 51591 - protein, 15 aa, Homo Sapiens
SSSPLVPGTLEEVPA

SEQ ID NO: 51592 - protein, 15 aa, Homo Sapiens
SSPLVPGTLEEVPAA

SEQ ID NO: 51593 - protein, 15 aa, Homo Sapiens
SPLVPGTLEEVPAAE

SEQ ID NO: 51594 - protein, 15 aa, Homo Sapiens
PLVPGTLEEVPAAES

SEQ ID NO: 51595 - protein, 15 aa, Homo Sapiens
LVPGTLEEVPAAESA

SEQ ID NO: 51596 - protein, 15 aa, Homo Sapiens
VPGTLEEVPAAESAG

SEQ ID NO: 51597 - protein, 15 aa, Homo Sapiens
PGTLEEVPAAESAGP

SEQ ID NO: 51598 - protein, 15 aa, Homo Sapiens
GTLEEVPAAESAGPP

SEQ ID NO: 51599 - protein, 15 aa, Homo Sapiens
TLEEVPAAESAGPPQ

SEQ ID NO: 51600 - protein, 15 aa, Homo Sapiens
LEEVPAAESAGPPQS

SEQ ID NO: 51601 - protein, 15 aa, Homo Sapiens
EEVPAAESAGPPQSP

SEQ ID NO: 51602 - protein, 15 aa, Homo Sapiens
EVPAAESAGPPQSPQ

SEQ ID NO: 51603 - protein, 15 aa, Homo Sapiens
VPAAESAGPPQSPQG

SEQ ID NO: 51604 - protein, 15 aa, Homo Sapiens
PAAESAGPPQSPQGA

SEQ ID NO: 51605 - protein, 15 aa, Homo Sapiens
AAESAGPPQSPQGAS

SEQ ID NO: 51606 - protein, 15 aa, Homo Sapiens
AESAGPPQSPQGASA

SEQ ID NO: 51607 - protein, 15 aa, Homo Sapiens
ESAGPPQSPQGASAL

SEQ ID NO: 51608 - protein, 15 aa, Homo Sapiens
SAGPPQSPQGASALP

SEQ ID NO: 51609 - protein, 15 aa, Homo Sapiens
AGPPQSPQGASALPT

SEQ ID NO: 51610 - protein, 15 aa, Homo Sapiens
GPPQSPQGASALPTT

SEQ ID NO: 51611 - protein, 15 aa, Homo Sapiens
PPQSPQGASALPTTI

SEQ ID NO: 51612 - protein, 15 aa, Homo Sapiens
PQSPQGASALPTTIS

SEQ ID NO: 51613 - protein, 15 aa, Homo Sapiens
QSPQGASALPTTISF

SEQ ID NO: 51614 - protein, 15 aa, Homo Sapiens
SPQGASALPTTISFT

SEQ ID NO: 51615 - protein, 15 aa, Homo Sapiens
PQGASALPTTISFTC

SEQ ID NO: 51616 - protein, 15 aa, Homo Sapiens
QGASALPTTISFTCW

SEQ ID NO: 51617 - protein, 15 aa, Homo Sapiens
GASALPTTISFTCWR

SEQ ID NO: 51618 - protein, 15 aa, Homo Sapiens
ASALPTTISFTCWRQ

SEQ ID NO: 51619 - protein, 15 aa, Homo Sapiens
SALPTTISFTCWRQP

SEQ ID NO: 51620 - protein, 15 aa, Homo Sapiens
ALPTTISFTCWRQPN

SEQ ID NO: 51621 - protein, 15 aa, Homo Sapiens
LPTTISFTCWRQPNE

SEQ ID NO: 51622 - protein, 15 aa, Homo Sapiens
PTTISFTCWRQPNEG

SEQ ID NO: 51623 - protein, 15 aa, Homo Sapiens
TTISFTCWRQPNEGS

SEQ ID NO: 51624 - protein, 15 aa, Homo Sapiens
TISFTCWRQPNEGSS

SEQ ID NO: 51625 - protein, 15 aa, Homo Sapiens
ISFTCWRQPNEGSSS

SEQ ID NO: 51626 - protein, 15 aa, Homo Sapiens
SFTCWRQPNEGSSSQ

SEQ ID NO: 51627 - protein, 15 aa, Homo Sapiens
FTCWRQPNEGSSSQE

SEQ ID NO: 51628 - protein, 15 aa, Homo Sapiens
TCWRQPNEGSSSQEE

SEQ ID NO: 51629 - protein, 15 aa, Homo Sapiens
CWRQPNEGSSSQEEE

SEQ ID NO: 51630 - protein, 15 aa, Homo Sapiens
WRQPNEGSSSQEEEG

SEQ ID NO: 51631 - protein, 15 aa, Homo Sapiens
RQPNEGSSSQEEEGP

SEQ ID NO: 51632 - protein, 15 aa, Homo Sapiens
QPNEGSSSQEEEGPS

SEQ ID NO: 51633 - protein, 15 aa, Homo Sapiens
PNEGSSSQEEEGPST

SEQ ID NO: 51634 - protein, 15 aa, Homo Sapiens
NEGSSSQEEEGPSTS

SEQ ID NO: 51635 - protein, 15 aa, Homo Sapiens
EGSSSQEEEGPSTSP

SEQ ID NO: 51636 - protein, 15 aa, Homo Sapiens
GSSSQEEEGPSTSPD

SEQ ID NO: 51637 - protein, 15 aa, Homo Sapiens
SSSQEEEGPSTSPDA

SEQ ID NO: 51638 - protein, 15 aa, Homo Sapiens
SSQEEEGPSTSPDAE

SEQ ID NO: 51639 - protein, 15 aa, Homo Sapiens
SQEEEGPSTSPDAES

SEQ ID NO: 51640 - protein, 15 aa, Homo Sapiens
QEEEGPSTSPDAESL

SEQ ID NO: 51641 - protein, 15 aa, Homo Sapiens
EEEGPSTSPDAESLF

SEQ ID NO: 51642 - protein, 15 aa, Homo Sapiens
EEGPSTSPDAESLFR

SEQ ID NO: 51643 - protein, 15 aa, Homo Sapiens
EGPSTSPDAESLFRE

SEQ ID NO: 51644 - protein, 15 aa, Homo Sapiens
GPSTSPDAESLFREA

SEQ ID NO: 51645 - protein, 15 aa, Homo Sapiens
PSTSPDAESLFREAL

SEQ ID NO: 51646 - protein, 15 aa, Homo Sapiens
STSPDAESLFREALS

SEQ ID NO: 51647 - protein, 15 aa, Homo Sapiens
TSPDAESLFREALSN

SEQ ID NO: 51648 - protein, 15 aa, Homo Sapiens
SPDAESLFREALSNK

SEQ ID NO: 51649 - protein, 15 aa, Homo Sapiens
PDAESLFREALSNKV

SEQ ID NO: 51650 - protein, 15 aa, Homo Sapiens
DAESLFREALSNKVD

SEQ ID NO: 51651 - protein, 15 aa, Homo Sapiens
AESLFREALSNKVDE

SEQ ID NO: 51652 - protein, 15 aa, Homo Sapiens
ESLFREALSNKVDEL

SEQ ID NO: 51653 - protein, 15 aa, Homo Sapiens
SLFREALSNKVDELA

SEQ ID NO: 51654 - protein, 15 aa, Homo Sapiens
LFREALSNKVDELAH

SEQ ID NO: 51655 - protein, 15 aa, Homo Sapiens
FREALSNKVDELAHF

SEQ ID NO: 51656 - protein, 15 aa, Homo Sapiens
REALSNKVDELAHFL

SEQ ID NO: 51657 - protein, 15 aa, Homo Sapiens
EALSNKVDELAHFLL

SEQ ID NO: 51658 - protein, 15 aa, Homo Sapiens
ALSNKVDELAHFLLR

SEQ ID NO: 51659 - protein, 15 aa, Homo Sapiens
LSNKVDELAHFLLRK

SEQ ID NO: 51660 - protein, 15 aa, Homo Sapiens
SNKVDELAHFLLRKY

SEQ ID NO: 51661 - protein, 15 aa, Homo Sapiens
NKVDELAHFLLRKYR

SEQ ID NO: 51662 - protein, 15 aa, Homo Sapiens
KVDELAHFLLRKYRA

SEQ ID NO: 51663 - protein, 15 aa, Homo Sapiens
VDELAHFLLRKYRAK

SEQ ID NO: 51664 - protein, 15 aa, Homo Sapiens
DELAHFLLRKYRAKE

SEQ ID NO: 51665 - protein, 15 aa, Homo Sapiens
ELAHFLLRKYRAKEL

SEQ ID NO: 51666 - protein, 15 aa, Homo Sapiens
LAHFLLRKYRAKELV

SEQ ID NO: 51667 - protein, 15 aa, Homo Sapiens
AHFLLRKYRAKELVT

SEQ ID NO: 51668 - protein, 15 aa, Homo Sapiens
HFLLRKYRAKELVTK

SEQ ID NO: 51669 - protein, 15 aa, Homo Sapiens
FLLRKYRAKELVTKA

SEQ ID NO: 51670 - protein, 15 aa, Homo Sapiens
LLRKYRAKELVTKAE

SEQ ID NO: 51671 - protein, 15 aa, Homo Sapiens
LRKYRAKELVTKAEM

SEQ ID NO: 51672 - protein, 15 aa, Homo Sapiens
RKYRAKELVTKAEML

SEQ ID NO: 51673 - protein, 15 aa, Homo Sapiens
KYRAKELVTKAEMLE

SEQ ID NO: 51674 - protein, 15 aa, Homo Sapiens
YRAKELVTKAEMLER

SEQ ID NO: 51675 - protein, 15 aa, Homo Sapiens
RAKELVTKAEMLERV

SEQ ID NO: 51676 - protein, 15 aa, Homo Sapiens
AKELVTKAEMLERVI

SEQ ID NO: 51677 - protein, 15 aa, Homo Sapiens
KELVTKAEMLERVIK

SEQ ID NO: 51678 - protein, 15 aa, Homo Sapiens
ELVTKAEMLERVIKN

SEQ ID NO: 51679 - protein, 15 aa, Homo Sapiens
LVTKAEMLERVIKNY

SEQ ID NO: 51680 - protein, 15 aa, Homo Sapiens
VTKAEMLERVIKNYK

SEQ ID NO: 51681 - protein, 15 aa, Homo Sapiens
TKAEMLERVIKNYKR

SEQ ID NO: 51682 - protein, 15 aa, Homo Sapiens
KAEMLERVIKNYKRC

SEQ ID NO: 51683 - protein, 15 aa, Homo Sapiens
AEMLERVIKNYKRCF

SEQ ID NO: 51684 - protein, 15 aa, Homo Sapiens
EMLERVIKNYKRCFP

SEQ ID NO: 51685 - protein, 15 aa, Homo Sapiens
MLERVIKNYKRCFPV

SEQ ID NO: 51686 - protein, 15 aa, Homo Sapiens
LERVIKNYKRCFPVI

SEQ ID NO: 51687 - protein, 15 aa, Homo Sapiens
ERVIKNYKRCFPVIF

SEQ ID NO: 51688 - protein, 15 aa, Homo Sapiens
RVIKNYKRCFPVIFG

SEQ ID NO: 51689 - protein, 15 aa, Homo Sapiens
VIKNYKRCFPVIFGK

SEQ ID NO: 51690 - protein, 15 aa, Homo Sapiens
IKNYKRCFPVIFGKA

SEQ ID NO: 51691 - protein, 15 aa, Homo Sapiens
KNYKRCFPVIFGKAS

SEQ ID NO: 51692 - protein, 15 aa, Homo Sapiens
NYKRCFPVIFGKASE

SEQ ID NO: 51693 - protein, 15 aa, Homo Sapiens
YKRCFPVIFGKASES

SEQ ID NO: 51694 - protein, 15 aa, Homo Sapiens
KRCFPVIFGKASESL

SEQ ID NO: 51695 - protein, 15 aa, Homo Sapiens
RCFPVIFGKASESLK

SEQ ID NO: 51696 - protein, 15 aa, Homo Sapiens
CFPVIFGKASESLKM

SEQ ID NO: 51697 - protein, 15 aa, Homo Sapiens
FPVIFGKASESLKMI

SEQ ID NO: 51698 - protein, 15 aa, Homo Sapiens
PVIFGKASESLKMIF

SEQ ID NO: 51699 - protein, 15 aa, Homo Sapiens
VIFGKASESLKMIFG

SEQ ID NO: 51700 - protein, 15 aa, Homo Sapiens
IFGKASESLKMIFGI

SEQ ID NO: 51701 - protein, 15 aa, Homo Sapiens
FGKASESLKMIFGID

SEQ ID NO: 51702 - protein, 15 aa, Homo Sapiens
GKASESLKMIFGIDV

SEQ ID NO: 51703 - protein, 15 aa, Homo Sapiens
KASESLKMIFGIDVK

SEQ ID NO: 51704 - protein, 15 aa, Homo Sapiens
ASESLKMIFGIDVKE

SEQ ID NO: 51705 - protein, 15 aa, Homo Sapiens
SESLKMIFGIDVKEV

SEQ ID NO: 51706 - protein, 15 aa, Homo Sapiens
ESLKMIFGIDVKEVD

SEQ ID NO: 51707 - protein, 15 aa, Homo Sapiens
SLKMIFGIDVKEVDP

SEQ ID NO: 51708 - protein, 15 aa, Homo Sapiens
LKMIFGIDVKEVDPA

SEQ ID NO: 51709 - protein, 15 aa, Homo Sapiens
KMIFGIDVKEVDPAS

SEQ ID NO: 51710 - protein, 15 aa, Homo Sapiens
MIFGIDVKEVDPASN

SEQ ID NO: 51711 - protein, 15 aa, Homo Sapiens
IFGIDVKEVDPASNT

SEQ ID NO: 51712 - protein, 15 aa, Homo Sapiens
FGIDVKEVDPASNTY

SEQ ID NO: 51713 - protein, 15 aa, Homo Sapiens
GIDVKEVDPASNTYT

SEQ ID NO: 51714 - protein, 15 aa, Homo Sapiens
IDVKEVDPASNTYTL

SEQ ID NO: 51715 - protein, 15 aa, Homo Sapiens
DVKEVDPASNTYTLV

SEQ ID NO: 51716 - protein, 15 aa, Homo Sapiens
VKEVDPASNTYTLVT

SEQ ID NO: 51717 - protein, 15 aa, Homo Sapiens
KEVDPASNTYTLVTC

SEQ ID NO: 51718 - protein, 15 aa, Homo Sapiens
EVDPASNTYTLVTCL

SEQ ID NO: 51719 - protein, 15 aa, Homo Sapiens
VDPASNTYTLVTCLG

SEQ ID NO: 51720 - protein, 15 aa, Homo Sapiens
DPASNTYTLVTCLGL

SEQ ID NO: 51721 - protein, 15 aa, Homo Sapiens
PASNTYTLVTCLGLS

SEQ ID NO: 51722 - protein, 15 aa, Homo Sapiens
ASNTYTLVTCLGLSY

SEQ ID NO: 51723 - protein, 15 aa, Homo Sapiens
SNTYTLVTCLGLSYD

SEQ ID NO: 51724 - protein, 15 aa, Homo Sapiens
NTYTLVTCLGLSYDG

SEQ ID NO: 51725 - protein, 15 aa, Homo Sapiens
TYTLVTCLGLSYDGL

SEQ ID NO: 51726 - protein, 15 aa, Homo Sapiens
YTLVTCLGLSYDGLL

SEQ ID NO: 51727 - protein, 15 aa, Homo Sapiens
TLVTCLGLSYDGLLG

SEQ ID NO: 51728 - protein, 15 aa, Homo Sapiens
LVTCLGLSYDGLLGN

SEQ ID NO: 51729 - protein, 15 aa, Homo Sapiens
VTCLGLSYDGLLGNN

SEQ ID NO: 51730 - protein, 15 aa, Homo Sapiens
TCLGLSYDGLLGNNQ

SEQ ID NO: 51731 - protein, 15 aa, Homo Sapiens
CLGLSYDGLLGNNQI

SEQ ID NO: 51732 - protein, 15 aa, Homo Sapiens
LGLSYDGLLGNNQIF

SEQ ID NO: 51733 - protein, 15 aa, Homo Sapiens
GLSYDGLLGNNQIFP

SEQ ID NO: 51734 - protein, 15 aa, Homo Sapiens
LSYDGLLGNNQIFPK

SEQ ID NO: 51735 - protein, 15 aa, Homo Sapiens
SYDGLLGNNQIFPKT

SEQ ID NO: 51736 - protein, 15 aa, Homo Sapiens
YDGLLGNNQIFPKTG

SEQ ID NO: 51737 - protein, 15 aa, Homo Sapiens
DGLLGNNQIFPKTGL

SEQ ID NO: 51738 - protein, 15 aa, Homo Sapiens
GLLGNNQIFPKTGLL

SEQ ID NO: 51739 - protein, 15 aa, Homo Sapiens
LLGNNQIFPKTGLLI

SEQ ID NO: 51740 - protein, 15 aa, Homo Sapiens
LGNNQIFPKTGLLII

SEQ ID NO: 51741 - protein, 15 aa, Homo Sapiens
GNNQIFPKTGLLIIV

SEQ ID NO: 51742 - protein, 15 aa, Homo Sapiens
NNQIFPKTGLLIIVL

SEQ ID NO: 51743 - protein, 15 aa, Homo Sapiens
NQIFPKTGLLIIVLG

SEQ ID NO: 51744 - protein, 15 aa, Homo Sapiens
QIFPKTGLLIIVLGT

SEQ ID NO: 51745 - protein, 15 aa, Homo Sapiens
IFPKTGLLIIVLGTI

SEQ ID NO: 51746 - protein, 15 aa, Homo Sapiens
FPKTGLLIIVLGTIA

SEQ ID NO: 51747 - protein, 15 aa, Homo Sapiens
PKTGLLIIVLGTIAM

SEQ ID NO: 51748 - protein, 15 aa, Homo Sapiens
KTGLLIIVLGTIAME

SEQ ID NO: 51749 - protein, 15 aa, Homo Sapiens
TGLLIIVLGTIAMEG

SEQ ID NO: 51750 - protein, 15 aa, Homo Sapiens
GLLIIVLGTIAMEGD

SEQ ID NO: 51751 - protein, 15 aa, Homo Sapiens
LLIIVLGTIAMEGDS

SEQ ID NO: 51752 - protein, 15 aa, Homo Sapiens
LIIVLGTIAMEGDSA

SEQ ID NO: 51753 - protein, 15 aa, Homo Sapiens
IIVLGTIAMEGDSAS

SEQ ID NO: 51754 - protein, 15 aa, Homo Sapiens
IVLGTIAMEGDSASE

SEQ ID NO: 51755 - protein, 15 aa, Homo Sapiens
VLGTIAMEGDSASEE

SEQ ID NO: 51756 - protein, 15 aa, Homo Sapiens
LGTIAMEGDSASEEE

SEQ ID NO: 51757 - protein, 15 aa, Homo Sapiens
GTIAMEGDSASEEEI

SEQ ID NO: 51758 - protein, 15 aa, Homo Sapiens
TIAMEGDSASEEEIW

SEQ ID NO: 51759 - protein, 15 aa, Homo Sapiens
IAMEGDSASEEEIWE

SEQ ID NO: 51760 - protein, 15 aa, Homo Sapiens
AMEGDSASEEEIWEE

SEQ ID NO: 51761 - protein, 15 aa, Homo Sapiens
MEGDSASEEEIWEEL

SEQ ID NO: 51762 - protein, 15 aa, Homo Sapiens
EGDSASEEEIWEELG

SEQ ID NO: 51763 - protein, 15 aa, Homo Sapiens
GDSASEEEIWEELGV

SEQ ID NO: 51764 - protein, 15 aa, Homo Sapiens
DSASEEEIWEELGVM

SEQ ID NO: 51765 - protein, 15 aa, Homo Sapiens
SASEEEIWEELGVMG

SEQ ID NO: 51766 - protein, 15 aa, Homo Sapiens
ASEEEIWEELGVMGV

SEQ ID NO: 51767 - protein, 15 aa, Homo Sapiens
SEEEIWEELGVMGVY

SEQ ID NO: 51768 - protein, 15 aa, Homo Sapiens
EEEIWEELGVMGVYD

SEQ ID NO: 51769 - protein, 15 aa, Homo Sapiens
EEIWEELGVMGVYDG

SEQ ID NO: 51770 - protein, 15 aa, Homo Sapiens
EIWEELGVMGVYDGR

SEQ ID NO: 51771 - protein, 15 aa, Homo Sapiens
IWEELGVMGVYDGRE

SEQ ID NO: 51772 - protein, 15 aa, Homo Sapiens
WEELGVMGVYDGREH

SEQ ID NO: 51773 - protein, 15 aa, Homo Sapiens
EELGVMGVYDGREHT

SEQ ID NO: 51774 - protein, 15 aa, Homo Sapiens
ELGVMGVYDGREHTV

SEQ ID NO: 51775 - protein, 15 aa, Homo Sapiens
LGVMGVYDGREHTVY

SEQ ID NO: 51776 - protein, 15 aa, Homo Sapiens
GVMGVYDGREHTVYG

SEQ ID NO: 51777 - protein, 15 aa, Homo Sapiens
VMGVYDGREHTVYGE

SEQ ID NO: 51778 - protein, 15 aa, Homo Sapiens
MGVYDGREHTVYGEP

SEQ ID NO: 51779 - protein, 15 aa, Homo Sapiens
GVYDGREHTVYGEPR

SEQ ID NO: 51780 - protein, 15 aa, Homo Sapiens
VYDGREHTVYGEPRK

SEQ ID NO: 51781 - protein, 15 aa, Homo Sapiens
YDGREHTVYGEPRKL

SEQ ID NO: 51782 - protein, 15 aa, Homo Sapiens
DGREHTVYGEPRKLL

SEQ ID NO: 51783 - protein, 15 aa, Homo Sapiens
GREHTVYGEPRKLLT

SEQ ID NO: 51784 - protein, 15 aa, Homo Sapiens
REHTVYGEPRKLLTQ

SEQ ID NO: 51785 - protein, 15 aa, Homo Sapiens
EHTVYGEPRKLLTQD

SEQ ID NO: 51786 - protein, 15 aa, Homo Sapiens
HTVYGEPRKLLTQDW

SEQ ID NO: 51787 - protein, 15 aa, Homo Sapiens
TVYGEPRKLLTQDWV

SEQ ID NO: 51788 - protein, 15 aa, Homo Sapiens
VYGEPRKLLTQDWVQ

SEQ ID NO: 51789 - protein, 15 aa, Homo Sapiens
YGEPRKLLTQDWVQE

SEQ ID NO: 51790 - protein, 15 aa, Homo Sapiens
GEPRKLLTQDWVQEN

SEQ ID NO: 51791 - protein, 15 aa, Homo Sapiens
EPRKLLTQDWVQENY

SEQ ID NO: 51792 - protein, 15 aa, Homo Sapiens
PRKLLTQDWVQENYL

SEQ ID NO: 51793 - protein, 15 aa, Homo Sapiens
RKLLTQDWVQENYLE

SEQ ID NO: 51794 - protein, 15 aa, Homo Sapiens
KLLTQDWVQENYLEY

SEQ ID NO: 51795 - protein, 15 aa, Homo Sapiens
LLTQDWVQENYLEYR

SEQ ID NO: 51796 - protein, 15 aa, Homo Sapiens
LTQDWVQENYLEYRQ

SEQ ID NO: 51797 - protein, 15 aa, Homo Sapiens
TQDWVQENYLEYRQV

SEQ ID NO: 51798 - protein, 15 aa, Homo Sapiens
QDWVQENYLEYRQVP

SEQ ID NO: 51799 - protein, 15 aa, Homo Sapiens
DWVQENYLEYRQVPG

SEQ ID NO: 51800 - protein, 15 aa, Homo Sapiens
WVQENYLEYRQVPGS

SEQ ID NO: 51801 - protein, 15 aa, Homo Sapiens
VQENYLEYRQVPGSN

SEQ ID NO: 51802 - protein, 15 aa, Homo Sapiens
QENYLEYRQVPGSNP

SEQ ID NO: 51803 - protein, 15 aa, Homo Sapiens
ENYLEYRQVPGSNPA

SEQ ID NO: 51804 - protein, 15 aa, Homo Sapiens
NYLEYRQVPGSNPAR

SEQ ID NO: 51805 - protein, 15 aa, Homo Sapiens
YLEYRQVPGSNPARY

SEQ ID NO: 51806 - protein, 15 aa, Homo Sapiens
LEYRQVPGSNPARYE

SEQ ID NO: 51807 - protein, 15 aa, Homo Sapiens
EYRQVPGSNPARYEF

SEQ ID NO: 51808 - protein, 15 aa, Homo Sapiens
YRQVPGSNPARYEFL

SEQ ID NO: 51809 - protein, 15 aa, Homo Sapiens
RQVPGSNPARYEFLW

SEQ ID NO: 51810 - protein, 15 aa, Homo Sapiens
QVPGSNPARYEFLWG

SEQ ID NO: 51811 - protein, 15 aa, Homo Sapiens
VPGSNPARYEFLWGP

SEQ ID NO: 51812 - protein, 15 aa, Homo Sapiens
PGSNPARYEFLWGPR

SEQ ID NO: 51813 - protein, 15 aa, Homo Sapiens
GSNPARYEFLWGPRA

SEQ ID NO: 51814 - protein, 15 aa, Homo Sapiens
SNPARYEFLWGPRAL

SEQ ID NO: 51815 - protein, 15 aa, Homo Sapiens
NPARYEFLWGPRALA

SEQ ID NO: 51816 - protein, 15 aa, Homo Sapiens
PARYEFLWGPRALAE

SEQ ID NO: 51817 - protein, 15 aa, Homo Sapiens
ARYEFLWGPRALAET

SEQ ID NO: 51818 - protein, 15 aa, Homo Sapiens
RYEFLWGPRALAETS

SEQ ID NO: 51819 - protein, 15 aa, Homo Sapiens
YEFLWGPRALAETSY

SEQ ID NO: 51820 - protein, 15 aa, Homo Sapiens
EFLWGPRALAETSYV

SEQ ID NO: 51821 - protein, 15 aa, Homo Sapiens
FLWGPRALAETSYVK

SEQ ID NO: 51822 - protein, 15 aa, Homo Sapiens
LWGPRALAETSYVKV

SEQ ID NO: 51823 - protein, 15 aa, Homo Sapiens
WGPRALAETSYVKVL

SEQ ID NO: 51824 - protein, 15 aa, Homo Sapiens
GPRALAETSYVKVLE

SEQ ID NO: 51825 - protein, 15 aa, Homo Sapiens
PRALAETSYVKVLEH

SEQ ID NO: 51826 - protein, 15 aa, Homo Sapiens
RALAETSYVKVLEHV

SEQ ID NO: 51827 - protein, 15 aa, Homo Sapiens
ALAETSYVKVLEHVV

SEQ ID NO: 51828 - protein, 15 aa, Homo Sapiens
LAETSYVKVLEHVVR

SEQ ID NO: 51829 - protein, 15 aa, Homo Sapiens
AETSYVKVLEHVVRV

SEQ ID NO: 51830 - protein, 15 aa, Homo Sapiens
ETSYVKVLEHVVRVN

SEQ ID NO: 51831 - protein, 15 aa, Homo Sapiens
TSYVKVLEHVVRVNA

SEQ ID NO: 51832 - protein, 15 aa, Homo Sapiens
SYVKVLEHVVRVNAR

SEQ ID NO: 51833 - protein, 15 aa, Homo Sapiens
YVKVLEHVVRVNARV

SEQ ID NO: 51834 - protein, 15 aa, Homo Sapiens
VKVLEHVVRVNARVR

SEQ ID NO: 51835 - protein, 15 aa, Homo Sapiens
KVLEHVVRVNARVRI

SEQ ID NO: 51836 - protein, 15 aa, Homo Sapiens
VLEHVVRVNARVRIA

SEQ ID NO: 51837 - protein, 15 aa, Homo Sapiens
LEHVVRVNARVRIAY

SEQ ID NO: 51838 - protein, 15 aa, Homo Sapiens
EHVVRVNARVRIAYP

SEQ ID NO: 51839 - protein, 15 aa, Homo Sapiens
HVVRVNARVRIAYPS

SEQ ID NO: 51840 - protein, 15 aa, Homo Sapiens
VVRVNARVRIAYPSL

SEQ ID NO: 51841 - protein, 15 aa, Homo Sapiens
VRVNARVRIAYPSLR

SEQ ID NO: 51842 - protein, 15 aa, Homo Sapiens
RVNARVRIAYPSLRE

SEQ ID NO: 51843 - protein, 15 aa, Homo Sapiens
VNARVRIAYPSLREA

SEQ ID NO: 51844 - protein, 15 aa, Homo Sapiens
NARVRIAYPSLREAA

SEQ ID NO: 51845 - protein, 15 aa, Homo Sapiens
ARVRIAYPSLREAAL

SEQ ID NO: 51846 - protein, 15 aa, Homo Sapiens
RVRIAYPSLREAALL

SEQ ID NO: 51847 - protein, 15 aa, Homo Sapiens
VRIAYPSLREAALLE

SEQ ID NO: 51848 - protein, 15 aa, Homo Sapiens
RIAYPSLREAALLEE

SEQ ID NO: 51849 - protein, 15 aa, Homo Sapiens
IAYPSLREAALLEEE

SEQ ID NO: 51850 - protein, 15 aa, Homo Sapiens
AYPSLREAALLEEEE

SEQ ID NO: 51851 - protein, 15 aa, Homo Sapiens
YPSLREAALLEEEEG

SEQ ID NO: 51852 - protein, 15 aa, Homo Sapiens
PSLREAALLEEEEGV

SEQ ID NO: 51853 - protein, 16 aa, Homo Sapiens
MSSEQKSQHCKPEEGV

SEQ ID NO: 51854 - protein, 16 aa, Homo Sapiens
SSEQKSQHCKPEEGVE

SEQ ID NO: 51855 - protein, 16 aa, Homo Sapiens
SEQKSQHCKPEEGVEA

SEQ ID NO: 51856 - protein, 16 aa, Homo Sapiens
EQKSQHCKPEEGVEAQ

SEQ ID NO: 51857 - protein, 16 aa, Homo Sapiens
QKSQHCKPEEGVEAQE

SEQ ID NO: 51858 - protein, 16 aa, Homo Sapiens
KSQHCKPEEGVEAQEE

SEQ ID NO: 51859 - protein, 16 aa, Homo Sapiens
SQHCKPEEGVEAQEEA

SEQ ID NO: 51860 - protein, 16 aa, Homo Sapiens
QHCKPEEGVEAQEEAL

SEQ ID NO: 51861 - protein, 16 aa, Homo Sapiens
HCKPEEGVEAQEEALG

SEQ ID NO: 51862 - protein, 16 aa, Homo Sapiens
CKPEEGVEAQEEALGL

SEQ ID NO: 51863 - protein, 16 aa, Homo Sapiens
KPEEGVEAQEEALGLV

SEQ ID NO: 51864 - protein, 16 aa, Homo Sapiens
PEEGVEAQEEALGLVG

SEQ ID NO: 51865 - protein, 16 aa, Homo Sapiens
EEGVEAQEEALGLVGA

SEQ ID NO: 51866 - protein, 16 aa, Homo Sapiens
EGVEAQEEALGLVGAQ

SEQ ID NO: 51867 - protein, 16 aa, Homo Sapiens
GVEAQEEALGLVGAQA

SEQ ID NO: 51868 - protein, 16 aa, Homo Sapiens
VEAQEEALGLVGAQAP

SEQ ID NO: 51869 - protein, 16 aa, Homo Sapiens
EAQEEALGLVGAQAPT

SEQ ID NO: 51870 - protein, 16 aa, Homo Sapiens
AQEEALGLVGAQAPTT

SEQ ID NO: 51871 - protein, 16 aa, Homo Sapiens
QEEALGLVGAQAPTTE

SEQ ID NO: 51872 - protein, 16 aa, Homo Sapiens
EEALGLVGAQAPTTEE

SEQ ID NO: 51873 - protein, 16 aa, Homo Sapiens
EALGLVGAQAPTTEEQ

SEQ ID NO: 51874 - protein, 16 aa, Homo Sapiens
ALGLVGAQAPTTEEQE

SEQ ID NO: 51875 - protein, 16 aa, Homo Sapiens
LGLVGAQAPTTEEQEA

SEQ ID NO: 51876 - protein, 16 aa, Homo Sapiens
GLVGAQAPTTEEQEAA

SEQ ID NO: 51877 - protein, 16 aa, Homo Sapiens
LVGAQAPTTEEQEAAV

SEQ ID NO: 51878 - protein, 16 aa, Homo Sapiens
VGAQAPTTEEQEAAVS

SEQ ID NO: 51879 - protein, 16 aa, Homo Sapiens
GAQAPTTEEQEAAVSS

SEQ ID NO: 51880 - protein, 16 aa, Homo Sapiens
AQAPTTEEQEAAVSSS

SEQ ID NO: 51881 - protein, 16 aa, Homo Sapiens
QAPTTEEQEAAVSSSS

SEQ ID NO: 51882 - protein, 16 aa, Homo Sapiens
APTTEEQEAAVSSSSP

SEQ ID NO: 51883 - protein, 16 aa, Homo Sapiens
PTTEEQEAAVSSSSPL

SEQ ID NO: 51884 - protein, 16 aa, Homo Sapiens
TTEEQEAAVSSSSPLV

SEQ ID NO: 51885 - protein, 16 aa, Homo Sapiens
TEEQEAAVSSSSPLVP

SEQ ID NO: 51886 - protein, 16 aa, Homo Sapiens
EEQEAAVSSSSPLVPG

SEQ ID NO: 51887 - protein, 16 aa, Homo Sapiens
EQEAAVSSSSPLVPGT

SEQ ID NO: 51888 - protein, 16 aa, Homo Sapiens
QEAAVSSSSPLVPGTL

SEQ ID NO: 51889 - protein, 16 aa, Homo Sapiens
EAAVSSSSPLVPGTLE

SEQ ID NO: 51890 - protein, 16 aa, Homo Sapiens
AAVSSSSPLVPGTLEE

SEQ ID NO: 51891 - protein, 16 aa, Homo Sapiens
AVSSSSPLVPGTLEEV

SEQ ID NO: 51892 - protein, 16 aa, Homo Sapiens
VSSSSPLVPGTLEEVP

SEQ ID NO: 51893 - protein, 16 aa, Homo Sapiens
SSSSPLVPGTLEEVPA

SEQ ID NO: 51894 - protein, 16 aa, Homo Sapiens
SSSPLVPGTLEEVPAA

SEQ ID NO: 51895 - protein, 16 aa, Homo Sapiens
SSPLVPGTLEEVPAAE

SEQ ID NO: 51896 - protein, 16 aa, Homo Sapiens
SPLVPGTLEEVPAAES

SEQ ID NO: 51897 - protein, 16 aa, Homo Sapiens
PLVPGTLEEVPAAESA

SEQ ID NO: 51898 - protein, 16 aa, Homo Sapiens
LVPGTLEEVPAAESAG

SEQ ID NO: 51899 - protein, 16 aa, Homo Sapiens
VPGTLEEVPAAESAGP

SEQ ID NO: 51900 - protein, 16 aa, Homo Sapiens
PGTLEEVPAAESAGPP

SEQ ID NO: 51901 - protein, 16 aa, Homo Sapiens
GTLEEVPAAESAGPPQ

SEQ ID NO: 51902 - protein, 16 aa, Homo Sapiens
TLEEVPAAESAGPPQS

SEQ ID NO: 51903 - protein, 16 aa, Homo Sapiens
LEEVPAAESAGPPQSP

SEQ ID NO: 51904 - protein, 16 aa, Homo Sapiens
EEVPAAESAGPPQSPQ

SEQ ID NO: 51905 - protein, 16 aa, Homo Sapiens
EVPAAESAGPPQSPQG

SEQ ID NO: 51906 - protein, 16 aa, Homo Sapiens
VPAAESAGPPQSPQGA

SEQ ID NO: 51907 - protein, 16 aa, Homo Sapiens
PAAESAGPPQSPQGAS

SEQ ID NO: 51908 - protein, 16 aa, Homo Sapiens
AAESAGPPQSPQGASA

SEQ ID NO: 51909 - protein, 16 aa, Homo Sapiens
AESAGPPQSPQGASAL

SEQ ID NO: 51910 - protein, 16 aa, Homo Sapiens
ESAGPPQSPQGASALP

SEQ ID NO: 51911 - protein, 16 aa, Homo Sapiens
SAGPPQSPQGASALPT

SEQ ID NO: 51912 - protein, 16 aa, Homo Sapiens
AGPPQSPQGASALPTT

SEQ ID NO: 51913 - protein, 16 aa, Homo Sapiens
GPPQSPQGASALPTTI

SEQ ID NO: 51914 - protein, 16 aa, Homo Sapiens
PPQSPQGASALPTTIS

SEQ ID NO: 51915 - protein, 16 aa, Homo Sapiens
PQSPQGASALPTTISF

SEQ ID NO: 51916 - protein, 16 aa, Homo Sapiens
QSPQGASALPTTISFT

SEQ ID NO: 51917 - protein, 16 aa, Homo Sapiens
SPQGASALPTTISFTC

SEQ ID NO: 51918 - protein, 16 aa, Homo Sapiens
PQGASALPTTISFTCW

SEQ ID NO: 51919 - protein, 16 aa, Homo Sapiens
QGASALPTTISFTCWR

SEQ ID NO: 51920 - protein, 16 aa, Homo Sapiens
GASALPTTISFTCWRQ

SEQ ID NO: 51921 - protein, 16 aa, Homo Sapiens
ASALPTTISFTCWRQP

SEQ ID NO: 51922 - protein, 16 aa, Homo Sapiens
SALPTTISFTCWRQPN

SEQ ID NO: 51923 - protein, 16 aa, Homo Sapiens
ALPTTISFTCWRQPNE

SEQ ID NO: 51924 - protein, 16 aa, Homo Sapiens
LPTTISFTCWRQPNEG

SEQ ID NO: 51925 - protein, 16 aa, Homo Sapiens
PTTISFTCWRQPNEGS

SEQ ID NO: 51926 - protein, 16 aa, Homo Sapiens
TTISFTCWRQPNEGSS

SEQ ID NO: 51927 - protein, 16 aa, Homo Sapiens
TISFTCWRQPNEGSSS

SEQ ID NO: 51928 - protein, 16 aa, Homo Sapiens
ISFTCWRQPNEGSSSQ

SEQ ID NO: 51929 - protein, 16 aa, Homo Sapiens
SFTCWRQPNEGSSSQE

SEQ ID NO: 51930 - protein, 16 aa, Homo Sapiens
FTCWRQPNEGSSSQEE

SEQ ID NO: 51931 - protein, 16 aa, Homo Sapiens
TCWRQPNEGSSSQEEE

SEQ ID NO: 51932 - protein, 16 aa, Homo Sapiens
CWRQPNEGSSSQEEEG

SEQ ID NO: 51933 - protein, 16 aa, Homo Sapiens
WRQPNEGSSSQEEEGP

SEQ ID NO: 51934 - protein, 16 aa, Homo Sapiens
RQPNEGSSSQEEEGPS

SEQ ID NO: 51935 - protein, 16 aa, Homo Sapiens
QPNEGSSSQEEEGPST

SEQ ID NO: 51936 - protein, 16 aa, Homo Sapiens
PNEGSSSQEEEGPSTS

SEQ ID NO: 51937 - protein, 16 aa, Homo Sapiens
NEGSSSQEEEGPSTSP

SEQ ID NO: 51938 - protein, 16 aa, Homo Sapiens
EGSSSQEEEGPSTSPD

SEQ ID NO: 51939 - protein, 16 aa, Homo Sapiens
GSSSQEEEGPSTSPDA

SEQ ID NO: 51940 - protein, 16 aa, Homo Sapiens
SSSQEEEGPSTSPDAE

SEQ ID NO: 51941 - protein, 16 aa, Homo Sapiens
SSQEEEGPSTSPDAES

SEQ ID NO: 51942 - protein, 16 aa, Homo Sapiens
SQEEEGPSTSPDAESL

SEQ ID NO: 51943 - protein, 16 aa, Homo Sapiens
QEEEGPSTSPDAESLF

SEQ ID NO: 51944 - protein, 16 aa, Homo Sapiens
EEEGPSTSPDAESLFR

SEQ ID NO: 51945 - protein, 16 aa, Homo Sapiens
EEGPSTSPDAESLFRE

SEQ ID NO: 51946 - protein, 16 aa, Homo Sapiens
EGPSTSPDAESLFREA

SEQ ID NO: 51947 - protein, 16 aa, Homo Sapiens
GPSTSPDAESLFREAL

SEQ ID NO: 51948 - protein, 16 aa, Homo Sapiens
PSTSPDAESLFREALS

SEQ ID NO: 51949 - protein, 16 aa, Homo Sapiens
STSPDAESLFREALSN

SEQ ID NO: 51950 - protein, 16 aa, Homo Sapiens
TSPDAESLFREALSNK

SEQ ID NO: 51951 - protein, 16 aa, Homo Sapiens
SPDAESLFREALSNKV

SEQ ID NO: 51952 - protein, 16 aa, Homo Sapiens
PDAESLFREALSNKVD

SEQ ID NO: 51953 - protein, 16 aa, Homo Sapiens
DAESLFREALSNKVDE

SEQ ID NO: 51954 - protein, 16 aa, Homo Sapiens
AESLFREALSNKVDEL

SEQ ID NO: 51955 - protein, 16 aa, Homo Sapiens
ESLFREALSNKVDELA

SEQ ID NO: 51956 - protein, 16 aa, Homo Sapiens
SLFREALSNKVDELAH

SEQ ID NO: 51957 - protein, 16 aa, Homo Sapiens
LFREALSNKVDELAHF

SEQ ID NO: 51958 - protein, 16 aa, Homo Sapiens
FREALSNKVDELAHFL

SEQ ID NO: 51959 - protein, 16 aa, Homo Sapiens
REALSNKVDELAHFLL

SEQ ID NO: 51960 - protein, 16 aa, Homo Sapiens
EALSNKVDELAHFLLR

SEQ ID NO: 51961 - protein, 16 aa, Homo Sapiens
ALSNKVDELAHFLLRK

SEQ ID NO: 51962 - protein, 16 aa, Homo Sapiens
LSNKVDELAHFLLRKY

SEQ ID NO: 51963 - protein, 16 aa, Homo Sapiens
SNKVDELAHFLLRKYR

SEQ ID NO: 51964 - protein, 16 aa, Homo Sapiens
NKVDELAHFLLRKYRA

SEQ ID NO: 51965 - protein, 16 aa, Homo Sapiens
KVDELAHFLLRKYRAK

SEQ ID NO: 51966 - protein, 16 aa, Homo Sapiens
VDELAHFLLRKYRAKE

SEQ ID NO: 51967 - protein, 16 aa, Homo Sapiens
DELAHFLLRKYRAKEL

SEQ ID NO: 51968 - protein, 16 aa, Homo Sapiens
ELAHFLLRKYRAKELV

SEQ ID NO: 51969 - protein, 16 aa, Homo Sapiens
LAHFLLRKYRAKELVT

SEQ ID NO: 51970 - protein, 16 aa, Homo Sapiens
AHFLLRKYRAKELVTK

SEQ ID NO: 51971 - protein, 16 aa, Homo Sapiens
HFLLRKYRAKELVTKA

SEQ ID NO: 51972 - protein, 16 aa, Homo Sapiens
FLLRKYRAKELVTKAE

SEQ ID NO: 51973 - protein, 16 aa, Homo Sapiens
LLRKYRAKELVTKAEM

SEQ ID NO: 51974 - protein, 16 aa, Homo Sapiens
LRKYRAKELVTKAEML

SEQ ID NO: 51975 - protein, 16 aa, Homo Sapiens
RKYRAKELVTKAEMLE

SEQ ID NO: 51976 - protein, 16 aa, Homo Sapiens
KYRAKELVTKAEMLER

SEQ ID NO: 51977 - protein, 16 aa, Homo Sapiens
YRAKELVTKAEMLERV

SEQ ID NO: 51978 - protein, 16 aa, Homo Sapiens
RAKELVTKAEMLERVI

SEQ ID NO: 51979 - protein, 16 aa, Homo Sapiens
AKELVTKAEMLERVIK

SEQ ID NO: 51980 - protein, 16 aa, Homo Sapiens
KELVTKAEMLERVIKN

SEQ ID NO: 51981 - protein, 16 aa, Homo Sapiens
ELVTKAEMLERVIKNY

SEQ ID NO: 51982 - protein, 16 aa, Homo Sapiens
LVTKAEMLERVIKNYK

SEQ ID NO: 51983 - protein, 16 aa, Homo Sapiens
VTKAEMLERVIKNYKR

SEQ ID NO: 51984 - protein, 16 aa, Homo Sapiens
TKAEMLERVIKNYKRC

SEQ ID NO: 51985 - protein, 16 aa, Homo Sapiens
KAEMLERVIKNYKRCF

SEQ ID NO: 51986 - protein, 16 aa, Homo Sapiens
AEMLERVIKNYKRCFP

SEQ ID NO: 51987 - protein, 16 aa, Homo Sapiens
EMLERVIKNYKRCFPV

SEQ ID NO: 51988 - protein, 16 aa, Homo Sapiens
MLERVIKNYKRCFPVI

SEQ ID NO: 51989 - protein, 16 aa, Homo Sapiens
LERVIKNYKRCFPVIF

SEQ ID NO: 51990 - protein, 16 aa, Homo Sapiens
ERVIKNYKRCFPVIFG

SEQ ID NO: 51991 - protein, 16 aa, Homo Sapiens
RVIKNYKRCFPVIFGK

SEQ ID NO: 51992 - protein, 16 aa, Homo Sapiens
VIKNYKRCFPVIFGKA

SEQ ID NO: 51993 - protein, 16 aa, Homo Sapiens
IKNYKRCFPVIFGKAS

SEQ ID NO: 51994 - protein, 16 aa, Homo Sapiens
KNYKRCFPVIFGKASE

SEQ ID NO: 51995 - protein, 16 aa, Homo Sapiens
NYKRCFPVIFGKASES

SEQ ID NO: 51996 - protein, 16 aa, Homo Sapiens
YKRCFPVIFGKASESL

SEQ ID NO: 51997 - protein, 16 aa, Homo Sapiens
KRCFPVIFGKASESLK

SEQ ID NO: 51998 - protein, 16 aa, Homo Sapiens
RCFPVIFGKASESLKM

SEQ ID NO: 51999 - protein, 16 aa, Homo Sapiens
CFPVIFGKASESLKMI

SEQ ID NO: 52000 - protein, 16 aa, Homo Sapiens
FPVIFGKASESLKMIF

SEQ ID NO: 52001 - protein, 16 aa, Homo Sapiens
PVIFGKASESLKMIFG

SEQ ID NO: 52002 - protein, 16 aa, Homo Sapiens
VIFGKASESLKMIFGI

SEQ ID NO: 52003 - protein, 16 aa, Homo Sapiens
IFGKASESLKMIFGID

SEQ ID NO: 52004 - protein, 16 aa, Homo Sapiens
FGKASESLKMIFGIDV

SEQ ID NO: 52005 - protein, 16 aa, Homo Sapiens
GKASESLKMIFGIDVK

SEQ ID NO: 52006 - protein, 16 aa, Homo Sapiens
KASESLKMIFGIDVKE

SEQ ID NO: 52007 - protein, 16 aa, Homo Sapiens
ASESLKMIFGIDVKEV

SEQ ID NO: 52008 - protein, 16 aa, Homo Sapiens
SESLKMIFGIDVKEVD

SEQ ID NO: 52009 - protein, 16 aa, Homo Sapiens
ESLKMIFGIDVKEVDP

SEQ ID NO: 52010 - protein, 16 aa, Homo Sapiens
SLKMIFGIDVKEVDPA

SEQ ID NO: 52011 - protein, 16 aa, Homo Sapiens
LKMIFGIDVKEVDPAS

SEQ ID NO: 52012 - protein, 16 aa, Homo Sapiens
KMIFGIDVKEVDPASN

SEQ ID NO: 52013 - protein, 16 aa, Homo Sapiens
MIFGIDVKEVDPASNT

SEQ ID NO: 52014 - protein, 16 aa, Homo Sapiens
IFGIDVKEVDPASNTY

SEQ ID NO: 52015 - protein, 16 aa, Homo Sapiens
FGIDVKEVDPASNTYT

SEQ ID NO: 52016 - protein, 16 aa, Homo Sapiens
GIDVKEVDPASNTYTL

SEQ ID NO: 52017 - protein, 16 aa, Homo Sapiens
IDVKEVDPASNTYTLV

SEQ ID NO: 52018 - protein, 16 aa, Homo Sapiens
DVKEVDPASNTYTLVT

SEQ ID NO: 52019 - protein, 16 aa, Homo Sapiens
VKEVDPASNTYTLVTC

SEQ ID NO: 52020 - protein, 16 aa, Homo Sapiens
KEVDPASNTYTLVTCL

SEQ ID NO: 52021 - protein, 16 aa, Homo Sapiens
EVDPASNTYTLVTCLG

SEQ ID NO: 52022 - protein, 16 aa, Homo Sapiens
VDPASNTYTLVTCLGL

SEQ ID NO: 52023 - protein, 16 aa, Homo Sapiens
DPASNTYTLVTCLGLS

SEQ ID NO: 52024 - protein, 16 aa, Homo Sapiens
PASNTYTLVTCLGLSY

SEQ ID NO: 52025 - protein, 16 aa, Homo Sapiens
ASNTYTLVTCLGLSYD

SEQ ID NO: 52026 - protein, 16 aa, Homo Sapiens
SNTYTLVTCLGLSYDG

SEQ ID NO: 52027 - protein, 16 aa, Homo Sapiens
NTYTLVTCLGLSYDGL

SEQ ID NO: 52028 - protein, 16 aa, Homo Sapiens
TYTLVTCLGLSYDGLL

SEQ ID NO: 52029 - protein, 16 aa, Homo Sapiens
YTLVTCLGLSYDGLLG

SEQ ID NO: 52030 - protein, 16 aa, Homo Sapiens
TLVTCLGLSYDGLLGN

SEQ ID NO: 52031 - protein, 16 aa, Homo Sapiens
LVTCLGLSYDGLLGNN

SEQ ID NO: 52032 - protein, 16 aa, Homo Sapiens
VTCLGLSYDGLLGNNQ

SEQ ID NO: 52033 - protein, 16 aa, Homo Sapiens
TCLGLSYDGLLGNNQI

SEQ ID NO: 52034 - protein, 16 aa, Homo Sapiens
CLGLSYDGLLGNNQIF

SEQ ID NO: 52035 - protein, 16 aa, Homo Sapiens
LGLSYDGLLGNNQIFP

SEQ ID NO: 52036 - protein, 16 aa, Homo Sapiens
GLSYDGLLGNNQIFPK

SEQ ID NO: 52037 - protein, 16 aa, Homo Sapiens
LSYDGLLGNNQIFPKT

SEQ ID NO: 52038 - protein, 16 aa, Homo Sapiens
SYDGLLGNNQIFPKTG

SEQ ID NO: 52039 - protein, 16 aa, Homo Sapiens
YDGLLGNNQIFPKTGL

SEQ ID NO: 52040 - protein, 16 aa, Homo Sapiens
DGLLGNNQIFPKTGLL

SEQ ID NO: 52041 - protein, 16 aa, Homo Sapiens
GLLGNNQIFPKTGLLI

SEQ ID NO: 52042 - protein, 16 aa, Homo Sapiens
LLGNNQIFPKTGLLII

SEQ ID NO: 52043 - protein, 16 aa, Homo Sapiens
LGNNQIFPKTGLLIIV

SEQ ID NO: 52044 - protein, 16 aa, Homo Sapiens
GNNQIFPKTGLLIIVL

SEQ ID NO: 52045 - protein, 16 aa, Homo Sapiens
NNQIFPKTGLLIIVLG

SEQ ID NO: 52046 - protein, 16 aa, Homo Sapiens
NQIFPKTGLLIIVLGT

SEQ ID NO: 52047 - protein, 16 aa, Homo Sapiens
QIFPKTGLLIIVLGTI

SEQ ID NO: 52048 - protein, 16 aa, Homo Sapiens
IFPKTGLLIIVLGTIA

SEQ ID NO: 52049 - protein, 16 aa, Homo Sapiens
FPKTGLLIIVLGTIAM

SEQ ID NO: 52050 - protein, 16 aa, Homo Sapiens
PKTGLLIIVLGTIAME

SEQ ID NO: 52051 - protein, 16 aa, Homo Sapiens
KTGLLIIVLGTIAMEG

SEQ ID NO: 52052 - protein, 16 aa, Homo Sapiens
TGLLIIVLGTIAMEGD

SEQ ID NO: 52053 - protein, 16 aa, Homo Sapiens
GLLIIVLGTIAMEGDS

SEQ ID NO: 52054 - protein, 16 aa, Homo Sapiens
LLIIVLGTIAMEGDSA

SEQ ID NO: 52055 - protein, 16 aa, Homo Sapiens
LIIVLGTIAMEGDSAS

SEQ ID NO: 52056 - protein, 16 aa, Homo Sapiens
IIVLGTIAMEGDSASE

SEQ ID NO: 52057 - protein, 16 aa, Homo Sapiens
IVLGTIAMEGDSASEE

SEQ ID NO: 52058 - protein, 16 aa, Homo Sapiens
VLGTIAMEGDSASEEE

SEQ ID NO: 52059 - protein, 16 aa, Homo Sapiens
LGTIAMEGDSASEEEI

SEQ ID NO: 52060 - protein, 16 aa, Homo Sapiens
GTIAMEGDSASEEEIW

SEQ ID NO: 52061 - protein, 16 aa, Homo Sapiens
TIAMEGDSASEEEIWE

SEQ ID NO: 52062 - protein, 16 aa, Homo Sapiens
IAMEGDSASEEEIWEE

SEQ ID NO: 52063 - protein, 16 aa, Homo Sapiens
AMEGDSASEEEIWEEL

SEQ ID NO: 52064 - protein, 16 aa, Homo Sapiens
MEGDSASEEEIWEELG

SEQ ID NO: 52065 - protein, 16 aa, Homo Sapiens
EGDSASEEEIWEELGV

SEQ ID NO: 52066 - protein, 16 aa, Homo Sapiens
GDSASEEEIWEELGVM

SEQ ID NO: 52067 - protein, 16 aa, Homo Sapiens
DSASEEEIWEELGVMG

SEQ ID NO: 52068 - protein, 16 aa, Homo Sapiens
SASEEEIWEELGVMGV

SEQ ID NO: 52069 - protein, 16 aa, Homo Sapiens
ASEEEIWEELGVMGVY

SEQ ID NO: 52070 - protein, 16 aa, Homo Sapiens
SEEEIWEELGVMGVYD

SEQ ID NO: 52071 - protein, 16 aa, Homo Sapiens
EEEIWEELGVMGVYDG

SEQ ID NO: 52072 - protein, 16 aa, Homo Sapiens
EEIWEELGVMGVYDGR

SEQ ID NO: 52073 - protein, 16 aa, Homo Sapiens
EIWEELGVMGVYDGRE

SEQ ID NO: 52074 - protein, 16 aa, Homo Sapiens
IWEELGVMGVYDGREH

SEQ ID NO: 52075 - protein, 16 aa, Homo Sapiens
WEELGVMGVYDGREHT

SEQ ID NO: 52076 - protein, 16 aa, Homo Sapiens
EELGVMGVYDGREHTV

SEQ ID NO: 52077 - protein, 16 aa, Homo Sapiens
ELGVMGVYDGREHTVY

SEQ ID NO: 52078 - protein, 16 aa, Homo Sapiens
LGVMGVYDGREHTVYG

SEQ ID NO: 52079 - protein, 16 aa, Homo Sapiens
GVMGVYDGREHTVYGE

SEQ ID NO: 52080 - protein, 16 aa, Homo Sapiens
VMGVYDGREHTVYGEP

SEQ ID NO: 52081 - protein, 16 aa, Homo Sapiens
MGVYDGREHTVYGEPR

SEQ ID NO: 52082 - protein, 16 aa, Homo Sapiens
GVYDGREHTVYGEPRK

SEQ ID NO: 52083 - protein, 16 aa, Homo Sapiens
VYDGREHTVYGEPRKL

SEQ ID NO: 52084 - protein, 16 aa, Homo Sapiens
YDGREHTVYGEPRKLL

SEQ ID NO: 52085 - protein, 16 aa, Homo Sapiens
DGREHTVYGEPRKLLT

SEQ ID NO: 52086 - protein, 16 aa, Homo Sapiens
GREHTVYGEPRKLLTQ

SEQ ID NO: 52087 - protein, 16 aa, Homo Sapiens
REHTVYGEPRKLLTQD

SEQ ID NO: 52088 - protein, 16 aa, Homo Sapiens
EHTVYGEPRKLLTQDW

SEQ ID NO: 52089 - protein, 16 aa, Homo Sapiens
HTVYGEPRKLLTQDWV

SEQ ID NO: 52090 - protein, 16 aa, Homo Sapiens
TVYGEPRKLLTQDWVQ

SEQ ID NO: 52091 - protein, 16 aa, Homo Sapiens
VYGEPRKLLTQDWVQE

SEQ ID NO: 52092 - protein, 16 aa, Homo Sapiens
YGEPRKLLTQDWVQEN

SEQ ID NO: 52093 - protein, 16 aa, Homo Sapiens
GEPRKLLTQDWVQENY

SEQ ID NO: 52094 - protein, 16 aa, Homo Sapiens
EPRKLLTQDWVQENYL

SEQ ID NO: 52095 - protein, 16 aa, Homo Sapiens
PRKLLTQDWVQENYLE

SEQ ID NO: 52096 - protein, 16 aa, Homo Sapiens
RKLLTQDWVQENYLEY

SEQ ID NO: 52097 - protein, 16 aa, Homo Sapiens
KLLTQDWVQENYLEYR

SEQ ID NO: 52098 - protein, 16 aa, Homo Sapiens
LLTQDWVQENYLEYRQ

SEQ ID NO: 52099 - protein, 16 aa, Homo Sapiens
LTQDWVQENYLEYRQV

SEQ ID NO: 52100 - protein, 16 aa, Homo Sapiens
TQDWVQENYLEYRQVP

SEQ ID NO: 52101 - protein, 16 aa, Homo Sapiens
QDWVQENYLEYRQVPG

SEQ ID NO: 52102 - protein, 16 aa, Homo Sapiens
DWVQENYLEYRQVPGS

SEQ ID NO: 52103 - protein, 16 aa, Homo Sapiens
WVQENYLEYRQVPGSN

SEQ ID NO: 52104 - protein, 16 aa, Homo Sapiens
VQENYLEYRQVPGSNP

SEQ ID NO: 52105 - protein, 16 aa, Homo Sapiens
QENYLEYRQVPGSNPA

SEQ ID NO: 52106 - protein, 16 aa, Homo Sapiens
ENYLEYRQVPGSNPAR

SEQ ID NO: 52107 - protein, 16 aa, Homo Sapiens
NYLEYRQVPGSNPARY

SEQ ID NO: 52108 - protein, 16 aa, Homo Sapiens
YLEYRQVPGSNPARYE

SEQ ID NO: 52109 - protein, 16 aa, Homo Sapiens
LEYRQVPGSNPARYEF

SEQ ID NO: 52110 - protein, 16 aa, Homo Sapiens
EYRQVPGSNPARYEFL

SEQ ID NO: 52111 - protein, 16 aa, Homo Sapiens
YRQVPGSNPARYEFLW

SEQ ID NO: 52112 - protein, 16 aa, Homo Sapiens
RQVPGSNPARYEFLWG

SEQ ID NO: 52113 - protein, 16 aa, Homo Sapiens
QVPGSNPARYEFLWGP

SEQ ID NO: 52114 - protein, 16 aa, Homo Sapiens
VPGSNPARYEFLWGPR

SEQ ID NO: 52115 - protein, 16 aa, Homo Sapiens
PGSNPARYEFLWGPRA

SEQ ID NO: 52116 - protein, 16 aa, Homo Sapiens
GSNPARYEFLWGPRAL

SEQ ID NO: 52117 - protein, 16 aa, Homo Sapiens
SNPARYEFLWGPRALA

SEQ ID NO: 52118 - protein, 16 aa, Homo Sapiens
NPARYEFLWGPRALAE

SEQ ID NO: 52119 - protein, 16 aa, Homo Sapiens
PARYEFLWGPRALAET

SEQ ID NO: 52120 - protein, 16 aa, Homo Sapiens
ARYEFLWGPRALAETS

SEQ ID NO: 52121 - protein, 16 aa, Homo Sapiens
RYEFLWGPRALAETSY

SEQ ID NO: 52122 - protein, 16 aa, Homo Sapiens
YEFLWGPRALAETSYV

SEQ ID NO: 52123 - protein, 16 aa, Homo Sapiens
EFLWGPRALAETSYVK

SEQ ID NO: 52124 - protein, 16 aa, Homo Sapiens
FLWGPRALAETSYVKV

SEQ ID NO: 52125 - protein, 16 aa, Homo Sapiens
LWGPRALAETSYVKVL

SEQ ID NO: 52126 - protein, 16 aa, Homo Sapiens
WGPRALAETSYVKVLE

SEQ ID NO: 52127 - protein, 16 aa, Homo Sapiens
GPRALAETSYVKVLEH

SEQ ID NO: 52128 - protein, 16 aa, Homo Sapiens
PRALAETSYVKVLEHV

SEQ ID NO: 52129 - protein, 16 aa, Homo Sapiens
RALAETSYVKVLEHVV

SEQ ID NO: 52130 - protein, 16 aa, Homo Sapiens
ALAETSYVKVLEHVVR

SEQ ID NO: 52131 - protein, 16 aa, Homo Sapiens
LAETSYVKVLEHVVRV

SEQ ID NO: 52132 - protein, 16 aa, Homo Sapiens
AETSYVKVLEHVVRVN

SEQ ID NO: 52133 - protein, 16 aa, Homo Sapiens
ETSYVKVLEHVVRVNA

SEQ ID NO: 52134 - protein, 16 aa, Homo Sapiens
TSYVKVLEHVVRVNAR

SEQ ID NO: 52135 - protein, 16 aa, Homo Sapiens
SYVKVLEHVVRVNARV

SEQ ID NO: 52136 - protein, 16 aa, Homo Sapiens
YVKVLEHVVRVNARVR

SEQ ID NO: 52137 - protein, 16 aa, Homo Sapiens
VKVLEHVVRVNARVRI

SEQ ID NO: 52138 - protein, 16 aa, Homo Sapiens
KVLEHVVRVNARVRIA

SEQ ID NO: 52139 - protein, 16 aa, Homo Sapiens
VLEHVVRVNARVRIAY

SEQ ID NO: 52140 - protein, 16 aa, Homo Sapiens
LEHVVRVNARVRIAYP

SEQ ID NO: 52141 - protein, 16 aa, Homo Sapiens
EHVVRVNARVRIAYPS

SEQ ID NO: 52142 - protein, 16 aa, Homo Sapiens
HVVRVNARVRIAYPSL

SEQ ID NO: 52143 - protein, 16 aa, Homo Sapiens
VVRVNARVRIAYPSLR

SEQ ID NO: 52144 - protein, 16 aa, Homo Sapiens
VRVNARVRIAYPSLRE

SEQ ID NO: 52145 - protein, 16 aa, Homo Sapiens
RVNARVRIAYPSLREA

SEQ ID NO: 52146 - protein, 16 aa, Homo Sapiens
VNARVRIAYPSLREAA

SEQ ID NO: 52147 - protein, 16 aa, Homo Sapiens
NARVRIAYPSLREAAL

SEQ ID NO: 52148 - protein, 16 aa, Homo Sapiens
ARVRIAYPSLREAALL

SEQ ID NO: 52149 - protein, 16 aa, Homo Sapiens
RVRIAYPSLREAALLE

SEQ ID NO: 52150 - protein, 16 aa, Homo Sapiens
VRIAYPSLREAALLEE

SEQ ID NO: 52151 - protein, 16 aa, Homo Sapiens
RIAYPSLREAALLEEE

SEQ ID NO: 52152 - protein, 16 aa, Homo Sapiens
IAYPSLREAALLEEEE

SEQ ID NO: 52153 - protein, 16 aa, Homo Sapiens
AYPSLREAALLEEEEG

SEQ ID NO: 52154 - protein, 16 aa, Homo Sapiens
YPSLREAALLEEEEGV

SEQ ID NO: 52155 - protein, 124 aa, Homo Sapiens
MSLEQKSQHCKPEEGLDTQEEALGLVGVQAATTEEQEAVSSSSPLVPGTLGEVPAAGSPGPLKSPQGASAIPTAIDFTLWRQSIKGSSNQEEEGPSTSPDPESVFRAALSKKVADLIHFLLLKY

SEQ ID NO: 52156 - protein, 8 aa, Homo Sapiens
GLDTQEEA

SEQ ID NO: 52157 - protein, 8 aa, Homo Sapiens
TQEEALGL

SEQ ID NO: 52158 - protein, 8 aa, Homo Sapiens
EALGLVGV

SEQ ID NO: 52159 - protein, 8 aa, Homo Sapiens
GLVGVQAA

SEQ ID NO: 52160 - protein, 8 aa, Homo Sapiens
VQAATTEE

SEQ ID NO: 52161 - protein, 8 aa, Homo Sapiens
TTEEQEAV

SEQ ID NO: 52162 - protein, 8 aa, Homo Sapiens
AVSSSSPL

SEQ ID NO: 52163 - protein, 8 aa, Homo Sapiens
SPLVPGTL

SEQ ID NO: 52164 - protein, 8 aa, Homo Sapiens
VPGTLGEV

SEQ ID NO: 52165 - protein, 8 aa, Homo Sapiens
TLGEVPAA

SEQ ID NO: 52166 - protein, 8 aa, Homo Sapiens
AGSPGPLK

SEQ ID NO: 52167 - protein, 8 aa, Homo Sapiens
SPQGASAI

SEQ ID NO: 52168 - protein, 8 aa, Homo Sapiens
ASAIPTAI

SEQ ID NO: 52169 - protein, 8 aa, Homo Sapiens
AIPTAIDF

SEQ ID NO: 52170 - protein, 8 aa, Homo Sapiens
IPTAIDFT

SEQ ID NO: 52171 - protein, 8 aa, Homo Sapiens
TAIDFTLW

SEQ ID NO: 52172 - protein, 8 aa, Homo Sapiens
AIDFTLWR

SEQ ID NO: 52173 - protein, 8 aa, Homo Sapiens
FTLWRQSI

SEQ ID NO: 52174 - protein, 8 aa, Homo Sapiens
TLWRQSIK

SEQ ID NO: 52175 - protein, 8 aa, Homo Sapiens
TSPDPESV

SEQ ID NO: 52176 - protein, 8 aa, Homo Sapiens
SPDPESVF

SEQ ID NO: 52177 - protein, 8 aa, Homo Sapiens
ESVFRAAL

SEQ ID NO: 52178 - protein, 8 aa, Homo Sapiens
VFRAALSK

SEQ ID NO: 52179 - protein, 8 aa, Homo Sapiens
FRAALSKK

SEQ ID NO: 52180 - protein, 8 aa, Homo Sapiens
KVADLIHF

SEQ ID NO: 52181 - protein, 8 aa, Homo Sapiens
VADLIHFL

SEQ ID NO: 52182 - protein, 8 aa, Homo Sapiens
DLIHFLLL

SEQ ID NO: 52183 - protein, 8 aa, Homo Sapiens
LIHFLLLK

SEQ ID NO: 52184 - protein, 8 aa, Homo Sapiens
IHFLLLKY

SEQ ID NO: 52185 - protein, 9 aa, Homo Sapiens
GLDTQEEAL

SEQ ID NO: 52186 - protein, 9 aa, Homo Sapiens
DTQEEALGL

SEQ ID NO: 52187 - protein, 9 aa, Homo Sapiens
TQEEALGLV

SEQ ID NO: 52188 - protein, 9 aa, Homo Sapiens
EEALGLVGV

SEQ ID NO: 52189 - protein, 9 aa, Homo Sapiens
ALGLVGVQA

SEQ ID NO: 52190 - protein, 9 aa, Homo Sapiens
GLVGVQAAT

SEQ ID NO: 52191 - protein, 9 aa, Homo Sapiens
ATTEEQEAV

SEQ ID NO: 52192 - protein, 9 aa, Homo Sapiens
EAVSSSSPL

SEQ ID NO: 52193 - protein, 9 aa, Homo Sapiens
AVSSSSPLV

SEQ ID NO: 52194 - protein, 9 aa, Homo Sapiens
PLVPGTLGE

SEQ ID NO: 52195 - protein, 9 aa, Homo Sapiens
LVPGTLGEV

SEQ ID NO: 52196 - protein, 9 aa, Homo Sapiens
AAGSPGPLK

SEQ ID NO: 52197 - protein, 9 aa, Homo Sapiens
GASAIPTAI

SEQ ID NO: 52198 - protein, 9 aa, Homo Sapiens
SAIPTAIDF

SEQ ID NO: 52199 - protein, 9 aa, Homo Sapiens
IPTAIDFTL

SEQ ID NO: 52200 - protein, 9 aa, Homo Sapiens
PTAIDFTLW

SEQ ID NO: 52201 - protein, 9 aa, Homo Sapiens
TAIDFTLWR

SEQ ID NO: 52202 - protein, 9 aa, Homo Sapiens
AIDFTLWRQ

SEQ ID NO: 52203 - protein, 9 aa, Homo Sapiens
DFTLWRQSI

SEQ ID NO: 52204 - protein, 9 aa, Homo Sapiens
FTLWRQSIK

SEQ ID NO: 52205 - protein, 9 aa, Homo Sapiens
STSPDPESV

SEQ ID NO: 52206 - protein, 9 aa, Homo Sapiens
DPESVFRAA

SEQ ID NO: 52207 - protein, 9 aa, Homo Sapiens
PESVFRAAL

SEQ ID NO: 52208 - protein, 9 aa, Homo Sapiens
SVFRAALSK

SEQ ID NO: 52209 - protein, 9 aa, Homo Sapiens
VFRAALSKK

SEQ ID NO: 52210 - protein, 9 aa, Homo Sapiens
ALSKKVADL

SEQ ID NO: 52211 - protein, 9 aa, Homo Sapiens
KVADLIHFL

SEQ ID NO: 52212 - protein, 9 aa, Homo Sapiens
VADLIHFLL

SEQ ID NO: 52213 - protein, 9 aa, Homo Sapiens
DLIHFLLLK

SEQ ID NO: 52214 - protein, 9 aa, Homo Sapiens
LIHFLLLKY

SEQ ID NO: 52215 - protein, 10 aa, Homo Sapiens
SLEQKSQHCK

SEQ ID NO: 52216 - protein, 10 aa, Homo Sapiens
EEGLDTQEEA

SEQ ID NO: 52217 - protein, 10 aa, Homo Sapiens
DTQEEALGLV

SEQ ID NO: 52218 - protein, 10 aa, Homo Sapiens
QEEALGLVGV

SEQ ID NO: 52219 - protein, 10 aa, Homo Sapiens
EALGLVGVQA

SEQ ID NO: 52220 - protein, 10 aa, Homo Sapiens
ALGLVGVQAA

SEQ ID NO: 52221 - protein, 10 aa, Homo Sapiens
GLVGVQAATT

SEQ ID NO: 52222 - protein, 10 aa, Homo Sapiens
QEAVSSSSPL

SEQ ID NO: 52223 - protein, 10 aa, Homo Sapiens
EAVSSSSPLV

SEQ ID NO: 52224 - protein, 10 aa, Homo Sapiens
PLVPGTLGEV

SEQ ID NO: 52225 - protein, 10 aa, Homo Sapiens
VPGTLGEVPA

SEQ ID NO: 52226 - protein, 10 aa, Homo Sapiens
VPAAGSPGPL

SEQ ID NO: 52227 - protein, 10 aa, Homo Sapiens
PAAGSPGPLK

SEQ ID NO: 52228 - protein, 10 aa, Homo Sapiens
SPQGASAIPT

SEQ ID NO: 52229 - protein, 10 aa, Homo Sapiens
QGASAIPTAI

SEQ ID NO: 52230 - protein, 10 aa, Homo Sapiens
AIPTAIDFTL

SEQ ID NO: 52231 - protein, 10 aa, Homo Sapiens
IPTAIDFTLW

SEQ ID NO: 52232 - protein, 10 aa, Homo Sapiens
PTAIDFTLWR

SEQ ID NO: 52233 - protein, 10 aa, Homo Sapiens
DFTLWRQSIK

SEQ ID NO: 52234 - protein, 10 aa, Homo Sapiens
STSPDPESVF

SEQ ID NO: 52235 - protein, 10 aa, Homo Sapiens
TSPDPESVFR

SEQ ID NO: 52236 - protein, 10 aa, Homo Sapiens
DPESVFRAAL

SEQ ID NO: 52237 - protein, 10 aa, Homo Sapiens
ESVFRAALSK

SEQ ID NO: 52238 - protein, 10 aa, Homo Sapiens
SVFRAALSKK

SEQ ID NO: 52239 - protein, 10 aa, Homo Sapiens
ALSKKVADLI

SEQ ID NO: 52240 - protein, 10 aa, Homo Sapiens
KKVADLIHFL

SEQ ID NO: 52241 - protein, 10 aa, Homo Sapiens
KVADLIHFLL

SEQ ID NO: 52242 - protein, 10 aa, Homo Sapiens
VADLIHFLLL

SEQ ID NO: 52243 - protein, 10 aa, Homo Sapiens
ADLIHFLLLK

SEQ ID NO: 52244 - protein, 10 aa, Homo Sapiens
DLIHFLLLKY

SEQ ID NO: 52245 - protein, 11 aa, Homo Sapiens
MSLEQKSQHCK

SEQ ID NO: 52246 - protein, 11 aa, Homo Sapiens
EEGLDTQEEAL

SEQ ID NO: 52247 - protein, 11 aa, Homo Sapiens
GLDTQEEALGL

SEQ ID NO: 52248 - protein, 11 aa, Homo Sapiens
TQEEALGLVGV

SEQ ID NO: 52249 - protein, 11 aa, Homo Sapiens
EALGLVGVQAA

SEQ ID NO: 52250 - protein, 11 aa, Homo Sapiens
ALGLVGVQAAT

SEQ ID NO: 52251 - protein, 11 aa, Homo Sapiens
VQAATTEEQEA

SEQ ID NO: 52252 - protein, 11 aa, Homo Sapiens
QAATTEEQEAV

SEQ ID NO: 52253 - protein, 11 aa, Homo Sapiens
SPLVPGTLGEV

SEQ ID NO: 52254 - protein, 11 aa, Homo Sapiens
LVPGTLGEVPA

SEQ ID NO: 52255 - protein, 11 aa, Homo Sapiens
VPGTLGEVPAA

SEQ ID NO: 52256 - protein, 11 aa, Homo Sapiens
EVPAAGSPGPL

SEQ ID NO: 52257 - protein, 11 aa, Homo Sapiens
GPLKSPQGASA

SEQ ID NO: 52258 - protein, 11 aa, Homo Sapiens
GASAIPTAIDF

SEQ ID NO: 52259 - protein, 11 aa, Homo Sapiens
SAIPTAIDFTL

SEQ ID NO: 52260 - protein, 11 aa, Homo Sapiens
IPTAIDFTLWR

SEQ ID NO: 52261 - protein, 11 aa, Homo Sapiens
AIDFTLWRQSI

SEQ ID NO: 52262 - protein, 11 aa, Homo Sapiens
GPSTSPDPESV

SEQ ID NO: 52263 - protein, 11 aa, Homo Sapiens
STSPDPESVFR

SEQ ID NO: 52264 - protein, 11 aa, Homo Sapiens
TSPDPESVFRA

SEQ ID NO: 52265 - protein, 11 aa, Homo Sapiens
SPDPESVFRAA

SEQ ID NO: 52266 - protein, 11 aa, Homo Sapiens
ESVFRAALSKK

SEQ ID NO: 52267 - protein, 11 aa, Homo Sapiens
SVFRAALSKKV

SEQ ID NO: 52268 - protein, 11 aa, Homo Sapiens
RAALSKKVADL

SEQ ID NO: 52269 - protein, 11 aa, Homo Sapiens
KKVADLIHFLL

SEQ ID NO: 52270 - protein, 11 aa, Homo Sapiens
KVADLIHFLLL

SEQ ID NO: 52271 - protein, 11 aa, Homo Sapiens
VADLIHFLLLK

SEQ ID NO: 52272 - protein, 13 aa, Homo Sapiens
MSLEQKSQHCKPE

SEQ ID NO: 52273 - protein, 13 aa, Homo Sapiens
SLEQKSQHCKPEE

SEQ ID NO: 52274 - protein, 13 aa, Homo Sapiens
LEQKSQHCKPEEG

SEQ ID NO: 52275 - protein, 13 aa, Homo Sapiens
EQKSQHCKPEEGL

SEQ ID NO: 52276 - protein, 13 aa, Homo Sapiens
QKSQHCKPEEGLD

SEQ ID NO: 52277 - protein, 13 aa, Homo Sapiens
KSQHCKPEEGLDT

SEQ ID NO: 52278 - protein, 13 aa, Homo Sapiens
SQHCKPEEGLDTQ

SEQ ID NO: 52279 - protein, 13 aa, Homo Sapiens
QHCKPEEGLDTQE

SEQ ID NO: 52280 - protein, 13 aa, Homo Sapiens
HCKPEEGLDTQEE

SEQ ID NO: 52281 - protein, 13 aa, Homo Sapiens
CKPEEGLDTQEEA

SEQ ID NO: 52282 - protein, 13 aa, Homo Sapiens
KPEEGLDTQEEAL

SEQ ID NO: 52283 - protein, 13 aa, Homo Sapiens
PEEGLDTQEEALG

SEQ ID NO: 52284 - protein, 13 aa, Homo Sapiens
EEGLDTQEEALGL

SEQ ID NO: 52285 - protein, 13 aa, Homo Sapiens
EGLDTQEEALGLV

SEQ ID NO: 52286 - protein, 13 aa, Homo Sapiens
GLDTQEEALGLVG

SEQ ID NO: 52287 - protein, 13 aa, Homo Sapiens
LDTQEEALGLVGV

SEQ ID NO: 52288 - protein, 13 aa, Homo Sapiens
DTQEEALGLVGVQ

SEQ ID NO: 52289 - protein, 13 aa, Homo Sapiens
TQEEALGLVGVQA

SEQ ID NO: 52290 - protein, 13 aa, Homo Sapiens
QEEALGLVGVQAA

SEQ ID NO: 52291 - protein, 13 aa, Homo Sapiens
EEALGLVGVQAAT

SEQ ID NO: 52292 - protein, 13 aa, Homo Sapiens
EALGLVGVQAATT

SEQ ID NO: 52293 - protein, 13 aa, Homo Sapiens
ALGLVGVQAATTE

SEQ ID NO: 52294 - protein, 13 aa, Homo Sapiens
LGLVGVQAATTEE

SEQ ID NO: 52295 - protein, 13 aa, Homo Sapiens
GLVGVQAATTEEQ

SEQ ID NO: 52296 - protein, 13 aa, Homo Sapiens
LVGVQAATTEEQE

SEQ ID NO: 52297 - protein, 13 aa, Homo Sapiens
VGVQAATTEEQEA

SEQ ID NO: 52298 - protein, 13 aa, Homo Sapiens
GVQAATTEEQEAV

SEQ ID NO: 52299 - protein, 13 aa, Homo Sapiens
VQAATTEEQEAVS

SEQ ID NO: 52300 - protein, 13 aa, Homo Sapiens
QAATTEEQEAVSS

SEQ ID NO: 52301 - protein, 13 aa, Homo Sapiens
AATTEEQEAVSSS

SEQ ID NO: 52302 - protein, 13 aa, Homo Sapiens
ATTEEQEAVSSSS

SEQ ID NO: 52303 - protein, 13 aa, Homo Sapiens
TTEEQEAVSSSSP

SEQ ID NO: 52304 - protein, 13 aa, Homo Sapiens
TEEQEAVSSSSPL

SEQ ID NO: 52305 - protein, 13 aa, Homo Sapiens
EEQEAVSSSSPLV

SEQ ID NO: 52306 - protein, 13 aa, Homo Sapiens
EQEAVSSSSPLVP

SEQ ID NO: 52307 - protein, 13 aa, Homo Sapiens
QEAVSSSSPLVPG

SEQ ID NO: 52308 - protein, 13 aa, Homo Sapiens
EAVSSSSPLVPGT

SEQ ID NO: 52309 - protein, 13 aa, Homo Sapiens
AVSSSSPLVPGTL

SEQ ID NO: 52310 - protein, 13 aa, Homo Sapiens
VSSSSPLVPGTLG

SEQ ID NO: 52311 - protein, 13 aa, Homo Sapiens
SSSSPLVPGTLGE

SEQ ID NO: 52312 - protein, 13 aa, Homo Sapiens
SSSPLVPGTLGEV

SEQ ID NO: 52313 - protein, 13 aa, Homo Sapiens
SSPLVPGTLGEVP

SEQ ID NO: 52314 - protein, 13 aa, Homo Sapiens
SPLVPGTLGEVPA

SEQ ID NO: 52315 - protein, 13 aa, Homo Sapiens
PLVPGTLGEVPAA

SEQ ID NO: 52316 - protein, 13 aa, Homo Sapiens
LVPGTLGEVPAAG

SEQ ID NO: 52317 - protein, 13 aa, Homo Sapiens
VPGTLGEVPAAGS

SEQ ID NO: 52318 - protein, 13 aa, Homo Sapiens
PGTLGEVPAAGSP

SEQ ID NO: 52319 - protein, 13 aa, Homo Sapiens
GTLGEVPAAGSPG

SEQ ID NO: 52320 - protein, 13 aa, Homo Sapiens
TLGEVPAAGSPGP

SEQ ID NO: 52321 - protein, 13 aa, Homo Sapiens
LGEVPAAGSPGPL

SEQ ID NO: 52322 - protein, 13 aa, Homo Sapiens
GEVPAAGSPGPLK

SEQ ID NO: 52323 - protein, 13 aa, Homo Sapiens
EVPAAGSPGPLKS

SEQ ID NO: 52324 - protein, 13 aa, Homo Sapiens
VPAAGSPGPLKSP

SEQ ID NO: 52325 - protein, 13 aa, Homo Sapiens
PAAGSPGPLKSPQ

SEQ ID NO: 52326 - protein, 13 aa, Homo Sapiens
AAGSPGPLKSPQG

SEQ ID NO: 52327 - protein, 13 aa, Homo Sapiens
AGSPGPLKSPQGA

SEQ ID NO: 52328 - protein, 13 aa, Homo Sapiens
GSPGPLKSPQGAS

SEQ ID NO: 52329 - protein, 13 aa, Homo Sapiens
SPGPLKSPQGASA

SEQ ID NO: 52330 - protein, 13 aa, Homo Sapiens
PGPLKSPQGASAI

SEQ ID NO: 52331 - protein, 13 aa, Homo Sapiens
GPLKSPQGASAIP

SEQ ID NO: 52332 - protein, 13 aa, Homo Sapiens
PLKSPQGASAIPT

SEQ ID NO: 52333 - protein, 13 aa, Homo Sapiens
LKSPQGASAIPTA

SEQ ID NO: 52334 - protein, 13 aa, Homo Sapiens
KSPQGASAIPTAI

SEQ ID NO: 52335 - protein, 13 aa, Homo Sapiens
SPQGASAIPTAID

SEQ ID NO: 52336 - protein, 13 aa, Homo Sapiens
PQGASAIPTAIDF

SEQ ID NO: 52337 - protein, 13 aa, Homo Sapiens
QGASAIPTAIDFT

SEQ ID NO: 52338 - protein, 13 aa, Homo Sapiens
GASAIPTAIDFTL

SEQ ID NO: 52339 - protein, 13 aa, Homo Sapiens
ASAIPTAIDFTLW

SEQ ID NO: 52340 - protein, 13 aa, Homo Sapiens
SAIPTAIDFTLWR

SEQ ID NO: 52341 - protein, 13 aa, Homo Sapiens
AIPTAIDFTLWRQ

SEQ ID NO: 52342 - protein, 13 aa, Homo Sapiens
IPTAIDFTLWRQS

SEQ ID NO: 52343 - protein, 13 aa, Homo Sapiens
PTAIDFTLWRQSI

SEQ ID NO: 52344 - protein, 13 aa, Homo Sapiens
TAIDFTLWRQSIK

SEQ ID NO: 52345 - protein, 13 aa, Homo Sapiens
AIDFTLWRQSIKG

SEQ ID NO: 52346 - protein, 13 aa, Homo Sapiens
IDFTLWRQSIKGS

SEQ ID NO: 52347 - protein, 13 aa, Homo Sapiens
DFTLWRQSIKGSS

SEQ ID NO: 52348 - protein, 13 aa, Homo Sapiens
FTLWRQSIKGSSN

SEQ ID NO: 52349 - protein, 13 aa, Homo Sapiens
TLWRQSIKGSSNQ

SEQ ID NO: 52350 - protein, 13 aa, Homo Sapiens
LWRQSIKGSSNQE

SEQ ID NO: 52351 - protein, 13 aa, Homo Sapiens
WRQSIKGSSNQEE

SEQ ID NO: 52352 - protein, 13 aa, Homo Sapiens
RQSIKGSSNQEEE

SEQ ID NO: 52353 - protein, 13 aa, Homo Sapiens
QSIKGSSNQEEEG

SEQ ID NO: 52354 - protein, 13 aa, Homo Sapiens
SIKGSSNQEEEGP

SEQ ID NO: 52355 - protein, 13 aa, Homo Sapiens
IKGSSNQEEEGPS

SEQ ID NO: 52356 - protein, 13 aa, Homo Sapiens
KGSSNQEEEGPST

SEQ ID NO: 52357 - protein, 13 aa, Homo Sapiens
GSSNQEEEGPSTS

SEQ ID NO: 52358 - protein, 13 aa, Homo Sapiens
SSNQEEEGPSTSP

SEQ ID NO: 52359 - protein, 13 aa, Homo Sapiens
SNQEEEGPSTSPD

SEQ ID NO: 52360 - protein, 13 aa, Homo Sapiens
NQEEEGPSTSPDP

SEQ ID NO: 52361 - protein, 13 aa, Homo Sapiens
QEEEGPSTSPDPE

SEQ ID NO: 52362 - protein, 13 aa, Homo Sapiens
EEEGPSTSPDPES

SEQ ID NO: 52363 - protein, 13 aa, Homo Sapiens
EEGPSTSPDPESV

SEQ ID NO: 52364 - protein, 13 aa, Homo Sapiens
EGPSTSPDPESVF

SEQ ID NO: 52365 - protein, 13 aa, Homo Sapiens
GPSTSPDPESVFR

SEQ ID NO: 52366 - protein, 13 aa, Homo Sapiens
PSTSPDPESVFRA

SEQ ID NO: 52367 - protein, 13 aa, Homo Sapiens
STSPDPESVFRAA

SEQ ID NO: 52368 - protein, 13 aa, Homo Sapiens
TSPDPESVFRAAL

SEQ ID NO: 52369 - protein, 13 aa, Homo Sapiens
SPDPESVFRAALS

SEQ ID NO: 52370 - protein, 13 aa, Homo Sapiens
PDPESVFRAALSK

SEQ ID NO: 52371 - protein, 13 aa, Homo Sapiens
DPESVFRAALSKK

SEQ ID NO: 52372 - protein, 13 aa, Homo Sapiens
PESVFRAALSKKV

SEQ ID NO: 52373 - protein, 13 aa, Homo Sapiens
ESVFRAALSKKVA

SEQ ID NO: 52374 - protein, 13 aa, Homo Sapiens
SVFRAALSKKVAD

SEQ ID NO: 52375 - protein, 13 aa, Homo Sapiens
VFRAALSKKVADL

SEQ ID NO: 52376 - protein, 13 aa, Homo Sapiens
FRAALSKKVADLI

SEQ ID NO: 52377 - protein, 13 aa, Homo Sapiens
RAALSKKVADLIH

SEQ ID NO: 52378 - protein, 13 aa, Homo Sapiens
AALSKKVADLIHF

SEQ ID NO: 52379 - protein, 13 aa, Homo Sapiens
ALSKKVADLIHFL

SEQ ID NO: 52380 - protein, 13 aa, Homo Sapiens
LSKKVADLIHFLL

SEQ ID NO: 52381 - protein, 13 aa, Homo Sapiens
SKKVADLIHFLLL

SEQ ID NO: 52382 - protein, 13 aa, Homo Sapiens
KKVADLIHFLLLK

SEQ ID NO: 52383 - protein, 13 aa, Homo Sapiens
KVADLIHFLLLKY

SEQ ID NO: 52384 - protein, 14 aa, Homo Sapiens
MSLEQKSQHCKPEE

SEQ ID NO: 52385 - protein, 14 aa, Homo Sapiens
SLEQKSQHCKPEEG

SEQ ID NO: 52386 - protein, 14 aa, Homo Sapiens
LEQKSQHCKPEEGL

SEQ ID NO: 52387 - protein, 14 aa, Homo Sapiens
EQKSQHCKPEEGLD

SEQ ID NO: 52388 - protein, 14 aa, Homo Sapiens
QKSQHCKPEEGLDT

SEQ ID NO: 52389 - protein, 14 aa, Homo Sapiens
KSQHCKPEEGLDTQ

SEQ ID NO: 52390 - protein, 14 aa, Homo Sapiens
SQHCKPEEGLDTQE

SEQ ID NO: 52391 - protein, 14 aa, Homo Sapiens
QHCKPEEGLDTQEE

SEQ ID NO: 52392 - protein, 14 aa, Homo Sapiens
HCKPEEGLDTQEEA

SEQ ID NO: 52393 - protein, 14 aa, Homo Sapiens
CKPEEGLDTQEEAL

SEQ ID NO: 52394 - protein, 14 aa, Homo Sapiens
KPEEGLDTQEEALG

SEQ ID NO: 52395 - protein, 14 aa, Homo Sapiens
PEEGLDTQEEALGL

SEQ ID NO: 52396 - protein, 14 aa, Homo Sapiens
EEGLDTQEEALGLV

SEQ ID NO: 52397 - protein, 14 aa, Homo Sapiens
EGLDTQEEALGLVG

SEQ ID NO: 52398 - protein, 14 aa, Homo Sapiens
GLDTQEEALGLVGV

SEQ ID NO: 52399 - protein, 14 aa, Homo Sapiens
LDTQEEALGLVGVQ

SEQ ID NO: 52400 - protein, 14 aa, Homo Sapiens
DTQEEALGLVGVQA

SEQ ID NO: 52401 - protein, 14 aa, Homo Sapiens
TQEEALGLVGVQAA

SEQ ID NO: 52402 - protein, 14 aa, Homo Sapiens
QEEALGLVGVQAAT

SEQ ID NO: 52403 - protein, 14 aa, Homo Sapiens
EEALGLVGVQAATT

SEQ ID NO: 52404 - protein, 14 aa, Homo Sapiens
EALGLVGVQAATTE

SEQ ID NO: 52405 - protein, 14 aa, Homo Sapiens
ALGLVGVQAATTEE

SEQ ID NO: 52406 - protein, 14 aa, Homo Sapiens
LGLVGVQAATTEEQ

SEQ ID NO: 52407 - protein, 14 aa, Homo Sapiens
GLVGVQAATTEEQE

SEQ ID NO: 52408 - protein, 14 aa, Homo Sapiens
LVGVQAATTEEQEA

SEQ ID NO: 52409 - protein, 14 aa, Homo Sapiens
VGVQAATTEEQEAV

SEQ ID NO: 52410 - protein, 14 aa, Homo Sapiens
GVQAATTEEQEAVS

SEQ ID NO: 52411 - protein, 14 aa, Homo Sapiens
VQAATTEEQEAVSS

SEQ ID NO: 52412 - protein, 14 aa, Homo Sapiens
QAATTEEQEAVSSS

SEQ ID NO: 52413 - protein, 14 aa, Homo Sapiens
AATTEEQEAVSSSS

SEQ ID NO: 52414 - protein, 14 aa, Homo Sapiens
ATTEEQEAVSSSSP

SEQ ID NO: 52415 - protein, 14 aa, Homo Sapiens
TTEEQEAVSSSSPL

SEQ ID NO: 52416 - protein, 14 aa, Homo Sapiens
TEEQEAVSSSSPLV

SEQ ID NO: 52417 - protein, 14 aa, Homo Sapiens
EEQEAVSSSSPLVP

SEQ ID NO: 52418 - protein, 14 aa, Homo Sapiens
EQEAVSSSSPLVPG

SEQ ID NO: 52419 - protein, 14 aa, Homo Sapiens
QEAVSSSSPLVPGT

SEQ ID NO: 52420 - protein, 14 aa, Homo Sapiens
EAVSSSSPLVPGTL

SEQ ID NO: 52421 - protein, 14 aa, Homo Sapiens
AVSSSSPLVPGTLG

SEQ ID NO: 52422 - protein, 14 aa, Homo Sapiens
VSSSSPLVPGTLGE

SEQ ID NO: 52423 - protein, 14 aa, Homo Sapiens
SSSSPLVPGTLGEV

SEQ ID NO: 52424 - protein, 14 aa, Homo Sapiens
SSSPLVPGTLGEVP

SEQ ID NO: 52425 - protein, 14 aa, Homo Sapiens
SSPLVPGTLGEVPA

SEQ ID NO: 52426 - protein, 14 aa, Homo Sapiens
SPLVPGTLGEVPAA

SEQ ID NO: 52427 - protein, 14 aa, Homo Sapiens
PLVPGTLGEVPAAG

SEQ ID NO: 52428 - protein, 14 aa, Homo Sapiens
LVPGTLGEVPAAGS

SEQ ID NO: 52429 - protein, 14 aa, Homo Sapiens
VPGTLGEVPAAGSP

SEQ ID NO: 52430 - protein, 14 aa, Homo Sapiens
PGTLGEVPAAGSPG

SEQ ID NO: 52431 - protein, 14 aa, Homo Sapiens
GTLGEVPAAGSPGP

SEQ ID NO: 52432 - protein, 14 aa, Homo Sapiens
TLGEVPAAGSPGPL

SEQ ID NO: 52433 - protein, 14 aa, Homo Sapiens
LGEVPAAGSPGPLK

SEQ ID NO: 52434 - protein, 14 aa, Homo Sapiens
GEVPAAGSPGPLKS

SEQ ID NO: 52435 - protein, 14 aa, Homo Sapiens
EVPAAGSPGPLKSP

SEQ ID NO: 52436 - protein, 14 aa, Homo Sapiens
VPAAGSPGPLKSPQ

SEQ ID NO: 52437 - protein, 14 aa, Homo Sapiens
PAAGSPGPLKSPQG

SEQ ID NO: 52438 - protein, 14 aa, Homo Sapiens
AAGSPGPLKSPQGA

SEQ ID NO: 52439 - protein, 14 aa, Homo Sapiens
AGSPGPLKSPQGAS

SEQ ID NO: 52440 - protein, 14 aa, Homo Sapiens
GSPGPLKSPQGASA

SEQ ID NO: 52441 - protein, 14 aa, Homo Sapiens
SPGPLKSPQGASAI

SEQ ID NO: 52442 - protein, 14 aa, Homo Sapiens
PGPLKSPQGASAIP

SEQ ID NO: 52443 - protein, 14 aa, Homo Sapiens
GPLKSPQGASAIPT

SEQ ID NO: 52444 - protein, 14 aa, Homo Sapiens
PLKSPQGASAIPTA

SEQ ID NO: 52445 - protein, 14 aa, Homo Sapiens
LKSPQGASAIPTAI

SEQ ID NO: 52446 - protein, 14 aa, Homo Sapiens
KSPQGASAIPTAID

SEQ ID NO: 52447 - protein, 14 aa, Homo Sapiens
SPQGASAIPTAIDF

SEQ ID NO: 52448 - protein, 14 aa, Homo Sapiens
PQGASAIPTAIDFT

SEQ ID NO: 52449 - protein, 14 aa, Homo Sapiens
QGASAIPTAIDFTL

SEQ ID NO: 52450 - protein, 14 aa, Homo Sapiens
GASAIPTAIDFTLW

SEQ ID NO: 52451 - protein, 14 aa, Homo Sapiens
ASAIPTAIDFTLWR

SEQ ID NO: 52452 - protein, 14 aa, Homo Sapiens
SAIPTAIDFTLWRQ

SEQ ID NO: 52453 - protein, 14 aa, Homo Sapiens
AIPTAIDFTLWRQS

SEQ ID NO: 52454 - protein, 14 aa, Homo Sapiens
IPTAIDFTLWRQSI

SEQ ID NO: 52455 - protein, 14 aa, Homo Sapiens
PTAIDFTLWRQSIK

SEQ ID NO: 52456 - protein, 14 aa, Homo Sapiens
TAIDFTLWRQSIKG

SEQ ID NO: 52457 - protein, 14 aa, Homo Sapiens
AIDFTLWRQSIKGS

SEQ ID NO: 52458 - protein, 14 aa, Homo Sapiens
IDFTLWRQSIKGSS

SEQ ID NO: 52459 - protein, 14 aa, Homo Sapiens
DFTLWRQSIKGSSN

SEQ ID NO: 52460 - protein, 14 aa, Homo Sapiens
FTLWRQSIKGSSNQ

SEQ ID NO: 52461 - protein, 14 aa, Homo Sapiens
TLWRQSIKGSSNQE

SEQ ID NO: 52462 - protein, 14 aa, Homo Sapiens
LWRQSIKGSSNQEE

SEQ ID NO: 52463 - protein, 14 aa, Homo Sapiens
WRQSIKGSSNQEEE

SEQ ID NO: 52464 - protein, 14 aa, Homo Sapiens
RQSIKGSSNQEEEG

SEQ ID NO: 52465 - protein, 14 aa, Homo Sapiens
QSIKGSSNQEEEGP

SEQ ID NO: 52466 - protein, 14 aa, Homo Sapiens
SIKGSSNQEEEGPS

SEQ ID NO: 52467 - protein, 14 aa, Homo Sapiens
IKGSSNQEEEGPST

SEQ ID NO: 52468 - protein, 14 aa, Homo Sapiens
KGSSNQEEEGPSTS

SEQ ID NO: 52469 - protein, 14 aa, Homo Sapiens
GSSNQEEEGPSTSP

SEQ ID NO: 52470 - protein, 14 aa, Homo Sapiens
SSNQEEEGPSTSPD

SEQ ID NO: 52471 - protein, 14 aa, Homo Sapiens
SNQEEEGPSTSPDP

SEQ ID NO: 52472 - protein, 14 aa, Homo Sapiens
NQEEEGPSTSPDPE

SEQ ID NO: 52473 - protein, 14 aa, Homo Sapiens
QEEEGPSTSPDPES

SEQ ID NO: 52474 - protein, 14 aa, Homo Sapiens
EEEGPSTSPDPESV

SEQ ID NO: 52475 - protein, 14 aa, Homo Sapiens
EEGPSTSPDPESVF

SEQ ID NO: 52476 - protein, 14 aa, Homo Sapiens
EGPSTSPDPESVFR

SEQ ID NO: 52477 - protein, 14 aa, Homo Sapiens
GPSTSPDPESVFRA

SEQ ID NO: 52478 - protein, 14 aa, Homo Sapiens
PSTSPDPESVFRAA

SEQ ID NO: 52479 - protein, 14 aa, Homo Sapiens
STSPDPESVFRAAL

SEQ ID NO: 52480 - protein, 14 aa, Homo Sapiens
TSPDPESVFRAALS

SEQ ID NO: 52481 - protein, 14 aa, Homo Sapiens
SPDPESVFRAALSK

SEQ ID NO: 52482 - protein, 14 aa, Homo Sapiens
PDPESVFRAALSKK

SEQ ID NO: 52483 - protein, 14 aa, Homo Sapiens
DPESVFRAALSKKV

SEQ ID NO: 52484 - protein, 14 aa, Homo Sapiens
PESVFRAALSKKVA

SEQ ID NO: 52485 - protein, 14 aa, Homo Sapiens
ESVFRAALSKKVAD

SEQ ID NO: 52486 - protein, 14 aa, Homo Sapiens
SVFRAALSKKVADL

SEQ ID NO: 52487 - protein, 14 aa, Homo Sapiens
VFRAALSKKVADLI

SEQ ID NO: 52488 - protein, 14 aa, Homo Sapiens
FRAALSKKVADLIH

SEQ ID NO: 52489 - protein, 14 aa, Homo Sapiens
RAALSKKVADLIHF

SEQ ID NO: 52490 - protein, 14 aa, Homo Sapiens
AALSKKVADLIHFL

SEQ ID NO: 52491 - protein, 14 aa, Homo Sapiens
ALSKKVADLIHFLL

SEQ ID NO: 52492 - protein, 14 aa, Homo Sapiens
LSKKVADLIHFLLL

SEQ ID NO: 52493 - protein, 14 aa, Homo Sapiens
SKKVADLIHFLLLK

SEQ ID NO: 52494 - protein, 14 aa, Homo Sapiens
KKVADLIHFLLLKY

SEQ ID NO: 52495 - protein, 15 aa, Homo Sapiens
MSLEQKSQHCKPEEG

SEQ ID NO: 52496 - protein, 15 aa, Homo Sapiens
SLEQKSQHCKPEEGL

SEQ ID NO: 52497 - protein, 15 aa, Homo Sapiens
LEQKSQHCKPEEGLD

SEQ ID NO: 52498 - protein, 15 aa, Homo Sapiens
EQKSQHCKPEEGLDT

SEQ ID NO: 52499 - protein, 15 aa, Homo Sapiens
QKSQHCKPEEGLDTQ

SEQ ID NO: 52500 - protein, 15 aa, Homo Sapiens
KSQHCKPEEGLDTQE

SEQ ID NO: 52501 - protein, 15 aa, Homo Sapiens
SQHCKPEEGLDTQEE

SEQ ID NO: 52502 - protein, 15 aa, Homo Sapiens
QHCKPEEGLDTQEEA

SEQ ID NO: 52503 - protein, 15 aa, Homo Sapiens
HCKPEEGLDTQEEAL

SEQ ID NO: 52504 - protein, 15 aa, Homo Sapiens
CKPEEGLDTQEEALG

SEQ ID NO: 52505 - protein, 15 aa, Homo Sapiens
KPEEGLDTQEEALGL

SEQ ID NO: 52506 - protein, 15 aa, Homo Sapiens
PEEGLDTQEEALGLV

SEQ ID NO: 52507 - protein, 15 aa, Homo Sapiens
EEGLDTQEEALGLVG

SEQ ID NO: 52508 - protein, 15 aa, Homo Sapiens
EGLDTQEEALGLVGV

SEQ ID NO: 52509 - protein, 15 aa, Homo Sapiens
GLDTQEEALGLVGVQ

SEQ ID NO: 52510 - protein, 15 aa, Homo Sapiens
LDTQEEALGLVGVQA

SEQ ID NO: 52511 - protein, 15 aa, Homo Sapiens
DTQEEALGLVGVQAA

SEQ ID NO: 52512 - protein, 15 aa, Homo Sapiens
TQEEALGLVGVQAAT

SEQ ID NO: 52513 - protein, 15 aa, Homo Sapiens
QEEALGLVGVQAATT

SEQ ID NO: 52514 - protein, 15 aa, Homo Sapiens
EEALGLVGVQAATTE

SEQ ID NO: 52515 - protein, 15 aa, Homo Sapiens
EALGLVGVQAATTEE

SEQ ID NO: 52516 - protein, 15 aa, Homo Sapiens
ALGLVGVQAATTEEQ

SEQ ID NO: 52517 - protein, 15 aa, Homo Sapiens
LGLVGVQAATTEEQE

SEQ ID NO: 52518 - protein, 15 aa, Homo Sapiens
GLVGVQAATTEEQEA

SEQ ID NO: 52519 - protein, 15 aa, Homo Sapiens
LVGVQAATTEEQEAV

SEQ ID NO: 52520 - protein, 15 aa, Homo Sapiens
VGVQAATTEEQEAVS

SEQ ID NO: 52521 - protein, 15 aa, Homo Sapiens
GVQAATTEEQEAVSS

SEQ ID NO: 52522 - protein, 15 aa, Homo Sapiens
VQAATTEEQEAVSSS

SEQ ID NO: 52523 - protein, 15 aa, Homo Sapiens
QAATTEEQEAVSSSS

SEQ ID NO: 52524 - protein, 15 aa, Homo Sapiens
AATTEEQEAVSSSSP

SEQ ID NO: 52525 - protein, 15 aa, Homo Sapiens
ATTEEQEAVSSSSPL

SEQ ID NO: 52526 - protein, 15 aa, Homo Sapiens
TTEEQEAVSSSSPLV

SEQ ID NO: 52527 - protein, 15 aa, Homo Sapiens
TEEQEAVSSSSPLVP

SEQ ID NO: 52528 - protein, 15 aa, Homo Sapiens
EEQEAVSSSSPLVPG

SEQ ID NO: 52529 - protein, 15 aa, Homo Sapiens
EQEAVSSSSPLVPGT

SEQ ID NO: 52530 - protein, 15 aa, Homo Sapiens
QEAVSSSSPLVPGTL

SEQ ID NO: 52531 - protein, 15 aa, Homo Sapiens
EAVSSSSPLVPGTLG

SEQ ID NO: 52532 - protein, 15 aa, Homo Sapiens
AVSSSSPLVPGTLGE

SEQ ID NO: 52533 - protein, 15 aa, Homo Sapiens
VSSSSPLVPGTLGEV

SEQ ID NO: 52534 - protein, 15 aa, Homo Sapiens
SSSSPLVPGTLGEVP

SEQ ID NO: 52535 - protein, 15 aa, Homo Sapiens
SSSPLVPGTLGEVPA

SEQ ID NO: 52536 - protein, 15 aa, Homo Sapiens
SSPLVPGTLGEVPAA

SEQ ID NO: 52537 - protein, 15 aa, Homo Sapiens
SPLVPGTLGEVPAAG

SEQ ID NO: 52538 - protein, 15 aa, Homo Sapiens
PLVPGTLGEVPAAGS

SEQ ID NO: 52539 - protein, 15 aa, Homo Sapiens
LVPGTLGEVPAAGSP

SEQ ID NO: 52540 - protein, 15 aa, Homo Sapiens
VPGTLGEVPAAGSPG

SEQ ID NO: 52541 - protein, 15 aa, Homo Sapiens
PGTLGEVPAAGSPGP

SEQ ID NO: 52542 - protein, 15 aa, Homo Sapiens
GTLGEVPAAGSPGPL

SEQ ID NO: 52543 - protein, 15 aa, Homo Sapiens
TLGEVPAAGSPGPLK

SEQ ID NO: 52544 - protein, 15 aa, Homo Sapiens
LGEVPAAGSPGPLKS

SEQ ID NO: 52545 - protein, 15 aa, Homo Sapiens
GEVPAAGSPGPLKSP

SEQ ID NO: 52546 - protein, 15 aa, Homo Sapiens
EVPAAGSPGPLKSPQ

SEQ ID NO: 52547 - protein, 15 aa, Homo Sapiens
VPAAGSPGPLKSPQG

SEQ ID NO: 52548 - protein, 15 aa, Homo Sapiens
PAAGSPGPLKSPQGA

SEQ ID NO: 52549 - protein, 15 aa, Homo Sapiens
AAGSPGPLKSPQGAS

SEQ ID NO: 52550 - protein, 15 aa, Homo Sapiens
AGSPGPLKSPQGASA

SEQ ID NO: 52551 - protein, 15 aa, Homo Sapiens
GSPGPLKSPQGASAI

SEQ ID NO: 52552 - protein, 15 aa, Homo Sapiens
SPGPLKSPQGASAIP

SEQ ID NO: 52553 - protein, 15 aa, Homo Sapiens
PGPLKSPQGASAIPT

SEQ ID NO: 52554 - protein, 15 aa, Homo Sapiens
GPLKSPQGASAIPTA

SEQ ID NO: 52555 - protein, 15 aa, Homo Sapiens
PLKSPQGASAIPTAI

SEQ ID NO: 52556 - protein, 15 aa, Homo Sapiens
LKSPQGASAIPTAID

SEQ ID NO: 52557 - protein, 15 aa, Homo Sapiens
KSPQGASAIPTAIDF

SEQ ID NO: 52558 - protein, 15 aa, Homo Sapiens
SPQGASAIPTAIDFT

SEQ ID NO: 52559 - protein, 15 aa, Homo Sapiens
PQGASAIPTAIDFTL

SEQ ID NO: 52560 - protein, 15 aa, Homo Sapiens
QGASAIPTAIDFTLW

SEQ ID NO: 52561 - protein, 15 aa, Homo Sapiens
GASAIPTAIDFTLWR

SEQ ID NO: 52562 - protein, 15 aa, Homo Sapiens
ASAIPTAIDFTLWRQ

SEQ ID NO: 52563 - protein, 15 aa, Homo Sapiens
SAIPTAIDFTLWRQS

SEQ ID NO: 52564 - protein, 15 aa, Homo Sapiens
AIPTAIDFTLWRQSI

SEQ ID NO: 52565 - protein, 15 aa, Homo Sapiens
IPTAIDFTLWRQSIK

SEQ ID NO: 52566 - protein, 15 aa, Homo Sapiens
PTAIDFTLWRQSIKG

SEQ ID NO: 52567 - protein, 15 aa, Homo Sapiens
TAIDFTLWRQSIKGS

SEQ ID NO: 52568 - protein, 15 aa, Homo Sapiens
AIDFTLWRQSIKGSS

SEQ ID NO: 52569 - protein, 15 aa, Homo Sapiens
IDFTLWRQSIKGSSN

SEQ ID NO: 52570 - protein, 15 aa, Homo Sapiens
DFTLWRQSIKGSSNQ

SEQ ID NO: 52571 - protein, 15 aa, Homo Sapiens
FTLWRQSIKGSSNQE

SEQ ID NO: 52572 - protein, 15 aa, Homo Sapiens
TLWRQSIKGSSNQEE

SEQ ID NO: 52573 - protein, 15 aa, Homo Sapiens
LWRQSIKGSSNQEEE

SEQ ID NO: 52574 - protein, 15 aa, Homo Sapiens
WRQSIKGSSNQEEEG

SEQ ID NO: 52575 - protein, 15 aa, Homo Sapiens
RQSIKGSSNQEEEGP

SEQ ID NO: 52576 - protein, 15 aa, Homo Sapiens
QSIKGSSNQEEEGPS

SEQ ID NO: 52577 - protein, 15 aa, Homo Sapiens
SIKGSSNQEEEGPST

SEQ ID NO: 52578 - protein, 15 aa, Homo Sapiens
IKGSSNQEEEGPSTS

SEQ ID NO: 52579 - protein, 15 aa, Homo Sapiens
KGSSNQEEEGPSTSP

SEQ ID NO: 52580 - protein, 15 aa, Homo Sapiens
GSSNQEEEGPSTSPD

SEQ ID NO: 52581 - protein, 15 aa, Homo Sapiens
SSNQEEEGPSTSPDP

SEQ ID NO: 52582 - protein, 15 aa, Homo Sapiens
SNQEEEGPSTSPDPE

SEQ ID NO: 52583 - protein, 15 aa, Homo Sapiens
NQEEEGPSTSPDPES

SEQ ID NO: 52584 - protein, 15 aa, Homo Sapiens
QEEEGPSTSPDPESV

SEQ ID NO: 52585 - protein, 15 aa, Homo Sapiens
EEEGPSTSPDPESVF

SEQ ID NO: 52586 - protein, 15 aa, Homo Sapiens
EEGPSTSPDPESVFR

SEQ ID NO: 52587 - protein, 15 aa, Homo Sapiens
EGPSTSPDPESVFRA

SEQ ID NO: 52588 - protein, 15 aa, Homo Sapiens
GPSTSPDPESVFRAA

SEQ ID NO: 52589 - protein, 15 aa, Homo Sapiens
PSTSPDPESVFRAAL

SEQ ID NO: 52590 - protein, 15 aa, Homo Sapiens
STSPDPESVFRAALS

SEQ ID NO: 52591 - protein, 15 aa, Homo Sapiens
TSPDPESVFRAALSK

SEQ ID NO: 52592 - protein, 15 aa, Homo Sapiens
SPDPESVFRAALSKK

SEQ ID NO: 52593 - protein, 15 aa, Homo Sapiens
PDPESVFRAALSKKV

SEQ ID NO: 52594 - protein, 15 aa, Homo Sapiens
DPESVFRAALSKKVA

SEQ ID NO: 52595 - protein, 15 aa, Homo Sapiens
PESVFRAALSKKVAD

SEQ ID NO: 52596 - protein, 15 aa, Homo Sapiens
ESVFRAALSKKVADL

SEQ ID NO: 52597 - protein, 15 aa, Homo Sapiens
SVFRAALSKKVADLI

SEQ ID NO: 52598 - protein, 15 aa, Homo Sapiens
VFRAALSKKVADLIH

SEQ ID NO: 52599 - protein, 15 aa, Homo Sapiens
FRAALSKKVADLIHF

SEQ ID NO: 52600 - protein, 15 aa, Homo Sapiens
RAALSKKVADLIHFL

SEQ ID NO: 52601 - protein, 15 aa, Homo Sapiens
AALSKKVADLIHFLL

SEQ ID NO: 52602 - protein, 15 aa, Homo Sapiens
ALSKKVADLIHFLLL

SEQ ID NO: 52603 - protein, 15 aa, Homo Sapiens
LSKKVADLIHFLLLK

SEQ ID NO: 52604 - protein, 15 aa, Homo Sapiens
SKKVADLIHFLLLKY

SEQ ID NO: 52605 - protein, 16 aa, Homo Sapiens
MSLEQKSQHCKPEEGL

SEQ ID NO: 52606 - protein, 16 aa, Homo Sapiens
SLEQKSQHCKPEEGLD

SEQ ID NO: 52607 - protein, 16 aa, Homo Sapiens
LEQKSQHCKPEEGLDT

SEQ ID NO: 52608 - protein, 16 aa, Homo Sapiens
EQKSQHCKPEEGLDTQ

SEQ ID NO: 52609 - protein, 16 aa, Homo Sapiens
QKSQHCKPEEGLDTQE

SEQ ID NO: 52610 - protein, 16 aa, Homo Sapiens
KSQHCKPEEGLDTQEE

SEQ ID NO: 52611 - protein, 16 aa, Homo Sapiens
SQHCKPEEGLDTQEEA

SEQ ID NO: 52612 - protein, 16 aa, Homo Sapiens
QHCKPEEGLDTQEEAL

SEQ ID NO: 52613 - protein, 16 aa, Homo Sapiens
HCKPEEGLDTQEEALG

SEQ ID NO: 52614 - protein, 16 aa, Homo Sapiens
CKPEEGLDTQEEALGL

SEQ ID NO: 52615 - protein, 16 aa, Homo Sapiens
KPEEGLDTQEEALGLV

SEQ ID NO: 52616 - protein, 16 aa, Homo Sapiens
PEEGLDTQEEALGLVG

SEQ ID NO: 52617 - protein, 16 aa, Homo Sapiens
EEGLDTQEEALGLVGV

SEQ ID NO: 52618 - protein, 16 aa, Homo Sapiens
EGLDTQEEALGLVGVQ

SEQ ID NO: 52619 - protein, 16 aa, Homo Sapiens
GLDTQEEALGLVGVQA

SEQ ID NO: 52620 - protein, 16 aa, Homo Sapiens
LDTQEEALGLVGVQAA

SEQ ID NO: 52621 - protein, 16 aa, Homo Sapiens
DTQEEALGLVGVQAAT

SEQ ID NO: 52622 - protein, 16 aa, Homo Sapiens
TQEEALGLVGVQAATT

SEQ ID NO: 52623 - protein, 16 aa, Homo Sapiens
QEEALGLVGVQAATTE

SEQ ID NO: 52624 - protein, 16 aa, Homo Sapiens
EEALGLVGVQAATTEE

SEQ ID NO: 52625 - protein, 16 aa, Homo Sapiens
EALGLVGVQAATTEEQ

SEQ ID NO: 52626 - protein, 16 aa, Homo Sapiens
ALGLVGVQAATTEEQE

SEQ ID NO: 52627 - protein, 16 aa, Homo Sapiens
LGLVGVQAATTEEQEA

SEQ ID NO: 52628 - protein, 16 aa, Homo Sapiens
GLVGVQAATTEEQEAV

SEQ ID NO: 52629 - protein, 16 aa, Homo Sapiens
LVGVQAATTEEQEAVS

SEQ ID NO: 52630 - protein, 16 aa, Homo Sapiens
VGVQAATTEEQEAVSS

SEQ ID NO: 52631 - protein, 16 aa, Homo Sapiens
GVQAATTEEQEAVSSS

SEQ ID NO: 52632 - protein, 16 aa, Homo Sapiens
VQAATTEEQEAVSSSS

SEQ ID NO: 52633 - protein, 16 aa, Homo Sapiens
QAATTEEQEAVSSSSP

SEQ ID NO: 52634 - protein, 16 aa, Homo Sapiens
AATTEEQEAVSSSSPL

SEQ ID NO: 52635 - protein, 16 aa, Homo Sapiens
ATTEEQEAVSSSSPLV

SEQ ID NO: 52636 - protein, 16 aa, Homo Sapiens
TTEEQEAVSSSSPLVP

SEQ ID NO: 52637 - protein, 16 aa, Homo Sapiens
TEEQEAVSSSSPLVPG

SEQ ID NO: 52638 - protein, 16 aa, Homo Sapiens
EEQEAVSSSSPLVPGT

SEQ ID NO: 52639 - protein, 16 aa, Homo Sapiens
EQEAVSSSSPLVPGTL

SEQ ID NO: 52640 - protein, 16 aa, Homo Sapiens
QEAVSSSSPLVPGTLG

SEQ ID NO: 52641 - protein, 16 aa, Homo Sapiens
EAVSSSSPLVPGTLGE

SEQ ID NO: 52642 - protein, 16 aa, Homo Sapiens
AVSSSSPLVPGTLGEV

SEQ ID NO: 52643 - protein, 16 aa, Homo Sapiens
VSSSSPLVPGTLGEVP

SEQ ID NO: 52644 - protein, 16 aa, Homo Sapiens
SSSSPLVPGTLGEVPA

SEQ ID NO: 52645 - protein, 16 aa, Homo Sapiens
SSSPLVPGTLGEVPAA

SEQ ID NO: 52646 - protein, 16 aa, Homo Sapiens
SSPLVPGTLGEVPAAG

SEQ ID NO: 52647 - protein, 16 aa, Homo Sapiens
SPLVPGTLGEVPAAGS

SEQ ID NO: 52648 - protein, 16 aa, Homo Sapiens
PLVPGTLGEVPAAGSP

SEQ ID NO: 52649 - protein, 16 aa, Homo Sapiens
LVPGTLGEVPAAGSPG

SEQ ID NO: 52650 - protein, 16 aa, Homo Sapiens
VPGTLGEVPAAGSPGP

SEQ ID NO: 52651 - protein, 16 aa, Homo Sapiens
PGTLGEVPAAGSPGPL

SEQ ID NO: 52652 - protein, 16 aa, Homo Sapiens
GTLGEVPAAGSPGPLK

SEQ ID NO: 52653 - protein, 16 aa, Homo Sapiens
TLGEVPAAGSPGPLKS

SEQ ID NO: 52654 - protein, 16 aa, Homo Sapiens
LGEVPAAGSPGPLKSP

SEQ ID NO: 52655 - protein, 16 aa, Homo Sapiens
GEVPAAGSPGPLKSPQ

SEQ ID NO: 52656 - protein, 16 aa, Homo Sapiens
EVPAAGSPGPLKSPQG

SEQ ID NO: 52657 - protein, 16 aa, Homo Sapiens
VPAAGSPGPLKSPQGA

SEQ ID NO: 52658 - protein, 16 aa, Homo Sapiens
PAAGSPGPLKSPQGAS

SEQ ID NO: 52659 - protein, 16 aa, Homo Sapiens
AAGSPGPLKSPQGASA

SEQ ID NO: 52660 - protein, 16 aa, Homo Sapiens
AGSPGPLKSPQGASAI

SEQ ID NO: 52661 - protein, 16 aa, Homo Sapiens
GSPGPLKSPQGASAIP

SEQ ID NO: 52662 - protein, 16 aa, Homo Sapiens
SPGPLKSPQGASAIPT

SEQ ID NO: 52663 - protein, 16 aa, Homo Sapiens
PGPLKSPQGASAIPTA

SEQ ID NO: 52664 - protein, 16 aa, Homo Sapiens
GPLKSPQGASAIPTAI

SEQ ID NO: 52665 - protein, 16 aa, Homo Sapiens
PLKSPQGASAIPTAID

SEQ ID NO: 52666 - protein, 16 aa, Homo Sapiens
LKSPQGASAIPTAIDF

SEQ ID NO: 52667 - protein, 16 aa, Homo Sapiens
KSPQGASAIPTAIDFT

SEQ ID NO: 52668 - protein, 16 aa, Homo Sapiens
SPQGASAIPTAIDFTL

SEQ ID NO: 52669 - protein, 16 aa, Homo Sapiens
PQGASAIPTAIDFTLW

SEQ ID NO: 52670 - protein, 16 aa, Homo Sapiens
QGASAIPTAIDFTLWR

SEQ ID NO: 52671 - protein, 16 aa, Homo Sapiens
GASAIPTAIDFTLWRQ

SEQ ID NO: 52672 - protein, 16 aa, Homo Sapiens
ASAIPTAIDFTLWRQS

SEQ ID NO: 52673 - protein, 16 aa, Homo Sapiens
SAIPTAIDFTLWRQSI

SEQ ID NO: 52674 - protein, 16 aa, Homo Sapiens
AIPTAIDFTLWRQSIK

SEQ ID NO: 52675 - protein, 16 aa, Homo Sapiens
IPTAIDFTLWRQSIKG

SEQ ID NO: 52676 - protein, 16 aa, Homo Sapiens
PTAIDFTLWRQSIKGS

SEQ ID NO: 52677 - protein, 16 aa, Homo Sapiens
TAIDFTLWRQSIKGSS

SEQ ID NO: 52678 - protein, 16 aa, Homo Sapiens
AIDFTLWRQSIKGSSN

SEQ ID NO: 52679 - protein, 16 aa, Homo Sapiens
IDFTLWRQSIKGSSNQ

SEQ ID NO: 52680 - protein, 16 aa, Homo Sapiens
DFTLWRQSIKGSSNQE

SEQ ID NO: 52681 - protein, 16 aa, Homo Sapiens
FTLWRQSIKGSSNQEE

SEQ ID NO: 52682 - protein, 16 aa, Homo Sapiens
TLWRQSIKGSSNQEEE

SEQ ID NO: 52683 - protein, 16 aa, Homo Sapiens
LWRQSIKGSSNQEEEG

SEQ ID NO: 52684 - protein, 16 aa, Homo Sapiens
WRQSIKGSSNQEEEGP

SEQ ID NO: 52685 - protein, 16 aa, Homo Sapiens
RQSIKGSSNQEEEGPS

SEQ ID NO: 52686 - protein, 16 aa, Homo Sapiens
QSIKGSSNQEEEGPST

SEQ ID NO: 52687 - protein, 16 aa, Homo Sapiens
SIKGSSNQEEEGPSTS

SEQ ID NO: 52688 - protein, 16 aa, Homo Sapiens
IKGSSNQEEEGPSTSP

SEQ ID NO: 52689 - protein, 16 aa, Homo Sapiens
KGSSNQEEEGPSTSPD

SEQ ID NO: 52690 - protein, 16 aa, Homo Sapiens
GSSNQEEEGPSTSPDP

SEQ ID NO: 52691 - protein, 16 aa, Homo Sapiens
SSNQEEEGPSTSPDPE

SEQ ID NO: 52692 - protein, 16 aa, Homo Sapiens
SNQEEEGPSTSPDPES

SEQ ID NO: 52693 - protein, 16 aa, Homo Sapiens
NQEEEGPSTSPDPESV

SEQ ID NO: 52694 - protein, 16 aa, Homo Sapiens
QEEEGPSTSPDPESVF

SEQ ID NO: 52695 - protein, 16 aa, Homo Sapiens
EEEGPSTSPDPESVFR

SEQ ID NO: 52696 - protein, 16 aa, Homo Sapiens
EEGPSTSPDPESVFRA

SEQ ID NO: 52697 - protein, 16 aa, Homo Sapiens
EGPSTSPDPESVFRAA

SEQ ID NO: 52698 - protein, 16 aa, Homo Sapiens
GPSTSPDPESVFRAAL

SEQ ID NO: 52699 - protein, 16 aa, Homo Sapiens
PSTSPDPESVFRAALS

SEQ ID NO: 52700 - protein, 16 aa, Homo Sapiens
STSPDPESVFRAALSK

SEQ ID NO: 52701 - protein, 16 aa, Homo Sapiens
TSPDPESVFRAALSKK

SEQ ID NO: 52702 - protein, 16 aa, Homo Sapiens
SPDPESVFRAALSKKV

SEQ ID NO: 52703 - protein, 16 aa, Homo Sapiens
PDPESVFRAALSKKVA

SEQ ID NO: 52704 - protein, 16 aa, Homo Sapiens
DPESVFRAALSKKVAD

SEQ ID NO: 52705 - protein, 16 aa, Homo Sapiens
PESVFRAALSKKVADL

SEQ ID NO: 52706 - protein, 16 aa, Homo Sapiens
ESVFRAALSKKVADLI

SEQ ID NO: 52707 - protein, 16 aa, Homo Sapiens
SVFRAALSKKVADLIH

SEQ ID NO: 52708 - protein, 16 aa, Homo Sapiens
VFRAALSKKVADLIHF

SEQ ID NO: 52709 - protein, 16 aa, Homo Sapiens
FRAALSKKVADLIHFL

SEQ ID NO: 52710 - protein, 16 aa, Homo Sapiens
RAALSKKVADLIHFLL

SEQ ID NO: 52711 - protein, 16 aa, Homo Sapiens
AALSKKVADLIHFLLL

SEQ ID NO: 52712 - protein, 16 aa, Homo Sapiens
ALSKKVADLIHFLLLK

SEQ ID NO: 52713 - protein, 16 aa, Homo Sapiens
LSKKVADLIHFLLLKY

SEQ ID NO: 52714 - protein, 314 aa, Homo Sapiens
MPLEQRSQHCKPEEGLEARGEALGLVGAQAPATEEQEAASSSSTLVEVTLGEVPAAESPDPPQSPQGASSLPTTMNYPLWSQSYEDSSNQEEEGPSTFPDLESEFQAALSRKVAKLVHFLLLKYRAREPVTKAEMLGSVVGNWQYFFPVIFSKASDSLQLVFGIELMEVDPIGHVYIFATCLGLSYDGLLGDNQIMPKTGFLIIILAIIAKEGDCAPEEKIWEELSVLEVFEGREDSIFGDPKKLLTQYFVQENYLEYRQVPGSDPACYEFLWGPRALIETSYVKVLHHMVKISGGPRISYPLLHEWALREGEE

SEQ ID NO: 52715 - protein, 8 aa, Homo Sapiens
EQRSQHCK

SEQ ID NO: 52716 - protein, 8 aa, Homo Sapiens
LEARGEAL

SEQ ID NO: 52717 - protein, 8 aa, Homo Sapiens
EALGLVGA

SEQ ID NO: 52718 - protein, 8 aa, Homo Sapiens
AQAPATEE

SEQ ID NO: 52719 - protein, 8 aa, Homo Sapiens
EAASSSST

SEQ ID NO: 52720 - protein, 8 aa, Homo Sapiens
AASSSSTL

SEQ ID NO: 52721 - protein, 8 aa, Homo Sapiens
ASSSSTLV

SEQ ID NO: 52722 - protein, 8 aa, Homo Sapiens
SSSTLVEV

SEQ ID NO: 52723 - protein, 8 aa, Homo Sapiens
STLVEVTL

SEQ ID NO: 52724 - protein, 8 aa, Homo Sapiens
VEVTLGEV

SEQ ID NO: 52725 - protein, 8 aa, Homo Sapiens
TLGEVPAA

SEQ ID NO: 52726 - protein, 8 aa, Homo Sapiens
SPQGASSL

SEQ ID NO: 52727 - protein, 8 aa, Homo Sapiens
SLPTTMNY

SEQ ID NO: 52728 - protein, 8 aa, Homo Sapiens
LPTTMNYP

SEQ ID NO: 52729 - protein, 8 aa, Homo Sapiens
TTMNYPLW

SEQ ID NO: 52730 - protein, 8 aa, Homo Sapiens
YPLWSQSY

SEQ ID NO: 52731 - protein, 8 aa, Homo Sapiens
EEEGPSTF

SEQ ID NO: 52732 - protein, 8 aa, Homo Sapiens
FPDLESEF

SEQ ID NO: 52733 - protein, 8 aa, Homo Sapiens
DLESEFQA

SEQ ID NO: 52734 - protein, 8 aa, Homo Sapiens
SEFQAALS

SEQ ID NO: 52735 - protein, 8 aa, Homo Sapiens
EFQAALSR

SEQ ID NO: 52736 - protein, 8 aa, Homo Sapiens
FQAALSRK

SEQ ID NO: 52737 - protein, 8 aa, Homo Sapiens
QAALSRKV

SEQ ID NO: 52738 - protein, 8 aa, Homo Sapiens
ALSRKVAK

SEQ ID NO: 52739 - protein, 8 aa, Homo Sapiens
KVAKLVHF

SEQ ID NO: 52740 - protein, 8 aa, Homo Sapiens
KLVHFLLL

SEQ ID NO: 52741 - protein, 8 aa, Homo Sapiens
LVHFLLLK

SEQ ID NO: 52742 - protein, 8 aa, Homo Sapiens
VHFLLLKY

SEQ ID NO: 52743 - protein, 8 aa, Homo Sapiens
HFLLLKYR

SEQ ID NO: 52744 - protein, 8 aa, Homo Sapiens
FLLLKYRA

SEQ ID NO: 52745 - protein, 8 aa, Homo Sapiens
LLLKYRAR

SEQ ID NO: 52746 - protein, 8 aa, Homo Sapiens
KYRAREPV

SEQ ID NO: 52747 - protein, 8 aa, Homo Sapiens
RAREPVTK

SEQ ID NO: 52748 - protein, 8 aa, Homo Sapiens
EPVTKAEM

SEQ ID NO: 52749 - protein, 8 aa, Homo Sapiens
AEMLGSVV

SEQ ID NO: 52750 - protein, 8 aa, Homo Sapiens
LGSVVGNW

SEQ ID NO: 52751 - protein, 8 aa, Homo Sapiens
SVVGNWQY

SEQ ID NO: 52752 - protein, 8 aa, Homo Sapiens
NWQYFFPV

SEQ ID NO: 52753 - protein, 8 aa, Homo Sapiens
WQYFFPVI

SEQ ID NO: 52754 - protein, 8 aa, Homo Sapiens
QYFFPVIF

SEQ ID NO: 52755 - protein, 8 aa, Homo Sapiens
FFPVIFSK

SEQ ID NO: 52756 - protein, 8 aa, Homo Sapiens
FPVIFSKA

SEQ ID NO: 52757 - protein, 8 aa, Homo Sapiens
KASDSLQL

SEQ ID NO: 52758 - protein, 8 aa, Homo Sapiens
ASDSLQLV

SEQ ID NO: 52759 - protein, 8 aa, Homo Sapiens
SLQLVFGI

SEQ ID NO: 52760 - protein, 8 aa, Homo Sapiens
QLVFGIEL

SEQ ID NO: 52761 - protein, 8 aa, Homo Sapiens
LVFGIELM

SEQ ID NO: 52762 - protein, 8 aa, Homo Sapiens
FGIELMEV

SEQ ID NO: 52763 - protein, 8 aa, Homo Sapiens
ELMEVDPI

SEQ ID NO: 52764 - protein, 8 aa, Homo Sapiens
EVDPIGHV

SEQ ID NO: 52765 - protein, 8 aa, Homo Sapiens
DPIGHVYI

SEQ ID NO: 52766 - protein, 8 aa, Homo Sapiens
VYIFATCL

SEQ ID NO: 52767 - protein, 8 aa, Homo Sapiens
ATCLGLSY

SEQ ID NO: 52768 - protein, 8 aa, Homo Sapiens
GLSYDGLL

SEQ ID NO: 52769 - protein, 8 aa, Homo Sapiens
GLLGDNQI

SEQ ID NO: 52770 - protein, 8 aa, Homo Sapiens
LLGDNQIM

SEQ ID NO: 52771 - protein, 8 aa, Homo Sapiens
QIMPKTGF

SEQ ID NO: 52772 - protein, 8 aa, Homo Sapiens
IMPKTGFL

SEQ ID NO: 52773 - protein, 8 aa, Homo Sapiens
MPKTGFLI

SEQ ID NO: 52774 - protein, 8 aa, Homo Sapiens
TGFLIIIL

SEQ ID NO: 52775 - protein, 8 aa, Homo Sapiens
FLIIILAI

SEQ ID NO: 52776 - protein, 8 aa, Homo Sapiens
LIIILAII

SEQ ID NO: 52777 - protein, 8 aa, Homo Sapiens
IILAIIAK

SEQ ID NO: 52778 - protein, 8 aa, Homo Sapiens
EEKIWEEL

SEQ ID NO: 52779 - protein, 8 aa, Homo Sapiens
KIWEELSV

SEQ ID NO: 52780 - protein, 8 aa, Homo Sapiens
EELSVLEV

SEQ ID NO: 52781 - protein, 8 aa, Homo Sapiens
ELSVLEVF

SEQ ID NO: 52782 - protein, 8 aa, Homo Sapiens
DSIFGDPK

SEQ ID NO: 52783 - protein, 8 aa, Homo Sapiens
SIFGDPKK

SEQ ID NO: 52784 - protein, 8 aa, Homo Sapiens
KLLTQYFV

SEQ ID NO: 52785 - protein, 8 aa, Homo Sapiens
LLTQYFVQ

SEQ ID NO: 52786 - protein, 8 aa, Homo Sapiens
QYFVQENY

SEQ ID NO: 52787 - protein, 8 aa, Homo Sapiens
YFVQENYL

SEQ ID NO: 52788 - protein, 8 aa, Homo Sapiens
VQENYLEY

SEQ ID NO: 52789 - protein, 8 aa, Homo Sapiens
NYLEYRQV

SEQ ID NO: 52790 - protein, 8 aa, Homo Sapiens
QVPGSDPA

SEQ ID NO: 52791 - protein, 8 aa, Homo Sapiens
DPACYEFL

SEQ ID NO: 52792 - protein, 8 aa, Homo Sapiens
YEFLWGPR

SEQ ID NO: 52793 - protein, 8 aa, Homo Sapiens
FLWGPRAL

SEQ ID NO: 52794 - protein, 8 aa, Homo Sapiens
LWGPRALI

SEQ ID NO: 52795 - protein, 8 aa, Homo Sapiens
RALIETSY

SEQ ID NO: 52796 - protein, 8 aa, Homo Sapiens
ALIETSYV

SEQ ID NO: 52797 - protein, 8 aa, Homo Sapiens
LIETSYVK

SEQ ID NO: 52798 - protein, 8 aa, Homo Sapiens
ETSYVKVL

SEQ ID NO: 52799 - protein, 8 aa, Homo Sapiens
YVKVLHHM

SEQ ID NO: 52800 - protein, 8 aa, Homo Sapiens
KVLHHMVK

SEQ ID NO: 52801 - protein, 8 aa, Homo Sapiens
VLHHMVKI

SEQ ID NO: 52802 - protein, 8 aa, Homo Sapiens
KISGGPRI

SEQ ID NO: 52803 - protein, 8 aa, Homo Sapiens
GPRISYPL

SEQ ID NO: 52804 - protein, 8 aa, Homo Sapiens
RISYPLLH

SEQ ID NO: 52805 - protein, 8 aa, Homo Sapiens
SYPLLHEW

SEQ ID NO: 52806 - protein, 8 aa, Homo Sapiens
YPLLHEWA

SEQ ID NO: 52807 - protein, 8 aa, Homo Sapiens
PLLHEWAL

SEQ ID NO: 52808 - protein, 8 aa, Homo Sapiens
LLHEWALR

SEQ ID NO: 52809 - protein, 9 aa, Homo Sapiens
MPLEQRSQH

SEQ ID NO: 52810 - protein, 9 aa, Homo Sapiens
GLEARGEAL

SEQ ID NO: 52811 - protein, 9 aa, Homo Sapiens
ALGLVGAQA

SEQ ID NO: 52812 - protein, 9 aa, Homo Sapiens
GLVGAQAPA

SEQ ID NO: 52813 - protein, 9 aa, Homo Sapiens
AQAPATEEQ

SEQ ID NO: 52814 - protein, 9 aa, Homo Sapiens
EAASSSSTL

SEQ ID NO: 52815 - protein, 9 aa, Homo Sapiens
AASSSSTLV

SEQ ID NO: 52816 - protein, 9 aa, Homo Sapiens
SSSSTLVEV

SEQ ID NO: 52817 - protein, 9 aa, Homo Sapiens
TLVEVTLGE

SEQ ID NO: 52818 - protein, 9 aa, Homo Sapiens
LVEVTLGEV

SEQ ID NO: 52819 - protein, 9 aa, Homo Sapiens
EVTLGEVPA

SEQ ID NO: 52820 - protein, 9 aa, Homo Sapiens
TLGEVPAAE

SEQ ID NO: 52821 - protein, 9 aa, Homo Sapiens
SSLPTTMNY

SEQ ID NO: 52822 - protein, 9 aa, Homo Sapiens
LPTTMNYPL

SEQ ID NO: 52823 - protein, 9 aa, Homo Sapiens
TMNYPLWSQ

SEQ ID NO: 52824 - protein, 9 aa, Homo Sapiens
NYPLWSQSY

SEQ ID NO: 52825 - protein, 9 aa, Homo Sapiens
QEEEGPSTF

SEQ ID NO: 52826 - protein, 9 aa, Homo Sapiens
TFPDLESEF

SEQ ID NO: 52827 - protein, 9 aa, Homo Sapiens
LESEFQAAL

SEQ ID NO: 52828 - protein, 9 aa, Homo Sapiens
SEFQAALSR

SEQ ID NO: 52829 - protein, 9 aa, Homo Sapiens
EFQAALSRK

SEQ ID NO: 52830 - protein, 9 aa, Homo Sapiens
FQAALSRKV

SEQ ID NO: 52831 - protein, 9 aa, Homo Sapiens
AALSRKVAK

SEQ ID NO: 52832 - protein, 9 aa, Homo Sapiens
ALSRKVAKL

SEQ ID NO: 52833 - protein, 9 aa, Homo Sapiens
KVAKLVHFL

SEQ ID NO: 52834 - protein, 9 aa, Homo Sapiens
KLVHFLLLK

SEQ ID NO: 52835 - protein, 9 aa, Homo Sapiens
LVHFLLLKY

SEQ ID NO: 52836 - protein, 9 aa, Homo Sapiens
FLLLKYRAR

SEQ ID NO: 52837 - protein, 9 aa, Homo Sapiens
YRAREPVTK

SEQ ID NO: 52838 - protein, 9 aa, Homo Sapiens
EPVTKAEML

SEQ ID NO: 52839 - protein, 9 aa, Homo Sapiens
TKAEMLGSV

SEQ ID NO: 52840 - protein, 9 aa, Homo Sapiens
AEMLGSVVG

SEQ ID NO: 52841 - protein, 9 aa, Homo Sapiens
GSVVGNWQY

SEQ ID NO: 52842 - protein, 9 aa, Homo Sapiens
SVVGNWQYF

SEQ ID NO: 52843 - protein, 9 aa, Homo Sapiens
VVGNWQYFF

SEQ ID NO: 52844 - protein, 9 aa, Homo Sapiens
GNWQYFFPV

SEQ ID NO: 52845 - protein, 9 aa, Homo Sapiens
NWQYFFPVI

SEQ ID NO: 52846 - protein, 9 aa, Homo Sapiens
WQYFFPVIF

SEQ ID NO: 52847 - protein, 9 aa, Homo Sapiens
YFFPVIFSK

SEQ ID NO: 52848 - protein, 9 aa, Homo Sapiens
FPVIFSKAS

SEQ ID NO: 52849 - protein, 9 aa, Homo Sapiens
IFSKASDSL

SEQ ID NO: 52850 - protein, 9 aa, Homo Sapiens
KASDSLQLV

SEQ ID NO: 52851 - protein, 9 aa, Homo Sapiens
ASDSLQLVF

SEQ ID NO: 52852 - protein, 9 aa, Homo Sapiens
DSLQLVFGI

SEQ ID NO: 52853 - protein, 9 aa, Homo Sapiens
LQLVFGIEL

SEQ ID NO: 52854 - protein, 9 aa, Homo Sapiens
QLVFGIELM

SEQ ID NO: 52855 - protein, 9 aa, Homo Sapiens
MEVDPIGHV

SEQ ID NO: 52856 - protein, 9 aa, Homo Sapiens
EVDPIGHVY

SEQ ID NO: 52857 - protein, 9 aa, Homo Sapiens
DPIGHVYIF

SEQ ID NO: 52858 - protein, 9 aa, Homo Sapiens
PIGHVYIFA

SEQ ID NO: 52859 - protein, 9 aa, Homo Sapiens
HVYIFATCL

SEQ ID NO: 52860 - protein, 9 aa, Homo Sapiens
YIFATCLGL

SEQ ID NO: 52861 - protein, 9 aa, Homo Sapiens
FATCLGLSY

SEQ ID NO: 52862 - protein, 9 aa, Homo Sapiens
CLGLSYDGL

SEQ ID NO: 52863 - protein, 9 aa, Homo Sapiens
GLLGDNQIM

SEQ ID NO: 52864 - protein, 9 aa, Homo Sapiens
LLGDNQIMP

SEQ ID NO: 52865 - protein, 9 aa, Homo Sapiens
NQIMPKTGF

SEQ ID NO: 52866 - protein, 9 aa, Homo Sapiens
QIMPKTGFL

SEQ ID NO: 52867 - protein, 9 aa, Homo Sapiens
IMPKTGFLI

SEQ ID NO: 52868 - protein, 9 aa, Homo Sapiens
MPKTGFLII

SEQ ID NO: 52869 - protein, 9 aa, Homo Sapiens
TGFLIIILA

SEQ ID NO: 52870 - protein, 9 aa, Homo Sapiens
GFLIIILAI

SEQ ID NO: 52871 - protein, 9 aa, Homo Sapiens
FLIIILAII

SEQ ID NO: 52872 - protein, 9 aa, Homo Sapiens
IIILAIIAK

SEQ ID NO: 52873 - protein, 9 aa, Homo Sapiens
PEEKIWEEL

SEQ ID NO: 52874 - protein, 9 aa, Homo Sapiens
EEKIWEELS

SEQ ID NO: 52875 - protein, 9 aa, Homo Sapiens
KIWEELSVL

SEQ ID NO: 52876 - protein, 9 aa, Homo Sapiens
WEELSVLEV

SEQ ID NO: 52877 - protein, 9 aa, Homo Sapiens
EELSVLEVF

SEQ ID NO: 52878 - protein, 9 aa, Homo Sapiens
SVLEVFEGR

SEQ ID NO: 52879 - protein, 9 aa, Homo Sapiens
DSIFGDPKK

SEQ ID NO: 52880 - protein, 9 aa, Homo Sapiens
SIFGDPKKL

SEQ ID NO: 52881 - protein, 9 aa, Homo Sapiens
DPKKLLTQY

SEQ ID NO: 52882 - protein, 9 aa, Homo Sapiens
KKLLTQYFV

SEQ ID NO: 52883 - protein, 9 aa, Homo Sapiens
KLLTQYFVQ

SEQ ID NO: 52884 - protein, 9 aa, Homo Sapiens
LLTQYFVQE

SEQ ID NO: 52885 - protein, 9 aa, Homo Sapiens
TQYFVQENY

SEQ ID NO: 52886 - protein, 9 aa, Homo Sapiens
QYFVQENYL

SEQ ID NO: 52887 - protein, 9 aa, Homo Sapiens
FVQENYLEY

SEQ ID NO: 52888 - protein, 9 aa, Homo Sapiens
VQENYLEYR

SEQ ID NO: 52889 - protein, 9 aa, Homo Sapiens
RQVPGSDPA

SEQ ID NO: 52890 - protein, 9 aa, Homo Sapiens
VPGSDPACY

SEQ ID NO: 52891 - protein, 9 aa, Homo Sapiens
GSDPACYEF

SEQ ID NO: 52892 - protein, 9 aa, Homo Sapiens
DPACYEFLW

SEQ ID NO: 52893 - protein, 9 aa, Homo Sapiens
CYEFLWGPR

SEQ ID NO: 52894 - protein, 9 aa, Homo Sapiens
EFLWGPRAL

SEQ ID NO: 52895 - protein, 9 aa, Homo Sapiens
FLWGPRALI

SEQ ID NO: 52896 - protein, 9 aa, Homo Sapiens
RALIETSYV

SEQ ID NO: 52897 - protein, 9 aa, Homo Sapiens
ALIETSYVK

SEQ ID NO: 52898 - protein, 9 aa, Homo Sapiens
LIETSYVKV

SEQ ID NO: 52899 - protein, 9 aa, Homo Sapiens
IETSYVKVL

SEQ ID NO: 52900 - protein, 9 aa, Homo Sapiens
ETSYVKVLH

SEQ ID NO: 52901 - protein, 9 aa, Homo Sapiens
SYVKVLHHM

SEQ ID NO: 52902 - protein, 9 aa, Homo Sapiens
YVKVLHHMV

SEQ ID NO: 52903 - protein, 9 aa, Homo Sapiens
KVLHHMVKI

SEQ ID NO: 52904 - protein, 9 aa, Homo Sapiens
MVKISGGPR

SEQ ID NO: 52905 - protein, 9 aa, Homo Sapiens
ISGGPRISY

SEQ ID NO: 52906 - protein, 9 aa, Homo Sapiens
GPRISYPLL

SEQ ID NO: 52907 - protein, 9 aa, Homo Sapiens
ISYPLLHEW

SEQ ID NO: 52908 - protein, 9 aa, Homo Sapiens
YPLLHEWAL

SEQ ID NO: 52909 - protein, 9 aa, Homo Sapiens
LLHEWALRE

SEQ ID NO: 52910 - protein, 10 aa, Homo Sapiens
MPLEQRSQHC

SEQ ID NO: 52911 - protein, 10 aa, Homo Sapiens
EEGLEARGEA

SEQ ID NO: 52912 - protein, 10 aa, Homo Sapiens
LEARGEALGL

SEQ ID NO: 52913 - protein, 10 aa, Homo Sapiens
EALGLVGAQA

SEQ ID NO: 52914 - protein, 10 aa, Homo Sapiens
GLVGAQAPAT

SEQ ID NO: 52915 - protein, 10 aa, Homo Sapiens
APATEEQEAA

SEQ ID NO: 52916 - protein, 10 aa, Homo Sapiens
QEAASSSSTL

SEQ ID NO: 52917 - protein, 10 aa, Homo Sapiens
EAASSSSTLV

SEQ ID NO: 52918 - protein, 10 aa, Homo Sapiens
TLVEVTLGEV

SEQ ID NO: 52919 - protein, 10 aa, Homo Sapiens
TLGEVPAAES

SEQ ID NO: 52920 - protein, 10 aa, Homo Sapiens
SPQGASSLPT

SEQ ID NO: 52921 - protein, 10 aa, Homo Sapiens
ASSLPTTMNY

SEQ ID NO: 52922 - protein, 10 aa, Homo Sapiens
SLPTTMNYPL

SEQ ID NO: 52923 - protein, 10 aa, Homo Sapiens
LPTTMNYPLW

SEQ ID NO: 52924 - protein, 10 aa, Homo Sapiens
TTMNYPLWSQ

SEQ ID NO: 52925 - protein, 10 aa, Homo Sapiens
MNYPLWSQSY

SEQ ID NO: 52926 - protein, 10 aa, Homo Sapiens
NQEEEGPSTF

SEQ ID NO: 52927 - protein, 10 aa, Homo Sapiens
EEGPSTFPDL

SEQ ID NO: 52928 - protein, 10 aa, Homo Sapiens
STFPDLESEF

SEQ ID NO: 52929 - protein, 10 aa, Homo Sapiens
FPDLESEFQA

SEQ ID NO: 52930 - protein, 10 aa, Homo Sapiens
DLESEFQAAL

SEQ ID NO: 52931 - protein, 10 aa, Homo Sapiens
ESEFQAALSR

SEQ ID NO: 52932 - protein, 10 aa, Homo Sapiens
SEFQAALSRK

SEQ ID NO: 52933 - protein, 10 aa, Homo Sapiens
FQAALSRKVA

SEQ ID NO: 52934 - protein, 10 aa, Homo Sapiens
QAALSRKVAK

SEQ ID NO: 52935 - protein, 10 aa, Homo Sapiens
ALSRKVAKLV

SEQ ID NO: 52936 - protein, 10 aa, Homo Sapiens
KVAKLVHFLL

SEQ ID NO: 52937 - protein, 10 aa, Homo Sapiens
AKLVHFLLLK

SEQ ID NO: 52938 - protein, 10 aa, Homo Sapiens
KLVHFLLLKY

SEQ ID NO: 52939 - protein, 10 aa, Homo Sapiens
LVHFLLLKYR

SEQ ID NO: 52940 - protein, 10 aa, Homo Sapiens
HFLLLKYRAR

SEQ ID NO: 52941 - protein, 10 aa, Homo Sapiens
LLKYRAREPV

SEQ ID NO: 52942 - protein, 10 aa, Homo Sapiens
KYRAREPVTK

SEQ ID NO: 52943 - protein, 10 aa, Homo Sapiens
REPVTKAEML

SEQ ID NO: 52944 - protein, 10 aa, Homo Sapiens
VTKAEMLGSV

SEQ ID NO: 52945 - protein, 10 aa, Homo Sapiens
TKAEMLGSVV

SEQ ID NO: 52946 - protein, 10 aa, Homo Sapiens
MLGSVVGNWQ

SEQ ID NO: 52947 - protein, 10 aa, Homo Sapiens
GSVVGNWQYF

SEQ ID NO: 52948 - protein, 10 aa, Homo Sapiens
SVVGNWQYFF

SEQ ID NO: 52949 - protein, 10 aa, Homo Sapiens
VGNWQYFFPV

SEQ ID NO: 52950 - protein, 10 aa, Homo Sapiens
NWQYFFPVIF

SEQ ID NO: 52951 - protein, 10 aa, Homo Sapiens
QYFFPVIFSK

SEQ ID NO: 52952 - protein, 10 aa, Homo Sapiens
YFFPVIFSKA

SEQ ID NO: 52953 - protein, 10 aa, Homo Sapiens
FPVIFSKASD

SEQ ID NO: 52954 - protein, 10 aa, Homo Sapiens
VIFSKASDSL

SEQ ID NO: 52955 - protein, 10 aa, Homo Sapiens
SKASDSLQLV

SEQ ID NO: 52956 - protein, 10 aa, Homo Sapiens
KASDSLQLVF

SEQ ID NO: 52957 - protein, 10 aa, Homo Sapiens
SLQLVFGIEL

SEQ ID NO: 52958 - protein, 10 aa, Homo Sapiens
LQLVFGIELM

SEQ ID NO: 52959 - protein, 10 aa, Homo Sapiens
LVFGIELMEV

SEQ ID NO: 52960 - protein, 10 aa, Homo Sapiens
LMEVDPIGHV

SEQ ID NO: 52961 - protein, 10 aa, Homo Sapiens
MEVDPIGHVY

SEQ ID NO: 52962 - protein, 10 aa, Homo Sapiens
EVDPIGHVYI

SEQ ID NO: 52963 - protein, 10 aa, Homo Sapiens
DPIGHVYIFA

SEQ ID NO: 52964 - protein, 10 aa, Homo Sapiens
VYIFATCLGL

SEQ ID NO: 52965 - protein, 10 aa, Homo Sapiens
IFATCLGLSY

SEQ ID NO: 52966 - protein, 10 aa, Homo Sapiens
CLGLSYDGLL

SEQ ID NO: 52967 - protein, 10 aa, Homo Sapiens
GLLGDNQIMP

SEQ ID NO: 52968 - protein, 10 aa, Homo Sapiens
LLGDNQIMPK

SEQ ID NO: 52969 - protein, 10 aa, Homo Sapiens
NQIMPKTGFL

SEQ ID NO: 52970 - protein, 10 aa, Homo Sapiens
QIMPKTGFLI

SEQ ID NO: 52971 - protein, 10 aa, Homo Sapiens
IMPKTGFLII

SEQ ID NO: 52972 - protein, 10 aa, Homo Sapiens
MPKTGFLIII

SEQ ID NO: 52973 - protein, 10 aa, Homo Sapiens
TGFLIIILAI

SEQ ID NO: 52974 - protein, 10 aa, Homo Sapiens
FLIIILAIIA

SEQ ID NO: 52975 - protein, 10 aa, Homo Sapiens
LIIILAIIAK

SEQ ID NO: 52976 - protein, 10 aa, Homo Sapiens
APEEKIWEEL

SEQ ID NO: 52977 - protein, 10 aa, Homo Sapiens
EEKIWEELSV

SEQ ID NO: 52978 - protein, 10 aa, Homo Sapiens
WEELSVLEVF

SEQ ID NO: 52979 - protein, 10 aa, Homo Sapiens
LSVLEVFEGR

SEQ ID NO: 52980 - protein, 10 aa, Homo Sapiens
EVFEGREDSI

SEQ ID NO: 52981 - protein, 10 aa, Homo Sapiens
VFEGREDSIF

SEQ ID NO: 52982 - protein, 10 aa, Homo Sapiens
SIFGDPKKLL

SEQ ID NO: 52983 - protein, 10 aa, Homo Sapiens
DPKKLLTQYF

SEQ ID NO: 52984 - protein, 10 aa, Homo Sapiens
LTQYFVQENY

SEQ ID NO: 52985 - protein, 10 aa, Homo Sapiens
TQYFVQENYL

SEQ ID NO: 52986 - protein, 10 aa, Homo Sapiens
YFVQENYLEY

SEQ ID NO: 52987 - protein, 10 aa, Homo Sapiens
FVQENYLEYR

SEQ ID NO: 52988 - protein, 10 aa, Homo Sapiens
RQVPGSDPAC

SEQ ID NO: 52989 - protein, 10 aa, Homo Sapiens
QVPGSDPACY

SEQ ID NO: 52990 - protein, 10 aa, Homo Sapiens
YEFLWGPRAL

SEQ ID NO: 52991 - protein, 10 aa, Homo Sapiens
EFLWGPRALI

SEQ ID NO: 52992 - protein, 10 aa, Homo Sapiens
FLWGPRALIE

SEQ ID NO: 52993 - protein, 10 aa, Homo Sapiens
GPRALIETSY

SEQ ID NO: 52994 - protein, 10 aa, Homo Sapiens
RALIETSYVK

SEQ ID NO: 52995 - protein, 10 aa, Homo Sapiens
ALIETSYVKV

SEQ ID NO: 52996 - protein, 10 aa, Homo Sapiens
ETSYVKVLHH

SEQ ID NO: 52997 - protein, 10 aa, Homo Sapiens
TSYVKVLHHM

SEQ ID NO: 52998 - protein, 10 aa, Homo Sapiens
SYVKVLHHMV

SEQ ID NO: 52999 - protein, 10 aa, Homo Sapiens
YVKVLHHMVK

SEQ ID NO: 53000 - protein, 10 aa, Homo Sapiens
HMVKISGGPR

SEQ ID NO: 53001 - protein, 10 aa, Homo Sapiens
MVKISGGPRI

SEQ ID NO: 53002 - protein, 10 aa, Homo Sapiens
KISGGPRISY

SEQ ID NO: 53003 - protein, 10 aa, Homo Sapiens
RISYPLLHEW

SEQ ID NO: 53004 - protein, 10 aa, Homo Sapiens
SYPLLHEWAL

SEQ ID NO: 53005 - protein, 11 aa, Homo Sapiens
EEGLEARGEAL

SEQ ID NO: 53006 - protein, 11 aa, Homo Sapiens
GLEARGEALGL

SEQ ID NO: 53007 - protein, 11 aa, Homo Sapiens
ALGLVGAQAPA

SEQ ID NO: 53008 - protein, 11 aa, Homo Sapiens
AQAPATEEQEA

SEQ ID NO: 53009 - protein, 11 aa, Homo Sapiens
APATEEQEAAS

SEQ ID NO: 53010 - protein, 11 aa, Homo Sapiens
EEQEAASSSST

SEQ ID NO: 53011 - protein, 11 aa, Homo Sapiens
EQEAASSSSTL

SEQ ID NO: 53012 - protein, 11 aa, Homo Sapiens
QEAASSSSTLV

SEQ ID NO: 53013 - protein, 11 aa, Homo Sapiens
AASSSSTLVEV

SEQ ID NO: 53014 - protein, 11 aa, Homo Sapiens
STLVEVTLGEV

SEQ ID NO: 53015 - protein, 11 aa, Homo Sapiens
PPQSPQGASSL

SEQ ID NO: 53016 - protein, 11 aa, Homo Sapiens
GASSLPTTMNY

SEQ ID NO: 53017 - protein, 11 aa, Homo Sapiens
SSLPTTMNYPL

SEQ ID NO: 53018 - protein, 11 aa, Homo Sapiens
LPTTMNYPLWS

SEQ ID NO: 53019 - protein, 11 aa, Homo Sapiens
TTMNYPLWSQS

SEQ ID NO: 53020 - protein, 11 aa, Homo Sapiens
TMNYPLWSQSY

SEQ ID NO: 53021 - protein, 11 aa, Homo Sapiens
EEEGPSTFPDL

SEQ ID NO: 53022 - protein, 11 aa, Homo Sapiens
STFPDLESEFQ

SEQ ID NO: 53023 - protein, 11 aa, Homo Sapiens
FPDLESEFQAA

SEQ ID NO: 53024 - protein, 11 aa, Homo Sapiens
ESEFQAALSRK

SEQ ID NO: 53025 - protein, 11 aa, Homo Sapiens
SEFQAALSRKV

SEQ ID NO: 53026 - protein, 11 aa, Homo Sapiens
FQAALSRKVAK

SEQ ID NO: 53027 - protein, 11 aa, Homo Sapiens
AALSRKVAKLV

SEQ ID NO: 53028 - protein, 11 aa, Homo Sapiens
KVAKLVHFLLL

SEQ ID NO: 53029 - protein, 11 aa, Homo Sapiens
VAKLVHFLLLK

SEQ ID NO: 53030 - protein, 11 aa, Homo Sapiens
KLVHFLLLKYR

SEQ ID NO: 53031 - protein, 11 aa, Homo Sapiens
LLLKYRAREPV

SEQ ID NO: 53032 - protein, 11 aa, Homo Sapiens
RAREPVTKAEM

SEQ ID NO: 53033 - protein, 11 aa, Homo Sapiens
PVTKAEMLGSV

SEQ ID NO: 53034 - protein, 11 aa, Homo Sapiens
VTKAEMLGSVV

SEQ ID NO: 53035 - protein, 11 aa, Homo Sapiens
AEMLGSVVGNW

SEQ ID NO: 53036 - protein, 11 aa, Homo Sapiens
EMLGSVVGNWQ

SEQ ID NO: 53037 - protein, 11 aa, Homo Sapiens
MLGSVVGNWQY

SEQ ID NO: 53038 - protein, 11 aa, Homo Sapiens
GSVVGNWQYFF

SEQ ID NO: 53039 - protein, 11 aa, Homo Sapiens
VVGNWQYFFPV

SEQ ID NO: 53040 - protein, 11 aa, Homo Sapiens
WQYFFPVIFSK

SEQ ID NO: 53041 - protein, 11 aa, Homo Sapiens
FPVIFSKASDS

SEQ ID NO: 53042 - protein, 11 aa, Homo Sapiens
IFSKASDSLQL

SEQ ID NO: 53043 - protein, 11 aa, Homo Sapiens
FSKASDSLQLV

SEQ ID NO: 53044 - protein, 11 aa, Homo Sapiens
DSLQLVFGIEL

SEQ ID NO: 53045 - protein, 11 aa, Homo Sapiens
SLQLVFGIELM

SEQ ID NO: 53046 - protein, 11 aa, Homo Sapiens
QLVFGIELMEV

SEQ ID NO: 53047 - protein, 11 aa, Homo Sapiens
FGIELMEVDPI

SEQ ID NO: 53048 - protein, 11 aa, Homo Sapiens
ELMEVDPIGHV

SEQ ID NO: 53049 - protein, 11 aa, Homo Sapiens
LMEVDPIGHVY

SEQ ID NO: 53050 - protein, 11 aa, Homo Sapiens
MEVDPIGHVYI

SEQ ID NO: 53051 - protein, 11 aa, Homo Sapiens
EVDPIGHVYIF

SEQ ID NO: 53052 - protein, 11 aa, Homo Sapiens
DPIGHVYIFAT

SEQ ID NO: 53053 - protein, 11 aa, Homo Sapiens
HVYIFATCLGL

SEQ ID NO: 53054 - protein, 11 aa, Homo Sapiens
YIFATCLGLSY

SEQ ID NO: 53055 - protein, 11 aa, Homo Sapiens
SYDGLLGDNQI

SEQ ID NO: 53056 - protein, 11 aa, Homo Sapiens
GLLGDNQIMPK

SEQ ID NO: 53057 - protein, 11 aa, Homo Sapiens
LLGDNQIMPKT

SEQ ID NO: 53058 - protein, 11 aa, Homo Sapiens
NQIMPKTGFLI

SEQ ID NO: 53059 - protein, 11 aa, Homo Sapiens
QIMPKTGFLII

SEQ ID NO: 53060 - protein, 11 aa, Homo Sapiens
IMPKTGFLIII

SEQ ID NO: 53061 - protein, 11 aa, Homo Sapiens
MPKTGFLIIIL

SEQ ID NO: 53062 - protein, 11 aa, Homo Sapiens
TGFLIIILAII

SEQ ID NO: 53063 - protein, 11 aa, Homo Sapiens
FLIIILAIIAK

SEQ ID NO: 53064 - protein, 11 aa, Homo Sapiens
PEEKIWEELSV

SEQ ID NO: 53065 - protein, 11 aa, Homo Sapiens
EEKIWEELSVL

SEQ ID NO: 53066 - protein, 11 aa, Homo Sapiens
KIWEELSVLEV

SEQ ID NO: 53067 - protein, 11 aa, Homo Sapiens
IWEELSVLEVF

SEQ ID NO: 53068 - protein, 11 aa, Homo Sapiens
ELSVLEVFEGR

SEQ ID NO: 53069 - protein, 11 aa, Homo Sapiens
EVFEGREDSIF

SEQ ID NO: 53070 - protein, 11 aa, Homo Sapiens
SIFGDPKKLLT

SEQ ID NO: 53071 - protein, 11 aa, Homo Sapiens
LLTQYFVQENY

SEQ ID NO: 53072 - protein, 11 aa, Homo Sapiens
LTQYFVQENYL

SEQ ID NO: 53073 - protein, 11 aa, Homo Sapiens
QYFVQENYLEY

SEQ ID NO: 53074 - protein, 11 aa, Homo Sapiens
YFVQENYLEYR

SEQ ID NO: 53075 - protein, 11 aa, Homo Sapiens
FVQENYLEYRQ

SEQ ID NO: 53076 - protein, 11 aa, Homo Sapiens
VQENYLEYRQV

SEQ ID NO: 53077 - protein, 11 aa, Homo Sapiens
RQVPGSDPACY

SEQ ID NO: 53078 - protein, 11 aa, Homo Sapiens
VPGSDPACYEF

SEQ ID NO: 53079 - protein, 11 aa, Homo Sapiens
GSDPACYEFLW

SEQ ID NO: 53080 - protein, 11 aa, Homo Sapiens
YEFLWGPRALI

SEQ ID NO: 53081 - protein, 11 aa, Homo Sapiens
FLWGPRALIET

SEQ ID NO: 53082 - protein, 11 aa, Homo Sapiens
GPRALIETSYV

SEQ ID NO: 53083 - protein, 11 aa, Homo Sapiens
RALIETSYVKV

SEQ ID NO: 53084 - protein, 11 aa, Homo Sapiens
ALIETSYVKVL

SEQ ID NO: 53085 - protein, 11 aa, Homo Sapiens
ETSYVKVLHHM

SEQ ID NO: 53086 - protein, 11 aa, Homo Sapiens
TSYVKVLHHMV

SEQ ID NO: 53087 - protein, 11 aa, Homo Sapiens
SYVKVLHHMVK

SEQ ID NO: 53088 - protein, 11 aa, Homo Sapiens
YVKVLHHMVKI

SEQ ID NO: 53089 - protein, 11 aa, Homo Sapiens
HMVKISGGPRI

SEQ ID NO: 53090 - protein, 11 aa, Homo Sapiens
VKISGGPRISY

SEQ ID NO: 53091 - protein, 11 aa, Homo Sapiens
RISYPLLHEWA

SEQ ID NO: 53092 - protein, 11 aa, Homo Sapiens
ISYPLLHEWAL

SEQ ID NO: 53093 - protein, 11 aa, Homo Sapiens
SYPLLHEWALR

SEQ ID NO: 53094 - protein, 11 aa, Homo Sapiens
LLHEWALREGE

SEQ ID NO: 53095 - protein, 13 aa, Homo Sapiens
MPLEQRSQHCKPE

SEQ ID NO: 53096 - protein, 13 aa, Homo Sapiens
PLEQRSQHCKPEE

SEQ ID NO: 53097 - protein, 13 aa, Homo Sapiens
LEQRSQHCKPEEG

SEQ ID NO: 53098 - protein, 13 aa, Homo Sapiens
EQRSQHCKPEEGL

SEQ ID NO: 53099 - protein, 13 aa, Homo Sapiens
QRSQHCKPEEGLE

SEQ ID NO: 53100 - protein, 13 aa, Homo Sapiens
RSQHCKPEEGLEA

SEQ ID NO: 53101 - protein, 13 aa, Homo Sapiens
SQHCKPEEGLEAR

SEQ ID NO: 53102 - protein, 13 aa, Homo Sapiens
QHCKPEEGLEARG

SEQ ID NO: 53103 - protein, 13 aa, Homo Sapiens
HCKPEEGLEARGE

SEQ ID NO: 53104 - protein, 13 aa, Homo Sapiens
CKPEEGLEARGEA

SEQ ID NO: 53105 - protein, 13 aa, Homo Sapiens
KPEEGLEARGEAL

SEQ ID NO: 53106 - protein, 13 aa, Homo Sapiens
PEEGLEARGEALG

SEQ ID NO: 53107 - protein, 13 aa, Homo Sapiens
EEGLEARGEALGL

SEQ ID NO: 53108 - protein, 13 aa, Homo Sapiens
EGLEARGEALGLV

SEQ ID NO: 53109 - protein, 13 aa, Homo Sapiens
GLEARGEALGLVG

SEQ ID NO: 53110 - protein, 13 aa, Homo Sapiens
LEARGEALGLVGA

SEQ ID NO: 53111 - protein, 13 aa, Homo Sapiens
EARGEALGLVGAQ

SEQ ID NO: 53112 - protein, 13 aa, Homo Sapiens
ARGEALGLVGAQA

SEQ ID NO: 53113 - protein, 13 aa, Homo Sapiens
RGEALGLVGAQAP

SEQ ID NO: 53114 - protein, 13 aa, Homo Sapiens
GEALGLVGAQAPA

SEQ ID NO: 53115 - protein, 13 aa, Homo Sapiens
EALGLVGAQAPAT

SEQ ID NO: 53116 - protein, 13 aa, Homo Sapiens
ALGLVGAQAPATE

SEQ ID NO: 53117 - protein, 13 aa, Homo Sapiens
LGLVGAQAPATEE

SEQ ID NO: 53118 - protein, 13 aa, Homo Sapiens
GLVGAQAPATEEQ

SEQ ID NO: 53119 - protein, 13 aa, Homo Sapiens
LVGAQAPATEEQE

SEQ ID NO: 53120 - protein, 13 aa, Homo Sapiens
VGAQAPATEEQEA

SEQ ID NO: 53121 - protein, 13 aa, Homo Sapiens
GAQAPATEEQEAA

SEQ ID NO: 53122 - protein, 13 aa, Homo Sapiens
AQAPATEEQEAAS

SEQ ID NO: 53123 - protein, 13 aa, Homo Sapiens
QAPATEEQEAASS

SEQ ID NO: 53124 - protein, 13 aa, Homo Sapiens
APATEEQEAASSS

SEQ ID NO: 53125 - protein, 13 aa, Homo Sapiens
PATEEQEAASSSS

SEQ ID NO: 53126 - protein, 13 aa, Homo Sapiens
ATEEQEAASSSST

SEQ ID NO: 53127 - protein, 13 aa, Homo Sapiens
TEEQEAASSSSTL

SEQ ID NO: 53128 - protein, 13 aa, Homo Sapiens
EEQEAASSSSTLV

SEQ ID NO: 53129 - protein, 13 aa, Homo Sapiens
EQEAASSSSTLVE

SEQ ID NO: 53130 - protein, 13 aa, Homo Sapiens
QEAASSSSTLVEV

SEQ ID NO: 53131 - protein, 13 aa, Homo Sapiens
EAASSSSTLVEVT

SEQ ID NO: 53132 - protein, 13 aa, Homo Sapiens
AASSSSTLVEVTL

SEQ ID NO: 53133 - protein, 13 aa, Homo Sapiens
ASSSSTLVEVTLG

SEQ ID NO: 53134 - protein, 13 aa, Homo Sapiens
SSSSTLVEVTLGE

SEQ ID NO: 53135 - protein, 13 aa, Homo Sapiens
SSSTLVEVTLGEV

SEQ ID NO: 53136 - protein, 13 aa, Homo Sapiens
SSTLVEVTLGEVP

SEQ ID NO: 53137 - protein, 13 aa, Homo Sapiens
STLVEVTLGEVPA

SEQ ID NO: 53138 - protein, 13 aa, Homo Sapiens
TLVEVTLGEVPAA

SEQ ID NO: 53139 - protein, 13 aa, Homo Sapiens
LVEVTLGEVPAAE

SEQ ID NO: 53140 - protein, 13 aa, Homo Sapiens
VEVTLGEVPAAES

SEQ ID NO: 53141 - protein, 13 aa, Homo Sapiens
EVTLGEVPAAESP

SEQ ID NO: 53142 - protein, 13 aa, Homo Sapiens
VTLGEVPAAESPD

SEQ ID NO: 53143 - protein, 13 aa, Homo Sapiens
TLGEVPAAESPDP

SEQ ID NO: 53144 - protein, 13 aa, Homo Sapiens
LGEVPAAESPDPP

SEQ ID NO: 53145 - protein, 13 aa, Homo Sapiens
GEVPAAESPDPPQ

SEQ ID NO: 53146 - protein, 13 aa, Homo Sapiens
EVPAAESPDPPQS

SEQ ID NO: 53147 - protein, 13 aa, Homo Sapiens
VPAAESPDPPQSP

SEQ ID NO: 53148 - protein, 13 aa, Homo Sapiens
PAAESPDPPQSPQ

SEQ ID NO: 53149 - protein, 13 aa, Homo Sapiens
AAESPDPPQSPQG

SEQ ID NO: 53150 - protein, 13 aa, Homo Sapiens
AESPDPPQSPQGA

SEQ ID NO: 53151 - protein, 13 aa, Homo Sapiens
ESPDPPQSPQGAS

SEQ ID NO: 53152 - protein, 13 aa, Homo Sapiens
SPDPPQSPQGASS

SEQ ID NO: 53153 - protein, 13 aa, Homo Sapiens
PDPPQSPQGASSL

SEQ ID NO: 53154 - protein, 13 aa, Homo Sapiens
DPPQSPQGASSLP

SEQ ID NO: 53155 - protein, 13 aa, Homo Sapiens
PPQSPQGASSLPT

SEQ ID NO: 53156 - protein, 13 aa, Homo Sapiens
PQSPQGASSLPTT

SEQ ID NO: 53157 - protein, 13 aa, Homo Sapiens
QSPQGASSLPTTM

SEQ ID NO: 53158 - protein, 13 aa, Homo Sapiens
SPQGASSLPTTMN

SEQ ID NO: 53159 - protein, 13 aa, Homo Sapiens
PQGASSLPTTMNY

SEQ ID NO: 53160 - protein, 13 aa, Homo Sapiens
QGASSLPTTMNYP

SEQ ID NO: 53161 - protein, 13 aa, Homo Sapiens
GASSLPTTMNYPL

SEQ ID NO: 53162 - protein, 13 aa, Homo Sapiens
ASSLPTTMNYPLW

SEQ ID NO: 53163 - protein, 13 aa, Homo Sapiens
SSLPTTMNYPLWS

SEQ ID NO: 53164 - protein, 13 aa, Homo Sapiens
SLPTTMNYPLWSQ

SEQ ID NO: 53165 - protein, 13 aa, Homo Sapiens
LPTTMNYPLWSQS

SEQ ID NO: 53166 - protein, 13 aa, Homo Sapiens
PTTMNYPLWSQSY

SEQ ID NO: 53167 - protein, 13 aa, Homo Sapiens
TTMNYPLWSQSYE

SEQ ID NO: 53168 - protein, 13 aa, Homo Sapiens
TMNYPLWSQSYED

SEQ ID NO: 53169 - protein, 13 aa, Homo Sapiens
MNYPLWSQSYEDS

SEQ ID NO: 53170 - protein, 13 aa, Homo Sapiens
NYPLWSQSYEDSS

SEQ ID NO: 53171 - protein, 13 aa, Homo Sapiens
YPLWSQSYEDSSN

SEQ ID NO: 53172 - protein, 13 aa, Homo Sapiens
PLWSQSYEDSSNQ

SEQ ID NO: 53173 - protein, 13 aa, Homo Sapiens
LWSQSYEDSSNQE

SEQ ID NO: 53174 - protein, 13 aa, Homo Sapiens
WSQSYEDSSNQEE

SEQ ID NO: 53175 - protein, 13 aa, Homo Sapiens
SQSYEDSSNQEEE

SEQ ID NO: 53176 - protein, 13 aa, Homo Sapiens
QSYEDSSNQEEEG

SEQ ID NO: 53177 - protein, 13 aa, Homo Sapiens
SYEDSSNQEEEGP

SEQ ID NO: 53178 - protein, 13 aa, Homo Sapiens
YEDSSNQEEEGPS

SEQ ID NO: 53179 - protein, 13 aa, Homo Sapiens
EDSSNQEEEGPST

SEQ ID NO: 53180 - protein, 13 aa, Homo Sapiens
DSSNQEEEGPSTF

SEQ ID NO: 53181 - protein, 13 aa, Homo Sapiens
SSNQEEEGPSTFP

SEQ ID NO: 53182 - protein, 13 aa, Homo Sapiens
SNQEEEGPSTFPD

SEQ ID NO: 53183 - protein, 13 aa, Homo Sapiens
NQEEEGPSTFPDL

SEQ ID NO: 53184 - protein, 13 aa, Homo Sapiens
QEEEGPSTFPDLE

SEQ ID NO: 53185 - protein, 13 aa, Homo Sapiens
EEEGPSTFPDLES

SEQ ID NO: 53186 - protein, 13 aa, Homo Sapiens
EEGPSTFPDLESE

SEQ ID NO: 53187 - protein, 13 aa, Homo Sapiens
EGPSTFPDLESEF

SEQ ID NO: 53188 - protein, 13 aa, Homo Sapiens
GPSTFPDLESEFQ

SEQ ID NO: 53189 - protein, 13 aa, Homo Sapiens
PSTFPDLESEFQA

SEQ ID NO: 53190 - protein, 13 aa, Homo Sapiens
STFPDLESEFQAA

SEQ ID NO: 53191 - protein, 13 aa, Homo Sapiens
TFPDLESEFQAAL

SEQ ID NO: 53192 - protein, 13 aa, Homo Sapiens
FPDLESEFQAALS

SEQ ID NO: 53193 - protein, 13 aa, Homo Sapiens
PDLESEFQAALSR

SEQ ID NO: 53194 - protein, 13 aa, Homo Sapiens
DLESEFQAALSRK

SEQ ID NO: 53195 - protein, 13 aa, Homo Sapiens
LESEFQAALSRKV

SEQ ID NO: 53196 - protein, 13 aa, Homo Sapiens
ESEFQAALSRKVA

SEQ ID NO: 53197 - protein, 13 aa, Homo Sapiens
SEFQAALSRKVAK

SEQ ID NO: 53198 - protein, 13 aa, Homo Sapiens
EFQAALSRKVAKL

SEQ ID NO: 53199 - protein, 13 aa, Homo Sapiens
FQAALSRKVAKLV

SEQ ID NO: 53200 - protein, 13 aa, Homo Sapiens
QAALSRKVAKLVH

SEQ ID NO: 53201 - protein, 13 aa, Homo Sapiens
AALSRKVAKLVHF

SEQ ID NO: 53202 - protein, 13 aa, Homo Sapiens
ALSRKVAKLVHFL

SEQ ID NO: 53203 - protein, 13 aa, Homo Sapiens
LSRKVAKLVHFLL

SEQ ID NO: 53204 - protein, 13 aa, Homo Sapiens
SRKVAKLVHFLLL

SEQ ID NO: 53205 - protein, 13 aa, Homo Sapiens
RKVAKLVHFLLLK

SEQ ID NO: 53206 - protein, 13 aa, Homo Sapiens
KVAKLVHFLLLKY

SEQ ID NO: 53207 - protein, 13 aa, Homo Sapiens
VAKLVHFLLLKYR

SEQ ID NO: 53208 - protein, 13 aa, Homo Sapiens
AKLVHFLLLKYRA

SEQ ID NO: 53209 - protein, 13 aa, Homo Sapiens
KLVHFLLLKYRAR

SEQ ID NO: 53210 - protein, 13 aa, Homo Sapiens
LVHFLLLKYRARE

SEQ ID NO: 53211 - protein, 13 aa, Homo Sapiens
VHFLLLKYRAREP

SEQ ID NO: 53212 - protein, 13 aa, Homo Sapiens
HFLLLKYRAREPV

SEQ ID NO: 53213 - protein, 13 aa, Homo Sapiens
FLLLKYRAREPVT

SEQ ID NO: 53214 - protein, 13 aa, Homo Sapiens
LLLKYRAREPVTK

SEQ ID NO: 53215 - protein, 13 aa, Homo Sapiens
LLKYRAREPVTKA

SEQ ID NO: 53216 - protein, 13 aa, Homo Sapiens
LKYRAREPVTKAE

SEQ ID NO: 53217 - protein, 13 aa, Homo Sapiens
KYRAREPVTKAEM

SEQ ID NO: 53218 - protein, 13 aa, Homo Sapiens
YRAREPVTKAEML

SEQ ID NO: 53219 - protein, 13 aa, Homo Sapiens
RAREPVTKAEMLG

SEQ ID NO: 53220 - protein, 13 aa, Homo Sapiens
AREPVTKAEMLGS

SEQ ID NO: 53221 - protein, 13 aa, Homo Sapiens
REPVTKAEMLGSV

SEQ ID NO: 53222 - protein, 13 aa, Homo Sapiens
EPVTKAEMLGSVV

SEQ ID NO: 53223 - protein, 13 aa, Homo Sapiens
PVTKAEMLGSVVG

SEQ ID NO: 53224 - protein, 13 aa, Homo Sapiens
VTKAEMLGSVVGN

SEQ ID NO: 53225 - protein, 13 aa, Homo Sapiens
TKAEMLGSVVGNW

SEQ ID NO: 53226 - protein, 13 aa, Homo Sapiens
KAEMLGSVVGNWQ

SEQ ID NO: 53227 - protein, 13 aa, Homo Sapiens
AEMLGSVVGNWQY

SEQ ID NO: 53228 - protein, 13 aa, Homo Sapiens
EMLGSVVGNWQYF

SEQ ID NO: 53229 - protein, 13 aa, Homo Sapiens
MLGSVVGNWQYFF

SEQ ID NO: 53230 - protein, 13 aa, Homo Sapiens
LGSVVGNWQYFFP

SEQ ID NO: 53231 - protein, 13 aa, Homo Sapiens
GSVVGNWQYFFPV

SEQ ID NO: 53232 - protein, 13 aa, Homo Sapiens
SVVGNWQYFFPVI

SEQ ID NO: 53233 - protein, 13 aa, Homo Sapiens
VVGNWQYFFPVIF

SEQ ID NO: 53234 - protein, 13 aa, Homo Sapiens
VGNWQYFFPVIFS

SEQ ID NO: 53235 - protein, 13 aa, Homo Sapiens
GNWQYFFPVIFSK

SEQ ID NO: 53236 - protein, 13 aa, Homo Sapiens
NWQYFFPVIFSKA

SEQ ID NO: 53237 - protein, 13 aa, Homo Sapiens
WQYFFPVIFSKAS

SEQ ID NO: 53238 - protein, 13 aa, Homo Sapiens
QYFFPVIFSKASD

SEQ ID NO: 53239 - protein, 13 aa, Homo Sapiens
YFFPVIFSKASDS

SEQ ID NO: 53240 - protein, 13 aa, Homo Sapiens
FFPVIFSKASDSL

SEQ ID NO: 53241 - protein, 13 aa, Homo Sapiens
FPVIFSKASDSLQ

SEQ ID NO: 53242 - protein, 13 aa, Homo Sapiens
PVIFSKASDSLQL

SEQ ID NO: 53243 - protein, 13 aa, Homo Sapiens
VIFSKASDSLQLV

SEQ ID NO: 53244 - protein, 13 aa, Homo Sapiens
IFSKASDSLQLVF

SEQ ID NO: 53245 - protein, 13 aa, Homo Sapiens
FSKASDSLQLVFG

SEQ ID NO: 53246 - protein, 13 aa, Homo Sapiens
SKASDSLQLVFGI

SEQ ID NO: 53247 - protein, 13 aa, Homo Sapiens
KASDSLQLVFGIE

SEQ ID NO: 53248 - protein, 13 aa, Homo Sapiens
ASDSLQLVFGIEL

SEQ ID NO: 53249 - protein, 13 aa, Homo Sapiens
SDSLQLVFGIELM

SEQ ID NO: 53250 - protein, 13 aa, Homo Sapiens
DSLQLVFGIELME

SEQ ID NO: 53251 - protein, 13 aa, Homo Sapiens
SLQLVFGIELMEV

SEQ ID NO: 53252 - protein, 13 aa, Homo Sapiens
LQLVFGIELMEVD

SEQ ID NO: 53253 - protein, 13 aa, Homo Sapiens
QLVFGIELMEVDP

SEQ ID NO: 53254 - protein, 13 aa, Homo Sapiens
LVFGIELMEVDPI

SEQ ID NO: 53255 - protein, 13 aa, Homo Sapiens
VFGIELMEVDPIG

SEQ ID NO: 53256 - protein, 13 aa, Homo Sapiens
FGIELMEVDPIGH

SEQ ID NO: 53257 - protein, 13 aa, Homo Sapiens
GIELMEVDPIGHV

SEQ ID NO: 53258 - protein, 13 aa, Homo Sapiens
IELMEVDPIGHVY

SEQ ID NO: 53259 - protein, 13 aa, Homo Sapiens
ELMEVDPIGHVYI

SEQ ID NO: 53260 - protein, 13 aa, Homo Sapiens
LMEVDPIGHVYIF

SEQ ID NO: 53261 - protein, 13 aa, Homo Sapiens
MEVDPIGHVYIFA

SEQ ID NO: 53262 - protein, 13 aa, Homo Sapiens
EVDPIGHVYIFAT

SEQ ID NO: 53263 - protein, 13 aa, Homo Sapiens
VDPIGHVYIFATC

SEQ ID NO: 53264 - protein, 13 aa, Homo Sapiens
DPIGHVYIFATCL

SEQ ID NO: 53265 - protein, 13 aa, Homo Sapiens
PIGHVYIFATCLG

SEQ ID NO: 53266 - protein, 13 aa, Homo Sapiens
IGHVYIFATCLGL

SEQ ID NO: 53267 - protein, 13 aa, Homo Sapiens
GHVYIFATCLGLS

SEQ ID NO: 53268 - protein, 13 aa, Homo Sapiens
HVYIFATCLGLSY

SEQ ID NO: 53269 - protein, 13 aa, Homo Sapiens
VYIFATCLGLSYD

SEQ ID NO: 53270 - protein, 13 aa, Homo Sapiens
YIFATCLGLSYDG

SEQ ID NO: 53271 - protein, 13 aa, Homo Sapiens
IFATCLGLSYDGL

SEQ ID NO: 53272 - protein, 13 aa, Homo Sapiens
FATCLGLSYDGLL

SEQ ID NO: 53273 - protein, 13 aa, Homo Sapiens
ATCLGLSYDGLLG

SEQ ID NO: 53274 - protein, 13 aa, Homo Sapiens
TCLGLSYDGLLGD

SEQ ID NO: 53275 - protein, 13 aa, Homo Sapiens
CLGLSYDGLLGDN

SEQ ID NO: 53276 - protein, 13 aa, Homo Sapiens
LGLSYDGLLGDNQ

SEQ ID NO: 53277 - protein, 13 aa, Homo Sapiens
GLSYDGLLGDNQI

SEQ ID NO: 53278 - protein, 13 aa, Homo Sapiens
LSYDGLLGDNQIM

SEQ ID NO: 53279 - protein, 13 aa, Homo Sapiens
SYDGLLGDNQIMP

SEQ ID NO: 53280 - protein, 13 aa, Homo Sapiens
YDGLLGDNQIMPK

SEQ ID NO: 53281 - protein, 13 aa, Homo Sapiens
DGLLGDNQIMPKT

SEQ ID NO: 53282 - protein, 13 aa, Homo Sapiens
GLLGDNQIMPKTG

SEQ ID NO: 53283 - protein, 13 aa, Homo Sapiens
LLGDNQIMPKTGF

SEQ ID NO: 53284 - protein, 13 aa, Homo Sapiens
LGDNQIMPKTGFL

SEQ ID NO: 53285 - protein, 13 aa, Homo Sapiens
GDNQIMPKTGFLI

SEQ ID NO: 53286 - protein, 13 aa, Homo Sapiens
DNQIMPKTGFLII

SEQ ID NO: 53287 - protein, 13 aa, Homo Sapiens
NQIMPKTGFLIII

SEQ ID NO: 53288 - protein, 13 aa, Homo Sapiens
QIMPKTGFLIIIL

SEQ ID NO: 53289 - protein, 13 aa, Homo Sapiens
IMPKTGFLIIILA

SEQ ID NO: 53290 - protein, 13 aa, Homo Sapiens
MPKTGFLIIILAI

SEQ ID NO: 53291 - protein, 13 aa, Homo Sapiens
PKTGFLIIILAII

SEQ ID NO: 53292 - protein, 13 aa, Homo Sapiens
KTGFLIIILAIIA

SEQ ID NO: 53293 - protein, 13 aa, Homo Sapiens
TGFLIIILAIIAK

SEQ ID NO: 53294 - protein, 13 aa, Homo Sapiens
GFLIIILAIIAKE

SEQ ID NO: 53295 - protein, 13 aa, Homo Sapiens
FLIIILAIIAKEG

SEQ ID NO: 53296 - protein, 13 aa, Homo Sapiens
LIIILAIIAKEGD

SEQ ID NO: 53297 - protein, 13 aa, Homo Sapiens
IIILAIIAKEGDC

SEQ ID NO: 53298 - protein, 13 aa, Homo Sapiens
IILAIIAKEGDCA

SEQ ID NO: 53299 - protein, 13 aa, Homo Sapiens
ILAIIAKEGDCAP

SEQ ID NO: 53300 - protein, 13 aa, Homo Sapiens
LAIIAKEGDCAPE

SEQ ID NO: 53301 - protein, 13 aa, Homo Sapiens
AIIAKEGDCAPEE

SEQ ID NO: 53302 - protein, 13 aa, Homo Sapiens
IIAKEGDCAPEEK

SEQ ID NO: 53303 - protein, 13 aa, Homo Sapiens
IAKEGDCAPEEKI

SEQ ID NO: 53304 - protein, 13 aa, Homo Sapiens
AKEGDCAPEEKIW

SEQ ID NO: 53305 - protein, 13 aa, Homo Sapiens
KEGDCAPEEKIWE

SEQ ID NO: 53306 - protein, 13 aa, Homo Sapiens
EGDCAPEEKIWEE

SEQ ID NO: 53307 - protein, 13 aa, Homo Sapiens
GDCAPEEKIWEEL

SEQ ID NO: 53308 - protein, 13 aa, Homo Sapiens
DCAPEEKIWEELS

SEQ ID NO: 53309 - protein, 13 aa, Homo Sapiens
CAPEEKIWEELSV

SEQ ID NO: 53310 - protein, 13 aa, Homo Sapiens
APEEKIWEELSVL

SEQ ID NO: 53311 - protein, 13 aa, Homo Sapiens
PEEKIWEELSVLE

SEQ ID NO: 53312 - protein, 13 aa, Homo Sapiens
EEKIWEELSVLEV

SEQ ID NO: 53313 - protein, 13 aa, Homo Sapiens
EKIWEELSVLEVF

SEQ ID NO: 53314 - protein, 13 aa, Homo Sapiens
KIWEELSVLEVFE

SEQ ID NO: 53315 - protein, 13 aa, Homo Sapiens
IWEELSVLEVFEG

SEQ ID NO: 53316 - protein, 13 aa, Homo Sapiens
WEELSVLEVFEGR

SEQ ID NO: 53317 - protein, 13 aa, Homo Sapiens
EELSVLEVFEGRE

SEQ ID NO: 53318 - protein, 13 aa, Homo Sapiens
ELSVLEVFEGRED

SEQ ID NO: 53319 - protein, 13 aa, Homo Sapiens
LSVLEVFEGREDS

SEQ ID NO: 53320 - protein, 13 aa, Homo Sapiens
SVLEVFEGREDSI

SEQ ID NO: 53321 - protein, 13 aa, Homo Sapiens
VLEVFEGREDSIF

SEQ ID NO: 53322 - protein, 13 aa, Homo Sapiens
LEVFEGREDSIFG

SEQ ID NO: 53323 - protein, 13 aa, Homo Sapiens
EVFEGREDSIFGD

SEQ ID NO: 53324 - protein, 13 aa, Homo Sapiens
VFEGREDSIFGDP

SEQ ID NO: 53325 - protein, 13 aa, Homo Sapiens
FEGREDSIFGDPK

SEQ ID NO: 53326 - protein, 13 aa, Homo Sapiens
EGREDSIFGDPKK

SEQ ID NO: 53327 - protein, 13 aa, Homo Sapiens
GREDSIFGDPKKL

SEQ ID NO: 53328 - protein, 13 aa, Homo Sapiens
REDSIFGDPKKLL

SEQ ID NO: 53329 - protein, 13 aa, Homo Sapiens
EDSIFGDPKKLLT

SEQ ID NO: 53330 - protein, 13 aa, Homo Sapiens
DSIFGDPKKLLTQ

SEQ ID NO: 53331 - protein, 13 aa, Homo Sapiens
SIFGDPKKLLTQY

SEQ ID NO: 53332 - protein, 13 aa, Homo Sapiens
IFGDPKKLLTQYF

SEQ ID NO: 53333 - protein, 13 aa, Homo Sapiens
FGDPKKLLTQYFV

SEQ ID NO: 53334 - protein, 13 aa, Homo Sapiens
GDPKKLLTQYFVQ

SEQ ID NO: 53335 - protein, 13 aa, Homo Sapiens
DPKKLLTQYFVQE

SEQ ID NO: 53336 - protein, 13 aa, Homo Sapiens
PKKLLTQYFVQEN

SEQ ID NO: 53337 - protein, 13 aa, Homo Sapiens
KKLLTQYFVQENY

SEQ ID NO: 53338 - protein, 13 aa, Homo Sapiens
KLLTQYFVQENYL

SEQ ID NO: 53339 - protein, 13 aa, Homo Sapiens
LLTQYFVQENYLE

SEQ ID NO: 53340 - protein, 13 aa, Homo Sapiens
LTQYFVQENYLEY

SEQ ID NO: 53341 - protein, 13 aa, Homo Sapiens
TQYFVQENYLEYR

SEQ ID NO: 53342 - protein, 13 aa, Homo Sapiens
QYFVQENYLEYRQ

SEQ ID NO: 53343 - protein, 13 aa, Homo Sapiens
YFVQENYLEYRQV

SEQ ID NO: 53344 - protein, 13 aa, Homo Sapiens
FVQENYLEYRQVP

SEQ ID NO: 53345 - protein, 13 aa, Homo Sapiens
VQENYLEYRQVPG

SEQ ID NO: 53346 - protein, 13 aa, Homo Sapiens
QENYLEYRQVPGS

SEQ ID NO: 53347 - protein, 13 aa, Homo Sapiens
ENYLEYRQVPGSD

SEQ ID NO: 53348 - protein, 13 aa, Homo Sapiens
NYLEYRQVPGSDP

SEQ ID NO: 53349 - protein, 13 aa, Homo Sapiens
YLEYRQVPGSDPA

SEQ ID NO: 53350 - protein, 13 aa, Homo Sapiens
LEYRQVPGSDPAC

SEQ ID NO: 53351 - protein, 13 aa, Homo Sapiens
EYRQVPGSDPACY

SEQ ID NO: 53352 - protein, 13 aa, Homo Sapiens
YRQVPGSDPACYE

SEQ ID NO: 53353 - protein, 13 aa, Homo Sapiens
RQVPGSDPACYEF

SEQ ID NO: 53354 - protein, 13 aa, Homo Sapiens
QVPGSDPACYEFL

SEQ ID NO: 53355 - protein, 13 aa, Homo Sapiens
VPGSDPACYEFLW

SEQ ID NO: 53356 - protein, 13 aa, Homo Sapiens
PGSDPACYEFLWG

SEQ ID NO: 53357 - protein, 13 aa, Homo Sapiens
GSDPACYEFLWGP

SEQ ID NO: 53358 - protein, 13 aa, Homo Sapiens
SDPACYEFLWGPR

SEQ ID NO: 53359 - protein, 13 aa, Homo Sapiens
DPACYEFLWGPRA

SEQ ID NO: 53360 - protein, 13 aa, Homo Sapiens
PACYEFLWGPRAL

SEQ ID NO: 53361 - protein, 13 aa, Homo Sapiens
ACYEFLWGPRALI

SEQ ID NO: 53362 - protein, 13 aa, Homo Sapiens
CYEFLWGPRALIE

SEQ ID NO: 53363 - protein, 13 aa, Homo Sapiens
YEFLWGPRALIET

SEQ ID NO: 53364 - protein, 13 aa, Homo Sapiens
EFLWGPRALIETS

SEQ ID NO: 53365 - protein, 13 aa, Homo Sapiens
FLWGPRALIETSY

SEQ ID NO: 53366 - protein, 13 aa, Homo Sapiens
LWGPRALIETSYV

SEQ ID NO: 53367 - protein, 13 aa, Homo Sapiens
WGPRALIETSYVK

SEQ ID NO: 53368 - protein, 13 aa, Homo Sapiens
GPRALIETSYVKV

SEQ ID NO: 53369 - protein, 13 aa, Homo Sapiens
PRALIETSYVKVL

SEQ ID NO: 53370 - protein, 13 aa, Homo Sapiens
RALIETSYVKVLH

SEQ ID NO: 53371 - protein, 13 aa, Homo Sapiens
ALIETSYVKVLHH

SEQ ID NO: 53372 - protein, 13 aa, Homo Sapiens
LIETSYVKVLHHM

SEQ ID NO: 53373 - protein, 13 aa, Homo Sapiens
IETSYVKVLHHMV

SEQ ID NO: 53374 - protein, 13 aa, Homo Sapiens
ETSYVKVLHHMVK

SEQ ID NO: 53375 - protein, 13 aa, Homo Sapiens
TSYVKVLHHMVKI

SEQ ID NO: 53376 - protein, 13 aa, Homo Sapiens
SYVKVLHHMVKIS

SEQ ID NO: 53377 - protein, 13 aa, Homo Sapiens
YVKVLHHMVKISG

SEQ ID NO: 53378 - protein, 13 aa, Homo Sapiens
VKVLHHMVKISGG

SEQ ID NO: 53379 - protein, 13 aa, Homo Sapiens
KVLHHMVKISGGP

SEQ ID NO: 53380 - protein, 13 aa, Homo Sapiens
VLHHMVKISGGPR

SEQ ID NO: 53381 - protein, 13 aa, Homo Sapiens
LHHMVKISGGPRI

SEQ ID NO: 53382 - protein, 13 aa, Homo Sapiens
HHMVKISGGPRIS

SEQ ID NO: 53383 - protein, 13 aa, Homo Sapiens
HMVKISGGPRISY

SEQ ID NO: 53384 - protein, 13 aa, Homo Sapiens
MVKISGGPRISYP

SEQ ID NO: 53385 - protein, 13 aa, Homo Sapiens
VKISGGPRISYPL

SEQ ID NO: 53386 - protein, 13 aa, Homo Sapiens
KISGGPRISYPLL

SEQ ID NO: 53387 - protein, 13 aa, Homo Sapiens
ISGGPRISYPLLH

SEQ ID NO: 53388 - protein, 13 aa, Homo Sapiens
SGGPRISYPLLHE

SEQ ID NO: 53389 - protein, 13 aa, Homo Sapiens
GGPRISYPLLHEW

SEQ ID NO: 53390 - protein, 13 aa, Homo Sapiens
GPRISYPLLHEWA

SEQ ID NO: 53391 - protein, 13 aa, Homo Sapiens
PRISYPLLHEWAL

SEQ ID NO: 53392 - protein, 13 aa, Homo Sapiens
RISYPLLHEWALR

SEQ ID NO: 53393 - protein, 13 aa, Homo Sapiens
ISYPLLHEWALRE

SEQ ID NO: 53394 - protein, 13 aa, Homo Sapiens
SYPLLHEWALREG

SEQ ID NO: 53395 - protein, 13 aa, Homo Sapiens
YPLLHEWALREGE

SEQ ID NO: 53396 - protein, 13 aa, Homo Sapiens
PLLHEWALREGEE

SEQ ID NO: 53397 - protein, 14 aa, Homo Sapiens
MPLEQRSQHCKPEE

SEQ ID NO: 53398 - protein, 14 aa, Homo Sapiens
PLEQRSQHCKPEEG

SEQ ID NO: 53399 - protein, 14 aa, Homo Sapiens
LEQRSQHCKPEEGL

SEQ ID NO: 53400 - protein, 14 aa, Homo Sapiens
EQRSQHCKPEEGLE

SEQ ID NO: 53401 - protein, 14 aa, Homo Sapiens
QRSQHCKPEEGLEA

SEQ ID NO: 53402 - protein, 14 aa, Homo Sapiens
RSQHCKPEEGLEAR

SEQ ID NO: 53403 - protein, 14 aa, Homo Sapiens
SQHCKPEEGLEARG

SEQ ID NO: 53404 - protein, 14 aa, Homo Sapiens
QHCKPEEGLEARGE

SEQ ID NO: 53405 - protein, 14 aa, Homo Sapiens
HCKPEEGLEARGEA

SEQ ID NO: 53406 - protein, 14 aa, Homo Sapiens
CKPEEGLEARGEAL

SEQ ID NO: 53407 - protein, 14 aa, Homo Sapiens
KPEEGLEARGEALG

SEQ ID NO: 53408 - protein, 14 aa, Homo Sapiens
PEEGLEARGEALGL

SEQ ID NO: 53409 - protein, 14 aa, Homo Sapiens
EEGLEARGEALGLV

SEQ ID NO: 53410 - protein, 14 aa, Homo Sapiens
EGLEARGEALGLVG

SEQ ID NO: 53411 - protein, 14 aa, Homo Sapiens
GLEARGEALGLVGA

SEQ ID NO: 53412 - protein, 14 aa, Homo Sapiens
LEARGEALGLVGAQ

SEQ ID NO: 53413 - protein, 14 aa, Homo Sapiens
EARGEALGLVGAQA

SEQ ID NO: 53414 - protein, 14 aa, Homo Sapiens
ARGEALGLVGAQAP

SEQ ID NO: 53415 - protein, 14 aa, Homo Sapiens
RGEALGLVGAQAPA

SEQ ID NO: 53416 - protein, 14 aa, Homo Sapiens
GEALGLVGAQAPAT

SEQ ID NO: 53417 - protein, 14 aa, Homo Sapiens
EALGLVGAQAPATE

SEQ ID NO: 53418 - protein, 14 aa, Homo Sapiens
ALGLVGAQAPATEE

SEQ ID NO: 53419 - protein, 14 aa, Homo Sapiens
LGLVGAQAPATEEQ

SEQ ID NO: 53420 - protein, 14 aa, Homo Sapiens
GLVGAQAPATEEQE

SEQ ID NO: 53421 - protein, 14 aa, Homo Sapiens
LVGAQAPATEEQEA

SEQ ID NO: 53422 - protein, 14 aa, Homo Sapiens
VGAQAPATEEQEAA

SEQ ID NO: 53423 - protein, 14 aa, Homo Sapiens
GAQAPATEEQEAAS

SEQ ID NO: 53424 - protein, 14 aa, Homo Sapiens
AQAPATEEQEAASS

SEQ ID NO: 53425 - protein, 14 aa, Homo Sapiens
QAPATEEQEAASSS

SEQ ID NO: 53426 - protein, 14 aa, Homo Sapiens
APATEEQEAASSSS

SEQ ID NO: 53427 - protein, 14 aa, Homo Sapiens
PATEEQEAASSSST

SEQ ID NO: 53428 - protein, 14 aa, Homo Sapiens
ATEEQEAASSSSTL

SEQ ID NO: 53429 - protein, 14 aa, Homo Sapiens
TEEQEAASSSSTLV

SEQ ID NO: 53430 - protein, 14 aa, Homo Sapiens
EEQEAASSSSTLVE

SEQ ID NO: 53431 - protein, 14 aa, Homo Sapiens
EQEAASSSSTLVEV

SEQ ID NO: 53432 - protein, 14 aa, Homo Sapiens
QEAASSSSTLVEVT

SEQ ID NO: 53433 - protein, 14 aa, Homo Sapiens
EAASSSSTLVEVTL

SEQ ID NO: 53434 - protein, 14 aa, Homo Sapiens
AASSSSTLVEVTLG

SEQ ID NO: 53435 - protein, 14 aa, Homo Sapiens
ASSSSTLVEVTLGE

SEQ ID NO: 53436 - protein, 14 aa, Homo Sapiens
SSSSTLVEVTLGEV

SEQ ID NO: 53437 - protein, 14 aa, Homo Sapiens
SSSTLVEVTLGEVP

SEQ ID NO: 53438 - protein, 14 aa, Homo Sapiens
SSTLVEVTLGEVPA

SEQ ID NO: 53439 - protein, 14 aa, Homo Sapiens
STLVEVTLGEVPAA

SEQ ID NO: 53440 - protein, 14 aa, Homo Sapiens
TLVEVTLGEVPAAE

SEQ ID NO: 53441 - protein, 14 aa, Homo Sapiens
LVEVTLGEVPAAES

SEQ ID NO: 53442 - protein, 14 aa, Homo Sapiens
VEVTLGEVPAAESP

SEQ ID NO: 53443 - protein, 14 aa, Homo Sapiens
EVTLGEVPAAESPD

SEQ ID NO: 53444 - protein, 14 aa, Homo Sapiens
VTLGEVPAAESPDP

SEQ ID NO: 53445 - protein, 14 aa, Homo Sapiens
TLGEVPAAESPDPP

SEQ ID NO: 53446 - protein, 14 aa, Homo Sapiens
LGEVPAAESPDPPQ

SEQ ID NO: 53447 - protein, 14 aa, Homo Sapiens
GEVPAAESPDPPQS

SEQ ID NO: 53448 - protein, 14 aa, Homo Sapiens
EVPAAESPDPPQSP

SEQ ID NO: 53449 - protein, 14 aa, Homo Sapiens
VPAAESPDPPQSPQ

SEQ ID NO: 53450 - protein, 14 aa, Homo Sapiens
PAAESPDPPQSPQG

SEQ ID NO: 53451 - protein, 14 aa, Homo Sapiens
AAESPDPPQSPQGA

SEQ ID NO: 53452 - protein, 14 aa, Homo Sapiens
AESPDPPQSPQGAS

SEQ ID NO: 53453 - protein, 14 aa, Homo Sapiens
ESPDPPQSPQGASS

SEQ ID NO: 53454 - protein, 14 aa, Homo Sapiens
SPDPPQSPQGASSL

SEQ ID NO: 53455 - protein, 14 aa, Homo Sapiens
PDPPQSPQGASSLP

SEQ ID NO: 53456 - protein, 14 aa, Homo Sapiens
DPPQSPQGASSLPT

SEQ ID NO: 53457 - protein, 14 aa, Homo Sapiens
PPQSPQGASSLPTT

SEQ ID NO: 53458 - protein, 14 aa, Homo Sapiens
PQSPQGASSLPTTM

SEQ ID NO: 53459 - protein, 14 aa, Homo Sapiens
QSPQGASSLPTTMN

SEQ ID NO: 53460 - protein, 14 aa, Homo Sapiens
SPQGASSLPTTMNY

SEQ ID NO: 53461 - protein, 14 aa, Homo Sapiens
PQGASSLPTTMNYP

SEQ ID NO: 53462 - protein, 14 aa, Homo Sapiens
QGASSLPTTMNYPL

SEQ ID NO: 53463 - protein, 14 aa, Homo Sapiens
GASSLPTTMNYPLW

SEQ ID NO: 53464 - protein, 14 aa, Homo Sapiens
ASSLPTTMNYPLWS

SEQ ID NO: 53465 - protein, 14 aa, Homo Sapiens
SSLPTTMNYPLWSQ

SEQ ID NO: 53466 - protein, 14 aa, Homo Sapiens
SLPTTMNYPLWSQS

SEQ ID NO: 53467 - protein, 14 aa, Homo Sapiens
LPTTMNYPLWSQSY

SEQ ID NO: 53468 - protein, 14 aa, Homo Sapiens
PTTMNYPLWSQSYE

SEQ ID NO: 53469 - protein, 14 aa, Homo Sapiens
TTMNYPLWSQSYED

SEQ ID NO: 53470 - protein, 14 aa, Homo Sapiens
TMNYPLWSQSYEDS

SEQ ID NO: 53471 - protein, 14 aa, Homo Sapiens
MNYPLWSQSYEDSS

SEQ ID NO: 53472 - protein, 14 aa, Homo Sapiens
NYPLWSQSYEDSSN

SEQ ID NO: 53473 - protein, 14 aa, Homo Sapiens
YPLWSQSYEDSSNQ

SEQ ID NO: 53474 - protein, 14 aa, Homo Sapiens
PLWSQSYEDSSNQE

SEQ ID NO: 53475 - protein, 14 aa, Homo Sapiens
LWSQSYEDSSNQEE

SEQ ID NO: 53476 - protein, 14 aa, Homo Sapiens
WSQSYEDSSNQEEE

SEQ ID NO: 53477 - protein, 14 aa, Homo Sapiens
SQSYEDSSNQEEEG

SEQ ID NO: 53478 - protein, 14 aa, Homo Sapiens
QSYEDSSNQEEEGP

SEQ ID NO: 53479 - protein, 14 aa, Homo Sapiens
SYEDSSNQEEEGPS

SEQ ID NO: 53480 - protein, 14 aa, Homo Sapiens
YEDSSNQEEEGPST

SEQ ID NO: 53481 - protein, 14 aa, Homo Sapiens
EDSSNQEEEGPSTF

SEQ ID NO: 53482 - protein, 14 aa, Homo Sapiens
DSSNQEEEGPSTFP

SEQ ID NO: 53483 - protein, 14 aa, Homo Sapiens
SSNQEEEGPSTFPD

SEQ ID NO: 53484 - protein, 14 aa, Homo Sapiens
SNQEEEGPSTFPDL

SEQ ID NO: 53485 - protein, 14 aa, Homo Sapiens
NQEEEGPSTFPDLE

SEQ ID NO: 53486 - protein, 14 aa, Homo Sapiens
QEEEGPSTFPDLES

SEQ ID NO: 53487 - protein, 14 aa, Homo Sapiens
EEEGPSTFPDLESE

SEQ ID NO: 53488 - protein, 14 aa, Homo Sapiens
EEGPSTFPDLESEF

SEQ ID NO: 53489 - protein, 14 aa, Homo Sapiens
EGPSTFPDLESEFQ

SEQ ID NO: 53490 - protein, 14 aa, Homo Sapiens
GPSTFPDLESEFQA

SEQ ID NO: 53491 - protein, 14 aa, Homo Sapiens
PSTFPDLESEFQAA

SEQ ID NO: 53492 - protein, 14 aa, Homo Sapiens
STFPDLESEFQAAL

SEQ ID NO: 53493 - protein, 14 aa, Homo Sapiens
TFPDLESEFQAALS

SEQ ID NO: 53494 - protein, 14 aa, Homo Sapiens
FPDLESEFQAALSR

SEQ ID NO: 53495 - protein, 14 aa, Homo Sapiens
PDLESEFQAALSRK

SEQ ID NO: 53496 - protein, 14 aa, Homo Sapiens
DLESEFQAALSRKV

SEQ ID NO: 53497 - protein, 14 aa, Homo Sapiens
LESEFQAALSRKVA

SEQ ID NO: 53498 - protein, 14 aa, Homo Sapiens
ESEFQAALSRKVAK

SEQ ID NO: 53499 - protein, 14 aa, Homo Sapiens
SEFQAALSRKVAKL

SEQ ID NO: 53500 - protein, 14 aa, Homo Sapiens
EFQAALSRKVAKLV

SEQ ID NO: 53501 - protein, 14 aa, Homo Sapiens
FQAALSRKVAKLVH

SEQ ID NO: 53502 - protein, 14 aa, Homo Sapiens
QAALSRKVAKLVHF

SEQ ID NO: 53503 - protein, 14 aa, Homo Sapiens
AALSRKVAKLVHFL

SEQ ID NO: 53504 - protein, 14 aa, Homo Sapiens
ALSRKVAKLVHFLL

SEQ ID NO: 53505 - protein, 14 aa, Homo Sapiens
LSRKVAKLVHFLLL

SEQ ID NO: 53506 - protein, 14 aa, Homo Sapiens
SRKVAKLVHFLLLK

SEQ ID NO: 53507 - protein, 14 aa, Homo Sapiens
RKVAKLVHFLLLKY

SEQ ID NO: 53508 - protein, 14 aa, Homo Sapiens
KVAKLVHFLLLKYR

SEQ ID NO: 53509 - protein, 14 aa, Homo Sapiens
VAKLVHFLLLKYRA

SEQ ID NO: 53510 - protein, 14 aa, Homo Sapiens
AKLVHFLLLKYRAR

SEQ ID NO: 53511 - protein, 14 aa, Homo Sapiens
KLVHFLLLKYRARE

SEQ ID NO: 53512 - protein, 14 aa, Homo Sapiens
LVHFLLLKYRAREP

SEQ ID NO: 53513 - protein, 14 aa, Homo Sapiens
VHFLLLKYRAREPV

SEQ ID NO: 53514 - protein, 14 aa, Homo Sapiens
HFLLLKYRAREPVT

SEQ ID NO: 53515 - protein, 14 aa, Homo Sapiens
FLLLKYRAREPVTK

SEQ ID NO: 53516 - protein, 14 aa, Homo Sapiens
LLLKYRAREPVTKA

SEQ ID NO: 53517 - protein, 14 aa, Homo Sapiens
LLKYRAREPVTKAE

SEQ ID NO: 53518 - protein, 14 aa, Homo Sapiens
LKYRAREPVTKAEM

SEQ ID NO: 53519 - protein, 14 aa, Homo Sapiens
KYRAREPVTKAEML

SEQ ID NO: 53520 - protein, 14 aa, Homo Sapiens
YRAREPVTKAEMLG

SEQ ID NO: 53521 - protein, 14 aa, Homo Sapiens
RAREPVTKAEMLGS

SEQ ID NO: 53522 - protein, 14 aa, Homo Sapiens
AREPVTKAEMLGSV

SEQ ID NO: 53523 - protein, 14 aa, Homo Sapiens
REPVTKAEMLGSVV

SEQ ID NO: 53524 - protein, 14 aa, Homo Sapiens
EPVTKAEMLGSVVG

SEQ ID NO: 53525 - protein, 14 aa, Homo Sapiens
PVTKAEMLGSVVGN

SEQ ID NO: 53526 - protein, 14 aa, Homo Sapiens
VTKAEMLGSVVGNW

SEQ ID NO: 53527 - protein, 14 aa, Homo Sapiens
TKAEMLGSVVGNWQ

SEQ ID NO: 53528 - protein, 14 aa, Homo Sapiens
KAEMLGSVVGNWQY

SEQ ID NO: 53529 - protein, 14 aa, Homo Sapiens
AEMLGSVVGNWQYF

SEQ ID NO: 53530 - protein, 14 aa, Homo Sapiens
EMLGSVVGNWQYFF

SEQ ID NO: 53531 - protein, 14 aa, Homo Sapiens
MLGSVVGNWQYFFP

SEQ ID NO: 53532 - protein, 14 aa, Homo Sapiens
LGSVVGNWQYFFPV

SEQ ID NO: 53533 - protein, 14 aa, Homo Sapiens
GSVVGNWQYFFPVI

SEQ ID NO: 53534 - protein, 14 aa, Homo Sapiens
SVVGNWQYFFPVIF

SEQ ID NO: 53535 - protein, 14 aa, Homo Sapiens
VVGNWQYFFPVIFS

SEQ ID NO: 53536 - protein, 14 aa, Homo Sapiens
VGNWQYFFPVIFSK

SEQ ID NO: 53537 - protein, 14 aa, Homo Sapiens
GNWQYFFPVIFSKA

SEQ ID NO: 53538 - protein, 14 aa, Homo Sapiens
NWQYFFPVIFSKAS

SEQ ID NO: 53539 - protein, 14 aa, Homo Sapiens
WQYFFPVIFSKASD

SEQ ID NO: 53540 - protein, 14 aa, Homo Sapiens
QYFFPVIFSKASDS

SEQ ID NO: 53541 - protein, 14 aa, Homo Sapiens
YFFPVIFSKASDSL

SEQ ID NO: 53542 - protein, 14 aa, Homo Sapiens
FFPVIFSKASDSLQ

SEQ ID NO: 53543 - protein, 14 aa, Homo Sapiens
FPVIFSKASDSLQL

SEQ ID NO: 53544 - protein, 14 aa, Homo Sapiens
PVIFSKASDSLQLV

SEQ ID NO: 53545 - protein, 14 aa, Homo Sapiens
VIFSKASDSLQLVF

SEQ ID NO: 53546 - protein, 14 aa, Homo Sapiens
IFSKASDSLQLVFG

SEQ ID NO: 53547 - protein, 14 aa, Homo Sapiens
FSKASDSLQLVFGI

SEQ ID NO: 53548 - protein, 14 aa, Homo Sapiens
SKASDSLQLVFGIE

SEQ ID NO: 53549 - protein, 14 aa, Homo Sapiens
KASDSLQLVFGIEL

SEQ ID NO: 53550 - protein, 14 aa, Homo Sapiens
ASDSLQLVFGIELM

SEQ ID NO: 53551 - protein, 14 aa, Homo Sapiens
SDSLQLVFGIELME

SEQ ID NO: 53552 - protein, 14 aa, Homo Sapiens
DSLQLVFGIELMEV

SEQ ID NO: 53553 - protein, 14 aa, Homo Sapiens
SLQLVFGIELMEVD

SEQ ID NO: 53554 - protein, 14 aa, Homo Sapiens
LQLVFGIELMEVDP

SEQ ID NO: 53555 - protein, 14 aa, Homo Sapiens
QLVFGIELMEVDPI

SEQ ID NO: 53556 - protein, 14 aa, Homo Sapiens
LVFGIELMEVDPIG

SEQ ID NO: 53557 - protein, 14 aa, Homo Sapiens
VFGIELMEVDPIGH

SEQ ID NO: 53558 - protein, 14 aa, Homo Sapiens
FGIELMEVDPIGHV

SEQ ID NO: 53559 - protein, 14 aa, Homo Sapiens
GIELMEVDPIGHVY

SEQ ID NO: 53560 - protein, 14 aa, Homo Sapiens
IELMEVDPIGHVYI

SEQ ID NO: 53561 - protein, 14 aa, Homo Sapiens
ELMEVDPIGHVYIF

SEQ ID NO: 53562 - protein, 14 aa, Homo Sapiens
LMEVDPIGHVYIFA

SEQ ID NO: 53563 - protein, 14 aa, Homo Sapiens
MEVDPIGHVYIFAT

SEQ ID NO: 53564 - protein, 14 aa, Homo Sapiens
EVDPIGHVYIFATC

SEQ ID NO: 53565 - protein, 14 aa, Homo Sapiens
VDPIGHVYIFATCL

SEQ ID NO: 53566 - protein, 14 aa, Homo Sapiens
DPIGHVYIFATCLG

SEQ ID NO: 53567 - protein, 14 aa, Homo Sapiens
PIGHVYIFATCLGL

SEQ ID NO: 53568 - protein, 14 aa, Homo Sapiens
IGHVYIFATCLGLS

SEQ ID NO: 53569 - protein, 14 aa, Homo Sapiens
GHVYIFATCLGLSY

SEQ ID NO: 53570 - protein, 14 aa, Homo Sapiens
HVYIFATCLGLSYD

SEQ ID NO: 53571 - protein, 14 aa, Homo Sapiens
VYIFATCLGLSYDG

SEQ ID NO: 53572 - protein, 14 aa, Homo Sapiens
YIFATCLGLSYDGL

SEQ ID NO: 53573 - protein, 14 aa, Homo Sapiens
IFATCLGLSYDGLL

SEQ ID NO: 53574 - protein, 14 aa, Homo Sapiens
FATCLGLSYDGLLG

SEQ ID NO: 53575 - protein, 14 aa, Homo Sapiens
ATCLGLSYDGLLGD

SEQ ID NO: 53576 - protein, 14 aa, Homo Sapiens
TCLGLSYDGLLGDN

SEQ ID NO: 53577 - protein, 14 aa, Homo Sapiens
CLGLSYDGLLGDNQ

SEQ ID NO: 53578 - protein, 14 aa, Homo Sapiens
LGLSYDGLLGDNQI

SEQ ID NO: 53579 - protein, 14 aa, Homo Sapiens
GLSYDGLLGDNQIM

SEQ ID NO: 53580 - protein, 14 aa, Homo Sapiens
LSYDGLLGDNQIMP

SEQ ID NO: 53581 - protein, 14 aa, Homo Sapiens
SYDGLLGDNQIMPK

SEQ ID NO: 53582 - protein, 14 aa, Homo Sapiens
YDGLLGDNQIMPKT

SEQ ID NO: 53583 - protein, 14 aa, Homo Sapiens
DGLLGDNQIMPKTG

SEQ ID NO: 53584 - protein, 14 aa, Homo Sapiens
GLLGDNQIMPKTGF

SEQ ID NO: 53585 - protein, 14 aa, Homo Sapiens
LLGDNQIMPKTGFL

SEQ ID NO: 53586 - protein, 14 aa, Homo Sapiens
LGDNQIMPKTGFLI

SEQ ID NO: 53587 - protein, 14 aa, Homo Sapiens
GDNQIMPKTGFLII

SEQ ID NO: 53588 - protein, 14 aa, Homo Sapiens
DNQIMPKTGFLIII

SEQ ID NO: 53589 - protein, 14 aa, Homo Sapiens
NQIMPKTGFLIIIL

SEQ ID NO: 53590 - protein, 14 aa, Homo Sapiens
QIMPKTGFLIIILA

SEQ ID NO: 53591 - protein, 14 aa, Homo Sapiens
IMPKTGFLIIILAI

SEQ ID NO: 53592 - protein, 14 aa, Homo Sapiens
MPKTGFLIIILAII

SEQ ID NO: 53593 - protein, 14 aa, Homo Sapiens
PKTGFLIIILAIIA

SEQ ID NO: 53594 - protein, 14 aa, Homo Sapiens
KTGFLIIILAIIAK

SEQ ID NO: 53595 - protein, 14 aa, Homo Sapiens
TGFLIIILAIIAKE

SEQ ID NO: 53596 - protein, 14 aa, Homo Sapiens
GFLIIILAIIAKEG

SEQ ID NO: 53597 - protein, 14 aa, Homo Sapiens
FLIIILAIIAKEGD

SEQ ID NO: 53598 - protein, 14 aa, Homo Sapiens
LIIILAIIAKEGDC

SEQ ID NO: 53599 - protein, 14 aa, Homo Sapiens
IIILAIIAKEGDCA

SEQ ID NO: 53600 - protein, 14 aa, Homo Sapiens
IILAIIAKEGDCAP

SEQ ID NO: 53601 - protein, 14 aa, Homo Sapiens
ILAIIAKEGDCAPE

SEQ ID NO: 53602 - protein, 14 aa, Homo Sapiens
LAIIAKEGDCAPEE

SEQ ID NO: 53603 - protein, 14 aa, Homo Sapiens
AIIAKEGDCAPEEK

SEQ ID NO: 53604 - protein, 14 aa, Homo Sapiens
IIAKEGDCAPEEKI

SEQ ID NO: 53605 - protein, 14 aa, Homo Sapiens
IAKEGDCAPEEKIW

SEQ ID NO: 53606 - protein, 14 aa, Homo Sapiens
AKEGDCAPEEKIWE

SEQ ID NO: 53607 - protein, 14 aa, Homo Sapiens
KEGDCAPEEKIWEE

SEQ ID NO: 53608 - protein, 14 aa, Homo Sapiens
EGDCAPEEKIWEEL

SEQ ID NO: 53609 - protein, 14 aa, Homo Sapiens
GDCAPEEKIWEELS

SEQ ID NO: 53610 - protein, 14 aa, Homo Sapiens
DCAPEEKIWEELSV

SEQ ID NO: 53611 - protein, 14 aa, Homo Sapiens
CAPEEKIWEELSVL

SEQ ID NO: 53612 - protein, 14 aa, Homo Sapiens
APEEKIWEELSVLE

SEQ ID NO: 53613 - protein, 14 aa, Homo Sapiens
PEEKIWEELSVLEV

SEQ ID NO: 53614 - protein, 14 aa, Homo Sapiens
EEKIWEELSVLEVF

SEQ ID NO: 53615 - protein, 14 aa, Homo Sapiens
EKIWEELSVLEVFE

SEQ ID NO: 53616 - protein, 14 aa, Homo Sapiens
KIWEELSVLEVFEG

SEQ ID NO: 53617 - protein, 14 aa, Homo Sapiens
IWEELSVLEVFEGR

SEQ ID NO: 53618 - protein, 14 aa, Homo Sapiens
WEELSVLEVFEGRE

SEQ ID NO: 53619 - protein, 14 aa, Homo Sapiens
EELSVLEVFEGRED

SEQ ID NO: 53620 - protein, 14 aa, Homo Sapiens
ELSVLEVFEGREDS

SEQ ID NO: 53621 - protein, 14 aa, Homo Sapiens
LSVLEVFEGREDSI

SEQ ID NO: 53622 - protein, 14 aa, Homo Sapiens
SVLEVFEGREDSIF

SEQ ID NO: 53623 - protein, 14 aa, Homo Sapiens
VLEVFEGREDSIFG

SEQ ID NO: 53624 - protein, 14 aa, Homo Sapiens
LEVFEGREDSIFGD

SEQ ID NO: 53625 - protein, 14 aa, Homo Sapiens
EVFEGREDSIFGDP

SEQ ID NO: 53626 - protein, 14 aa, Homo Sapiens
VFEGREDSIFGDPK

SEQ ID NO: 53627 - protein, 14 aa, Homo Sapiens
FEGREDSIFGDPKK

SEQ ID NO: 53628 - protein, 14 aa, Homo Sapiens
EGREDSIFGDPKKL

SEQ ID NO: 53629 - protein, 14 aa, Homo Sapiens
GREDSIFGDPKKLL

SEQ ID NO: 53630 - protein, 14 aa, Homo Sapiens
REDSIFGDPKKLLT

SEQ ID NO: 53631 - protein, 14 aa, Homo Sapiens
EDSIFGDPKKLLTQ

SEQ ID NO: 53632 - protein, 14 aa, Homo Sapiens
DSIFGDPKKLLTQY

SEQ ID NO: 53633 - protein, 14 aa, Homo Sapiens
SIFGDPKKLLTQYF

SEQ ID NO: 53634 - protein, 14 aa, Homo Sapiens
IFGDPKKLLTQYFV

SEQ ID NO: 53635 - protein, 14 aa, Homo Sapiens
FGDPKKLLTQYFVQ

SEQ ID NO: 53636 - protein, 14 aa, Homo Sapiens
GDPKKLLTQYFVQE

SEQ ID NO: 53637 - protein, 14 aa, Homo Sapiens
DPKKLLTQYFVQEN

SEQ ID NO: 53638 - protein, 14 aa, Homo Sapiens
PKKLLTQYFVQENY

SEQ ID NO: 53639 - protein, 14 aa, Homo Sapiens
KKLLTQYFVQENYL

SEQ ID NO: 53640 - protein, 14 aa, Homo Sapiens
KLLTQYFVQENYLE

SEQ ID NO: 53641 - protein, 14 aa, Homo Sapiens
LLTQYFVQENYLEY

SEQ ID NO: 53642 - protein, 14 aa, Homo Sapiens
LTQYFVQENYLEYR

SEQ ID NO: 53643 - protein, 14 aa, Homo Sapiens
TQYFVQENYLEYRQ

SEQ ID NO: 53644 - protein, 14 aa, Homo Sapiens
QYFVQENYLEYRQV

SEQ ID NO: 53645 - protein, 14 aa, Homo Sapiens
YFVQENYLEYRQVP

SEQ ID NO: 53646 - protein, 14 aa, Homo Sapiens
FVQENYLEYRQVPG

SEQ ID NO: 53647 - protein, 14 aa, Homo Sapiens
VQENYLEYRQVPGS

SEQ ID NO: 53648 - protein, 14 aa, Homo Sapiens
QENYLEYRQVPGSD

SEQ ID NO: 53649 - protein, 14 aa, Homo Sapiens
ENYLEYRQVPGSDP

SEQ ID NO: 53650 - protein, 14 aa, Homo Sapiens
NYLEYRQVPGSDPA

SEQ ID NO: 53651 - protein, 14 aa, Homo Sapiens
YLEYRQVPGSDPAC

SEQ ID NO: 53652 - protein, 14 aa, Homo Sapiens
LEYRQVPGSDPACY

SEQ ID NO: 53653 - protein, 14 aa, Homo Sapiens
EYRQVPGSDPACYE

SEQ ID NO: 53654 - protein, 14 aa, Homo Sapiens
YRQVPGSDPACYEF

SEQ ID NO: 53655 - protein, 14 aa, Homo Sapiens
RQVPGSDPACYEFL

SEQ ID NO: 53656 - protein, 14 aa, Homo Sapiens
QVPGSDPACYEFLW

SEQ ID NO: 53657 - protein, 14 aa, Homo Sapiens
VPGSDPACYEFLWG

SEQ ID NO: 53658 - protein, 14 aa, Homo Sapiens
PGSDPACYEFLWGP

SEQ ID NO: 53659 - protein, 14 aa, Homo Sapiens
GSDPACYEFLWGPR

SEQ ID NO: 53660 - protein, 14 aa, Homo Sapiens
SDPACYEFLWGPRA

SEQ ID NO: 53661 - protein, 14 aa, Homo Sapiens
DPACYEFLWGPRAL

SEQ ID NO: 53662 - protein, 14 aa, Homo Sapiens
PACYEFLWGPRALI

SEQ ID NO: 53663 - protein, 14 aa, Homo Sapiens
ACYEFLWGPRALIE

SEQ ID NO: 53664 - protein, 14 aa, Homo Sapiens
CYEFLWGPRALIET

SEQ ID NO: 53665 - protein, 14 aa, Homo Sapiens
YEFLWGPRALIETS

SEQ ID NO: 53666 - protein, 14 aa, Homo Sapiens
EFLWGPRALIETSY

SEQ ID NO: 53667 - protein, 14 aa, Homo Sapiens
FLWGPRALIETSYV

SEQ ID NO: 53668 - protein, 14 aa, Homo Sapiens
LWGPRALIETSYVK

SEQ ID NO: 53669 - protein, 14 aa, Homo Sapiens
WGPRALIETSYVKV

SEQ ID NO: 53670 - protein, 14 aa, Homo Sapiens
GPRALIETSYVKVL

SEQ ID NO: 53671 - protein, 14 aa, Homo Sapiens
PRALIETSYVKVLH

SEQ ID NO: 53672 - protein, 14 aa, Homo Sapiens
RALIETSYVKVLHH

SEQ ID NO: 53673 - protein, 14 aa, Homo Sapiens
ALIETSYVKVLHHM

SEQ ID NO: 53674 - protein, 14 aa, Homo Sapiens
LIETSYVKVLHHMV

SEQ ID NO: 53675 - protein, 14 aa, Homo Sapiens
IETSYVKVLHHMVK

SEQ ID NO: 53676 - protein, 14 aa, Homo Sapiens
ETSYVKVLHHMVKI

SEQ ID NO: 53677 - protein, 14 aa, Homo Sapiens
TSYVKVLHHMVKIS

SEQ ID NO: 53678 - protein, 14 aa, Homo Sapiens
SYVKVLHHMVKISG

SEQ ID NO: 53679 - protein, 14 aa, Homo Sapiens
YVKVLHHMVKISGG

SEQ ID NO: 53680 - protein, 14 aa, Homo Sapiens
VKVLHHMVKISGGP

SEQ ID NO: 53681 - protein, 14 aa, Homo Sapiens
KVLHHMVKISGGPR

SEQ ID NO: 53682 - protein, 14 aa, Homo Sapiens
VLHHMVKISGGPRI

SEQ ID NO: 53683 - protein, 14 aa, Homo Sapiens
LHHMVKISGGPRIS

SEQ ID NO: 53684 - protein, 14 aa, Homo Sapiens
HHMVKISGGPRISY

SEQ ID NO: 53685 - protein, 14 aa, Homo Sapiens
HMVKISGGPRISYP

SEQ ID NO: 53686 - protein, 14 aa, Homo Sapiens
MVKISGGPRISYPL

SEQ ID NO: 53687 - protein, 14 aa, Homo Sapiens
VKISGGPRISYPLL

SEQ ID NO: 53688 - protein, 14 aa, Homo Sapiens
KISGGPRISYPLLH

SEQ ID NO: 53689 - protein, 14 aa, Homo Sapiens
ISGGPRISYPLLHE

SEQ ID NO: 53690 - protein, 14 aa, Homo Sapiens
SGGPRISYPLLHEW

SEQ ID NO: 53691 - protein, 14 aa, Homo Sapiens
GGPRISYPLLHEWA

SEQ ID NO: 53692 - protein, 14 aa, Homo Sapiens
GPRISYPLLHEWAL

SEQ ID NO: 53693 - protein, 14 aa, Homo Sapiens
PRISYPLLHEWALR

SEQ ID NO: 53694 - protein, 14 aa, Homo Sapiens
RISYPLLHEWALRE

SEQ ID NO: 53695 - protein, 14 aa, Homo Sapiens
ISYPLLHEWALREG

SEQ ID NO: 53696 - protein, 14 aa, Homo Sapiens
SYPLLHEWALREGE

SEQ ID NO: 53697 - protein, 14 aa, Homo Sapiens
YPLLHEWALREGEE

SEQ ID NO: 53698 - protein, 15 aa, Homo Sapiens
MPLEQRSQHCKPEEG

SEQ ID NO: 53699 - protein, 15 aa, Homo Sapiens
PLEQRSQHCKPEEGL

SEQ ID NO: 53700 - protein, 15 aa, Homo Sapiens
LEQRSQHCKPEEGLE

SEQ ID NO: 53701 - protein, 15 aa, Homo Sapiens
EQRSQHCKPEEGLEA

SEQ ID NO: 53702 - protein, 15 aa, Homo Sapiens
QRSQHCKPEEGLEAR

SEQ ID NO: 53703 - protein, 15 aa, Homo Sapiens
RSQHCKPEEGLEARG

SEQ ID NO: 53704 - protein, 15 aa, Homo Sapiens
SQHCKPEEGLEARGE

SEQ ID NO: 53705 - protein, 15 aa, Homo Sapiens
QHCKPEEGLEARGEA

SEQ ID NO: 53706 - protein, 15 aa, Homo Sapiens
HCKPEEGLEARGEAL

SEQ ID NO: 53707 - protein, 15 aa, Homo Sapiens
CKPEEGLEARGEALG

SEQ ID NO: 53708 - protein, 15 aa, Homo Sapiens
KPEEGLEARGEALGL

SEQ ID NO: 53709 - protein, 15 aa, Homo Sapiens
PEEGLEARGEALGLV

SEQ ID NO: 53710 - protein, 15 aa, Homo Sapiens
EEGLEARGEALGLVG

SEQ ID NO: 53711 - protein, 15 aa, Homo Sapiens
EGLEARGEALGLVGA

SEQ ID NO: 53712 - protein, 15 aa, Homo Sapiens
GLEARGEALGLVGAQ

SEQ ID NO: 53713 - protein, 15 aa, Homo Sapiens
LEARGEALGLVGAQA

SEQ ID NO: 53714 - protein, 15 aa, Homo Sapiens
EARGEALGLVGAQAP

SEQ ID NO: 53715 - protein, 15 aa, Homo Sapiens
ARGEALGLVGAQAPA

SEQ ID NO: 53716 - protein, 15 aa, Homo Sapiens
RGEALGLVGAQAPAT

SEQ ID NO: 53717 - protein, 15 aa, Homo Sapiens
GEALGLVGAQAPATE

SEQ ID NO: 53718 - protein, 15 aa, Homo Sapiens
EALGLVGAQAPATEE

SEQ ID NO: 53719 - protein, 15 aa, Homo Sapiens
ALGLVGAQAPATEEQ

SEQ ID NO: 53720 - protein, 15 aa, Homo Sapiens
LGLVGAQAPATEEQE

SEQ ID NO: 53721 - protein, 15 aa, Homo Sapiens
GLVGAQAPATEEQEA

SEQ ID NO: 53722 - protein, 15 aa, Homo Sapiens
LVGAQAPATEEQEAA

SEQ ID NO: 53723 - protein, 15 aa, Homo Sapiens
VGAQAPATEEQEAAS

SEQ ID NO: 53724 - protein, 15 aa, Homo Sapiens
GAQAPATEEQEAASS

SEQ ID NO: 53725 - protein, 15 aa, Homo Sapiens
AQAPATEEQEAASSS

SEQ ID NO: 53726 - protein, 15 aa, Homo Sapiens
QAPATEEQEAASSSS

SEQ ID NO: 53727 - protein, 15 aa, Homo Sapiens
APATEEQEAASSSST

SEQ ID NO: 53728 - protein, 15 aa, Homo Sapiens
PATEEQEAASSSSTL

SEQ ID NO: 53729 - protein, 15 aa, Homo Sapiens
ATEEQEAASSSSTLV

SEQ ID NO: 53730 - protein, 15 aa, Homo Sapiens
TEEQEAASSSSTLVE

SEQ ID NO: 53731 - protein, 15 aa, Homo Sapiens
EEQEAASSSSTLVEV

SEQ ID NO: 53732 - protein, 15 aa, Homo Sapiens
EQEAASSSSTLVEVT

SEQ ID NO: 53733 - protein, 15 aa, Homo Sapiens
QEAASSSSTLVEVTL

SEQ ID NO: 53734 - protein, 15 aa, Homo Sapiens
EAASSSSTLVEVTLG

SEQ ID NO: 53735 - protein, 15 aa, Homo Sapiens
AASSSSTLVEVTLGE

SEQ ID NO: 53736 - protein, 15 aa, Homo Sapiens
ASSSSTLVEVTLGEV

SEQ ID NO: 53737 - protein, 15 aa, Homo Sapiens
SSSSTLVEVTLGEVP

SEQ ID NO: 53738 - protein, 15 aa, Homo Sapiens
SSSTLVEVTLGEVPA

SEQ ID NO: 53739 - protein, 15 aa, Homo Sapiens
SSTLVEVTLGEVPAA

SEQ ID NO: 53740 - protein, 15 aa, Homo Sapiens
STLVEVTLGEVPAAE

SEQ ID NO: 53741 - protein, 15 aa, Homo Sapiens
TLVEVTLGEVPAAES

SEQ ID NO: 53742 - protein, 15 aa, Homo Sapiens
LVEVTLGEVPAAESP

SEQ ID NO: 53743 - protein, 15 aa, Homo Sapiens
VEVTLGEVPAAESPD

SEQ ID NO: 53744 - protein, 15 aa, Homo Sapiens
EVTLGEVPAAESPDP

SEQ ID NO: 53745 - protein, 15 aa, Homo Sapiens
VTLGEVPAAESPDPP

SEQ ID NO: 53746 - protein, 15 aa, Homo Sapiens
TLGEVPAAESPDPPQ

SEQ ID NO: 53747 - protein, 15 aa, Homo Sapiens
LGEVPAAESPDPPQS

SEQ ID NO: 53748 - protein, 15 aa, Homo Sapiens
GEVPAAESPDPPQSP

SEQ ID NO: 53749 - protein, 15 aa, Homo Sapiens
EVPAAESPDPPQSPQ

SEQ ID NO: 53750 - protein, 15 aa, Homo Sapiens
VPAAESPDPPQSPQG

SEQ ID NO: 53751 - protein, 15 aa, Homo Sapiens
PAAESPDPPQSPQGA

SEQ ID NO: 53752 - protein, 15 aa, Homo Sapiens
AAESPDPPQSPQGAS

SEQ ID NO: 53753 - protein, 15 aa, Homo Sapiens
AESPDPPQSPQGASS

SEQ ID NO: 53754 - protein, 15 aa, Homo Sapiens
ESPDPPQSPQGASSL

SEQ ID NO: 53755 - protein, 15 aa, Homo Sapiens
SPDPPQSPQGASSLP

SEQ ID NO: 53756 - protein, 15 aa, Homo Sapiens
PDPPQSPQGASSLPT

SEQ ID NO: 53757 - protein, 15 aa, Homo Sapiens
DPPQSPQGASSLPTT

SEQ ID NO: 53758 - protein, 15 aa, Homo Sapiens
PPQSPQGASSLPTTM

SEQ ID NO: 53759 - protein, 15 aa, Homo Sapiens
PQSPQGASSLPTTMN

SEQ ID NO: 53760 - protein, 15 aa, Homo Sapiens
QSPQGASSLPTTMNY

SEQ ID NO: 53761 - protein, 15 aa, Homo Sapiens
SPQGASSLPTTMNYP

SEQ ID NO: 53762 - protein, 15 aa, Homo Sapiens
PQGASSLPTTMNYPL

SEQ ID NO: 53763 - protein, 15 aa, Homo Sapiens
QGASSLPTTMNYPLW

SEQ ID NO: 53764 - protein, 15 aa, Homo Sapiens
GASSLPTTMNYPLWS

SEQ ID NO: 53765 - protein, 15 aa, Homo Sapiens
ASSLPTTMNYPLWSQ

SEQ ID NO: 53766 - protein, 15 aa, Homo Sapiens
SSLPTTMNYPLWSQS

SEQ ID NO: 53767 - protein, 15 aa, Homo Sapiens
SLPTTMNYPLWSQSY

SEQ ID NO: 53768 - protein, 15 aa, Homo Sapiens
LPTTMNYPLWSQSYE

SEQ ID NO: 53769 - protein, 15 aa, Homo Sapiens
PTTMNYPLWSQSYED

SEQ ID NO: 53770 - protein, 15 aa, Homo Sapiens
TTMNYPLWSQSYEDS

SEQ ID NO: 53771 - protein, 15 aa, Homo Sapiens
TMNYPLWSQSYEDSS

SEQ ID NO: 53772 - protein, 15 aa, Homo Sapiens
MNYPLWSQSYEDSSN

SEQ ID NO: 53773 - protein, 15 aa, Homo Sapiens
NYPLWSQSYEDSSNQ

SEQ ID NO: 53774 - protein, 15 aa, Homo Sapiens
YPLWSQSYEDSSNQE

SEQ ID NO: 53775 - protein, 15 aa, Homo Sapiens
PLWSQSYEDSSNQEE

SEQ ID NO: 53776 - protein, 15 aa, Homo Sapiens
LWSQSYEDSSNQEEE

SEQ ID NO: 53777 - protein, 15 aa, Homo Sapiens
WSQSYEDSSNQEEEG

SEQ ID NO: 53778 - protein, 15 aa, Homo Sapiens
SQSYEDSSNQEEEGP

SEQ ID NO: 53779 - protein, 15 aa, Homo Sapiens
QSYEDSSNQEEEGPS

SEQ ID NO: 53780 - protein, 15 aa, Homo Sapiens
SYEDSSNQEEEGPST

SEQ ID NO: 53781 - protein, 15 aa, Homo Sapiens
YEDSSNQEEEGPSTF

SEQ ID NO: 53782 - protein, 15 aa, Homo Sapiens
EDSSNQEEEGPSTFP

SEQ ID NO: 53783 - protein, 15 aa, Homo Sapiens
DSSNQEEEGPSTFPD

SEQ ID NO: 53784 - protein, 15 aa, Homo Sapiens
SSNQEEEGPSTFPDL

SEQ ID NO: 53785 - protein, 15 aa, Homo Sapiens
SNQEEEGPSTFPDLE

SEQ ID NO: 53786 - protein, 15 aa, Homo Sapiens
NQEEEGPSTFPDLES

SEQ ID NO: 53787 - protein, 15 aa, Homo Sapiens
QEEEGPSTFPDLESE

SEQ ID NO: 53788 - protein, 15 aa, Homo Sapiens
EEEGPSTFPDLESEF

SEQ ID NO: 53789 - protein, 15 aa, Homo Sapiens
EEGPSTFPDLESEFQ

SEQ ID NO: 53790 - protein, 15 aa, Homo Sapiens
EGPSTFPDLESEFQA

SEQ ID NO: 53791 - protein, 15 aa, Homo Sapiens
GPSTFPDLESEFQAA

SEQ ID NO: 53792 - protein, 15 aa, Homo Sapiens
PSTFPDLESEFQAAL

SEQ ID NO: 53793 - protein, 15 aa, Homo Sapiens
STFPDLESEFQAALS

SEQ ID NO: 53794 - protein, 15 aa, Homo Sapiens
TFPDLESEFQAALSR

SEQ ID NO: 53795 - protein, 15 aa, Homo Sapiens
FPDLESEFQAALSRK

SEQ ID NO: 53796 - protein, 15 aa, Homo Sapiens
PDLESEFQAALSRKV

SEQ ID NO: 53797 - protein, 15 aa, Homo Sapiens
DLESEFQAALSRKVA

SEQ ID NO: 53798 - protein, 15 aa, Homo Sapiens
LESEFQAALSRKVAK

SEQ ID NO: 53799 - protein, 15 aa, Homo Sapiens
ESEFQAALSRKVAKL

SEQ ID NO: 53800 - protein, 15 aa, Homo Sapiens
SEFQAALSRKVAKLV

SEQ ID NO: 53801 - protein, 15 aa, Homo Sapiens
EFQAALSRKVAKLVH

SEQ ID NO: 53802 - protein, 15 aa, Homo Sapiens
FQAALSRKVAKLVHF

SEQ ID NO: 53803 - protein, 15 aa, Homo Sapiens
QAALSRKVAKLVHFL

SEQ ID NO: 53804 - protein, 15 aa, Homo Sapiens
AALSRKVAKLVHFLL

SEQ ID NO: 53805 - protein, 15 aa, Homo Sapiens
ALSRKVAKLVHFLLL

SEQ ID NO: 53806 - protein, 15 aa, Homo Sapiens
LSRKVAKLVHFLLLK

SEQ ID NO: 53807 - protein, 15 aa, Homo Sapiens
SRKVAKLVHFLLLKY

SEQ ID NO: 53808 - protein, 15 aa, Homo Sapiens
RKVAKLVHFLLLKYR

SEQ ID NO: 53809 - protein, 15 aa, Homo Sapiens
KVAKLVHFLLLKYRA

SEQ ID NO: 53810 - protein, 15 aa, Homo Sapiens
VAKLVHFLLLKYRAR

SEQ ID NO: 53811 - protein, 15 aa, Homo Sapiens
AKLVHFLLLKYRARE

SEQ ID NO: 53812 - protein, 15 aa, Homo Sapiens
KLVHFLLLKYRAREP

SEQ ID NO: 53813 - protein, 15 aa, Homo Sapiens
LVHFLLLKYRAREPV

SEQ ID NO: 53814 - protein, 15 aa, Homo Sapiens
VHFLLLKYRAREPVT

SEQ ID NO: 53815 - protein, 15 aa, Homo Sapiens
HFLLLKYRAREPVTK

SEQ ID NO: 53816 - protein, 15 aa, Homo Sapiens
FLLLKYRAREPVTKA

SEQ ID NO: 53817 - protein, 15 aa, Homo Sapiens
LLLKYRAREPVTKAE

SEQ ID NO: 53818 - protein, 15 aa, Homo Sapiens
LLKYRAREPVTKAEM

SEQ ID NO: 53819 - protein, 15 aa, Homo Sapiens
LKYRAREPVTKAEML

SEQ ID NO: 53820 - protein, 15 aa, Homo Sapiens
KYRAREPVTKAEMLG

SEQ ID NO: 53821 - protein, 15 aa, Homo Sapiens
YRAREPVTKAEMLGS

SEQ ID NO: 53822 - protein, 15 aa, Homo Sapiens
RAREPVTKAEMLGSV

SEQ ID NO: 53823 - protein, 15 aa, Homo Sapiens
AREPVTKAEMLGSVV

SEQ ID NO: 53824 - protein, 15 aa, Homo Sapiens
REPVTKAEMLGSVVG

SEQ ID NO: 53825 - protein, 15 aa, Homo Sapiens
EPVTKAEMLGSVVGN

SEQ ID NO: 53826 - protein, 15 aa, Homo Sapiens
PVTKAEMLGSVVGNW

SEQ ID NO: 53827 - protein, 15 aa, Homo Sapiens
VTKAEMLGSVVGNWQ

SEQ ID NO: 53828 - protein, 15 aa, Homo Sapiens
TKAEMLGSVVGNWQY

SEQ ID NO: 53829 - protein, 15 aa, Homo Sapiens
KAEMLGSVVGNWQYF

SEQ ID NO: 53830 - protein, 15 aa, Homo Sapiens
AEMLGSVVGNWQYFF

SEQ ID NO: 53831 - protein, 15 aa, Homo Sapiens
EMLGSVVGNWQYFFP

SEQ ID NO: 53832 - protein, 15 aa, Homo Sapiens
MLGSVVGNWQYFFPV

SEQ ID NO: 53833 - protein, 15 aa, Homo Sapiens
LGSVVGNWQYFFPVI

SEQ ID NO: 53834 - protein, 15 aa, Homo Sapiens
GSVVGNWQYFFPVIF

SEQ ID NO: 53835 - protein, 15 aa, Homo Sapiens
SVVGNWQYFFPVIFS

SEQ ID NO: 53836 - protein, 15 aa, Homo Sapiens
VVGNWQYFFPVIFSK

SEQ ID NO: 53837 - protein, 15 aa, Homo Sapiens
VGNWQYFFPVIFSKA

SEQ ID NO: 53838 - protein, 15 aa, Homo Sapiens
GNWQYFFPVIFSKAS

SEQ ID NO: 53839 - protein, 15 aa, Homo Sapiens
NWQYFFPVIFSKASD

SEQ ID NO: 53840 - protein, 15 aa, Homo Sapiens
WQYFFPVIFSKASDS

SEQ ID NO: 53841 - protein, 15 aa, Homo Sapiens
QYFFPVIFSKASDSL

SEQ ID NO: 53842 - protein, 15 aa, Homo Sapiens
YFFPVIFSKASDSLQ

SEQ ID NO: 53843 - protein, 15 aa, Homo Sapiens
FFPVIFSKASDSLQL

SEQ ID NO: 53844 - protein, 15 aa, Homo Sapiens
FPVIFSKASDSLQLV

SEQ ID NO: 53845 - protein, 15 aa, Homo Sapiens
PVIFSKASDSLQLVF

SEQ ID NO: 53846 - protein, 15 aa, Homo Sapiens
VIFSKASDSLQLVFG

SEQ ID NO: 53847 - protein, 15 aa, Homo Sapiens
IFSKASDSLQLVFGI

SEQ ID NO: 53848 - protein, 15 aa, Homo Sapiens
FSKASDSLQLVFGIE

SEQ ID NO: 53849 - protein, 15 aa, Homo Sapiens
SKASDSLQLVFGIEL

SEQ ID NO: 53850 - protein, 15 aa, Homo Sapiens
KASDSLQLVFGIELM

SEQ ID NO: 53851 - protein, 15 aa, Homo Sapiens
ASDSLQLVFGIELME

SEQ ID NO: 53852 - protein, 15 aa, Homo Sapiens
SDSLQLVFGIELMEV

SEQ ID NO: 53853 - protein, 15 aa, Homo Sapiens
DSLQLVFGIELMEVD

SEQ ID NO: 53854 - protein, 15 aa, Homo Sapiens
SLQLVFGIELMEVDP

SEQ ID NO: 53855 - protein, 15 aa, Homo Sapiens
LQLVFGIELMEVDPI

SEQ ID NO: 53856 - protein, 15 aa, Homo Sapiens
QLVFGIELMEVDPIG

SEQ ID NO: 53857 - protein, 15 aa, Homo Sapiens
LVFGIELMEVDPIGH

SEQ ID NO: 53858 - protein, 15 aa, Homo Sapiens
VFGIELMEVDPIGHV

SEQ ID NO: 53859 - protein, 15 aa, Homo Sapiens
FGIELMEVDPIGHVY

SEQ ID NO: 53860 - protein, 15 aa, Homo Sapiens
GIELMEVDPIGHVYI

SEQ ID NO: 53861 - protein, 15 aa, Homo Sapiens
IELMEVDPIGHVYIF

SEQ ID NO: 53862 - protein, 15 aa, Homo Sapiens
ELMEVDPIGHVYIFA

SEQ ID NO: 53863 - protein, 15 aa, Homo Sapiens
LMEVDPIGHVYIFAT

SEQ ID NO: 53864 - protein, 15 aa, Homo Sapiens
MEVDPIGHVYIFATC

SEQ ID NO: 53865 - protein, 15 aa, Homo Sapiens
EVDPIGHVYIFATCL

SEQ ID NO: 53866 - protein, 15 aa, Homo Sapiens
VDPIGHVYIFATCLG

SEQ ID NO: 53867 - protein, 15 aa, Homo Sapiens
DPIGHVYIFATCLGL

SEQ ID NO: 53868 - protein, 15 aa, Homo Sapiens
PIGHVYIFATCLGLS

SEQ ID NO: 53869 - protein, 15 aa, Homo Sapiens
IGHVYIFATCLGLSY

SEQ ID NO: 53870 - protein, 15 aa, Homo Sapiens
GHVYIFATCLGLSYD

SEQ ID NO: 53871 - protein, 15 aa, Homo Sapiens
HVYIFATCLGLSYDG

SEQ ID NO: 53872 - protein, 15 aa, Homo Sapiens
VYIFATCLGLSYDGL

SEQ ID NO: 53873 - protein, 15 aa, Homo Sapiens
YIFATCLGLSYDGLL

SEQ ID NO: 53874 - protein, 15 aa, Homo Sapiens
IFATCLGLSYDGLLG

SEQ ID NO: 53875 - protein, 15 aa, Homo Sapiens
FATCLGLSYDGLLGD

SEQ ID NO: 53876 - protein, 15 aa, Homo Sapiens
ATCLGLSYDGLLGDN

SEQ ID NO: 53877 - protein, 15 aa, Homo Sapiens
TCLGLSYDGLLGDNQ

SEQ ID NO: 53878 - protein, 15 aa, Homo Sapiens
CLGLSYDGLLGDNQI

SEQ ID NO: 53879 - protein, 15 aa, Homo Sapiens
LGLSYDGLLGDNQIM

SEQ ID NO: 53880 - protein, 15 aa, Homo Sapiens
GLSYDGLLGDNQIMP

SEQ ID NO: 53881 - protein, 15 aa, Homo Sapiens
LSYDGLLGDNQIMPK

SEQ ID NO: 53882 - protein, 15 aa, Homo Sapiens
SYDGLLGDNQIMPKT

SEQ ID NO: 53883 - protein, 15 aa, Homo Sapiens
YDGLLGDNQIMPKTG

SEQ ID NO: 53884 - protein, 15 aa, Homo Sapiens
DGLLGDNQIMPKTGF

SEQ ID NO: 53885 - protein, 15 aa, Homo Sapiens
GLLGDNQIMPKTGFL

SEQ ID NO: 53886 - protein, 15 aa, Homo Sapiens
LLGDNQIMPKTGFLI

SEQ ID NO: 53887 - protein, 15 aa, Homo Sapiens
LGDNQIMPKTGFLII

SEQ ID NO: 53888 - protein, 15 aa, Homo Sapiens
GDNQIMPKTGFLIII

SEQ ID NO: 53889 - protein, 15 aa, Homo Sapiens
DNQIMPKTGFLIIIL

SEQ ID NO: 53890 - protein, 15 aa, Homo Sapiens
NQIMPKTGFLIIILA

SEQ ID NO: 53891 - protein, 15 aa, Homo Sapiens
QIMPKTGFLIIILAI

SEQ ID NO: 53892 - protein, 15 aa, Homo Sapiens
IMPKTGFLIIILAII

SEQ ID NO: 53893 - protein, 15 aa, Homo Sapiens
MPKTGFLIIILAIIA

SEQ ID NO: 53894 - protein, 15 aa, Homo Sapiens
PKTGFLIIILAIIAK

SEQ ID NO: 53895 - protein, 15 aa, Homo Sapiens
KTGFLIIILAIIAKE

SEQ ID NO: 53896 - protein, 15 aa, Homo Sapiens
TGFLIIILAIIAKEG

SEQ ID NO: 53897 - protein, 15 aa, Homo Sapiens
GFLIIILAIIAKEGD

SEQ ID NO: 53898 - protein, 15 aa, Homo Sapiens
FLIIILAIIAKEGDC

SEQ ID NO: 53899 - protein, 15 aa, Homo Sapiens
LIIILAIIAKEGDCA

SEQ ID NO: 53900 - protein, 15 aa, Homo Sapiens
IIILAIIAKEGDCAP

SEQ ID NO: 53901 - protein, 15 aa, Homo Sapiens
IILAIIAKEGDCAPE

SEQ ID NO: 53902 - protein, 15 aa, Homo Sapiens
ILAIIAKEGDCAPEE

SEQ ID NO: 53903 - protein, 15 aa, Homo Sapiens
LAIIAKEGDCAPEEK

SEQ ID NO: 53904 - protein, 15 aa, Homo Sapiens
AIIAKEGDCAPEEKI

SEQ ID NO: 53905 - protein, 15 aa, Homo Sapiens
IIAKEGDCAPEEKIW

SEQ ID NO: 53906 - protein, 15 aa, Homo Sapiens
IAKEGDCAPEEKIWE

SEQ ID NO: 53907 - protein, 15 aa, Homo Sapiens
AKEGDCAPEEKIWEE

SEQ ID NO: 53908 - protein, 15 aa, Homo Sapiens
KEGDCAPEEKIWEEL

SEQ ID NO: 53909 - protein, 15 aa, Homo Sapiens
EGDCAPEEKIWEELS

SEQ ID NO: 53910 - protein, 15 aa, Homo Sapiens
GDCAPEEKIWEELSV

SEQ ID NO: 53911 - protein, 15 aa, Homo Sapiens
DCAPEEKIWEELSVL

SEQ ID NO: 53912 - protein, 15 aa, Homo Sapiens
CAPEEKIWEELSVLE

SEQ ID NO: 53913 - protein, 15 aa, Homo Sapiens
APEEKIWEELSVLEV

SEQ ID NO: 53914 - protein, 15 aa, Homo Sapiens
PEEKIWEELSVLEVF

SEQ ID NO: 53915 - protein, 15 aa, Homo Sapiens
EEKIWEELSVLEVFE

SEQ ID NO: 53916 - protein, 15 aa, Homo Sapiens
EKIWEELSVLEVFEG

SEQ ID NO: 53917 - protein, 15 aa, Homo Sapiens
KIWEELSVLEVFEGR

SEQ ID NO: 53918 - protein, 15 aa, Homo Sapiens
IWEELSVLEVFEGRE

SEQ ID NO: 53919 - protein, 15 aa, Homo Sapiens
WEELSVLEVFEGRED

SEQ ID NO: 53920 - protein, 15 aa, Homo Sapiens
EELSVLEVFEGREDS

SEQ ID NO: 53921 - protein, 15 aa, Homo Sapiens
ELSVLEVFEGREDSI

SEQ ID NO: 53922 - protein, 15 aa, Homo Sapiens
LSVLEVFEGREDSIF

SEQ ID NO: 53923 - protein, 15 aa, Homo Sapiens
SVLEVFEGREDSIFG

SEQ ID NO: 53924 - protein, 15 aa, Homo Sapiens
VLEVFEGREDSIFGD

SEQ ID NO: 53925 - protein, 15 aa, Homo Sapiens
LEVFEGREDSIFGDP

SEQ ID NO: 53926 - protein, 15 aa, Homo Sapiens
EVFEGREDSIFGDPK

SEQ ID NO: 53927 - protein, 15 aa, Homo Sapiens
VFEGREDSIFGDPKK

SEQ ID NO: 53928 - protein, 15 aa, Homo Sapiens
FEGREDSIFGDPKKL

SEQ ID NO: 53929 - protein, 15 aa, Homo Sapiens
EGREDSIFGDPKKLL

SEQ ID NO: 53930 - protein, 15 aa, Homo Sapiens
GREDSIFGDPKKLLT

SEQ ID NO: 53931 - protein, 15 aa, Homo Sapiens
REDSIFGDPKKLLTQ

SEQ ID NO: 53932 - protein, 15 aa, Homo Sapiens
EDSIFGDPKKLLTQY

SEQ ID NO: 53933 - protein, 15 aa, Homo Sapiens
DSIFGDPKKLLTQYF

SEQ ID NO: 53934 - protein, 15 aa, Homo Sapiens
SIFGDPKKLLTQYFV

SEQ ID NO: 53935 - protein, 15 aa, Homo Sapiens
IFGDPKKLLTQYFVQ

SEQ ID NO: 53936 - protein, 15 aa, Homo Sapiens
FGDPKKLLTQYFVQE

SEQ ID NO: 53937 - protein, 15 aa, Homo Sapiens
GDPKKLLTQYFVQEN

SEQ ID NO: 53938 - protein, 15 aa, Homo Sapiens
DPKKLLTQYFVQENY

SEQ ID NO: 53939 - protein, 15 aa, Homo Sapiens
PKKLLTQYFVQENYL

SEQ ID NO: 53940 - protein, 15 aa, Homo Sapiens
KKLLTQYFVQENYLE

SEQ ID NO: 53941 - protein, 15 aa, Homo Sapiens
KLLTQYFVQENYLEY

SEQ ID NO: 53942 - protein, 15 aa, Homo Sapiens
LLTQYFVQENYLEYR

SEQ ID NO: 53943 - protein, 15 aa, Homo Sapiens
LTQYFVQENYLEYRQ

SEQ ID NO: 53944 - protein, 15 aa, Homo Sapiens
TQYFVQENYLEYRQV

SEQ ID NO: 53945 - protein, 15 aa, Homo Sapiens
QYFVQENYLEYRQVP

SEQ ID NO: 53946 - protein, 15 aa, Homo Sapiens
YFVQENYLEYRQVPG

SEQ ID NO: 53947 - protein, 15 aa, Homo Sapiens
FVQENYLEYRQVPGS

SEQ ID NO: 53948 - protein, 15 aa, Homo Sapiens
VQENYLEYRQVPGSD

SEQ ID NO: 53949 - protein, 15 aa, Homo Sapiens
QENYLEYRQVPGSDP

SEQ ID NO: 53950 - protein, 15 aa, Homo Sapiens
ENYLEYRQVPGSDPA

SEQ ID NO: 53951 - protein, 15 aa, Homo Sapiens
NYLEYRQVPGSDPAC

SEQ ID NO: 53952 - protein, 15 aa, Homo Sapiens
YLEYRQVPGSDPACY

SEQ ID NO: 53953 - protein, 15 aa, Homo Sapiens
LEYRQVPGSDPACYE

SEQ ID NO: 53954 - protein, 15 aa, Homo Sapiens
EYRQVPGSDPACYEF

SEQ ID NO: 53955 - protein, 15 aa, Homo Sapiens
YRQVPGSDPACYEFL

SEQ ID NO: 53956 - protein, 15 aa, Homo Sapiens
RQVPGSDPACYEFLW

SEQ ID NO: 53957 - protein, 15 aa, Homo Sapiens
QVPGSDPACYEFLWG

SEQ ID NO: 53958 - protein, 15 aa, Homo Sapiens
VPGSDPACYEFLWGP

SEQ ID NO: 53959 - protein, 15 aa, Homo Sapiens
PGSDPACYEFLWGPR

SEQ ID NO: 53960 - protein, 15 aa, Homo Sapiens
GSDPACYEFLWGPRA

SEQ ID NO: 53961 - protein, 15 aa, Homo Sapiens
SDPACYEFLWGPRAL

SEQ ID NO: 53962 - protein, 15 aa, Homo Sapiens
DPACYEFLWGPRALI

SEQ ID NO: 53963 - protein, 15 aa, Homo Sapiens
PACYEFLWGPRALIE

SEQ ID NO: 53964 - protein, 15 aa, Homo Sapiens
ACYEFLWGPRALIET

SEQ ID NO: 53965 - protein, 15 aa, Homo Sapiens
CYEFLWGPRALIETS

SEQ ID NO: 53966 - protein, 15 aa, Homo Sapiens
YEFLWGPRALIETSY

SEQ ID NO: 53967 - protein, 15 aa, Homo Sapiens
EFLWGPRALIETSYV

SEQ ID NO: 53968 - protein, 15 aa, Homo Sapiens
FLWGPRALIETSYVK

SEQ ID NO: 53969 - protein, 15 aa, Homo Sapiens
LWGPRALIETSYVKV

SEQ ID NO: 53970 - protein, 15 aa, Homo Sapiens
WGPRALIETSYVKVL

SEQ ID NO: 53971 - protein, 15 aa, Homo Sapiens
GPRALIETSYVKVLH

SEQ ID NO: 53972 - protein, 15 aa, Homo Sapiens
PRALIETSYVKVLHH

SEQ ID NO: 53973 - protein, 15 aa, Homo Sapiens
RALIETSYVKVLHHM

SEQ ID NO: 53974 - protein, 15 aa, Homo Sapiens
ALIETSYVKVLHHMV

SEQ ID NO: 53975 - protein, 15 aa, Homo Sapiens
LIETSYVKVLHHMVK

SEQ ID NO: 53976 - protein, 15 aa, Homo Sapiens
IETSYVKVLHHMVKI

SEQ ID NO: 53977 - protein, 15 aa, Homo Sapiens
ETSYVKVLHHMVKIS

SEQ ID NO: 53978 - protein, 15 aa, Homo Sapiens
TSYVKVLHHMVKISG

SEQ ID NO: 53979 - protein, 15 aa, Homo Sapiens
SYVKVLHHMVKISGG

SEQ ID NO: 53980 - protein, 15 aa, Homo Sapiens
YVKVLHHMVKISGGP

SEQ ID NO: 53981 - protein, 15 aa, Homo Sapiens
VKVLHHMVKISGGPR

SEQ ID NO: 53982 - protein, 15 aa, Homo Sapiens
KVLHHMVKISGGPRI

SEQ ID NO: 53983 - protein, 15 aa, Homo Sapiens
VLHHMVKISGGPRIS

SEQ ID NO: 53984 - protein, 15 aa, Homo Sapiens
LHHMVKISGGPRISY

SEQ ID NO: 53985 - protein, 15 aa, Homo Sapiens
HHMVKISGGPRISYP

SEQ ID NO: 53986 - protein, 15 aa, Homo Sapiens
HMVKISGGPRISYPL

SEQ ID NO: 53987 - protein, 15 aa, Homo Sapiens
MVKISGGPRISYPLL

SEQ ID NO: 53988 - protein, 15 aa, Homo Sapiens
VKISGGPRISYPLLH

SEQ ID NO: 53989 - protein, 15 aa, Homo Sapiens
KISGGPRISYPLLHE

SEQ ID NO: 53990 - protein, 15 aa, Homo Sapiens
ISGGPRISYPLLHEW

SEQ ID NO: 53991 - protein, 15 aa, Homo Sapiens
SGGPRISYPLLHEWA

SEQ ID NO: 53992 - protein, 15 aa, Homo Sapiens
GGPRISYPLLHEWAL

SEQ ID NO: 53993 - protein, 15 aa, Homo Sapiens
GPRISYPLLHEWALR

SEQ ID NO: 53994 - protein, 15 aa, Homo Sapiens
PRISYPLLHEWALRE

SEQ ID NO: 53995 - protein, 15 aa, Homo Sapiens
RISYPLLHEWALREG

SEQ ID NO: 53996 - protein, 15 aa, Homo Sapiens
ISYPLLHEWALREGE

SEQ ID NO: 53997 - protein, 15 aa, Homo Sapiens
SYPLLHEWALREGEE

SEQ ID NO: 53998 - protein, 16 aa, Homo Sapiens
MPLEQRSQHCKPEEGL

SEQ ID NO: 53999 - protein, 16 aa, Homo Sapiens
PLEQRSQHCKPEEGLE

SEQ ID NO: 54000 - protein, 16 aa, Homo Sapiens
LEQRSQHCKPEEGLEA

SEQ ID NO: 54001 - protein, 16 aa, Homo Sapiens
EQRSQHCKPEEGLEAR

SEQ ID NO: 54002 - protein, 16 aa, Homo Sapiens
QRSQHCKPEEGLEARG

SEQ ID NO: 54003 - protein, 16 aa, Homo Sapiens
RSQHCKPEEGLEARGE

SEQ ID NO: 54004 - protein, 16 aa, Homo Sapiens
SQHCKPEEGLEARGEA

SEQ ID NO: 54005 - protein, 16 aa, Homo Sapiens
QHCKPEEGLEARGEAL

SEQ ID NO: 54006 - protein, 16 aa, Homo Sapiens
HCKPEEGLEARGEALG

SEQ ID NO: 54007 - protein, 16 aa, Homo Sapiens
CKPEEGLEARGEALGL

SEQ ID NO: 54008 - protein, 16 aa, Homo Sapiens
KPEEGLEARGEALGLV

SEQ ID NO: 54009 - protein, 16 aa, Homo Sapiens
PEEGLEARGEALGLVG

SEQ ID NO: 54010 - protein, 16 aa, Homo Sapiens
EEGLEARGEALGLVGA

SEQ ID NO: 54011 - protein, 16 aa, Homo Sapiens
EGLEARGEALGLVGAQ

SEQ ID NO: 54012 - protein, 16 aa, Homo Sapiens
GLEARGEALGLVGAQA

SEQ ID NO: 54013 - protein, 16 aa, Homo Sapiens
LEARGEALGLVGAQAP

SEQ ID NO: 54014 - protein, 16 aa, Homo Sapiens
EARGEALGLVGAQAPA

SEQ ID NO: 54015 - protein, 16 aa, Homo Sapiens
ARGEALGLVGAQAPAT

SEQ ID NO: 54016 - protein, 16 aa, Homo Sapiens
RGEALGLVGAQAPATE

SEQ ID NO: 54017 - protein, 16 aa, Homo Sapiens
GEALGLVGAQAPATEE

SEQ ID NO: 54018 - protein, 16 aa, Homo Sapiens
EALGLVGAQAPATEEQ

SEQ ID NO: 54019 - protein, 16 aa, Homo Sapiens
ALGLVGAQAPATEEQE

SEQ ID NO: 54020 - protein, 16 aa, Homo Sapiens
LGLVGAQAPATEEQEA

SEQ ID NO: 54021 - protein, 16 aa, Homo Sapiens
GLVGAQAPATEEQEAA

SEQ ID NO: 54022 - protein, 16 aa, Homo Sapiens
LVGAQAPATEEQEAAS

SEQ ID NO: 54023 - protein, 16 aa, Homo Sapiens
VGAQAPATEEQEAASS

SEQ ID NO: 54024 - protein, 16 aa, Homo Sapiens
GAQAPATEEQEAASSS

SEQ ID NO: 54025 - protein, 16 aa, Homo Sapiens
AQAPATEEQEAASSSS

SEQ ID NO: 54026 - protein, 16 aa, Homo Sapiens
QAPATEEQEAASSSST

SEQ ID NO: 54027 - protein, 16 aa, Homo Sapiens
APATEEQEAASSSSTL

SEQ ID NO: 54028 - protein, 16 aa, Homo Sapiens
PATEEQEAASSSSTLV

SEQ ID NO: 54029 - protein, 16 aa, Homo Sapiens
ATEEQEAASSSSTLVE

SEQ ID NO: 54030 - protein, 16 aa, Homo Sapiens
TEEQEAASSSSTLVEV

SEQ ID NO: 54031 - protein, 16 aa, Homo Sapiens
EEQEAASSSSTLVEVT

SEQ ID NO: 54032 - protein, 16 aa, Homo Sapiens
EQEAASSSSTLVEVTL

SEQ ID NO: 54033 - protein, 16 aa, Homo Sapiens
QEAASSSSTLVEVTLG

SEQ ID NO: 54034 - protein, 16 aa, Homo Sapiens
EAASSSSTLVEVTLGE

SEQ ID NO: 54035 - protein, 16 aa, Homo Sapiens
AASSSSTLVEVTLGEV

SEQ ID NO: 54036 - protein, 16 aa, Homo Sapiens
ASSSSTLVEVTLGEVP

SEQ ID NO: 54037 - protein, 16 aa, Homo Sapiens
SSSSTLVEVTLGEVPA

SEQ ID NO: 54038 - protein, 16 aa, Homo Sapiens
SSSTLVEVTLGEVPAA

SEQ ID NO: 54039 - protein, 16 aa, Homo Sapiens
SSTLVEVTLGEVPAAE

SEQ ID NO: 54040 - protein, 16 aa, Homo Sapiens
STLVEVTLGEVPAAES

SEQ ID NO: 54041 - protein, 16 aa, Homo Sapiens
TLVEVTLGEVPAAESP

SEQ ID NO: 54042 - protein, 16 aa, Homo Sapiens
LVEVTLGEVPAAESPD

SEQ ID NO: 54043 - protein, 16 aa, Homo Sapiens
VEVTLGEVPAAESPDP

SEQ ID NO: 54044 - protein, 16 aa, Homo Sapiens
EVTLGEVPAAESPDPP

SEQ ID NO: 54045 - protein, 16 aa, Homo Sapiens
VTLGEVPAAESPDPPQ

SEQ ID NO: 54046 - protein, 16 aa, Homo Sapiens
TLGEVPAAESPDPPQS

SEQ ID NO: 54047 - protein, 16 aa, Homo Sapiens
LGEVPAAESPDPPQSP

SEQ ID NO: 54048 - protein, 16 aa, Homo Sapiens
GEVPAAESPDPPQSPQ

SEQ ID NO: 54049 - protein, 16 aa, Homo Sapiens
EVPAAESPDPPQSPQG

SEQ ID NO: 54050 - protein, 16 aa, Homo Sapiens
VPAAESPDPPQSPQGA

SEQ ID NO: 54051 - protein, 16 aa, Homo Sapiens
PAAESPDPPQSPQGAS

SEQ ID NO: 54052 - protein, 16 aa, Homo Sapiens
AAESPDPPQSPQGASS

SEQ ID NO: 54053 - protein, 16 aa, Homo Sapiens
AESPDPPQSPQGASSL

SEQ ID NO: 54054 - protein, 16 aa, Homo Sapiens
ESPDPPQSPQGASSLP

SEQ ID NO: 54055 - protein, 16 aa, Homo Sapiens
SPDPPQSPQGASSLPT

SEQ ID NO: 54056 - protein, 16 aa, Homo Sapiens
PDPPQSPQGASSLPTT

SEQ ID NO: 54057 - protein, 16 aa, Homo Sapiens
DPPQSPQGASSLPTTM

SEQ ID NO: 54058 - protein, 16 aa, Homo Sapiens
PPQSPQGASSLPTTMN

SEQ ID NO: 54059 - protein, 16 aa, Homo Sapiens
PQSPQGASSLPTTMNY

SEQ ID NO: 54060 - protein, 16 aa, Homo Sapiens
QSPQGASSLPTTMNYP

SEQ ID NO: 54061 - protein, 16 aa, Homo Sapiens
SPQGASSLPTTMNYPL

SEQ ID NO: 54062 - protein, 16 aa, Homo Sapiens
PQGASSLPTTMNYPLW

SEQ ID NO: 54063 - protein, 16 aa, Homo Sapiens
QGASSLPTTMNYPLWS

SEQ ID NO: 54064 - protein, 16 aa, Homo Sapiens
GASSLPTTMNYPLWSQ

SEQ ID NO: 54065 - protein, 16 aa, Homo Sapiens
ASSLPTTMNYPLWSQS

SEQ ID NO: 54066 - protein, 16 aa, Homo Sapiens
SSLPTTMNYPLWSQSY

SEQ ID NO: 54067 - protein, 16 aa, Homo Sapiens
SLPTTMNYPLWSQSYE

SEQ ID NO: 54068 - protein, 16 aa, Homo Sapiens
LPTTMNYPLWSQSYED

SEQ ID NO: 54069 - protein, 16 aa, Homo Sapiens
PTTMNYPLWSQSYEDS

SEQ ID NO: 54070 - protein, 16 aa, Homo Sapiens
TTMNYPLWSQSYEDSS

SEQ ID NO: 54071 - protein, 16 aa, Homo Sapiens
TMNYPLWSQSYEDSSN

SEQ ID NO: 54072 - protein, 16 aa, Homo Sapiens
MNYPLWSQSYEDSSNQ

SEQ ID NO: 54073 - protein, 16 aa, Homo Sapiens
NYPLWSQSYEDSSNQE

SEQ ID NO: 54074 - protein, 16 aa, Homo Sapiens
YPLWSQSYEDSSNQEE

SEQ ID NO: 54075 - protein, 16 aa, Homo Sapiens
PLWSQSYEDSSNQEEE

SEQ ID NO: 54076 - protein, 16 aa, Homo Sapiens
LWSQSYEDSSNQEEEG

SEQ ID NO: 54077 - protein, 16 aa, Homo Sapiens
WSQSYEDSSNQEEEGP

SEQ ID NO: 54078 - protein, 16 aa, Homo Sapiens
SQSYEDSSNQEEEGPS

SEQ ID NO: 54079 - protein, 16 aa, Homo Sapiens
QSYEDSSNQEEEGPST

SEQ ID NO: 54080 - protein, 16 aa, Homo Sapiens
SYEDSSNQEEEGPSTF

SEQ ID NO: 54081 - protein, 16 aa, Homo Sapiens
YEDSSNQEEEGPSTFP

SEQ ID NO: 54082 - protein, 16 aa, Homo Sapiens
EDSSNQEEEGPSTFPD

SEQ ID NO: 54083 - protein, 16 aa, Homo Sapiens
DSSNQEEEGPSTFPDL

SEQ ID NO: 54084 - protein, 16 aa, Homo Sapiens
SSNQEEEGPSTFPDLE

SEQ ID NO: 54085 - protein, 16 aa, Homo Sapiens
SNQEEEGPSTFPDLES

SEQ ID NO: 54086 - protein, 16 aa, Homo Sapiens
NQEEEGPSTFPDLESE

SEQ ID NO: 54087 - protein, 16 aa, Homo Sapiens
QEEEGPSTFPDLESEF

SEQ ID NO: 54088 - protein, 16 aa, Homo Sapiens
EEEGPSTFPDLESEFQ

SEQ ID NO: 54089 - protein, 16 aa, Homo Sapiens
EEGPSTFPDLESEFQA

SEQ ID NO: 54090 - protein, 16 aa, Homo Sapiens
EGPSTFPDLESEFQAA

SEQ ID NO: 54091 - protein, 16 aa, Homo Sapiens
GPSTFPDLESEFQAAL

SEQ ID NO: 54092 - protein, 16 aa, Homo Sapiens
PSTFPDLESEFQAALS

SEQ ID NO: 54093 - protein, 16 aa, Homo Sapiens
STFPDLESEFQAALSR

SEQ ID NO: 54094 - protein, 16 aa, Homo Sapiens
TFPDLESEFQAALSRK

SEQ ID NO: 54095 - protein, 16 aa, Homo Sapiens
FPDLESEFQAALSRKV

SEQ ID NO: 54096 - protein, 16 aa, Homo Sapiens
PDLESEFQAALSRKVA

SEQ ID NO: 54097 - protein, 16 aa, Homo Sapiens
DLESEFQAALSRKVAK

SEQ ID NO: 54098 - protein, 16 aa, Homo Sapiens
LESEFQAALSRKVAKL

SEQ ID NO: 54099 - protein, 16 aa, Homo Sapiens
ESEFQAALSRKVAKLV

SEQ ID NO: 54100 - protein, 16 aa, Homo Sapiens
SEFQAALSRKVAKLVH

SEQ ID NO: 54101 - protein, 16 aa, Homo Sapiens
EFQAALSRKVAKLVHF

SEQ ID NO: 54102 - protein, 16 aa, Homo Sapiens
FQAALSRKVAKLVHFL

SEQ ID NO: 54103 - protein, 16 aa, Homo Sapiens
QAALSRKVAKLVHFLL

SEQ ID NO: 54104 - protein, 16 aa, Homo Sapiens
AALSRKVAKLVHFLLL

SEQ ID NO: 54105 - protein, 16 aa, Homo Sapiens
ALSRKVAKLVHFLLLK

SEQ ID NO: 54106 - protein, 16 aa, Homo Sapiens
LSRKVAKLVHFLLLKY

SEQ ID NO: 54107 - protein, 16 aa, Homo Sapiens
SRKVAKLVHFLLLKYR

SEQ ID NO: 54108 - protein, 16 aa, Homo Sapiens
RKVAKLVHFLLLKYRA

SEQ ID NO: 54109 - protein, 16 aa, Homo Sapiens
KVAKLVHFLLLKYRAR

SEQ ID NO: 54110 - protein, 16 aa, Homo Sapiens
VAKLVHFLLLKYRARE

SEQ ID NO: 54111 - protein, 16 aa, Homo Sapiens
AKLVHFLLLKYRAREP

SEQ ID NO: 54112 - protein, 16 aa, Homo Sapiens
KLVHFLLLKYRAREPV

SEQ ID NO: 54113 - protein, 16 aa, Homo Sapiens
LVHFLLLKYRAREPVT

SEQ ID NO: 54114 - protein, 16 aa, Homo Sapiens
VHFLLLKYRAREPVTK

SEQ ID NO: 54115 - protein, 16 aa, Homo Sapiens
HFLLLKYRAREPVTKA

SEQ ID NO: 54116 - protein, 16 aa, Homo Sapiens
FLLLKYRAREPVTKAE

SEQ ID NO: 54117 - protein, 16 aa, Homo Sapiens
LLLKYRAREPVTKAEM

SEQ ID NO: 54118 - protein, 16 aa, Homo Sapiens
LLKYRAREPVTKAEML

SEQ ID NO: 54119 - protein, 16 aa, Homo Sapiens
LKYRAREPVTKAEMLG

SEQ ID NO: 54120 - protein, 16 aa, Homo Sapiens
KYRAREPVTKAEMLGS

SEQ ID NO: 54121 - protein, 16 aa, Homo Sapiens
YRAREPVTKAEMLGSV

SEQ ID NO: 54122 - protein, 16 aa, Homo Sapiens
RAREPVTKAEMLGSVV

SEQ ID NO: 54123 - protein, 16 aa, Homo Sapiens
AREPVTKAEMLGSVVG

SEQ ID NO: 54124 - protein, 16 aa, Homo Sapiens
REPVTKAEMLGSVVGN

SEQ ID NO: 54125 - protein, 16 aa, Homo Sapiens
EPVTKAEMLGSVVGNW

SEQ ID NO: 54126 - protein, 16 aa, Homo Sapiens
PVTKAEMLGSVVGNWQ

SEQ ID NO: 54127 - protein, 16 aa, Homo Sapiens
VTKAEMLGSVVGNWQY

SEQ ID NO: 54128 - protein, 16 aa, Homo Sapiens
TKAEMLGSVVGNWQYF

SEQ ID NO: 54129 - protein, 16 aa, Homo Sapiens
KAEMLGSVVGNWQYFF

SEQ ID NO: 54130 - protein, 16 aa, Homo Sapiens
AEMLGSVVGNWQYFFP

SEQ ID NO: 54131 - protein, 16 aa, Homo Sapiens
EMLGSVVGNWQYFFPV

SEQ ID NO: 54132 - protein, 16 aa, Homo Sapiens
MLGSVVGNWQYFFPVI

SEQ ID NO: 54133 - protein, 16 aa, Homo Sapiens
LGSVVGNWQYFFPVIF

SEQ ID NO: 54134 - protein, 16 aa, Homo Sapiens
GSVVGNWQYFFPVIFS

SEQ ID NO: 54135 - protein, 16 aa, Homo Sapiens
SVVGNWQYFFPVIFSK

SEQ ID NO: 54136 - protein, 16 aa, Homo Sapiens
VVGNWQYFFPVIFSKA

SEQ ID NO: 54137 - protein, 16 aa, Homo Sapiens
VGNWQYFFPVIFSKAS

SEQ ID NO: 54138 - protein, 16 aa, Homo Sapiens
GNWQYFFPVIFSKASD

SEQ ID NO: 54139 - protein, 16 aa, Homo Sapiens
NWQYFFPVIFSKASDS

SEQ ID NO: 54140 - protein, 16 aa, Homo Sapiens
WQYFFPVIFSKASDSL

SEQ ID NO: 54141 - protein, 16 aa, Homo Sapiens
QYFFPVIFSKASDSLQ

SEQ ID NO: 54142 - protein, 16 aa, Homo Sapiens
YFFPVIFSKASDSLQL

SEQ ID NO: 54143 - protein, 16 aa, Homo Sapiens
FFPVIFSKASDSLQLV

SEQ ID NO: 54144 - protein, 16 aa, Homo Sapiens
FPVIFSKASDSLQLVF

SEQ ID NO: 54145 - protein, 16 aa, Homo Sapiens
PVIFSKASDSLQLVFG

SEQ ID NO: 54146 - protein, 16 aa, Homo Sapiens
VIFSKASDSLQLVFGI

SEQ ID NO: 54147 - protein, 16 aa, Homo Sapiens
IFSKASDSLQLVFGIE

SEQ ID NO: 54148 - protein, 16 aa, Homo Sapiens
FSKASDSLQLVFGIEL

SEQ ID NO: 54149 - protein, 16 aa, Homo Sapiens
SKASDSLQLVFGIELM

SEQ ID NO: 54150 - protein, 16 aa, Homo Sapiens
KASDSLQLVFGIELME

SEQ ID NO: 54151 - protein, 16 aa, Homo Sapiens
ASDSLQLVFGIELMEV

SEQ ID NO: 54152 - protein, 16 aa, Homo Sapiens
SDSLQLVFGIELMEVD

SEQ ID NO: 54153 - protein, 16 aa, Homo Sapiens
DSLQLVFGIELMEVDP

SEQ ID NO: 54154 - protein, 16 aa, Homo Sapiens
SLQLVFGIELMEVDPI

SEQ ID NO: 54155 - protein, 16 aa, Homo Sapiens
LQLVFGIELMEVDPIG

SEQ ID NO: 54156 - protein, 16 aa, Homo Sapiens
QLVFGIELMEVDPIGH

SEQ ID NO: 54157 - protein, 16 aa, Homo Sapiens
LVFGIELMEVDPIGHV

SEQ ID NO: 54158 - protein, 16 aa, Homo Sapiens
VFGIELMEVDPIGHVY

SEQ ID NO: 54159 - protein, 16 aa, Homo Sapiens
FGIELMEVDPIGHVYI

SEQ ID NO: 54160 - protein, 16 aa, Homo Sapiens
GIELMEVDPIGHVYIF

SEQ ID NO: 54161 - protein, 16 aa, Homo Sapiens
IELMEVDPIGHVYIFA

SEQ ID NO: 54162 - protein, 16 aa, Homo Sapiens
ELMEVDPIGHVYIFAT

SEQ ID NO: 54163 - protein, 16 aa, Homo Sapiens
LMEVDPIGHVYIFATC

SEQ ID NO: 54164 - protein, 16 aa, Homo Sapiens
MEVDPIGHVYIFATCL

SEQ ID NO: 54165 - protein, 16 aa, Homo Sapiens
EVDPIGHVYIFATCLG

SEQ ID NO: 54166 - protein, 16 aa, Homo Sapiens
VDPIGHVYIFATCLGL

SEQ ID NO: 54167 - protein, 16 aa, Homo Sapiens
DPIGHVYIFATCLGLS

SEQ ID NO: 54168 - protein, 16 aa, Homo Sapiens
PIGHVYIFATCLGLSY

SEQ ID NO: 54169 - protein, 16 aa, Homo Sapiens
IGHVYIFATCLGLSYD

SEQ ID NO: 54170 - protein, 16 aa, Homo Sapiens
GHVYIFATCLGLSYDG

SEQ ID NO: 54171 - protein, 16 aa, Homo Sapiens
HVYIFATCLGLSYDGL

SEQ ID NO: 54172 - protein, 16 aa, Homo Sapiens
VYIFATCLGLSYDGLL

SEQ ID NO: 54173 - protein, 16 aa, Homo Sapiens
YIFATCLGLSYDGLLG

SEQ ID NO: 54174 - protein, 16 aa, Homo Sapiens
IFATCLGLSYDGLLGD

SEQ ID NO: 54175 - protein, 16 aa, Homo Sapiens
FATCLGLSYDGLLGDN

SEQ ID NO: 54176 - protein, 16 aa, Homo Sapiens
ATCLGLSYDGLLGDNQ

SEQ ID NO: 54177 - protein, 16 aa, Homo Sapiens
TCLGLSYDGLLGDNQI

SEQ ID NO: 54178 - protein, 16 aa, Homo Sapiens
CLGLSYDGLLGDNQIM

SEQ ID NO: 54179 - protein, 16 aa, Homo Sapiens
LGLSYDGLLGDNQIMP

SEQ ID NO: 54180 - protein, 16 aa, Homo Sapiens
GLSYDGLLGDNQIMPK

SEQ ID NO: 54181 - protein, 16 aa, Homo Sapiens
LSYDGLLGDNQIMPKT

SEQ ID NO: 54182 - protein, 16 aa, Homo Sapiens
SYDGLLGDNQIMPKTG

SEQ ID NO: 54183 - protein, 16 aa, Homo Sapiens
YDGLLGDNQIMPKTGF

SEQ ID NO: 54184 - protein, 16 aa, Homo Sapiens
DGLLGDNQIMPKTGFL

SEQ ID NO: 54185 - protein, 16 aa, Homo Sapiens
GLLGDNQIMPKTGFLI

SEQ ID NO: 54186 - protein, 16 aa, Homo Sapiens
LLGDNQIMPKTGFLII

SEQ ID NO: 54187 - protein, 16 aa, Homo Sapiens
LGDNQIMPKTGFLIII

SEQ ID NO: 54188 - protein, 16 aa, Homo Sapiens
GDNQIMPKTGFLIIIL

SEQ ID NO: 54189 - protein, 16 aa, Homo Sapiens
DNQIMPKTGFLIIILA

SEQ ID NO: 54190 - protein, 16 aa, Homo Sapiens
NQIMPKTGFLIIILAI

SEQ ID NO: 54191 - protein, 16 aa, Homo Sapiens
QIMPKTGFLIIILAII

SEQ ID NO: 54192 - protein, 16 aa, Homo Sapiens
IMPKTGFLIIILAIIA

SEQ ID NO: 54193 - protein, 16 aa, Homo Sapiens
MPKTGFLIIILAIIAK

SEQ ID NO: 54194 - protein, 16 aa, Homo Sapiens
PKTGFLIIILAIIAKE

SEQ ID NO: 54195 - protein, 16 aa, Homo Sapiens
KTGFLIIILAIIAKEG

SEQ ID NO: 54196 - protein, 16 aa, Homo Sapiens
TGFLIIILAIIAKEGD

SEQ ID NO: 54197 - protein, 16 aa, Homo Sapiens
GFLIIILAIIAKEGDC

SEQ ID NO: 54198 - protein, 16 aa, Homo Sapiens
FLIIILAIIAKEGDCA

SEQ ID NO: 54199 - protein, 16 aa, Homo Sapiens
LIIILAIIAKEGDCAP

SEQ ID NO: 54200 - protein, 16 aa, Homo Sapiens
IIILAIIAKEGDCAPE

SEQ ID NO: 54201 - protein, 16 aa, Homo Sapiens
IILAIIAKEGDCAPEE

SEQ ID NO: 54202 - protein, 16 aa, Homo Sapiens
ILAIIAKEGDCAPEEK

SEQ ID NO: 54203 - protein, 16 aa, Homo Sapiens
LAIIAKEGDCAPEEKI

SEQ ID NO: 54204 - protein, 16 aa, Homo Sapiens
AIIAKEGDCAPEEKIW

SEQ ID NO: 54205 - protein, 16 aa, Homo Sapiens
IIAKEGDCAPEEKIWE

SEQ ID NO: 54206 - protein, 16 aa, Homo Sapiens
IAKEGDCAPEEKIWEE

SEQ ID NO: 54207 - protein, 16 aa, Homo Sapiens
AKEGDCAPEEKIWEEL

SEQ ID NO: 54208 - protein, 16 aa, Homo Sapiens
KEGDCAPEEKIWEELS

SEQ ID NO: 54209 - protein, 16 aa, Homo Sapiens
EGDCAPEEKIWEELSV

SEQ ID NO: 54210 - protein, 16 aa, Homo Sapiens
GDCAPEEKIWEELSVL

SEQ ID NO: 54211 - protein, 16 aa, Homo Sapiens
DCAPEEKIWEELSVLE

SEQ ID NO: 54212 - protein, 16 aa, Homo Sapiens
CAPEEKIWEELSVLEV

SEQ ID NO: 54213 - protein, 16 aa, Homo Sapiens
APEEKIWEELSVLEVF

SEQ ID NO: 54214 - protein, 16 aa, Homo Sapiens
PEEKIWEELSVLEVFE

SEQ ID NO: 54215 - protein, 16 aa, Homo Sapiens
EEKIWEELSVLEVFEG

SEQ ID NO: 54216 - protein, 16 aa, Homo Sapiens
EKIWEELSVLEVFEGR

SEQ ID NO: 54217 - protein, 16 aa, Homo Sapiens
KIWEELSVLEVFEGRE

SEQ ID NO: 54218 - protein, 16 aa, Homo Sapiens
IWEELSVLEVFEGRED

SEQ ID NO: 54219 - protein, 16 aa, Homo Sapiens
WEELSVLEVFEGREDS

SEQ ID NO: 54220 - protein, 16 aa, Homo Sapiens
EELSVLEVFEGREDSI

SEQ ID NO: 54221 - protein, 16 aa, Homo Sapiens
ELSVLEVFEGREDSIF

SEQ ID NO: 54222 - protein, 16 aa, Homo Sapiens
LSVLEVFEGREDSIFG

SEQ ID NO: 54223 - protein, 16 aa, Homo Sapiens
SVLEVFEGREDSIFGD

SEQ ID NO: 54224 - protein, 16 aa, Homo Sapiens
VLEVFEGREDSIFGDP

SEQ ID NO: 54225 - protein, 16 aa, Homo Sapiens
LEVFEGREDSIFGDPK

SEQ ID NO: 54226 - protein, 16 aa, Homo Sapiens
EVFEGREDSIFGDPKK

SEQ ID NO: 54227 - protein, 16 aa, Homo Sapiens
VFEGREDSIFGDPKKL

SEQ ID NO: 54228 - protein, 16 aa, Homo Sapiens
FEGREDSIFGDPKKLL

SEQ ID NO: 54229 - protein, 16 aa, Homo Sapiens
EGREDSIFGDPKKLLT

SEQ ID NO: 54230 - protein, 16 aa, Homo Sapiens
GREDSIFGDPKKLLTQ

SEQ ID NO: 54231 - protein, 16 aa, Homo Sapiens
REDSIFGDPKKLLTQY

SEQ ID NO: 54232 - protein, 16 aa, Homo Sapiens
EDSIFGDPKKLLTQYF

SEQ ID NO: 54233 - protein, 16 aa, Homo Sapiens
DSIFGDPKKLLTQYFV

SEQ ID NO: 54234 - protein, 16 aa, Homo Sapiens
SIFGDPKKLLTQYFVQ

SEQ ID NO: 54235 - protein, 16 aa, Homo Sapiens
IFGDPKKLLTQYFVQE

SEQ ID NO: 54236 - protein, 16 aa, Homo Sapiens
FGDPKKLLTQYFVQEN

SEQ ID NO: 54237 - protein, 16 aa, Homo Sapiens
GDPKKLLTQYFVQENY

SEQ ID NO: 54238 - protein, 16 aa, Homo Sapiens
DPKKLLTQYFVQENYL

SEQ ID NO: 54239 - protein, 16 aa, Homo Sapiens
PKKLLTQYFVQENYLE

SEQ ID NO: 54240 - protein, 16 aa, Homo Sapiens
KKLLTQYFVQENYLEY

SEQ ID NO: 54241 - protein, 16 aa, Homo Sapiens
KLLTQYFVQENYLEYR

SEQ ID NO: 54242 - protein, 16 aa, Homo Sapiens
LLTQYFVQENYLEYRQ

SEQ ID NO: 54243 - protein, 16 aa, Homo Sapiens
LTQYFVQENYLEYRQV

SEQ ID NO: 54244 - protein, 16 aa, Homo Sapiens
TQYFVQENYLEYRQVP

SEQ ID NO: 54245 - protein, 16 aa, Homo Sapiens
QYFVQENYLEYRQVPG

SEQ ID NO: 54246 - protein, 16 aa, Homo Sapiens
YFVQENYLEYRQVPGS

SEQ ID NO: 54247 - protein, 16 aa, Homo Sapiens
FVQENYLEYRQVPGSD

SEQ ID NO: 54248 - protein, 16 aa, Homo Sapiens
VQENYLEYRQVPGSDP

SEQ ID NO: 54249 - protein, 16 aa, Homo Sapiens
QENYLEYRQVPGSDPA

SEQ ID NO: 54250 - protein, 16 aa, Homo Sapiens
ENYLEYRQVPGSDPAC

SEQ ID NO: 54251 - protein, 16 aa, Homo Sapiens
NYLEYRQVPGSDPACY

SEQ ID NO: 54252 - protein, 16 aa, Homo Sapiens
YLEYRQVPGSDPACYE

SEQ ID NO: 54253 - protein, 16 aa, Homo Sapiens
LEYRQVPGSDPACYEF

SEQ ID NO: 54254 - protein, 16 aa, Homo Sapiens
EYRQVPGSDPACYEFL

SEQ ID NO: 54255 - protein, 16 aa, Homo Sapiens
YRQVPGSDPACYEFLW

SEQ ID NO: 54256 - protein, 16 aa, Homo Sapiens
RQVPGSDPACYEFLWG

SEQ ID NO: 54257 - protein, 16 aa, Homo Sapiens
QVPGSDPACYEFLWGP

SEQ ID NO: 54258 - protein, 16 aa, Homo Sapiens
VPGSDPACYEFLWGPR

SEQ ID NO: 54259 - protein, 16 aa, Homo Sapiens
PGSDPACYEFLWGPRA

SEQ ID NO: 54260 - protein, 16 aa, Homo Sapiens
GSDPACYEFLWGPRAL

SEQ ID NO: 54261 - protein, 16 aa, Homo Sapiens
SDPACYEFLWGPRALI

SEQ ID NO: 54262 - protein, 16 aa, Homo Sapiens
DPACYEFLWGPRALIE

SEQ ID NO: 54263 - protein, 16 aa, Homo Sapiens
PACYEFLWGPRALIET

SEQ ID NO: 54264 - protein, 16 aa, Homo Sapiens
ACYEFLWGPRALIETS

SEQ ID NO: 54265 - protein, 16 aa, Homo Sapiens
CYEFLWGPRALIETSY

SEQ ID NO: 54266 - protein, 16 aa, Homo Sapiens
YEFLWGPRALIETSYV

SEQ ID NO: 54267 - protein, 16 aa, Homo Sapiens
EFLWGPRALIETSYVK

SEQ ID NO: 54268 - protein, 16 aa, Homo Sapiens
FLWGPRALIETSYVKV

SEQ ID NO: 54269 - protein, 16 aa, Homo Sapiens
LWGPRALIETSYVKVL

SEQ ID NO: 54270 - protein, 16 aa, Homo Sapiens
WGPRALIETSYVKVLH

SEQ ID NO: 54271 - protein, 16 aa, Homo Sapiens
GPRALIETSYVKVLHH

SEQ ID NO: 54272 - protein, 16 aa, Homo Sapiens
PRALIETSYVKVLHHM

SEQ ID NO: 54273 - protein, 16 aa, Homo Sapiens
RALIETSYVKVLHHMV

SEQ ID NO: 54274 - protein, 16 aa, Homo Sapiens
ALIETSYVKVLHHMVK

SEQ ID NO: 54275 - protein, 16 aa, Homo Sapiens
LIETSYVKVLHHMVKI

SEQ ID NO: 54276 - protein, 16 aa, Homo Sapiens
IETSYVKVLHHMVKIS

SEQ ID NO: 54277 - protein, 16 aa, Homo Sapiens
ETSYVKVLHHMVKISG

SEQ ID NO: 54278 - protein, 16 aa, Homo Sapiens
TSYVKVLHHMVKISGG

SEQ ID NO: 54279 - protein, 16 aa, Homo Sapiens
SYVKVLHHMVKISGGP

SEQ ID NO: 54280 - protein, 16 aa, Homo Sapiens
YVKVLHHMVKISGGPR

SEQ ID NO: 54281 - protein, 16 aa, Homo Sapiens
VKVLHHMVKISGGPRI

SEQ ID NO: 54282 - protein, 16 aa, Homo Sapiens
KVLHHMVKISGGPRIS

SEQ ID NO: 54283 - protein, 16 aa, Homo Sapiens
VLHHMVKISGGPRISY

SEQ ID NO: 54284 - protein, 16 aa, Homo Sapiens
LHHMVKISGGPRISYP

SEQ ID NO: 54285 - protein, 16 aa, Homo Sapiens
HHMVKISGGPRISYPL

SEQ ID NO: 54286 - protein, 16 aa, Homo Sapiens
HMVKISGGPRISYPLL

SEQ ID NO: 54287 - protein, 16 aa, Homo Sapiens
MVKISGGPRISYPLLH

SEQ ID NO: 54288 - protein, 16 aa, Homo Sapiens
VKISGGPRISYPLLHE

SEQ ID NO: 54289 - protein, 16 aa, Homo Sapiens
KISGGPRISYPLLHEW

SEQ ID NO: 54290 - protein, 16 aa, Homo Sapiens
ISGGPRISYPLLHEWA

SEQ ID NO: 54291 - protein, 16 aa, Homo Sapiens
SGGPRISYPLLHEWAL

SEQ ID NO: 54292 - protein, 16 aa, Homo Sapiens
GGPRISYPLLHEWALR

SEQ ID NO: 54293 - protein, 16 aa, Homo Sapiens
GPRISYPLLHEWALRE

SEQ ID NO: 54294 - protein, 16 aa, Homo Sapiens
PRISYPLLHEWALREG

SEQ ID NO: 54295 - protein, 16 aa, Homo Sapiens
RISYPLLHEWALREGE

SEQ ID NO: 54296 - protein, 16 aa, Homo Sapiens
ISYPLLHEWALREGEE

SEQ ID NO: 54297 - protein, 369 aa, Homo Sapiens
MPRAPKRQRCMPEEDLQSQSETQGLEGAQAPLAVEEDASSSTSTSSSFPSSFPSSSSSSSSSCYPLIPSTPEEVSADDETPNPPQSAQIACSSPSVVASLPLDQSDEGSSSQKEESPSTLQVLPDSESLPRSEIDEKVTDLVQFLLFKYQMKEPITKAEILESVIKNYEDHFPLLFSEASECMLLVFGIDVKEVDPTGHSFVLVTSLGLTYDGMLSDVQSMPKTGILILILSIIFIEGYCTPEEVIWEALNMMGLYDGMEHLIYGEPRKLLTQDWVQENYLEYRQVPGSDPARYEFLWGPRAHAEIRKMSLLKFLAKVNGSDPRSFPLWYEEALKDEEERAQDRIATTDDTTAMASASSSATGSFSYPE

SEQ ID NO: 54298 - protein, 8 aa, Homo Sapiens
MPRAPKRQ

SEQ ID NO: 54299 - protein, 8 aa, Homo Sapiens
APKRQRCM

SEQ ID NO: 54300 - protein, 8 aa, Homo Sapiens
MPEEDLQS

SEQ ID NO: 54301 - protein, 8 aa, Homo Sapiens
SQSETQGL

SEQ ID NO: 54302 - protein, 8 aa, Homo Sapiens
ETQGLEGA

SEQ ID NO: 54303 - protein, 8 aa, Homo Sapiens
LEGAQAPL

SEQ ID NO: 54304 - protein, 8 aa, Homo Sapiens
GAQAPLAV

SEQ ID NO: 54305 - protein, 8 aa, Homo Sapiens
AQAPLAVE

SEQ ID NO: 54306 - protein, 8 aa, Homo Sapiens
LAVEEDAS

SEQ ID NO: 54307 - protein, 8 aa, Homo Sapiens
EEDASSST

SEQ ID NO: 54308 - protein, 8 aa, Homo Sapiens
STSTSSSF

SEQ ID NO: 54309 - protein, 8 aa, Homo Sapiens
STSSSFPS

SEQ ID NO: 54310 - protein, 8 aa, Homo Sapiens
SSSFPSSF

SEQ ID NO: 54311 - protein, 8 aa, Homo Sapiens
FPSSFPSS

SEQ ID NO: 54312 - protein, 8 aa, Homo Sapiens
FPSSSSSS

SEQ ID NO: 54313 - protein, 8 aa, Homo Sapiens
SSSSSSCY

SEQ ID NO: 54314 - protein, 8 aa, Homo Sapiens
SSSSCYPL

SEQ ID NO: 54315 - protein, 8 aa, Homo Sapiens
YPLIPSTP

SEQ ID NO: 54316 - protein, 8 aa, Homo Sapiens
IPSTPEEV

SEQ ID NO: 54317 - protein, 8 aa, Homo Sapiens
EVSADDET

SEQ ID NO: 54318 - protein, 8 aa, Homo Sapiens
NPPQSAQI

SEQ ID NO: 54319 - protein, 8 aa, Homo Sapiens
AQIACSSP

SEQ ID NO: 54320 - protein, 8 aa, Homo Sapiens
QIACSSPS

SEQ ID NO: 54321 - protein, 8 aa, Homo Sapiens
SPSVVASL

SEQ ID NO: 54322 - protein, 8 aa, Homo Sapiens
SVVASLPL

SEQ ID NO: 54323 - protein, 8 aa, Homo Sapiens
KEESPSTL

SEQ ID NO: 54324 - protein, 8 aa, Homo Sapiens
ESPSTLQV

SEQ ID NO: 54325 - protein, 8 aa, Homo Sapiens
SPSTLQVL

SEQ ID NO: 54326 - protein, 8 aa, Homo Sapiens
VLPDSESL

SEQ ID NO: 54327 - protein, 8 aa, Homo Sapiens
ESLPRSEI

SEQ ID NO: 54328 - protein, 8 aa, Homo Sapiens
VTDLVQFL

SEQ ID NO: 54329 - protein, 8 aa, Homo Sapiens
DLVQFLLF

SEQ ID NO: 54330 - protein, 8 aa, Homo Sapiens
LVQFLLFK

SEQ ID NO: 54331 - protein, 8 aa, Homo Sapiens
VQFLLFKY

SEQ ID NO: 54332 - protein, 8 aa, Homo Sapiens
FLLFKYQM

SEQ ID NO: 54333 - protein, 8 aa, Homo Sapiens
LLFKYQMK

SEQ ID NO: 54334 - protein, 8 aa, Homo Sapiens
KYQMKEPI

SEQ ID NO: 54335 - protein, 8 aa, Homo Sapiens
YQMKEPIT

SEQ ID NO: 54336 - protein, 8 aa, Homo Sapiens
QMKEPITK

SEQ ID NO: 54337 - protein, 8 aa, Homo Sapiens
EPITKAEI

SEQ ID NO: 54338 - protein, 8 aa, Homo Sapiens
AEILESVI

SEQ ID NO: 54339 - protein, 8 aa, Homo Sapiens
EILESVIK

SEQ ID NO: 54340 - protein, 8 aa, Homo Sapiens
LESVIKNY

SEQ ID NO: 54341 - protein, 8 aa, Homo Sapiens
NYEDHFPL

SEQ ID NO: 54342 - protein, 8 aa, Homo Sapiens
YEDHFPLL

SEQ ID NO: 54343 - protein, 8 aa, Homo Sapiens
FPLLFSEA

SEQ ID NO: 54344 - protein, 8 aa, Homo Sapiens
SEASECML

SEQ ID NO: 54345 - protein, 8 aa, Homo Sapiens
EASECMLL

SEQ ID NO: 54346 - protein, 8 aa, Homo Sapiens
SECMLLVF

SEQ ID NO: 54347 - protein, 8 aa, Homo Sapiens
CMLLVFGI

SEQ ID NO: 54348 - protein, 8 aa, Homo Sapiens
LLVFGIDV

SEQ ID NO: 54349 - protein, 8 aa, Homo Sapiens
LVFGIDVK

SEQ ID NO: 54350 - protein, 8 aa, Homo Sapiens
FGIDVKEV

SEQ ID NO: 54351 - protein, 8 aa, Homo Sapiens
DPTGHSFV

SEQ ID NO: 54352 - protein, 8 aa, Homo Sapiens
TGHSFVLV

SEQ ID NO: 54353 - protein, 8 aa, Homo Sapiens
SFVLVTSL

SEQ ID NO: 54354 - protein, 8 aa, Homo Sapiens
VLVTSLGL

SEQ ID NO: 54355 - protein, 8 aa, Homo Sapiens
VTSLGLTY

SEQ ID NO: 54356 - protein, 8 aa, Homo Sapiens
GLTYDGML

SEQ ID NO: 54357 - protein, 8 aa, Homo Sapiens
MLSDVQSM

SEQ ID NO: 54358 - protein, 8 aa, Homo Sapiens
QSMPKTGI

SEQ ID NO: 54359 - protein, 8 aa, Homo Sapiens
SMPKTGIL

SEQ ID NO: 54360 - protein, 8 aa, Homo Sapiens
MPKTGILI

SEQ ID NO: 54361 - protein, 8 aa, Homo Sapiens
ILILILSI

SEQ ID NO: 54362 - protein, 8 aa, Homo Sapiens
ILILSIIF

SEQ ID NO: 54363 - protein, 8 aa, Homo Sapiens
LILSIIFI

SEQ ID NO: 54364 - protein, 8 aa, Homo Sapiens
SIIFIEGY

SEQ ID NO: 54365 - protein, 8 aa, Homo Sapiens
CTPEEVIW

SEQ ID NO: 54366 - protein, 8 aa, Homo Sapiens
EEVIWEAL

SEQ ID NO: 54367 - protein, 8 aa, Homo Sapiens
VIWEALNM

SEQ ID NO: 54368 - protein, 8 aa, Homo Sapiens
EALNMMGL

SEQ ID NO: 54369 - protein, 8 aa, Homo Sapiens
ALNMMGLY

SEQ ID NO: 54370 - protein, 8 aa, Homo Sapiens
MMGLYDGM

SEQ ID NO: 54371 - protein, 8 aa, Homo Sapiens
GLYDGMEH

SEQ ID NO: 54372 - protein, 8 aa, Homo Sapiens
LYDGMEHL

SEQ ID NO: 54373 - protein, 8 aa, Homo Sapiens
DGMEHLIY

SEQ ID NO: 54374 - protein, 8 aa, Homo Sapiens
HLIYGEPR

SEQ ID NO: 54375 - protein, 8 aa, Homo Sapiens
LIYGEPRK

SEQ ID NO: 54376 - protein, 8 aa, Homo Sapiens
IYGEPRKL

SEQ ID NO: 54377 - protein, 8 aa, Homo Sapiens
KLLTQDWV

SEQ ID NO: 54378 - protein, 8 aa, Homo Sapiens
LLTQDWVQ

SEQ ID NO: 54379 - protein, 8 aa, Homo Sapiens
VQENYLEY

SEQ ID NO: 54380 - protein, 8 aa, Homo Sapiens
NYLEYRQV

SEQ ID NO: 54381 - protein, 8 aa, Homo Sapiens
QVPGSDPA

SEQ ID NO: 54382 - protein, 8 aa, Homo Sapiens
YEFLWGPR

SEQ ID NO: 54383 - protein, 8 aa, Homo Sapiens
FLWGPRAH

SEQ ID NO: 54384 - protein, 8 aa, Homo Sapiens
GPRAHAEI

SEQ ID NO: 54385 - protein, 8 aa, Homo Sapiens
RAHAEIRK

SEQ ID NO: 54386 - protein, 8 aa, Homo Sapiens
AEIRKMSL

SEQ ID NO: 54387 - protein, 8 aa, Homo Sapiens
EIRKMSLL

SEQ ID NO: 54388 - protein, 8 aa, Homo Sapiens
IRKMSLLK

SEQ ID NO: 54389 - protein, 8 aa, Homo Sapiens
RKMSLLKF

SEQ ID NO: 54390 - protein, 8 aa, Homo Sapiens
KMSLLKFL

SEQ ID NO: 54391 - protein, 8 aa, Homo Sapiens
SLLKFLAK

SEQ ID NO: 54392 - protein, 8 aa, Homo Sapiens
LLKFLAKV

SEQ ID NO: 54393 - protein, 8 aa, Homo Sapiens
FLAKVNGS

SEQ ID NO: 54394 - protein, 8 aa, Homo Sapiens
KVNGSDPR

SEQ ID NO: 54395 - protein, 8 aa, Homo Sapiens
RSFPLWYE

SEQ ID NO: 54396 - protein, 8 aa, Homo Sapiens
FPLWYEEA

SEQ ID NO: 54397 - protein, 8 aa, Homo Sapiens
PLWYEEAL

SEQ ID NO: 54398 - protein, 8 aa, Homo Sapiens
LWYEEALK

SEQ ID NO: 54399 - protein, 8 aa, Homo Sapiens
AQDRIATT

SEQ ID NO: 54400 - protein, 8 aa, Homo Sapiens
ATTDDTTA

SEQ ID NO: 54401 - protein, 8 aa, Homo Sapiens
TTDDTTAM

SEQ ID NO: 54402 - protein, 8 aa, Homo Sapiens
DTTAMASA

SEQ ID NO: 54403 - protein, 8 aa, Homo Sapiens
TTAMASAS

SEQ ID NO: 54404 - protein, 8 aa, Homo Sapiens
AMASASSS

SEQ ID NO: 54405 - protein, 8 aa, Homo Sapiens
MASASSSA

SEQ ID NO: 54406 - protein, 8 aa, Homo Sapiens
SSSATGSF

SEQ ID NO: 54407 - protein, 8 aa, Homo Sapiens
SATGSFSY

SEQ ID NO: 54408 - protein, 9 aa, Homo Sapiens
MPRAPKRQR

SEQ ID NO: 54409 - protein, 9 aa, Homo Sapiens
MPEEDLQSQ

SEQ ID NO: 54410 - protein, 9 aa, Homo Sapiens
SETQGLEGA

SEQ ID NO: 54411 - protein, 9 aa, Homo Sapiens
GLEGAQAPL

SEQ ID NO: 54412 - protein, 9 aa, Homo Sapiens
EGAQAPLAV

SEQ ID NO: 54413 - protein, 9 aa, Homo Sapiens
AQAPLAVEE

SEQ ID NO: 54414 - protein, 9 aa, Homo Sapiens
EEDASSSTS

SEQ ID NO: 54415 - protein, 9 aa, Homo Sapiens
TSSSFPSSF

SEQ ID NO: 54416 - protein, 9 aa, Homo Sapiens
SSFPSSFPS

SEQ ID NO: 54417 - protein, 9 aa, Homo Sapiens
FPSSFPSSS

SEQ ID NO: 54418 - protein, 9 aa, Homo Sapiens
FPSSSSSSS

SEQ ID NO: 54419 - protein, 9 aa, Homo Sapiens
SSSSSSSCY

SEQ ID NO: 54420 - protein, 9 aa, Homo Sapiens
SSSSSCYPL

SEQ ID NO: 54421 - protein, 9 aa, Homo Sapiens
YPLIPSTPE

SEQ ID NO: 54422 - protein, 9 aa, Homo Sapiens
LIPSTPEEV

SEQ ID NO: 54423 - protein, 9 aa, Homo Sapiens
EEVSADDET

SEQ ID NO: 54424 - protein, 9 aa, Homo Sapiens
ETPNPPQSA

SEQ ID NO: 54425 - protein, 9 aa, Homo Sapiens
AQIACSSPS

SEQ ID NO: 54426 - protein, 9 aa, Homo Sapiens
QIACSSPSV

SEQ ID NO: 54427 - protein, 9 aa, Homo Sapiens
SSPSVVASL

SEQ ID NO: 54428 - protein, 9 aa, Homo Sapiens
LPLDQSDEG

SEQ ID NO: 54429 - protein, 9 aa, Homo Sapiens
SQKEESPST

SEQ ID NO: 54430 - protein, 9 aa, Homo Sapiens
QKEESPSTL

SEQ ID NO: 54431 - protein, 9 aa, Homo Sapiens
EESPSTLQV

SEQ ID NO: 54432 - protein, 9 aa, Homo Sapiens
ESPSTLQVL

SEQ ID NO: 54433 - protein, 9 aa, Homo Sapiens
QVLPDSESL

SEQ ID NO: 54434 - protein, 9 aa, Homo Sapiens
VLPDSESLP

SEQ ID NO: 54435 - protein, 9 aa, Homo Sapiens
EIDEKVTDL

SEQ ID NO: 54436 - protein, 9 aa, Homo Sapiens
EKVTDLVQF

SEQ ID NO: 54437 - protein, 9 aa, Homo Sapiens
KVTDLVQFL

SEQ ID NO: 54438 - protein, 9 aa, Homo Sapiens
VTDLVQFLL

SEQ ID NO: 54439 - protein, 9 aa, Homo Sapiens
DLVQFLLFK

SEQ ID NO: 54440 - protein, 9 aa, Homo Sapiens
LVQFLLFKY

SEQ ID NO: 54441 - protein, 9 aa, Homo Sapiens
FLLFKYQMK

SEQ ID NO: 54442 - protein, 9 aa, Homo Sapiens
LLFKYQMKE

SEQ ID NO: 54443 - protein, 9 aa, Homo Sapiens
FKYQMKEPI

SEQ ID NO: 54444 - protein, 9 aa, Homo Sapiens
YQMKEPITK

SEQ ID NO: 54445 - protein, 9 aa, Homo Sapiens
QMKEPITKA

SEQ ID NO: 54446 - protein, 9 aa, Homo Sapiens
EPITKAEIL

SEQ ID NO: 54447 - protein, 9 aa, Homo Sapiens
TKAEILESV

SEQ ID NO: 54448 - protein, 9 aa, Homo Sapiens
AEILESVIK

SEQ ID NO: 54449 - protein, 9 aa, Homo Sapiens
KNYEDHFPL

SEQ ID NO: 54450 - protein, 9 aa, Homo Sapiens
NYEDHFPLL

SEQ ID NO: 54451 - protein, 9 aa, Homo Sapiens
YEDHFPLLF

SEQ ID NO: 54452 - protein, 9 aa, Homo Sapiens
FPLLFSEAS

SEQ ID NO: 54453 - protein, 9 aa, Homo Sapiens
LLFSEASEC

SEQ ID NO: 54454 - protein, 9 aa, Homo Sapiens
LFSEASECM

SEQ ID NO: 54455 - protein, 9 aa, Homo Sapiens
SEASECMLL

SEQ ID NO: 54456 - protein, 9 aa, Homo Sapiens
EASECMLLV

SEQ ID NO: 54457 - protein, 9 aa, Homo Sapiens
ECMLLVFGI

SEQ ID NO: 54458 - protein, 9 aa, Homo Sapiens
MLLVFGIDV

SEQ ID NO: 54459 - protein, 9 aa, Homo Sapiens
LLVFGIDVK

SEQ ID NO: 54460 - protein, 9 aa, Homo Sapiens
EVDPTGHSF

SEQ ID NO: 54461 - protein, 9 aa, Homo Sapiens
DPTGHSFVL

SEQ ID NO: 54462 - protein, 9 aa, Homo Sapiens
PTGHSFVLV

SEQ ID NO: 54463 - protein, 9 aa, Homo Sapiens
HSFVLVTSL

SEQ ID NO: 54464 - protein, 9 aa, Homo Sapiens
FVLVTSLGL

SEQ ID NO: 54465 - protein, 9 aa, Homo Sapiens
VLVTSLGLT

SEQ ID NO: 54466 - protein, 9 aa, Homo Sapiens
LVTSLGLTY

SEQ ID NO: 54467 - protein, 9 aa, Homo Sapiens
SLGLTYDGM

SEQ ID NO: 54468 - protein, 9 aa, Homo Sapiens
TYDGMLSDV

SEQ ID NO: 54469 - protein, 9 aa, Homo Sapiens
GMLSDVQSM

SEQ ID NO: 54470 - protein, 9 aa, Homo Sapiens
MLSDVQSMP

SEQ ID NO: 54471 - protein, 9 aa, Homo Sapiens
LSDVQSMPK

SEQ ID NO: 54472 - protein, 9 aa, Homo Sapiens
QSMPKTGIL

SEQ ID NO: 54473 - protein, 9 aa, Homo Sapiens
SMPKTGILI

SEQ ID NO: 54474 - protein, 9 aa, Homo Sapiens
MPKTGILIL

SEQ ID NO: 54475 - protein, 9 aa, Homo Sapiens
GILILILSI

SEQ ID NO: 54476 - protein, 9 aa, Homo Sapiens
ILILILSII

SEQ ID NO: 54477 - protein, 9 aa, Homo Sapiens
ILILSIIFI

SEQ ID NO: 54478 - protein, 9 aa, Homo Sapiens
LSIIFIEGY

SEQ ID NO: 54479 - protein, 9 aa, Homo Sapiens
EGYCTPEEV

SEQ ID NO: 54480 - protein, 9 aa, Homo Sapiens
GYCTPEEVI

SEQ ID NO: 54481 - protein, 9 aa, Homo Sapiens
YCTPEEVIW

SEQ ID NO: 54482 - protein, 9 aa, Homo Sapiens
TPEEVIWEA

SEQ ID NO: 54483 - protein, 9 aa, Homo Sapiens
PEEVIWEAL

SEQ ID NO: 54484 - protein, 9 aa, Homo Sapiens
EEVIWEALN

SEQ ID NO: 54485 - protein, 9 aa, Homo Sapiens
EVIWEALNM

SEQ ID NO: 54486 - protein, 9 aa, Homo Sapiens
VIWEALNMM

SEQ ID NO: 54487 - protein, 9 aa, Homo Sapiens
WEALNMMGL

SEQ ID NO: 54488 - protein, 9 aa, Homo Sapiens
EALNMMGLY

SEQ ID NO: 54489 - protein, 9 aa, Homo Sapiens
NMMGLYDGM

SEQ ID NO: 54490 - protein, 9 aa, Homo Sapiens
GLYDGMEHL

SEQ ID NO: 54491 - protein, 9 aa, Homo Sapiens
LYDGMEHLI

SEQ ID NO: 54492 - protein, 9 aa, Homo Sapiens
HLIYGEPRK

SEQ ID NO: 54493 - protein, 9 aa, Homo Sapiens
LIYGEPRKL

SEQ ID NO: 54494 - protein, 9 aa, Homo Sapiens
IYGEPRKLL

SEQ ID NO: 54495 - protein, 9 aa, Homo Sapiens
KLLTQDWVQ

SEQ ID NO: 54496 - protein, 9 aa, Homo Sapiens
TQDWVQENY

SEQ ID NO: 54497 - protein, 9 aa, Homo Sapiens
WVQENYLEY

SEQ ID NO: 54498 - protein, 9 aa, Homo Sapiens
VQENYLEYR

SEQ ID NO: 54499 - protein, 9 aa, Homo Sapiens
RQVPGSDPA

SEQ ID NO: 54500 - protein, 9 aa, Homo Sapiens
QVPGSDPAR

SEQ ID NO: 54501 - protein, 9 aa, Homo Sapiens
VPGSDPARY

SEQ ID NO: 54502 - protein, 9 aa, Homo Sapiens
GSDPARYEF

SEQ ID NO: 54503 - protein, 9 aa, Homo Sapiens
DPARYEFLW

SEQ ID NO: 54504 - protein, 9 aa, Homo Sapiens
RYEFLWGPR

SEQ ID NO: 54505 - protein, 9 aa, Homo Sapiens
FLWGPRAHA

SEQ ID NO: 54506 - protein, 9 aa, Homo Sapiens
HAEIRKMSL

SEQ ID NO: 54507 - protein, 9 aa, Homo Sapiens
AEIRKMSLL

SEQ ID NO: 54508 - protein, 9 aa, Homo Sapiens
EIRKMSLLK

SEQ ID NO: 54509 - protein, 9 aa, Homo Sapiens
KMSLLKFLA

SEQ ID NO: 54510 - protein, 9 aa, Homo Sapiens
MSLLKFLAK

SEQ ID NO: 54511 - protein, 9 aa, Homo Sapiens
SLLKFLAKV

SEQ ID NO: 54512 - protein, 9 aa, Homo Sapiens
DPRSFPLWY

SEQ ID NO: 54513 - protein, 9 aa, Homo Sapiens
RSFPLWYEE

SEQ ID NO: 54514 - protein, 9 aa, Homo Sapiens
FPLWYEEAL

SEQ ID NO: 54515 - protein, 9 aa, Homo Sapiens
EALKDEEER

SEQ ID NO: 54516 - protein, 9 aa, Homo Sapiens
ALKDEEERA

SEQ ID NO: 54517 - protein, 9 aa, Homo Sapiens
ATTDDTTAM

SEQ ID NO: 54518 - protein, 9 aa, Homo Sapiens
TTDDTTAMA

SEQ ID NO: 54519 - protein, 9 aa, Homo Sapiens
TTAMASASS

SEQ ID NO: 54520 - protein, 9 aa, Homo Sapiens
AMASASSSA

SEQ ID NO: 54521 - protein, 9 aa, Homo Sapiens
MASASSSAT

SEQ ID NO: 54522 - protein, 9 aa, Homo Sapiens
ASSSATGSF

SEQ ID NO: 54523 - protein, 9 aa, Homo Sapiens
SSATGSFSY

SEQ ID NO: 54524 - protein, 10 aa, Homo Sapiens
MPRAPKRQRC

SEQ ID NO: 54525 - protein, 10 aa, Homo Sapiens
CMPEEDLQSQ

SEQ ID NO: 54526 - protein, 10 aa, Homo Sapiens
EEDLQSQSET

SEQ ID NO: 54527 - protein, 10 aa, Homo Sapiens
LQSQSETQGL

SEQ ID NO: 54528 - protein, 10 aa, Homo Sapiens
GLEGAQAPLA

SEQ ID NO: 54529 - protein, 10 aa, Homo Sapiens
EEDASSSTST

SEQ ID NO: 54530 - protein, 10 aa, Homo Sapiens
SSSTSTSSSF

SEQ ID NO: 54531 - protein, 10 aa, Homo Sapiens
STSTSSSFPS

SEQ ID NO: 54532 - protein, 10 aa, Homo Sapiens
STSSSFPSSF

SEQ ID NO: 54533 - protein, 10 aa, Homo Sapiens
FPSSFPSSSS

SEQ ID NO: 54534 - protein, 10 aa, Homo Sapiens
FPSSSSSSSS

SEQ ID NO: 54535 - protein, 10 aa, Homo Sapiens
SSSSSSSSCY

SEQ ID NO: 54536 - protein, 10 aa, Homo Sapiens
SSSSSSCYPL

SEQ ID NO: 54537 - protein, 10 aa, Homo Sapiens
PLIPSTPEEV

SEQ ID NO: 54538 - protein, 10 aa, Homo Sapiens
IPSTPEEVSA

SEQ ID NO: 54539 - protein, 10 aa, Homo Sapiens
ETPNPPQSAQ

SEQ ID NO: 54540 - protein, 10 aa, Homo Sapiens
TPNPPQSAQI

SEQ ID NO: 54541 - protein, 10 aa, Homo Sapiens
AQIACSSPSV

SEQ ID NO: 54542 - protein, 10 aa, Homo Sapiens
QIACSSPSVV

SEQ ID NO: 54543 - protein, 10 aa, Homo Sapiens
CSSPSVVASL

SEQ ID NO: 54544 - protein, 10 aa, Homo Sapiens
SPSVVASLPL

SEQ ID NO: 54545 - protein, 10 aa, Homo Sapiens
LPLDQSDEGS

SEQ ID NO: 54546 - protein, 10 aa, Homo Sapiens
QSDEGSSSQK

SEQ ID NO: 54547 - protein, 10 aa, Homo Sapiens
SQKEESPSTL

SEQ ID NO: 54548 - protein, 10 aa, Homo Sapiens
EESPSTLQVL

SEQ ID NO: 54549 - protein, 10 aa, Homo Sapiens
LQVLPDSESL

SEQ ID NO: 54550 - protein, 10 aa, Homo Sapiens
VLPDSESLPR

SEQ ID NO: 54551 - protein, 10 aa, Homo Sapiens
SLPRSEIDEK

SEQ ID NO: 54552 - protein, 10 aa, Homo Sapiens
LPRSEIDEKV

SEQ ID NO: 54553 - protein, 10 aa, Homo Sapiens
SEIDEKVTDL

SEQ ID NO: 54554 - protein, 10 aa, Homo Sapiens
EIDEKVTDLV

SEQ ID NO: 54555 - protein, 10 aa, Homo Sapiens
DEKVTDLVQF

SEQ ID NO: 54556 - protein, 10 aa, Homo Sapiens
KVTDLVQFLL

SEQ ID NO: 54557 - protein, 10 aa, Homo Sapiens
VTDLVQFLLF

SEQ ID NO: 54558 - protein, 10 aa, Homo Sapiens
TDLVQFLLFK

SEQ ID NO: 54559 - protein, 10 aa, Homo Sapiens
DLVQFLLFKY

SEQ ID NO: 54560 - protein, 10 aa, Homo Sapiens
QFLLFKYQMK

SEQ ID NO: 54561 - protein, 10 aa, Homo Sapiens
FLLFKYQMKE

SEQ ID NO: 54562 - protein, 10 aa, Homo Sapiens
KYQMKEPITK

SEQ ID NO: 54563 - protein, 10 aa, Homo Sapiens
YQMKEPITKA

SEQ ID NO: 54564 - protein, 10 aa, Homo Sapiens
ITKAEILESV

SEQ ID NO: 54565 - protein, 10 aa, Homo Sapiens
TKAEILESVI

SEQ ID NO: 54566 - protein, 10 aa, Homo Sapiens
KAEILESVIK

SEQ ID NO: 54567 - protein, 10 aa, Homo Sapiens
AEILESVIKN

SEQ ID NO: 54568 - protein, 10 aa, Homo Sapiens
EILESVIKNY

SEQ ID NO: 54569 - protein, 10 aa, Homo Sapiens
SVIKNYEDHF

SEQ ID NO: 54570 - protein, 10 aa, Homo Sapiens
NYEDHFPLLF

SEQ ID NO: 54571 - protein, 10 aa, Homo Sapiens
FPLLFSEASE

SEQ ID NO: 54572 - protein, 10 aa, Homo Sapiens
LLFSEASECM

SEQ ID NO: 54573 - protein, 10 aa, Homo Sapiens
SEASECMLLV

SEQ ID NO: 54574 - protein, 10 aa, Homo Sapiens
EASECMLLVF

SEQ ID NO: 54575 - protein, 10 aa, Homo Sapiens
SECMLLVFGI

SEQ ID NO: 54576 - protein, 10 aa, Homo Sapiens
CMLLVFGIDV

SEQ ID NO: 54577 - protein, 10 aa, Homo Sapiens
MLLVFGIDVK

SEQ ID NO: 54578 - protein, 10 aa, Homo Sapiens
LVFGIDVKEV

SEQ ID NO: 54579 - protein, 10 aa, Homo Sapiens
KEVDPTGHSF

SEQ ID NO: 54580 - protein, 10 aa, Homo Sapiens
EVDPTGHSFV

SEQ ID NO: 54581 - protein, 10 aa, Homo Sapiens
DPTGHSFVLV

SEQ ID NO: 54582 - protein, 10 aa, Homo Sapiens
SFVLVTSLGL

SEQ ID NO: 54583 - protein, 10 aa, Homo Sapiens
VLVTSLGLTY

SEQ ID NO: 54584 - protein, 10 aa, Homo Sapiens
SLGLTYDGML

SEQ ID NO: 54585 - protein, 10 aa, Homo Sapiens
LTYDGMLSDV

SEQ ID NO: 54586 - protein, 10 aa, Homo Sapiens
MLSDVQSMPK

SEQ ID NO: 54587 - protein, 10 aa, Homo Sapiens
QSMPKTGILI

SEQ ID NO: 54588 - protein, 10 aa, Homo Sapiens
SMPKTGILIL

SEQ ID NO: 54589 - protein, 10 aa, Homo Sapiens
MPKTGILILI

SEQ ID NO: 54590 - protein, 10 aa, Homo Sapiens
TGILILILSI

SEQ ID NO: 54591 - protein, 10 aa, Homo Sapiens
GILILILSII

SEQ ID NO: 54592 - protein, 10 aa, Homo Sapiens
ILILILSIIF

SEQ ID NO: 54593 - protein, 10 aa, Homo Sapiens
LILILSIIFI

SEQ ID NO: 54594 - protein, 10 aa, Homo Sapiens
ILSIIFIEGY

SEQ ID NO: 54595 - protein, 10 aa, Homo Sapiens
EGYCTPEEVI

SEQ ID NO: 54596 - protein, 10 aa, Homo Sapiens
GYCTPEEVIW

SEQ ID NO: 54597 - protein, 10 aa, Homo Sapiens
CTPEEVIWEA

SEQ ID NO: 54598 - protein, 10 aa, Homo Sapiens
TPEEVIWEAL

SEQ ID NO: 54599 - protein, 10 aa, Homo Sapiens
EEVIWEALNM

SEQ ID NO: 54600 - protein, 10 aa, Homo Sapiens
EVIWEALNMM

SEQ ID NO: 54601 - protein, 10 aa, Homo Sapiens
IWEALNMMGL

SEQ ID NO: 54602 - protein, 10 aa, Homo Sapiens
WEALNMMGLY

SEQ ID NO: 54603 - protein, 10 aa, Homo Sapiens
GLYDGMEHLI

SEQ ID NO: 54604 - protein, 10 aa, Homo Sapiens
LYDGMEHLIY

SEQ ID NO: 54605 - protein, 10 aa, Homo Sapiens
HLIYGEPRKL

SEQ ID NO: 54606 - protein, 10 aa, Homo Sapiens
LIYGEPRKLL

SEQ ID NO: 54607 - protein, 10 aa, Homo Sapiens
EPRKLLTQDW

SEQ ID NO: 54608 - protein, 10 aa, Homo Sapiens
LTQDWVQENY

SEQ ID NO: 54609 - protein, 10 aa, Homo Sapiens
TQDWVQENYL

SEQ ID NO: 54610 - protein, 10 aa, Homo Sapiens
DWVQENYLEY

SEQ ID NO: 54611 - protein, 10 aa, Homo Sapiens
WVQENYLEYR

SEQ ID NO: 54612 - protein, 10 aa, Homo Sapiens
QVPGSDPARY

SEQ ID NO: 54613 - protein, 10 aa, Homo Sapiens
ARYEFLWGPR

SEQ ID NO: 54614 - protein, 10 aa, Homo Sapiens
FLWGPRAHAE

SEQ ID NO: 54615 - protein, 10 aa, Homo Sapiens
AHAEIRKMSL

SEQ ID NO: 54616 - protein, 10 aa, Homo Sapiens
AEIRKMSLLK

SEQ ID NO: 54617 - protein, 10 aa, Homo Sapiens
EIRKMSLLKF

SEQ ID NO: 54618 - protein, 10 aa, Homo Sapiens
KMSLLKFLAK

SEQ ID NO: 54619 - protein, 10 aa, Homo Sapiens
MSLLKFLAKV

SEQ ID NO: 54620 - protein, 10 aa, Homo Sapiens
LAKVNGSDPR

SEQ ID NO: 54621 - protein, 10 aa, Homo Sapiens
KVNGSDPRSF

SEQ ID NO: 54622 - protein, 10 aa, Homo Sapiens
NGSDPRSFPL

SEQ ID NO: 54623 - protein, 10 aa, Homo Sapiens
GSDPRSFPLW

SEQ ID NO: 54624 - protein, 10 aa, Homo Sapiens
RSFPLWYEEA

SEQ ID NO: 54625 - protein, 10 aa, Homo Sapiens
SFPLWYEEAL

SEQ ID NO: 54626 - protein, 10 aa, Homo Sapiens
FPLWYEEALK

SEQ ID NO: 54627 - protein, 10 aa, Homo Sapiens
EEALKDEEER

SEQ ID NO: 54628 - protein, 10 aa, Homo Sapiens
EERAQDRIAT

SEQ ID NO: 54629 - protein, 10 aa, Homo Sapiens
RIATTDDTTA

SEQ ID NO: 54630 - protein, 10 aa, Homo Sapiens
IATTDDTTAM

SEQ ID NO: 54631 - protein, 10 aa, Homo Sapiens
ATTDDTTAMA

SEQ ID NO: 54632 - protein, 10 aa, Homo Sapiens
TTAMASASSS

SEQ ID NO: 54633 - protein, 10 aa, Homo Sapiens
TAMASASSSA

SEQ ID NO: 54634 - protein, 10 aa, Homo Sapiens
AMASASSSAT

SEQ ID NO: 54635 - protein, 10 aa, Homo Sapiens
SASSSATGSF

SEQ ID NO: 54636 - protein, 10 aa, Homo Sapiens
SSSATGSFSY

SEQ ID NO: 54637 - protein, 11 aa, Homo Sapiens
MPRAPKRQRCM

SEQ ID NO: 54638 - protein, 11 aa, Homo Sapiens
MPEEDLQSQSE

SEQ ID NO: 54639 - protein, 11 aa, Homo Sapiens
DLQSQSETQGL

SEQ ID NO: 54640 - protein, 11 aa, Homo Sapiens
SQSETQGLEGA

SEQ ID NO: 54641 - protein, 11 aa, Homo Sapiens
GLEGAQAPLAV

SEQ ID NO: 54642 - protein, 11 aa, Homo Sapiens
AQAPLAVEEDA

SEQ ID NO: 54643 - protein, 11 aa, Homo Sapiens
LAVEEDASSST

SEQ ID NO: 54644 - protein, 11 aa, Homo Sapiens
EEDASSSTSTS

SEQ ID NO: 54645 - protein, 11 aa, Homo Sapiens
ASSSTSTSSSF

SEQ ID NO: 54646 - protein, 11 aa, Homo Sapiens
TSTSSSFPSSF

SEQ ID NO: 54647 - protein, 11 aa, Homo Sapiens
FPSSFPSSSSS

SEQ ID NO: 54648 - protein, 11 aa, Homo Sapiens
FPSSSSSSSSS

SEQ ID NO: 54649 - protein, 11 aa, Homo Sapiens
SSSSSSSSSCY

SEQ ID NO: 54650 - protein, 11 aa, Homo Sapiens
SSSSSSSCYPL

SEQ ID NO: 54651 - protein, 11 aa, Homo Sapiens
YPLIPSTPEEV

SEQ ID NO: 54652 - protein, 11 aa, Homo Sapiens
LIPSTPEEVSA

SEQ ID NO: 54653 - protein, 11 aa, Homo Sapiens
TPEEVSADDET

SEQ ID NO: 54654 - protein, 11 aa, Homo Sapiens
ETPNPPQSAQI

SEQ ID NO: 54655 - protein, 11 aa, Homo Sapiens
QSAQIACSSPS

SEQ ID NO: 54656 - protein, 11 aa, Homo Sapiens
SAQIACSSPSV

SEQ ID NO: 54657 - protein, 11 aa, Homo Sapiens
AQIACSSPSVV

SEQ ID NO: 54658 - protein, 11 aa, Homo Sapiens
QIACSSPSVVA

SEQ ID NO: 54659 - protein, 11 aa, Homo Sapiens
SSPSVVASLPL

SEQ ID NO: 54660 - protein, 11 aa, Homo Sapiens
LPLDQSDEGSS

SEQ ID NO: 54661 - protein, 11 aa, Homo Sapiens
KEESPSTLQVL

SEQ ID NO: 54662 - protein, 11 aa, Homo Sapiens
TLQVLPDSESL

SEQ ID NO: 54663 - protein, 11 aa, Homo Sapiens
QVLPDSESLPR

SEQ ID NO: 54664 - protein, 11 aa, Homo Sapiens
VLPDSESLPRS

SEQ ID NO: 54665 - protein, 11 aa, Homo Sapiens
ESLPRSEIDEK

SEQ ID NO: 54666 - protein, 11 aa, Homo Sapiens
SLPRSEIDEKV

SEQ ID NO: 54667 - protein, 11 aa, Homo Sapiens
SEIDEKVTDLV

SEQ ID NO: 54668 - protein, 11 aa, Homo Sapiens
KVTDLVQFLLF

SEQ ID NO: 54669 - protein, 11 aa, Homo Sapiens
VTDLVQFLLFK

SEQ ID NO: 54670 - protein, 11 aa, Homo Sapiens
VQFLLFKYQMK

SEQ ID NO: 54671 - protein, 11 aa, Homo Sapiens
LLFKYQMKEPI

SEQ ID NO: 54672 - protein, 11 aa, Homo Sapiens
YQMKEPITKAE

SEQ ID NO: 54673 - protein, 11 aa, Homo Sapiens
QMKEPITKAEI

SEQ ID NO: 54674 - protein, 11 aa, Homo Sapiens
PITKAEILESV

SEQ ID NO: 54675 - protein, 11 aa, Homo Sapiens
AEILESVIKNY

SEQ ID NO: 54676 - protein, 11 aa, Homo Sapiens
VIKNYEDHFPL

SEQ ID NO: 54677 - protein, 11 aa, Homo Sapiens
KNYEDHFPLLF

SEQ ID NO: 54678 - protein, 11 aa, Homo Sapiens
FPLLFSEASEC

SEQ ID NO: 54679 - protein, 11 aa, Homo Sapiens
LLFSEASECML

SEQ ID NO: 54680 - protein, 11 aa, Homo Sapiens
FSEASECMLLV

SEQ ID NO: 54681 - protein, 11 aa, Homo Sapiens
SEASECMLLVF

SEQ ID NO: 54682 - protein, 11 aa, Homo Sapiens
ECMLLVFGIDV

SEQ ID NO: 54683 - protein, 11 aa, Homo Sapiens
CMLLVFGIDVK

SEQ ID NO: 54684 - protein, 11 aa, Homo Sapiens
LLVFGIDVKEV

SEQ ID NO: 54685 - protein, 11 aa, Homo Sapiens
KEVDPTGHSFV

SEQ ID NO: 54686 - protein, 11 aa, Homo Sapiens
EVDPTGHSFVL

SEQ ID NO: 54687 - protein, 11 aa, Homo Sapiens
HSFVLVTSLGL

SEQ ID NO: 54688 - protein, 11 aa, Homo Sapiens
FVLVTSLGLTY

SEQ ID NO: 54689 - protein, 11 aa, Homo Sapiens
VTSLGLTYDGM

SEQ ID NO: 54690 - protein, 11 aa, Homo Sapiens
GLTYDGMLSDV

SEQ ID NO: 54691 - protein, 11 aa, Homo Sapiens
GMLSDVQSMPK

SEQ ID NO: 54692 - protein, 11 aa, Homo Sapiens
MLSDVQSMPKT

SEQ ID NO: 54693 - protein, 11 aa, Homo Sapiens
DVQSMPKTGIL

SEQ ID NO: 54694 - protein, 11 aa, Homo Sapiens
SMPKTGILILI

SEQ ID NO: 54695 - protein, 11 aa, Homo Sapiens
MPKTGILILIL

SEQ ID NO: 54696 - protein, 11 aa, Homo Sapiens
TGILILILSII

SEQ ID NO: 54697 - protein, 11 aa, Homo Sapiens
ILILILSIIFI

SEQ ID NO: 54698 - protein, 11 aa, Homo Sapiens
ILSIIFIEGYC

SEQ ID NO: 54699 - protein, 11 aa, Homo Sapiens
FIEGYCTPEEV

SEQ ID NO: 54700 - protein, 11 aa, Homo Sapiens
EGYCTPEEVIW

SEQ ID NO: 54701 - protein, 11 aa, Homo Sapiens
YCTPEEVIWEA

SEQ ID NO: 54702 - protein, 11 aa, Homo Sapiens
CTPEEVIWEAL

SEQ ID NO: 54703 - protein, 11 aa, Homo Sapiens
EEVIWEALNMM

SEQ ID NO: 54704 - protein, 11 aa, Homo Sapiens
VIWEALNMMGL

SEQ ID NO: 54705 - protein, 11 aa, Homo Sapiens
IWEALNMMGLY

SEQ ID NO: 54706 - protein, 11 aa, Homo Sapiens
ALNMMGLYDGM

SEQ ID NO: 54707 - protein, 11 aa, Homo Sapiens
MMGLYDGMEHL

SEQ ID NO: 54708 - protein, 11 aa, Homo Sapiens
GLYDGMEHLIY

SEQ ID NO: 54709 - protein, 11 aa, Homo Sapiens
GMEHLIYGEPR

SEQ ID NO: 54710 - protein, 11 aa, Homo Sapiens
MEHLIYGEPRK

SEQ ID NO: 54711 - protein, 11 aa, Homo Sapiens
HLIYGEPRKLL

SEQ ID NO: 54712 - protein, 11 aa, Homo Sapiens
GEPRKLLTQDW

SEQ ID NO: 54713 - protein, 11 aa, Homo Sapiens
LTQDWVQENYL

SEQ ID NO: 54714 - protein, 11 aa, Homo Sapiens
QDWVQENYLEY

SEQ ID NO: 54715 - protein, 11 aa, Homo Sapiens
DWVQENYLEYR

SEQ ID NO: 54716 - protein, 11 aa, Homo Sapiens
VQENYLEYRQV

SEQ ID NO: 54717 - protein, 11 aa, Homo Sapiens
RQVPGSDPARY

SEQ ID NO: 54718 - protein, 11 aa, Homo Sapiens
VPGSDPARYEF

SEQ ID NO: 54719 - protein, 11 aa, Homo Sapiens
GSDPARYEFLW

SEQ ID NO: 54720 - protein, 11 aa, Homo Sapiens
FLWGPRAHAEI

SEQ ID NO: 54721 - protein, 11 aa, Homo Sapiens
GPRAHAEIRKM

SEQ ID NO: 54722 - protein, 11 aa, Homo Sapiens
RAHAEIRKMSL

SEQ ID NO: 54723 - protein, 11 aa, Homo Sapiens
AHAEIRKMSLL

SEQ ID NO: 54724 - protein, 11 aa, Homo Sapiens
HAEIRKMSLLK

SEQ ID NO: 54725 - protein, 11 aa, Homo Sapiens
AEIRKMSLLKF

SEQ ID NO: 54726 - protein, 11 aa, Homo Sapiens
EIRKMSLLKFL

SEQ ID NO: 54727 - protein, 9 aa, Homo Sapiens
RKMSLLKFL

SEQ ID NO: 54728 - protein, 314 aa, Homo Sapiens
MPLEQRSQHCKPEEGLEAQGEALGLVGAQAPATEEQETASSSSTLVEVTLREVPAAESPSPPHSPQGASTLPTTINYTLWSQSDEGSSNEEQEGPSTFPDLETSFQVALSRKMAELVHFLLLKYRAREPFTKAEMLGSVIRNFQDFFPVIFSKASEYLQLVFGIEVVEVVRIGHLYILVTCLGLSYDGLLGDNQIVPKTGLLIIVLAIIAKEGDCAPEEKIWEELSVLEASDGREDSVFAHPRKLLTQDLVQENYLEYRQVPGSDPACYEFLWGPRALVETSYVKVLHHLLKISGGPHISYPPLHEWAFREGEE

SEQ ID NO: 54729 - protein, 8 aa, Homo Sapiens
EQRSQHCK

SEQ ID NO: 54730 - protein, 8 aa, Homo Sapiens
LEAQGEAL

SEQ ID NO: 54731 - protein, 8 aa, Homo Sapiens
AQGEALGL

SEQ ID NO: 54732 - protein, 8 aa, Homo Sapiens
EALGLVGA

SEQ ID NO: 54733 - protein, 8 aa, Homo Sapiens
AQAPATEE

SEQ ID NO: 54734 - protein, 8 aa, Homo Sapiens
ETASSSST

SEQ ID NO: 54735 - protein, 8 aa, Homo Sapiens
TASSSSTL

SEQ ID NO: 54736 - protein, 8 aa, Homo Sapiens
ASSSSTLV

SEQ ID NO: 54737 - protein, 8 aa, Homo Sapiens
SSSTLVEV

SEQ ID NO: 54738 - protein, 8 aa, Homo Sapiens
STLVEVTL

SEQ ID NO: 54739 - protein, 8 aa, Homo Sapiens
TLVEVTLR

SEQ ID NO: 54740 - protein, 8 aa, Homo Sapiens
VEVTLREV

SEQ ID NO: 54741 - protein, 8 aa, Homo Sapiens
TLREVPAA

SEQ ID NO: 54742 - protein, 8 aa, Homo Sapiens
SPQGASTL

SEQ ID NO: 54743 - protein, 8 aa, Homo Sapiens
TLPTTINY

SEQ ID NO: 54744 - protein, 8 aa, Homo Sapiens
LPTTINYT

SEQ ID NO: 54745 - protein, 8 aa, Homo Sapiens
TTINYTLW

SEQ ID NO: 54746 - protein, 8 aa, Homo Sapiens
EQEGPSTF

SEQ ID NO: 54747 - protein, 8 aa, Homo Sapiens
FPDLETSF

SEQ ID NO: 54748 - protein, 8 aa, Homo Sapiens
DLETSFQV

SEQ ID NO: 54749 - protein, 8 aa, Homo Sapiens
ETSFQVAL

SEQ ID NO: 54750 - protein, 8 aa, Homo Sapiens
SFQVALSR

SEQ ID NO: 54751 - protein, 8 aa, Homo Sapiens
FQVALSRK

SEQ ID NO: 54752 - protein, 8 aa, Homo Sapiens
QVALSRKM

SEQ ID NO: 54753 - protein, 8 aa, Homo Sapiens
KMAELVHF

SEQ ID NO: 54754 - protein, 8 aa, Homo Sapiens
MAELVHFL

SEQ ID NO: 54755 - protein, 8 aa, Homo Sapiens
AELVHFLL

SEQ ID NO: 54756 - protein, 8 aa, Homo Sapiens
ELVHFLLL

SEQ ID NO: 54757 - protein, 8 aa, Homo Sapiens
LVHFLLLK

SEQ ID NO: 54758 - protein, 8 aa, Homo Sapiens
VHFLLLKY

SEQ ID NO: 54759 - protein, 8 aa, Homo Sapiens
HFLLLKYR

SEQ ID NO: 54760 - protein, 8 aa, Homo Sapiens
FLLLKYRA

SEQ ID NO: 54761 - protein, 8 aa, Homo Sapiens
LLLKYRAR

SEQ ID NO: 54762 - protein, 8 aa, Homo Sapiens
KYRAREPF

SEQ ID NO: 54763 - protein, 8 aa, Homo Sapiens
RAREPFTK

SEQ ID NO: 54764 - protein, 8 aa, Homo Sapiens
EPFTKAEM

SEQ ID NO: 54765 - protein, 8 aa, Homo Sapiens
AEMLGSVI

SEQ ID NO: 54766 - protein, 8 aa, Homo Sapiens
EMLGSVIR

SEQ ID NO: 54767 - protein, 8 aa, Homo Sapiens
NFQDFFPV

SEQ ID NO: 54768 - protein, 8 aa, Homo Sapiens
FQDFFPVI

SEQ ID NO: 54769 - protein, 8 aa, Homo Sapiens
DFFPVIFS

SEQ ID NO: 54770 - protein, 8 aa, Homo Sapiens
FFPVIFSK

SEQ ID NO: 54771 - protein, 8 aa, Homo Sapiens
FPVIFSKA

SEQ ID NO: 54772 - protein, 8 aa, Homo Sapiens
IFSKASEY

SEQ ID NO: 54773 - protein, 8 aa, Homo Sapiens
FSKASEYL

SEQ ID NO: 54774 - protein, 8 aa, Homo Sapiens
KASEYLQL

SEQ ID NO: 54775 - protein, 8 aa, Homo Sapiens
SEYLQLVF

SEQ ID NO: 54776 - protein, 8 aa, Homo Sapiens
YLQLVFGI

SEQ ID NO: 54777 - protein, 8 aa, Homo Sapiens
QLVFGIEV

SEQ ID NO: 54778 - protein, 8 aa, Homo Sapiens
LVFGIEVV

SEQ ID NO: 54779 - protein, 8 aa, Homo Sapiens
FGIEVVEV

SEQ ID NO: 54780 - protein, 8 aa, Homo Sapiens
GIEVVEVV

SEQ ID NO: 54781 - protein, 8 aa, Homo Sapiens
EVVEVVRI

SEQ ID NO: 54782 - protein, 8 aa, Homo Sapiens
EVVRIGHL

SEQ ID NO: 54783 - protein, 8 aa, Homo Sapiens
VVRIGHLY

SEQ ID NO: 54784 - protein, 8 aa, Homo Sapiens
RIGHLYIL

SEQ ID NO: 54785 - protein, 8 aa, Homo Sapiens
HLYILVTC

SEQ ID NO: 54786 - protein, 8 aa, Homo Sapiens
LYILVTCL

SEQ ID NO: 54787 - protein, 8 aa, Homo Sapiens
ILVTCLGL

SEQ ID NO: 54788 - protein, 8 aa, Homo Sapiens
VTCLGLSY

SEQ ID NO: 54789 - protein, 8 aa, Homo Sapiens
GLSYDGLL

SEQ ID NO: 54790 - protein, 8 aa, Homo Sapiens
GLLGDNQI

SEQ ID NO: 54791 - protein, 8 aa, Homo Sapiens
LLGDNQIV

SEQ ID NO: 54792 - protein, 8 aa, Homo Sapiens
QIVPKTGL

SEQ ID NO: 54793 - protein, 8 aa, Homo Sapiens
VPKTGLLI

SEQ ID NO: 54794 - protein, 8 aa, Homo Sapiens
KTGLLIIV

SEQ ID NO: 54795 - protein, 8 aa, Homo Sapiens
GLLIIVLA

SEQ ID NO: 54796 - protein, 8 aa, Homo Sapiens
LLIIVLAI

SEQ ID NO: 54797 - protein, 8 aa, Homo Sapiens
LIIVLAII

SEQ ID NO: 54798 - protein, 8 aa, Homo Sapiens
IVLAIIAK

SEQ ID NO: 54799 - protein, 8 aa, Homo Sapiens
EEKIWEEL

SEQ ID NO: 54800 - protein, 8 aa, Homo Sapiens
KIWEELSV

SEQ ID NO: 54801 - protein, 8 aa, Homo Sapiens
DSVFAHPR

SEQ ID NO: 54802 - protein, 8 aa, Homo Sapiens
SVFAHPRK

SEQ ID NO: 54803 - protein, 8 aa, Homo Sapiens
FAHPRKLL

SEQ ID NO: 54804 - protein, 8 aa, Homo Sapiens
HPRKLLTQ

SEQ ID NO: 54805 - protein, 8 aa, Homo Sapiens
KLLTQDLV

SEQ ID NO: 54806 - protein, 8 aa, Homo Sapiens
LLTQDLVQ

SEQ ID NO: 54807 - protein, 8 aa, Homo Sapiens
DLVQENYL

SEQ ID NO: 54808 - protein, 8 aa, Homo Sapiens
VQENYLEY

SEQ ID NO: 54809 - protein, 8 aa, Homo Sapiens
NYLEYRQV

SEQ ID NO: 54810 - protein, 8 aa, Homo Sapiens
QVPGSDPA

SEQ ID NO: 54811 - protein, 8 aa, Homo Sapiens
DPACYEFL

SEQ ID NO: 54812 - protein, 8 aa, Homo Sapiens
YEFLWGPR

SEQ ID NO: 54813 - protein, 8 aa, Homo Sapiens
FLWGPRAL

SEQ ID NO: 54814 - protein, 8 aa, Homo Sapiens
RALVETSY

SEQ ID NO: 54815 - protein, 8 aa, Homo Sapiens
ALVETSYV

SEQ ID NO: 54816 - protein, 8 aa, Homo Sapiens
LVETSYVK

SEQ ID NO: 54817 - protein, 8 aa, Homo Sapiens
ETSYVKVL

SEQ ID NO: 54818 - protein, 8 aa, Homo Sapiens
YVKVLHHL

SEQ ID NO: 54819 - protein, 8 aa, Homo Sapiens
KVLHHLLK

SEQ ID NO: 54820 - protein, 8 aa, Homo Sapiens
VLHHLLKI

SEQ ID NO: 54821 - protein, 8 aa, Homo Sapiens
KISGGPHI

SEQ ID NO: 54822 - protein, 8 aa, Homo Sapiens
SYPPLHEW

SEQ ID NO: 54823 - protein, 8 aa, Homo Sapiens
YPPLHEWA

SEQ ID NO: 54824 - protein, 8 aa, Homo Sapiens
PPLHEWAF

SEQ ID NO: 54825 - protein, 8 aa, Homo Sapiens
PLHEWAFR

SEQ ID NO: 54826 - protein, 9 aa, Homo Sapiens
MPLEQRSQH

SEQ ID NO: 54827 - protein, 9 aa, Homo Sapiens
GLEAQGEAL

SEQ ID NO: 54828 - protein, 9 aa, Homo Sapiens
AQGEALGLV

SEQ ID NO: 54829 - protein, 9 aa, Homo Sapiens
ALGLVGAQA

SEQ ID NO: 54830 - protein, 9 aa, Homo Sapiens
GLVGAQAPA

SEQ ID NO: 54831 - protein, 9 aa, Homo Sapiens
AQAPATEEQ

SEQ ID NO: 54832 - protein, 9 aa, Homo Sapiens
ETASSSSTL

SEQ ID NO: 54833 - protein, 9 aa, Homo Sapiens
TASSSSTLV

SEQ ID NO: 54834 - protein, 9 aa, Homo Sapiens
SSSSTLVEV

SEQ ID NO: 54835 - protein, 9 aa, Homo Sapiens
STLVEVTLR

SEQ ID NO: 54836 - protein, 9 aa, Homo Sapiens
TLVEVTLRE

SEQ ID NO: 54837 - protein, 9 aa, Homo Sapiens
EVTLREVPA

SEQ ID NO: 54838 - protein, 9 aa, Homo Sapiens
AESPSPPHS

SEQ ID NO: 54839 - protein, 9 aa, Homo Sapiens
SPSPPHSPQ

SEQ ID NO: 54840 - protein, 9 aa, Homo Sapiens
STLPTTINY

SEQ ID NO: 54841 - protein, 9 aa, Homo Sapiens
TLPTTINYT

SEQ ID NO: 54842 - protein, 9 aa, Homo Sapiens
LPTTINYTL

SEQ ID NO: 54843 - protein, 9 aa, Homo Sapiens
PTTINYTLW

SEQ ID NO: 54844 - protein, 9 aa, Homo Sapiens
EEQEGPSTF

SEQ ID NO: 54845 - protein, 9 aa, Homo Sapiens
TFPDLETSF

SEQ ID NO: 54846 - protein, 9 aa, Homo Sapiens
LETSFQVAL

SEQ ID NO: 54847 - protein, 9 aa, Homo Sapiens
ETSFQVALS

SEQ ID NO: 54848 - protein, 9 aa, Homo Sapiens
TSFQVALSR

SEQ ID NO: 54849 - protein, 9 aa, Homo Sapiens
SFQVALSRK

SEQ ID NO: 54850 - protein, 9 aa, Homo Sapiens
FQVALSRKM

SEQ ID NO: 54851 - protein, 9 aa, Homo Sapiens
ALSRKMAEL

SEQ ID NO: 54852 - protein, 9 aa, Homo Sapiens
KMAELVHFL

SEQ ID NO: 54853 - protein, 9 aa, Homo Sapiens
MAELVHFLL

SEQ ID NO: 54854 - protein, 9 aa, Homo Sapiens
AELVHFLLL

SEQ ID NO: 54855 - protein, 9 aa, Homo Sapiens
ELVHFLLLK

SEQ ID NO: 54856 - protein, 9 aa, Homo Sapiens
LVHFLLLKY

SEQ ID NO: 54857 - protein, 9 aa, Homo Sapiens
FLLLKYRAR

SEQ ID NO: 54858 - protein, 9 aa, Homo Sapiens
KYRAREPFT

SEQ ID NO: 54859 - protein, 9 aa, Homo Sapiens
YRAREPFTK

SEQ ID NO: 54860 - protein, 9 aa, Homo Sapiens
EPFTKAEML

SEQ ID NO: 54861 - protein, 9 aa, Homo Sapiens
TKAEMLGSV

SEQ ID NO: 54862 - protein, 9 aa, Homo Sapiens
SVIRNFQDF

SEQ ID NO: 54863 - protein, 9 aa, Homo Sapiens
RNFQDFFPV

SEQ ID NO: 54864 - protein, 9 aa, Homo Sapiens
NFQDFFPVI

SEQ ID NO: 54865 - protein, 9 aa, Homo Sapiens
FQDFFPVIF

SEQ ID NO: 54866 - protein, 9 aa, Homo Sapiens
DFFPVIFSK

SEQ ID NO: 54867 - protein, 9 aa, Homo Sapiens
FPVIFSKAS

SEQ ID NO: 54868 - protein, 9 aa, Homo Sapiens
VIFSKASEY

SEQ ID NO: 54869 - protein, 9 aa, Homo Sapiens
IFSKASEYL

SEQ ID NO: 54870 - protein, 9 aa, Homo Sapiens
KASEYLQLV

SEQ ID NO: 54871 - protein, 9 aa, Homo Sapiens
EYLQLVFGI

SEQ ID NO: 54872 - protein, 9 aa, Homo Sapiens
LQLVFGIEV

SEQ ID NO: 54873 - protein, 9 aa, Homo Sapiens
QLVFGIEVV

SEQ ID NO: 54874 - protein, 9 aa, Homo Sapiens
FGIEVVEVV

SEQ ID NO: 54875 - protein, 9 aa, Homo Sapiens
IEVVEVVRI

SEQ ID NO: 54876 - protein, 9 aa, Homo Sapiens
EVVRIGHLY

SEQ ID NO: 54877 - protein, 9 aa, Homo Sapiens
VRIGHLYIL

SEQ ID NO: 54878 - protein, 9 aa, Homo Sapiens
RIGHLYILV

SEQ ID NO: 54879 - protein, 9 aa, Homo Sapiens
HLYILVTCL

SEQ ID NO: 54880 - protein, 9 aa, Homo Sapiens
YILVTCLGL

SEQ ID NO: 54881 - protein, 9 aa, Homo Sapiens
ILVTCLGLS

SEQ ID NO: 54882 - protein, 9 aa, Homo Sapiens
LVTCLGLSY

SEQ ID NO: 54883 - protein, 9 aa, Homo Sapiens
CLGLSYDGL

SEQ ID NO: 54884 - protein, 9 aa, Homo Sapiens
GLLGDNQIV

SEQ ID NO: 54885 - protein, 9 aa, Homo Sapiens
LLGDNQIVP

SEQ ID NO: 54886 - protein, 9 aa, Homo Sapiens
NQIVPKTGL

SEQ ID NO: 54887 - protein, 9 aa, Homo Sapiens
QIVPKTGLL

SEQ ID NO: 54888 - protein, 9 aa, Homo Sapiens
IVPKTGLLI

SEQ ID NO: 54889 - protein, 9 aa, Homo Sapiens
VPKTGLLII

SEQ ID NO: 54890 - protein, 9 aa, Homo Sapiens
GLLIIVLAI

SEQ ID NO: 54891 - protein, 9 aa, Homo Sapiens
LLIIVLAII

SEQ ID NO: 54892 - protein, 9 aa, Homo Sapiens
IIVLAIIAK

SEQ ID NO: 54893 - protein, 9 aa, Homo Sapiens
PEEKIWEEL

SEQ ID NO: 54894 - protein, 9 aa, Homo Sapiens
EEKIWEELS

SEQ ID NO: 54895 - protein, 9 aa, Homo Sapiens
KIWEELSVL

SEQ ID NO: 54896 - protein, 9 aa, Homo Sapiens
SVLEASDGR

SEQ ID NO: 54897 - protein, 9 aa, Homo Sapiens
EDSVFAHPR

SEQ ID NO: 54898 - protein, 9 aa, Homo Sapiens
DSVFAHPRK

SEQ ID NO: 54899 - protein, 9 aa, Homo Sapiens
SVFAHPRKL

SEQ ID NO: 54900 - protein, 9 aa, Homo Sapiens
KLLTQDLVQ

SEQ ID NO: 54901 - protein, 9 aa, Homo Sapiens
TQDLVQENY

SEQ ID NO: 54902 - protein, 9 aa, Homo Sapiens
LVQENYLEY

SEQ ID NO: 54903 - protein, 9 aa, Homo Sapiens
VQENYLEYR

SEQ ID NO: 54904 - protein, 9 aa, Homo Sapiens
RQVPGSDPA

SEQ ID NO: 54905 - protein, 9 aa, Homo Sapiens
VPGSDPACY

SEQ ID NO: 54906 - protein, 9 aa, Homo Sapiens
GSDPACYEF

SEQ ID NO: 54907 - protein, 9 aa, Homo Sapiens
DPACYEFLW

SEQ ID NO: 54908 - protein, 9 aa, Homo Sapiens
CYEFLWGPR

SEQ ID NO: 54909 - protein, 9 aa, Homo Sapiens
EFLWGPRAL

SEQ ID NO: 54910 - protein, 9 aa, Homo Sapiens
FLWGPRALV

SEQ ID NO: 54911 - protein, 9 aa, Homo Sapiens
RALVETSYV

SEQ ID NO: 54912 - protein, 9 aa, Homo Sapiens
ALVETSYVK

SEQ ID NO: 54913 - protein, 9 aa, Homo Sapiens
LVETSYVKV

SEQ ID NO: 54914 - protein, 9 aa, Homo Sapiens
VETSYVKVL

SEQ ID NO: 54915 - protein, 9 aa, Homo Sapiens
ETSYVKVLH

SEQ ID NO: 54916 - protein, 9 aa, Homo Sapiens
SYVKVLHHL

SEQ ID NO: 54917 - protein, 9 aa, Homo Sapiens
YVKVLHHLL

SEQ ID NO: 54918 - protein, 9 aa, Homo Sapiens
KVLHHLLKI

SEQ ID NO: 54919 - protein, 9 aa, Homo Sapiens
ISGGPHISY

SEQ ID NO: 54920 - protein, 9 aa, Homo Sapiens
GPHISYPPL

SEQ ID NO: 54921 - protein, 9 aa, Homo Sapiens
ISYPPLHEW

SEQ ID NO: 54922 - protein, 9 aa, Homo Sapiens
SYPPLHEWA

SEQ ID NO: 54923 - protein, 9 aa, Homo Sapiens
YPPLHEWAF

SEQ ID NO: 54924 - protein, 9 aa, Homo Sapiens
PLHEWAFRE

SEQ ID NO: 54925 - protein, 10 aa, Homo Sapiens
MPLEQRSQHC

SEQ ID NO: 54926 - protein, 10 aa, Homo Sapiens
EEGLEAQGEA

SEQ ID NO: 54927 - protein, 10 aa, Homo Sapiens
LEAQGEALGL

SEQ ID NO: 54928 - protein, 10 aa, Homo Sapiens
EAQGEALGLV

SEQ ID NO: 54929 - protein, 10 aa, Homo Sapiens
EALGLVGAQA

SEQ ID NO: 54930 - protein, 10 aa, Homo Sapiens
GLVGAQAPAT

SEQ ID NO: 54931 - protein, 10 aa, Homo Sapiens
QETASSSSTL

SEQ ID NO: 54932 - protein, 10 aa, Homo Sapiens
ETASSSSTLV

SEQ ID NO: 54933 - protein, 10 aa, Homo Sapiens
SSTLVEVTLR

SEQ ID NO: 54934 - protein, 10 aa, Homo Sapiens
TLVEVTLREV

SEQ ID NO: 54935 - protein, 10 aa, Homo Sapiens
SPQGASTLPT

SEQ ID NO: 54936 - protein, 10 aa, Homo Sapiens
ASTLPTTINY

SEQ ID NO: 54937 - protein, 10 aa, Homo Sapiens
STLPTTINYT

SEQ ID NO: 54938 - protein, 10 aa, Homo Sapiens
TLPTTINYTL

SEQ ID NO: 54939 - protein, 10 aa, Homo Sapiens
LPTTINYTLW

SEQ ID NO: 54940 - protein, 10 aa, Homo Sapiens
TTINYTLWSQ

SEQ ID NO: 54941 - protein, 10 aa, Homo Sapiens
NEEQEGPSTF

SEQ ID NO: 54942 - protein, 10 aa, Homo Sapiens
QEGPSTFPDL

SEQ ID NO: 54943 - protein, 10 aa, Homo Sapiens
STFPDLETSF

SEQ ID NO: 54944 - protein, 10 aa, Homo Sapiens
FPDLETSFQV

SEQ ID NO: 54945 - protein, 10 aa, Homo Sapiens
DLETSFQVAL

SEQ ID NO: 54946 - protein, 10 aa, Homo Sapiens
ETSFQVALSR

SEQ ID NO: 54947 - protein, 10 aa, Homo Sapiens
TSFQVALSRK

SEQ ID NO: 54948 - protein, 10 aa, Homo Sapiens
FQVALSRKMA

SEQ ID NO: 54949 - protein, 10 aa, Homo Sapiens
ALSRKMAELV

SEQ ID NO: 54950 - protein, 10 aa, Homo Sapiens
RKMAELVHFL

SEQ ID NO: 54951 - protein, 10 aa, Homo Sapiens
KMAELVHFLL

SEQ ID NO: 54952 - protein, 10 aa, Homo Sapiens
MAELVHFLLL

SEQ ID NO: 54953 - protein, 10 aa, Homo Sapiens
AELVHFLLLK

SEQ ID NO: 54954 - protein, 10 aa, Homo Sapiens
ELVHFLLLKY

SEQ ID NO: 54955 - protein, 10 aa, Homo Sapiens
LVHFLLLKYR

SEQ ID NO: 54956 - protein, 10 aa, Homo Sapiens
HFLLLKYRAR

SEQ ID NO: 54957 - protein, 10 aa, Homo Sapiens
LLKYRAREPF

SEQ ID NO: 54958 - protein, 10 aa, Homo Sapiens
KYRAREPFTK

SEQ ID NO: 54959 - protein, 10 aa, Homo Sapiens
REPFTKAEML

SEQ ID NO: 54960 - protein, 10 aa, Homo Sapiens
FTKAEMLGSV

SEQ ID NO: 54961 - protein, 10 aa, Homo Sapiens
KAEMLGSVIR

SEQ ID NO: 54962 - protein, 10 aa, Homo Sapiens
EMLGSVIRNF

SEQ ID NO: 54963 - protein, 10 aa, Homo Sapiens
MLGSVIRNFQ

SEQ ID NO: 54964 - protein, 10 aa, Homo Sapiens
GSVIRNFQDF

SEQ ID NO: 54965 - protein, 10 aa, Homo Sapiens
SVIRNFQDFF

SEQ ID NO: 54966 - protein, 10 aa, Homo Sapiens
IRNFQDFFPV

SEQ ID NO: 54967 - protein, 10 aa, Homo Sapiens
NFQDFFPVIF

SEQ ID NO: 54968 - protein, 10 aa, Homo Sapiens
FQDFFPVIFS

SEQ ID NO: 54969 - protein, 10 aa, Homo Sapiens
QDFFPVIFSK

SEQ ID NO: 54970 - protein, 10 aa, Homo Sapiens
FPVIFSKASE

SEQ ID NO: 54971 - protein, 10 aa, Homo Sapiens
PVIFSKASEY

SEQ ID NO: 54972 - protein, 10 aa, Homo Sapiens
VIFSKASEYL

SEQ ID NO: 54973 - protein, 10 aa, Homo Sapiens
FSKASEYLQL

SEQ ID NO: 54974 - protein, 10 aa, Homo Sapiens
SKASEYLQLV

SEQ ID NO: 54975 - protein, 10 aa, Homo Sapiens
KASEYLQLVF

SEQ ID NO: 54976 - protein, 10 aa, Homo Sapiens
SEYLQLVFGI

SEQ ID NO: 54977 - protein, 10 aa, Homo Sapiens
YLQLVFGIEV

SEQ ID NO: 54978 - protein, 10 aa, Homo Sapiens
LQLVFGIEVV

SEQ ID NO: 54979 - protein, 10 aa, Homo Sapiens
LVFGIEVVEV

SEQ ID NO: 54980 - protein, 10 aa, Homo Sapiens
FGIEVVEVVR

SEQ ID NO: 54981 - protein, 10 aa, Homo Sapiens
EVVEVVRIGH

SEQ ID NO: 54982 - protein, 10 aa, Homo Sapiens
VEVVRIGHLY

SEQ ID NO: 54983 - protein, 10 aa, Homo Sapiens
EVVRIGHLYI

SEQ ID NO: 54984 - protein, 10 aa, Homo Sapiens
VVRIGHLYIL

SEQ ID NO: 54985 - protein, 10 aa, Homo Sapiens
VRIGHLYILV

SEQ ID NO: 54986 - protein, 10 aa, Homo Sapiens
HLYILVTCLG

SEQ ID NO: 54987 - protein, 10 aa, Homo Sapiens
LYILVTCLGL

SEQ ID NO: 54988 - protein, 10 aa, Homo Sapiens
ILVTCLGLSY

SEQ ID NO: 54989 - protein, 10 aa, Homo Sapiens
CLGLSYDGLL

SEQ ID NO: 54990 - protein, 10 aa, Homo Sapiens
GLLGDNQIVP

SEQ ID NO: 54991 - protein, 10 aa, Homo Sapiens
LLGDNQIVPK

SEQ ID NO: 54992 - protein, 10 aa, Homo Sapiens
NQIVPKTGLL

SEQ ID NO: 54993 - protein, 10 aa, Homo Sapiens
QIVPKTGLLI

SEQ ID NO: 54994 - protein, 10 aa, Homo Sapiens
VPKTGLLIIV

SEQ ID NO: 54995 - protein, 10 aa, Homo Sapiens
GLLIIVLAII

SEQ ID NO: 54996 - protein, 10 aa, Homo Sapiens
LLIIVLAIIA

SEQ ID NO: 54997 - protein, 10 aa, Homo Sapiens
LIIVLAIIAK

SEQ ID NO: 54998 - protein, 10 aa, Homo Sapiens
APEEKIWEEL

SEQ ID NO: 54999 - protein, 10 aa, Homo Sapiens
EEKIWEELSV

SEQ ID NO: 55000 - protein, 10 aa, Homo Sapiens
LSVLEASDGR

SEQ ID NO: 55001 - protein, 10 aa, Homo Sapiens
EASDGREDSV

SEQ ID NO: 55002 - protein, 10 aa, Homo Sapiens
EDSVFAHPRK

SEQ ID NO: 55003 - protein, 10 aa, Homo Sapiens
SVFAHPRKLL

SEQ ID NO: 55004 - protein, 10 aa, Homo Sapiens
HPRKLLTQDL

SEQ ID NO: 55005 - protein, 10 aa, Homo Sapiens
LTQDLVQENY

SEQ ID NO: 55006 - protein, 10 aa, Homo Sapiens
TQDLVQENYL

SEQ ID NO: 55007 - protein, 10 aa, Homo Sapiens
DLVQENYLEY

SEQ ID NO: 55008 - protein, 10 aa, Homo Sapiens
LVQENYLEYR

SEQ ID NO: 55009 - protein, 10 aa, Homo Sapiens
RQVPGSDPAC

SEQ ID NO: 55010 - protein, 10 aa, Homo Sapiens
QVPGSDPACY

SEQ ID NO: 55011 - protein, 10 aa, Homo Sapiens
YEFLWGPRAL

SEQ ID NO: 55012 - protein, 10 aa, Homo Sapiens
EFLWGPRALV

SEQ ID NO: 55013 - protein, 10 aa, Homo Sapiens
FLWGPRALVE

SEQ ID NO: 55014 - protein, 10 aa, Homo Sapiens
RALVETSYVK

SEQ ID NO: 55015 - protein, 10 aa, Homo Sapiens
ALVETSYVKV

SEQ ID NO: 55016 - protein, 10 aa, Homo Sapiens
ETSYVKVLHH

SEQ ID NO: 55017 - protein, 10 aa, Homo Sapiens
TSYVKVLHHL

SEQ ID NO: 55018 - protein, 10 aa, Homo Sapiens
SYVKVLHHLL

SEQ ID NO: 55019 - protein, 10 aa, Homo Sapiens
YVKVLHHLLK

SEQ ID NO: 55020 - protein, 10 aa, Homo Sapiens
LLKISGGPHI

SEQ ID NO: 55021 - protein, 10 aa, Homo Sapiens
KISGGPHISY

SEQ ID NO: 55022 - protein, 10 aa, Homo Sapiens
HISYPPLHEW

SEQ ID NO: 55023 - protein, 10 aa, Homo Sapiens
SYPPLHEWAF

SEQ ID NO: 55024 - protein, 10 aa, Homo Sapiens
YPPLHEWAFR

SEQ ID NO: 55025 - protein, 11 aa, Homo Sapiens
EEGLEAQGEAL

SEQ ID NO: 55026 - protein, 11 aa, Homo Sapiens
GLEAQGEALGL

SEQ ID NO: 55027 - protein, 11 aa, Homo Sapiens
LEAQGEALGLV

SEQ ID NO: 55028 - protein, 11 aa, Homo Sapiens
AQGEALGLVGA

SEQ ID NO: 55029 - protein, 11 aa, Homo Sapiens
ALGLVGAQAPA

SEQ ID NO: 55030 - protein, 11 aa, Homo Sapiens
AQAPATEEQET

SEQ ID NO: 55031 - protein, 11 aa, Homo Sapiens
APATEEQETAS

SEQ ID NO: 55032 - protein, 11 aa, Homo Sapiens
QETASSSSTLV

SEQ ID NO: 55033 - protein, 11 aa, Homo Sapiens
ETASSSSTLVE

SEQ ID NO: 55034 - protein, 11 aa, Homo Sapiens
TASSSSTLVEV

SEQ ID NO: 55035 - protein, 11 aa, Homo Sapiens
SSSTLVEVTLR

SEQ ID NO: 55036 - protein, 11 aa, Homo Sapiens
STLVEVTLREV

SEQ ID NO: 55037 - protein, 11 aa, Homo Sapiens
VPAAESPSPPH

SEQ ID NO: 55038 - protein, 11 aa, Homo Sapiens
SPSPPHSPQGA

SEQ ID NO: 55039 - protein, 11 aa, Homo Sapiens
SPPHSPQGAST

SEQ ID NO: 55040 - protein, 11 aa, Homo Sapiens
GASTLPTTINY

SEQ ID NO: 55041 - protein, 11 aa, Homo Sapiens
STLPTTINYTL

SEQ ID NO: 55042 - protein, 11 aa, Homo Sapiens
LPTTINYTLWS

SEQ ID NO: 55043 - protein, 11 aa, Homo Sapiens
STFPDLETSFQ

SEQ ID NO: 55044 - protein, 11 aa, Homo Sapiens
TFPDLETSFQV

SEQ ID NO: 55045 - protein, 11 aa, Homo Sapiens
FPDLETSFQVA

SEQ ID NO: 55046 - protein, 11 aa, Homo Sapiens
ETSFQVALSRK

SEQ ID NO: 55047 - protein, 11 aa, Homo Sapiens
FQVALSRKMAE

SEQ ID NO: 55048 - protein, 11 aa, Homo Sapiens
QVALSRKMAEL

SEQ ID NO: 55049 - protein, 11 aa, Homo Sapiens
VALSRKMAELV

SEQ ID NO: 55050 - protein, 11 aa, Homo Sapiens
LSRKMAELVHF

SEQ ID NO: 55051 - protein, 11 aa, Homo Sapiens
RKMAELVHFLL

SEQ ID NO: 55052 - protein, 11 aa, Homo Sapiens
KMAELVHFLLL

SEQ ID NO: 55053 - protein, 11 aa, Homo Sapiens
MAELVHFLLLK

SEQ ID NO: 55054 - protein, 11 aa, Homo Sapiens
AELVHFLLLKY

SEQ ID NO: 55055 - protein, 11 aa, Homo Sapiens
ELVHFLLLKYR

SEQ ID NO: 55056 - protein, 11 aa, Homo Sapiens
RAREPFTKAEM

SEQ ID NO: 55057 - protein, 11 aa, Homo Sapiens
FTKAEMLGSVI

SEQ ID NO: 55058 - protein, 11 aa, Homo Sapiens
AEMLGSVIRNF

SEQ ID NO: 55059 - protein, 11 aa, Homo Sapiens
EMLGSVIRNFQ

SEQ ID NO: 55060 - protein, 11 aa, Homo Sapiens
VIRNFQDFFPV

SEQ ID NO: 55061 - protein, 11 aa, Homo Sapiens
FQDFFPVIFSK

SEQ ID NO: 55062 - protein, 11 aa, Homo Sapiens
FPVIFSKASEY

SEQ ID NO: 55063 - protein, 11 aa, Homo Sapiens
PVIFSKASEYL

SEQ ID NO: 55064 - protein, 11 aa, Homo Sapiens
IFSKASEYLQL

SEQ ID NO: 55065 - protein, 11 aa, Homo Sapiens
FSKASEYLQLV

SEQ ID NO: 55066 - protein, 11 aa, Homo Sapiens
EYLQLVFGIEV

SEQ ID NO: 55067 - protein, 11 aa, Homo Sapiens
YLQLVFGIEVV

SEQ ID NO: 55068 - protein, 11 aa, Homo Sapiens
QLVFGIEVVEV

SEQ ID NO: 55069 - protein, 11 aa, Homo Sapiens
LVFGIEVVEVV

SEQ ID NO: 55070 - protein, 11 aa, Homo Sapiens
VFGIEVVEVVR

SEQ ID NO: 55071 - protein, 11 aa, Homo Sapiens
FGIEVVEVVRI

SEQ ID NO: 55072 - protein, 11 aa, Homo Sapiens
EVVEVVRIGHL

SEQ ID NO: 55073 - protein, 11 aa, Homo Sapiens
VVEVVRIGHLY

SEQ ID NO: 55074 - protein, 11 aa, Homo Sapiens
VEVVRIGHLYI

SEQ ID NO: 55075 - protein, 11 aa, Homo Sapiens
EVVRIGHLYIL

SEQ ID NO: 55076 - protein, 11 aa, Homo Sapiens
VVRIGHLYILV

SEQ ID NO: 55077 - protein, 11 aa, Homo Sapiens
HLYILVTCLGL

SEQ ID NO: 55078 - protein, 11 aa, Homo Sapiens
YILVTCLGLSY

SEQ ID NO: 55079 - protein, 11 aa, Homo Sapiens
SYDGLLGDNQI

SEQ ID NO: 55080 - protein, 11 aa, Homo Sapiens
GLLGDNQIVPK

SEQ ID NO: 55081 - protein, 11 aa, Homo Sapiens
LLGDNQIVPKT

SEQ ID NO: 55082 - protein, 11 aa, Homo Sapiens
NQIVPKTGLLI

SEQ ID NO: 55083 - protein, 11 aa, Homo Sapiens
QIVPKTGLLII

SEQ ID NO: 55084 - protein, 11 aa, Homo Sapiens
IVPKTGLLIIV

SEQ ID NO: 55085 - protein, 11 aa, Homo Sapiens
VPKTGLLIIVL

SEQ ID NO: 55086 - protein, 11 aa, Homo Sapiens
GLLIIVLAIIA

SEQ ID NO: 55087 - protein, 11 aa, Homo Sapiens
LLIIVLAIIAK

SEQ ID NO: 55088 - protein, 11 aa, Homo Sapiens
PEEKIWEELSV

SEQ ID NO: 55089 - protein, 11 aa, Homo Sapiens
EEKIWEELSVL

SEQ ID NO: 55090 - protein, 11 aa, Homo Sapiens
KIWEELSVLEA

SEQ ID NO: 55091 - protein, 11 aa, Homo Sapiens
ELSVLEASDGR

SEQ ID NO: 55092 - protein, 11 aa, Homo Sapiens
EASDGREDSVF

SEQ ID NO: 55093 - protein, 11 aa, Homo Sapiens
HPRKLLTQDLV

SEQ ID NO: 55094 - protein, 11 aa, Homo Sapiens
LTQDLVQENYL

SEQ ID NO: 55095 - protein, 11 aa, Homo Sapiens
DLVQENYLEYR

SEQ ID NO: 55096 - protein, 11 aa, Homo Sapiens
VQENYLEYRQV

SEQ ID NO: 55097 - protein, 11 aa, Homo Sapiens
RQVPGSDPACY

SEQ ID NO: 55098 - protein, 11 aa, Homo Sapiens
VPGSDPACYEF

SEQ ID NO: 55099 - protein, 11 aa, Homo Sapiens
GSDPACYEFLW

SEQ ID NO: 55100 - protein, 11 aa, Homo Sapiens
YEFLWGPRALV

SEQ ID NO: 55101 - protein, 11 aa, Homo Sapiens
FLWGPRALVET

SEQ ID NO: 55102 - protein, 11 aa, Homo Sapiens
GPRALVETSYV

SEQ ID NO: 55103 - protein, 11 aa, Homo Sapiens
RALVETSYVKV

SEQ ID NO: 55104 - protein, 11 aa, Homo Sapiens
ALVETSYVKVL

SEQ ID NO: 55105 - protein, 11 aa, Homo Sapiens
ETSYVKVLHHL

SEQ ID NO: 55106 - protein, 11 aa, Homo Sapiens
SYVKVLHHLLK

SEQ ID NO: 55107 - protein, 11 aa, Homo Sapiens
YVKVLHHLLKI

SEQ ID NO: 55108 - protein, 11 aa, Homo Sapiens
HLLKISGGPHI

SEQ ID NO: 55109 - protein, 11 aa, Homo Sapiens
HISYPPLHEWA

SEQ ID NO: 55110 - protein, 11 aa, Homo Sapiens
ISYPPLHEWAF

SEQ ID NO: 55111 - protein, 11 aa, Homo Sapiens
SYPPLHEWAFR

SEQ ID NO: 55112 - protein, 13 aa, Homo Sapiens
MPLEQRSQHCKPE

SEQ ID NO: 55113 - protein, 13 aa, Homo Sapiens
PLEQRSQHCKPEE

SEQ ID NO: 55114 - protein, 13 aa, Homo Sapiens
LEQRSQHCKPEEG

SEQ ID NO: 55115 - protein, 13 aa, Homo Sapiens
EQRSQHCKPEEGL

SEQ ID NO: 55116 - protein, 13 aa, Homo Sapiens
QRSQHCKPEEGLE

SEQ ID NO: 55117 - protein, 13 aa, Homo Sapiens
RSQHCKPEEGLEA

SEQ ID NO: 55118 - protein, 13 aa, Homo Sapiens
SQHCKPEEGLEAQ

SEQ ID NO: 55119 - protein, 13 aa, Homo Sapiens
QHCKPEEGLEAQG

SEQ ID NO: 55120 - protein, 13 aa, Homo Sapiens
HCKPEEGLEAQGE

SEQ ID NO: 55121 - protein, 13 aa, Homo Sapiens
CKPEEGLEAQGEA

SEQ ID NO: 55122 - protein, 13 aa, Homo Sapiens
KPEEGLEAQGEAL

SEQ ID NO: 55123 - protein, 13 aa, Homo Sapiens
PEEGLEAQGEALG

SEQ ID NO: 55124 - protein, 13 aa, Homo Sapiens
EEGLEAQGEALGL

SEQ ID NO: 55125 - protein, 13 aa, Homo Sapiens
EGLEAQGEALGLV

SEQ ID NO: 55126 - protein, 13 aa, Homo Sapiens
GLEAQGEALGLVG

SEQ ID NO: 55127 - protein, 13 aa, Homo Sapiens
LEAQGEALGLVGA

SEQ ID NO: 55128 - protein, 13 aa, Homo Sapiens
EAQGEALGLVGAQ

SEQ ID NO: 55129 - protein, 13 aa, Homo Sapiens
AQGEALGLVGAQA

SEQ ID NO: 55130 - protein, 13 aa, Homo Sapiens
QGEALGLVGAQAP

SEQ ID NO: 55131 - protein, 13 aa, Homo Sapiens
GEALGLVGAQAPA

SEQ ID NO: 55132 - protein, 13 aa, Homo Sapiens
EALGLVGAQAPAT

SEQ ID NO: 55133 - protein, 13 aa, Homo Sapiens
ALGLVGAQAPATE

SEQ ID NO: 55134 - protein, 13 aa, Homo Sapiens
LGLVGAQAPATEE

SEQ ID NO: 55135 - protein, 13 aa, Homo Sapiens
GLVGAQAPATEEQ

SEQ ID NO: 55136 - protein, 13 aa, Homo Sapiens
LVGAQAPATEEQE

SEQ ID NO: 55137 - protein, 13 aa, Homo Sapiens
VGAQAPATEEQET

SEQ ID NO: 55138 - protein, 13 aa, Homo Sapiens
GAQAPATEEQETA

SEQ ID NO: 55139 - protein, 13 aa, Homo Sapiens
AQAPATEEQETAS

SEQ ID NO: 55140 - protein, 13 aa, Homo Sapiens
QAPATEEQETASS

SEQ ID NO: 55141 - protein, 13 aa, Homo Sapiens
APATEEQETASSS

SEQ ID NO: 55142 - protein, 13 aa, Homo Sapiens
PATEEQETASSSS

SEQ ID NO: 55143 - protein, 13 aa, Homo Sapiens
ATEEQETASSSST

SEQ ID NO: 55144 - protein, 13 aa, Homo Sapiens
TEEQETASSSSTL

SEQ ID NO: 55145 - protein, 13 aa, Homo Sapiens
EEQETASSSSTLV

SEQ ID NO: 55146 - protein, 13 aa, Homo Sapiens
EQETASSSSTLVE

SEQ ID NO: 55147 - protein, 13 aa, Homo Sapiens
QETASSSSTLVEV

SEQ ID NO: 55148 - protein, 13 aa, Homo Sapiens
ETASSSSTLVEVT

SEQ ID NO: 55149 - protein, 13 aa, Homo Sapiens
TASSSSTLVEVTL

SEQ ID NO: 55150 - protein, 13 aa, Homo Sapiens
ASSSSTLVEVTLR

SEQ ID NO: 55151 - protein, 13 aa, Homo Sapiens
SSSSTLVEVTLRE

SEQ ID NO: 55152 - protein, 13 aa, Homo Sapiens
SSSTLVEVTLREV

SEQ ID NO: 55153 - protein, 13 aa, Homo Sapiens
SSTLVEVTLREVP

SEQ ID NO: 55154 - protein, 13 aa, Homo Sapiens
STLVEVTLREVPA

SEQ ID NO: 55155 - protein, 13 aa, Homo Sapiens
TLVEVTLREVPAA

SEQ ID NO: 55156 - protein, 13 aa, Homo Sapiens
LVEVTLREVPAAE

SEQ ID NO: 55157 - protein, 13 aa, Homo Sapiens
VEVTLREVPAAES

SEQ ID NO: 55158 - protein, 13 aa, Homo Sapiens
EVTLREVPAAESP

SEQ ID NO: 55159 - protein, 13 aa, Homo Sapiens
VTLREVPAAESPS

SEQ ID NO: 55160 - protein, 13 aa, Homo Sapiens
TLREVPAAESPSP

SEQ ID NO: 55161 - protein, 13 aa, Homo Sapiens
LREVPAAESPSPP

SEQ ID NO: 55162 - protein, 13 aa, Homo Sapiens
REVPAAESPSPPH

SEQ ID NO: 55163 - protein, 13 aa, Homo Sapiens
EVPAAESPSPPHS

SEQ ID NO: 55164 - protein, 13 aa, Homo Sapiens
VPAAESPSPPHSP

SEQ ID NO: 55165 - protein, 13 aa, Homo Sapiens
PAAESPSPPHSPQ

SEQ ID NO: 55166 - protein, 13 aa, Homo Sapiens
AAESPSPPHSPQG

SEQ ID NO: 55167 - protein, 13 aa, Homo Sapiens
AESPSPPHSPQGA

SEQ ID NO: 55168 - protein, 13 aa, Homo Sapiens
ESPSPPHSPQGAS

SEQ ID NO: 55169 - protein, 13 aa, Homo Sapiens
SPSPPHSPQGAST

SEQ ID NO: 55170 - protein, 13 aa, Homo Sapiens
PSPPHSPQGASTL

SEQ ID NO: 55171 - protein, 13 aa, Homo Sapiens
SPPHSPQGASTLP

SEQ ID NO: 55172 - protein, 13 aa, Homo Sapiens
PPHSPQGASTLPT

SEQ ID NO: 55173 - protein, 13 aa, Homo Sapiens
PHSPQGASTLPTT

SEQ ID NO: 55174 - protein, 13 aa, Homo Sapiens
HSPQGASTLPTTI

SEQ ID NO: 55175 - protein, 13 aa, Homo Sapiens
SPQGASTLPTTIN

SEQ ID NO: 55176 - protein, 13 aa, Homo Sapiens
PQGASTLPTTINY

SEQ ID NO: 55177 - protein, 13 aa, Homo Sapiens
QGASTLPTTINYT

SEQ ID NO: 55178 - protein, 13 aa, Homo Sapiens
GASTLPTTINYTL

SEQ ID NO: 55179 - protein, 13 aa, Homo Sapiens
ASTLPTTINYTLW

SEQ ID NO: 55180 - protein, 13 aa, Homo Sapiens
STLPTTINYTLWS

SEQ ID NO: 55181 - protein, 13 aa, Homo Sapiens
TLPTTINYTLWSQ

SEQ ID NO: 55182 - protein, 13 aa, Homo Sapiens
LPTTINYTLWSQS

SEQ ID NO: 55183 - protein, 13 aa, Homo Sapiens
PTTINYTLWSQSD

SEQ ID NO: 55184 - protein, 13 aa, Homo Sapiens
TTINYTLWSQSDE

SEQ ID NO: 55185 - protein, 13 aa, Homo Sapiens
TINYTLWSQSDEG

SEQ ID NO: 55186 - protein, 13 aa, Homo Sapiens
INYTLWSQSDEGS

SEQ ID NO: 55187 - protein, 13 aa, Homo Sapiens
NYTLWSQSDEGSS

SEQ ID NO: 55188 - protein, 13 aa, Homo Sapiens
YTLWSQSDEGSSN

SEQ ID NO: 55189 - protein, 13 aa, Homo Sapiens
TLWSQSDEGSSNE

SEQ ID NO: 55190 - protein, 13 aa, Homo Sapiens
LWSQSDEGSSNEE

SEQ ID NO: 55191 - protein, 13 aa, Homo Sapiens
WSQSDEGSSNEEQ

SEQ ID NO: 55192 - protein, 13 aa, Homo Sapiens
SQSDEGSSNEEQE

SEQ ID NO: 55193 - protein, 13 aa, Homo Sapiens
QSDEGSSNEEQEG

SEQ ID NO: 55194 - protein, 13 aa, Homo Sapiens
SDEGSSNEEQEGP

SEQ ID NO: 55195 - protein, 13 aa, Homo Sapiens
DEGSSNEEQEGPS

SEQ ID NO: 55196 - protein, 13 aa, Homo Sapiens
EGSSNEEQEGPST

SEQ ID NO: 55197 - protein, 13 aa, Homo Sapiens
GSSNEEQEGPSTF

SEQ ID NO: 55198 - protein, 13 aa, Homo Sapiens
SSNEEQEGPSTFP

SEQ ID NO: 55199 - protein, 13 aa, Homo Sapiens
SNEEQEGPSTFPD

SEQ ID NO: 55200 - protein, 13 aa, Homo Sapiens
NEEQEGPSTFPDL

SEQ ID NO: 55201 - protein, 13 aa, Homo Sapiens
EEQEGPSTFPDLE

SEQ ID NO: 55202 - protein, 13 aa, Homo Sapiens
EQEGPSTFPDLET

SEQ ID NO: 55203 - protein, 13 aa, Homo Sapiens
QEGPSTFPDLETS

SEQ ID NO: 55204 - protein, 13 aa, Homo Sapiens
EGPSTFPDLETSF

SEQ ID NO: 55205 - protein, 13 aa, Homo Sapiens
GPSTFPDLETSFQ

SEQ ID NO: 55206 - protein, 13 aa, Homo Sapiens
PSTFPDLETSFQV

SEQ ID NO: 55207 - protein, 13 aa, Homo Sapiens
STFPDLETSFQVA

SEQ ID NO: 55208 - protein, 13 aa, Homo Sapiens
TFPDLETSFQVAL

SEQ ID NO: 55209 - protein, 13 aa, Homo Sapiens
FPDLETSFQVALS

SEQ ID NO: 55210 - protein, 13 aa, Homo Sapiens
PDLETSFQVALSR

SEQ ID NO: 55211 - protein, 13 aa, Homo Sapiens
DLETSFQVALSRK

SEQ ID NO: 55212 - protein, 13 aa, Homo Sapiens
LETSFQVALSRKM

SEQ ID NO: 55213 - protein, 13 aa, Homo Sapiens
ETSFQVALSRKMA

SEQ ID NO: 55214 - protein, 13 aa, Homo Sapiens
TSFQVALSRKMAE

SEQ ID NO: 55215 - protein, 13 aa, Homo Sapiens
SFQVALSRKMAEL

SEQ ID NO: 55216 - protein, 13 aa, Homo Sapiens
FQVALSRKMAELV

SEQ ID NO: 55217 - protein, 13 aa, Homo Sapiens
QVALSRKMAELVH

SEQ ID NO: 55218 - protein, 13 aa, Homo Sapiens
VALSRKMAELVHF

SEQ ID NO: 55219 - protein, 13 aa, Homo Sapiens
ALSRKMAELVHFL

SEQ ID NO: 55220 - protein, 13 aa, Homo Sapiens
LSRKMAELVHFLL

SEQ ID NO: 55221 - protein, 13 aa, Homo Sapiens
SRKMAELVHFLLL

SEQ ID NO: 55222 - protein, 13 aa, Homo Sapiens
RKMAELVHFLLLK

SEQ ID NO: 55223 - protein, 13 aa, Homo Sapiens
KMAELVHFLLLKY

SEQ ID NO: 55224 - protein, 13 aa, Homo Sapiens
MAELVHFLLLKYR

SEQ ID NO: 55225 - protein, 13 aa, Homo Sapiens
AELVHFLLLKYRA

SEQ ID NO: 55226 - protein, 13 aa, Homo Sapiens
ELVHFLLLKYRAR

SEQ ID NO: 55227 - protein, 13 aa, Homo Sapiens
LVHFLLLKYRARE

SEQ ID NO: 55228 - protein, 13 aa, Homo Sapiens
VHFLLLKYRAREP

SEQ ID NO: 55229 - protein, 13 aa, Homo Sapiens
HFLLLKYRAREPF

SEQ ID NO: 55230 - protein, 13 aa, Homo Sapiens
FLLLKYRAREPFT

SEQ ID NO: 55231 - protein, 13 aa, Homo Sapiens
LLLKYRAREPFTK

SEQ ID NO: 55232 - protein, 13 aa, Homo Sapiens
LLKYRAREPFTKA

SEQ ID NO: 55233 - protein, 13 aa, Homo Sapiens
LKYRAREPFTKAE

SEQ ID NO: 55234 - protein, 13 aa, Homo Sapiens
KYRAREPFTKAEM

SEQ ID NO: 55235 - protein, 13 aa, Homo Sapiens
YRAREPFTKAEML

SEQ ID NO: 55236 - protein, 13 aa, Homo Sapiens
RAREPFTKAEMLG

SEQ ID NO: 55237 - protein, 13 aa, Homo Sapiens
AREPFTKAEMLGS

SEQ ID NO: 55238 - protein, 13 aa, Homo Sapiens
REPFTKAEMLGSV

SEQ ID NO: 55239 - protein, 13 aa, Homo Sapiens
EPFTKAEMLGSVI

SEQ ID NO: 55240 - protein, 13 aa, Homo Sapiens
PFTKAEMLGSVIR

SEQ ID NO: 55241 - protein, 13 aa, Homo Sapiens
FTKAEMLGSVIRN

SEQ ID NO: 55242 - protein, 13 aa, Homo Sapiens
TKAEMLGSVIRNF

SEQ ID NO: 55243 - protein, 13 aa, Homo Sapiens
KAEMLGSVIRNFQ

SEQ ID NO: 55244 - protein, 13 aa, Homo Sapiens
AEMLGSVIRNFQD

SEQ ID NO: 55245 - protein, 13 aa, Homo Sapiens
EMLGSVIRNFQDF

SEQ ID NO: 55246 - protein, 13 aa, Homo Sapiens
MLGSVIRNFQDFF

SEQ ID NO: 55247 - protein, 13 aa, Homo Sapiens
LGSVIRNFQDFFP

SEQ ID NO: 55248 - protein, 13 aa, Homo Sapiens
GSVIRNFQDFFPV

SEQ ID NO: 55249 - protein, 13 aa, Homo Sapiens
SVIRNFQDFFPVI

SEQ ID NO: 55250 - protein, 13 aa, Homo Sapiens
VIRNFQDFFPVIF

SEQ ID NO: 55251 - protein, 13 aa, Homo Sapiens
IRNFQDFFPVIFS

SEQ ID NO: 55252 - protein, 13 aa, Homo Sapiens
RNFQDFFPVIFSK

SEQ ID NO: 55253 - protein, 13 aa, Homo Sapiens
NFQDFFPVIFSKA

SEQ ID NO: 55254 - protein, 13 aa, Homo Sapiens
FQDFFPVIFSKAS

SEQ ID NO: 55255 - protein, 13 aa, Homo Sapiens
QDFFPVIFSKASE

SEQ ID NO: 55256 - protein, 13 aa, Homo Sapiens
DFFPVIFSKASEY

SEQ ID NO: 55257 - protein, 13 aa, Homo Sapiens
FFPVIFSKASEYL

SEQ ID NO: 55258 - protein, 13 aa, Homo Sapiens
FPVIFSKASEYLQ

SEQ ID NO: 55259 - protein, 13 aa, Homo Sapiens
PVIFSKASEYLQL

SEQ ID NO: 55260 - protein, 13 aa, Homo Sapiens
VIFSKASEYLQLV

SEQ ID NO: 55261 - protein, 13 aa, Homo Sapiens
IFSKASEYLQLVF

SEQ ID NO: 55262 - protein, 13 aa, Homo Sapiens
FSKASEYLQLVFG

SEQ ID NO: 55263 - protein, 13 aa, Homo Sapiens
SKASEYLQLVFGI

SEQ ID NO: 55264 - protein, 13 aa, Homo Sapiens
KASEYLQLVFGIE

SEQ ID NO: 55265 - protein, 13 aa, Homo Sapiens
ASEYLQLVFGIEV

SEQ ID NO: 55266 - protein, 13 aa, Homo Sapiens
SEYLQLVFGIEVV

SEQ ID NO: 55267 - protein, 13 aa, Homo Sapiens
EYLQLVFGIEVVE

SEQ ID NO: 55268 - protein, 13 aa, Homo Sapiens
YLQLVFGIEVVEV

SEQ ID NO: 55269 - protein, 13 aa, Homo Sapiens
LQLVFGIEVVEVV

SEQ ID NO: 55270 - protein, 13 aa, Homo Sapiens
QLVFGIEVVEVVR

SEQ ID NO: 55271 - protein, 13 aa, Homo Sapiens
LVFGIEVVEVVRI

SEQ ID NO: 55272 - protein, 13 aa, Homo Sapiens
VFGIEVVEVVRIG

SEQ ID NO: 55273 - protein, 13 aa, Homo Sapiens
FGIEVVEVVRIGH

SEQ ID NO: 55274 - protein, 13 aa, Homo Sapiens
GIEVVEVVRIGHL

SEQ ID NO: 55275 - protein, 13 aa, Homo Sapiens
IEVVEVVRIGHLY

SEQ ID NO: 55276 - protein, 13 aa, Homo Sapiens
EVVEVVRIGHLYI

SEQ ID NO: 55277 - protein, 13 aa, Homo Sapiens
VVEVVRIGHLYIL

SEQ ID NO: 55278 - protein, 13 aa, Homo Sapiens
VEVVRIGHLYILV

SEQ ID NO: 55279 - protein, 13 aa, Homo Sapiens
EVVRIGHLYILVT

SEQ ID NO: 55280 - protein, 13 aa, Homo Sapiens
VVRIGHLYILVTC

SEQ ID NO: 55281 - protein, 13 aa, Homo Sapiens
VRIGHLYILVTCL

SEQ ID NO: 55282 - protein, 13 aa, Homo Sapiens
RIGHLYILVTCLG

SEQ ID NO: 55283 - protein, 13 aa, Homo Sapiens
IGHLYILVTCLGL

SEQ ID NO: 55284 - protein, 13 aa, Homo Sapiens
GHLYILVTCLGLS

SEQ ID NO: 55285 - protein, 13 aa, Homo Sapiens
HLYILVTCLGLSY

SEQ ID NO: 55286 - protein, 13 aa, Homo Sapiens
LYILVTCLGLSYD

SEQ ID NO: 55287 - protein, 13 aa, Homo Sapiens
YILVTCLGLSYDG

SEQ ID NO: 55288 - protein, 13 aa, Homo Sapiens
ILVTCLGLSYDGL

SEQ ID NO: 55289 - protein, 13 aa, Homo Sapiens
LVTCLGLSYDGLL

SEQ ID NO: 55290 - protein, 13 aa, Homo Sapiens
VTCLGLSYDGLLG

SEQ ID NO: 55291 - protein, 13 aa, Homo Sapiens
TCLGLSYDGLLGD

SEQ ID NO: 55292 - protein, 13 aa, Homo Sapiens
CLGLSYDGLLGDN

SEQ ID NO: 55293 - protein, 13 aa, Homo Sapiens
LGLSYDGLLGDNQ

SEQ ID NO: 55294 - protein, 13 aa, Homo Sapiens
GLSYDGLLGDNQI

SEQ ID NO: 55295 - protein, 13 aa, Homo Sapiens
LSYDGLLGDNQIV

SEQ ID NO: 55296 - protein, 13 aa, Homo Sapiens
SYDGLLGDNQIVP

SEQ ID NO: 55297 - protein, 13 aa, Homo Sapiens
YDGLLGDNQIVPK

SEQ ID NO: 55298 - protein, 13 aa, Homo Sapiens
DGLLGDNQIVPKT

SEQ ID NO: 55299 - protein, 13 aa, Homo Sapiens
GLLGDNQIVPKTG

SEQ ID NO: 55300 - protein, 13 aa, Homo Sapiens
LLGDNQIVPKTGL

SEQ ID NO: 55301 - protein, 13 aa, Homo Sapiens
LGDNQIVPKTGLL

SEQ ID NO: 55302 - protein, 13 aa, Homo Sapiens
GDNQIVPKTGLLI

SEQ ID NO: 55303 - protein, 13 aa, Homo Sapiens
DNQIVPKTGLLII

SEQ ID NO: 55304 - protein, 13 aa, Homo Sapiens
NQIVPKTGLLIIV

SEQ ID NO: 55305 - protein, 13 aa, Homo Sapiens
QIVPKTGLLIIVL

SEQ ID NO: 55306 - protein, 13 aa, Homo Sapiens
IVPKTGLLIIVLA

SEQ ID NO: 55307 - protein, 13 aa, Homo Sapiens
VPKTGLLIIVLAI

SEQ ID NO: 55308 - protein, 13 aa, Homo Sapiens
PKTGLLIIVLAII

SEQ ID NO: 55309 - protein, 13 aa, Homo Sapiens
KTGLLIIVLAIIA

SEQ ID NO: 55310 - protein, 13 aa, Homo Sapiens
TGLLIIVLAIIAK

SEQ ID NO: 55311 - protein, 13 aa, Homo Sapiens
GLLIIVLAIIAKE

SEQ ID NO: 55312 - protein, 13 aa, Homo Sapiens
LLIIVLAIIAKEG

SEQ ID NO: 55313 - protein, 13 aa, Homo Sapiens
LIIVLAIIAKEGD

SEQ ID NO: 55314 - protein, 13 aa, Homo Sapiens
IIVLAIIAKEGDC

SEQ ID NO: 55315 - protein, 13 aa, Homo Sapiens
IVLAIIAKEGDCA

SEQ ID NO: 55316 - protein, 13 aa, Homo Sapiens
VLAIIAKEGDCAP

SEQ ID NO: 55317 - protein, 13 aa, Homo Sapiens
LAIIAKEGDCAPE

SEQ ID NO: 55318 - protein, 13 aa, Homo Sapiens
AIIAKEGDCAPEE

SEQ ID NO: 55319 - protein, 13 aa, Homo Sapiens
IIAKEGDCAPEEK

SEQ ID NO: 55320 - protein, 13 aa, Homo Sapiens
IAKEGDCAPEEKI

SEQ ID NO: 55321 - protein, 13 aa, Homo Sapiens
AKEGDCAPEEKIW

SEQ ID NO: 55322 - protein, 13 aa, Homo Sapiens
KEGDCAPEEKIWE

SEQ ID NO: 55323 - protein, 13 aa, Homo Sapiens
EGDCAPEEKIWEE

SEQ ID NO: 55324 - protein, 13 aa, Homo Sapiens
GDCAPEEKIWEEL

SEQ ID NO: 55325 - protein, 13 aa, Homo Sapiens
DCAPEEKIWEELS

SEQ ID NO: 55326 - protein, 13 aa, Homo Sapiens
CAPEEKIWEELSV

SEQ ID NO: 55327 - protein, 13 aa, Homo Sapiens
APEEKIWEELSVL

SEQ ID NO: 55328 - protein, 13 aa, Homo Sapiens
PEEKIWEELSVLE

SEQ ID NO: 55329 - protein, 13 aa, Homo Sapiens
EEKIWEELSVLEA

SEQ ID NO: 55330 - protein, 13 aa, Homo Sapiens
EKIWEELSVLEAS

SEQ ID NO: 55331 - protein, 13 aa, Homo Sapiens
KIWEELSVLEASD

SEQ ID NO: 55332 - protein, 13 aa, Homo Sapiens
IWEELSVLEASDG

SEQ ID NO: 55333 - protein, 13 aa, Homo Sapiens
WEELSVLEASDGR

SEQ ID NO: 55334 - protein, 13 aa, Homo Sapiens
EELSVLEASDGRE

SEQ ID NO: 55335 - protein, 13 aa, Homo Sapiens
ELSVLEASDGRED

SEQ ID NO: 55336 - protein, 13 aa, Homo Sapiens
LSVLEASDGREDS

SEQ ID NO: 55337 - protein, 13 aa, Homo Sapiens
SVLEASDGREDSV

SEQ ID NO: 55338 - protein, 13 aa, Homo Sapiens
VLEASDGREDSVF

SEQ ID NO: 55339 - protein, 13 aa, Homo Sapiens
LEASDGREDSVFA

SEQ ID NO: 55340 - protein, 13 aa, Homo Sapiens
EASDGREDSVFAH

SEQ ID NO: 55341 - protein, 13 aa, Homo Sapiens
ASDGREDSVFAHP

SEQ ID NO: 55342 - protein, 13 aa, Homo Sapiens
SDGREDSVFAHPR

SEQ ID NO: 55343 - protein, 13 aa, Homo Sapiens
DGREDSVFAHPRK

SEQ ID NO: 55344 - protein, 13 aa, Homo Sapiens
GREDSVFAHPRKL

SEQ ID NO: 55345 - protein, 13 aa, Homo Sapiens
REDSVFAHPRKLL

SEQ ID NO: 55346 - protein, 13 aa, Homo Sapiens
EDSVFAHPRKLLT

SEQ ID NO: 55347 - protein, 13 aa, Homo Sapiens
DSVFAHPRKLLTQ

SEQ ID NO: 55348 - protein, 13 aa, Homo Sapiens
SVFAHPRKLLTQD

SEQ ID NO: 55349 - protein, 13 aa, Homo Sapiens
VFAHPRKLLTQDL

SEQ ID NO: 55350 - protein, 13 aa, Homo Sapiens
FAHPRKLLTQDLV

SEQ ID NO: 55351 - protein, 13 aa, Homo Sapiens
AHPRKLLTQDLVQ

SEQ ID NO: 55352 - protein, 13 aa, Homo Sapiens
HPRKLLTQDLVQE

SEQ ID NO: 55353 - protein, 13 aa, Homo Sapiens
PRKLLTQDLVQEN

SEQ ID NO: 55354 - protein, 13 aa, Homo Sapiens
RKLLTQDLVQENY

SEQ ID NO: 55355 - protein, 13 aa, Homo Sapiens
KLLTQDLVQENYL

SEQ ID NO: 55356 - protein, 13 aa, Homo Sapiens
LLTQDLVQENYLE

SEQ ID NO: 55357 - protein, 13 aa, Homo Sapiens
LTQDLVQENYLEY

SEQ ID NO: 55358 - protein, 13 aa, Homo Sapiens
TQDLVQENYLEYR

SEQ ID NO: 55359 - protein, 13 aa, Homo Sapiens
QDLVQENYLEYRQ

SEQ ID NO: 55360 - protein, 13 aa, Homo Sapiens
DLVQENYLEYRQV

SEQ ID NO: 55361 - protein, 13 aa, Homo Sapiens
LVQENYLEYRQVP

SEQ ID NO: 55362 - protein, 13 aa, Homo Sapiens
VQENYLEYRQVPG

SEQ ID NO: 55363 - protein, 13 aa, Homo Sapiens
QENYLEYRQVPGS

SEQ ID NO: 55364 - protein, 13 aa, Homo Sapiens
ENYLEYRQVPGSD

SEQ ID NO: 55365 - protein, 13 aa, Homo Sapiens
NYLEYRQVPGSDP

SEQ ID NO: 55366 - protein, 13 aa, Homo Sapiens
YLEYRQVPGSDPA

SEQ ID NO: 55367 - protein, 13 aa, Homo Sapiens
LEYRQVPGSDPAC

SEQ ID NO: 55368 - protein, 13 aa, Homo Sapiens
EYRQVPGSDPACY

SEQ ID NO: 55369 - protein, 13 aa, Homo Sapiens
YRQVPGSDPACYE

SEQ ID NO: 55370 - protein, 13 aa, Homo Sapiens
RQVPGSDPACYEF

SEQ ID NO: 55371 - protein, 13 aa, Homo Sapiens
QVPGSDPACYEFL

SEQ ID NO: 55372 - protein, 13 aa, Homo Sapiens
VPGSDPACYEFLW

SEQ ID NO: 55373 - protein, 13 aa, Homo Sapiens
PGSDPACYEFLWG

SEQ ID NO: 55374 - protein, 13 aa, Homo Sapiens
GSDPACYEFLWGP

SEQ ID NO: 55375 - protein, 13 aa, Homo Sapiens
SDPACYEFLWGPR

SEQ ID NO: 55376 - protein, 13 aa, Homo Sapiens
DPACYEFLWGPRA

SEQ ID NO: 55377 - protein, 13 aa, Homo Sapiens
PACYEFLWGPRAL

SEQ ID NO: 55378 - protein, 13 aa, Homo Sapiens
ACYEFLWGPRALV

SEQ ID NO: 55379 - protein, 13 aa, Homo Sapiens
CYEFLWGPRALVE

SEQ ID NO: 55380 - protein, 13 aa, Homo Sapiens
YEFLWGPRALVET

SEQ ID NO: 55381 - protein, 13 aa, Homo Sapiens
EFLWGPRALVETS

SEQ ID NO: 55382 - protein, 13 aa, Homo Sapiens
FLWGPRALVETSY

SEQ ID NO: 55383 - protein, 13 aa, Homo Sapiens
LWGPRALVETSYV

SEQ ID NO: 55384 - protein, 13 aa, Homo Sapiens
WGPRALVETSYVK

SEQ ID NO: 55385 - protein, 13 aa, Homo Sapiens
GPRALVETSYVKV

SEQ ID NO: 55386 - protein, 13 aa, Homo Sapiens
PRALVETSYVKVL

SEQ ID NO: 55387 - protein, 13 aa, Homo Sapiens
RALVETSYVKVLH

SEQ ID NO: 55388 - protein, 13 aa, Homo Sapiens
ALVETSYVKVLHH

SEQ ID NO: 55389 - protein, 13 aa, Homo Sapiens
LVETSYVKVLHHL

SEQ ID NO: 55390 - protein, 13 aa, Homo Sapiens
VETSYVKVLHHLL

SEQ ID NO: 55391 - protein, 13 aa, Homo Sapiens
ETSYVKVLHHLLK

SEQ ID NO: 55392 - protein, 13 aa, Homo Sapiens
TSYVKVLHHLLKI

SEQ ID NO: 55393 - protein, 13 aa, Homo Sapiens
SYVKVLHHLLKIS

SEQ ID NO: 55394 - protein, 13 aa, Homo Sapiens
YVKVLHHLLKISG

SEQ ID NO: 55395 - protein, 13 aa, Homo Sapiens
VKVLHHLLKISGG

SEQ ID NO: 55396 - protein, 13 aa, Homo Sapiens
KVLHHLLKISGGP

SEQ ID NO: 55397 - protein, 13 aa, Homo Sapiens
VLHHLLKISGGPH

SEQ ID NO: 55398 - protein, 13 aa, Homo Sapiens
LHHLLKISGGPHI

SEQ ID NO: 55399 - protein, 13 aa, Homo Sapiens
HHLLKISGGPHIS

SEQ ID NO: 55400 - protein, 13 aa, Homo Sapiens
HLLKISGGPHISY

SEQ ID NO: 55401 - protein, 13 aa, Homo Sapiens
LLKISGGPHISYP

SEQ ID NO: 55402 - protein, 13 aa, Homo Sapiens
LKISGGPHISYPP

SEQ ID NO: 55403 - protein, 13 aa, Homo Sapiens
KISGGPHISYPPL

SEQ ID NO: 55404 - protein, 13 aa, Homo Sapiens
ISGGPHISYPPLH

SEQ ID NO: 55405 - protein, 13 aa, Homo Sapiens
SGGPHISYPPLHE

SEQ ID NO: 55406 - protein, 13 aa, Homo Sapiens
GGPHISYPPLHEW

SEQ ID NO: 55407 - protein, 13 aa, Homo Sapiens
GPHISYPPLHEWA

SEQ ID NO: 55408 - protein, 13 aa, Homo Sapiens
PHISYPPLHEWAF

SEQ ID NO: 55409 - protein, 13 aa, Homo Sapiens
HISYPPLHEWAFR

SEQ ID NO: 55410 - protein, 13 aa, Homo Sapiens
ISYPPLHEWAFRE

SEQ ID NO: 55411 - protein, 13 aa, Homo Sapiens
SYPPLHEWAFREG

SEQ ID NO: 55412 - protein, 13 aa, Homo Sapiens
YPPLHEWAFREGE

SEQ ID NO: 55413 - protein, 13 aa, Homo Sapiens
PPLHEWAFREGEE

SEQ ID NO: 55414 - protein, 14 aa, Homo Sapiens
MPLEQRSQHCKPEE

SEQ ID NO: 55415 - protein, 14 aa, Homo Sapiens
PLEQRSQHCKPEEG

SEQ ID NO: 55416 - protein, 14 aa, Homo Sapiens
LEQRSQHCKPEEGL

SEQ ID NO: 55417 - protein, 14 aa, Homo Sapiens
EQRSQHCKPEEGLE

SEQ ID NO: 55418 - protein, 14 aa, Homo Sapiens
QRSQHCKPEEGLEA

SEQ ID NO: 55419 - protein, 14 aa, Homo Sapiens
RSQHCKPEEGLEAQ

SEQ ID NO: 55420 - protein, 14 aa, Homo Sapiens
SQHCKPEEGLEAQG

SEQ ID NO: 55421 - protein, 14 aa, Homo Sapiens
QHCKPEEGLEAQGE

SEQ ID NO: 55422 - protein, 14 aa, Homo Sapiens
HCKPEEGLEAQGEA

SEQ ID NO: 55423 - protein, 14 aa, Homo Sapiens
CKPEEGLEAQGEAL

SEQ ID NO: 55424 - protein, 14 aa, Homo Sapiens
KPEEGLEAQGEALG

SEQ ID NO: 55425 - protein, 14 aa, Homo Sapiens
PEEGLEAQGEALGL

SEQ ID NO: 55426 - protein, 14 aa, Homo Sapiens
EEGLEAQGEALGLV

SEQ ID NO: 55427 - protein, 14 aa, Homo Sapiens
EGLEAQGEALGLVG

SEQ ID NO: 55428 - protein, 14 aa, Homo Sapiens
GLEAQGEALGLVGA

SEQ ID NO: 55429 - protein, 14 aa, Homo Sapiens
LEAQGEALGLVGAQ

SEQ ID NO: 55430 - protein, 14 aa, Homo Sapiens
EAQGEALGLVGAQA

SEQ ID NO: 55431 - protein, 14 aa, Homo Sapiens
AQGEALGLVGAQAP

SEQ ID NO: 55432 - protein, 14 aa, Homo Sapiens
QGEALGLVGAQAPA

SEQ ID NO: 55433 - protein, 14 aa, Homo Sapiens
GEALGLVGAQAPAT

SEQ ID NO: 55434 - protein, 14 aa, Homo Sapiens
EALGLVGAQAPATE

SEQ ID NO: 55435 - protein, 14 aa, Homo Sapiens
ALGLVGAQAPATEE

SEQ ID NO: 55436 - protein, 14 aa, Homo Sapiens
LGLVGAQAPATEEQ

SEQ ID NO: 55437 - protein, 14 aa, Homo Sapiens
GLVGAQAPATEEQE

SEQ ID NO: 55438 - protein, 14 aa, Homo Sapiens
LVGAQAPATEEQET

SEQ ID NO: 55439 - protein, 14 aa, Homo Sapiens
VGAQAPATEEQETA

SEQ ID NO: 55440 - protein, 14 aa, Homo Sapiens
GAQAPATEEQETAS

SEQ ID NO: 55441 - protein, 14 aa, Homo Sapiens
AQAPATEEQETASS

SEQ ID NO: 55442 - protein, 14 aa, Homo Sapiens
QAPATEEQETASSS

SEQ ID NO: 55443 - protein, 14 aa, Homo Sapiens
APATEEQETASSSS

SEQ ID NO: 55444 - protein, 14 aa, Homo Sapiens
PATEEQETASSSST

SEQ ID NO: 55445 - protein, 14 aa, Homo Sapiens
ATEEQETASSSSTL

SEQ ID NO: 55446 - protein, 14 aa, Homo Sapiens
TEEQETASSSSTLV

SEQ ID NO: 55447 - protein, 14 aa, Homo Sapiens
EEQETASSSSTLVE

SEQ ID NO: 55448 - protein, 14 aa, Homo Sapiens
EQETASSSSTLVEV

SEQ ID NO: 55449 - protein, 14 aa, Homo Sapiens
QETASSSSTLVEVT

SEQ ID NO: 55450 - protein, 14 aa, Homo Sapiens
ETASSSSTLVEVTL

SEQ ID NO: 55451 - protein, 14 aa, Homo Sapiens
TASSSSTLVEVTLR

SEQ ID NO: 55452 - protein, 14 aa, Homo Sapiens
ASSSSTLVEVTLRE

SEQ ID NO: 55453 - protein, 14 aa, Homo Sapiens
SSSSTLVEVTLREV

SEQ ID NO: 55454 - protein, 14 aa, Homo Sapiens
SSSTLVEVTLREVP

SEQ ID NO: 55455 - protein, 14 aa, Homo Sapiens
SSTLVEVTLREVPA

SEQ ID NO: 55456 - protein, 14 aa, Homo Sapiens
STLVEVTLREVPAA

SEQ ID NO: 55457 - protein, 14 aa, Homo Sapiens
TLVEVTLREVPAAE

SEQ ID NO: 55458 - protein, 14 aa, Homo Sapiens
LVEVTLREVPAAES

SEQ ID NO: 55459 - protein, 14 aa, Homo Sapiens
VEVTLREVPAAESP

SEQ ID NO: 55460 - protein, 14 aa, Homo Sapiens
EVTLREVPAAESPS

SEQ ID NO: 55461 - protein, 14 aa, Homo Sapiens
VTLREVPAAESPSP

SEQ ID NO: 55462 - protein, 14 aa, Homo Sapiens
TLREVPAAESPSPP

SEQ ID NO: 55463 - protein, 14 aa, Homo Sapiens
LREVPAAESPSPPH

SEQ ID NO: 55464 - protein, 14 aa, Homo Sapiens
REVPAAESPSPPHS

SEQ ID NO: 55465 - protein, 14 aa, Homo Sapiens
EVPAAESPSPPHSP

SEQ ID NO: 55466 - protein, 14 aa, Homo Sapiens
VPAAESPSPPHSPQ

SEQ ID NO: 55467 - protein, 14 aa, Homo Sapiens
PAAESPSPPHSPQG

SEQ ID NO: 55468 - protein, 14 aa, Homo Sapiens
AAESPSPPHSPQGA

SEQ ID NO: 55469 - protein, 14 aa, Homo Sapiens
AESPSPPHSPQGAS

SEQ ID NO: 55470 - protein, 14 aa, Homo Sapiens
ESPSPPHSPQGAST

SEQ ID NO: 55471 - protein, 14 aa, Homo Sapiens
SPSPPHSPQGASTL

SEQ ID NO: 55472 - protein, 14 aa, Homo Sapiens
PSPPHSPQGASTLP

SEQ ID NO: 55473 - protein, 14 aa, Homo Sapiens
SPPHSPQGASTLPT

SEQ ID NO: 55474 - protein, 14 aa, Homo Sapiens
PPHSPQGASTLPTT

SEQ ID NO: 55475 - protein, 14 aa, Homo Sapiens
PHSPQGASTLPTTI

SEQ ID NO: 55476 - protein, 14 aa, Homo Sapiens
HSPQGASTLPTTIN

SEQ ID NO: 55477 - protein, 14 aa, Homo Sapiens
SPQGASTLPTTINY

SEQ ID NO: 55478 - protein, 14 aa, Homo Sapiens
PQGASTLPTTINYT

SEQ ID NO: 55479 - protein, 14 aa, Homo Sapiens
QGASTLPTTINYTL

SEQ ID NO: 55480 - protein, 14 aa, Homo Sapiens
GASTLPTTINYTLW

SEQ ID NO: 55481 - protein, 14 aa, Homo Sapiens
ASTLPTTINYTLWS

SEQ ID NO: 55482 - protein, 14 aa, Homo Sapiens
STLPTTINYTLWSQ

SEQ ID NO: 55483 - protein, 14 aa, Homo Sapiens
TLPTTINYTLWSQS

SEQ ID NO: 55484 - protein, 14 aa, Homo Sapiens
LPTTINYTLWSQSD

SEQ ID NO: 55485 - protein, 14 aa, Homo Sapiens
PTTINYTLWSQSDE

SEQ ID NO: 55486 - protein, 14 aa, Homo Sapiens
TTINYTLWSQSDEG

SEQ ID NO: 55487 - protein, 14 aa, Homo Sapiens
TINYTLWSQSDEGS

SEQ ID NO: 55488 - protein, 14 aa, Homo Sapiens
INYTLWSQSDEGSS

SEQ ID NO: 55489 - protein, 14 aa, Homo Sapiens
NYTLWSQSDEGSSN

SEQ ID NO: 55490 - protein, 14 aa, Homo Sapiens
YTLWSQSDEGSSNE

SEQ ID NO: 55491 - protein, 14 aa, Homo Sapiens
TLWSQSDEGSSNEE

SEQ ID NO: 55492 - protein, 14 aa, Homo Sapiens
LWSQSDEGSSNEEQ

SEQ ID NO: 55493 - protein, 14 aa, Homo Sapiens
WSQSDEGSSNEEQE

SEQ ID NO: 55494 - protein, 14 aa, Homo Sapiens
SQSDEGSSNEEQEG

SEQ ID NO: 55495 - protein, 14 aa, Homo Sapiens
QSDEGSSNEEQEGP

SEQ ID NO: 55496 - protein, 14 aa, Homo Sapiens
SDEGSSNEEQEGPS

SEQ ID NO: 55497 - protein, 14 aa, Homo Sapiens
DEGSSNEEQEGPST

SEQ ID NO: 55498 - protein, 14 aa, Homo Sapiens
EGSSNEEQEGPSTF

SEQ ID NO: 55499 - protein, 14 aa, Homo Sapiens
GSSNEEQEGPSTFP

SEQ ID NO: 55500 - protein, 14 aa, Homo Sapiens
SSNEEQEGPSTFPD

SEQ ID NO: 55501 - protein, 14 aa, Homo Sapiens
SNEEQEGPSTFPDL

SEQ ID NO: 55502 - protein, 14 aa, Homo Sapiens
NEEQEGPSTFPDLE

SEQ ID NO: 55503 - protein, 14 aa, Homo Sapiens
EEQEGPSTFPDLET

SEQ ID NO: 55504 - protein, 14 aa, Homo Sapiens
EQEGPSTFPDLETS

SEQ ID NO: 55505 - protein, 14 aa, Homo Sapiens
QEGPSTFPDLETSF

SEQ ID NO: 55506 - protein, 14 aa, Homo Sapiens
EGPSTFPDLETSFQ

SEQ ID NO: 55507 - protein, 14 aa, Homo Sapiens
GPSTFPDLETSFQV

SEQ ID NO: 55508 - protein, 14 aa, Homo Sapiens
PSTFPDLETSFQVA

SEQ ID NO: 55509 - protein, 14 aa, Homo Sapiens
STFPDLETSFQVAL

SEQ ID NO: 55510 - protein, 14 aa, Homo Sapiens
TFPDLETSFQVALS

SEQ ID NO: 55511 - protein, 14 aa, Homo Sapiens
FPDLETSFQVALSR

SEQ ID NO: 55512 - protein, 14 aa, Homo Sapiens
PDLETSFQVALSRK

SEQ ID NO: 55513 - protein, 14 aa, Homo Sapiens
DLETSFQVALSRKM

SEQ ID NO: 55514 - protein, 14 aa, Homo Sapiens
LETSFQVALSRKMA

SEQ ID NO: 55515 - protein, 14 aa, Homo Sapiens
ETSFQVALSRKMAE

SEQ ID NO: 55516 - protein, 14 aa, Homo Sapiens
TSFQVALSRKMAEL

SEQ ID NO: 55517 - protein, 14 aa, Homo Sapiens
SFQVALSRKMAELV

SEQ ID NO: 55518 - protein, 14 aa, Homo Sapiens
FQVALSRKMAELVH

SEQ ID NO: 55519 - protein, 14 aa, Homo Sapiens
QVALSRKMAELVHF

SEQ ID NO: 55520 - protein, 14 aa, Homo Sapiens
VALSRKMAELVHFL

SEQ ID NO: 55521 - protein, 14 aa, Homo Sapiens
ALSRKMAELVHFLL

SEQ ID NO: 55522 - protein, 14 aa, Homo Sapiens
LSRKMAELVHFLLL

SEQ ID NO: 55523 - protein, 14 aa, Homo Sapiens
SRKMAELVHFLLLK

SEQ ID NO: 55524 - protein, 14 aa, Homo Sapiens
RKMAELVHFLLLKY

SEQ ID NO: 55525 - protein, 14 aa, Homo Sapiens
KMAELVHFLLLKYR

SEQ ID NO: 55526 - protein, 14 aa, Homo Sapiens
MAELVHFLLLKYRA

SEQ ID NO: 55527 - protein, 14 aa, Homo Sapiens
AELVHFLLLKYRAR

SEQ ID NO: 55528 - protein, 14 aa, Homo Sapiens
ELVHFLLLKYRARE

SEQ ID NO: 55529 - protein, 14 aa, Homo Sapiens
LVHFLLLKYRAREP

SEQ ID NO: 55530 - protein, 14 aa, Homo Sapiens
VHFLLLKYRAREPF

SEQ ID NO: 55531 - protein, 14 aa, Homo Sapiens
HFLLLKYRAREPFT

SEQ ID NO: 55532 - protein, 14 aa, Homo Sapiens
FLLLKYRAREPFTK

SEQ ID NO: 55533 - protein, 14 aa, Homo Sapiens
LLLKYRAREPFTKA

SEQ ID NO: 55534 - protein, 14 aa, Homo Sapiens
LLKYRAREPFTKAE

SEQ ID NO: 55535 - protein, 14 aa, Homo Sapiens
LKYRAREPFTKAEM

SEQ ID NO: 55536 - protein, 14 aa, Homo Sapiens
KYRAREPFTKAEML

SEQ ID NO: 55537 - protein, 14 aa, Homo Sapiens
YRAREPFTKAEMLG

SEQ ID NO: 55538 - protein, 14 aa, Homo Sapiens
RAREPFTKAEMLGS

SEQ ID NO: 55539 - protein, 14 aa, Homo Sapiens
AREPFTKAEMLGSV

SEQ ID NO: 55540 - protein, 14 aa, Homo Sapiens
REPFTKAEMLGSVI

SEQ ID NO: 55541 - protein, 14 aa, Homo Sapiens
EPFTKAEMLGSVIR

SEQ ID NO: 55542 - protein, 14 aa, Homo Sapiens
PFTKAEMLGSVIRN

SEQ ID NO: 55543 - protein, 14 aa, Homo Sapiens
FTKAEMLGSVIRNF

SEQ ID NO: 55544 - protein, 14 aa, Homo Sapiens
TKAEMLGSVIRNFQ

SEQ ID NO: 55545 - protein, 14 aa, Homo Sapiens
KAEMLGSVIRNFQD

SEQ ID NO: 55546 - protein, 14 aa, Homo Sapiens
AEMLGSVIRNFQDF

SEQ ID NO: 55547 - protein, 14 aa, Homo Sapiens
EMLGSVIRNFQDFF

SEQ ID NO: 55548 - protein, 14 aa, Homo Sapiens
MLGSVIRNFQDFFP

SEQ ID NO: 55549 - protein, 14 aa, Homo Sapiens
LGSVIRNFQDFFPV

SEQ ID NO: 55550 - protein, 14 aa, Homo Sapiens
GSVIRNFQDFFPVI

SEQ ID NO: 55551 - protein, 14 aa, Homo Sapiens
SVIRNFQDFFPVIF

SEQ ID NO: 55552 - protein, 14 aa, Homo Sapiens
VIRNFQDFFPVIFS

SEQ ID NO: 55553 - protein, 14 aa, Homo Sapiens
IRNFQDFFPVIFSK

SEQ ID NO: 55554 - protein, 14 aa, Homo Sapiens
RNFQDFFPVIFSKA

SEQ ID NO: 55555 - protein, 14 aa, Homo Sapiens
NFQDFFPVIFSKAS

SEQ ID NO: 55556 - protein, 14 aa, Homo Sapiens
FQDFFPVIFSKASE

SEQ ID NO: 55557 - protein, 14 aa, Homo Sapiens
QDFFPVIFSKASEY

SEQ ID NO: 55558 - protein, 14 aa, Homo Sapiens
DFFPVIFSKASEYL

SEQ ID NO: 55559 - protein, 14 aa, Homo Sapiens
FFPVIFSKASEYLQ

SEQ ID NO: 55560 - protein, 14 aa, Homo Sapiens
FPVIFSKASEYLQL

SEQ ID NO: 55561 - protein, 14 aa, Homo Sapiens
PVIFSKASEYLQLV

SEQ ID NO: 55562 - protein, 14 aa, Homo Sapiens
VIFSKASEYLQLVF

SEQ ID NO: 55563 - protein, 14 aa, Homo Sapiens
IFSKASEYLQLVFG

SEQ ID NO: 55564 - protein, 14 aa, Homo Sapiens
FSKASEYLQLVFGI

SEQ ID NO: 55565 - protein, 14 aa, Homo Sapiens
SKASEYLQLVFGIE

SEQ ID NO: 55566 - protein, 14 aa, Homo Sapiens
KASEYLQLVFGIEV

SEQ ID NO: 55567 - protein, 14 aa, Homo Sapiens
ASEYLQLVFGIEVV

SEQ ID NO: 55568 - protein, 14 aa, Homo Sapiens
SEYLQLVFGIEVVE

SEQ ID NO: 55569 - protein, 14 aa, Homo Sapiens
EYLQLVFGIEVVEV

SEQ ID NO: 55570 - protein, 14 aa, Homo Sapiens
YLQLVFGIEVVEVV

SEQ ID NO: 55571 - protein, 14 aa, Homo Sapiens
LQLVFGIEVVEVVR

SEQ ID NO: 55572 - protein, 14 aa, Homo Sapiens
QLVFGIEVVEVVRI

SEQ ID NO: 55573 - protein, 14 aa, Homo Sapiens
LVFGIEVVEVVRIG

SEQ ID NO: 55574 - protein, 14 aa, Homo Sapiens
VFGIEVVEVVRIGH

SEQ ID NO: 55575 - protein, 14 aa, Homo Sapiens
FGIEVVEVVRIGHL

SEQ ID NO: 55576 - protein, 14 aa, Homo Sapiens
GIEVVEVVRIGHLY

SEQ ID NO: 55577 - protein, 14 aa, Homo Sapiens
IEVVEVVRIGHLYI

SEQ ID NO: 55578 - protein, 14 aa, Homo Sapiens
EVVEVVRIGHLYIL

SEQ ID NO: 55579 - protein, 14 aa, Homo Sapiens
VVEVVRIGHLYILV

SEQ ID NO: 55580 - protein, 14 aa, Homo Sapiens
VEVVRIGHLYILVT

SEQ ID NO: 55581 - protein, 14 aa, Homo Sapiens
EVVRIGHLYILVTC

SEQ ID NO: 55582 - protein, 14 aa, Homo Sapiens
VVRIGHLYILVTCL

SEQ ID NO: 55583 - protein, 14 aa, Homo Sapiens
VRIGHLYILVTCLG

SEQ ID NO: 55584 - protein, 14 aa, Homo Sapiens
RIGHLYILVTCLGL

SEQ ID NO: 55585 - protein, 14 aa, Homo Sapiens
IGHLYILVTCLGLS

SEQ ID NO: 55586 - protein, 14 aa, Homo Sapiens
GHLYILVTCLGLSY

SEQ ID NO: 55587 - protein, 14 aa, Homo Sapiens
HLYILVTCLGLSYD

SEQ ID NO: 55588 - protein, 14 aa, Homo Sapiens
LYILVTCLGLSYDG

SEQ ID NO: 55589 - protein, 14 aa, Homo Sapiens
YILVTCLGLSYDGL

SEQ ID NO: 55590 - protein, 14 aa, Homo Sapiens
ILVTCLGLSYDGLL

SEQ ID NO: 55591 - protein, 14 aa, Homo Sapiens
LVTCLGLSYDGLLG

SEQ ID NO: 55592 - protein, 14 aa, Homo Sapiens
VTCLGLSYDGLLGD

SEQ ID NO: 55593 - protein, 14 aa, Homo Sapiens
TCLGLSYDGLLGDN

SEQ ID NO: 55594 - protein, 14 aa, Homo Sapiens
CLGLSYDGLLGDNQ

SEQ ID NO: 55595 - protein, 14 aa, Homo Sapiens
LGLSYDGLLGDNQI

SEQ ID NO: 55596 - protein, 14 aa, Homo Sapiens
GLSYDGLLGDNQIV

SEQ ID NO: 55597 - protein, 14 aa, Homo Sapiens
LSYDGLLGDNQIVP

SEQ ID NO: 55598 - protein, 14 aa, Homo Sapiens
SYDGLLGDNQIVPK

SEQ ID NO: 55599 - protein, 14 aa, Homo Sapiens
YDGLLGDNQIVPKT

SEQ ID NO: 55600 - protein, 14 aa, Homo Sapiens
DGLLGDNQIVPKTG

SEQ ID NO: 55601 - protein, 14 aa, Homo Sapiens
GLLGDNQIVPKTGL

SEQ ID NO: 55602 - protein, 14 aa, Homo Sapiens
LLGDNQIVPKTGLL

SEQ ID NO: 55603 - protein, 14 aa, Homo Sapiens
LGDNQIVPKTGLLI

SEQ ID NO: 55604 - protein, 14 aa, Homo Sapiens
GDNQIVPKTGLLII

SEQ ID NO: 55605 - protein, 14 aa, Homo Sapiens
DNQIVPKTGLLIIV

SEQ ID NO: 55606 - protein, 14 aa, Homo Sapiens
NQIVPKTGLLIIVL

SEQ ID NO: 55607 - protein, 14 aa, Homo Sapiens
QIVPKTGLLIIVLA

SEQ ID NO: 55608 - protein, 14 aa, Homo Sapiens
IVPKTGLLIIVLAI

SEQ ID NO: 55609 - protein, 14 aa, Homo Sapiens
VPKTGLLIIVLAII

SEQ ID NO: 55610 - protein, 14 aa, Homo Sapiens
PKTGLLIIVLAIIA

SEQ ID NO: 55611 - protein, 14 aa, Homo Sapiens
KTGLLIIVLAIIAK

SEQ ID NO: 55612 - protein, 14 aa, Homo Sapiens
TGLLIIVLAIIAKE

SEQ ID NO: 55613 - protein, 14 aa, Homo Sapiens
GLLIIVLAIIAKEG

SEQ ID NO: 55614 - protein, 14 aa, Homo Sapiens
LLIIVLAIIAKEGD

SEQ ID NO: 55615 - protein, 14 aa, Homo Sapiens
LIIVLAIIAKEGDC

SEQ ID NO: 55616 - protein, 14 aa, Homo Sapiens
IIVLAIIAKEGDCA

SEQ ID NO: 55617 - protein, 14 aa, Homo Sapiens
IVLAIIAKEGDCAP

SEQ ID NO: 55618 - protein, 14 aa, Homo Sapiens
VLAIIAKEGDCAPE

SEQ ID NO: 55619 - protein, 14 aa, Homo Sapiens
LAIIAKEGDCAPEE

SEQ ID NO: 55620 - protein, 14 aa, Homo Sapiens
AIIAKEGDCAPEEK

SEQ ID NO: 55621 - protein, 14 aa, Homo Sapiens
IIAKEGDCAPEEKI

SEQ ID NO: 55622 - protein, 14 aa, Homo Sapiens
IAKEGDCAPEEKIW

SEQ ID NO: 55623 - protein, 14 aa, Homo Sapiens
AKEGDCAPEEKIWE

SEQ ID NO: 55624 - protein, 14 aa, Homo Sapiens
KEGDCAPEEKIWEE

SEQ ID NO: 55625 - protein, 14 aa, Homo Sapiens
EGDCAPEEKIWEEL

SEQ ID NO: 55626 - protein, 14 aa, Homo Sapiens
GDCAPEEKIWEELS

SEQ ID NO: 55627 - protein, 14 aa, Homo Sapiens
DCAPEEKIWEELSV

SEQ ID NO: 55628 - protein, 14 aa, Homo Sapiens
CAPEEKIWEELSVL

SEQ ID NO: 55629 - protein, 14 aa, Homo Sapiens
APEEKIWEELSVLE

SEQ ID NO: 55630 - protein, 14 aa, Homo Sapiens
PEEKIWEELSVLEA

SEQ ID NO: 55631 - protein, 14 aa, Homo Sapiens
EEKIWEELSVLEAS

SEQ ID NO: 55632 - protein, 14 aa, Homo Sapiens
EKIWEELSVLEASD

SEQ ID NO: 55633 - protein, 14 aa, Homo Sapiens
KIWEELSVLEASDG

SEQ ID NO: 55634 - protein, 14 aa, Homo Sapiens
IWEELSVLEASDGR

SEQ ID NO: 55635 - protein, 14 aa, Homo Sapiens
WEELSVLEASDGRE

SEQ ID NO: 55636 - protein, 14 aa, Homo Sapiens
EELSVLEASDGRED

SEQ ID NO: 55637 - protein, 14 aa, Homo Sapiens
ELSVLEASDGREDS

SEQ ID NO: 55638 - protein, 14 aa, Homo Sapiens
LSVLEASDGREDSV

SEQ ID NO: 55639 - protein, 14 aa, Homo Sapiens
SVLEASDGREDSVF

SEQ ID NO: 55640 - protein, 14 aa, Homo Sapiens
VLEASDGREDSVFA

SEQ ID NO: 55641 - protein, 14 aa, Homo Sapiens
LEASDGREDSVFAH

SEQ ID NO: 55642 - protein, 14 aa, Homo Sapiens
EASDGREDSVFAHP

SEQ ID NO: 55643 - protein, 14 aa, Homo Sapiens
ASDGREDSVFAHPR

SEQ ID NO: 55644 - protein, 14 aa, Homo Sapiens
SDGREDSVFAHPRK

SEQ ID NO: 55645 - protein, 14 aa, Homo Sapiens
DGREDSVFAHPRKL

SEQ ID NO: 55646 - protein, 14 aa, Homo Sapiens
GREDSVFAHPRKLL

SEQ ID NO: 55647 - protein, 14 aa, Homo Sapiens
REDSVFAHPRKLLT

SEQ ID NO: 55648 - protein, 14 aa, Homo Sapiens
EDSVFAHPRKLLTQ

SEQ ID NO: 55649 - protein, 14 aa, Homo Sapiens
DSVFAHPRKLLTQD

SEQ ID NO: 55650 - protein, 14 aa, Homo Sapiens
SVFAHPRKLLTQDL

SEQ ID NO: 55651 - protein, 14 aa, Homo Sapiens
VFAHPRKLLTQDLV

SEQ ID NO: 55652 - protein, 14 aa, Homo Sapiens
FAHPRKLLTQDLVQ

SEQ ID NO: 55653 - protein, 14 aa, Homo Sapiens
AHPRKLLTQDLVQE

SEQ ID NO: 55654 - protein, 14 aa, Homo Sapiens
HPRKLLTQDLVQEN

SEQ ID NO: 55655 - protein, 14 aa, Homo Sapiens
PRKLLTQDLVQENY

SEQ ID NO: 55656 - protein, 14 aa, Homo Sapiens
RKLLTQDLVQENYL

SEQ ID NO: 55657 - protein, 14 aa, Homo Sapiens
KLLTQDLVQENYLE

SEQ ID NO: 55658 - protein, 14 aa, Homo Sapiens
LLTQDLVQENYLEY

SEQ ID NO: 55659 - protein, 14 aa, Homo Sapiens
LTQDLVQENYLEYR

SEQ ID NO: 55660 - protein, 14 aa, Homo Sapiens
TQDLVQENYLEYRQ

SEQ ID NO: 55661 - protein, 14 aa, Homo Sapiens
QDLVQENYLEYRQV

SEQ ID NO: 55662 - protein, 14 aa, Homo Sapiens
DLVQENYLEYRQVP

SEQ ID NO: 55663 - protein, 14 aa, Homo Sapiens
LVQENYLEYRQVPG

SEQ ID NO: 55664 - protein, 14 aa, Homo Sapiens
VQENYLEYRQVPGS

SEQ ID NO: 55665 - protein, 14 aa, Homo Sapiens
QENYLEYRQVPGSD

SEQ ID NO: 55666 - protein, 14 aa, Homo Sapiens
ENYLEYRQVPGSDP

SEQ ID NO: 55667 - protein, 14 aa, Homo Sapiens
NYLEYRQVPGSDPA

SEQ ID NO: 55668 - protein, 14 aa, Homo Sapiens
YLEYRQVPGSDPAC

SEQ ID NO: 55669 - protein, 14 aa, Homo Sapiens
LEYRQVPGSDPACY

SEQ ID NO: 55670 - protein, 14 aa, Homo Sapiens
EYRQVPGSDPACYE

SEQ ID NO: 55671 - protein, 14 aa, Homo Sapiens
YRQVPGSDPACYEF

SEQ ID NO: 55672 - protein, 14 aa, Homo Sapiens
RQVPGSDPACYEFL

SEQ ID NO: 55673 - protein, 14 aa, Homo Sapiens
QVPGSDPACYEFLW

SEQ ID NO: 55674 - protein, 14 aa, Homo Sapiens
VPGSDPACYEFLWG

SEQ ID NO: 55675 - protein, 14 aa, Homo Sapiens
PGSDPACYEFLWGP

SEQ ID NO: 55676 - protein, 14 aa, Homo Sapiens
GSDPACYEFLWGPR

SEQ ID NO: 55677 - protein, 14 aa, Homo Sapiens
SDPACYEFLWGPRA

SEQ ID NO: 55678 - protein, 14 aa, Homo Sapiens
DPACYEFLWGPRAL

SEQ ID NO: 55679 - protein, 14 aa, Homo Sapiens
PACYEFLWGPRALV

SEQ ID NO: 55680 - protein, 14 aa, Homo Sapiens
ACYEFLWGPRALVE

SEQ ID NO: 55681 - protein, 14 aa, Homo Sapiens
CYEFLWGPRALVET

SEQ ID NO: 55682 - protein, 14 aa, Homo Sapiens
YEFLWGPRALVETS

SEQ ID NO: 55683 - protein, 14 aa, Homo Sapiens
EFLWGPRALVETSY

SEQ ID NO: 55684 - protein, 14 aa, Homo Sapiens
FLWGPRALVETSYV

SEQ ID NO: 55685 - protein, 14 aa, Homo Sapiens
LWGPRALVETSYVK

SEQ ID NO: 55686 - protein, 14 aa, Homo Sapiens
WGPRALVETSYVKV

SEQ ID NO: 55687 - protein, 14 aa, Homo Sapiens
GPRALVETSYVKVL

SEQ ID NO: 55688 - protein, 14 aa, Homo Sapiens
PRALVETSYVKVLH

SEQ ID NO: 55689 - protein, 14 aa, Homo Sapiens
RALVETSYVKVLHH

SEQ ID NO: 55690 - protein, 14 aa, Homo Sapiens
ALVETSYVKVLHHL

SEQ ID NO: 55691 - protein, 14 aa, Homo Sapiens
LVETSYVKVLHHLL

SEQ ID NO: 55692 - protein, 14 aa, Homo Sapiens
VETSYVKVLHHLLK

SEQ ID NO: 55693 - protein, 14 aa, Homo Sapiens
ETSYVKVLHHLLKI

SEQ ID NO: 55694 - protein, 14 aa, Homo Sapiens
TSYVKVLHHLLKIS

SEQ ID NO: 55695 - protein, 14 aa, Homo Sapiens
SYVKVLHHLLKISG

SEQ ID NO: 55696 - protein, 14 aa, Homo Sapiens
YVKVLHHLLKISGG

SEQ ID NO: 55697 - protein, 14 aa, Homo Sapiens
VKVLHHLLKISGGP

SEQ ID NO: 55698 - protein, 14 aa, Homo Sapiens
KVLHHLLKISGGPH

SEQ ID NO: 55699 - protein, 14 aa, Homo Sapiens
VLHHLLKISGGPHI

SEQ ID NO: 55700 - protein, 14 aa, Homo Sapiens
LHHLLKISGGPHIS

SEQ ID NO: 55701 - protein, 14 aa, Homo Sapiens
HHLLKISGGPHISY

SEQ ID NO: 55702 - protein, 14 aa, Homo Sapiens
HLLKISGGPHISYP

SEQ ID NO: 55703 - protein, 14 aa, Homo Sapiens
LLKISGGPHISYPP

SEQ ID NO: 55704 - protein, 14 aa, Homo Sapiens
LKISGGPHISYPPL

SEQ ID NO: 55705 - protein, 14 aa, Homo Sapiens
KISGGPHISYPPLH

SEQ ID NO: 55706 - protein, 14 aa, Homo Sapiens
ISGGPHISYPPLHE

SEQ ID NO: 55707 - protein, 14 aa, Homo Sapiens
SGGPHISYPPLHEW

SEQ ID NO: 55708 - protein, 14 aa, Homo Sapiens
GGPHISYPPLHEWA

SEQ ID NO: 55709 - protein, 14 aa, Homo Sapiens
GPHISYPPLHEWAF

SEQ ID NO: 55710 - protein, 14 aa, Homo Sapiens
PHISYPPLHEWAFR

SEQ ID NO: 55711 - protein, 14 aa, Homo Sapiens
HISYPPLHEWAFRE

SEQ ID NO: 55712 - protein, 14 aa, Homo Sapiens
ISYPPLHEWAFREG

SEQ ID NO: 55713 - protein, 14 aa, Homo Sapiens
SYPPLHEWAFREGE

SEQ ID NO: 55714 - protein, 14 aa, Homo Sapiens
YPPLHEWAFREGEE

SEQ ID NO: 55715 - protein, 15 aa, Homo Sapiens
MPLEQRSQHCKPEEG

SEQ ID NO: 55716 - protein, 15 aa, Homo Sapiens
PLEQRSQHCKPEEGL

SEQ ID NO: 55717 - protein, 15 aa, Homo Sapiens
LEQRSQHCKPEEGLE

SEQ ID NO: 55718 - protein, 15 aa, Homo Sapiens
EQRSQHCKPEEGLEA

SEQ ID NO: 55719 - protein, 15 aa, Homo Sapiens
QRSQHCKPEEGLEAQ

SEQ ID NO: 55720 - protein, 15 aa, Homo Sapiens
RSQHCKPEEGLEAQG

SEQ ID NO: 55721 - protein, 15 aa, Homo Sapiens
SQHCKPEEGLEAQGE

SEQ ID NO: 55722 - protein, 15 aa, Homo Sapiens
QHCKPEEGLEAQGEA

SEQ ID NO: 55723 - protein, 15 aa, Homo Sapiens
HCKPEEGLEAQGEAL

SEQ ID NO: 55724 - protein, 15 aa, Homo Sapiens
CKPEEGLEAQGEALG

SEQ ID NO: 55725 - protein, 15 aa, Homo Sapiens
KPEEGLEAQGEALGL

SEQ ID NO: 55726 - protein, 15 aa, Homo Sapiens
PEEGLEAQGEALGLV

SEQ ID NO: 55727 - protein, 15 aa, Homo Sapiens
EEGLEAQGEALGLVG

SEQ ID NO: 55728 - protein, 15 aa, Homo Sapiens
EGLEAQGEALGLVGA

SEQ ID NO: 55729 - protein, 15 aa, Homo Sapiens
GLEAQGEALGLVGAQ

SEQ ID NO: 55730 - protein, 15 aa, Homo Sapiens
LEAQGEALGLVGAQA

SEQ ID NO: 55731 - protein, 15 aa, Homo Sapiens
EAQGEALGLVGAQAP

SEQ ID NO: 55732 - protein, 15 aa, Homo Sapiens
AQGEALGLVGAQAPA

SEQ ID NO: 55733 - protein, 15 aa, Homo Sapiens
QGEALGLVGAQAPAT

SEQ ID NO: 55734 - protein, 15 aa, Homo Sapiens
GEALGLVGAQAPATE

SEQ ID NO: 55735 - protein, 15 aa, Homo Sapiens
EALGLVGAQAPATEE

SEQ ID NO: 55736 - protein, 15 aa, Homo Sapiens
ALGLVGAQAPATEEQ

SEQ ID NO: 55737 - protein, 15 aa, Homo Sapiens
LGLVGAQAPATEEQE

SEQ ID NO: 55738 - protein, 15 aa, Homo Sapiens
GLVGAQAPATEEQET

SEQ ID NO: 55739 - protein, 15 aa, Homo Sapiens
LVGAQAPATEEQETA

SEQ ID NO: 55740 - protein, 15 aa, Homo Sapiens
VGAQAPATEEQETAS

SEQ ID NO: 55741 - protein, 15 aa, Homo Sapiens
GAQAPATEEQETASS

SEQ ID NO: 55742 - protein, 15 aa, Homo Sapiens
AQAPATEEQETASSS

SEQ ID NO: 55743 - protein, 15 aa, Homo Sapiens
QAPATEEQETASSSS

SEQ ID NO: 55744 - protein, 15 aa, Homo Sapiens
APATEEQETASSSST

SEQ ID NO: 55745 - protein, 15 aa, Homo Sapiens
PATEEQETASSSSTL

SEQ ID NO: 55746 - protein, 15 aa, Homo Sapiens
ATEEQETASSSSTLV

SEQ ID NO: 55747 - protein, 15 aa, Homo Sapiens
TEEQETASSSSTLVE

SEQ ID NO: 55748 - protein, 15 aa, Homo Sapiens
EEQETASSSSTLVEV

SEQ ID NO: 55749 - protein, 15 aa, Homo Sapiens
EQETASSSSTLVEVT

SEQ ID NO: 55750 - protein, 15 aa, Homo Sapiens
QETASSSSTLVEVTL

SEQ ID NO: 55751 - protein, 15 aa, Homo Sapiens
ETASSSSTLVEVTLR

SEQ ID NO: 55752 - protein, 15 aa, Homo Sapiens
TASSSSTLVEVTLRE

SEQ ID NO: 55753 - protein, 15 aa, Homo Sapiens
ASSSSTLVEVTLREV

SEQ ID NO: 55754 - protein, 15 aa, Homo Sapiens
SSSSTLVEVTLREVP

SEQ ID NO: 55755 - protein, 15 aa, Homo Sapiens
SSSTLVEVTLREVPA

SEQ ID NO: 55756 - protein, 15 aa, Homo Sapiens
SSTLVEVTLREVPAA

SEQ ID NO: 55757 - protein, 15 aa, Homo Sapiens
STLVEVTLREVPAAE

SEQ ID NO: 55758 - protein, 15 aa, Homo Sapiens
TLVEVTLREVPAAES

SEQ ID NO: 55759 - protein, 15 aa, Homo Sapiens
LVEVTLREVPAAESP

SEQ ID NO: 55760 - protein, 15 aa, Homo Sapiens
VEVTLREVPAAESPS

SEQ ID NO: 55761 - protein, 15 aa, Homo Sapiens
EVTLREVPAAESPSP

SEQ ID NO: 55762 - protein, 15 aa, Homo Sapiens
VTLREVPAAESPSPP

SEQ ID NO: 55763 - protein, 15 aa, Homo Sapiens
TLREVPAAESPSPPH

SEQ ID NO: 55764 - protein, 15 aa, Homo Sapiens
LREVPAAESPSPPHS

SEQ ID NO: 55765 - protein, 15 aa, Homo Sapiens
REVPAAESPSPPHSP

SEQ ID NO: 55766 - protein, 15 aa, Homo Sapiens
EVPAAESPSPPHSPQ

SEQ ID NO: 55767 - protein, 15 aa, Homo Sapiens
VPAAESPSPPHSPQG

SEQ ID NO: 55768 - protein, 15 aa, Homo Sapiens
PAAESPSPPHSPQGA

SEQ ID NO: 55769 - protein, 15 aa, Homo Sapiens
AAESPSPPHSPQGAS

SEQ ID NO: 55770 - protein, 15 aa, Homo Sapiens
AESPSPPHSPQGAST

SEQ ID NO: 55771 - protein, 15 aa, Homo Sapiens
ESPSPPHSPQGASTL

SEQ ID NO: 55772 - protein, 15 aa, Homo Sapiens
SPSPPHSPQGASTLP

SEQ ID NO: 55773 - protein, 15 aa, Homo Sapiens
PSPPHSPQGASTLPT

SEQ ID NO: 55774 - protein, 15 aa, Homo Sapiens
SPPHSPQGASTLPTT

SEQ ID NO: 55775 - protein, 15 aa, Homo Sapiens
PPHSPQGASTLPTTI

SEQ ID NO: 55776 - protein, 15 aa, Homo Sapiens
PHSPQGASTLPTTIN

SEQ ID NO: 55777 - protein, 15 aa, Homo Sapiens
HSPQGASTLPTTINY

SEQ ID NO: 55778 - protein, 15 aa, Homo Sapiens
SPQGASTLPTTINYT

SEQ ID NO: 55779 - protein, 15 aa, Homo Sapiens
PQGASTLPTTINYTL

SEQ ID NO: 55780 - protein, 15 aa, Homo Sapiens
QGASTLPTTINYTLW

SEQ ID NO: 55781 - protein, 15 aa, Homo Sapiens
GASTLPTTINYTLWS

SEQ ID NO: 55782 - protein, 15 aa, Homo Sapiens
ASTLPTTINYTLWSQ

SEQ ID NO: 55783 - protein, 15 aa, Homo Sapiens
STLPTTINYTLWSQS

SEQ ID NO: 55784 - protein, 15 aa, Homo Sapiens
TLPTTINYTLWSQSD

SEQ ID NO: 55785 - protein, 15 aa, Homo Sapiens
LPTTINYTLWSQSDE

SEQ ID NO: 55786 - protein, 15 aa, Homo Sapiens
PTTINYTLWSQSDEG

SEQ ID NO: 55787 - protein, 15 aa, Homo Sapiens
TTINYTLWSQSDEGS

SEQ ID NO: 55788 - protein, 15 aa, Homo Sapiens
TINYTLWSQSDEGSS

SEQ ID NO: 55789 - protein, 15 aa, Homo Sapiens
INYTLWSQSDEGSSN

SEQ ID NO: 55790 - protein, 15 aa, Homo Sapiens
NYTLWSQSDEGSSNE

SEQ ID NO: 55791 - protein, 15 aa, Homo Sapiens
YTLWSQSDEGSSNEE

SEQ ID NO: 55792 - protein, 15 aa, Homo Sapiens
TLWSQSDEGSSNEEQ

SEQ ID NO: 55793 - protein, 15 aa, Homo Sapiens
LWSQSDEGSSNEEQE

SEQ ID NO: 55794 - protein, 15 aa, Homo Sapiens
WSQSDEGSSNEEQEG

SEQ ID NO: 55795 - protein, 15 aa, Homo Sapiens
SQSDEGSSNEEQEGP

SEQ ID NO: 55796 - protein, 15 aa, Homo Sapiens
QSDEGSSNEEQEGPS

SEQ ID NO: 55797 - protein, 15 aa, Homo Sapiens
SDEGSSNEEQEGPST

SEQ ID NO: 55798 - protein, 15 aa, Homo Sapiens
DEGSSNEEQEGPSTF

SEQ ID NO: 55799 - protein, 15 aa, Homo Sapiens
EGSSNEEQEGPSTFP

SEQ ID NO: 55800 - protein, 15 aa, Homo Sapiens
GSSNEEQEGPSTFPD

SEQ ID NO: 55801 - protein, 15 aa, Homo Sapiens
SSNEEQEGPSTFPDL

SEQ ID NO: 55802 - protein, 15 aa, Homo Sapiens
SNEEQEGPSTFPDLE

SEQ ID NO: 55803 - protein, 15 aa, Homo Sapiens
NEEQEGPSTFPDLET

SEQ ID NO: 55804 - protein, 15 aa, Homo Sapiens
EEQEGPSTFPDLETS

SEQ ID NO: 55805 - protein, 15 aa, Homo Sapiens
EQEGPSTFPDLETSF

SEQ ID NO: 55806 - protein, 15 aa, Homo Sapiens
QEGPSTFPDLETSFQ

SEQ ID NO: 55807 - protein, 15 aa, Homo Sapiens
EGPSTFPDLETSFQV

SEQ ID NO: 55808 - protein, 15 aa, Homo Sapiens
GPSTFPDLETSFQVA

SEQ ID NO: 55809 - protein, 15 aa, Homo Sapiens
PSTFPDLETSFQVAL

SEQ ID NO: 55810 - protein, 15 aa, Homo Sapiens
STFPDLETSFQVALS

SEQ ID NO: 55811 - protein, 15 aa, Homo Sapiens
TFPDLETSFQVALSR

SEQ ID NO: 55812 - protein, 15 aa, Homo Sapiens
FPDLETSFQVALSRK

SEQ ID NO: 55813 - protein, 15 aa, Homo Sapiens
PDLETSFQVALSRKM

SEQ ID NO: 55814 - protein, 15 aa, Homo Sapiens
DLETSFQVALSRKMA

SEQ ID NO: 55815 - protein, 15 aa, Homo Sapiens
LETSFQVALSRKMAE

SEQ ID NO: 55816 - protein, 15 aa, Homo Sapiens
ETSFQVALSRKMAEL

SEQ ID NO: 55817 - protein, 15 aa, Homo Sapiens
TSFQVALSRKMAELV

SEQ ID NO: 55818 - protein, 15 aa, Homo Sapiens
SFQVALSRKMAELVH

SEQ ID NO: 55819 - protein, 15 aa, Homo Sapiens
FQVALSRKMAELVHF

SEQ ID NO: 55820 - protein, 15 aa, Homo Sapiens
QVALSRKMAELVHFL

SEQ ID NO: 55821 - protein, 15 aa, Homo Sapiens
VALSRKMAELVHFLL

SEQ ID NO: 55822 - protein, 15 aa, Homo Sapiens
ALSRKMAELVHFLLL

SEQ ID NO: 55823 - protein, 15 aa, Homo Sapiens
LSRKMAELVHFLLLK

SEQ ID NO: 55824 - protein, 15 aa, Homo Sapiens
SRKMAELVHFLLLKY

SEQ ID NO: 55825 - protein, 15 aa, Homo Sapiens
RKMAELVHFLLLKYR

SEQ ID NO: 55826 - protein, 15 aa, Homo Sapiens
KMAELVHFLLLKYRA

SEQ ID NO: 55827 - protein, 15 aa, Homo Sapiens
MAELVHFLLLKYRAR

SEQ ID NO: 55828 - protein, 15 aa, Homo Sapiens
AELVHFLLLKYRARE

SEQ ID NO: 55829 - protein, 15 aa, Homo Sapiens
ELVHFLLLKYRAREP

SEQ ID NO: 55830 - protein, 15 aa, Homo Sapiens
LVHFLLLKYRAREPF

SEQ ID NO: 55831 - protein, 15 aa, Homo Sapiens
VHFLLLKYRAREPFT

SEQ ID NO: 55832 - protein, 15 aa, Homo Sapiens
HFLLLKYRAREPFTK

SEQ ID NO: 55833 - protein, 15 aa, Homo Sapiens
FLLLKYRAREPFTKA

SEQ ID NO: 55834 - protein, 15 aa, Homo Sapiens
LLLKYRAREPFTKAE

SEQ ID NO: 55835 - protein, 15 aa, Homo Sapiens
LLKYRAREPFTKAEM

SEQ ID NO: 55836 - protein, 15 aa, Homo Sapiens
LKYRAREPFTKAEML

SEQ ID NO: 55837 - protein, 15 aa, Homo Sapiens
KYRAREPFTKAEMLG

SEQ ID NO: 55838 - protein, 15 aa, Homo Sapiens
YRAREPFTKAEMLGS

SEQ ID NO: 55839 - protein, 15 aa, Homo Sapiens
RAREPFTKAEMLGSV

SEQ ID NO: 55840 - protein, 15 aa, Homo Sapiens
AREPFTKAEMLGSVI

SEQ ID NO: 55841 - protein, 15 aa, Homo Sapiens
REPFTKAEMLGSVIR

SEQ ID NO: 55842 - protein, 15 aa, Homo Sapiens
EPFTKAEMLGSVIRN

SEQ ID NO: 55843 - protein, 15 aa, Homo Sapiens
PFTKAEMLGSVIRNF

SEQ ID NO: 55844 - protein, 15 aa, Homo Sapiens
FTKAEMLGSVIRNFQ

SEQ ID NO: 55845 - protein, 15 aa, Homo Sapiens
TKAEMLGSVIRNFQD

SEQ ID NO: 55846 - protein, 15 aa, Homo Sapiens
KAEMLGSVIRNFQDF

SEQ ID NO: 55847 - protein, 15 aa, Homo Sapiens
AEMLGSVIRNFQDFF

SEQ ID NO: 55848 - protein, 15 aa, Homo Sapiens
EMLGSVIRNFQDFFP

SEQ ID NO: 55849 - protein, 15 aa, Homo Sapiens
MLGSVIRNFQDFFPV

SEQ ID NO: 55850 - protein, 15 aa, Homo Sapiens
LGSVIRNFQDFFPVI

SEQ ID NO: 55851 - protein, 15 aa, Homo Sapiens
GSVIRNFQDFFPVIF

SEQ ID NO: 55852 - protein, 15 aa, Homo Sapiens
SVIRNFQDFFPVIFS

SEQ ID NO: 55853 - protein, 15 aa, Homo Sapiens
VIRNFQDFFPVIFSK

SEQ ID NO: 55854 - protein, 15 aa, Homo Sapiens
IRNFQDFFPVIFSKA

SEQ ID NO: 55855 - protein, 15 aa, Homo Sapiens
RNFQDFFPVIFSKAS

SEQ ID NO: 55856 - protein, 15 aa, Homo Sapiens
NFQDFFPVIFSKASE

SEQ ID NO: 55857 - protein, 15 aa, Homo Sapiens
FQDFFPVIFSKASEY

SEQ ID NO: 55858 - protein, 15 aa, Homo Sapiens
QDFFPVIFSKASEYL

SEQ ID NO: 55859 - protein, 15 aa, Homo Sapiens
DFFPVIFSKASEYLQ

SEQ ID NO: 55860 - protein, 15 aa, Homo Sapiens
FFPVIFSKASEYLQL

SEQ ID NO: 55861 - protein, 15 aa, Homo Sapiens
FPVIFSKASEYLQLV

SEQ ID NO: 55862 - protein, 15 aa, Homo Sapiens
PVIFSKASEYLQLVF

SEQ ID NO: 55863 - protein, 15 aa, Homo Sapiens
VIFSKASEYLQLVFG

SEQ ID NO: 55864 - protein, 15 aa, Homo Sapiens
IFSKASEYLQLVFGI

SEQ ID NO: 55865 - protein, 15 aa, Homo Sapiens
FSKASEYLQLVFGIE

SEQ ID NO: 55866 - protein, 15 aa, Homo Sapiens
SKASEYLQLVFGIEV

SEQ ID NO: 55867 - protein, 15 aa, Homo Sapiens
KASEYLQLVFGIEVV

SEQ ID NO: 55868 - protein, 15 aa, Homo Sapiens
ASEYLQLVFGIEVVE

SEQ ID NO: 55869 - protein, 15 aa, Homo Sapiens
SEYLQLVFGIEVVEV

SEQ ID NO: 55870 - protein, 15 aa, Homo Sapiens
EYLQLVFGIEVVEVV

SEQ ID NO: 55871 - protein, 15 aa, Homo Sapiens
YLQLVFGIEVVEVVR

SEQ ID NO: 55872 - protein, 15 aa, Homo Sapiens
LQLVFGIEVVEVVRI

SEQ ID NO: 55873 - protein, 15 aa, Homo Sapiens
QLVFGIEVVEVVRIG

SEQ ID NO: 55874 - protein, 15 aa, Homo Sapiens
LVFGIEVVEVVRIGH

SEQ ID NO: 55875 - protein, 15 aa, Homo Sapiens
VFGIEVVEVVRIGHL

SEQ ID NO: 55876 - protein, 15 aa, Homo Sapiens
FGIEVVEVVRIGHLY

SEQ ID NO: 55877 - protein, 15 aa, Homo Sapiens
GIEVVEVVRIGHLYI

SEQ ID NO: 55878 - protein, 15 aa, Homo Sapiens
IEVVEVVRIGHLYIL

SEQ ID NO: 55879 - protein, 15 aa, Homo Sapiens
EVVEVVRIGHLYILV

SEQ ID NO: 55880 - protein, 15 aa, Homo Sapiens
VVEVVRIGHLYILVT

SEQ ID NO: 55881 - protein, 15 aa, Homo Sapiens
VEVVRIGHLYILVTC

SEQ ID NO: 55882 - protein, 15 aa, Homo Sapiens
EVVRIGHLYILVTCL

SEQ ID NO: 55883 - protein, 15 aa, Homo Sapiens
VVRIGHLYILVTCLG

SEQ ID NO: 55884 - protein, 15 aa, Homo Sapiens
VRIGHLYILVTCLGL

SEQ ID NO: 55885 - protein, 15 aa, Homo Sapiens
RIGHLYILVTCLGLS

SEQ ID NO: 55886 - protein, 15 aa, Homo Sapiens
IGHLYILVTCLGLSY

SEQ ID NO: 55887 - protein, 15 aa, Homo Sapiens
GHLYILVTCLGLSYD

SEQ ID NO: 55888 - protein, 15 aa, Homo Sapiens
HLYILVTCLGLSYDG

SEQ ID NO: 55889 - protein, 15 aa, Homo Sapiens
LYILVTCLGLSYDGL

SEQ ID NO: 55890 - protein, 15 aa, Homo Sapiens
YILVTCLGLSYDGLL

SEQ ID NO: 55891 - protein, 15 aa, Homo Sapiens
ILVTCLGLSYDGLLG

SEQ ID NO: 55892 - protein, 15 aa, Homo Sapiens
LVTCLGLSYDGLLGD

SEQ ID NO: 55893 - protein, 15 aa, Homo Sapiens
VTCLGLSYDGLLGDN

SEQ ID NO: 55894 - protein, 15 aa, Homo Sapiens
TCLGLSYDGLLGDNQ

SEQ ID NO: 55895 - protein, 15 aa, Homo Sapiens
CLGLSYDGLLGDNQI

SEQ ID NO: 55896 - protein, 15 aa, Homo Sapiens
LGLSYDGLLGDNQIV

SEQ ID NO: 55897 - protein, 15 aa, Homo Sapiens
GLSYDGLLGDNQIVP

SEQ ID NO: 55898 - protein, 15 aa, Homo Sapiens
LSYDGLLGDNQIVPK

SEQ ID NO: 55899 - protein, 15 aa, Homo Sapiens
SYDGLLGDNQIVPKT

SEQ ID NO: 55900 - protein, 15 aa, Homo Sapiens
YDGLLGDNQIVPKTG

SEQ ID NO: 55901 - protein, 15 aa, Homo Sapiens
DGLLGDNQIVPKTGL

SEQ ID NO: 55902 - protein, 15 aa, Homo Sapiens
GLLGDNQIVPKTGLL

SEQ ID NO: 55903 - protein, 15 aa, Homo Sapiens
LLGDNQIVPKTGLLI

SEQ ID NO: 55904 - protein, 15 aa, Homo Sapiens
LGDNQIVPKTGLLII

SEQ ID NO: 55905 - protein, 15 aa, Homo Sapiens
GDNQIVPKTGLLIIV

SEQ ID NO: 55906 - protein, 15 aa, Homo Sapiens
DNQIVPKTGLLIIVL

SEQ ID NO: 55907 - protein, 15 aa, Homo Sapiens
NQIVPKTGLLIIVLA

SEQ ID NO: 55908 - protein, 15 aa, Homo Sapiens
QIVPKTGLLIIVLAI

SEQ ID NO: 55909 - protein, 15 aa, Homo Sapiens
IVPKTGLLIIVLAII

SEQ ID NO: 55910 - protein, 15 aa, Homo Sapiens
VPKTGLLIIVLAIIA

SEQ ID NO: 55911 - protein, 15 aa, Homo Sapiens
PKTGLLIIVLAIIAK

SEQ ID NO: 55912 - protein, 15 aa, Homo Sapiens
KTGLLIIVLAIIAKE

SEQ ID NO: 55913 - protein, 15 aa, Homo Sapiens
TGLLIIVLAIIAKEG

SEQ ID NO: 55914 - protein, 15 aa, Homo Sapiens
GLLIIVLAIIAKEGD

SEQ ID NO: 55915 - protein, 15 aa, Homo Sapiens
LLIIVLAIIAKEGDC

SEQ ID NO: 55916 - protein, 15 aa, Homo Sapiens
LIIVLAIIAKEGDCA

SEQ ID NO: 55917 - protein, 15 aa, Homo Sapiens
IIVLAIIAKEGDCAP

SEQ ID NO: 55918 - protein, 15 aa, Homo Sapiens
IVLAIIAKEGDCAPE

SEQ ID NO: 55919 - protein, 15 aa, Homo Sapiens
VLAIIAKEGDCAPEE

SEQ ID NO: 55920 - protein, 15 aa, Homo Sapiens
LAIIAKEGDCAPEEK

SEQ ID NO: 55921 - protein, 15 aa, Homo Sapiens
AIIAKEGDCAPEEKI

SEQ ID NO: 55922 - protein, 15 aa, Homo Sapiens
IIAKEGDCAPEEKIW

SEQ ID NO: 55923 - protein, 15 aa, Homo Sapiens
IAKEGDCAPEEKIWE

SEQ ID NO: 55924 - protein, 15 aa, Homo Sapiens
AKEGDCAPEEKIWEE

SEQ ID NO: 55925 - protein, 15 aa, Homo Sapiens
KEGDCAPEEKIWEEL

SEQ ID NO: 55926 - protein, 15 aa, Homo Sapiens
EGDCAPEEKIWEELS

SEQ ID NO: 55927 - protein, 15 aa, Homo Sapiens
GDCAPEEKIWEELSV

SEQ ID NO: 55928 - protein, 15 aa, Homo Sapiens
DCAPEEKIWEELSVL

SEQ ID NO: 55929 - protein, 15 aa, Homo Sapiens
CAPEEKIWEELSVLE

SEQ ID NO: 55930 - protein, 15 aa, Homo Sapiens
APEEKIWEELSVLEA

SEQ ID NO: 55931 - protein, 15 aa, Homo Sapiens
PEEKIWEELSVLEAS

SEQ ID NO: 55932 - protein, 15 aa, Homo Sapiens
EEKIWEELSVLEASD

SEQ ID NO: 55933 - protein, 15 aa, Homo Sapiens
EKIWEELSVLEASDG

SEQ ID NO: 55934 - protein, 15 aa, Homo Sapiens
KIWEELSVLEASDGR

SEQ ID NO: 55935 - protein, 15 aa, Homo Sapiens
IWEELSVLEASDGRE

SEQ ID NO: 55936 - protein, 15 aa, Homo Sapiens
WEELSVLEASDGRED

SEQ ID NO: 55937 - protein, 15 aa, Homo Sapiens
EELSVLEASDGREDS

SEQ ID NO: 55938 - protein, 15 aa, Homo Sapiens
ELSVLEASDGREDSV

SEQ ID NO: 55939 - protein, 15 aa, Homo Sapiens
LSVLEASDGREDSVF

SEQ ID NO: 55940 - protein, 15 aa, Homo Sapiens
SVLEASDGREDSVFA

SEQ ID NO: 55941 - protein, 15 aa, Homo Sapiens
VLEASDGREDSVFAH

SEQ ID NO: 55942 - protein, 15 aa, Homo Sapiens
LEASDGREDSVFAHP

SEQ ID NO: 55943 - protein, 15 aa, Homo Sapiens
EASDGREDSVFAHPR

SEQ ID NO: 55944 - protein, 15 aa, Homo Sapiens
ASDGREDSVFAHPRK

SEQ ID NO: 55945 - protein, 15 aa, Homo Sapiens
SDGREDSVFAHPRKL

SEQ ID NO: 55946 - protein, 15 aa, Homo Sapiens
DGREDSVFAHPRKLL

SEQ ID NO: 55947 - protein, 15 aa, Homo Sapiens
GREDSVFAHPRKLLT

SEQ ID NO: 55948 - protein, 15 aa, Homo Sapiens
REDSVFAHPRKLLTQ

SEQ ID NO: 55949 - protein, 15 aa, Homo Sapiens
EDSVFAHPRKLLTQD

SEQ ID NO: 55950 - protein, 15 aa, Homo Sapiens
DSVFAHPRKLLTQDL

SEQ ID NO: 55951 - protein, 15 aa, Homo Sapiens
SVFAHPRKLLTQDLV

SEQ ID NO: 55952 - protein, 15 aa, Homo Sapiens
VFAHPRKLLTQDLVQ

SEQ ID NO: 55953 - protein, 15 aa, Homo Sapiens
FAHPRKLLTQDLVQE

SEQ ID NO: 55954 - protein, 15 aa, Homo Sapiens
AHPRKLLTQDLVQEN

SEQ ID NO: 55955 - protein, 15 aa, Homo Sapiens
HPRKLLTQDLVQENY

SEQ ID NO: 55956 - protein, 15 aa, Homo Sapiens
PRKLLTQDLVQENYL

SEQ ID NO: 55957 - protein, 15 aa, Homo Sapiens
RKLLTQDLVQENYLE

SEQ ID NO: 55958 - protein, 15 aa, Homo Sapiens
KLLTQDLVQENYLEY

SEQ ID NO: 55959 - protein, 15 aa, Homo Sapiens
LLTQDLVQENYLEYR

SEQ ID NO: 55960 - protein, 15 aa, Homo Sapiens
LTQDLVQENYLEYRQ

SEQ ID NO: 55961 - protein, 15 aa, Homo Sapiens
TQDLVQENYLEYRQV

SEQ ID NO: 55962 - protein, 15 aa, Homo Sapiens
QDLVQENYLEYRQVP

SEQ ID NO: 55963 - protein, 15 aa, Homo Sapiens
DLVQENYLEYRQVPG

SEQ ID NO: 55964 - protein, 15 aa, Homo Sapiens
LVQENYLEYRQVPGS

SEQ ID NO: 55965 - protein, 15 aa, Homo Sapiens
VQENYLEYRQVPGSD

SEQ ID NO: 55966 - protein, 15 aa, Homo Sapiens
QENYLEYRQVPGSDP

SEQ ID NO: 55967 - protein, 15 aa, Homo Sapiens
ENYLEYRQVPGSDPA

SEQ ID NO: 55968 - protein, 15 aa, Homo Sapiens
NYLEYRQVPGSDPAC

SEQ ID NO: 55969 - protein, 15 aa, Homo Sapiens
YLEYRQVPGSDPACY

SEQ ID NO: 55970 - protein, 15 aa, Homo Sapiens
LEYRQVPGSDPACYE

SEQ ID NO: 55971 - protein, 15 aa, Homo Sapiens
EYRQVPGSDPACYEF

SEQ ID NO: 55972 - protein, 15 aa, Homo Sapiens
YRQVPGSDPACYEFL

SEQ ID NO: 55973 - protein, 15 aa, Homo Sapiens
RQVPGSDPACYEFLW

SEQ ID NO: 55974 - protein, 15 aa, Homo Sapiens
QVPGSDPACYEFLWG

SEQ ID NO: 55975 - protein, 15 aa, Homo Sapiens
VPGSDPACYEFLWGP

SEQ ID NO: 55976 - protein, 15 aa, Homo Sapiens
PGSDPACYEFLWGPR

SEQ ID NO: 55977 - protein, 15 aa, Homo Sapiens
GSDPACYEFLWGPRA

SEQ ID NO: 55978 - protein, 15 aa, Homo Sapiens
SDPACYEFLWGPRAL

SEQ ID NO: 55979 - protein, 15 aa, Homo Sapiens
DPACYEFLWGPRALV

SEQ ID NO: 55980 - protein, 15 aa, Homo Sapiens
PACYEFLWGPRALVE

SEQ ID NO: 55981 - protein, 15 aa, Homo Sapiens
ACYEFLWGPRALVET

SEQ ID NO: 55982 - protein, 15 aa, Homo Sapiens
CYEFLWGPRALVETS

SEQ ID NO: 55983 - protein, 15 aa, Homo Sapiens
YEFLWGPRALVETSY

SEQ ID NO: 55984 - protein, 15 aa, Homo Sapiens
EFLWGPRALVETSYV

SEQ ID NO: 55985 - protein, 15 aa, Homo Sapiens
FLWGPRALVETSYVK

SEQ ID NO: 55986 - protein, 15 aa, Homo Sapiens
LWGPRALVETSYVKV

SEQ ID NO: 55987 - protein, 15 aa, Homo Sapiens
WGPRALVETSYVKVL

SEQ ID NO: 55988 - protein, 15 aa, Homo Sapiens
GPRALVETSYVKVLH

SEQ ID NO: 55989 - protein, 15 aa, Homo Sapiens
PRALVETSYVKVLHH

SEQ ID NO: 55990 - protein, 15 aa, Homo Sapiens
RALVETSYVKVLHHL

SEQ ID NO: 55991 - protein, 15 aa, Homo Sapiens
ALVETSYVKVLHHLL

SEQ ID NO: 55992 - protein, 15 aa, Homo Sapiens
LVETSYVKVLHHLLK

SEQ ID NO: 55993 - protein, 15 aa, Homo Sapiens
VETSYVKVLHHLLKI

SEQ ID NO: 55994 - protein, 15 aa, Homo Sapiens
ETSYVKVLHHLLKIS

SEQ ID NO: 55995 - protein, 15 aa, Homo Sapiens
TSYVKVLHHLLKISG

SEQ ID NO: 55996 - protein, 15 aa, Homo Sapiens
SYVKVLHHLLKISGG

SEQ ID NO: 55997 - protein, 15 aa, Homo Sapiens
YVKVLHHLLKISGGP

SEQ ID NO: 55998 - protein, 15 aa, Homo Sapiens
VKVLHHLLKISGGPH

SEQ ID NO: 55999 - protein, 15 aa, Homo Sapiens
KVLHHLLKISGGPHI

SEQ ID NO: 56000 - protein, 15 aa, Homo Sapiens
VLHHLLKISGGPHIS

SEQ ID NO: 56001 - protein, 15 aa, Homo Sapiens
LHHLLKISGGPHISY

SEQ ID NO: 56002 - protein, 15 aa, Homo Sapiens
HHLLKISGGPHISYP

SEQ ID NO: 56003 - protein, 15 aa, Homo Sapiens
HLLKISGGPHISYPP

SEQ ID NO: 56004 - protein, 15 aa, Homo Sapiens
LLKISGGPHISYPPL

SEQ ID NO: 56005 - protein, 15 aa, Homo Sapiens
LKISGGPHISYPPLH

SEQ ID NO: 56006 - protein, 15 aa, Homo Sapiens
KISGGPHISYPPLHE

SEQ ID NO: 56007 - protein, 15 aa, Homo Sapiens
ISGGPHISYPPLHEW

SEQ ID NO: 56008 - protein, 15 aa, Homo Sapiens
SGGPHISYPPLHEWA

SEQ ID NO: 56009 - protein, 15 aa, Homo Sapiens
GGPHISYPPLHEWAF

SEQ ID NO: 56010 - protein, 15 aa, Homo Sapiens
GPHISYPPLHEWAFR

SEQ ID NO: 56011 - protein, 15 aa, Homo Sapiens
PHISYPPLHEWAFRE

SEQ ID NO: 56012 - protein, 15 aa, Homo Sapiens
HISYPPLHEWAFREG

SEQ ID NO: 56013 - protein, 15 aa, Homo Sapiens
ISYPPLHEWAFREGE

SEQ ID NO: 56014 - protein, 15 aa, Homo Sapiens
SYPPLHEWAFREGEE

SEQ ID NO: 56015 - protein, 16 aa, Homo Sapiens
MPLEQRSQHCKPEEGL

SEQ ID NO: 56016 - protein, 16 aa, Homo Sapiens
PLEQRSQHCKPEEGLE

SEQ ID NO: 56017 - protein, 16 aa, Homo Sapiens
LEQRSQHCKPEEGLEA

SEQ ID NO: 56018 - protein, 16 aa, Homo Sapiens
EQRSQHCKPEEGLEAQ

SEQ ID NO: 56019 - protein, 16 aa, Homo Sapiens
QRSQHCKPEEGLEAQG

SEQ ID NO: 56020 - protein, 16 aa, Homo Sapiens
RSQHCKPEEGLEAQGE

SEQ ID NO: 56021 - protein, 16 aa, Homo Sapiens
SQHCKPEEGLEAQGEA

SEQ ID NO: 56022 - protein, 16 aa, Homo Sapiens
QHCKPEEGLEAQGEAL

SEQ ID NO: 56023 - protein, 16 aa, Homo Sapiens
HCKPEEGLEAQGEALG

SEQ ID NO: 56024 - protein, 16 aa, Homo Sapiens
CKPEEGLEAQGEALGL

SEQ ID NO: 56025 - protein, 16 aa, Homo Sapiens
KPEEGLEAQGEALGLV

SEQ ID NO: 56026 - protein, 16 aa, Homo Sapiens
PEEGLEAQGEALGLVG

SEQ ID NO: 56027 - protein, 16 aa, Homo Sapiens
EEGLEAQGEALGLVGA

SEQ ID NO: 56028 - protein, 16 aa, Homo Sapiens
EGLEAQGEALGLVGAQ

SEQ ID NO: 56029 - protein, 16 aa, Homo Sapiens
GLEAQGEALGLVGAQA

SEQ ID NO: 56030 - protein, 16 aa, Homo Sapiens
LEAQGEALGLVGAQAP

SEQ ID NO: 56031 - protein, 16 aa, Homo Sapiens
EAQGEALGLVGAQAPA

SEQ ID NO: 56032 - protein, 16 aa, Homo Sapiens
AQGEALGLVGAQAPAT

SEQ ID NO: 56033 - protein, 16 aa, Homo Sapiens
QGEALGLVGAQAPATE

SEQ ID NO: 56034 - protein, 16 aa, Homo Sapiens
GEALGLVGAQAPATEE

SEQ ID NO: 56035 - protein, 16 aa, Homo Sapiens
EALGLVGAQAPATEEQ

SEQ ID NO: 56036 - protein, 16 aa, Homo Sapiens
ALGLVGAQAPATEEQE

SEQ ID NO: 56037 - protein, 16 aa, Homo Sapiens
LGLVGAQAPATEEQET

SEQ ID NO: 56038 - protein, 16 aa, Homo Sapiens
GLVGAQAPATEEQETA

SEQ ID NO: 56039 - protein, 16 aa, Homo Sapiens
LVGAQAPATEEQETAS

SEQ ID NO: 56040 - protein, 16 aa, Homo Sapiens
VGAQAPATEEQETASS

SEQ ID NO: 56041 - protein, 16 aa, Homo Sapiens
GAQAPATEEQETASSS

SEQ ID NO: 56042 - protein, 16 aa, Homo Sapiens
AQAPATEEQETASSSS

SEQ ID NO: 56043 - protein, 16 aa, Homo Sapiens
QAPATEEQETASSSST

SEQ ID NO: 56044 - protein, 16 aa, Homo Sapiens
APATEEQETASSSSTL

SEQ ID NO: 56045 - protein, 16 aa, Homo Sapiens
PATEEQETASSSSTLV

SEQ ID NO: 56046 - protein, 16 aa, Homo Sapiens
ATEEQETASSSSTLVE

SEQ ID NO: 56047 - protein, 16 aa, Homo Sapiens
TEEQETASSSSTLVEV

SEQ ID NO: 56048 - protein, 16 aa, Homo Sapiens
EEQETASSSSTLVEVT

SEQ ID NO: 56049 - protein, 16 aa, Homo Sapiens
EQETASSSSTLVEVTL

SEQ ID NO: 56050 - protein, 16 aa, Homo Sapiens
QETASSSSTLVEVTLR

SEQ ID NO: 56051 - protein, 16 aa, Homo Sapiens
ETASSSSTLVEVTLRE

SEQ ID NO: 56052 - protein, 16 aa, Homo Sapiens
TASSSSTLVEVTLREV

SEQ ID NO: 56053 - protein, 16 aa, Homo Sapiens
ASSSSTLVEVTLREVP

SEQ ID NO: 56054 - protein, 16 aa, Homo Sapiens
SSSSTLVEVTLREVPA

SEQ ID NO: 56055 - protein, 16 aa, Homo Sapiens
SSSTLVEVTLREVPAA

SEQ ID NO: 56056 - protein, 16 aa, Homo Sapiens
SSTLVEVTLREVPAAE

SEQ ID NO: 56057 - protein, 16 aa, Homo Sapiens
STLVEVTLREVPAAES

SEQ ID NO: 56058 - protein, 16 aa, Homo Sapiens
TLVEVTLREVPAAESP

SEQ ID NO: 56059 - protein, 16 aa, Homo Sapiens
LVEVTLREVPAAESPS

SEQ ID NO: 56060 - protein, 16 aa, Homo Sapiens
VEVTLREVPAAESPSP

SEQ ID NO: 56061 - protein, 16 aa, Homo Sapiens
EVTLREVPAAESPSPP

SEQ ID NO: 56062 - protein, 16 aa, Homo Sapiens
VTLREVPAAESPSPPH

SEQ ID NO: 56063 - protein, 16 aa, Homo Sapiens
TLREVPAAESPSPPHS

SEQ ID NO: 56064 - protein, 16 aa, Homo Sapiens
LREVPAAESPSPPHSP

SEQ ID NO: 56065 - protein, 16 aa, Homo Sapiens
REVPAAESPSPPHSPQ

SEQ ID NO: 56066 - protein, 16 aa, Homo Sapiens
EVPAAESPSPPHSPQG

SEQ ID NO: 56067 - protein, 16 aa, Homo Sapiens
VPAAESPSPPHSPQGA

SEQ ID NO: 56068 - protein, 16 aa, Homo Sapiens
PAAESPSPPHSPQGAS

SEQ ID NO: 56069 - protein, 16 aa, Homo Sapiens
AAESPSPPHSPQGAST

SEQ ID NO: 56070 - protein, 16 aa, Homo Sapiens
AESPSPPHSPQGASTL

SEQ ID NO: 56071 - protein, 16 aa, Homo Sapiens
ESPSPPHSPQGASTLP

SEQ ID NO: 56072 - protein, 16 aa, Homo Sapiens
SPSPPHSPQGASTLPT

SEQ ID NO: 56073 - protein, 16 aa, Homo Sapiens
PSPPHSPQGASTLPTT

SEQ ID NO: 56074 - protein, 16 aa, Homo Sapiens
SPPHSPQGASTLPTTI

SEQ ID NO: 56075 - protein, 16 aa, Homo Sapiens
PPHSPQGASTLPTTIN

SEQ ID NO: 56076 - protein, 16 aa, Homo Sapiens
PHSPQGASTLPTTINY

SEQ ID NO: 56077 - protein, 16 aa, Homo Sapiens
HSPQGASTLPTTINYT

SEQ ID NO: 56078 - protein, 16 aa, Homo Sapiens
SPQGASTLPTTINYTL

SEQ ID NO: 56079 - protein, 16 aa, Homo Sapiens
PQGASTLPTTINYTLW

SEQ ID NO: 56080 - protein, 16 aa, Homo Sapiens
QGASTLPTTINYTLWS

SEQ ID NO: 56081 - protein, 16 aa, Homo Sapiens
GASTLPTTINYTLWSQ

SEQ ID NO: 56082 - protein, 16 aa, Homo Sapiens
ASTLPTTINYTLWSQS

SEQ ID NO: 56083 - protein, 16 aa, Homo Sapiens
STLPTTINYTLWSQSD

SEQ ID NO: 56084 - protein, 16 aa, Homo Sapiens
TLPTTINYTLWSQSDE

SEQ ID NO: 56085 - protein, 16 aa, Homo Sapiens
LPTTINYTLWSQSDEG

SEQ ID NO: 56086 - protein, 16 aa, Homo Sapiens
PTTINYTLWSQSDEGS

SEQ ID NO: 56087 - protein, 16 aa, Homo Sapiens
TTINYTLWSQSDEGSS

SEQ ID NO: 56088 - protein, 16 aa, Homo Sapiens
TINYTLWSQSDEGSSN

SEQ ID NO: 56089 - protein, 16 aa, Homo Sapiens
INYTLWSQSDEGSSNE

SEQ ID NO: 56090 - protein, 16 aa, Homo Sapiens
NYTLWSQSDEGSSNEE

SEQ ID NO: 56091 - protein, 16 aa, Homo Sapiens
YTLWSQSDEGSSNEEQ

SEQ ID NO: 56092 - protein, 16 aa, Homo Sapiens
TLWSQSDEGSSNEEQE

SEQ ID NO: 56093 - protein, 16 aa, Homo Sapiens
LWSQSDEGSSNEEQEG

SEQ ID NO: 56094 - protein, 16 aa, Homo Sapiens
WSQSDEGSSNEEQEGP

SEQ ID NO: 56095 - protein, 16 aa, Homo Sapiens
SQSDEGSSNEEQEGPS

SEQ ID NO: 56096 - protein, 16 aa, Homo Sapiens
QSDEGSSNEEQEGPST

SEQ ID NO: 56097 - protein, 16 aa, Homo Sapiens
SDEGSSNEEQEGPSTF

SEQ ID NO: 56098 - protein, 16 aa, Homo Sapiens
DEGSSNEEQEGPSTFP

SEQ ID NO: 56099 - protein, 16 aa, Homo Sapiens
EGSSNEEQEGPSTFPD

SEQ ID NO: 56100 - protein, 16 aa, Homo Sapiens
GSSNEEQEGPSTFPDL

SEQ ID NO: 56101 - protein, 16 aa, Homo Sapiens
SSNEEQEGPSTFPDLE

SEQ ID NO: 56102 - protein, 16 aa, Homo Sapiens
SNEEQEGPSTFPDLET

SEQ ID NO: 56103 - protein, 16 aa, Homo Sapiens
NEEQEGPSTFPDLETS

SEQ ID NO: 56104 - protein, 16 aa, Homo Sapiens
EEQEGPSTFPDLETSF

SEQ ID NO: 56105 - protein, 16 aa, Homo Sapiens
EQEGPSTFPDLETSFQ

SEQ ID NO: 56106 - protein, 16 aa, Homo Sapiens
QEGPSTFPDLETSFQV

SEQ ID NO: 56107 - protein, 16 aa, Homo Sapiens
EGPSTFPDLETSFQVA

SEQ ID NO: 56108 - protein, 16 aa, Homo Sapiens
GPSTFPDLETSFQVAL

SEQ ID NO: 56109 - protein, 16 aa, Homo Sapiens
PSTFPDLETSFQVALS

SEQ ID NO: 56110 - protein, 16 aa, Homo Sapiens
STFPDLETSFQVALSR

SEQ ID NO: 56111 - protein, 16 aa, Homo Sapiens
TFPDLETSFQVALSRK

SEQ ID NO: 56112 - protein, 16 aa, Homo Sapiens
FPDLETSFQVALSRKM

SEQ ID NO: 56113 - protein, 16 aa, Homo Sapiens
PDLETSFQVALSRKMA

SEQ ID NO: 56114 - protein, 16 aa, Homo Sapiens
DLETSFQVALSRKMAE

SEQ ID NO: 56115 - protein, 16 aa, Homo Sapiens
LETSFQVALSRKMAEL

SEQ ID NO: 56116 - protein, 16 aa, Homo Sapiens
ETSFQVALSRKMAELV

SEQ ID NO: 56117 - protein, 16 aa, Homo Sapiens
TSFQVALSRKMAELVH

SEQ ID NO: 56118 - protein, 16 aa, Homo Sapiens
SFQVALSRKMAELVHF

SEQ ID NO: 56119 - protein, 16 aa, Homo Sapiens
FQVALSRKMAELVHFL

SEQ ID NO: 56120 - protein, 16 aa, Homo Sapiens
QVALSRKMAELVHFLL

SEQ ID NO: 56121 - protein, 16 aa, Homo Sapiens
VALSRKMAELVHFLLL

SEQ ID NO: 56122 - protein, 16 aa, Homo Sapiens
ALSRKMAELVHFLLLK

SEQ ID NO: 56123 - protein, 16 aa, Homo Sapiens
LSRKMAELVHFLLLKY

SEQ ID NO: 56124 - protein, 16 aa, Homo Sapiens
SRKMAELVHFLLLKYR

SEQ ID NO: 56125 - protein, 16 aa, Homo Sapiens
RKMAELVHFLLLKYRA

SEQ ID NO: 56126 - protein, 16 aa, Homo Sapiens
KMAELVHFLLLKYRAR

SEQ ID NO: 56127 - protein, 16 aa, Homo Sapiens
MAELVHFLLLKYRARE

SEQ ID NO: 56128 - protein, 16 aa, Homo Sapiens
AELVHFLLLKYRAREP

SEQ ID NO: 56129 - protein, 16 aa, Homo Sapiens
ELVHFLLLKYRAREPF

SEQ ID NO: 56130 - protein, 16 aa, Homo Sapiens
LVHFLLLKYRAREPFT

SEQ ID NO: 56131 - protein, 16 aa, Homo Sapiens
VHFLLLKYRAREPFTK

SEQ ID NO: 56132 - protein, 16 aa, Homo Sapiens
HFLLLKYRAREPFTKA

SEQ ID NO: 56133 - protein, 16 aa, Homo Sapiens
FLLLKYRAREPFTKAE

SEQ ID NO: 56134 - protein, 16 aa, Homo Sapiens
LLLKYRAREPFTKAEM

SEQ ID NO: 56135 - protein, 16 aa, Homo Sapiens
LLKYRAREPFTKAEML

SEQ ID NO: 56136 - protein, 16 aa, Homo Sapiens
LKYRAREPFTKAEMLG

SEQ ID NO: 56137 - protein, 16 aa, Homo Sapiens
KYRAREPFTKAEMLGS

SEQ ID NO: 56138 - protein, 16 aa, Homo Sapiens
YRAREPFTKAEMLGSV

SEQ ID NO: 56139 - protein, 16 aa, Homo Sapiens
RAREPFTKAEMLGSVI

SEQ ID NO: 56140 - protein, 16 aa, Homo Sapiens
AREPFTKAEMLGSVIR

SEQ ID NO: 56141 - protein, 16 aa, Homo Sapiens
REPFTKAEMLGSVIRN

SEQ ID NO: 56142 - protein, 16 aa, Homo Sapiens
EPFTKAEMLGSVIRNF

SEQ ID NO: 56143 - protein, 16 aa, Homo Sapiens
PFTKAEMLGSVIRNFQ

SEQ ID NO: 56144 - protein, 16 aa, Homo Sapiens
FTKAEMLGSVIRNFQD

SEQ ID NO: 56145 - protein, 16 aa, Homo Sapiens
TKAEMLGSVIRNFQDF

SEQ ID NO: 56146 - protein, 16 aa, Homo Sapiens
KAEMLGSVIRNFQDFF

SEQ ID NO: 56147 - protein, 16 aa, Homo Sapiens
AEMLGSVIRNFQDFFP

SEQ ID NO: 56148 - protein, 16 aa, Homo Sapiens
EMLGSVIRNFQDFFPV

SEQ ID NO: 56149 - protein, 16 aa, Homo Sapiens
MLGSVIRNFQDFFPVI

SEQ ID NO: 56150 - protein, 16 aa, Homo Sapiens
LGSVIRNFQDFFPVIF

SEQ ID NO: 56151 - protein, 16 aa, Homo Sapiens
GSVIRNFQDFFPVIFS

SEQ ID NO: 56152 - protein, 16 aa, Homo Sapiens
SVIRNFQDFFPVIFSK

SEQ ID NO: 56153 - protein, 16 aa, Homo Sapiens
VIRNFQDFFPVIFSKA

SEQ ID NO: 56154 - protein, 16 aa, Homo Sapiens
IRNFQDFFPVIFSKAS

SEQ ID NO: 56155 - protein, 16 aa, Homo Sapiens
RNFQDFFPVIFSKASE

SEQ ID NO: 56156 - protein, 16 aa, Homo Sapiens
NFQDFFPVIFSKASEY

SEQ ID NO: 56157 - protein, 16 aa, Homo Sapiens
FQDFFPVIFSKASEYL

SEQ ID NO: 56158 - protein, 16 aa, Homo Sapiens
QDFFPVIFSKASEYLQ

SEQ ID NO: 56159 - protein, 16 aa, Homo Sapiens
DFFPVIFSKASEYLQL

SEQ ID NO: 56160 - protein, 16 aa, Homo Sapiens
FFPVIFSKASEYLQLV

SEQ ID NO: 56161 - protein, 16 aa, Homo Sapiens
FPVIFSKASEYLQLVF

SEQ ID NO: 56162 - protein, 16 aa, Homo Sapiens
PVIFSKASEYLQLVFG

SEQ ID NO: 56163 - protein, 16 aa, Homo Sapiens
VIFSKASEYLQLVFGI

SEQ ID NO: 56164 - protein, 16 aa, Homo Sapiens
IFSKASEYLQLVFGIE

SEQ ID NO: 56165 - protein, 16 aa, Homo Sapiens
FSKASEYLQLVFGIEV

SEQ ID NO: 56166 - protein, 16 aa, Homo Sapiens
SKASEYLQLVFGIEVV

SEQ ID NO: 56167 - protein, 16 aa, Homo Sapiens
KASEYLQLVFGIEVVE

SEQ ID NO: 56168 - protein, 16 aa, Homo Sapiens
ASEYLQLVFGIEVVEV

SEQ ID NO: 56169 - protein, 16 aa, Homo Sapiens
SEYLQLVFGIEVVEVV

SEQ ID NO: 56170 - protein, 16 aa, Homo Sapiens
EYLQLVFGIEVVEVVR

SEQ ID NO: 56171 - protein, 16 aa, Homo Sapiens
YLQLVFGIEVVEVVRI

SEQ ID NO: 56172 - protein, 16 aa, Homo Sapiens
LQLVFGIEVVEVVRIG

SEQ ID NO: 56173 - protein, 16 aa, Homo Sapiens
QLVFGIEVVEVVRIGH

SEQ ID NO: 56174 - protein, 16 aa, Homo Sapiens
LVFGIEVVEVVRIGHL

SEQ ID NO: 56175 - protein, 16 aa, Homo Sapiens
VFGIEVVEVVRIGHLY

SEQ ID NO: 56176 - protein, 16 aa, Homo Sapiens
FGIEVVEVVRIGHLYI

SEQ ID NO: 56177 - protein, 16 aa, Homo Sapiens
GIEVVEVVRIGHLYIL

SEQ ID NO: 56178 - protein, 16 aa, Homo Sapiens
IEVVEVVRIGHLYILV

SEQ ID NO: 56179 - protein, 16 aa, Homo Sapiens
EVVEVVRIGHLYILVT

SEQ ID NO: 56180 - protein, 16 aa, Homo Sapiens
VVEVVRIGHLYILVTC

SEQ ID NO: 56181 - protein, 16 aa, Homo Sapiens
VEVVRIGHLYILVTCL

SEQ ID NO: 56182 - protein, 16 aa, Homo Sapiens
EVVRIGHLYILVTCLG

SEQ ID NO: 56183 - protein, 16 aa, Homo Sapiens
VVRIGHLYILVTCLGL

SEQ ID NO: 56184 - protein, 16 aa, Homo Sapiens
VRIGHLYILVTCLGLS

SEQ ID NO: 56185 - protein, 16 aa, Homo Sapiens
RIGHLYILVTCLGLSY

SEQ ID NO: 56186 - protein, 16 aa, Homo Sapiens
IGHLYILVTCLGLSYD

SEQ ID NO: 56187 - protein, 16 aa, Homo Sapiens
GHLYILVTCLGLSYDG

SEQ ID NO: 56188 - protein, 16 aa, Homo Sapiens
HLYILVTCLGLSYDGL

SEQ ID NO: 56189 - protein, 16 aa, Homo Sapiens
LYILVTCLGLSYDGLL

SEQ ID NO: 56190 - protein, 16 aa, Homo Sapiens
YILVTCLGLSYDGLLG

SEQ ID NO: 56191 - protein, 16 aa, Homo Sapiens
ILVTCLGLSYDGLLGD

SEQ ID NO: 56192 - protein, 16 aa, Homo Sapiens
LVTCLGLSYDGLLGDN

SEQ ID NO: 56193 - protein, 16 aa, Homo Sapiens
VTCLGLSYDGLLGDNQ

SEQ ID NO: 56194 - protein, 16 aa, Homo Sapiens
TCLGLSYDGLLGDNQI

SEQ ID NO: 56195 - protein, 16 aa, Homo Sapiens
CLGLSYDGLLGDNQIV

SEQ ID NO: 56196 - protein, 16 aa, Homo Sapiens
LGLSYDGLLGDNQIVP

SEQ ID NO: 56197 - protein, 16 aa, Homo Sapiens
GLSYDGLLGDNQIVPK

SEQ ID NO: 56198 - protein, 16 aa, Homo Sapiens
LSYDGLLGDNQIVPKT

SEQ ID NO: 56199 - protein, 16 aa, Homo Sapiens
SYDGLLGDNQIVPKTG

SEQ ID NO: 56200 - protein, 16 aa, Homo Sapiens
YDGLLGDNQIVPKTGL

SEQ ID NO: 56201 - protein, 16 aa, Homo Sapiens
DGLLGDNQIVPKTGLL

SEQ ID NO: 56202 - protein, 16 aa, Homo Sapiens
GLLGDNQIVPKTGLLI

SEQ ID NO: 56203 - protein, 16 aa, Homo Sapiens
LLGDNQIVPKTGLLII

SEQ ID NO: 56204 - protein, 16 aa, Homo Sapiens
LGDNQIVPKTGLLIIV

SEQ ID NO: 56205 - protein, 16 aa, Homo Sapiens
GDNQIVPKTGLLIIVL

SEQ ID NO: 56206 - protein, 16 aa, Homo Sapiens
DNQIVPKTGLLIIVLA

SEQ ID NO: 56207 - protein, 16 aa, Homo Sapiens
NQIVPKTGLLIIVLAI

SEQ ID NO: 56208 - protein, 16 aa, Homo Sapiens
QIVPKTGLLIIVLAII

SEQ ID NO: 56209 - protein, 16 aa, Homo Sapiens
IVPKTGLLIIVLAIIA

SEQ ID NO: 56210 - protein, 16 aa, Homo Sapiens
VPKTGLLIIVLAIIAK

SEQ ID NO: 56211 - protein, 16 aa, Homo Sapiens
PKTGLLIIVLAIIAKE

SEQ ID NO: 56212 - protein, 16 aa, Homo Sapiens
KTGLLIIVLAIIAKEG

SEQ ID NO: 56213 - protein, 16 aa, Homo Sapiens
TGLLIIVLAIIAKEGD

SEQ ID NO: 56214 - protein, 16 aa, Homo Sapiens
GLLIIVLAIIAKEGDC

SEQ ID NO: 56215 - protein, 16 aa, Homo Sapiens
LLIIVLAIIAKEGDCA

SEQ ID NO: 56216 - protein, 16 aa, Homo Sapiens
LIIVLAIIAKEGDCAP

SEQ ID NO: 56217 - protein, 16 aa, Homo Sapiens
IIVLAIIAKEGDCAPE

SEQ ID NO: 56218 - protein, 16 aa, Homo Sapiens
IVLAIIAKEGDCAPEE

SEQ ID NO: 56219 - protein, 16 aa, Homo Sapiens
VLAIIAKEGDCAPEEK

SEQ ID NO: 56220 - protein, 16 aa, Homo Sapiens
LAIIAKEGDCAPEEKI

SEQ ID NO: 56221 - protein, 16 aa, Homo Sapiens
AIIAKEGDCAPEEKIW

SEQ ID NO: 56222 - protein, 16 aa, Homo Sapiens
IIAKEGDCAPEEKIWE

SEQ ID NO: 56223 - protein, 16 aa, Homo Sapiens
IAKEGDCAPEEKIWEE

SEQ ID NO: 56224 - protein, 16 aa, Homo Sapiens
AKEGDCAPEEKIWEEL

SEQ ID NO: 56225 - protein, 16 aa, Homo Sapiens
KEGDCAPEEKIWEELS

SEQ ID NO: 56226 - protein, 16 aa, Homo Sapiens
EGDCAPEEKIWEELSV

SEQ ID NO: 56227 - protein, 16 aa, Homo Sapiens
GDCAPEEKIWEELSVL

SEQ ID NO: 56228 - protein, 16 aa, Homo Sapiens
DCAPEEKIWEELSVLE

SEQ ID NO: 56229 - protein, 16 aa, Homo Sapiens
CAPEEKIWEELSVLEA

SEQ ID NO: 56230 - protein, 16 aa, Homo Sapiens
APEEKIWEELSVLEAS

SEQ ID NO: 56231 - protein, 16 aa, Homo Sapiens
PEEKIWEELSVLEASD

SEQ ID NO: 56232 - protein, 16 aa, Homo Sapiens
EEKIWEELSVLEASDG

SEQ ID NO: 56233 - protein, 16 aa, Homo Sapiens
EKIWEELSVLEASDGR

SEQ ID NO: 56234 - protein, 16 aa, Homo Sapiens
KIWEELSVLEASDGRE

SEQ ID NO: 56235 - protein, 16 aa, Homo Sapiens
IWEELSVLEASDGRED

SEQ ID NO: 56236 - protein, 16 aa, Homo Sapiens
WEELSVLEASDGREDS

SEQ ID NO: 56237 - protein, 16 aa, Homo Sapiens
EELSVLEASDGREDSV

SEQ ID NO: 56238 - protein, 16 aa, Homo Sapiens
ELSVLEASDGREDSVF

SEQ ID NO: 56239 - protein, 16 aa, Homo Sapiens
LSVLEASDGREDSVFA

SEQ ID NO: 56240 - protein, 16 aa, Homo Sapiens
SVLEASDGREDSVFAH

SEQ ID NO: 56241 - protein, 16 aa, Homo Sapiens
VLEASDGREDSVFAHP

SEQ ID NO: 56242 - protein, 16 aa, Homo Sapiens
LEASDGREDSVFAHPR

SEQ ID NO: 56243 - protein, 16 aa, Homo Sapiens
EASDGREDSVFAHPRK

SEQ ID NO: 56244 - protein, 16 aa, Homo Sapiens
ASDGREDSVFAHPRKL

SEQ ID NO: 56245 - protein, 16 aa, Homo Sapiens
SDGREDSVFAHPRKLL

SEQ ID NO: 56246 - protein, 16 aa, Homo Sapiens
DGREDSVFAHPRKLLT

SEQ ID NO: 56247 - protein, 16 aa, Homo Sapiens
GREDSVFAHPRKLLTQ

SEQ ID NO: 56248 - protein, 16 aa, Homo Sapiens
REDSVFAHPRKLLTQD

SEQ ID NO: 56249 - protein, 16 aa, Homo Sapiens
EDSVFAHPRKLLTQDL

SEQ ID NO: 56250 - protein, 16 aa, Homo Sapiens
DSVFAHPRKLLTQDLV

SEQ ID NO: 56251 - protein, 16 aa, Homo Sapiens
SVFAHPRKLLTQDLVQ

SEQ ID NO: 56252 - protein, 16 aa, Homo Sapiens
VFAHPRKLLTQDLVQE

SEQ ID NO: 56253 - protein, 16 aa, Homo Sapiens
FAHPRKLLTQDLVQEN

SEQ ID NO: 56254 - protein, 16 aa, Homo Sapiens
AHPRKLLTQDLVQENY

SEQ ID NO: 56255 - protein, 16 aa, Homo Sapiens
HPRKLLTQDLVQENYL

SEQ ID NO: 56256 - protein, 16 aa, Homo Sapiens
PRKLLTQDLVQENYLE

SEQ ID NO: 56257 - protein, 16 aa, Homo Sapiens
RKLLTQDLVQENYLEY

SEQ ID NO: 56258 - protein, 16 aa, Homo Sapiens
KLLTQDLVQENYLEYR

SEQ ID NO: 56259 - protein, 16 aa, Homo Sapiens
LLTQDLVQENYLEYRQ

SEQ ID NO: 56260 - protein, 16 aa, Homo Sapiens
LTQDLVQENYLEYRQV

SEQ ID NO: 56261 - protein, 16 aa, Homo Sapiens
TQDLVQENYLEYRQVP

SEQ ID NO: 56262 - protein, 16 aa, Homo Sapiens
QDLVQENYLEYRQVPG

SEQ ID NO: 56263 - protein, 16 aa, Homo Sapiens
DLVQENYLEYRQVPGS

SEQ ID NO: 56264 - protein, 16 aa, Homo Sapiens
LVQENYLEYRQVPGSD

SEQ ID NO: 56265 - protein, 16 aa, Homo Sapiens
VQENYLEYRQVPGSDP

SEQ ID NO: 56266 - protein, 16 aa, Homo Sapiens
QENYLEYRQVPGSDPA

SEQ ID NO: 56267 - protein, 16 aa, Homo Sapiens
ENYLEYRQVPGSDPAC

SEQ ID NO: 56268 - protein, 16 aa, Homo Sapiens
NYLEYRQVPGSDPACY

SEQ ID NO: 56269 - protein, 16 aa, Homo Sapiens
YLEYRQVPGSDPACYE

SEQ ID NO: 56270 - protein, 16 aa, Homo Sapiens
LEYRQVPGSDPACYEF

SEQ ID NO: 56271 - protein, 16 aa, Homo Sapiens
EYRQVPGSDPACYEFL

SEQ ID NO: 56272 - protein, 16 aa, Homo Sapiens
YRQVPGSDPACYEFLW

SEQ ID NO: 56273 - protein, 16 aa, Homo Sapiens
RQVPGSDPACYEFLWG

SEQ ID NO: 56274 - protein, 16 aa, Homo Sapiens
QVPGSDPACYEFLWGP

SEQ ID NO: 56275 - protein, 16 aa, Homo Sapiens
VPGSDPACYEFLWGPR

SEQ ID NO: 56276 - protein, 16 aa, Homo Sapiens
PGSDPACYEFLWGPRA

SEQ ID NO: 56277 - protein, 16 aa, Homo Sapiens
GSDPACYEFLWGPRAL

SEQ ID NO: 56278 - protein, 16 aa, Homo Sapiens
SDPACYEFLWGPRALV

SEQ ID NO: 56279 - protein, 16 aa, Homo Sapiens
DPACYEFLWGPRALVE

SEQ ID NO: 56280 - protein, 16 aa, Homo Sapiens
PACYEFLWGPRALVET

SEQ ID NO: 56281 - protein, 16 aa, Homo Sapiens
ACYEFLWGPRALVETS

SEQ ID NO: 56282 - protein, 16 aa, Homo Sapiens
CYEFLWGPRALVETSY

SEQ ID NO: 56283 - protein, 16 aa, Homo Sapiens
YEFLWGPRALVETSYV

SEQ ID NO: 56284 - protein, 16 aa, Homo Sapiens
EFLWGPRALVETSYVK

SEQ ID NO: 56285 - protein, 16 aa, Homo Sapiens
FLWGPRALVETSYVKV

SEQ ID NO: 56286 - protein, 16 aa, Homo Sapiens
LWGPRALVETSYVKVL

SEQ ID NO: 56287 - protein, 16 aa, Homo Sapiens
WGPRALVETSYVKVLH

SEQ ID NO: 56288 - protein, 16 aa, Homo Sapiens
GPRALVETSYVKVLHH

SEQ ID NO: 56289 - protein, 16 aa, Homo Sapiens
PRALVETSYVKVLHHL

SEQ ID NO: 56290 - protein, 16 aa, Homo Sapiens
RALVETSYVKVLHHLL

SEQ ID NO: 56291 - protein, 16 aa, Homo Sapiens
ALVETSYVKVLHHLLK

SEQ ID NO: 56292 - protein, 16 aa, Homo Sapiens
LVETSYVKVLHHLLKI

SEQ ID NO: 56293 - protein, 16 aa, Homo Sapiens
VETSYVKVLHHLLKIS

SEQ ID NO: 56294 - protein, 16 aa, Homo Sapiens
ETSYVKVLHHLLKISG

SEQ ID NO: 56295 - protein, 16 aa, Homo Sapiens
TSYVKVLHHLLKISGG

SEQ ID NO: 56296 - protein, 16 aa, Homo Sapiens
SYVKVLHHLLKISGGP

SEQ ID NO: 56297 - protein, 16 aa, Homo Sapiens
YVKVLHHLLKISGGPH

SEQ ID NO: 56298 - protein, 16 aa, Homo Sapiens
VKVLHHLLKISGGPHI

SEQ ID NO: 56299 - protein, 16 aa, Homo Sapiens
KVLHHLLKISGGPHIS

SEQ ID NO: 56300 - protein, 16 aa, Homo Sapiens
VLHHLLKISGGPHISY

SEQ ID NO: 56301 - protein, 16 aa, Homo Sapiens
LHHLLKISGGPHISYP

SEQ ID NO: 56302 - protein, 16 aa, Homo Sapiens
HHLLKISGGPHISYPP

SEQ ID NO: 56303 - protein, 16 aa, Homo Sapiens
HLLKISGGPHISYPPL

SEQ ID NO: 56304 - protein, 16 aa, Homo Sapiens
LLKISGGPHISYPPLH

SEQ ID NO: 56305 - protein, 16 aa, Homo Sapiens
LKISGGPHISYPPLHE

SEQ ID NO: 56306 - protein, 16 aa, Homo Sapiens
KISGGPHISYPPLHEW

SEQ ID NO: 56307 - protein, 16 aa, Homo Sapiens
ISGGPHISYPPLHEWA

SEQ ID NO: 56308 - protein, 16 aa, Homo Sapiens
SGGPHISYPPLHEWAF

SEQ ID NO: 56309 - protein, 16 aa, Homo Sapiens
GGPHISYPPLHEWAFR

SEQ ID NO: 56310 - protein, 16 aa, Homo Sapiens
GPHISYPPLHEWAFRE

SEQ ID NO: 56311 - protein, 16 aa, Homo Sapiens
PHISYPPLHEWAFREG

SEQ ID NO: 56312 - protein, 16 aa, Homo Sapiens
HISYPPLHEWAFREGE

SEQ ID NO: 56313 - protein, 16 aa, Homo Sapiens
ISYPPLHEWAFREGEE

SEQ ID NO: 56314 - protein, 124 aa, Homo Sapiens; identical to SEQ ID NO: 52155

SEQ ID NO: 56315 - protein, 8 aa, Homo Sapiens
MQAEGRGT

SEQ ID NO: 56316 - protein, 8 aa, Homo Sapiens
EAGATGGR

SEQ ID NO: 56317 - protein, 8 aa, Homo Sapiens
ATGGRGPR

SEQ ID NO: 56318 - protein, 8 aa, Homo Sapiens
GPRGAGAA

SEQ ID NO: 56319 - protein, 8 aa, Homo Sapiens
GLNGCCRC

SEQ ID NO: 56320 - protein, 8 aa, Homo Sapiens
ESRLLEFY

SEQ ID NO: 56321 - protein, 8 aa, Homo Sapiens
RLLEFYLA

SEQ ID NO: 56322 - protein, 8 aa, Homo Sapiens
LLEFYLAM

SEQ ID NO: 56323 - protein, 8 aa, Homo Sapiens
EFYLAMPF

SEQ ID NO: 56324 - protein, 8 aa, Homo Sapiens
YLAMPFAT

SEQ ID NO: 56325 - protein, 8 aa, Homo Sapiens
AMPFATPM

SEQ ID NO: 56326 - protein, 8 aa, Homo Sapiens
MPFATPME

SEQ ID NO: 56327 - protein, 8 aa, Homo Sapiens
TPMEAELA

SEQ ID NO: 56328 - protein, 8 aa, Homo Sapiens
MEAELARR

SEQ ID NO: 56329 - protein, 8 aa, Homo Sapiens
AELARRSL

SEQ ID NO: 56330 - protein, 8 aa, Homo Sapiens
ELARRSLA

SEQ ID NO: 56331 - protein, 8 aa, Homo Sapiens
LAQDAPPL

SEQ ID NO: 56332 - protein, 8 aa, Homo Sapiens
QDAPPLPV

SEQ ID NO: 56333 - protein, 8 aa, Homo Sapiens
PPLPVPGV

SEQ ID NO: 56334 - protein, 8 aa, Homo Sapiens
PLPVPGVL

SEQ ID NO: 56335 - protein, 8 aa, Homo Sapiens
LPVPGVLL

SEQ ID NO: 56336 - protein, 8 aa, Homo Sapiens
PVPGVLLK

SEQ ID NO: 56337 - protein, 8 aa, Homo Sapiens
VLLKEFTV

SEQ ID NO: 56338 - protein, 8 aa, Homo Sapiens
LLKEFTVS

SEQ ID NO: 56339 - protein, 8 aa, Homo Sapiens
FTVSGNIL

SEQ ID NO: 56340 - protein, 8 aa, Homo Sapiens
SGNILTIR

SEQ ID NO: 56341 - protein, 8 aa, Homo Sapiens
ILTIRLTA

SEQ ID NO: 56342 - protein, 8 aa, Homo Sapiens
LTIRLTAA

SEQ ID NO: 56343 - protein, 8 aa, Homo Sapiens
RLTAADHR

SEQ ID NO: 56344 - protein, 8 aa, Homo Sapiens
TAADHRQL

SEQ ID NO: 56345 - protein, 8 aa, Homo Sapiens
RQLQLSIS

SEQ ID NO: 56346 - protein, 8 aa, Homo Sapiens
LQLSISSC

SEQ ID NO: 56347 - protein, 8 aa, Homo Sapiens
QLSISSCL

SEQ ID NO: 56348 - protein, 8 aa, Homo Sapiens
CLQQLSLL

SEQ ID NO: 56349 - protein, 8 aa, Homo Sapiens
LQQLSLLM

SEQ ID NO: 56350 - protein, 8 aa, Homo Sapiens
QLSLLMWI

SEQ ID NO: 56351 - protein, 8 aa, Homo Sapiens
SLLMWITQ

SEQ ID NO: 56352 - protein, 8 aa, Homo Sapiens
LLMWITQC

SEQ ID NO: 56353 - protein, 8 aa, Homo Sapiens
LMWITQCF

SEQ ID NO: 56354 - protein, 8 aa, Homo Sapiens
MWITQCFL

SEQ ID NO: 56355 - protein, 8 aa, Homo Sapiens
ITQCFLPV

SEQ ID NO: 56356 - protein, 8 aa, Homo Sapiens
TQCFLPVF

SEQ ID NO: 56357 - protein, 8 aa, Homo Sapiens
QCFLPVFL

SEQ ID NO: 56358 - protein, 8 aa, Homo Sapiens
FLPVFLAQ

SEQ ID NO: 56359 - protein, 8 aa, Homo Sapiens
LPVFLAQP

SEQ ID NO: 56360 - protein, 9 aa, Homo Sapiens
IPDGPGGNA

SEQ ID NO: 56361 - protein, 9 aa, Homo Sapiens
GATGGRGPR

SEQ ID NO: 56362 - protein, 9 aa, Homo Sapiens
GPRGAGAAR

SEQ ID NO: 56363 - protein, 9 aa, Homo Sapiens
APRGPHGGA

SEQ ID NO: 56364 - protein, 9 aa, Homo Sapiens
GPESRLLEF

SEQ ID NO: 56365 - protein, 9 aa, Homo Sapiens
RLLEFYLAM

SEQ ID NO: 56366 - protein, 9 aa, Homo Sapiens
LEFYLAMPF

SEQ ID NO: 56367 - protein, 9 aa, Homo Sapiens
FYLAMPFAT

SEQ ID NO: 56368 - protein, 9 aa, Homo Sapiens
YLAMPFATP

SEQ ID NO: 56369 - protein, 9 aa, Homo Sapiens
LAMPFATPM

SEQ ID NO: 56370 - protein, 9 aa, Homo Sapiens
MPFATPMEA

SEQ ID NO: 56371 - protein, 9 aa, Homo Sapiens
FATPMEAEL

SEQ ID NO: 56372 - protein, 9 aa, Homo Sapiens
TPMEAELAR

SEQ ID NO: 56373 - protein, 9 aa, Homo Sapiens
AELARRSLA

SEQ ID NO: 56374 - protein, 9 aa, Homo Sapiens
ELARRSLAQ

SEQ ID NO: 56375 - protein, 9 aa, Homo Sapiens
SLAQDAPPL

SEQ ID NO: 56376 - protein, 9 aa, Homo Sapiens
AQDAPPLPV

SEQ ID NO: 56377 - protein, 9 aa, Homo Sapiens
APPLPVPGV

SEQ ID NO: 56378 - protein, 9 aa, Homo Sapiens
PLPVPGVLL

SEQ ID NO: 56379 - protein, 9 aa, Homo Sapiens
LPVPGVLLK

SEQ ID NO: 56380 - protein, 9 aa, Homo Sapiens
VPGVLLKEF

SEQ ID NO: 56381 - protein, 9 aa, Homo Sapiens
GVLLKEFTV

SEQ ID NO: 56382 - protein, 9 aa, Homo Sapiens
KEFTVSGNI

SEQ ID NO: 56383 - protein, 9 aa, Homo Sapiens
FTVSGNILT

SEQ ID NO: 56384 - protein, 9 aa, Homo Sapiens
TVSGNILTI

SEQ ID NO: 56385 - protein, 9 aa, Homo Sapiens
VSGNILTIR

SEQ ID NO: 56386 - protein, 9 aa, Homo Sapiens
NILTIRLTA

SEQ ID NO: 56387 - protein, 9 aa, Homo Sapiens
ILTIRLTAA

SEQ ID NO: 56388 - protein, 9 aa, Homo Sapiens
RLTAADHRQ

SEQ ID NO: 56389 - protein, 9 aa, Homo Sapiens
RQLQLSISS

SEQ ID NO: 56390 - protein, 9 aa, Homo Sapiens
LQLSISSCL

SEQ ID NO: 56391 - protein, 9 aa, Homo Sapiens
SISSCLQQL

SEQ ID NO: 56392 - protein, 9 aa, Homo Sapiens
CLQQLSLLM

SEQ ID NO: 56393 - protein, 9 aa, Homo Sapiens
QQLSLLMWI

SEQ ID NO: 56394 - protein, 9 aa, Homo Sapiens
QLSLLMWIT

SEQ ID NO: 56395 - protein, 9 aa, Homo Sapiens
SLLMWITQC

SEQ ID NO: 56396 - protein, 9 aa, Homo Sapiens
LLMWITQCF

SEQ ID NO: 56397 - protein, 9 aa, Homo Sapiens
LMWITQCFL

SEQ ID NO: 56398 - protein, 9 aa, Homo Sapiens
WITQCFLPV

SEQ ID NO: 56399 - protein, 9 aa, Homo Sapiens
ITQCFLPVF

SEQ ID NO: 56400 - protein, 9 aa, Homo Sapiens
QCFLPVFLA

SEQ ID NO: 56401 - protein, 9 aa, Homo Sapiens
FLPVFLAQP

SEQ ID NO: 56402 - protein, 9 aa, Homo Sapiens
LPVFLAQPP

SEQ ID NO: 56403 - protein, 9 aa, Homo Sapiens
FLAQPPSGQ

SEQ ID NO: 56404 - protein, 9 aa, Homo Sapiens
LAQPPSGQR

SEQ ID NO: 56405 - protein, 10 aa, Homo Sapiens
MQAEGRGTGG

SEQ ID NO: 56406 - protein, 10 aa, Homo Sapiens
AEGRGTGGST

SEQ ID NO: 56407 - protein, 10 aa, Homo Sapiens
DADGPGGPGI

SEQ ID NO: 56408 - protein, 10 aa, Homo Sapiens
GPRGAGAARA

SEQ ID NO: 56409 - protein, 10 aa, Homo Sapiens
APRGPHGGAA

SEQ ID NO: 56410 - protein, 10 aa, Homo Sapiens
GPHGGAASGL

SEQ ID NO: 56411 - protein, 10 aa, Homo Sapiens
AASGLNGCCR

SEQ ID NO: 56412 - protein, 10 aa, Homo Sapiens
GLNGCCRCGA

SEQ ID NO: 56413 - protein, 10 aa, Homo Sapiens
PESRLLEFYL

SEQ ID NO: 56414 - protein, 10 aa, Homo Sapiens
SRLLEFYLAM

SEQ ID NO: 56415 - protein, 10 aa, Homo Sapiens
RLLEFYLAMP

SEQ ID NO: 56416 - protein, 10 aa, Homo Sapiens
LLEFYLAMPF

SEQ ID NO: 56417 - protein, 10 aa, Homo Sapiens
LEFYLAMPFA

SEQ ID NO: 56418 - protein, 10 aa, Homo Sapiens
YLAMPFATPM

SEQ ID NO: 56419 - protein, 10 aa, Homo Sapiens
AMPFATPMEA

SEQ ID NO: 56420 - protein, 10 aa, Homo Sapiens
MPFATPMEAE

SEQ ID NO: 56421 - protein, 10 aa, Homo Sapiens
FATPMEAELA

SEQ ID NO: 56422 - protein, 10 aa, Homo Sapiens
ATPMEAELAR

SEQ ID NO: 56423 - protein, 10 aa, Homo Sapiens
TPMEAELARR

SEQ ID NO: 56424 - protein, 10 aa, Homo Sapiens
MEAELARRSL

SEQ ID NO: 56425 - protein, 10 aa, Homo Sapiens
AELARRSLAQ

SEQ ID NO: 56426 - protein, 10 aa, Homo Sapiens
LAQDAPPLPV

SEQ ID NO: 56427 - protein, 10 aa, Homo Sapiens
DAPPLPVPGV

SEQ ID NO: 56428 - protein, 10 aa, Homo Sapiens
APPLPVPGVL

SEQ ID NO: 56429 - protein, 10 aa, Homo Sapiens
PPLPVPGVLL

SEQ ID NO: 56430 - protein, 10 aa, Homo Sapiens
PLPVPGVLLK

SEQ ID NO: 56431 - protein, 10 aa, Homo Sapiens
LPVPGVLLKE

SEQ ID NO: 56432 - protein, 10 aa, Homo Sapiens
PVPGVLLKEF

SEQ ID NO: 56433 - protein, 10 aa, Homo Sapiens
VPGVLLKEFT

SEQ ID NO: 56434 - protein, 10 aa, Homo Sapiens
KEFTVSGNIL

SEQ ID NO: 56435 - protein, 10 aa, Homo Sapiens
FTVSGNILTI

SEQ ID NO: 56436 - protein, 10 aa, Homo Sapiens
TVSGNILTIR

SEQ ID NO: 56437 - protein, 10 aa, Homo Sapiens
NILTIRLTAA

SEQ ID NO: 56438 - protein, 10 aa, Homo Sapiens
TIRLTAADHR

SEQ ID NO: 56439 - protein, 10 aa, Homo Sapiens
RLTAADHRQL

SEQ ID NO: 56440 - protein, 10 aa, Homo Sapiens
TAADHRQLQL

SEQ ID NO: 56441 - protein, 10 aa, Homo Sapiens
RQLQLSISSC

SEQ ID NO: 56442 - protein, 10 aa, Homo Sapiens
QLQLSISSCL

SEQ ID NO: 56443 - protein, 10 aa, Homo Sapiens
LQQLSLLMWI

SEQ ID NO: 56444 - protein, 10 aa, Homo Sapiens
QQLSLLMWIT

SEQ ID NO: 56445 - protein, 10 aa, Homo Sapiens
QLSLLMWITQ

SEQ ID NO: 56446 - protein, 10 aa, Homo Sapiens
SLLMWITQCF

SEQ ID NO: 56447 - protein, 10 aa, Homo Sapiens
LLMWITQCFL

SEQ ID NO: 56448 - protein, 10 aa, Homo Sapiens
MWITQCFLPV

SEQ ID NO: 56449 - protein, 10 aa, Homo Sapiens
WITQCFLPVF

SEQ ID NO: 56450 - protein, 10 aa, Homo Sapiens
ITQCFLPVFL

SEQ ID NO: 56451 - protein, 10 aa, Homo Sapiens
LPVFLAQPPS

SEQ ID NO: 56452 - protein, 10 aa, Homo Sapiens
FLAQPPSGQR

SEQ ID NO: 56453 - protein, 11 aa, Homo Sapiens
MQAEGRGTGGS

SEQ ID NO: 56454 - protein, 11 aa, Homo Sapiens
EAGATGGRGPR

SEQ ID NO: 56455 - protein, 11 aa, Homo Sapiens
GPRGAGAARAS

SEQ ID NO: 56456 - protein, 11 aa, Homo Sapiens
RASGPGGGAPR

SEQ ID NO: 56457 - protein, 11 aa, Homo Sapiens
APRGPHGGAAS

SEQ ID NO: 56458 - protein, 11 aa, Homo Sapiens
GAASGLNGCCR

SEQ ID NO: 56459 - protein, 11 aa, Homo Sapiens
GLNGCCRCGAR

SEQ ID NO: 56460 - protein, 11 aa, Homo Sapiens
GPESRLLEFYL

SEQ ID NO: 56461 - protein, 11 aa, Homo Sapiens
RLLEFYLAMPF

SEQ ID NO: 56462 - protein, 11 aa, Homo Sapiens
LLEFYLAMPFA

SEQ ID NO: 56463 - protein, 11 aa, Homo Sapiens
FYLAMPFATPM

SEQ ID NO: 56464 - protein, 11 aa, Homo Sapiens
YLAMPFATPME

SEQ ID NO: 56465 - protein, 11 aa, Homo Sapiens
LAMPFATPMEA

SEQ ID NO: 56466 - protein, 11 aa, Homo Sapiens
MPFATPMEAEL

SEQ ID NO: 56467 - protein, 11 aa, Homo Sapiens
FATPMEAELAR

SEQ ID NO: 56468 - protein, 11 aa, Homo Sapiens
ATPMEAELARR

SEQ ID NO: 56469 - protein, 11 aa, Homo Sapiens
ELARRSLAQDA

SEQ ID NO: 56470 - protein, 11 aa, Homo Sapiens
RRSLAQDAPPL

SEQ ID NO: 56471 - protein, 11 aa, Homo Sapiens
SLAQDAPPLPV

SEQ ID NO: 56472 - protein, 11 aa, Homo Sapiens
APPLPVPGVLL

SEQ ID NO: 56473 - protein, 11 aa, Homo Sapiens
LPVPGVLLKEF

SEQ ID NO: 56474 - protein, 11 aa, Homo Sapiens
VPGVLLKEFTV

SEQ ID NO: 56475 - protein, 11 aa, Homo Sapiens
LLKEFTVSGNI

SEQ ID NO: 56476 - protein, 11 aa, Homo Sapiens
KEFTVSGNILT

SEQ ID NO: 56477 - protein, 11 aa, Homo Sapiens
FTVSGNILTIR

SEQ ID NO: 56478 - protein, 11 aa, Homo Sapiens
TVSGNILTIRL

SEQ ID NO: 56479 - protein, 11 aa, Homo Sapiens
LTIRLTAADHR

SEQ ID NO: 56480 - protein, 11 aa, Homo Sapiens
RLTAADHRQLQ

SEQ ID NO: 56481 - protein, 11 aa, Homo Sapiens
RQLQLSISSCL

SEQ ID NO: 56482 - protein, 11 aa, Homo Sapiens
QLSISSCLQQL

SEQ ID NO: 56483 - protein, 11 aa, Homo Sapiens
SISSCLQQLSL

SEQ ID NO: 56484 - protein, 11 aa, Homo Sapiens
ISSCLQQLSLL

SEQ ID NO: 56485 - protein, 11 aa, Homo Sapiens
CLQQLSLLMWI

SEQ ID NO: 56486 - protein, 11 aa, Homo Sapiens
QLSLLMWITQC

SEQ ID NO: 56487 - protein, 11 aa, Homo Sapiens
SLLMWITQCFL

SEQ ID NO: 56488 - protein, 11 aa, Homo Sapiens
LLMWITQCFLP

SEQ ID NO: 56489 - protein, 11 aa, Homo Sapiens
LMWITQCFLPV

SEQ ID NO: 56490 - protein, 11 aa, Homo Sapiens
MWITQCFLPVF

SEQ ID NO: 56491 - protein, 11 aa, Homo Sapiens
WITQCFLPVFL

SEQ ID NO: 56492 - protein, 11 aa, Homo Sapiens
FLPVFLAQPPS

SEQ ID NO: 56493 - protein, 11 aa, Homo Sapiens
LPVFLAQPPSG

SEQ ID NO: 56494 - protein, 11 aa, Homo Sapiens
VFLAQPPSGQR

SEQ ID NO: 56495 - protein, 11 aa, Homo Sapiens
FLAQPPSGQRR

SEQ ID NO: 56496 - protein, 13 aa, Homo Sapiens
MSLEQKSQHCKPE

SEQ ID NO: 56497 - protein, 13 aa, Homo Sapiens
SLEQKSQHCKPEE

SEQ ID NO: 56498 - protein, 13 aa, Homo Sapiens
LEQKSQHCKPEEG

SEQ ID NO: 56499 - protein, 13 aa, Homo Sapiens
EQKSQHCKPEEGL

SEQ ID NO: 56500 - protein, 13 aa, Homo Sapiens
QKSQHCKPEEGLD

SEQ ID NO: 56501 - protein, 13 aa, Homo Sapiens
KSQHCKPEEGLDT

SEQ ID NO: 56502 - protein, 13 aa, Homo Sapiens
SQHCKPEEGLDTQ

SEQ ID NO: 56503 - protein, 13 aa, Homo Sapiens
QHCKPEEGLDTQE

SEQ ID NO: 56504 - protein, 13 aa, Homo Sapiens
HCKPEEGLDTQEE

SEQ ID NO: 56505 - protein, 13 aa, Homo Sapiens
CKPEEGLDTQEEA

SEQ ID NO: 56506 - protein, 13 aa, Homo Sapiens
KPEEGLDTQEEAL

SEQ ID NO: 56507 - protein, 13 aa, Homo Sapiens
PEEGLDTQEEALG

SEQ ID NO: 56508 - protein, 13 aa, Homo Sapiens
EEGLDTQEEALGL

SEQ ID NO: 56509 - protein, 13 aa, Homo Sapiens
EGLDTQEEALGLV

SEQ ID NO: 56510 - protein, 13 aa, Homo Sapiens
GLDTQEEALGLVG

SEQ ID NO: 56511 - protein, 13 aa, Homo Sapiens
LDTQEEALGLVGV

SEQ ID NO: 56512 - protein, 13 aa, Homo Sapiens
DTQEEALGLVGVQ

SEQ ID NO: 56513 - protein, 13 aa, Homo Sapiens
TQEEALGLVGVQA

SEQ ID NO: 56514 - protein, 13 aa, Homo Sapiens
QEEALGLVGVQAA

SEQ ID NO: 56515 - protein, 13 aa, Homo Sapiens
EEALGLVGVQAAT

SEQ ID NO: 56516 - protein, 13 aa, Homo Sapiens
EALGLVGVQAATT

SEQ ID NO: 56517 - protein, 13 aa, Homo Sapiens
ALGLVGVQAATTE

SEQ ID NO: 56518 - protein, 13 aa, Homo Sapiens
LGLVGVQAATTEE

SEQ ID NO: 56519 - protein, 13 aa, Homo Sapiens
GLVGVQAATTEEQ

SEQ ID NO: 56520 - protein, 13 aa, Homo Sapiens
LVGVQAATTEEQE

SEQ ID NO: 56521 - protein, 13 aa, Homo Sapiens
VGVQAATTEEQEA

SEQ ID NO: 56522 - protein, 13 aa, Homo Sapiens
GVQAATTEEQEAV

SEQ ID NO: 56523 - protein, 13 aa, Homo Sapiens
VQAATTEEQEAVS

SEQ ID NO: 56524 - protein, 13 aa, Homo Sapiens
QAATTEEQEAVSS

SEQ ID NO: 56525 - protein, 13 aa, Homo Sapiens
AATTEEQEAVSSS

SEQ ID NO: 56526 - protein, 13 aa, Homo Sapiens
ATTEEQEAVSSSS

SEQ ID NO: 56527 - protein, 13 aa, Homo Sapiens
TTEEQEAVSSSSP

SEQ ID NO: 56528 - protein, 13 aa, Homo Sapiens
TEEQEAVSSSSPL

SEQ ID NO: 56529 - protein, 13 aa, Homo Sapiens
EEQEAVSSSSPLV

SEQ ID NO: 56530 - protein, 13 aa, Homo Sapiens
EQEAVSSSSPLVP

SEQ ID NO: 56531 - protein, 13 aa, Homo Sapiens
QEAVSSSSPLVPG

SEQ ID NO: 56532 - protein, 13 aa, Homo Sapiens
EAVSSSSPLVPGT

SEQ ID NO: 56533 - protein, 13 aa, Homo Sapiens
AVSSSSPLVPGTL

SEQ ID NO: 56534 - protein, 13 aa, Homo Sapiens
VSSSSPLVPGTLG

SEQ ID NO: 56535 - protein, 13 aa, Homo Sapiens
SSSSPLVPGTLGE

SEQ ID NO: 56536 - protein, 13 aa, Homo Sapiens
SSSPLVPGTLGEV

SEQ ID NO: 56537 - protein, 13 aa, Homo Sapiens
SSPLVPGTLGEVP

SEQ ID NO: 56538 - protein, 13 aa, Homo Sapiens
SPLVPGTLGEVPA

SEQ ID NO: 56539 - protein, 13 aa, Homo Sapiens
PLVPGTLGEVPAA

SEQ ID NO: 56540 - protein, 13 aa, Homo Sapiens
LVPGTLGEVPAAG

SEQ ID NO: 56541 - protein, 13 aa, Homo Sapiens
VPGTLGEVPAAGS

SEQ ID NO: 56542 - protein, 13 aa, Homo Sapiens
PGTLGEVPAAGSP

SEQ ID NO: 56543 - protein, 13 aa, Homo Sapiens
GTLGEVPAAGSPG

SEQ ID NO: 56544 - protein, 13 aa, Homo Sapiens
TLGEVPAAGSPGP

SEQ ID NO: 56545 - protein, 13 aa, Homo Sapiens
LGEVPAAGSPGPL

SEQ ID NO: 56546 - protein, 13 aa, Homo Sapiens
GEVPAAGSPGPLK

SEQ ID NO: 56547 - protein, 13 aa, Homo Sapiens
EVPAAGSPGPLKS

SEQ ID NO: 56548 - protein, 13 aa, Homo Sapiens
VPAAGSPGPLKSP

SEQ ID NO: 56549 - protein, 13 aa, Homo Sapiens
PAAGSPGPLKSPQ

SEQ ID NO: 56550 - protein, 13 aa, Homo Sapiens
AAGSPGPLKSPQG

SEQ ID NO: 56551 - protein, 13 aa, Homo Sapiens
AGSPGPLKSPQGA

SEQ ID NO: 56552 - protein, 13 aa, Homo Sapiens
GSPGPLKSPQGAS

SEQ ID NO: 56553 - protein, 13 aa, Homo Sapiens
SPGPLKSPQGASA

SEQ ID NO: 56554 - protein, 13 aa, Homo Sapiens
PGPLKSPQGASAI

SEQ ID NO: 56555 - protein, 13 aa, Homo Sapiens
GPLKSPQGASAIP

SEQ ID NO: 56556 - protein, 13 aa, Homo Sapiens
PLKSPQGASAIPT

SEQ ID NO: 56557 - protein, 13 aa, Homo Sapiens
LKSPQGASAIPTA

SEQ ID NO: 56558 - protein, 13 aa, Homo Sapiens
KSPQGASAIPTAI

SEQ ID NO: 56559 - protein, 13 aa, Homo Sapiens
SPQGASAIPTAID

SEQ ID NO: 56560 - protein, 13 aa, Homo Sapiens
PQGASAIPTAIDF

SEQ ID NO: 56561 - protein, 13 aa, Homo Sapiens
QGASAIPTAIDFT

SEQ ID NO: 56562 - protein, 13 aa, Homo Sapiens
GASAIPTAIDFTL

SEQ ID NO: 56563 - protein, 13 aa, Homo Sapiens
ASAIPTAIDFTLW

SEQ ID NO: 56564 - protein, 13 aa, Homo Sapiens
SAIPTAIDFTLWR

SEQ ID NO: 56565 - protein, 13 aa, Homo Sapiens
AIPTAIDFTLWRQ

SEQ ID NO: 56566 - protein, 13 aa, Homo Sapiens
IPTAIDFTLWRQS

SEQ ID NO: 56567 - protein, 13 aa, Homo Sapiens
PTAIDFTLWRQSI

SEQ ID NO: 56568 - protein, 13 aa, Homo Sapiens
TAIDFTLWRQSIK

SEQ ID NO: 56569 - protein, 13 aa, Homo Sapiens
AIDFTLWRQSIKG

SEQ ID NO: 56570 - protein, 13 aa, Homo Sapiens
IDFTLWRQSIKGS

SEQ ID NO: 56571 - protein, 13 aa, Homo Sapiens
DFTLWRQSIKGSS

SEQ ID NO: 56572 - protein, 13 aa, Homo Sapiens
FTLWRQSIKGSSN

SEQ ID NO: 56573 - protein, 13 aa, Homo Sapiens
TLWRQSIKGSSNQ

SEQ ID NO: 56574 - protein, 13 aa, Homo Sapiens
LWRQSIKGSSNQE

SEQ ID NO: 56575 - protein, 13 aa, Homo Sapiens
WRQSIKGSSNQEE

SEQ ID NO: 56576 - protein, 13 aa, Homo Sapiens
RQSIKGSSNQEEE

SEQ ID NO: 56577 - protein, 13 aa, Homo Sapiens
QSIKGSSNQEEEG

SEQ ID NO: 56578 - protein, 13 aa, Homo Sapiens
SIKGSSNQEEEGP

SEQ ID NO: 56579 - protein, 13 aa, Homo Sapiens
IKGSSNQEEEGPS

SEQ ID NO: 56580 - protein, 13 aa, Homo Sapiens
KGSSNQEEEGPST

SEQ ID NO: 56581 - protein, 13 aa, Homo Sapiens
GSSNQEEEGPSTS

SEQ ID NO: 56582 - protein, 13 aa, Homo Sapiens
SSNQEEEGPSTSP

SEQ ID NO: 56583 - protein, 13 aa, Homo Sapiens
SNQEEEGPSTSPD

SEQ ID NO: 56584 - protein, 13 aa, Homo Sapiens
NQEEEGPSTSPDP

SEQ ID NO: 56585 - protein, 13 aa, Homo Sapiens
QEEEGPSTSPDPE

SEQ ID NO: 56586 - protein, 13 aa, Homo Sapiens
EEEGPSTSPDPES

SEQ ID NO: 56587 - protein, 13 aa, Homo Sapiens
EEGPSTSPDPESV

SEQ ID NO: 56588 - protein, 13 aa, Homo Sapiens
EGPSTSPDPESVF

SEQ ID NO: 56589 - protein, 13 aa, Homo Sapiens
GPSTSPDPESVFR

SEQ ID NO: 56590 - protein, 13 aa, Homo Sapiens
PSTSPDPESVFRA

SEQ ID NO: 56591 - protein, 13 aa, Homo Sapiens
STSPDPESVFRAA

SEQ ID NO: 56592 - protein, 13 aa, Homo Sapiens
TSPDPESVFRAAL

SEQ ID NO: 56593 - protein, 13 aa, Homo Sapiens
SPDPESVFRAALS

SEQ ID NO: 56594 - protein, 13 aa, Homo Sapiens
PDPESVFRAALSK

SEQ ID NO: 56595 - protein, 13 aa, Homo Sapiens
DPESVFRAALSKK

SEQ ID NO: 56596 - protein, 13 aa, Homo Sapiens
PESVFRAALSKKV

SEQ ID NO: 56597 - protein, 13 aa, Homo Sapiens
ESVFRAALSKKVA

SEQ ID NO: 56598 - protein, 13 aa, Homo Sapiens
SVFRAALSKKVAD

SEQ ID NO: 56599 - protein, 13 aa, Homo Sapiens
VFRAALSKKVADL

SEQ ID NO: 56600 - protein, 13 aa, Homo Sapiens
FRAALSKKVADLI

SEQ ID NO: 56601 - protein, 13 aa, Homo Sapiens
RAALSKKVADLIH

SEQ ID NO: 56602 - protein, 13 aa, Homo Sapiens
AALSKKVADLIHF

SEQ ID NO: 56603 - protein, 13 aa, Homo Sapiens
ALSKKVADLIHFL

SEQ ID NO: 56604 - protein, 13 aa, Homo Sapiens
LSKKVADLIHFLL

SEQ ID NO: 56605 - protein, 13 aa, Homo Sapiens
SKKVADLIHFLLL

SEQ ID NO: 56606 - protein, 13 aa, Homo Sapiens
KKVADLIHFLLLK

SEQ ID NO: 56607 - protein, 13 aa, Homo Sapiens
KVADLIHFLLLKY

SEQ ID NO: 56608 - protein, 14 aa, Homo Sapiens
MSLEQKSQHCKPEE

SEQ ID NO: 56609 - protein, 14 aa, Homo Sapiens
SLEQKSQHCKPEEG

SEQ ID NO: 56610 - protein, 14 aa, Homo Sapiens
LEQKSQHCKPEEGL

SEQ ID NO: 56611 - protein, 14 aa, Homo Sapiens
EQKSQHCKPEEGLD

SEQ ID NO: 56612 - protein, 14 aa, Homo Sapiens
QKSQHCKPEEGLDT

SEQ ID NO: 56613 - protein, 14 aa, Homo Sapiens
KSQHCKPEEGLDTQ

SEQ ID NO: 56614 - protein, 14 aa, Homo Sapiens
SQHCKPEEGLDTQE

SEQ ID NO: 56615 - protein, 14 aa, Homo Sapiens
QHCKPEEGLDTQEE

SEQ ID NO: 56616 - protein, 14 aa, Homo Sapiens
HCKPEEGLDTQEEA

SEQ ID NO: 56617 - protein, 14 aa, Homo Sapiens
CKPEEGLDTQEEAL

SEQ ID NO: 56618 - protein, 14 aa, Homo Sapiens
KPEEGLDTQEEALG

SEQ ID NO: 56619 - protein, 14 aa, Homo Sapiens
PEEGLDTQEEALGL

SEQ ID NO: 56620 - protein, 14 aa, Homo Sapiens
EEGLDTQEEALGLV

SEQ ID NO: 56621 - protein, 14 aa, Homo Sapiens
EGLDTQEEALGLVG

SEQ ID NO: 56622 - protein, 14 aa, Homo Sapiens
GLDTQEEALGLVGV

SEQ ID NO: 56623 - protein, 14 aa, Homo Sapiens
LDTQEEALGLVGVQ

SEQ ID NO: 56624 - protein, 14 aa, Homo Sapiens
DTQEEALGLVGVQA

SEQ ID NO: 56625 - protein, 14 aa, Homo Sapiens
TQEEALGLVGVQAA

SEQ ID NO: 56626 - protein, 14 aa, Homo Sapiens
QEEALGLVGVQAAT

SEQ ID NO: 56627 - protein, 14 aa, Homo Sapiens
EEALGLVGVQAATT

SEQ ID NO: 56628 - protein, 14 aa, Homo Sapiens
EALGLVGVQAATTE

SEQ ID NO: 56629 - protein, 14 aa, Homo Sapiens
ALGLVGVQAATTEE

SEQ ID NO: 56630 - protein, 14 aa, Homo Sapiens
LGLVGVQAATTEEQ

SEQ ID NO: 56631 - protein, 14 aa, Homo Sapiens
GLVGVQAATTEEQE

SEQ ID NO: 56632 - protein, 14 aa, Homo Sapiens
LVGVQAATTEEQEA

SEQ ID NO: 56633 - protein, 14 aa, Homo Sapiens
VGVQAATTEEQEAV

SEQ ID NO: 56634 - protein, 14 aa, Homo Sapiens
GVQAATTEEQEAVS

SEQ ID NO: 56635 - protein, 14 aa, Homo Sapiens
VQAATTEEQEAVSS

SEQ ID NO: 56636 - protein, 14 aa, Homo Sapiens
QAATTEEQEAVSSS

SEQ ID NO: 56637 - protein, 14 aa, Homo Sapiens
AATTEEQEAVSSSS

SEQ ID NO: 56638 - protein, 14 aa, Homo Sapiens
ATTEEQEAVSSSSP

SEQ ID NO: 56639 - protein, 14 aa, Homo Sapiens
TTEEQEAVSSSSPL

SEQ ID NO: 56640 - protein, 14 aa, Homo Sapiens
TEEQEAVSSSSPLV

SEQ ID NO: 56641 - protein, 14 aa, Homo Sapiens
EEQEAVSSSSPLVP

SEQ ID NO: 56642 - protein, 14 aa, Homo Sapiens
EQEAVSSSSPLVPG

SEQ ID NO: 56643 - protein, 14 aa, Homo Sapiens
QEAVSSSSPLVPGT

SEQ ID NO: 56644 - protein, 14 aa, Homo Sapiens
EAVSSSSPLVPGTL

SEQ ID NO: 56645 - protein, 14 aa, Homo Sapiens
AVSSSSPLVPGTLG

SEQ ID NO: 56646 - protein, 14 aa, Homo Sapiens
VSSSSPLVPGTLGE

SEQ ID NO: 56647 - protein, 14 aa, Homo Sapiens
SSSSPLVPGTLGEV

SEQ ID NO: 56648 - protein, 14 aa, Homo Sapiens
SSSPLVPGTLGEVP

SEQ ID NO: 56649 - protein, 14 aa, Homo Sapiens
SSPLVPGTLGEVPA

SEQ ID NO: 56650 - protein, 14 aa, Homo Sapiens
SPLVPGTLGEVPAA

SEQ ID NO: 56651 - protein, 14 aa, Homo Sapiens
PLVPGTLGEVPAAG

SEQ ID NO: 56652 - protein, 14 aa, Homo Sapiens
LVPGTLGEVPAAGS

SEQ ID NO: 56653 - protein, 14 aa, Homo Sapiens
VPGTLGEVPAAGSP

SEQ ID NO: 56654 - protein, 14 aa, Homo Sapiens
PGTLGEVPAAGSPG

SEQ ID NO: 56655 - protein, 14 aa, Homo Sapiens
GTLGEVPAAGSPGP

SEQ ID NO: 56656 - protein, 14 aa, Homo Sapiens
TLGEVPAAGSPGPL

SEQ ID NO: 56657 - protein, 14 aa, Homo Sapiens
LGEVPAAGSPGPLK

SEQ ID NO: 56658 - protein, 14 aa, Homo Sapiens
GEVPAAGSPGPLKS

SEQ ID NO: 56659 - protein, 14 aa, Homo Sapiens
EVPAAGSPGPLKSP

SEQ ID NO: 56660 - protein, 14 aa, Homo Sapiens
VPAAGSPGPLKSPQ

SEQ ID NO: 56661 - protein, 14 aa, Homo Sapiens
PAAGSPGPLKSPQG

SEQ ID NO: 56662 - protein, 14 aa, Homo Sapiens
AAGSPGPLKSPQGA

SEQ ID NO: 56663 - protein, 14 aa, Homo Sapiens
AGSPGPLKSPQGAS

SEQ ID NO: 56664 - protein, 14 aa, Homo Sapiens
GSPGPLKSPQGASA

SEQ ID NO: 56665 - protein, 14 aa, Homo Sapiens
SPGPLKSPQGASAI

SEQ ID NO: 56666 - protein, 14 aa, Homo Sapiens
PGPLKSPQGASAIP

SEQ ID NO: 56667 - protein, 14 aa, Homo Sapiens
GPLKSPQGASAIPT

SEQ ID NO: 56668 - protein, 14 aa, Homo Sapiens
PLKSPQGASAIPTA

SEQ ID NO: 56669 - protein, 14 aa, Homo Sapiens
LKSPQGASAIPTAI

SEQ ID NO: 56670 - protein, 14 aa, Homo Sapiens
KSPQGASAIPTAID

SEQ ID NO: 56671 - protein, 14 aa, Homo Sapiens
SPQGASAIPTAIDF

SEQ ID NO: 56672 - protein, 14 aa, Homo Sapiens
PQGASAIPTAIDFT

SEQ ID NO: 56673 - protein, 14 aa, Homo Sapiens
QGASAIPTAIDFTL

SEQ ID NO: 56674 - protein, 14 aa, Homo Sapiens
GASAIPTAIDFTLW

SEQ ID NO: 56675 - protein, 14 aa, Homo Sapiens
ASAIPTAIDFTLWR

SEQ ID NO: 56676 - protein, 14 aa, Homo Sapiens
SAIPTAIDFTLWRQ

SEQ ID NO: 56677 - protein, 14 aa, Homo Sapiens
AIPTAIDFTLWRQS

SEQ ID NO: 56678 - protein, 14 aa, Homo Sapiens
IPTAIDFTLWRQSI

SEQ ID NO: 56679 - protein, 14 aa, Homo Sapiens
PTAIDFTLWRQSIK

SEQ ID NO: 56680 - protein, 14 aa, Homo Sapiens
TAIDFTLWRQSIKG

SEQ ID NO: 56681 - protein, 14 aa, Homo Sapiens
AIDFTLWRQSIKGS

SEQ ID NO: 56682 - protein, 14 aa, Homo Sapiens
IDFTLWRQSIKGSS

SEQ ID NO: 56683 - protein, 14 aa, Homo Sapiens
DFTLWRQSIKGSSN

SEQ ID NO: 56684 - protein, 14 aa, Homo Sapiens
FTLWRQSIKGSSNQ

SEQ ID NO: 56685 - protein, 14 aa, Homo Sapiens
TLWRQSIKGSSNQE

SEQ ID NO: 56686 - protein, 14 aa, Homo Sapiens
LWRQSIKGSSNQEE

SEQ ID NO: 56687 - protein, 14 aa, Homo Sapiens
WRQSIKGSSNQEEE

SEQ ID NO: 56688 - protein, 14 aa, Homo Sapiens
RQSIKGSSNQEEEG

SEQ ID NO: 56689 - protein, 14 aa, Homo Sapiens
QSIKGSSNQEEEGP

SEQ ID NO: 56690 - protein, 14 aa, Homo Sapiens
SIKGSSNQEEEGPS

SEQ ID NO: 56691 - protein, 14 aa, Homo Sapiens
IKGSSNQEEEGPST

SEQ ID NO: 56692 - protein, 14 aa, Homo Sapiens
KGSSNQEEEGPSTS

SEQ ID NO: 56693 - protein, 14 aa, Homo Sapiens
GSSNQEEEGPSTSP

SEQ ID NO: 56694 - protein, 14 aa, Homo Sapiens
SSNQEEEGPSTSPD

SEQ ID NO: 56695 - protein, 14 aa, Homo Sapiens
SNQEEEGPSTSPDP

SEQ ID NO: 56696 - protein, 14 aa, Homo Sapiens
NQEEEGPSTSPDPE

SEQ ID NO: 56697 - protein, 14 aa, Homo Sapiens
QEEEGPSTSPDPES

SEQ ID NO: 56698 - protein, 14 aa, Homo Sapiens
EEEGPSTSPDPESV

SEQ ID NO: 56699 - protein, 14 aa, Homo Sapiens
EEGPSTSPDPESVF

SEQ ID NO: 56700 - protein, 14 aa, Homo Sapiens
EGPSTSPDPESVFR

SEQ ID NO: 56701 - protein, 14 aa, Homo Sapiens
GPSTSPDPESVFRA

SEQ ID NO: 56702 - protein, 14 aa, Homo Sapiens
PSTSPDPESVFRAA

SEQ ID NO: 56703 - protein, 14 aa, Homo Sapiens
STSPDPESVFRAAL

SEQ ID NO: 56704 - protein, 14 aa, Homo Sapiens
TSPDPESVFRAALS

SEQ ID NO: 56705 - protein, 14 aa, Homo Sapiens
SPDPESVFRAALSK

SEQ ID NO: 56706 - protein, 14 aa, Homo Sapiens
PDPESVFRAALSKK

SEQ ID NO: 56707 - protein, 14 aa, Homo Sapiens
DPESVFRAALSKKV

SEQ ID NO: 56708 - protein, 14 aa, Homo Sapiens
PESVFRAALSKKVA

SEQ ID NO: 56709 - protein, 14 aa, Homo Sapiens
ESVFRAALSKKVAD

SEQ ID NO: 56710 - protein, 14 aa, Homo Sapiens
SVFRAALSKKVADL

SEQ ID NO: 56711 - protein, 14 aa, Homo Sapiens
VFRAALSKKVADLI

SEQ ID NO: 56712 - protein, 14 aa, Homo Sapiens
FRAALSKKVADLIH

SEQ ID NO: 56713 - protein, 14 aa, Homo Sapiens
RAALSKKVADLIHF

SEQ ID NO: 56714 - protein, 14 aa, Homo Sapiens
AALSKKVADLIHFL

SEQ ID NO: 56715 - protein, 14 aa, Homo Sapiens
ALSKKVADLIHFLL

SEQ ID NO: 56716 - protein, 14 aa, Homo Sapiens
LSKKVADLIHFLLL

SEQ ID NO: 56717 - protein, 14 aa, Homo Sapiens
SKKVADLIHFLLLK

SEQ ID NO: 56718 - protein, 14 aa, Homo Sapiens
KKVADLIHFLLLKY

SEQ ID NO: 56719 - protein, 15 aa, Homo Sapiens
MSLEQKSQHCKPEEG

SEQ ID NO: 56720 - protein, 15 aa, Homo Sapiens
SLEQKSQHCKPEEGL

SEQ ID NO: 56721 - protein, 15 aa, Homo Sapiens
LEQKSQHCKPEEGLD

SEQ ID NO: 56722 - protein, 15 aa, Homo Sapiens
EQKSQHCKPEEGLDT

SEQ ID NO: 56723 - protein, 15 aa, Homo Sapiens
QKSQHCKPEEGLDTQ

SEQ ID NO: 56724 - protein, 15 aa, Homo Sapiens
KSQHCKPEEGLDTQE

SEQ ID NO: 56725 - protein, 15 aa, Homo Sapiens
SQHCKPEEGLDTQEE

SEQ ID NO: 56726 - protein, 15 aa, Homo Sapiens
QHCKPEEGLDTQEEA

SEQ ID NO: 56727 - protein, 15 aa, Homo Sapiens
HCKPEEGLDTQEEAL

SEQ ID NO: 56728 - protein, 15 aa, Homo Sapiens
CKPEEGLDTQEEALG

SEQ ID NO: 56729 - protein, 15 aa, Homo Sapiens
KPEEGLDTQEEALGL

SEQ ID NO: 56730 - protein, 15 aa, Homo Sapiens
PEEGLDTQEEALGLV

SEQ ID NO: 56731 - protein, 15 aa, Homo Sapiens
EEGLDTQEEALGLVG

SEQ ID NO: 56732 - protein, 15 aa, Homo Sapiens
EGLDTQEEALGLVGV

SEQ ID NO: 56733 - protein, 15 aa, Homo Sapiens
GLDTQEEALGLVGVQ

SEQ ID NO: 56734 - protein, 15 aa, Homo Sapiens
LDTQEEALGLVGVQA

SEQ ID NO: 56735 - protein, 15 aa, Homo Sapiens
DTQEEALGLVGVQAA

SEQ ID NO: 56736 - protein, 15 aa, Homo Sapiens
TQEEALGLVGVQAAT

SEQ ID NO: 56737 - protein, 15 aa, Homo Sapiens
QEEALGLVGVQAATT

SEQ ID NO: 56738 - protein, 15 aa, Homo Sapiens
EEALGLVGVQAATTE

SEQ ID NO: 56739 - protein, 15 aa, Homo Sapiens
EALGLVGVQAATTEE

SEQ ID NO: 56740 - protein, 15 aa, Homo Sapiens
ALGLVGVQAATTEEQ

SEQ ID NO: 56741 - protein, 15 aa, Homo Sapiens
LGLVGVQAATTEEQE

SEQ ID NO: 56742 - protein, 15 aa, Homo Sapiens
GLVGVQAATTEEQEA

SEQ ID NO: 56743 - protein, 15 aa, Homo Sapiens
LVGVQAATTEEQEAV

SEQ ID NO: 56744 - protein, 15 aa, Homo Sapiens
VGVQAATTEEQEAVS

SEQ ID NO: 56745 - protein, 15 aa, Homo Sapiens
GVQAATTEEQEAVSS

SEQ ID NO: 56746 - protein, 15 aa, Homo Sapiens
VQAATTEEQEAVSSS

SEQ ID NO: 56747 - protein, 15 aa, Homo Sapiens
QAATTEEQEAVSSSS

SEQ ID NO: 56748 - protein, 15 aa, Homo Sapiens
AATTEEQEAVSSSSP

SEQ ID NO: 56749 - protein, 15 aa, Homo Sapiens
ATTEEQEAVSSSSPL

SEQ ID NO: 56750 - protein, 15 aa, Homo Sapiens
TTEEQEAVSSSSPLV

SEQ ID NO: 56751 - protein, 15 aa, Homo Sapiens
TEEQEAVSSSSPLVP

SEQ ID NO: 56752 - protein, 15 aa, Homo Sapiens
EEQEAVSSSSPLVPG

SEQ ID NO: 56753 - protein, 15 aa, Homo Sapiens
EQEAVSSSSPLVPGT

SEQ ID NO: 56754 - protein, 15 aa, Homo Sapiens
QEAVSSSSPLVPGTL

SEQ ID NO: 56755 - protein, 15 aa, Homo Sapiens
EAVSSSSPLVPGTLG

SEQ ID NO: 56756 - protein, 15 aa, Homo Sapiens
AVSSSSPLVPGTLGE

SEQ ID NO: 56757 - protein, 15 aa, Homo Sapiens
VSSSSPLVPGTLGEV

SEQ ID NO: 56758 - protein, 15 aa, Homo Sapiens
SSSSPLVPGTLGEVP

SEQ ID NO: 56759 - protein, 15 aa, Homo Sapiens
SSSPLVPGTLGEVPA

SEQ ID NO: 56760 - protein, 15 aa, Homo Sapiens
SSPLVPGTLGEVPAA

SEQ ID NO: 56761 - protein, 15 aa, Homo Sapiens
SPLVPGTLGEVPAAG

SEQ ID NO: 56762 - protein, 15 aa, Homo Sapiens
PLVPGTLGEVPAAGS

SEQ ID NO: 56763 - protein, 15 aa, Homo Sapiens
LVPGTLGEVPAAGSP

SEQ ID NO: 56764 - protein, 15 aa, Homo Sapiens
VPGTLGEVPAAGSPG

SEQ ID NO: 56765 - protein, 15 aa, Homo Sapiens
PGTLGEVPAAGSPGP

SEQ ID NO: 56766 - protein, 15 aa, Homo Sapiens
GTLGEVPAAGSPGPL

SEQ ID NO: 56767 - protein, 15 aa, Homo Sapiens
TLGEVPAAGSPGPLK

SEQ ID NO: 56768 - protein, 15 aa, Homo Sapiens
LGEVPAAGSPGPLKS

SEQ ID NO: 56769 - protein, 15 aa, Homo Sapiens
GEVPAAGSPGPLKSP

SEQ ID NO: 56770 - protein, 15 aa, Homo Sapiens
EVPAAGSPGPLKSPQ

SEQ ID NO: 56771 - protein, 15 aa, Homo Sapiens
VPAAGSPGPLKSPQG

SEQ ID NO: 56772 - protein, 15 aa, Homo Sapiens
PAAGSPGPLKSPQGA

SEQ ID NO: 56773 - protein, 15 aa, Homo Sapiens
AAGSPGPLKSPQGAS

SEQ ID NO: 56774 - protein, 15 aa, Homo Sapiens
AGSPGPLKSPQGASA

SEQ ID NO: 56775 - protein, 15 aa, Homo Sapiens
GSPGPLKSPQGASAI

SEQ ID NO: 56776 - protein, 15 aa, Homo Sapiens
SPGPLKSPQGASAIP

SEQ ID NO: 56777 - protein, 15 aa, Homo Sapiens
PGPLKSPQGASAIPT

SEQ ID NO: 56778 - protein, 15 aa, Homo Sapiens
GPLKSPQGASAIPTA

SEQ ID NO: 56779 - protein, 15 aa, Homo Sapiens
PLKSPQGASAIPTAI

SEQ ID NO: 56780 - protein, 15 aa, Homo Sapiens
LKSPQGASAIPTAID

SEQ ID NO: 56781 - protein, 15 aa, Homo Sapiens
KSPQGASAIPTAIDF

SEQ ID NO: 56782 - protein, 15 aa, Homo Sapiens
SPQGASAIPTAIDFT

SEQ ID NO: 56783 - protein, 15 aa, Homo Sapiens
PQGASAIPTAIDFTL

SEQ ID NO: 56784 - protein, 15 aa, Homo Sapiens
QGASAIPTAIDFTLW

SEQ ID NO: 56785 - protein, 15 aa, Homo Sapiens
GASAIPTAIDFTLWR

SEQ ID NO: 56786 - protein, 15 aa, Homo Sapiens
ASAIPTAIDFTLWRQ

SEQ ID NO: 56787 - protein, 15 aa, Homo Sapiens
SAIPTAIDFTLWRQS

SEQ ID NO: 56788 - protein, 15 aa, Homo Sapiens
AIPTAIDFTLWRQSI

SEQ ID NO: 56789 - protein, 15 aa, Homo Sapiens
IPTAIDFTLWRQSIK

SEQ ID NO: 56790 - protein, 15 aa, Homo Sapiens
PTAIDFTLWRQSIKG

SEQ ID NO: 56791 - protein, 15 aa, Homo Sapiens
TAIDFTLWRQSIKGS

SEQ ID NO: 56792 - protein, 15 aa, Homo Sapiens
AIDFTLWRQSIKGSS

SEQ ID NO: 56793 - protein, 15 aa, Homo Sapiens
IDFTLWRQSIKGSSN

SEQ ID NO: 56794 - protein, 15 aa, Homo Sapiens
DFTLWRQSIKGSSNQ

SEQ ID NO: 56795 - protein, 15 aa, Homo Sapiens
FTLWRQSIKGSSNQE

SEQ ID NO: 56796 - protein, 15 aa, Homo Sapiens
TLWRQSIKGSSNQEE

SEQ ID NO: 56797 - protein, 15 aa, Homo Sapiens
LWRQSIKGSSNQEEE

SEQ ID NO: 56798 - protein, 15 aa, Homo Sapiens
WRQSIKGSSNQEEEG

SEQ ID NO: 56799 - protein, 15 aa, Homo Sapiens
RQSIKGSSNQEEEGP

SEQ ID NO: 56800 - protein, 15 aa, Homo Sapiens
QSIKGSSNQEEEGPS

SEQ ID NO: 56801 - protein, 15 aa, Homo Sapiens
SIKGSSNQEEEGPST

SEQ ID NO: 56802 - protein, 15 aa, Homo Sapiens
IKGSSNQEEEGPSTS

SEQ ID NO: 56803 - protein, 15 aa, Homo Sapiens
KGSSNQEEEGPSTSP

SEQ ID NO: 56804 - protein, 15 aa, Homo Sapiens
GSSNQEEEGPSTSPD

SEQ ID NO: 56805 - protein, 15 aa, Homo Sapiens
SSNQEEEGPSTSPDP

SEQ ID NO: 56806 - protein, 15 aa, Homo Sapiens
SNQEEEGPSTSPDPE

SEQ ID NO: 56807 - protein, 15 aa, Homo Sapiens
NQEEEGPSTSPDPES

SEQ ID NO: 56808 - protein, 15 aa, Homo Sapiens
QEEEGPSTSPDPESV

SEQ ID NO: 56809 - protein, 15 aa, Homo Sapiens
EEEGPSTSPDPESVF

SEQ ID NO: 56810 - protein, 15 aa, Homo Sapiens
EEGPSTSPDPESVFR

SEQ ID NO: 56811 - protein, 15 aa, Homo Sapiens
EGPSTSPDPESVFRA

SEQ ID NO: 56812 - protein, 15 aa, Homo Sapiens
GPSTSPDPESVFRAA

SEQ ID NO: 56813 - protein, 15 aa, Homo Sapiens
PSTSPDPESVFRAAL

SEQ ID NO: 56814 - protein, 15 aa, Homo Sapiens
STSPDPESVFRAALS

SEQ ID NO: 56815 - protein, 15 aa, Homo Sapiens
TSPDPESVFRAALSK

SEQ ID NO: 56816 - protein, 15 aa, Homo Sapiens
SPDPESVFRAALSKK

SEQ ID NO: 56817 - protein, 15 aa, Homo Sapiens
PDPESVFRAALSKKV

SEQ ID NO: 56818 - protein, 15 aa, Homo Sapiens
DPESVFRAALSKKVA

SEQ ID NO: 56819 - protein, 15 aa, Homo Sapiens
PESVFRAALSKKVAD

SEQ ID NO: 56820 - protein, 15 aa, Homo Sapiens
ESVFRAALSKKVADL

SEQ ID NO: 56821 - protein, 15 aa, Homo Sapiens
SVFRAALSKKVADLI

SEQ ID NO: 56822 - protein, 15 aa, Homo Sapiens
VFRAALSKKVADLIH

SEQ ID NO: 56823 - protein, 15 aa, Homo Sapiens
FRAALSKKVADLIHF

SEQ ID NO: 56824 - protein, 15 aa, Homo Sapiens
RAALSKKVADLIHFL

SEQ ID NO: 56825 - protein, 15 aa, Homo Sapiens
AALSKKVADLIHFLL

SEQ ID NO: 56826 - protein, 15 aa, Homo Sapiens
ALSKKVADLIHFLLL

SEQ ID NO: 56827 - protein, 15 aa, Homo Sapiens
LSKKVADLIHFLLLK

SEQ ID NO: 56828 - protein, 15 aa, Homo Sapiens
SKKVADLIHFLLLKY

SEQ ID NO: 56829 - protein, 16 aa, Homo Sapiens
MSLEQKSQHCKPEEGL

SEQ ID NO: 56830 - protein, 16 aa, Homo Sapiens
SLEQKSQHCKPEEGLD

SEQ ID NO: 56831 - protein, 16 aa, Homo Sapiens
LEQKSQHCKPEEGLDT

SEQ ID NO: 56832 - protein, 16 aa, Homo Sapiens
EQKSQHCKPEEGLDTQ

SEQ ID NO: 56833 - protein, 16 aa, Homo Sapiens
QKSQHCKPEEGLDTQE

SEQ ID NO: 56834 - protein, 16 aa, Homo Sapiens
KSQHCKPEEGLDTQEE

SEQ ID NO: 56835 - protein, 16 aa, Homo Sapiens
SQHCKPEEGLDTQEEA

SEQ ID NO: 56836 - protein, 16 aa, Homo Sapiens
QHCKPEEGLDTQEEAL

SEQ ID NO: 56837 - protein, 16 aa, Homo Sapiens
HCKPEEGLDTQEEALG

SEQ ID NO: 56838 - protein, 16 aa, Homo Sapiens
CKPEEGLDTQEEALGL

SEQ ID NO: 56839 - protein, 16 aa, Homo Sapiens
KPEEGLDTQEEALGLV

SEQ ID NO: 56840 - protein, 16 aa, Homo Sapiens
PEEGLDTQEEALGLVG

SEQ ID NO: 56841 - protein, 16 aa, Homo Sapiens
EEGLDTQEEALGLVGV

SEQ ID NO: 56842 - protein, 16 aa, Homo Sapiens
EGLDTQEEALGLVGVQ

SEQ ID NO: 56843 - protein, 16 aa, Homo Sapiens
GLDTQEEALGLVGVQA

SEQ ID NO: 56844 - protein, 16 aa, Homo Sapiens
LDTQEEALGLVGVQAA

SEQ ID NO: 56845 - protein, 16 aa, Homo Sapiens
DTQEEALGLVGVQAAT

SEQ ID NO: 56846 - protein, 16 aa, Homo Sapiens
TQEEALGLVGVQAATT

SEQ ID NO: 56847 - protein, 16 aa, Homo Sapiens
QEEALGLVGVQAATTE

SEQ ID NO: 56848 - protein, 16 aa, Homo Sapiens
EEALGLVGVQAATTEE

SEQ ID NO: 56849 - protein, 16 aa, Homo Sapiens
EALGLVGVQAATTEEQ

SEQ ID NO: 56850 - protein, 16 aa, Homo Sapiens
ALGLVGVQAATTEEQE

SEQ ID NO: 56851 - protein, 16 aa, Homo Sapiens
LGLVGVQAATTEEQEA

SEQ ID NO: 56852 - protein, 16 aa, Homo Sapiens
GLVGVQAATTEEQEAV

SEQ ID NO: 56853 - protein, 16 aa, Homo Sapiens
LVGVQAATTEEQEAVS

SEQ ID NO: 56854 - protein, 16 aa, Homo Sapiens
VGVQAATTEEQEAVSS

SEQ ID NO: 56855 - protein, 16 aa, Homo Sapiens
GVQAATTEEQEAVSSS

SEQ ID NO: 56856 - protein, 16 aa, Homo Sapiens
VQAATTEEQEAVSSSS

SEQ ID NO: 56857 - protein, 16 aa, Homo Sapiens
QAATTEEQEAVSSSSP

SEQ ID NO: 56858 - protein, 16 aa, Homo Sapiens
AATTEEQEAVSSSSPL

SEQ ID NO: 56859 - protein, 16 aa, Homo Sapiens
ATTEEQEAVSSSSPLV

SEQ ID NO: 56860 - protein, 16 aa, Homo Sapiens
TTEEQEAVSSSSPLVP

SEQ ID NO: 56861 - protein, 16 aa, Homo Sapiens
TEEQEAVSSSSPLVPG

SEQ ID NO: 56862 - protein, 16 aa, Homo Sapiens
EEQEAVSSSSPLVPGT

SEQ ID NO: 56863 - protein, 16 aa, Homo Sapiens
EQEAVSSSSPLVPGTL

SEQ ID NO: 56864 - protein, 16 aa, Homo Sapiens
QEAVSSSSPLVPGTLG

SEQ ID NO: 56865 - protein, 16 aa, Homo Sapiens
EAVSSSSPLVPGTLGE

SEQ ID NO: 56866 - protein, 16 aa, Homo Sapiens
AVSSSSPLVPGTLGEV

SEQ ID NO: 56867 - protein, 16 aa, Homo Sapiens
VSSSSPLVPGTLGEVP

SEQ ID NO: 56868 - protein, 16 aa, Homo Sapiens
SSSSPLVPGTLGEVPA

SEQ ID NO: 56869 - protein, 16 aa, Homo Sapiens
SSSPLVPGTLGEVPAA

SEQ ID NO: 56870 - protein, 16 aa, Homo Sapiens
SSPLVPGTLGEVPAAG

SEQ ID NO: 56871 - protein, 16 aa, Homo Sapiens
SPLVPGTLGEVPAAGS

SEQ ID NO: 56872 - protein, 16 aa, Homo Sapiens
PLVPGTLGEVPAAGSP

SEQ ID NO: 56873 - protein, 16 aa, Homo Sapiens
LVPGTLGEVPAAGSPG

SEQ ID NO: 56874 - protein, 16 aa, Homo Sapiens
VPGTLGEVPAAGSPGP

SEQ ID NO: 56875 - protein, 16 aa, Homo Sapiens
PGTLGEVPAAGSPGPL

SEQ ID NO: 56876 - protein, 16 aa, Homo Sapiens
GTLGEVPAAGSPGPLK

SEQ ID NO: 56877 - protein, 16 aa, Homo Sapiens
TLGEVPAAGSPGPLKS

SEQ ID NO: 56878 - protein, 16 aa, Homo Sapiens
LGEVPAAGSPGPLKSP

SEQ ID NO: 56879 - protein, 16 aa, Homo Sapiens
GEVPAAGSPGPLKSPQ

SEQ ID NO: 56880 - protein, 16 aa, Homo Sapiens
EVPAAGSPGPLKSPQG

SEQ ID NO: 56881 - protein, 16 aa, Homo Sapiens
VPAAGSPGPLKSPQGA

SEQ ID NO: 56882 - protein, 16 aa, Homo Sapiens
PAAGSPGPLKSPQGAS

SEQ ID NO: 56883 - protein, 16 aa, Homo Sapiens
AAGSPGPLKSPQGASA

SEQ ID NO: 56884 - protein, 16 aa, Homo Sapiens
AGSPGPLKSPQGASAI

SEQ ID NO: 56885 - protein, 16 aa, Homo Sapiens
GSPGPLKSPQGASAIP

SEQ ID NO: 56886 - protein, 16 aa, Homo Sapiens
SPGPLKSPQGASAIPT

SEQ ID NO: 56887 - protein, 16 aa, Homo Sapiens
PGPLKSPQGASAIPTA

SEQ ID NO: 56888 - protein, 16 aa, Homo Sapiens
GPLKSPQGASAIPTAI

SEQ ID NO: 56889 - protein, 16 aa, Homo Sapiens
PLKSPQGASAIPTAID

SEQ ID NO: 56890 - protein, 16 aa, Homo Sapiens
LKSPQGASAIPTAIDF

SEQ ID NO: 56891 - protein, 16 aa, Homo Sapiens
KSPQGASAIPTAIDFT

SEQ ID NO: 56892 - protein, 16 aa, Homo Sapiens
SPQGASAIPTAIDFTL

SEQ ID NO: 56893 - protein, 16 aa, Homo Sapiens
PQGASAIPTAIDFTLW

SEQ ID NO: 56894 - protein, 16 aa, Homo Sapiens
QGASAIPTAIDFTLWR

SEQ ID NO: 56895 - protein, 16 aa, Homo Sapiens
GASAIPTAIDFTLWRQ

SEQ ID NO: 56896 - protein, 16 aa, Homo Sapiens
ASAIPTAIDFTLWRQS

SEQ ID NO: 56897 - protein, 16 aa, Homo Sapiens
SAIPTAIDFTLWRQSI

SEQ ID NO: 56898 - protein, 16 aa, Homo Sapiens
AIPTAIDFTLWRQSIK

SEQ ID NO: 56899 - protein, 16 aa, Homo Sapiens
IPTAIDFTLWRQSIKG

SEQ ID NO: 56900 - protein, 16 aa, Homo Sapiens
PTAIDFTLWRQSIKGS

SEQ ID NO: 56901 - protein, 16 aa, Homo Sapiens
TAIDFTLWRQSIKGSS

SEQ ID NO: 56902 - protein, 16 aa, Homo Sapiens
AIDFTLWRQSIKGSSN

SEQ ID NO: 56903 - protein, 16 aa, Homo Sapiens
IDFTLWRQSIKGSSNQ

SEQ ID NO: 56904 - protein, 16 aa, Homo Sapiens
DFTLWRQSIKGSSNQE

SEQ ID NO: 56905 - protein, 16 aa, Homo Sapiens
FTLWRQSIKGSSNQEE

SEQ ID NO: 56906 - protein, 16 aa, Homo Sapiens
TLWRQSIKGSSNQEEE

SEQ ID NO: 56907 - protein, 16 aa, Homo Sapiens
LWRQSIKGSSNQEEEG

SEQ ID NO: 56908 - protein, 16 aa, Homo Sapiens
WRQSIKGSSNQEEEGP

SEQ ID NO: 56909 - protein, 16 aa, Homo Sapiens
RQSIKGSSNQEEEGPS

SEQ ID NO: 56910 - protein, 16 aa, Homo Sapiens
QSIKGSSNQEEEGPST

SEQ ID NO: 56911 - protein, 16 aa, Homo Sapiens
SIKGSSNQEEEGPSTS

SEQ ID NO: 56912 - protein, 16 aa, Homo Sapiens
IKGSSNQEEEGPSTSP

SEQ ID NO: 56913 - protein, 16 aa, Homo Sapiens
KGSSNQEEEGPSTSPD

SEQ ID NO: 56914 - protein, 16 aa, Homo Sapiens
GSSNQEEEGPSTSPDP

SEQ ID NO: 56915 - protein, 16 aa, Homo Sapiens
SSNQEEEGPSTSPDPE

SEQ ID NO: 56916 - protein, 16 aa, Homo Sapiens
SNQEEEGPSTSPDPES

SEQ ID NO: 56917 - protein, 16 aa, Homo Sapiens
NQEEEGPSTSPDPESV

SEQ ID NO: 56918 - protein, 16 aa, Homo Sapiens
QEEEGPSTSPDPESVF

SEQ ID NO: 56919 - protein, 16 aa, Homo Sapiens
EEEGPSTSPDPESVFR

SEQ ID NO: 56920 - protein, 16 aa, Homo Sapiens
EEGPSTSPDPESVFRA

SEQ ID NO: 56921 - protein, 16 aa, Homo Sapiens
EGPSTSPDPESVFRAA

SEQ ID NO: 56922 - protein, 16 aa, Homo Sapiens
GPSTSPDPESVFRAAL

SEQ ID NO: 56923 - protein, 16 aa, Homo Sapiens
PSTSPDPESVFRAALS

SEQ ID NO: 56924 - protein, 16 aa, Homo Sapiens
STSPDPESVFRAALSK

SEQ ID NO: 56925 - protein, 16 aa, Homo Sapiens
TSPDPESVFRAALSKK

SEQ ID NO: 56926 - protein, 16 aa, Homo Sapiens
SPDPESVFRAALSKKV

SEQ ID NO: 56927 - protein, 16 aa, Homo Sapiens
PDPESVFRAALSKKVA

SEQ ID NO: 56928 - protein, 16 aa, Homo Sapiens
DPESVFRAALSKKVAD

SEQ ID NO: 56929 - protein, 16 aa, Homo Sapiens
PESVFRAALSKKVADL

SEQ ID NO: 56930 - protein, 16 aa, Homo Sapiens
ESVFRAALSKKVADLI

SEQ ID NO: 56931 - protein, 16 aa, Homo Sapiens
SVFRAALSKKVADLIH

SEQ ID NO: 56932 - protein, 16 aa, Homo Sapiens
VFRAALSKKVADLIHF

SEQ ID NO: 56933 - protein, 16 aa, Homo Sapiens
FRAALSKKVADLIHFL

SEQ ID NO: 56934 - protein, 16 aa, Homo Sapiens
RAALSKKVADLIHFLL

SEQ ID NO: 56935 - protein, 16 aa, Homo Sapiens
AALSKKVADLIHFLLL

SEQ ID NO: 56936 - protein, 16 aa, Homo Sapiens
ALSKKVADLIHFLLLK

SEQ ID NO: 56937 - protein, 16 aa, Homo Sapiens
LSKKVADLIHFLLLKY

SEQ ID NO: 56938 - protein, 750 aa, Homo Sapiens
MWNLLHETDSAVATARRPRWLCAGALVLAGGFFLLGFLFGWFIKSSNEATNITPKHNMKAFLDELKAENIKKFLYNFTQIPHLAGTEQNFQLAKQIQSQWKEFGLDSVELAHYDVLLSYPNKTHPNYISIINEDGNEIFNTSLFEPPPPGYENVSDIVPPFSAFSPQGMPEGDLVYVNYARTEDFFKLERDMKINCSGKIVIARYGKVFRGNKVKNAQLAGAKGVILYSDPADYFAPGVKSYPDGWNLPGGGVQRGNILNLNGAGDPLTPGYPANEYAYRRGIAEAVGLPSIPVHPIGYYDAQKLLEKMGGSAPPDSSWRGSLKVPYNVGPGFTGNFSTQKVKMHIHSTNEVTRIYNVIGTLRGAVEPDRYVILGGHRDSWVFGGIDPQSGAAVVHEIVRSFGTLKKEGWRPRRTILFASWDAEEFGLLGSTEWAEENSRLLQERGVAYINADSSIEGNYTLRVDCTPLMYSLVHNLTKELKSPDEGFEGKSLYESWTKKSPSPEFSGMPRISKLGSGNDFEVFFQRLGIASGRARYTKNWETNKFSGYPLYHSVYETYELVEKFYDPMFKYHLTVAQVRGGMVFELANSIVLPFDCRDYAVVLRKYADKIYSISMKHPQEMKTYSVSFDSLFSAVKNFTEIASKFSERLQDFDKSNPIVLRMMNDQLMFLERAFIDPLGLPDRPFYRHVIYAPSSHNKYAGESFPGIYDALFDIESKVDPSKAWGEVKRQIYVAAFTVQAAAETLSEVA

SEQ ID NO: 56939 - protein, 8 aa, Homo Sapiens
LLHETDSA

SEQ ID NO: 56940 - protein, 8 aa, Homo Sapiens
ETDSAVAT

SEQ ID NO: 56941 - protein, 8 aa, Homo Sapiens
DSAVATAR

SEQ ID NO: 56942 - protein, 8 aa, Homo Sapiens
SAVATARR

SEQ ID NO: 56943 - protein, 8 aa, Homo Sapiens
VATARRPR

SEQ ID NO: 56944 - protein, 8 aa, Homo Sapiens
ATARRPRW

SEQ ID NO: 56945 - protein, 8 aa, Homo Sapiens
TARRPRWL

SEQ ID NO: 56946 - protein, 8 aa, Homo Sapiens
RPRWLCAG

SEQ ID NO: 56947 - protein, 8 aa, Homo Sapiens
RWLCAGAL

SEQ ID NO: 56948 - protein, 8 aa, Homo Sapiens
WLCAGALV

SEQ ID NO: 56949 - protein, 8 aa, Homo Sapiens
ALVLAGGF

SEQ ID NO: 56950 - protein, 8 aa, Homo Sapiens
LVLAGGFF

SEQ ID NO: 56951 - protein, 8 aa, Homo Sapiens
VLAGGFFL

SEQ ID NO: 56952 - protein, 8 aa, Homo Sapiens
LAGGFFLL

SEQ ID NO: 56953 - protein, 8 aa, Homo Sapiens
FFLLGFLF

SEQ ID NO: 56954 - protein, 8 aa, Homo Sapiens
FLLGFLFG

SEQ ID NO: 56955 - protein, 8 aa, Homo Sapiens
LLGFLFGW

SEQ ID NO: 56956 - protein, 8 aa, Homo Sapiens
GFLFGWFI

SEQ ID NO: 56957 - protein, 8 aa, Homo Sapiens
FLFGWFIK

SEQ ID NO: 56958 - protein, 8 aa, Homo Sapiens
FIKSSNEA

SEQ ID NO: 56959 - protein, 8 aa, Homo Sapiens
EATNITPK

SEQ ID NO: 56960 - protein, 8 aa, Homo Sapiens
NITPKHNM

SEQ ID NO: 56961 - protein, 8 aa, Homo Sapiens
ITPKHNMK

SEQ ID NO: 56962 - protein, 8 aa, Homo Sapiens
MKAFLDEL

SEQ ID NO: 56963 - protein, 8 aa, Homo Sapiens
KAFLDELK

SEQ ID NO: 56964 - protein, 8 aa, Homo Sapiens
FLDELKAE

SEQ ID NO: 56965 - protein, 8 aa, Homo Sapiens
ELKAENIK

SEQ ID NO: 56966 - protein, 8 aa, Homo Sapiens
AENIKKFL

SEQ ID NO: 56967 - protein, 8 aa, Homo Sapiens
ENIKKFLY

SEQ ID NO: 56968 - protein, 8 aa, Homo Sapiens
FLYNFTQI

SEQ ID NO: 56969 - protein, 8 aa, Homo Sapiens
FTQIPHLA

SEQ ID NO: 56970 - protein, 8 aa, Homo Sapiens
EQNFQLAK

SEQ ID NO: 56971 - protein, 8 aa, Homo Sapiens
KQIQSQWK

SEQ ID NO: 56972 - protein, 8 aa, Homo Sapiens
IQSQWKEF

SEQ ID NO: 56973 - protein, 8 aa, Homo Sapiens
SQWKEFGL

SEQ ID NO: 56974 - protein, 8 aa, Homo Sapiens
KEFGLDSV

SEQ ID NO: 56975 - protein, 8 aa, Homo Sapiens
FGLDSVEL

SEQ ID NO: 56976 - protein, 8 aa, Homo Sapiens
GLDSVELA

SEQ ID NO: 56977 - protein, 8 aa, Homo Sapiens
DSVELAHY

SEQ ID NO: 56978 - protein, 8 aa, Homo Sapiens
VELAHYDV

SEQ ID NO: 56979 - protein, 8 aa, Homo Sapiens
ELAHYDVL

SEQ ID NO: 56980 - protein, 8 aa, Homo Sapiens
HYDVLLSY

SEQ ID NO: 56981 - protein, 8 aa, Homo Sapiens
VLLSYPNK

SEQ ID NO: 56982 - protein, 8 aa, Homo Sapiens
KTHPNYIS

SEQ ID NO: 56983 - protein, 8 aa, Homo Sapiens
HPNYISII

SEQ ID NO: 56984 - protein, 8 aa, Homo Sapiens
NEDGNEIF

SEQ ID NO: 56985 - protein, 8 aa, Homo Sapiens
NEIFNTSL

SEQ ID NO: 56986 - protein, 8 aa, Homo Sapiens
EIFNTSLF

SEQ ID NO: 56987 - protein, 8 aa, Homo Sapiens
SLFEPPPP

SEQ ID NO: 56988 - protein, 8 aa, Homo Sapiens
FEPPPPGY

SEQ ID NO: 56989 - protein, 8 aa, Homo Sapiens
GYENVSDI

SEQ ID NO: 56990 - protein, 8 aa, Homo Sapiens
YENVSDIV

SEQ ID NO: 56991 - protein, 8 aa, Homo Sapiens
VSDIVPPF

SEQ ID NO: 56992 - protein, 8 aa, Homo Sapiens
DIVPPFSA

SEQ ID NO: 56993 - protein, 8 aa, Homo Sapiens
IVPPFSAF

SEQ ID NO: 56994 - protein, 8 aa, Homo Sapiens
GMPEGDLV

SEQ ID NO: 56995 - protein, 8 aa, Homo Sapiens
MPEGDLVY

SEQ ID NO: 56996 - protein, 8 aa, Homo Sapiens
DLVYVNYA

SEQ ID NO: 56997 - protein, 8 aa, Homo Sapiens
LVYVNYAR

SEQ ID NO: 56998 - protein, 8 aa, Homo Sapiens
NYARTEDF

SEQ ID NO: 56999 - protein, 8 aa, Homo Sapiens
YARTEDFF

SEQ ID NO: 57000 - protein, 8 aa, Homo Sapiens
RTEDFFKL

SEQ ID NO: 57001 - protein, 8 aa, Homo Sapiens
EDFFKLER

SEQ ID NO: 57002 - protein, 8 aa, Homo Sapiens
KLERDMKI

SEQ ID NO: 57003 - protein, 8 aa, Homo Sapiens
MKINCSGK

SEQ ID NO: 57004 - protein, 8 aa, Homo Sapiens
KINCSGKI

SEQ ID NO: 57005 - protein, 8 aa, Homo Sapiens
SGKIVIAR

SEQ ID NO: 57006 - protein, 8 aa, Homo Sapiens
IVIARYGK

SEQ ID NO: 57007 - protein, 8 aa, Homo Sapiens
VIARYGKV

SEQ ID NO: 57008 - protein, 8 aa, Homo Sapiens
IARYGKVF

SEQ ID NO: 57009 - protein, 8 aa, Homo Sapiens
ARYGKVFR

SEQ ID NO: 57010 - protein, 8 aa, Homo Sapiens
KVFRGNKV

SEQ ID NO: 57011 - protein, 8 aa, Homo Sapiens
VFRGNKVK

SEQ ID NO: 57012 - protein, 8 aa, Homo Sapiens
KVKNAQLA

SEQ ID NO: 57013 - protein, 8 aa, Homo Sapiens
NAQLAGAK

SEQ ID NO: 57014 - protein, 8 aa, Homo Sapiens
QLAGAKGV

SEQ ID NO: 57015 - protein, 8 aa, Homo Sapiens
VILYSDPA

SEQ ID NO: 57016 - protein, 8 aa, Homo Sapiens
LYSDPADY

SEQ ID NO: 57017 - protein, 8 aa, Homo Sapiens
YSDPADYF

SEQ ID NO: 57018 - protein, 8 aa, Homo Sapiens
DYFAPGVK

SEQ ID NO: 57019 - protein, 8 aa, Homo Sapiens
FAPGVKSY

SEQ ID NO: 57020 - protein, 8 aa, Homo Sapiens
SYPDGWNL

SEQ ID NO: 57021 - protein, 8 aa, Homo Sapiens
NLPGGGVQ

SEQ ID NO: 57022 - protein, 8 aa, Homo Sapiens
NILNLNGA

SEQ ID NO: 57023 - protein, 8 aa, Homo Sapiens
PLTPGYPA

SEQ ID NO: 57024 - protein, 8 aa, Homo Sapiens
YPANEYAY

SEQ ID NO: 57025 - protein, 8 aa, Homo Sapiens
PANEYAYR

SEQ ID NO: 57026 - protein, 8 aa, Homo Sapiens
EYAYRRGI

SEQ ID NO: 57027 - protein, 8 aa, Homo Sapiens
YAYRRGIA

SEQ ID NO: 57028 - protein, 8 aa, Homo Sapiens
GIAEAVGL

SEQ ID NO: 57029 - protein, 8 aa, Homo Sapiens
AEAVGLPS

SEQ ID NO: 57030 - protein, 8 aa, Homo Sapiens
EAVGLPSI

SEQ ID NO: 57031 - protein, 8 aa, Homo Sapiens
VGLPSIPV

SEQ ID NO: 57032 - protein, 8 aa, Homo Sapiens
IPVHPIGY

SEQ ID NO: 57033 - protein, 8 aa, Homo Sapiens
PVHPIGYY

SEQ ID NO: 57034 - protein, 8 aa, Homo Sapiens
HPIGYYDA

SEQ ID NO: 57035 - protein, 8 aa, Homo Sapiens
IGYYDAQK

SEQ ID NO: 57036 - protein, 8 aa, Homo Sapiens
GYYDAQKL

SEQ ID NO: 57037 - protein, 8 aa, Homo Sapiens
YYDAQKLL

SEQ ID NO: 57038 - protein, 8 aa, Homo Sapiens
DAQKLLEK

SEQ ID NO: 57039 - protein, 8 aa, Homo Sapiens
SAPPDSSW

SEQ ID NO: 57040 - protein, 8 aa, Homo Sapiens
SSWRGSLK

SEQ ID NO: 57041 - protein, 8 aa, Homo Sapiens
SLKVPYNV

SEQ ID NO: 57042 - protein, 8 aa, Homo Sapiens
VPYNVGPG

SEQ ID NO: 57043 - protein, 8 aa, Homo Sapiens
PYNVGPGF

SEQ ID NO: 57044 - protein, 8 aa, Homo Sapiens
TGNFSTQK

SEQ ID NO: 57045 - protein, 8 aa, Homo Sapiens
KVKMHIHS

SEQ ID NO: 57046 - protein, 8 aa, Homo Sapiens
HIHSTNEV

SEQ ID NO: 57047 - protein, 8 aa, Homo Sapiens
HSTNEVTR

SEQ ID NO: 57048 - protein, 8 aa, Homo Sapiens
STNEVTRI

SEQ ID NO: 57049 - protein, 8 aa, Homo Sapiens
EVTRIYNV

SEQ ID NO: 57050 - protein, 8 aa, Homo Sapiens
RIYNVIGT

SEQ ID NO: 57051 - protein, 8 aa, Homo Sapiens
IYNVIGTL

SEQ ID NO: 57052 - protein, 8 aa, Homo Sapiens
YNVIGTLR

SEQ ID NO: 57053 - protein, 8 aa, Homo Sapiens
AVEPDRYV

SEQ ID NO: 57054 - protein, 8 aa, Homo Sapiens
EPDRYVIL

SEQ ID NO: 57055 - protein, 8 aa, Homo Sapiens
YVILGGHR

SEQ ID NO: 57056 - protein, 8 aa, Homo Sapiens
DSWVFGGI

SEQ ID NO: 57057 - protein, 8 aa, Homo Sapiens
GIDPQSGA

SEQ ID NO: 57058 - protein, 8 aa, Homo Sapiens
AAVVHEIV

SEQ ID NO: 57059 - protein, 8 aa, Homo Sapiens
AVVHEIVR

SEQ ID NO: 57060 - protein, 8 aa, Homo Sapiens
EIVRSFGT

SEQ ID NO: 57061 - protein, 8 aa, Homo Sapiens
IVRSFGTL

SEQ ID NO: 57062 - protein, 8 aa, Homo Sapiens
RSFGTLKK

SEQ ID NO: 57063 - protein, 8 aa, Homo Sapiens
TLKKEGWR

SEQ ID NO: 57064 - protein, 8 aa, Homo Sapiens
RPRRTILF

SEQ ID NO: 57065 - protein, 8 aa, Homo Sapiens
RTILFASW

SEQ ID NO: 57066 - protein, 8 aa, Homo Sapiens
ILFASWDA

SEQ ID NO: 57067 - protein, 8 aa, Homo Sapiens
ASWDAEEF

SEQ ID NO: 57068 - protein, 8 aa, Homo Sapiens
EEFGLLGS

SEQ ID NO: 57069 - protein, 8 aa, Homo Sapiens
GLLGSTEW

SEQ ID NO: 57070 - protein, 8 aa, Homo Sapiens
LLGSTEWA

SEQ ID NO: 57071 - protein, 8 aa, Homo Sapiens
EWAEENSR

SEQ ID NO: 57072 - protein, 8 aa, Homo Sapiens
WAEENSRL

SEQ ID NO: 57073 - protein, 8 aa, Homo Sapiens
AEENSRLL

SEQ ID NO: 57074 - protein, 8 aa, Homo Sapiens
NSRLLQER

SEQ ID NO: 57075 - protein, 8 aa, Homo Sapiens
RLLQERGV

SEQ ID NO: 57076 - protein, 8 aa, Homo Sapiens
LLQERGVA

SEQ ID NO: 57077 - protein, 8 aa, Homo Sapiens
LQERGVAY

SEQ ID NO: 57078 - protein, 8 aa, Homo Sapiens
QERGVAYI

SEQ ID NO: 57079 - protein, 8 aa, Homo Sapiens
YINADSSI

SEQ ID NO: 57080 - protein, 8 aa, Homo Sapiens
DSSIEGNY

SEQ ID NO: 57081 - protein, 8 aa, Homo Sapiens
SIEGNYTL

SEQ ID NO: 57082 - protein, 8 aa, Homo Sapiens
EGNYTLRV

SEQ ID NO: 57083 - protein, 8 aa, Homo Sapiens
CTPLMYSL

SEQ ID NO: 57084 - protein, 8 aa, Homo Sapiens
TPLMYSLV

SEQ ID NO: 57085 - protein, 8 aa, Homo Sapiens
MYSLVHNL

SEQ ID NO: 57086 - protein, 8 aa, Homo Sapiens
SLVHNLTK

SEQ ID NO: 57087 - protein, 8 aa, Homo Sapiens
SLYESWTK

SEQ ID NO: 57088 - protein, 8 aa, Homo Sapiens
LYESWTKK

SEQ ID NO: 57089 - protein, 8 aa, Homo Sapiens
KKSPSPEF

SEQ ID NO: 57090 - protein, 8 aa, Homo Sapiens
SGMPRISK

SEQ ID NO: 57091 - protein, 8 aa, Homo Sapiens
GMPRISKL

SEQ ID NO: 57092 - protein, 8 aa, Homo Sapiens
MPRISKLG

SEQ ID NO: 57093 - protein, 8 aa, Homo Sapiens
DFEVFFQR

SEQ ID NO: 57094 - protein, 8 aa, Homo Sapiens
FEVFFQRL

SEQ ID NO: 57095 - protein, 8 aa, Homo Sapiens
FQRLGIAS

SEQ ID NO: 57096 - protein, 8 aa, Homo Sapiens
RLGIASGR

SEQ ID NO: 57097 - protein, 8 aa, Homo Sapiens
GIASGRAR

SEQ ID NO: 57098 - protein, 8 aa, Homo Sapiens
IASGRARY

SEQ ID NO: 57099 - protein, 8 aa, Homo Sapiens
SGRARYTK

SEQ ID NO: 57100 - protein, 8 aa, Homo Sapiens
RARYTKNW

SEQ ID NO: 57101 - protein, 8 aa, Homo Sapiens
RYTKNWET

SEQ ID NO: 57102 - protein, 8 aa, Homo Sapiens
ETNKFSGY

SEQ ID NO: 57103 - protein, 8 aa, Homo Sapiens
KFSGYPLY

SEQ ID NO: 57104 - protein, 8 aa, Homo Sapiens
GYPLYHSV

SEQ ID NO: 57105 - protein, 8 aa, Homo Sapiens
YPLYHSVY

SEQ ID NO: 57106 - protein, 8 aa, Homo Sapiens
YHSVYETY

SEQ ID NO: 57107 - protein, 8 aa, Homo Sapiens
SVYETYEL

SEQ ID NO: 57108 - protein, 8 aa, Homo Sapiens
VYETYELV

SEQ ID NO: 57109 - protein, 8 aa, Homo Sapiens
ETYELVEK

SEQ ID NO: 57110 - protein, 8 aa, Homo Sapiens
TYELVEKF

SEQ ID NO: 57111 - protein, 8 aa, Homo Sapiens
YELVEKFY

SEQ ID NO: 57112 - protein, 8 aa, Homo Sapiens
KFYDPMFK

SEQ ID NO: 57113 - protein, 8 aa, Homo Sapiens
FYDPMFKY

SEQ ID NO: 57114 - protein, 8 aa, Homo Sapiens
PMFKYHLT

SEQ ID NO: 57115 - protein, 8 aa, Homo Sapiens
MFKYHLTV

SEQ ID NO: 57116 - protein, 8 aa, Homo Sapiens
FKYHLTVA

SEQ ID NO: 57117 - protein, 8 aa, Homo Sapiens
YHLTVAQV

SEQ ID NO: 57118 - protein, 8 aa, Homo Sapiens
HLTVAQVR

SEQ ID NO: 57119 - protein, 8 aa, Homo Sapiens
AQVRGGMV

SEQ ID NO: 57120 - protein, 8 aa, Homo Sapiens
QVRGGMVF

SEQ ID NO: 57121 - protein, 8 aa, Homo Sapiens
MVFELANS

SEQ ID NO: 57122 - protein, 8 aa, Homo Sapiens
FELANSIV

SEQ ID NO: 57123 - protein, 8 aa, Homo Sapiens
ELANSIVL

SEQ ID NO: 57124 - protein, 8 aa, Homo Sapiens
IVLPFDCR

SEQ ID NO: 57125 - protein, 8 aa, Homo Sapiens
LPFDCRDY

SEQ ID NO: 57126 - protein, 8 aa, Homo Sapiens
CRDYAVVL

SEQ ID NO: 57127 - protein, 8 aa, Homo Sapiens
RDYAVVLR

SEQ ID NO: 57128 - protein, 8 aa, Homo Sapiens
DYAVVLRK

SEQ ID NO: 57129 - protein, 8 aa, Homo Sapiens
YAVVLRKY

SEQ ID NO: 57130 - protein, 8 aa, Homo Sapiens
VLRKYADK

SEQ ID NO: 57131 - protein, 8 aa, Homo Sapiens
YADKIYSI

SEQ ID NO: 57132 - protein, 8 aa, Homo Sapiens
KIYSISMK

SEQ ID NO: 57133 - protein, 8 aa, Homo Sapiens
SMKHPQEM

SEQ ID NO: 57134 - protein, 8 aa, Homo Sapiens
MKHPQEMK

SEQ ID NO: 57135 - protein, 8 aa, Homo Sapiens
HPQEMKTY

SEQ ID NO: 57136 - protein, 8 aa, Homo Sapiens
QEMKTYSV

SEQ ID NO: 57137 - protein, 8 aa, Homo Sapiens
YSVSFDSL

SEQ ID NO: 57138 - protein, 8 aa, Homo Sapiens
SVSFDSLF

SEQ ID NO: 57139 - protein, 8 aa, Homo Sapiens
FDSLFSAV

SEQ ID NO: 57140 - protein, 8 aa, Homo Sapiens
DSLFSAVK

SEQ ID NO: 57141 - protein, 8 aa, Homo Sapiens
LFSAVKNF

SEQ ID NO: 57142 - protein, 8 aa, Homo Sapiens
AVKNFTEI

SEQ ID NO: 57143 - protein, 8 aa, Homo Sapiens
NFTEIASK

SEQ ID NO: 57144 - protein, 8 aa, Homo Sapiens
FTEIASKF

SEQ ID NO: 57145 - protein, 8 aa, Homo Sapiens
IASKFSER

SEQ ID NO: 57146 - protein, 8 aa, Homo Sapiens
KSNPIVLR

SEQ ID NO: 57147 - protein, 8 aa, Homo Sapiens
NPIVLRMM

SEQ ID NO: 57148 - protein, 8 aa, Homo Sapiens
RMMNDQLM

SEQ ID NO: 57149 - protein, 8 aa, Homo Sapiens
MMNDQLMF

SEQ ID NO: 57150 - protein, 8 aa, Homo Sapiens
DQLMFLER

SEQ ID NO: 57151 - protein, 8 aa, Homo Sapiens
QLMFLERA

SEQ ID NO: 57152 - protein, 8 aa, Homo Sapiens
LMFLERAF

SEQ ID NO: 57153 - protein, 8 aa, Homo Sapiens
MFLERAFI

SEQ ID NO: 57154 - protein, 8 aa, Homo Sapiens
ERAFIDPL

SEQ ID NO: 57155 - protein, 8 aa, Homo Sapiens
GLPDRPFY

SEQ ID NO: 57156 - protein, 8 aa, Homo Sapiens
RPFYRHVI

SEQ ID NO: 57157 - protein, 8 aa, Homo Sapiens
PFYRHVIY

SEQ ID NO: 57158 - protein, 8 aa, Homo Sapiens
YAPSSHNK

SEQ ID NO: 57159 - protein, 8 aa, Homo Sapiens
APSSHNKY

SEQ ID NO: 57160 - protein, 8 aa, Homo Sapiens
FPGIYDAL

SEQ ID NO: 57161 - protein, 8 aa, Homo Sapiens
IYDALFDI

SEQ ID NO: 57162 - protein, 8 aa, Homo Sapiens
ALFDIESK

SEQ ID NO: 57163 - protein, 8 aa, Homo Sapiens
ESKVDPSK

SEQ ID NO: 57164 - protein, 8 aa, Homo Sapiens
KVDPSKAW

SEQ ID NO: 57165 - protein, 8 aa, Homo Sapiens
KAWGEVKR

SEQ ID NO: 57166 - protein, 8 aa, Homo Sapiens
GEVKRQIY

SEQ ID NO: 57167 - protein, 8 aa, Homo Sapiens
EVKRQIYV

SEQ ID NO: 57168 - protein, 8 aa, Homo Sapiens
RQIYVAAF

SEQ ID NO: 57169 - protein, 8 aa, Homo Sapiens
IYVAAFTV

SEQ ID NO: 57170 - protein, 8 aa, Homo Sapiens
VQAAAETL

SEQ ID NO: 57171 - protein, 8 aa, Homo Sapiens
AETLSEVA

SEQ ID NO: 57172 - protein, 9 aa, Homo Sapiens
NLLHETDSA

SEQ ID NO: 57173 - protein, 9 aa, Homo Sapiens
LLHETDSAV

SEQ ID NO: 57174 - protein, 9 aa, Homo Sapiens
ETDSAVATA

SEQ ID NO: 57175 - protein, 9 aa, Homo Sapiens
TDSAVATAR

SEQ ID NO: 57176 - protein, 9 aa, Homo Sapiens
DSAVATARR

SEQ ID NO: 57177 - protein, 9 aa, Homo Sapiens
AVATARRPR

SEQ ID NO: 57178 - protein, 9 aa, Homo Sapiens
VATARRPRW

SEQ ID NO: 57179 - protein, 9 aa, Homo Sapiens
ATARRPRWL

SEQ ID NO: 57180 - protein, 9 aa, Homo Sapiens
ARRPRWLCA

SEQ ID NO: 57181 - protein, 9 aa, Homo Sapiens
RPRWLCAGA

SEQ ID NO: 57182 - protein, 9 aa, Homo Sapiens
WLCAGALVL

SEQ ID NO: 57183 - protein, 9 aa, Homo Sapiens
LCAGALVLA

SEQ ID NO: 57184 - protein, 9 aa, Homo Sapiens
LVLAGGFFL

SEQ ID NO: 57185 - protein, 9 aa, Homo Sapiens
VLAGGFFLL

SEQ ID NO: 57186 - protein, 9 aa, Homo Sapiens
GGFFLLGFL

SEQ ID NO: 57187 - protein, 9 aa, Homo Sapiens
GFFLLGFLF

SEQ ID NO: 57188 - protein, 9 aa, Homo Sapiens
FLLGFLFGW

SEQ ID NO: 57189 - protein, 9 aa, Homo Sapiens
LGFLFGWFI

SEQ ID NO: 57190 - protein, 9 aa, Homo Sapiens
GFLFGWFIK

SEQ ID NO: 57191 - protein, 9 aa, Homo Sapiens
FLFGWFIKS

SEQ ID NO: 57192 - protein, 9 aa, Homo Sapiens
KSSNEATNI

SEQ ID NO: 57193 - protein, 9 aa, Homo Sapiens
EATNITPKH

SEQ ID NO: 57194 - protein, 9 aa, Homo Sapiens
NITPKHNMK

SEQ ID NO: 57195 - protein, 9 aa, Homo Sapiens
TPKHNMKAF

SEQ ID NO: 57196 - protein, 9 aa, Homo Sapiens
NMKAFLDEL

SEQ ID NO: 57197 - protein, 9 aa, Homo Sapiens
MKAFLDELK

SEQ ID NO: 57198 - protein, 9 aa, Homo Sapiens
FLDELKAEN

SEQ ID NO: 57199 - protein, 9 aa, Homo Sapiens
AENIKKFLY

SEQ ID NO: 57200 - protein, 9 aa, Homo Sapiens
NIKKFLYNF

SEQ ID NO: 57201 - protein, 9 aa, Homo Sapiens
KFLYNFTQI

SEQ ID NO: 57202 - protein, 9 aa, Homo Sapiens
FLYNFTQIP

SEQ ID NO: 57203 - protein, 9 aa, Homo Sapiens
TQIPHLAGT

SEQ ID NO: 57204 - protein, 9 aa, Homo Sapiens
HLAGTEQNF

SEQ ID NO: 57205 - protein, 9 aa, Homo Sapiens
TEQNFQLAK

SEQ ID NO: 57206 - protein, 9 aa, Homo Sapiens
FQLAKQIQS

SEQ ID NO: 57207 - protein, 9 aa, Homo Sapiens
QLAKQIQSQ

SEQ ID NO: 57208 - protein, 9 aa, Homo Sapiens
LAKQIQSQW

SEQ ID NO: 57209 - protein, 9 aa, Homo Sapiens
KQIQSQWKE

SEQ ID NO: 57210 - protein, 9 aa, Homo Sapiens
QIQSQWKEF

SEQ ID NO: 57211 - protein, 9 aa, Homo Sapiens
WKEFGLDSV

SEQ ID NO: 57212 - protein, 9 aa, Homo Sapiens
VELAHYDVL

SEQ ID NO: 57213 - protein, 9 aa, Homo Sapiens
ELAHYDVLL

SEQ ID NO: 57214 - protein, 9 aa, Homo Sapiens
DVLLSYPNK

SEQ ID NO: 57215 - protein, 9 aa, Homo Sapiens
VLLSYPNKT

SEQ ID NO: 57216 - protein, 9 aa, Homo Sapiens
YPNKTHPNY

SEQ ID NO: 57217 - protein, 9 aa, Homo Sapiens
KTHPNYISI

SEQ ID NO: 57218 - protein, 9 aa, Homo Sapiens
NEIFNTSLF

SEQ ID NO: 57219 - protein, 9 aa, Homo Sapiens
EIFNTSLFE

SEQ ID NO: 57220 - protein, 9 aa, Homo Sapiens
SLFEPPPPG

SEQ ID NO: 57221 - protein, 9 aa, Homo Sapiens
PPPPGYENV

SEQ ID NO: 57222 - protein, 9 aa, Homo Sapiens
NVSDIVPPF

SEQ ID NO: 57223 - protein, 9 aa, Homo Sapiens
DIVPPFSAF

SEQ ID NO: 57224 - protein, 9 aa, Homo Sapiens
VPPFSAFSP

SEQ ID NO: 57225 - protein, 9 aa, Homo Sapiens
FSAFSPQGM

SEQ ID NO: 57226 - protein, 9 aa, Homo Sapiens
QGMPEGDLV

SEQ ID NO: 57227 - protein, 9 aa, Homo Sapiens
GMPEGDLVY

SEQ ID NO: 57228 - protein, 9 aa, Homo Sapiens
MPEGDLVYV

SEQ ID NO: 57229 - protein, 9 aa, Homo Sapiens
EGDLVYVNY

SEQ ID NO: 57230 - protein, 9 aa, Homo Sapiens
DLVYVNYAR

SEQ ID NO: 57231 - protein, 9 aa, Homo Sapiens
NYARTEDFF

SEQ ID NO: 57232 - protein, 9 aa, Homo Sapiens
YARTEDFFK

SEQ ID NO: 57233 - protein, 9 aa, Homo Sapiens
FFKLERDMK

SEQ ID NO: 57234 - protein, 9 aa, Homo Sapiens
DMKINCSGK

SEQ ID NO: 57235 - protein, 9 aa, Homo Sapiens
KINCSGKIV

SEQ ID NO: 57236 - protein, 9 aa, Homo Sapiens
CSGKIVIAR

SEQ ID NO: 57237 - protein, 9 aa, Homo Sapiens
KIVIARYGK

SEQ ID NO: 57238 - protein, 9 aa, Homo Sapiens
IVIARYGKV

SEQ ID NO: 57239 - protein, 9 aa, Homo Sapiens
VIARYGKVF

SEQ ID NO: 57240 - protein, 9 aa, Homo Sapiens
IARYGKVFR

SEQ ID NO: 57241 - protein, 9 aa, Homo Sapiens
YGKVFRGNK

SEQ ID NO: 57242 - protein, 9 aa, Homo Sapiens
KVFRGNKVK

SEQ ID NO: 57243 - protein, 9 aa, Homo Sapiens
AQLAGAKGV

SEQ ID NO: 57244 - protein, 9 aa, Homo Sapiens
QLAGAKGVI

SEQ ID NO: 57245 - protein, 9 aa, Homo Sapiens
GVILYSDPA

SEQ ID NO: 57246 - protein, 9 aa, Homo Sapiens
ILYSDPADY

SEQ ID NO: 57247 - protein, 9 aa, Homo Sapiens
LYSDPADYF

SEQ ID NO: 57248 - protein, 9 aa, Homo Sapiens
YSDPADYFA

SEQ ID NO: 57249 - protein, 9 aa, Homo Sapiens
DPADYFAPG

SEQ ID NO: 57250 - protein, 9 aa, Homo Sapiens
PADYFAPGV

SEQ ID NO: 57251 - protein, 9 aa, Homo Sapiens
YFAPGVKSY

SEQ ID NO: 57252 - protein, 9 aa, Homo Sapiens
KSYPDGWNL

SEQ ID NO: 57253 - protein, 9 aa, Homo Sapiens
YPDGWNLPG

SEQ ID NO: 57254 - protein, 9 aa, Homo Sapiens
NLPGGGVQR

SEQ ID NO: 57255 - protein, 9 aa, Homo Sapiens
VQRGNILNL

SEQ ID NO: 57256 - protein, 9 aa, Homo Sapiens
NLNGAGDPL

SEQ ID NO: 57257 - protein, 9 aa, Homo Sapiens
DPLTPGYPA

SEQ ID NO: 57258 - protein, 9 aa, Homo Sapiens
TPGYPANEY

SEQ ID NO: 57259 - protein, 9 aa, Homo Sapiens
GYPANEYAY

SEQ ID NO: 57260 - protein, 9 aa, Homo Sapiens
YPANEYAYR

SEQ ID NO: 57261 - protein, 9 aa, Homo Sapiens
PANEYAYRR

SEQ ID NO: 57262 - protein, 9 aa, Homo Sapiens
NEYAYRRGI

SEQ ID NO: 57263 - protein, 9 aa, Homo Sapiens
AEAVGLPSI

SEQ ID NO: 57264 - protein, 9 aa, Homo Sapiens
AVGLPSIPV

SEQ ID NO: 57265 - protein, 9 aa, Homo Sapiens
LPSIPVHPI

SEQ ID NO: 57266 - protein, 9 aa, Homo Sapiens
SIPVHPIGY

SEQ ID NO: 57267 - protein, 9 aa, Homo Sapiens
IPVHPIGYY

SEQ ID NO: 57268 - protein, 9 aa, Homo Sapiens
HPIGYYDAQ

SEQ ID NO: 57269 - protein, 9 aa, Homo Sapiens
GYYDAQKLL

SEQ ID NO: 57270 - protein, 9 aa, Homo Sapiens
KLLEKMGGS

SEQ ID NO: 57271 - protein, 9 aa, Homo Sapiens
GSAPPDSSW

SEQ ID NO: 57272 - protein, 9 aa, Homo Sapiens
SAPPDSSWR

SEQ ID NO: 57273 - protein, 9 aa, Homo Sapiens
DSSWRGSLK

SEQ ID NO: 57274 - protein, 9 aa, Homo Sapiens
SSWRGSLKV

SEQ ID NO: 57275 - protein, 9 aa, Homo Sapiens
WRGSLKVPY

SEQ ID NO: 57276 - protein, 9 aa, Homo Sapiens
VPYNVGPGF

SEQ ID NO: 57277 - protein, 9 aa, Homo Sapiens
FTGNFSTQK

SEQ ID NO: 57278 - protein, 9 aa, Homo Sapiens
TGNFSTQKV

SEQ ID NO: 57279 - protein, 9 aa, Homo Sapiens
KVKMHIHST

SEQ ID NO: 57280 - protein, 9 aa, Homo Sapiens
STNEVTRIY

SEQ ID NO: 57281 - protein, 9 aa, Homo Sapiens
EVTRIYNVI

SEQ ID NO: 57282 - protein, 9 aa, Homo Sapiens
RIYNVIGTL

SEQ ID NO: 57283 - protein, 9 aa, Homo Sapiens
IYNVIGTLR

SEQ ID NO: 57284 - protein, 9 aa, Homo Sapiens
NVIGTLRGA

SEQ ID NO: 57285 - protein, 9 aa, Homo Sapiens
VIGTLRGAV

SEQ ID NO: 57286 - protein, 9 aa, Homo Sapiens
RGAVEPDRY

SEQ ID NO: 57287 - protein, 9 aa, Homo Sapiens
AVEPDRYVI

SEQ ID NO: 57288 - protein, 9 aa, Homo Sapiens
VEPDRYVIL

SEQ ID NO: 57289 - protein, 9 aa, Homo Sapiens
RYVILGGHR

SEQ ID NO: 57290 - protein, 9 aa, Homo Sapiens
WVFGGIDPQ

SEQ ID NO: 57291 - protein, 9 aa, Homo Sapiens
GIDPQSGAA

SEQ ID NO: 57292 - protein, 9 aa, Homo Sapiens
SGAAVVHEI

SEQ ID NO: 57293 - protein, 9 aa, Homo Sapiens
GAAVVHEIV

SEQ ID NO: 57294 - protein, 9 aa, Homo Sapiens
AAVVHEIVR

SEQ ID NO: 57295 - protein, 9 aa, Homo Sapiens
VVHEIVRSF

SEQ ID NO: 57296 - protein, 9 aa, Homo Sapiens
EIVRSFGTL

SEQ ID NO: 57297 - protein, 9 aa, Homo Sapiens
IVRSFGTLK

SEQ ID NO: 57298 - protein, 9 aa, Homo Sapiens
GTLKKEGWR

SEQ ID NO: 57299 - protein, 9 aa, Homo Sapiens
RPRRTILFA

SEQ ID NO: 57300 - protein, 9 aa, Homo Sapiens
RRTILFASW

SEQ ID NO: 57301 - protein, 9 aa, Homo Sapiens
FASWDAEEF

SEQ ID NO: 57302 - protein, 9 aa, Homo Sapiens
FGLLGSTEW

SEQ ID NO: 57303 - protein, 9 aa, Homo Sapiens
GLLGSTEWA

SEQ ID NO: 57304 - protein, 9 aa, Homo Sapiens
LLGSTEWAE

SEQ ID NO: 57305 - protein, 9 aa, Homo Sapiens
WAEENSRLL

SEQ ID NO: 57306 - protein, 9 aa, Homo Sapiens
AEENSRLLQ

SEQ ID NO: 57307 - protein, 9 aa, Homo Sapiens
ENSRLLQER

SEQ ID NO: 57308 - protein, 9 aa, Homo Sapiens
RLLQERGVA

SEQ ID NO: 57309 - protein, 9 aa, Homo Sapiens
LLQERGVAY

SEQ ID NO: 57310 - protein, 9 aa, Homo Sapiens
LQERGVAYI

SEQ ID NO: 57311 - protein, 9 aa, Homo Sapiens
AYINADSSI

SEQ ID NO: 57312 - protein, 9 aa, Homo Sapiens
SSIEGNYTL

SEQ ID NO: 57313 - protein, 9 aa, Homo Sapiens
SIEGNYTLR

SEQ ID NO: 57314 - protein, 9 aa, Homo Sapiens
IEGNYTLRV

SEQ ID NO: 57315 - protein, 9 aa, Homo Sapiens
TLRVDCTPL

SEQ ID NO: 57316 - protein, 9 aa, Homo Sapiens
RVDCTPLMY

SEQ ID NO: 57317 - protein, 9 aa, Homo Sapiens
DCTPLMYSL

SEQ ID NO: 57318 - protein, 9 aa, Homo Sapiens
CTPLMYSLV

SEQ ID NO: 57319 - protein, 9 aa, Homo Sapiens
TPLMYSLVH

SEQ ID NO: 57320 - protein, 9 aa, Homo Sapiens
LMYSLVHNL

SEQ ID NO: 57321 - protein, 9 aa, Homo Sapiens
YSLVHNLTK

SEQ ID NO: 57322 - protein, 9 aa, Homo Sapiens
LVHNLTKEL

SEQ ID NO: 57323 - protein, 9 aa, Homo Sapiens
ELKSPDEGF

SEQ ID NO: 57324 - protein, 9 aa, Homo Sapiens
EGFEGKSLY

SEQ ID NO: 57325 - protein, 9 aa, Homo Sapiens
KSLYESWTK

SEQ ID NO: 57326 - protein, 9 aa, Homo Sapiens
SLYESWTKK

SEQ ID NO: 57327 - protein, 9 aa, Homo Sapiens
SPSPEFSGM

SEQ ID NO: 57328 - protein, 9 aa, Homo Sapiens
FSGMPRISK

SEQ ID NO: 57329 - protein, 9 aa, Homo Sapiens
SGMPRISKL

SEQ ID NO: 57330 - protein, 9 aa, Homo Sapiens
MPRISKLGS

SEQ ID NO: 57331 - protein, 9 aa, Homo Sapiens
LGSGNDFEV

SEQ ID NO: 57332 - protein, 9 aa, Homo Sapiens
NDFEVFFQR

SEQ ID NO: 57333 - protein, 9 aa, Homo Sapiens
EVFFQRLGI

SEQ ID NO: 57334 - protein, 9 aa, Homo Sapiens
QRLGIASGR

SEQ ID NO: 57335 - protein, 9 aa, Homo Sapiens
RLGIASGRA

SEQ ID NO: 57336 - protein, 9 aa, Homo Sapiens
GIASGRARY

SEQ ID NO: 57337 - protein, 9 aa, Homo Sapiens
ASGRARYTK

SEQ ID NO: 57338 - protein, 9 aa, Homo Sapiens
YTKNWETNK

SEQ ID NO: 57339 - protein, 9 aa, Homo Sapiens
WETNKFSGY

SEQ ID NO: 57340 - protein, 9 aa, Homo Sapiens
SGYPLYHSV

SEQ ID NO: 57341 - protein, 9 aa, Homo Sapiens
YPLYHSVYE

SEQ ID NO: 57342 - protein, 9 aa, Homo Sapiens
PLYHSVYET

SEQ ID NO: 57343 - protein, 9 aa, Homo Sapiens
LYHSVYETY

SEQ ID NO: 57344 - protein, 9 aa, Homo Sapiens
HSVYETYEL

SEQ ID NO: 57345 - protein, 9 aa, Homo Sapiens
SVYETYELV

SEQ ID NO: 57346 - protein, 9 aa, Homo Sapiens
ETYELVEKF

SEQ ID NO: 57347 - protein, 9 aa, Homo Sapiens
TYELVEKFY

SEQ ID NO: 57348 - protein, 9 aa, Homo Sapiens
LVEKFYDPM

SEQ ID NO: 57349 - protein, 9 aa, Homo Sapiens
VEKFYDPMF

SEQ ID NO: 57350 - protein, 9 aa, Homo Sapiens
EKFYDPMFK

SEQ ID NO: 57351 - protein, 9 aa, Homo Sapiens
KFYDPMFKY

SEQ ID NO: 57352 - protein, 9 aa, Homo Sapiens
PMFKYHLTV

SEQ ID NO: 57353 - protein, 9 aa, Homo Sapiens
KYHLTVAQV

SEQ ID NO: 57354 - protein, 9 aa, Homo Sapiens
TVAQVRGGM

SEQ ID NO: 57355 - protein, 9 aa, Homo Sapiens
AQVRGGMVF

SEQ ID NO: 57356 - protein, 9 aa, Homo Sapiens
QVRGGMVFE

SEQ ID NO: 57357 - protein, 9 aa, Homo Sapiens
GMVFELANS

SEQ ID NO: 57358 - protein, 9 aa, Homo Sapiens
MVFELANSI

SEQ ID NO: 57359 - protein, 9 aa, Homo Sapiens
FELANSIVL

SEQ ID NO: 57360 - protein, 9 aa, Homo Sapiens
LANSIVLPF

SEQ ID NO: 57361 - protein, 9 aa, Homo Sapiens
SIVLPFDCR

SEQ ID NO: 57362 - protein, 9 aa, Homo Sapiens
LPFDCRDYA

SEQ ID NO: 57363 - protein, 9 aa, Homo Sapiens
RDYAVVLRK

SEQ ID NO: 57364 - protein, 9 aa, Homo Sapiens
DYAVVLRKY

SEQ ID NO: 57365 - protein, 9 aa, Homo Sapiens
VVLRKYADK

SEQ ID NO: 57366 - protein, 9 aa, Homo Sapiens
VLRKYADKI

SEQ ID NO: 57367 - protein, 9 aa, Homo Sapiens
KYADKIYSI

SEQ ID NO: 57368 - protein, 9 aa, Homo Sapiens
DKIYSISMK

SEQ ID NO: 57369 - protein, 9 aa, Homo Sapiens
KIYSISMKH

SEQ ID NO: 57370 - protein, 9 aa, Homo Sapiens
ISMKHPQEM

SEQ ID NO: 57371 - protein, 9 aa, Homo Sapiens
SMKHPQEMK

SEQ ID NO: 57372 - protein, 9 aa, Homo Sapiens
EMKTYSVSF

SEQ ID NO: 57373 - protein, 9 aa, Homo Sapiens
TYSVSFDSL

SEQ ID NO: 57374 - protein, 9 aa, Homo Sapiens
YSVSFDSLF

SEQ ID NO: 57375 - protein, 9 aa, Homo Sapiens
VSFDSLFSA

SEQ ID NO: 57376 - protein, 9 aa, Homo Sapiens
SFDSLFSAV

SEQ ID NO: 57377 - protein, 9 aa, Homo Sapiens
SLFSAVKNF

SEQ ID NO: 57378 - protein, 9 aa, Homo Sapiens
SAVKNFTEI

SEQ ID NO: 57379 - protein, 9 aa, Homo Sapiens
AVKNFTEIA

SEQ ID NO: 57380 - protein, 9 aa, Homo Sapiens
NFTEIASKF

SEQ ID NO: 57381 - protein, 9 aa, Homo Sapiens
EIASKFSER

SEQ ID NO: 57382 - protein, 9 aa, Homo Sapiens
IASKFSERL

SEQ ID NO: 57383 - protein, 9 aa, Homo Sapiens
KFSERLQDF

SEQ ID NO: 57384 - protein, 9 aa, Homo Sapiens
KSNPIVLRM

SEQ ID NO: 57385 - protein, 9 aa, Homo Sapiens
VLRMMNDQL

SEQ ID NO: 57386 - protein, 9 aa, Homo Sapiens
RMMNDQLMF

SEQ ID NO: 57387 - protein, 9 aa, Homo Sapiens
MMNDQLMFL

SEQ ID NO: 57388 - protein, 9 aa, Homo Sapiens
QLMFLERAF

SEQ ID NO: 57389 - protein, 9 aa, Homo Sapiens
LMFLERAFI

SEQ ID NO: 57390 - protein, 9 aa, Homo Sapiens
LERAFIDPL

SEQ ID NO: 57391 - protein, 9 aa, Homo Sapiens
RAFIDPLGL

SEQ ID NO: 57392 - protein, 9 aa, Homo Sapiens
GLPDRPFYR

SEQ ID NO: 57393 - protein, 9 aa, Homo Sapiens
RPFYRHVIY

SEQ ID NO: 57394 - protein, 9 aa, Homo Sapiens
YRHVIYAPS

SEQ ID NO: 57395 - protein, 9 aa, Homo Sapiens
IYAPSSHNK

SEQ ID NO: 57396 - protein, 9 aa, Homo Sapiens
YAPSSHNKY

SEQ ID NO: 57397 - protein, 9 aa, Homo Sapiens
APSSHNKYA

SEQ ID NO: 57398 - protein, 9 aa, Homo Sapiens
YAGESFPGI

SEQ ID NO: 57399 - protein, 9 aa, Homo Sapiens
ESFPGIYDA

SEQ ID NO: 57400 - protein, 9 aa, Homo Sapiens
SFPGIYDAL

SEQ ID NO: 57401 - protein, 9 aa, Homo Sapiens
FPGIYDALF

SEQ ID NO: 57402 - protein, 9 aa, Homo Sapiens
GIYDALFDI

SEQ ID NO: 57403 - protein, 9 aa, Homo Sapiens
DALFDIESK

SEQ ID NO: 57404 - protein, 9 aa, Homo Sapiens
ALFDIESKV

SEQ ID NO: 57405 - protein, 9 aa, Homo Sapiens
GEVKRQIYV

SEQ ID NO: 57406 - protein, 9 aa, Homo Sapiens
EVKRQIYVA

SEQ ID NO: 57407 - protein, 9 aa, Homo Sapiens
KRQIYVAAF

SEQ ID NO: 57408 - protein, 9 aa, Homo Sapiens
RQIYVAAFT

SEQ ID NO: 57409 - protein, 9 aa, Homo Sapiens
QIYVAAFTV

SEQ ID NO: 57410 - protein, 9 aa, Homo Sapiens
YVAAFTVQA

SEQ ID NO: 57411 - protein, 9 aa, Homo Sapiens
FTVQAAAET

SEQ ID NO: 57412 - protein, 9 aa, Homo Sapiens
TVQAAAETL

SEQ ID NO: 57413 - protein, 9 aa, Homo Sapiens
AAAETLSEV

SEQ ID NO: 57414 - protein, 10 aa, Homo Sapiens
NLLHETDSAV

SEQ ID NO: 57415 - protein, 10 aa, Homo Sapiens
LLHETDSAVA

SEQ ID NO: 57416 - protein, 10 aa, Homo Sapiens
ETDSAVATAR

SEQ ID NO: 57417 - protein, 10 aa, Homo Sapiens
TDSAVATARR

SEQ ID NO: 57418 - protein, 10 aa, Homo Sapiens
SAVATARRPR

SEQ ID NO: 57419 - protein, 10 aa, Homo Sapiens
AVATARRPRW

SEQ ID NO: 57420 - protein, 10 aa, Homo Sapiens
TARRPRWLCA

SEQ ID NO: 57421 - protein, 10 aa, Homo Sapiens
RPRWLCAGAL

SEQ ID NO: 57422 - protein, 10 aa, Homo Sapiens
RWLCAGALVL

SEQ ID NO: 57423 - protein, 10 aa, Homo Sapiens
WLCAGALVLA

SEQ ID NO: 57424 - protein, 10 aa, Homo Sapiens
ALVLAGGFFL

SEQ ID NO: 57425 - protein, 10 aa, Homo Sapiens
LVLAGGFFLL

SEQ ID NO: 57426 - protein, 10 aa, Homo Sapiens
VLAGGFFLLG

SEQ ID NO: 57427 - protein, 10 aa, Homo Sapiens
LAGGFFLLGF

SEQ ID NO: 57428 - protein, 10 aa, Homo Sapiens
FFLLGFLFGW

SEQ ID NO: 57429 - protein, 10 aa, Homo Sapiens
FLLGFLFGWF

SEQ ID NO: 57430 - protein, 10 aa, Homo Sapiens
LLGFLFGWFI

SEQ ID NO: 57431 - protein, 10 aa, Homo Sapiens
LGFLFGWFIK

SEQ ID NO: 57432 - protein, 10 aa, Homo Sapiens
FLFGWFIKSS

SEQ ID NO: 57433 - protein, 10 aa, Homo Sapiens
ITPKHNMKAF

SEQ ID NO: 57434 - protein, 10 aa, Homo Sapiens
TPKHNMKAFL

SEQ ID NO: 57435 - protein, 10 aa, Homo Sapiens
NMKAFLDELK

SEQ ID NO: 57436 - protein, 10 aa, Homo Sapiens
FLDELKAENI

SEQ ID NO: 57437 - protein, 10 aa, Homo Sapiens
ELKAENIKKF

SEQ ID NO: 57438 - protein, 10 aa, Homo Sapiens
ENIKKFLYNF

SEQ ID NO: 57439 - protein, 10 aa, Homo Sapiens
FLYNFTQIPH

SEQ ID NO: 57440 - protein, 10 aa, Homo Sapiens
LYNFTQIPHL

SEQ ID NO: 57441 - protein, 10 aa, Homo Sapiens
TQIPHLAGTE

SEQ ID NO: 57442 - protein, 10 aa, Homo Sapiens
HLAGTEQNFQ

SEQ ID NO: 57443 - protein, 10 aa, Homo Sapiens
GTEQNFQLAK

SEQ ID NO: 57444 - protein, 10 aa, Homo Sapiens
FQLAKQIQSQ

SEQ ID NO: 57445 - protein, 10 aa, Homo Sapiens
QLAKQIQSQW

SEQ ID NO: 57446 - protein, 10 aa, Homo Sapiens
LAKQIQSQWK

SEQ ID NO: 57447 - protein, 10 aa, Homo Sapiens
KQIQSQWKEF

SEQ ID NO: 57448 - protein, 10 aa, Homo Sapiens
IQSQWKEFGL

SEQ ID NO: 57449 - protein, 10 aa, Homo Sapiens
KEFGLDSVEL

SEQ ID NO: 57450 - protein, 10 aa, Homo Sapiens
GLDSVELAHY

SEQ ID NO: 57451 - protein, 10 aa, Homo Sapiens
DSVELAHYDV

SEQ ID NO: 57452 - protein, 10 aa, Homo Sapiens
VELAHYDVLL

SEQ ID NO: 57453 - protein, 10 aa, Homo Sapiens
LAHYDVLLSY

SEQ ID NO: 57454 - protein, 10 aa, Homo Sapiens
SYPNKTHPNY

SEQ ID NO: 57455 - protein, 10 aa, Homo Sapiens
YPNKTHPNYI

SEQ ID NO: 57456 - protein, 10 aa, Homo Sapiens
KTHPNYISII

SEQ ID NO: 57457 - protein, 10 aa, Homo Sapiens
IINEDGNEIF

SEQ ID NO: 57458 - protein, 10 aa, Homo Sapiens
DGNEIFNTSL

SEQ ID NO: 57459 - protein, 10 aa, Homo Sapiens
SLFEPPPPGY

SEQ ID NO: 57460 - protein, 10 aa, Homo Sapiens
EPPPPGYENV

SEQ ID NO: 57461 - protein, 10 aa, Homo Sapiens
DIVPPFSAFS

SEQ ID NO: 57462 - protein, 10 aa, Homo Sapiens
SPQGMPEGDL

SEQ ID NO: 57463 - protein, 10 aa, Homo Sapiens
QGMPEGDLVY

SEQ ID NO: 57464 - protein, 10 aa, Homo Sapiens
GMPEGDLVYV

SEQ ID NO: 57465 - protein, 10 aa, Homo Sapiens
MPEGDLVYVN

SEQ ID NO: 57466 - protein, 10 aa, Homo Sapiens
YVNYARTEDF

SEQ ID NO: 57467 - protein, 10 aa, Homo Sapiens
NYARTEDFFK

SEQ ID NO: 57468 - protein, 10 aa, Homo Sapiens
RTEDFFKLER

SEQ ID NO: 57469 - protein, 10 aa, Homo Sapiens
DFFKLERDMK

SEQ ID NO: 57470 - protein, 10 aa, Homo Sapiens
NCSGKIVIAR

SEQ ID NO: 57471 - protein, 10 aa, Homo Sapiens
KIVIARYGKV

SEQ ID NO: 57472 - protein, 10 aa, Homo Sapiens
IVIARYGKVF

SEQ ID NO: 57473 - protein, 10 aa, Homo Sapiens
VIARYGKVFR

SEQ ID NO: 57474 - protein, 10 aa, Homo Sapiens
RYGKVFRGNK

SEQ ID NO: 57475 - protein, 10 aa, Homo Sapiens
KVKNAQLAGA

SEQ ID NO: 57476 - protein, 10 aa, Homo Sapiens
AQLAGAKGVI

SEQ ID NO: 57477 - protein, 10 aa, Homo Sapiens
QLAGAKGVIL

SEQ ID NO: 57478 - protein, 10 aa, Homo Sapiens
LAGAKGVILY

SEQ ID NO: 57479 - protein, 10 aa, Homo Sapiens
VILYSDPADY

SEQ ID NO: 57480 - protein, 10 aa, Homo Sapiens
ILYSDPADYF

SEQ ID NO: 57481 - protein, 10 aa, Homo Sapiens
DPADYFAPGV

SEQ ID NO: 57482 - protein, 10 aa, Homo Sapiens
DYFAPGVKSY

SEQ ID NO: 57483 - protein, 10 aa, Homo Sapiens
DGWNLPGGGV

SEQ ID NO: 57484 - protein, 10 aa, Homo Sapiens
NLPGGGVQRG

SEQ ID NO: 57485 - protein, 10 aa, Homo Sapiens
GVQRGNILNL

SEQ ID NO: 57486 - protein, 10 aa, Homo Sapiens
NLNGAGDPLT

SEQ ID NO: 57487 - protein, 10 aa, Homo Sapiens
LTPGYPANEY

SEQ ID NO: 57488 - protein, 10 aa, Homo Sapiens
TPGYPANEYA

SEQ ID NO: 57489 - protein, 10 aa, Homo Sapiens
GYPANEYAYR

SEQ ID NO: 57490 - protein, 10 aa, Homo Sapiens
YPANEYAYRR

SEQ ID NO: 57491 - protein, 10 aa, Homo Sapiens
YAYRRGIAEA

SEQ ID NO: 57492 - protein, 10 aa, Homo Sapiens
RRGIAEAVGL

SEQ ID NO: 57493 - protein, 10 aa, Homo Sapiens
EAVGLPSIPV

SEQ ID NO: 57494 - protein, 10 aa, Homo Sapiens
GLPSIPVHPI

SEQ ID NO: 57495 - protein, 10 aa, Homo Sapiens
SIPVHPIGYY

SEQ ID NO: 57496 - protein, 10 aa, Homo Sapiens
HPIGYYDAQK

SEQ ID NO: 57497 - protein, 10 aa, Homo Sapiens
YYDAQKLLEK

SEQ ID NO: 57498 - protein, 10 aa, Homo Sapiens
KLLEKMGGSA

SEQ ID NO: 57499 - protein, 10 aa, Homo Sapiens
GGSAPPDSSW

SEQ ID NO: 57500 - protein, 10 aa, Homo Sapiens
GSAPPDSSWR

SEQ ID NO: 57501 - protein, 10 aa, Homo Sapiens
PPDSSWRGSL

SEQ ID NO: 57502 - protein, 10 aa, Homo Sapiens
SWRGSLKVPY

SEQ ID NO: 57503 - protein, 10 aa, Homo Sapiens
KVPYNVGPGF

SEQ ID NO: 57504 - protein, 10 aa, Homo Sapiens
VPYNVGPGFT

SEQ ID NO: 57505 - protein, 10 aa, Homo Sapiens
GFTGNFSTQK

SEQ ID NO: 57506 - protein, 10 aa, Homo Sapiens
FTGNFSTQKV

SEQ ID NO: 57507 - protein, 10 aa, Homo Sapiens
TGNFSTQKVK

SEQ ID NO: 57508 - protein, 10 aa, Homo Sapiens
KMHIHSTNEV

SEQ ID NO: 57509 - protein, 10 aa, Homo Sapiens
HIHSTNEVTR

SEQ ID NO: 57510 - protein, 10 aa, Homo Sapiens
HSTNEVTRIY

SEQ ID NO: 57511 - protein, 10 aa, Homo Sapiens
RIYNVIGTLR

SEQ ID NO: 57512 - protein, 10 aa, Homo Sapiens
NVIGTLRGAV

SEQ ID NO: 57513 - protein, 10 aa, Homo Sapiens
TLRGAVEPDR

SEQ ID NO: 57514 - protein, 10 aa, Homo Sapiens
AVEPDRYVIL

SEQ ID NO: 57515 - protein, 10 aa, Homo Sapiens
ILGGHRDSWV

SEQ ID NO: 57516 - protein, 10 aa, Homo Sapiens
GIDPQSGAAV

SEQ ID NO: 57517 - protein, 10 aa, Homo Sapiens
DPQSGAAVVH

SEQ ID NO: 57518 - protein, 10 aa, Homo Sapiens
SGAAVVHEIV

SEQ ID NO: 57519 - protein, 10 aa, Homo Sapiens
GAAVVHEIVR

SEQ ID NO: 57520 - protein, 10 aa, Homo Sapiens
AVVHEIVRSF

SEQ ID NO: 57521 - protein, 10 aa, Homo Sapiens
HEIVRSFGTL

SEQ ID NO: 57522 - protein, 10 aa, Homo Sapiens
EIVRSFGTLK

SEQ ID NO: 57523 - protein, 10 aa, Homo Sapiens
IVRSFGTLKK

SEQ ID NO: 57524 - protein, 10 aa, Homo Sapiens
TLKKEGWRPR

SEQ ID NO: 57525 - protein, 10 aa, Homo Sapiens
GWRPRRTILF

SEQ ID NO: 57526 - protein, 10 aa, Homo Sapiens
RPRRTILFAS

SEQ ID NO: 57527 - protein, 10 aa, Homo Sapiens
LFASWDAEEF

SEQ ID NO: 57528 - protein, 10 aa, Homo Sapiens
ASWDAEEFGL

SEQ ID NO: 57529 - protein, 10 aa, Homo Sapiens
GLLGSTEWAE

SEQ ID NO: 57530 - protein, 10 aa, Homo Sapiens
STEWAEENSR

SEQ ID NO: 57531 - protein, 10 aa, Homo Sapiens
TEWAEENSRL

SEQ ID NO: 57532 - protein, 10 aa, Homo Sapiens
RLLQERGVAY

SEQ ID NO: 57533 - protein, 10 aa, Homo Sapiens
LLQERGVAYI

SEQ ID NO: 57534 - protein, 10 aa, Homo Sapiens
NADSSIEGNY

SEQ ID NO: 57535 - protein, 10 aa, Homo Sapiens
SSIEGNYTLR

SEQ ID NO: 57536 - protein, 10 aa, Homo Sapiens
SIEGNYTLRV

SEQ ID NO: 57537 - protein, 10 aa, Homo Sapiens
YTLRVDCTPL

SEQ ID NO: 57538 - protein, 10 aa, Homo Sapiens
DCTPLMYSLV

SEQ ID NO: 57539 - protein, 10 aa, Homo Sapiens
PLMYSLVHNL

SEQ ID NO: 57540 - protein, 10 aa, Homo Sapiens
LMYSLVHNLT

SEQ ID NO: 57541 - protein, 10 aa, Homo Sapiens
MYSLVHNLTK

SEQ ID NO: 57542 - protein, 10 aa, Homo Sapiens
SLVHNLTKEL

SEQ ID NO: 57543 - protein, 10 aa, Homo Sapiens
LVHNLTKELK

SEQ ID NO: 57544 - protein, 10 aa, Homo Sapiens
KELKSPDEGF

SEQ ID NO: 57545 - protein, 10 aa, Homo Sapiens
KSPDEGFEGK

SEQ ID NO: 57546 - protein, 10 aa, Homo Sapiens
KSLYESWTKK

SEQ ID NO: 57547 - protein, 10 aa, Homo Sapiens
SLYESWTKKS

SEQ ID NO: 57548 - protein, 10 aa, Homo Sapiens
WTKKSPSPEF

SEQ ID NO: 57549 - protein, 10 aa, Homo Sapiens
SPEFSGMPRI

SEQ ID NO: 57550 - protein, 10 aa, Homo Sapiens
EFSGMPRISK

SEQ ID NO: 57551 - protein, 10 aa, Homo Sapiens
MPRISKLGSG

SEQ ID NO: 57552 - protein, 10 aa, Homo Sapiens
ISKLGSGNDF

SEQ ID NO: 57553 - protein, 10 aa, Homo Sapiens
KLGSGNDFEV

SEQ ID NO: 57554 - protein, 10 aa, Homo Sapiens
NDFEVFFQRL

SEQ ID NO: 57555 - protein, 10 aa, Homo Sapiens
FEVFFQRLGI

SEQ ID NO: 57556 - protein, 10 aa, Homo Sapiens
EVFFQRLGIA

SEQ ID NO: 57557 - protein, 10 aa, Homo Sapiens
FQRLGIASGR

SEQ ID NO: 57558 - protein, 10 aa, Homo Sapiens
RLGIASGRAR

SEQ ID NO: 57559 - protein, 10 aa, Homo Sapiens
IASGRARYTK

SEQ ID NO: 57560 - protein, 10 aa, Homo Sapiens
RYTKNWETNK

SEQ ID NO: 57561 - protein, 10 aa, Homo Sapiens
YTKNWETNKF

SEQ ID NO: 57562 - protein, 10 aa, Homo Sapiens
ETNKFSGYPL

SEQ ID NO: 57563 - protein, 10 aa, Homo Sapiens
FSGYPLYHSV

SEQ ID NO: 57564 - protein, 10 aa, Homo Sapiens
SGYPLYHSVY

SEQ ID NO: 57565 - protein, 10 aa, Homo Sapiens
YPLYHSVYET

SEQ ID NO: 57566 - protein, 10 aa, Homo Sapiens
PLYHSVYETY

SEQ ID NO: 57567 - protein, 10 aa, Homo Sapiens
YHSVYETYEL

SEQ ID NO: 57568 - protein, 10 aa, Homo Sapiens
HSVYETYELV

SEQ ID NO: 57569 - protein, 10 aa, Homo Sapiens
VYETYELVEK

SEQ ID NO: 57570 - protein, 10 aa, Homo Sapiens
YETYELVEKF

SEQ ID NO: 57571 - protein, 10 aa, Homo Sapiens
ETYELVEKFY

SEQ ID NO: 57572 - protein, 10 aa, Homo Sapiens
ELVEKFYDPM

SEQ ID NO: 57573 - protein, 10 aa, Homo Sapiens
LVEKFYDPMF

SEQ ID NO: 57574 - protein, 10 aa, Homo Sapiens
EKFYDPMFKY

SEQ ID NO: 57575 - protein, 10 aa, Homo Sapiens
KFYDPMFKYH

SEQ ID NO: 57576 - protein, 10 aa, Homo Sapiens
FYDPMFKYHL

SEQ ID NO: 57577 - protein, 10 aa, Homo Sapiens
DPMFKYHLTV

SEQ ID NO: 57578 - protein, 10 aa, Homo Sapiens
PMFKYHLTVA

SEQ ID NO: 57579 - protein, 10 aa, Homo Sapiens
FKYHLTVAQV

SEQ ID NO: 57580 - protein, 10 aa, Homo Sapiens
KYHLTVAQVR

SEQ ID NO: 57581 - protein, 10 aa, Homo Sapiens
LTVAQVRGGM

SEQ ID NO: 57582 - protein, 10 aa, Homo Sapiens
TVAQVRGGMV

SEQ ID NO: 57583 - protein, 10 aa, Homo Sapiens
VAQVRGGMVF

SEQ ID NO: 57584 - protein, 10 aa, Homo Sapiens
AQVRGGMVFE

SEQ ID NO: 57585 - protein, 10 aa, Homo Sapiens
QVRGGMVFEL

SEQ ID NO: 57586 - protein, 10 aa, Homo Sapiens
GMVFELANSI

SEQ ID NO: 57587 - protein, 10 aa, Homo Sapiens
MVFELANSIV

SEQ ID NO: 57588 - protein, 10 aa, Homo Sapiens
VFELANSIVL

SEQ ID NO: 57589 - protein, 10 aa, Homo Sapiens
ELANSIVLPF

SEQ ID NO: 57590 - protein, 10 aa, Homo Sapiens
NSIVLPFDCR

SEQ ID NO: 57591 - protein, 10 aa, Homo Sapiens
IVLPFDCRDY

SEQ ID NO: 57592 - protein, 10 aa, Homo Sapiens
VLPFDCRDYA

SEQ ID NO: 57593 - protein, 10 aa, Homo Sapiens
LPFDCRDYAV

SEQ ID NO: 57594 - protein, 10 aa, Homo Sapiens
DCRDYAVVLR

SEQ ID NO: 57595 - protein, 10 aa, Homo Sapiens
AVVLRKYADK

SEQ ID NO: 57596 - protein, 10 aa, Homo Sapiens
YADKIYSISM

SEQ ID NO: 57597 - protein, 10 aa, Homo Sapiens
SISMKHPQEM

SEQ ID NO: 57598 - protein, 10 aa, Homo Sapiens
ISMKHPQEMK

SEQ ID NO: 57599 - protein, 10 aa, Homo Sapiens
HPQEMKTYSV

SEQ ID NO: 57600 - protein, 10 aa, Homo Sapiens
QEMKTYSVSF

SEQ ID NO: 57601 - protein, 10 aa, Homo Sapiens
KTYSVSFDSL

SEQ ID NO: 57602 - protein, 10 aa, Homo Sapiens
TYSVSFDSLF

SEQ ID NO: 57603 - protein, 10 aa, Homo Sapiens
SVSFDSLFSA

SEQ ID NO: 57604 - protein, 10 aa, Homo Sapiens
VSFDSLFSAV

SEQ ID NO: 57605 - protein, 10 aa, Homo Sapiens
SFDSLFSAVK

SEQ ID NO: 57606 - protein, 10 aa, Homo Sapiens
SLFSAVKNFT

SEQ ID NO: 57607 - protein, 10 aa, Homo Sapiens
FSAVKNFTEI

SEQ ID NO: 57608 - protein, 10 aa, Homo Sapiens
TEIASKFSER

SEQ ID NO: 57609 - protein, 10 aa, Homo Sapiens
EIASKFSERL

SEQ ID NO: 57610 - protein, 10 aa, Homo Sapiens
FSERLQDFDK

SEQ ID NO: 57611 - protein, 10 aa, Homo Sapiens
LQDFDKSNPI

SEQ ID NO: 57612 - protein, 10 aa, Homo Sapiens
KSNPIVLRMM

SEQ ID NO: 57613 - protein, 10 aa, Homo Sapiens
IVLRMMNDQL

SEQ ID NO: 57614 - protein, 10 aa, Homo Sapiens
VLRMMNDQLM

SEQ ID NO: 57615 - protein, 10 aa, Homo Sapiens
RMMNDQLMFL

SEQ ID NO: 57616 - protein, 10 aa, Homo Sapiens
MMNDQLMFLE

SEQ ID NO: 57617 - protein, 10 aa, Homo Sapiens
MNDQLMFLER

SEQ ID NO: 57618 - protein, 10 aa, Homo Sapiens
QLMFLERAFI

SEQ ID NO: 57619 - protein, 10 aa, Homo Sapiens
FLERAFIDPL

SEQ ID NO: 57620 - protein, 10 aa, Homo Sapiens
ERAFIDPLGL

SEQ ID NO: 57621 - protein, 10 aa, Homo Sapiens
DPLGLPDRPF

SEQ ID NO: 57622 - protein, 10 aa, Homo Sapiens
LGLPDRPFYR

SEQ ID NO: 57623 - protein, 10 aa, Homo Sapiens
LPDRPFYRHV

SEQ ID NO: 57624 - protein, 10 aa, Homo Sapiens
RPFYRHVIYA

SEQ ID NO: 57625 - protein, 10 aa, Homo Sapiens
FYRHVIYAPS

SEQ ID NO: 57626 - protein, 10 aa, Homo Sapiens
VIYAPSSHNK

SEQ ID NO: 57627 - protein, 10 aa, Homo Sapiens
IYAPSSHNKY

SEQ ID NO: 57628 - protein, 10 aa, Homo Sapiens
APSSHNKYAG

SEQ ID NO: 57629 - protein, 10 aa, Homo Sapiens
KYAGESFPGI

SEQ ID NO: 57630 - protein, 10 aa, Homo Sapiens
YAGESFPGIY

SEQ ID NO: 57631 - protein, 10 aa, Homo Sapiens
ESFPGIYDAL

SEQ ID NO: 57632 - protein, 10 aa, Homo Sapiens
SFPGIYDALF

SEQ ID NO: 57633 - protein, 10 aa, Homo Sapiens
DALFDIESKV

SEQ ID NO: 57634 - protein, 10 aa, Homo Sapiens
DIESKVDPSK

SEQ ID NO: 57635 - protein, 10 aa, Homo Sapiens
GEVKRQIYVA

SEQ ID NO: 57636 - protein, 10 aa, Homo Sapiens
EVKRQIYVAA

SEQ ID NO: 57637 - protein, 10 aa, Homo Sapiens
VKRQIYVAAF

SEQ ID NO: 57638 - protein, 10 aa, Homo Sapiens
RQIYVAAFTV

SEQ ID NO: 57639 - protein, 10 aa, Homo Sapiens
YVAAFTVQAA

SEQ ID NO: 57640 - protein, 10 aa, Homo Sapiens
FTVQAAAETL

SEQ ID NO: 57641 - protein, 10 aa, Homo Sapiens
VQAAAETLSE

SEQ ID NO: 57642 - protein, 10 aa, Homo Sapiens
QAAAETLSEV

SEQ ID NO: 57643 - protein, 10 aa, Homo Sapiens
AAAETLSEVA

SEQ ID NO: 57644 - protein, 11 aa, Homo Sapiens
NLLHETDSAVA

SEQ ID NO: 57645 - protein, 11 aa, Homo Sapiens
LLHETDSAVAT

SEQ ID NO: 57646 - protein, 11 aa, Homo Sapiens
HETDSAVATAR

SEQ ID NO: 57647 - protein, 11 aa, Homo Sapiens
ETDSAVATARR

SEQ ID NO: 57648 - protein, 11 aa, Homo Sapiens
DSAVATARRPR

SEQ ID NO: 57649 - protein, 11 aa, Homo Sapiens
SAVATARRPRW

SEQ ID NO: 57650 - protein, 11 aa, Homo Sapiens
AVATARRPRWL

SEQ ID NO: 57651 - protein, 11 aa, Homo Sapiens
RRPRWLCAGAL

SEQ ID NO: 57652 - protein, 11 aa, Homo Sapiens
RPRWLCAGALV

SEQ ID NO: 57653 - protein, 11 aa, Homo Sapiens
ALVLAGGFFLL

SEQ ID NO: 57654 - protein, 11 aa, Homo Sapiens
VLAGGFFLLGF

SEQ ID NO: 57655 - protein, 11 aa, Homo Sapiens
LAGGFFLLGFL

SEQ ID NO: 57656 - protein, 11 aa, Homo Sapiens
GFFLLGFLFGW

SEQ ID NO: 57657 - protein, 11 aa, Homo Sapiens
FFLLGFLFGWF

SEQ ID NO: 57658 - protein, 11 aa, Homo Sapiens
FLLGFLFGWFI

SEQ ID NO: 57659 - protein, 11 aa, Homo Sapiens
LLGFLFGWFIK

SEQ ID NO: 57660 - protein, 11 aa, Homo Sapiens
FLFGWFIKSSN

SEQ ID NO: 57661 - protein, 11 aa, Homo Sapiens
FGWFIKSSNEA

SEQ ID NO: 57662 - protein, 11 aa, Homo Sapiens
FIKSSNEATNI

SEQ ID NO: 57663 - protein, 11 aa, Homo Sapiens
SSNEATNITPK

SEQ ID NO: 57664 - protein, 11 aa, Homo Sapiens
EATNITPKHNM

SEQ ID NO: 57665 - protein, 11 aa, Homo Sapiens
ATNITPKHNMK

SEQ ID NO: 57666 - protein, 11 aa, Homo Sapiens
NITPKHNMKAF

SEQ ID NO: 57667 - protein, 11 aa, Homo Sapiens
ITPKHNMKAFL

SEQ ID NO: 57668 - protein, 11 aa, Homo Sapiens
HNMKAFLDELK

SEQ ID NO: 57669 - protein, 11 aa, Homo Sapiens
NMKAFLDELKA

SEQ ID NO: 57670 - protein, 11 aa, Homo Sapiens
FLDELKAENIK

SEQ ID NO: 57671 - protein, 11 aa, Homo Sapiens
DELKAENIKKF

SEQ ID NO: 57672 - protein, 11 aa, Homo Sapiens
ELKAENIKKFL

SEQ ID NO: 57673 - protein, 11 aa, Homo Sapiens
AENIKKFLYNF

SEQ ID NO: 57674 - protein, 11 aa, Homo Sapiens
KFLYNFTQIPH

SEQ ID NO: 57675 - protein, 11 aa, Homo Sapiens
FLYNFTQIPHL

SEQ ID NO: 57676 - protein, 11 aa, Homo Sapiens
TQIPHLAGTEQ

SEQ ID NO: 57677 - protein, 11 aa, Homo Sapiens
IPHLAGTEQNF

SEQ ID NO: 57678 - protein, 11 aa, Homo Sapiens
HLAGTEQNFQL

SEQ ID NO: 57679 - protein, 11 aa, Homo Sapiens
QLAKQIQSQWK

SEQ ID NO: 57680 - protein, 11 aa, Homo Sapiens
QIQSQWKEFGL

SEQ ID NO: 57681 - protein, 11 aa, Homo Sapiens
SQWKEFGLDSV

SEQ ID NO: 57682 - protein, 11 aa, Homo Sapiens
KEFGLDSVELA

SEQ ID NO: 57683 - protein, 11 aa, Homo Sapiens
GLDSVELAHYD

SEQ ID NO: 57684 - protein, 11 aa, Homo Sapiens
ELAHYDVLLSY

SEQ ID NO: 57685 - protein, 11 aa, Homo Sapiens
HYDVLLSYPNK

SEQ ID NO: 57686 - protein, 11 aa, Homo Sapiens
LSYPNKTHPNY

SEQ ID NO: 57687 - protein, 11 aa, Homo Sapiens
SYPNKTHPNYI

SEQ ID NO: 57688 - protein, 11 aa, Homo Sapiens
YPNKTHPNYIS

SEQ ID NO: 57689 - protein, 11 aa, Homo Sapiens
KTHPNYISIIN

SEQ ID NO: 57690 - protein, 11 aa, Homo Sapiens
SIINEDGNEIF

SEQ ID NO: 57691 - protein, 11 aa, Homo Sapiens
TSLFEPPPPGY

SEQ ID NO: 57692 - protein, 11 aa, Homo Sapiens
SLFEPPPPGYE

SEQ ID NO: 57693 - protein, 11 aa, Homo Sapiens
FEPPPPGYENV

SEQ ID NO: 57694 - protein, 11 aa, Homo Sapiens
YENVSDIVPPF

SEQ ID NO: 57695 - protein, 11 aa, Homo Sapiens
NVSDIVPPFSA

SEQ ID NO: 57696 - protein, 11 aa, Homo Sapiens
PPFSAFSPQGM

SEQ ID NO: 57697 - protein, 11 aa, Homo Sapiens
QGMPEGDLVYV

SEQ ID NO: 57698 - protein, 11 aa, Homo Sapiens
MPEGDLVYVNY

SEQ ID NO: 57699 - protein, 11 aa, Homo Sapiens
VYVNYARTEDF

SEQ ID NO: 57700 - protein, 11 aa, Homo Sapiens
YVNYARTEDFF

SEQ ID NO: 57701 - protein, 11 aa, Homo Sapiens
VNYARTEDFFK

SEQ ID NO: 57702 - protein, 11 aa, Homo Sapiens
NYARTEDFFKL

SEQ ID NO: 57703 - protein, 11 aa, Homo Sapiens
EDFFKLERDMK

SEQ ID NO: 57704 - protein, 11 aa, Homo Sapiens
KINCSGKIVIA

SEQ ID NO: 57705 - protein, 11 aa, Homo Sapiens
INCSGKIVIAR

SEQ ID NO: 57706 - protein, 11 aa, Homo Sapiens
SGKIVIARYGK

SEQ ID NO: 57707 - protein, 11 aa, Homo Sapiens
IVIARYGKVFR

SEQ ID NO: 57708 - protein, 11 aa, Homo Sapiens
ARYGKVFRGNK

SEQ ID NO: 57709 - protein, 11 aa, Homo Sapiens
RYGKVFRGNKV

SEQ ID NO: 57710 - protein, 11 aa, Homo Sapiens
YGKVFRGNKVK

SEQ ID NO: 57711 - protein, 11 aa, Homo Sapiens
KVKNAQLAGAK

SEQ ID NO: 57712 - protein, 11 aa, Homo Sapiens
AQLAGAKGVIL

SEQ ID NO: 57713 - protein, 11 aa, Homo Sapiens
QLAGAKGVILY

SEQ ID NO: 57714 - protein, 11 aa, Homo Sapiens
GVILYSDPADY

SEQ ID NO: 57715 - protein, 11 aa, Homo Sapiens
VILYSDPADYF

SEQ ID NO: 57716 - protein, 11 aa, Homo Sapiens
ILYSDPADYFA

SEQ ID NO: 57717 - protein, 11 aa, Homo Sapiens
DPADYFAPGVK

SEQ ID NO: 57718 - protein, 11 aa, Homo Sapiens
LPGGGVQRGNI

SEQ ID NO: 57719 - protein, 11 aa, Homo Sapiens
ILNLNGAGDPL

SEQ ID NO: 57720 - protein, 11 aa, Homo Sapiens
PLTPGYPANEY

SEQ ID NO: 57721 - protein, 11 aa, Homo Sapiens
LTPGYPANEYA

SEQ ID NO: 57722 - protein, 11 aa, Homo Sapiens
TPGYPANEYAY

SEQ ID NO: 57723 - protein, 11 aa, Homo Sapiens
GYPANEYAYRR

SEQ ID NO: 57724 - protein, 11 aa, Homo Sapiens
YAYRRGIAEAV

SEQ ID NO: 57725 - protein, 11 aa, Homo Sapiens
YRRGIAEAVGL

SEQ ID NO: 57726 - protein, 11 aa, Homo Sapiens
GIAEAVGLPSI

SEQ ID NO: 57727 - protein, 11 aa, Homo Sapiens
AEAVGLPSIPV

SEQ ID NO: 57728 - protein, 11 aa, Homo Sapiens
EAVGLPSIPVH

SEQ ID NO: 57729 - protein, 11 aa, Homo Sapiens
LPSIPVHPIGY

SEQ ID NO: 57730 - protein, 11 aa, Homo Sapiens
PSIPVHPIGYY

SEQ ID NO: 57731 - protein, 11 aa, Homo Sapiens
IPVHPIGYYDA

SEQ ID NO: 57732 - protein, 11 aa, Homo Sapiens
HPIGYYDAQKL

SEQ ID NO: 57733 - protein, 11 aa, Homo Sapiens
GYYDAQKLLEK

SEQ ID NO: 57734 - protein, 11 aa, Homo Sapiens
YYDAQKLLEKM

SEQ ID NO: 57735 - protein, 11 aa, Homo Sapiens
MGGSAPPDSSW

SEQ ID NO: 57736 - protein, 11 aa, Homo Sapiens
APPDSSWRGSL

SEQ ID NO: 57737 - protein, 11 aa, Homo Sapiens
SSWRGSLKVPY

SEQ ID NO: 57738 - protein, 11 aa, Homo Sapiens
LKVPYNVGPGF

SEQ ID NO: 57739 - protein, 11 aa, Homo Sapiens
VPYNVGPGFTG

SEQ ID NO: 57740 - protein, 11 aa, Homo Sapiens
YNVGPGFTGNF

SEQ ID NO: 57741 - protein, 11 aa, Homo Sapiens
FTGNFSTQKVK

SEQ ID NO: 57742 - protein, 11 aa, Homo Sapiens
VKMHIHSTNEV

SEQ ID NO: 57743 - protein, 11 aa, Homo Sapiens
MHIHSTNEVTR

SEQ ID NO: 57744 - protein, 11 aa, Homo Sapiens
HIHSTNEVTRI

SEQ ID NO: 57745 - protein, 11 aa, Homo Sapiens
STNEVTRIYNV

SEQ ID NO: 57746 - protein, 11 aa, Homo Sapiens
EVTRIYNVIGT

SEQ ID NO: 57747 - protein, 11 aa, Homo Sapiens
TRIYNVIGTLR

SEQ ID NO: 57748 - protein, 11 aa, Homo Sapiens
YVILGGHRDSW

SEQ ID NO: 57749 - protein, 11 aa, Homo Sapiens
VILGGHRDSWV

SEQ ID NO: 57750 - protein, 11 aa, Homo Sapiens
ILGGHRDSWVF

SEQ ID NO: 57751 - protein, 11 aa, Homo Sapiens
GIDPQSGAAVV

SEQ ID NO: 57752 - protein, 11 aa, Homo Sapiens
SGAAVVHEIVR

SEQ ID NO: 57753 - protein, 11 aa, Homo Sapiens
AAVVHEIVRSF

SEQ ID NO: 57754 - protein, 11 aa, Homo Sapiens
VHEIVRSFGTL

SEQ ID NO: 57755 - protein, 11 aa, Homo Sapiens
EIVRSFGTLKK

SEQ ID NO: 57756 - protein, 11 aa, Homo Sapiens
RSFGTLKKEGW

SEQ ID NO: 57757 - protein, 11 aa, Homo Sapiens
SFGTLKKEGWR

SEQ ID NO: 57758 - protein, 11 aa, Homo Sapiens
GTLKKEGWRPR

SEQ ID NO: 57759 - protein, 11 aa, Homo Sapiens
TLKKEGWRPRR

SEQ ID NO: 57760 - protein, 11 aa, Homo Sapiens
KEGWRPRRTIL

SEQ ID NO: 57761 - protein, 11 aa, Homo Sapiens
RPRRTILFASW

SEQ ID NO: 57762 - protein, 11 aa, Homo Sapiens
ILFASWDAEEF

SEQ ID NO: 57763 - protein, 11 aa, Homo Sapiens
FASWDAEEFGL

SEQ ID NO: 57764 - protein, 11 aa, Homo Sapiens
EEFGLLGSTEW

SEQ ID NO: 57765 - protein, 11 aa, Homo Sapiens
GSTEWAEENSR

SEQ ID NO: 57766 - protein, 11 aa, Homo Sapiens
TEWAEENSRLL

SEQ ID NO: 57767 - protein, 11 aa, Homo Sapiens
SRLLQERGVAY

SEQ ID NO: 57768 - protein, 11 aa, Homo Sapiens
RLLQERGVAYI

SEQ ID NO: 57769 - protein, 11 aa, Homo Sapiens
GVAYINADSSI

SEQ ID NO: 57770 - protein, 11 aa, Homo Sapiens
DSSIEGNYTLR

SEQ ID NO: 57771 - protein, 11 aa, Homo Sapiens
SSIEGNYTLRV

SEQ ID NO: 57772 - protein, 11 aa, Homo Sapiens
NYTLRVDCTPL

SEQ ID NO: 57773 - protein, 11 aa, Homo Sapiens
YTLRVDCTPLM

SEQ ID NO: 57774 - protein, 11 aa, Homo Sapiens
TLRVDCTPLMY

SEQ ID NO: 57775 - protein, 11 aa, Homo Sapiens
RVDCTPLMYSL

SEQ ID NO: 57776 - protein, 11 aa, Homo Sapiens
TPLMYSLVHNL

SEQ ID NO: 57777 - protein, 11 aa, Homo Sapiens
LMYSLVHNLTK

SEQ ID NO: 57778 - protein, 11 aa, Homo Sapiens
SLVHNLTKELK

SEQ ID NO: 57779 - protein, 11 aa, Homo Sapiens
SPDEGFEGKSL

SEQ ID NO: 57780 - protein, 11 aa, Homo Sapiens
SLYESWTKKSP

SEQ ID NO: 57781 - protein, 11 aa, Homo Sapiens
SWTKKSPSPEF

SEQ ID NO: 57782 - protein, 11 aa, Homo Sapiens
RISKLGSGNDF

SEQ ID NO: 57783 - protein, 11 aa, Homo Sapiens
SKLGSGNDFEV

SEQ ID NO: 57784 - protein, 11 aa, Homo Sapiens
SGNDFEVFFQR

SEQ ID NO: 57785 - protein, 11 aa, Homo Sapiens
EVFFQRLGIAS

SEQ ID NO: 57786 - protein, 11 aa, Homo Sapiens
FFQRLGIASGR

SEQ ID NO: 57787 - protein, 11 aa, Homo Sapiens
FQRLGIASGRA

SEQ ID NO: 57788 - protein, 11 aa, Homo Sapiens
QRLGIASGRAR

SEQ ID NO: 57789 - protein, 11 aa, Homo Sapiens
GIASGRARYTK

SEQ ID NO: 57790 - protein, 11 aa, Homo Sapiens
ASGRARYTKNW

SEQ ID NO: 57791 - protein, 11 aa, Homo Sapiens
ARYTKNWETNK

SEQ ID NO: 57792 - protein, 11 aa, Homo Sapiens
RYTKNWETNKF

SEQ ID NO: 57793 - protein, 11 aa, Homo Sapiens
WETNKFSGYPL

SEQ ID NO: 57794 - protein, 11 aa, Homo Sapiens
ETNKFSGYPLY

SEQ ID NO: 57795 - protein, 11 aa, Homo Sapiens
KFSGYPLYHSV

SEQ ID NO: 57796 - protein, 11 aa, Homo Sapiens
FSGYPLYHSVY

SEQ ID NO: 57797 - protein, 11 aa, Homo Sapiens
YPLYHSVYETY

SEQ ID NO: 57798 - protein, 11 aa, Homo Sapiens
LYHSVYETYEL

SEQ ID NO: 57799 - protein, 11 aa, Homo Sapiens
SVYETYELVEK

SEQ ID NO: 57800 - protein, 11 aa, Homo Sapiens
VYETYELVEKF

SEQ ID NO: 57801 - protein, 11 aa, Homo Sapiens
YETYELVEKFY

SEQ ID NO: 57802 - protein, 11 aa, Homo Sapiens
ETYELVEKFYD

SEQ ID NO: 57803 - protein, 11 aa, Homo Sapiens
YELVEKFYDPM

SEQ ID NO: 57804 - protein, 11 aa, Homo Sapiens
ELVEKFYDPMF

SEQ ID NO: 57805 - protein, 11 aa, Homo Sapiens
LVEKFYDPMFK

SEQ ID NO: 57806 - protein, 11 aa, Homo Sapiens
VEKFYDPMFKY

SEQ ID NO: 57807 - protein, 11 aa, Homo Sapiens
KFYDPMFKYHL

SEQ ID NO: 57808 - protein, 11 aa, Homo Sapiens
YDPMFKYHLTV

SEQ ID NO: 57809 - protein, 11 aa, Homo Sapiens
DPMFKYHLTVA

SEQ ID NO: 57810 - protein, 11 aa, Homo Sapiens
PMFKYHLTVAQ

SEQ ID NO: 57811 - protein, 11 aa, Homo Sapiens
MFKYHLTVAQV

SEQ ID NO: 57812 - protein, 11 aa, Homo Sapiens
FKYHLTVAQVR

SEQ ID NO: 57813 - protein, 11 aa, Homo Sapiens
LTVAQVRGGMV

SEQ ID NO: 57814 - protein, 11 aa, Homo Sapiens
TVAQVRGGMVF

SEQ ID NO: 57815 - protein, 11 aa, Homo Sapiens
AQVRGGMVFEL

SEQ ID NO: 57816 - protein, 11 aa, Homo Sapiens
QVRGGMVFELA

SEQ ID NO: 57817 - protein, 11 aa, Homo Sapiens
GMVFELANSIV

SEQ ID NO: 57818 - protein, 11 aa, Homo Sapiens
MVFELANSIVL

SEQ ID NO: 57819 - protein, 11 aa, Homo Sapiens
FELANSIVLPF

SEQ ID NO: 57820 - protein, 11 aa, Homo Sapiens
SIVLPFDCRDY

SEQ ID NO: 57821 - protein, 11 aa, Homo Sapiens
IVLPFDCRDYA

SEQ ID NO: 57822 - protein, 11 aa, Homo Sapiens
VLPFDCRDYAV

SEQ ID NO: 57823 - protein, 11 aa, Homo Sapiens
LPFDCRDYAVV

SEQ ID NO: 57824 - protein, 11 aa, Homo Sapiens
DCRDYAVVLRK

SEQ ID NO: 57825 - protein, 11 aa, Homo Sapiens
YAVVLRKYADK

SEQ ID NO: 57826 - protein, 11 aa, Homo Sapiens
VVLRKYADKIY

SEQ ID NO: 57827 - protein, 11 aa, Homo Sapiens
KYADKIYSISM

SEQ ID NO: 57828 - protein, 11 aa, Homo Sapiens
YADKIYSISMK

SEQ ID NO: 57829 - protein, 11 aa, Homo Sapiens
KIYSISMKHPQ

SEQ ID NO: 57830 - protein, 11 aa, Homo Sapiens
YSISMKHPQEM

SEQ ID NO: 57831 - protein, 11 aa, Homo Sapiens
SISMKHPQEMK

SEQ ID NO: 57832 - protein, 11 aa, Homo Sapiens
SMKHPQEMKTY

SEQ ID NO: 57833 - protein, 11 aa, Homo Sapiens
MKTYSVSFDSL

SEQ ID NO: 57834 - protein, 11 aa, Homo Sapiens
KTYSVSFDSLF

SEQ ID NO: 57835 - protein, 11 aa, Homo Sapiens
YSVSFDSLFSA

SEQ ID NO: 57836 - protein, 11 aa, Homo Sapiens
SVSFDSLFSAV

SEQ ID NO: 57837 - protein, 11 aa, Homo Sapiens
VSFDSLFSAVK

SEQ ID NO: 57838 - protein, 11 aa, Homo Sapiens
SLFSAVKNFTE

SEQ ID NO: 57839 - protein, 11 aa, Homo Sapiens
FSAVKNFTEIA

SEQ ID NO: 57840 - protein, 11 aa, Homo Sapiens
AVKNFTEIASK

SEQ ID NO: 57841 - protein, 11 aa, Homo Sapiens
FTEIASKFSER

SEQ ID NO: 57842 - protein, 11 aa, Homo Sapiens
TEIASKFSERL

SEQ ID NO: 57843 - protein, 11 aa, Homo Sapiens
KFSERLQDFDK

SEQ ID NO: 57844 - protein, 11 aa, Homo Sapiens
RLQDFDKSNPI

SEQ ID NO: 57845 - protein, 11 aa, Homo Sapiens
LQDFDKSNPIV

SEQ ID NO: 57846 - protein, 11 aa, Homo Sapiens
DFDKSNPIVLR

SEQ ID NO: 57847 - protein, 11 aa, Homo Sapiens
IVLRMMNDQLM

SEQ ID NO: 57848 - protein, 11 aa, Homo Sapiens
VLRMMNDQLMF

SEQ ID NO: 57849 - protein, 11 aa, Homo Sapiens
MMNDQLMFLER

SEQ ID NO: 57850 - protein, 11 aa, Homo Sapiens
MFLERAFIDPL

SEQ ID NO: 57851 - protein, 11 aa, Homo Sapiens
LERAFIDPLGL

SEQ ID NO: 57852 - protein, 11 aa, Homo Sapiens
AFIDPLGLPDR

SEQ ID NO: 57853 - protein, 11 aa, Homo Sapiens
DPLGLPDRPFY

SEQ ID NO: 57854 - protein, 11 aa, Homo Sapiens
GLPDRPFYRHV

SEQ ID NO: 57855 - protein, 11 aa, Homo Sapiens
LPDRPFYRHVI

SEQ ID NO: 57856 - protein, 11 aa, Homo Sapiens
RPFYRHVIYAP

SEQ ID NO: 57857 - protein, 11 aa, Homo Sapiens
YRHVIYAPSSH

SEQ ID NO: 57858 - protein, 11 aa, Homo Sapiens
HVIYAPSSHNK

SEQ ID NO: 57859 - protein, 11 aa, Homo Sapiens
VIYAPSSHNKY

SEQ ID NO: 57860 - protein, 11 aa, Homo Sapiens
SSHNKYAGESF

SEQ ID NO: 57861 - protein, 11 aa, Homo Sapiens
KYAGESFPGIY

SEQ ID NO: 57862 - protein, 11 aa, Homo Sapiens
GESFPGIYDAL

SEQ ID NO: 57863 - protein, 11 aa, Homo Sapiens
ESFPGIYDALF

SEQ ID NO: 57864 - protein, 11 aa, Homo Sapiens
FPGIYDALFDI

SEQ ID NO: 57865 - protein, 11 aa, Homo Sapiens
GIYDALFDIES

SEQ ID NO: 57866 - protein, 11 aa, Homo Sapiens
IYDALFDIESK

SEQ ID NO: 57867 - protein, 11 aa, Homo Sapiens
IESKVDPSKAW

SEQ ID NO: 57868 - protein, 11 aa, Homo Sapiens
KVDPSKAWGEV

SEQ ID NO: 57869 - protein, 11 aa, Homo Sapiens
DPSKAWGEVKR

SEQ ID NO: 57870 - protein, 11 aa, Homo Sapiens
KAWGEVKRQIY

SEQ ID NO: 57871 - protein, 11 aa, Homo Sapiens
AWGEVKRQIYV

SEQ ID NO: 57872 - protein, 11 aa, Homo Sapiens
GEVKRQIYVAA

SEQ ID NO: 57873 - protein, 11 aa, Homo Sapiens
EVKRQIYVAAF

SEQ ID NO: 57874 - protein, 11 aa, Homo Sapiens
RQIYVAAFTVQ

SEQ ID NO: 57875 - protein, 11 aa, Homo Sapiens
QIYVAAFTVQA

SEQ ID NO: 57876 - protein, 11 aa, Homo Sapiens
YVAAFTVQAAA

SEQ ID NO: 57877 - protein, 11 aa, Homo Sapiens
VQAAAETLSEV

SEQ ID NO: 57878 - protein, 11 aa, Homo Sapiens
QAAAETLSEVA

SEQ ID NO: 57879 - protein, 529 aa, Homo Sapiens [sequence omitted]

SEQ ID NO: 57880 - protein, 8 aa, Homo Sapiens
MLLAVLYC

SEQ ID NO: 57881 - protein, 8 aa, Homo Sapiens
LLAVLYCL

SEQ ID NO: 57882 - protein, 8 aa, Homo Sapiens
VLYCLLWS

SEQ ID NO: 57883 - protein, 8 aa, Homo Sapiens
LYCLLWSF

SEQ ID NO: 57884 - protein, 8 aa, Homo Sapiens
CLLWSFQT

SEQ ID NO: 57885 - protein, 8 aa, Homo Sapiens
LLWSFQTS

SEQ ID NO: 57886 - protein, 8 aa, Homo Sapiens
FQTSAGHF

SEQ ID NO: 57887 - protein, 8 aa, Homo Sapiens
TSAGHFPR

SEQ ID NO: 57888 - protein, 8 aa, Homo Sapiens
FPRACVSS

SEQ ID NO: 57889 - protein, 8 aa, Homo Sapiens
SSKNLMEK

SEQ ID NO: 57890 - protein, 8 aa, Homo Sapiens
ILLSNAPL

SEQ ID NO: 57891 - protein, 8 aa, Homo Sapiens
PQFPFTGV

SEQ ID NO: 57892 - protein, 8 aa, Homo Sapiens
FPFTGVDD

SEQ ID NO: 57893 - protein, 8 aa, Homo Sapiens
RESWPSVF

SEQ ID NO: 57894 - protein, 8 aa, Homo Sapiens
ESWPSVFY

SEQ ID NO: 57895 - protein, 8 aa, Homo Sapiens
WPSVFYNR

SEQ ID NO: 57896 - protein, 8 aa, Homo Sapiens
RRLLVRRN

SEQ ID NO: 57897 - protein, 8 aa, Homo Sapiens
RLLVRRNI

SEQ ID NO: 57898 - protein, 8 aa, Homo Sapiens
LLVRRNIF

SEQ ID NO: 57899 - protein, 8 aa, Homo Sapiens
APEKDKFF

SEQ ID NO: 57900 - protein, 8 aa, Homo Sapiens
EKDKFFAY

SEQ ID NO: 57901 - protein, 8 aa, Homo Sapiens
KFFAYLTL

SEQ ID NO: 57902 - protein, 8 aa, Homo Sapiens
FFAYLTLA

SEQ ID NO: 57903 - protein, 8 aa, Homo Sapiens
FAYLTLAK

SEQ ID NO: 57904 - protein, 8 aa, Homo Sapiens
YLTLAKHT

SEQ ID NO: 57905 - protein, 8 aa, Homo Sapiens
LTLAKHTI

SEQ ID NO: 57906 - protein, 8 aa, Homo Sapiens
HTISSDYV

SEQ ID NO: 57907 - protein, 8 aa, Homo Sapiens
TISSDYVI

SEQ ID NO: 57908 - protein, 8 aa, Homo Sapiens
YVIPIGTY

SEQ ID NO: 57909 - protein, 8 aa, Homo Sapiens
GQMKNGST

SEQ ID NO: 57910 - protein, 8 aa, Homo Sapiens
MKNGSTPM

SEQ ID NO: 57911 - protein, 8 aa, Homo Sapiens
STPMFNDI

SEQ ID NO: 57912 - protein, 8 aa, Homo Sapiens
PMFNDINI

SEQ ID NO: 57913 - protein, 8 aa, Homo Sapiens
MFNDINIY

SEQ ID NO: 57914 - protein, 8 aa, Homo Sapiens
DINIYDLF

SEQ ID NO: 57915 - protein, 8 aa, Homo Sapiens
NIYDLFVW

SEQ ID NO: 57916 - protein, 8 aa, Homo Sapiens
IYDLFVWM

SEQ ID NO: 57917 - protein, 8 aa, Homo Sapiens
DLFVWMHY

SEQ ID NO: 57918 - protein, 8 aa, Homo Sapiens
LFVWMHYY

SEQ ID NO: 57919 - protein, 8 aa, Homo Sapiens
FVWMHYYV

SEQ ID NO: 57920 - protein, 8 aa, Homo Sapiens
WMHYYVSM

SEQ ID NO: 57921 - protein, 8 aa, Homo Sapiens
YYVSMDAL

SEQ ID NO: 57922 - protein, 8 aa, Homo Sapiens
YVSMDALL

SEQ ID NO: 57923 - protein, 8 aa, Homo Sapiens
SMDALLGG

SEQ ID NO: 57924 - protein, 8 aa, Homo Sapiens
ALLGGSEI

SEQ ID NO: 57925 - protein, 8 aa, Homo Sapiens
LLGGSEIW

SEQ ID NO: 57926 - protein, 8 aa, Homo Sapiens
EIWRDIDF

SEQ ID NO: 57927 - protein, 8 aa, Homo Sapiens
DIDFAHEA

SEQ ID NO: 57928 - protein, 8 aa, Homo Sapiens
FAHEAPAF

SEQ ID NO: 57929 - protein, 8 aa, Homo Sapiens
AHEAPAFL

SEQ ID NO: 57930 - protein, 8 aa, Homo Sapiens
PAFLPWHR

SEQ ID NO: 57931 - protein, 8 aa, Homo Sapiens
AFLPWHRL

SEQ ID NO: 57932 - protein, 8 aa, Homo Sapiens
FLPWHRLF

SEQ ID NO: 57933 - protein, 8 aa, Homo Sapiens
LPWHRLFL

SEQ ID NO: 57934 - protein, 8 aa, Homo Sapiens
PWHRLFLL

SEQ ID NO: 57935 - protein, 8 aa, Homo Sapiens
FLLRWEQE

SEQ ID NO: 57936 - protein, 8 aa, Homo Sapiens
LLRWEQEI

SEQ ID NO: 57937 - protein, 8 aa, Homo Sapiens
WEQEIQKL

SEQ ID NO: 57938 - protein, 8 aa, Homo Sapiens
DENFTIPY

SEQ ID NO: 57939 - protein, 8 aa, Homo Sapiens
FTIPYWDW

SEQ ID NO: 57940 - protein, 8 aa, Homo Sapiens
TIPYWDWR

SEQ ID NO: 57941 - protein, 8 aa, Homo Sapiens
AEKCDICT

SEQ ID NO: 57942 - protein, 8 aa, Homo Sapiens
DICTDEYM

SEQ ID NO: 57943 - protein, 8 aa, Homo Sapiens
YMGGQHPT

SEQ ID NO: 57944 - protein, 8 aa, Homo Sapiens
HPTNPNLL

SEQ ID NO: 57945 - protein, 8 aa, Homo Sapiens
NPNLLSPA

SEQ ID NO: 57946 - protein, 8 aa, Homo Sapiens
LLSPASFF

SEQ ID NO: 57947 - protein, 8 aa, Homo Sapiens
SPASFFSS

SEQ ID NO: 57948 - protein, 8 aa, Homo Sapiens
SFFSSWQI

SEQ ID NO: 57949 - protein, 8 aa, Homo Sapiens
FFSSWQIV

SEQ ID NO: 57950 - protein, 8 aa, Homo Sapiens
SWQIVCSR

SEQ ID NO: 57951 - protein, 8 aa, Homo Sapiens
WQIVCSRL

SEQ ID NO: 57952 - protein, 8 aa, Homo Sapiens
EYNSHQSL

SEQ ID NO: 57953 - protein, 8 aa, Homo Sapiens
HDKSRTPR

SEQ ID NO: 57954 - protein, 8 aa, Homo Sapiens
TPRLPSSA

SEQ ID NO: 57955 - protein, 8 aa, Homo Sapiens
RLPSSADV

SEQ ID NO: 57956 - protein, 8 aa, Homo Sapiens
LPSSADVE

SEQ ID NO: 57957 - protein, 8 aa, Homo Sapiens
FCLSLTQY

SEQ ID NO: 57958 - protein, 8 aa, Homo Sapiens
TQYESGSM

SEQ ID NO: 57959 - protein, 8 aa, Homo Sapiens
KAANFSFR

SEQ ID NO: 57960 - protein, 8 aa, Homo Sapiens
FRNTLEGF

SEQ ID NO: 57961 - protein, 8 aa, Homo Sapiens
NTLEGFAS

SEQ ID NO: 57962 - protein, 8 aa, Homo Sapiens
LEGFASPL

SEQ ID NO: 57963 - protein, 8 aa, Homo Sapiens
FASPLTGI

SEQ ID NO: 57964 - protein, 8 aa, Homo Sapiens
PLTGIADA

SEQ ID NO: 57965 - protein, 8 aa, Homo Sapiens
SQSSMHNA

SEQ ID NO: 57966 - protein, 8 aa, Homo Sapiens
SSMHNALH

SEQ ID NO: 57967 - protein, 8 aa, Homo Sapiens
SMHNALHI

SEQ ID NO: 57968 - protein, 8 aa, Homo Sapiens
MHNALHIY

SEQ ID NO: 57969 - protein, 8 aa, Homo Sapiens
HIYMNGTM

SEQ ID NO: 57970 - protein, 8 aa, Homo Sapiens
YMNGTMSQ

SEQ ID NO: 57971 - protein, 8 aa, Homo Sapiens
QGSANDPI

SEQ ID NO: 57972 - protein, 8 aa, Homo Sapiens
SANDPIFL

SEQ ID NO: 57973 - protein, 8 aa, Homo Sapiens
IFLLHHAF

SEQ ID NO: 57974 - protein, 8 aa, Homo Sapiens
FLLHHAFV

SEQ ID NO: 57975 - protein, 8 aa, Homo Sapiens
HAFVDSIF

SEQ ID NO: 57976 - protein, 8 aa, Homo Sapiens
FVDSIFEQ

SEQ ID NO: 57977 - protein, 8 aa, Homo Sapiens
SIFEQWLQ

SEQ ID NO: 57978 - protein, 8 aa, Homo Sapiens
IFEQWLQR

SEQ ID NO: 57979 - protein, 8 aa, Homo Sapiens
EQWLQRHR

SEQ ID NO: 57980 - protein, 8 aa, Homo Sapiens
WLQRHRPL

SEQ ID NO: 57981 - protein, 8 aa, Homo Sapiens
LQEVYPEA

SEQ ID NO: 57982 - protein, 8 aa, Homo Sapiens
EVYPEANA

SEQ ID NO: 57983 - protein, 8 aa, Homo Sapiens
YPEANAPI

SEQ ID NO: 57984 - protein, 8 aa, Homo Sapiens
NAPIGHNR

SEQ ID NO: 57985 - protein, 8 aa, Homo Sapiens
RESYMVPF

SEQ ID NO: 57986 - protein, 8 aa, Homo Sapiens
ESYMVPFI

SEQ ID NO: 57987 - protein, 8 aa, Homo Sapiens
YMVPFIPL

SEQ ID NO: 57988 - protein, 8 aa, Homo Sapiens
MVPFIPLY

SEQ ID NO: 57989 - protein, 8 aa, Homo Sapiens
VPFIPLYR

SEQ ID NO: 57990 - protein, 8 aa, Homo Sapiens
PLYRNGDF

SEQ ID NO: 57991 - protein, 8 aa, Homo Sapiens
LYRNGDFF

SEQ ID NO: 57992 - protein, 8 aa, Homo Sapiens
FFISSKDL

SEQ ID NO: 57993 - protein, 8 aa, Homo Sapiens
ISSKDLGY

SEQ ID NO: 57994 - protein, 8 aa, Homo Sapiens
DLGYDYSY

SEQ ID NO: 57995 - protein, 8 aa, Homo Sapiens
LGYDYSYL

SEQ ID NO: 57996 - protein, 8 aa, Homo Sapiens
DPDSFQDY

SEQ ID NO: 57997 - protein, 8 aa, Homo Sapiens
DSFQDYIK

SEQ ID NO: 57998 - protein, 8 aa, Homo Sapiens
FQDYIKSY

SEQ ID NO: 57999 - protein, 8 aa, Homo Sapiens
SYLEQASR

SEQ ID NO: 58000 - protein, 8 aa, Homo Sapiens
YLEQASRI

SEQ ID NO: 58001 - protein, 8 aa, Homo Sapiens
QASRIWSW

SEQ ID NO: 58002 - protein, 8 aa, Homo Sapiens
WLLGAAMV

SEQ ID NO: 58003 - protein, 8 aa, Homo Sapiens
GAAMVGAV

SEQ ID NO: 58004 - protein, 8 aa, Homo Sapiens
AAMVGAVL

SEQ ID NO: 58005 - protein, 8 aa, Homo Sapiens
AMVGAVLT

SEQ ID NO: 58006 - protein, 8 aa, Homo Sapiens
MVGAVLTA

SEQ ID NO: 58007 - protein, 8 aa, Homo Sapiens
AVLTALLA

SEQ ID NO: 58008 - protein, 8 aa, Homo Sapiens
LTALLAGL

SEQ ID NO: 58009 - protein, 8 aa, Homo Sapiens
TALLAGLV

SEQ ID NO: 58010 - protein, 8 aa, Homo Sapiens
ALLAGLVS

SEQ ID NO: 58011 - protein, 8 aa, Homo Sapiens
LLAGLVSL

SEQ ID NO: 58012 - protein, 8 aa, Homo Sapiens
GLVSLLCR

SEQ ID NO: 58013 - protein, 8 aa, Homo Sapiens
VSLLCRHK

SEQ ID NO: 58014 - protein, 8 aa, Homo Sapiens
SLLCRHKR

SEQ ID NO: 58015 - protein, 8 aa, Homo Sapiens
LLCRHKRK

SEQ ID NO: 58016 - protein, 8 aa, Homo Sapiens
LPEEKQPL

SEQ ID NO: 58017 - protein, 8 aa, Homo Sapiens
PEEKQPLL

SEQ ID NO: 58018 - protein, 8 aa, Homo Sapiens
EEKQPLLM

SEQ ID NO: 58019 - protein, 8 aa, Homo Sapiens
KQPLLMEK

SEQ ID NO: 58020 - protein, 8 aa, Homo Sapiens
LLMEKEDY

SEQ ID NO: 58021 - protein, 8 aa, Homo Sapiens
EKEDYHSL

SEQ ID NO: 58022 - protein, 8 aa, Homo Sapiens
KEDYHSLY

SEQ ID NO: 58023 - protein, 9 aa, Homo Sapiens
MLLAVLYCL

SEQ ID NO: 58024 - protein, 9 aa, Homo Sapiens
LLAVLYCLL

SEQ ID NO: 58025 - protein, 9 aa, Homo Sapiens
LAVLYCLLW

SEQ ID NO: 58026 - protein, 9 aa, Homo Sapiens
VLYCLLWSF

SEQ ID NO: 58027 - protein, 9 aa, Homo Sapiens
CLLWSFQTS

SEQ ID NO: 58028 - protein, 9 aa, Homo Sapiens
LLWSFQTSA

SEQ ID NO: 58029 - protein, 9 aa, Homo Sapiens
SFQTSAGHF

SEQ ID NO: 58030 - protein, 9 aa, Homo Sapiens
QTSAGHFPR

SEQ ID NO: 58031 - protein, 9 aa, Homo Sapiens
TSAGHFPRA

SEQ ID NO: 58032 - protein, 9 aa, Homo Sapiens
FPRACVSSK

SEQ ID NO: 58033 - protein, 9 aa, Homo Sapiens
VSSKNLMEK

SEQ ID NO: 58034 - protein, 9 aa, Homo Sapiens
MEKECCPPW

SEQ ID NO: 58035 - protein, 9 aa, Homo Sapiens
SPCGQLSGR

SEQ ID NO: 58036 - protein, 9 aa, Homo Sapiens
CQNILLSNA

SEQ ID NO: 58037 - protein, 9 aa, Homo Sapiens
NILLSNAPL

SEQ ID NO: 58038 - protein, 9 aa, Homo Sapiens
APLGPQFPF

SEQ ID NO: 58039 - protein, 9 aa, Homo Sapiens
PLGPQFPFT

SEQ ID NO: 58040 - protein, 9 aa, Homo Sapiens
FPFTGVDDR

SEQ ID NO: 58041 - protein, 9 aa, Homo Sapiens
RESWPSVFY

SEQ ID NO: 58042 - protein, 9 aa, Homo Sapiens
SWPSVFYNR

SEQ ID NO: 58043 - protein, 9 aa, Homo Sapiens
WPSVFYNRT

SEQ ID NO: 58044 - protein, 9 aa, Homo Sapiens
SVFYNRTCQ

SEQ ID NO: 58045 - protein, 9 aa, Homo Sapiens
GFNCGNCKF

SEQ ID NO: 58046 - protein, 9 aa, Homo Sapiens
NCTERRLLV

SEQ ID NO: 58047 - protein, 9 aa, Homo Sapiens
CTERRLLVR

SEQ ID NO: 58048 - protein, 9 aa, Homo Sapiens
RRLLVRRNI

SEQ ID NO: 58049 - protein, 9 aa, Homo Sapiens
RLLVRRNIF

SEQ ID NO: 58050 - protein, 9 aa, Homo Sapiens
LVRRNIFDL

SEQ ID NO: 58051 - protein, 9 aa, Homo Sapiens
RRNIFDLSA

SEQ ID NO: 58052 - protein, 9 aa, Homo Sapiens
LSAPEKDKF

SEQ ID NO: 58053 - protein, 9 aa, Homo Sapiens
FFAYLTLAK

SEQ ID NO: 58054 - protein, 9 aa, Homo Sapiens
YLTLAKHTI

SEQ ID NO: 58055 - protein, 9 aa, Homo Sapiens
TLAKHTISS

SEQ ID NO: 58056 - protein, 9 aa, Homo Sapiens
HTISSDYVI

SEQ ID NO: 58057 - protein, 9 aa, Homo Sapiens
ISSDYVIPI

SEQ ID NO: 58058 - protein, 9 aa, Homo Sapiens
IPIGTYGQM

SEQ ID NO: 58059 - protein, 9 aa, Homo Sapiens
QMKNGSTPM

SEQ ID NO: 58060 - protein, 9 aa, Homo Sapiens
MKNGSTPMF

SEQ ID NO: 58061 - protein, 9 aa, Homo Sapiens
TPMFNDINI

SEQ ID NO: 58062 - protein, 9 aa, Homo Sapiens
PMFNDINIY

SEQ ID NO: 58063 - protein, 9 aa, Homo Sapiens
FNDINIYDL

SEQ ID NO: 58064 - protein, 9 aa, Homo Sapiens
DINIYDLFV

SEQ ID NO: 58065 - protein, 9 aa, Homo Sapiens
INIYDLFVW

SEQ ID NO: 58066 - protein, 9 aa, Homo Sapiens
NIYDLFVWM

SEQ ID NO: 58067 - protein, 9 aa, Homo Sapiens
YDLFVWMHY

SEQ ID NO: 58068 - protein, 9 aa, Homo Sapiens
DLFVWMHYY

SEQ ID NO: 58069 - protein, 9 aa, Homo Sapiens
LFVWMHYYV

SEQ ID NO: 58070 - protein, 9 aa, Homo Sapiens
VWMHYYVSM

SEQ ID NO: 58071 - protein, 9 aa, Homo Sapiens
HYYVSMDAL

SEQ ID NO: 58072 - protein, 9 aa, Homo Sapiens
YYVSMDALL

SEQ ID NO: 58073 - protein, 9 aa, Homo Sapiens
SMDALLGGS

SEQ ID NO: 58074 - protein, 9 aa, Homo Sapiens
ALLGGSEIW

SEQ ID NO: 58075 - protein, 9 aa, Homo Sapiens
SEIWRDIDF

SEQ ID NO: 58076 - protein, 9 aa, Homo Sapiens
EIWRDIDFA

SEQ ID NO: 58077 - protein, 9 aa, Homo Sapiens
DFAHEAPAF

SEQ ID NO: 58078 - protein, 9 aa, Homo Sapiens
FAHEAPAFL

SEQ ID NO: 58079 - protein, 9 aa, Homo Sapiens
HEAPAFLPW

SEQ ID NO: 58080 - protein, 9 aa, Homo Sapiens
AFLPWHRLF

SEQ ID NO: 58081 - protein, 9 aa, Homo Sapiens
FLPWHRLFL

SEQ ID NO: 58082 - protein, 9 aa, Homo Sapiens
LPWHRLFLL

SEQ ID NO: 58083 - protein, 9 aa, Homo Sapiens
WHRLFLLRW

SEQ ID NO: 58084 - protein, 9 aa, Homo Sapiens
RLFLLRWEQ

SEQ ID NO: 58085 - protein, 9 aa, Homo Sapiens
FLLRWEQEI

SEQ ID NO: 58086 - protein, 9 aa, Homo Sapiens
LRWEQEIQK

SEQ ID NO: 58087 - protein, 9 aa, Homo Sapiens
KLTGDENFT

SEQ ID NO: 58088 - protein, 9 aa, Homo Sapiens
LTGDENFTI

SEQ ID NO: 58089 - protein, 9 aa, Homo Sapiens
DENFTIPYW

SEQ ID NO: 58090 - protein, 9 aa, Homo Sapiens
NFTIPYWDW

SEQ ID NO: 58091 - protein, 9 aa, Homo Sapiens
FTIPYWDWR

SEQ ID NO: 58092 - protein, 9 aa, Homo Sapiens
IPYWDWRDA

SEQ ID NO: 58093 - protein, 9 aa, Homo Sapiens
AEKCDICTD

SEQ ID NO: 58094 - protein, 9 aa, Homo Sapiens
YMGGQHPTN

SEQ ID NO: 58095 - protein, 9 aa, Homo Sapiens
GQHPTNPNL

SEQ ID NO: 58096 - protein, 9 aa, Homo Sapiens
NPNLLSPAS

SEQ ID NO: 58097 - protein, 9 aa, Homo Sapiens
LLSPASFFS

SEQ ID NO: 58098 - protein, 9 aa, Homo Sapiens
SPASFFSSW

SEQ ID NO: 58099 - protein, 9 aa, Homo Sapiens
SFFSSWQIV

SEQ ID NO: 58100 - protein, 9 aa, Homo Sapiens
SSWQIVCSR

SEQ ID NO: 58101 - protein, 9 aa, Homo Sapiens
IVCSRLEEY

SEQ ID NO: 58102 - protein, 9 aa, Homo Sapiens
RLEEYNSHQ

SEQ ID NO: 58103 - protein, 9 aa, Homo Sapiens
EEYNSHQSL

SEQ ID NO: 58104 - protein, 9 aa, Homo Sapiens
SLCNGTPEG

SEQ ID NO: 58105 - protein, 9 aa, Homo Sapiens
RRNPGNHDK

SEQ ID NO: 58106 - protein, 9 aa, Homo Sapiens
KSRTPRLPS

SEQ ID NO: 58107 - protein, 9 aa, Homo Sapiens
TPRLPSSAD

SEQ ID NO: 58108 - protein, 9 aa, Homo Sapiens
LPSSADVEF

SEQ ID NO: 58109 - protein, 9 aa, Homo Sapiens
SSADVEFCL

SEQ ID NO: 58110 - protein, 9 aa, Homo Sapiens
ADVEFCLSL

SEQ ID NO: 58111 - protein, 9 aa, Homo Sapiens
EFCLSLTQY

SEQ ID NO: 58112 - protein, 9 aa, Homo Sapiens
SLTQYESGS

SEQ ID NO: 58113 - protein, 9 aa, Homo Sapiens
QYESGSMDK

SEQ ID NO: 58114 - protein, 9 aa, Homo Sapiens
DKAANFSFR

SEQ ID NO: 58115 - protein, 9 aa, Homo Sapiens
SFRNTLEGF

SEQ ID NO: 58116 - protein, 9 aa, Homo Sapiens
NTLEGFASP

SEQ ID NO: 58117 - protein, 9 aa, Homo Sapiens
TLEGFASPL

SEQ ID NO: 58118 - protein, 9 aa, Homo Sapiens
FASPLTGIA

SEQ ID NO: 58119 - protein, 9 aa, Homo Sapiens
SQSSMHNAL

SEQ ID NO: 58120 - protein, 9 aa, Homo Sapiens
SMHNALHIY

SEQ ID NO: 58121 - protein, 9 aa, Homo Sapiens
ALHIYMNGT

SEQ ID NO: 58122 - protein, 9 aa, Homo Sapiens
YMNGTMSQV

SEQ ID NO: 58123 - protein, 9 aa, Homo Sapiens
TMSQVQGSA

SEQ ID NO: 58124 - protein, 9 aa, Homo Sapiens
VQGSANDPI

SEQ ID NO: 58125 - protein, 9 aa, Homo Sapiens
SANDPIFLL

SEQ ID NO: 58126 - protein, 9 aa, Homo Sapiens
DPIFLLHHA

SEQ ID NO: 58127 - protein, 9 aa, Homo Sapiens
PIFLLHHAF

SEQ ID NO: 58128 - protein, 9 aa, Homo Sapiens
IFLLHHAFV

SEQ ID NO: 58129 - protein, 9 aa, Homo Sapiens
FVDSIFEQW

SEQ ID NO: 58130 - protein, 9 aa, Homo Sapiens
SIFEQWLQR

SEQ ID NO: 58131 - protein, 9 aa, Homo Sapiens
WLQRHRPLQ

SEQ ID NO: 58132 - protein, 9 aa, Homo Sapiens
PLQEVYPEA

SEQ ID NO: 58133 - protein, 9 aa, Homo Sapiens
VYPEANAPI

SEQ ID NO: 58134 - protein, 9 aa, Homo Sapiens
ANAPIGHNR

SEQ ID NO: 58135 - protein, 9 aa, Homo Sapiens
NRESYMVPF

SEQ ID NO: 58136 - protein, 9 aa, Homo Sapiens
RESYMVPFI

SEQ ID NO: 58137 - protein, 9 aa, Homo Sapiens
SYMVPFIPL

SEQ ID NO: 58138 - protein, 9 aa, Homo Sapiens
YMVPFIPLY

SEQ ID NO: 58139 - protein, 9 aa, Homo Sapiens
MVPFIPLYR

SEQ ID NO: 58140 - protein, 9 aa, Homo Sapiens
VPFIPLYRN

SEQ ID NO: 58141 - protein, 9 aa, Homo Sapiens
IPLYRNGDF

SEQ ID NO: 58142 - protein, 9 aa, Homo Sapiens
PLYRNGDFF

SEQ ID NO: 58143 - protein, 9 aa, Homo Sapiens
LYRNGDFFI

SEQ ID NO: 58144 - protein, 9 aa, Homo Sapiens
FISSKDLGY

SEQ ID NO: 58145 - protein, 9 aa, Homo Sapiens
SSKDLGYDY

SEQ ID NO: 58146 - protein, 9 aa, Homo Sapiens
DLGYDYSYL

SEQ ID NO: 58147 - protein, 9 aa, Homo Sapiens
YLQDSDPDS

SEQ ID NO: 58148 - protein, 9 aa, Homo Sapiens
FQDYIKSYL

SEQ ID NO: 58149 - protein, 9 aa, Homo Sapiens
YIKSYLEQA

SEQ ID NO: 58150 - protein, 9 aa, Homo Sapiens
KSYLEQASR

SEQ ID NO: 58151 - protein, 9 aa, Homo Sapiens
SYLEQASRI

SEQ ID NO: 58152 - protein, 9 aa, Homo Sapiens
QASRIWSWL

SEQ ID NO: 58153 - protein, 9 aa, Homo Sapiens
RIWSWLLGA

SEQ ID NO: 58154 - protein, 9 aa, Homo Sapiens
WSWLLGAAM

SEQ ID NO: 58155 - protein, 9 aa, Homo Sapiens
WLLGAAMVG

SEQ ID NO: 58156 - protein, 9 aa, Homo Sapiens
LLGAAMVGA

SEQ ID NO: 58157 - protein, 9 aa, Homo Sapiens
LGAAMVGAV

SEQ ID NO: 58158 - protein, 9 aa, Homo Sapiens
GAAMVGAVL

SEQ ID NO: 58159 - protein, 9 aa, Homo Sapiens
AMVGAVLTA

SEQ ID NO: 58160 - protein, 9 aa, Homo Sapiens
MVGAVLTAL

SEQ ID NO: 58161 - protein, 9 aa, Homo Sapiens
VLTALLAGL

SEQ ID NO: 58162 - protein, 9 aa, Homo Sapiens
LTALLAGLV

SEQ ID NO: 58163 - protein, 9 aa, Homo Sapiens
ALLAGLVSL

SEQ ID NO: 58164 - protein, 9 aa, Homo Sapiens
LLAGLVSLL

SEQ ID NO: 58165 - protein, 9 aa, Homo Sapiens
LVSLLCRHK

SEQ ID NO: 58166 - protein, 9 aa, Homo Sapiens
VSLLCRHKR

SEQ ID NO: 58167 - protein, 9 aa, Homo Sapiens
SLLCRHKRK

SEQ ID NO: 58168 - protein, 9 aa, Homo Sapiens
KRKQLPEEK

SEQ ID NO: 58169 - protein, 9 aa, Homo Sapiens
QLPEEKQPL

SEQ ID NO: 58170 - protein, 9 aa, Homo Sapiens
LPEEKQPLL

SEQ ID NO: 58171 - protein, 9 aa, Homo Sapiens
MEKEDYHSL

SEQ ID NO: 58172 - protein, 9 aa, Homo Sapiens
EKEDYHSLY

SEQ ID NO: 58173 - protein, 9 aa, Homo Sapiens
YHSLYQSHL

SEQ ID NO: 58174 - protein, 10 aa, Homo Sapiens
MLLAVLYCLL

SEQ ID NO: 58175 - protein, 10 aa, Homo Sapiens
LLAVLYCLLW

SEQ ID NO: 58176 - protein, 10 aa, Homo Sapiens
AVLYCLLWSF

SEQ ID NO: 58177 - protein, 10 aa, Homo Sapiens
VLYCLLWSFQ

SEQ ID NO: 58178 - protein, 10 aa, Homo Sapiens
CLLWSFQTSA

SEQ ID NO: 58179 - protein, 10 aa, Homo Sapiens
LLWSFQTSAG

SEQ ID NO: 58180 - protein, 10 aa, Homo Sapiens
WSFQTSAGHF

SEQ ID NO: 58181 - protein, 10 aa, Homo Sapiens
FQTSAGHFPR

SEQ ID NO: 58182 - protein, 10 aa, Homo Sapiens
QTSAGHFPRA

SEQ ID NO: 58183 - protein, 10 aa, Homo Sapiens
SAGHFPRACV

SEQ ID NO: 58184 - protein, 10 aa, Homo Sapiens
CVSSKNLMEK

SEQ ID NO: 58185 - protein, 10 aa, Homo Sapiens
RSPCGQLSGR

SEQ ID NO: 58186 - protein, 10 aa, Homo Sapiens
LLSNAPLGPQ

SEQ ID NO: 58187 - protein, 10 aa, Homo Sapiens
LSNAPLGPQF

SEQ ID NO: 58188 - protein, 10 aa, Homo Sapiens
NAPLGPQFPF

SEQ ID NO: 58189 - protein, 10 aa, Homo Sapiens
LGPQFPFTGV

SEQ ID NO: 58190 - protein, 10 aa, Homo Sapiens
FPFTGVDDRE

SEQ ID NO: 58191 - protein, 10 aa, Homo Sapiens
FTGVDDRESW

SEQ ID NO: 58192 - protein, 10 aa, Homo Sapiens
ESWPSVFYNR

SEQ ID NO: 58193 - protein, 10 aa, Homo Sapiens
WPSVFYNRTC

SEQ ID NO: 58194 - protein, 10 aa, Homo Sapiens
CQCSGNFMGF

SEQ ID NO: 58195 - protein, 10 aa, Homo Sapiens
FMGFNCGNCK

SEQ ID NO: 58196 - protein, 10 aa, Homo Sapiens
GFWGPNCTER

SEQ ID NO: 58197 - protein, 10 aa, Homo Sapiens
GPNCTERRLL

SEQ ID NO: 58198 - protein, 10 aa, Homo Sapiens
NCTERRLLVR

SEQ ID NO: 58199 - protein, 10 aa, Homo Sapiens
CTERRLLVRR

SEQ ID NO: 58200 - protein, 10 aa, Homo Sapiens
RRLLVRRNIF

SEQ ID NO: 58201 - protein, 10 aa, Homo Sapiens
LLVRRNIFDL

SEQ ID NO: 58202 - protein, 10 aa, Homo Sapiens
NIFDLSAPEK

SEQ ID NO: 58203 - protein, 10 aa, Homo Sapiens
LSAPEKDKFF

SEQ ID NO: 58204 - protein, 10 aa, Homo Sapiens
APEKDKFFAY

SEQ ID NO: 58205 - protein, 10 aa, Homo Sapiens
KFFAYLTLAK

SEQ ID NO: 58206 - protein, 10 aa, Homo Sapiens
FAYLTLAKHT

SEQ ID NO: 58207 - protein, 10 aa, Homo Sapiens
AYLTLAKHTI

SEQ ID NO: 58208 - protein, 10 aa, Homo Sapiens
LAKHTISSDY

SEQ ID NO: 58209 - protein, 10 aa, Homo Sapiens
TISSDYVIPI

SEQ ID NO: 58210 - protein, 10 aa, Homo Sapiens
SDYVIPIGTY

SEQ ID NO: 58211 - protein, 10 aa, Homo Sapiens
YVIPIGTYGQ

SEQ ID NO: 58212 - protein, 10 aa, Homo Sapiens
VIPIGTYGQM

SEQ ID NO: 58213 - protein, 10 aa, Homo Sapiens
GQMKNGSTPM

SEQ ID NO: 58214 - protein, 10 aa, Homo Sapiens
QMKNGSTPMF

SEQ ID NO: 58215 - protein, 10 aa, Homo Sapiens
STPMFNDINI

SEQ ID NO: 58216 - protein, 10 aa, Homo Sapiens
TPMFNDINIY

SEQ ID NO: 58217 - protein, 10 aa, Homo Sapiens
MFNDINIYDL

SEQ ID NO: 58218 - protein, 10 aa, Homo Sapiens
NDINIYDLFV

SEQ ID NO: 58219 - protein, 10 aa, Homo Sapiens
DINIYDLFVW

SEQ ID NO: 58220 - protein, 10 aa, Homo Sapiens
IYDLFVWMHY

SEQ ID NO: 58221 - protein, 10 aa, Homo Sapiens
YDLFVWMHYY

SEQ ID NO: 58222 - protein, 10 aa, Homo Sapiens
DLFVWMHYYV

SEQ ID NO: 58223 - protein, 10 aa, Homo Sapiens
FVWMHYYVSM

SEQ ID NO: 58224 - protein, 10 aa, Homo Sapiens
WMHYYVSMDA

SEQ ID NO: 58225 - protein, 10 aa, Homo Sapiens
MHYYVSMDAL

SEQ ID NO: 58226 - protein, 10 aa, Homo Sapiens
HYYVSMDALL

SEQ ID NO: 58227 - protein, 10 aa, Homo Sapiens
ALLGGSEIWR

SEQ ID NO: 58228 - protein, 10 aa, Homo Sapiens
SEIWRDIDFA

SEQ ID NO: 58229 - protein, 10 aa, Homo Sapiens
EIWRDIDFAH

SEQ ID NO: 58230 - protein, 10 aa, Homo Sapiens
EAPAFLPWHR

SEQ ID NO: 58231 - protein, 10 aa, Homo Sapiens
APAFLPWHRL

SEQ ID NO: 58232 - protein, 10 aa, Homo Sapiens
AFLPWHRLFL

SEQ ID NO: 58233 - protein, 10 aa, Homo Sapiens
FLPWHRLFLL

SEQ ID NO: 58234 - protein, 10 aa, Homo Sapiens
LPWHRLFLLR

SEQ ID NO: 58235 - protein, 10 aa, Homo Sapiens
FLLRWEQEIQ

SEQ ID NO: 58236 - protein, 10 aa, Homo Sapiens
LLRWEQEIQK

SEQ ID NO: 58237 - protein, 10 aa, Homo Sapiens
LRWEQEIQKL

SEQ ID NO: 58238 - protein, 10 aa, Homo Sapiens
IQKLTGDENF

SEQ ID NO: 58239 - protein, 10 aa, Homo Sapiens
KLTGDENFTI

SEQ ID NO: 58240 - protein, 10 aa, Homo Sapiens
TGDENFTIPY

SEQ ID NO: 58241 - protein, 10 aa, Homo Sapiens
NFTIPYWDWR

SEQ ID NO: 58242 - protein, 10 aa, Homo Sapiens
PYWDWRDAEK

SEQ ID NO: 58243 - protein, 10 aa, Homo Sapiens
CTDEYMGGQH

SEQ ID NO: 58244 - protein, 10 aa, Homo Sapiens
YMGGQHPTNP

SEQ ID NO: 58245 - protein, 10 aa, Homo Sapiens
NPNLLSPASF

SEQ ID NO: 58246 - protein, 10 aa, Homo Sapiens
NLLSPASFFS

SEQ ID NO: 58247 - protein, 10 aa, Homo Sapiens
LLSPASFFSS

SEQ ID NO: 58248 - protein, 10 aa, Homo Sapiens
LSPASFFSSW

SEQ ID NO: 58249 - protein, 10 aa, Homo Sapiens
ASFFSSWQIV

SEQ ID NO: 58250 - protein, 10 aa, Homo Sapiens
FSSWQIVCSR

SEQ ID NO: 58251 - protein, 10 aa, Homo Sapiens
SSWQIVCSRL

SEQ ID NO: 58252 - protein, 10 aa, Homo Sapiens
QIVCSRLEEY

SEQ ID NO: 58253 - protein, 10 aa, Homo Sapiens
RLEEYNSHQS

SEQ ID NO: 58254 - protein, 10 aa, Homo Sapiens
LEEYNSHQSL

SEQ ID NO: 58255 - protein, 10 aa, Homo Sapiens
NHDKSRTPRL

SEQ ID NO: 58256 - protein, 10 aa, Homo Sapiens
KSRTPRLPSS

SEQ ID NO: 58257 - protein, 10 aa, Homo Sapiens
TPRLPSSADV

SEQ ID NO: 58258 - protein, 10 aa, Homo Sapiens
RLPSSADVEF

SEQ ID NO: 58259 - protein, 10 aa, Homo Sapiens
SADVEFCLSL

SEQ ID NO: 58260 - protein, 10 aa, Homo Sapiens
VEFCLSLTQY

SEQ ID NO: 58261 - protein, 10 aa, Homo Sapiens
SLTQYESGSM

SEQ ID NO: 58262 - protein, 10 aa, Homo Sapiens
TQYESGSMDK

SEQ ID NO: 58263 - protein, 10 aa, Homo Sapiens
SMDKAANFSF

SEQ ID NO: 58264 - protein, 10 aa, Homo Sapiens
MDKAANFSFR

SEQ ID NO: 58265 - protein, 10 aa, Homo Sapiens
AANFSFRNTL

SEQ ID NO: 58266 - protein, 10 aa, Homo Sapiens
FSFRNTLEGF

SEQ ID NO: 58267 - protein, 10 aa, Homo Sapiens
NTLEGFASPL

SEQ ID NO: 58268 - protein, 10 aa, Homo Sapiens
TLEGFASPLT

SEQ ID NO: 58269 - protein, 10 aa, Homo Sapiens
EGFASPLTGI

SEQ ID NO: 58270 - protein, 10 aa, Homo Sapiens
SPLTGIADAS

SEQ ID NO: 58271 - protein, 10 aa, Homo Sapiens
PLTGIADASQ

SEQ ID NO: 58272 - protein, 10 aa, Homo Sapiens
GIADASQSSM

SEQ ID NO: 58273 - protein, 10 aa, Homo Sapiens
SSMHNALHIY

SEQ ID NO: 58274 - protein, 10 aa, Homo Sapiens
SMHNALHIYM

SEQ ID NO: 58275 - protein, 10 aa, Homo Sapiens
ALHIYMNGTM

SEQ ID NO: 58276 - protein, 10 aa, Homo Sapiens
IYMNGTMSQV

SEQ ID NO: 58277 - protein, 10 aa, Homo Sapiens
YMNGTMSQVQ

SEQ ID NO: 58278 - protein, 10 aa, Homo Sapiens
GTMSQVQGSA

SEQ ID NO: 58279 - protein, 10 aa, Homo Sapiens
QVQGSANDPI

SEQ ID NO: 58280 - protein, 10 aa, Homo Sapiens
VQGSANDPIF

SEQ ID NO: 58281 - protein, 10 aa, Homo Sapiens
GSANDPIFLL

SEQ ID NO: 58282 - protein, 10 aa, Homo Sapiens
SANDPIFLLH

SEQ ID NO: 58283 - protein, 10 aa, Homo Sapiens
DPIFLLHHAF

SEQ ID NO: 58284 - protein, 10 aa, Homo Sapiens
PIFLLHHAFV

SEQ ID NO: 58285 - protein, 10 aa, Homo Sapiens
FLLHHAFVDS

SEQ ID NO: 58286 - protein, 10 aa, Homo Sapiens
LLHHAFVDSI

SEQ ID NO: 58287 - protein, 10 aa, Homo Sapiens
HAFVDSIFEQ

SEQ ID NO: 58288 - protein, 10 aa, Homo Sapiens
AFVDSIFEQW

SEQ ID NO: 58289 - protein, 10 aa, Homo Sapiens
FVDSIFEQWL

SEQ ID NO: 58290 - protein, 10 aa, Homo Sapiens
DSIFEQWLQR

SEQ ID NO: 58291 - protein, 10 aa, Homo Sapiens
LQRHRPLQEV

SEQ ID NO: 58292 - protein, 10 aa, Homo Sapiens
RPLQEVYPEA

SEQ ID NO: 58293 - protein, 10 aa, Homo Sapiens
EVYPEANAPI

SEQ ID NO: 58294 - protein, 10 aa, Homo Sapiens
YPEANAPIGH

SEQ ID NO: 58295 - protein, 10 aa, Homo Sapiens
EANAPIGHNR

SEQ ID NO: 58296 - protein, 10 aa, Homo Sapiens
APIGHNRESY

SEQ ID NO: 58297 - protein, 10 aa, Homo Sapiens
HNRESYMVPF

SEQ ID NO: 58298 - protein, 10 aa, Homo Sapiens
ESYMVPFIPL

SEQ ID NO: 58299 - protein, 10 aa, Homo Sapiens
SYMVPFIPLY

SEQ ID NO: 58300 - protein, 10 aa, Homo Sapiens
YMVPFIPLYR

SEQ ID NO: 58301 - protein, 10 aa, Homo Sapiens
FIPLYRNGDF

SEQ ID NO: 58302 - protein, 10 aa, Homo Sapiens
IPLYRNGDFF

SEQ ID NO: 58303 - protein, 10 aa, Homo Sapiens
PLYRNGDFFI

SEQ ID NO: 58304 - protein, 10 aa, Homo Sapiens
RNGDFFISSK

SEQ ID NO: 58305 - protein, 10 aa, Homo Sapiens
FFISSKDLGY

SEQ ID NO: 58306 - protein, 10 aa, Homo Sapiens
ISSKDLGYDY

SEQ ID NO: 58307 - protein, 10 aa, Homo Sapiens
KDLGYDYSYL

SEQ ID NO: 58308 - protein, 10 aa, Homo Sapiens
YLQDSDPDSF

SEQ ID NO: 58309 - protein, 10 aa, Homo Sapiens
DSDPDSFQDY

SEQ ID NO: 58310 - protein, 10 aa, Homo Sapiens
DSFQDYIKSY

SEQ ID NO: 58311 - protein, 10 aa, Homo Sapiens
SFQDYIKSYL

SEQ ID NO: 58312 - protein, 10 aa, Homo Sapiens
FQDYIKSYLE

SEQ ID NO: 58313 - protein, 10 aa, Homo Sapiens
SYLEQASRIW

SEQ ID NO: 58314 - protein, 10 aa, Homo Sapiens
YLEQASRIWS

SEQ ID NO: 58315 - protein, 10 aa, Homo Sapiens
LEQASRIWSW

SEQ ID NO: 58316 - protein, 10 aa, Homo Sapiens
EQASRIWSWL

SEQ ID NO: 58317 - protein, 10 aa, Homo Sapiens
QASRIWSWLL

SEQ ID NO: 58318 - protein, 10 aa, Homo Sapiens
RIWSWLLGAA

SEQ ID NO: 58319 - protein, 10 aa, Homo Sapiens
WSWLLGAAMV

SEQ ID NO: 58320 - protein, 10 aa, Homo Sapiens
WLLGAAMVGA

SEQ ID NO: 58321 - protein, 10 aa, Homo Sapiens
LLGAAMVGAV

SEQ ID NO: 58322 - protein, 10 aa, Homo Sapiens
AAMVGAVLTA

SEQ ID NO: 58323 - protein, 10 aa, Homo Sapiens
AMVGAVLTAL

SEQ ID NO: 58324 - protein, 10 aa, Homo Sapiens
MVGAVLTALL

SEQ ID NO: 58325 - protein, 10 aa, Homo Sapiens
AVLTALLAGL

SEQ ID NO: 58326 - protein, 10 aa, Homo Sapiens
VLTALLAGLV

SEQ ID NO: 58327 - protein, 10 aa, Homo Sapiens
TALLAGLVSL

SEQ ID NO: 58328 - protein, 10 aa, Homo Sapiens
ALLAGLVSLL

SEQ ID NO: 58329 - protein, 10 aa, Homo Sapiens
LLAGLVSLLC

SEQ ID NO: 58330 - protein, 10 aa, Homo Sapiens
LAGLVSLLCR

SEQ ID NO: 58331 - protein, 10 aa, Homo Sapiens
GLVSLLCRHK

SEQ ID NO: 58332 - protein, 10 aa, Homo Sapiens
LVSLLCRHKR

SEQ ID NO: 58333 - protein, 10 aa, Homo Sapiens
VSLLCRHKRK

SEQ ID NO: 58334 - protein, 10 aa, Homo Sapiens
LLCRHKRKQL

SEQ ID NO: 58335 - protein, 10 aa, Homo Sapiens
KQLPEEKQPL

SEQ ID NO: 58336 - protein, 10 aa, Homo Sapiens
QLPEEKQPLL

SEQ ID NO: 58337 - protein, 10 aa, Homo Sapiens
LPEEKQPLLM

SEQ ID NO: 58338 - protein, 10 aa, Homo Sapiens
QPLLMEKEDY

SEQ ID NO: 58339 - protein, 10 aa, Homo Sapiens
LLMEKEDYHS

SEQ ID NO: 58340 - protein, 10 aa, Homo Sapiens
LMEKEDYHSL

SEQ ID NO: 58341 - protein, 10 aa, Homo Sapiens
MEKEDYHSLY

SEQ ID NO: 58342 - protein, 10 aa, Homo Sapiens
DYHSLYQSHL

SEQ ID NO: 58343 - protein, 11 aa, Homo Sapiens
MLLAVLYCLLW

SEQ ID NO: 58344 - protein, 11 aa, Homo Sapiens
LLAVLYCLLWS

SEQ ID NO: 58345 - protein, 11 aa, Homo Sapiens
LAVLYCLLWSF

SEQ ID NO: 58346 - protein, 11 aa, Homo Sapiens
AVLYCLLWSFQ

SEQ ID NO: 58347 - protein, 11 aa, Homo Sapiens
VLYCLLWSFQT

SEQ ID NO: 58348 - protein, 11 aa, Homo Sapiens
LLWSFQTSAGH

SEQ ID NO: 58349 - protein, 11 aa, Homo Sapiens
LWSFQTSAGHF

SEQ ID NO: 58350 - protein, 11 aa, Homo Sapiens
SFQTSAGHFPR

SEQ ID NO: 58351 - protein, 11 aa, Homo Sapiens
FQTSAGHFPRA

SEQ ID NO: 58352 - protein, 11 aa, Homo Sapiens
TSAGHFPRACV

SEQ ID NO: 58353 - protein, 11 aa, Homo Sapiens
FPRACVSSKNL

SEQ ID NO: 58354 - protein, 11 aa, Homo Sapiens
QLSGRGSCQNI

SEQ ID NO: 58355 - protein, 11 aa, Homo Sapiens
CQNILLSNAPL

SEQ ID NO: 58356 - protein, 11 aa, Homo Sapiens
ILLSNAPLGPQ

SEQ ID NO: 58357 - protein, 11 aa, Homo Sapiens
LLSNAPLGPQF

SEQ ID NO: 58358 - protein, 11 aa, Homo Sapiens
PLGPQFPFTGV

SEQ ID NO: 58359 - protein, 11 aa, Homo Sapiens
FPFTGVDDRES

SEQ ID NO: 58360 - protein, 11 aa, Homo Sapiens
GVDDRESWPSV

SEQ ID NO: 58361 - protein, 11 aa, Homo Sapiens
DDRESWPSVFY

SEQ ID NO: 58362 - protein, 11 aa, Homo Sapiens
RESWPSVFYNR

SEQ ID NO: 58363 - protein, 11 aa, Homo Sapiens
ESWPSVFYNRT

SEQ ID NO: 58364 - protein, 11 aa, Homo Sapiens
NFMGFNCGNCK

SEQ ID NO: 58365 - protein, 11 aa, Homo Sapiens
FMGFNCGNCKF

SEQ ID NO: 58366 - protein, 11 aa, Homo Sapiens
GFNCGNCKFGF

SEQ ID NO: 58367 - protein, 11 aa, Homo Sapiens
FGFWGPNCTER

SEQ ID NO: 58368 - protein, 11 aa, Homo Sapiens
GFWGPNCTERR

SEQ ID NO: 58369 - protein, 11 aa, Homo Sapiens
NCTERRLLVRR

SEQ ID NO: 58370 - protein, 11 aa, Homo Sapiens
RLLVRRNIFDL

SEQ ID NO: 58371 - protein, 11 aa, Homo Sapiens
RRNIFDLSAPE

SEQ ID NO: 58372 - protein, 11 aa, Homo Sapiens
SAPEKDKFFAY

SEQ ID NO: 58373 - protein, 11 aa, Homo Sapiens
APEKDKFFAYL

SEQ ID NO: 58374 - protein, 11 aa, Homo Sapiens
EKDKFFAYLTL

SEQ ID NO: 58375 - protein, 11 aa, Homo Sapiens
DKFFAYLTLAK

SEQ ID NO: 58376 - protein, 11 aa, Homo Sapiens
KFFAYLTLAKH

SEQ ID NO: 58377 - protein, 11 aa, Homo Sapiens
FAYLTLAKHTI

SEQ ID NO: 58378 - protein, 11 aa, Homo Sapiens
YLTLAKHTISS

SEQ ID NO: 58379 - protein, 11 aa, Homo Sapiens
TLAKHTISSDY

SEQ ID NO: 58380 - protein, 11 aa, Homo Sapiens
LAKHTISSDYV

SEQ ID NO: 58381 - protein, 11 aa, Homo Sapiens
HTISSDYVIPI

SEQ ID NO: 58382 - protein, 11 aa, Homo Sapiens
SSDYVIPIGTY

SEQ ID NO: 58383 - protein, 11 aa, Homo Sapiens
YVIPIGTYGQM

SEQ ID NO: 58384 - protein, 11 aa, Homo Sapiens
VIPIGTYGQMK

SEQ ID NO: 58385 - protein, 11 aa, Homo Sapiens
GQMKNGSTPMF

SEQ ID NO: 58386 - protein, 11 aa, Homo Sapiens
STPMFNDINIY

SEQ ID NO: 58387 - protein, 11 aa, Homo Sapiens
PMFNDINIYDL

SEQ ID NO: 58388 - protein, 11 aa, Homo Sapiens
MFNDINIYDLF

SEQ ID NO: 58389 - protein, 11 aa, Homo Sapiens
FNDINIYDLFV

SEQ ID NO: 58390 - protein, 11 aa, Homo Sapiens
DINIYDLFVWM

SEQ ID NO: 58391 - protein, 11 aa, Homo Sapiens
NIYDLFVWMHY

SEQ ID NO: 58392 - protein, 11 aa, Homo Sapiens
IYDLFVWMHYY

SEQ ID NO: 58393 - protein, 11 aa, Homo Sapiens
YDLFVWMHYYV

SEQ ID NO: 58394 - protein, 11 aa, Homo Sapiens
LFVWMHYYVSM

SEQ ID NO: 58395 - protein, 11 aa, Homo Sapiens
WMHYYVSMDAL

SEQ ID NO: 58396 - protein, 11 aa, Homo Sapiens
MHYYVSMDALL

SEQ ID NO: 58397 - protein, 11 aa, Homo Sapiens
SMDALLGGSEI

SEQ ID NO: 58398 - protein, 11 aa, Homo Sapiens
DALLGGSEIWR

SEQ ID NO: 58399 - protein, 11 aa, Homo Sapiens
ALLGGSEIWRD

SEQ ID NO: 58400 - protein, 11 aa, Homo Sapiens
LLGGSEIWRDI

SEQ ID NO: 58401 - protein, 11 aa, Homo Sapiens
SEIWRDIDFAH

SEQ ID NO: 58402 - protein, 11 aa, Homo Sapiens
EIWRDIDFAHE

SEQ ID NO: 58403 - protein, 11 aa, Homo Sapiens
DIDFAHEAPAF

SEQ ID NO: 58404 - protein, 11 aa, Homo Sapiens
FAHEAPAFLPW

SEQ ID NO: 58405 - protein, 11 aa, Homo Sapiens
HEAPAFLPWHR

SEQ ID NO: 58406 - protein, 11 aa, Homo Sapiens
EAPAFLPWHRL

SEQ ID NO: 58407 - protein, 11 aa, Homo Sapiens
APAFLPWHRLF

SEQ ID NO: 58408 - protein, 11 aa, Homo Sapiens
AFLPWHRLFLL

SEQ ID NO: 58409 - protein, 11 aa, Homo Sapiens
FLPWHRLFLLR

SEQ ID NO: 58410 - protein, 11 aa, Homo Sapiens
LPWHRLFLLRW

SEQ ID NO: 58411 - protein, 11 aa, Homo Sapiens
RLFLLRWEQEI

SEQ ID NO: 58412 - protein, 11 aa, Homo Sapiens
FLLRWEQEIQK

SEQ ID NO: 58413 - protein, 11 aa, Homo Sapiens
LLRWEQEIQKL

SEQ ID NO: 58414 - protein, 11 aa, Homo Sapiens
EIQKLTGDENF

SEQ ID NO: 58415 - protein, 11 aa, Homo Sapiens
LTGDENFTIPY

SEQ ID NO: 58416 - protein, 11 aa, Homo Sapiens
TGDENFTIPYW

SEQ ID NO: 58417 - protein, 11 aa, Homo Sapiens
DENFTIPYWDW

SEQ ID NO: 58418 - protein, 11 aa, Homo Sapiens
ENFTIPYWDWR

SEQ ID NO: 58419 - protein, 11 aa, Homo Sapiens
FTIPYWDWRDA

SEQ ID NO: 58420 - protein, 11 aa, Homo Sapiens
IPYWDWRDAEK

SEQ ID NO: 58421 - protein, 11 aa, Homo Sapiens
AEKCDICTDEY

SEQ ID NO: 58422 - protein, 11 aa, Homo Sapiens
HPTNPNLLSPA

SEQ ID NO: 58423 - protein, 11 aa, Homo Sapiens
NPNLLSPASFF

SEQ ID NO: 58424 - protein, 11 aa, Homo Sapiens
LLSPASFFSSW

SEQ ID NO: 58425 - protein, 11 aa, Homo Sapiens
SPASFFSSWQI

SEQ ID NO: 58426 - protein, 11 aa, Homo Sapiens
FFSSWQIVCSR

SEQ ID NO: 58427 - protein, 11 aa, Homo Sapiens
FSSWQIVCSRL

SEQ ID NO: 58428 - protein, 11 aa, Homo Sapiens
WQIVCSRLEEY

SEQ ID NO: 58429 - protein, 11 aa, Homo Sapiens
RLEEYNSHQSL

SEQ ID NO: 58430 - protein, 11 aa, Homo Sapiens
SLCNGTPEGPL

SEQ ID NO: 58431 - protein, 11 aa, Homo Sapiens
PLRRNPGNHDK

SEQ ID NO: 58432 - protein, 11 aa, Homo Sapiens
RRNPGNHDKSR

SEQ ID NO: 58433 - protein, 11 aa, Homo Sapiens
KSRTPRLPSSA

SEQ ID NO: 58434 - protein, 11 aa, Homo Sapiens
TPRLPSSADVE

SEQ ID NO: 58435 - protein, 11 aa, Homo Sapiens
RLPSSADVEFC

SEQ ID NO: 58436 - protein, 11 aa, Homo Sapiens
LPSSADVEFCL

SEQ ID NO: 58437 - protein, 11 aa, Homo Sapiens
SSADVEFCLSL

SEQ ID NO: 58438 - protein, 11 aa, Homo Sapiens
DVEFCLSLTQY

SEQ ID NO: 58439 - protein, 11 aa, Homo Sapiens
LTQYESGSMDK

SEQ ID NO: 58440 - protein, 11 aa, Homo Sapiens
TQYESGSMDKA

SEQ ID NO: 58441 - protein, 11 aa, Homo Sapiens
GSMDKAANFSF

SEQ ID NO: 58442 - protein, 11 aa, Homo Sapiens
SMDKAANFSFR

SEQ ID NO: 58443 - protein, 11 aa, Homo Sapiens
KAANFSFRNTL

SEQ ID NO: 58444 - protein, 11 aa, Homo Sapiens
NFSFRNTLEGF

SEQ ID NO: 58445 - protein, 11 aa, Homo Sapiens
FSFRNTLEGFA

SEQ ID NO: 58446 - protein, 11 aa, Homo Sapiens
NTLEGFASPLT

SEQ ID NO: 58447 - protein, 11 aa, Homo Sapiens
LEGFASPLTGI

SEQ ID NO: 58448 - protein, 11 aa, Homo Sapiens
EGFASPLTGIA

SEQ ID NO: 58449 - protein, 11 aa, Homo Sapiens
FASPLTGIADA

SEQ ID NO: 58450 - protein, 11 aa, Homo Sapiens
DASQSSMHNAL

SEQ ID NO: 58451 - protein, 11 aa, Homo Sapiens
SQSSMHNALHI

SEQ ID NO: 58452 - protein, 11 aa, Homo Sapiens
QSSMHNALHIY

SEQ ID NO: 58453 - protein, 11 aa, Homo Sapiens
SSMHNALHIYM

SEQ ID NO: 58454 - protein, 11 aa, Homo Sapiens
NALHIYMNGTM

SEQ ID NO: 58455 - protein, 11 aa, Homo Sapiens
HIYMNGTMSQV

SEQ ID NO: 58456 - protein, 11 aa, Homo Sapiens
YMNGTMSQVQG

SEQ ID NO: 58457 - protein, 11 aa, Homo Sapiens
SQVQGSANDPI

SEQ ID NO: 58458 - protein, 11 aa, Homo Sapiens
QVQGSANDPIF

SEQ ID NO: 58459 - protein, 11 aa, Homo Sapiens
VQGSANDPIFL

SEQ ID NO: 58460 - protein, 11 aa, Homo Sapiens
QGSANDPIFLL

SEQ ID NO: 58461 - protein, 11 aa, Homo Sapiens
SANDPIFLLHH

SEQ ID NO: 58462 - protein, 11 aa, Homo Sapiens
DPIFLLHHAFV

SEQ ID NO: 58463 - protein, 11 aa, Homo Sapiens
FLLHHAFVDSI

SEQ ID NO: 58464 - protein, 11 aa, Homo Sapiens
LLHHAFVDSIF

SEQ ID NO: 58465 - protein, 11 aa, Homo Sapiens
HAFVDSIFEQW

SEQ ID NO: 58466 - protein, 11 aa, Homo Sapiens
AFVDSIFEQWL

SEQ ID NO: 58467 - protein, 11 aa, Homo Sapiens
FVDSIFEQWLQ

SEQ ID NO: 58468 - protein, 11 aa, Homo Sapiens
SIFEQWLQRHR

SEQ ID NO: 58469 - protein, 11 aa, Homo Sapiens
FEQWLQRHRPL

SEQ ID NO: 58470 - protein, 11 aa, Homo Sapiens
WLQRHRPLQEV

SEQ ID NO: 58471 - protein, 11 aa, Homo Sapiens
LQRHRPLQEVY

SEQ ID NO: 58472 - protein, 11 aa, Homo Sapiens
PLQEVYPEANA

SEQ ID NO: 58473 - protein, 11 aa, Homo Sapiens
APIGHNRESYM

SEQ ID NO: 58474 - protein, 11 aa, Homo Sapiens
PIGHNRESYMV

SEQ ID NO: 58475 - protein, 11 aa, Homo Sapiens
RESYMVPFIPL

SEQ ID NO: 58476 - protein, 11 aa, Homo Sapiens
ESYMVPFIPLY

SEQ ID NO: 58477 - protein, 11 aa, Homo Sapiens
SYMVPFIPLYR

SEQ ID NO: 58478 - protein, 11 aa, Homo Sapiens
YMVPFIPLYRN

SEQ ID NO: 58479 - protein, 11 aa, Homo Sapiens
VPFIPLYRNGD

SEQ ID NO: 58480 - protein, 11 aa, Homo Sapiens
PFIPLYRNGDF

SEQ ID NO: 58481 - protein, 11 aa, Homo Sapiens
FIPLYRNGDFF

SEQ ID NO: 58482 - protein, 11 aa, Homo Sapiens
IPLYRNGDFFI

SEQ ID NO: 58483 - protein, 11 aa, Homo Sapiens
YRNGDFFISSK

SEQ ID NO: 58484 - protein, 11 aa, Homo Sapiens
DFFISSKDLGY

SEQ ID NO: 58485 - protein, 11 aa, Homo Sapiens
FISSKDLGYDY

SEQ ID NO: 58486 - protein, 11 aa, Homo Sapiens
SSKDLGYDYSY

SEQ ID NO: 58487 - protein, 11 aa, Homo Sapiens
SYLQDSDPDSF

SEQ ID NO: 58488 - protein, 11 aa, Homo Sapiens
YLQDSDPDSFQ

SEQ ID NO: 58489 - protein, 11 aa, Homo Sapiens
DSFQDYIKSYL

SEQ ID NO: 58490 - protein, 11 aa, Homo Sapiens
FQDYIKSYLEQ

SEQ ID NO: 58491 - protein, 11 aa, Homo Sapiens
YIKSYLEQASR

SEQ ID NO: 58492 - protein, 11 aa, Homo Sapiens
KSYLEQASRIW

SEQ ID NO: 58493 - protein, 11 aa, Homo Sapiens
YLEQASRIWSW

SEQ ID NO: 58494 - protein, 11 aa, Homo Sapiens
LEQASRIWSWL

SEQ ID NO: 58495 - protein, 11 aa, Homo Sapiens
EQASRIWSWLL

SEQ ID NO: 58496 - protein, 11 aa, Homo Sapiens
RIWSWLLGAAM

SEQ ID NO: 58497 - protein, 11 aa, Homo Sapiens
WLLGAAMVGAV

SEQ ID NO: 58498 - protein, 11 aa, Homo Sapiens
LLGAAMVGAVL

SEQ ID NO: 58499 - protein, 11 aa, Homo Sapiens
AAMVGAVLTAL

SEQ ID NO: 58500 - protein, 11 aa, Homo Sapiens
AMVGAVLTALL

SEQ ID NO: 58501 - protein, 11 aa, Homo Sapiens
MVGAVLTALLA

SEQ ID NO: 58502 - protein, 11 aa, Homo Sapiens
GAVLTALLAGL

SEQ ID NO: 58503 - protein, 11 aa, Homo Sapiens
AVLTALLAGLV

SEQ ID NO: 58504 - protein, 11 aa, Homo Sapiens
LTALLAGLVSL

SEQ ID NO: 58505 - protein, 11 aa, Homo Sapiens
ALLAGLVSLLC

SEQ ID NO: 58506 - protein, 11 aa, Homo Sapiens
LLAGLVSLLCR

SEQ ID NO: 58507 - protein, 11 aa, Homo Sapiens
AGLVSLLCRHK

SEQ ID NO: 58508 - protein, 11 aa, Homo Sapiens
GLVSLLCRHKR

SEQ ID NO: 58509 - protein, 11 aa, Homo Sapiens
LVSLLCRHKRK

SEQ ID NO: 58510 - protein, 11 aa, Homo Sapiens
SLLCRHKRKQL

SEQ ID NO: 58511 - protein, 11 aa, Homo Sapiens
RHKRKQLPEEK

SEQ ID NO: 58512 - protein, 11 aa, Homo Sapiens
KQLPEEKQPLL

SEQ ID NO: 58513 - protein, 11 aa, Homo Sapiens
QLPEEKQPLLM

SEQ ID NO: 58514 - protein, 11 aa, Homo Sapiens
KQPLLMEKEDY

SEQ ID NO: 58515 - protein, 11 aa, Homo Sapiens
LLMEKEDYHSL

SEQ ID NO: 58516 - protein, 11 aa, Homo Sapiens
LMEKEDYHSLY

SEQ ID NO: 58517 - protein, 13 aa, Homo Sapiens
MLLAVLYCLLWSF

SEQ ID NO: 58518 - protein, 13 aa, Homo Sapiens
LLAVLYCLLWSFQ

SEQ ID NO: 58519 - protein, 13 aa, Homo Sapiens
LAVLYCLLWSFQT

SEQ ID NO: 58520 - protein, 13 aa, Homo Sapiens
AVLYCLLWSFQTS

SEQ ID NO: 58521 - protein, 13 aa, Homo Sapiens
VLYCLLWSFQTSA

SEQ ID NO: 58522 - protein, 13 aa, Homo Sapiens
LYCLLWSFQTSAG

SEQ ID NO: 58523 - protein, 13 aa, Homo Sapiens
YCLLWSFQTSAGH

SEQ ID NO: 58524 - protein, 13 aa, Homo Sapiens
CLLWSFQTSAGHF

SEQ ID NO: 58525 - protein, 13 aa, Homo Sapiens
LLWSFQTSAGHFP

SEQ ID NO: 58526 - protein, 13 aa, Homo Sapiens
LWSFQTSAGHFPR

SEQ ID NO: 58527 - protein, 13 aa, Homo Sapiens
WSFQTSAGHFPRA

SEQ ID NO: 58528 - protein, 13 aa, Homo Sapiens
SFQTSAGHFPRAC

SEQ ID NO: 58529 - protein, 13 aa, Homo Sapiens
FQTSAGHFPRACV

SEQ ID NO: 58530 - protein, 13 aa, Homo Sapiens
QTSAGHFPRACVS

SEQ ID NO: 58531 - protein, 13 aa, Homo Sapiens
TSAGHFPRACVSS

SEQ ID NO: 58532 - protein, 13 aa, Homo Sapiens
SAGHFPRACVSSK

SEQ ID NO: 58533 - protein, 13 aa, Homo Sapiens
AGHFPRACVSSKN

SEQ ID NO: 58534 - protein, 13 aa, Homo Sapiens
GHFPRACVSSKNL

SEQ ID NO: 58535 - protein, 13 aa, Homo Sapiens
HFPRACVSSKNLM

SEQ ID NO: 58536 - protein, 13 aa, Homo Sapiens
FPRACVSSKNLME

SEQ ID NO: 58537 - protein, 13 aa, Homo Sapiens
PRACVSSKNLMEK

SEQ ID NO: 58538 - protein, 13 aa, Homo Sapiens
RACVSSKNLMEKE

SEQ ID NO: 58539 - protein, 13 aa, Homo Sapiens
ACVSSKNLMEKEC

SEQ ID NO: 58540 - protein, 13 aa, Homo Sapiens
CVSSKNLMEKECC

SEQ ID NO: 58541 - protein, 13 aa, Homo Sapiens
VSSKNLMEKECCP

SEQ ID NO: 58542 - protein, 13 aa, Homo Sapiens
SSKNLMEKECCPP

SEQ ID NO: 58543 - protein, 13 aa, Homo Sapiens
SKNLMEKECCPPW

SEQ ID NO: 58544 - protein, 13 aa, Homo Sapiens
KNLMEKECCPPWS

SEQ ID NO: 58545 - protein, 13 aa, Homo Sapiens
NLMEKECCPPWSG

SEQ ID NO: 58546 - protein, 13 aa, Homo Sapiens
LMEKECCPPWSGD

SEQ ID NO: 58547 - protein, 13 aa, Homo Sapiens
MEKECCPPWSGDR

SEQ ID NO: 58548 - protein, 13 aa, Homo Sapiens
EKECCPPWSGDRS

SEQ ID NO: 58549 - protein, 13 aa, Homo Sapiens
KECCPPWSGDRSP

SEQ ID NO: 58550 - protein, 13 aa, Homo Sapiens
ECCPPWSGDRSPC

SEQ ID NO: 58551 - protein, 13 aa, Homo Sapiens
CCPPWSGDRSPCG

SEQ ID NO: 58552 - protein, 13 aa, Homo Sapiens
CPPWSGDRSPCGQ

SEQ ID NO: 58553 - protein, 13 aa, Homo Sapiens
PPWSGDRSPCGQL

SEQ ID NO: 58554 - protein, 13 aa, Homo Sapiens
PWSGDRSPCGQLS

SEQ ID NO: 58555 - protein, 13 aa, Homo Sapiens
WSGDRSPCGQLSG

SEQ ID NO: 58556 - protein, 13 aa, Homo Sapiens
SGDRSPCGQLSGR

SEQ ID NO: 58557 - protein, 13 aa, Homo Sapiens
GDRSPCGQLSGRG

SEQ ID NO: 58558 - protein, 13 aa, Homo Sapiens
DRSPCGQLSGRGS

SEQ ID NO: 58559 - protein, 13 aa, Homo Sapiens
RSPCGQLSGRGSC

SEQ ID NO: 58560 - protein, 13 aa, Homo Sapiens
SPCGQLSGRGSCQ

SEQ ID NO: 58561 - protein, 13 aa, Homo Sapiens
PCGQLSGRGSCQN

SEQ ID NO: 58562 - protein, 13 aa, Homo Sapiens
CGQLSGRGSCQNI

SEQ ID NO: 58563 - protein, 13 aa, Homo Sapiens
GQLSGRGSCQNIL

SEQ ID NO: 58564 - protein, 13 aa, Homo Sapiens
QLSGRGSCQNILL

SEQ ID NO: 58565 - protein, 13 aa, Homo Sapiens
LSGRGSCQNILLS

SEQ ID NO: 58566 - protein, 13 aa, Homo Sapiens
SGRGSCQNILLSN

SEQ ID NO: 58567 - protein, 13 aa, Homo Sapiens
GRGSCQNILLSNA

SEQ ID NO: 58568 - protein, 13 aa, Homo Sapiens
RGSCQNILLSNAP

SEQ ID NO: 58569 - protein, 13 aa, Homo Sapiens
GSCQNILLSNAPL

SEQ ID NO: 58570 - protein, 13 aa, Homo Sapiens
SCQNILLSNAPLG

SEQ ID NO: 58571 - protein, 13 aa, Homo Sapiens
CQNILLSNAPLGP

SEQ ID NO: 58572 - protein, 13 aa, Homo Sapiens
QNILLSNAPLGPQ

SEQ ID NO: 58573 - protein, 13 aa, Homo Sapiens
NILLSNAPLGPQF

SEQ ID NO: 58574 - protein, 13 aa, Homo Sapiens
ILLSNAPLGPQFP

SEQ ID NO: 58575 - protein, 13 aa, Homo Sapiens
LLSNAPLGPQFPF

SEQ ID NO: 58576 - protein, 13 aa, Homo Sapiens
LSNAPLGPQFPFT

SEQ ID NO: 58577 - protein, 13 aa, Homo Sapiens
SNAPLGPQFPFTG

SEQ ID NO: 58578 - protein, 13 aa, Homo Sapiens
NAPLGPQFPFTGV

SEQ ID NO: 58579 - protein, 13 aa, Homo Sapiens
APLGPQFPFTGVD

SEQ ID NO: 58580 - protein, 13 aa, Homo Sapiens
PLGPQFPFTGVDD

SEQ ID NO: 58581 - protein, 13 aa, Homo Sapiens
LGPQFPFTGVDDR

SEQ ID NO: 58582 - protein, 13 aa, Homo Sapiens
GPQFPFTGVDDRE

SEQ ID NO: 58583 - protein, 13 aa, Homo Sapiens
PQFPFTGVDDRES

SEQ ID NO: 58584 - protein, 13 aa, Homo Sapiens
QFPFTGVDDRESW

SEQ ID NO: 58585 - protein, 13 aa, Homo Sapiens
FPFTGVDDRESWP

SEQ ID NO: 58586 - protein, 13 aa, Homo Sapiens
PFTGVDDRESWPS

SEQ ID NO: 58587 - protein, 13 aa, Homo Sapiens
FTGVDDRESWPSV

SEQ ID NO: 58588 - protein, 13 aa, Homo Sapiens
TGVDDRESWPSVF

SEQ ID NO: 58589 - protein, 13 aa, Homo Sapiens
GVDDRESWPSVFY

SEQ ID NO: 58590 - protein, 13 aa, Homo Sapiens
VDDRESWPSVFYN

SEQ ID NO: 58591 - protein, 13 aa, Homo Sapiens
DDRESWPSVFYNR

SEQ ID NO: 58592 - protein, 13 aa, Homo Sapiens
DRESWPSVFYNRT

SEQ ID NO: 58593 - protein, 13 aa, Homo Sapiens
RESWPSVFYNRTC

SEQ ID NO: 58594 - protein, 13 aa, Homo Sapiens
ESWPSVFYNRTCQ

SEQ ID NO: 58595 - protein, 13 aa, Homo Sapiens
SWPSVFYNRTCQC

SEQ ID NO: 58596 - protein, 13 aa, Homo Sapiens
WPSVFYNRTCQCS

SEQ ID NO: 58597 - protein, 13 aa, Homo Sapiens
PSVFYNRTCQCSG

SEQ ID NO: 58598 - protein, 13 aa, Homo Sapiens
SVFYNRTCQCSGN

SEQ ID NO: 58599 - protein, 13 aa, Homo Sapiens
VFYNRTCQCSGNF

SEQ ID NO: 58600 - protein, 13 aa, Homo Sapiens
FYNRTCQCSGNFM

SEQ ID NO: 58601 - protein, 13 aa, Homo Sapiens
YNRTCQCSGNFMG

SEQ ID NO: 58602 - protein, 13 aa, Homo Sapiens
NRTCQCSGNFMGF

SEQ ID NO: 58603 - protein, 13 aa, Homo Sapiens
RTCQCSGNFMGFN

SEQ ID NO: 58604 - protein, 13 aa, Homo Sapiens
TCQCSGNFMGFNC

SEQ ID NO: 58605 - protein, 13 aa, Homo Sapiens
CQCSGNFMGFNCG

SEQ ID NO: 58606 - protein, 13 aa, Homo Sapiens
QCSGNFMGFNCGN

SEQ ID NO: 58607 - protein, 13 aa, Homo Sapiens
CSGNFMGFNCGNC

SEQ ID NO: 58608 - protein, 13 aa, Homo Sapiens
SGNFMGFNCGNCK

SEQ ID NO: 58609 - protein, 13 aa, Homo Sapiens
GNFMGFNCGNCKF

SEQ ID NO: 58610 - protein, 13 aa, Homo Sapiens
NFMGFNCGNCKFG

SEQ ID NO: 58611 - protein, 13 aa, Homo Sapiens
FMGFNCGNCKFGF

SEQ ID NO: 58612 - protein, 13 aa, Homo Sapiens
MGFNCGNCKFGFW

SEQ ID NO: 58613 - protein, 13 aa, Homo Sapiens
GFNCGNCKFGFWG

SEQ ID NO: 58614 - protein, 13 aa, Homo Sapiens
FNCGNCKFGFWGP

SEQ ID NO: 58615 - protein, 13 aa, Homo Sapiens
NCGNCKFGFWGPN

SEQ ID NO: 58616 - protein, 13 aa, Homo Sapiens
CGNCKFGFWGPNC

SEQ ID NO: 58617 - protein, 13 aa, Homo Sapiens
GNCKFGFWGPNCT

SEQ ID NO: 58618 - protein, 13 aa, Homo Sapiens
NCKFGFWGPNCTE

SEQ ID NO: 58619 - protein, 13 aa, Homo Sapiens
CKFGFWGPNCTER

SEQ ID NO: 58620 - protein, 13 aa, Homo Sapiens
KFGFWGPNCTERR

SEQ ID NO: 58621 - protein, 13 aa, Homo Sapiens
FGFWGPNCTERRL

SEQ ID NO: 58622 - protein, 13 aa, Homo Sapiens
GFWGPNCTERRLL

SEQ ID NO: 58623 - protein, 13 aa, Homo Sapiens
FWGPNCTERRLLV

SEQ ID NO: 58624 - protein, 13 aa, Homo Sapiens
WGPNCTERRLLVR

SEQ ID NO: 58625 - protein, 13 aa, Homo Sapiens
GPNCTERRLLVRR

SEQ ID NO: 58626 - protein, 13 aa, Homo Sapiens
PNCTERRLLVRRN

SEQ ID NO: 58627 - protein, 13 aa, Homo Sapiens
NCTERRLLVRRNI

SEQ ID NO: 58628 - protein, 13 aa, Homo Sapiens
CTERRLLVRRNIF

SEQ ID NO: 58629 - protein, 13 aa, Homo Sapiens
TERRLLVRRNIFD

SEQ ID NO: 58630 - protein, 13 aa, Homo Sapiens
ERRLLVRRNIFDL

SEQ ID NO: 58631 - protein, 13 aa, Homo Sapiens
RRLLVRRNIFDLS

SEQ ID NO: 58632 - protein, 13 aa, Homo Sapiens
RLLVRRNIFDLSA

SEQ ID NO: 58633 - protein, 13 aa, Homo Sapiens
LLVRRNIFDLSAP

SEQ ID NO: 58634 - protein, 13 aa, Homo Sapiens
LVRRNIFDLSAPE

SEQ ID NO: 58635 - protein, 13 aa, Homo Sapiens
VRRNIFDLSAPEK

SEQ ID NO: 58636 - protein, 13 aa, Homo Sapiens
RRNIFDLSAPEKD

SEQ ID NO: 58637 - protein, 13 aa, Homo Sapiens
RNIFDLSAPEKDK

SEQ ID NO: 58638 - protein, 13 aa, Homo Sapiens
NIFDLSAPEKDKF

SEQ ID NO: 58639 - protein, 13 aa, Homo Sapiens
IFDLSAPEKDKFF

SEQ ID NO: 58640 - protein, 13 aa, Homo Sapiens
FDLSAPEKDKFFA

SEQ ID NO: 58641 - protein, 13 aa, Homo Sapiens
DLSAPEKDKFFAY

SEQ ID NO: 58642 - protein, 13 aa, Homo Sapiens
LSAPEKDKFFAYL

SEQ ID NO: 58643 - protein, 13 aa, Homo Sapiens
SAPEKDKFFAYLT

SEQ ID NO: 58644 - protein, 13 aa, Homo Sapiens
APEKDKFFAYLTL

SEQ ID NO: 58645 - protein, 13 aa, Homo Sapiens
PEKDKFFAYLTLA

SEQ ID NO: 58646 - protein, 13 aa, Homo Sapiens
EKDKFFAYLTLAK

SEQ ID NO: 58647 - protein, 13 aa, Homo Sapiens
KDKFFAYLTLAKH

SEQ ID NO: 58648 - protein, 13 aa, Homo Sapiens
DKFFAYLTLAKHT

SEQ ID NO: 58649 - protein, 13 aa, Homo Sapiens
KFFAYLTLAKHTI

SEQ ID NO: 58650 - protein, 13 aa, Homo Sapiens
FFAYLTLAKHTIS

SEQ ID NO: 58651 - protein, 13 aa, Homo Sapiens
FAYLTLAKHTISS

SEQ ID NO: 58652 - protein, 13 aa, Homo Sapiens
AYLTLAKHTISSD

SEQ ID NO: 58653 - protein, 13 aa, Homo Sapiens
YLTLAKHTISSDY

SEQ ID NO: 58654 - protein, 13 aa, Homo Sapiens
LTLAKHTISSDYV

SEQ ID NO: 58655 - protein, 13 aa, Homo Sapiens
TLAKHTISSDYVI

SEQ ID NO: 58656 - protein, 13 aa, Homo Sapiens
LAKHTISSDYVIP

SEQ ID NO: 58657 - protein, 13 aa, Homo Sapiens
AKHTISSDYVIPI

SEQ ID NO: 58658 - protein, 13 aa, Homo Sapiens
KHTISSDYVIPIG

SEQ ID NO: 58659 - protein, 13 aa, Homo Sapiens
HTISSDYVIPIGT

SEQ ID NO: 58660 - protein, 13 aa, Homo Sapiens
TISSDYVIPIGTY

SEQ ID NO: 58661 - protein, 13 aa, Homo Sapiens
ISSDYVIPIGTYG

SEQ ID NO: 58662 - protein, 13 aa, Homo Sapiens
SSDYVIPIGTYGQ

SEQ ID NO: 58663 - protein, 13 aa, Homo Sapiens
SDYVIPIGTYGQM

SEQ ID NO: 58664 - protein, 13 aa, Homo Sapiens
DYVIPIGTYGQMK

SEQ ID NO: 58665 - protein, 13 aa, Homo Sapiens
YVIPIGTYGQMKN

SEQ ID NO: 58666 - protein, 13 aa, Homo Sapiens
VIPIGTYGQMKNG

SEQ ID NO: 58667 - protein, 13 aa, Homo Sapiens
IPIGTYGQMKNGS

SEQ ID NO: 58668 - protein, 13 aa, Homo Sapiens
PIGTYGQMKNGST

SEQ ID NO: 58669 - protein, 13 aa, Homo Sapiens
IGTYGQMKNGSTP

SEQ ID NO: 58670 - protein, 13 aa, Homo Sapiens
GTYGQMKNGSTPM

SEQ ID NO: 58671 - protein, 13 aa, Homo Sapiens
TYGQMKNGSTPMF

SEQ ID NO: 58672 - protein, 13 aa, Homo Sapiens
YGQMKNGSTPMFN

SEQ ID NO: 58673 - protein, 13 aa, Homo Sapiens
GQMKNGSTPMFND

SEQ ID NO: 58674 - protein, 13 aa, Homo Sapiens
QMKNGSTPMFNDI

SEQ ID NO: 58675 - protein, 13 aa, Homo Sapiens
MKNGSTPMFNDIN

SEQ ID NO: 58676 - protein, 13 aa, Homo Sapiens
KNGSTPMFNDINI

SEQ ID NO: 58677 - protein, 13 aa, Homo Sapiens
NGSTPMFNDINIY

SEQ ID NO: 58678 - protein, 13 aa, Homo Sapiens
GSTPMFNDINIYD

SEQ ID NO: 58679 - protein, 13 aa, Homo Sapiens
STPMFNDINIYDL

SEQ ID NO: 58680 - protein, 13 aa, Homo Sapiens
TPMFNDINIYDLF

SEQ ID NO: 58681 - protein, 13 aa, Homo Sapiens
PMFNDINIYDLFV

SEQ ID NO: 58682 - protein, 13 aa, Homo Sapiens
MFNDINIYDLFVW

SEQ ID NO: 58683 - protein, 13 aa, Homo Sapiens
FNDINIYDLFVWM

SEQ ID NO: 58684 - protein, 13 aa, Homo Sapiens
NDINIYDLFVWMH

SEQ ID NO: 58685 - protein, 13 aa, Homo Sapiens
DINIYDLFVWMHY

SEQ ID NO: 58686 - protein, 13 aa, Homo Sapiens
INIYDLFVWMHYY

SEQ ID NO: 58687 - protein, 13 aa, Homo Sapiens
NIYDLFVWMHYYV

SEQ ID NO: 58688 - protein, 13 aa, Homo Sapiens
IYDLFVWMHYYVS

SEQ ID NO: 58689 - protein, 13 aa, Homo Sapiens
YDLFVWMHYYVSM

SEQ ID NO: 58690 - protein, 13 aa, Homo Sapiens
DLFVWMHYYVSMD

SEQ ID NO: 58691 - protein, 13 aa, Homo Sapiens
LFVWMHYYVSMDA

SEQ ID NO: 58692 - protein, 13 aa, Homo Sapiens
FVWMHYYVSMDAL

SEQ ID NO: 58693 - protein, 13 aa, Homo Sapiens
VWMHYYVSMDALL

SEQ ID NO: 58694 - protein, 13 aa, Homo Sapiens
WMHYYVSMDALLG

SEQ ID NO: 58695 - protein, 13 aa, Homo Sapiens
MHYYVSMDALLGG

SEQ ID NO: 58696 - protein, 13 aa, Homo Sapiens
HYYVSMDALLGGS

SEQ ID NO: 58697 - protein, 13 aa, Homo Sapiens
YYVSMDALLGGSE

SEQ ID NO: 58698 - protein, 13 aa, Homo Sapiens
YVSMDALLGGSEI

SEQ ID NO: 58699 - protein, 13 aa, Homo Sapiens
VSMDALLGGSEIW

SEQ ID NO: 58700 - protein, 13 aa, Homo Sapiens
SMDALLGGSEIWR

SEQ ID NO: 58701 - protein, 13 aa, Homo Sapiens
MDALLGGSEIWRD

SEQ ID NO: 58702 - protein, 13 aa, Homo Sapiens
DALLGGSEIWRDI

SEQ ID NO: 58703 - protein, 13 aa, Homo Sapiens
ALLGGSEIWRDID

SEQ ID NO: 58704 - protein, 13 aa, Homo Sapiens
LLGGSEIWRDIDF

SEQ ID NO: 58705 - protein, 13 aa, Homo Sapiens
LGGSEIWRDIDFA

SEQ ID NO: 58706 - protein, 13 aa, Homo Sapiens
GGSEIWRDIDFAH

SEQ ID NO: 58707 - protein, 13 aa, Homo Sapiens
GSEIWRDIDFAHE

SEQ ID NO: 58708 - protein, 13 aa, Homo Sapiens
SEIWRDIDFAHEA

SEQ ID NO: 58709 - protein, 13 aa, Homo Sapiens
EIWRDIDFAHEAP

SEQ ID NO: 58710 - protein, 13 aa, Homo Sapiens
IWRDIDFAHEAPA

SEQ ID NO: 58711 - protein, 13 aa, Homo Sapiens
WRDIDFAHEAPAF

SEQ ID NO: 58712 - protein, 13 aa, Homo Sapiens
RDIDFAHEAPAFL

SEQ ID NO: 58713 - protein, 13 aa, Homo Sapiens
DIDFAHEAPAFLP

SEQ ID NO: 58714 - protein, 13 aa, Homo Sapiens
IDFAHEAPAFLPW

SEQ ID NO: 58715 - protein, 13 aa, Homo Sapiens
DFAHEAPAFLPWH

SEQ ID NO: 58716 - protein, 13 aa, Homo Sapiens
FAHEAPAFLPWHR

SEQ ID NO: 58717 - protein, 13 aa, Homo Sapiens
AHEAPAFLPWHRL

SEQ ID NO: 58718 - protein, 13 aa, Homo Sapiens
HEAPAFLPWHRLF

SEQ ID NO: 58719 - protein, 13 aa, Homo Sapiens
EAPAFLPWHRLFL

SEQ ID NO: 58720 - protein, 13 aa, Homo Sapiens
APAFLPWHRLFLL

SEQ ID NO: 58721 - protein, 13 aa, Homo Sapiens
PAFLPWHRLFLLR

SEQ ID NO: 58722 - protein, 13 aa, Homo Sapiens
AFLPWHRLFLLRW

SEQ ID NO: 58723 - protein, 13 aa, Homo Sapiens
FLPWHRLFLLRWE

SEQ ID NO: 58724 - protein, 13 aa, Homo Sapiens
LPWHRLFLLRWEQ

SEQ ID NO: 58725 - protein, 13 aa, Homo Sapiens
PWHRLFLLRWEQE

SEQ ID NO: 58726 - protein, 13 aa, Homo Sapiens
WHRLFLLRWEQEI

SEQ ID NO: 58727 - protein, 13 aa, Homo Sapiens
HRLFLLRWEQEIQ

SEQ ID NO: 58728 - protein, 13 aa, Homo Sapiens
RLFLLRWEQEIQK

SEQ ID NO: 58729 - protein, 13 aa, Homo Sapiens
LFLLRWEQEIQKL

SEQ ID NO: 58730 - protein, 13 aa, Homo Sapiens
FLLRWEQEIQKLT

SEQ ID NO: 58731 - protein, 13 aa, Homo Sapiens
LLRWEQEIQKLTG

SEQ ID NO: 58732 - protein, 13 aa, Homo Sapiens
LRWEQEIQKLTGD

SEQ ID NO: 58733 - protein, 13 aa, Homo Sapiens
RWEQEIQKLTGDE

SEQ ID NO: 58734 - protein, 13 aa, Homo Sapiens
WEQEIQKLTGDEN

SEQ ID NO: 58735 - protein, 13 aa, Homo Sapiens
EQEIQKLTGDENF

SEQ ID NO: 58736 - protein, 13 aa, Homo Sapiens
QEIQKLTGDENFT

SEQ ID NO: 58737 - protein, 13 aa, Homo Sapiens
EIQKLTGDENFTI

SEQ ID NO: 58738 - protein, 13 aa, Homo Sapiens
IQKLTGDENFTIP

SEQ ID NO: 58739 - protein, 13 aa, Homo Sapiens
QKLTGDENFTIPY

SEQ ID NO: 58740 - protein, 13 aa, Homo Sapiens
KLTGDENFTIPYW

SEQ ID NO: 58741 - protein, 13 aa, Homo Sapiens
LTGDENFTIPYWD

SEQ ID NO: 58742 - protein, 13 aa, Homo Sapiens
TGDENFTIPYWDW

SEQ ID NO: 58743 - protein, 13 aa, Homo Sapiens
GDENFTIPYWDWR

SEQ ID NO: 58744 - protein, 13 aa, Homo Sapiens
DENFTIPYWDWRD

SEQ ID NO: 58745 - protein, 13 aa, Homo Sapiens
ENFTIPYWDWRDA

SEQ ID NO: 58746 - protein, 13 aa, Homo Sapiens
NFTIPYWDWRDAE

SEQ ID NO: 58747 - protein, 13 aa, Homo Sapiens
FTIPYWDWRDAEK

SEQ ID NO: 58748 - protein, 13 aa, Homo Sapiens
TIPYWDWRDAEKC

SEQ ID NO: 58749 - protein, 13 aa, Homo Sapiens
IPYWDWRDAEKCD

SEQ ID NO: 58750 - protein, 13 aa, Homo Sapiens
PYWDWRDAEKCDI

SEQ ID NO: 58751 - protein, 13 aa, Homo Sapiens
YWDWRDAEKCDIC

SEQ ID NO: 58752 - protein, 13 aa, Homo Sapiens
WDWRDAEKCDICT

SEQ ID NO: 58753 - protein, 13 aa, Homo Sapiens
DWRDAEKCDICTD

SEQ ID NO: 58754 - protein, 13 aa, Homo Sapiens
WRDAEKCDICTDE

SEQ ID NO: 58755 - protein, 13 aa, Homo Sapiens
RDAEKCDICTDEY

SEQ ID NO: 58756 - protein, 13 aa, Homo Sapiens
DAEKCDICTDEYM

SEQ ID NO: 58757 - protein, 13 aa, Homo Sapiens
AEKCDICTDEYMG

SEQ ID NO: 58758 - protein, 13 aa, Homo Sapiens
EKCDICTDEYMGG

SEQ ID NO: 58759 - protein, 13 aa, Homo Sapiens
KCDICTDEYMGGQ

SEQ ID NO: 58760 - protein, 13 aa, Homo Sapiens
CDICTDEYMGGQH

SEQ ID NO: 58761 - protein, 13 aa, Homo Sapiens
DICTDEYMGGQHP

SEQ ID NO: 58762 - protein, 13 aa, Homo Sapiens
ICTDEYMGGQHPT

SEQ ID NO: 58763 - protein, 13 aa, Homo Sapiens
CTDEYMGGQHPTN

SEQ ID NO: 58764 - protein, 13 aa, Homo Sapiens
TDEYMGGQHPTNP

SEQ ID NO: 58765 - protein, 13 aa, Homo Sapiens
DEYMGGQHPTNPN

SEQ ID NO: 58766 - protein, 13 aa, Homo Sapiens
EYMGGQHPTNPNL

SEQ ID NO: 58767 - protein, 13 aa, Homo Sapiens
YMGGQHPTNPNLL

SEQ ID NO: 58768 - protein, 13 aa, Homo Sapiens
MGGQHPTNPNLLS

SEQ ID NO: 58769 - protein, 13 aa, Homo Sapiens
GGQHPTNPNLLSP

SEQ ID NO: 58770 - protein, 13 aa, Homo Sapiens
GQHPTNPNLLSPA

SEQ ID NO: 58771 - protein, 13 aa, Homo Sapiens
QHPTNPNLLSPAS

SEQ ID NO: 58772 - protein, 13 aa, Homo Sapiens
HPTNPNLLSPASF

SEQ ID NO: 58773 - protein, 13 aa, Homo Sapiens
PTNPNLLSPASFF

SEQ ID NO: 58774 - protein, 13 aa, Homo Sapiens
TNPNLLSPASFFS

SEQ ID NO: 58775 - protein, 13 aa, Homo Sapiens
NPNLLSPASFFSS

SEQ ID NO: 58776 - protein, 13 aa, Homo Sapiens
PNLLSPASFFSSW

SEQ ID NO: 58777 - protein, 13 aa, Homo Sapiens
NLLSPASFFSSWQ

SEQ ID NO: 58778 - protein, 13 aa, Homo Sapiens
LLSPASFFSSWQI

SEQ ID NO: 58779 - protein, 13 aa, Homo Sapiens
LSPASFFSSWQIV

SEQ ID NO: 58780 - protein, 13 aa, Homo Sapiens
SPASFFSSWQIVC

SEQ ID NO: 58781 - protein, 13 aa, Homo Sapiens
PASFFSSWQIVCS

SEQ ID NO: 58782 - protein, 13 aa, Homo Sapiens
ASFFSSWQIVCSR

SEQ ID NO: 58783 - protein, 13 aa, Homo Sapiens
SFFSSWQIVCSRL

SEQ ID NO: 58784 - protein, 13 aa, Homo Sapiens
FFSSWQIVCSRLE

SEQ ID NO: 58785 - protein, 13 aa, Homo Sapiens
FSSWQIVCSRLEE

SEQ ID NO: 58786 - protein, 13 aa, Homo Sapiens
SSWQIVCSRLEEY

SEQ ID NO: 58787 - protein, 13 aa, Homo Sapiens
SWQIVCSRLEEYN

SEQ ID NO: 58788 - protein, 13 aa, Homo Sapiens
WQIVCSRLEEYNS

SEQ ID NO: 58789 - protein, 13 aa, Homo Sapiens
QIVCSRLEEYNSH

SEQ ID NO: 58790 - protein, 13 aa, Homo Sapiens
IVCSRLEEYNSHQ

SEQ ID NO: 58791 - protein, 13 aa, Homo Sapiens
VCSRLEEYNSHQS

SEQ ID NO: 58792 - protein, 13 aa, Homo Sapiens
CSRLEEYNSHQSL

SEQ ID NO: 58793 - protein, 13 aa, Homo Sapiens
SRLEEYNSHQSLC

SEQ ID NO: 58794 - protein, 13 aa, Homo Sapiens
RLEEYNSHQSLCN

SEQ ID NO: 58795 - protein, 13 aa, Homo Sapiens
LEEYNSHQSLCNG

SEQ ID NO: 58796 - protein, 13 aa, Homo Sapiens
EEYNSHQSLCNGT

SEQ ID NO: 58797 - protein, 13 aa, Homo Sapiens
EYNSHQSLCNGTP

SEQ ID NO: 58798 - protein, 13 aa, Homo Sapiens
YNSHQSLCNGTPE

SEQ ID NO: 58799 - protein, 13 aa, Homo Sapiens
NSHQSLCNGTPEG

SEQ ID NO: 58800 - protein, 13 aa, Homo Sapiens
SHQSLCNGTPEGP

SEQ ID NO: 58801 - protein, 13 aa, Homo Sapiens
HQSLCNGTPEGPL

SEQ ID NO: 58802 - protein, 13 aa, Homo Sapiens
QSLCNGTPEGPLR

SEQ ID NO: 58803 - protein, 13 aa, Homo Sapiens
SLCNGTPEGPLRR

SEQ ID NO: 58804 - protein, 13 aa, Homo Sapiens
LCNGTPEGPLRRN

SEQ ID NO: 58805 - protein, 13 aa, Homo Sapiens
CNGTPEGPLRRNP

SEQ ID NO: 58806 - protein, 13 aa, Homo Sapiens
NGTPEGPLRRNPG

SEQ ID NO: 58807 - protein, 13 aa, Homo Sapiens
GTPEGPLRRNPGN

SEQ ID NO: 58808 - protein, 13 aa, Homo Sapiens
TPEGPLRRNPGNH

SEQ ID NO: 58809 - protein, 13 aa, Homo Sapiens
PEGPLRRNPGNHD

SEQ ID NO: 58810 - protein, 13 aa, Homo Sapiens
EGPLRRNPGNHDK

SEQ ID NO: 58811 - protein, 13 aa, Homo Sapiens
GPLRRNPGNHDKS

SEQ ID NO: 58812 - protein, 13 aa, Homo Sapiens
PLRRNPGNHDKSR

SEQ ID NO: 58813 - protein, 13 aa, Homo Sapiens
LRRNPGNHDKSRT

SEQ ID NO: 58814 - protein, 13 aa, Homo Sapiens
RRNPGNHDKSRTP

SEQ ID NO: 58815 - protein, 13 aa, Homo Sapiens
RNPGNHDKSRTPR

SEQ ID NO: 58816 - protein, 13 aa, Homo Sapiens
NPGNHDKSRTPRL

SEQ ID NO: 58817 - protein, 13 aa, Homo Sapiens
PGNHDKSRTPRLP

SEQ ID NO: 58818 - protein, 13 aa, Homo Sapiens
GNHDKSRTPRLPS

SEQ ID NO: 58819 - protein, 13 aa, Homo Sapiens
NHDKSRTPRLPSS

SEQ ID NO: 58820 - protein, 13 aa, Homo Sapiens
HDKSRTPRLPSSA

SEQ ID NO: 58821 - protein, 13 aa, Homo Sapiens
DKSRTPRLPSSAD

SEQ ID NO: 58822 - protein, 13 aa, Homo Sapiens
KSRTPRLPSSADV

SEQ ID NO: 58823 - protein, 13 aa, Homo Sapiens
SRTPRLPSSADVE

SEQ ID NO: 58824 - protein, 13 aa, Homo Sapiens
RTPRLPSSADVEF

SEQ ID NO: 58825 - protein, 13 aa, Homo Sapiens
TPRLPSSADVEFC

SEQ ID NO: 58826 - protein, 13 aa, Homo Sapiens
PRLPSSADVEFCL

SEQ ID NO: 58827 - protein, 13 aa, Homo Sapiens
RLPSSADVEFCLS

SEQ ID NO: 58828 - protein, 13 aa, Homo Sapiens
LPSSADVEFCLSL

SEQ ID NO: 58829 - protein, 13 aa, Homo Sapiens
PSSADVEFCLSLT

SEQ ID NO: 58830 - protein, 13 aa, Homo Sapiens
SSADVEFCLSLTQ

SEQ ID NO: 58831 - protein, 13 aa, Homo Sapiens
SADVEFCLSLTQY

SEQ ID NO: 58832 - protein, 13 aa, Homo Sapiens
ADVEFCLSLTQYE

SEQ ID NO: 58833 - protein, 13 aa, Homo Sapiens
DVEFCLSLTQYES

SEQ ID NO: 58834 - protein, 13 aa, Homo Sapiens
VEFCLSLTQYESG

SEQ ID NO: 58835 - protein, 13 aa, Homo Sapiens
EFCLSLTQYESGS

SEQ ID NO: 58836 - protein, 13 aa, Homo Sapiens
FCLSLTQYESGSM

SEQ ID NO: 58837 - protein, 13 aa, Homo Sapiens
CLSLTQYESGSMD

SEQ ID NO: 58838 - protein, 13 aa, Homo Sapiens
LSLTQYESGSMDK

SEQ ID NO: 58839 - protein, 13 aa, Homo Sapiens
SLTQYESGSMDKA

SEQ ID NO: 58840 - protein, 13 aa, Homo Sapiens
LTQYESGSMDKAA

SEQ ID NO: 58841 - protein, 13 aa, Homo Sapiens
TQYESGSMDKAAN

SEQ ID NO: 58842 - protein, 13 aa, Homo Sapiens
QYESGSMDKAANF

SEQ ID NO: 58843 - protein, 13 aa, Homo Sapiens
YESGSMDKAANFS

SEQ ID NO: 58844 - protein, 13 aa, Homo Sapiens
ESGSMDKAANFSF

SEQ ID NO: 58845 - protein, 13 aa, Homo Sapiens
SGSMDKAANFSFR

SEQ ID NO: 58846 - protein, 13 aa, Homo Sapiens
GSMDKAANFSFRN

SEQ ID NO: 58847 - protein, 13 aa, Homo Sapiens
SMDKAANFSFRNT

SEQ ID NO: 58848 - protein, 13 aa, Homo Sapiens
MDKAANFSFRNTL

SEQ ID NO: 58849 - protein, 13 aa, Homo Sapiens
DKAANFSFRNTLE

SEQ ID NO: 58850 - protein, 13 aa, Homo Sapiens
KAANFSFRNTLEG

SEQ ID NO: 58851 - protein, 13 aa, Homo Sapiens
AANFSFRNTLEGF

SEQ ID NO: 58852 - protein, 13 aa, Homo Sapiens
ANFSFRNTLEGFA

SEQ ID NO: 58853 - protein, 13 aa, Homo Sapiens
NFSFRNTLEGFAS

SEQ ID NO: 58854 - protein, 13 aa, Homo Sapiens
FSFRNTLEGFASP

SEQ ID NO: 58855 - protein, 13 aa, Homo Sapiens
SFRNTLEGFASPL

SEQ ID NO: 58856 - protein, 13 aa, Homo Sapiens
FRNTLEGFASPLT

SEQ ID NO: 58857 - protein, 13 aa, Homo Sapiens
RNTLEGFASPLTG

SEQ ID NO: 58858 - protein, 13 aa, Homo Sapiens
NTLEGFASPLTGI

SEQ ID NO: 58859 - protein, 13 aa, Homo Sapiens
TLEGFASPLTGIA

SEQ ID NO: 58860 - protein, 13 aa, Homo Sapiens
LEGFASPLTGIAD

SEQ ID NO: 58861 - protein, 13 aa, Homo Sapiens
EGFASPLTGIADA

SEQ ID NO: 58862 - protein, 13 aa, Homo Sapiens
GFASPLTGIADAS

SEQ ID NO: 58863 - protein, 13 aa, Homo Sapiens
FASPLTGIADASQ

SEQ ID NO: 58864 - protein, 13 aa, Homo Sapiens
ASPLTGIADASQS

SEQ ID NO: 58865 - protein, 13 aa, Homo Sapiens
SPLTGIADASQSS

SEQ ID NO: 58866 - protein, 13 aa, Homo Sapiens
PLTGIADASQSSM

SEQ ID NO: 58867 - protein, 13 aa, Homo Sapiens
LTGIADASQSSMH

SEQ ID NO: 58868 - protein, 13 aa, Homo Sapiens
TGIADASQSSMHN

SEQ ID NO: 58869 - protein, 13 aa, Homo Sapiens
GIADASQSSMHNA

SEQ ID NO: 58870 - protein, 13 aa, Homo Sapiens
IADASQSSMHNAL

SEQ ID NO: 58871 - protein, 13 aa, Homo Sapiens
ADASQSSMHNALH

SEQ ID NO: 58872 - protein, 13 aa, Homo Sapiens
DASQSSMHNALHI

SEQ ID NO: 58873 - protein, 13 aa, Homo Sapiens
ASQSSMHNALHIY

SEQ ID NO: 58874 - protein, 13 aa, Homo Sapiens
SQSSMHNALHIYM

SEQ ID NO: 58875 - protein, 13 aa, Homo Sapiens
QSSMHNALHIYMN

SEQ ID NO: 58876 - protein, 13 aa, Homo Sapiens
SSMHNALHIYMNG

SEQ ID NO: 58877 - protein, 13 aa, Homo Sapiens
SMHNALHIYMNGT

SEQ ID NO: 58878 - protein, 13 aa, Homo Sapiens
MHNALHIYMNGTM

SEQ ID NO: 58879 - protein, 13 aa, Homo Sapiens
HNALHIYMNGTMS

SEQ ID NO: 58880 - protein, 13 aa, Homo Sapiens
NALHIYMNGTMSQ

SEQ ID NO: 58881 - protein, 13 aa, Homo Sapiens
ALHIYMNGTMSQV

SEQ ID NO: 58882 - protein, 13 aa, Homo Sapiens
LHIYMNGTMSQVQ

SEQ ID NO: 58883 - protein, 13 aa, Homo Sapiens
HIYMNGTMSQVQG

SEQ ID NO: 58884 - protein, 13 aa, Homo Sapiens
IYMNGTMSQVQGS

SEQ ID NO: 58885 - protein, 13 aa, Homo Sapiens
YMNGTMSQVQGSA

SEQ ID NO: 58886 - protein, 13 aa, Homo Sapiens
MNGTMSQVQGSAN

SEQ ID NO: 58887 - protein, 13 aa, Homo Sapiens
NGTMSQVQGSAND

SEQ ID NO: 58888 - protein, 13 aa, Homo Sapiens
GTMSQVQGSANDP

SEQ ID NO: 58889 - protein, 13 aa, Homo Sapiens
TMSQVQGSANDPI

SEQ ID NO: 58890 - protein, 13 aa, Homo Sapiens
MSQVQGSANDPIF

SEQ ID NO: 58891 - protein, 13 aa, Homo Sapiens
SQVQGSANDPIFL

SEQ ID NO: 58892 - protein, 13 aa, Homo Sapiens
QVQGSANDPIFLL

SEQ ID NO: 58893 - protein, 13 aa, Homo Sapiens
VQGSANDPIFLLH

SEQ ID NO: 58894 - protein, 13 aa, Homo Sapiens
QGSANDPIFLLHH

SEQ ID NO: 58895 - protein, 13 aa, Homo Sapiens
GSANDPIFLLHHA

SEQ ID NO: 58896 - protein, 13 aa, Homo Sapiens
SANDPIFLLHHAF

SEQ ID NO: 58897 - protein, 13 aa, Homo Sapiens
ANDPIFLLHHAFV

SEQ ID NO: 58898 - protein, 13 aa, Homo Sapiens
NDPIFLLHHAFVD

SEQ ID NO: 58899 - protein, 13 aa, Homo Sapiens
DPIFLLHHAFVDS

SEQ ID NO: 58900 - protein, 13 aa, Homo Sapiens
PIFLLHHAFVDSI

SEQ ID NO: 58901 - protein, 13 aa, Homo Sapiens
IFLLHHAFVDSIF

SEQ ID NO: 58902 - protein, 13 aa, Homo Sapiens
FLLHHAFVDSIFE

SEQ ID NO: 58903 - protein, 13 aa, Homo Sapiens
LLHHAFVDSIFEQ

SEQ ID NO: 58904 - protein, 13 aa, Homo Sapiens
LHHAFVDSIFEQW

SEQ ID NO: 58905 - protein, 13 aa, Homo Sapiens
HHAFVDSIFEQWL

SEQ ID NO: 58906 - protein, 13 aa, Homo Sapiens
HAFVDSIFEQWLQ

SEQ ID NO: 58907 - protein, 13 aa, Homo Sapiens
AFVDSIFEQWLQR

SEQ ID NO: 58908 - protein, 13 aa, Homo Sapiens
FVDSIFEQWLQRH

SEQ ID NO: 58909 - protein, 13 aa, Homo Sapiens
VDSIFEQWLQRHR

SEQ ID NO: 58910 - protein, 13 aa, Homo Sapiens
DSIFEQWLQRHRP

SEQ ID NO: 58911 - protein, 13 aa, Homo Sapiens
SIFEQWLQRHRPL

SEQ ID NO: 58912 - protein, 13 aa, Homo Sapiens
IFEQWLQRHRPLQ

SEQ ID NO: 58913 - protein, 13 aa, Homo Sapiens
FEQWLQRHRPLQE

SEQ ID NO: 58914 - protein, 13 aa, Homo Sapiens
EQWLQRHRPLQEV

SEQ ID NO: 58915 - protein, 13 aa, Homo Sapiens
QWLQRHRPLQEVY

SEQ ID NO: 58916 - protein, 13 aa, Homo Sapiens
WLQRHRPLQEVYP

SEQ ID NO: 58917 - protein, 13 aa, Homo Sapiens
LQRHRPLQEVYPE

SEQ ID NO: 58918 - protein, 13 aa, Homo Sapiens
QRHRPLQEVYPEA

SEQ ID NO: 58919 - protein, 13 aa, Homo Sapiens
RHRPLQEVYPEAN

SEQ ID NO: 58920 - protein, 13 aa, Homo Sapiens
HRPLQEVYPEANA

SEQ ID NO: 58921 - protein, 13 aa, Homo Sapiens
RPLQEVYPEANAP

SEQ ID NO: 58922 - protein, 13 aa, Homo Sapiens
PLQEVYPEANAPI

SEQ ID NO: 58923 - protein, 13 aa, Homo Sapiens
LQEVYPEANAPIG

SEQ ID NO: 58924 - protein, 13 aa, Homo Sapiens
QEVYPEANAPIGH

SEQ ID NO: 58925 - protein, 13 aa, Homo Sapiens
EVYPEANAPIGHN

SEQ ID NO: 58926 - protein, 13 aa, Homo Sapiens
VYPEANAPIGHNR

SEQ ID NO: 58927 - protein, 13 aa, Homo Sapiens
YPEANAPIGHNRE

SEQ ID NO: 58928 - protein, 13 aa, Homo Sapiens
PEANAPIGHNRES

SEQ ID NO: 58929 - protein, 13 aa, Homo Sapiens
EANAPIGHNRESY

SEQ ID NO: 58930 - protein, 13 aa, Homo Sapiens
ANAPIGHNRESYM

SEQ ID NO: 58931 - protein, 13 aa, Homo Sapiens
NAPIGHNRESYMV

SEQ ID NO: 58932 - protein, 13 aa, Homo Sapiens
APIGHNRESYMVP

SEQ ID NO: 58933 - protein, 13 aa, Homo Sapiens
PIGHNRESYMVPF

SEQ ID NO: 58934 - protein, 13 aa, Homo Sapiens
IGHNRESYMVPFI

SEQ ID NO: 58935 - protein, 13 aa, Homo Sapiens
GHNRESYMVPFIP

SEQ ID NO: 58936 - protein, 13 aa, Homo Sapiens
HNRESYMVPFIPL

SEQ ID NO: 58937 - protein, 13 aa, Homo Sapiens
NRESYMVPFIPLY

SEQ ID NO: 58938 - protein, 13 aa, Homo Sapiens
RESYMVPFIPLYR

SEQ ID NO: 58939 - protein, 13 aa, Homo Sapiens
ESYMVPFIPLYRN

SEQ ID NO: 58940 - protein, 13 aa, Homo Sapiens
SYMVPFIPLYRNG

SEQ ID NO: 58941 - protein, 13 aa, Homo Sapiens
YMVPFIPLYRNGD

SEQ ID NO: 58942 - protein, 13 aa, Homo Sapiens
MVPFIPLYRNGDF

SEQ ID NO: 58943 - protein, 13 aa, Homo Sapiens
VPFIPLYRNGDFF

SEQ ID NO: 58944 - protein, 13 aa, Homo Sapiens
PFIPLYRNGDFFI

SEQ ID NO: 58945 - protein, 13 aa, Homo Sapiens
FIPLYRNGDFFIS

SEQ ID NO: 58946 - protein, 13 aa, Homo Sapiens
IPLYRNGDFFISS

SEQ ID NO: 58947 - protein, 13 aa, Homo Sapiens
PLYRNGDFFISSK

SEQ ID NO: 58948 - protein, 13 aa, Homo Sapiens
LYRNGDFFISSKD

SEQ ID NO: 58949 - protein, 13 aa, Homo Sapiens
YRNGDFFISSKDL

SEQ ID NO: 58950 - protein, 13 aa, Homo Sapiens
RNGDFFISSKDLG

SEQ ID NO: 58951 - protein, 13 aa, Homo Sapiens
NGDFFISSKDLGY

SEQ ID NO: 58952 - protein, 13 aa, Homo Sapiens
GDFFISSKDLGYD

SEQ ID NO: 58953 - protein, 13 aa, Homo Sapiens
DFFISSKDLGYDY

SEQ ID NO: 58954 - protein, 13 aa, Homo Sapiens
FFISSKDLGYDYS

SEQ ID NO: 58955 - protein, 13 aa, Homo Sapiens
FISSKDLGYDYSY

SEQ ID NO: 58956 - protein, 13 aa, Homo Sapiens
ISSKDLGYDYSYL

SEQ ID NO: 58957 - protein, 13 aa, Homo Sapiens
SSKDLGYDYSYLQ

SEQ ID NO: 58958 - protein, 13 aa, Homo Sapiens
SKDLGYDYSYLQD

SEQ ID NO: 58959 - protein, 13 aa, Homo Sapiens
KDLGYDYSYLQDS

SEQ ID NO: 58960 - protein, 13 aa, Homo Sapiens
DLGYDYSYLQDSD

SEQ ID NO: 58961 - protein, 13 aa, Homo Sapiens
LGYDYSYLQDSDP

SEQ ID NO: 58962 - protein, 13 aa, Homo Sapiens
GYDYSYLQDSDPD

SEQ ID NO: 58963 - protein, 13 aa, Homo Sapiens
YDYSYLQDSDPDS

SEQ ID NO: 58964 - protein, 13 aa, Homo Sapiens
DYSYLQDSDPDSF

SEQ ID NO: 58965 - protein, 13 aa, Homo Sapiens
YSYLQDSDPDSFQ

SEQ ID NO: 58966 - protein, 13 aa, Homo Sapiens
SYLQDSDPDSFQD

SEQ ID NO: 58967 - protein, 13 aa, Homo Sapiens
YLQDSDPDSFQDY

SEQ ID NO: 58968 - protein, 13 aa, Homo Sapiens
LQDSDPDSFQDYI

SEQ ID NO: 58969 - protein, 13 aa, Homo Sapiens
QDSDPDSFQDYIK

SEQ ID NO: 58970 - protein, 13 aa, Homo Sapiens
DSDPDSFQDYIKS

SEQ ID NO: 58971 - protein, 13 aa, Homo Sapiens
SDPDSFQDYIKSY

SEQ ID NO: 58972 - protein, 13 aa, Homo Sapiens
DPDSFQDYIKSYL

SEQ ID NO: 58973 - protein, 13 aa, Homo Sapiens
PDSFQDYIKSYLE

SEQ ID NO: 58974 - protein, 13 aa, Homo Sapiens
DSFQDYIKSYLEQ

SEQ ID NO: 58975 - protein, 13 aa, Homo Sapiens
SFQDYIKSYLEQA

SEQ ID NO: 58976 - protein, 13 aa, Homo Sapiens
FQDYIKSYLEQAS

SEQ ID NO: 58977 - protein, 13 aa, Homo Sapiens
QDYIKSYLEQASR

SEQ ID NO: 58978 - protein, 13 aa, Homo Sapiens
DYIKSYLEQASRI

SEQ ID NO: 58979 - protein, 13 aa, Homo Sapiens
YIKSYLEQASRIW

SEQ ID NO: 58980 - protein, 13 aa, Homo Sapiens
IKSYLEQASRIWS

SEQ ID NO: 58981 - protein, 13 aa, Homo Sapiens
KSYLEQASRIWSW

SEQ ID NO: 58982 - protein, 13 aa, Homo Sapiens
SYLEQASRIWSWL

SEQ ID NO: 58983 - protein, 13 aa, Homo Sapiens
YLEQASRIWSWLL

SEQ ID NO: 58984 - protein, 13 aa, Homo Sapiens
LEQASRIWSWLLG

SEQ ID NO: 58985 - protein, 13 aa, Homo Sapiens
EQASRIWSWLLGA

SEQ ID NO: 58986 - protein, 13 aa, Homo Sapiens
QASRIWSWLLGAA

SEQ ID NO: 58987 - protein, 13 aa, Homo Sapiens
ASRIWSWLLGAAM

SEQ ID NO: 58988 - protein, 13 aa, Homo Sapiens
SRIWSWLLGAAMV

SEQ ID NO: 58989 - protein, 13 aa, Homo Sapiens
RIWSWLLGAAMVG

SEQ ID NO: 58990 - protein, 13 aa, Homo Sapiens
IWSWLLGAAMVGA

SEQ ID NO: 58991 - protein, 13 aa, Homo Sapiens
WSWLLGAAMVGAV

SEQ ID NO: 58992 - protein, 13 aa, Homo Sapiens
SWLLGAAMVGAVL

SEQ ID NO: 58993 - protein, 13 aa, Homo Sapiens
WLLGAAMVGAVLT

SEQ ID NO: 58994 - protein, 13 aa, Homo Sapiens
LLGAAMVGAVLTA

SEQ ID NO: 58995 - protein, 13 aa, Homo Sapiens
LGAAMVGAVLTAL

SEQ ID NO: 58996 - protein, 13 aa, Homo Sapiens
GAAMVGAVLTALL

SEQ ID NO: 58997 - protein, 13 aa, Homo Sapiens
AAMVGAVLTALLA

SEQ ID NO: 58998 - protein, 13 aa, Homo Sapiens
AMVGAVLTALLAG

SEQ ID NO: 58999 - protein, 13 aa, Homo Sapiens
MVGAVLTALLAGL

SEQ ID NO: 59000 - protein, 13 aa, Homo Sapiens
VGAVLTALLAGLV

SEQ ID NO: 59001 - protein, 13 aa, Homo Sapiens
GAVLTALLAGLVS

SEQ ID NO: 59002 - protein, 13 aa, Homo Sapiens
AVLTALLAGLVSL

SEQ ID NO: 59003 - protein, 13 aa, Homo Sapiens
VLTALLAGLVSLL

SEQ ID NO: 59004 - protein, 13 aa, Homo Sapiens
LTALLAGLVSLLC

SEQ ID NO: 59005 - protein, 13 aa, Homo Sapiens
TALLAGLVSLLCR

SEQ ID NO: 59006 - protein, 13 aa, Homo Sapiens
ALLAGLVSLLCRH

SEQ ID NO: 59007 - protein, 13 aa, Homo Sapiens
LLAGLVSLLCRHK

SEQ ID NO: 59008 - protein, 13 aa, Homo Sapiens
LAGLVSLLCRHKR

SEQ ID NO: 59009 - protein, 13 aa, Homo Sapiens
AGLVSLLCRHKRK

SEQ ID NO: 59010 - protein, 13 aa, Homo Sapiens
GLVSLLCRHKRKQ

SEQ ID NO: 59011 - protein, 13 aa, Homo Sapiens
LVSLLCRHKRKQL

SEQ ID NO: 59012 - protein, 13 aa, Homo Sapiens
VSLLCRHKRKQLP

SEQ ID NO: 59013 - protein, 13 aa, Homo Sapiens
SLLCRHKRKQLPE

SEQ ID NO: 59014 - protein, 13 aa, Homo Sapiens
LLCRHKRKQLPEE

SEQ ID NO: 59015 - protein, 13 aa, Homo Sapiens
LCRHKRKQLPEEK

SEQ ID NO: 59016 - protein, 13 aa, Homo Sapiens
CRHKRKQLPEEKQ

SEQ ID NO: 59017 - protein, 13 aa, Homo Sapiens
RHKRKQLPEEKQP

SEQ ID NO: 59018 - protein, 13 aa, Homo Sapiens
HKRKQLPEEKQPL

SEQ ID NO: 59019 - protein, 13 aa, Homo Sapiens
KRKQLPEEKQPLL

SEQ ID NO: 59020 - protein, 13 aa, Homo Sapiens
RKQLPEEKQPLLM

SEQ ID NO: 59021 - protein, 13 aa, Homo Sapiens
KQLPEEKQPLLME

SEQ ID NO: 59022 - protein, 13 aa, Homo Sapiens
QLPEEKQPLLMEK

SEQ ID NO: 59023 - protein, 13 aa, Homo Sapiens
LPEEKQPLLMEKE

SEQ ID NO: 59024 - protein, 13 aa, Homo Sapiens
PEEKQPLLMEKED

SEQ ID NO: 59025 - protein, 13 aa, Homo Sapiens
EEKQPLLMEKEDY

SEQ ID NO: 59026 - protein, 13 aa, Homo Sapiens
EKQPLLMEKEDYH

SEQ ID NO: 59027 - protein, 13 aa, Homo Sapiens
KQPLLMEKEDYHS

SEQ ID NO: 59028 - protein, 13 aa, Homo Sapiens
QPLLMEKEDYHSL

SEQ ID NO: 59029 - protein, 13 aa, Homo Sapiens
PLLMEKEDYHSLY

SEQ ID NO: 59030 - protein, 13 aa, Homo Sapiens
LLMEKEDYHSLYQ

SEQ ID NO: 59031 - protein, 13 aa, Homo Sapiens
LMEKEDYHSLYQS

SEQ ID NO: 59032 - protein, 13 aa, Homo Sapiens
MEKEDYHSLYQSH

SEQ ID NO: 59033 - protein, 13 aa, Homo Sapiens
EKEDYHSLYQSHL

SEQ ID NO: 59034 - protein, 14 aa, Homo Sapiens
MLLAVLYCLLWSFQ

SEQ ID NO: 59035 - protein, 14 aa, Homo Sapiens
LLAVLYCLLWSFQT

SEQ ID NO: 59036 - protein, 14 aa, Homo Sapiens
LAVLYCLLWSFQTS

SEQ ID NO: 59037 - protein, 14 aa, Homo Sapiens
AVLYCLLWSFQTSA

SEQ ID NO: 59038 - protein, 14 aa, Homo Sapiens
VLYCLLWSFQTSAG

SEQ ID NO: 59039 - protein, 14 aa, Homo Sapiens
LYCLLWSFQTSAGH

SEQ ID NO: 59040 - protein, 14 aa, Homo Sapiens
YCLLWSFQTSAGHF

SEQ ID NO: 59041 - protein, 14 aa, Homo Sapiens
CLLWSFQTSAGHFP

SEQ ID NO: 59042 - protein, 14 aa, Homo Sapiens
LLWSFQTSAGHFPR

SEQ ID NO: 59043 - protein, 14 aa, Homo Sapiens
LWSFQTSAGHFPRA

SEQ ID NO: 59044 - protein, 14 aa, Homo Sapiens
WSFQTSAGHFPRAC

SEQ ID NO: 59045 - protein, 14 aa, Homo Sapiens
SFQTSAGHFPRACV

SEQ ID NO: 59046 - protein, 14 aa, Homo Sapiens
FQTSAGHFPRACVS

SEQ ID NO: 59047 - protein, 14 aa, Homo Sapiens
QTSAGHFPRACVSS

SEQ ID NO: 59048 - protein, 14 aa, Homo Sapiens
TSAGHFPRACVSSK

SEQ ID NO: 59049 - protein, 14 aa, Homo Sapiens
SAGHFPRACVSSKN

SEQ ID NO: 59050 - protein, 14 aa, Homo Sapiens
AGHFPRACVSSKNL

SEQ ID NO: 59051 - protein, 14 aa, Homo Sapiens
GHFPRACVSSKNLM

SEQ ID NO: 59052 - protein, 14 aa, Homo Sapiens
HFPRACVSSKNLME

SEQ ID NO: 59053 - protein, 14 aa, Homo Sapiens
FPRACVSSKNLMEK

SEQ ID NO: 59054 - protein, 14 aa, Homo Sapiens
PRACVSSKNLMEKE

SEQ ID NO: 59055 - protein, 14 aa, Homo Sapiens
RACVSSKNLMEKEC

SEQ ID NO: 59056 - protein, 14 aa, Homo Sapiens
ACVSSKNLMEKECC

SEQ ID NO: 59057 - protein, 14 aa, Homo Sapiens
CVSSKNLMEKECCP

SEQ ID NO: 59058 - protein, 14 aa, Homo Sapiens
VSSKNLMEKECCPP

SEQ ID NO: 59059 - protein, 14 aa, Homo Sapiens
SSKNLMEKECCPPW

SEQ ID NO: 59060 - protein, 14 aa, Homo Sapiens
SKNLMEKECCPPWS

SEQ ID NO: 59061 - protein, 14 aa, Homo Sapiens
KNLMEKECCPPWSG

SEQ ID NO: 59062 - protein, 14 aa, Homo Sapiens
NLMEKECCPPWSGD

SEQ ID NO: 59063 - protein, 14 aa, Homo Sapiens
LMEKECCPPWSGDR

SEQ ID NO: 59064 - protein, 14 aa, Homo Sapiens
MEKECCPPWSGDRS

SEQ ID NO: 59065 - protein, 14 aa, Homo Sapiens
EKECCPPWSGDRSP

SEQ ID NO: 59066 - protein, 14 aa, Homo Sapiens
KECCPPWSGDRSPC

SEQ ID NO: 59067 - protein, 14 aa, Homo Sapiens
ECCPPWSGDRSPCG

SEQ ID NO: 59068 - protein, 14 aa, Homo Sapiens
CCPPWSGDRSPCGQ

SEQ ID NO: 59069 - protein, 14 aa, Homo Sapiens
CPPWSGDRSPCGQL

SEQ ID NO: 59070 - protein, 14 aa, Homo Sapiens
PPWSGDRSPCGQLS

SEQ ID NO: 59071 - protein, 14 aa, Homo Sapiens
PWSGDRSPCGQLSG

SEQ ID NO: 59072 - protein, 14 aa, Homo Sapiens
WSGDRSPCGQLSGR

SEQ ID NO: 59073 - protein, 14 aa, Homo Sapiens
SGDRSPCGQLSGRG

SEQ ID NO: 59074 - protein, 14 aa, Homo Sapiens
GDRSPCGQLSGRGS

SEQ ID NO: 59075 - protein, 14 aa, Homo Sapiens
DRSPCGQLSGRGSC

SEQ ID NO: 59076 - protein, 14 aa, Homo Sapiens
RSPCGQLSGRGSCQ

SEQ ID NO: 59077 - protein, 14 aa, Homo Sapiens
SPCGQLSGRGSCQN

SEQ ID NO: 59078 - protein, 14 aa, Homo Sapiens
PCGQLSGRGSCQNI

SEQ ID NO: 59079 - protein, 14 aa, Homo Sapiens
CGQLSGRGSCQNIL

SEQ ID NO: 59080 - protein, 14 aa, Homo Sapiens
GQLSGRGSCQNILL

SEQ ID NO: 59081 - protein, 14 aa, Homo Sapiens
QLSGRGSCQNILLS

SEQ ID NO: 59082 - protein, 14 aa, Homo Sapiens
LSGRGSCQNILLSN

SEQ ID NO: 59083 - protein, 14 aa, Homo Sapiens
SGRGSCQNILLSNA

SEQ ID NO: 59084 - protein, 14 aa, Homo Sapiens
GRGSCQNILLSNAP

SEQ ID NO: 59085 - protein, 14 aa, Homo Sapiens
RGSCQNILLSNAPL

SEQ ID NO: 59086 - protein, 14 aa, Homo Sapiens
GSCQNILLSNAPLG

SEQ ID NO: 59087 - protein, 14 aa, Homo Sapiens
SCQNILLSNAPLGP

SEQ ID NO: 59088 - protein, 14 aa, Homo Sapiens
CQNILLSNAPLGPQ

SEQ ID NO: 59089 - protein, 14 aa, Homo Sapiens
QNILLSNAPLGPQF

SEQ ID NO: 59090 - protein, 14 aa, Homo Sapiens
NILLSNAPLGPQFP

SEQ ID NO: 59091 - protein, 14 aa, Homo Sapiens
ILLSNAPLGPQFPF

SEQ ID NO: 59092 - protein, 14 aa, Homo Sapiens
LLSNAPLGPQFPFT

SEQ ID NO: 59093 - protein, 14 aa, Homo Sapiens
LSNAPLGPQFPFTG

SEQ ID NO: 59094 - protein, 14 aa, Homo Sapiens
SNAPLGPQFPFTGV

SEQ ID NO: 59095 - protein, 14 aa, Homo Sapiens
NAPLGPQFPFTGVD

SEQ ID NO: 59096 - protein, 14 aa, Homo Sapiens
APLGPQFPFTGVDD

SEQ ID NO: 59097 - protein, 14 aa, Homo Sapiens
PLGPQFPFTGVDDR

SEQ ID NO: 59098 - protein, 14 aa, Homo Sapiens
LGPQFPFTGVDDRE

SEQ ID NO: 59099 - protein, 14 aa, Homo Sapiens
GPQFPFTGVDDRES

SEQ ID NO: 59100 - protein, 14 aa, Homo Sapiens
PQFPFTGVDDRESW

SEQ ID NO: 59101 - protein, 14 aa, Homo Sapiens
QFPFTGVDDRESWP

SEQ ID NO: 59102 - protein, 14 aa, Homo Sapiens
FPFTGVDDRESWPS

SEQ ID NO: 59103 - protein, 14 aa, Homo Sapiens
PFTGVDDRESWPSV

SEQ ID NO: 59104 - protein, 14 aa, Homo Sapiens
FTGVDDRESWPSVF

SEQ ID NO: 59105 - protein, 14 aa, Homo Sapiens
TGVDDRESWPSVFY

SEQ ID NO: 59106 - protein, 14 aa, Homo Sapiens
GVDDRESWPSVFYN

SEQ ID NO: 59107 - protein, 14 aa, Homo Sapiens
VDDRESWPSVFYNR

SEQ ID NO: 59108 - protein, 14 aa, Homo Sapiens
DDRESWPSVFYNRT

SEQ ID NO: 59109 - protein, 14 aa, Homo Sapiens
DRESWPSVFYNRTC

SEQ ID NO: 59110 - protein, 14 aa, Homo Sapiens
RESWPSVFYNRTCQ

SEQ ID NO: 59111 - protein, 14 aa, Homo Sapiens
ESWPSVFYNRTCQC

SEQ ID NO: 59112 - protein, 14 aa, Homo Sapiens
SWPSVFYNRTCQCS

SEQ ID NO: 59113 - protein, 14 aa, Homo Sapiens
WPSVFYNRTCQCSG

SEQ ID NO: 59114 - protein, 14 aa, Homo Sapiens
PSVFYNRTCQCSGN

SEQ ID NO: 59115 - protein, 14 aa, Homo Sapiens
SVFYNRTCQCSGNF

SEQ ID NO: 59116 - protein, 14 aa, Homo Sapiens
VFYNRTCQCSGNFM

SEQ ID NO: 59117 - protein, 14 aa, Homo Sapiens
FYNRTCQCSGNFMG

SEQ ID NO: 59118 - protein, 14 aa, Homo Sapiens
YNRTCQCSGNFMGF

SEQ ID NO: 59119 - protein, 14 aa, Homo Sapiens
NRTCQCSGNFMGFN

SEQ ID NO: 59120 - protein, 14 aa, Homo Sapiens
RTCQCSGNFMGFNC

SEQ ID NO: 59121 - protein, 14 aa, Homo Sapiens
TCQCSGNFMGFNCG

SEQ ID NO: 59122 - protein, 14 aa, Homo Sapiens
CQCSGNFMGFNCGN

SEQ ID NO: 59123 - protein, 14 aa, Homo Sapiens
QCSGNFMGFNCGNC

SEQ ID NO: 59124 - protein, 14 aa, Homo Sapiens
CSGNFMGFNCGNCK

SEQ ID NO: 59125 - protein, 14 aa, Homo Sapiens
SGNFMGFNCGNCKF

SEQ ID NO: 59126 - protein, 14 aa, Homo Sapiens
GNFMGFNCGNCKFG

SEQ ID NO: 59127 - protein, 14 aa, Homo Sapiens
NFMGFNCGNCKFGF

SEQ ID NO: 59128 - protein, 14 aa, Homo Sapiens
FMGFNCGNCKFGFW

SEQ ID NO: 59129 - protein, 14 aa, Homo Sapiens
MGFNCGNCKFGFWG

SEQ ID NO: 59130 - protein, 14 aa, Homo Sapiens
GFNCGNCKFGFWGP

SEQ ID NO: 59131 - protein, 14 aa, Homo Sapiens
FNCGNCKFGFWGPN

SEQ ID NO: 59132 - protein, 14 aa, Homo Sapiens
NCGNCKFGFWGPNC

SEQ ID NO: 59133 - protein, 14 aa, Homo Sapiens
CGNCKFGFWGPNCT

SEQ ID NO: 59134 - protein, 14 aa, Homo Sapiens
GNCKFGFWGPNCTE

SEQ ID NO: 59135 - protein, 14 aa, Homo Sapiens
NCKFGFWGPNCTER

SEQ ID NO: 59136 - protein, 14 aa, Homo Sapiens
CKFGFWGPNCTERR

SEQ ID NO: 59137 - protein, 14 aa, Homo Sapiens
KFGFWGPNCTERRL

SEQ ID NO: 59138 - protein, 14 aa, Homo Sapiens
FGFWGPNCTERRLL

SEQ ID NO: 59139 - protein, 14 aa, Homo Sapiens
GFWGPNCTERRLLV

SEQ ID NO: 59140 - protein, 14 aa, Homo Sapiens
FWGPNCTERRLLVR

SEQ ID NO: 59141 - protein, 14 aa, Homo Sapiens
WGPNCTERRLLVRR

SEQ ID NO: 59142 - protein, 14 aa, Homo Sapiens
GPNCTERRLLVRRN

SEQ ID NO: 59143 - protein, 14 aa, Homo Sapiens
PNCTERRLLVRRNI

SEQ ID NO: 59144 - protein, 14 aa, Homo Sapiens
NCTERRLLVRRNIF

SEQ ID NO: 59145 - protein, 14 aa, Homo Sapiens
CTERRLLVRRNIFD

SEQ ID NO: 59146 - protein, 14 aa, Homo Sapiens
TERRLLVRRNIFDL

SEQ ID NO: 59147 - protein, 14 aa, Homo Sapiens
ERRLLVRRNIFDLS

SEQ ID NO: 59148 - protein, 14 aa, Homo Sapiens
RRLLVRRNIFDLSA

SEQ ID NO: 59149 - protein, 14 aa, Homo Sapiens
RLLVRRNIFDLSAP

SEQ ID NO: 59150 - protein, 14 aa, Homo Sapiens
LLVRRNIFDLSAPE

SEQ ID NO: 59151 - protein, 14 aa, Homo Sapiens
LVRRNIFDLSAPEK

SEQ ID NO: 59152 - protein, 14 aa, Homo Sapiens
VRRNIFDLSAPEKD

SEQ ID NO: 59153 - protein, 14 aa, Homo Sapiens
RRNIFDLSAPEKDK

SEQ ID NO: 59154 - protein, 14 aa, Homo Sapiens
RNIFDLSAPEKDKF

SEQ ID NO: 59155 - protein, 14 aa, Homo Sapiens
NIFDLSAPEKDKFF

SEQ ID NO: 59156 - protein, 14 aa, Homo Sapiens
IFDLSAPEKDKFFA

SEQ ID NO: 59157 - protein, 14 aa, Homo Sapiens
FDLSAPEKDKFFAY

SEQ ID NO: 59158 - protein, 14 aa, Homo Sapiens
DLSAPEKDKFFAYL

SEQ ID NO: 59159 - protein, 14 aa, Homo Sapiens
LSAPEKDKFFAYLT

SEQ ID NO: 59160 - protein, 14 aa, Homo Sapiens
SAPEKDKFFAYLTL

SEQ ID NO: 59161 - protein, 14 aa, Homo Sapiens
APEKDKFFAYLTLA

SEQ ID NO: 59162 - protein, 14 aa, Homo Sapiens
PEKDKFFAYLTLAK

SEQ ID NO: 59163 - protein, 14 aa, Homo Sapiens
EKDKFFAYLTLAKH

SEQ ID NO: 59164 - protein, 14 aa, Homo Sapiens
KDKFFAYLTLAKHT

SEQ ID NO: 59165 - protein, 14 aa, Homo Sapiens
DKFFAYLTLAKHTI

SEQ ID NO: 59166 - protein, 14 aa, Homo Sapiens
KFFAYLTLAKHTIS

SEQ ID NO: 59167 - protein, 14 aa, Homo Sapiens
FFAYLTLAKHTISS

SEQ ID NO: 59168 - protein, 14 aa, Homo Sapiens
FAYLTLAKHTISSD

SEQ ID NO: 59169 - protein, 14 aa, Homo Sapiens
AYLTLAKHTISSDY

SEQ ID NO: 59170 - protein, 14 aa, Homo Sapiens
YLTLAKHTISSDYV

SEQ ID NO: 59171 - protein, 14 aa, Homo Sapiens
LTLAKHTISSDYVI

SEQ ID NO: 59172 - protein, 14 aa, Homo Sapiens
TLAKHTISSDYVIP

SEQ ID NO: 59173 - protein, 14 aa, Homo Sapiens
LAKHTISSDYVIPI

SEQ ID NO: 59174 - protein, 14 aa, Homo Sapiens
AKHTISSDYVIPIG

SEQ ID NO: 59175 - protein, 14 aa, Homo Sapiens
KHTISSDYVIPIGT

SEQ ID NO: 59176 - protein, 14 aa, Homo Sapiens
HTISSDYVIPIGTY

SEQ ID NO: 59177 - protein, 14 aa, Homo Sapiens
TISSDYVIPIGTYG

SEQ ID NO: 59178 - protein, 14 aa, Homo Sapiens
ISSDYVIPIGTYGQ

SEQ ID NO: 59179 - protein, 14 aa, Homo Sapiens
SSDYVIPIGTYGQM

SEQ ID NO: 59180 - protein, 14 aa, Homo Sapiens
SDYVIPIGTYGQMK

SEQ ID NO: 59181 - protein, 14 aa, Homo Sapiens
DYVIPIGTYGQMKN

SEQ ID NO: 59182 - protein, 14 aa, Homo Sapiens
YVIPIGTYGQMKNG

SEQ ID NO: 59183 - protein, 14 aa, Homo Sapiens
VIPIGTYGQMKNGS

SEQ ID NO: 59184 - protein, 14 aa, Homo Sapiens
IPIGTYGQMKNGST

SEQ ID NO: 59185 - protein, 14 aa, Homo Sapiens
PIGTYGQMKNGSTP

SEQ ID NO: 59186 - protein, 14 aa, Homo Sapiens
IGTYGQMKNGSTPM

SEQ ID NO: 59187 - protein, 14 aa, Homo Sapiens
GTYGQMKNGSTPMF

SEQ ID NO: 59188 - protein, 14 aa, Homo Sapiens
TYGQMKNGSTPMFN

SEQ ID NO: 59189 - protein, 14 aa, Homo Sapiens
YGQMKNGSTPMFND

SEQ ID NO: 59190 - protein, 14 aa, Homo Sapiens
GQMKNGSTPMFNDI

SEQ ID NO: 59191 - protein, 14 aa, Homo Sapiens
QMKNGSTPMFNDIN

SEQ ID NO: 59192 - protein, 14 aa, Homo Sapiens
MKNGSTPMFNDINI

SEQ ID NO: 59193 - protein, 14 aa, Homo Sapiens
KNGSTPMFNDINIY

SEQ ID NO: 59194 - protein, 14 aa, Homo Sapiens
NGSTPMFNDINIYD

SEQ ID NO: 59195 - protein, 14 aa, Homo Sapiens
GSTPMFNDINIYDL

SEQ ID NO: 59196 - protein, 14 aa, Homo Sapiens
STPMFNDINIYDLF

SEQ ID NO: 59197 - protein, 14 aa, Homo Sapiens
TPMFNDINIYDLFV

SEQ ID NO: 59198 - protein, 14 aa, Homo Sapiens
PMFNDINIYDLFVW

SEQ ID NO: 59199 - protein, 14 aa, Homo Sapiens
MFNDINIYDLFVWM

SEQ ID NO: 59200 - protein, 14 aa, Homo Sapiens
FNDINIYDLFVWMH

SEQ ID NO: 59201 - protein, 14 aa, Homo Sapiens
NDINIYDLFVWMHY

SEQ ID NO: 59202 - protein, 14 aa, Homo Sapiens
DINIYDLFVWMHYY

SEQ ID NO: 59203 - protein, 14 aa, Homo Sapiens
INIYDLFVWMHYYV

SEQ ID NO: 59204 - protein, 14 aa, Homo Sapiens
NIYDLFVWMHYYVS

SEQ ID NO: 59205 - protein, 14 aa, Homo Sapiens
IYDLFVWMHYYVSM

SEQ ID NO: 59206 - protein, 14 aa, Homo Sapiens
YDLFVWMHYYVSMD

SEQ ID NO: 59207 - protein, 14 aa, Homo Sapiens
DLFVWMHYYVSMDA

SEQ ID NO: 59208 - protein, 14 aa, Homo Sapiens
LFVWMHYYVSMDAL

SEQ ID NO: 59209 - protein, 14 aa, Homo Sapiens
FVWMHYYVSMDALL

SEQ ID NO: 59210 - protein, 14 aa, Homo Sapiens
VWMHYYVSMDALLG

SEQ ID NO: 59211 - protein, 14 aa, Homo Sapiens
WMHYYVSMDALLGG

SEQ ID NO: 59212 - protein, 14 aa, Homo Sapiens
MHYYVSMDALLGGS

SEQ ID NO: 59213 - protein, 14 aa, Homo Sapiens
HYYVSMDALLGGSE

SEQ ID NO: 59214 - protein, 14 aa, Homo Sapiens
YYVSMDALLGGSEI

SEQ ID NO: 59215 - protein, 14 aa, Homo Sapiens
YVSMDALLGGSEIW

SEQ ID NO: 59216 - protein, 14 aa, Homo Sapiens
VSMDALLGGSEIWR

SEQ ID NO: 59217 - protein, 14 aa, Homo Sapiens
SMDALLGGSEIWRD

SEQ ID NO: 59218 - protein, 14 aa, Homo Sapiens
MDALLGGSEIWRDI

SEQ ID NO: 59219 - protein, 14 aa, Homo Sapiens
DALLGGSEIWRDID

SEQ ID NO: 59220 - protein, 14 aa, Homo Sapiens
ALLGGSEIWRDIDF

SEQ ID NO: 59221 - protein, 14 aa, Homo Sapiens
LLGGSEIWRDIDFA

SEQ ID NO: 59222 - protein, 14 aa, Homo Sapiens
LGGSEIWRDIDFAH

SEQ ID NO: 59223 - protein, 14 aa, Homo Sapiens
GGSEIWRDIDFAHE

SEQ ID NO: 59224 - protein, 14 aa, Homo Sapiens
GSEIWRDIDFAHEA

SEQ ID NO: 59225 - protein, 14 aa, Homo Sapiens
SEIWRDIDFAHEAP

SEQ ID NO: 59226 - protein, 14 aa, Homo Sapiens
EIWRDIDFAHEAPA

SEQ ID NO: 59227 - protein, 14 aa, Homo Sapiens
IWRDIDFAHEAPAF

SEQ ID NO: 59228 - protein, 14 aa, Homo Sapiens
WRDIDFAHEAPAFL

SEQ ID NO: 59229 - protein, 14 aa, Homo Sapiens
RDIDFAHEAPAFLP

SEQ ID NO: 59230 - protein, 14 aa, Homo Sapiens
DIDFAHEAPAFLPW

SEQ ID NO: 59231 - protein, 14 aa, Homo Sapiens
IDFAHEAPAFLPWH

SEQ ID NO: 59232 - protein, 14 aa, Homo Sapiens
DFAHEAPAFLPWHR

SEQ ID NO: 59233 - protein, 14 aa, Homo Sapiens
FAHEAPAFLPWHRL

SEQ ID NO: 59234 - protein, 14 aa, Homo Sapiens
AHEAPAFLPWHRLF

SEQ ID NO: 59235 - protein, 14 aa, Homo Sapiens
HEAPAFLPWHRLFL

SEQ ID NO: 59236 - protein, 14 aa, Homo Sapiens
EAPAFLPWHRLFLL

SEQ ID NO: 59237 - protein, 14 aa, Homo Sapiens
APAFLPWHRLFLLR

SEQ ID NO: 59238 - protein, 14 aa, Homo Sapiens
PAFLPWHRLFLLRW

SEQ ID NO: 59239 - protein, 14 aa, Homo Sapiens
AFLPWHRLFLLRWE

SEQ ID NO: 59240 - protein, 14 aa, Homo Sapiens
FLPWHRLFLLRWEQ

SEQ ID NO: 59241 - protein, 14 aa, Homo Sapiens
LPWHRLFLLRWEQE

SEQ ID NO: 59242 - protein, 14 aa, Homo Sapiens
PWHRLFLLRWEQEI

SEQ ID NO: 59243 - protein, 14 aa, Homo Sapiens
WHRLFLLRWEQEIQ

SEQ ID NO: 59244 - protein, 14 aa, Homo Sapiens
HRLFLLRWEQEIQK

SEQ ID NO: 59245 - protein, 14 aa, Homo Sapiens
RLFLLRWEQEIQKL

SEQ ID NO: 59246 - protein, 14 aa, Homo Sapiens
LFLLRWEQEIQKLT

SEQ ID NO: 59247 - protein, 14 aa, Homo Sapiens
FLLRWEQEIQKLTG

SEQ ID NO: 59248 - protein, 14 aa, Homo Sapiens
LLRWEQEIQKLTGD

SEQ ID NO: 59249 - protein, 14 aa, Homo Sapiens
LRWEQEIQKLTGDE

SEQ ID NO: 59250 - protein, 14 aa, Homo Sapiens
RWEQEIQKLTGDEN

SEQ ID NO: 59251 - protein, 14 aa, Homo Sapiens
WEQEIQKLTGDENF

SEQ ID NO: 59252 - protein, 14 aa, Homo Sapiens
EQEIQKLTGDENFT

SEQ ID NO: 59253 - protein, 14 aa, Homo Sapiens
QEIQKLTGDENFTI

SEQ ID NO: 59254 - protein, 14 aa, Homo Sapiens
EIQKLTGDENFTIP

SEQ ID NO: 59255 - protein, 14 aa, Homo Sapiens
IQKLTGDENFTIPY

SEQ ID NO: 59256 - protein, 14 aa, Homo Sapiens
QKLTGDENFTIPYW

SEQ ID NO: 59257 - protein, 14 aa, Homo Sapiens
KLTGDENFTIPYWD

SEQ ID NO: 59258 - protein, 14 aa, Homo Sapiens
LTGDENFTIPYWDW

SEQ ID NO: 59259 - protein, 14 aa, Homo Sapiens
TGDENFTIPYWDWR

SEQ ID NO: 59260 - protein, 14 aa, Homo Sapiens
GDENFTIPYWDWRD

SEQ ID NO: 59261 - protein, 14 aa, Homo Sapiens
DENFTIPYWDWRDA

SEQ ID NO: 59262 - protein, 14 aa, Homo Sapiens
ENFTIPYWDWRDAE

SEQ ID NO: 59263 - protein, 14 aa, Homo Sapiens
NFTIPYWDWRDAEK

SEQ ID NO: 59264 - protein, 14 aa, Homo Sapiens
FTIPYWDWRDAEKC

SEQ ID NO: 59265 - protein, 14 aa, Homo Sapiens
TIPYWDWRDAEKCD

SEQ ID NO: 59266 - protein, 14 aa, Homo Sapiens
IPYWDWRDAEKCDI

SEQ ID NO: 59267 - protein, 14 aa, Homo Sapiens
PYWDWRDAEKCDIC

SEQ ID NO: 59268 - protein, 14 aa, Homo Sapiens
YWDWRDAEKCDICT

SEQ ID NO: 59269 - protein, 14 aa, Homo Sapiens
WDWRDAEKCDICTD

SEQ ID NO: 59270 - protein, 14 aa, Homo Sapiens
DWRDAEKCDICTDE

SEQ ID NO: 59271 - protein, 14 aa, Homo Sapiens
WRDAEKCDICTDEY

SEQ ID NO: 59272 - protein, 14 aa, Homo Sapiens
RDAEKCDICTDEYM

SEQ ID NO: 59273 - protein, 14 aa, Homo Sapiens
DAEKCDICTDEYMG

SEQ ID NO: 59274 - protein, 14 aa, Homo Sapiens
AEKCDICTDEYMGG

SEQ ID NO: 59275 - protein, 14 aa, Homo Sapiens
EKCDICTDEYMGGQ

SEQ ID NO: 59276 - protein, 14 aa, Homo Sapiens
KCDICTDEYMGGQH

SEQ ID NO: 59277 - protein, 14 aa, Homo Sapiens
CDICTDEYMGGQHP

SEQ ID NO: 59278 - protein, 14 aa, Homo Sapiens
DICTDEYMGGQHPT

SEQ ID NO: 59279 - protein, 14 aa, Homo Sapiens
ICTDEYMGGQHPTN

SEQ ID NO: 59280 - protein, 14 aa, Homo Sapiens
CTDEYMGGQHPTNP

SEQ ID NO: 59281 - protein, 14 aa, Homo Sapiens
TDEYMGGQHPTNPN

SEQ ID NO: 59282 - protein, 14 aa, Homo Sapiens
DEYMGGQHPTNPNL

SEQ ID NO: 59283 - protein, 14 aa, Homo Sapiens
EYMGGQHPTNPNLL

SEQ ID NO: 59284 - protein, 14 aa, Homo Sapiens
YMGGQHPTNPNLLS

SEQ ID NO: 59285 - protein, 14 aa, Homo Sapiens
MGGQHPTNPNLLSP

SEQ ID NO: 59286 - protein, 14 aa, Homo Sapiens
GGQHPTNPNLLSPA

SEQ ID NO: 59287 - protein, 14 aa, Homo Sapiens
GQHPTNPNLLSPAS

SEQ ID NO: 59288 - protein, 14 aa, Homo Sapiens
QHPTNPNLLSPASF

SEQ ID NO: 59289 - protein, 14 aa, Homo Sapiens
HPTNPNLLSPASFF

SEQ ID NO: 59290 - protein, 14 aa, Homo Sapiens
PTNPNLLSPASFFS

SEQ ID NO: 59291 - protein, 14 aa, Homo Sapiens
TNPNLLSPASFFSS

SEQ ID NO: 59292 - protein, 14 aa, Homo Sapiens
NPNLLSPASFFSSW

SEQ ID NO: 59293 - protein, 14 aa, Homo Sapiens
PNLLSPASFFSSWQ

SEQ ID NO: 59294 - protein, 14 aa, Homo Sapiens
NLLSPASFFSSWQI

SEQ ID NO: 59295 - protein, 14 aa, Homo Sapiens
LLSPASFFSSWQIV

SEQ ID NO: 59296 - protein, 14 aa, Homo Sapiens
LSPASFFSSWQIVC

SEQ ID NO: 59297 - protein, 14 aa, Homo Sapiens
SPASFFSSWQIVCS

SEQ ID NO: 59298 - protein, 14 aa, Homo Sapiens
PASFFSSWQIVCSR

SEQ ID NO: 59299 - protein, 14 aa, Homo Sapiens
ASFFSSWQIVCSRL

SEQ ID NO: 59300 - protein, 14 aa, Homo Sapiens
SFFSSWQIVCSRLE

SEQ ID NO: 59301 - protein, 14 aa, Homo Sapiens
FFSSWQIVCSRLEE

SEQ ID NO: 59302 - protein, 14 aa, Homo Sapiens
FSSWQIVCSRLEEY

SEQ ID NO: 59303 - protein, 14 aa, Homo Sapiens
SSWQIVCSRLEEYN

SEQ ID NO: 59304 - protein, 14 aa, Homo Sapiens
SWQIVCSRLEEYNS

SEQ ID NO: 59305 - protein, 14 aa, Homo Sapiens
WQIVCSRLEEYNSH

SEQ ID NO: 59306 - protein, 14 aa, Homo Sapiens
QIVCSRLEEYNSHQ

SEQ ID NO: 59307 - protein, 14 aa, Homo Sapiens
IVCSRLEEYNSHQS

SEQ ID NO: 59308 - protein, 14 aa, Homo Sapiens
VCSRLEEYNSHQSL

SEQ ID NO: 59309 - protein, 14 aa, Homo Sapiens
CSRLEEYNSHQSLC

SEQ ID NO: 59310 - protein, 14 aa, Homo Sapiens
SRLEEYNSHQSLCN

SEQ ID NO: 59311 - protein, 14 aa, Homo Sapiens
RLEEYNSHQSLCNG

SEQ ID NO: 59312 - protein, 14 aa, Homo Sapiens
LEEYNSHQSLCNGT

SEQ ID NO: 59313 - protein, 14 aa, Homo Sapiens
EEYNSHQSLCNGTP

SEQ ID NO: 59314 - protein, 14 aa, Homo Sapiens
EYNSHQSLCNGTPE

SEQ ID NO: 59315 - protein, 14 aa, Homo Sapiens
YNSHQSLCNGTPEG

SEQ ID NO: 59316 - protein, 14 aa, Homo Sapiens
NSHQSLCNGTPEGP

SEQ ID NO: 59317 - protein, 14 aa, Homo Sapiens
SHQSLCNGTPEGPL

SEQ ID NO: 59318 - protein, 14 aa, Homo Sapiens
HQSLCNGTPEGPLR

SEQ ID NO: 59319 - protein, 14 aa, Homo Sapiens
QSLCNGTPEGPLRR

SEQ ID NO: 59320 - protein, 14 aa, Homo Sapiens
SLCNGTPEGPLRRN

SEQ ID NO: 59321 - protein, 14 aa, Homo Sapiens
LCNGTPEGPLRRNP

SEQ ID NO: 59322 - protein, 14 aa, Homo Sapiens
CNGTPEGPLRRNPG

SEQ ID NO: 59323 - protein, 14 aa, Homo Sapiens
NGTPEGPLRRNPGN

SEQ ID NO: 59324 - protein, 14 aa, Homo Sapiens
GTPEGPLRRNPGNH

SEQ ID NO: 59325 - protein, 14 aa, Homo Sapiens
TPEGPLRRNPGNHD

SEQ ID NO: 59326 - protein, 14 aa, Homo Sapiens
PEGPLRRNPGNHDK

SEQ ID NO: 59327 - protein, 14 aa, Homo Sapiens
EGPLRRNPGNHDKS

SEQ ID NO: 59328 - protein, 14 aa, Homo Sapiens
GPLRRNPGNHDKSR

SEQ ID NO: 59329 - protein, 14 aa, Homo Sapiens
PLRRNPGNHDKSRT

SEQ ID NO: 59330 - protein, 14 aa, Homo Sapiens
LRRNPGNHDKSRTP

SEQ ID NO: 59331 - protein, 14 aa, Homo Sapiens
RRNPGNHDKSRTPR

SEQ ID NO: 59332 - protein, 14 aa, Homo Sapiens
RNPGNHDKSRTPRL

SEQ ID NO: 59333 - protein, 14 aa, Homo Sapiens
NPGNHDKSRTPRLP

SEQ ID NO: 59334 - protein, 14 aa, Homo Sapiens
PGNHDKSRTPRLPS

SEQ ID NO: 59335 - protein, 14 aa, Homo Sapiens
GNHDKSRTPRLPSS

SEQ ID NO: 59336 - protein, 14 aa, Homo Sapiens
NHDKSRTPRLPSSA

SEQ ID NO: 59337 - protein, 14 aa, Homo Sapiens
HDKSRTPRLPSSAD

SEQ ID NO: 59338 - protein, 14 aa, Homo Sapiens
DKSRTPRLPSSADV

SEQ ID NO: 59339 - protein, 14 aa, Homo Sapiens
KSRTPRLPSSADVE

SEQ ID NO: 59340 - protein, 14 aa, Homo Sapiens
SRTPRLPSSADVEF

SEQ ID NO: 59341 - protein, 14 aa, Homo Sapiens
RTPRLPSSADVEFC

SEQ ID NO: 59342 - protein, 14 aa, Homo Sapiens
TPRLPSSADVEFCL

SEQ ID NO: 59343 - protein, 14 aa, Homo Sapiens
PRLPSSADVEFCLS

SEQ ID NO: 59344 - protein, 14 aa, Homo Sapiens
RLPSSADVEFCLSL

SEQ ID NO: 59345 - protein, 14 aa, Homo Sapiens
LPSSADVEFCLSLT

SEQ ID NO: 59346 - protein, 14 aa, Homo Sapiens
PSSADVEFCLSLTQ

SEQ ID NO: 59347 - protein, 14 aa, Homo Sapiens
SSADVEFCLSLTQY

SEQ ID NO: 59348 - protein, 14 aa, Homo Sapiens
SADVEFCLSLTQYE

SEQ ID NO: 59349 - protein, 14 aa, Homo Sapiens
ADVEFCLSLTQYES

SEQ ID NO: 59350 - protein, 14 aa, Homo Sapiens
DVEFCLSLTQYESG

SEQ ID NO: 59351 - protein, 14 aa, Homo Sapiens
VEFCLSLTQYESGS

SEQ ID NO: 59352 - protein, 14 aa, Homo Sapiens
EFCLSLTQYESGSM

SEQ ID NO: 59353 - protein, 14 aa, Homo Sapiens
FCLSLTQYESGSMD

SEQ ID NO: 59354 - protein, 14 aa, Homo Sapiens
CLSLTQYESGSMDK

SEQ ID NO: 59355 - protein, 14 aa, Homo Sapiens
LSLTQYESGSMDKA

SEQ ID NO: 59356 - protein, 14 aa, Homo Sapiens
SLTQYESGSMDKAA

SEQ ID NO: 59357 - protein, 14 aa, Homo Sapiens
LTQYESGSMDKAAN

SEQ ID NO: 59358 - protein, 14 aa, Homo Sapiens
TQYESGSMDKAANF

SEQ ID NO: 59359 - protein, 14 aa, Homo Sapiens
QYESGSMDKAANFS

SEQ ID NO: 59360 - protein, 14 aa, Homo Sapiens
YESGSMDKAANFSF

SEQ ID NO: 59361 - protein, 14 aa, Homo Sapiens
ESGSMDKAANFSFR

SEQ ID NO: 59362 - protein, 14 aa, Homo Sapiens
SGSMDKAANFSFRN

SEQ ID NO: 59363 - protein, 14 aa, Homo Sapiens
GSMDKAANFSFRNT

SEQ ID NO: 59364 - protein, 14 aa, Homo Sapiens
SMDKAANFSFRNTL

SEQ ID NO: 59365 - protein, 14 aa, Homo Sapiens
MDKAANFSFRNTLE

SEQ ID NO: 59366 - protein, 14 aa, Homo Sapiens
DKAANFSFRNTLEG

SEQ ID NO: 59367 - protein, 14 aa, Homo Sapiens
KAANFSFRNTLEGF

SEQ ID NO: 59368 - protein, 14 aa, Homo Sapiens
AANFSFRNTLEGFA

SEQ ID NO: 59369 - protein, 14 aa, Homo Sapiens
ANFSFRNTLEGFAS

SEQ ID NO: 59370 - protein, 14 aa, Homo Sapiens
NFSFRNTLEGFASP

SEQ ID NO: 59371 - protein, 14 aa, Homo Sapiens
FSFRNTLEGFASPL

SEQ ID NO: 59372 - protein, 14 aa, Homo Sapiens
SFRNTLEGFASPLT

SEQ ID NO: 59373 - protein, 14 aa, Homo Sapiens
FRNTLEGFASPLTG

SEQ ID NO: 59374 - protein, 14 aa, Homo Sapiens
RNTLEGFASPLTGI

SEQ ID NO: 59375 - protein, 14 aa, Homo Sapiens
NTLEGFASPLTGIA

SEQ ID NO: 59376 - protein, 14 aa, Homo Sapiens
TLEGFASPLTGIAD

SEQ ID NO: 59377 - protein, 14 aa, Homo Sapiens
LEGFASPLTGIADA

SEQ ID NO: 59378 - protein, 14 aa, Homo Sapiens
EGFASPLTGIADAS

SEQ ID NO: 59379 - protein, 14 aa, Homo Sapiens
GFASPLTGIADASQ

SEQ ID NO: 59380 - protein, 14 aa, Homo Sapiens
FASPLTGIADASQS

SEQ ID NO: 59381 - protein, 14 aa, Homo Sapiens
ASPLTGIADASQSS

SEQ ID NO: 59382 - protein, 14 aa, Homo Sapiens
SPLTGIADASQSSM

SEQ ID NO: 59383 - protein, 14 aa, Homo Sapiens
PLTGIADASQSSMH

SEQ ID NO: 59384 - protein, 14 aa, Homo Sapiens
LTGIADASQSSMHN

SEQ ID NO: 59385 - protein, 14 aa, Homo Sapiens
TGIADASQSSMHNA

SEQ ID NO: 59386 - protein, 14 aa, Homo Sapiens
GIADASQSSMHNAL

SEQ ID NO: 59387 - protein, 14 aa, Homo Sapiens
IADASQSSMHNALH

SEQ ID NO: 59388 - protein, 14 aa, Homo Sapiens
ADASQSSMHNALHI

SEQ ID NO: 59389 - protein, 14 aa, Homo Sapiens
DASQSSMHNALHIY

SEQ ID NO: 59390 - protein, 14 aa, Homo Sapiens
ASQSSMHNALHIYM

SEQ ID NO: 59391 - protein, 14 aa, Homo Sapiens
SQSSMHNALHIYMN

SEQ ID NO: 59392 - protein, 14 aa, Homo Sapiens
QSSMHNALHIYMNG

SEQ ID NO: 59393 - protein, 14 aa, Homo Sapiens
SSMHNALHIYMNGT

SEQ ID NO: 59394 - protein, 14 aa, Homo Sapiens
SMHNALHIYMNGTM

SEQ ID NO: 59395 - protein, 14 aa, Homo Sapiens
MHNALHIYMNGTMS

SEQ ID NO: 59396 - protein, 14 aa, Homo Sapiens
HNALHIYMNGTMSQ

SEQ ID NO: 59397 - protein, 14 aa, Homo Sapiens
NALHIYMNGTMSQV

SEQ ID NO: 59398 - protein, 14 aa, Homo Sapiens
ALHIYMNGTMSQVQ

SEQ ID NO: 59399 - protein, 14 aa, Homo Sapiens
LHIYMNGTMSQVQG

SEQ ID NO: 59400 - protein, 14 aa, Homo Sapiens
HIYMNGTMSQVQGS

SEQ ID NO: 59401 - protein, 14 aa, Homo Sapiens
IYMNGTMSQVQGSA

SEQ ID NO: 59402 - protein, 14 aa, Homo Sapiens
YMNGTMSQVQGSAN

SEQ ID NO: 59403 - protein, 14 aa, Homo Sapiens
MNGTMSQVQGSAND

SEQ ID NO: 59404 - protein, 14 aa, Homo Sapiens
NGTMSQVQGSANDP

SEQ ID NO: 59405 - protein, 14 aa, Homo Sapiens
GTMSQVQGSANDPI

SEQ ID NO: 59406 - protein, 14 aa, Homo Sapiens
TMSQVQGSANDPIF

SEQ ID NO: 59407 - protein, 14 aa, Homo Sapiens
MSQVQGSANDPIFL

SEQ ID NO: 59408 - protein, 14 aa, Homo Sapiens
SQVQGSANDPIFLL

SEQ ID NO: 59409 - protein, 14 aa, Homo Sapiens
QVQGSANDPIFLLH

SEQ ID NO: 59410 - protein, 14 aa, Homo Sapiens
VQGSANDPIFLLHH

SEQ ID NO: 59411 - protein, 14 aa, Homo Sapiens
QGSANDPIFLLHHA

SEQ ID NO: 59412 - protein, 14 aa, Homo Sapiens
GSANDPIFLLHHAF

SEQ ID NO: 59413 - protein, 14 aa, Homo Sapiens
SANDPIFLLHHAFV

SEQ ID NO: 59414 - protein, 14 aa, Homo Sapiens
ANDPIFLLHHAFVD

SEQ ID NO: 59415 - protein, 14 aa, Homo Sapiens
NDPIFLLHHAFVDS

SEQ ID NO: 59416 - protein, 14 aa, Homo Sapiens
DPIFLLHHAFVDSI

SEQ ID NO: 59417 - protein, 14 aa, Homo Sapiens
PIFLLHHAFVDSIF

SEQ ID NO: 59418 - protein, 14 aa, Homo Sapiens
IFLLHHAFVDSIFE

SEQ ID NO: 59419 - protein, 14 aa, Homo Sapiens
FLLHHAFVDSIFEQ

SEQ ID NO: 59420 - protein, 14 aa, Homo Sapiens
LLHHAFVDSIFEQW

SEQ ID NO: 59421 - protein, 14 aa, Homo Sapiens
LHHAFVDSIFEQWL

SEQ ID NO: 59422 - protein, 14 aa, Homo Sapiens
HHAFVDSIFEQWLQ

SEQ ID NO: 59423 - protein, 14 aa, Homo Sapiens
HAFVDSIFEQWLQR

SEQ ID NO: 59424 - protein, 14 aa, Homo Sapiens
AFVDSIFEQWLQRH

SEQ ID NO: 59425 - protein, 14 aa, Homo Sapiens
FVDSIFEQWLQRHR

SEQ ID NO: 59426 - protein, 14 aa, Homo Sapiens
VDSIFEQWLQRHRP

SEQ ID NO: 59427 - protein, 14 aa, Homo Sapiens
DSIFEQWLQRHRPL

SEQ ID NO: 59428 - protein, 14 aa, Homo Sapiens
SIFEQWLQRHRPLQ

SEQ ID NO: 59429 - protein, 14 aa, Homo Sapiens
IFEQWLQRHRPLQE

SEQ ID NO: 59430 - protein, 14 aa, Homo Sapiens
FEQWLQRHRPLQEV

SEQ ID NO: 59431 - protein, 14 aa, Homo Sapiens
EQWLQRHRPLQEVY

SEQ ID NO: 59432 - protein, 14 aa, Homo Sapiens
QWLQRHRPLQEVYP

SEQ ID NO: 59433 - protein, 14 aa, Homo Sapiens
WLQRHRPLQEVYPE

SEQ ID NO: 59434 - protein, 14 aa, Homo Sapiens
LQRHRPLQEVYPEA

SEQ ID NO: 59435 - protein, 14 aa, Homo Sapiens
QRHRPLQEVYPEAN

SEQ ID NO: 59436 - protein, 14 aa, Homo Sapiens
RHRPLQEVYPEANA

SEQ ID NO: 59437 - protein, 14 aa, Homo Sapiens
HRPLQEVYPEANAP

SEQ ID NO: 59438 - protein, 14 aa, Homo Sapiens
RPLQEVYPEANAPI

SEQ ID NO: 59439 - protein, 14 aa, Homo Sapiens
PLQEVYPEANAPIG

SEQ ID NO: 59440 - protein, 14 aa, Homo Sapiens
LQEVYPEANAPIGH

SEQ ID NO: 59441 - protein, 14 aa, Homo Sapiens
QEVYPEANAPIGHN

SEQ ID NO: 59442 - protein, 14 aa, Homo Sapiens
EVYPEANAPIGHNR

SEQ ID NO: 59443 - protein, 14 aa, Homo Sapiens
VYPEANAPIGHNRE

SEQ ID NO: 59444 - protein, 14 aa, Homo Sapiens
YPEANAPIGHNRES

SEQ ID NO: 59445 - protein, 14 aa, Homo Sapiens
PEANAPIGHNRESY

SEQ ID NO: 59446 - protein, 14 aa, Homo Sapiens
EANAPIGHNRESYM

SEQ ID NO: 59447 - protein, 14 aa, Homo Sapiens
ANAPIGHNRESYMV

SEQ ID NO: 59448 - protein, 14 aa, Homo Sapiens
NAPIGHNRESYMVP

SEQ ID NO: 59449 - protein, 14 aa, Homo Sapiens
APIGHNRESYMVPF

SEQ ID NO: 59450 - protein, 14 aa, Homo Sapiens
PIGHNRESYMVPFI

SEQ ID NO: 59451 - protein, 14 aa, Homo Sapiens
IGHNRESYMVPFIP

SEQ ID NO: 59452 - protein, 14 aa, Homo Sapiens
GHNRESYMVPFIPL

SEQ ID NO: 59453 - protein, 14 aa, Homo Sapiens
HNRESYMVPFIPLY

SEQ ID NO: 59454 - protein, 14 aa, Homo Sapiens
NRESYMVPFIPLYR

SEQ ID NO: 59455 - protein, 14 aa, Homo Sapiens
RESYMVPFIPLYRN

SEQ ID NO: 59456 - protein, 14 aa, Homo Sapiens
ESYMVPFIPLYRNG

SEQ ID NO: 59457 - protein, 14 aa, Homo Sapiens
SYMVPFIPLYRNGD

SEQ ID NO: 59458 - protein, 14 aa, Homo Sapiens
YMVPFIPLYRNGDF

SEQ ID NO: 59459 - protein, 14 aa, Homo Sapiens
MVPFIPLYRNGDFF

SEQ ID NO: 59460 - protein, 14 aa, Homo Sapiens
VPFIPLYRNGDFFI

SEQ ID NO: 59461 - protein, 14 aa, Homo Sapiens
PFIPLYRNGDFFIS

SEQ ID NO: 59462 - protein, 14 aa, Homo Sapiens
FIPLYRNGDFFISS

SEQ ID NO: 59463 - protein, 14 aa, Homo Sapiens
IPLYRNGDFFISSK

SEQ ID NO: 59464 - protein, 14 aa, Homo Sapiens
PLYRNGDFFISSKD

SEQ ID NO: 59465 - protein, 14 aa, Homo Sapiens
LYRNGDFFISSKDL

SEQ ID NO: 59466 - protein, 14 aa, Homo Sapiens
YRNGDFFISSKDLG

SEQ ID NO: 59467 - protein, 14 aa, Homo Sapiens
RNGDFFISSKDLGY

SEQ ID NO: 59468 - protein, 14 aa, Homo Sapiens
NGDFFISSKDLGYD

SEQ ID NO: 59469 - protein, 14 aa, Homo Sapiens
GDFFISSKDLGYDY

SEQ ID NO: 59470 - protein, 14 aa, Homo Sapiens
DFFISSKDLGYDYS

SEQ ID NO: 59471 - protein, 14 aa, Homo Sapiens
FFISSKDLGYDYSY

SEQ ID NO: 59472 - protein, 14 aa, Homo Sapiens
FISSKDLGYDYSYL

SEQ ID NO: 59473 - protein, 14 aa, Homo Sapiens
ISSKDLGYDYSYLQ

SEQ ID NO: 59474 - protein, 14 aa, Homo Sapiens
SSKDLGYDYSYLQD

SEQ ID NO: 59475 - protein, 14 aa, Homo Sapiens
SKDLGYDYSYLQDS

SEQ ID NO: 59476 - protein, 14 aa, Homo Sapiens
KDLGYDYSYLQDSD

SEQ ID NO: 59477 - protein, 14 aa, Homo Sapiens
DLGYDYSYLQDSDP

SEQ ID NO: 59478 - protein, 14 aa, Homo Sapiens
LGYDYSYLQDSDPD

SEQ ID NO: 59479 - protein, 14 aa, Homo Sapiens
GYDYSYLQDSDPDS

SEQ ID NO: 59480 - protein, 14 aa, Homo Sapiens
YDYSYLQDSDPDSF

SEQ ID NO: 59481 - protein, 14 aa, Homo Sapiens
DYSYLQDSDPDSFQ

SEQ ID NO: 59482 - protein, 14 aa, Homo Sapiens
YSYLQDSDPDSFQD

SEQ ID NO: 59483 - protein, 14 aa, Homo Sapiens
SYLQDSDPDSFQDY

SEQ ID NO: 59484 - protein, 14 aa, Homo Sapiens
YLQDSDPDSFQDYI

SEQ ID NO: 59485 - protein, 14 aa, Homo Sapiens
LQDSDPDSFQDYIK

SEQ ID NO: 59486 - protein, 14 aa, Homo Sapiens
QDSDPDSFQDYIKS

SEQ ID NO: 59487 - protein, 14 aa, Homo Sapiens
DSDPDSFQDYIKSY

SEQ ID NO: 59488 - protein, 14 aa, Homo Sapiens
SDPDSFQDYIKSYL

SEQ ID NO: 59489 - protein, 14 aa, Homo Sapiens
DPDSFQDYIKSYLE

SEQ ID NO: 59490 - protein, 14 aa, Homo Sapiens
PDSFQDYIKSYLEQ

SEQ ID NO: 59491 - protein, 14 aa, Homo Sapiens
DSFQDYIKSYLEQA

SEQ ID NO: 59492 - protein, 14 aa, Homo Sapiens
SFQDYIKSYLEQAS

SEQ ID NO: 59493 - protein, 14 aa, Homo Sapiens
FQDYIKSYLEQASR

SEQ ID NO: 59494 - protein, 14 aa, Homo Sapiens
QDYIKSYLEQASRI

SEQ ID NO: 59495 - protein, 14 aa, Homo Sapiens
DYIKSYLEQASRIW

SEQ ID NO: 59496 - protein, 14 aa, Homo Sapiens
YIKSYLEQASRIWS

SEQ ID NO: 59497 - protein, 14 aa, Homo Sapiens
IKSYLEQASRIWSW

SEQ ID NO: 59498 - protein, 14 aa, Homo Sapiens
KSYLEQASRIWSWL

SEQ ID NO: 59499 - protein, 14 aa, Homo Sapiens
SYLEQASRIWSWLL

SEQ ID NO: 59500 - protein, 14 aa, Homo Sapiens
YLEQASRIWSWLLG

SEQ ID NO: 59501 - protein, 14 aa, Homo Sapiens
LEQASRIWSWLLGA

SEQ ID NO: 59502 - protein, 14 aa, Homo Sapiens
EQASRIWSWLLGAA

SEQ ID NO: 59503 - protein, 14 aa, Homo Sapiens
QASRIWSWLLGAAM

SEQ ID NO: 59504 - protein, 14 aa, Homo Sapiens
ASRIWSWLLGAAMV

SEQ ID NO: 59505 - protein, 14 aa, Homo Sapiens
SRIWSWLLGAAMVG

SEQ ID NO: 59506 - protein, 14 aa, Homo Sapiens
RIWSWLLGAAMVGA

SEQ ID NO: 59507 - protein, 14 aa, Homo Sapiens
IWSWLLGAAMVGAV

SEQ ID NO: 59508 - protein, 14 aa, Homo Sapiens
WSWLLGAAMVGAVL

SEQ ID NO: 59509 - protein, 14 aa, Homo Sapiens
SWLLGAAMVGAVLT

SEQ ID NO: 59510 - protein, 14 aa, Homo Sapiens
WLLGAAMVGAVLTA

SEQ ID NO: 59511 - protein, 14 aa, Homo Sapiens
LLGAAMVGAVLTAL

SEQ ID NO: 59512 - protein, 14 aa, Homo Sapiens
LGAAMVGAVLTALL

SEQ ID NO: 59513 - protein, 14 aa, Homo Sapiens
GAAMVGAVLTALLA

SEQ ID NO: 59514 - protein, 14 aa, Homo Sapiens
AAMVGAVLTALLAG

SEQ ID NO: 59515 - protein, 14 aa, Homo Sapiens
AMVGAVLTALLAGL

SEQ ID NO: 59516 - protein, 14 aa, Homo Sapiens
MVGAVLTALLAGLV

SEQ ID NO: 59517 - protein, 14 aa, Homo Sapiens
VGAVLTALLAGLVS

SEQ ID NO: 59518 - protein, 14 aa, Homo Sapiens
GAVLTALLAGLVSL

SEQ ID NO: 59519 - protein, 14 aa, Homo Sapiens
AVLTALLAGLVSLL

SEQ ID NO: 59520 - protein, 14 aa, Homo Sapiens
VLTALLAGLVSLLC

SEQ ID NO: 59521 - protein, 14 aa, Homo Sapiens
LTALLAGLVSLLCR

SEQ ID NO: 59522 - protein, 14 aa, Homo Sapiens
TALLAGLVSLLCRH

SEQ ID NO: 59523 - protein, 14 aa, Homo Sapiens
ALLAGLVSLLCRHK

SEQ ID NO: 59524 - protein, 14 aa, Homo Sapiens
LLAGLVSLLCRHKR

SEQ ID NO: 59525 - protein, 14 aa, Homo Sapiens
LAGLVSLLCRHKRK

SEQ ID NO: 59526 - protein, 14 aa, Homo Sapiens
AGLVSLLCRHKRKQ

SEQ ID NO: 59527 - protein, 14 aa, Homo Sapiens
GLVSLLCRHKRKQL

SEQ ID NO: 59528 - protein, 14 aa, Homo Sapiens
LVSLLCRHKRKQLP

SEQ ID NO: 59529 - protein, 14 aa, Homo Sapiens
VSLLCRHKRKQLPE

SEQ ID NO: 59530 - protein, 14 aa, Homo Sapiens
SLLCRHKRKQLPEE

SEQ ID NO: 59531 - protein, 14 aa, Homo Sapiens
LLCRHKRKQLPEEK

SEQ ID NO: 59532 - protein, 14 aa, Homo Sapiens
LCRHKRKQLPEEKQ

SEQ ID NO: 59533 - protein, 14 aa, Homo Sapiens
CRHKRKQLPEEKQP

SEQ ID NO: 59534 - protein, 14 aa, Homo Sapiens
RHKRKQLPEEKQPL

SEQ ID NO: 59535 - protein, 14 aa, Homo Sapiens
HKRKQLPEEKQPLL

SEQ ID NO: 59536 - protein, 14 aa, Homo Sapiens
KRKQLPEEKQPLLM

SEQ ID NO: 59537 - protein, 14 aa, Homo Sapiens
RKQLPEEKQPLLME

SEQ ID NO: 59538 - protein, 14 aa, Homo Sapiens
KQLPEEKQPLLMEK

SEQ ID NO: 59539 - protein, 14 aa, Homo Sapiens
QLPEEKQPLLMEKE

SEQ ID NO: 59540 - protein, 14 aa, Homo Sapiens
LPEEKQPLLMEKED

SEQ ID NO: 59541 - protein, 14 aa, Homo Sapiens
PEEKQPLLMEKEDY

SEQ ID NO: 59542 - protein, 14 aa, Homo Sapiens
EEKQPLLMEKEDYH

SEQ ID NO: 59543 - protein, 14 aa, Homo Sapiens
EKQPLLMEKEDYHS

SEQ ID NO: 59544 - protein, 14 aa, Homo Sapiens
KQPLLMEKEDYHSL

SEQ ID NO: 59545 - protein, 14 aa, Homo Sapiens
QPLLMEKEDYHSLY

SEQ ID NO: 59546 - protein, 14 aa, Homo Sapiens
PLLMEKEDYHSLYQ

SEQ ID NO: 59547 - protein, 14 aa, Homo Sapiens
LLMEKEDYHSLYQS

SEQ ID NO: 59548 - protein, 14 aa, Homo Sapiens
LMEKEDYHSLYQSH

SEQ ID NO: 59549 - protein, 14 aa, Homo Sapiens
MEKEDYHSLYQSHL

SEQ ID NO: 59550 - protein, 15 aa, Homo Sapiens
MLLAVLYCLLWSFQT

SEQ ID NO: 59551 - protein, 15 aa, Homo Sapiens
LLAVLYCLLWSFQTS

SEQ ID NO: 59552 - protein, 15 aa, Homo Sapiens
LAVLYCLLWSFQTSA

SEQ ID NO: 59553 - protein, 15 aa, Homo Sapiens
AVLYCLLWSFQTSAG

SEQ ID NO: 59554 - protein, 15 aa, Homo Sapiens
VLYCLLWSFQTSAGH

SEQ ID NO: 59555 - protein, 15 aa, Homo Sapiens
LYCLLWSFQTSAGHF

SEQ ID NO: 59556 - protein, 15 aa, Homo Sapiens
YCLLWSFQTSAGHFP

SEQ ID NO: 59557 - protein, 15 aa, Homo Sapiens
CLLWSFQTSAGHFPR

SEQ ID NO: 59558 - protein, 15 aa, Homo Sapiens
LLWSFQTSAGHFPRA

SEQ ID NO: 59559 - protein, 15 aa, Homo Sapiens
LWSFQTSAGHFPRAC

SEQ ID NO: 59560 - protein, 15 aa, Homo Sapiens
WSFQTSAGHFPRACV

SEQ ID NO: 59561 - protein, 15 aa, Homo Sapiens
SFQTSAGHFPRACVS

SEQ ID NO: 59562 - protein, 15 aa, Homo Sapiens
FQTSAGHFPRACVSS

SEQ ID NO: 59563 - protein, 15 aa, Homo Sapiens
QTSAGHFPRACVSSK

SEQ ID NO: 59564 - protein, 15 aa, Homo Sapiens
TSAGHFPRACVSSKN

SEQ ID NO: 59565 - protein, 15 aa, Homo Sapiens
SAGHFPRACVSSKNL

SEQ ID NO: 59566 - protein, 15 aa, Homo Sapiens
AGHFPRACVSSKNLM

SEQ ID NO: 59567 - protein, 15 aa, Homo Sapiens
GHFPRACVSSKNLME

SEQ ID NO: 59568 - protein, 15 aa, Homo Sapiens
HFPRACVSSKNLMEK

SEQ ID NO: 59569 - protein, 15 aa, Homo Sapiens
FPRACVSSKNLMEKE

SEQ ID NO: 59570 - protein, 15 aa, Homo Sapiens
PRACVSSKNLMEKEC

SEQ ID NO: 59571 - protein, 15 aa, Homo Sapiens
RACVSSKNLMEKECC

SEQ ID NO: 59572 - protein, 15 aa, Homo Sapiens
ACVSSKNLMEKECCP

SEQ ID NO: 59573 - protein, 15 aa, Homo Sapiens
CVSSKNLMEKECCPP

SEQ ID NO: 59574 - protein, 15 aa, Homo Sapiens
VSSKNLMEKECCPPW

SEQ ID NO: 59575 - protein, 15 aa, Homo Sapiens
SSKNLMEKECCPPWS

SEQ ID NO: 59576 - protein, 15 aa, Homo Sapiens
SKNLMEKECCPPWSG

SEQ ID NO: 59577 - protein, 15 aa, Homo Sapiens
KNLMEKECCPPWSGD

SEQ ID NO: 59578 - protein, 15 aa, Homo Sapiens
NLMEKECCPPWSGDR

SEQ ID NO: 59579 - protein, 15 aa, Homo Sapiens
LMEKECCPPWSGDRS

SEQ ID NO: 59580 - protein, 15 aa, Homo Sapiens
MEKECCPPWSGDRSP

SEQ ID NO: 59581 - protein, 15 aa, Homo Sapiens
EKECCPPWSGDRSPC

SEQ ID NO: 59582 - protein, 15 aa, Homo Sapiens
KECCPPWSGDRSPCG

SEQ ID NO: 59583 - protein, 15 aa, Homo Sapiens
ECCPPWSGDRSPCGQ

SEQ ID NO: 59584 - protein, 15 aa, Homo Sapiens
CCPPWSGDRSPCGQL

SEQ ID NO: 59585 - protein, 15 aa, Homo Sapiens
CPPWSGDRSPCGQLS

SEQ ID NO: 59586 - protein, 15 aa, Homo Sapiens
PPWSGDRSPCGQLSG

SEQ ID NO: 59587 - protein, 15 aa, Homo Sapiens
PWSGDRSPCGQLSGR

SEQ ID NO: 59588 - protein, 15 aa, Homo Sapiens
WSGDRSPCGQLSGRG

SEQ ID NO: 59589 - protein, 15 aa, Homo Sapiens
SGDRSPCGQLSGRGS

SEQ ID NO: 59590 - protein, 15 aa, Homo Sapiens
GDRSPCGQLSGRGSC

SEQ ID NO: 59591 - protein, 15 aa, Homo Sapiens
DRSPCGQLSGRGSCQ

SEQ ID NO: 59592 - protein, 15 aa, Homo Sapiens
RSPCGQLSGRGSCQN

SEQ ID NO: 59593 - protein, 15 aa, Homo Sapiens
SPCGQLSGRGSCQNI

SEQ ID NO: 59594 - protein, 15 aa, Homo Sapiens
PCGQLSGRGSCQNIL

SEQ ID NO: 59595 - protein, 15 aa, Homo Sapiens
CGQLSGRGSCQNILL

SEQ ID NO: 59596 - protein, 15 aa, Homo Sapiens
GQLSGRGSCQNILLS

SEQ ID NO: 59597 - protein, 15 aa, Homo Sapiens
QLSGRGSCQNILLSN

SEQ ID NO: 59598 - protein, 15 aa, Homo Sapiens
LSGRGSCQNILLSNA

SEQ ID NO: 59599 - protein, 15 aa, Homo Sapiens
SGRGSCQNILLSNAP

SEQ ID NO: 59600 - protein, 15 aa, Homo Sapiens
GRGSCQNILLSNAPL

SEQ ID NO: 59601 - protein, 15 aa, Homo Sapiens
RGSCQNILLSNAPLG

SEQ ID NO: 59602 - protein, 15 aa, Homo Sapiens
GSCQNILLSNAPLGP

SEQ ID NO: 59603 - protein, 15 aa, Homo Sapiens
SCQNILLSNAPLGPQ

SEQ ID NO: 59604 - protein, 15 aa, Homo Sapiens
CQNILLSNAPLGPQF

SEQ ID NO: 59605 - protein, 15 aa, Homo Sapiens
QNILLSNAPLGPQFP

SEQ ID NO: 59606 - protein, 15 aa, Homo Sapiens
NILLSNAPLGPQFPF

SEQ ID NO: 59607 - protein, 15 aa, Homo Sapiens
ILLSNAPLGPQFPFT

SEQ ID NO: 59608 - protein, 15 aa, Homo Sapiens
LLSNAPLGPQFPFTG

SEQ ID NO: 59609 - protein, 15 aa, Homo Sapiens
LSNAPLGPQFPFTGV

SEQ ID NO: 59610 - protein, 15 aa, Homo Sapiens
SNAPLGPQFPFTGVD

SEQ ID NO: 59611 - protein, 15 aa, Homo Sapiens
NAPLGPQFPFTGVDD

SEQ ID NO: 59612 - protein, 15 aa, Homo Sapiens
APLGPQFPFTGVDDR

SEQ ID NO: 59613 - protein, 15 aa, Homo Sapiens
PLGPQFPFTGVDDRE

SEQ ID NO: 59614 - protein, 15 aa, Homo Sapiens
LGPQFPFTGVDDRES

SEQ ID NO: 59615 - protein, 15 aa, Homo Sapiens
GPQFPFTGVDDRESW

SEQ ID NO: 59616 - protein, 15 aa, Homo Sapiens
PQFPFTGVDDRESWP

SEQ ID NO: 59617 - protein, 15 aa, Homo Sapiens
QFPFTGVDDRESWPS

SEQ ID NO: 59618 - protein, 15 aa, Homo Sapiens
FPFTGVDDRESWPSV

SEQ ID NO: 59619 - protein, 15 aa, Homo Sapiens
PFTGVDDRESWPSVF

SEQ ID NO: 59620 - protein, 15 aa, Homo Sapiens
FTGVDDRESWPSVFY

SEQ ID NO: 59621 - protein, 15 aa, Homo Sapiens
TGVDDRESWPSVFYN

SEQ ID NO: 59622 - protein, 15 aa, Homo Sapiens
GVDDRESWPSVFYNR

SEQ ID NO: 59623 - protein, 15 aa, Homo Sapiens
VDDRESWPSVFYNRT

SEQ ID NO: 59624 - protein, 15 aa, Homo Sapiens
DDRESWPSVFYNRTC

SEQ ID NO: 59625 - protein, 15 aa, Homo Sapiens
DRESWPSVFYNRTCQ

SEQ ID NO: 59626 - protein, 15 aa, Homo Sapiens
RESWPSVFYNRTCQC

SEQ ID NO: 59627 - protein, 15 aa, Homo Sapiens
ESWPSVFYNRTCQCS

SEQ ID NO: 59628 - protein, 15 aa, Homo Sapiens
SWPSVFYNRTCQCSG

SEQ ID NO: 59629 - protein, 15 aa, Homo Sapiens
WPSVFYNRTCQCSGN

SEQ ID NO: 59630 - protein, 15 aa, Homo Sapiens
PSVFYNRTCQCSGNF

SEQ ID NO: 59631 - protein, 15 aa, Homo Sapiens
SVFYNRTCQCSGNFM

SEQ ID NO: 59632 - protein, 15 aa, Homo Sapiens
VFYNRTCQCSGNFMG

SEQ ID NO: 59633 - protein, 15 aa, Homo Sapiens
FYNRTCQCSGNFMGF

SEQ ID NO: 59634 - protein, 15 aa, Homo Sapiens
YNRTCQCSGNFMGFN

SEQ ID NO: 59635 - protein, 15 aa, Homo Sapiens
NRTCQCSGNFMGFNC

SEQ ID NO: 59636 - protein, 15 aa, Homo Sapiens
RTCQCSGNFMGFNCG

SEQ ID NO: 59637 - protein, 15 aa, Homo Sapiens
TCQCSGNFMGFNCGN

SEQ ID NO: 59638 - protein, 15 aa, Homo Sapiens
CQCSGNFMGFNCGNC

SEQ ID NO: 59639 - protein, 15 aa, Homo Sapiens
QCSGNFMGFNCGNCK

SEQ ID NO: 59640 - protein, 15 aa, Homo Sapiens
CSGNFMGFNCGNCKF

SEQ ID NO: 59641 - protein, 15 aa, Homo Sapiens
SGNFMGFNCGNCKFG

SEQ ID NO: 59642 - protein, 15 aa, Homo Sapiens
GNFMGFNCGNCKFGF

SEQ ID NO: 59643 - protein, 15 aa, Homo Sapiens
NFMGFNCGNCKFGFW

SEQ ID NO: 59644 - protein, 15 aa, Homo Sapiens
FMGFNCGNCKFGFWG

SEQ ID NO: 59645 - protein, 15 aa, Homo Sapiens
MGFNCGNCKFGFWGP

SEQ ID NO: 59646 - protein, 15 aa, Homo Sapiens
GFNCGNCKFGFWGPN

SEQ ID NO: 59647 - protein, 15 aa, Homo Sapiens
FNCGNCKFGFWGPNC

SEQ ID NO: 59648 - protein, 15 aa, Homo Sapiens
NCGNCKFGFWGPNCT

SEQ ID NO: 59649 - protein, 15 aa, Homo Sapiens
CGNCKFGFWGPNCTE

SEQ ID NO: 59650 - protein, 15 aa, Homo Sapiens
GNCKFGFWGPNCTER

SEQ ID NO: 59651 - protein, 15 aa, Homo Sapiens
NCKFGFWGPNCTERR

SEQ ID NO: 59652 - protein, 15 aa, Homo Sapiens
CKFGFWGPNCTERRL

SEQ ID NO: 59653 - protein, 15 aa, Homo Sapiens
KFGFWGPNCTERRLL

SEQ ID NO: 59654 - protein, 15 aa, Homo Sapiens
FGFWGPNCTERRLLV

SEQ ID NO: 59655 - protein, 15 aa, Homo Sapiens
GFWGPNCTERRLLVR

SEQ ID NO: 59656 - protein, 15 aa, Homo Sapiens
FWGPNCTERRLLVRR

SEQ ID NO: 59657 - protein, 15 aa, Homo Sapiens
WGPNCTERRLLVRRN

SEQ ID NO: 59658 - protein, 15 aa, Homo Sapiens
GPNCTERRLLVRRNI

SEQ ID NO: 59659 - protein, 15 aa, Homo Sapiens
PNCTERRLLVRRNIF

SEQ ID NO: 59660 - protein, 15 aa, Homo Sapiens
NCTERRLLVRRNIFD

SEQ ID NO: 59661 - protein, 15 aa, Homo Sapiens
CTERRLLVRRNIFDL

SEQ ID NO: 59662 - protein, 15 aa, Homo Sapiens
TERRLLVRRNIFDLS

SEQ ID NO: 59663 - protein, 15 aa, Homo Sapiens
ERRLLVRRNIFDLSA

SEQ ID NO: 59664 - protein, 15 aa, Homo Sapiens
RRLLVRRNIFDLSAP

SEQ ID NO: 59665 - protein, 15 aa, Homo Sapiens
RLLVRRNIFDLSAPE

SEQ ID NO: 59666 - protein, 15 aa, Homo Sapiens
LLVRRNIFDLSAPEK

SEQ ID NO: 59667 - protein, 15 aa, Homo Sapiens
LVRRNIFDLSAPEKD

SEQ ID NO: 59668 - protein, 15 aa, Homo Sapiens
VRRNIFDLSAPEKDK

SEQ ID NO: 59669 - protein, 15 aa, Homo Sapiens
RRNIFDLSAPEKDKF

SEQ ID NO: 59670 - protein, 15 aa, Homo Sapiens
RNIFDLSAPEKDKFF

SEQ ID NO: 59671 - protein, 15 aa, Homo Sapiens
NIFDLSAPEKDKFFA

SEQ ID NO: 59672 - protein, 15 aa, Homo Sapiens
IFDLSAPEKDKFFAY

SEQ ID NO: 59673 - protein, 15 aa, Homo Sapiens
FDLSAPEKDKFFAYL

SEQ ID NO: 59674 - protein, 15 aa, Homo Sapiens
DLSAPEKDKFFAYLT

SEQ ID NO: 59675 - protein, 15 aa, Homo Sapiens
LSAPEKDKFFAYLTL

SEQ ID NO: 59676 - protein, 15 aa, Homo Sapiens
SAPEKDKFFAYLTLA

SEQ ID NO: 59677 - protein, 15 aa, Homo Sapiens
APEKDKFFAYLTLAK

SEQ ID NO: 59678 - protein, 15 aa, Homo Sapiens
PEKDKFFAYLTLAKH

SEQ ID NO: 59679 - protein, 15 aa, Homo Sapiens
EKDKFFAYLTLAKHT

SEQ ID NO: 59680 - protein, 15 aa, Homo Sapiens
KDKFFAYLTLAKHTI

SEQ ID NO: 59681 - protein, 15 aa, Homo Sapiens
DKFFAYLTLAKHTIS

SEQ ID NO: 59682 - protein, 15 aa, Homo Sapiens
KFFAYLTLAKHTISS

SEQ ID NO: 59683 - protein, 15 aa, Homo Sapiens
FFAYLTLAKHTISSD

SEQ ID NO: 59684 - protein, 15 aa, Homo Sapiens
FAYLTLAKHTISSDY

SEQ ID NO: 59685 - protein, 15 aa, Homo Sapiens
AYLTLAKHTISSDYV

SEQ ID NO: 59686 - protein, 15 aa, Homo Sapiens
YLTLAKHTISSDYVI

SEQ ID NO: 59687 - protein, 15 aa, Homo Sapiens
LTLAKHTISSDYVIP

SEQ ID NO: 59688 - protein, 15 aa, Homo Sapiens
TLAKHTISSDYVIPI

SEQ ID NO: 59689 - protein, 15 aa, Homo Sapiens
LAKHTISSDYVIPIG

SEQ ID NO: 59690 - protein, 15 aa, Homo Sapiens
AKHTISSDYVIPIGT

SEQ ID NO: 59691 - protein, 15 aa, Homo Sapiens
KHTISSDYVIPIGTY

SEQ ID NO: 59692 - protein, 15 aa, Homo Sapiens
HTISSDYVIPIGTYG

SEQ ID NO: 59693 - protein, 15 aa, Homo Sapiens
TISSDYVIPIGTYGQ

SEQ ID NO: 59694 - protein, 15 aa, Homo Sapiens
ISSDYVIPIGTYGQM

SEQ ID NO: 59695 - protein, 15 aa, Homo Sapiens
SSDYVIPIGTYGQMK

SEQ ID NO: 59696 - protein, 15 aa, Homo Sapiens
SDYVIPIGTYGQMKN

SEQ ID NO: 59697 - protein, 15 aa, Homo Sapiens
DYVIPIGTYGQMKNG

SEQ ID NO: 59698 - protein, 15 aa, Homo Sapiens
YVIPIGTYGQMKNGS

SEQ ID NO: 59699 - protein, 15 aa, Homo Sapiens
VIPIGTYGQMKNGST

SEQ ID NO: 59700 - protein, 15 aa, Homo Sapiens
IPIGTYGQMKNGSTP

SEQ ID NO: 59701 - protein, 15 aa, Homo Sapiens
PIGTYGQMKNGSTPM

SEQ ID NO: 59702 - protein, 15 aa, Homo Sapiens
IGTYGQMKNGSTPMF

SEQ ID NO: 59703 - protein, 15 aa, Homo Sapiens
GTYGQMKNGSTPMFN

SEQ ID NO: 59704 - protein, 15 aa, Homo Sapiens
TYGQMKNGSTPMFND

SEQ ID NO: 59705 - protein, 15 aa, Homo Sapiens
YGQMKNGSTPMFNDI

SEQ ID NO: 59706 - protein, 15 aa, Homo Sapiens
GQMKNGSTPMFNDIN

SEQ ID NO: 59707 - protein, 15 aa, Homo Sapiens
QMKNGSTPMFNDINI

SEQ ID NO: 59708 - protein, 15 aa, Homo Sapiens
MKNGSTPMFNDINIY

SEQ ID NO: 59709 - protein, 15 aa, Homo Sapiens
KNGSTPMFNDINIYD

SEQ ID NO: 59710 - protein, 15 aa, Homo Sapiens
NGSTPMFNDINIYDL

SEQ ID NO: 59711 - protein, 15 aa, Homo Sapiens
GSTPMFNDINIYDLF

SEQ ID NO: 59712 - protein, 15 aa, Homo Sapiens
STPMFNDINIYDLFV

SEQ ID NO: 59713 - protein, 15 aa, Homo Sapiens
TPMFNDINIYDLFVW

SEQ ID NO: 59714 - protein, 15 aa, Homo Sapiens
PMFNDINIYDLFVWM

SEQ ID NO: 59715 - protein, 15 aa, Homo Sapiens
MFNDINIYDLFVWMH

SEQ ID NO: 59716 - protein, 15 aa, Homo Sapiens
FNDINIYDLFVWMHY

SEQ ID NO: 59717 - protein, 15 aa, Homo Sapiens
NDINIYDLFVWMHYY

SEQ ID NO: 59718 - protein, 15 aa, Homo Sapiens
DINIYDLFVWMHYYV

SEQ ID NO: 59719 - protein, 15 aa, Homo Sapiens
INIYDLFVWMHYYVS

SEQ ID NO: 59720 - protein, 15 aa, Homo Sapiens
NIYDLFVWMHYYVSM

SEQ ID NO: 59721 - protein, 15 aa, Homo Sapiens
IYDLFVWMHYYVSMD

SEQ ID NO: 59722 - protein, 15 aa, Homo Sapiens
YDLFVWMHYYVSMDA

SEQ ID NO: 59723 - protein, 15 aa, Homo Sapiens
DLFVWMHYYVSMDAL

SEQ ID NO: 59724 - protein, 15 aa, Homo Sapiens
LFVWMHYYVSMDALL

SEQ ID NO: 59725 - protein, 15 aa, Homo Sapiens
FVWMHYYVSMDALLG

SEQ ID NO: 59726 - protein, 15 aa, Homo Sapiens
VWMHYYVSMDALLGG

SEQ ID NO: 59727 - protein, 15 aa, Homo Sapiens
WMHYYVSMDALLGGS

SEQ ID NO: 59728 - protein, 15 aa, Homo Sapiens
MHYYVSMDALLGGSE

SEQ ID NO: 59729 - protein, 15 aa, Homo Sapiens
HYYVSMDALLGGSEI

SEQ ID NO: 59730 - protein, 15 aa, Homo Sapiens
YYVSMDALLGGSEIW

SEQ ID NO: 59731 - protein, 15 aa, Homo Sapiens
YVSMDALLGGSEIWR

SEQ ID NO: 59732 - protein, 15 aa, Homo Sapiens
VSMDALLGGSEIWRD

SEQ ID NO: 59733 - protein, 15 aa, Homo Sapiens
SMDALLGGSEIWRDI

SEQ ID NO: 59734 - protein, 15 aa, Homo Sapiens
MDALLGGSEIWRDID

SEQ ID NO: 59735 - protein, 15 aa, Homo Sapiens
DALLGGSEIWRDIDF

SEQ ID NO: 59736 - protein, 15 aa, Homo Sapiens
ALLGGSEIWRDIDFA

SEQ ID NO: 59737 - protein, 15 aa, Homo Sapiens
LLGGSEIWRDIDFAH

SEQ ID NO: 59738 - protein, 15 aa, Homo Sapiens
LGGSEIWRDIDFAHE

SEQ ID NO: 59739 - protein, 15 aa, Homo Sapiens
GGSEIWRDIDFAHEA

SEQ ID NO: 59740 - protein, 15 aa, Homo Sapiens
GSEIWRDIDFAHEAP

SEQ ID NO: 59741 - protein, 15 aa, Homo Sapiens
SEIWRDIDFAHEAPA

SEQ ID NO: 59742 - protein, 15 aa, Homo Sapiens
EIWRDIDFAHEAPAF

SEQ ID NO: 59743 - protein, 15 aa, Homo Sapiens
IWRDIDFAHEAPAFL

SEQ ID NO: 59744 - protein, 15 aa, Homo Sapiens
WRDIDFAHEAPAFLP

SEQ ID NO: 59745 - protein, 15 aa, Homo Sapiens
RDIDFAHEAPAFLPW

SEQ ID NO: 59746 - protein, 15 aa, Homo Sapiens
DIDFAHEAPAFLPWH

SEQ ID NO: 59747 - protein, 15 aa, Homo Sapiens
IDFAHEAPAFLPWHR

SEQ ID NO: 59748 - protein, 15 aa, Homo Sapiens
DFAHEAPAFLPWHRL

SEQ ID NO: 59749 - protein, 15 aa, Homo Sapiens
FAHEAPAFLPWHRLF

SEQ ID NO: 59750 - protein, 15 aa, Homo Sapiens
AHEAPAFLPWHRLFL

SEQ ID NO: 59751 - protein, 15 aa, Homo Sapiens
HEAPAFLPWHRLFLL

SEQ ID NO: 59752 - protein, 15 aa, Homo Sapiens
EAPAFLPWHRLFLLR

SEQ ID NO: 59753 - protein, 15 aa, Homo Sapiens
APAFLPWHRLFLLRW

SEQ ID NO: 59754 - protein, 15 aa, Homo Sapiens
PAFLPWHRLFLLRWE

SEQ ID NO: 59755 - protein, 15 aa, Homo Sapiens
AFLPWHRLFLLRWEQ

SEQ ID NO: 59756 - protein, 15 aa, Homo Sapiens
FLPWHRLFLLRWEQE

SEQ ID NO: 59757 - protein, 15 aa, Homo Sapiens
LPWHRLFLLRWEQEI

SEQ ID NO: 59758 - protein, 15 aa, Homo Sapiens
PWHRLFLLRWEQEIQ

SEQ ID NO: 59759 - protein, 15 aa, Homo Sapiens
WHRLFLLRWEQEIQK

SEQ ID NO: 59760 - protein, 15 aa, Homo Sapiens
HRLFLLRWEQEIQKL

SEQ ID NO: 59761 - protein, 15 aa, Homo Sapiens
RLFLLRWEQEIQKLT

SEQ ID NO: 59762 - protein, 15 aa, Homo Sapiens
LFLLRWEQEIQKLTG

SEQ ID NO: 59763 - protein, 15 aa, Homo Sapiens
FLLRWEQEIQKLTGD

SEQ ID NO: 59764 - protein, 15 aa, Homo Sapiens
LLRWEQEIQKLTGDE

SEQ ID NO: 59765 - protein, 15 aa, Homo Sapiens
LRWEQEIQKLTGDEN

SEQ ID NO: 59766 - protein, 15 aa, Homo Sapiens
RWEQEIQKLTGDENF

SEQ ID NO: 59767 - protein, 15 aa, Homo Sapiens
WEQEIQKLTGDENFT

SEQ ID NO: 59768 - protein, 15 aa, Homo Sapiens
EQEIQKLTGDENFTI

SEQ ID NO: 59769 - protein, 15 aa, Homo Sapiens
QEIQKLTGDENFTIP

SEQ ID NO: 59770 - protein, 15 aa, Homo Sapiens
EIQKLTGDENFTIPY

SEQ ID NO: 59771 - protein, 15 aa, Homo Sapiens
IQKLTGDENFTIPYW

SEQ ID NO: 59772 - protein, 15 aa, Homo Sapiens
QKLTGDENFTIPYWD

SEQ ID NO: 59773 - protein, 15 aa, Homo Sapiens
KLTGDENFTIPYWDW

SEQ ID NO: 59774 - protein, 15 aa, Homo Sapiens
LTGDENFTIPYWDWR

SEQ ID NO: 59775 - protein, 15 aa, Homo Sapiens
TGDENFTIPYWDWRD

SEQ ID NO: 59776 - protein, 15 aa, Homo Sapiens
GDENFTIPYWDWRDA

SEQ ID NO: 59777 - protein, 15 aa, Homo Sapiens
DENFTIPYWDWRDAE

SEQ ID NO: 59778 - protein, 15 aa, Homo Sapiens
ENFTIPYWDWRDAEK

SEQ ID NO: 59779 - protein, 15 aa, Homo Sapiens
NFTIPYWDWRDAEKC

SEQ ID NO: 59780 - protein, 15 aa, Homo Sapiens
FTIPYWDWRDAEKCD

SEQ ID NO: 59781 - protein, 15 aa, Homo Sapiens
TIPYWDWRDAEKCDI

SEQ ID NO: 59782 - protein, 15 aa, Homo Sapiens
IPYWDWRDAEKCDIC

SEQ ID NO: 59783 - protein, 15 aa, Homo Sapiens
PYWDWRDAEKCDICT

SEQ ID NO: 59784 - protein, 15 aa, Homo Sapiens
YWDWRDAEKCDICTD

SEQ ID NO: 59785 - protein, 15 aa, Homo Sapiens
WDWRDAEKCDICTDE

SEQ ID NO: 59786 - protein, 15 aa, Homo Sapiens
DWRDAEKCDICTDEY

SEQ ID NO: 59787 - protein, 15 aa, Homo Sapiens
WRDAEKCDICTDEYM

SEQ ID NO: 59788 - protein, 15 aa, Homo Sapiens
RDAEKCDICTDEYMG

SEQ ID NO: 59789 - protein, 15 aa, Homo Sapiens
DAEKCDICTDEYMGG

SEQ ID NO: 59790 - protein, 15 aa, Homo Sapiens
AEKCDICTDEYMGGQ

SEQ ID NO: 59791 - protein, 15 aa, Homo Sapiens
EKCDICTDEYMGGQH

SEQ ID NO: 59792 - protein, 15 aa, Homo Sapiens
KCDICTDEYMGGQHP

SEQ ID NO: 59793 - protein, 15 aa, Homo Sapiens
CDICTDEYMGGQHPT

SEQ ID NO: 59794 - protein, 15 aa, Homo Sapiens
DICTDEYMGGQHPTN

SEQ ID NO: 59795 - protein, 15 aa, Homo Sapiens
ICTDEYMGGQHPTNP

SEQ ID NO: 59796 - protein, 15 aa, Homo Sapiens
CTDEYMGGQHPTNPN

SEQ ID NO: 59797 - protein, 15 aa, Homo Sapiens
TDEYMGGQHPTNPNL

SEQ ID NO: 59798 - protein, 15 aa, Homo Sapiens
DEYMGGQHPTNPNLL

SEQ ID NO: 59799 - protein, 15 aa, Homo Sapiens
EYMGGQHPTNPNLLS

SEQ ID NO: 59800 - protein, 15 aa, Homo Sapiens
YMGGQHPTNPNLLSP

SEQ ID NO: 59801 - protein, 15 aa, Homo Sapiens
MGGQHPTNPNLLSPA

SEQ ID NO: 59802 - protein, 15 aa, Homo Sapiens
GGQHPTNPNLLSPAS

SEQ ID NO: 59803 - protein, 15 aa, Homo Sapiens
GQHPTNPNLLSPASF

SEQ ID NO: 59804 - protein, 15 aa, Homo Sapiens
QHPTNPNLLSPASFF

SEQ ID NO: 59805 - protein, 15 aa, Homo Sapiens
HPTNPNLLSPASFFS

SEQ ID NO: 59806 - protein, 15 aa, Homo Sapiens
PTNPNLLSPASFFSS

SEQ ID NO: 59807 - protein, 15 aa, Homo Sapiens
TNPNLLSPASFFSSW

SEQ ID NO: 59808 - protein, 15 aa, Homo Sapiens
NPNLLSPASFFSSWQ

SEQ ID NO: 59809 - protein, 15 aa, Homo Sapiens
PNLLSPASFFSSWQI

SEQ ID NO: 59810 - protein, 15 aa, Homo Sapiens
NLLSPASFFSSWQIV

SEQ ID NO: 59811 - protein, 15 aa, Homo Sapiens
LLSPASFFSSWQIVC

SEQ ID NO: 59812 - protein, 15 aa, Homo Sapiens
LSPASFFSSWQIVCS

SEQ ID NO: 59813 - protein, 15 aa, Homo Sapiens
SPASFFSSWQIVCSR

SEQ ID NO: 59814 - protein, 15 aa, Homo Sapiens
PASFFSSWQIVCSRL

SEQ ID NO: 59815 - protein, 15 aa, Homo Sapiens
ASFFSSWQIVCSRLE

SEQ ID NO: 59816 - protein, 15 aa, Homo Sapiens
SFFSSWQIVCSRLEE

SEQ ID NO: 59817 - protein, 15 aa, Homo Sapiens
FFSSWQIVCSRLEEY

SEQ ID NO: 59818 - protein, 15 aa, Homo Sapiens
FSSWQIVCSRLEEYN

SEQ ID NO: 59819 - protein, 15 aa, Homo Sapiens
SSWQIVCSRLEEYNS

SEQ ID NO: 59820 - protein, 15 aa, Homo Sapiens
SWQIVCSRLEEYNSH

SEQ ID NO: 59821 - protein, 15 aa, Homo Sapiens
WQIVCSRLEEYNSHQ

SEQ ID NO: 59822 - protein, 15 aa, Homo Sapiens
QIVCSRLEEYNSHQS

SEQ ID NO: 59823 - protein, 15 aa, Homo Sapiens
IVCSRLEEYNSHQSL

SEQ ID NO: 59824 - protein, 15 aa, Homo Sapiens
VCSRLEEYNSHQSLC

SEQ ID NO: 59825 - protein, 15 aa, Homo Sapiens
CSRLEEYNSHQSLCN

SEQ ID NO: 59826 - protein, 15 aa, Homo Sapiens
SRLEEYNSHQSLCNG

SEQ ID NO: 59827 - protein, 15 aa, Homo Sapiens
RLEEYNSHQSLCNGT

SEQ ID NO: 59828 - protein, 15 aa, Homo Sapiens
LEEYNSHQSLCNGTP

SEQ ID NO: 59829 - protein, 15 aa, Homo Sapiens
EEYNSHQSLCNGTPE

SEQ ID NO: 59830 - protein, 15 aa, Homo Sapiens
EYNSHQSLCNGTPEG

SEQ ID NO: 59831 - protein, 15 aa, Homo Sapiens
YNSHQSLCNGTPEGP

SEQ ID NO: 59832 - protein, 15 aa, Homo Sapiens
NSHQSLCNGTPEGPL

SEQ ID NO: 59833 - protein, 15 aa, Homo Sapiens
SHQSLCNGTPEGPLR

SEQ ID NO: 59834 - protein, 15 aa, Homo Sapiens
HQSLCNGTPEGPLRR

SEQ ID NO: 59835 - protein, 15 aa, Homo Sapiens
QSLCNGTPEGPLRRN

SEQ ID NO: 59836 - protein, 15 aa, Homo Sapiens
SLCNGTPEGPLRRNP

SEQ ID NO: 59837 - protein, 15 aa, Homo Sapiens
LCNGTPEGPLRRNPG

SEQ ID NO: 59838 - protein, 15 aa, Homo Sapiens
CNGTPEGPLRRNPGN

SEQ ID NO: 59839 - protein, 15 aa, Homo Sapiens
NGTPEGPLRRNPGNH

SEQ ID NO: 59840 - protein, 15 aa, Homo Sapiens
GTPEGPLRRNPGNHD

SEQ ID NO: 59841 - protein, 15 aa, Homo Sapiens
TPEGPLRRNPGNHDK

SEQ ID NO: 59842 - protein, 15 aa, Homo Sapiens
PEGPLRRNPGNHDKS

SEQ ID NO: 59843 - protein, 15 aa, Homo Sapiens
EGPLRRNPGNHDKSR

SEQ ID NO: 59844 - protein, 15 aa, Homo Sapiens
GPLRRNPGNHDKSRT

SEQ ID NO: 59845 - protein, 15 aa, Homo Sapiens
PLRRNPGNHDKSRTP

SEQ ID NO: 59846 - protein, 15 aa, Homo Sapiens
LRRNPGNHDKSRTPR

SEQ ID NO: 59847 - protein, 15 aa, Homo Sapiens
RRNPGNHDKSRTPRL

SEQ ID NO: 59848 - protein, 15 aa, Homo Sapiens
RNPGNHDKSRTPRLP

SEQ ID NO: 59849 - protein, 15 aa, Homo Sapiens
NPGNHDKSRTPRLPS

SEQ ID NO: 59850 - protein, 15 aa, Homo Sapiens
PGNHDKSRTPRLPSS

SEQ ID NO: 59851 - protein, 15 aa, Homo Sapiens
GNHDKSRTPRLPSSA

SEQ ID NO: 59852 - protein, 15 aa, Homo Sapiens
NHDKSRTPRLPSSAD

SEQ ID NO: 59853 - protein, 15 aa, Homo Sapiens
HDKSRTPRLPSSADV

SEQ ID NO: 59854 - protein, 15 aa, Homo Sapiens
DKSRTPRLPSSADVE

SEQ ID NO: 59855 - protein, 15 aa, Homo Sapiens
KSRTPRLPSSADVEF

SEQ ID NO: 59856 - protein, 15 aa, Homo Sapiens
SRTPRLPSSADVEFC

SEQ ID NO: 59857 - protein, 15 aa, Homo Sapiens
RTPRLPSSADVEFCL

SEQ ID NO: 59858 - protein, 15 aa, Homo Sapiens
TPRLPSSADVEFCLS

SEQ ID NO: 59859 - protein, 15 aa, Homo Sapiens
PRLPSSADVEFCLSL

SEQ ID NO: 59860 - protein, 15 aa, Homo Sapiens
RLPSSADVEFCLSLT

SEQ ID NO: 59861 - protein, 15 aa, Homo Sapiens
LPSSADVEFCLSLTQ

SEQ ID NO: 59862 - protein, 15 aa, Homo Sapiens
PSSADVEFCLSLTQY

SEQ ID NO: 59863 - protein, 15 aa, Homo Sapiens
SSADVEFCLSLTQYE

SEQ ID NO: 59864 - protein, 15 aa, Homo Sapiens
SADVEFCLSLTQYES

SEQ ID NO: 59865 - protein, 15 aa, Homo Sapiens
ADVEFCLSLTQYESG

SEQ ID NO: 59866 - protein, 15 aa, Homo Sapiens
DVEFCLSLTQYESGS

SEQ ID NO: 59867 - protein, 15 aa, Homo Sapiens
VEFCLSLTQYESGSM

SEQ ID NO: 59868 - protein, 15 aa, Homo Sapiens
EFCLSLTQYESGSMD

SEQ ID NO: 59869 - protein, 15 aa, Homo Sapiens
FCLSLTQYESGSMDK

SEQ ID NO: 59870 - protein, 15 aa, Homo Sapiens
CLSLTQYESGSMDKA

SEQ ID NO: 59871 - protein, 15 aa, Homo Sapiens
LSLTQYESGSMDKAA

SEQ ID NO: 59872 - protein, 15 aa, Homo Sapiens
SLTQYESGSMDKAAN

SEQ ID NO: 59873 - protein, 15 aa, Homo Sapiens
LTQYESGSMDKAANF

SEQ ID NO: 59874 - protein, 15 aa, Homo Sapiens
TQYESGSMDKAANFS

SEQ ID NO: 59875 - protein, 15 aa, Homo Sapiens
QYESGSMDKAANFSF

SEQ ID NO: 59876 - protein, 15 aa, Homo Sapiens
YESGSMDKAANFSFR

SEQ ID NO: 59877 - protein, 15 aa, Homo Sapiens
ESGSMDKAANFSFRN

SEQ ID NO: 59878 - protein, 15 aa, Homo Sapiens
SGSMDKAANFSFRNT

SEQ ID NO: 59879 - protein, 15 aa, Homo Sapiens
GSMDKAANFSFRNTL

SEQ ID NO: 59880 - protein, 15 aa, Homo Sapiens
SMDKAANFSFRNTLE

SEQ ID NO: 59881 - protein, 15 aa, Homo Sapiens
MDKAANFSFRNTLEG

SEQ ID NO: 59882 - protein, 15 aa, Homo Sapiens
DKAANFSFRNTLEGF

SEQ ID NO: 59883 - protein, 15 aa, Homo Sapiens
KAANFSFRNTLEGFA

SEQ ID NO: 59884 - protein, 15 aa, Homo Sapiens
AANFSFRNTLEGFAS

SEQ ID NO: 59885 - protein, 15 aa, Homo Sapiens
ANFSFRNTLEGFASP

SEQ ID NO: 59886 - protein, 15 aa, Homo Sapiens
NFSFRNTLEGFASPL

SEQ ID NO: 59887 - protein, 15 aa, Homo Sapiens
FSFRNTLEGFASPLT

SEQ ID NO: 59888 - protein, 15 aa, Homo Sapiens
SFRNTLEGFASPLTG

SEQ ID NO: 59889 - protein, 15 aa, Homo Sapiens
FRNTLEGFASPLTGI

SEQ ID NO: 59890 - protein, 15 aa, Homo Sapiens
RNTLEGFASPLTGIA

SEQ ID NO: 59891 - protein, 15 aa, Homo Sapiens
NTLEGFASPLTGIAD

SEQ ID NO: 59892 - protein, 15 aa, Homo Sapiens
TLEGFASPLTGIADA

SEQ ID NO: 59893 - protein, 15 aa, Homo Sapiens
LEGFASPLTGIADAS

SEQ ID NO: 59894 - protein, 15 aa, Homo Sapiens
EGFASPLTGIADASQ

SEQ ID NO: 59895 - protein, 15 aa, Homo Sapiens
GFASPLTGIADASQS

SEQ ID NO: 59896 - protein, 15 aa, Homo Sapiens
FASPLTGIADASQSS

SEQ ID NO: 59897 - protein, 15 aa, Homo Sapiens
ASPLTGIADASQSSM

SEQ ID NO: 59898 - protein, 15 aa, Homo Sapiens
SPLTGIADASQSSMH

SEQ ID NO: 59899 - protein, 15 aa, Homo Sapiens
PLTGIADASQSSMHN

SEQ ID NO: 59900 - protein, 15 aa, Homo Sapiens
LTGIADASQSSMHNA

SEQ ID NO: 59901 - protein, 15 aa, Homo Sapiens
TGIADASQSSMHNAL

SEQ ID NO: 59902 - protein, 15 aa, Homo Sapiens
GIADASQSSMHNALH

SEQ ID NO: 59903 - protein, 15 aa, Homo Sapiens
IADASQSSMHNALHI

SEQ ID NO: 59904 - protein, 15 aa, Homo Sapiens
ADASQSSMHNALHIY

SEQ ID NO: 59905 - protein, 15 aa, Homo Sapiens
DASQSSMHNALHIYM

SEQ ID NO: 59906 - protein, 15 aa, Homo Sapiens
ASQSSMHNALHIYMN

SEQ ID NO: 59907 - protein, 15 aa, Homo Sapiens
SQSSMHNALHIYMNG

SEQ ID NO: 59908 - protein, 15 aa, Homo Sapiens
QSSMHNALHIYMNGT

SEQ ID NO: 59909 - protein, 15 aa, Homo Sapiens
SSMHNALHIYMNGTM

SEQ ID NO: 59910 - protein, 15 aa, Homo Sapiens
SMHNALHIYMNGTMS

SEQ ID NO: 59911 - protein, 15 aa, Homo Sapiens
MHNALHIYMNGTMSQ

SEQ ID NO: 59912 - protein, 15 aa, Homo Sapiens
HNALHIYMNGTMSQV

SEQ ID NO: 59913 - protein, 15 aa, Homo Sapiens
NALHIYMNGTMSQVQ

SEQ ID NO: 59914 - protein, 15 aa, Homo Sapiens
ALHIYMNGTMSQVQG

SEQ ID NO: 59915 - protein, 15 aa, Homo Sapiens
LHIYMNGTMSQVQGS

SEQ ID NO: 59916 - protein, 15 aa, Homo Sapiens
HIYMNGTMSQVQGSA

SEQ ID NO: 59917 - protein, 15 aa, Homo Sapiens
IYMNGTMSQVQGSAN

SEQ ID NO: 59918 - protein, 15 aa, Homo Sapiens
YMNGTMSQVQGSAND

SEQ ID NO: 59919 - protein, 15 aa, Homo Sapiens
MNGTMSQVQGSANDP

SEQ ID NO: 59920 - protein, 15 aa, Homo Sapiens
NGTMSQVQGSANDPI

SEQ ID NO: 59921 - protein, 15 aa, Homo Sapiens
GTMSQVQGSANDPIF

SEQ ID NO: 59922 - protein, 15 aa, Homo Sapiens
TMSQVQGSANDPIFL

SEQ ID NO: 59923 - protein, 15 aa, Homo Sapiens
MSQVQGSANDPIFLL

SEQ ID NO: 59924 - protein, 15 aa, Homo Sapiens
SQVQGSANDPIFLLH

SEQ ID NO: 59925 - protein, 15 aa, Homo Sapiens
QVQGSANDPIFLLHH

SEQ ID NO: 59926 - protein, 15 aa, Homo Sapiens
VQGSANDPIFLLHHA

SEQ ID NO: 59927 - protein, 15 aa, Homo Sapiens
QGSANDPIFLLHHAF

SEQ ID NO: 59928 - protein, 15 aa, Homo Sapiens
GSANDPIFLLHHAFV

SEQ ID NO: 59929 - protein, 15 aa, Homo Sapiens
SANDPIFLLHHAFVD

SEQ ID NO: 59930 - protein, 15 aa, Homo Sapiens
ANDPIFLLHHAFVDS

SEQ ID NO: 59931 - protein, 15 aa, Homo Sapiens
NDPIFLLHHAFVDSI

SEQ ID NO: 59932 - protein, 15 aa, Homo Sapiens
DPIFLLHHAFVDSIF

SEQ ID NO: 59933 - protein, 15 aa, Homo Sapiens
PIFLLHHAFVDSIFE

SEQ ID NO: 59934 - protein, 15 aa, Homo Sapiens
IFLLHHAFVDSIFEQ

SEQ ID NO: 59935 - protein, 15 aa, Homo Sapiens
FLLHHAFVDSIFEQW

SEQ ID NO: 59936 - protein, 15 aa, Homo Sapiens
LLHHAFVDSIFEQWL

SEQ ID NO: 59937 - protein, 15 aa, Homo Sapiens
LHHAFVDSIFEQWLQ

SEQ ID NO: 59938 - protein, 15 aa, Homo Sapiens
HHAFVDSIFEQWLQR

SEQ ID NO: 59939 - protein, 15 aa, Homo Sapiens
HAFVDSIFEQWLQRH

SEQ ID NO: 59940 - protein, 15 aa, Homo Sapiens
AFVDSIFEQWLQRHR

SEQ ID NO: 59941 - protein, 15 aa, Homo Sapiens
FVDSIFEQWLQRHRP

SEQ ID NO: 59942 - protein, 15 aa, Homo Sapiens
VDSIFEQWLQRHRPL

SEQ ID NO: 59943 - protein, 15 aa, Homo Sapiens
DSIFEQWLQRHRPLQ

SEQ ID NO: 59944 - protein, 15 aa, Homo Sapiens
SIFEQWLQRHRPLQE

SEQ ID NO: 59945 - protein, 15 aa, Homo Sapiens
IFEQWLQRHRPLQEV

SEQ ID NO: 59946 - protein, 15 aa, Homo Sapiens
FEQWLQRHRPLQEVY

SEQ ID NO: 59947 - protein, 15 aa, Homo Sapiens
EQWLQRHRPLQEVYP

SEQ ID NO: 59948 - protein, 15 aa, Homo Sapiens
QWLQRHRPLQEVYPE

SEQ ID NO: 59949 - protein, 15 aa, Homo Sapiens
WLQRHRPLQEVYPEA

SEQ ID NO: 59950 - protein, 15 aa, Homo Sapiens
LQRHRPLQEVYPEAN

SEQ ID NO: 59951 - protein, 15 aa, Homo Sapiens
QRHRPLQEVYPEANA

SEQ ID NO: 59952 - protein, 15 aa, Homo Sapiens
RHRPLQEVYPEANAP

SEQ ID NO: 59953 - protein, 15 aa, Homo Sapiens
HRPLQEVYPEANAPI

SEQ ID NO: 59954 - protein, 15 aa, Homo Sapiens
RPLQEVYPEANAPIG

SEQ ID NO: 59955 - protein, 15 aa, Homo Sapiens
PLQEVYPEANAPIGH

SEQ ID NO: 59956 - protein, 15 aa, Homo Sapiens
LQEVYPEANAPIGHN

SEQ ID NO: 59957 - protein, 15 aa, Homo Sapiens
QEVYPEANAPIGHNR

SEQ ID NO: 59958 - protein, 15 aa, Homo Sapiens
EVYPEANAPIGHNRE

SEQ ID NO: 59959 - protein, 15 aa, Homo Sapiens
VYPEANAPIGHNRES

SEQ ID NO: 59960 - protein, 15 aa, Homo Sapiens
YPEANAPIGHNRESY

SEQ ID NO: 59961 - protein, 15 aa, Homo Sapiens
PEANAPIGHNRESYM

SEQ ID NO: 59962 - protein, 15 aa, Homo Sapiens
EANAPIGHNRESYMV

SEQ ID NO: 59963 - protein, 15 aa, Homo Sapiens
ANAPIGHNRESYMVP

SEQ ID NO: 59964 - protein, 15 aa, Homo Sapiens
NAPIGHNRESYMVPF

SEQ ID NO: 59965 - protein, 15 aa, Homo Sapiens
APIGHNRESYMVPFI

SEQ ID NO: 59966 - protein, 15 aa, Homo Sapiens
PIGHNRESYMVPFIP

SEQ ID NO: 59967 - protein, 15 aa, Homo Sapiens
IGHNRESYMVPFIPL

SEQ ID NO: 59968 - protein, 15 aa, Homo Sapiens
GHNRESYMVPFIPLY

SEQ ID NO: 59969 - protein, 15 aa, Homo Sapiens
HNRESYMVPFIPLYR

SEQ ID NO: 59970 - protein, 15 aa, Homo Sapiens
NRESYMVPFIPLYRN

SEQ ID NO: 59971 - protein, 15 aa, Homo Sapiens
RESYMVPFIPLYRNG

SEQ ID NO: 59972 - protein, 15 aa, Homo Sapiens
ESYMVPFIPLYRNGD

SEQ ID NO: 59973 - protein, 15 aa, Homo Sapiens
SYMVPFIPLYRNGDF

SEQ ID NO: 59974 - protein, 15 aa, Homo Sapiens
YMVPFIPLYRNGDFF

SEQ ID NO: 59975 - protein, 15 aa, Homo Sapiens
MVPFIPLYRNGDFFI

SEQ ID NO: 59976 - protein, 15 aa, Homo Sapiens
VPFIPLYRNGDFFIS

SEQ ID NO: 59977 - protein, 15 aa, Homo Sapiens
PFIPLYRNGDFFISS

SEQ ID NO: 59978 - protein, 15 aa, Homo Sapiens
FIPLYRNGDFFISSK

SEQ ID NO: 59979 - protein, 15 aa, Homo Sapiens
IPLYRNGDFFISSKD

SEQ ID NO: 59980 - protein, 15 aa, Homo Sapiens
PLYRNGDFFISSKDL

SEQ ID NO: 59981 - protein, 15 aa, Homo Sapiens
LYRNGDFFISSKDLG

SEQ ID NO: 59982 - protein, 15 aa, Homo Sapiens
YRNGDFFISSKDLGY

SEQ ID NO: 59983 - protein, 15 aa, Homo Sapiens
RNGDFFISSKDLGYD

SEQ ID NO: 59984 - protein, 15 aa, Homo Sapiens
NGDFFISSKDLGYDY

SEQ ID NO: 59985 - protein, 15 aa, Homo Sapiens
GDFFISSKDLGYDYS

SEQ ID NO: 59986 - protein, 15 aa, Homo Sapiens
DFFISSKDLGYDYSY

SEQ ID NO: 59987 - protein, 15 aa, Homo Sapiens
FFISSKDLGYDYSYL

SEQ ID NO: 59988 - protein, 15 aa, Homo Sapiens
FISSKDLGYDYSYLQ

SEQ ID NO: 59989 - protein, 15 aa, Homo Sapiens
ISSKDLGYDYSYLQD

SEQ ID NO: 59990 - protein, 15 aa, Homo Sapiens
SSKDLGYDYSYLQDS

SEQ ID NO: 59991 - protein, 15 aa, Homo Sapiens
SKDLGYDYSYLQDSD

SEQ ID NO: 59992 - protein, 15 aa, Homo Sapiens
KDLGYDYSYLQDSDP

SEQ ID NO: 59993 - protein, 15 aa, Homo Sapiens
DLGYDYSYLQDSDPD

SEQ ID NO: 59994 - protein, 15 aa, Homo Sapiens
LGYDYSYLQDSDPDS

SEQ ID NO: 59995 - protein, 15 aa, Homo Sapiens
GYDYSYLQDSDPDSF

SEQ ID NO: 59996 - protein, 15 aa, Homo Sapiens
YDYSYLQDSDPDSFQ

SEQ ID NO: 59997 - protein, 15 aa, Homo Sapiens
DYSYLQDSDPDSFQD

SEQ ID NO: 59998 - protein, 15 aa, Homo Sapiens
YSYLQDSDPDSFQDY

SEQ ID NO: 59999 - protein, 15 aa, Homo Sapiens
SYLQDSDPDSFQDYI

SEQ ID NO: 60000 - protein, 15 aa, Homo Sapiens
YLQDSDPDSFQDYIK

SEQ ID NO: 60001 - protein, 15 aa, Homo Sapiens
LQDSDPDSFQDYIKS

SEQ ID NO: 60002 - protein, 15 aa, Homo Sapiens
QDSDPDSFQDYIKSY

SEQ ID NO: 60003 - protein, 15 aa, Homo Sapiens
DSDPDSFQDYIKSYL

SEQ ID NO: 60004 - protein, 15 aa, Homo Sapiens
SDPDSFQDYIKSYLE

SEQ ID NO: 60005 - protein, 15 aa, Homo Sapiens
DPDSFQDYIKSYLEQ

SEQ ID NO: 60006 - protein, 15 aa, Homo Sapiens
PDSFQDYIKSYLEQA

SEQ ID NO: 60007 - protein, 15 aa, Homo Sapiens
DSFQDYIKSYLEQAS

SEQ ID NO: 60008 - protein, 15 aa, Homo Sapiens
SFQDYIKSYLEQASR

SEQ ID NO: 60009 - protein, 15 aa, Homo Sapiens
FQDYIKSYLEQASRI

SEQ ID NO: 60010 - protein, 15 aa, Homo Sapiens
QDYIKSYLEQASRIW

SEQ ID NO: 60011 - protein, 15 aa, Homo Sapiens
DYIKSYLEQASRIWS

SEQ ID NO: 60012 - protein, 15 aa, Homo Sapiens
YIKSYLEQASRIWSW

SEQ ID NO: 60013 - protein, 15 aa, Homo Sapiens
IKSYLEQASRIWSWL

SEQ ID NO: 60014 - protein, 15 aa, Homo Sapiens
KSYLEQASRIWSWLL

SEQ ID NO: 60015 - protein, 15 aa, Homo Sapiens
SYLEQASRIWSWLLG

SEQ ID NO: 60016 - protein, 15 aa, Homo Sapiens
YLEQASRIWSWLLGA

SEQ ID NO: 60017 - protein, 15 aa, Homo Sapiens
LEQASRIWSWLLGAA

SEQ ID NO: 60018 - protein, 15 aa, Homo Sapiens
EQASRIWSWLLGAAM

SEQ ID NO: 60019 - protein, 15 aa, Homo Sapiens
QASRIWSWLLGAAMV

SEQ ID NO: 60020 - protein, 15 aa, Homo Sapiens
ASRIWSWLLGAAMVG

SEQ ID NO: 60021 - protein, 15 aa, Homo Sapiens
SRIWSWLLGAAMVGA

SEQ ID NO: 60022 - protein, 15 aa, Homo Sapiens
RIWSWLLGAAMVGAV

SEQ ID NO: 60023 - protein, 15 aa, Homo Sapiens
IWSWLLGAAMVGAVL

SEQ ID NO: 60024 - protein, 15 aa, Homo Sapiens
WSWLLGAAMVGAVLT

SEQ ID NO: 60025 - protein, 15 aa, Homo Sapiens
SWLLGAAMVGAVLTA

SEQ ID NO: 60026 - protein, 15 aa, Homo Sapiens
WLLGAAMVGAVLTAL

SEQ ID NO: 60027 - protein, 15 aa, Homo Sapiens
LLGAAMVGAVLTALL

SEQ ID NO: 60028 - protein, 15 aa, Homo Sapiens
LGAAMVGAVLTALLA

SEQ ID NO: 60029 - protein, 15 aa, Homo Sapiens
GAAMVGAVLTALLAG

SEQ ID NO: 60030 - protein, 15 aa, Homo Sapiens
AAMVGAVLTALLAGL

SEQ ID NO: 60031 - protein, 15 aa, Homo Sapiens
AMVGAVLTALLAGLV

SEQ ID NO: 60032 - protein, 15 aa, Homo Sapiens
MVGAVLTALLAGLVS

SEQ ID NO: 60033 - protein, 15 aa, Homo Sapiens
VGAVLTALLAGLVSL

SEQ ID NO: 60034 - protein, 15 aa, Homo Sapiens
GAVLTALLAGLVSLL

SEQ ID NO: 60035 - protein, 15 aa, Homo Sapiens
AVLTALLAGLVSLLC

SEQ ID NO: 60036 - protein, 15 aa, Homo Sapiens
VLTALLAGLVSLLCR

SEQ ID NO: 60037 - protein, 15 aa, Homo Sapiens
LTALLAGLVSLLCRH

SEQ ID NO: 60038 - protein, 15 aa, Homo Sapiens
TALLAGLVSLLCRHK

SEQ ID NO: 60039 - protein, 15 aa, Homo Sapiens
ALLAGLVSLLCRHKR

SEQ ID NO: 60040 - protein, 15 aa, Homo Sapiens
LLAGLVSLLCRHKRK

SEQ ID NO: 60041 - protein, 15 aa, Homo Sapiens
LAGLVSLLCRHKRKQ

SEQ ID NO: 60042 - protein, 15 aa, Homo Sapiens
AGLVSLLCRHKRKQL

SEQ ID NO: 60043 - protein, 15 aa, Homo Sapiens
GLVSLLCRHKRKQLP

SEQ ID NO: 60044 - protein, 15 aa, Homo Sapiens
LVSLLCRHKRKQLPE

SEQ ID NO: 60045 - protein, 15 aa, Homo Sapiens
VSLLCRHKRKQLPEE

SEQ ID NO: 60046 - protein, 15 aa, Homo Sapiens
SLLCRHKRKQLPEEK

SEQ ID NO: 60047 - protein, 15 aa, Homo Sapiens
LLCRHKRKQLPEEKQ

SEQ ID NO: 60048 - protein, 15 aa, Homo Sapiens
LCRHKRKQLPEEKQP

SEQ ID NO: 60049 - protein, 15 aa, Homo Sapiens
CRHKRKQLPEEKQPL

SEQ ID NO: 60050 - protein, 15 aa, Homo Sapiens
RHKRKQLPEEKQPLL

SEQ ID NO: 60051 - protein, 15 aa, Homo Sapiens
HKRKQLPEEKQPLLM

SEQ ID NO: 60052 - protein, 15 aa, Homo Sapiens
KRKQLPEEKQPLLME

SEQ ID NO: 60053 - protein, 15 aa, Homo Sapiens
RKQLPEEKQPLLMEK

SEQ ID NO: 60054 - protein, 15 aa, Homo Sapiens
KQLPEEKQPLLMEKE

SEQ ID NO: 60055 - protein, 15 aa, Homo Sapiens
QLPEEKQPLLMEKED

SEQ ID NO: 60056 - protein, 15 aa, Homo Sapiens
LPEEKQPLLMEKEDY

SEQ ID NO: 60057 - protein, 15 aa, Homo Sapiens
PEEKQPLLMEKEDYH

SEQ ID NO: 60058 - protein, 15 aa, Homo Sapiens
EEKQPLLMEKEDYHS

SEQ ID NO: 60059 - protein, 15 aa, Homo Sapiens
EKQPLLMEKEDYHSL

SEQ ID NO: 60060 - protein, 15 aa, Homo Sapiens
KQPLLMEKEDYHSLY

SEQ ID NO: 60061 - protein, 15 aa, Homo Sapiens
QPLLMEKEDYHSLYQ

SEQ ID NO: 60062 - protein, 15 aa, Homo Sapiens
PLLMEKEDYHSLYQS

SEQ ID NO: 60063 - protein, 15 aa, Homo Sapiens
LLMEKEDYHSLYQSH

SEQ ID NO: 60064 - protein, 15 aa, Homo Sapiens
LMEKEDYHSLYQSHL

SEQ ID NO: 60065 - protein, 16 aa, Homo Sapiens
MLLAVLYCLLWSFQTS

SEQ ID NO: 60066 - protein, 16 aa, Homo Sapiens
LLAVLYCLLWSFQTSA

SEQ ID NO: 60067 - protein, 16 aa, Homo Sapiens
LAVLYCLLWSFQTSAG

SEQ ID NO: 60068 - protein, 16 aa, Homo Sapiens
AVLYCLLWSFQTSAGH

SEQ ID NO: 60069 - protein, 16 aa, Homo Sapiens
VLYCLLWSFQTSAGHF

SEQ ID NO: 60070 - protein, 16 aa, Homo Sapiens
LYCLLWSFQTSAGHFP

SEQ ID NO: 60071 - protein, 16 aa, Homo Sapiens
YCLLWSFQTSAGHFPR

SEQ ID NO: 60072 - protein, 16 aa, Homo Sapiens
CLLWSFQTSAGHFPRA

SEQ ID NO: 60073 - protein, 16 aa, Homo Sapiens
LLWSFQTSAGHFPRAC

SEQ ID NO: 60074 - protein, 16 aa, Homo Sapiens
LWSFQTSAGHFPRACV

SEQ ID NO: 60075 - protein, 16 aa, Homo Sapiens
WSFQTSAGHFPRACVS

SEQ ID NO: 60076 - protein, 16 aa, Homo Sapiens
SFQTSAGHFPRACVSS

SEQ ID NO: 60077 - protein, 16 aa, Homo Sapiens
FQTSAGHFPRACVSSK

SEQ ID NO: 60078 - protein, 16 aa, Homo Sapiens
QTSAGHFPRACVSSKN

SEQ ID NO: 60079 - protein, 16 aa, Homo Sapiens
TSAGHFPRACVSSKNL

SEQ ID NO: 60080 - protein, 16 aa, Homo Sapiens
SAGHFPRACVSSKNLM

SEQ ID NO: 60081 - protein, 16 aa, Homo Sapiens
AGHFPRACVSSKNLME

SEQ ID NO: 60082 - protein, 16 aa, Homo Sapiens
GHFPRACVSSKNLMEK

SEQ ID NO: 60083 - protein, 16 aa, Homo Sapiens
HFPRACVSSKNLMEKE

SEQ ID NO: 60084 - protein, 16 aa, Homo Sapiens
FPRACVSSKNLMEKEC

SEQ ID NO: 60085 - protein, 16 aa, Homo Sapiens
PRACVSSKNLMEKECC

SEQ ID NO: 60086 - protein, 16 aa, Homo Sapiens
RACVSSKNLMEKECCP

SEQ ID NO: 60087 - protein, 16 aa, Homo Sapiens
ACVSSKNLMEKECCPP

SEQ ID NO: 60088 - protein, 16 aa, Homo Sapiens
CVSSKNLMEKECCPPW

SEQ ID NO: 60089 - protein, 16 aa, Homo Sapiens
VSSKNLMEKECCPPWS

SEQ ID NO: 60090 - protein, 16 aa, Homo Sapiens
SSKNLMEKECCPPWSG

SEQ ID NO: 60091 - protein, 16 aa, Homo Sapiens
SKNLMEKECCPPWSGD

SEQ ID NO: 60092 - protein, 16 aa, Homo Sapiens
KNLMEKECCPPWSGDR

SEQ ID NO: 60093 - protein, 16 aa, Homo Sapiens
NLMEKECCPPWSGDRS

SEQ ID NO: 60094 - protein, 16 aa, Homo Sapiens
LMEKECCPPWSGDRSP

SEQ ID NO: 60095 - protein, 16 aa, Homo Sapiens
MEKECCPPWSGDRSPC

SEQ ID NO: 60096 - protein, 16 aa, Homo Sapiens
EKECCPPWSGDRSPCG

SEQ ID NO: 60097 - protein, 16 aa, Homo Sapiens
KECCPPWSGDRSPCGQ

SEQ ID NO: 60098 - protein, 16 aa, Homo Sapiens
ECCPPWSGDRSPCGQL

SEQ ID NO: 60099 - protein, 16 aa, Homo Sapiens
CCPPWSGDRSPCGQLS

SEQ ID NO: 60100 - protein, 16 aa, Homo Sapiens
CPPWSGDRSPCGQLSG

SEQ ID NO: 60101 - protein, 16 aa, Homo Sapiens
PPWSGDRSPCGQLSGR

SEQ ID NO: 60102 - protein, 16 aa, Homo Sapiens
PWSGDRSPCGQLSGRG

SEQ ID NO: 60103 - protein, 16 aa, Homo Sapiens
WSGDRSPCGQLSGRGS

SEQ ID NO: 60104 - protein, 16 aa, Homo Sapiens
SGDRSPCGQLSGRGSC

SEQ ID NO: 60105 - protein, 16 aa, Homo Sapiens
GDRSPCGQLSGRGSCQ

SEQ ID NO: 60106 - protein, 16 aa, Homo Sapiens
DRSPCGQLSGRGSCQN

SEQ ID NO: 60107 - protein, 16 aa, Homo Sapiens
RSPCGQLSGRGSCQNI

SEQ ID NO: 60108 - protein, 16 aa, Homo Sapiens
SPCGQLSGRGSCQNIL

SEQ ID NO: 60109 - protein, 16 aa, Homo Sapiens
PCGQLSGRGSCQNILL

SEQ ID NO: 60110 - protein, 16 aa, Homo Sapiens
CGQLSGRGSCQNILLS

SEQ ID NO: 60111 - protein, 16 aa, Homo Sapiens
GQLSGRGSCQNILLSN

SEQ ID NO: 60112 - protein, 16 aa, Homo Sapiens
QLSGRGSCQNILLSNA

SEQ ID NO: 60113 - protein, 16 aa, Homo Sapiens
LSGRGSCQNILLSNAP

SEQ ID NO: 60114 - protein, 16 aa, Homo Sapiens
SGRGSCQNILLSNAPL

SEQ ID NO: 60115 - protein, 16 aa, Homo Sapiens
GRGSCQNILLSNAPLG

SEQ ID NO: 60116 - protein, 16 aa, Homo Sapiens
RGSCQNILLSNAPLGP

SEQ ID NO: 60117 - protein, 16 aa, Homo Sapiens
GSCQNILLSNAPLGPQ

SEQ ID NO: 60118 - protein, 16 aa, Homo Sapiens
SCQNILLSNAPLGPQF

SEQ ID NO: 60119 - protein, 16 aa, Homo Sapiens
CQNILLSNAPLGPQFP

SEQ ID NO: 60120 - protein, 16 aa, Homo Sapiens
QNILLSNAPLGPQFPF

SEQ ID NO: 60121 - protein, 16 aa, Homo Sapiens
NILLSNAPLGPQFPFT

SEQ ID NO: 60122 - protein, 16 aa, Homo Sapiens
ILLSNAPLGPQFPFTG

SEQ ID NO: 60123 - protein, 16 aa, Homo Sapiens
LLSNAPLGPQFPFTGV

SEQ ID NO: 60124 - protein, 16 aa, Homo Sapiens
LSNAPLGPQFPFTGVD

SEQ ID NO: 60125 - protein, 16 aa, Homo Sapiens
SNAPLGPQFPFTGVDD

SEQ ID NO: 60126 - protein, 16 aa, Homo Sapiens
NAPLGPQFPFTGVDDR

SEQ ID NO: 60127 - protein, 16 aa, Homo Sapiens
APLGPQFPFTGVDDRE

SEQ ID NO: 60128 - protein, 16 aa, Homo Sapiens
PLGPQFPFTGVDDRES

SEQ ID NO: 60129 - protein, 16 aa, Homo Sapiens
LGPQFPFTGVDDRESW

SEQ ID NO: 60130 - protein, 16 aa, Homo Sapiens
GPQFPFTGVDDRESWP

SEQ ID NO: 60131 - protein, 16 aa, Homo Sapiens
PQFPFTGVDDRESWPS

SEQ ID NO: 60132 - protein, 16 aa, Homo Sapiens
QFPFTGVDDRESWPSV

SEQ ID NO: 60133 - protein, 16 aa, Homo Sapiens
FPFTGVDDRESWPSVF

SEQ ID NO: 60134 - protein, 16 aa, Homo Sapiens
PFTGVDDRESWPSVFY

SEQ ID NO: 60135 - protein, 16 aa, Homo Sapiens
FTGVDDRESWPSVFYN

SEQ ID NO: 60136 - protein, 16 aa, Homo Sapiens
TGVDDRESWPSVFYNR

SEQ ID NO: 60137 - protein, 16 aa, Homo Sapiens
GVDDRESWPSVFYNRT

SEQ ID NO: 60138 - protein, 16 aa, Homo Sapiens
VDDRESWPSVFYNRTC

SEQ ID NO: 60139 - protein, 16 aa, Homo Sapiens
DDRESWPSVFYNRTCQ

SEQ ID NO: 60140 - protein, 16 aa, Homo Sapiens
DRESWPSVFYNRTCQC

SEQ ID NO: 60141 - protein, 16 aa, Homo Sapiens
RESWPSVFYNRTCQCS

SEQ ID NO: 60142 - protein, 16 aa, Homo Sapiens
ESWPSVFYNRTCQCSG

SEQ ID NO: 60143 - protein, 16 aa, Homo Sapiens
SWPSVFYNRTCQCSGN

SEQ ID NO: 60144 - protein, 16 aa, Homo Sapiens
WPSVFYNRTCQCSGNF

SEQ ID NO: 60145 - protein, 16 aa, Homo Sapiens
PSVFYNRTCQCSGNFM

SEQ ID NO: 60146 - protein, 16 aa, Homo Sapiens
SVFYNRTCQCSGNFMG

SEQ ID NO: 60147 - protein, 16 aa, Homo Sapiens
VFYNRTCQCSGNFMGF

SEQ ID NO: 60148 - protein, 16 aa, Homo Sapiens
FYNRTCQCSGNFMGFN

SEQ ID NO: 60149 - protein, 16 aa, Homo Sapiens
YNRTCQCSGNFMGFNC

SEQ ID NO: 60150 - protein, 16 aa, Homo Sapiens
NRTCQCSGNFMGFNCG

SEQ ID NO: 60151 - protein, 16 aa, Homo Sapiens
RTCQCSGNFMGFNCGN

SEQ ID NO: 60152 - protein, 16 aa, Homo Sapiens
TCQCSGNFMGFNCGNC

SEQ ID NO: 60153 - protein, 16 aa, Homo Sapiens
CQCSGNFMGFNCGNCK

SEQ ID NO: 60154 - protein, 16 aa, Homo Sapiens
QCSGNFMGFNCGNCKF

SEQ ID NO: 60155 - protein, 16 aa, Homo Sapiens
CSGNFMGFNCGNCKFG

SEQ ID NO: 60156 - protein, 16 aa, Homo Sapiens
SGNFMGFNCGNCKFGF

SEQ ID NO: 60157 - protein, 16 aa, Homo Sapiens
GNFMGFNCGNCKFGFW

SEQ ID NO: 60158 - protein, 16 aa, Homo Sapiens
NFMGFNCGNCKFGFWG

SEQ ID NO: 60159 - protein, 16 aa, Homo Sapiens
FMGFNCGNCKFGFWGP

SEQ ID NO: 60160 - protein, 16 aa, Homo Sapiens
MGFNCGNCKFGFWGPN

SEQ ID NO: 60161 - protein, 16 aa, Homo Sapiens
GFNCGNCKFGFWGPNC

SEQ ID NO: 60162 - protein, 16 aa, Homo Sapiens
FNCGNCKFGFWGPNCT

SEQ ID NO: 60163 - protein, 16 aa, Homo Sapiens
NCGNCKFGFWGPNCTE

SEQ ID NO: 60164 - protein, 16 aa, Homo Sapiens
CGNCKFGFWGPNCTER

SEQ ID NO: 60165 - protein, 16 aa, Homo Sapiens
GNCKFGFWGPNCTERR

SEQ ID NO: 60166 - protein, 16 aa, Homo Sapiens
NCKFGFWGPNCTERRL

SEQ ID NO: 60167 - protein, 16 aa, Homo Sapiens
CKFGFWGPNCTERRLL

SEQ ID NO: 60168 - protein, 16 aa, Homo Sapiens
KFGFWGPNCTERRLLV

SEQ ID NO: 60169 - protein, 16 aa, Homo Sapiens
FGFWGPNCTERRLLVR

SEQ ID NO: 60170 - protein, 16 aa, Homo Sapiens
GFWGPNCTERRLLVRR

SEQ ID NO: 60171 - protein, 16 aa, Homo Sapiens
FWGPNCTERRLLVRRN

SEQ ID NO: 60172 - protein, 16 aa, Homo Sapiens
WGPNCTERRLLVRRNI

SEQ ID NO: 60173 - protein, 16 aa, Homo Sapiens
GPNCTERRLLVRRNIF

SEQ ID NO: 60174 - protein, 16 aa, Homo Sapiens
PNCTERRLLVRRNIFD

SEQ ID NO: 60175 - protein, 16 aa, Homo Sapiens
NCTERRLLVRRNIFDL

SEQ ID NO: 60176 - protein, 16 aa, Homo Sapiens
CTERRLLVRRNIFDLS

SEQ ID NO: 60177 - protein, 16 aa, Homo Sapiens
TERRLLVRRNIFDLSA

SEQ ID NO: 60178 - protein, 16 aa, Homo Sapiens
ERRLLVRRNIFDLSAP

SEQ ID NO: 60179 - protein, 16 aa, Homo Sapiens
RRLLVRRNIFDLSAPE

SEQ ID NO: 60180 - protein, 16 aa, Homo Sapiens
RLLVRRNIFDLSAPEK

SEQ ID NO: 60181 - protein, 16 aa, Homo Sapiens
LLVRRNIFDLSAPEKD

SEQ ID NO: 60182 - protein, 16 aa, Homo Sapiens
LVRRNIFDLSAPEKDK

SEQ ID NO: 60183 - protein, 16 aa, Homo Sapiens
VRRNIFDLSAPEKDKF

SEQ ID NO: 60184 - protein, 16 aa, Homo Sapiens
RRNIFDLSAPEKDKFF

SEQ ID NO: 60185 - protein, 16 aa, Homo Sapiens
RNIFDLSAPEKDKFFA

SEQ ID NO: 60186 - protein, 16 aa, Homo Sapiens
NIFDLSAPEKDKFFAY

SEQ ID NO: 60187 - protein, 16 aa, Homo Sapiens
IFDLSAPEKDKFFAYL

SEQ ID NO: 60188 - protein, 16 aa, Homo Sapiens
FDLSAPEKDKFFAYLT

SEQ ID NO: 60189 - protein, 16 aa, Homo Sapiens
DLSAPEKDKFFAYLTL

SEQ ID NO: 60190 - protein, 16 aa, Homo Sapiens
LSAPEKDKFFAYLTLA

SEQ ID NO: 60191 - protein, 16 aa, Homo Sapiens
SAPEKDKFFAYLTLAK

SEQ ID NO: 60192 - protein, 16 aa, Homo Sapiens
APEKDKFFAYLTLAKH

SEQ ID NO: 60193 - protein, 16 aa, Homo Sapiens
PEKDKFFAYLTLAKHT

SEQ ID NO: 60194 - protein, 16 aa, Homo Sapiens
EKDKFFAYLTLAKHTI

SEQ ID NO: 60195 - protein, 16 aa, Homo Sapiens
KDKFFAYLTLAKHTIS

SEQ ID NO: 60196 - protein, 16 aa, Homo Sapiens
DKFFAYLTLAKHTISS

SEQ ID NO: 60197 - protein, 16 aa, Homo Sapiens
KFFAYLTLAKHTISSD

SEQ ID NO: 60198 - protein, 16 aa, Homo Sapiens
FFAYLTLAKHTISSDY

SEQ ID NO: 60199 - protein, 16 aa, Homo Sapiens
FAYLTLAKHTISSDYV

SEQ ID NO: 60200 - protein, 16 aa, Homo Sapiens
AYLTLAKHTISSDYVI

SEQ ID NO: 60201 - protein, 16 aa, Homo Sapiens
YLTLAKHTISSDYVIP

SEQ ID NO: 60202 - protein, 16 aa, Homo Sapiens
LTLAKHTISSDYVIPI

SEQ ID NO: 60203 - protein, 16 aa, Homo Sapiens
TLAKHTISSDYVIPIG

SEQ ID NO: 60204 - protein, 16 aa, Homo Sapiens
LAKHTISSDYVIPIGT

SEQ ID NO: 60205 - protein, 16 aa, Homo Sapiens
AKHTISSDYVIPIGTY

SEQ ID NO: 60206 - protein, 16 aa, Homo Sapiens
KHTISSDYVIPIGTYG

SEQ ID NO: 60207 - protein, 16 aa, Homo Sapiens
HTISSDYVIPIGTYGQ

SEQ ID NO: 60208 - protein, 16 aa, Homo Sapiens
TISSDYVIPIGTYGQM

SEQ ID NO: 60209 - protein, 16 aa, Homo Sapiens
ISSDYVIPIGTYGQMK

SEQ ID NO: 60210 - protein, 16 aa, Homo Sapiens
SSDYVIPIGTYGQMKN

SEQ ID NO: 60211 - protein, 16 aa, Homo Sapiens
SDYVIPIGTYGQMKNG

SEQ ID NO: 60212 - protein, 16 aa, Homo Sapiens
DYVIPIGTYGQMKNGS

SEQ ID NO: 60213 - protein, 16 aa, Homo Sapiens
YVIPIGTYGQMKNGST

SEQ ID NO: 60214 - protein, 16 aa, Homo Sapiens
VIPIGTYGQMKNGSTP

SEQ ID NO: 60215 - protein, 16 aa, Homo Sapiens
IPIGTYGQMKNGSTPM

SEQ ID NO: 60216 - protein, 16 aa, Homo Sapiens
PIGTYGQMKNGSTPMF

SEQ ID NO: 60217 - protein, 16 aa, Homo Sapiens
IGTYGQMKNGSTPMFN

SEQ ID NO: 60218 - protein, 16 aa, Homo Sapiens
GTYGQMKNGSTPMFND

SEQ ID NO: 60219 - protein, 16 aa, Homo Sapiens
TYGQMKNGSTPMFNDI

SEQ ID NO: 60220 - protein, 16 aa, Homo Sapiens
YGQMKNGSTPMFNDIN

SEQ ID NO: 60221 - protein, 16 aa, Homo Sapiens
GQMKNGSTPMFNDINI

SEQ ID NO: 60222 - protein, 16 aa, Homo Sapiens
QMKNGSTPMFNDINIY

SEQ ID NO: 60223 - protein, 16 aa, Homo Sapiens
MKNGSTPMFNDINIYD

SEQ ID NO: 60224 - protein, 16 aa, Homo Sapiens
KNGSTPMFNDINIYDL

SEQ ID NO: 60225 - protein, 16 aa, Homo Sapiens
NGSTPMFNDINIYDLF

SEQ ID NO: 60226 - protein, 16 aa, Homo Sapiens
GSTPMFNDINIYDLFV

SEQ ID NO: 60227 - protein, 16 aa, Homo Sapiens
STPMFNDINIYDLFVW

SEQ ID NO: 60228 - protein, 16 aa, Homo Sapiens
TPMFNDINIYDLFVWM

SEQ ID NO: 60229 - protein, 16 aa, Homo Sapiens
PMFNDINIYDLFVWMH

SEQ ID NO: 60230 - protein, 16 aa, Homo Sapiens
MFNDINIYDLFVWMHY

SEQ ID NO: 60231 - protein, 16 aa, Homo Sapiens
FNDINIYDLFVWMHYY

SEQ ID NO: 60232 - protein, 16 aa, Homo Sapiens
NDINIYDLFVWMHYYV

SEQ ID NO: 60233 - protein, 16 aa, Homo Sapiens
DINIYDLFVWMHYYVS

SEQ ID NO: 60234 - protein, 16 aa, Homo Sapiens
INIYDLFVWMHYYVSM

SEQ ID NO: 60235 - protein, 16 aa, Homo Sapiens
NIYDLFVWMHYYVSMD

SEQ ID NO: 60236 - protein, 16 aa, Homo Sapiens
IYDLFVWMHYYVSMDA

SEQ ID NO: 60237 - protein, 16 aa, Homo Sapiens
YDLFVWMHYYVSMDAL

SEQ ID NO: 60238 - protein, 16 aa, Homo Sapiens
DLFVWMHYYVSMDALL

SEQ ID NO: 60239 - protein, 16 aa, Homo Sapiens
LFVWMHYYVSMDALLG

SEQ ID NO: 60240 - protein, 16 aa, Homo Sapiens
FVWMHYYVSMDALLGG

SEQ ID NO: 60241 - protein, 16 aa, Homo Sapiens
VWMHYYVSMDALLGGS

SEQ ID NO: 60242 - protein, 16 aa, Homo Sapiens
WMHYYVSMDALLGGSE

SEQ ID NO: 60243 - protein, 16 aa, Homo Sapiens
MHYYVSMDALLGGSEI

SEQ ID NO: 60244 - protein, 16 aa, Homo Sapiens
HYYVSMDALLGGSEIW

SEQ ID NO: 60245 - protein, 16 aa, Homo Sapiens
YYVSMDALLGGSEIWR

SEQ ID NO: 60246 - protein, 16 aa, Homo Sapiens
YVSMDALLGGSEIWRD

SEQ ID NO: 60247 - protein, 16 aa, Homo Sapiens
VSMDALLGGSEIWRDI

SEQ ID NO: 60248 - protein, 16 aa, Homo Sapiens
SMDALLGGSEIWRDID

SEQ ID NO: 60249 - protein, 16 aa, Homo Sapiens
MDALLGGSEIWRDIDF

SEQ ID NO: 60250 - protein, 16 aa, Homo Sapiens
DALLGGSEIWRDIDFA

SEQ ID NO: 60251 - protein, 16 aa, Homo Sapiens
ALLGGSEIWRDIDFAH

SEQ ID NO: 60252 - protein, 16 aa, Homo Sapiens
LLGGSEIWRDIDFAHE

SEQ ID NO: 60253 - protein, 16 aa, Homo Sapiens
LGGSEIWRDIDFAHEA

SEQ ID NO: 60254 - protein, 16 aa, Homo Sapiens
GGSEIWRDIDFAHEAP

SEQ ID NO: 60255 - protein, 16 aa, Homo Sapiens
GSEIWRDIDFAHEAPA

SEQ ID NO: 60256 - protein, 16 aa, Homo Sapiens
SEIWRDIDFAHEAPAF

SEQ ID NO: 60257 - protein, 16 aa, Homo Sapiens
EIWRDIDFAHEAPAFL

SEQ ID NO: 60258 - protein, 16 aa, Homo Sapiens
IWRDIDFAHEAPAFLP

SEQ ID NO: 60259 - protein, 16 aa, Homo Sapiens
WRDIDFAHEAPAFLPW

SEQ ID NO: 60260 - protein, 16 aa, Homo Sapiens
RDIDFAHEAPAFLPWH

SEQ ID NO: 60261 - protein, 16 aa, Homo Sapiens
DIDFAHEAPAFLPWHR

SEQ ID NO: 60262 - protein, 16 aa, Homo Sapiens
IDFAHEAPAFLPWHRL

SEQ ID NO: 60263 - protein, 16 aa, Homo Sapiens
DFAHEAPAFLPWHRLF

SEQ ID NO: 60264 - protein, 16 aa, Homo Sapiens
FAHEAPAFLPWHRLFL

SEQ ID NO: 60265 - protein, 16 aa, Homo Sapiens
AHEAPAFLPWHRLFLL

SEQ ID NO: 60266 - protein, 16 aa, Homo Sapiens
HEAPAFLPWHRLFLLR

SEQ ID NO: 60267 - protein, 16 aa, Homo Sapiens
EAPAFLPWHRLFLLRW

SEQ ID NO: 60268 - protein, 16 aa, Homo Sapiens
APAFLPWHRLFLLRWE

SEQ ID NO: 60269 - protein, 16 aa, Homo Sapiens
PAFLPWHRLFLLRWEQ

SEQ ID NO: 60270 - protein, 16 aa, Homo Sapiens
AFLPWHRLFLLRWEQE

SEQ ID NO: 60271 - protein, 16 aa, Homo Sapiens
FLPWHRLFLLRWEQEI

SEQ ID NO: 60272 - protein, 16 aa, Homo Sapiens
LPWHRLFLLRWEQEIQ

SEQ ID NO: 60273 - protein, 16 aa, Homo Sapiens
PWHRLFLLRWEQEIQK

SEQ ID NO: 60274 - protein, 16 aa, Homo Sapiens
WHRLFLLRWEQEIQKL

SEQ ID NO: 60275 - protein, 16 aa, Homo Sapiens
HRLFLLRWEQEIQKLT

SEQ ID NO: 60276 - protein, 16 aa, Homo Sapiens
RLFLLRWEQEIQKLTG

SEQ ID NO: 60277 - protein, 16 aa, Homo Sapiens
LFLLRWEQEIQKLTGD

SEQ ID NO: 60278 - protein, 16 aa, Homo Sapiens
FLLRWEQEIQKLTGDE

SEQ ID NO: 60279 - protein, 16 aa, Homo Sapiens
LLRWEQEIQKLTGDEN

SEQ ID NO: 60280 - protein, 16 aa, Homo Sapiens
LRWEQEIQKLTGDENF

SEQ ID NO: 60281 - protein, 16 aa, Homo Sapiens
RWEQEIQKLTGDENFT

SEQ ID NO: 60282 - protein, 16 aa, Homo Sapiens
WEQEIQKLTGDENFTI

SEQ ID NO: 60283 - protein, 16 aa, Homo Sapiens
EQEIQKLTGDENFTIP

SEQ ID NO: 60284 - protein, 16 aa, Homo Sapiens
QEIQKLTGDENFTIPY

SEQ ID NO: 60285 - protein, 16 aa, Homo Sapiens
EIQKLTGDENFTIPYW

SEQ ID NO: 60286 - protein, 16 aa, Homo Sapiens
IQKLTGDENFTIPYWD

SEQ ID NO: 60287 - protein, 16 aa, Homo Sapiens
QKLTGDENFTIPYWDW

SEQ ID NO: 60288 - protein, 16 aa, Homo Sapiens
KLTGDENFTIPYWDWR

SEQ ID NO: 60289 - protein, 16 aa, Homo Sapiens
LTGDENFTIPYWDWRD

SEQ ID NO: 60290 - protein, 16 aa, Homo Sapiens
TGDENFTIPYWDWRDA

SEQ ID NO: 60291 - protein, 16 aa, Homo Sapiens
GDENFTIPYWDWRDAE

SEQ ID NO: 60292 - protein, 16 aa, Homo Sapiens
DENFTIPYWDWRDAEK

SEQ ID NO: 60293 - protein, 16 aa, Homo Sapiens
ENFTIPYWDWRDAEKC

SEQ ID NO: 60294 - protein, 16 aa, Homo Sapiens
NFTIPYWDWRDAEKCD

SEQ ID NO: 60295 - protein, 16 aa, Homo Sapiens
FTIPYWDWRDAEKCDI

SEQ ID NO: 60296 - protein, 16 aa, Homo Sapiens
TIPYWDWRDAEKCDIC

SEQ ID NO: 60297 - protein, 16 aa, Homo Sapiens
IPYWDWRDAEKCDICT

SEQ ID NO: 60298 - protein, 16 aa, Homo Sapiens
PYWDWRDAEKCDICTD

SEQ ID NO: 60299 - protein, 16 aa, Homo Sapiens
YWDWRDAEKCDICTDE

SEQ ID NO: 60300 - protein, 16 aa, Homo Sapiens
WDWRDAEKCDICTDEY

SEQ ID NO: 60301 - protein, 16 aa, Homo Sapiens
DWRDAEKCDICTDEYM

SEQ ID NO: 60302 - protein, 16 aa, Homo Sapiens
WRDAEKCDICTDEYMG

SEQ ID NO: 60303 - protein, 16 aa, Homo Sapiens
RDAEKCDICTDEYMGG

SEQ ID NO: 60304 - protein, 16 aa, Homo Sapiens
DAEKCDICTDEYMGGQ

SEQ ID NO: 60305 - protein, 16 aa, Homo Sapiens
AEKCDICTDEYMGGQH

SEQ ID NO: 60306 - protein, 16 aa, Homo Sapiens
EKCDICTDEYMGGQHP

SEQ ID NO: 60307 - protein, 16 aa, Homo Sapiens
KCDICTDEYMGGQHPT

SEQ ID NO: 60308 - protein, 16 aa, Homo Sapiens
CDICTDEYMGGQHPTN

SEQ ID NO: 60309 - protein, 16 aa, Homo Sapiens
DICTDEYMGGQHPTNP

SEQ ID NO: 60310 - protein, 16 aa, Homo Sapiens
ICTDEYMGGQHPTNPN

SEQ ID NO: 60311 - protein, 16 aa, Homo Sapiens
CTDEYMGGQHPTNPNL

SEQ ID NO: 60312 - protein, 16 aa, Homo Sapiens
TDEYMGGQHPTNPNLL

SEQ ID NO: 60313 - protein, 16 aa, Homo Sapiens
DEYMGGQHPTNPNLLS

SEQ ID NO: 60314 - protein, 16 aa, Homo Sapiens
EYMGGQHPTNPNLLSP

SEQ ID NO: 60315 - protein, 16 aa, Homo Sapiens
YMGGQHPTNPNLLSPA

SEQ ID NO: 60316 - protein, 16 aa, Homo Sapiens
MGGQHPTNPNLLSPAS

SEQ ID NO: 60317 - protein, 16 aa, Homo Sapiens
GGQHPTNPNLLSPASF

SEQ ID NO: 60318 - protein, 16 aa, Homo Sapiens
GQHPTNPNLLSPASFF

SEQ ID NO: 60319 - protein, 16 aa, Homo Sapiens
QHPTNPNLLSPASFFS

SEQ ID NO: 60320 - protein, 16 aa, Homo Sapiens
HPTNPNLLSPASFFSS

SEQ ID NO: 60321 - protein, 16 aa, Homo Sapiens
PTNPNLLSPASFFSSW

SEQ ID NO: 60322 - protein, 16 aa, Homo Sapiens
TNPNLLSPASFFSSWQ

SEQ ID NO: 60323 - protein, 16 aa, Homo Sapiens
NPNLLSPASFFSSWQI

SEQ ID NO: 60324 - protein, 16 aa, Homo Sapiens
PNLLSPASFFSSWQIV

SEQ ID NO: 60325 - protein, 16 aa, Homo Sapiens
NLLSPASFFSSWQIVC

SEQ ID NO: 60326 - protein, 16 aa, Homo Sapiens
LLSPASFFSSWQIVCS

SEQ ID NO: 60327 - protein, 16 aa, Homo Sapiens
LSPASFFSSWQIVCSR

SEQ ID NO: 60328 - protein, 16 aa, Homo Sapiens
SPASFFSSWQIVCSRL

SEQ ID NO: 60329 - protein, 16 aa, Homo Sapiens
PASFFSSWQIVCSRLE

SEQ ID NO: 60330 - protein, 16 aa, Homo Sapiens
ASFFSSWQIVCSRLEE

SEQ ID NO: 60331 - protein, 16 aa, Homo Sapiens
SFFSSWQIVCSRLEEY

SEQ ID NO: 60332 - protein, 16 aa, Homo Sapiens
FFSSWQIVCSRLEEYN

SEQ ID NO: 60333 - protein, 16 aa, Homo Sapiens
FSSWQIVCSRLEEYNS

SEQ ID NO: 60334 - protein, 16 aa, Homo Sapiens
SSWQIVCSRLEEYNSH

SEQ ID NO: 60335 - protein, 16 aa, Homo Sapiens
SWQIVCSRLEEYNSHQ

SEQ ID NO: 60336 - protein, 16 aa, Homo Sapiens
WQIVCSRLEEYNSHQS

SEQ ID NO: 60337 - protein, 16 aa, Homo Sapiens
QIVCSRLEEYNSHQSL

SEQ ID NO: 60338 - protein, 16 aa, Homo Sapiens
IVCSRLEEYNSHQSLC

SEQ ID NO: 60339 - protein, 16 aa, Homo Sapiens
VCSRLEEYNSHQSLCN

SEQ ID NO: 60340 - protein, 16 aa, Homo Sapiens
CSRLEEYNSHQSLCNG

SEQ ID NO: 60341 - protein, 16 aa, Homo Sapiens
SRLEEYNSHQSLCNGT

SEQ ID NO: 60342 - protein, 16 aa, Homo Sapiens
RLEEYNSHQSLCNGTP

SEQ ID NO: 60343 - protein, 16 aa, Homo Sapiens
LEEYNSHQSLCNGTPE

SEQ ID NO: 60344 - protein, 16 aa, Homo Sapiens
EEYNSHQSLCNGTPEG

SEQ ID NO: 60345 - protein, 16 aa, Homo Sapiens
EYNSHQSLCNGTPEGP

SEQ ID NO: 60346 - protein, 16 aa, Homo Sapiens
YNSHQSLCNGTPEGPL

SEQ ID NO: 60347 - protein, 16 aa, Homo Sapiens
NSHQSLCNGTPEGPLR

SEQ ID NO: 60348 - protein, 16 aa, Homo Sapiens
SHQSLCNGTPEGPLRR

SEQ ID NO: 60349 - protein, 16 aa, Homo Sapiens
HQSLCNGTPEGPLRRN

SEQ ID NO: 60350 - protein, 16 aa, Homo Sapiens
QSLCNGTPEGPLRRNP

SEQ ID NO: 60351 - protein, 16 aa, Homo Sapiens
SLCNGTPEGPLRRNPG

SEQ ID NO: 60352 - protein, 16 aa, Homo Sapiens
LCNGTPEGPLRRNPGN

SEQ ID NO: 60353 - protein, 16 aa, Homo Sapiens
CNGTPEGPLRRNPGNH

SEQ ID NO: 60354 - protein, 16 aa, Homo Sapiens
NGTPEGPLRRNPGNHD

SEQ ID NO: 60355 - protein, 16 aa, Homo Sapiens
GTPEGPLRRNPGNHDK

SEQ ID NO: 60356 - protein, 16 aa, Homo Sapiens
TPEGPLRRNPGNHDKS

SEQ ID NO: 60357 - protein, 16 aa, Homo Sapiens
PEGPLRRNPGNHDKSR

SEQ ID NO: 60358 - protein, 16 aa, Homo Sapiens
EGPLRRNPGNHDKSRT

SEQ ID NO: 60359 - protein, 16 aa, Homo Sapiens
GPLRRNPGNHDKSRTP

SEQ ID NO: 60360 - protein, 16 aa, Homo Sapiens
PLRRNPGNHDKSRTPR

SEQ ID NO: 60361 - protein, 16 aa, Homo Sapiens
LRRNPGNHDKSRTPRL

SEQ ID NO: 60362 - protein, 16 aa, Homo Sapiens
RRNPGNHDKSRTPRLP

SEQ ID NO: 60363 - protein, 16 aa, Homo Sapiens
RNPGNHDKSRTPRLPS

SEQ ID NO: 60364 - protein, 16 aa, Homo Sapiens
NPGNHDKSRTPRLPSS

SEQ ID NO: 60365 - protein, 16 aa, Homo Sapiens
PGNHDKSRTPRLPSSA

SEQ ID NO: 60366 - protein, 16 aa, Homo Sapiens
GNHDKSRTPRLPSSAD

SEQ ID NO: 60367 - protein, 16 aa, Homo Sapiens
NHDKSRTPRLPSSADV

SEQ ID NO: 60368 - protein, 16 aa, Homo Sapiens
HDKSRTPRLPSSADVE

SEQ ID NO: 60369 - protein, 16 aa, Homo Sapiens
DKSRTPRLPSSADVEF

SEQ ID NO: 60370 - protein, 16 aa, Homo Sapiens
KSRTPRLPSSADVEFC

SEQ ID NO: 60371 - protein, 16 aa, Homo Sapiens
SRTPRLPSSADVEFCL

SEQ ID NO: 60372 - protein, 16 aa, Homo Sapiens
RTPRLPSSADVEFCLS

SEQ ID NO: 60373 - protein, 16 aa, Homo Sapiens
TPRLPSSADVEFCLSL

SEQ ID NO: 60374 - protein, 16 aa, Homo Sapiens
PRLPSSADVEFCLSLT

SEQ ID NO: 60375 - protein, 16 aa, Homo Sapiens
RLPSSADVEFCLSLTQ

SEQ ID NO: 60376 - protein, 16 aa, Homo Sapiens
LPSSADVEFCLSLTQY

SEQ ID NO: 60377 - protein, 16 aa, Homo Sapiens
PSSADVEFCLSLTQYE

SEQ ID NO: 60378 - protein, 16 aa, Homo Sapiens
SSADVEFCLSLTQYES

SEQ ID NO: 60379 - protein, 16 aa, Homo Sapiens
SADVEFCLSLTQYESG

SEQ ID NO: 60380 - protein, 16 aa, Homo Sapiens
ADVEFCLSLTQYESGS

SEQ ID NO: 60381 - protein, 16 aa, Homo Sapiens
DVEFCLSLTQYESGSM

SEQ ID NO: 60382 - protein, 16 aa, Homo Sapiens
VEFCLSLTQYESGSMD

SEQ ID NO: 60383 - protein, 16 aa, Homo Sapiens
EFCLSLTQYESGSMDK

SEQ ID NO: 60384 - protein, 16 aa, Homo Sapiens
FCLSLTQYESGSMDKA

SEQ ID NO: 60385 - protein, 16 aa, Homo Sapiens
CLSLTQYESGSMDKAA

SEQ ID NO: 60386 - protein, 16 aa, Homo Sapiens
LSLTQYESGSMDKAAN

SEQ ID NO: 60387 - protein, 16 aa, Homo Sapiens
SLTQYESGSMDKAANF

SEQ ID NO: 60388 - protein, 16 aa, Homo Sapiens
LTQYESGSMDKAANFS

SEQ ID NO: 60389 - protein, 16 aa, Homo Sapiens
TQYESGSMDKAANFSF

SEQ ID NO: 60390 - protein, 16 aa, Homo Sapiens
QYESGSMDKAANFSFR

SEQ ID NO: 60391 - protein, 16 aa, Homo Sapiens
YESGSMDKAANFSFRN

SEQ ID NO: 60392 - protein, 16 aa, Homo Sapiens
ESGSMDKAANFSFRNT

SEQ ID NO: 60393 - protein, 16 aa, Homo Sapiens
SGSMDKAANFSFRNTL

SEQ ID NO: 60394 - protein, 16 aa, Homo Sapiens
GSMDKAANFSFRNTLE

SEQ ID NO: 60395 - protein, 16 aa, Homo Sapiens
SMDKAANFSFRNTLEG

SEQ ID NO: 60396 - protein, 16 aa, Homo Sapiens
MDKAANFSFRNTLEGF

SEQ ID NO: 60397 - protein, 16 aa, Homo Sapiens
DKAANFSFRNTLEGFA

SEQ ID NO: 60398 - protein, 16 aa, Homo Sapiens
KAANFSFRNTLEGFAS

SEQ ID NO: 60399 - protein, 16 aa, Homo Sapiens
AANFSFRNTLEGFASP

SEQ ID NO: 60400 - protein, 16 aa, Homo Sapiens
ANFSFRNTLEGFASPL

SEQ ID NO: 60401 - protein, 16 aa, Homo Sapiens
NFSFRNTLEGFASPLT

SEQ ID NO: 60402 - protein, 16 aa, Homo Sapiens
FSFRNTLEGFASPLTG

SEQ ID NO: 60403 - protein, 16 aa, Homo Sapiens
SFRNTLEGFASPLTGI

SEQ ID NO: 60404 - protein, 16 aa, Homo Sapiens
FRNTLEGFASPLTGIA

SEQ ID NO: 60405 - protein, 16 aa, Homo Sapiens
RNTLEGFASPLTGIAD

SEQ ID NO: 60406 - protein, 16 aa, Homo Sapiens
NTLEGFASPLTGIADA

SEQ ID NO: 60407 - protein, 16 aa, Homo Sapiens
TLEGFASPLTGIADAS

SEQ ID NO: 60408 - protein, 16 aa, Homo Sapiens
LEGFASPLTGIADASQ

SEQ ID NO: 60409 - protein, 16 aa, Homo Sapiens
EGFASPLTGIADASQS

SEQ ID NO: 60410 - protein, 16 aa, Homo Sapiens
GFASPLTGIADASQSS

SEQ ID NO: 60411 - protein, 16 aa, Homo Sapiens
FASPLTGIADASQSSM

SEQ ID NO: 60412 - protein, 16 aa, Homo Sapiens
ASPLTGIADASQSSMH

SEQ ID NO: 60413 - protein, 16 aa, Homo Sapiens
SPLTGIADASQSSMHN

SEQ ID NO: 60414 - protein, 16 aa, Homo Sapiens
PLTGIADASQSSMHNA

SEQ ID NO: 60415 - protein, 16 aa, Homo Sapiens
LTGIADASQSSMHNAL

SEQ ID NO: 60416 - protein, 16 aa, Homo Sapiens
TGIADASQSSMHNALH

SEQ ID NO: 60417 - protein, 16 aa, Homo Sapiens
GIADASQSSMHNALHI

SEQ ID NO: 60418 - protein, 16 aa, Homo Sapiens
IADASQSSMHNALHIY

SEQ ID NO: 60419 - protein, 16 aa, Homo Sapiens
ADASQSSMHNALHIYM

SEQ ID NO: 60420 - protein, 16 aa, Homo Sapiens
DASQSSMHNALHIYMN

SEQ ID NO: 60421 - protein, 16 aa, Homo Sapiens
ASQSSMHNALHIYMNG

SEQ ID NO: 60422 - protein, 16 aa, Homo Sapiens
SQSSMHNALHIYMNGT

SEQ ID NO: 60423 - protein, 16 aa, Homo Sapiens
QSSMHNALHIYMNGTM

SEQ ID NO: 60424 - protein, 16 aa, Homo Sapiens
SSMHNALHIYMNGTMS

SEQ ID NO: 60425 - protein, 16 aa, Homo Sapiens
SMHNALHIYMNGTMSQ

SEQ ID NO: 60426 - protein, 16 aa, Homo Sapiens
MHNALHIYMNGTMSQV

SEQ ID NO: 60427 - protein, 16 aa, Homo Sapiens
HNALHIYMNGTMSQVQ

SEQ ID NO: 60428 - protein, 16 aa, Homo Sapiens
NALHIYMNGTMSQVQG

SEQ ID NO: 60429 - protein, 16 aa, Homo Sapiens
ALHIYMNGTMSQVQGS

SEQ ID NO: 60430 - protein, 16 aa, Homo Sapiens
LHIYMNGTMSQVQGSA

SEQ ID NO: 60431 - protein, 16 aa, Homo Sapiens
HIYMNGTMSQVQGSAN

SEQ ID NO: 60432 - protein, 16 aa, Homo Sapiens
IYMNGTMSQVQGSAND

SEQ ID NO: 60433 - protein, 16 aa, Homo Sapiens
YMNGTMSQVQGSANDP

SEQ ID NO: 60434 - protein, 16 aa, Homo Sapiens
MNGTMSQVQGSANDPI

SEQ ID NO: 60435 - protein, 16 aa, Homo Sapiens
NGTMSQVQGSANDPIF

SEQ ID NO: 60436 - protein, 16 aa, Homo Sapiens
GTMSQVQGSANDPIFL

SEQ ID NO: 60437 - protein, 16 aa, Homo Sapiens
TMSQVQGSANDPIFLL

SEQ ID NO: 60438 - protein, 16 aa, Homo Sapiens
MSQVQGSANDPIFLLH

SEQ ID NO: 60439 - protein, 16 aa, Homo Sapiens
SQVQGSANDPIFLLHH

SEQ ID NO: 60440 - protein, 16 aa, Homo Sapiens
QVQGSANDPIFLLHHA

SEQ ID NO: 60441 - protein, 16 aa, Homo Sapiens
VQGSANDPIFLLHHAF

SEQ ID NO: 60442 - protein, 16 aa, Homo Sapiens
QGSANDPIFLLHHAFV

SEQ ID NO: 60443 - protein, 16 aa, Homo Sapiens
GSANDPIFLLHHAFVD

SEQ ID NO: 60444 - protein, 16 aa, Homo Sapiens
SANDPIFLLHHAFVDS

SEQ ID NO: 60445 - protein, 16 aa, Homo Sapiens
ANDPIFLLHHAFVDSI

SEQ ID NO: 60446 - protein, 16 aa, Homo Sapiens
NDPIFLLHHAFVDSIF

SEQ ID NO: 60447 - protein, 16 aa, Homo Sapiens
DPIFLLHHAFVDSIFE

SEQ ID NO: 60448 - protein, 16 aa, Homo Sapiens
PIFLLHHAFVDSIFEQ

SEQ ID NO: 60449 - protein, 16 aa, Homo Sapiens
IFLLHHAFVDSIFEQW

SEQ ID NO: 60450 - protein, 16 aa, Homo Sapiens
FLLHHAFVDSIFEQWL

SEQ ID NO: 60451 - protein, 16 aa, Homo Sapiens
LLHHAFVDSIFEQWLQ

SEQ ID NO: 60452 - protein, 16 aa, Homo Sapiens
LHHAFVDSIFEQWLQR

SEQ ID NO: 60453 - protein, 16 aa, Homo Sapiens
HHAFVDSIFEQWLQRH

SEQ ID NO: 60454 - protein, 16 aa, Homo Sapiens
HAFVDSIFEQWLQRHR

SEQ ID NO: 60455 - protein, 16 aa, Homo Sapiens
AFVDSIFEQWLQRHRP

SEQ ID NO: 60456 - protein, 16 aa, Homo Sapiens
FVDSIFEQWLQRHRPL

SEQ ID NO: 60457 - protein, 16 aa, Homo Sapiens
VDSIFEQWLQRHRPLQ

SEQ ID NO: 60458 - protein, 16 aa, Homo Sapiens
DSIFEQWLQRHRPLQE

SEQ ID NO: 60459 - protein, 16 aa, Homo Sapiens
SIFEQWLQRHRPLQEV

SEQ ID NO: 60460 - protein, 16 aa, Homo Sapiens
IFEQWLQRHRPLQEVY

SEQ ID NO: 60461 - protein, 16 aa, Homo Sapiens
FEQWLQRHRPLQEVYP

SEQ ID NO: 60462 - protein, 16 aa, Homo Sapiens
EQWLQRHRPLQEVYPE

SEQ ID NO: 60463 - protein, 16 aa, Homo Sapiens
QWLQRHRPLQEVYPEA

SEQ ID NO: 60464 - protein, 16 aa, Homo Sapiens
WLQRHRPLQEVYPEAN

SEQ ID NO: 60465 - protein, 16 aa, Homo Sapiens
LQRHRPLQEVYPEANA

SEQ ID NO: 60466 - protein, 16 aa, Homo Sapiens
QRHRPLQEVYPEANAP

SEQ ID NO: 60467 - protein, 16 aa, Homo Sapiens
RHRPLQEVYPEANAPI

SEQ ID NO: 60468 - protein, 16 aa, Homo Sapiens
HRPLQEVYPEANAPIG

SEQ ID NO: 60469 - protein, 16 aa, Homo Sapiens
RPLQEVYPEANAPIGH

SEQ ID NO: 60470 - protein, 16 aa, Homo Sapiens
PLQEVYPEANAPIGHN

SEQ ID NO: 60471 - protein, 16 aa, Homo Sapiens
LQEVYPEANAPIGHNR

SEQ ID NO: 60472 - protein, 16 aa, Homo Sapiens
QEVYPEANAPIGHNRE

SEQ ID NO: 60473 - protein, 16 aa, Homo Sapiens
EVYPEANAPIGHNRES

SEQ ID NO: 60474 - protein, 16 aa, Homo Sapiens
VYPEANAPIGHNRESY

SEQ ID NO: 60475 - protein, 16 aa, Homo Sapiens
YPEANAPIGHNRESYM

SEQ ID NO: 60476 - protein, 16 aa, Homo Sapiens
PEANAPIGHNRESYMV

SEQ ID NO: 60477 - protein, 16 aa, Homo Sapiens
EANAPIGHNRESYMVP

SEQ ID NO: 60478 - protein, 16 aa, Homo Sapiens
ANAPIGHNRESYMVPF

SEQ ID NO: 60479 - protein, 16 aa, Homo Sapiens
NAPIGHNRESYMVPFI

SEQ ID NO: 60480 - protein, 16 aa, Homo Sapiens
APIGHNRESYMVPFIP

SEQ ID NO: 60481 - protein, 16 aa, Homo Sapiens
PIGHNRESYMVPFIPL

SEQ ID NO: 60482 - protein, 16 aa, Homo Sapiens
IGHNRESYMVPFIPLY

SEQ ID NO: 60483 - protein, 16 aa, Homo Sapiens
GHNRESYMVPFIPLYR

SEQ ID NO: 60484 - protein, 16 aa, Homo Sapiens
HNRESYMVPFIPLYRN

SEQ ID NO: 60485 - protein, 16 aa, Homo Sapiens
NRESYMVPFIPLYRNG

SEQ ID NO: 60486 - protein, 16 aa, Homo Sapiens
RESYMVPFIPLYRNGD

SEQ ID NO: 60487 - protein, 16 aa, Homo Sapiens
ESYMVPFIPLYRNGDF

SEQ ID NO: 60488 - protein, 16 aa, Homo Sapiens
SYMVPFIPLYRNGDFF

SEQ ID NO: 60489 - protein, 16 aa, Homo Sapiens
YMVPFIPLYRNGDFFI

SEQ ID NO: 60490 - protein, 16 aa, Homo Sapiens
MVPFIPLYRNGDFFIS

SEQ ID NO: 60491 - protein, 16 aa, Homo Sapiens
VPFIPLYRNGDFFISS

SEQ ID NO: 60492 - protein, 16 aa, Homo Sapiens
PFIPLYRNGDFFISSK

SEQ ID NO: 60493 - protein, 16 aa, Homo Sapiens
FIPLYRNGDFFISSKD

SEQ ID NO: 60494 - protein, 16 aa, Homo Sapiens
IPLYRNGDFFISSKDL

SEQ ID NO: 60495 - protein, 16 aa, Homo Sapiens
PLYRNGDFFISSKDLG

SEQ ID NO: 60496 - protein, 16 aa, Homo Sapiens
LYRNGDFFISSKDLGY

SEQ ID NO: 60497 - protein, 16 aa, Homo Sapiens
YRNGDFFISSKDLGYD

SEQ ID NO: 60498 - protein, 16 aa, Homo Sapiens
RNGDFFISSKDLGYDY

SEQ ID NO: 60499 - protein, 16 aa, Homo Sapiens
NGDFFISSKDLGYDYS

SEQ ID NO: 60500 - protein, 16 aa, Homo Sapiens
GDFFISSKDLGYDYSY

SEQ ID NO: 60501 - protein, 16 aa, Homo Sapiens
DFFISSKDLGYDYSYL

SEQ ID NO: 60502 - protein, 16 aa, Homo Sapiens
FFISSKDLGYDYSYLQ

SEQ ID NO: 60503 - protein, 16 aa, Homo Sapiens
FISSKDLGYDYSYLQD

SEQ ID NO: 60504 - protein, 16 aa, Homo Sapiens
ISSKDLGYDYSYLQDS

SEQ ID NO: 60505 - protein, 16 aa, Homo Sapiens
SSKDLGYDYSYLQDSD

SEQ ID NO: 60506 - protein, 16 aa, Homo Sapiens
SKDLGYDYSYLQDSDP

SEQ ID NO: 60507 - protein, 16 aa, Homo Sapiens
KDLGYDYSYLQDSDPD

SEQ ID NO: 60508 - protein, 16 aa, Homo Sapiens
DLGYDYSYLQDSDPDS

SEQ ID NO: 60509 - protein, 16 aa, Homo Sapiens
LGYDYSYLQDSDPDSF

SEQ ID NO: 60510 - protein, 16 aa, Homo Sapiens
GYDYSYLQDSDPDSFQ

SEQ ID NO: 60511 - protein, 16 aa, Homo Sapiens
YDYSYLQDSDPDSFQD

SEQ ID NO: 60512 - protein, 16 aa, Homo Sapiens
DYSYLQDSDPDSFQDY

SEQ ID NO: 60513 - protein, 16 aa, Homo Sapiens
YSYLQDSDPDSFQDYI

SEQ ID NO: 60514 - protein, 16 aa, Homo Sapiens
SYLQDSDPDSFQDYIK

SEQ ID NO: 60515 - protein, 16 aa, Homo Sapiens
YLQDSDPDSFQDYIKS

SEQ ID NO: 60516 - protein, 16 aa, Homo Sapiens
LQDSDPDSFQDYIKSY

SEQ ID NO: 60517 - protein, 16 aa, Homo Sapiens
QDSDPDSFQDYIKSYL

SEQ ID NO: 60518 - protein, 16 aa, Homo Sapiens
DSDPDSFQDYIKSYLE

SEQ ID NO: 60519 - protein, 16 aa, Homo Sapiens
SDPDSFQDYIKSYLEQ

SEQ ID NO: 60520 - protein, 16 aa, Homo Sapiens
DPDSFQDYIKSYLEQA

SEQ ID NO: 60521 - protein, 16 aa, Homo Sapiens
PDSFQDYIKSYLEQAS

SEQ ID NO: 60522 - protein, 16 aa, Homo Sapiens
DSFQDYIKSYLEQASR

SEQ ID NO: 60523 - protein, 16 aa, Homo Sapiens
SFQDYIKSYLEQASRI

SEQ ID NO: 60524 - protein, 16 aa, Homo Sapiens
FQDYIKSYLEQASRIW

SEQ ID NO: 60525 - protein, 16 aa, Homo Sapiens
QDYIKSYLEQASRIWS

SEQ ID NO: 60526 - protein, 16 aa, Homo Sapiens
DYIKSYLEQASRIWSW

SEQ ID NO: 60527 - protein, 16 aa, Homo Sapiens
YIKSYLEQASRIWSWL

SEQ ID NO: 60528 - protein, 16 aa, Homo Sapiens
IKSYLEQASRIWSWLL

SEQ ID NO: 60529 - protein, 16 aa, Homo Sapiens
KSYLEQASRIWSWLLG

SEQ ID NO: 60530 - protein, 16 aa, Homo Sapiens
SYLEQASRIWSWLLGA

SEQ ID NO: 60531 - protein, 16 aa, Homo Sapiens
YLEQASRIWSWLLGAA

SEQ ID NO: 60532 - protein, 16 aa, Homo Sapiens
LEQASRIWSWLLGAAM

SEQ ID NO: 60533 - protein, 16 aa, Homo Sapiens
EQASRIWSWLLGAAMV

SEQ ID NO: 60534 - protein, 16 aa, Homo Sapiens
QASRIWSWLLGAAMVG

SEQ ID NO: 60535 - protein, 16 aa, Homo Sapiens
ASRIWSWLLGAAMVGA

SEQ ID NO: 60536 - protein, 16 aa, Homo Sapiens
SRIWSWLLGAAMVGAV

SEQ ID NO: 60537 - protein, 16 aa, Homo Sapiens
RIWSWLLGAAMVGAVL

SEQ ID NO: 60538 - protein, 16 aa, Homo Sapiens
IWSWLLGAAMVGAVLT

SEQ ID NO: 60539 - protein, 16 aa, Homo Sapiens
WSWLLGAAMVGAVLTA

SEQ ID NO: 60540 - protein, 16 aa, Homo Sapiens
SWLLGAAMVGAVLTAL

SEQ ID NO: 60541 - protein, 16 aa, Homo Sapiens
WLLGAAMVGAVLTALL

SEQ ID NO: 60542 - protein, 16 aa, Homo Sapiens
LLGAAMVGAVLTALLA

SEQ ID NO: 60543 - protein, 16 aa, Homo Sapiens
LGAAMVGAVLTALLAG

SEQ ID NO: 60544 - protein, 16 aa, Homo Sapiens
GAAMVGAVLTALLAGL

SEQ ID NO: 60545 - protein, 16 aa, Homo Sapiens
AAMVGAVLTALLAGLV

SEQ ID NO: 60546 - protein, 16 aa, Homo Sapiens
AMVGAVLTALLAGLVS

SEQ ID NO: 60547 - protein, 16 aa, Homo Sapiens
MVGAVLTALLAGLVSL

SEQ ID NO: 60548 - protein, 16 aa, Homo Sapiens
VGAVLTALLAGLVSLL

SEQ ID NO: 60549 - protein, 16 aa, Homo Sapiens
GAVLTALLAGLVSLLC

SEQ ID NO: 60550 - protein, 16 aa, Homo Sapiens
AVLTALLAGLVSLLCR

SEQ ID NO: 60551 - protein, 16 aa, Homo Sapiens
VLTALLAGLVSLLCRH

SEQ ID NO: 60552 - protein, 16 aa, Homo Sapiens
LTALLAGLVSLLCRHK

SEQ ID NO: 60553 - protein, 16 aa, Homo Sapiens
TALLAGLVSLLCRHKR

SEQ ID NO: 60554 - protein, 16 aa, Homo Sapiens
ALLAGLVSLLCRHKRK

SEQ ID NO: 60555 - protein, 16 aa, Homo Sapiens
LLAGLVSLLCRHKRKQ

SEQ ID NO: 60556 - protein, 16 aa, Homo Sapiens
LAGLVSLLCRHKRKQL

SEQ ID NO: 60557 - protein, 16 aa, Homo Sapiens
AGLVSLLCRHKRKQLP

SEQ ID NO: 60558 - protein, 16 aa, Homo Sapiens
GLVSLLCRHKRKQLPE

SEQ ID NO: 60559 - protein, 16 aa, Homo Sapiens
LVSLLCRHKRKQLPEE

SEQ ID NO: 60560 - protein, 16 aa, Homo Sapiens
VSLLCRHKRKQLPEEK

SEQ ID NO: 60561 - protein, 16 aa, Homo Sapiens
SLLCRHKRKQLPEEKQ

SEQ ID NO: 60562 - protein, 16 aa, Homo Sapiens
LLCRHKRKQLPEEKQP

SEQ ID NO: 60563 - protein, 16 aa, Homo Sapiens
LCRHKRKQLPEEKQPL

SEQ ID NO: 60564 - protein, 16 aa, Homo Sapiens
CRHKRKQLPEEKQPLL

SEQ ID NO: 60565 - protein, 16 aa, Homo Sapiens
RHKRKQLPEEKQPLLM

SEQ ID NO: 60566 - protein, 16 aa, Homo Sapiens
HKRKQLPEEKQPLLME

SEQ ID NO: 60567 - protein, 16 aa, Homo Sapiens
KRKQLPEEKQPLLMEK

SEQ ID NO: 60568 - protein, 16 aa, Homo Sapiens
RKQLPEEKQPLLMEKE

SEQ ID NO: 60569 - protein, 16 aa, Homo Sapiens
KQLPEEKQPLLMEKED

SEQ ID NO: 60570 - protein, 16 aa, Homo Sapiens
QLPEEKQPLLMEKEDY

SEQ ID NO: 60571 - protein, 16 aa, Homo Sapiens
LPEEKQPLLMEKEDYH

SEQ ID NO: 60572 - protein, 16 aa, Homo Sapiens
PEEKQPLLMEKEDYHS

SEQ ID NO: 60573 - protein, 16 aa, Homo Sapiens
EEKQPLLMEKEDYHSL

SEQ ID NO: 60574 - protein, 16 aa, Homo Sapiens
EKQPLLMEKEDYHSLY

SEQ ID NO: 60575 - protein, 16 aa, Homo Sapiens
KQPLLMEKEDYHSLYQ

SEQ ID NO: 60576 - protein, 16 aa, Homo Sapiens
QPLLMEKEDYHSLYQS

SEQ ID NO: 60577 - protein, 16 aa, Homo Sapiens
PLLMEKEDYHSLYQSH

SEQ ID NO: 60578 - protein, 16 aa, Homo Sapiens
LLMEKEDYHSLYQSHL

SEQ ID NO: 60579 - protein, 393 aa, Homo Sapiens [sequence omitted]

SEQ ID NO: 60580 - protein, 8 aa, Homo Sapiens
DPSVEPPL

SEQ ID NO: 60581 - protein, 8 aa, Homo Sapiens
PPLSQETF

SEQ ID NO: 60582 - protein, 8 aa, Homo Sapiens
QETFSDLW

SEQ ID NO: 60583 - protein, 8 aa, Homo Sapiens
ETFSDLWK

SEQ ID NO: 60584 - protein, 8 aa, Homo Sapiens
TFSDLWKL

SEQ ID NO: 60585 - protein, 8 aa, Homo Sapiens
KLLPENNV

SEQ ID NO: 60586 - protein, 8 aa, Homo Sapiens
LLPENNVL

SEQ ID NO: 60587 - protein, 8 aa, Homo Sapiens
VLSPLPSQ

SEQ ID NO: 60588 - protein, 8 aa, Homo Sapiens
SPLPSQAM

SEQ ID NO: 60589 - protein, 8 aa, Homo Sapiens
SQAMDDLM

SEQ ID NO: 60590 - protein, 8 aa, Homo Sapiens
QAMDDLML

SEQ ID NO: 60591 - protein, 8 aa, Homo Sapiens
AMDDLMLS

SEQ ID NO: 60592 - protein, 8 aa, Homo Sapiens
LMLSPDDI

SEQ ID NO: 60593 - protein, 8 aa, Homo Sapiens
SPDDIEQW

SEQ ID NO: 60594 - protein, 8 aa, Homo Sapiens
APRMPEAA

SEQ ID NO: 60595 - protein, 8 aa, Homo Sapiens
RMPEAAPR

SEQ ID NO: 60596 - protein, 8 aa, Homo Sapiens
MPEAAPRV

SEQ ID NO: 60597 - protein, 8 aa, Homo Sapiens
APRVAPAP

SEQ ID NO: 60598 - protein, 8 aa, Homo Sapiens
RVAPAPAA

SEQ ID NO: 60599 - protein, 8 aa, Homo Sapiens
APAPAAPT

SEQ ID NO: 60600 - protein, 8 aa, Homo Sapiens
APAAPTPA

SEQ ID NO: 60601 - protein, 8 aa, Homo Sapiens
APTPAAPA

SEQ ID NO: 60602 - protein, 8 aa, Homo Sapiens
TPAAPAPA

SEQ ID NO: 60603 - protein, 8 aa, Homo Sapiens
APAPAPSW

SEQ ID NO: 60604 - protein, 8 aa, Homo Sapiens
APAPSWPL

SEQ ID NO: 60605 - protein, 8 aa, Homo Sapiens
APSWPLSS

SEQ ID NO: 60606 - protein, 8 aa, Homo Sapiens
SSSVPSQK

SEQ ID NO: 60607 - protein, 8 aa, Homo Sapiens
SVPSQKTY

SEQ ID NO: 60608 - protein, 8 aa, Homo Sapiens
TYQGSYGF

SEQ ID NO: 60609 - protein, 8 aa, Homo Sapiens
YQGSYGFR

SEQ ID NO: 60610 - protein, 8 aa, Homo Sapiens
SYGFRLGF

SEQ ID NO: 60611 - protein, 8 aa, Homo Sapiens
FLHSGTAK

SEQ ID NO: 60612 - protein, 8 aa, Homo Sapiens
TYSPALNK

SEQ ID NO: 60613 - protein, 8 aa, Homo Sapiens
SPALNKMF

SEQ ID NO: 60614 - protein, 8 aa, Homo Sapiens
ALNKMFCQ

SEQ ID NO: 60615 - protein, 8 aa, Homo Sapiens
KMFCQLAK

SEQ ID NO: 60616 - protein, 8 aa, Homo Sapiens
QLAKTCPV

SEQ ID NO: 60617 - protein, 8 aa, Homo Sapiens
KTCPVQLW

SEQ ID NO: 60618 - protein, 8 aa, Homo Sapiens
TCPVQLWV

SEQ ID NO: 60619 - protein, 8 aa, Homo Sapiens
VQLWVDST

SEQ ID NO: 60620 - protein, 8 aa, Homo Sapiens
STPPPGTR

SEQ ID NO: 60621 - protein, 8 aa, Homo Sapiens
TPPPGTRV

SEQ ID NO: 60622 - protein, 8 aa, Homo Sapiens
RVRAMAIY

SEQ ID NO: 60623 - protein, 8 aa, Homo Sapiens
KQSQHMTE

SEQ ID NO: 60624 - protein, 8 aa, Homo Sapiens
QSQHMTEV

SEQ ID NO: 60625 - protein, 8 aa, Homo Sapiens
SQHMTEVV

SEQ ID NO: 60626 - protein, 8 aa, Homo Sapiens
HMTEVVRR

SEQ ID NO: 60627 - protein, 8 aa, Homo Sapiens
EVVRRCPH

SEQ ID NO: 60628 - protein, 8 aa, Homo Sapiens
GLAPPQHL

SEQ ID NO: 60629 - protein, 8 aa, Homo Sapiens
LAPPQHLI

SEQ ID NO: 60630 - protein, 8 aa, Homo Sapiens
RVEGNLRV

SEQ ID NO: 60631 - protein, 8 aa, Homo Sapiens
RVEYLDDR

SEQ ID NO: 60632 - protein, 8 aa, Homo Sapiens
YLDDRNTF

SEQ ID NO: 60633 - protein, 8 aa, Homo Sapiens
NTFRHSVV

SEQ ID NO: 60634 - protein, 8 aa, Homo Sapiens
VPYEPPEV

SEQ ID NO: 60635 - protein, 8 aa, Homo Sapiens
CTTIHYNY

SEQ ID NO: 60636 - protein, 8 aa, Homo Sapiens
TTIHYNYM

SEQ ID NO: 60637 - protein, 8 aa, Homo Sapiens
YMCNSSCM

SEQ ID NO: 60638 - protein, 8 aa, Homo Sapiens
CMGGMNRR

SEQ ID NO: 60639 - protein, 8 aa, Homo Sapiens
GMNRRPIL

SEQ ID NO: 60640 - protein, 8 aa, Homo Sapiens
RPILTIIT

SEQ ID NO: 60641 - protein, 8 aa, Homo Sapiens
PILTIITL

SEQ ID NO: 60642 - protein, 8 aa, Homo Sapiens
LEDSSGNL

SEQ ID NO: 60643 - protein, 8 aa, Homo Sapiens
SSGNLLGR

SEQ ID NO: 60644 - protein, 8 aa, Homo Sapiens
NLLGRNSF

SEQ ID NO: 60645 - protein, 8 aa, Homo Sapiens
RVCACPGR

SEQ ID NO: 60646 - protein, 8 aa, Homo Sapiens
CACPGRDR

SEQ ID NO: 60647 - protein, 8 aa, Homo Sapiens
RTEEENLR

SEQ ID NO: 60648 - protein, 8 aa, Homo Sapiens
ELPPGSTK

SEQ ID NO: 60649 - protein, 8 aa, Homo Sapiens
LPNNTSSS

SEQ ID NO: 60650 - protein, 8 aa, Homo Sapiens
TSSSPQPK

SEQ ID NO: 60651 - protein, 8 aa, Homo Sapiens
SSSPQPKK

SEQ ID NO: 60652 - protein, 8 aa, Homo Sapiens
SSPQPKKK

SEQ ID NO: 60653 - protein, 8 aa, Homo Sapiens
KPLDGEYF

SEQ ID NO: 60654 - protein, 8 aa, Homo Sapiens
PLDGEYFT

SEQ ID NO: 60655 - protein, 8 aa, Homo Sapiens
GEYFTLQI

SEQ ID NO: 60656 - protein, 8 aa, Homo Sapiens
EYFTLQIR

SEQ ID NO: 60657 - protein, 8 aa, Homo Sapiens
FTLQIRGR

SEQ ID NO: 60658 - protein, 8 aa, Homo Sapiens
LQIRGRER

SEQ ID NO: 60659 - protein, 8 aa, Homo Sapiens
RERFEMFR

SEQ ID NO: 60660 - protein, 8 aa, Homo Sapiens
FRELNEAL

SEQ ID NO: 60661 - protein, 8 aa, Homo Sapiens
ELNEALEL

SEQ ID NO: 60662 - protein, 8 aa, Homo Sapiens
EPGGSRAH

SEQ ID NO: 60663 - protein, 8 aa, Homo Sapiens
RAHSSHLK

SEQ ID NO: 60664 - protein, 8 aa, Homo Sapiens
HSSHLKSK

SEQ ID NO: 60665 - protein, 8 aa, Homo Sapiens
SSHLKSKK

SEQ ID NO: 60666 - protein, 8 aa, Homo Sapiens
GQSTSRHK

SEQ ID NO: 60667 - protein, 8 aa, Homo Sapiens
QSTSRHKK

SEQ ID NO: 60668 - protein, 8 aa, Homo Sapiens
STSRHKKL

SEQ ID NO: 60669 - protein, 8 aa, Homo Sapiens
SRHKKLMF

SEQ ID NO: 60670 - protein, 8 aa, Homo Sapiens
RHKKLMFK

SEQ ID NO: 60671 - protein, 9 aa, Homo Sapiens
EEPQSDPSV

SEQ ID NO: 60672 - protein, 9 aa, Homo Sapiens
EPPLSQETF

SEQ ID NO: 60673 - protein, 9 aa, Homo Sapiens
ETFSDLWKL

SEQ ID NO: 60674 - protein, 9 aa, Homo Sapiens
KLLPENNVL

SEQ ID NO: 60675 - protein, 9 aa, Homo Sapiens
LLPENNVLS

SEQ ID NO: 60676 - protein, 9 aa, Homo Sapiens
VLSPLPSQA

SEQ ID NO: 60677 - protein, 9 aa, Homo Sapiens
LPSQAMDDL

SEQ ID NO: 60678 - protein, 9 aa, Homo Sapiens
SQAMDDLML

SEQ ID NO: 60679 - protein, 9 aa, Homo Sapiens
AMDDLMLSP

SEQ ID NO: 60680 - protein, 9 aa, Homo Sapiens
MLSPDDIEQ

SEQ ID NO: 60681 - protein, 9 aa, Homo Sapiens
LSPDDIEQW

SEQ ID NO: 60682 - protein, 9 aa, Homo Sapiens
SPDDIEQWF

SEQ ID NO: 60683 - protein, 9 aa, Homo Sapiens
DPGPDEAPR

SEQ ID NO: 60684 - protein, 9 aa, Homo Sapiens
EAPRMPEAA

SEQ ID NO: 60685 - protein, 9 aa, Homo Sapiens
APRMPEAAP

SEQ ID NO: 60686 - protein, 9 aa, Homo Sapiens
RMPEAAPRV

SEQ ID NO: 60687 - protein, 9 aa, Homo Sapiens
MPEAAPRVA

SEQ ID NO: 60688 - protein, 9 aa, Homo Sapiens
EAAPRVAPA

SEQ ID NO: 60689 - protein, 9 aa, Homo Sapiens
APRVAPAPA

SEQ ID NO: 60690 - protein, 9 aa, Homo Sapiens
APAAPTPAA

SEQ ID NO: 60691 - protein, 9 aa, Homo Sapiens
APSWPLSSS

SEQ ID NO: 60692 - protein, 9 aa, Homo Sapiens
PSWPLSSSV

SEQ ID NO: 60693 - protein, 9 aa, Homo Sapiens
WPLSSSVPS

SEQ ID NO: 60694 - protein, 9 aa, Homo Sapiens
PLSSSVPSQ

SEQ ID NO: 60695 - protein, 9 aa, Homo Sapiens
LSSSVPSQK

SEQ ID NO: 60696 - protein, 9 aa, Homo Sapiens
SSVPSQKTY

SEQ ID NO: 60697 - protein, 9 aa, Homo Sapiens
SQKTYQGSY

SEQ ID NO: 60698 - protein, 9 aa, Homo Sapiens
KTYQGSYGF

SEQ ID NO: 60699 - protein, 9 aa, Homo Sapiens
TYQGSYGFR

SEQ ID NO: 60700 - protein, 9 aa, Homo Sapiens
YQGSYGFRL

SEQ ID NO: 60701 - protein, 9 aa, Homo Sapiens
GSYGFRLGF

SEQ ID NO: 60702 - protein, 9 aa, Homo Sapiens
SYGFRLGFL

SEQ ID NO: 60703 - protein, 9 aa, Homo Sapiens
RLGFLHSGT

SEQ ID NO: 60704 - protein, 9 aa, Homo Sapiens
GFLHSGTAK

SEQ ID NO: 60705 - protein, 9 aa, Homo Sapiens
FLHSGTAKS

SEQ ID NO: 60706 - protein, 9 aa, Homo Sapiens
TAKSVTCTY

SEQ ID NO: 60707 - protein, 9 aa, Homo Sapiens
SVTCTYSPA

SEQ ID NO: 60708 - protein, 9 aa, Homo Sapiens
VTCTYSPAL

SEQ ID NO: 60709 - protein, 9 aa, Homo Sapiens
CTYSPALNK

SEQ ID NO: 60710 - protein, 9 aa, Homo Sapiens
TYSPALNKM

SEQ ID NO: 60711 - protein, 9 aa, Homo Sapiens
YSPALNKMF

SEQ ID NO: 60712 - protein, 9 aa, Homo Sapiens
SPALNKMFC

SEQ ID NO: 60713 - protein, 9 aa, Homo Sapiens
ALNKMFCQL

SEQ ID NO: 60714 - protein, 9 aa, Homo Sapiens
KMFCQLAKT

SEQ ID NO: 60715 - protein, 9 aa, Homo Sapiens
CQLAKTCPV

SEQ ID NO: 60716 - protein, 9 aa, Homo Sapiens
KTCPVQLWV

SEQ ID NO: 60717 - protein, 9 aa, Homo Sapiens
CPVQLWVDS

SEQ ID NO: 60718 - protein, 9 aa, Homo Sapiens
VQLWVDSTP

SEQ ID NO: 60719 - protein, 9 aa, Homo Sapiens
DSTPPPGTR

SEQ ID NO: 60720 - protein, 9 aa, Homo Sapiens
STPPPGTRV

SEQ ID NO: 60721 - protein, 9 aa, Homo Sapiens
PPGTRVRAM

SEQ ID NO: 60722 - protein, 9 aa, Homo Sapiens
GTRVRAMAI

SEQ ID NO: 60723 - protein, 9 aa, Homo Sapiens
TRVRAMAIY

SEQ ID NO: 60724 - protein, 9 aa, Homo Sapiens
RVRAMAIYK

SEQ ID NO: 60725 - protein, 9 aa, Homo Sapiens
AMAIYKQSQ

SEQ ID NO: 60726 - protein, 9 aa, Homo Sapiens
MAIYKQSQH

SEQ ID NO: 60727 - protein, 9 aa, Homo Sapiens
AIYKQSQHM

SEQ ID NO: 60728 - protein, 9 aa, Homo Sapiens
KQSQHMTEV

SEQ ID NO: 60729 - protein, 9 aa, Homo Sapiens
QSQHMTEVV

SEQ ID NO: 60730 - protein, 9 aa, Homo Sapiens
SQHMTEVVR

SEQ ID NO: 60731 - protein, 9 aa, Homo Sapiens
HMTEVVRRC

SEQ ID NO: 60732 - protein, 9 aa, Homo Sapiens
EVVRRCPHH

SEQ ID NO: 60733 - protein, 9 aa, Homo Sapiens
GLAPPQHLI

SEQ ID NO: 60734 - protein, 9 aa, Homo Sapiens
APPQHLIRV

SEQ ID NO: 60735 - protein, 9 aa, Homo Sapiens
HLIRVEGNL

SEQ ID NO: 60736 - protein, 9 aa, Homo Sapiens
LIRVEGNLR

SEQ ID NO: 60737 - protein, 9 aa, Homo Sapiens
IRVEGNLRV

SEQ ID NO: 60738 - protein, 9 aa, Homo Sapiens
VEGNLRVEY

SEQ ID NO: 60739 - protein, 9 aa, Homo Sapiens
EYLDDRNTF

SEQ ID NO: 60740 - protein, 9 aa, Homo Sapiens
YLDDRNTFR

SEQ ID NO: 60741 - protein, 9 aa, Homo Sapiens
DRNTFRHSV

SEQ ID NO: 60742 - protein, 9 aa, Homo Sapiens
NTFRHSVVV

SEQ ID NO: 60743 - protein, 9 aa, Homo Sapiens
FRHSVVVPY

SEQ ID NO: 60744 - protein, 9 aa, Homo Sapiens
VVPYEPPEV

SEQ ID NO: 60745 - protein, 9 aa, Homo Sapiens
VPYEPPEVG

SEQ ID NO: 60746 - protein, 9 aa, Homo Sapiens
EPPEVGSDC

SEQ ID NO: 60747 - protein, 9 aa, Homo Sapiens
EVGSDCTTI

SEQ ID NO: 60748 - protein, 9 aa, Homo Sapiens
GSDCTTIHY

SEQ ID NO: 60749 - protein, 9 aa, Homo Sapiens
CTTIHYNYM

SEQ ID NO: 60750 - protein, 9 aa, Homo Sapiens
NYMCNSSCM

SEQ ID NO: 60751 - protein, 9 aa, Homo Sapiens
SSCMGGMNR

SEQ ID NO: 60752 - protein, 9 aa, Homo Sapiens
GMNRRPILT

SEQ ID NO: 60753 - protein, 9 aa, Homo Sapiens
RPILTIITL

SEQ ID NO: 60754 - protein, 9 aa, Homo Sapiens
TLEDSSGNL

SEQ ID NO: 60755 - protein, 9 aa, Homo Sapiens
LEDSSGNLL

SEQ ID NO: 60756 - protein, 9 aa, Homo Sapiens
DSSGNLLGR

SEQ ID NO: 60757 - protein, 9 aa, Homo Sapiens
LLGRNSFEV

SEQ ID NO: 60758 - protein, 9 aa, Homo Sapiens
LGRNSFEVR

SEQ ID NO: 60759 - protein, 9 aa, Homo Sapiens
NSFEVRVCA

SEQ ID NO: 60760 - protein, 9 aa, Homo Sapiens
CACPGRDRR

SEQ ID NO: 60761 - protein, 9 aa, Homo Sapiens
RTEEENLRK

SEQ ID NO: 60762 - protein, 9 aa, Homo Sapiens
ELPPGSTKR

SEQ ID NO: 60763 - protein, 9 aa, Homo Sapiens
LPPGSTKRA

SEQ ID NO: 60764 - protein, 9 aa, Homo Sapiens
PPGSTKRAL

SEQ ID NO: 60765 - protein, 9 aa, Homo Sapiens
NTSSSPQPK

SEQ ID NO: 60766 - protein, 9 aa, Homo Sapiens
TSSSPQPKK

SEQ ID NO: 60767 - protein, 9 aa, Homo Sapiens
SSSPQPKKK

SEQ ID NO: 60768 - protein, 9 aa, Homo Sapiens
SPQPKKKPL

SEQ ID NO: 60769 - protein, 9 aa, Homo Sapiens
PLDGEYFTL

SEQ ID NO: 60770 - protein, 9 aa, Homo Sapiens
YFTLQIRGR

SEQ ID NO: 60771 - protein, 9 aa, Homo Sapiens
TLQIRGRER

SEQ ID NO: 60772 - protein, 9 aa, Homo Sapiens
LQIRGRERF

SEQ ID NO: 60773 - protein, 9 aa, Homo Sapiens
ERFEMFREL

SEQ ID NO: 60774 - protein, 9 aa, Homo Sapiens
EMFRELNEA

SEQ ID NO: 60775 - protein, 9 aa, Homo Sapiens
MFRELNEAL

SEQ ID NO: 60776 - protein, 9 aa, Homo Sapiens
RELNEALEL

SEQ ID NO: 60777 - protein, 9 aa, Homo Sapiens
ELNEALELK

SEQ ID NO: 60778 - protein, 9 aa, Homo Sapiens
ALELKDAQA

SEQ ID NO: 60779 - protein, 9 aa, Homo Sapiens
ELKDAQAGK

SEQ ID NO: 60780 - protein, 9 aa, Homo Sapiens
RAHSSHLKS

SEQ ID NO: 60781 - protein, 9 aa, Homo Sapiens
HSSHLKSKK

SEQ ID NO: 60782 - protein, 9 aa, Homo Sapiens
KGQSTSRHK

SEQ ID NO: 60783 - protein, 9 aa, Homo Sapiens
GQSTSRHKK

SEQ ID NO: 60784 - protein, 9 aa, Homo Sapiens
STSRHKKLM

SEQ ID NO: 60785 - protein, 9 aa, Homo Sapiens
SRHKKLMFK

SEQ ID NO: 60786 - protein, 9 aa, Homo Sapiens
KLMFKTEGP

SEQ ID NO: 60787 - protein, 10 aa, Homo Sapiens
MEEPQSDPSV

SEQ ID NO: 60788 - protein, 10 aa, Homo Sapiens
VEPPLSQETF

SEQ ID NO: 60789 - protein, 10 aa, Homo Sapiens
PLSQETFSDL

SEQ ID NO: 60790 - protein, 10 aa, Homo Sapiens
LSQETFSDLW

SEQ ID NO: 60791 - protein, 10 aa, Homo Sapiens
SQETFSDLWK

SEQ ID NO: 60792 - protein, 10 aa, Homo Sapiens
QETFSDLWKL

SEQ ID NO: 60793 - protein, 10 aa, Homo Sapiens
ETFSDLWKLL

SEQ ID NO: 60794 - protein, 10 aa, Homo Sapiens
KLLPENNVLS

SEQ ID NO: 60795 - protein, 10 aa, Homo Sapiens
LLPENNVLSP

SEQ ID NO: 60796 - protein, 10 aa, Homo Sapiens
LPENNVLSPL

SEQ ID NO: 60797 - protein, 10 aa, Homo Sapiens
NVLSPLPSQA

SEQ ID NO: 60798 - protein, 10 aa, Homo Sapiens
VLSPLPSQAM

SEQ ID NO: 60799 - protein, 10 aa, Homo Sapiens
LPSQAMDDLM

SEQ ID NO: 60800 - protein, 10 aa, Homo Sapiens
AMDDLMLSPD

SEQ ID NO: 60801 - protein, 10 aa, Homo Sapiens
LMLSPDDIEQ

SEQ ID NO: 60802 - protein, 10 aa, Homo Sapiens
MLSPDDIEQW

SEQ ID NO: 60803 - protein, 10 aa, Homo Sapiens
FTEDPGPDEA

SEQ ID NO: 60804 - protein, 10 aa, Homo Sapiens
DPGPDEAPRM

SEQ ID NO: 60805 - protein, 10 aa, Homo Sapiens
APRMPEAAPR

SEQ ID NO: 60806 - protein, 10 aa, Homo Sapiens
RMPEAAPRVA

SEQ ID NO: 60807 - protein, 10 aa, Homo Sapiens
MPEAAPRVAP

SEQ ID NO: 60808 - protein, 10 aa, Homo Sapiens
APRVAPAPAA

SEQ ID NO: 60809 - protein, 10 aa, Homo Sapiens
RVAPAPAAPT

SEQ ID NO: 60810 - protein, 10 aa, Homo Sapiens
APAPAAPTPA

SEQ ID NO: 60811 - protein, 10 aa, Homo Sapiens
APAAPTPAAP

SEQ ID NO: 60812 - protein, 10 aa, Homo Sapiens
APTPAAPAPA

SEQ ID NO: 60813 - protein, 10 aa, Homo Sapiens
TPAAPAPAPS

SEQ ID NO: 60814 - protein, 10 aa, Homo Sapiens
PAAPAPAPSW

SEQ ID NO: 60815 - protein, 10 aa, Homo Sapiens
APAPAPSWPL

SEQ ID NO: 60816 - protein, 10 aa, Homo Sapiens
APAPSWPLSS

SEQ ID NO: 60817 - protein, 10 aa, Homo Sapiens
APSWPLSSSV

SEQ ID NO: 60818 - protein, 10 aa, Homo Sapiens
WPLSSSVPSQ

SEQ ID NO: 60819 - protein, 10 aa, Homo Sapiens
PLSSSVPSQK

SEQ ID NO: 60820 - protein, 10 aa, Homo Sapiens
SSSVPSQKTY

SEQ ID NO: 60821 - protein, 10 aa, Homo Sapiens
KTYQGSYGFR

SEQ ID NO: 60822 - protein, 10 aa, Homo Sapiens
TYQGSYGFRL

SEQ ID NO: 60823 - protein, 10 aa, Homo Sapiens
GSYGFRLGFL

SEQ ID NO: 60824 - protein, 10 aa, Homo Sapiens
RLGFLHSGTA

SEQ ID NO: 60825 - protein, 10 aa, Homo Sapiens
LGFLHSGTAK

SEQ ID NO: 60826 - protein, 10 aa, Homo Sapiens
FLHSGTAKSV

SEQ ID NO: 60827 - protein, 10 aa, Homo Sapiens
GTAKSVTCTY

SEQ ID NO: 60828 - protein, 10 aa, Homo Sapiens
SVTCTYSPAL

SEQ ID NO: 60829 - protein, 10 aa, Homo Sapiens
TYSPALNKMF

SEQ ID NO: 60830 - protein, 10 aa, Homo Sapiens
ALNKMFCQLA

SEQ ID NO: 60831 - protein, 10 aa, Homo Sapiens
LNKMFCQLAK

SEQ ID NO: 60832 - protein, 10 aa, Homo Sapiens
KMFCQLAKTC

SEQ ID NO: 60833 - protein, 10 aa, Homo Sapiens
FCQLAKTCPV

SEQ ID NO: 60834 - protein, 10 aa, Homo Sapiens
QLAKTCPVQL

SEQ ID NO: 60835 - protein, 10 aa, Homo Sapiens
LAKTCPVQLW

SEQ ID NO: 60836 - protein, 10 aa, Homo Sapiens
CPVQLWVDST

SEQ ID NO: 60837 - protein, 10 aa, Homo Sapiens
VQLWVDSTPP

SEQ ID NO: 60838 - protein, 10 aa, Homo Sapiens
WVDSTPPPGT

SEQ ID NO: 60839 - protein, 10 aa, Homo Sapiens
DSTPPPGTRV

SEQ ID NO: 60840 - protein, 10 aa, Homo Sapiens
STPPPGTRVR

SEQ ID NO: 60841 - protein, 10 aa, Homo Sapiens
PPPGTRVRAM

SEQ ID NO: 60842 - protein, 10 aa, Homo Sapiens
GTRVRAMAIY

SEQ ID NO: 60843 - protein, 10 aa, Homo Sapiens
TRVRAMAIYK

SEQ ID NO: 60844 - protein, 10 aa, Homo Sapiens
RVRAMAIYKQ

SEQ ID NO: 60845 - protein, 10 aa, Homo Sapiens
MAIYKQSQHM

SEQ ID NO: 60846 - protein, 10 aa, Homo Sapiens
YKQSQHMTEV

SEQ ID NO: 60847 - protein, 10 aa, Homo Sapiens
KQSQHMTEVV

SEQ ID NO: 60848 - protein, 10 aa, Homo Sapiens
QSQHMTEVVR

SEQ ID NO: 60849 - protein, 10 aa, Homo Sapiens
SQHMTEVVRR

SEQ ID NO: 60850 - protein, 10 aa, Homo Sapiens
EVVRRCPHHE

SEQ ID NO: 60851 - protein, 10 aa, Homo Sapiens
VVRRCPHHER

SEQ ID NO: 60852 - protein, 10 aa, Homo Sapiens
HERCSDSDGL

SEQ ID NO: 60853 - protein, 10 aa, Homo Sapiens
DGLAPPQHLI

SEQ ID NO: 60854 - protein, 10 aa, Homo Sapiens
LAPPQHLIRV

SEQ ID NO: 60855 - protein, 10 aa, Homo Sapiens
HLIRVEGNLR

SEQ ID NO: 60856 - protein, 10 aa, Homo Sapiens
LIRVEGNLRV

SEQ ID NO: 60857 - protein, 10 aa, Homo Sapiens
RVEGNLRVEY

SEQ ID NO: 60858 - protein, 10 aa, Homo Sapiens
VEYLDDRNTF

SEQ ID NO: 60859 - protein, 10 aa, Homo Sapiens
EYLDDRNTFR

SEQ ID NO: 60860 - protein, 10 aa, Homo Sapiens
YLDDRNTFRH

SEQ ID NO: 60861 - protein, 10 aa, Homo Sapiens
TFRHSVVVPY

SEQ ID NO: 60862 - protein, 10 aa, Homo Sapiens
VVVPYEPPEV

SEQ ID NO: 60863 - protein, 10 aa, Homo Sapiens
VPYEPPEVGS

SEQ ID NO: 60864 - protein, 10 aa, Homo Sapiens
PEVGSDCTTI

SEQ ID NO: 60865 - protein, 10 aa, Homo Sapiens
NSSCMGGMNR

SEQ ID NO: 60866 - protein, 10 aa, Homo Sapiens
SSCMGGMNRR

SEQ ID NO: 60867 - protein, 10 aa, Homo Sapiens
CMGGMNRRPI

SEQ ID NO: 60868 - protein, 10 aa, Homo Sapiens
GMNRRPILTI

SEQ ID NO: 60869 - protein, 10 aa, Homo Sapiens
RRPILTIITL

SEQ ID NO: 60870 - protein, 10 aa, Homo Sapiens
ITLEDSSGNL

SEQ ID NO: 60871 - protein, 10 aa, Homo Sapiens
TLEDSSGNLL

SEQ ID NO: 60872 - protein, 10 aa, Homo Sapiens
NLLGRNSFEV

SEQ ID NO: 60873 - protein, 10 aa, Homo Sapiens
LLGRNSFEVR

SEQ ID NO: 60874 - protein, 10 aa, Homo Sapiens
EVRVCACPGR

SEQ ID NO: 60875 - protein, 10 aa, Homo Sapiens
RVCACPGRDR

SEQ ID NO: 60876 - protein, 10 aa, Homo Sapiens
RRTEEENLRK

SEQ ID NO: 60877 - protein, 10 aa, Homo Sapiens
RTEEENLRKK

SEQ ID NO: 60878 - protein, 10 aa, Homo Sapiens
ELPPGSTKRA

SEQ ID NO: 60879 - protein, 10 aa, Homo Sapiens
LPPGSTKRAL

SEQ ID NO: 60880 - protein, 10 aa, Homo Sapiens
LPNNTSSSPQ

SEQ ID NO: 60881 - protein, 10 aa, Homo Sapiens
NTSSSPQPKK

SEQ ID NO: 60882 - protein, 10 aa, Homo Sapiens
TSSSPQPKKK

SEQ ID NO: 60883 - protein, 10 aa, Homo Sapiens
KPLDGEYFTL

SEQ ID NO: 60884 - protein, 10 aa, Homo Sapiens
PLDGEYFTLQ

SEQ ID NO: 60885 - protein, 10 aa, Homo Sapiens
EYFTLQIRGR

SEQ ID NO: 60886 - protein, 10 aa, Homo Sapiens
FTLQIRGRER

SEQ ID NO: 60887 - protein, 10 aa, Homo Sapiens
QIRGRERFEM

SEQ ID NO: 60888 - protein, 10 aa, Homo Sapiens
RGRERFEMFR

SEQ ID NO: 60889 - protein, 10 aa, Homo Sapiens
RERFEMFREL

SEQ ID NO: 60890 - protein, 10 aa, Homo Sapiens
FEMFRELNEA

SEQ ID NO: 60891 - protein, 10 aa, Homo Sapiens
EMFRELNEAL

SEQ ID NO: 60892 - protein, 10 aa, Homo Sapiens
FRELNEALEL

SEQ ID NO: 60893 - protein, 10 aa, Homo Sapiens
EALELKDAQA

SEQ ID NO: 60894 - protein, 10 aa, Homo Sapiens
GSRAHSSHLK

SEQ ID NO: 60895 - protein, 10 aa, Homo Sapiens
RAHSSHLKSK

SEQ ID NO: 60896 - protein, 10 aa, Homo Sapiens
KSKKGQSTSR

SEQ ID NO: 60897 - protein, 10 aa, Homo Sapiens
KKGQSTSRHK

SEQ ID NO: 60898 - protein, 10 aa, Homo Sapiens
KGQSTSRHKK

SEQ ID NO: 60899 - protein, 10 aa, Homo Sapiens
STSRHKKLMF

SEQ ID NO: 60900 - protein, 10 aa, Homo Sapiens
TSRHKKLMFK

SEQ ID NO: 60901 - protein, 11 aa, Homo Sapiens
SVEPPLSQETF

SEQ ID NO: 60902 - protein, 11 aa, Homo Sapiens
LSQETFSDLWK

SEQ ID NO: 60903 - protein, 11 aa, Homo Sapiens
SQETFSDLWKL

SEQ ID NO: 60904 - protein, 11 aa, Homo Sapiens
QETFSDLWKLL

SEQ ID NO: 60905 - protein, 11 aa, Homo Sapiens
DLWKLLPENNV

SEQ ID NO: 60906 - protein, 11 aa, Homo Sapiens
KLLPENNVLSP

SEQ ID NO: 60907 - protein, 11 aa, Homo Sapiens
LLPENNVLSPL

SEQ ID NO: 60908 - protein, 11 aa, Homo Sapiens
NVLSPLPSQAM

SEQ ID NO: 60909 - protein, 11 aa, Homo Sapiens
SPLPSQAMDDL

SEQ ID NO: 60910 - protein, 11 aa, Homo Sapiens
LPSQAMDDLML

SEQ ID NO: 60911 - protein, 11 aa, Homo Sapiens
LMLSPDDIEQW

SEQ ID NO: 60912 - protein, 11 aa, Homo Sapiens
MLSPDDIEQWF

SEQ ID NO: 60913 - protein, 11 aa, Homo Sapiens
EAPRMPEAAPR

SEQ ID NO: 60914 - protein, 11 aa, Homo Sapiens
APRMPEAAPRV

SEQ ID NO: 60915 - protein, 11 aa, Homo Sapiens
MPEAAPRVAPA

SEQ ID NO: 60916 - protein, 11 aa, Homo Sapiens
EAAPRVAPAPA

SEQ ID NO: 60917 - protein, 11 aa, Homo Sapiens
APRVAPAPAAP

SEQ ID NO: 60918 - protein, 11 aa, Homo Sapiens
APAPAAPTPAA

SEQ ID NO: 60919 - protein, 11 aa, Homo Sapiens
APAAPTPAAPA

SEQ ID NO: 60920 - protein, 11 aa, Homo Sapiens
TPAAPAPAPSW

SEQ ID NO: 60921 - protein, 11 aa, Homo Sapiens
AAPAPAPSWPL

SEQ ID NO: 60922 - protein, 11 aa, Homo Sapiens
APAPSWPLSSS

SEQ ID NO: 60923 - protein, 11 aa, Homo Sapiens
PAPSWPLSSSV

SEQ ID NO: 60924 - protein, 11 aa, Homo Sapiens
APSWPLSSSVP

SEQ ID NO: 60925 - protein, 11 aa, Homo Sapiens
LSSSVPSQKTY

SEQ ID NO: 60926 - protein, 11 aa, Homo Sapiens
VPSQKTYQGSY

SEQ ID NO: 60927 - protein, 11 aa, Homo Sapiens
SQKTYQGSYGF

SEQ ID NO: 60928 - protein, 11 aa, Homo Sapiens
KTYQGSYGFRL

SEQ ID NO: 60929 - protein, 11 aa, Homo Sapiens
YQGSYGFRLGF

SEQ ID NO: 60930 - protein, 11 aa, Homo Sapiens
GSYGFRLGFLH

SEQ ID NO: 60931 - protein, 11 aa, Homo Sapiens
RLGFLHSGTAK

SEQ ID NO: 60932 - protein, 11 aa, Homo Sapiens
FLHSGTAKSVT

SEQ ID NO: 60933 - protein, 11 aa, Homo Sapiens
VTCTYSPALNK

SEQ ID NO: 60934 - protein, 11 aa, Homo Sapiens
CTYSPALNKMF

SEQ ID NO: 60935 - protein, 11 aa, Homo Sapiens
SPALNKMFCQL

SEQ ID NO: 60936 - protein, 11 aa, Homo Sapiens
ALNKMFCQLAK

SEQ ID NO: 60937 - protein, 11 aa, Homo Sapiens
CQLAKTCPVQL

SEQ ID NO: 60938 - protein, 11 aa, Homo Sapiens
QLAKTCPVQLW

SEQ ID NO: 60939 - protein, 11 aa, Homo Sapiens
LAKTCPVQLWV

SEQ ID NO: 60940 - protein, 11 aa, Homo Sapiens
VQLWVDSTPPP

SEQ ID NO: 60941 - protein, 11 aa, Homo Sapiens
DSTPPPGTRVR

SEQ ID NO: 60942 - protein, 11 aa, Homo Sapiens
STPPPGTRVRA

SEQ ID NO: 60943 - protein, 11 aa, Homo Sapiens
TPPPGTRVRAM

SEQ ID NO: 60944 - protein, 11 aa, Homo Sapiens
PPGTRVRAMAI

SEQ ID NO: 60945 - protein, 11 aa, Homo Sapiens
GTRVRAMAIYK

SEQ ID NO: 60946 - protein, 11 aa, Homo Sapiens
AMAIYKQSQHM

SEQ ID NO: 60947 - protein, 11 aa, Homo Sapiens
KQSQHMTEVVR

SEQ ID NO: 60948 - protein, 11 aa, Homo Sapiens
QSQHMTEVVRR

SEQ ID NO: 60949 - protein, 11 aa, Homo Sapiens
EVVRRCPHHER

SEQ ID NO: 60950 - protein, 11 aa, Homo Sapiens
HHERCSDSDGL

SEQ ID NO: 60951 - protein, 11 aa, Homo Sapiens
GLAPPQHLIRV

SEQ ID NO: 60952 - protein, 11 aa, Homo Sapiens
HLIRVEGNLRV

SEQ ID NO: 60953 - protein, 11 aa, Homo Sapiens
IRVEGNLRVEY

SEQ ID NO: 60954 - protein, 11 aa, Homo Sapiens
RVEYLDDRNTF

SEQ ID NO: 60955 - protein, 11 aa, Homo Sapiens
YLDDRNTFRHS

SEQ ID NO: 60956 - protein, 11 aa, Homo Sapiens
LDDRNTFRHSV

SEQ ID NO: 60957 - protein, 11 aa, Homo Sapiens
NTFRHSVVVPY

SEQ ID NO: 60958 - protein, 11 aa, Homo Sapiens
SVVVPYEPPEV

SEQ ID NO: 60959 - protein, 11 aa, Homo Sapiens
EPPEVGSDCTT

SEQ ID NO: 60960 - protein, 11 aa, Homo Sapiens
EVGSDCTTIHY

SEQ ID NO: 60961 - protein, 11 aa, Homo Sapiens
GSDCTTIHYNY

SEQ ID NO: 60962 - protein, 11 aa, Homo Sapiens
TTIHYNYMCNS

SEQ ID NO: 60963 - protein, 11 aa, Homo Sapiens
YMCNSSCMGGM

SEQ ID NO: 60964 - protein, 11 aa, Homo Sapiens
NSSCMGGMNRR

SEQ ID NO: 60965 - protein, 11 aa, Homo Sapiens
SCMGGMNRRPI

SEQ ID NO: 60966 - protein, 11 aa, Homo Sapiens
CMGGMNRRPIL

SEQ ID NO: 60967 - protein, 11 aa, Homo Sapiens
GMNRRPILTII

SEQ ID NO: 60968 - protein, 11 aa, Homo Sapiens
ITLEDSSGNLL

SEQ ID NO: 60969 - protein, 11 aa, Homo Sapiens
NLLGRNSFEVR

SEQ ID NO: 60970 - protein, 11 aa, Homo Sapiens
LLGRNSFEVRV

SEQ ID NO: 60971 - protein, 11 aa, Homo Sapiens
RVCACPGRDRR

SEQ ID NO: 60972 - protein, 11 aa, Homo Sapiens
RRTEEENLRKK

SEQ ID NO: 60973 - protein, 11 aa, Homo Sapiens
ELPPGSTKRAL

SEQ ID NO: 60974 - protein, 11 aa, Homo Sapiens
ALPNNTSSSPQ

SEQ ID NO: 60975 - protein, 11 aa, Homo Sapiens
NTSSSPQPKKK

SEQ ID NO: 60976 - protein, 11 aa, Homo Sapiens
PLDGEYFTLQI

SEQ ID NO: 60977 - protein, 11 aa, Homo Sapiens
YFTLQIRGRER

SEQ ID NO: 60978 - protein, 11 aa, Homo Sapiens
FTLQIRGRERF

SEQ ID NO: 60979 - protein, 11 aa, Homo Sapiens
LQIRGRERFEM

SEQ ID NO: 60980 - protein, 11 aa, Homo Sapiens
QIRGRERFEMF

SEQ ID NO: 60981 - protein, 11 aa, Homo Sapiens
FEMFRELNEAL

SEQ ID NO: 60982 - protein, 11 aa, Homo Sapiens
ELNEALELKDA

SEQ ID NO: 60983 - protein, 11 aa, Homo Sapiens
GGSRAHSSHLK

SEQ ID NO: 60984 - protein, 11 aa, Homo Sapiens
RAHSSHLKSKK

SEQ ID NO: 60985 - protein, 11 aa, Homo Sapiens
SKKGQSTSRHK

SEQ ID NO: 60986 - protein, 11 aa, Homo Sapiens
STSRHKKLMFK

SEQ ID NO: 60987 - protein, 13 aa, Homo Sapiens
MEEPQSDPSVEPP

SEQ ID NO: 60988 - protein, 13 aa, Homo Sapiens
EEPQSDPSVEPPL

SEQ ID NO: 60989 - protein, 13 aa, Homo Sapiens
EPQSDPSVEPPLS

SEQ ID NO: 60990 - protein, 13 aa, Homo Sapiens
PQSDPSVEPPLSQ

SEQ ID NO: 60991 - protein, 13 aa, Homo Sapiens
QSDPSVEPPLSQE

SEQ ID NO: 60992 - protein, 13 aa, Homo Sapiens
SDPSVEPPLSQET

SEQ ID NO: 60993 - protein, 13 aa, Homo Sapiens
DPSVEPPLSQETF

SEQ ID NO: 60994 - protein, 13 aa, Homo Sapiens
PSVEPPLSQETFS

SEQ ID NO: 60995 - protein, 13 aa, Homo Sapiens
SVEPPLSQETFSD

SEQ ID NO: 60996 - protein, 13 aa, Homo Sapiens
VEPPLSQETFSDL

SEQ ID NO: 60997 - protein, 13 aa, Homo Sapiens
EPPLSQETFSDLW

SEQ ID NO: 60998 - protein, 13 aa, Homo Sapiens
PPLSQETFSDLWK

SEQ ID NO: 60999 - protein, 13 aa, Homo Sapiens
PLSQETFSDLWKL

SEQ ID NO: 61000 - protein, 13 aa, Homo Sapiens
LSQETFSDLWKLL

SEQ ID NO: 61001 - protein, 13 aa, Homo Sapiens
SQETFSDLWKLLP

SEQ ID NO: 61002 - protein, 13 aa, Homo Sapiens
QETFSDLWKLLPE

SEQ ID NO: 61003 - protein, 13 aa, Homo Sapiens
ETFSDLWKLLPEN

SEQ ID NO: 61004 - protein, 13 aa, Homo Sapiens
TFSDLWKLLPENN

SEQ ID NO: 61005 - protein, 13 aa, Homo Sapiens
FSDLWKLLPENNV

SEQ ID NO: 61006 - protein, 13 aa, Homo Sapiens
SDLWKLLPENNVL

SEQ ID NO: 61007 - protein, 13 aa, Homo Sapiens
DLWKLLPENNVLS

SEQ ID NO: 61008 - protein, 13 aa, Homo Sapiens
LWKLLPENNVLSP

SEQ ID NO: 61009 - protein, 13 aa, Homo Sapiens
WKLLPENNVLSPL

SEQ ID NO: 61010 - protein, 13 aa, Homo Sapiens
KLLPENNVLSPLP

SEQ ID NO: 61011 - protein, 13 aa, Homo Sapiens
LLPENNVLSPLPS

SEQ ID NO: 61012 - protein, 13 aa, Homo Sapiens
LPENNVLSPLPSQ

SEQ ID NO: 61013 - protein, 13 aa, Homo Sapiens
PENNVLSPLPSQA

SEQ ID NO: 61014 - protein, 13 aa, Homo Sapiens
ENNVLSPLPSQAM

SEQ ID NO: 61015 - protein, 13 aa, Homo Sapiens
NNVLSPLPSQAMD

SEQ ID NO: 61016 - protein, 13 aa, Homo Sapiens
NVLSPLPSQAMDD

SEQ ID NO: 61017 - protein, 13 aa, Homo Sapiens
VLSPLPSQAMDDL

SEQ ID NO: 61018 - protein, 13 aa, Homo Sapiens
LSPLPSQAMDDLM

SEQ ID NO: 61019 - protein, 13 aa, Homo Sapiens
SPLPSQAMDDLML

SEQ ID NO: 61020 - protein, 13 aa, Homo Sapiens
PLPSQAMDDLMLS

SEQ ID NO: 61021 - protein, 13 aa, Homo Sapiens
LPSQAMDDLMLSP

SEQ ID NO: 61022 - protein, 13 aa, Homo Sapiens
PSQAMDDLMLSPD

SEQ ID NO: 61023 - protein, 13 aa, Homo Sapiens
SQAMDDLMLSPDD

SEQ ID NO: 61024 - protein, 13 aa, Homo Sapiens
QAMDDLMLSPDDI

SEQ ID NO: 61025 - protein, 13 aa, Homo Sapiens
AMDDLMLSPDDIE

SEQ ID NO: 61026 - protein, 13 aa, Homo Sapiens
MDDLMLSPDDIEQ

SEQ ID NO: 61027 - protein, 13 aa, Homo Sapiens
DDLMLSPDDIEQW

SEQ ID NO: 61028 - protein, 13 aa, Homo Sapiens
DLMLSPDDIEQWF

SEQ ID NO: 61029 - protein, 13 aa, Homo Sapiens
LMLSPDDIEQWFT

SEQ ID NO: 61030 - protein, 13 aa, Homo Sapiens
MLSPDDIEQWFTE

SEQ ID NO: 61031 - protein, 13 aa, Homo Sapiens
LSPDDIEQWFTED

SEQ ID NO: 61032 - protein, 13 aa, Homo Sapiens
SPDDIEQWFTEDP

SEQ ID NO: 61033 - protein, 13 aa, Homo Sapiens
PDDIEQWFTEDPG

SEQ ID NO: 61034 - protein, 13 aa, Homo Sapiens
DDIEQWFTEDPGP

SEQ ID NO: 61035 - protein, 13 aa, Homo Sapiens
DIEQWFTEDPGPD

SEQ ID NO: 61036 - protein, 13 aa, Homo Sapiens
IEQWFTEDPGPDE

SEQ ID NO: 61037 - protein, 13 aa, Homo Sapiens
EQWFTEDPGPDEA

SEQ ID NO: 61038 - protein, 13 aa, Homo Sapiens
QWFTEDPGPDEAP

SEQ ID NO: 61039 - protein, 13 aa, Homo Sapiens
WFTEDPGPDEAPR

SEQ ID NO: 61040 - protein, 13 aa, Homo Sapiens
FTEDPGPDEAPRM

SEQ ID NO: 61041 - protein, 13 aa, Homo Sapiens
TEDPGPDEAPRMP

SEQ ID NO: 61042 - protein, 13 aa, Homo Sapiens
EDPGPDEAPRMPE

SEQ ID NO: 61043 - protein, 13 aa, Homo Sapiens
DPGPDEAPRMPEA

SEQ ID NO: 61044 - protein, 13 aa, Homo Sapiens
PGPDEAPRMPEAA

SEQ ID NO: 61045 - protein, 13 aa, Homo Sapiens
GPDEAPRMPEAAP

SEQ ID NO: 61046 - protein, 13 aa, Homo Sapiens
PDEAPRMPEAAPR

SEQ ID NO: 61047 - protein, 13 aa, Homo Sapiens
DEAPRMPEAAPRV

SEQ ID NO: 61048 - protein, 13 aa, Homo Sapiens
EAPRMPEAAPRVA

SEQ ID NO: 61049 - protein, 13 aa, Homo Sapiens
APRMPEAAPRVAP

SEQ ID NO: 61050 - protein, 13 aa, Homo Sapiens
PRMPEAAPRVAPA

SEQ ID NO: 61051 - protein, 13 aa, Homo Sapiens
RMPEAAPRVAPAP

SEQ ID NO: 61052 - protein, 13 aa, Homo Sapiens
MPEAAPRVAPAPA

SEQ ID NO: 61053 - protein, 13 aa, Homo Sapiens
PEAAPRVAPAPAA

SEQ ID NO: 61054 - protein, 13 aa, Homo Sapiens
EAAPRVAPAPAAP

SEQ ID NO: 61055 - protein, 13 aa, Homo Sapiens
AAPRVAPAPAAPT

SEQ ID NO: 61056 - protein, 13 aa, Homo Sapiens
APRVAPAPAAPTP

SEQ ID NO: 61057 - protein, 13 aa, Homo Sapiens
PRVAPAPAAPTPA

SEQ ID NO: 61058 - protein, 13 aa, Homo Sapiens
RVAPAPAAPTPAA

SEQ ID NO: 61059 - protein, 13 aa, Homo Sapiens
VAPAPAAPTPAAP

SEQ ID NO: 61060 - protein, 13 aa, Homo Sapiens
APAPAAPTPAAPA

SEQ ID NO: 61061 - protein, 13 aa, Homo Sapiens
PAPAAPTPAAPAP

SEQ ID NO: 61062 - protein, 13 aa, Homo Sapiens
APAAPTPAAPAPA

SEQ ID NO: 61063 - protein, 13 aa, Homo Sapiens
PAAPTPAAPAPAP

SEQ ID NO: 61064 - protein, 13 aa, Homo Sapiens
AAPTPAAPAPAPS

SEQ ID NO: 61065 - protein, 13 aa, Homo Sapiens
APTPAAPAPAPSW

SEQ ID NO: 61066 - protein, 13 aa, Homo Sapiens
PTPAAPAPAPSWP

SEQ ID NO: 61067 - protein, 13 aa, Homo Sapiens
TPAAPAPAPSWPL

SEQ ID NO: 61068 - protein, 13 aa, Homo Sapiens
PAAPAPAPSWPLS

SEQ ID NO: 61069 - protein, 13 aa, Homo Sapiens
AAPAPAPSWPLSS

SEQ ID NO: 61070 - protein, 13 aa, Homo Sapiens
APAPAPSWPLSSS

SEQ ID NO: 61071 - protein, 13 aa, Homo Sapiens
PAPAPSWPLSSSV

SEQ ID NO: 61072 - protein, 13 aa, Homo Sapiens
APAPSWPLSSSVP

SEQ ID NO: 61073 - protein, 13 aa, Homo Sapiens
PAPSWPLSSSVPS

SEQ ID NO: 61074 - protein, 13 aa, Homo Sapiens
APSWPLSSSVPSQ

SEQ ID NO: 61075 - protein, 13 aa, Homo Sapiens
PSWPLSSSVPSQK

SEQ ID NO: 61076 - protein, 13 aa, Homo Sapiens
SWPLSSSVPSQKT

SEQ ID NO: 61077 - protein, 13 aa, Homo Sapiens
WPLSSSVPSQKTY

SEQ ID NO: 61078 - protein, 13 aa, Homo Sapiens
PLSSSVPSQKTYQ

SEQ ID NO: 61079 - protein, 13 aa, Homo Sapiens
LSSSVPSQKTYQG

SEQ ID NO: 61080 - protein, 13 aa, Homo Sapiens
SSSVPSQKTYQGS

SEQ ID NO: 61081 - protein, 13 aa, Homo Sapiens
SSVPSQKTYQGSY

SEQ ID NO: 61082 - protein, 13 aa, Homo Sapiens
SVPSQKTYQGSYG

SEQ ID NO: 61083 - protein, 13 aa, Homo Sapiens
VPSQKTYQGSYGF

SEQ ID NO: 61084 - protein, 13 aa, Homo Sapiens
PSQKTYQGSYGFR

SEQ ID NO: 61085 - protein, 13 aa, Homo Sapiens
SQKTYQGSYGFRL

SEQ ID NO: 61086 - protein, 13 aa, Homo Sapiens
QKTYQGSYGFRLG

SEQ ID NO: 61087 - protein, 13 aa, Homo Sapiens
KTYQGSYGFRLGF

SEQ ID NO: 61088 - protein, 13 aa, Homo Sapiens
TYQGSYGFRLGFL

SEQ ID NO: 61089 - protein, 13 aa, Homo Sapiens
YQGSYGFRLGFLH

SEQ ID NO: 61090 - protein, 13 aa, Homo Sapiens
QGSYGFRLGFLHS

SEQ ID NO: 61091 - protein, 13 aa, Homo Sapiens
GSYGFRLGFLHSG

SEQ ID NO: 61092 - protein, 13 aa, Homo Sapiens
SYGFRLGFLHSGT

SEQ ID NO: 61093 - protein, 13 aa, Homo Sapiens
YGFRLGFLHSGTA

SEQ ID NO: 61094 - protein, 13 aa, Homo Sapiens
GFRLGFLHSGTAK

SEQ ID NO: 61095 - protein, 13 aa, Homo Sapiens
FRLGFLHSGTAKS

SEQ ID NO: 61096 - protein, 13 aa, Homo Sapiens
RLGFLHSGTAKSV

SEQ ID NO: 61097 - protein, 13 aa, Homo Sapiens
LGFLHSGTAKSVT

SEQ ID NO: 61098 - protein, 13 aa, Homo Sapiens
GFLHSGTAKSVTC

SEQ ID NO: 61099 - protein, 13 aa, Homo Sapiens
FLHSGTAKSVTCT

SEQ ID NO: 61100 - protein, 13 aa, Homo Sapiens
LHSGTAKSVTCTY

SEQ ID NO: 61101 - protein, 13 aa, Homo Sapiens
HSGTAKSVTCTYS

SEQ ID NO: 61102 - protein, 13 aa, Homo Sapiens
SGTAKSVTCTYSP

SEQ ID NO: 61103 - protein, 13 aa, Homo Sapiens
GTAKSVTCTYSPA

SEQ ID NO: 61104 - protein, 13 aa, Homo Sapiens
TAKSVTCTYSPAL

SEQ ID NO: 61105 - protein, 13 aa, Homo Sapiens
AKSVTCTYSPALN

SEQ ID NO: 61106 - protein, 13 aa, Homo Sapiens
KSVTCTYSPALNK

SEQ ID NO: 61107 - protein, 13 aa, Homo Sapiens
SVTCTYSPALNKM

SEQ ID NO: 61108 - protein, 13 aa, Homo Sapiens
VTCTYSPALNKMF

SEQ ID NO: 61109 - protein, 13 aa, Homo Sapiens
TCTYSPALNKMFC

SEQ ID NO: 61110 - protein, 13 aa, Homo Sapiens
CTYSPALNKMFCQ

SEQ ID NO: 61111 - protein, 13 aa, Homo Sapiens
TYSPALNKMFCQL

SEQ ID NO: 61112 - protein, 13 aa, Homo Sapiens
YSPALNKMFCQLA

SEQ ID NO: 61113 - protein, 13 aa, Homo Sapiens
SPALNKMFCQLAK

SEQ ID NO: 61114 - protein, 13 aa, Homo Sapiens
PALNKMFCQLAKT

SEQ ID NO: 61115 - protein, 13 aa, Homo Sapiens
ALNKMFCQLAKTC

SEQ ID NO: 61116 - protein, 13 aa, Homo Sapiens
LNKMFCQLAKTCP

SEQ ID NO: 61117 - protein, 13 aa, Homo Sapiens
NKMFCQLAKTCPV

SEQ ID NO: 61118 - protein, 13 aa, Homo Sapiens
KMFCQLAKTCPVQ

SEQ ID NO: 61119 - protein, 13 aa, Homo Sapiens
MFCQLAKTCPVQL

SEQ ID NO: 61120 - protein, 13 aa, Homo Sapiens
FCQLAKTCPVQLW

SEQ ID NO: 61121 - protein, 13 aa, Homo Sapiens
CQLAKTCPVQLWV

SEQ ID NO: 61122 - protein, 13 aa, Homo Sapiens
QLAKTCPVQLWVD

SEQ ID NO: 61123 - protein, 13 aa, Homo Sapiens
LAKTCPVQLWVDS

SEQ ID NO: 61124 - protein, 13 aa, Homo Sapiens
AKTCPVQLWVDST

SEQ ID NO: 61125 - protein, 13 aa, Homo Sapiens
KTCPVQLWVDSTP

SEQ ID NO: 61126 - protein, 13 aa, Homo Sapiens
TCPVQLWVDSTPP

SEQ ID NO: 61127 - protein, 13 aa, Homo Sapiens
CPVQLWVDSTPPP

SEQ ID NO: 61128 - protein, 13 aa, Homo Sapiens
PVQLWVDSTPPPG

SEQ ID NO: 61129 - protein, 13 aa, Homo Sapiens
VQLWVDSTPPPGT

SEQ ID NO: 61130 - protein, 13 aa, Homo Sapiens
QLWVDSTPPPGTR

SEQ ID NO: 61131 - protein, 13 aa, Homo Sapiens
LWVDSTPPPGTRV

SEQ ID NO: 61132 - protein, 13 aa, Homo Sapiens
WVDSTPPPGTRVR

SEQ ID NO: 61133 - protein, 13 aa, Homo Sapiens
VDSTPPPGTRVRA

SEQ ID NO: 61134 - protein, 13 aa, Homo Sapiens
DSTPPPGTRVRAM

SEQ ID NO: 61135 - protein, 13 aa, Homo Sapiens
STPPPGTRVRAMA

SEQ ID NO: 61136 - protein, 13 aa, Homo Sapiens
TPPPGTRVRAMAI

SEQ ID NO: 61137 - protein, 13 aa, Homo Sapiens
PPPGTRVRAMAIY

SEQ ID NO: 61138 - protein, 13 aa, Homo Sapiens
PPGTRVRAMAIYK

SEQ ID NO: 61139 - protein, 13 aa, Homo Sapiens
PGTRVRAMAIYKQ

SEQ ID NO: 61140 - protein, 13 aa, Homo Sapiens
GTRVRAMAIYKQS

SEQ ID NO: 61141 - protein, 13 aa, Homo Sapiens
TRVRAMAIYKQSQ

SEQ ID NO: 61142 - protein, 13 aa, Homo Sapiens
RVRAMAIYKQSQH

SEQ ID NO: 61143 - protein, 13 aa, Homo Sapiens
VRAMAIYKQSQHM

SEQ ID NO: 61144 - protein, 13 aa, Homo Sapiens
RAMAIYKQSQHMT

SEQ ID NO: 61145 - protein, 13 aa, Homo Sapiens
AMAIYKQSQHMTE

SEQ ID NO: 61146 - protein, 13 aa, Homo Sapiens
MAIYKQSQHMTEV

SEQ ID NO: 61147 - protein, 13 aa, Homo Sapiens
AIYKQSQHMTEVV

SEQ ID NO: 61148 - protein, 13 aa, Homo Sapiens
IYKQSQHMTEVVR

SEQ ID NO: 61149 - protein, 13 aa, Homo Sapiens
YKQSQHMTEVVRR

SEQ ID NO: 61150 - protein, 13 aa, Homo Sapiens
KQSQHMTEVVRRC

SEQ ID NO: 61151 - protein, 13 aa, Homo Sapiens
QSQHMTEVVRRCP

SEQ ID NO: 61152 - protein, 13 aa, Homo Sapiens
SQHMTEVVRRCPH

SEQ ID NO: 61153 - protein, 13 aa, Homo Sapiens
QHMTEVVRRCPHH

SEQ ID NO: 61154 - protein, 13 aa, Homo Sapiens
HMTEVVRRCPHHE

SEQ ID NO: 61155 - protein, 13 aa, Homo Sapiens
MTEVVRRCPHHER

SEQ ID NO: 61156 - protein, 13 aa, Homo Sapiens
TEVVRRCPHHERC

SEQ ID NO: 61157 - protein, 13 aa, Homo Sapiens
EVVRRCPHHERCS

SEQ ID NO: 61158 - protein, 13 aa, Homo Sapiens
VVRRCPHHERCSD

SEQ ID NO: 61159 - protein, 13 aa, Homo Sapiens
VRRCPHHERCSDS

SEQ ID NO: 61160 - protein, 13 aa, Homo Sapiens
RRCPHHERCSDSD

SEQ ID NO: 61161 - protein, 13 aa, Homo Sapiens
RCPHHERCSDSDG

SEQ ID NO: 61162 - protein, 13 aa, Homo Sapiens
CPHHERCSDSDGL

SEQ ID NO: 61163 - protein, 13 aa, Homo Sapiens
PHHERCSDSDGLA

SEQ ID NO: 61164 - protein, 13 aa, Homo Sapiens
HHERCSDSDGLAP

SEQ ID NO: 61165 - protein, 13 aa, Homo Sapiens
HERCSDSDGLAPP

SEQ ID NO: 61166 - protein, 13 aa, Homo Sapiens
ERCSDSDGLAPPQ

SEQ ID NO: 61167 - protein, 13 aa, Homo Sapiens
RCSDSDGLAPPQH

SEQ ID NO: 61168 - protein, 13 aa, Homo Sapiens
CSDSDGLAPPQHL

SEQ ID NO: 61169 - protein, 13 aa, Homo Sapiens
SDSDGLAPPQHLI

SEQ ID NO: 61170 - protein, 13 aa, Homo Sapiens
DSDGLAPPQHLIR

SEQ ID NO: 61171 - protein, 13 aa, Homo Sapiens
SDGLAPPQHLIRV

SEQ ID NO: 61172 - protein, 13 aa, Homo Sapiens
DGLAPPQHLIRVE

SEQ ID NO: 61173 - protein, 13 aa, Homo Sapiens
GLAPPQHLIRVEG

SEQ ID NO: 61174 - protein, 13 aa, Homo Sapiens
LAPPQHLIRVEGN

SEQ ID NO: 61175 - protein, 13 aa, Homo Sapiens
APPQHLIRVEGNL

SEQ ID NO: 61176 - protein, 13 aa, Homo Sapiens
PPQHLIRVEGNLR

SEQ ID NO: 61177 - protein, 13 aa, Homo Sapiens
PQHLIRVEGNLRV

SEQ ID NO: 61178 - protein, 13 aa, Homo Sapiens
QHLIRVEGNLRVE

SEQ ID NO: 61179 - protein, 13 aa, Homo Sapiens
HLIRVEGNLRVEY

SEQ ID NO: 61180 - protein, 13 aa, Homo Sapiens
LIRVEGNLRVEYL

SEQ ID NO: 61181 - protein, 13 aa, Homo Sapiens
IRVEGNLRVEYLD

SEQ ID NO: 61182 - protein, 13 aa, Homo Sapiens
RVEGNLRVEYLDD

SEQ ID NO: 61183 - protein, 13 aa, Homo Sapiens
VEGNLRVEYLDDR

SEQ ID NO: 61184 - protein, 13 aa, Homo Sapiens
EGNLRVEYLDDRN

SEQ ID NO: 61185 - protein, 13 aa, Homo Sapiens
GNLRVEYLDDRNT

SEQ ID NO: 61186 - protein, 13 aa, Homo Sapiens
NLRVEYLDDRNTF

SEQ ID NO: 61187 - protein, 13 aa, Homo Sapiens
LRVEYLDDRNTFR

SEQ ID NO: 61188 - protein, 13 aa, Homo Sapiens
RVEYLDDRNTFRH

SEQ ID NO: 61189 - protein, 13 aa, Homo Sapiens
VEYLDDRNTFRHS

SEQ ID NO: 61190 - protein, 13 aa, Homo Sapiens
EYLDDRNTFRHSV

SEQ ID NO: 61191 - protein, 13 aa, Homo Sapiens
YLDDRNTFRHSVV

SEQ ID NO: 61192 - protein, 13 aa, Homo Sapiens
LDDRNTFRHSVVV

SEQ ID NO: 61193 - protein, 13 aa, Homo Sapiens
DDRNTFRHSVVVP

SEQ ID NO: 61194 - protein, 13 aa, Homo Sapiens
DRNTFRHSVVVPY

SEQ ID NO: 61195 - protein, 13 aa, Homo Sapiens
RNTFRHSVVVPYE

SEQ ID NO: 61196 - protein, 13 aa, Homo Sapiens
NTFRHSVVVPYEP

SEQ ID NO: 61197 - protein, 13 aa, Homo Sapiens
TFRHSVVVPYEPP

SEQ ID NO: 61198 - protein, 13 aa, Homo Sapiens
FRHSVVVPYEPPE

SEQ ID NO: 61199 - protein, 13 aa, Homo Sapiens
RHSVVVPYEPPEV

SEQ ID NO: 61200 - protein, 13 aa, Homo Sapiens
HSVVVPYEPPEVG

SEQ ID NO: 61201 - protein, 13 aa, Homo Sapiens
SVVVPYEPPEVGS

SEQ ID NO: 61202 - protein, 13 aa, Homo Sapiens
VVVPYEPPEVGSD

SEQ ID NO: 61203 - protein, 13 aa, Homo Sapiens
VVPYEPPEVGSDC

SEQ ID NO: 61204 - protein, 13 aa, Homo Sapiens
VPYEPPEVGSDCT

SEQ ID NO: 61205 - protein, 13 aa, Homo Sapiens
PYEPPEVGSDCTT

SEQ ID NO: 61206 - protein, 13 aa, Homo Sapiens
YEPPEVGSDCTTI

SEQ ID NO: 61207 - protein, 13 aa, Homo Sapiens
EPPEVGSDCTTIH

SEQ ID NO: 61208 - protein, 13 aa, Homo Sapiens
PPEVGSDCTTIHY

SEQ ID NO: 61209 - protein, 13 aa, Homo Sapiens
PEVGSDCTTIHYN

SEQ ID NO: 61210 - protein, 13 aa, Homo Sapiens
EVGSDCTTIHYNY

SEQ ID NO: 61211 - protein, 13 aa, Homo Sapiens
VGSDCTTIHYNYM

SEQ ID NO: 61212 - protein, 13 aa, Homo Sapiens
GSDCTTIHYNYMC

SEQ ID NO: 61213 - protein, 13 aa, Homo Sapiens
SDCTTIHYNYMCN

SEQ ID NO: 61214 - protein, 13 aa, Homo Sapiens
DCTTIHYNYMCNS

SEQ ID NO: 61215 - protein, 13 aa, Homo Sapiens
CTTIHYNYMCNSS

SEQ ID NO: 61216 - protein, 13 aa, Homo Sapiens
TTIHYNYMCNSSC

SEQ ID NO: 61217 - protein, 13 aa, Homo Sapiens
TIHYNYMCNSSCM

SEQ ID NO: 61218 - protein, 13 aa, Homo Sapiens
IHYNYMCNSSCMG

SEQ ID NO: 61219 - protein, 13 aa, Homo Sapiens
HYNYMCNSSCMGG

SEQ ID NO: 61220 - protein, 13 aa, Homo Sapiens
YNYMCNSSCMGGM

SEQ ID NO: 61221 - protein, 13 aa, Homo Sapiens
NYMCNSSCMGGMN

SEQ ID NO: 61222 - protein, 13 aa, Homo Sapiens
YMCNSSCMGGMNR

SEQ ID NO: 61223 - protein, 13 aa, Homo Sapiens
MCNSSCMGGMNRR

SEQ ID NO: 61224 - protein, 13 aa, Homo Sapiens
CNSSCMGGMNRRP

SEQ ID NO: 61225 - protein, 13 aa, Homo Sapiens
NSSCMGGMNRRPI

SEQ ID NO: 61226 - protein, 13 aa, Homo Sapiens
SSCMGGMNRRPIL

SEQ ID NO: 61227 - protein, 13 aa, Homo Sapiens
SCMGGMNRRPILT

SEQ ID NO: 61228 - protein, 13 aa, Homo Sapiens
CMGGMNRRPILTI

SEQ ID NO: 61229 - protein, 13 aa, Homo Sapiens
MGGMNRRPILTII

SEQ ID NO: 61230 - protein, 13 aa, Homo Sapiens
GGMNRRPILTIIT

SEQ ID NO: 61231 - protein, 13 aa, Homo Sapiens
GMNRRPILTIITL

SEQ ID NO: 61232 - protein, 13 aa, Homo Sapiens
MNRRPILTIITLE

SEQ ID NO: 61233 - protein, 13 aa, Homo Sapiens
NRRPILTIITLED

SEQ ID NO: 61234 - protein, 13 aa, Homo Sapiens
RRPILTIITLEDS

SEQ ID NO: 61235 - protein, 13 aa, Homo Sapiens
RPILTIITLEDSS

SEQ ID NO: 61236 - protein, 13 aa, Homo Sapiens
PILTIITLEDSSG

SEQ ID NO: 61237 - protein, 13 aa, Homo Sapiens
ILTIITLEDSSGN

SEQ ID NO: 61238 - protein, 13 aa, Homo Sapiens
LTIITLEDSSGNL

SEQ ID NO: 61239 - protein, 13 aa, Homo Sapiens
TIITLEDSSGNLL

SEQ ID NO: 61240 - protein, 13 aa, Homo Sapiens
IITLEDSSGNLLG

SEQ ID NO: 61241 - protein, 13 aa, Homo Sapiens
ITLEDSSGNLLGR

SEQ ID NO: 61242 - protein, 13 aa, Homo Sapiens
TLEDSSGNLLGRN

SEQ ID NO: 61243 - protein, 13 aa, Homo Sapiens
LEDSSGNLLGRNS

SEQ ID NO: 61244 - protein, 13 aa, Homo Sapiens
EDSSGNLLGRNSF

SEQ ID NO: 61245 - protein, 13 aa, Homo Sapiens
DSSGNLLGRNSFE

SEQ ID NO: 61246 - protein, 13 aa, Homo Sapiens
SSGNLLGRNSFEV

SEQ ID NO: 61247 - protein, 13 aa, Homo Sapiens
SGNLLGRNSFEVR

SEQ ID NO: 61248 - protein, 13 aa, Homo Sapiens
GNLLGRNSFEVRV

SEQ ID NO: 61249 - protein, 13 aa, Homo Sapiens
NLLGRNSFEVRVC

SEQ ID NO: 61250 - protein, 13 aa, Homo Sapiens
LLGRNSFEVRVCA

SEQ ID NO: 61251 - protein, 13 aa, Homo Sapiens
LGRNSFEVRVCAC

SEQ ID NO: 61252 - protein, 13 aa, Homo Sapiens
GRNSFEVRVCACP

SEQ ID NO: 61253 - protein, 13 aa, Homo Sapiens
RNSFEVRVCACPG

SEQ ID NO: 61254 - protein, 13 aa, Homo Sapiens
NSFEVRVCACPGR

SEQ ID NO: 61255 - protein, 13 aa, Homo Sapiens
SFEVRVCACPGRD

SEQ ID NO: 61256 - protein, 13 aa, Homo Sapiens
FEVRVCACPGRDR

SEQ ID NO: 61257 - protein, 13 aa, Homo Sapiens
EVRVCACPGRDRR

SEQ ID NO: 61258 - protein, 13 aa, Homo Sapiens
VRVCACPGRDRRT

SEQ ID NO: 61259 - protein, 13 aa, Homo Sapiens
RVCACPGRDRRTE

SEQ ID NO: 61260 - protein, 13 aa, Homo Sapiens
VCACPGRDRRTEE

SEQ ID NO: 61261 - protein, 13 aa, Homo Sapiens
CACPGRDRRTEEE

SEQ ID NO: 61262 - protein, 13 aa, Homo Sapiens
ACPGRDRRTEEEN

SEQ ID NO: 61263 - protein, 13 aa, Homo Sapiens
CPGRDRRTEEENL

SEQ ID NO: 61264 - protein, 13 aa, Homo Sapiens
PGRDRRTEEENLR

SEQ ID NO: 61265 - protein, 13 aa, Homo Sapiens
GRDRRTEEENLRK

SEQ ID NO: 61266 - protein, 13 aa, Homo Sapiens
RDRRTEEENLRKK

SEQ ID NO: 61267 - protein, 13 aa, Homo Sapiens
DRRTEEENLRKKG

SEQ ID NO: 61268 - protein, 13 aa, Homo Sapiens
RRTEEENLRKKGE

SEQ ID NO: 61269 - protein, 13 aa, Homo Sapiens
RTEEENLRKKGEP

SEQ ID NO: 61270 - protein, 13 aa, Homo Sapiens
TEEENLRKKGEPH

SEQ ID NO: 61271 - protein, 13 aa, Homo Sapiens
EEENLRKKGEPHH

SEQ ID NO: 61272 - protein, 13 aa, Homo Sapiens
EENLRKKGEPHHE

SEQ ID NO: 61273 - protein, 13 aa, Homo Sapiens
ENLRKKGEPHHEL

SEQ ID NO: 61274 - protein, 13 aa, Homo Sapiens
NLRKKGEPHHELP

SEQ ID NO: 61275 - protein, 13 aa, Homo Sapiens
LRKKGEPHHELPP

SEQ ID NO: 61276 - protein, 13 aa, Homo Sapiens
RKKGEPHHELPPG

SEQ ID NO: 61277 - protein, 13 aa, Homo Sapiens
KKGEPHHELPPGS

SEQ ID NO: 61278 - protein, 13 aa, Homo Sapiens
KGEPHHELPPGST

SEQ ID NO: 61279 - protein, 13 aa, Homo Sapiens
GEPHHELPPGSTK

SEQ ID NO: 61280 - protein, 13 aa, Homo Sapiens
EPHHELPPGSTKR

SEQ ID NO: 61281 - protein, 13 aa, Homo Sapiens
PHHELPPGSTKRA

SEQ ID NO: 61282 - protein, 13 aa, Homo Sapiens
HHELPPGSTKRAL

SEQ ID NO: 61283 - protein, 13 aa, Homo Sapiens
HELPPGSTKRALP

SEQ ID NO: 61284 - protein, 13 aa, Homo Sapiens
ELPPGSTKRALPN

SEQ ID NO: 61285 - protein, 13 aa, Homo Sapiens
LPPGSTKRALPNN

SEQ ID NO: 61286 - protein, 13 aa, Homo Sapiens
PPGSTKRALPNNT

SEQ ID NO: 61287 - protein, 13 aa, Homo Sapiens
PGSTKRALPNNTS

SEQ ID NO: 61288 - protein, 13 aa, Homo Sapiens
GSTKRALPNNTSS

SEQ ID NO: 61289 - protein, 13 aa, Homo Sapiens
STKRALPNNTSSS

SEQ ID NO: 61290 - protein, 13 aa, Homo Sapiens
TKRALPNNTSSSP

SEQ ID NO: 61291 - protein, 13 aa, Homo Sapiens
KRALPNNTSSSPQ

SEQ ID NO: 61292 - protein, 13 aa, Homo Sapiens
RALPNNTSSSPQP

SEQ ID NO: 61293 - protein, 13 aa, Homo Sapiens
ALPNNTSSSPQPK

SEQ ID NO: 61294 - protein, 13 aa, Homo Sapiens
LPNNTSSSPQPKK

SEQ ID NO: 61295 - protein, 13 aa, Homo Sapiens
PNNTSSSPQPKKK

SEQ ID NO: 61296 - protein, 13 aa, Homo Sapiens
NNTSSSPQPKKKP

SEQ ID NO: 61297 - protein, 13 aa, Homo Sapiens
NTSSSPQPKKKPL

SEQ ID NO: 61298 - protein, 13 aa, Homo Sapiens
TSSSPQPKKKPLD

SEQ ID NO: 61299 - protein, 13 aa, Homo Sapiens
SSSPQPKKKPLDG

SEQ ID NO: 61300 - protein, 13 aa, Homo Sapiens
SSPQPKKKPLDGE

SEQ ID NO: 61301 - protein, 13 aa, Homo Sapiens
SPQPKKKPLDGEY

SEQ ID NO: 61302 - protein, 13 aa, Homo Sapiens
PQPKKKPLDGEYF

SEQ ID NO: 61303 - protein, 13 aa, Homo Sapiens
QPKKKPLDGEYFT

SEQ ID NO: 61304 - protein, 13 aa, Homo Sapiens
PKKKPLDGEYFTL

SEQ ID NO: 61305 - protein, 13 aa, Homo Sapiens
KKKPLDGEYFTLQ

SEQ ID NO: 61306 - protein, 13 aa, Homo Sapiens
KKPLDGEYFTLQI

SEQ ID NO: 61307 - protein, 13 aa, Homo Sapiens
KPLDGEYFTLQIR

SEQ ID NO: 61308 - protein, 13 aa, Homo Sapiens
PLDGEYFTLQIRG

SEQ ID NO: 61309 - protein, 13 aa, Homo Sapiens
LDGEYFTLQIRGR

SEQ ID NO: 61310 - protein, 13 aa, Homo Sapiens
DGEYFTLQIRGRE

SEQ ID NO: 61311 - protein, 13 aa, Homo Sapiens
GEYFTLQIRGRER

SEQ ID NO: 61312 - protein, 13 aa, Homo Sapiens
EYFTLQIRGRERF

SEQ ID NO: 61313 - protein, 13 aa, Homo Sapiens
YFTLQIRGRERFE

SEQ ID NO: 61314 - protein, 13 aa, Homo Sapiens
FTLQIRGRERFEM

SEQ ID NO: 61315 - protein, 13 aa, Homo Sapiens
TLQIRGRERFEMF

SEQ ID NO: 61316 - protein, 13 aa, Homo Sapiens
LQIRGRERFEMFR

SEQ ID NO: 61317 - protein, 13 aa, Homo Sapiens
QIRGRERFEMFRE

SEQ ID NO: 61318 - protein, 13 aa, Homo Sapiens
IRGRERFEMFREL

SEQ ID NO: 61319 - protein, 13 aa, Homo Sapiens
RGRERFEMFRELN

SEQ ID NO: 61320 - protein, 13 aa, Homo Sapiens
GRERFEMFRELNE

SEQ ID NO: 61321 - protein, 13 aa, Homo Sapiens
RERFEMFRELNEA

SEQ ID NO: 61322 - protein, 13 aa, Homo Sapiens
ERFEMFRELNEAL

SEQ ID NO: 61323 - protein, 13 aa, Homo Sapiens
RFEMFRELNEALE

SEQ ID NO: 61324 - protein, 13 aa, Homo Sapiens
FEMFRELNEALEL

SEQ ID NO: 61325 - protein, 13 aa, Homo Sapiens
EMFRELNEALELK

SEQ ID NO: 61326 - protein, 13 aa, Homo Sapiens
MFRELNEALELKD

SEQ ID NO: 61327 - protein, 13 aa, Homo Sapiens
FRELNEALELKDA

SEQ ID NO: 61328 - protein, 13 aa, Homo Sapiens
RELNEALELKDAQ

SEQ ID NO: 61329 - protein, 13 aa, Homo Sapiens
ELNEALELKDAQA

SEQ ID NO: 61330 - protein, 13 aa, Homo Sapiens
LNEALELKDAQAG

SEQ ID NO: 61331 - protein, 13 aa, Homo Sapiens
NEALELKDAQAGK

SEQ ID NO: 61332 - protein, 13 aa, Homo Sapiens
EALELKDAQAGKE

SEQ ID NO: 61333 - protein, 13 aa, Homo Sapiens
ALELKDAQAGKEP

SEQ ID NO: 61334 - protein, 13 aa, Homo Sapiens
LELKDAQAGKEPG

SEQ ID NO: 61335 - protein, 13 aa, Homo Sapiens
ELKDAQAGKEPGG

SEQ ID NO: 61336 - protein, 13 aa, Homo Sapiens
LKDAQAGKEPGGS

SEQ ID NO: 61337 - protein, 13 aa, Homo Sapiens
KDAQAGKEPGGSR

SEQ ID NO: 61338 - protein, 13 aa, Homo Sapiens
DAQAGKEPGGSRA

SEQ ID NO: 61339 - protein, 13 aa, Homo Sapiens
AQAGKEPGGSRAH

SEQ ID NO: 61340 - protein, 13 aa, Homo Sapiens
QAGKEPGGSRAHS

SEQ ID NO: 61341 - protein, 13 aa, Homo Sapiens
AGKEPGGSRAHSS

SEQ ID NO: 61342 - protein, 13 aa, Homo Sapiens
GKEPGGSRAHSSH

SEQ ID NO: 61343 - protein, 13 aa, Homo Sapiens
KEPGGSRAHSSHL

SEQ ID NO: 61344 - protein, 13 aa, Homo Sapiens
EPGGSRAHSSHLK

SEQ ID NO: 61345 - protein, 13 aa, Homo Sapiens
PGGSRAHSSHLKS

SEQ ID NO: 61346 - protein, 13 aa, Homo Sapiens
GGSRAHSSHLKSK

SEQ ID NO: 61347 - protein, 13 aa, Homo Sapiens
GSRAHSSHLKSKK

SEQ ID NO: 61348 - protein, 13 aa, Homo Sapiens
SRAHSSHLKSKKG

SEQ ID NO: 61349 - protein, 13 aa, Homo Sapiens
RAHSSHLKSKKGQ

SEQ ID NO: 61350 - protein, 13 aa, Homo Sapiens
AHSSHLKSKKGQS

SEQ ID NO: 61351 - protein, 13 aa, Homo Sapiens
HSSHLKSKKGQST

SEQ ID NO: 61352 - protein, 13 aa, Homo Sapiens
SSHLKSKKGQSTS

SEQ ID NO: 61353 - protein, 13 aa, Homo Sapiens
SHLKSKKGQSTSR

SEQ ID NO: 61354 - protein, 13 aa, Homo Sapiens
HLKSKKGQSTSRH

SEQ ID NO: 61355 - protein, 13 aa, Homo Sapiens
LKSKKGQSTSRHK

SEQ ID NO: 61356 - protein, 13 aa, Homo Sapiens
KSKKGQSTSRHKK

SEQ ID NO: 61357 - protein, 13 aa, Homo Sapiens
SKKGQSTSRHKKL

SEQ ID NO: 61358 - protein, 13 aa, Homo Sapiens
KKGQSTSRHKKLM

SEQ ID NO: 61359 - protein, 13 aa, Homo Sapiens
KGQSTSRHKKLMF

SEQ ID NO: 61360 - protein, 13 aa, Homo Sapiens
GQSTSRHKKLMFK

SEQ ID NO: 61361 - protein, 13 aa, Homo Sapiens
QSTSRHKKLMFKT

SEQ ID NO: 61362 - protein, 13 aa, Homo Sapiens
STSRHKKLMFKTE

SEQ ID NO: 61363 - protein, 13 aa, Homo Sapiens
TSRHKKLMFKTEG

SEQ ID NO: 61364 - protein, 13 aa, Homo Sapiens
SRHKKLMFKTEGP

SEQ ID NO: 61365 - protein, 13 aa, Homo Sapiens
RHKKLMFKTEGPD

SEQ ID NO: 61366 - protein, 13 aa, Homo Sapiens
HKKLMFKTEGPDS

SEQ ID NO: 61367 - protein, 13 aa, Homo Sapiens
KKLMFKTEGPDSD

SEQ ID NO: 61368 - protein, 14 aa, Homo Sapiens
MEEPQSDPSVEPPL

SEQ ID NO: 61369 - protein, 14 aa, Homo Sapiens
EEPQSDPSVEPPLS

SEQ ID NO: 61370 - protein, 14 aa, Homo Sapiens
EPQSDPSVEPPLSQ

SEQ ID NO: 61371 - protein, 14 aa, Homo Sapiens
PQSDPSVEPPLSQE

SEQ ID NO: 61372 - protein, 14 aa, Homo Sapiens
QSDPSVEPPLSQET

SEQ ID NO: 61373 - protein, 14 aa, Homo Sapiens
SDPSVEPPLSQETF

SEQ ID NO: 61374 - protein, 14 aa, Homo Sapiens
DPSVEPPLSQETFS

SEQ ID NO: 61375 - protein, 14 aa, Homo Sapiens
PSVEPPLSQETFSD

SEQ ID NO: 61376 - protein, 14 aa, Homo Sapiens
SVEPPLSQETFSDL

SEQ ID NO: 61377 - protein, 14 aa, Homo Sapiens
VEPPLSQETFSDLW

SEQ ID NO: 61378 - protein, 14 aa, Homo Sapiens
EPPLSQETFSDLWK

SEQ ID NO: 61379 - protein, 14 aa, Homo Sapiens
PPLSQETFSDLWKL

SEQ ID NO: 61380 - protein, 14 aa, Homo Sapiens
PLSQETFSDLWKLL

SEQ ID NO: 61381 - protein, 14 aa, Homo Sapiens
LSQETFSDLWKLLP

SEQ ID NO: 61382 - protein, 14 aa, Homo Sapiens
SQETFSDLWKLLPE

SEQ ID NO: 61383 - protein, 14 aa, Homo Sapiens
QETFSDLWKLLPEN

SEQ ID NO: 61384 - protein, 14 aa, Homo Sapiens
ETFSDLWKLLPENN

SEQ ID NO: 61385 - protein, 14 aa, Homo Sapiens
TFSDLWKLLPENNV

SEQ ID NO: 61386 - protein, 14 aa, Homo Sapiens
FSDLWKLLPENNVL

SEQ ID NO: 61387 - protein, 14 aa, Homo Sapiens
SDLWKLLPENNVLS

SEQ ID NO: 61388 - protein, 14 aa, Homo Sapiens
DLWKLLPENNVLSP

SEQ ID NO: 61389 - protein, 14 aa, Homo Sapiens
LWKLLPENNVLSPL

SEQ ID NO: 61390 - protein, 14 aa, Homo Sapiens
WKLLPENNVLSPLP

SEQ ID NO: 61391 - protein, 14 aa, Homo Sapiens
KLLPENNVLSPLPS

SEQ ID NO: 61392 - protein, 14 aa, Homo Sapiens
LLPENNVLSPLPSQ

SEQ ID NO: 61393 - protein, 14 aa, Homo Sapiens
LPENNVLSPLPSQA

SEQ ID NO: 61394 - protein, 14 aa, Homo Sapiens
PENNVLSPLPSQAM

SEQ ID NO: 61395 - protein, 14 aa, Homo Sapiens
ENNVLSPLPSQAMD

SEQ ID NO: 61396 - protein, 14 aa, Homo Sapiens
NNVLSPLPSQAMDD

SEQ ID NO: 61397 - protein, 14 aa, Homo Sapiens
NVLSPLPSQAMDDL

SEQ ID NO: 61398 - protein, 14 aa, Homo Sapiens
VLSPLPSQAMDDLM

SEQ ID NO: 61399 - protein, 14 aa, Homo Sapiens
LSPLPSQAMDDLML

SEQ ID NO: 61400 - protein, 14 aa, Homo Sapiens
SPLPSQAMDDLMLS

SEQ ID NO: 61401 - protein, 14 aa, Homo Sapiens
PLPSQAMDDLMLSP

SEQ ID NO: 61402 - protein, 14 aa, Homo Sapiens
LPSQAMDDLMLSPD

SEQ ID NO: 61403 - protein, 14 aa, Homo Sapiens
PSQAMDDLMLSPDD

SEQ ID NO: 61404 - protein, 14 aa, Homo Sapiens
SQAMDDLMLSPDDI

SEQ ID NO: 61405 - protein, 14 aa, Homo Sapiens
QAMDDLMLSPDDIE

SEQ ID NO: 61406 - protein, 14 aa, Homo Sapiens
AMDDLMLSPDDIEQ

SEQ ID NO: 61407 - protein, 14 aa, Homo Sapiens
MDDLMLSPDDIEQW

SEQ ID NO: 61408 - protein, 14 aa, Homo Sapiens
DDLMLSPDDIEQWF

SEQ ID NO: 61409 - protein, 14 aa, Homo Sapiens
DLMLSPDDIEQWFT

SEQ ID NO: 61410 - protein, 14 aa, Homo Sapiens
LMLSPDDIEQWFTE

SEQ ID NO: 61411 - protein, 14 aa, Homo Sapiens
MLSPDDIEQWFTED

SEQ ID NO: 61412 - protein, 14 aa, Homo Sapiens
LSPDDIEQWFTEDP

SEQ ID NO: 61413 - protein, 14 aa, Homo Sapiens
SPDDIEQWFTEDPG

SEQ ID NO: 61414 - protein, 14 aa, Homo Sapiens
PDDIEQWFTEDPGP

SEQ ID NO: 61415 - protein, 14 aa, Homo Sapiens
DDIEQWFTEDPGPD

SEQ ID NO: 61416 - protein, 14 aa, Homo Sapiens
DIEQWFTEDPGPDE

SEQ ID NO: 61417 - protein, 14 aa, Homo Sapiens
IEQWFTEDPGPDEA

SEQ ID NO: 61418 - protein, 14 aa, Homo Sapiens
EQWFTEDPGPDEAP

SEQ ID NO: 61419 - protein, 14 aa, Homo Sapiens
QWFTEDPGPDEAPR

SEQ ID NO: 61420 - protein, 14 aa, Homo Sapiens
WFTEDPGPDEAPRM

SEQ ID NO: 61421 - protein, 14 aa, Homo Sapiens
FTEDPGPDEAPRMP

SEQ ID NO: 61422 - protein, 14 aa, Homo Sapiens
TEDPGPDEAPRMPE

SEQ ID NO: 61423 - protein, 14 aa, Homo Sapiens
EDPGPDEAPRMPEA

SEQ ID NO: 61424 - protein, 14 aa, Homo Sapiens
DPGPDEAPRMPEAA

SEQ ID NO: 61425 - protein, 14 aa, Homo Sapiens
PGPDEAPRMPEAAP

SEQ ID NO: 61426 - protein, 14 aa, Homo Sapiens
GPDEAPRMPEAAPR

SEQ ID NO: 61427 - protein, 14 aa, Homo Sapiens
PDEAPRMPEAAPRV

SEQ ID NO: 61428 - protein, 14 aa, Homo Sapiens
DEAPRMPEAAPRVA

SEQ ID NO: 61429 - protein, 14 aa, Homo Sapiens
EAPRMPEAAPRVAP

SEQ ID NO: 61430 - protein, 14 aa, Homo Sapiens
APRMPEAAPRVAPA

SEQ ID NO: 61431 - protein, 14 aa, Homo Sapiens
PRMPEAAPRVAPAP

SEQ ID NO: 61432 - protein, 14 aa, Homo Sapiens
RMPEAAPRVAPAPA

SEQ ID NO: 61433 - protein, 14 aa, Homo Sapiens
MPEAAPRVAPAPAA

SEQ ID NO: 61434 - protein, 14 aa, Homo Sapiens
PEAAPRVAPAPAAP

SEQ ID NO: 61435 - protein, 14 aa, Homo Sapiens
EAAPRVAPAPAAPT

SEQ ID NO: 61436 - protein, 14 aa, Homo Sapiens
AAPRVAPAPAAPTP

SEQ ID NO: 61437 - protein, 14 aa, Homo Sapiens
APRVAPAPAAPTPA

SEQ ID NO: 61438 - protein, 14 aa, Homo Sapiens
PRVAPAPAAPTPAA

SEQ ID NO: 61439 - protein, 14 aa, Homo Sapiens
RVAPAPAAPTPAAP

SEQ ID NO: 61440 - protein, 14 aa, Homo Sapiens
VAPAPAAPTPAAPA

SEQ ID NO: 61441 - protein, 14 aa, Homo Sapiens
APAPAAPTPAAPAP

SEQ ID NO: 61442 - protein, 14 aa, Homo Sapiens
PAPAAPTPAAPAPA

SEQ ID NO: 61443 - protein, 14 aa, Homo Sapiens
APAAPTPAAPAPAP

SEQ ID NO: 61444 - protein, 14 aa, Homo Sapiens
PAAPTPAAPAPAPS

SEQ ID NO: 61445 - protein, 14 aa, Homo Sapiens
AAPTPAAPAPAPSW

SEQ ID NO: 61446 - protein, 14 aa, Homo Sapiens
APTPAAPAPAPSWP

SEQ ID NO: 61447 - protein, 14 aa, Homo Sapiens
PTPAAPAPAPSWPL

SEQ ID NO: 61448 - protein, 14 aa, Homo Sapiens
TPAAPAPAPSWPLS

SEQ ID NO: 61449 - protein, 14 aa, Homo Sapiens
PAAPAPAPSWPLSS

SEQ ID NO: 61450 - protein, 14 aa, Homo Sapiens
AAPAPAPSWPLSSS

SEQ ID NO: 61451 - protein, 14 aa, Homo Sapiens
APAPAPSWPLSSSV

SEQ ID NO: 61452 - protein, 14 aa, Homo Sapiens
PAPAPSWPLSSSVP

SEQ ID NO: 61453 - protein, 14 aa, Homo Sapiens
APAPSWPLSSSVPS

SEQ ID NO: 61454 - protein, 14 aa, Homo Sapiens
PAPSWPLSSSVPSQ

SEQ ID NO: 61455 - protein, 14 aa, Homo Sapiens
APSWPLSSSVPSQK

SEQ ID NO: 61456 - protein, 14 aa, Homo Sapiens
PSWPLSSSVPSQKT

SEQ ID NO: 61457 - protein, 14 aa, Homo Sapiens
SWPLSSSVPSQKTY

SEQ ID NO: 61458 - protein, 14 aa, Homo Sapiens
WPLSSSVPSQKTYQ

SEQ ID NO: 61459 - protein, 14 aa, Homo Sapiens
PLSSSVPSQKTYQG

SEQ ID NO: 61460 - protein, 14 aa, Homo Sapiens
LSSSVPSQKTYQGS

SEQ ID NO: 61461 - protein, 14 aa, Homo Sapiens
SSSVPSQKTYQGSY

SEQ ID NO: 61462 - protein, 14 aa, Homo Sapiens
SSVPSQKTYQGSYG

SEQ ID NO: 61463 - protein, 14 aa, Homo Sapiens
SVPSQKTYQGSYGF

SEQ ID NO: 61464 - protein, 14 aa, Homo Sapiens
VPSQKTYQGSYGFR

SEQ ID NO: 61465 - protein, 14 aa, Homo Sapiens
PSQKTYQGSYGFRL

SEQ ID NO: 61466 - protein, 14 aa, Homo Sapiens
SQKTYQGSYGFRLG

SEQ ID NO: 61467 - protein, 14 aa, Homo Sapiens
QKTYQGSYGFRLGF

SEQ ID NO: 61468 - protein, 14 aa, Homo Sapiens
KTYQGSYGFRLGFL

SEQ ID NO: 61469 - protein, 14 aa, Homo Sapiens
TYQGSYGFRLGFLH

SEQ ID NO: 61470 - protein, 14 aa, Homo Sapiens
YQGSYGFRLGFLHS

SEQ ID NO: 61471 - protein, 14 aa, Homo Sapiens
QGSYGFRLGFLHSG

SEQ ID NO: 61472 - protein, 14 aa, Homo Sapiens
GSYGFRLGFLHSGT

SEQ ID NO: 61473 - protein, 14 aa, Homo Sapiens
SYGFRLGFLHSGTA

SEQ ID NO: 61474 - protein, 14 aa, Homo Sapiens
YGFRLGFLHSGTAK

SEQ ID NO: 61475 - protein, 14 aa, Homo Sapiens
GFRLGFLHSGTAKS

SEQ ID NO: 61476 - protein, 14 aa, Homo Sapiens
FRLGFLHSGTAKSV

SEQ ID NO: 61477 - protein, 14 aa, Homo Sapiens
RLGFLHSGTAKSVT

SEQ ID NO: 61478 - protein, 14 aa, Homo Sapiens
LGFLHSGTAKSVTC

SEQ ID NO: 61479 - protein, 14 aa, Homo Sapiens
GFLHSGTAKSVTCT

SEQ ID NO: 61480 - protein, 14 aa, Homo Sapiens
FLHSGTAKSVTCTY

SEQ ID NO: 61481 - protein, 14 aa, Homo Sapiens
LHSGTAKSVTCTYS

SEQ ID NO: 61482 - protein, 14 aa, Homo Sapiens
HSGTAKSVTCTYSP

SEQ ID NO: 61483 - protein, 14 aa, Homo Sapiens
SGTAKSVTCTYSPA

SEQ ID NO: 61484 - protein, 14 aa, Homo Sapiens
GTAKSVTCTYSPAL

SEQ ID NO: 61485 - protein, 14 aa, Homo Sapiens
TAKSVTCTYSPALN

SEQ ID NO: 61486 - protein, 14 aa, Homo Sapiens
AKSVTCTYSPALNK

SEQ ID NO: 61487 - protein, 14 aa, Homo Sapiens
KSVTCTYSPALNKM

SEQ ID NO: 61488 - protein, 14 aa, Homo Sapiens
SVTCTYSPALNKMF

SEQ ID NO: 61489 - protein, 14 aa, Homo Sapiens
VTCTYSPALNKMFC

SEQ ID NO: 61490 - protein, 14 aa, Homo Sapiens
TCTYSPALNKMFCQ

SEQ ID NO: 61491 - protein, 14 aa, Homo Sapiens
CTYSPALNKMFCQL

SEQ ID NO: 61492 - protein, 14 aa, Homo Sapiens
TYSPALNKMFCQLA

SEQ ID NO: 61493 - protein, 14 aa, Homo Sapiens
YSPALNKMFCQLAK

SEQ ID NO: 61494 - protein, 14 aa, Homo Sapiens
SPALNKMFCQLAKT

SEQ ID NO: 61495 - protein, 14 aa, Homo Sapiens
PALNKMFCQLAKTC

SEQ ID NO: 61496 - protein, 14 aa, Homo Sapiens
ALNKMFCQLAKTCP

SEQ ID NO: 61497 - protein, 14 aa, Homo Sapiens
LNKMFCQLAKTCPV

SEQ ID NO: 61498 - protein, 14 aa, Homo Sapiens
NKMFCQLAKTCPVQ

SEQ ID NO: 61499 - protein, 14 aa, Homo Sapiens
KMFCQLAKTCPVQL

SEQ ID NO: 61500 - protein, 14 aa, Homo Sapiens
MFCQLAKTCPVQLW

SEQ ID NO: 61501 - protein, 14 aa, Homo Sapiens
FCQLAKTCPVQLWV

SEQ ID NO: 61502 - protein, 14 aa, Homo Sapiens
CQLAKTCPVQLWVD

SEQ ID NO: 61503 - protein, 14 aa, Homo Sapiens
QLAKTCPVQLWVDS

SEQ ID NO: 61504 - protein, 14 aa, Homo Sapiens
LAKTCPVQLWVDST

SEQ ID NO: 61505 - protein, 14 aa, Homo Sapiens
AKTCPVQLWVDSTP

SEQ ID NO: 61506 - protein, 14 aa, Homo Sapiens
KTCPVQLWVDSTPP

SEQ ID NO: 61507 - protein, 14 aa, Homo Sapiens
TCPVQLWVDSTPPP

SEQ ID NO: 61508 - protein, 14 aa, Homo Sapiens
CPVQLWVDSTPPPG

SEQ ID NO: 61509 - protein, 14 aa, Homo Sapiens
PVQLWVDSTPPPGT

SEQ ID NO: 61510 - protein, 14 aa, Homo Sapiens
VQLWVDSTPPPGTR

SEQ ID NO: 61511 - protein, 14 aa, Homo Sapiens
QLWVDSTPPPGTRV

SEQ ID NO: 61512 - protein, 14 aa, Homo Sapiens
LWVDSTPPPGTRVR

SEQ ID NO: 61513 - protein, 14 aa, Homo Sapiens
WVDSTPPPGTRVRA

SEQ ID NO: 61514 - protein, 14 aa, Homo Sapiens
VDSTPPPGTRVRAM

SEQ ID NO: 61515 - protein, 14 aa, Homo Sapiens
DSTPPPGTRVRAMA

SEQ ID NO: 61516 - protein, 14 aa, Homo Sapiens
STPPPGTRVRAMAI

SEQ ID NO: 61517 - protein, 14 aa, Homo Sapiens
TPPPGTRVRAMAIY

SEQ ID NO: 61518 - protein, 14 aa, Homo Sapiens
PPPGTRVRAMAIYK

SEQ ID NO: 61519 - protein, 14 aa, Homo Sapiens
PPGTRVRAMAIYKQ

SEQ ID NO: 61520 - protein, 14 aa, Homo Sapiens
PGTRVRAMAIYKQS

SEQ ID NO: 61521 - protein, 14 aa, Homo Sapiens
GTRVRAMAIYKQSQ

SEQ ID NO: 61522 - protein, 14 aa, Homo Sapiens
TRVRAMAIYKQSQH

SEQ ID NO: 61523 - protein, 14 aa, Homo Sapiens
RVRAMAIYKQSQHM

SEQ ID NO: 61524 - protein, 14 aa, Homo Sapiens
VRAMAIYKQSQHMT

SEQ ID NO: 61525 - protein, 14 aa, Homo Sapiens
RAMAIYKQSQHMTE

SEQ ID NO: 61526 - protein, 14 aa, Homo Sapiens
AMAIYKQSQHMTEV

SEQ ID NO: 61527 - protein, 14 aa, Homo Sapiens
MAIYKQSQHMTEVV

SEQ ID NO: 61528 - protein, 14 aa, Homo Sapiens
AIYKQSQHMTEVVR

SEQ ID NO: 61529 - protein, 14 aa, Homo Sapiens
IYKQSQHMTEVVRR

SEQ ID NO: 61530 - protein, 14 aa, Homo Sapiens
YKQSQHMTEVVRRC

SEQ ID NO: 61531 - protein, 14 aa, Homo Sapiens
KQSQHMTEVVRRCP

SEQ ID NO: 61532 - protein, 14 aa, Homo Sapiens
QSQHMTEVVRRCPH

SEQ ID NO: 61533 - protein, 14 aa, Homo Sapiens
SQHMTEVVRRCPHH

SEQ ID NO: 61534 - protein, 14 aa, Homo Sapiens
QHMTEVVRRCPHHE

SEQ ID NO: 61535 - protein, 14 aa, Homo Sapiens
HMTEVVRRCPHHER

SEQ ID NO: 61536 - protein, 14 aa, Homo Sapiens
MTEVVRRCPHHERC

SEQ ID NO: 61537 - protein, 14 aa, Homo Sapiens
TEVVRRCPHHERCS

SEQ ID NO: 61538 - protein, 14 aa, Homo Sapiens
EVVRRCPHHERCSD

SEQ ID NO: 61539 - protein, 14 aa, Homo Sapiens
VVRRCPHHERCSDS

SEQ ID NO: 61540 - protein, 14 aa, Homo Sapiens
VRRCPHHERCSDSD

SEQ ID NO: 61541 - protein, 14 aa, Homo Sapiens
RRCPHHERCSDSDG

SEQ ID NO: 61542 - protein, 14 aa, Homo Sapiens
RCPHHERCSDSDGL

SEQ ID NO: 61543 - protein, 14 aa, Homo Sapiens
CPHHERCSDSDGLA

SEQ ID NO: 61544 - protein, 14 aa, Homo Sapiens
PHHERCSDSDGLAP

SEQ ID NO: 61545 - protein, 14 aa, Homo Sapiens
HHERCSDSDGLAPP

SEQ ID NO: 61546 - protein, 14 aa, Homo Sapiens
HERCSDSDGLAPPQ

SEQ ID NO: 61547 - protein, 14 aa, Homo Sapiens
ERCSDSDGLAPPQH

SEQ ID NO: 61548 - protein, 14 aa, Homo Sapiens
RCSDSDGLAPPQHL

SEQ ID NO: 61549 - protein, 14 aa, Homo Sapiens
CSDSDGLAPPQHLI

SEQ ID NO: 61550 - protein, 14 aa, Homo Sapiens
SDSDGLAPPQHLIR

SEQ ID NO: 61551 - protein, 14 aa, Homo Sapiens
DSDGLAPPQHLIRV

SEQ ID NO: 61552 - protein, 14 aa, Homo Sapiens
SDGLAPPQHLIRVE

SEQ ID NO: 61553 - protein, 14 aa, Homo Sapiens
DGLAPPQHLIRVEG

SEQ ID NO: 61554 - protein, 14 aa, Homo Sapiens
GLAPPQHLIRVEGN

SEQ ID NO: 61555 - protein, 14 aa, Homo Sapiens
LAPPQHLIRVEGNL

SEQ ID NO: 61556 - protein, 14 aa, Homo Sapiens
APPQHLIRVEGNLR

SEQ ID NO: 61557 - protein, 14 aa, Homo Sapiens
PPQHLIRVEGNLRV

SEQ ID NO: 61558 - protein, 14 aa, Homo Sapiens
PQHLIRVEGNLRVE

SEQ ID NO: 61559 - protein, 14 aa, Homo Sapiens
QHLIRVEGNLRVEY

SEQ ID NO: 61560 - protein, 14 aa, Homo Sapiens
HLIRVEGNLRVEYL

SEQ ID NO: 61561 - protein, 14 aa, Homo Sapiens
LIRVEGNLRVEYLD

SEQ ID NO: 61562 - protein, 14 aa, Homo Sapiens
IRVEGNLRVEYLDD

SEQ ID NO: 61563 - protein, 14 aa, Homo Sapiens
RVEGNLRVEYLDDR

SEQ ID NO: 61564 - protein, 14 aa, Homo Sapiens
VEGNLRVEYLDDRN

SEQ ID NO: 61565 - protein, 14 aa, Homo Sapiens
EGNLRVEYLDDRNT

SEQ ID NO: 61566 - protein, 14 aa, Homo Sapiens
GNLRVEYLDDRNTF

SEQ ID NO: 61567 - protein, 14 aa, Homo Sapiens
NLRVEYLDDRNTFR

SEQ ID NO: 61568 - protein, 14 aa, Homo Sapiens
LRVEYLDDRNTFRH

SEQ ID NO: 61569 - protein, 14 aa, Homo Sapiens
RVEYLDDRNTFRHS

SEQ ID NO: 61570 - protein, 14 aa, Homo Sapiens
VEYLDDRNTFRHSV

SEQ ID NO: 61571 - protein, 14 aa, Homo Sapiens
EYLDDRNTFRHSVV

SEQ ID NO: 61572 - protein, 14 aa, Homo Sapiens
YLDDRNTFRHSVVV

SEQ ID NO: 61573 - protein, 14 aa, Homo Sapiens
LDDRNTFRHSVVVP

SEQ ID NO: 61574 - protein, 14 aa, Homo Sapiens
DDRNTFRHSVVVPY

SEQ ID NO: 61575 - protein, 14 aa, Homo Sapiens
DRNTFRHSVVVPYE

SEQ ID NO: 61576 - protein, 14 aa, Homo Sapiens
RNTFRHSVVVPYEP

SEQ ID NO: 61577 - protein, 14 aa, Homo Sapiens
NTFRHSVVVPYEPP

SEQ ID NO: 61578 - protein, 14 aa, Homo Sapiens
TFRHSVVVPYEPPE

SEQ ID NO: 61579 - protein, 14 aa, Homo Sapiens
FRHSVVVPYEPPEV

SEQ ID NO: 61580 - protein, 14 aa, Homo Sapiens
RHSVVVPYEPPEVG

SEQ ID NO: 61581 - protein, 14 aa, Homo Sapiens
HSVVVPYEPPEVGS

SEQ ID NO: 61582 - protein, 14 aa, Homo Sapiens
SVVVPYEPPEVGSD

SEQ ID NO: 61583 - protein, 14 aa, Homo Sapiens
VVVPYEPPEVGSDC

SEQ ID NO: 61584 - protein, 14 aa, Homo Sapiens
VVPYEPPEVGSDCT

SEQ ID NO: 61585 - protein, 14 aa, Homo Sapiens
VPYEPPEVGSDCTT

SEQ ID NO: 61586 - protein, 14 aa, Homo Sapiens
PYEPPEVGSDCTTI

SEQ ID NO: 61587 - protein, 14 aa, Homo Sapiens
YEPPEVGSDCTTIH

SEQ ID NO: 61588 - protein, 14 aa, Homo Sapiens
EPPEVGSDCTTIHY

SEQ ID NO: 61589 - protein, 14 aa, Homo Sapiens
PPEVGSDCTTIHYN

SEQ ID NO: 61590 - protein, 14 aa, Homo Sapiens
PEVGSDCTTIHYNY

SEQ ID NO: 61591 - protein, 14 aa, Homo Sapiens
EVGSDCTTIHYNYM

SEQ ID NO: 61592 - protein, 14 aa, Homo Sapiens
VGSDCTTIHYNYMC

SEQ ID NO: 61593 - protein, 14 aa, Homo Sapiens
GSDCTTIHYNYMCN

SEQ ID NO: 61594 - protein, 14 aa, Homo Sapiens
SDCTTIHYNYMCNS

SEQ ID NO: 61595 - protein, 14 aa, Homo Sapiens
DCTTIHYNYMCNSS

SEQ ID NO: 61596 - protein, 14 aa, Homo Sapiens
CTTIHYNYMCNSSC

SEQ ID NO: 61597 - protein, 14 aa, Homo Sapiens
TTIHYNYMCNSSCM

SEQ ID NO: 61598 - protein, 14 aa, Homo Sapiens
TIHYNYMCNSSCMG

SEQ ID NO: 61599 - protein, 14 aa, Homo Sapiens
IHYNYMCNSSCMGG

SEQ ID NO: 61600 - protein, 14 aa, Homo Sapiens
HYNYMCNSSCMGGM

SEQ ID NO: 61601 - protein, 14 aa, Homo Sapiens
YNYMCNSSCMGGMN

SEQ ID NO: 61602 - protein, 14 aa, Homo Sapiens
NYMCNSSCMGGMNR

SEQ ID NO: 61603 - protein, 14 aa, Homo Sapiens
YMCNSSCMGGMNRR

SEQ ID NO: 61604 - protein, 14 aa, Homo Sapiens
MCNSSCMGGMNRRP

SEQ ID NO: 61605 - protein, 14 aa, Homo Sapiens
CNSSCMGGMNRRPI

SEQ ID NO: 61606 - protein, 14 aa, Homo Sapiens
NSSCMGGMNRRPIL

SEQ ID NO: 61607 - protein, 14 aa, Homo Sapiens
SSCMGGMNRRPILT

SEQ ID NO: 61608 - protein, 14 aa, Homo Sapiens
SCMGGMNRRPILTI

SEQ ID NO: 61609 - protein, 14 aa, Homo Sapiens
CMGGMNRRPILTII

SEQ ID NO: 61610 - protein, 14 aa, Homo Sapiens
MGGMNRRPILTIIT

SEQ ID NO: 61611 - protein, 14 aa, Homo Sapiens
GGMNRRPILTIITL

SEQ ID NO: 61612 - protein, 14 aa, Homo Sapiens
GMNRRPILTIITLE

SEQ ID NO: 61613 - protein, 14 aa, Homo Sapiens
MNRRPILTIITLED

SEQ ID NO: 61614 - protein, 14 aa, Homo Sapiens
NRRPILTIITLEDS

SEQ ID NO: 61615 - protein, 14 aa, Homo Sapiens
RRPILTIITLEDSS

SEQ ID NO: 61616 - protein, 14 aa, Homo Sapiens
RPILTIITLEDSSG

SEQ ID NO: 61617 - protein, 14 aa, Homo Sapiens
PILTIITLEDSSGN

SEQ ID NO: 61618 - protein, 14 aa, Homo Sapiens
ILTIITLEDSSGNL

SEQ ID NO: 61619 - protein, 14 aa, Homo Sapiens
LTIITLEDSSGNLL

SEQ ID NO: 61620 - protein, 14 aa, Homo Sapiens
TIITLEDSSGNLLG

SEQ ID NO: 61621 - protein, 14 aa, Homo Sapiens
IITLEDSSGNLLGR

SEQ ID NO: 61622 - protein, 14 aa, Homo Sapiens
ITLEDSSGNLLGRN

SEQ ID NO: 61623 - protein, 14 aa, Homo Sapiens
TLEDSSGNLLGRNS

SEQ ID NO: 61624 - protein, 14 aa, Homo Sapiens
LEDSSGNLLGRNSF

SEQ ID NO: 61625 - protein, 14 aa, Homo Sapiens
EDSSGNLLGRNSFE

SEQ ID NO: 61626 - protein, 14 aa, Homo Sapiens
DSSGNLLGRNSFEV

SEQ ID NO: 61627 - protein, 14 aa, Homo Sapiens
SSGNLLGRNSFEVR

SEQ ID NO: 61628 - protein, 14 aa, Homo Sapiens
SGNLLGRNSFEVRV

SEQ ID NO: 61629 - protein, 14 aa, Homo Sapiens
GNLLGRNSFEVRVC

SEQ ID NO: 61630 - protein, 14 aa, Homo Sapiens
NLLGRNSFEVRVCA

SEQ ID NO: 61631 - protein, 14 aa, Homo Sapiens
LLGRNSFEVRVCAC

SEQ ID NO: 61632 - protein, 14 aa, Homo Sapiens
LGRNSFEVRVCACP

SEQ ID NO: 61633 - protein, 14 aa, Homo Sapiens
GRNSFEVRVCACPG

SEQ ID NO: 61634 - protein, 14 aa, Homo Sapiens
RNSFEVRVCACPGR

SEQ ID NO: 61635 - protein, 14 aa, Homo Sapiens
NSFEVRVCACPGRD

SEQ ID NO: 61636 - protein, 14 aa, Homo Sapiens
SFEVRVCACPGRDR

SEQ ID NO: 61637 - protein, 14 aa, Homo Sapiens
FEVRVCACPGRDRR

SEQ ID NO: 61638 - protein, 14 aa, Homo Sapiens
EVRVCACPGRDRRT

SEQ ID NO: 61639 - protein, 14 aa, Homo Sapiens
VRVCACPGRDRRTE

SEQ ID NO: 61640 - protein, 14 aa, Homo Sapiens
RVCACPGRDRRTEE

SEQ ID NO: 61641 - protein, 14 aa, Homo Sapiens
VCACPGRDRRTEEE

SEQ ID NO: 61642 - protein, 14 aa, Homo Sapiens
CACPGRDRRTEEEN

SEQ ID NO: 61643 - protein, 14 aa, Homo Sapiens
ACPGRDRRTEEENL

SEQ ID NO: 61644 - protein, 14 aa, Homo Sapiens
CPGRDRRTEEENLR

SEQ ID NO: 61645 - protein, 14 aa, Homo Sapiens
PGRDRRTEEENLRK

SEQ ID NO: 61646 - protein, 14 aa, Homo Sapiens
GRDRRTEEENLRKK

SEQ ID NO: 61647 - protein, 14 aa, Homo Sapiens
RDRRTEEENLRKKG

SEQ ID NO: 61648 - protein, 14 aa, Homo Sapiens
DRRTEEENLRKKGE

SEQ ID NO: 61649 - protein, 14 aa, Homo Sapiens
RRTEEENLRKKGEP

SEQ ID NO: 61650 - protein, 14 aa, Homo Sapiens
RTEEENLRKKGEPH

SEQ ID NO: 61651 - protein, 14 aa, Homo Sapiens
TEEENLRKKGEPHH

SEQ ID NO: 61652 - protein, 14 aa, Homo Sapiens
EEENLRKKGEPHHE

SEQ ID NO: 61653 - protein, 14 aa, Homo Sapiens
EENLRKKGEPHHEL

SEQ ID NO: 61654 - protein, 14 aa, Homo Sapiens
ENLRKKGEPHHELP

SEQ ID NO: 61655 - protein, 14 aa, Homo Sapiens
NLRKKGEPHHELPP

SEQ ID NO: 61656 - protein, 14 aa, Homo Sapiens
LRKKGEPHHELPPG

SEQ ID NO: 61657 - protein, 14 aa, Homo Sapiens
RKKGEPHHELPPGS

SEQ ID NO: 61658 - protein, 14 aa, Homo Sapiens
KKGEPHHELPPGST

SEQ ID NO: 61659 - protein, 14 aa, Homo Sapiens
KGEPHHELPPGSTK

SEQ ID NO: 61660 - protein, 14 aa, Homo Sapiens
GEPHHELPPGSTKR

SEQ ID NO: 61661 - protein, 14 aa, Homo Sapiens
EPHHELPPGSTKRA

SEQ ID NO: 61662 - protein, 14 aa, Homo Sapiens
PHHELPPGSTKRAL

SEQ ID NO: 61663 - protein, 14 aa, Homo Sapiens
HHELPPGSTKRALP

SEQ ID NO: 61664 - protein, 14 aa, Homo Sapiens
HELPPGSTKRALPN

SEQ ID NO: 61665 - protein, 14 aa, Homo Sapiens
ELPPGSTKRALPNN

SEQ ID NO: 61666 - protein, 14 aa, Homo Sapiens
LPPGSTKRALPNNT

SEQ ID NO: 61667 - protein, 14 aa, Homo Sapiens
PPGSTKRALPNNTS

SEQ ID NO: 61668 - protein, 14 aa, Homo Sapiens
PGSTKRALPNNTSS

SEQ ID NO: 61669 - protein, 14 aa, Homo Sapiens
GSTKRALPNNTSSS

SEQ ID NO: 61670 - protein, 14 aa, Homo Sapiens
STKRALPNNTSSSP

SEQ ID NO: 61671 - protein, 14 aa, Homo Sapiens
TKRALPNNTSSSPQ

SEQ ID NO: 61672 - protein, 14 aa, Homo Sapiens
KRALPNNTSSSPQP

SEQ ID NO: 61673 - protein, 14 aa, Homo Sapiens
RALPNNTSSSPQPK

SEQ ID NO: 61674 - protein, 14 aa, Homo Sapiens
ALPNNTSSSPQPKK

SEQ ID NO: 61675 - protein, 14 aa, Homo Sapiens
LPNNTSSSPQPKKK

SEQ ID NO: 61676 - protein, 14 aa, Homo Sapiens
PNNTSSSPQPKKKP

SEQ ID NO: 61677 - protein, 14 aa, Homo Sapiens
NNTSSSPQPKKKPL

SEQ ID NO: 61678 - protein, 14 aa, Homo Sapiens
NTSSSPQPKKKPLD

SEQ ID NO: 61679 - protein, 14 aa, Homo Sapiens
TSSSPQPKKKPLDG

SEQ ID NO: 61680 - protein, 14 aa, Homo Sapiens
SSSPQPKKKPLDGE

SEQ ID NO: 61681 - protein, 14 aa, Homo Sapiens
SSPQPKKKPLDGEY

SEQ ID NO: 61682 - protein, 14 aa, Homo Sapiens
SPQPKKKPLDGEYF

SEQ ID NO: 61683 - protein, 14 aa, Homo Sapiens
PQPKKKPLDGEYFT

SEQ ID NO: 61684 - protein, 14 aa, Homo Sapiens
QPKKKPLDGEYFTL

SEQ ID NO: 61685 - protein, 14 aa, Homo Sapiens
PKKKPLDGEYFTLQ

SEQ ID NO: 61686 - protein, 14 aa, Homo Sapiens
KKKPLDGEYFTLQI

SEQ ID NO: 61687 - protein, 14 aa, Homo Sapiens
KKPLDGEYFTLQIR

SEQ ID NO: 61688 - protein, 14 aa, Homo Sapiens
KPLDGEYFTLQIRG

SEQ ID NO: 61689 - protein, 14 aa, Homo Sapiens
PLDGEYFTLQIRGR

SEQ ID NO: 61690 - protein, 14 aa, Homo Sapiens
LDGEYFTLQIRGRE

SEQ ID NO: 61691 - protein, 14 aa, Homo Sapiens
DGEYFTLQIRGRER

SEQ ID NO: 61692 - protein, 14 aa, Homo Sapiens
GEYFTLQIRGRERF

SEQ ID NO: 61693 - protein, 14 aa, Homo Sapiens
EYFTLQIRGRERFE

SEQ ID NO: 61694 - protein, 14 aa, Homo Sapiens
YFTLQIRGRERFEM

SEQ ID NO: 61695 - protein, 14 aa, Homo Sapiens
FTLQIRGRERFEMF

SEQ ID NO: 61696 - protein, 14 aa, Homo Sapiens
TLQIRGRERFEMFR

SEQ ID NO: 61697 - protein, 14 aa, Homo Sapiens
LQIRGRERFEMFRE

SEQ ID NO: 61698 - protein, 14 aa, Homo Sapiens
QIRGRERFEMFREL

SEQ ID NO: 61699 - protein, 14 aa, Homo Sapiens
IRGRERFEMFRELN

SEQ ID NO: 61700 - protein, 14 aa, Homo Sapiens
RGRERFEMFRELNE

SEQ ID NO: 61701 - protein, 14 aa, Homo Sapiens
GRERFEMFRELNEA

SEQ ID NO: 61702 - protein, 14 aa, Homo Sapiens
RERFEMFRELNEAL

SEQ ID NO: 61703 - protein, 14 aa, Homo Sapiens
ERFEMFRELNEALE

SEQ ID NO: 61704 - protein, 14 aa, Homo Sapiens
RFEMFRELNEALEL

SEQ ID NO: 61705 - protein, 14 aa, Homo Sapiens
FEMFRELNEALELK

SEQ ID NO: 61706 - protein, 14 aa, Homo Sapiens
EMFRELNEALELKD

SEQ ID NO: 61707 - protein, 14 aa, Homo Sapiens
MFRELNEALELKDA

SEQ ID NO: 61708 - protein, 14 aa, Homo Sapiens
FRELNEALELKDAQ

SEQ ID NO: 61709 - protein, 14 aa, Homo Sapiens
RELNEALELKDAQA

SEQ ID NO: 61710 - protein, 14 aa, Homo Sapiens
ELNEALELKDAQAG

SEQ ID NO: 61711 - protein, 14 aa, Homo Sapiens
LNEALELKDAQAGK

SEQ ID NO: 61712 - protein, 14 aa, Homo Sapiens
NEALELKDAQAGKE

SEQ ID NO: 61713 - protein, 14 aa, Homo Sapiens
EALELKDAQAGKEP

SEQ ID NO: 61714 - protein, 14 aa, Homo Sapiens
ALELKDAQAGKEPG

SEQ ID NO: 61715 - protein, 14 aa, Homo Sapiens
LELKDAQAGKEPGG

SEQ ID NO: 61716 - protein, 14 aa, Homo Sapiens
ELKDAQAGKEPGGS

SEQ ID NO: 61717 - protein, 14 aa, Homo Sapiens
LKDAQAGKEPGGSR

SEQ ID NO: 61718 - protein, 14 aa, Homo Sapiens
KDAQAGKEPGGSRA

SEQ ID NO: 61719 - protein, 14 aa, Homo Sapiens
DAQAGKEPGGSRAH

SEQ ID NO: 61720 - protein, 14 aa, Homo Sapiens
AQAGKEPGGSRAHS

SEQ ID NO: 61721 - protein, 14 aa, Homo Sapiens
QAGKEPGGSRAHSS

SEQ ID NO: 61722 - protein, 14 aa, Homo Sapiens
AGKEPGGSRAHSSH

SEQ ID NO: 61723 - protein, 14 aa, Homo Sapiens
GKEPGGSRAHSSHL

SEQ ID NO: 61724 - protein, 14 aa, Homo Sapiens
KEPGGSRAHSSHLK

SEQ ID NO: 61725 - protein, 14 aa, Homo Sapiens
EPGGSRAHSSHLKS

SEQ ID NO: 61726 - protein, 14 aa, Homo Sapiens
PGGSRAHSSHLKSK

SEQ ID NO: 61727 - protein, 14 aa, Homo Sapiens
GGSRAHSSHLKSKK

SEQ ID NO: 61728 - protein, 14 aa, Homo Sapiens
GSRAHSSHLKSKKG

SEQ ID NO: 61729 - protein, 14 aa, Homo Sapiens
SRAHSSHLKSKKGQ

SEQ ID NO: 61730 - protein, 14 aa, Homo Sapiens
RAHSSHLKSKKGQS

SEQ ID NO: 61731 - protein, 14 aa, Homo Sapiens
AHSSHLKSKKGQST

SEQ ID NO: 61732 - protein, 14 aa, Homo Sapiens
HSSHLKSKKGQSTS

SEQ ID NO: 61733 - protein, 14 aa, Homo Sapiens
SSHLKSKKGQSTSR

SEQ ID NO: 61734 - protein, 14 aa, Homo Sapiens
SHLKSKKGQSTSRH

SEQ ID NO: 61735 - protein, 14 aa, Homo Sapiens
HLKSKKGQSTSRHK

SEQ ID NO: 61736 - protein, 14 aa, Homo Sapiens
LKSKKGQSTSRHKK

SEQ ID NO: 61737 - protein, 14 aa, Homo Sapiens
KSKKGQSTSRHKKL

SEQ ID NO: 61738 - protein, 14 aa, Homo Sapiens
SKKGQSTSRHKKLM

SEQ ID NO: 61739 - protein, 14 aa, Homo Sapiens
KKGQSTSRHKKLMF

SEQ ID NO: 61740 - protein, 14 aa, Homo Sapiens
KGQSTSRHKKLMFK

SEQ ID NO: 61741 - protein, 14 aa, Homo Sapiens
GQSTSRHKKLMFKT

SEQ ID NO: 61742 - protein, 14 aa, Homo Sapiens
QSTSRHKKLMFKTE

SEQ ID NO: 61743 - protein, 14 aa, Homo Sapiens
STSRHKKLMFKTEG

SEQ ID NO: 61744 - protein, 14 aa, Homo Sapiens
TSRHKKLMFKTEGP

SEQ ID NO: 61745 - protein, 14 aa, Homo Sapiens
SRHKKLMFKTEGPD

SEQ ID NO: 61746 - protein, 14 aa, Homo Sapiens
RHKKLMFKTEGPDS

SEQ ID NO: 61747 - protein, 14 aa, Homo Sapiens
HKKLMFKTEGPDSD

SEQ ID NO: 61748 - protein, 15 aa, Homo Sapiens
MEEPQSDPSVEPPLS

SEQ ID NO: 61749 - protein, 15 aa, Homo Sapiens
EEPQSDPSVEPPLSQ

SEQ ID NO: 61750 - protein, 15 aa, Homo Sapiens
EPQSDPSVEPPLSQE

SEQ ID NO: 61751 - protein, 15 aa, Homo Sapiens
PQSDPSVEPPLSQET

SEQ ID NO: 61752 - protein, 15 aa, Homo Sapiens
QSDPSVEPPLSQETF

SEQ ID NO: 61753 - protein, 15 aa, Homo Sapiens
SDPSVEPPLSQETFS

SEQ ID NO: 61754 - protein, 15 aa, Homo Sapiens
DPSVEPPLSQETFSD

SEQ ID NO: 61755 - protein, 15 aa, Homo Sapiens
PSVEPPLSQETFSDL

SEQ ID NO: 61756 - protein, 15 aa, Homo Sapiens
SVEPPLSQETFSDLW

SEQ ID NO: 61757 - protein, 15 aa, Homo Sapiens
VEPPLSQETFSDLWK

SEQ ID NO: 61758 - protein, 15 aa, Homo Sapiens
EPPLSQETFSDLWKL

SEQ ID NO: 61759 - protein, 15 aa, Homo Sapiens
PPLSQETFSDLWKLL

SEQ ID NO: 61760 - protein, 15 aa, Homo Sapiens
PLSQETFSDLWKLLP

SEQ ID NO: 61761 - protein, 15 aa, Homo Sapiens
LSQETFSDLWKLLPE

SEQ ID NO: 61762 - protein, 15 aa, Homo Sapiens
SQETFSDLWKLLPEN

SEQ ID NO: 61763 - protein, 15 aa, Homo Sapiens
QETFSDLWKLLPENN

SEQ ID NO: 61764 - protein, 15 aa, Homo Sapiens
ETFSDLWKLLPENNV

SEQ ID NO: 61765 - protein, 15 aa, Homo Sapiens
TFSDLWKLLPENNVL

SEQ ID NO: 61766 - protein, 15 aa, Homo Sapiens
FSDLWKLLPENNVLS

SEQ ID NO: 61767 - protein, 15 aa, Homo Sapiens
SDLWKLLPENNVLSP

SEQ ID NO: 61768 - protein, 15 aa, Homo Sapiens
DLWKLLPENNVLSPL

SEQ ID NO: 61769 - protein, 15 aa, Homo Sapiens
LWKLLPENNVLSPLP

SEQ ID NO: 61770 - protein, 15 aa, Homo Sapiens
WKLLPENNVLSPLPS

SEQ ID NO: 61771 - protein, 15 aa, Homo Sapiens
KLLPENNVLSPLPSQ

SEQ ID NO: 61772 - protein, 15 aa, Homo Sapiens
LLPENNVLSPLPSQA

SEQ ID NO: 61773 - protein, 15 aa, Homo Sapiens
LPENNVLSPLPSQAM

SEQ ID NO: 61774 - protein, 15 aa, Homo Sapiens
PENNVLSPLPSQAMD

SEQ ID NO: 61775 - protein, 15 aa, Homo Sapiens
ENNVLSPLPSQAMDD

SEQ ID NO: 61776 - protein, 15 aa, Homo Sapiens
NNVLSPLPSQAMDDL

SEQ ID NO: 61777 - protein, 15 aa, Homo Sapiens
NVLSPLPSQAMDDLM

SEQ ID NO: 61778 - protein, 15 aa, Homo Sapiens
VLSPLPSQAMDDLML

SEQ ID NO: 61779 - protein, 15 aa, Homo Sapiens
LSPLPSQAMDDLMLS

SEQ ID NO: 61780 - protein, 15 aa, Homo Sapiens
SPLPSQAMDDLMLSP

SEQ ID NO: 61781 - protein, 15 aa, Homo Sapiens
PLPSQAMDDLMLSPD

SEQ ID NO: 61782 - protein, 15 aa, Homo Sapiens
LPSQAMDDLMLSPDD

SEQ ID NO: 61783 - protein, 15 aa, Homo Sapiens
PSQAMDDLMLSPDDI

SEQ ID NO: 61784 - protein, 15 aa, Homo Sapiens
SQAMDDLMLSPDDIE

SEQ ID NO: 61785 - protein, 15 aa, Homo Sapiens
QAMDDLMLSPDDIEQ

SEQ ID NO: 61786 - protein, 15 aa, Homo Sapiens
AMDDLMLSPDDIEQW

SEQ ID NO: 61787 - protein, 15 aa, Homo Sapiens
MDDLMLSPDDIEQWF

SEQ ID NO: 61788 - protein, 15 aa, Homo Sapiens
DDLMLSPDDIEQWFT

SEQ ID NO: 61789 - protein, 15 aa, Homo Sapiens
DLMLSPDDIEQWFTE

SEQ ID NO: 61790 - protein, 15 aa, Homo Sapiens
LMLSPDDIEQWFTED

SEQ ID NO: 61791 - protein, 15 aa, Homo Sapiens
MLSPDDIEQWFTEDP

SEQ ID NO: 61792 - protein, 15 aa, Homo Sapiens
LSPDDIEQWFTEDPG

SEQ ID NO: 61793 - protein, 15 aa, Homo Sapiens
SPDDIEQWFTEDPGP

SEQ ID NO: 61794 - protein, 15 aa, Homo Sapiens
PDDIEQWFTEDPGPD

SEQ ID NO: 61795 - protein, 15 aa, Homo Sapiens
DDIEQWFTEDPGPDE

SEQ ID NO: 61796 - protein, 15 aa, Homo Sapiens
DIEQWFTEDPGPDEA

SEQ ID NO: 61797 - protein, 15 aa, Homo Sapiens
IEQWFTEDPGPDEAP

SEQ ID NO: 61798 - protein, 15 aa, Homo Sapiens
EQWFTEDPGPDEAPR

SEQ ID NO: 61799 - protein, 15 aa, Homo Sapiens
QWFTEDPGPDEAPRM

SEQ ID NO: 61800 - protein, 15 aa, Homo Sapiens
WFTEDPGPDEAPRMP

SEQ ID NO: 61801 - protein, 15 aa, Homo Sapiens
FTEDPGPDEAPRMPE

SEQ ID NO: 61802 - protein, 15 aa, Homo Sapiens
TEDPGPDEAPRMPEA

SEQ ID NO: 61803 - protein, 15 aa, Homo Sapiens
EDPGPDEAPRMPEAA

SEQ ID NO: 61804 - protein, 15 aa, Homo Sapiens
DPGPDEAPRMPEAAP

SEQ ID NO: 61805 - protein, 15 aa, Homo Sapiens
PGPDEAPRMPEAAPR

SEQ ID NO: 61806 - protein, 15 aa, Homo Sapiens
GPDEAPRMPEAAPRV

SEQ ID NO: 61807 - protein, 15 aa, Homo Sapiens
PDEAPRMPEAAPRVA

SEQ ID NO: 61808 - protein, 15 aa, Homo Sapiens
DEAPRMPEAAPRVAP

SEQ ID NO: 61809 - protein, 15 aa, Homo Sapiens
EAPRMPEAAPRVAPA

SEQ ID NO: 61810 - protein, 15 aa, Homo Sapiens
APRMPEAAPRVAPAP

SEQ ID NO: 61811 - protein, 15 aa, Homo Sapiens
PRMPEAAPRVAPAPA

SEQ ID NO: 61812 - protein, 15 aa, Homo Sapiens
RMPEAAPRVAPAPAA

SEQ ID NO: 61813 - protein, 15 aa, Homo Sapiens
MPEAAPRVAPAPAAP

SEQ ID NO: 61814 - protein, 15 aa, Homo Sapiens
PEAAPRVAPAPAAPT

SEQ ID NO: 61815 - protein, 15 aa, Homo Sapiens
EAAPRVAPAPAAPTP

SEQ ID NO: 61816 - protein, 15 aa, Homo Sapiens
AAPRVAPAPAAPTPA

SEQ ID NO: 61817 - protein, 15 aa, Homo Sapiens
APRVAPAPAAPTPAA

SEQ ID NO: 61818 - protein, 15 aa, Homo Sapiens
PRVAPAPAAPTPAAP

SEQ ID NO: 61819 - protein, 15 aa, Homo Sapiens
RVAPAPAAPTPAAPA

SEQ ID NO: 61820 - protein, 15 aa, Homo Sapiens
VAPAPAAPTPAAPAP

SEQ ID NO: 61821 - protein, 15 aa, Homo Sapiens
APAPAAPTPAAPAPA

SEQ ID NO: 61822 - protein, 15 aa, Homo Sapiens
PAPAAPTPAAPAPAP

SEQ ID NO: 61823 - protein, 15 aa, Homo Sapiens
APAAPTPAAPAPAPS

SEQ ID NO: 61824 - protein, 15 aa, Homo Sapiens
PAAPTPAAPAPAPSW

SEQ ID NO: 61825 - protein, 15 aa, Homo Sapiens
AAPTPAAPAPAPSWP

SEQ ID NO: 61826 - protein, 15 aa, Homo Sapiens
APTPAAPAPAPSWPL

SEQ ID NO: 61827 - protein, 15 aa, Homo Sapiens
PTPAAPAPAPSWPLS

SEQ ID NO: 61828 - protein, 15 aa, Homo Sapiens
TPAAPAPAPSWPLSS

SEQ ID NO: 61829 - protein, 15 aa, Homo Sapiens
PAAPAPAPSWPLSSS

SEQ ID NO: 61830 - protein, 15 aa, Homo Sapiens
AAPAPAPSWPLSSSV

SEQ ID NO: 61831 - protein, 15 aa, Homo Sapiens
APAPAPSWPLSSSVP

SEQ ID NO: 61832 - protein, 15 aa, Homo Sapiens
PAPAPSWPLSSSVPS

SEQ ID NO: 61833 - protein, 15 aa, Homo Sapiens
APAPSWPLSSSVPSQ

SEQ ID NO: 61834 - protein, 15 aa, Homo Sapiens
PAPSWPLSSSVPSQK

SEQ ID NO: 61835 - protein, 15 aa, Homo Sapiens
APSWPLSSSVPSQKT

SEQ ID NO: 61836 - protein, 15 aa, Homo Sapiens
PSWPLSSSVPSQKTY

SEQ ID NO: 61837 - protein, 15 aa, Homo Sapiens
SWPLSSSVPSQKTYQ

SEQ ID NO: 61838 - protein, 15 aa, Homo Sapiens
WPLSSSVPSQKTYQG

SEQ ID NO: 61839 - protein, 15 aa, Homo Sapiens
PLSSSVPSQKTYQGS

SEQ ID NO: 61840 - protein, 15 aa, Homo Sapiens
LSSSVPSQKTYQGSY

SEQ ID NO: 61841 - protein, 15 aa, Homo Sapiens
SSSVPSQKTYQGSYG

SEQ ID NO: 61842 - protein, 15 aa, Homo Sapiens
SSVPSQKTYQGSYGF

SEQ ID NO: 61843 - protein, 15 aa, Homo Sapiens
SVPSQKTYQGSYGFR

SEQ ID NO: 61844 - protein, 15 aa, Homo Sapiens
VPSQKTYQGSYGFRL

SEQ ID NO: 61845 - protein, 15 aa, Homo Sapiens
PSQKTYQGSYGFRLG

SEQ ID NO: 61846 - protein, 15 aa, Homo Sapiens
SQKTYQGSYGFRLGF

SEQ ID NO: 61847 - protein, 15 aa, Homo Sapiens
QKTYQGSYGFRLGFL

SEQ ID NO: 61848 - protein, 15 aa, Homo Sapiens
KTYQGSYGFRLGFLH

SEQ ID NO: 61849 - protein, 15 aa, Homo Sapiens
TYQGSYGFRLGFLHS

SEQ ID NO: 61850 - protein, 15 aa, Homo Sapiens
YQGSYGFRLGFLHSG

SEQ ID NO: 61851 - protein, 15 aa, Homo Sapiens
QGSYGFRLGFLHSGT

SEQ ID NO: 61852 - protein, 15 aa, Homo Sapiens
GSYGFRLGFLHSGTA

SEQ ID NO: 61853 - protein, 15 aa, Homo Sapiens
SYGFRLGFLHSGTAK

SEQ ID NO: 61854 - protein, 15 aa, Homo Sapiens
YGFRLGFLHSGTAKS

SEQ ID NO: 61855 - protein, 15 aa, Homo Sapiens
GFRLGFLHSGTAKSV

SEQ ID NO: 61856 - protein, 15 aa, Homo Sapiens
FRLGFLHSGTAKSVT

SEQ ID NO: 61857 - protein, 15 aa, Homo Sapiens
RLGFLHSGTAKSVTC

SEQ ID NO: 61858 - protein, 15 aa, Homo Sapiens
LGFLHSGTAKSVTCT

SEQ ID NO: 61859 - protein, 15 aa, Homo Sapiens
GFLHSGTAKSVTCTY

SEQ ID NO: 61860 - protein, 15 aa, Homo Sapiens
FLHSGTAKSVTCTYS

SEQ ID NO: 61861 - protein, 15 aa, Homo Sapiens
LHSGTAKSVTCTYSP

SEQ ID NO: 61862 - protein, 15 aa, Homo Sapiens
HSGTAKSVTCTYSPA

SEQ ID NO: 61863 - protein, 15 aa, Homo Sapiens
SGTAKSVTCTYSPAL

SEQ ID NO: 61864 - protein, 15 aa, Homo Sapiens
GTAKSVTCTYSPALN

SEQ ID NO: 61865 - protein, 15 aa, Homo Sapiens
TAKSVTCTYSPALNK

SEQ ID NO: 61866 - protein, 15 aa, Homo Sapiens
AKSVTCTYSPALNKM

SEQ ID NO: 61867 - protein, 15 aa, Homo Sapiens
KSVTCTYSPALNKMF

SEQ ID NO: 61868 - protein, 15 aa, Homo Sapiens
SVTCTYSPALNKMFC

SEQ ID NO: 61869 - protein, 15 aa, Homo Sapiens
VTCTYSPALNKMFCQ

SEQ ID NO: 61870 - protein, 15 aa, Homo Sapiens
TCTYSPALNKMFCQL

SEQ ID NO: 61871 - protein, 15 aa, Homo Sapiens
CTYSPALNKMFCQLA

SEQ ID NO: 61872 - protein, 15 aa, Homo Sapiens
TYSPALNKMFCQLAK

SEQ ID NO: 61873 - protein, 15 aa, Homo Sapiens
YSPALNKMFCQLAKT

SEQ ID NO: 61874 - protein, 15 aa, Homo Sapiens
SPALNKMFCQLAKTC

SEQ ID NO: 61875 - protein, 15 aa, Homo Sapiens
PALNKMFCQLAKTCP

SEQ ID NO: 61876 - protein, 15 aa, Homo Sapiens
ALNKMFCQLAKTCPV

SEQ ID NO: 61877 - protein, 15 aa, Homo Sapiens
LNKMFCQLAKTCPVQ

SEQ ID NO: 61878 - protein, 15 aa, Homo Sapiens
NKMFCQLAKTCPVQL

SEQ ID NO: 61879 - protein, 15 aa, Homo Sapiens
KMFCQLAKTCPVQLW

SEQ ID NO: 61880 - protein, 15 aa, Homo Sapiens
MFCQLAKTCPVQLWV

SEQ ID NO: 61881 - protein, 15 aa, Homo Sapiens
FCQLAKTCPVQLWVD

SEQ ID NO: 61882 - protein, 15 aa, Homo Sapiens
CQLAKTCPVQLWVDS

SEQ ID NO: 61883 - protein, 15 aa, Homo Sapiens
QLAKTCPVQLWVDST

SEQ ID NO: 61884 - protein, 15 aa, Homo Sapiens
LAKTCPVQLWVDSTP

SEQ ID NO: 61885 - protein, 15 aa, Homo Sapiens
AKTCPVQLWVDSTPP

SEQ ID NO: 61886 - protein, 15 aa, Homo Sapiens
KTCPVQLWVDSTPPP

SEQ ID NO: 61887 - protein, 15 aa, Homo Sapiens
TCPVQLWVDSTPPPG

SEQ ID NO: 61888 - protein, 15 aa, Homo Sapiens
CPVQLWVDSTPPPGT

SEQ ID NO: 61889 - protein, 15 aa, Homo Sapiens
PVQLWVDSTPPPGTR

SEQ ID NO: 61890 - protein, 15 aa, Homo Sapiens
VQLWVDSTPPPGTRV

SEQ ID NO: 61891 - protein, 15 aa, Homo Sapiens
QLWVDSTPPPGTRVR

SEQ ID NO: 61892 - protein, 15 aa, Homo Sapiens
LWVDSTPPPGTRVRA

SEQ ID NO: 61893 - protein, 15 aa, Homo Sapiens
WVDSTPPPGTRVRAM

SEQ ID NO: 61894 - protein, 15 aa, Homo Sapiens
VDSTPPPGTRVRAMA

SEQ ID NO: 61895 - protein, 15 aa, Homo Sapiens
DSTPPPGTRVRAMAI

SEQ ID NO: 61896 - protein, 15 aa, Homo Sapiens
STPPPGTRVRAMAIY

SEQ ID NO: 61897 - protein, 15 aa, Homo Sapiens
TPPPGTRVRAMAIYK

SEQ ID NO: 61898 - protein, 15 aa, Homo Sapiens
PPPGTRVRAMAIYKQ

SEQ ID NO: 61899 - protein, 15 aa, Homo Sapiens
PPGTRVRAMAIYKQS

SEQ ID NO: 61900 - protein, 15 aa, Homo Sapiens
PGTRVRAMAIYKQSQ

SEQ ID NO: 61901 - protein, 15 aa, Homo Sapiens
GTRVRAMAIYKQSQH

SEQ ID NO: 61902 - protein, 15 aa, Homo Sapiens
TRVRAMAIYKQSQHM

SEQ ID NO: 61903 - protein, 15 aa, Homo Sapiens
RVRAMAIYKQSQHMT

SEQ ID NO: 61904 - protein, 15 aa, Homo Sapiens
VRAMAIYKQSQHMTE

SEQ ID NO: 61905 - protein, 15 aa, Homo Sapiens
RAMAIYKQSQHMTEV

SEQ ID NO: 61906 - protein, 15 aa, Homo Sapiens
AMAIYKQSQHMTEVV

SEQ ID NO: 61907 - protein, 15 aa, Homo Sapiens
MAIYKQSQHMTEVVR

SEQ ID NO: 61908 - protein, 15 aa, Homo Sapiens
AIYKQSQHMTEVVRR

SEQ ID NO: 61909 - protein, 15 aa, Homo Sapiens
IYKQSQHMTEVVRRC

SEQ ID NO: 61910 - protein, 15 aa, Homo Sapiens
YKQSQHMTEVVRRCP

SEQ ID NO: 61911 - protein, 15 aa, Homo Sapiens
KQSQHMTEVVRRCPH

SEQ ID NO: 61912 - protein, 15 aa, Homo Sapiens
QSQHMTEVVRRCPHH

SEQ ID NO: 61913 - protein, 15 aa, Homo Sapiens
SQHMTEVVRRCPHHE

SEQ ID NO: 61914 - protein, 15 aa, Homo Sapiens
QHMTEVVRRCPHHER

SEQ ID NO: 61915 - protein, 15 aa, Homo Sapiens
HMTEVVRRCPHHERC

SEQ ID NO: 61916 - protein, 15 aa, Homo Sapiens
MTEVVRRCPHHERCS

SEQ ID NO: 61917 - protein, 15 aa, Homo Sapiens
TEVVRRCPHHERCSD

SEQ ID NO: 61918 - protein, 15 aa, Homo Sapiens
EVVRRCPHHERCSDS

SEQ ID NO: 61919 - protein, 15 aa, Homo Sapiens
VVRRCPHHERCSDSD

SEQ ID NO: 61920 - protein, 15 aa, Homo Sapiens
VRRCPHHERCSDSDG

SEQ ID NO: 61921 - protein, 15 aa, Homo Sapiens
RRCPHHERCSDSDGL

SEQ ID NO: 61922 - protein, 15 aa, Homo Sapiens
RCPHHERCSDSDGLA

SEQ ID NO: 61923 - protein, 15 aa, Homo Sapiens
CPHHERCSDSDGLAP

SEQ ID NO: 61924 - protein, 15 aa, Homo Sapiens
PHHERCSDSDGLAPP

SEQ ID NO: 61925 - protein, 15 aa, Homo Sapiens
HHERCSDSDGLAPPQ

SEQ ID NO: 61926 - protein, 15 aa, Homo Sapiens
HERCSDSDGLAPPQH

SEQ ID NO: 61927 - protein, 15 aa, Homo Sapiens
ERCSDSDGLAPPQHL

SEQ ID NO: 61928 - protein, 15 aa, Homo Sapiens
RCSDSDGLAPPQHLI

SEQ ID NO: 61929 - protein, 15 aa, Homo Sapiens
CSDSDGLAPPQHLIR

SEQ ID NO: 61930 - protein, 15 aa, Homo Sapiens
SDSDGLAPPQHLIRV

SEQ ID NO: 61931 - protein, 15 aa, Homo Sapiens
DSDGLAPPQHLIRVE

SEQ ID NO: 61932 - protein, 15 aa, Homo Sapiens
SDGLAPPQHLIRVEG

SEQ ID NO: 61933 - protein, 15 aa, Homo Sapiens
DGLAPPQHLIRVEGN

SEQ ID NO: 61934 - protein, 15 aa, Homo Sapiens
GLAPPQHLIRVEGNL

SEQ ID NO: 61935 - protein, 15 aa, Homo Sapiens
LAPPQHLIRVEGNLR

SEQ ID NO: 61936 - protein, 15 aa, Homo Sapiens
APPQHLIRVEGNLRV

SEQ ID NO: 61937 - protein, 15 aa, Homo Sapiens
PPQHLIRVEGNLRVE

SEQ ID NO: 61938 - protein, 15 aa, Homo Sapiens
PQHLIRVEGNLRVEY

SEQ ID NO: 61939 - protein, 15 aa, Homo Sapiens
QHLIRVEGNLRVEYL

SEQ ID NO: 61940 - protein, 15 aa, Homo Sapiens
HLIRVEGNLRVEYLD

SEQ ID NO: 61941 - protein, 15 aa, Homo Sapiens
LIRVEGNLRVEYLDD

SEQ ID NO: 61942 - protein, 15 aa, Homo Sapiens
IRVEGNLRVEYLDDR

SEQ ID NO: 61943 - protein, 15 aa, Homo Sapiens
RVEGNLRVEYLDDRN

SEQ ID NO: 61944 - protein, 15 aa, Homo Sapiens
VEGNLRVEYLDDRNT

SEQ ID NO: 61945 - protein, 15 aa, Homo Sapiens
EGNLRVEYLDDRNTF

SEQ ID NO: 61946 - protein, 15 aa, Homo Sapiens
GNLRVEYLDDRNTFR

SEQ ID NO: 61947 - protein, 15 aa, Homo Sapiens
NLRVEYLDDRNTFRH

SEQ ID NO: 61948 - protein, 15 aa, Homo Sapiens
LRVEYLDDRNTFRHS

SEQ ID NO: 61949 - protein, 15 aa, Homo Sapiens
RVEYLDDRNTFRHSV

SEQ ID NO: 61950 - protein, 15 aa, Homo Sapiens
VEYLDDRNTFRHSVV

SEQ ID NO: 61951 - protein, 15 aa, Homo Sapiens
EYLDDRNTFRHSVVV

SEQ ID NO: 61952 - protein, 15 aa, Homo Sapiens
YLDDRNTFRHSVVVP

SEQ ID NO: 61953 - protein, 15 aa, Homo Sapiens
LDDRNTFRHSVVVPY

SEQ ID NO: 61954 - protein, 15 aa, Homo Sapiens
DDRNTFRHSVVVPYE

SEQ ID NO: 61955 - protein, 15 aa, Homo Sapiens
DRNTFRHSVVVPYEP

SEQ ID NO: 61956 - protein, 15 aa, Homo Sapiens
RNTFRHSVVVPYEPP

SEQ ID NO: 61957 - protein, 15 aa, Homo Sapiens
NTFRHSVVVPYEPPE

SEQ ID NO: 61958 - protein, 15 aa, Homo Sapiens
TFRHSVVVPYEPPEV

SEQ ID NO: 61959 - protein, 15 aa, Homo Sapiens
FRHSVVVPYEPPEVG

SEQ ID NO: 61960 - protein, 15 aa, Homo Sapiens
RHSVVVPYEPPEVGS

SEQ ID NO: 61961 - protein, 15 aa, Homo Sapiens
HSVVVPYEPPEVGSD

SEQ ID NO: 61962 - protein, 15 aa, Homo Sapiens
SVVVPYEPPEVGSDC

SEQ ID NO: 61963 - protein, 15 aa, Homo Sapiens
VVVPYEPPEVGSDCT

SEQ ID NO: 61964 - protein, 15 aa, Homo Sapiens
VVPYEPPEVGSDCTT

SEQ ID NO: 61965 - protein, 15 aa, Homo Sapiens
VPYEPPEVGSDCTTI

SEQ ID NO: 61966 - protein, 15 aa, Homo Sapiens
PYEPPEVGSDCTTIH

SEQ ID NO: 61967 - protein, 15 aa, Homo Sapiens
YEPPEVGSDCTTIHY

SEQ ID NO: 61968 - protein, 15 aa, Homo Sapiens
EPPEVGSDCTTIHYN

SEQ ID NO: 61969 - protein, 15 aa, Homo Sapiens
PPEVGSDCTTIHYNY

SEQ ID NO: 61970 - protein, 15 aa, Homo Sapiens
PEVGSDCTTIHYNYM

SEQ ID NO: 61971 - protein, 15 aa, Homo Sapiens
EVGSDCTTIHYNYMC

SEQ ID NO: 61972 - protein, 15 aa, Homo Sapiens
VGSDCTTIHYNYMCN

SEQ ID NO: 61973 - protein, 15 aa, Homo Sapiens
GSDCTTIHYNYMCNS

SEQ ID NO: 61974 - protein, 15 aa, Homo Sapiens
SDCTTIHYNYMCNSS

SEQ ID NO: 61975 - protein, 15 aa, Homo Sapiens
DCTTIHYNYMCNSSC

SEQ ID NO: 61976 - protein, 15 aa, Homo Sapiens
CTTIHYNYMCNSSCM

SEQ ID NO: 61977 - protein, 15 aa, Homo Sapiens
TTIHYNYMCNSSCMG

SEQ ID NO: 61978 - protein, 15 aa, Homo Sapiens
TIHYNYMCNSSCMGG

SEQ ID NO: 61979 - protein, 15 aa, Homo Sapiens
IHYNYMCNSSCMGGM

SEQ ID NO: 61980 - protein, 15 aa, Homo Sapiens
HYNYMCNSSCMGGMN

SEQ ID NO: 61981 - protein, 15 aa, Homo Sapiens
YNYMCNSSCMGGMNR

SEQ ID NO: 61982 - protein, 15 aa, Homo Sapiens
NYMCNSSCMGGMNRR

SEQ ID NO: 61983 - protein, 15 aa, Homo Sapiens
YMCNSSCMGGMNRRP

SEQ ID NO: 61984 - protein, 15 aa, Homo Sapiens
MCNSSCMGGMNRRPI

SEQ ID NO: 61985 - protein, 15 aa, Homo Sapiens
CNSSCMGGMNRRPIL

SEQ ID NO: 61986 - protein, 15 aa, Homo Sapiens
NSSCMGGMNRRPILT

SEQ ID NO: 61987 - protein, 15 aa, Homo Sapiens
SSCMGGMNRRPILTI

SEQ ID NO: 61988 - protein, 15 aa, Homo Sapiens
SCMGGMNRRPILTII

SEQ ID NO: 61989 - protein, 15 aa, Homo Sapiens
CMGGMNRRPILTIIT

SEQ ID NO: 61990 - protein, 15 aa, Homo Sapiens
MGGMNRRPILTIITL

SEQ ID NO: 61991 - protein, 15 aa, Homo Sapiens
GGMNRRPILTIITLE

SEQ ID NO: 61992 - protein, 15 aa, Homo Sapiens
GMNRRPILTIITLED

SEQ ID NO: 61993 - protein, 15 aa, Homo Sapiens
MNRRPILTIITLEDS

SEQ ID NO: 61994 - protein, 15 aa, Homo Sapiens
NRRPILTIITLEDSS

SEQ ID NO: 61995 - protein, 15 aa, Homo Sapiens
RRPILTIITLEDSSG

SEQ ID NO: 61996 - protein, 15 aa, Homo Sapiens
RPILTIITLEDSSGN

SEQ ID NO: 61997 - protein, 15 aa, Homo Sapiens
PILTIITLEDSSGNL

SEQ ID NO: 61998 - protein, 15 aa, Homo Sapiens
ILTIITLEDSSGNLL

SEQ ID NO: 61999 - protein, 15 aa, Homo Sapiens
LTIITLEDSSGNLLG

SEQ ID NO: 62000 - protein, 15 aa, Homo Sapiens
TIITLEDSSGNLLGR

SEQ ID NO: 62001 - protein, 15 aa, Homo Sapiens
IITLEDSSGNLLGRN

SEQ ID NO: 62002 - protein, 15 aa, Homo Sapiens
ITLEDSSGNLLGRNS

SEQ ID NO: 62003 - protein, 15 aa, Homo Sapiens
TLEDSSGNLLGRNSF

SEQ ID NO: 62004 - protein, 15 aa, Homo Sapiens
LEDSSGNLLGRNSFE

SEQ ID NO: 62005 - protein, 15 aa, Homo Sapiens
EDSSGNLLGRNSFEV

SEQ ID NO: 62006 - protein, 15 aa, Homo Sapiens
DSSGNLLGRNSFEVR

SEQ ID NO: 62007 - protein, 15 aa, Homo Sapiens
SSGNLLGRNSFEVRV

SEQ ID NO: 62008 - protein, 15 aa, Homo Sapiens
SGNLLGRNSFEVRVC

SEQ ID NO: 62009 - protein, 15 aa, Homo Sapiens
GNLLGRNSFEVRVCA

SEQ ID NO: 62010 - protein, 15 aa, Homo Sapiens
NLLGRNSFEVRVCAC

SEQ ID NO: 62011 - protein, 15 aa, Homo Sapiens
LLGRNSFEVRVCACP

SEQ ID NO: 62012 - protein, 15 aa, Homo Sapiens
LGRNSFEVRVCACPG

SEQ ID NO: 62013 - protein, 15 aa, Homo Sapiens
GRNSFEVRVCACPGR

SEQ ID NO: 62014 - protein, 15 aa, Homo Sapiens
RNSFEVRVCACPGRD

SEQ ID NO: 62015 - protein, 15 aa, Homo Sapiens
NSFEVRVCACPGRDR

SEQ ID NO: 62016 - protein, 15 aa, Homo Sapiens
SFEVRVCACPGRDRR

SEQ ID NO: 62017 - protein, 15 aa, Homo Sapiens
FEVRVCACPGRDRRT

SEQ ID NO: 62018 - protein, 15 aa, Homo Sapiens
EVRVCACPGRDRRTE

SEQ ID NO: 62019 - protein, 15 aa, Homo Sapiens
VRVCACPGRDRRTEE

SEQ ID NO: 62020 - protein, 15 aa, Homo Sapiens
RVCACPGRDRRTEEE

SEQ ID NO: 62021 - protein, 15 aa, Homo Sapiens
VCACPGRDRRTEEEN

SEQ ID NO: 62022 - protein, 15 aa, Homo Sapiens
CACPGRDRRTEEENL

SEQ ID NO: 62023 - protein, 15 aa, Homo Sapiens
ACPGRDRRTEEENLR

SEQ ID NO: 62024 - protein, 15 aa, Homo Sapiens
CPGRDRRTEEENLRK

SEQ ID NO: 62025 - protein, 15 aa, Homo Sapiens
PGRDRRTEEENLRKK

SEQ ID NO: 62026 - protein, 15 aa, Homo Sapiens
GRDRRTEEENLRKKG

SEQ ID NO: 62027 - protein, 15 aa, Homo Sapiens
RDRRTEEENLRKKGE

SEQ ID NO: 62028 - protein, 15 aa, Homo Sapiens
DRRTEEENLRKKGEP

SEQ ID NO: 62029 - protein, 15 aa, Homo Sapiens
RRTEEENLRKKGEPH

SEQ ID NO: 62030 - protein, 15 aa, Homo Sapiens
RTEEENLRKKGEPHH

SEQ ID NO: 62031 - protein, 15 aa, Homo Sapiens
TEEENLRKKGEPHHE

SEQ ID NO: 62032 - protein, 15 aa, Homo Sapiens
EEENLRKKGEPHHEL

SEQ ID NO: 62033 - protein, 15 aa, Homo Sapiens
EENLRKKGEPHHELP

SEQ ID NO: 62034 - protein, 15 aa, Homo Sapiens
ENLRKKGEPHHELPP

SEQ ID NO: 62035 - protein, 15 aa, Homo Sapiens
NLRKKGEPHHELPPG

SEQ ID NO: 62036 - protein, 15 aa, Homo Sapiens
LRKKGEPHHELPPGS

SEQ ID NO: 62037 - protein, 15 aa, Homo Sapiens
RKKGEPHHELPPGST

SEQ ID NO: 62038 - protein, 15 aa, Homo Sapiens
KKGEPHHELPPGSTK

SEQ ID NO: 62039 - protein, 15 aa, Homo Sapiens
KGEPHHELPPGSTKR

SEQ ID NO: 62040 - protein, 15 aa, Homo Sapiens
GEPHHELPPGSTKRA

SEQ ID NO: 62041 - protein, 15 aa, Homo Sapiens
EPHHELPPGSTKRAL

SEQ ID NO: 62042 - protein, 15 aa, Homo Sapiens
PHHELPPGSTKRALP

SEQ ID NO: 62043 - protein, 15 aa, Homo Sapiens
HHELPPGSTKRALPN

SEQ ID NO: 62044 - protein, 15 aa, Homo Sapiens
HELPPGSTKRALPNN

SEQ ID NO: 62045 - protein, 15 aa, Homo Sapiens
ELPPGSTKRALPNNT

SEQ ID NO: 62046 - protein, 15 aa, Homo Sapiens
LPPGSTKRALPNNTS

SEQ ID NO: 62047 - protein, 15 aa, Homo Sapiens
PPGSTKRALPNNTSS

SEQ ID NO: 62048 - protein, 15 aa, Homo Sapiens
PGSTKRALPNNTSSS

SEQ ID NO: 62049 - protein, 15 aa, Homo Sapiens
GSTKRALPNNTSSSP

SEQ ID NO: 62050 - protein, 15 aa, Homo Sapiens
STKRALPNNTSSSPQ

SEQ ID NO: 62051 - protein, 15 aa, Homo Sapiens
TKRALPNNTSSSPQP

SEQ ID NO: 62052 - protein, 15 aa, Homo Sapiens
KRALPNNTSSSPQPK

SEQ ID NO: 62053 - protein, 15 aa, Homo Sapiens
RALPNNTSSSPQPKK

SEQ ID NO: 62054 - protein, 15 aa, Homo Sapiens
ALPNNTSSSPQPKKK

SEQ ID NO: 62055 - protein, 15 aa, Homo Sapiens
LPNNTSSSPQPKKKP

SEQ ID NO: 62056 - protein, 15 aa, Homo Sapiens
PNNTSSSPQPKKKPL

SEQ ID NO: 62057 - protein, 15 aa, Homo Sapiens
NNTSSSPQPKKKPLD

SEQ ID NO: 62058 - protein, 15 aa, Homo Sapiens
NTSSSPQPKKKPLDG

SEQ ID NO: 62059 - protein, 15 aa, Homo Sapiens
TSSSPQPKKKPLDGE

SEQ ID NO: 62060 - protein, 15 aa, Homo Sapiens
SSSPQPKKKPLDGEY

SEQ ID NO: 62061 - protein, 15 aa, Homo Sapiens
SSPQPKKKPLDGEYF

SEQ ID NO: 62062 - protein, 15 aa, Homo Sapiens
SPQPKKKPLDGEYFT

SEQ ID NO: 62063 - protein, 15 aa, Homo Sapiens
PQPKKKPLDGEYFTL

SEQ ID NO: 62064 - protein, 15 aa, Homo Sapiens
QPKKKPLDGEYFTLQ

SEQ ID NO: 62065 - protein, 15 aa, Homo Sapiens
PKKKPLDGEYFTLQI

SEQ ID NO: 62066 - protein, 15 aa, Homo Sapiens
KKKPLDGEYFTLQIR

SEQ ID NO: 62067 - protein, 15 aa, Homo Sapiens
KKPLDGEYFTLQIRG

SEQ ID NO: 62068 - protein, 15 aa, Homo Sapiens
KPLDGEYFTLQIRGR

SEQ ID NO: 62069 - protein, 15 aa, Homo Sapiens
PLDGEYFTLQIRGRE

SEQ ID NO: 62070 - protein, 15 aa, Homo Sapiens
LDGEYFTLQIRGRER

SEQ ID NO: 62071 - protein, 15 aa, Homo Sapiens
DGEYFTLQIRGRERF

SEQ ID NO: 62072 - protein, 15 aa, Homo Sapiens
GEYFTLQIRGRERFE

SEQ ID NO: 62073 - protein, 15 aa, Homo Sapiens
EYFTLQIRGRERFEM

SEQ ID NO: 62074 - protein, 15 aa, Homo Sapiens
YFTLQIRGRERFEMF

SEQ ID NO: 62075 - protein, 15 aa, Homo Sapiens
FTLQIRGRERFEMFR

SEQ ID NO: 62076 - protein, 15 aa, Homo Sapiens
TLQIRGRERFEMFRE

SEQ ID NO: 62077 - protein, 15 aa, Homo Sapiens
LQIRGRERFEMFREL

SEQ ID NO: 62078 - protein, 15 aa, Homo Sapiens
QIRGRERFEMFRELN

SEQ ID NO: 62079 - protein, 15 aa, Homo Sapiens
IRGRERFEMFRELNE

SEQ ID NO: 62080 - protein, 15 aa, Homo Sapiens
RGRERFEMFRELNEA

SEQ ID NO: 62081 - protein, 15 aa, Homo Sapiens
GRERFEMFRELNEAL

SEQ ID NO: 62082 - protein, 15 aa, Homo Sapiens
RERFEMFRELNEALE

SEQ ID NO: 62083 - protein, 15 aa, Homo Sapiens
ERFEMFRELNEALEL

SEQ ID NO: 62084 - protein, 15 aa, Homo Sapiens
RFEMFRELNEALELK

SEQ ID NO: 62085 - protein, 15 aa, Homo Sapiens
FEMFRELNEALELKD

SEQ ID NO: 62086 - protein, 15 aa, Homo Sapiens
EMFRELNEALELKDA

SEQ ID NO: 62087 - protein, 15 aa, Homo Sapiens
MFRELNEALELKDAQ

SEQ ID NO: 62088 - protein, 15 aa, Homo Sapiens
FRELNEALELKDAQA

SEQ ID NO: 62089 - protein, 15 aa, Homo Sapiens
RELNEALELKDAQAG

SEQ ID NO: 62090 - protein, 15 aa, Homo Sapiens
ELNEALELKDAQAGK

SEQ ID NO: 62091 - protein, 15 aa, Homo Sapiens
LNEALELKDAQAGKE

SEQ ID NO: 62092 - protein, 15 aa, Homo Sapiens
NEALELKDAQAGKEP

SEQ ID NO: 62093 - protein, 15 aa, Homo Sapiens
EALELKDAQAGKEPG

SEQ ID NO: 62094 - protein, 15 aa, Homo Sapiens
ALELKDAQAGKEPGG

SEQ ID NO: 62095 - protein, 15 aa, Homo Sapiens
LELKDAQAGKEPGGS

SEQ ID NO: 62096 - protein, 15 aa, Homo Sapiens
ELKDAQAGKEPGGSR

SEQ ID NO: 62097 - protein, 15 aa, Homo Sapiens
LKDAQAGKEPGGSRA

SEQ ID NO: 62098 - protein, 15 aa, Homo Sapiens
KDAQAGKEPGGSRAH

SEQ ID NO: 62099 - protein, 15 aa, Homo Sapiens
DAQAGKEPGGSRAHS

SEQ ID NO: 62100 - protein, 15 aa, Homo Sapiens
AQAGKEPGGSRAHSS

SEQ ID NO: 62101 - protein, 15 aa, Homo Sapiens
QAGKEPGGSRAHSSH

SEQ ID NO: 62102 - protein, 15 aa, Homo Sapiens
AGKEPGGSRAHSSHL

SEQ ID NO: 62103 - protein, 15 aa, Homo Sapiens
GKEPGGSRAHSSHLK

SEQ ID NO: 62104 - protein, 15 aa, Homo Sapiens
KEPGGSRAHSSHLKS

SEQ ID NO: 62105 - protein, 15 aa, Homo Sapiens
EPGGSRAHSSHLKSK

SEQ ID NO: 62106 - protein, 15 aa, Homo Sapiens
PGGSRAHSSHLKSKK

SEQ ID NO: 62107 - protein, 15 aa, Homo Sapiens
GGSRAHSSHLKSKKG

SEQ ID NO: 62108 - protein, 15 aa, Homo Sapiens
GSRAHSSHLKSKKGQ

SEQ ID NO: 62109 - protein, 15 aa, Homo Sapiens
SRAHSSHLKSKKGQS

SEQ ID NO: 62110 - protein, 15 aa, Homo Sapiens
RAHSSHLKSKKGQST

SEQ ID NO: 62111 - protein, 15 aa, Homo Sapiens
AHSSHLKSKKGQSTS

SEQ ID NO: 62112 - protein, 15 aa, Homo Sapiens
HSSHLKSKKGQSTSR

SEQ ID NO: 62113 - protein, 15 aa, Homo Sapiens
SSHLKSKKGQSTSRH

SEQ ID NO: 62114 - protein, 15 aa, Homo Sapiens
SHLKSKKGQSTSRHK

SEQ ID NO: 62115 - protein, 15 aa, Homo Sapiens
HLKSKKGQSTSRHKK

SEQ ID NO: 62116 - protein, 15 aa, Homo Sapiens
LKSKKGQSTSRHKKL

SEQ ID NO: 62117 - protein, 15 aa, Homo Sapiens
KSKKGQSTSRHKKLM

SEQ ID NO: 62118 - protein, 15 aa, Homo Sapiens
SKKGQSTSRHKKLMF

SEQ ID NO: 62119 - protein, 15 aa, Homo Sapiens
KKGQSTSRHKKLMFK

SEQ ID NO: 62120 - protein, 15 aa, Homo Sapiens
KGQSTSRHKKLMFKT

SEQ ID NO: 62121 - protein, 15 aa, Homo Sapiens
GQSTSRHKKLMFKTE

SEQ ID NO: 62122 - protein, 15 aa, Homo Sapiens
QSTSRHKKLMFKTEG

SEQ ID NO: 62123 - protein, 15 aa, Homo Sapiens
STSRHKKLMFKTEGP

SEQ ID NO: 62124 - protein, 15 aa, Homo Sapiens
TSRHKKLMFKTEGPD

SEQ ID NO: 62125 - protein, 15 aa, Homo Sapiens
SRHKKLMFKTEGPDS

SEQ ID NO: 62126 - protein, 15 aa, Homo Sapiens
RHKKLMFKTEGPDSD

SEQ ID NO: 62127 - protein, 16 aa, Homo Sapiens
MEEPQSDPSVEPPLSQ

SEQ ID NO: 62128 - protein, 16 aa, Homo Sapiens
EEPQSDPSVEPPLSQE

SEQ ID NO: 62129 - protein, 16 aa, Homo Sapiens
EPQSDPSVEPPLSQET

SEQ ID NO: 62130 - protein, 16 aa, Homo Sapiens
PQSDPSVEPPLSQETF

SEQ ID NO: 62131 - protein, 16 aa, Homo Sapiens
QSDPSVEPPLSQETFS

SEQ ID NO: 62132 - protein, 16 aa, Homo Sapiens
SDPSVEPPLSQETFSD

SEQ ID NO: 62133 - protein, 16 aa, Homo Sapiens
DPSVEPPLSQETFSDL

SEQ ID NO: 62134 - protein, 16 aa, Homo Sapiens
PSVEPPLSQETFSDLW

SEQ ID NO: 62135 - protein, 16 aa, Homo Sapiens
SVEPPLSQETFSDLWK

SEQ ID NO: 62136 - protein, 16 aa, Homo Sapiens
VEPPLSQETFSDLWKL

SEQ ID NO: 62137 - protein, 16 aa, Homo Sapiens
EPPLSQETFSDLWKLL

SEQ ID NO: 62138 - protein, 16 aa, Homo Sapiens
PPLSQETFSDLWKLLP

SEQ ID NO: 62139 - protein, 16 aa, Homo Sapiens
PLSQETFSDLWKLLPE

SEQ ID NO: 62140 - protein, 16 aa, Homo Sapiens
LSQETFSDLWKLLPEN

SEQ ID NO: 62141 - protein, 16 aa, Homo Sapiens
SQETFSDLWKLLPENN

SEQ ID NO: 62142 - protein, 16 aa, Homo Sapiens
QETFSDLWKLLPENNV

SEQ ID NO: 62143 - protein, 16 aa, Homo Sapiens
ETFSDLWKLLPENNVL

SEQ ID NO: 62144 - protein, 16 aa, Homo Sapiens
TFSDLWKLLPENNVLS

SEQ ID NO: 62145 - protein, 16 aa, Homo Sapiens
FSDLWKLLPENNVLSP

SEQ ID NO: 62146 - protein, 16 aa, Homo Sapiens
SDLWKLLPENNVLSPL

SEQ ID NO: 62147 - protein, 16 aa, Homo Sapiens
DLWKLLPENNVLSPLP

SEQ ID NO: 62148 - protein, 16 aa, Homo Sapiens
LWKLLPENNVLSPLPS

SEQ ID NO: 62149 - protein, 16 aa, Homo Sapiens
WKLLPENNVLSPLPSQ

SEQ ID NO: 62150 - protein, 16 aa, Homo Sapiens
KLLPENNVLSPLPSQA

SEQ ID NO: 62151 - protein, 16 aa, Homo Sapiens
LLPENNVLSPLPSQAM

SEQ ID NO: 62152 - protein, 16 aa, Homo Sapiens
LPENNVLSPLPSQAMD

SEQ ID NO: 62153 - protein, 16 aa, Homo Sapiens
PENNVLSPLPSQAMDD

SEQ ID NO: 62154 - protein, 16 aa, Homo Sapiens
ENNVLSPLPSQAMDDL

SEQ ID NO: 62155 - protein, 16 aa, Homo Sapiens
NNVLSPLPSQAMDDLM

SEQ ID NO: 62156 - protein, 16 aa, Homo Sapiens
NVLSPLPSQAMDDLML

SEQ ID NO: 62157 - protein, 16 aa, Homo Sapiens
VLSPLPSQAMDDLMLS

SEQ ID NO: 62158 - protein, 16 aa, Homo Sapiens
LSPLPSQAMDDLMLSP

SEQ ID NO: 62159 - protein, 16 aa, Homo Sapiens
SPLPSQAMDDLMLSPD

SEQ ID NO: 62160 - protein, 16 aa, Homo Sapiens
PLPSQAMDDLMLSPDD

SEQ ID NO: 62161 - protein, 16 aa, Homo Sapiens
LPSQAMDDLMLSPDDI

SEQ ID NO: 62162 - protein, 16 aa, Homo Sapiens
PSQAMDDLMLSPDDIE

SEQ ID NO: 62163 - protein, 16 aa, Homo Sapiens
SQAMDDLMLSPDDIEQ

SEQ ID NO: 62164 - protein, 16 aa, Homo Sapiens
QAMDDLMLSPDDIEQW

SEQ ID NO: 62165 - protein, 16 aa, Homo Sapiens
AMDDLMLSPDDIEQWF

SEQ ID NO: 62166 - protein, 16 aa, Homo Sapiens
MDDLMLSPDDIEQWFT

SEQ ID NO: 62167 - protein, 16 aa, Homo Sapiens
DDLMLSPDDIEQWFTE

SEQ ID NO: 62168 - protein, 16 aa, Homo Sapiens
DLMLSPDDIEQWFTED

SEQ ID NO: 62169 - protein, 16 aa, Homo Sapiens
LMLSPDDIEQWFTEDP

SEQ ID NO: 62170 - protein, 16 aa, Homo Sapiens
MLSPDDIEQWFTEDPG

SEQ ID NO: 62171 - protein, 16 aa, Homo Sapiens
LSPDDIEQWFTEDPGP

SEQ ID NO: 62172 - protein, 16 aa, Homo Sapiens
SPDDIEQWFTEDPGPD

SEQ ID NO: 62173 - protein, 16 aa, Homo Sapiens
PDDIEQWFTEDPGPDE

SEQ ID NO: 62174 - protein, 16 aa, Homo Sapiens
DDIEQWFTEDPGPDEA

SEQ ID NO: 62175 - protein, 16 aa, Homo Sapiens
DIEQWFTEDPGPDEAP

SEQ ID NO: 62176 - protein, 16 aa, Homo Sapiens
IEQWFTEDPGPDEAPR

SEQ ID NO: 62177 - protein, 16 aa, Homo Sapiens
EQWFTEDPGPDEAPRM

SEQ ID NO: 62178 - protein, 16 aa, Homo Sapiens
QWFTEDPGPDEAPRMP

SEQ ID NO: 62179 - protein, 16 aa, Homo Sapiens
WFTEDPGPDEAPRMPE

SEQ ID NO: 62180 - protein, 16 aa, Homo Sapiens
FTEDPGPDEAPRMPEA

SEQ ID NO: 62181 - protein, 16 aa, Homo Sapiens
TEDPGPDEAPRMPEAA

SEQ ID NO: 62182 - protein, 16 aa, Homo Sapiens
EDPGPDEAPRMPEAAP

SEQ ID NO: 62183 - protein, 16 aa, Homo Sapiens
DPGPDEAPRMPEAAPR

SEQ ID NO: 62184 - protein, 16 aa, Homo Sapiens
PGPDEAPRMPEAAPRV

SEQ ID NO: 62185 - protein, 16 aa, Homo Sapiens
GPDEAPRMPEAAPRVA

SEQ ID NO: 62186 - protein, 16 aa, Homo Sapiens
PDEAPRMPEAAPRVAP

SEQ ID NO: 62187 - protein, 16 aa, Homo Sapiens
DEAPRMPEAAPRVAPA

SEQ ID NO: 62188 - protein, 16 aa, Homo Sapiens
EAPRMPEAAPRVAPAP

SEQ ID NO: 62189 - protein, 16 aa, Homo Sapiens
APRMPEAAPRVAPAPA

SEQ ID NO: 62190 - protein, 16 aa, Homo Sapiens
PRMPEAAPRVAPAPAA

SEQ ID NO: 62191 - protein, 16 aa, Homo Sapiens
RMPEAAPRVAPAPAAP

SEQ ID NO: 62192 - protein, 16 aa, Homo Sapiens
MPEAAPRVAPAPAAPT

SEQ ID NO: 62193 - protein, 16 aa, Homo Sapiens
PEAAPRVAPAPAAPTP

SEQ ID NO: 62194 - protein, 16 aa, Homo Sapiens
EAAPRVAPAPAAPTPA

SEQ ID NO: 62195 - protein, 16 aa, Homo Sapiens
AAPRVAPAPAAPTPAA

SEQ ID NO: 62196 - protein, 16 aa, Homo Sapiens
APRVAPAPAAPTPAAP

SEQ ID NO: 62197 - protein, 16 aa, Homo Sapiens
PRVAPAPAAPTPAAPA

SEQ ID NO: 62198 - protein, 16 aa, Homo Sapiens
RVAPAPAAPTPAAPAP

SEQ ID NO: 62199 - protein, 16 aa, Homo Sapiens
VAPAPAAPTPAAPAPA

SEQ ID NO: 62200 - protein, 16 aa, Homo Sapiens
APAPAAPTPAAPAPAP

SEQ ID NO: 62201 - protein, 16 aa, Homo Sapiens
PAPAAPTPAAPAPAPS

SEQ ID NO: 62202 - protein, 16 aa, Homo Sapiens
APAAPTPAAPAPAPSW

SEQ ID NO: 62203 - protein, 16 aa, Homo Sapiens
PAAPTPAAPAPAPSWP

SEQ ID NO: 62204 - protein, 16 aa, Homo Sapiens
AAPTPAAPAPAPSWPL

SEQ ID NO: 62205 - protein, 16 aa, Homo Sapiens
APTPAAPAPAPSWPLS

SEQ ID NO: 62206 - protein, 16 aa, Homo Sapiens
PTPAAPAPAPSWPLSS

SEQ ID NO: 62207 - protein, 16 aa, Homo Sapiens
TPAAPAPAPSWPLSSS

SEQ ID NO: 62208 - protein, 16 aa, Homo Sapiens
PAAPAPAPSWPLSSSV

SEQ ID NO: 62209 - protein, 16 aa, Homo Sapiens
AAPAPAPSWPLSSSVP

SEQ ID NO: 62210 - protein, 16 aa, Homo Sapiens
APAPAPSWPLSSSVPS

SEQ ID NO: 62211 - protein, 16 aa, Homo Sapiens
PAPAPSWPLSSSVPSQ

SEQ ID NO: 62212 - protein, 16 aa, Homo Sapiens
APAPSWPLSSSVPSQK

SEQ ID NO: 62213 - protein, 16 aa, Homo Sapiens
PAPSWPLSSSVPSQKT

SEQ ID NO: 62214 - protein, 16 aa, Homo Sapiens
APSWPLSSSVPSQKTY

SEQ ID NO: 62215 - protein, 16 aa, Homo Sapiens
PSWPLSSSVPSQKTYQ

SEQ ID NO: 62216 - protein, 16 aa, Homo Sapiens
SWPLSSSVPSQKTYQG

SEQ ID NO: 62217 - protein, 16 aa, Homo Sapiens
WPLSSSVPSQKTYQGS

SEQ ID NO: 62218 - protein, 16 aa, Homo Sapiens
PLSSSVPSQKTYQGSY

SEQ ID NO: 62219 - protein, 16 aa, Homo Sapiens
LSSSVPSQKTYQGSYG

SEQ ID NO: 62220 - protein, 16 aa, Homo Sapiens
SSSVPSQKTYQGSYGF

SEQ ID NO: 62221 - protein, 16 aa, Homo Sapiens
SSVPSQKTYQGSYGFR

SEQ ID NO: 62222 - protein, 16 aa, Homo Sapiens
SVPSQKTYQGSYGFRL

SEQ ID NO: 62223 - protein, 16 aa, Homo Sapiens
VPSQKTYQGSYGFRLG

SEQ ID NO: 62224 - protein, 16 aa, Homo Sapiens
PSQKTYQGSYGFRLGF

SEQ ID NO: 62225 - protein, 16 aa, Homo Sapiens
SQKTYQGSYGFRLGFL

SEQ ID NO: 62226 - protein, 16 aa, Homo Sapiens
QKTYQGSYGFRLGFLH

SEQ ID NO: 62227 - protein, 16 aa, Homo Sapiens
KTYQGSYGFRLGFLHS

SEQ ID NO: 62228 - protein, 16 aa, Homo Sapiens
TYQGSYGFRLGFLHSG

SEQ ID NO: 62229 - protein, 16 aa, Homo Sapiens
YQGSYGFRLGFLHSGT

SEQ ID NO: 62230 - protein, 16 aa, Homo Sapiens
QGSYGFRLGFLHSGTA

SEQ ID NO: 62231 - protein, 16 aa, Homo Sapiens
GSYGFRLGFLHSGTAK

SEQ ID NO: 62232 - protein, 16 aa, Homo Sapiens
SYGFRLGFLHSGTAKS

SEQ ID NO: 62233 - protein, 16 aa, Homo Sapiens
YGFRLGFLHSGTAKSV

SEQ ID NO: 62234 - protein, 16 aa, Homo Sapiens
GFRLGFLHSGTAKSVT

SEQ ID NO: 62235 - protein, 16 aa, Homo Sapiens
FRLGFLHSGTAKSVTC

SEQ ID NO: 62236 - protein, 16 aa, Homo Sapiens
RLGFLHSGTAKSVTCT

SEQ ID NO: 62237 - protein, 16 aa, Homo Sapiens
LGFLHSGTAKSVTCTY

SEQ ID NO: 62238 - protein, 16 aa, Homo Sapiens
GFLHSGTAKSVTCTYS

SEQ ID NO: 62239 - protein, 16 aa, Homo Sapiens
FLHSGTAKSVTCTYSP

SEQ ID NO: 62240 - protein, 16 aa, Homo Sapiens
LHSGTAKSVTCTYSPA

SEQ ID NO: 62241 - protein, 16 aa, Homo Sapiens
HSGTAKSVTCTYSPAL

SEQ ID NO: 62242 - protein, 16 aa, Homo Sapiens
SGTAKSVTCTYSPALN

SEQ ID NO: 62243 - protein, 16 aa, Homo Sapiens
GTAKSVTCTYSPALNK

SEQ ID NO: 62244 - protein, 16 aa, Homo Sapiens
TAKSVTCTYSPALNKM

SEQ ID NO: 62245 - protein, 16 aa, Homo Sapiens
AKSVTCTYSPALNKMF

SEQ ID NO: 62246 - protein, 16 aa, Homo Sapiens
KSVTCTYSPALNKMFC

SEQ ID NO: 62247 - protein, 16 aa, Homo Sapiens
SVTCTYSPALNKMFCQ

SEQ ID NO: 62248 - protein, 16 aa, Homo Sapiens
VTCTYSPALNKMFCQL

SEQ ID NO: 62249 - protein, 16 aa, Homo Sapiens
TCTYSPALNKMFCQLA

SEQ ID NO: 62250 - protein, 16 aa, Homo Sapiens
CTYSPALNKMFCQLAK

SEQ ID NO: 62251 - protein, 16 aa, Homo Sapiens
TYSPALNKMFCQLAKT

SEQ ID NO: 62252 - protein, 16 aa, Homo Sapiens
YSPALNKMFCQLAKTC

SEQ ID NO: 62253 - protein, 16 aa, Homo Sapiens
SPALNKMFCQLAKTCP

SEQ ID NO: 62254 - protein, 16 aa, Homo Sapiens
PALNKMFCQLAKTCPV

SEQ ID NO: 62255 - protein, 16 aa, Homo Sapiens
ALNKMFCQLAKTCPVQ

SEQ ID NO: 62256 - protein, 16 aa, Homo Sapiens
LNKMFCQLAKTCPVQL

SEQ ID NO: 62257 - protein, 16 aa, Homo Sapiens
NKMFCQLAKTCPVQLW

SEQ ID NO: 62258 - protein, 16 aa, Homo Sapiens
KMFCQLAKTCPVQLWV

SEQ ID NO: 62259 - protein, 16 aa, Homo Sapiens
MFCQLAKTCPVQLWVD

SEQ ID NO: 62260 - protein, 16 aa, Homo Sapiens
FCQLAKTCPVQLWVDS

SEQ ID NO: 62261 - protein, 16 aa, Homo Sapiens
CQLAKTCPVQLWVDST

SEQ ID NO: 62262 - protein, 16 aa, Homo Sapiens
QLAKTCPVQLWVDSTP

SEQ ID NO: 62263 - protein, 16 aa, Homo Sapiens
LAKTCPVQLWVDSTPP

SEQ ID NO: 62264 - protein, 16 aa, Homo Sapiens
AKTCPVQLWVDSTPPP

SEQ ID NO: 62265 - protein, 16 aa, Homo Sapiens
KTCPVQLWVDSTPPPG

SEQ ID NO: 62266 - protein, 16 aa, Homo Sapiens
TCPVQLWVDSTPPPGT

SEQ ID NO: 62267 - protein, 16 aa, Homo Sapiens
CPVQLWVDSTPPPGTR

SEQ ID NO: 62268 - protein, 16 aa, Homo Sapiens
PVQLWVDSTPPPGTRV

SEQ ID NO: 62269 - protein, 16 aa, Homo Sapiens
VQLWVDSTPPPGTRVR

SEQ ID NO: 62270 - protein, 16 aa, Homo Sapiens
QLWVDSTPPPGTRVRA

SEQ ID NO: 62271 - protein, 16 aa, Homo Sapiens
LWVDSTPPPGTRVRAM

SEQ ID NO: 62272 - protein, 16 aa, Homo Sapiens
WVDSTPPPGTRVRAMA

SEQ ID NO: 62273 - protein, 16 aa, Homo Sapiens
VDSTPPPGTRVRAMAI

SEQ ID NO: 62274 - protein, 16 aa, Homo Sapiens
DSTPPPGTRVRAMAIY

SEQ ID NO: 62275 - protein, 16 aa, Homo Sapiens
STPPPGTRVRAMAIYK

SEQ ID NO: 62276 - protein, 16 aa, Homo Sapiens
TPPPGTRVRAMAIYKQ

SEQ ID NO: 62277 - protein, 16 aa, Homo Sapiens
PPPGTRVRAMAIYKQS

SEQ ID NO: 62278 - protein, 16 aa, Homo Sapiens
PPGTRVRAMAIYKQSQ

SEQ ID NO: 62279 - protein, 16 aa, Homo Sapiens
PGTRVRAMAIYKQSQH

SEQ ID NO: 62280 - protein, 16 aa, Homo Sapiens
GTRVRAMAIYKQSQHM

SEQ ID NO: 62281 - protein, 16 aa, Homo Sapiens
TRVRAMAIYKQSQHMT

SEQ ID NO: 62282 - protein, 16 aa, Homo Sapiens
RVRAMAIYKQSQHMTE

SEQ ID NO: 62283 - protein, 16 aa, Homo Sapiens
VRAMAIYKQSQHMTEV

SEQ ID NO: 62284 - protein, 16 aa, Homo Sapiens
RAMAIYKQSQHMTEVV

SEQ ID NO: 62285 - protein, 16 aa, Homo Sapiens
AMAIYKQSQHMTEVVR

SEQ ID NO: 62286 - protein, 16 aa, Homo Sapiens
MAIYKQSQHMTEVVRR

SEQ ID NO: 62287 - protein, 16 aa, Homo Sapiens
AIYKQSQHMTEVVRRC

SEQ ID NO: 62288 - protein, 16 aa, Homo Sapiens
IYKQSQHMTEVVRRCP

SEQ ID NO: 62289 - protein, 16 aa, Homo Sapiens
YKQSQHMTEVVRRCPH

SEQ ID NO: 62290 - protein, 16 aa, Homo Sapiens
KQSQHMTEVVRRCPHH

SEQ ID NO: 62291 - protein, 16 aa, Homo Sapiens
QSQHMTEVVRRCPHHE

SEQ ID NO: 62292 - protein, 16 aa, Homo Sapiens
SQHMTEVVRRCPHHER

SEQ ID NO: 62293 - protein, 16 aa, Homo Sapiens
QHMTEVVRRCPHHERC

SEQ ID NO: 62294 - protein, 16 aa, Homo Sapiens
HMTEVVRRCPHHERCS

SEQ ID NO: 62295 - protein, 16 aa, Homo Sapiens
MTEVVRRCPHHERCSD

SEQ ID NO: 62296 - protein, 16 aa, Homo Sapiens
TEVVRRCPHHERCSDS

SEQ ID NO: 62297 - protein, 16 aa, Homo Sapiens
EVVRRCPHHERCSDSD

SEQ ID NO: 62298 - protein, 16 aa, Homo Sapiens
VVRRCPHHERCSDSDG

SEQ ID NO: 62299 - protein, 16 aa, Homo Sapiens
VRRCPHHERCSDSDGL

SEQ ID NO: 62300 - protein, 16 aa, Homo Sapiens
RRCPHHERCSDSDGLA

SEQ ID NO: 62301 - protein, 16 aa, Homo Sapiens
RCPHHERCSDSDGLAP

SEQ ID NO: 62302 - protein, 16 aa, Homo Sapiens
CPHHERCSDSDGLAPP

SEQ ID NO: 62303 - protein, 16 aa, Homo Sapiens
PHHERCSDSDGLAPPQ

SEQ ID NO: 62304 - protein, 16 aa, Homo Sapiens
HHERCSDSDGLAPPQH

SEQ ID NO: 62305 - protein, 16 aa, Homo Sapiens
HERCSDSDGLAPPQHL

SEQ ID NO: 62306 - protein, 16 aa, Homo Sapiens
ERCSDSDGLAPPQHLI

SEQ ID NO: 62307 - protein, 16 aa, Homo Sapiens
RCSDSDGLAPPQHLIR

SEQ ID NO: 62308 - protein, 16 aa, Homo Sapiens
CSDSDGLAPPQHLIRV

SEQ ID NO: 62309 - protein, 16 aa, Homo Sapiens
SDSDGLAPPQHLIRVE

SEQ ID NO: 62310 - protein, 16 aa, Homo Sapiens
DSDGLAPPQHLIRVEG

SEQ ID NO: 62311 - protein, 16 aa, Homo Sapiens
SDGLAPPQHLIRVEGN

SEQ ID NO: 62312 - protein, 16 aa, Homo Sapiens
DGLAPPQHLIRVEGNL

SEQ ID NO: 62313 - protein, 16 aa, Homo Sapiens
GLAPPQHLIRVEGNLR

SEQ ID NO: 62314 - protein, 16 aa, Homo Sapiens
LAPPQHLIRVEGNLRV

SEQ ID NO: 62315 - protein, 16 aa, Homo Sapiens
APPQHLIRVEGNLRVE

SEQ ID NO: 62316 - protein, 16 aa, Homo Sapiens
PPQHLIRVEGNLRVEY

SEQ ID NO: 62317 - protein, 16 aa, Homo Sapiens
PQHLIRVEGNLRVEYL

SEQ ID NO: 62318 - protein, 16 aa, Homo Sapiens
QHLIRVEGNLRVEYLD

SEQ ID NO: 62319 - protein, 16 aa, Homo Sapiens
HLIRVEGNLRVEYLDD

SEQ ID NO: 62320 - protein, 16 aa, Homo Sapiens
LIRVEGNLRVEYLDDR

SEQ ID NO: 62321 - protein, 16 aa, Homo Sapiens
IRVEGNLRVEYLDDRN

SEQ ID NO: 62322 - protein, 16 aa, Homo Sapiens
RVEGNLRVEYLDDRNT

SEQ ID NO: 62323 - protein, 16 aa, Homo Sapiens
VEGNLRVEYLDDRNTF

SEQ ID NO: 62324 - protein, 16 aa, Homo Sapiens
EGNLRVEYLDDRNTFR

SEQ ID NO: 62325 - protein, 16 aa, Homo Sapiens
GNLRVEYLDDRNTFRH

SEQ ID NO: 62326 - protein, 16 aa, Homo Sapiens
NLRVEYLDDRNTFRHS

SEQ ID NO: 62327 - protein, 16 aa, Homo Sapiens
LRVEYLDDRNTFRHSV

SEQ ID NO: 62328 - protein, 16 aa, Homo Sapiens
RVEYLDDRNTFRHSVV

SEQ ID NO: 62329 - protein, 16 aa, Homo Sapiens
VEYLDDRNTFRHSVVV

SEQ ID NO: 62330 - protein, 16 aa, Homo Sapiens
EYLDDRNTFRHSVVVP

SEQ ID NO: 62331 - protein, 16 aa, Homo Sapiens
YLDDRNTFRHSVVVPY

SEQ ID NO: 62332 - protein, 16 aa, Homo Sapiens
LDDRNTFRHSVVVPYE

SEQ ID NO: 62333 - protein, 16 aa, Homo Sapiens
DDRNTFRHSVVVPYEP

SEQ ID NO: 62334 - protein, 16 aa, Homo Sapiens
DRNTFRHSVVVPYEPP

SEQ ID NO: 62335 - protein, 16 aa, Homo Sapiens
RNTFRHSVVVPYEPPE

SEQ ID NO: 62336 - protein, 16 aa, Homo Sapiens
NTFRHSVVVPYEPPEV

SEQ ID NO: 62337 - protein, 16 aa, Homo Sapiens
TFRHSVVVPYEPPEVG

SEQ ID NO: 62338 - protein, 16 aa, Homo Sapiens
FRHSVVVPYEPPEVGS

SEQ ID NO: 62339 - protein, 16 aa, Homo Sapiens
RHSVVVPYEPPEVGSD

SEQ ID NO: 62340 - protein, 16 aa, Homo Sapiens
HSVVVPYEPPEVGSDC

SEQ ID NO: 62341 - protein, 16 aa, Homo Sapiens
SVVVPYEPPEVGSDCT

SEQ ID NO: 62342 - protein, 16 aa, Homo Sapiens
VVVPYEPPEVGSDCTT

SEQ ID NO: 62343 - protein, 16 aa, Homo Sapiens
VVPYEPPEVGSDCTTI

SEQ ID NO: 62344 - protein, 16 aa, Homo Sapiens
VPYEPPEVGSDCTTIH

SEQ ID NO: 62345 - protein, 16 aa, Homo Sapiens
PYEPPEVGSDCTTIHY

SEQ ID NO: 62346 - protein, 16 aa, Homo Sapiens
YEPPEVGSDCTTIHYN

SEQ ID NO: 62347 - protein, 16 aa, Homo Sapiens
EPPEVGSDCTTIHYNY

SEQ ID NO: 62348 - protein, 16 aa, Homo Sapiens
PPEVGSDCTTIHYNYM

SEQ ID NO: 62349 - protein, 16 aa, Homo Sapiens
PEVGSDCTTIHYNYMC

SEQ ID NO: 62350 - protein, 16 aa, Homo Sapiens
EVGSDCTTIHYNYMCN

SEQ ID NO: 62351 - protein, 16 aa, Homo Sapiens
VGSDCTTIHYNYMCNS

SEQ ID NO: 62352 - protein, 16 aa, Homo Sapiens
GSDCTTIHYNYMCNSS

SEQ ID NO: 62353 - protein, 16 aa, Homo Sapiens
SDCTTIHYNYMCNSSC

SEQ ID NO: 62354 - protein, 16 aa, Homo Sapiens
DCTTIHYNYMCNSSCM

SEQ ID NO: 62355 - protein, 16 aa, Homo Sapiens
CTTIHYNYMCNSSCMG

SEQ ID NO: 62356 - protein, 16 aa, Homo Sapiens
TTIHYNYMCNSSCMGG

SEQ ID NO: 62357 - protein, 16 aa, Homo Sapiens
TIHYNYMCNSSCMGGM

SEQ ID NO: 62358 - protein, 16 aa, Homo Sapiens
IHYNYMCNSSCMGGMN

SEQ ID NO: 62359 - protein, 16 aa, Homo Sapiens
HYNYMCNSSCMGGMNR

SEQ ID NO: 62360 - protein, 16 aa, Homo Sapiens
YNYMCNSSCMGGMNRR

SEQ ID NO: 62361 - protein, 16 aa, Homo Sapiens
NYMCNSSCMGGMNRRP

SEQ ID NO: 62362 - protein, 16 aa, Homo Sapiens
YMCNSSCMGGMNRRPI

SEQ ID NO: 62363 - protein, 16 aa, Homo Sapiens
MCNSSCMGGMNRRPIL

SEQ ID NO: 62364 - protein, 16 aa, Homo Sapiens
CNSSCMGGMNRRPILT

SEQ ID NO: 62365 - protein, 16 aa, Homo Sapiens
NSSCMGGMNRRPILTI

SEQ ID NO: 62366 - protein, 16 aa, Homo Sapiens
SSCMGGMNRRPILTII

SEQ ID NO: 62367 - protein, 16 aa, Homo Sapiens
SCMGGMNRRPILTIIT

SEQ ID NO: 62368 - protein, 16 aa, Homo Sapiens
CMGGMNRRPILTIITL

SEQ ID NO: 62369 - protein, 16 aa, Homo Sapiens
MGGMNRRPILTIITLE

SEQ ID NO: 62370 - protein, 16 aa, Homo Sapiens
GGMNRRPILTIITLED

SEQ ID NO: 62371 - protein, 16 aa, Homo Sapiens
GMNRRPILTIITLEDS

SEQ ID NO: 62372 - protein, 16 aa, Homo Sapiens
MNRRPILTIITLEDSS

SEQ ID NO: 62373 - protein, 16 aa, Homo Sapiens
NRRPILTIITLEDSSG

SEQ ID NO: 62374 - protein, 16 aa, Homo Sapiens
RRPILTIITLEDSSGN

SEQ ID NO: 62375 - protein, 16 aa, Homo Sapiens
RPILTIITLEDSSGNL

SEQ ID NO: 62376 - protein, 16 aa, Homo Sapiens
PILTIITLEDSSGNLL

SEQ ID NO: 62377 - protein, 16 aa, Homo Sapiens
ILTIITLEDSSGNLLG

SEQ ID NO: 62378 - protein, 16 aa, Homo Sapiens
LTIITLEDSSGNLLGR

SEQ ID NO: 62379 - protein, 16 aa, Homo Sapiens
TIITLEDSSGNLLGRN

SEQ ID NO: 62380 - protein, 16 aa, Homo Sapiens
IITLEDSSGNLLGRNS

SEQ ID NO: 62381 - protein, 16 aa, Homo Sapiens
ITLEDSSGNLLGRNSF

SEQ ID NO: 62382 - protein, 16 aa, Homo Sapiens
TLEDSSGNLLGRNSFE

SEQ ID NO: 62383 - protein, 16 aa, Homo Sapiens
LEDSSGNLLGRNSFEV

SEQ ID NO: 62384 - protein, 16 aa, Homo Sapiens
EDSSGNLLGRNSFEVR

SEQ ID NO: 62385 - protein, 16 aa, Homo Sapiens
DSSGNLLGRNSFEVRV

SEQ ID NO: 62386 - protein, 16 aa, Homo Sapiens
SSGNLLGRNSFEVRVC

SEQ ID NO: 62387 - protein, 16 aa, Homo Sapiens
SGNLLGRNSFEVRVCA

SEQ ID NO: 62388 - protein, 16 aa, Homo Sapiens
GNLLGRNSFEVRVCAC

SEQ ID NO: 62389 - protein, 16 aa, Homo Sapiens
NLLGRNSFEVRVCACP

SEQ ID NO: 62390 - protein, 16 aa, Homo Sapiens
LLGRNSFEVRVCACPG

SEQ ID NO: 62391 - protein, 16 aa, Homo Sapiens
LGRNSFEVRVCACPGR

SEQ ID NO: 62392 - protein, 16 aa, Homo Sapiens
GRNSFEVRVCACPGRD

SEQ ID NO: 62393 - protein, 16 aa, Homo Sapiens
RNSFEVRVCACPGRDR

SEQ ID NO: 62394 - protein, 16 aa, Homo Sapiens
NSFEVRVCACPGRDRR

SEQ ID NO: 62395 - protein, 16 aa, Homo Sapiens
SFEVRVCACPGRDRRT

SEQ ID NO: 62396 - protein, 16 aa, Homo Sapiens
FEVRVCACPGRDRRTE

SEQ ID NO: 62397 - protein, 16 aa, Homo Sapiens
EVRVCACPGRDRRTEE

SEQ ID NO: 62398 - protein, 16 aa, Homo Sapiens
VRVCACPGRDRRTEEE

SEQ ID NO: 62399 - protein, 16 aa, Homo Sapiens
RVCACPGRDRRTEEEN

SEQ ID NO: 62400 - protein, 16 aa, Homo Sapiens
VCACPGRDRRTEEENL

SEQ ID NO: 62401 - protein, 16 aa, Homo Sapiens
CACPGRDRRTEEENLR

SEQ ID NO: 62402 - protein, 16 aa, Homo Sapiens
ACPGRDRRTEEENLRK

SEQ ID NO: 62403 - protein, 16 aa, Homo Sapiens
CPGRDRRTEEENLRKK

SEQ ID NO: 62404 - protein, 16 aa, Homo Sapiens
PGRDRRTEEENLRKKG

SEQ ID NO: 62405 - protein, 16 aa, Homo Sapiens
GRDRRTEEENLRKKGE

SEQ ID NO: 62406 - protein, 16 aa, Homo Sapiens
RDRRTEEENLRKKGEP

SEQ ID NO: 62407 - protein, 16 aa, Homo Sapiens
DRRTEEENLRKKGEPH

SEQ ID NO: 62408 - protein, 16 aa, Homo Sapiens
RRTEEENLRKKGEPHH

SEQ ID NO: 62409 - protein, 16 aa, Homo Sapiens
RTEEENLRKKGEPHHE

SEQ ID NO: 62410 - protein, 16 aa, Homo Sapiens
TEEENLRKKGEPHHEL

SEQ ID NO: 62411 - protein, 16 aa, Homo Sapiens
EEENLRKKGEPHHELP

SEQ ID NO: 62412 - protein, 16 aa, Homo Sapiens
EENLRKKGEPHHELPP

SEQ ID NO: 62413 - protein, 16 aa, Homo Sapiens
ENLRKKGEPHHELPPG

SEQ ID NO: 62414 - protein, 16 aa, Homo Sapiens
NLRKKGEPHHELPPGS

SEQ ID NO: 62415 - protein, 16 aa, Homo Sapiens
LRKKGEPHHELPPGST

SEQ ID NO: 62416 - protein, 16 aa, Homo Sapiens
RKKGEPHHELPPGSTK

SEQ ID NO: 62417 - protein, 16 aa, Homo Sapiens
KKGEPHHELPPGSTKR

SEQ ID NO: 62418 - protein, 16 aa, Homo Sapiens
KGEPHHELPPGSTKRA

SEQ ID NO: 62419 - protein, 16 aa, Homo Sapiens
GEPHHELPPGSTKRAL

SEQ ID NO: 62420 - protein, 16 aa, Homo Sapiens
EPHHELPPGSTKRALP

SEQ ID NO: 62421 - protein, 16 aa, Homo Sapiens
PHHELPPGSTKRALPN

SEQ ID NO: 62422 - protein, 16 aa, Homo Sapiens
HHELPPGSTKRALPNN

SEQ ID NO: 62423 - protein, 16 aa, Homo Sapiens
HELPPGSTKRALPNNT

SEQ ID NO: 62424 - protein, 16 aa, Homo Sapiens
ELPPGSTKRALPNNTS

SEQ ID NO: 62425 - protein, 16 aa, Homo Sapiens
LPPGSTKRALPNNTSS

SEQ ID NO: 62426 - protein, 16 aa, Homo Sapiens
PPGSTKRALPNNTSSS

SEQ ID NO: 62427 - protein, 16 aa, Homo Sapiens
PGSTKRALPNNTSSSP

SEQ ID NO: 62428 - protein, 16 aa, Homo Sapiens
GSTKRALPNNTSSSPQ

SEQ ID NO: 62429 - protein, 16 aa, Homo Sapiens
STKRALPNNTSSSPQP

SEQ ID NO: 62430 - protein, 16 aa, Homo Sapiens
TKRALPNNTSSSPQPK

SEQ ID NO: 62431 - protein, 16 aa, Homo Sapiens
KRALPNNTSSSPQPKK

SEQ ID NO: 62432 - protein, 16 aa, Homo Sapiens
RALPNNTSSSPQPKKK

SEQ ID NO: 62433 - protein, 16 aa, Homo Sapiens
ALPNNTSSSPQPKKKP

SEQ ID NO: 62434 - protein, 16 aa, Homo Sapiens
LPNNTSSSPQPKKKPL

SEQ ID NO: 62435 - protein, 16 aa, Homo Sapiens
PNNTSSSPQPKKKPLD

SEQ ID NO: 62436 - protein, 16 aa, Homo Sapiens
NNTSSSPQPKKKPLDG

SEQ ID NO: 62437 - protein, 16 aa, Homo Sapiens
NTSSSPQPKKKPLDGE

SEQ ID NO: 62438 - protein, 16 aa, Homo Sapiens
TSSSPQPKKKPLDGEY

SEQ ID NO: 62439 - protein, 16 aa, Homo Sapiens
SSSPQPKKKPLDGEYF

SEQ ID NO: 62440 - protein, 16 aa, Homo Sapiens
SSPQPKKKPLDGEYFT

SEQ ID NO: 62441 - protein, 16 aa, Homo Sapiens
SPQPKKKPLDGEYFTL

SEQ ID NO: 62442 - protein, 16 aa, Homo Sapiens
PQPKKKPLDGEYFTLQ

SEQ ID NO: 62443 - protein, 16 aa, Homo Sapiens
QPKKKPLDGEYFTLQI

SEQ ID NO: 62444 - protein, 16 aa, Homo Sapiens
PKKKPLDGEYFTLQIR

SEQ ID NO: 62445 - protein, 16 aa, Homo Sapiens
KKKPLDGEYFTLQIRG

SEQ ID NO: 62446 - protein, 16 aa, Homo Sapiens
KKPLDGEYFTLQIRGR

SEQ ID NO: 62447 - protein, 16 aa, Homo Sapiens
KPLDGEYFTLQIRGRE

SEQ ID NO: 62448 - protein, 16 aa, Homo Sapiens
PLDGEYFTLQIRGRER

SEQ ID NO: 62449 - protein, 16 aa, Homo Sapiens
LDGEYFTLQIRGRERF

SEQ ID NO: 62450 - protein, 16 aa, Homo Sapiens
DGEYFTLQIRGRERFE

SEQ ID NO: 62451 - protein, 16 aa, Homo Sapiens
GEYFTLQIRGRERFEM

SEQ ID NO: 62452 - protein, 16 aa, Homo Sapiens
EYFTLQIRGRERFEMF

SEQ ID NO: 62453 - protein, 16 aa, Homo Sapiens
YFTLQIRGRERFEMFR

SEQ ID NO: 62454 - protein, 16 aa, Homo Sapiens
FTLQIRGRERFEMFRE

SEQ ID NO: 62455 - protein, 16 aa, Homo Sapiens
TLQIRGRERFEMFREL

SEQ ID NO: 62456 - protein, 16 aa, Homo Sapiens
LQIRGRERFEMFRELN

SEQ ID NO: 62457 - protein, 16 aa, Homo Sapiens
QIRGRERFEMFRELNE

SEQ ID NO: 62458 - protein, 16 aa, Homo Sapiens
IRGRERFEMFRELNEA

SEQ ID NO: 62459 - protein, 16 aa, Homo Sapiens
RGRERFEMFRELNEAL

SEQ ID NO: 62460 - protein, 16 aa, Homo Sapiens
GRERFEMFRELNEALE

SEQ ID NO: 62461 - protein, 16 aa, Homo Sapiens
RERFEMFRELNEALEL

SEQ ID NO: 62462 - protein, 16 aa, Homo Sapiens
ERFEMFRELNEALELK

SEQ ID NO: 62463 - protein, 16 aa, Homo Sapiens
RFEMFRELNEALELKD

SEQ ID NO: 62464 - protein, 16 aa, Homo Sapiens
FEMFRELNEALELKDA

SEQ ID NO: 62465 - protein, 16 aa, Homo Sapiens
EMFRELNEALELKDAQ

SEQ ID NO: 62466 - protein, 16 aa, Homo Sapiens
MFRELNEALELKDAQA

SEQ ID NO: 62467 - protein, 16 aa, Homo Sapiens
FRELNEALELKDAQAG

SEQ ID NO: 62468 - protein, 16 aa, Homo Sapiens
RELNEALELKDAQAGK

SEQ ID NO: 62469 - protein, 16 aa, Homo Sapiens
ELNEALELKDAQAGKE

SEQ ID NO: 62470 - protein, 16 aa, Homo Sapiens
LNEALELKDAQAGKEP

SEQ ID NO: 62471 - protein, 16 aa, Homo Sapiens
NEALELKDAQAGKEPG

SEQ ID NO: 62472 - protein, 16 aa, Homo Sapiens
EALELKDAQAGKEPGG

SEQ ID NO: 62473 - protein, 16 aa, Homo Sapiens
ALELKDAQAGKEPGGS

SEQ ID NO: 62474 - protein, 16 aa, Homo Sapiens
LELKDAQAGKEPGGSR

SEQ ID NO: 62475 - protein, 16 aa, Homo Sapiens
ELKDAQAGKEPGGSRA

SEQ ID NO: 62476 - protein, 16 aa, Homo Sapiens
LKDAQAGKEPGGSRAH

SEQ ID NO: 62477 - protein, 16 aa, Homo Sapiens
KDAQAGKEPGGSRAHS

SEQ ID NO: 62478 - protein, 16 aa, Homo Sapiens
DAQAGKEPGGSRAHSS

SEQ ID NO: 62479 - protein, 16 aa, Homo Sapiens
AQAGKEPGGSRAHSSH

SEQ ID NO: 62480 - protein, 16 aa, Homo Sapiens
QAGKEPGGSRAHSSHL

SEQ ID NO: 62481 - protein, 16 aa, Homo Sapiens
AGKEPGGSRAHSSHLK

SEQ ID NO: 62482 - protein, 16 aa, Homo Sapiens
GKEPGGSRAHSSHLKS

SEQ ID NO: 62483 - protein, 16 aa, Homo Sapiens
KEPGGSRAHSSHLKSK

SEQ ID NO: 62484 - protein, 16 aa, Homo Sapiens
EPGGSRAHSSHLKSKK

SEQ ID NO: 62485 - protein, 16 aa, Homo Sapiens
PGGSRAHSSHLKSKKG

SEQ ID NO: 62486 - protein, 16 aa, Homo Sapiens
GGSRAHSSHLKSKKGQ

SEQ ID NO: 62487 - protein, 16 aa, Homo Sapiens
GSRAHSSHLKSKKGQS

SEQ ID NO: 62488 - protein, 16 aa, Homo Sapiens
SRAHSSHLKSKKGQST

SEQ ID NO: 62489 - protein, 16 aa, Homo Sapiens
RAHSSHLKSKKGQSTS

SEQ ID NO: 62490 - protein, 16 aa, Homo Sapiens
AHSSHLKSKKGQSTSR

SEQ ID NO: 62491 - protein, 16 aa, Homo Sapiens
HSSHLKSKKGQSTSRH

SEQ ID NO: 62492 - protein, 16 aa, Homo Sapiens
SSHLKSKKGQSTSRHK

SEQ ID NO: 62493 - protein, 16 aa, Homo Sapiens
SHLKSKKGQSTSRHKK

SEQ ID NO: 62494 - protein, 16 aa, Homo Sapiens
HLKSKKGQSTSRHKKL

SEQ ID NO: 62495 - protein, 16 aa, Homo Sapiens
LKSKKGQSTSRHKKLM

SEQ ID NO: 62496 - protein, 16 aa, Homo Sapiens
KSKKGQSTSRHKKLMF

SEQ ID NO: 62497 - protein, 16 aa, Homo Sapiens
SKKGQSTSRHKKLMFK

SEQ ID NO: 62498 - protein, 16 aa, Homo Sapiens
KKGQSTSRHKKLMFKT

SEQ ID NO: 62499 - protein, 16 aa, Homo Sapiens
KGQSTSRHKKLMFKTE

SEQ ID NO: 62500 - protein, 16 aa, Homo Sapiens
GQSTSRHKKLMFKTEG

SEQ ID NO: 62501 - protein, 16 aa, Homo Sapiens
QSTSRHKKLMFKTEGP

SEQ ID NO: 62502 - protein, 16 aa, Homo Sapiens
STSRHKKLMFKTEGPD

SEQ ID NO: 62503 - protein, 16 aa, Homo Sapiens
TSRHKKLMFKTEGPDS

SEQ ID NO: 62504 - protein, 16 aa, Homo Sapiens
SRHKKLMFKTEGPDSD

SEQ ID NO: 62505 - protein, 118 aa, Homo Sapiens; identical to SEQ ID NO: 16561

SEQ ID NO: 62506 - protein, 8 aa, Homo Sapiens
MPREDAHF

SEQ ID NO: 62507 - protein, 8 aa, Homo Sapiens
REDAHFIY

SEQ ID NO: 62508 - protein, 8 aa, Homo Sapiens
DAHFIYGY

SEQ ID NO: 62509 - protein, 8 aa, Homo Sapiens
HFIYGYPK

SEQ ID NO: 62510 - protein, 8 aa, Homo Sapiens
FIYGYPKK

SEQ ID NO: 62511 - protein, 8 aa, Homo Sapiens
YTTAEEAA

SEQ ID NO: 62512 - protein, 8 aa, Homo Sapiens
EEAAGIGI

SEQ ID NO: 62513 - protein, 8 aa, Homo Sapiens
EAAGIGIL

SEQ ID NO: 62514 - protein, 8 aa, Homo Sapiens
AGIGILTV

SEQ ID NO: 62515 - protein, 8 aa, Homo Sapiens
ILTVILGV

SEQ ID NO: 62516 - protein, 8 aa, Homo Sapiens
TVILGVLL

SEQ ID NO: 62517 - protein, 8 aa, Homo Sapiens
VILGVLLL

SEQ ID NO: 62518 - protein, 8 aa, Homo Sapiens
ILGVLLLI

SEQ ID NO: 62519 - protein, 8 aa, Homo Sapiens
LLLIGCWY

SEQ ID NO: 62520 - protein, 8 aa, Homo Sapiens
LLIGCWYC

SEQ ID NO: 62521 - protein, 8 aa, Homo Sapiens
LIGCWYCR

SEQ ID NO: 62522 - protein, 8 aa, Homo Sapiens
IGCWYCRR

SEQ ID NO: 62523 - protein, 8 aa, Homo Sapiens
GCWYCRRR

SEQ ID NO: 62524 - protein, 8 aa, Homo Sapiens
RRNGYRAL

SEQ ID NO: 62525 - protein, 8 aa, Homo Sapiens
GYRALMDK

SEQ ID NO: 62526 - protein, 8 aa, Homo Sapiens
LMDKSLHV

SEQ ID NO: 62527 - protein, 8 aa, Homo Sapiens
SLHVGTQC

SEQ ID NO: 62528 - protein, 8 aa, Homo Sapiens
HVGTQCAL

SEQ ID NO: 62529 - protein, 8 aa, Homo Sapiens
GTQCALTR

SEQ ID NO: 62530 - protein, 8 aa, Homo Sapiens
TQCALTRR

SEQ ID NO: 62531 - protein, 8 aa, Homo Sapiens
ALTRRCPQ

SEQ ID NO: 62532 - protein, 8 aa, Homo Sapiens
RRCPQEGF

SEQ ID NO: 62533 - protein, 8 aa, Homo Sapiens
HRDSKVSL

SEQ ID NO: 62534 - protein, 8 aa, Homo Sapiens
VPNAPPAY

SEQ ID NO: 62535 - protein, 8 aa, Homo Sapiens
NAPPAYEK

SEQ ID NO: 62536 - protein, 8 aa, Homo Sapiens
AEQSPPPY

SEQ ID NO: 62537 - protein, 9 aa, Homo Sapiens
MPREDAHFI

SEQ ID NO: 62538 - protein, 9 aa, Homo Sapiens
EDAHFIYGY

SEQ ID NO: 62539 - protein, 9 aa, Homo Sapiens
AHFIYGYPK

SEQ ID NO: 62540 - protein, 9 aa, Homo Sapiens
HFIYGYPKK

SEQ ID NO: 62541 - protein, 9 aa, Homo Sapiens
TTAEEAAGI

SEQ ID NO: 62542 - protein, 9 aa, Homo Sapiens
AEEAAGIGI

SEQ ID NO: 62543 - protein, 9 aa, Homo Sapiens
EEAAGIGIL

SEQ ID NO: 62544 - protein, 9 aa, Homo Sapiens
EAAGIGILT

SEQ ID NO: 62545 - protein, 9 aa, Homo Sapiens
AAGIGILTV

SEQ ID NO: 62546 - protein, 9 aa, Homo Sapiens
GIGILTVIL

SEQ ID NO: 62547 - protein, 9 aa, Homo Sapiens
GILTVILGV

SEQ ID NO: 62548 - protein, 9 aa, Homo Sapiens
ILTVILGVL

SEQ ID NO: 62549 - protein, 9 aa, Homo Sapiens
TVILGVLLL

SEQ ID NO: 62550 - protein, 9 aa, Homo Sapiens
VILGVLLLI

SEQ ID NO: 62551 - protein, 9 aa, Homo Sapiens
VLLLIGCWY

SEQ ID NO: 62552 - protein, 9 aa, Homo Sapiens
LLLIGCWYC

SEQ ID NO: 62553 - protein, 9 aa, Homo Sapiens
LLIGCWYCR

SEQ ID NO: 62554 - protein, 9 aa, Homo Sapiens
LIGCWYCRR

SEQ ID NO: 62555 - protein, 9 aa, Homo Sapiens
YCRRRNGYR

SEQ ID NO: 62556 - protein, 9 aa, Homo Sapiens
RRRNGYRAL

SEQ ID NO: 62557 - protein, 9 aa, Homo Sapiens
RRNGYRALM

SEQ ID NO: 62558 - protein, 9 aa, Homo Sapiens
YRALMDKSL

SEQ ID NO: 62559 - protein, 9 aa, Homo Sapiens
ALMDKSLHV

SEQ ID NO: 62560 - protein, 9 aa, Homo Sapiens
SLHVGTQCA

SEQ ID NO: 62561 - protein, 9 aa, Homo Sapiens
LHVGTQCAL

SEQ ID NO: 62562 - protein, 9 aa, Homo Sapiens
GTQCALTRR

SEQ ID NO: 62563 - protein, 9 aa, Homo Sapiens
EGFDHRDSK

SEQ ID NO: 62564 - protein, 9 aa, Homo Sapiens
DSKVSLQEK

SEQ ID NO: 62565 - protein, 9 aa, Homo Sapiens
LQEKNCEPV

SEQ ID NO: 62566 - protein, 9 aa, Homo Sapiens
QEKNCEPVV

SEQ ID NO: 62567 - protein, 9 aa, Homo Sapiens
VVPNAPPAY

SEQ ID NO: 62568 - protein, 9 aa, Homo Sapiens
NAPPAYEKL

SEQ ID NO: 62569 - protein, 9 aa, Homo Sapiens
SAEQSPPPY

SEQ ID NO: 62570 - protein, 9 aa, Homo Sapiens
AEQSPPPYS

SEQ ID NO: 62571 - protein, 10 aa, Homo Sapiens
MPREDAHFIY

SEQ ID NO: 62572 - protein, 10 aa, Homo Sapiens
REDAHFIYGY

SEQ ID NO: 62573 - protein, 10 aa, Homo Sapiens
DAHFIYGYPK

SEQ ID NO: 62574 - protein, 10 aa, Homo Sapiens
AHFIYGYPKK

SEQ ID NO: 62575 - protein, 10 aa, Homo Sapiens
YPKKGHGHSY

SEQ ID NO: 62576 - protein, 10 aa, Homo Sapiens
YTTAEEAAGI

SEQ ID NO: 62577 - protein, 10 aa, Homo Sapiens
AEEAAGIGIL

SEQ ID NO: 62578 - protein, 10 aa, Homo Sapiens
EAAGIGILTV

SEQ ID NO: 62579 - protein, 10 aa, Homo Sapiens
GILTVILGVL

SEQ ID NO: 62580 - protein, 10 aa, Homo Sapiens
ILTVILGVLL

SEQ ID NO: 62581 - protein, 10 aa, Homo Sapiens
LTVILGVLLL

SEQ ID NO: 62582 - protein, 10 aa, Homo Sapiens
TVILGVLLLI

SEQ ID NO: 62583 - protein, 10 aa, Homo Sapiens
ILGVLLLIGC

SEQ ID NO: 62584 - protein, 10 aa, Homo Sapiens
GVLLLIGCWY

SEQ ID NO: 62585 - protein, 10 aa, Homo Sapiens
VLLLIGCWYC

SEQ ID NO: 62586 - protein, 10 aa, Homo Sapiens
LLLIGCWYCR

SEQ ID NO: 62587 - protein, 10 aa, Homo Sapiens
LLIGCWYCRR

SEQ ID NO: 62588 - protein, 10 aa, Homo Sapiens
LIGCWYCRRR

SEQ ID NO: 62589 - protein, 10 aa, Homo Sapiens
CWYCRRRNGY

SEQ ID NO: 62590 - protein, 10 aa, Homo Sapiens
WYCRRRNGYR

SEQ ID NO: 62591 - protein, 10 aa, Homo Sapiens
RRRNGYRALM

SEQ ID NO: 62592 - protein, 10 aa, Homo Sapiens
RRNGYRALMD

SEQ ID NO: 62593 - protein, 10 aa, Homo Sapiens
RNGYRALMDK

SEQ ID NO: 62594 - protein, 10 aa, Homo Sapiens
GYRALMDKSL

SEQ ID NO: 62595 - protein, 10 aa, Homo Sapiens
RALMDKSLHV

SEQ ID NO: 62596 - protein, 10 aa, Homo Sapiens
ALMDKSLHVG

SEQ ID NO: 62597 - protein, 10 aa, Homo Sapiens
LMDKSLHVGT

SEQ ID NO: 62598 - protein, 10 aa, Homo Sapiens
SLHVGTQCAL

SEQ ID NO: 62599 - protein, 10 aa, Homo Sapiens
HVGTQCALTR

SEQ ID NO: 62600 - protein, 10 aa, Homo Sapiens
EGFDHRDSKV

SEQ ID NO: 62601 - protein, 10 aa, Homo Sapiens
SLQEKNCEPV

SEQ ID NO: 62602 - protein, 10 aa, Homo Sapiens
LQEKNCEPVV

SEQ ID NO: 62603 - protein, 10 aa, Homo Sapiens
EPVVPNAPPA

SEQ ID NO: 62604 - protein, 10 aa, Homo Sapiens
PVVPNAPPAY

SEQ ID NO: 62605 - protein, 10 aa, Homo Sapiens
VPNAPPAYEK

SEQ ID NO: 62606 - protein, 10 aa, Homo Sapiens
LSAEQSPPPY

SEQ ID NO: 62607 - protein, 11 aa, Homo Sapiens
EDAHFIYGYPK

SEQ ID NO: 62608 - protein, 11 aa, Homo Sapiens
DAHFIYGYPKK

SEQ ID NO: 62609 - protein, 11 aa, Homo Sapiens
GYPKKGHGHSY

SEQ ID NO: 62610 - protein, 11 aa, Homo Sapiens
YPKKGHGHSYT

SEQ ID NO: 62611 - protein, 11 aa, Homo Sapiens
SYTTAEEAAGI

SEQ ID NO: 62612 - protein, 11 aa, Homo Sapiens
TTAEEAAGIGI

SEQ ID NO: 62613 - protein, 11 aa, Homo Sapiens
TAEEAAGIGIL

SEQ ID NO: 62614 - protein, 11 aa, Homo Sapiens
AEEAAGIGILT

SEQ ID NO: 62615 - protein, 11 aa, Homo Sapiens
EEAAGIGILTV

SEQ ID NO: 62616 - protein, 11 aa, Homo Sapiens
EAAGIGILTVI

SEQ ID NO: 62617 - protein, 11 aa, Homo Sapiens
GIGILTVILGV

SEQ ID NO: 62618 - protein, 11 aa, Homo Sapiens
GILTVILGVLL

SEQ ID NO: 62619 - protein, 11 aa, Homo Sapiens
ILTVILGVLLL

SEQ ID NO: 62620 - protein, 11 aa, Homo Sapiens
LTVILGVLLLI

SEQ ID NO: 62621 - protein, 11 aa, Homo Sapiens
VILGVLLLIGC

SEQ ID NO: 62622 - protein, 11 aa, Homo Sapiens
VLLLIGCWYCR

SEQ ID NO: 62623 - protein, 11 aa, Homo Sapiens
LLLIGCWYCRR

SEQ ID NO: 62624 - protein, 11 aa, Homo Sapiens
LLIGCWYCRRR

SEQ ID NO: 62625 - protein, 11 aa, Homo Sapiens
CWYCRRRNGYR

SEQ ID NO: 62626 - protein, 11 aa, Homo Sapiens
YCRRRNGYRAL

SEQ ID NO: 62627 - protein, 11 aa, Homo Sapiens
RRNGYRALMDK

SEQ ID NO: 62628 - protein, 11 aa, Homo Sapiens
ALMDKSLHVGT

SEQ ID NO: 62629 - protein, 11 aa, Homo Sapiens
LMDKSLHVGTQ

SEQ ID NO: 62630 - protein, 11 aa, Homo Sapiens
KSLHVGTQCAL

SEQ ID NO: 62631 - protein, 11 aa, Homo Sapiens
SLHVGTQCALT

SEQ ID NO: 62632 - protein, 11 aa, Homo Sapiens
HVGTQCALTRR

SEQ ID NO: 62633 - protein, 11 aa, Homo Sapiens
SLQEKNCEPVV

SEQ ID NO: 62634 - protein, 11 aa, Homo Sapiens
EPVVPNAPPAY

SEQ ID NO: 62635 - protein, 11 aa, Homo Sapiens
VVPNAPPAYEK

SEQ ID NO: 62636 - protein, 11 aa, Homo Sapiens
VPNAPPAYEKL

SEQ ID NO: 62637 - protein, 11 aa, Homo Sapiens
KLSAEQSPPPY

SEQ ID NO: 62638 - protein, 13 aa, Homo Sapiens
MPREDAHFIYGYP

SEQ ID NO: 62639 - protein, 13 aa, Homo Sapiens
PREDAHFIYGYPK

SEQ ID NO: 62640 - protein, 13 aa, Homo Sapiens
REDAHFIYGYPKK

SEQ ID NO: 62641 - protein, 13 aa, Homo Sapiens
EDAHFIYGYPKKG

SEQ ID NO: 62642 - protein, 13 aa, Homo Sapiens
DAHFIYGYPKKGH

SEQ ID NO: 62643 - protein, 13 aa, Homo Sapiens
AHFIYGYPKKGHG

SEQ ID NO: 62644 - protein, 13 aa, Homo Sapiens
HFIYGYPKKGHGH

SEQ ID NO: 62645 - protein, 13 aa, Homo Sapiens
FIYGYPKKGHGHS

SEQ ID NO: 62646 - protein, 13 aa, Homo Sapiens
IYGYPKKGHGHSY

SEQ ID NO: 62647 - protein, 13 aa, Homo Sapiens
YGYPKKGHGHSYT

SEQ ID NO: 62648 - protein, 13 aa, Homo Sapiens
GYPKKGHGHSYTT

SEQ ID NO: 62649 - protein, 13 aa, Homo Sapiens
YPKKGHGHSYTTA

SEQ ID NO: 62650 - protein, 13 aa, Homo Sapiens
PKKGHGHSYTTAE

SEQ ID NO: 62651 - protein, 13 aa, Homo Sapiens
KKGHGHSYTTAEE

SEQ ID NO: 62652 - protein, 13 aa, Homo Sapiens
KGHGHSYTTAEEA

SEQ ID NO: 62653 - protein, 13 aa, Homo Sapiens
GHGHSYTTAEEAA

SEQ ID NO: 62654 - protein, 13 aa, Homo Sapiens
HGHSYTTAEEAAG

SEQ ID NO: 62655 - protein, 13 aa, Homo Sapiens
GHSYTTAEEAAGI

SEQ ID NO: 62656 - protein, 13 aa, Homo Sapiens
HSYTTAEEAAGIG

SEQ ID NO: 62657 - protein, 13 aa, Homo Sapiens
SYTTAEEAAGIGI

SEQ ID NO: 62658 - protein, 13 aa, Homo Sapiens
YTTAEEAAGIGIL

SEQ ID NO: 62659 - protein, 13 aa, Homo Sapiens
TTAEEAAGIGILT

SEQ ID NO: 62660 - protein, 13 aa, Homo Sapiens
TAEEAAGIGILTV

SEQ ID NO: 62661 - protein, 13 aa, Homo Sapiens
AEEAAGIGILTVI

SEQ ID NO: 62662 - protein, 13 aa, Homo Sapiens
EEAAGIGILTVIL

SEQ ID NO: 62663 - protein, 13 aa, Homo Sapiens
EAAGIGILTVILG

SEQ ID NO: 62664 - protein, 13 aa, Homo Sapiens
AAGIGILTVILGV

SEQ ID NO: 62665 - protein, 13 aa, Homo Sapiens
AGIGILTVILGVL

SEQ ID NO: 62666 - protein, 13 aa, Homo Sapiens
GIGILTVILGVLL

SEQ ID NO: 62667 - protein, 13 aa, Homo Sapiens
IGILTVILGVLLL

SEQ ID NO: 62668 - protein, 13 aa, Homo Sapiens
GILTVILGVLLLI

SEQ ID NO: 62669 - protein, 13 aa, Homo Sapiens
ILTVILGVLLLIG

SEQ ID NO: 62670 - protein, 13 aa, Homo Sapiens
LTVILGVLLLIGC

SEQ ID NO: 62671 - protein, 13 aa, Homo Sapiens
TVILGVLLLIGCW

SEQ ID NO: 62672 - protein, 13 aa, Homo Sapiens
VILGVLLLIGCWY

SEQ ID NO: 62673 - protein, 13 aa, Homo Sapiens
ILGVLLLIGCWYC

SEQ ID NO: 62674 - protein, 13 aa, Homo Sapiens
LGVLLLIGCWYCR

SEQ ID NO: 62675 - protein, 13 aa, Homo Sapiens
GVLLLIGCWYCRR

SEQ ID NO: 62676 - protein, 13 aa, Homo Sapiens
VLLLIGCWYCRRR

SEQ ID NO: 62677 - protein, 13 aa, Homo Sapiens
LLLIGCWYCRRRN

SEQ ID NO: 62678 - protein, 13 aa, Homo Sapiens
LLIGCWYCRRRNG

SEQ ID NO: 62679 - protein, 13 aa, Homo Sapiens
LIGCWYCRRRNGY

SEQ ID NO: 62680 - protein, 13 aa, Homo Sapiens
IGCWYCRRRNGYR

SEQ ID NO: 62681 - protein, 13 aa, Homo Sapiens
GCWYCRRRNGYRA

SEQ ID NO: 62682 - protein, 13 aa, Homo Sapiens
CWYCRRRNGYRAL

SEQ ID NO: 62683 - protein, 13 aa, Homo Sapiens
WYCRRRNGYRALM

SEQ ID NO: 62684 - protein, 13 aa, Homo Sapiens
YCRRRNGYRALMD

SEQ ID NO: 62685 - protein, 13 aa, Homo Sapiens
CRRRNGYRALMDK

SEQ ID NO: 62686 - protein, 13 aa, Homo Sapiens
RRRNGYRALMDKS

SEQ ID NO: 62687 - protein, 13 aa, Homo Sapiens
RRNGYRALMDKSL

SEQ ID NO: 62688 - protein, 13 aa, Homo Sapiens
RNGYRALMDKSLH

SEQ ID NO: 62689 - protein, 13 aa, Homo Sapiens
NGYRALMDKSLHV

SEQ ID NO: 62690 - protein, 13 aa, Homo Sapiens
GYRALMDKSLHVG

SEQ ID NO: 62691 - protein, 13 aa, Homo Sapiens
YRALMDKSLHVGT

SEQ ID NO: 62692 - protein, 13 aa, Homo Sapiens
RALMDKSLHVGTQ

SEQ ID NO: 62693 - protein, 13 aa, Homo Sapiens
ALMDKSLHVGTQC

SEQ ID NO: 62694 - protein, 13 aa, Homo Sapiens
LMDKSLHVGTQCA

SEQ ID NO: 62695 - protein, 13 aa, Homo Sapiens
MDKSLHVGTQCAL

SEQ ID NO: 62696 - protein, 13 aa, Homo Sapiens
DKSLHVGTQCALT

SEQ ID NO: 62697 - protein, 13 aa, Homo Sapiens
KSLHVGTQCALTR

SEQ ID NO: 62698 - protein, 13 aa, Homo Sapiens
SLHVGTQCALTRR

SEQ ID NO: 62699 - protein, 13 aa, Homo Sapiens
LHVGTQCALTRRC

SEQ ID NO: 62700 - protein, 13 aa, Homo Sapiens
HVGTQCALTRRCP

SEQ ID NO: 62701 - protein, 13 aa, Homo Sapiens
VGTQCALTRRCPQ

SEQ ID NO: 62702 - protein, 13 aa, Homo Sapiens
GTQCALTRRCPQE

SEQ ID NO: 62703 - protein, 13 aa, Homo Sapiens
TQCALTRRCPQEG

SEQ ID NO: 62704 - protein, 13 aa, Homo Sapiens
QCALTRRCPQEGF

SEQ ID NO: 62705 - protein, 13 aa, Homo Sapiens
CALTRRCPQEGFD

SEQ ID NO: 62706 - protein, 13 aa, Homo Sapiens
ALTRRCPQEGFDH

SEQ ID NO: 62707 - protein, 13 aa, Homo Sapiens
LTRRCPQEGFDHR

SEQ ID NO: 62708 - protein, 13 aa, Homo Sapiens
TRRCPQEGFDHRD

SEQ ID NO: 62709 - protein, 13 aa, Homo Sapiens
RRCPQEGFDHRDS

SEQ ID NO: 62710 - protein, 13 aa, Homo Sapiens
RCPQEGFDHRDSK

SEQ ID NO: 62711 - protein, 13 aa, Homo Sapiens
CPQEGFDHRDSKV

SEQ ID NO: 62712 - protein, 13 aa, Homo Sapiens
PQEGFDHRDSKVS

SEQ ID NO: 62713 - protein, 13 aa, Homo Sapiens
QEGFDHRDSKVSL

SEQ ID NO: 62714 - protein, 13 aa, Homo Sapiens
EGFDHRDSKVSLQ

SEQ ID NO: 62715 - protein, 13 aa, Homo Sapiens
GFDHRDSKVSLQE

SEQ ID NO: 62716 - protein, 13 aa, Homo Sapiens
FDHRDSKVSLQEK

SEQ ID NO: 62717 - protein, 13 aa, Homo Sapiens
DHRDSKVSLQEKN

SEQ ID NO: 62718 - protein, 13 aa, Homo Sapiens
HRDSKVSLQEKNC

SEQ ID NO: 62719 - protein, 13 aa, Homo Sapiens
RDSKVSLQEKNCE

SEQ ID NO: 62720 - protein, 13 aa, Homo Sapiens
DSKVSLQEKNCEP

SEQ ID NO: 62721 - protein, 13 aa, Homo Sapiens
SKVSLQEKNCEPV

SEQ ID NO: 62722 - protein, 13 aa, Homo Sapiens
KVSLQEKNCEPVV

SEQ ID NO: 62723 - protein, 13 aa, Homo Sapiens
VSLQEKNCEPVVP

SEQ ID NO: 62724 - protein, 13 aa, Homo Sapiens
SLQEKNCEPVVPN

SEQ ID NO: 62725 - protein, 13 aa, Homo Sapiens
LQEKNCEPVVPNA

SEQ ID NO: 62726 - protein, 13 aa, Homo Sapiens
QEKNCEPVVPNAP

SEQ ID NO: 62727 - protein, 13 aa, Homo Sapiens
EKNCEPVVPNAPP

SEQ ID NO: 62728 - protein, 13 aa, Homo Sapiens
KNCEPVVPNAPPA

SEQ ID NO: 62729 - protein, 13 aa, Homo Sapiens
NCEPVVPNAPPAY

SEQ ID NO: 62730 - protein, 13 aa, Homo Sapiens
CEPVVPNAPPAYE

SEQ ID NO: 62731 - protein, 13 aa, Homo Sapiens
EPVVPNAPPAYEK

SEQ ID NO: 62732 - protein, 13 aa, Homo Sapiens
PVVPNAPPAYEKL

SEQ ID NO: 62733 - protein, 13 aa, Homo Sapiens
VVPNAPPAYEKLS

SEQ ID NO: 62734 - protein, 13 aa, Homo Sapiens
VPNAPPAYEKLSA

SEQ ID NO: 62735 - protein, 13 aa, Homo Sapiens
PNAPPAYEKLSAE

SEQ ID NO: 62736 - protein, 13 aa, Homo Sapiens
NAPPAYEKLSAEQ

SEQ ID NO: 62737 - protein, 13 aa, Homo Sapiens
APPAYEKLSAEQS

SEQ ID NO: 62738 - protein, 13 aa, Homo Sapiens
PPAYEKLSAEQSP

SEQ ID NO: 62739 - protein, 13 aa, Homo Sapiens
PAYEKLSAEQSPP

SEQ ID NO: 62740 - protein, 13 aa, Homo Sapiens
AYEKLSAEQSPPP

SEQ ID NO: 62741 - protein, 13 aa, Homo Sapiens
YEKLSAEQSPPPY

SEQ ID NO: 62742 - protein, 13 aa, Homo Sapiens
EKLSAEQSPPPYS

SEQ ID NO: 62743 - protein, 13 aa, Homo Sapiens
KLSAEQSPPPYSP

SEQ ID NO: 62744 - protein, 14 aa, Homo Sapiens
MPREDAHFIYGYPK

SEQ ID NO: 62745 - protein, 14 aa, Homo Sapiens
PREDAHFIYGYPKK

SEQ ID NO: 62746 - protein, 14 aa, Homo Sapiens
REDAHFIYGYPKKG

SEQ ID NO: 62747 - protein, 14 aa, Homo Sapiens
EDAHFIYGYPKKGH

SEQ ID NO: 62748 - protein, 14 aa, Homo Sapiens
DAHFIYGYPKKGHG

SEQ ID NO: 62749 - protein, 14 aa, Homo Sapiens
AHFIYGYPKKGHGH

SEQ ID NO: 62750 - protein, 14 aa, Homo Sapiens
HFIYGYPKKGHGHS

SEQ ID NO: 62751 - protein, 14 aa, Homo Sapiens
FIYGYPKKGHGHSY

SEQ ID NO: 62752 - protein, 14 aa, Homo Sapiens
IYGYPKKGHGHSYT

SEQ ID NO: 62753 - protein, 14 aa, Homo Sapiens
YGYPKKGHGHSYTT

SEQ ID NO: 62754 - protein, 14 aa, Homo Sapiens
GYPKKGHGHSYTTA

SEQ ID NO: 62755 - protein, 14 aa, Homo Sapiens
YPKKGHGHSYTTAE

SEQ ID NO: 62756 - protein, 14 aa, Homo Sapiens
PKKGHGHSYTTAEE

SEQ ID NO: 62757 - protein, 14 aa, Homo Sapiens
KKGHGHSYTTAEEA

SEQ ID NO: 62758 - protein, 14 aa, Homo Sapiens
KGHGHSYTTAEEAA

SEQ ID NO: 62759 - protein, 14 aa, Homo Sapiens
GHGHSYTTAEEAAG

SEQ ID NO: 62760 - protein, 14 aa, Homo Sapiens
HGHSYTTAEEAAGI

SEQ ID NO: 62761 - protein, 14 aa, Homo Sapiens
GHSYTTAEEAAGIG

SEQ ID NO: 62762 - protein, 14 aa, Homo Sapiens
HSYTTAEEAAGIGI

SEQ ID NO: 62763 - protein, 14 aa, Homo Sapiens
SYTTAEEAAGIGIL

SEQ ID NO: 62764 - protein, 14 aa, Homo Sapiens
YTTAEEAAGIGILT

SEQ ID NO: 62765 - protein, 14 aa, Homo Sapiens
TTAEEAAGIGILTV

SEQ ID NO: 62766 - protein, 14 aa, Homo Sapiens
TAEEAAGIGILTVI

SEQ ID NO: 62767 - protein, 14 aa, Homo Sapiens
AEEAAGIGILTVIL

SEQ ID NO: 62768 - protein, 14 aa, Homo Sapiens
EEAAGIGILTVILG

SEQ ID NO: 62769 - protein, 14 aa, Homo Sapiens
EAAGIGILTVILGV

SEQ ID NO: 62770 - protein, 14 aa, Homo Sapiens
AAGIGILTVILGVL

SEQ ID NO: 62771 - protein, 14 aa, Homo Sapiens
AGIGILTVILGVLL

SEQ ID NO: 62772 - protein, 14 aa, Homo Sapiens
GIGILTVILGVLLL

SEQ ID NO: 62773 - protein, 14 aa, Homo Sapiens
IGILTVILGVLLLI

SEQ ID NO: 62774 - protein, 14 aa, Homo Sapiens
GILTVILGVLLLIG

SEQ ID NO: 62775 - protein, 14 aa, Homo Sapiens
ILTVILGVLLLIGC

SEQ ID NO: 62776 - protein, 14 aa, Homo Sapiens
LTVILGVLLLIGCW

SEQ ID NO: 62777 - protein, 14 aa, Homo Sapiens
TVILGVLLLIGCWY

SEQ ID NO: 62778 - protein, 14 aa, Homo Sapiens
VILGVLLLIGCWYC

SEQ ID NO: 62779 - protein, 14 aa, Homo Sapiens
ILGVLLLIGCWYCR

SEQ ID NO: 62780 - protein, 14 aa, Homo Sapiens
LGVLLLIGCWYCRR

SEQ ID NO: 62781 - protein, 14 aa, Homo Sapiens
GVLLLIGCWYCRRR

SEQ ID NO: 62782 - protein, 14 aa, Homo Sapiens
VLLLIGCWYCRRRN

SEQ ID NO: 62783 - protein, 14 aa, Homo Sapiens
LLLIGCWYCRRRNG

SEQ ID NO: 62784 - protein, 14 aa, Homo Sapiens
LLIGCWYCRRRNGY

SEQ ID NO: 62785 - protein, 14 aa, Homo Sapiens
LIGCWYCRRRNGYR

SEQ ID NO: 62786 - protein, 14 aa, Homo Sapiens
IGCWYCRRRNGYRA

SEQ ID NO: 62787 - protein, 14 aa, Homo Sapiens
GCWYCRRRNGYRAL

SEQ ID NO: 62788 - protein, 14 aa, Homo Sapiens
CWYCRRRNGYRALM

SEQ ID NO: 62789 - protein, 14 aa, Homo Sapiens
WYCRRRNGYRALMD

SEQ ID NO: 62790 - protein, 14 aa, Homo Sapiens
YCRRRNGYRALMDK

SEQ ID NO: 62791 - protein, 14 aa, Homo Sapiens
CRRRNGYRALMDKS

SEQ ID NO: 62792 - protein, 14 aa, Homo Sapiens
RRRNGYRALMDKSL

SEQ ID NO: 62793 - protein, 14 aa, Homo Sapiens
RRNGYRALMDKSLH

SEQ ID NO: 62794 - protein, 14 aa, Homo Sapiens
RNGYRALMDKSLHV

SEQ ID NO: 62795 - protein, 14 aa, Homo Sapiens
NGYRALMDKSLHVG

SEQ ID NO: 62796 - protein, 14 aa, Homo Sapiens
GYRALMDKSLHVGT

SEQ ID NO: 62797 - protein, 14 aa, Homo Sapiens
YRALMDKSLHVGTQ

SEQ ID NO: 62798 - protein, 14 aa, Homo Sapiens
RALMDKSLHVGTQC

SEQ ID NO: 62799 - protein, 14 aa, Homo Sapiens
ALMDKSLHVGTQCA

SEQ ID NO: 62800 - protein, 14 aa, Homo Sapiens
LMDKSLHVGTQCAL

SEQ ID NO: 62801 - protein, 14 aa, Homo Sapiens
MDKSLHVGTQCALT

SEQ ID NO: 62802 - protein, 14 aa, Homo Sapiens
DKSLHVGTQCALTR

SEQ ID NO: 62803 - protein, 14 aa, Homo Sapiens
KSLHVGTQCALTRR

SEQ ID NO: 62804 - protein, 14 aa, Homo Sapiens
SLHVGTQCALTRRC

SEQ ID NO: 62805 - protein, 14 aa, Homo Sapiens
LHVGTQCALTRRCP

SEQ ID NO: 62806 - protein, 14 aa, Homo Sapiens
HVGTQCALTRRCPQ

SEQ ID NO: 62807 - protein, 14 aa, Homo Sapiens
VGTQCALTRRCPQE

SEQ ID NO: 62808 - protein, 14 aa, Homo Sapiens
GTQCALTRRCPQEG

SEQ ID NO: 62809 - protein, 14 aa, Homo Sapiens
TQCALTRRCPQEGF

SEQ ID NO: 62810 - protein, 14 aa, Homo Sapiens
QCALTRRCPQEGFD

SEQ ID NO: 62811 - protein, 14 aa, Homo Sapiens
CALTRRCPQEGFDH

SEQ ID NO: 62812 - protein, 14 aa, Homo Sapiens
ALTRRCPQEGFDHR

SEQ ID NO: 62813 - protein, 14 aa, Homo Sapiens
LTRRCPQEGFDHRD

SEQ ID NO: 62814 - protein, 14 aa, Homo Sapiens
TRRCPQEGFDHRDS

SEQ ID NO: 62815 - protein, 14 aa, Homo Sapiens
RRCPQEGFDHRDSK

SEQ ID NO: 62816 - protein, 14 aa, Homo Sapiens
RCPQEGFDHRDSKV

SEQ ID NO: 62817 - protein, 14 aa, Homo Sapiens
CPQEGFDHRDSKVS

SEQ ID NO: 62818 - protein, 14 aa, Homo Sapiens
PQEGFDHRDSKVSL

SEQ ID NO: 62819 - protein, 14 aa, Homo Sapiens
QEGFDHRDSKVSLQ

SEQ ID NO: 62820 - protein, 14 aa, Homo Sapiens
EGFDHRDSKVSLQE

SEQ ID NO: 62821 - protein, 14 aa, Homo Sapiens
GFDHRDSKVSLQEK

SEQ ID NO: 62822 - protein, 14 aa, Homo Sapiens
FDHRDSKVSLQEKN

SEQ ID NO: 62823 - protein, 14 aa, Homo Sapiens
DHRDSKVSLQEKNC

SEQ ID NO: 62824 - protein, 14 aa, Homo Sapiens
HRDSKVSLQEKNCE

SEQ ID NO: 62825 - protein, 14 aa, Homo Sapiens
RDSKVSLQEKNCEP

SEQ ID NO: 62826 - protein, 14 aa, Homo Sapiens
DSKVSLQEKNCEPV

SEQ ID NO: 62827 - protein, 14 aa, Homo Sapiens
SKVSLQEKNCEPVV

SEQ ID NO: 62828 - protein, 14 aa, Homo Sapiens
KVSLQEKNCEPVVP

SEQ ID NO: 62829 - protein, 14 aa, Homo Sapiens
VSLQEKNCEPVVPN

SEQ ID NO: 62830 - protein, 14 aa, Homo Sapiens
SLQEKNCEPVVPNA

SEQ ID NO: 62831 - protein, 14 aa, Homo Sapiens
LQEKNCEPVVPNAP

SEQ ID NO: 62832 - protein, 14 aa, Homo Sapiens
QEKNCEPVVPNAPP

SEQ ID NO: 62833 - protein, 14 aa, Homo Sapiens
EKNCEPVVPNAPPA

SEQ ID NO: 62834 - protein, 14 aa, Homo Sapiens
KNCEPVVPNAPPAY

SEQ ID NO: 62835 - protein, 14 aa, Homo Sapiens
NCEPVVPNAPPAYE

SEQ ID NO: 62836 - protein, 14 aa, Homo Sapiens
CEPVVPNAPPAYEK

SEQ ID NO: 62837 - protein, 14 aa, Homo Sapiens
EPVVPNAPPAYEKL

SEQ ID NO: 62838 - protein, 14 aa, Homo Sapiens
PVVPNAPPAYEKLS

SEQ ID NO: 62839 - protein, 14 aa, Homo Sapiens
VVPNAPPAYEKLSA

SEQ ID NO: 62840 - protein, 14 aa, Homo Sapiens
VPNAPPAYEKLSAE

SEQ ID NO: 62841 - protein, 14 aa, Homo Sapiens
PNAPPAYEKLSAEQ

SEQ ID NO: 62842 - protein, 14 aa, Homo Sapiens
NAPPAYEKLSAEQS

SEQ ID NO: 62843 - protein, 14 aa, Homo Sapiens
APPAYEKLSAEQSP

SEQ ID NO: 62844 - protein, 14 aa, Homo Sapiens
PPAYEKLSAEQSPP

SEQ ID NO: 62845 - protein, 14 aa, Homo Sapiens
PAYEKLSAEQSPPP

SEQ ID NO: 62846 - protein, 14 aa, Homo Sapiens
AYEKLSAEQSPPPY

SEQ ID NO: 62847 - protein, 14 aa, Homo Sapiens
YEKLSAEQSPPPYS

SEQ ID NO: 62848 - protein, 14 aa, Homo Sapiens
EKLSAEQSPPPYSP

SEQ ID NO: 62849 - protein, 15 aa, Homo Sapiens
MPREDAHFIYGYPKK

SEQ ID NO: 62850 - protein, 15 aa, Homo Sapiens
PREDAHFIYGYPKKG

SEQ ID NO: 62851 - protein, 15 aa, Homo Sapiens
REDAHFIYGYPKKGH

SEQ ID NO: 62852 - protein, 15 aa, Homo Sapiens
EDAHFIYGYPKKGHG

SEQ ID NO: 62853 - protein, 15 aa, Homo Sapiens
DAHFIYGYPKKGHGH

SEQ ID NO: 62854 - protein, 15 aa, Homo Sapiens
AHFIYGYPKKGHGHS

SEQ ID NO: 62855 - protein, 15 aa, Homo Sapiens
HFIYGYPKKGHGHSY

SEQ ID NO: 62856 - protein, 15 aa, Homo Sapiens
FIYGYPKKGHGHSYT

SEQ ID NO: 62857 - protein, 15 aa, Homo Sapiens
IYGYPKKGHGHSYTT

SEQ ID NO: 62858 - protein, 15 aa, Homo Sapiens
YGYPKKGHGHSYTTA

SEQ ID NO: 62859 - protein, 15 aa, Homo Sapiens
GYPKKGHGHSYTTAE

SEQ ID NO: 62860 - protein, 15 aa, Homo Sapiens
YPKKGHGHSYTTAEE

SEQ ID NO: 62861 - protein, 15 aa, Homo Sapiens
PKKGHGHSYTTAEEA

SEQ ID NO: 62862 - protein, 15 aa, Homo Sapiens
KKGHGHSYTTAEEAA

SEQ ID NO: 62863 - protein, 15 aa, Homo Sapiens
KGHGHSYTTAEEAAG

SEQ ID NO: 62864 - protein, 15 aa, Homo Sapiens
GHGHSYTTAEEAAGI

SEQ ID NO: 62865 - protein, 15 aa, Homo Sapiens
HGHSYTTAEEAAGIG

SEQ ID NO: 62866 - protein, 15 aa, Homo Sapiens
GHSYTTAEEAAGIGI

SEQ ID NO: 62867 - protein, 15 aa, Homo Sapiens
HSYTTAEEAAGIGIL

SEQ ID NO: 62868 - protein, 15 aa, Homo Sapiens
SYTTAEEAAGIGILT

SEQ ID NO: 62869 - protein, 15 aa, Homo Sapiens
YTTAEEAAGIGILTV

SEQ ID NO: 62870 - protein, 15 aa, Homo Sapiens
TTAEEAAGIGILTVI

SEQ ID NO: 62871 - protein, 15 aa, Homo Sapiens
TAEEAAGIGILTVIL

SEQ ID NO: 62872 - protein, 15 aa, Homo Sapiens
AEEAAGIGILTVILG

SEQ ID NO: 62873 - protein, 15 aa, Homo Sapiens
EEAAGIGILTVILGV

SEQ ID NO: 62874 - protein, 15 aa, Homo Sapiens
EAAGIGILTVILGVL

SEQ ID NO: 62875 - protein, 15 aa, Homo Sapiens
AAGIGILTVILGVLL

SEQ ID NO: 62876 - protein, 15 aa, Homo Sapiens
AGIGILTVILGVLLL

SEQ ID NO: 62877 - protein, 15 aa, Homo Sapiens
GIGILTVILGVLLLI

SEQ ID NO: 62878 - protein, 15 aa, Homo Sapiens
IGILTVILGVLLLIG

SEQ ID NO: 62879 - protein, 15 aa, Homo Sapiens
GILTVILGVLLLIGC

SEQ ID NO: 62880 - protein, 15 aa, Homo Sapiens
ILTVILGVLLLIGCW

SEQ ID NO: 62881 - protein, 15 aa, Homo Sapiens
LTVILGVLLLIGCWY

SEQ ID NO: 62882 - protein, 15 aa, Homo Sapiens
TVILGVLLLIGCWYC

SEQ ID NO: 62883 - protein, 15 aa, Homo Sapiens
VILGVLLLIGCWYCR

SEQ ID NO: 62884 - protein, 15 aa, Homo Sapiens
ILGVLLLIGCWYCRR

SEQ ID NO: 62885 - protein, 15 aa, Homo Sapiens
LGVLLLIGCWYCRRR

SEQ ID NO: 62886 - protein, 15 aa, Homo Sapiens
GVLLLIGCWYCRRRN

SEQ ID NO: 62887 - protein, 15 aa, Homo Sapiens
VLLLIGCWYCRRRNG

SEQ ID NO: 62888 - protein, 15 aa, Homo Sapiens
LLLIGCWYCRRRNGY

SEQ ID NO: 62889 - protein, 15 aa, Homo Sapiens
LLIGCWYCRRRNGYR

SEQ ID NO: 62890 - protein, 15 aa, Homo Sapiens
LIGCWYCRRRNGYRA

SEQ ID NO: 62891 - protein, 15 aa, Homo Sapiens
IGCWYCRRRNGYRAL

SEQ ID NO: 62892 - protein, 15 aa, Homo Sapiens
GCWYCRRRNGYRALM

SEQ ID NO: 62893 - protein, 15 aa, Homo Sapiens
CWYCRRRNGYRALMD

SEQ ID NO: 62894 - protein, 15 aa, Homo Sapiens
WYCRRRNGYRALMDK

SEQ ID NO: 62895 - protein, 15 aa, Homo Sapiens
YCRRRNGYRALMDKS

SEQ ID NO: 62896 - protein, 15 aa, Homo Sapiens
CRRRNGYRALMDKSL

SEQ ID NO: 62897 - protein, 15 aa, Homo Sapiens
RRRNGYRALMDKSLH

SEQ ID NO: 62898 - protein, 15 aa, Homo Sapiens
RRNGYRALMDKSLHV

SEQ ID NO: 62899 - protein, 15 aa, Homo Sapiens
RNGYRALMDKSLHVG

SEQ ID NO: 62900 - protein, 15 aa, Homo Sapiens
NGYRALMDKSLHVGT

SEQ ID NO: 62901 - protein, 15 aa, Homo Sapiens
GYRALMDKSLHVGTQ

SEQ ID NO: 62902 - protein, 15 aa, Homo Sapiens
YRALMDKSLHVGTQC

SEQ ID NO: 62903 - protein, 15 aa, Homo Sapiens
RALMDKSLHVGTQCA

SEQ ID NO: 62904 - protein, 15 aa, Homo Sapiens
ALMDKSLHVGTQCAL

SEQ ID NO: 62905 - protein, 15 aa, Homo Sapiens
LMDKSLHVGTQCALT

SEQ ID NO: 62906 - protein, 15 aa, Homo Sapiens
MDKSLHVGTQCALTR

SEQ ID NO: 62907 - protein, 15 aa, Homo Sapiens
DKSLHVGTQCALTRR

SEQ ID NO: 62908 - protein, 15 aa, Homo Sapiens
KSLHVGTQCALTRRC

SEQ ID NO: 62909 - protein, 15 aa, Homo Sapiens
SLHVGTQCALTRRCP

SEQ ID NO: 62910 - protein, 15 aa, Homo Sapiens
LHVGTQCALTRRCPQ

SEQ ID NO: 62911 - protein, 15 aa, Homo Sapiens
HVGTQCALTRRCPQE

SEQ ID NO: 62912 - protein, 15 aa, Homo Sapiens
VGTQCALTRRCPQEG

SEQ ID NO: 62913 - protein, 15 aa, Homo Sapiens
GTQCALTRRCPQEGF

SEQ ID NO: 62914 - protein, 15 aa, Homo Sapiens
TQCALTRRCPQEGFD

SEQ ID NO: 62915 - protein, 15 aa, Homo Sapiens
QCALTRRCPQEGFDH

SEQ ID NO: 62916 - protein, 15 aa, Homo Sapiens
CALTRRCPQEGFDHR

SEQ ID NO: 62917 - protein, 15 aa, Homo Sapiens
ALTRRCPQEGFDHRD

SEQ ID NO: 62918 - protein, 15 aa, Homo Sapiens
LTRRCPQEGFDHRDS

SEQ ID NO: 62919 - protein, 15 aa, Homo Sapiens
TRRCPQEGFDHRDSK

SEQ ID NO: 62920 - protein, 15 aa, Homo Sapiens
RRCPQEGFDHRDSKV

SEQ ID NO: 62921 - protein, 15 aa, Homo Sapiens
RCPQEGFDHRDSKVS

SEQ ID NO: 62922 - protein, 15 aa, Homo Sapiens
CPQEGFDHRDSKVSL

SEQ ID NO: 62923 - protein, 15 aa, Homo Sapiens
PQEGFDHRDSKVSLQ

SEQ ID NO: 62924 - protein, 15 aa, Homo Sapiens
QEGFDHRDSKVSLQE

SEQ ID NO: 62925 - protein, 15 aa, Homo Sapiens
EGFDHRDSKVSLQEK

SEQ ID NO: 62926 - protein, 15 aa, Homo Sapiens
GFDHRDSKVSLQEKN

SEQ ID NO: 62927 - protein, 15 aa, Homo Sapiens
FDHRDSKVSLQEKNC

SEQ ID NO: 62928 - protein, 15 aa, Homo Sapiens
DHRDSKVSLQEKNCE

SEQ ID NO: 62929 - protein, 15 aa, Homo Sapiens
HRDSKVSLQEKNCEP

SEQ ID NO: 62930 - protein, 15 aa, Homo Sapiens
RDSKVSLQEKNCEPV

SEQ ID NO: 62931 - protein, 15 aa, Homo Sapiens
DSKVSLQEKNCEPVV

SEQ ID NO: 62932 - protein, 15 aa, Homo Sapiens
SKVSLQEKNCEPVVP

SEQ ID NO: 62933 - protein, 15 aa, Homo Sapiens
KVSLQEKNCEPVVPN

SEQ ID NO: 62934 - protein, 15 aa, Homo Sapiens
VSLQEKNCEPVVPNA

SEQ ID NO: 62935 - protein, 15 aa, Homo Sapiens
SLQEKNCEPVVPNAP

SEQ ID NO: 62936 - protein, 15 aa, Homo Sapiens
LQEKNCEPVVPNAPP

SEQ ID NO: 62937 - protein, 15 aa, Homo Sapiens
QEKNCEPVVPNAPPA

SEQ ID NO: 62938 - protein, 15 aa, Homo Sapiens
EKNCEPVVPNAPPAY

SEQ ID NO: 62939 - protein, 15 aa, Homo Sapiens
KNCEPVVPNAPPAYE

SEQ ID NO: 62940 - protein, 15 aa, Homo Sapiens
NCEPVVPNAPPAYEK

SEQ ID NO: 62941 - protein, 15 aa, Homo Sapiens
CEPVVPNAPPAYEKL

SEQ ID NO: 62942 - protein, 15 aa, Homo Sapiens
EPVVPNAPPAYEKLS

SEQ ID NO: 62943 - protein, 15 aa, Homo Sapiens
PVVPNAPPAYEKLSA

SEQ ID NO: 62944 - protein, 15 aa, Homo Sapiens
VVPNAPPAYEKLSAE

SEQ ID NO: 62945 - protein, 15 aa, Homo Sapiens
VPNAPPAYEKLSAEQ

SEQ ID NO: 62946 - protein, 15 aa, Homo Sapiens
PNAPPAYEKLSAEQS

SEQ ID NO: 62947 - protein, 15 aa, Homo Sapiens
NAPPAYEKLSAEQSP

SEQ ID NO: 62948 - protein, 15 aa, Homo Sapiens
APPAYEKLSAEQSPP

SEQ ID NO: 62949 - protein, 15 aa, Homo Sapiens
PPAYEKLSAEQSPPP

SEQ ID NO: 62950 - protein, 15 aa, Homo Sapiens
PAYEKLSAEQSPPPY

SEQ ID NO: 62951 - protein, 15 aa, Homo Sapiens
AYEKLSAEQSPPPYS

SEQ ID NO: 62952 - protein, 15 aa, Homo Sapiens
YEKLSAEQSPPPYSP

SEQ ID NO: 62953 - protein, 16 aa, Homo Sapiens
MPREDAHFIYGYPKKG

SEQ ID NO: 62954 - protein, 16 aa, Homo Sapiens
PREDAHFIYGYPKKGH

SEQ ID NO: 62955 - protein, 16 aa, Homo Sapiens
REDAHFIYGYPKKGHG

SEQ ID NO: 62956 - protein, 16 aa, Homo Sapiens
EDAHFIYGYPKKGHGH

SEQ ID NO: 62957 - protein, 16 aa, Homo Sapiens
DAHFIYGYPKKGHGHS

SEQ ID NO: 62958 - protein, 16 aa, Homo Sapiens
AHFIYGYPKKGHGHSY

SEQ ID NO: 62959 - protein, 16 aa, Homo Sapiens
HFIYGYPKKGHGHSYT

SEQ ID NO: 62960 - protein, 16 aa, Homo Sapiens
FIYGYPKKGHGHSYTT

SEQ ID NO: 62961 - protein, 16 aa, Homo Sapiens
IYGYPKKGHGHSYTTA

SEQ ID NO: 62962 - protein, 16 aa, Homo Sapiens
YGYPKKGHGHSYTTAE

SEQ ID NO: 62963 - protein, 16 aa, Homo Sapiens
GYPKKGHGHSYTTAEE

SEQ ID NO: 62964 - protein, 16 aa, Homo Sapiens
YPKKGHGHSYTTAEEA

SEQ ID NO: 62965 - protein, 16 aa, Homo Sapiens
PKKGHGHSYTTAEEAA

SEQ ID NO: 62966 - protein, 16 aa, Homo Sapiens
KKGHGHSYTTAEEAAG

SEQ ID NO: 62967 - protein, 16 aa, Homo Sapiens
KGHGHSYTTAEEAAGI

SEQ ID NO: 62968 - protein, 16 aa, Homo Sapiens
GHGHSYTTAEEAAGIG

SEQ ID NO: 62969 - protein, 16 aa, Homo Sapiens
HGHSYTTAEEAAGIGI

SEQ ID NO: 62970 - protein, 16 aa, Homo Sapiens
GHSYTTAEEAAGIGIL

SEQ ID NO: 62971 - protein, 16 aa, Homo Sapiens
HSYTTAEEAAGIGILT

SEQ ID NO: 62972 - protein, 16 aa, Homo Sapiens
SYTTAEEAAGIGILTV

SEQ ID NO: 62973 - protein, 16 aa, Homo Sapiens
YTTAEEAAGIGILTVI

SEQ ID NO: 62974 - protein, 16 aa, Homo Sapiens
TTAEEAAGIGILTVIL

SEQ ID NO: 62975 - protein, 16 aa, Homo Sapiens
TAEEAAGIGILTVILG

SEQ ID NO: 62976 - protein, 16 aa, Homo Sapiens
AEEAAGIGILTVILGV

SEQ ID NO: 62977 - protein, 16 aa, Homo Sapiens
EEAAGIGILTVILGVL

SEQ ID NO: 62978 - protein, 16 aa, Homo Sapiens
EAAGIGILTVILGVLL

SEQ ID NO: 62979 - protein, 16 aa, Homo Sapiens
AAGIGILTVILGVLLL

SEQ ID NO: 62980 - protein, 16 aa, Homo Sapiens
AGIGILTVILGVLLLI

SEQ ID NO: 62981 - protein, 16 aa, Homo Sapiens
GIGILTVILGVLLLIG

SEQ ID NO: 62982 - protein, 16 aa, Homo Sapiens
IGILTVILGVLLLIGC

SEQ ID NO: 62983 - protein, 16 aa, Homo Sapiens
GILTVILGVLLLIGCW

SEQ ID NO: 62984 - protein, 16 aa, Homo Sapiens
ILTVILGVLLLIGCWY

SEQ ID NO: 62985 - protein, 16 aa, Homo Sapiens
LTVILGVLLLIGCWYC

SEQ ID NO: 62986 - protein, 16 aa, Homo Sapiens
TVILGVLLLIGCWYCR

SEQ ID NO: 62987 - protein, 16 aa, Homo Sapiens
VILGVLLLIGCWYCRR

SEQ ID NO: 62988 - protein, 16 aa, Homo Sapiens
ILGVLLLIGCWYCRRR

SEQ ID NO: 62989 - protein, 16 aa, Homo Sapiens
LGVLLLIGCWYCRRRN

SEQ ID NO: 62990 - protein, 16 aa, Homo Sapiens
GVLLLIGCWYCRRRNG

SEQ ID NO: 62991 - protein, 16 aa, Homo Sapiens
VLLLIGCWYCRRRNGY

SEQ ID NO: 62992 - protein, 16 aa, Homo Sapiens
LLLIGCWYCRRRNGYR

SEQ ID NO: 62993 - protein, 16 aa, Homo Sapiens
LLIGCWYCRRRNGYRA

SEQ ID NO: 62994 - protein, 16 aa, Homo Sapiens
LIGCWYCRRRNGYRAL

SEQ ID NO: 62995 - protein, 16 aa, Homo Sapiens
IGCWYCRRRNGYRALM

SEQ ID NO: 62996 - protein, 16 aa, Homo Sapiens
GCWYCRRRNGYRALMD

SEQ ID NO: 62997 - protein, 16 aa, Homo Sapiens
CWYCRRRNGYRALMDK

SEQ ID NO: 62998 - protein, 16 aa, Homo Sapiens
WYCRRRNGYRALMDKS

SEQ ID NO: 62999 - protein, 16 aa, Homo Sapiens
YCRRRNGYRALMDKSL

SEQ ID NO: 63000 - protein, 16 aa, Homo Sapiens
CRRRNGYRALMDKSLH

SEQ ID NO: 63001 - protein, 16 aa, Homo Sapiens
RRRNGYRALMDKSLHV

SEQ ID NO: 63002 - protein, 16 aa, Homo Sapiens
RRNGYRALMDKSLHVG

SEQ ID NO: 63003 - protein, 16 aa, Homo Sapiens
RNGYRALMDKSLHVGT

SEQ ID NO: 63004 - protein, 16 aa, Homo Sapiens
NGYRALMDKSLHVGTQ

SEQ ID NO: 63005 - protein, 16 aa, Homo Sapiens
GYRALMDKSLHVGTQC

SEQ ID NO: 63006 - protein, 16 aa, Homo Sapiens
YRALMDKSLHVGTQCA

SEQ ID NO: 63007 - protein, 16 aa, Homo Sapiens
RALMDKSLHVGTQCAL

SEQ ID NO: 63008 - protein, 16 aa, Homo Sapiens
ALMDKSLHVGTQCALT

SEQ ID NO: 63009 - protein, 16 aa, Homo Sapiens
LMDKSLHVGTQCALTR

SEQ ID NO: 63010 - protein, 16 aa, Homo Sapiens
MDKSLHVGTQCALTRR

SEQ ID NO: 63011 - protein, 16 aa, Homo Sapiens
DKSLHVGTQCALTRRC

SEQ ID NO: 63012 - protein, 16 aa, Homo Sapiens
KSLHVGTQCALTRRCP

SEQ ID NO: 63013 - protein, 16 aa, Homo Sapiens
SLHVGTQCALTRRCPQ

SEQ ID NO: 63014 - protein, 16 aa, Homo Sapiens
LHVGTQCALTRRCPQE

SEQ ID NO: 63015 - protein, 16 aa, Homo Sapiens
HVGTQCALTRRCPQEG

SEQ ID NO: 63016 - protein, 16 aa, Homo Sapiens
VGTQCALTRRCPQEGF

SEQ ID NO: 63017 - protein, 16 aa, Homo Sapiens
GTQCALTRRCPQEGFD

SEQ ID NO: 63018 - protein, 16 aa, Homo Sapiens
TQCALTRRCPQEGFDH

SEQ ID NO: 63019 - protein, 16 aa, Homo Sapiens
QCALTRRCPQEGFDHR

SEQ ID NO: 63020 - protein, 16 aa, Homo Sapiens
CALTRRCPQEGFDHRD

SEQ ID NO: 63021 - protein, 16 aa, Homo Sapiens
ALTRRCPQEGFDHRDS

SEQ ID NO: 63022 - protein, 16 aa, Homo Sapiens
LTRRCPQEGFDHRDSK

SEQ ID NO: 63023 - protein, 16 aa, Homo Sapiens
TRRCPQEGFDHRDSKV

SEQ ID NO: 63024 - protein, 16 aa, Homo Sapiens
RRCPQEGFDHRDSKVS

SEQ ID NO: 63025 - protein, 16 aa, Homo Sapiens
RCPQEGFDHRDSKVSL

SEQ ID NO: 63026 - protein, 16 aa, Homo Sapiens
CPQEGFDHRDSKVSLQ

SEQ ID NO: 63027 - protein, 16 aa, Homo Sapiens
PQEGFDHRDSKVSLQE

SEQ ID NO: 63028 - protein, 16 aa, Homo Sapiens
QEGFDHRDSKVSLQEK

SEQ ID NO: 63029 - protein, 16 aa, Homo Sapiens
EGFDHRDSKVSLQEKN

SEQ ID NO: 63030 - protein, 16 aa, Homo Sapiens
GFDHRDSKVSLQEKNC

SEQ ID NO: 63031 - protein, 16 aa, Homo Sapiens
FDHRDSKVSLQEKNCE

SEQ ID NO: 63032 - protein, 16 aa, Homo Sapiens
DHRDSKVSLQEKNCEP

SEQ ID NO: 63033 - protein, 16 aa, Homo Sapiens
HRDSKVSLQEKNCEPV

SEQ ID NO: 63034 - protein, 16 aa, Homo Sapiens
RDSKVSLQEKNCEPVV

SEQ ID NO: 63035 - protein, 16 aa, Homo Sapiens
DSKVSLQEKNCEPVVP

SEQ ID NO: 63036 - protein, 16 aa, Homo Sapiens
SKVSLQEKNCEPVVPN

SEQ ID NO: 63037 - protein, 16 aa, Homo Sapiens
KVSLQEKNCEPVVPNA

SEQ ID NO: 63038 - protein, 16 aa, Homo Sapiens
VSLQEKNCEPVVPNAP

SEQ ID NO: 63039 - protein, 16 aa, Homo Sapiens
SLQEKNCEPVVPNAPP

SEQ ID NO: 63040 - protein, 16 aa, Homo Sapiens
LQEKNCEPVVPNAPPA

SEQ ID NO: 63041 - protein, 16 aa, Homo Sapiens
QEKNCEPVVPNAPPAY

SEQ ID NO: 63042 - protein, 16 aa, Homo Sapiens
EKNCEPVVPNAPPAYE

SEQ ID NO: 63043 - protein, 16 aa, Homo Sapiens
KNCEPVVPNAPPAYEK

SEQ ID NO: 63044 - protein, 16 aa, Homo Sapiens
NCEPVVPNAPPAYEKL

SEQ ID NO: 63045 - protein, 16 aa, Homo Sapiens
CEPVVPNAPPAYEKLS

SEQ ID NO: 63046 - protein, 16 aa, Homo Sapiens
EPVVPNAPPAYEKLSA

SEQ ID NO: 63047 - protein, 16 aa, Homo Sapiens
PVVPNAPPAYEKLSAE

SEQ ID NO: 63048 - protein, 16 aa, Homo Sapiens
VVPNAPPAYEKLSAEQ

SEQ ID NO: 63049 - protein, 16 aa, Homo Sapiens
VPNAPPAYEKLSAEQS

SEQ ID NO: 63050 - protein, 16 aa, Homo Sapiens
PNAPPAYEKLSAEQSP

SEQ ID NO: 63051 - protein, 16 aa, Homo Sapiens
NAPPAYEKLSAEQSPP

SEQ ID NO: 63052 - protein, 16 aa, Homo Sapiens
APPAYEKLSAEQSPPP

SEQ ID NO: 63053 - protein, 16 aa, Homo Sapiens
PPAYEKLSAEQSPPPY

SEQ ID NO: 63054 - protein, 16 aa, Homo Sapiens
PAYEKLSAEQSPPPYS

SEQ ID NO: 63055 - protein, 16 aa, Homo Sapiens
AYEKLSAEQSPPPYSP

SEQ ID NO: 63056 - protein, 1255 aa, Homo Sapiens
MTPGTQSPFFLLLLLTVLTVVTGSGHASSTPGGEKETSATQRSSVPSSTEKNAVSMTSSVLSSHSPGSGSSTTQGQDVTLAPATEPASGSAATWGQDVTSVPVTRPALGSTTPPAHDVTSAPDNKPAPGSTAPPAHGVTSAPDTRPAPGSTAPPAHGVTSAPDTRPAPGSTAPPAHGVTSAPDTRPAPGSTAPPAHGVTSAPDTRPAPGSTAPPAHGVTSAPDTRPAPGSTAPPAHGVTSAPDTRPAPGSTAPPAHGVTSAPDTRPAPGSTAPPAHGVTSAPDTRPAPGSTAPPAHGVTSAPDTRPAPGSTAPPAHGVTSAPDTRPAPGSTAPPAHGVTSAPDTRPAPGSTAPPAHGVTSAPDTRPAPGSTAPPAHGVTSAPDTRPAPGSTAPPAHGVTSAPDTRPAPGSTAPPAHGVTSAPDTRPAPGSTAPPAHGVTSAPDTRPAPGSTAPPAHGVTSAPDTRPAPGSTAPPAHGVTSAPDTRPAPGSTAPPAHGVTSAPDTRPAPGSTAPPAHGVTSAPDTRPAPGSTAPPAHGVTSAPDTRPAPGSTAPPAHGVTSAPDTRPAPGSTAPPAHGVTSAPDTRPAPGSTAPPAHGVTSAPDTRPAPGSTAPPAHGVTSAPDTRPAPGSTAPPAHGVTSAPDTRPAPGSTAPPAHGVTSAPDTRPAPGSTAPPAHGVTSAPDTRPAPGSTAPPAHGVTSAPDTRPAPGSTAPPAHGVTSAPDTRPAPGSTAPPAHGVTSAPDTRPAPGSTAPPAHGVTSAPDTRPAPGSTAPPAHGVTSAPDTRPAPGSTAPPAHGVTSAPDTRPAPGSTAPPAHGVTSAPDTRPAPGSTAPPAHGVTSAPDTRPAPGSTAPPAHGVTSAPDTRPAPGSTAPPAHGVTSAPDTRPAPGSTAPPAHGVTSAPDTRPAPGSTAPPAHGVTSAPDTRPAPGSTAPPAHGVTSAPDNRPALGSTAPPVHNVTSASGSASGSASTLVHNGTSARATTTPASKSTPFSIPSHHSDTPTTLASHSTKTDASSTHHSSVPPLTSSNHSTSPQLSTGVSFFFLSFHISNLQFNSSLEDPSTDYYQELQRDISEMFLQIYKQGGFLGLSNIKFRPGSVVVQLTLAFREGTINVHDVETQFNQYKTEAASRYNLTISDVSVSDVPFPFSAQSGAGVPGWGIALLVLVCVLVALAIVYLIALAVCQCRRKNYGQLDIFPARDTYHPMSEYPTYHTHGRYVPPSSTDRSPYEKVSAGNGGSSLSYTNPAVAAASANL

SEQ ID NO: 63057 - protein, 8 aa, Homo Sapiens
TPGTQSPF

SEQ ID NO: 63058 - protein, 8 aa, Homo Sapiens
GTQSPFFL

SEQ ID NO: 63059 - protein, 8 aa, Homo Sapiens
TQSPFFLL

SEQ ID NO: 63060 - protein, 8 aa, Homo Sapiens
QSPFFLLL

SEQ ID NO: 63061 - protein, 8 aa, Homo Sapiens
SPFFLLLL

SEQ ID NO: 63062 - protein, 8 aa, Homo Sapiens
FLLLLLTV

SEQ ID NO: 63063 - protein, 8 aa, Homo Sapiens
LLLLLTVL

SEQ ID NO: 63064 - protein, 8 aa, Homo Sapiens
LLLLTVLT

SEQ ID NO: 63065 - protein, 8 aa, Homo Sapiens
LLLTVLTV

SEQ ID NO: 63066 - protein, 8 aa, Homo Sapiens
LLTVLTVV

SEQ ID NO: 63067 - protein, 8 aa, Homo Sapiens
SSTPGGEK

SEQ ID NO: 63068 - protein, 8 aa, Homo Sapiens
ETSATQRS

SEQ ID NO: 63069 - protein, 8 aa, Homo Sapiens
SATQRSSV

SEQ ID NO: 63070 - protein, 8 aa, Homo Sapiens
SVPSSTEK

SEQ ID NO: 63071 - protein, 8 aa, Homo Sapiens
AVSMTSSV

SEQ ID NO: 63072 - protein, 8 aa, Homo Sapiens
SPGSGSST

SEQ ID NO: 63073 - protein, 8 aa, Homo Sapiens
STTQGQDV

SEQ ID NO: 63074 - protein, 8 aa, Homo Sapiens
TQGQDVTL

SEQ ID NO: 63075 - protein, 8 aa, Homo Sapiens
EPASGSAA

SEQ ID NO: 63076 - protein, 8 aa, Homo Sapiens
ASGSAATW

SEQ ID NO: 63077 - protein, 8 aa, Homo Sapiens
AATWGQDV

SEQ ID NO: 63078 - protein, 8 aa, Homo Sapiens
WGQDVTSV

SEQ ID NO: 63079 - protein, 8 aa, Homo Sapiens
VTSVPVTR

SEQ ID NO: 63080 - protein, 8 aa, Homo Sapiens
VPVTRPAL

SEQ ID NO: 63081 - protein, 8 aa, Homo Sapiens
RPALGSTT

SEQ ID NO: 63082 - protein, 8 aa, Homo Sapiens
TTPPAHDV

SEQ ID NO: 63083 - protein, 8 aa, Homo Sapiens
VTSAPDNK

SEQ ID NO: 63084 - protein, 8 aa, Homo Sapiens
KPAPGSTA

SEQ ID NO: 63085 - protein, 8 aa, Homo Sapiens
TAPPAHGV

SEQ ID NO: 63086 - protein, 8 aa, Homo Sapiens
APPAHGVT

SEQ ID NO: 63087 - protein, 8 aa, Homo Sapiens
VTSAPDTR

SEQ ID NO: 63088 - protein, 8 aa, Homo Sapiens
RPAPGSTA

SEQ ID NO: 63089 - protein, 8 aa, Homo Sapiens
TAPPAHGV

SEQ ID NO: 63090 - protein, 8 aa, Homo Sapiens
APPAHGVT

SEQ ID NO: 63091 - protein, 8 aa, Homo Sapiens
VTSAPDTR

SEQ ID NO: 63092 - protein, 8 aa, Homo Sapiens
RPAPGSTA

SEQ ID NO: 63093 - protein, 8 aa, Homo Sapiens
TAPPAHGV

SEQ ID NO: 63094 - protein, 8 aa, Homo Sapiens
APPAHGVT

SEQ ID NO: 63095 - protein, 8 aa, Homo Sapiens
VTSAPDTR

SEQ ID NO: 63096 - protein, 8 aa, Homo Sapiens
RPAPGSTA

SEQ ID NO: 63097 - protein, 8 aa, Homo Sapiens
TAPPAHGV

SEQ ID NO: 63098 - protein, 8 aa, Homo Sapiens
APPAHGVT

SEQ ID NO: 63099 - protein, 8 aa, Homo Sapiens
VTSAPDTR

SEQ ID NO: 63100 - protein, 8 aa, Homo Sapiens
RPAPGSTA

SEQ ID NO: 63101 - protein, 8 aa, Homo Sapiens
TAPPAHGV

SEQ ID NO: 63102 - protein, 8 aa, Homo Sapiens
APPAHGVT

SEQ ID NO: 63103 - protein, 8 aa, Homo Sapiens
VTSAPDTR

SEQ ID NO: 63104 - protein, 8 aa, Homo Sapiens
RPAPGSTA

SEQ ID NO: 63105 - protein, 8 aa, Homo Sapiens
TAPPAHGV

SEQ ID NO: 63106 - protein, 8 aa, Homo Sapiens
APPAHGVT

SEQ ID NO: 63107 - protein, 8 aa, Homo Sapiens
VTSAPDTR

SEQ ID NO: 63108 - protein, 8 aa, Homo Sapiens
RPAPGSTA

SEQ ID NO: 63109 - protein, 8 aa, Homo Sapiens
TAPPAHGV

SEQ ID NO: 63110 - protein, 8 aa, Homo Sapiens
APPAHGVT

SEQ ID NO: 63111 - protein, 8 aa, Homo Sapiens
VTSAPDTR

SEQ ID NO: 63112 - protein, 8 aa, Homo Sapiens
RPAPGSTA

SEQ ID NO: 63113 - protein, 8 aa, Homo Sapiens
TAPPAHGV

SEQ ID NO: 63114 - protein, 8 aa, Homo Sapiens
APPAHGVT

SEQ ID NO: 63115 - protein, 8 aa, Homo Sapiens
VTSAPDTR

SEQ ID NO: 63116 - protein, 8 aa, Homo Sapiens
RPAPGSTA

SEQ ID NO: 63117 - protein, 8 aa, Homo Sapiens
TAPPAHGV

SEQ ID NO: 63118 - protein, 8 aa, Homo Sapiens
APPAHGVT

SEQ ID NO: 63119 - protein, 8 aa, Homo Sapiens
VTSAPDTR

SEQ ID NO: 63120 - protein, 8 aa, Homo Sapiens
RPAPGSTA

SEQ ID NO: 63121 - protein, 8 aa, Homo Sapiens
TAPPAHGV

SEQ ID NO: 63122 - protein, 8 aa, Homo Sapiens
APPAHGVT

SEQ ID NO: 63123 - protein, 8 aa, Homo Sapiens
VTSAPDTR

SEQ ID NO: 63124 - protein, 8 aa, Homo Sapiens
RPAPGSTA

SEQ ID NO: 63125 - protein, 8 aa, Homo Sapiens
TAPPAHGV

SEQ ID NO: 63126 - protein, 8 aa, Homo Sapiens
APPAHGVT

SEQ ID NO: 63127 - protein, 8 aa, Homo Sapiens
VTSAPDTR

SEQ ID NO: 63128 - protein, 8 aa, Homo Sapiens
RPAPGSTA

SEQ ID NO: 63129 - protein, 8 aa, Homo Sapiens
TAPPAHGV

SEQ ID NO: 63130 - protein, 8 aa, Homo Sapiens
APPAHGVT

SEQ ID NO: 63131 - protein, 8 aa, Homo Sapiens
VTSAPDTR

SEQ ID NO: 63132 - protein, 8 aa, Homo Sapiens
RPAPGSTA

SEQ ID NO: 63133 - protein, 8 aa, Homo Sapiens
TAPPAHGV

SEQ ID NO: 63134 - protein, 8 aa, Homo Sapiens
APPAHGVT

SEQ ID NO: 63135 - protein, 8 aa, Homo Sapiens
VTSAPDTR

SEQ ID NO: 63136 - protein, 8 aa, Homo Sapiens
RPAPGSTA

SEQ ID NO: 63137 - protein, 8 aa, Homo Sapiens
TAPPAHGV

SEQ ID NO: 63138 - protein, 8 aa, Homo Sapiens
APPAHGVT

SEQ ID NO: 63139 - protein, 8 aa, Homo Sapiens
VTSAPDTR

SEQ ID NO: 63140 - protein, 8 aa, Homo Sapiens
RPAPGSTA

SEQ ID NO: 63141 - protein, 8 aa, Homo Sapiens
TAPPAHGV

SEQ ID NO: 63142 - protein, 8 aa, Homo Sapiens
APPAHGVT

SEQ ID NO: 63143 - protein, 8 aa, Homo Sapiens
VTSAPDTR

SEQ ID NO: 63144 - protein, 8 aa, Homo Sapiens
RPAPGSTA

SEQ ID NO: 63145 - protein, 8 aa, Homo Sapiens
TAPPAHGV

SEQ ID NO: 63146 - protein, 8 aa, Homo Sapiens
APPAHGVT

SEQ ID NO: 63147 - protein, 8 aa, Homo Sapiens
VTSAPDTR

SEQ ID NO: 63148 - protein, 8 aa, Homo Sapiens
RPAPGSTA

SEQ ID NO: 63149 - protein, 8 aa, Homo Sapiens
TAPPAHGV

SEQ ID NO: 63150 - protein, 8 aa, Homo Sapiens
APPAHGVT

SEQ ID NO: 63151 - protein, 8 aa, Homo Sapiens
VTSAPDTR

SEQ ID NO: 63152 - protein, 8 aa, Homo Sapiens
RPAPGSTA

SEQ ID NO: 63153 - protein, 8 aa, Homo Sapiens
TAPPAHGV

SEQ ID NO: 63154 - protein, 8 aa, Homo Sapiens
APPAHGVT

SEQ ID NO: 63155 - protein, 8 aa, Homo Sapiens
VTSAPDTR

SEQ ID NO: 63156 - protein, 8 aa, Homo Sapiens
RPAPGSTA

SEQ ID NO: 63157 - protein, 8 aa, Homo Sapiens
TAPPAHGV

SEQ ID NO: 63158 - protein, 8 aa, Homo Sapiens
APPAHGVT

SEQ ID NO: 63159 - protein, 8 aa, Homo Sapiens
VTSAPDTR

SEQ ID NO: 63160 - protein, 8 aa, Homo Sapiens
RPAPGSTA

SEQ ID NO: 63161 - protein, 8 aa, Homo Sapiens
TAPPAHGV

SEQ ID NO: 63162 - protein, 8 aa, Homo Sapiens
APPAHGVT

SEQ ID NO: 63163 - protein, 8 aa, Homo Sapiens
VTSAPDTR

SEQ ID NO: 63164 - protein, 8 aa, Homo Sapiens
RPAPGSTA

SEQ ID NO: 63165 - protein, 8 aa, Homo Sapiens
TAPPAHGV

SEQ ID NO: 63166 - protein, 8 aa, Homo Sapiens
APPAHGVT

SEQ ID NO: 63167 - protein, 8 aa, Homo Sapiens
VTSAPDTR

SEQ ID NO: 63168 - protein, 8 aa, Homo Sapiens
RPAPGSTA

SEQ ID NO: 63169 - protein, 8 aa, Homo Sapiens
TAPPAHGV

SEQ ID NO: 63170 - protein, 8 aa, Homo Sapiens
APPAHGVT

SEQ ID NO: 63171 - protein, 8 aa, Homo Sapiens
VTSAPDTR

SEQ ID NO: 63172 - protein, 8 aa, Homo Sapiens
RPAPGSTA

SEQ ID NO: 63173 - protein, 8 aa, Homo Sapiens
TAPPAHGV

SEQ ID NO: 63174 - protein, 8 aa, Homo Sapiens
APPAHGVT

SEQ ID NO: 63175 - protein, 8 aa, Homo Sapiens
VTSAPDTR

SEQ ID NO: 63176 - protein, 8 aa, Homo Sapiens
RPAPGSTA

SEQ ID NO: 63177 - protein, 8 aa, Homo Sapiens
TAPPAHGV

SEQ ID NO: 63178 - protein, 8 aa, Homo Sapiens
APPAHGVT

SEQ ID NO: 63179 - protein, 8 aa, Homo Sapiens
VTSAPDTR

SEQ ID NO: 63180 - protein, 8 aa, Homo Sapiens
RPAPGSTA

SEQ ID NO: 63181 - protein, 8 aa, Homo Sapiens
TAPPAHGV

SEQ ID NO: 63182 - protein, 8 aa, Homo Sapiens
APPAHGVT

SEQ ID NO: 63183 - protein, 8 aa, Homo Sapiens
VTSAPDTR

SEQ ID NO: 63184 - protein, 8 aa, Homo Sapiens
RPAPGSTA

SEQ ID NO: 63185 - protein, 8 aa, Homo Sapiens
TAPPAHGV

SEQ ID NO: 63186 - protein, 8 aa, Homo Sapiens
APPAHGVT

SEQ ID NO: 63187 - protein, 8 aa, Homo Sapiens
VTSAPDTR

SEQ ID NO: 63188 - protein, 8 aa, Homo Sapiens
RPAPGSTA

SEQ ID NO: 63189 - protein, 8 aa, Homo Sapiens
TAPPAHGV

SEQ ID NO: 63190 - protein, 8 aa, Homo Sapiens
APPAHGVT

SEQ ID NO: 63191 - protein, 8 aa, Homo Sapiens
VTSAPDTR

SEQ ID NO: 63192 - protein, 8 aa, Homo Sapiens
RPAPGSTA

SEQ ID NO: 63193 - protein, 8 aa, Homo Sapiens
TAPPAHGV

SEQ ID NO: 63194 - protein, 8 aa, Homo Sapiens
APPAHGVT

SEQ ID NO: 63195 - protein, 8 aa, Homo Sapiens
VTSAPDTR

SEQ ID NO: 63196 - protein, 8 aa, Homo Sapiens
RPAPGSTA

SEQ ID NO: 63197 - protein, 8 aa, Homo Sapiens
TAPPAHGV

SEQ ID NO: 63198 - protein, 8 aa, Homo Sapiens
APPAHGVT

SEQ ID NO: 63199 - protein, 8 aa, Homo Sapiens
VTSAPDTR

SEQ ID NO: 63200 - protein, 8 aa, Homo Sapiens
RPAPGSTA

SEQ ID NO: 63201 - protein, 8 aa, Homo Sapiens
TAPPAHGV

SEQ ID NO: 63202 - protein, 8 aa, Homo Sapiens
APPAHGVT

SEQ ID NO: 63203 - protein, 8 aa, Homo Sapiens
VTSAPDTR

SEQ ID NO: 63204 - protein, 8 aa, Homo Sapiens
RPAPGSTA

SEQ ID NO: 63205 - protein, 8 aa, Homo Sapiens
TAPPAHGV

SEQ ID NO: 63206 - protein, 8 aa, Homo Sapiens
APPAHGVT

SEQ ID NO: 63207 - protein, 8 aa, Homo Sapiens
VTSAPDTR

SEQ ID NO: 63208 - protein, 8 aa, Homo Sapiens
RPAPGSTA

SEQ ID NO: 63209 - protein, 8 aa, Homo Sapiens
TAPPAHGV

SEQ ID NO: 63210 - protein, 8 aa, Homo Sapiens
APPAHGVT

SEQ ID NO: 63211 - protein, 8 aa, Homo Sapiens
VTSAPDTR

SEQ ID NO: 63212 - protein, 8 aa, Homo Sapiens
RPAPGSTA

SEQ ID NO: 63213 - protein, 8 aa, Homo Sapiens
TAPPAHGV

SEQ ID NO: 63214 - protein, 8 aa, Homo Sapiens
APPAHGVT

SEQ ID NO: 63215 - protein, 8 aa, Homo Sapiens
VTSAPDTR

SEQ ID NO: 63216 - protein, 8 aa, Homo Sapiens
RPAPGSTA

SEQ ID NO: 63217 - protein, 8 aa, Homo Sapiens
TAPPAHGV

SEQ ID NO: 63218 - protein, 8 aa, Homo Sapiens
APPAHGVT

SEQ ID NO: 63219 - protein, 8 aa, Homo Sapiens
VTSAPDTR

SEQ ID NO: 63220 - protein, 8 aa, Homo Sapiens
RPAPGSTA

SEQ ID NO: 63221 - protein, 8 aa, Homo Sapiens
TAPPAHGV

SEQ ID NO: 63222 - protein, 8 aa, Homo Sapiens
APPAHGVT

SEQ ID NO: 63223 - protein, 8 aa, Homo Sapiens
VTSAPDTR

SEQ ID NO: 63224 - protein, 8 aa, Homo Sapiens
RPAPGSTA

SEQ ID NO: 63225 - protein, 8 aa, Homo Sapiens
TAPPAHGV

SEQ ID NO: 63226 - protein, 8 aa, Homo Sapiens
APPAHGVT

SEQ ID NO: 63227 - protein, 8 aa, Homo Sapiens
VTSAPDTR

SEQ ID NO: 63228 - protein, 8 aa, Homo Sapiens
RPAPGSTA

SEQ ID NO: 63229 - protein, 8 aa, Homo Sapiens
TAPPAHGV

SEQ ID NO: 63230 - protein, 8 aa, Homo Sapiens
APPAHGVT

SEQ ID NO: 63231 - protein, 8 aa, Homo Sapiens
VTSAPDTR

SEQ ID NO: 63232 - protein, 8 aa, Homo Sapiens
RPAPGSTA

SEQ ID NO: 63233 - protein, 8 aa, Homo Sapiens
TAPPAHGV

SEQ ID NO: 63234 - protein, 8 aa, Homo Sapiens
APPAHGVT

SEQ ID NO: 63235 - protein, 8 aa, Homo Sapiens
VTSAPDTR

SEQ ID NO: 63236 - protein, 8 aa, Homo Sapiens
RPAPGSTA

SEQ ID NO: 63237 - protein, 8 aa, Homo Sapiens
TAPPAHGV

SEQ ID NO: 63238 - protein, 8 aa, Homo Sapiens
APPAHGVT

SEQ ID NO: 63239 - protein, 8 aa, Homo Sapiens
VTSAPDTR

SEQ ID NO: 63240 - protein, 8 aa, Homo Sapiens
RPAPGSTA

SEQ ID NO: 63241 - protein, 8 aa, Homo Sapiens
TAPPAHGV

SEQ ID NO: 63242 - protein, 8 aa, Homo Sapiens
APPAHGVT

SEQ ID NO: 63243 - protein, 8 aa, Homo Sapiens
VTSAPDTR

SEQ ID NO: 63244 - protein, 8 aa, Homo Sapiens
RPAPGSTA

SEQ ID NO: 63245 - protein, 8 aa, Homo Sapiens
TAPPAHGV

SEQ ID NO: 63246 - protein, 8 aa, Homo Sapiens
APPAHGVT

SEQ ID NO: 63247 - protein, 8 aa, Homo Sapiens
VTSAPDNR

SEQ ID NO: 63248 - protein, 8 aa, Homo Sapiens
APDNRPAL

SEQ ID NO: 63249 - protein, 8 aa, Homo Sapiens
RPALGSTA

SEQ ID NO: 63250 - protein, 8 aa, Homo Sapiens
TAPPVHNV

SEQ ID NO: 63251 - protein, 8 aa, Homo Sapiens
SGSASTLV

SEQ ID NO: 63252 - protein, 8 aa, Homo Sapiens
LVHNGTSA

SEQ ID NO: 63253 - protein, 8 aa, Homo Sapiens
ATTTPASK

SEQ ID NO: 63254 - protein, 8 aa, Homo Sapiens
TPFSIPSH

SEQ ID NO: 63255 - protein, 8 aa, Homo Sapiens
IPSHHSDT

SEQ ID NO: 63256 - protein, 8 aa, Homo Sapiens
HSDTPTTL

SEQ ID NO: 63257 - protein, 8 aa, Homo Sapiens
TPTTLASH

SEQ ID NO: 63258 - protein, 8 aa, Homo Sapiens
TTLASHST

SEQ ID NO: 63259 - protein, 8 aa, Homo Sapiens
TLASHSTK

SEQ ID NO: 63260 - protein, 8 aa, Homo Sapiens
SSTHHSSV

SEQ ID NO: 63261 - protein, 8 aa, Homo Sapiens
HHSSVPPL

SEQ ID NO: 63262 - protein, 8 aa, Homo Sapiens
NHSTSPQL

SEQ ID NO: 63263 - protein, 8 aa, Homo Sapiens
SPQLSTGV

SEQ ID NO: 63264 - protein, 8 aa, Homo Sapiens
QLSTGVSF

SEQ ID NO: 63265 - protein, 8 aa, Homo Sapiens
LSTGVSFF

SEQ ID NO: 63266 - protein, 8 aa, Homo Sapiens
STGVSFFF

SEQ ID NO: 63267 - protein, 8 aa, Homo Sapiens
TGVSFFFL

SEQ ID NO: 63268 - protein, 8 aa, Homo Sapiens
VSFFFLSF

SEQ ID NO: 63269 - protein, 8 aa, Homo Sapiens
SFFFLSFH

SEQ ID NO: 63270 - protein, 8 aa, Homo Sapiens
FFFLSFHI

SEQ ID NO: 63271 - protein, 8 aa, Homo Sapiens
LSFHISNL

SEQ ID NO: 63272 - protein, 8 aa, Homo Sapiens
FHISNLQF

SEQ ID NO: 63273 - protein, 8 aa, Homo Sapiens
NLQFNSSL

SEQ ID NO: 63274 - protein, 8 aa, Homo Sapiens
LQFNSSLE

SEQ ID NO: 63275 - protein, 8 aa, Homo Sapiens
STDYYQEL

SEQ ID NO: 63276 - protein, 8 aa, Homo Sapiens
DYYQELQR

SEQ ID NO: 63277 - protein, 8 aa, Homo Sapiens
LQRDISEM

SEQ ID NO: 63278 - protein, 8 aa, Homo Sapiens
SEMFLQIY

SEQ ID NO: 63279 - protein, 8 aa, Homo Sapiens
EMFLQIYK

SEQ ID NO: 63280 - protein, 8 aa, Homo Sapiens
QIYKQGGF

SEQ ID NO: 63281 - protein, 8 aa, Homo Sapiens
IYKQGGFL

SEQ ID NO: 63282 - protein, 8 aa, Homo Sapiens
KQGGFLGL

SEQ ID NO: 63283 - protein, 8 aa, Homo Sapiens
FLGLSNIK

SEQ ID NO: 63284 - protein, 8 aa, Homo Sapiens
GLSNIKFR

SEQ ID NO: 63285 - protein, 8 aa, Homo Sapiens
KFRPGSVV

SEQ ID NO: 63286 - protein, 8 aa, Homo Sapiens
FRPGSVVV

SEQ ID NO: 63287 - protein, 8 aa, Homo Sapiens
SVVVQLTL

SEQ ID NO: 63288 - protein, 8 aa, Homo Sapiens
VVVQLTLA

SEQ ID NO: 63289 - protein, 8 aa, Homo Sapiens
VVQLTLAF

SEQ ID NO: 63290 - protein, 8 aa, Homo Sapiens
VQLTLAFR

SEQ ID NO: 63291 - protein, 8 aa, Homo Sapiens
TLAFREGT

SEQ ID NO: 63292 - protein, 8 aa, Homo Sapiens
GTINVHDV

SEQ ID NO: 63293 - protein, 8 aa, Homo Sapiens
VETQFNQY

SEQ ID NO: 63294 - protein, 8 aa, Homo Sapiens
ETQFNQYK

SEQ ID NO: 63295 - protein, 8 aa, Homo Sapiens
NQYKTEAA

SEQ ID NO: 63296 - protein, 8 aa, Homo Sapiens
KTEAASRY

SEQ ID NO: 63297 - protein, 8 aa, Homo Sapiens
EAASRYNL

SEQ ID NO: 63298 - protein, 8 aa, Homo Sapiens
LTISDVSV

SEQ ID NO: 63299 - protein, 8 aa, Homo Sapiens
VSVSDVPF

SEQ ID NO: 63300 - protein, 8 aa, Homo Sapiens
VSDVPFPF

SEQ ID NO: 63301 - protein, 8 aa, Homo Sapiens
DVPFPFSA

SEQ ID NO: 63302 - protein, 8 aa, Homo Sapiens
FPFSAQSG

SEQ ID NO: 63303 - protein, 8 aa, Homo Sapiens
SAQSGAGV

SEQ ID NO: 63304 - protein, 8 aa, Homo Sapiens
SGAGVPGW

SEQ ID NO: 63305 - protein, 8 aa, Homo Sapiens
VPGWGIAL

SEQ ID NO: 63306 - protein, 8 aa, Homo Sapiens
GIALLVLV

SEQ ID NO: 63307 - protein, 8 aa, Homo Sapiens
ALLVLVCV

SEQ ID NO: 63308 - protein, 8 aa, Homo Sapiens
LLVLVCVL

SEQ ID NO: 63309 - protein, 8 aa, Homo Sapiens
LVLVCVLV

SEQ ID NO: 63310 - protein, 8 aa, Homo Sapiens
VLVCVLVA

SEQ ID NO: 63311 - protein, 8 aa, Homo Sapiens
LVCVLVAL

SEQ ID NO: 63312 - protein, 8 aa, Homo Sapiens
CVLVALAI

SEQ ID NO: 63313 - protein, 8 aa, Homo Sapiens
VLVALAIV

SEQ ID NO: 63314 - protein, 8 aa, Homo Sapiens
LVALAIVY

SEQ ID NO: 63315 - protein, 8 aa, Homo Sapiens
VALAIVYL

SEQ ID NO: 63316 - protein, 8 aa, Homo Sapiens
ALAIVYLI

SEQ ID NO: 63317 - protein, 8 aa, Homo Sapiens
AIVYLIAL

SEQ ID NO: 63318 - protein, 8 aa, Homo Sapiens
IVYLIALA

SEQ ID NO: 63319 - protein, 8 aa, Homo Sapiens
VYLIALAV

SEQ ID NO: 63320 - protein, 8 aa, Homo Sapiens
YLIALAVC

SEQ ID NO: 63321 - protein, 8 aa, Homo Sapiens
ALAVCQCR

SEQ ID NO: 63322 - protein, 8 aa, Homo Sapiens
LAVCQCRR

SEQ ID NO: 63323 - protein, 8 aa, Homo Sapiens
AVCQCRRK

SEQ ID NO: 63324 - protein, 8 aa, Homo Sapiens
RRKNYGQL

SEQ ID NO: 63325 - protein, 8 aa, Homo Sapiens
NYGQLDIF

SEQ ID NO: 63326 - protein, 8 aa, Homo Sapiens
GQLDIFPA

SEQ ID NO: 63327 - protein, 8 aa, Homo Sapiens
FPARDTYH

SEQ ID NO: 63328 - protein, 8 aa, Homo Sapiens
TYHPMSEY

SEQ ID NO: 63329 - protein, 8 aa, Homo Sapiens
HPMSEYPT

SEQ ID NO: 63330 - protein, 8 aa, Homo Sapiens
PMSEYPTY

SEQ ID NO: 63331 - protein, 8 aa, Homo Sapiens
PTYHTHGR

SEQ ID NO: 63332 - protein, 8 aa, Homo Sapiens
TYHTHGRY

SEQ ID NO: 63333 - protein, 8 aa, Homo Sapiens
SSTDRSPY

SEQ ID NO: 63334 - protein, 8 aa, Homo Sapiens
TDRSPYEK

SEQ ID NO: 63335 - protein, 8 aa, Homo Sapiens
SPYEKVSA

SEQ ID NO: 63336 - protein, 8 aa, Homo Sapiens
SLSYTNPA

SEQ ID NO: 63337 - protein, 8 aa, Homo Sapiens
LSYTNPAV

SEQ ID NO: 63338 - protein, 8 aa, Homo Sapiens
YTNPAVAA

SEQ ID NO: 63339 - protein, 8 aa, Homo Sapiens
NPAVAAAS

SEQ ID NO: 63340 - protein, 9 aa, Homo Sapiens
MTPGTQSPF

SEQ ID NO: 63341 - protein, 9 aa, Homo Sapiens
TPGTQSPFF

SEQ ID NO: 63342 - protein, 9 aa, Homo Sapiens
GTQSPFFLL

SEQ ID NO: 63343 - protein, 9 aa, Homo Sapiens
TQSPFFLLL

SEQ ID NO: 63344 - protein, 9 aa, Homo Sapiens
SPFFLLLLL

SEQ ID NO: 63345 - protein, 9 aa, Homo Sapiens
FFLLLLLTV

SEQ ID NO: 63346 - protein, 9 aa, Homo Sapiens
FLLLLLTVL

SEQ ID NO: 63347 - protein, 9 aa, Homo Sapiens
LLLLLTVLT

SEQ ID NO: 63348 - protein, 9 aa, Homo Sapiens
LLLLTVLTV

SEQ ID NO: 63349 - protein, 9 aa, Homo Sapiens
LLLTVLTVV

SEQ ID NO: 63350 - protein, 9 aa, Homo Sapiens
ASSTPGGEK

SEQ ID NO: 63351 - protein, 9 aa, Homo Sapiens
TSATQRSSV

SEQ ID NO: 63352 - protein, 9 aa, Homo Sapiens
SSVPSSTEK

SEQ ID NO: 63353 - protein, 9 aa, Homo Sapiens
STEKNAVSM

SEQ ID NO: 63354 - protein, 9 aa, Homo Sapiens
NAVSMTSSV

SEQ ID NO: 63355 - protein, 9 aa, Homo Sapiens
AVSMTSSVL

SEQ ID NO: 63356 - protein, 9 aa, Homo Sapiens
SMTSSVLSS

SEQ ID NO: 63357 - protein, 9 aa, Homo Sapiens
MTSSVLSSH

SEQ ID NO: 63358 - protein, 9 aa, Homo Sapiens
VLSSHSPGS

SEQ ID NO: 63359 - protein, 9 aa, Homo Sapiens
SPGSGSSTT

SEQ ID NO: 63360 - protein, 9 aa, Homo Sapiens
TTQGQDVTL

SEQ ID NO: 63361 - protein, 9 aa, Homo Sapiens
TQGQDVTLA

SEQ ID NO: 63362 - protein, 9 aa, Homo Sapiens
GQDVTLAPA

SEQ ID NO: 63363 - protein, 9 aa, Homo Sapiens
TLAPATEPA

SEQ ID NO: 63364 - protein, 9 aa, Homo Sapiens
EPASGSAAT

SEQ ID NO: 63365 - protein, 9 aa, Homo Sapiens
PASGSAATW

SEQ ID NO: 63366 - protein, 9 aa, Homo Sapiens
SAATWGQDV

SEQ ID NO: 63367 - protein, 9 aa, Homo Sapiens
GQDVTSVPV

SEQ ID NO: 63368 - protein, 9 aa, Homo Sapiens
DVTSVPVTR

SEQ ID NO: 63369 - protein, 9 aa, Homo Sapiens
TSVPVTRPA

SEQ ID NO: 63370 - protein, 9 aa, Homo Sapiens
SVPVTRPAL

SEQ ID NO: 63371 - protein, 9 aa, Homo Sapiens
VTRPALGST

SEQ ID NO: 63372 - protein, 9 aa, Homo Sapiens
RPALGSTTP

SEQ ID NO: 63373 - protein, 9 aa, Homo Sapiens
ALGSTTPPA

SEQ ID NO: 63374 - protein, 9 aa, Homo Sapiens
STTPPAHDV

SEQ ID NO: 63375 - protein, 9 aa, Homo Sapiens
DVTSAPDNK

SEQ ID NO: 63376 - protein, 9 aa, Homo Sapiens
TSAPDNKPA

SEQ ID NO: 63377 - protein, 9 aa, Homo Sapiens
KPAPGSTAP

SEQ ID NO: 63378 - protein, 9 aa, Homo Sapiens
APGSTAPPA

SEQ ID NO: 63379 - protein, 9 aa, Homo Sapiens
STAPPAHGV

SEQ ID NO: 63380 - protein, 9 aa, Homo Sapiens
GVTSAPDTR

SEQ ID NO: 63381 - protein, 9 aa, Homo Sapiens
TSAPDTRPA

SEQ ID NO: 63382 - protein, 9 aa, Homo Sapiens
RPAPGSTAP

SEQ ID NO: 63383 - protein, 9 aa, Homo Sapiens
APGSTAPPA

SEQ ID NO: 63384 - protein, 9 aa, Homo Sapiens
STAPPAHGV

SEQ ID NO: 63385 - protein, 9 aa, Homo Sapiens
GVTSAPDTR

SEQ ID NO: 63386 - protein, 9 aa, Homo Sapiens
TSAPDTRPA

SEQ ID NO: 63387 - protein, 9 aa, Homo Sapiens
RPAPGSTAP

SEQ ID NO: 63388 - protein, 9 aa, Homo Sapiens
APGSTAPPA

SEQ ID NO: 63389 - protein, 9 aa, Homo Sapiens
STAPPAHGV

SEQ ID NO: 63390 - protein, 9 aa, Homo Sapiens
GVTSAPDTR

SEQ ID NO: 63391 - protein, 9 aa, Homo Sapiens
TSAPDTRPA

SEQ ID NO: 63392 - protein, 9 aa, Homo Sapiens
RPAPGSTAP

SEQ ID NO: 63393 - protein, 9 aa, Homo Sapiens
APGSTAPPA

SEQ ID NO: 63394 - protein, 9 aa, Homo Sapiens
STAPPAHGV

SEQ ID NO: 63395 - protein, 9 aa, Homo Sapiens
GVTSAPDTR

SEQ ID NO: 63396 - protein, 9 aa, Homo Sapiens
TSAPDTRPA

SEQ ID NO: 63397 - protein, 9 aa, Homo Sapiens
RPAPGSTAP

SEQ ID NO: 63398 - protein, 9 aa, Homo Sapiens
APGSTAPPA

SEQ ID NO: 63399 - protein, 9 aa, Homo Sapiens
STAPPAHGV

SEQ ID NO: 63400 - protein, 9 aa, Homo Sapiens
GVTSAPDTR

SEQ ID NO: 63401 - protein, 9 aa, Homo Sapiens
TSAPDTRPA

SEQ ID NO: 63402 - protein, 9 aa, Homo Sapiens
RPAPGSTAP

SEQ ID NO: 63403 - protein, 9 aa, Homo Sapiens
APGSTAPPA

SEQ ID NO: 63404 - protein, 9 aa, Homo Sapiens
STAPPAHGV

SEQ ID NO: 63405 - protein, 9 aa, Homo Sapiens
GVTSAPDTR

SEQ ID NO: 63406 - protein, 9 aa, Homo Sapiens
TSAPDTRPA

SEQ ID NO: 63407 - protein, 9 aa, Homo Sapiens
RPAPGSTAP

SEQ ID NO: 63408 - protein, 9 aa, Homo Sapiens
APGSTAPPA

SEQ ID NO: 63409 - protein, 9 aa, Homo Sapiens
STAPPAHGV

SEQ ID NO: 63410 - protein, 9 aa, Homo Sapiens
GVTSAPDTR

SEQ ID NO: 63411 - protein, 9 aa, Homo Sapiens
TSAPDTRPA

SEQ ID NO: 63412 - protein, 9 aa, Homo Sapiens
RPAPGSTAP

SEQ ID NO: 63413 - protein, 9 aa, Homo Sapiens
APGSTAPPA

SEQ ID NO: 63414 - protein, 9 aa, Homo Sapiens
STAPPAHGV

SEQ ID NO: 63415 - protein, 9 aa, Homo Sapiens
GVTSAPDTR

SEQ ID NO: 63416 - protein, 9 aa, Homo Sapiens
TSAPDTRPA

SEQ ID NO: 63417 - protein, 9 aa, Homo Sapiens
RPAPGSTAP

SEQ ID NO: 63418 - protein, 9 aa, Homo Sapiens
APGSTAPPA

SEQ ID NO: 63419 - protein, 9 aa, Homo Sapiens
STAPPAHGV

SEQ ID NO: 63420 - protein, 9 aa, Homo Sapiens
GVTSAPDTR

SEQ ID NO: 63421 - protein, 9 aa, Homo Sapiens
TSAPDTRPA

SEQ ID NO: 63422 - protein, 9 aa, Homo Sapiens
RPAPGSTAP

SEQ ID NO: 63423 - protein, 9 aa, Homo Sapiens
APGSTAPPA

SEQ ID NO: 63424 - protein, 9 aa, Homo Sapiens
STAPPAHGV

SEQ ID NO: 63425 - protein, 9 aa, Homo Sapiens
GVTSAPDTR

SEQ ID NO: 63426 - protein, 9 aa, Homo Sapiens
TSAPDTRPA

SEQ ID NO: 63427 - protein, 9 aa, Homo Sapiens
RPAPGSTAP

SEQ ID NO: 63428 - protein, 9 aa, Homo Sapiens
APGSTAPPA

SEQ ID NO: 63429 - protein, 9 aa, Homo Sapiens
STAPPAHGV

SEQ ID NO: 63430 - protein, 9 aa, Homo Sapiens
GVTSAPDTR

SEQ ID NO: 63431 - protein, 9 aa, Homo Sapiens
TSAPDTRPA

SEQ ID NO: 63432 - protein, 9 aa, Homo Sapiens
RPAPGSTAP

SEQ ID NO: 63433 - protein, 9 aa, Homo Sapiens
APGSTAPPA

SEQ ID NO: 63434 - protein, 9 aa, Homo Sapiens
STAPPAHGV

SEQ ID NO: 63435 - protein, 9 aa, Homo Sapiens
GVTSAPDTR

SEQ ID NO: 63436 - protein, 9 aa, Homo Sapiens
TSAPDTRPA

SEQ ID NO: 63437 - protein, 9 aa, Homo Sapiens
RPAPGSTAP

SEQ ID NO: 63438 - protein, 9 aa, Homo Sapiens
APGSTAPPA

SEQ ID NO: 63439 - protein, 9 aa, Homo Sapiens
STAPPAHGV

SEQ ID NO: 63440 - protein, 9 aa, Homo Sapiens
GVTSAPDTR

SEQ ID NO: 63441 - protein, 9 aa, Homo Sapiens
TSAPDTRPA

SEQ ID NO: 63442 - protein, 9 aa, Homo Sapiens
RPAPGSTAP

SEQ ID NO: 63443 - protein, 9 aa, Homo Sapiens
APGSTAPPA

SEQ ID NO: 63444 - protein, 9 aa, Homo Sapiens
STAPPAHGV

SEQ ID NO: 63445 - protein, 9 aa, Homo Sapiens
GVTSAPDTR

SEQ ID NO: 63446 - protein, 9 aa, Homo Sapiens
TSAPDTRPA

SEQ ID NO: 63447 - protein, 9 aa, Homo Sapiens
RPAPGSTAP

SEQ ID NO: 63448 - protein, 9 aa, Homo Sapiens
APGSTAPPA

SEQ ID NO: 63449 - protein, 9 aa, Homo Sapiens
STAPPAHGV

SEQ ID NO: 63450 - protein, 9 aa, Homo Sapiens
GVTSAPDTR

SEQ ID NO: 63451 - protein, 9 aa, Homo Sapiens
TSAPDTRPA

SEQ ID NO: 63452 - protein, 9 aa, Homo Sapiens
RPAPGSTAP

SEQ ID NO: 63453 - protein, 9 aa, Homo Sapiens
APGSTAPPA

SEQ ID NO: 63454 - protein, 9 aa, Homo Sapiens
STAPPAHGV

SEQ ID NO: 63455 - protein, 9 aa, Homo Sapiens
GVTSAPDTR

SEQ ID NO: 63456 - protein, 9 aa, Homo Sapiens
TSAPDTRPA

SEQ ID NO: 63457 - protein, 9 aa, Homo Sapiens
RPAPGSTAP

SEQ ID NO: 63458 - protein, 9 aa, Homo Sapiens
APGSTAPPA

SEQ ID NO: 63459 - protein, 9 aa, Homo Sapiens
STAPPAHGV

SEQ ID NO: 63460 - protein, 9 aa, Homo Sapiens
GVTSAPDTR

SEQ ID NO: 63461 - protein, 9 aa, Homo Sapiens
TSAPDTRPA

SEQ ID NO: 63462 - protein, 9 aa, Homo Sapiens
RPAPGSTAP

SEQ ID NO: 63463 - protein, 9 aa, Homo Sapiens
APGSTAPPA

SEQ ID NO: 63464 - protein, 9 aa, Homo Sapiens
STAPPAHGV

SEQ ID NO: 63465 - protein, 9 aa, Homo Sapiens
GVTSAPDTR

SEQ ID NO: 63466 - protein, 9 aa, Homo Sapiens
TSAPDTRPA

SEQ ID NO: 63467 - protein, 9 aa, Homo Sapiens
RPAPGSTAP

SEQ ID NO: 63468 - protein, 9 aa, Homo Sapiens
APGSTAPPA

SEQ ID NO: 63469 - protein, 9 aa, Homo Sapiens
STAPPAHGV

SEQ ID NO: 63470 - protein, 9 aa, Homo Sapiens
GVTSAPDTR

SEQ ID NO: 63471 - protein, 9 aa, Homo Sapiens
TSAPDTRPA

SEQ ID NO: 63472 - protein, 9 aa, Homo Sapiens
RPAPGSTAP

SEQ ID NO: 63473 - protein, 9 aa, Homo Sapiens
APGSTAPPA

SEQ ID NO: 63474 - protein, 9 aa, Homo Sapiens
STAPPAHGV

SEQ ID NO: 63475 - protein, 9 aa, Homo Sapiens
GVTSAPDTR

SEQ ID NO: 63476 - protein, 9 aa, Homo Sapiens
TSAPDTRPA

SEQ ID NO: 63477 - protein, 9 aa, Homo Sapiens
RPAPGSTAP

SEQ ID NO: 63478 - protein, 9 aa, Homo Sapiens
APGSTAPPA

SEQ ID NO: 63479 - protein, 9 aa, Homo Sapiens
STAPPAHGV

SEQ ID NO: 63480 - protein, 9 aa, Homo Sapiens
GVTSAPDTR

SEQ ID NO: 63481 - protein, 9 aa, Homo Sapiens
TSAPDTRPA

SEQ ID NO: 63482 - protein, 9 aa, Homo Sapiens
RPAPGSTAP

SEQ ID NO: 63483 - protein, 9 aa, Homo Sapiens
APGSTAPPA

SEQ ID NO: 63484 - protein, 9 aa, Homo Sapiens
STAPPAHGV

SEQ ID NO: 63485 - protein, 9 aa, Homo Sapiens
GVTSAPDTR

SEQ ID NO: 63486 - protein, 9 aa, Homo Sapiens
TSAPDTRPA

SEQ ID NO: 63487 - protein, 9 aa, Homo Sapiens
RPAPGSTAP

SEQ ID NO: 63488 - protein, 9 aa, Homo Sapiens
APGSTAPPA

SEQ ID NO: 63489 - protein, 9 aa, Homo Sapiens
STAPPAHGV

SEQ ID NO: 63490 - protein, 9 aa, Homo Sapiens
GVTSAPDTR

SEQ ID NO: 63491 - protein, 9 aa, Homo Sapiens
TSAPDTRPA

SEQ ID NO: 63492 - protein, 9 aa, Homo Sapiens
RPAPGSTAP

SEQ ID NO: 63493 - protein, 9 aa, Homo Sapiens
APGSTAPPA

SEQ ID NO: 63494 - protein, 9 aa, Homo Sapiens
STAPPAHGV

SEQ ID NO: 63495 - protein, 9 aa, Homo Sapiens
GVTSAPDTR

SEQ ID NO: 63496 - protein, 9 aa, Homo Sapiens
TSAPDTRPA

SEQ ID NO: 63497 - protein, 9 aa, Homo Sapiens
RPAPGSTAP

SEQ ID NO: 63498 - protein, 9 aa, Homo Sapiens
APGSTAPPA

SEQ ID NO: 63499 - protein, 9 aa, Homo Sapiens
STAPPAHGV

SEQ ID NO: 63500 - protein, 9 aa, Homo Sapiens
GVTSAPDTR

SEQ ID NO: 63501 - protein, 9 aa, Homo Sapiens
TSAPDTRPA

SEQ ID NO: 63502 - protein, 9 aa, Homo Sapiens
RPAPGSTAP

SEQ ID NO: 63503 - protein, 9 aa, Homo Sapiens
APGSTAPPA

SEQ ID NO: 63504 - protein, 9 aa, Homo Sapiens
STAPPAHGV

SEQ ID NO: 63505 - protein, 9 aa, Homo Sapiens
GVTSAPDTR

SEQ ID NO: 63506 - protein, 9 aa, Homo Sapiens
TSAPDTRPA

SEQ ID NO: 63507 - protein, 9 aa, Homo Sapiens
RPAPGSTAP

SEQ ID NO: 63508 - protein, 9 aa, Homo Sapiens
APGSTAPPA

SEQ ID NO: 63509 - protein, 9 aa, Homo Sapiens
STAPPAHGV

SEQ ID NO: 63510 - protein, 9 aa, Homo Sapiens
GVTSAPDTR

SEQ ID NO: 63511 - protein, 9 aa, Homo Sapiens
TSAPDTRPA

SEQ ID NO: 63512 - protein, 9 aa, Homo Sapiens
RPAPGSTAP

SEQ ID NO: 63513 - protein, 9 aa, Homo Sapiens
APGSTAPPA

SEQ ID NO: 63514 - protein, 9 aa, Homo Sapiens
STAPPAHGV

SEQ ID NO: 63515 - protein, 9 aa, Homo Sapiens
GVTSAPDTR

SEQ ID NO: 63516 - protein, 9 aa, Homo Sapiens
TSAPDTRPA

SEQ ID NO: 63517 - protein, 9 aa, Homo Sapiens
RPAPGSTAP

SEQ ID NO: 63518 - protein, 9 aa, Homo Sapiens
APGSTAPPA

SEQ ID NO: 63519 - protein, 9 aa, Homo Sapiens
STAPPAHGV

SEQ ID NO: 63520 - protein, 9 aa, Homo Sapiens
GVTSAPDTR

SEQ ID NO: 63521 - protein, 9 aa, Homo Sapiens
TSAPDTRPA

SEQ ID NO: 63522 - protein, 9 aa, Homo Sapiens
RPAPGSTAP

SEQ ID NO: 63523 - protein, 9 aa, Homo Sapiens
APGSTAPPA

SEQ ID NO: 63524 - protein, 9 aa, Homo Sapiens
STAPPAHGV

SEQ ID NO: 63525 - protein, 9 aa, Homo Sapiens
GVTSAPDTR

SEQ ID NO: 63526 - protein, 9 aa, Homo Sapiens
TSAPDTRPA

SEQ ID NO: 63527 - protein, 9 aa, Homo Sapiens
RPAPGSTAP

SEQ ID NO: 63528 - protein, 9 aa, Homo Sapiens
APGSTAPPA

SEQ ID NO: 63529 - protein, 9 aa, Homo Sapiens
STAPPAHGV

SEQ ID NO: 63530 - protein, 9 aa, Homo Sapiens
GVTSAPDTR

SEQ ID NO: 63531 - protein, 9 aa, Homo Sapiens
TSAPDTRPA

SEQ ID NO: 63532 - protein, 9 aa, Homo Sapiens
RPAPGSTAP

SEQ ID NO: 63533 - protein, 9 aa, Homo Sapiens
APGSTAPPA

SEQ ID NO: 63534 - protein, 9 aa, Homo Sapiens
STAPPAHGV

SEQ ID NO: 63535 - protein, 9 aa, Homo Sapiens
GVTSAPDTR

SEQ ID NO: 63536 - protein, 9 aa, Homo Sapiens
TSAPDTRPA

SEQ ID NO: 63537 - protein, 9 aa, Homo Sapiens
RPAPGSTAP

SEQ ID NO: 63538 - protein, 9 aa, Homo Sapiens
APGSTAPPA

SEQ ID NO: 63539 - protein, 9 aa, Homo Sapiens
STAPPAHGV

SEQ ID NO: 63540 - protein, 9 aa, Homo Sapiens
GVTSAPDTR

SEQ ID NO: 63541 - protein, 9 aa, Homo Sapiens
TSAPDTRPA

SEQ ID NO: 63542 - protein, 9 aa, Homo Sapiens
RPAPGSTAP

SEQ ID NO: 63543 - protein, 9 aa, Homo Sapiens
APGSTAPPA

SEQ ID NO: 63544 - protein, 9 aa, Homo Sapiens
STAPPAHGV

SEQ ID NO: 63545 - protein, 9 aa, Homo Sapiens
GVTSAPDTR

SEQ ID NO: 63546 - protein, 9 aa, Homo Sapiens
TSAPDTRPA

SEQ ID NO: 63547 - protein, 9 aa, Homo Sapiens
RPAPGSTAP

SEQ ID NO: 63548 - protein, 9 aa, Homo Sapiens
APGSTAPPA

SEQ ID NO: 63549 - protein, 9 aa, Homo Sapiens
STAPPAHGV

SEQ ID NO: 63550 - protein, 9 aa, Homo Sapiens
GVTSAPDTR

SEQ ID NO: 63551 - protein, 9 aa, Homo Sapiens
TSAPDTRPA

SEQ ID NO: 63552 - protein, 9 aa, Homo Sapiens
RPAPGSTAP

SEQ ID NO: 63553 - protein, 9 aa, Homo Sapiens
APGSTAPPA

SEQ ID NO: 63554 - protein, 9 aa, Homo Sapiens
STAPPAHGV

SEQ ID NO: 63555 - protein, 9 aa, Homo Sapiens
GVTSAPDTR

SEQ ID NO: 63556 - protein, 9 aa, Homo Sapiens
TSAPDTRPA

SEQ ID NO: 63557 - protein, 9 aa, Homo Sapiens
RPAPGSTAP

SEQ ID NO: 63558 - protein, 9 aa, Homo Sapiens
APGSTAPPA

SEQ ID NO: 63559 - protein, 9 aa, Homo Sapiens
STAPPAHGV

SEQ ID NO: 63560 - protein, 9 aa, Homo Sapiens
GVTSAPDTR

SEQ ID NO: 63561 - protein, 9 aa, Homo Sapiens
TSAPDTRPA

SEQ ID NO: 63562 - protein, 9 aa, Homo Sapiens
RPAPGSTAP

SEQ ID NO: 63563 - protein, 9 aa, Homo Sapiens
APGSTAPPA

SEQ ID NO: 63564 - protein, 9 aa, Homo Sapiens
STAPPAHGV

SEQ ID NO: 63565 - protein, 9 aa, Homo Sapiens
GVTSAPDTR

SEQ ID NO: 63566 - protein, 9 aa, Homo Sapiens
TSAPDTRPA

SEQ ID NO: 63567 - protein, 9 aa, Homo Sapiens
RPAPGSTAP

SEQ ID NO: 63568 - protein, 9 aa, Homo Sapiens
APGSTAPPA

SEQ ID NO: 63569 - protein, 9 aa, Homo Sapiens
STAPPAHGV

SEQ ID NO: 63570 - protein, 9 aa, Homo Sapiens
GVTSAPDTR

SEQ ID NO: 63571 - protein, 9 aa, Homo Sapiens
TSAPDTRPA

SEQ ID NO: 63572 - protein, 9 aa, Homo Sapiens
RPAPGSTAP

SEQ ID NO: 63573 - protein, 9 aa, Homo Sapiens
APGSTAPPA

SEQ ID NO: 63574 - protein, 9 aa, Homo Sapiens
STAPPAHGV

SEQ ID NO: 63575 - protein, 9 aa, Homo Sapiens
GVTSAPDTR

SEQ ID NO: 63576 - protein, 9 aa, Homo Sapiens
TSAPDTRPA

SEQ ID NO: 63577 - protein, 9 aa, Homo Sapiens
RPAPGSTAP

SEQ ID NO: 63578 - protein, 9 aa, Homo Sapiens
APGSTAPPA

SEQ ID NO: 63579 - protein, 9 aa, Homo Sapiens
STAPPAHGV

SEQ ID NO: 63580 - protein, 9 aa, Homo Sapiens
GVTSAPDNR

SEQ ID NO: 63581 - protein, 9 aa, Homo Sapiens
TSAPDNRPA

SEQ ID NO: 63582 - protein, 9 aa, Homo Sapiens
SAPDNRPAL

SEQ ID NO: 63583 - protein, 9 aa, Homo Sapiens
RPALGSTAP

SEQ ID NO: 63584 - protein, 9 aa, Homo Sapiens
ALGSTAPPV

SEQ ID NO: 63585 - protein, 9 aa, Homo Sapiens
STAPPVHNV

SEQ ID NO: 63586 - protein, 9 aa, Homo Sapiens
PPVHNVTSA

SEQ ID NO: 63587 - protein, 9 aa, Homo Sapiens
NVTSASGSA

SEQ ID NO: 63588 - protein, 9 aa, Homo Sapiens
SASGSASTL

SEQ ID NO: 63589 - protein, 9 aa, Homo Sapiens
TLVHNGTSA

SEQ ID NO: 63590 - protein, 9 aa, Homo Sapiens
LVHNGTSAR

SEQ ID NO: 63591 - protein, 9 aa, Homo Sapiens
SARATTTPA

SEQ ID NO: 63592 - protein, 9 aa, Homo Sapiens
RATTTPASK

SEQ ID NO: 63593 - protein, 9 aa, Homo Sapiens
TPASKSTPF

SEQ ID NO: 63594 - protein, 9 aa, Homo Sapiens
KSTPFSIPS

SEQ ID NO: 63595 - protein, 9 aa, Homo Sapiens
HHSDTPTTL

SEQ ID NO: 63596 - protein, 9 aa, Homo Sapiens
DTPTTLASH

SEQ ID NO: 63597 - protein, 9 aa, Homo Sapiens
TTLASHSTK

SEQ ID NO: 63598 - protein, 9 aa, Homo Sapiens
TLASHSTKT

SEQ ID NO: 63599 - protein, 9 aa, Homo Sapiens
STHHSSVPP

SEQ ID NO: 63600 - protein, 9 aa, Homo Sapiens
THHSSVPPL

SEQ ID NO: 63601 - protein, 9 aa, Homo Sapiens
PLTSSNHST

SEQ ID NO: 63602 - protein, 9 aa, Homo Sapiens
TSPQLSTGV

SEQ ID NO: 63603 - protein, 9 aa, Homo Sapiens
SPQLSTGVS

SEQ ID NO: 63604 - protein, 9 aa, Homo Sapiens
PQLSTGVSF

SEQ ID NO: 63605 - protein, 9 aa, Homo Sapiens
QLSTGVSFF

SEQ ID NO: 63606 - protein, 9 aa, Homo Sapiens
LSTGVSFFF

SEQ ID NO: 63607 - protein, 9 aa, Homo Sapiens
STGVSFFFL

SEQ ID NO: 63608 - protein, 9 aa, Homo Sapiens
TGVSFFFLS

SEQ ID NO: 63609 - protein, 9 aa, Homo Sapiens
GVSFFFLSF

SEQ ID NO: 63610 - protein, 9 aa, Homo Sapiens
VSFFFLSFH

SEQ ID NO: 63611 - protein, 9 aa, Homo Sapiens
SFFFLSFHI

SEQ ID NO: 63612 - protein, 9 aa, Homo Sapiens
FLSFHISNL

SEQ ID NO: 63613 - protein, 9 aa, Homo Sapiens
SFHISNLQF

SEQ ID NO: 63614 - protein, 9 aa, Homo Sapiens
SLEDPSTDY

SEQ ID NO: 63615 - protein, 9 aa, Homo Sapiens
LEDPSTDYY

SEQ ID NO: 63616 - protein, 9 aa, Homo Sapiens
STDYYQELQ

SEQ ID NO: 63617 - protein, 9 aa, Homo Sapiens
TDYYQELQR

SEQ ID NO: 63618 - protein, 9 aa, Homo Sapiens
YYQELQRDI

SEQ ID NO: 63619 - protein, 9 aa, Homo Sapiens
ELQRDISEM

SEQ ID NO: 63620 - protein, 9 aa, Homo Sapiens
LQRDISEMF

SEQ ID NO: 63621 - protein, 9 aa, Homo Sapiens
DISEMFLQI

SEQ ID NO: 63622 - protein, 9 aa, Homo Sapiens
ISEMFLQIY

SEQ ID NO: 63623 - protein, 9 aa, Homo Sapiens
SEMFLQIYK

SEQ ID NO: 63624 - protein, 9 aa, Homo Sapiens
FLQIYKQGG

SEQ ID NO: 63625 - protein, 9 aa, Homo Sapiens
LQIYKQGGF

SEQ ID NO: 63626 - protein, 9 aa, Homo Sapiens
QIYKQGGFL

SEQ ID NO: 63627 - protein, 9 aa, Homo Sapiens
YKQGGFLGL

SEQ ID NO: 63628 - protein, 9 aa, Homo Sapiens
FLGLSNIKF

SEQ ID NO: 63629 - protein, 9 aa, Homo Sapiens
LGLSNIKFR

SEQ ID NO: 63630 - protein, 9 aa, Homo Sapiens
NIKFRPGSV

SEQ ID NO: 63631 - protein, 9 aa, Homo Sapiens
KFRPGSVVV

SEQ ID NO: 63632 - protein, 9 aa, Homo Sapiens
RPGSVVVQL

SEQ ID NO: 63633 - protein, 9 aa, Homo Sapiens
GSVVVQLTL

SEQ ID NO: 63634 - protein, 9 aa, Homo Sapiens
SVVVQLTLA

SEQ ID NO: 63635 - protein, 9 aa, Homo Sapiens
VVVQLTLAF

SEQ ID NO: 63636 - protein, 9 aa, Homo Sapiens
VVQLTLAFR

SEQ ID NO: 63637 - protein, 9 aa, Homo Sapiens
TLAFREGTI

SEQ ID NO: 63638 - protein, 9 aa, Homo Sapiens
AFREGTINV

SEQ ID NO: 63639 - protein, 9 aa, Homo Sapiens
DVETQFNQY

SEQ ID NO: 63640 - protein, 9 aa, Homo Sapiens
ETQFNQYKT

SEQ ID NO: 63641 - protein, 9 aa, Homo Sapiens
QYKTEAASR

SEQ ID NO: 63642 - protein, 9 aa, Homo Sapiens
TEAASRYNL

SEQ ID NO: 63643 - protein, 9 aa, Homo Sapiens
NLTISDVSV

SEQ ID NO: 63644 - protein, 9 aa, Homo Sapiens
DVSVSDVPF

SEQ ID NO: 63645 - protein, 9 aa, Homo Sapiens
SVSDVPFPF

SEQ ID NO: 63646 - protein, 9 aa, Homo Sapiens
VPFPFSAQS

SEQ ID NO: 63647 - protein, 9 aa, Homo Sapiens
FPFSAQSGA

SEQ ID NO: 63648 - protein, 9 aa, Homo Sapiens
FSAQSGAGV

SEQ ID NO: 63649 - protein, 9 aa, Homo Sapiens
QSGAGVPGW

SEQ ID NO: 63650 - protein, 9 aa, Homo Sapiens
GVPGWGIAL

SEQ ID NO: 63651 - protein, 9 aa, Homo Sapiens
VPGWGIALL

SEQ ID NO: 63652 - protein, 9 aa, Homo Sapiens
PGWGIALLV

SEQ ID NO: 63653 - protein, 9 aa, Homo Sapiens
GWGIALLVL

SEQ ID NO: 63654 - protein, 9 aa, Homo Sapiens
WGIALLVLV

SEQ ID NO: 63655 - protein, 9 aa, Homo Sapiens
IALLVLVCV

SEQ ID NO: 63656 - protein, 9 aa, Homo Sapiens
ALLVLVCVL

SEQ ID NO: 63657 - protein, 9 aa, Homo Sapiens
LLVLVCVLV

SEQ ID NO: 63658 - protein, 9 aa, Homo Sapiens
VLVCVLVAL

SEQ ID NO: 63659 - protein, 9 aa, Homo Sapiens
CVLVALAIV

SEQ ID NO: 63660 - protein, 9 aa, Homo Sapiens
VLVALAIVY

SEQ ID NO: 63661 - protein, 9 aa, Homo Sapiens
LVALAIVYL

SEQ ID NO: 63662 - protein, 9 aa, Homo Sapiens
VALAIVYLI

SEQ ID NO: 63663 - protein, 9 aa, Homo Sapiens
ALAIVYLIA

SEQ ID NO: 63664 - protein, 9 aa, Homo Sapiens
LAIVYLIAL

SEQ ID NO: 63665 - protein, 9 aa, Homo Sapiens
AIVYLIALA

SEQ ID NO: 63666 - protein, 9 aa, Homo Sapiens
IVYLIALAV

SEQ ID NO: 63667 - protein, 9 aa, Homo Sapiens
YLIALAVCQ

SEQ ID NO: 63668 - protein, 9 aa, Homo Sapiens
IALAVCQCR

SEQ ID NO: 63669 - protein, 9 aa, Homo Sapiens
ALAVCQCRR

SEQ ID NO: 63670 - protein, 9 aa, Homo Sapiens
GQLDIFPAR

SEQ ID NO: 63671 - protein, 9 aa, Homo Sapiens
DIFPARDTY

SEQ ID NO: 63672 - protein, 9 aa, Homo Sapiens
FPARDTYHP

SEQ ID NO: 63673 - protein, 9 aa, Homo Sapiens
DTYHPMSEY

SEQ ID NO: 63674 - protein, 9 aa, Homo Sapiens
HPMSEYPTY

SEQ ID NO: 63675 - protein, 9 aa, Homo Sapiens
YPTYHTHGR

SEQ ID NO: 63676 - protein, 9 aa, Homo Sapiens
PTYHTHGRY

SEQ ID NO: 63677 - protein, 9 aa, Homo Sapiens
YVPPSSTDR

SEQ ID NO: 63678 - protein, 9 aa, Homo Sapiens
STDRSPYEK

SEQ ID NO: 63679 - protein, 9 aa, Homo Sapiens
SPYEKVSAG

SEQ ID NO: 63680 - protein, 9 aa, Homo Sapiens
SAGNGGSSL

SEQ ID NO: 63681 - protein, 9 aa, Homo Sapiens
SLSYTNPAV

SEQ ID NO: 63682 - protein, 9 aa, Homo Sapiens
YTNPAVAAA

SEQ ID NO: 63683 - protein, 9 aa, Homo Sapiens
NPAVAAASA

SEQ ID NO: 63684 - protein, 9 aa, Homo Sapiens
AVAAASANL

SEQ ID NO: 63685 - protein, 10 aa, Homo Sapiens
MTPGTQSPFF

SEQ ID NO: 63686 - protein, 10 aa, Homo Sapiens
TPGTQSPFFL

SEQ ID NO: 63687 - protein, 10 aa, Homo Sapiens
TQSPFFLLLL

SEQ ID NO: 63688 - protein, 10 aa, Homo Sapiens
SPFFLLLLLT

SEQ ID NO: 63689 - protein, 10 aa, Homo Sapiens
PFFLLLLLTV

SEQ ID NO: 63690 - protein, 10 aa, Homo Sapiens
FFLLLLLTVL

SEQ ID NO: 63691 - protein, 10 aa, Homo Sapiens
FLLLLLTVLT

SEQ ID NO: 63692 - protein, 10 aa, Homo Sapiens
LLLLLTVLTV

SEQ ID NO: 63693 - protein, 10 aa, Homo Sapiens
LLLLTVLTVV

SEQ ID NO: 63694 - protein, 10 aa, Homo Sapiens
LLLTVLTVVT

SEQ ID NO: 63695 - protein, 10 aa, Homo Sapiens
HASSTPGGEK

SEQ ID NO: 63696 - protein, 10 aa, Homo Sapiens
ETSATQRSSV

SEQ ID NO: 63697 - protein, 10 aa, Homo Sapiens
RSSVPSSTEK

SEQ ID NO: 63698 - protein, 10 aa, Homo Sapiens
VPSSTEKNAV

SEQ ID NO: 63699 - protein, 10 aa, Homo Sapiens
NAVSMTSSVL

SEQ ID NO: 63700 - protein, 10 aa, Homo Sapiens
STTQGQDVTL

SEQ ID NO: 63701 - protein, 10 aa, Homo Sapiens
GQDVTLAPAT

SEQ ID NO: 63702 - protein, 10 aa, Homo Sapiens
VTLAPATEPA

SEQ ID NO: 63703 - protein, 10 aa, Homo Sapiens
TLAPATEPAS

SEQ ID NO: 63704 - protein, 10 aa, Homo Sapiens
EPASGSAATW

SEQ ID NO: 63705 - protein, 10 aa, Homo Sapiens
ATWGQDVTSV

SEQ ID NO: 63706 - protein, 10 aa, Homo Sapiens
WGQDVTSVPV

SEQ ID NO: 63707 - protein, 10 aa, Homo Sapiens
TSVPVTRPAL

SEQ ID NO: 63708 - protein, 10 aa, Homo Sapiens
RPALGSTTPP

SEQ ID NO: 63709 - protein, 10 aa, Homo Sapiens
TPPAHDVTSA

SEQ ID NO: 63710 - protein, 10 aa, Homo Sapiens
KPAPGSTAPP

SEQ ID NO: 63711 - protein, 10 aa, Homo Sapiens
STAPPAHGVT

SEQ ID NO: 63712 - protein, 10 aa, Homo Sapiens
APPAHGVTSA

SEQ ID NO: 63713 - protein, 10 aa, Homo Sapiens
RPAPGSTAPP

SEQ ID NO: 63714 - protein, 10 aa, Homo Sapiens
STAPPAHGVT

SEQ ID NO: 63715 - protein, 10 aa, Homo Sapiens
APPAHGVTSA

SEQ ID NO: 63716 - protein, 10 aa, Homo Sapiens
RPAPGSTAPP

SEQ ID NO: 63717 - protein, 10 aa, Homo Sapiens
STAPPAHGVT

SEQ ID NO: 63718 - protein, 10 aa, Homo Sapiens
APPAHGVTSA

SEQ ID NO: 63719 - protein, 10 aa, Homo Sapiens
RPAPGSTAPP

SEQ ID NO: 63720 - protein, 10 aa, Homo Sapiens
STAPPAHGVT

SEQ ID NO: 63721 - protein, 10 aa, Homo Sapiens
APPAHGVTSA

SEQ ID NO: 63722 - protein, 10 aa, Homo Sapiens
RPAPGSTAPP

SEQ ID NO: 63723 - protein, 10 aa, Homo Sapiens
STAPPAHGVT

SEQ ID NO: 63724 - protein, 10 aa, Homo Sapiens
APPAHGVTSA

SEQ ID NO: 63725 - protein, 10 aa, Homo Sapiens
RPAPGSTAPP

SEQ ID NO: 63726 - protein, 10 aa, Homo Sapiens
STAPPAHGVT

SEQ ID NO: 63727 - protein, 10 aa, Homo Sapiens
APPAHGVTSA

SEQ ID NO: 63728 - protein, 10 aa, Homo Sapiens
RPAPGSTAPP

SEQ ID NO: 63729 - protein, 10 aa, Homo Sapiens
STAPPAHGVT

SEQ ID NO: 63730 - protein, 10 aa, Homo Sapiens
APPAHGVTSA

SEQ ID NO: 63731 - protein, 10 aa, Homo Sapiens
RPAPGSTAPP

SEQ ID NO: 63732 - protein, 10 aa, Homo Sapiens
STAPPAHGVT

SEQ ID NO: 63733 - protein, 10 aa, Homo Sapiens
APPAHGVTSA

SEQ ID NO: 63734 - protein, 10 aa, Homo Sapiens
RPAPGSTAPP

SEQ ID NO: 63735 - protein, 10 aa, Homo Sapiens
STAPPAHGVT

SEQ ID NO: 63736 - protein, 10 aa, Homo Sapiens
APPAHGVTSA

SEQ ID NO: 63737 - protein, 10 aa, Homo Sapiens
RPAPGSTAPP

SEQ ID NO: 63738 - protein, 10 aa, Homo Sapiens
STAPPAHGVT

SEQ ID NO: 63739 - protein, 10 aa, Homo Sapiens
APPAHGVTSA

SEQ ID NO: 63740 - protein, 10 aa, Homo Sapiens
RPAPGSTAPP

SEQ ID NO: 63741 - protein, 10 aa, Homo Sapiens
STAPPAHGVT

SEQ ID NO: 63742 - protein, 10 aa, Homo Sapiens
APPAHGVTSA

SEQ ID NO: 63743 - protein, 10 aa, Homo Sapiens
RPAPGSTAPP

SEQ ID NO: 63744 - protein, 10 aa, Homo Sapiens
STAPPAHGVT

SEQ ID NO: 63745 - protein, 10 aa, Homo Sapiens
APPAHGVTSA

SEQ ID NO: 63746 - protein, 10 aa, Homo Sapiens
RPAPGSTAPP

SEQ ID NO: 63747 - protein, 10 aa, Homo Sapiens
STAPPAHGVT

SEQ ID NO: 63748 - protein, 10 aa, Homo Sapiens
APPAHGVTSA

SEQ ID NO: 63749 - protein, 10 aa, Homo Sapiens
RPAPGSTAPP

SEQ ID NO: 63750 - protein, 10 aa, Homo Sapiens
STAPPAHGVT

SEQ ID NO: 63751 - protein, 10 aa, Homo Sapiens
APPAHGVTSA

SEQ ID NO: 63752 - protein, 10 aa, Homo Sapiens
RPAPGSTAPP

SEQ ID NO: 63753 - protein, 10 aa, Homo Sapiens
STAPPAHGVT

SEQ ID NO: 63754 - protein, 10 aa, Homo Sapiens
APPAHGVTSA

SEQ ID NO: 63755 - protein, 10 aa, Homo Sapiens
RPAPGSTAPP

SEQ ID NO: 63756 - protein, 10 aa, Homo Sapiens
STAPPAHGVT

SEQ ID NO: 63757 - protein, 10 aa, Homo Sapiens
APPAHGVTSA

SEQ ID NO: 63758 - protein, 10 aa, Homo Sapiens
RPAPGSTAPP

SEQ ID NO: 63759 - protein, 10 aa, Homo Sapiens
STAPPAHGVT

SEQ ID NO: 63760 - protein, 10 aa, Homo Sapiens
APPAHGVTSA

SEQ ID NO: 63761 - protein, 10 aa, Homo Sapiens
RPAPGSTAPP

SEQ ID NO: 63762 - protein, 10 aa, Homo Sapiens
STAPPAHGVT

SEQ ID NO: 63763 - protein, 10 aa, Homo Sapiens
APPAHGVTSA

SEQ ID NO: 63764 - protein, 10 aa, Homo Sapiens
RPAPGSTAPP

SEQ ID NO: 63765 - protein, 10 aa, Homo Sapiens
STAPPAHGVT

SEQ ID NO: 63766 - protein, 10 aa, Homo Sapiens
APPAHGVTSA

SEQ ID NO: 63767 - protein, 10 aa, Homo Sapiens
RPAPGSTAPP

SEQ ID NO: 63768 - protein, 10 aa, Homo Sapiens
STAPPAHGVT

SEQ ID NO: 63769 - protein, 10 aa, Homo Sapiens
APPAHGVTSA

SEQ ID NO: 63770 - protein, 10 aa, Homo Sapiens
RPAPGSTAPP

SEQ ID NO: 63771 - protein, 10 aa, Homo Sapiens
STAPPAHGVT

SEQ ID NO: 63772 - protein, 10 aa, Homo Sapiens
APPAHGVTSA

SEQ ID NO: 63773 - protein, 10 aa, Homo Sapiens
RPAPGSTAPP

SEQ ID NO: 63774 - protein, 10 aa, Homo Sapiens
STAPPAHGVT

SEQ ID NO: 63775 - protein, 10 aa, Homo Sapiens
APPAHGVTSA

SEQ ID NO: 63776 - protein, 10 aa, Homo Sapiens
RPAPGSTAPP

SEQ ID NO: 63777 - protein, 10 aa, Homo Sapiens
STAPPAHGVT

SEQ ID NO: 63778 - protein, 10 aa, Homo Sapiens
APPAHGVTSA

SEQ ID NO: 63779 - protein, 10 aa, Homo Sapiens
RPAPGSTAPP

SEQ ID NO: 63780 - protein, 10 aa, Homo Sapiens
STAPPAHGVT

SEQ ID NO: 63781 - protein, 10 aa, Homo Sapiens
APPAHGVTSA

SEQ ID NO: 63782 - protein, 10 aa, Homo Sapiens
RPAPGSTAPP

SEQ ID NO: 63783 - protein, 10 aa, Homo Sapiens
STAPPAHGVT

SEQ ID NO: 63784 - protein, 10 aa, Homo Sapiens
APPAHGVTSA

SEQ ID NO: 63785 - protein, 10 aa, Homo Sapiens
RPAPGSTAPP

SEQ ID NO: 63786 - protein, 10 aa, Homo Sapiens
STAPPAHGVT

SEQ ID NO: 63787 - protein, 10 aa, Homo Sapiens
APPAHGVTSA

SEQ ID NO: 63788 - protein, 10 aa, Homo Sapiens
RPAPGSTAPP

SEQ ID NO: 63789 - protein, 10 aa, Homo Sapiens
STAPPAHGVT

SEQ ID NO: 63790 - protein, 10 aa, Homo Sapiens
APPAHGVTSA

SEQ ID NO: 63791 - protein, 10 aa, Homo Sapiens
RPAPGSTAPP

SEQ ID NO: 63792 - protein, 10 aa, Homo Sapiens
STAPPAHGVT

SEQ ID NO: 63793 - protein, 10 aa, Homo Sapiens
APPAHGVTSA

SEQ ID NO: 63794 - protein, 10 aa, Homo Sapiens
RPAPGSTAPP

SEQ ID NO: 63795 - protein, 10 aa, Homo Sapiens
STAPPAHGVT

SEQ ID NO: 63796 - protein, 10 aa, Homo Sapiens
APPAHGVTSA

SEQ ID NO: 63797 - protein, 10 aa, Homo Sapiens
RPAPGSTAPP

SEQ ID NO: 63798 - protein, 10 aa, Homo Sapiens
STAPPAHGVT

SEQ ID NO: 63799 - protein, 10 aa, Homo Sapiens
APPAHGVTSA

SEQ ID NO: 63800 - protein, 10 aa, Homo Sapiens
RPAPGSTAPP

SEQ ID NO: 63801 - protein, 10 aa, Homo Sapiens
STAPPAHGVT

SEQ ID NO: 63802 - protein, 10 aa, Homo Sapiens
APPAHGVTSA

SEQ ID NO: 63803 - protein, 10 aa, Homo Sapiens
RPAPGSTAPP

SEQ ID NO: 63804 - protein, 10 aa, Homo Sapiens
STAPPAHGVT

SEQ ID NO: 63805 - protein, 10 aa, Homo Sapiens
APPAHGVTSA

SEQ ID NO: 63806 - protein, 10 aa, Homo Sapiens
RPAPGSTAPP

SEQ ID NO: 63807 - protein, 10 aa, Homo Sapiens
STAPPAHGVT

SEQ ID NO: 63808 - protein, 10 aa, Homo Sapiens
APPAHGVTSA

SEQ ID NO: 63809 - protein, 10 aa, Homo Sapiens
RPAPGSTAPP

SEQ ID NO: 63810 - protein, 10 aa, Homo Sapiens
STAPPAHGVT

SEQ ID NO: 63811 - protein, 10 aa, Homo Sapiens
APPAHGVTSA

SEQ ID NO: 63812 - protein, 10 aa, Homo Sapiens
RPAPGSTAPP

SEQ ID NO: 63813 - protein, 10 aa, Homo Sapiens
STAPPAHGVT

SEQ ID NO: 63814 - protein, 10 aa, Homo Sapiens
APPAHGVTSA

SEQ ID NO: 63815 - protein, 10 aa, Homo Sapiens
RPAPGSTAPP

SEQ ID NO: 63816 - protein, 10 aa, Homo Sapiens
STAPPAHGVT

SEQ ID NO: 63817 - protein, 10 aa, Homo Sapiens
APPAHGVTSA

SEQ ID NO: 63818 - protein, 10 aa, Homo Sapiens
RPAPGSTAPP

SEQ ID NO: 63819 - protein, 10 aa, Homo Sapiens
STAPPAHGVT

SEQ ID NO: 63820 - protein, 10 aa, Homo Sapiens
APPAHGVTSA

SEQ ID NO: 63821 - protein, 10 aa, Homo Sapiens
RPAPGSTAPP

SEQ ID NO: 63822 - protein, 10 aa, Homo Sapiens
STAPPAHGVT

SEQ ID NO: 63823 - protein, 10 aa, Homo Sapiens
APPAHGVTSA

SEQ ID NO: 63824 - protein, 10 aa, Homo Sapiens
RPAPGSTAPP

SEQ ID NO: 63825 - protein, 10 aa, Homo Sapiens
STAPPAHGVT

SEQ ID NO: 63826 - protein, 10 aa, Homo Sapiens
APPAHGVTSA

SEQ ID NO: 63827 - protein, 10 aa, Homo Sapiens
RPAPGSTAPP

SEQ ID NO: 63828 - protein, 10 aa, Homo Sapiens
STAPPAHGVT

SEQ ID NO: 63829 - protein, 10 aa, Homo Sapiens
APPAHGVTSA

SEQ ID NO: 63830 - protein, 10 aa, Homo Sapiens
RPAPGSTAPP

SEQ ID NO: 63831 - protein, 10 aa, Homo Sapiens
STAPPAHGVT

SEQ ID NO: 63832 - protein, 10 aa, Homo Sapiens
APPAHGVTSA

SEQ ID NO: 63833 - protein, 10 aa, Homo Sapiens
TSAPDNRPAL

SEQ ID NO: 63834 - protein, 10 aa, Homo Sapiens
RPALGSTAPP

SEQ ID NO: 63835 - protein, 10 aa, Homo Sapiens
PALGSTAPPV

SEQ ID NO: 63836 - protein, 10 aa, Homo Sapiens
STAPPVHNVT

SEQ ID NO: 63837 - protein, 10 aa, Homo Sapiens
APPVHNVTSA

SEQ ID NO: 63838 - protein, 10 aa, Homo Sapiens
SASGSASTLV

SEQ ID NO: 63839 - protein, 10 aa, Homo Sapiens
TLVHNGTSAR

SEQ ID NO: 63840 - protein, 10 aa, Homo Sapiens
LVHNGTSARA

SEQ ID NO: 63841 - protein, 10 aa, Homo Sapiens
TSARATTTPA

SEQ ID NO: 63842 - protein, 10 aa, Homo Sapiens
SARATTTPAS

SEQ ID NO: 63843 - protein, 10 aa, Homo Sapiens
ARATTTPASK

SEQ ID NO: 63844 - protein, 10 aa, Homo Sapiens
TTPASKSTPF

SEQ ID NO: 63845 - protein, 10 aa, Homo Sapiens
IPSHHSDTPT

SEQ ID NO: 63846 - protein, 10 aa, Homo Sapiens
SHHSDTPTTL

SEQ ID NO: 63847 - protein, 10 aa, Homo Sapiens
TPTTLASHST

SEQ ID NO: 63848 - protein, 10 aa, Homo Sapiens
PTTLASHSTK

SEQ ID NO: 63849 - protein, 10 aa, Homo Sapiens
DASSTHHSSV

SEQ ID NO: 63850 - protein, 10 aa, Homo Sapiens
STHHSSVPPL

SEQ ID NO: 63851 - protein, 10 aa, Homo Sapiens
STSPQLSTGV

SEQ ID NO: 63852 - protein, 10 aa, Homo Sapiens
SPQLSTGVSF

SEQ ID NO: 63853 - protein, 10 aa, Homo Sapiens
QLSTGVSFFF

SEQ ID NO: 63854 - protein, 10 aa, Homo Sapiens
LSTGVSFFFL

SEQ ID NO: 63855 - protein, 10 aa, Homo Sapiens
GVSFFFLSFH

SEQ ID NO: 63856 - protein, 10 aa, Homo Sapiens
VSFFFLSFHI

SEQ ID NO: 63857 - protein, 10 aa, Homo Sapiens
FFLSFHISNL

SEQ ID NO: 63858 - protein, 10 aa, Homo Sapiens
FLSFHISNLQ

SEQ ID NO: 63859 - protein, 10 aa, Homo Sapiens
LSFHISNLQF

SEQ ID NO: 63860 - protein, 10 aa, Homo Sapiens
SLEDPSTDYY

SEQ ID NO: 63861 - protein, 10 aa, Homo Sapiens
DPSTDYYQEL

SEQ ID NO: 63862 - protein, 10 aa, Homo Sapiens
STDYYQELQR

SEQ ID NO: 63863 - protein, 10 aa, Homo Sapiens
DYYQELQRDI

SEQ ID NO: 63864 - protein, 10 aa, Homo Sapiens
ELQRDISEMF

SEQ ID NO: 63865 - protein, 10 aa, Homo Sapiens
LQRDISEMFL

SEQ ID NO: 63866 - protein, 10 aa, Homo Sapiens
DISEMFLQIY

SEQ ID NO: 63867 - protein, 10 aa, Homo Sapiens
ISEMFLQIYK

SEQ ID NO: 63868 - protein, 10 aa, Homo Sapiens
LQIYKQGGFL

SEQ ID NO: 63869 - protein, 10 aa, Homo Sapiens
IYKQGGFLGL

SEQ ID NO: 63870 - protein, 10 aa, Homo Sapiens
GFLGLSNIKF

SEQ ID NO: 63871 - protein, 10 aa, Homo Sapiens
FLGLSNIKFR

SEQ ID NO: 63872 - protein, 10 aa, Homo Sapiens
NIKFRPGSVV

SEQ ID NO: 63873 - protein, 10 aa, Homo Sapiens
KFRPGSVVVQ

SEQ ID NO: 63874 - protein, 10 aa, Homo Sapiens
FRPGSVVVQL

SEQ ID NO: 63875 - protein, 10 aa, Homo Sapiens
SVVVQLTLAF

SEQ ID NO: 63876 - protein, 10 aa, Homo Sapiens
VVVQLTLAFR

SEQ ID NO: 63877 - protein, 10 aa, Homo Sapiens
LAFREGTINV

SEQ ID NO: 63878 - protein, 10 aa, Homo Sapiens
REGTINVHDV

SEQ ID NO: 63879 - protein, 10 aa, Homo Sapiens
DVETQFNQYK

SEQ ID NO: 63880 - protein, 10 aa, Homo Sapiens
TQFNQYKTEA

SEQ ID NO: 63881 - protein, 10 aa, Homo Sapiens
NQYKTEAASR

SEQ ID NO: 63882 - protein, 10 aa, Homo Sapiens
QYKTEAASRY

SEQ ID NO: 63883 - protein, 10 aa, Homo Sapiens
EAASRYNLTI

SEQ ID NO: 63884 - protein, 10 aa, Homo Sapiens
YNLTISDVSV

SEQ ID NO: 63885 - protein, 10 aa, Homo Sapiens
TISDVSVSDV

SEQ ID NO: 63886 - protein, 10 aa, Homo Sapiens
VSVSDVPFPF

SEQ ID NO: 63887 - protein, 10 aa, Homo Sapiens
SVSDVPFPFS

SEQ ID NO: 63888 - protein, 10 aa, Homo Sapiens
FPFSAQSGAG

SEQ ID NO: 63889 - protein, 10 aa, Homo Sapiens
AQSGAGVPGW

SEQ ID NO: 63890 - protein, 10 aa, Homo Sapiens
SGAGVPGWGI

SEQ ID NO: 63891 - protein, 10 aa, Homo Sapiens
GVPGWGIALL

SEQ ID NO: 63892 - protein, 10 aa, Homo Sapiens
VPGWGIALLV

SEQ ID NO: 63893 - protein, 10 aa, Homo Sapiens
GIALLVLVCV

SEQ ID NO: 63894 - protein, 10 aa, Homo Sapiens
IALLVLVCVL

SEQ ID NO: 63895 - protein, 10 aa, Homo Sapiens
ALLVLVCVLV

SEQ ID NO: 63896 - protein, 10 aa, Homo Sapiens
LLVLVCVLVA

SEQ ID NO: 63897 - protein, 10 aa, Homo Sapiens
LVLVCVLVAL

SEQ ID NO: 63898 - protein, 10 aa, Homo Sapiens
VLVCVLVALA

SEQ ID NO: 63899 - protein, 10 aa, Homo Sapiens
CVLVALAIVY

SEQ ID NO: 63900 - protein, 10 aa, Homo Sapiens
VLVALAIVYL

SEQ ID NO: 63901 - protein, 10 aa, Homo Sapiens
LVALAIVYLI

SEQ ID NO: 63902 - protein, 10 aa, Homo Sapiens
ALAIVYLIAL

SEQ ID NO: 63903 - protein, 10 aa, Homo Sapiens
LAIVYLIALA

SEQ ID NO: 63904 - protein, 10 aa, Homo Sapiens
AIVYLIALAV

SEQ ID NO: 63905 - protein, 10 aa, Homo Sapiens
YLIALAVCQC

SEQ ID NO: 63906 - protein, 10 aa, Homo Sapiens
LIALAVCQCR

SEQ ID NO: 63907 - protein, 10 aa, Homo Sapiens
IALAVCQCRR

SEQ ID NO: 63908 - protein, 10 aa, Homo Sapiens
ALAVCQCRRK

SEQ ID NO: 63909 - protein, 10 aa, Homo Sapiens
RRKNYGQLDI

SEQ ID NO: 63910 - protein, 10 aa, Homo Sapiens
FPARDTYHPM

SEQ ID NO: 63911 - protein, 10 aa, Homo Sapiens
HPMSEYPTYH

SEQ ID NO: 63912 - protein, 10 aa, Homo Sapiens
EYPTYHTHGR

SEQ ID NO: 63913 - protein, 10 aa, Homo Sapiens
YPTYHTHGRY

SEQ ID NO: 63914 - protein, 10 aa, Homo Sapiens
PTYHTHGRYV

SEQ ID NO: 63915 - protein, 10 aa, Homo Sapiens
RYVPPSSTDR

SEQ ID NO: 63916 - protein, 10 aa, Homo Sapiens
PPSSTDRSPY

SEQ ID NO: 63917 - protein, 10 aa, Homo Sapiens
SSTDRSPYEK

SEQ ID NO: 63918 - protein, 10 aa, Homo Sapiens
STDRSPYEKV

SEQ ID NO: 63919 - protein, 10 aa, Homo Sapiens
AGNGGSSLSY

SEQ ID NO: 63920 - protein, 10 aa, Homo Sapiens
SSLSYTNPAV

SEQ ID NO: 63921 - protein, 10 aa, Homo Sapiens
SLSYTNPAVA

SEQ ID NO: 63922 - protein, 10 aa, Homo Sapiens
YTNPAVAAAS

SEQ ID NO: 63923 - protein, 10 aa, Homo Sapiens
NPAVAAASAN

SEQ ID NO: 63924 - protein, 11 aa, Homo Sapiens
MTPGTQSPFFL

SEQ ID NO: 63925 - protein, 11 aa, Homo Sapiens
TPGTQSPFFLL

SEQ ID NO: 63926 - protein, 11 aa, Homo Sapiens
TQSPFFLLLLL

SEQ ID NO: 63927 - protein, 11 aa, Homo Sapiens
SPFFLLLLLTV

SEQ ID NO: 63928 - protein, 11 aa, Homo Sapiens
FLLLLLTVLTV

SEQ ID NO: 63929 - protein, 11 aa, Homo Sapiens
LLLLLTVLTVV

SEQ ID NO: 63930 - protein, 11 aa, Homo Sapiens
LLLLTVLTVVT

SEQ ID NO: 63931 - protein, 11 aa, Homo Sapiens
LLTVLTVVTGS

SEQ ID NO: 63932 - protein, 11 aa, Homo Sapiens
VLTVVTGSGHA

SEQ ID NO: 63933 - protein, 11 aa, Homo Sapiens
STPGGEKETSA

SEQ ID NO: 63934 - protein, 11 aa, Homo Sapiens
TSATQRSSVPS

SEQ ID NO: 63935 - protein, 11 aa, Homo Sapiens
SVPSSTEKNAV

SEQ ID NO: 63936 - protein, 11 aa, Homo Sapiens
EKNAVSMTSSV

SEQ ID NO: 63937 - protein, 11 aa, Homo Sapiens
TQGQDVTLAPA

SEQ ID NO: 63938 - protein, 11 aa, Homo Sapiens
DVTLAPATEPA

SEQ ID NO: 63939 - protein, 11 aa, Homo Sapiens
APATEPASGSA

SEQ ID NO: 63940 - protein, 11 aa, Homo Sapiens
AATWGQDVTSV

SEQ ID NO: 63941 - protein, 11 aa, Homo Sapiens
DVTSVPVTRPA

SEQ ID NO: 63942 - protein, 11 aa, Homo Sapiens
VPVTRPALGST

SEQ ID NO: 63943 - protein, 11 aa, Homo Sapiens
RPALGSTTPPA

SEQ ID NO: 63944 - protein, 11 aa, Homo Sapiens
TTPPAHDVTSA

SEQ ID NO: 63945 - protein, 11 aa, Homo Sapiens
APDNKPAPGST

SEQ ID NO: 63946 - protein, 11 aa, Homo Sapiens
KPAPGSTAPPA

SEQ ID NO: 63947 - protein, 11 aa, Homo Sapiens
TAPPAHGVTSA

SEQ ID NO: 63948 - protein, 11 aa, Homo Sapiens
APDTRPAPGST

SEQ ID NO: 63949 - protein, 11 aa, Homo Sapiens
RPAPGSTAPPA

SEQ ID NO: 63950 - protein, 11 aa, Homo Sapiens
TAPPAHGVTSA

SEQ ID NO: 63951 - protein, 11 aa, Homo Sapiens
APDTRPAPGST

SEQ ID NO: 63952 - protein, 11 aa, Homo Sapiens
RPAPGSTAPPA

SEQ ID NO: 63953 - protein, 11 aa, Homo Sapiens
TAPPAHGVTSA

SEQ ID NO: 63954 - protein, 11 aa, Homo Sapiens
APDTRPAPGST

SEQ ID NO: 63955 - protein, 11 aa, Homo Sapiens
RPAPGSTAPPA

SEQ ID NO: 63956 - protein, 11 aa, Homo Sapiens
TAPPAHGVTSA

SEQ ID NO: 63957 - protein, 11 aa, Homo Sapiens
APDTRPAPGST

SEQ ID NO: 63958 - protein, 11 aa, Homo Sapiens
RPAPGSTAPPA

SEQ ID NO: 63959 - protein, 11 aa, Homo Sapiens
TAPPAHGVTSA

SEQ ID NO: 63960 - protein, 11 aa, Homo Sapiens
APDTRPAPGST

SEQ ID NO: 63961 - protein, 11 aa, Homo Sapiens
RPAPGSTAPPA

SEQ ID NO: 63962 - protein, 11 aa, Homo Sapiens
TAPPAHGVTSA

SEQ ID NO: 63963 - protein, 11 aa, Homo Sapiens
APDTRPAPGST

SEQ ID NO: 63964 - protein, 11 aa, Homo Sapiens
RPAPGSTAPPA

SEQ ID NO: 63965 - protein, 11 aa, Homo Sapiens
TAPPAHGVTSA

SEQ ID NO: 63966 - protein, 11 aa, Homo Sapiens
APDTRPAPGST

SEQ ID NO: 63967 - protein, 11 aa, Homo Sapiens
RPAPGSTAPPA

SEQ ID NO: 63968 - protein, 11 aa, Homo Sapiens
TAPPAHGVTSA

SEQ ID NO: 63969 - protein, 11 aa, Homo Sapiens
APDTRPAPGST

SEQ ID NO: 63970 - protein, 11 aa, Homo Sapiens
RPAPGSTAPPA

SEQ ID NO: 63971 - protein, 11 aa, Homo Sapiens
TAPPAHGVTSA

SEQ ID NO: 63972 - protein, 11 aa, Homo Sapiens
APDTRPAPGST

SEQ ID NO: 63973 - protein, 11 aa, Homo Sapiens
RPAPGSTAPPA

SEQ ID NO: 63974 - protein, 11 aa, Homo Sapiens
TAPPAHGVTSA

SEQ ID NO: 63975 - protein, 11 aa, Homo Sapiens
APDTRPAPGST

SEQ ID NO: 63976 - protein, 11 aa, Homo Sapiens
RPAPGSTAPPA

SEQ ID NO: 63977 - protein, 11 aa, Homo Sapiens
TAPPAHGVTSA

SEQ ID NO: 63978 - protein, 11 aa, Homo Sapiens
APDTRPAPGST

SEQ ID NO: 63979 - protein, 11 aa, Homo Sapiens
RPAPGSTAPPA

SEQ ID NO: 63980 - protein, 11 aa, Homo Sapiens
TAPPAHGVTSA

SEQ ID NO: 63981 - protein, 11 aa, Homo Sapiens
APDTRPAPGST

SEQ ID NO: 63982 - protein, 11 aa, Homo Sapiens
RPAPGSTAPPA

SEQ ID NO: 63983 - protein, 11 aa, Homo Sapiens
TAPPAHGVTSA

SEQ ID NO: 63984 - protein, 11 aa, Homo Sapiens
APDTRPAPGST

SEQ ID NO: 63985 - protein, 11 aa, Homo Sapiens
RPAPGSTAPPA

SEQ ID NO: 63986 - protein, 11 aa, Homo Sapiens
TAPPAHGVTSA

SEQ ID NO: 63987 - protein, 11 aa, Homo Sapiens
APDTRPAPGST

SEQ ID NO: 63988 - protein, 11 aa, Homo Sapiens
RPAPGSTAPPA

SEQ ID NO: 63989 - protein, 11 aa, Homo Sapiens
TAPPAHGVTSA

SEQ ID NO: 63990 - protein, 11 aa, Homo Sapiens
APDTRPAPGST

SEQ ID NO: 63991 - protein, 11 aa, Homo Sapiens
RPAPGSTAPPA

SEQ ID NO: 63992 - protein, 11 aa, Homo Sapiens
TAPPAHGVTSA

SEQ ID NO: 63993 - protein, 11 aa, Homo Sapiens
APDTRPAPGST

SEQ ID NO: 63994 - protein, 11 aa, Homo Sapiens
RPAPGSTAPPA

SEQ ID NO: 63995 - protein, 11 aa, Homo Sapiens
TAPPAHGVTSA

SEQ ID NO: 63996 - protein, 11 aa, Homo Sapiens
APDTRPAPGST

SEQ ID NO: 63997 - protein, 11 aa, Homo Sapiens
RPAPGSTAPPA

SEQ ID NO: 63998 - protein, 11 aa, Homo Sapiens
TAPPAHGVTSA

SEQ ID NO: 63999 - protein, 11 aa, Homo Sapiens
APDTRPAPGST

SEQ ID NO: 64000 - protein, 11 aa, Homo Sapiens
RPAPGSTAPPA

SEQ ID NO: 64001 - protein, 11 aa, Homo Sapiens
TAPPAHGVTSA

SEQ ID NO: 64002 - protein, 11 aa, Homo Sapiens
APDTRPAPGST

SEQ ID NO: 64003 - protein, 11 aa, Homo Sapiens
RPAPGSTAPPA

SEQ ID NO: 64004 - protein, 11 aa, Homo Sapiens
TAPPAHGVTSA

SEQ ID NO: 64005 - protein, 11 aa, Homo Sapiens
APDTRPAPGST

SEQ ID NO: 64006 - protein, 11 aa, Homo Sapiens
RPAPGSTAPPA

SEQ ID NO: 64007 - protein, 11 aa, Homo Sapiens
TAPPAHGVTSA

SEQ ID NO: 64008 - protein, 11 aa, Homo Sapiens
APDTRPAPGST

SEQ ID NO: 64009 - protein, 11 aa, Homo Sapiens
RPAPGSTAPPA

SEQ ID NO: 64010 - protein, 11 aa, Homo Sapiens
TAPPAHGVTSA

SEQ ID NO: 64011 - protein, 11 aa, Homo Sapiens
APDTRPAPGST

SEQ ID NO: 64012 - protein, 11 aa, Homo Sapiens
RPAPGSTAPPA

SEQ ID NO: 64013 - protein, 11 aa, Homo Sapiens
TAPPAHGVTSA

SEQ ID NO: 64014 - protein, 11 aa, Homo Sapiens
APDTRPAPGST

SEQ ID NO: 64015 - protein, 11 aa, Homo Sapiens
RPAPGSTAPPA

SEQ ID NO: 64016 - protein, 11 aa, Homo Sapiens
TAPPAHGVTSA

SEQ ID NO: 64017 - protein, 11 aa, Homo Sapiens
APDTRPAPGST

SEQ ID NO: 64018 - protein, 11 aa, Homo Sapiens
RPAPGSTAPPA

SEQ ID NO: 64019 - protein, 11 aa, Homo Sapiens
TAPPAHGVTSA

SEQ ID NO: 64020 - protein, 11 aa, Homo Sapiens
APDTRPAPGST

SEQ ID NO: 64021 - protein, 11 aa, Homo Sapiens
RPAPGSTAPPA

SEQ ID NO: 64022 - protein, 11 aa, Homo Sapiens
TAPPAHGVTSA

SEQ ID NO: 64023 - protein, 11 aa, Homo Sapiens
APDTRPAPGST

SEQ ID NO: 64024 - protein, 11 aa, Homo Sapiens
RPAPGSTAPPA

SEQ ID NO: 64025 - protein, 11 aa, Homo Sapiens
TAPPAHGVTSA

SEQ ID NO: 64026 - protein, 11 aa, Homo Sapiens
APDTRPAPGST

SEQ ID NO: 64027 - protein, 11 aa, Homo Sapiens
RPAPGSTAPPA

SEQ ID NO: 64028 - protein, 11 aa, Homo Sapiens
TAPPAHGVTSA

SEQ ID NO: 64029 - protein, 11 aa, Homo Sapiens
APDTRPAPGST

SEQ ID NO: 64030 - protein, 11 aa, Homo Sapiens
RPAPGSTAPPA

SEQ ID NO: 64031 - protein, 11 aa, Homo Sapiens
TAPPAHGVTSA

SEQ ID NO: 64032 - protein, 11 aa, Homo Sapiens
APDTRPAPGST

SEQ ID NO: 64033 - protein, 11 aa, Homo Sapiens
RPAPGSTAPPA

SEQ ID NO: 64034 - protein, 11 aa, Homo Sapiens
TAPPAHGVTSA

SEQ ID NO: 64035 - protein, 11 aa, Homo Sapiens
APDTRPAPGST

SEQ ID NO: 64036 - protein, 11 aa, Homo Sapiens
RPAPGSTAPPA

SEQ ID NO: 64037 - protein, 11 aa, Homo Sapiens
TAPPAHGVTSA

SEQ ID NO: 64038 - protein, 11 aa, Homo Sapiens
APDTRPAPGST

SEQ ID NO: 64039 - protein, 11 aa, Homo Sapiens
RPAPGSTAPPA

SEQ ID NO: 64040 - protein, 11 aa, Homo Sapiens
TAPPAHGVTSA

SEQ ID NO: 64041 - protein, 11 aa, Homo Sapiens
APDTRPAPGST

SEQ ID NO: 64042 - protein, 11 aa, Homo Sapiens
RPAPGSTAPPA

SEQ ID NO: 64043 - protein, 11 aa, Homo Sapiens
TAPPAHGVTSA

SEQ ID NO: 64044 - protein, 11 aa, Homo Sapiens
APDTRPAPGST

SEQ ID NO: 64045 - protein, 11 aa, Homo Sapiens
RPAPGSTAPPA

SEQ ID NO: 64046 - protein, 11 aa, Homo Sapiens
TAPPAHGVTSA

SEQ ID NO: 64047 - protein, 11 aa, Homo Sapiens
APDTRPAPGST

SEQ ID NO: 64048 - protein, 11 aa, Homo Sapiens
RPAPGSTAPPA

SEQ ID NO: 64049 - protein, 11 aa, Homo Sapiens
TAPPAHGVTSA

SEQ ID NO: 64050 - protein, 11 aa, Homo Sapiens
APDTRPAPGST

SEQ ID NO: 64051 - protein, 11 aa, Homo Sapiens
RPAPGSTAPPA

SEQ ID NO: 64052 - protein, 11 aa, Homo Sapiens
TAPPAHGVTSA

SEQ ID NO: 64053 - protein, 11 aa, Homo Sapiens
APDTRPAPGST

SEQ ID NO: 64054 - protein, 11 aa, Homo Sapiens
RPAPGSTAPPA

SEQ ID NO: 64055 - protein, 11 aa, Homo Sapiens
TAPPAHGVTSA

SEQ ID NO: 64056 - protein, 11 aa, Homo Sapiens
APDTRPAPGST

SEQ ID NO: 64057 - protein, 11 aa, Homo Sapiens
RPAPGSTAPPA

SEQ ID NO: 64058 - protein, 11 aa, Homo Sapiens
TAPPAHGVTSA

SEQ ID NO: 64059 - protein, 11 aa, Homo Sapiens
APDTRPAPGST

SEQ ID NO: 64060 - protein, 11 aa, Homo Sapiens
RPAPGSTAPPA

SEQ ID NO: 64061 - protein, 11 aa, Homo Sapiens
TAPPAHGVTSA

SEQ ID NO: 64062 - protein, 11 aa, Homo Sapiens
APDTRPAPGST

SEQ ID NO: 64063 - protein, 11 aa, Homo Sapiens
RPAPGSTAPPA

SEQ ID NO: 64064 - protein, 11 aa, Homo Sapiens
TAPPAHGVTSA

SEQ ID NO: 64065 - protein, 11 aa, Homo Sapiens
APDTRPAPGST

SEQ ID NO: 64066 - protein, 11 aa, Homo Sapiens
RPAPGSTAPPA

SEQ ID NO: 64067 - protein, 11 aa, Homo Sapiens
TAPPAHGVTSA

SEQ ID NO: 64068 - protein, 11 aa, Homo Sapiens
APDNRPALGST

SEQ ID NO: 64069 - protein, 11 aa, Homo Sapiens
RPALGSTAPPV

SEQ ID NO: 64070 - protein, 11 aa, Homo Sapiens
STAPPVHNVTS

SEQ ID NO: 64071 - protein, 11 aa, Homo Sapiens
TAPPVHNVTSA

SEQ ID NO: 64072 - protein, 11 aa, Homo Sapiens
APPVHNVTSAS

SEQ ID NO: 64073 - protein, 11 aa, Homo Sapiens
TSASGSASGSA

SEQ ID NO: 64074 - protein, 11 aa, Homo Sapiens
GSASGSASTLV

SEQ ID NO: 64075 - protein, 11 aa, Homo Sapiens
STLVHNGTSAR

SEQ ID NO: 64076 - protein, 11 aa, Homo Sapiens
TLVHNGTSARA

SEQ ID NO: 64077 - protein, 11 aa, Homo Sapiens
GTSARATTTPA

SEQ ID NO: 64078 - protein, 11 aa, Homo Sapiens
SARATTTPASK

SEQ ID NO: 64079 - protein, 11 aa, Homo Sapiens
TTTPASKSTPF

SEQ ID NO: 64080 - protein, 11 aa, Homo Sapiens
TPASKSTPFSI

SEQ ID NO: 64081 - protein, 11 aa, Homo Sapiens
IPSHHSDTPTT

SEQ ID NO: 64082 - protein, 11 aa, Homo Sapiens
TPTTLASHSTK

SEQ ID NO: 64083 - protein, 11 aa, Homo Sapiens
TLASHSTKTDA

SEQ ID NO: 64084 - protein, 11 aa, Homo Sapiens
TDASSTHHSSV

SEQ ID NO: 64085 - protein, 11 aa, Homo Sapiens
STHHSSVPPLT

SEQ ID NO: 64086 - protein, 11 aa, Homo Sapiens
VPPLTSSNHST

SEQ ID NO: 64087 - protein, 11 aa, Homo Sapiens
HSTSPQLSTGV

SEQ ID NO: 64088 - protein, 11 aa, Homo Sapiens
SPQLSTGVSFF

SEQ ID NO: 64089 - protein, 11 aa, Homo Sapiens
PQLSTGVSFFF

SEQ ID NO: 64090 - protein, 11 aa, Homo Sapiens
QLSTGVSFFFL

SEQ ID NO: 64091 - protein, 11 aa, Homo Sapiens
STGVSFFFLSF

SEQ ID NO: 64092 - protein, 11 aa, Homo Sapiens
GVSFFFLSFHI

SEQ ID NO: 64093 - protein, 11 aa, Homo Sapiens
FFFLSFHISNL

SEQ ID NO: 64094 - protein, 11 aa, Homo Sapiens
FLSFHISNLQF

SEQ ID NO: 64095 - protein, 11 aa, Homo Sapiens
HISNLQFNSSL

SEQ ID NO: 64096 - protein, 11 aa, Homo Sapiens
LQFNSSLEDPS

SEQ ID NO: 64097 - protein, 11 aa, Homo Sapiens
NSSLEDPSTDY

SEQ ID NO: 64098 - protein, 11 aa, Homo Sapiens
SSLEDPSTDYY

SEQ ID NO: 64099 - protein, 11 aa, Homo Sapiens
SLEDPSTDYYQ

SEQ ID NO: 64100 - protein, 11 aa, Homo Sapiens
QELQRDISEMF

SEQ ID NO: 64101 - protein, 11 aa, Homo Sapiens
ELQRDISEMFL

SEQ ID NO: 64102 - protein, 11 aa, Homo Sapiens
DISEMFLQIYK

SEQ ID NO: 64103 - protein, 11 aa, Homo Sapiens
MFLQIYKQGGF

SEQ ID NO: 64104 - protein, 11 aa, Homo Sapiens
FLQIYKQGGFL

SEQ ID NO: 64105 - protein, 11 aa, Homo Sapiens
QIYKQGGFLGL

SEQ ID NO: 64106 - protein, 11 aa, Homo Sapiens
KQGGFLGLSNI

SEQ ID NO: 64107 - protein, 11 aa, Homo Sapiens
GFLGLSNIKFR

SEQ ID NO: 64108 - protein, 11 aa, Homo Sapiens
LSNIKFRPGSV

SEQ ID NO: 64109 - protein, 11 aa, Homo Sapiens
NIKFRPGSVVV

SEQ ID NO: 64110 - protein, 11 aa, Homo Sapiens
KFRPGSVVVQL

SEQ ID NO: 64111 - protein, 11 aa, Homo Sapiens
RPGSVVVQLTL

SEQ ID NO: 64112 - protein, 11 aa, Homo Sapiens
GSVVVQLTLAF

SEQ ID NO: 64113 - protein, 11 aa, Homo Sapiens
SVVVQLTLAFR

SEQ ID NO: 64114 - protein, 11 aa, Homo Sapiens
VQLTLAFREGT

SEQ ID NO: 64115 - protein, 11 aa, Homo Sapiens
TLAFREGTINV

SEQ ID NO: 64116 - protein, 11 aa, Homo Sapiens
TINVHDVETQF

SEQ ID NO: 64117 - protein, 11 aa, Homo Sapiens
ETQFNQYKTEA

SEQ ID NO: 64118 - protein, 11 aa, Homo Sapiens
TQFNQYKTEAA

SEQ ID NO: 64119 - protein, 11 aa, Homo Sapiens
NQYKTEAASRY

SEQ ID NO: 64120 - protein, 11 aa, Homo Sapiens
YKTEAASRYNL

SEQ ID NO: 64121 - protein, 11 aa, Homo Sapiens
TEAASRYNLTI

SEQ ID NO: 64122 - protein, 11 aa, Homo Sapiens
LTISDVSVSDV

SEQ ID NO: 64123 - protein, 11 aa, Homo Sapiens
ISDVSVSDVPF

SEQ ID NO: 64124 - protein, 11 aa, Homo Sapiens
DVSVSDVPFPF

SEQ ID NO: 64125 - protein, 11 aa, Homo Sapiens
SVSDVPFPFSA

SEQ ID NO: 64126 - protein, 11 aa, Homo Sapiens
VPFPFSAQSGA

SEQ ID NO: 64127 - protein, 11 aa, Homo Sapiens
FPFSAQSGAGV

SEQ ID NO: 64128 - protein, 11 aa, Homo Sapiens
SAQSGAGVPGW

SEQ ID NO: 64129 - protein, 11 aa, Homo Sapiens
GVPGWGIALLV

SEQ ID NO: 64130 - protein, 11 aa, Homo Sapiens
VPGWGIALLVL

SEQ ID NO: 64131 - protein, 11 aa, Homo Sapiens
PGWGIALLVLV

SEQ ID NO: 64132 - protein, 11 aa, Homo Sapiens
WGIALLVLVCV

SEQ ID NO: 64133 - protein, 11 aa, Homo Sapiens
GIALLVLVCVL

SEQ ID NO: 64134 - protein, 11 aa, Homo Sapiens
IALLVLVCVLV

SEQ ID NO: 64135 - protein, 11 aa, Homo Sapiens
ALLVLVCVLVA

SEQ ID NO: 64136 - protein, 11 aa, Homo Sapiens
LLVLVCVLVAL

SEQ ID NO: 64137 - protein, 11 aa, Homo Sapiens
VLVCVLVALAI

SEQ ID NO: 64138 - protein, 11 aa, Homo Sapiens
LVCVLVALAIV

SEQ ID NO: 64139 - protein, 11 aa, Homo Sapiens
VCVLVALAIVY

SEQ ID NO: 64140 - protein, 11 aa, Homo Sapiens
CVLVALAIVYL

SEQ ID NO: 64141 - protein, 11 aa, Homo Sapiens
VLVALAIVYLI

SEQ ID NO: 64142 - protein, 11 aa, Homo Sapiens
LVALAIVYLIA

SEQ ID NO: 64143 - protein, 11 aa, Homo Sapiens
VALAIVYLIAL

SEQ ID NO: 64144 - protein, 11 aa, Homo Sapiens
ALAIVYLIALA

SEQ ID NO: 64145 - protein, 11 aa, Homo Sapiens
LAIVYLIALAV

SEQ ID NO: 64146 - protein, 11 aa, Homo Sapiens
YLIALAVCQCR

SEQ ID NO: 64147 - protein, 11 aa, Homo Sapiens
LIALAVCQCRR

SEQ ID NO: 64148 - protein, 11 aa, Homo Sapiens
IALAVCQCRRK

SEQ ID NO: 64149 - protein, 11 aa, Homo Sapiens
RRKNYGQLDIF

SEQ ID NO: 64150 - protein, 11 aa, Homo Sapiens
NYGQLDIFPAR

SEQ ID NO: 64151 - protein, 11 aa, Homo Sapiens
QLDIFPARDTY

SEQ ID NO: 64152 - protein, 11 aa, Homo Sapiens
FPARDTYHPMS

SEQ ID NO: 64153 - protein, 11 aa, Homo Sapiens
DTYHPMSEYPT

SEQ ID NO: 64154 - protein, 11 aa, Homo Sapiens
TYHPMSEYPTY

SEQ ID NO: 64155 - protein, 11 aa, Homo Sapiens
HPMSEYPTYHT

SEQ ID NO: 64156 - protein, 11 aa, Homo Sapiens
SEYPTYHTHGR

SEQ ID NO: 64157 - protein, 11 aa, Homo Sapiens
EYPTYHTHGRY

SEQ ID NO: 64158 - protein, 11 aa, Homo Sapiens
YPTYHTHGRYV

SEQ ID NO: 64159 - protein, 11 aa, Homo Sapiens
VPPSSTDRSPY

SEQ ID NO: 64160 - protein, 11 aa, Homo Sapiens
PSSTDRSPYEK

SEQ ID NO: 64161 - protein, 11 aa, Homo Sapiens
SSTDRSPYEKV

SEQ ID NO: 64162 - protein, 11 aa, Homo Sapiens
KVSAGNGGSSL

SEQ ID NO: 64163 - protein, 11 aa, Homo Sapiens
SAGNGGSSLSY

SEQ ID NO: 64164 - protein, 11 aa, Homo Sapiens
SLSYTNPAVAA

SEQ ID NO: 64165 - protein, 11 aa, Homo Sapiens
YTNPAVAAASA

SEQ ID NO: 64166 - protein, 11 aa, Homo Sapiens
NPAVAAASANL

SEQ ID NO: 64167 - protein, 13 aa, Homo Sapiens
MTPGTQSPFFLLL

SEQ ID NO: 64168 - protein, 13 aa, Homo Sapiens
TPGTQSPFFLLLL

SEQ ID NO: 64169 - protein, 13 aa, Homo Sapiens
PGTQSPFFLLLLL

SEQ ID NO: 64170 - protein, 13 aa, Homo Sapiens
GTQSPFFLLLLLT

SEQ ID NO: 64171 - protein, 13 aa, Homo Sapiens
TQSPFFLLLLLTV

SEQ ID NO: 64172 - protein, 13 aa, Homo Sapiens
QSPFFLLLLLTVL

SEQ ID NO: 64173 - protein, 13 aa, Homo Sapiens
SPFFLLLLLTVLT

SEQ ID NO: 64174 - protein, 13 aa, Homo Sapiens
PFFLLLLLTVLTV

SEQ ID NO: 64175 - protein, 13 aa, Homo Sapiens
FFLLLLLTVLTVV

SEQ ID NO: 64176 - protein, 13 aa, Homo Sapiens
FLLLLLTVLTVVT

SEQ ID NO: 64177 - protein, 13 aa, Homo Sapiens
LLLLLTVLTVVTG

SEQ ID NO: 64178 - protein, 13 aa, Homo Sapiens
LLLLTVLTVVTGS

SEQ ID NO: 64179 - protein, 13 aa, Homo Sapiens
LLLTVLTVVTGSG

SEQ ID NO: 64180 - protein, 13 aa, Homo Sapiens
LLTVLTVVTGSGH

SEQ ID NO: 64181 - protein, 13 aa, Homo Sapiens
LTVLTVVTGSGHA

SEQ ID NO: 64182 - protein, 13 aa, Homo Sapiens
TVLTVVTGSGHAS

SEQ ID NO: 64183 - protein, 13 aa, Homo Sapiens
VLTVVTGSGHASS

SEQ ID NO: 64184 - protein, 13 aa, Homo Sapiens
LTVVTGSGHASST

SEQ ID NO: 64185 - protein, 13 aa, Homo Sapiens
TVVTGSGHASSTP

SEQ ID NO: 64186 - protein, 13 aa, Homo Sapiens
VVTGSGHASSTPG

SEQ ID NO: 64187 - protein, 13 aa, Homo Sapiens
VTGSGHASSTPGG

SEQ ID NO: 64188 - protein, 13 aa, Homo Sapiens
TGSGHASSTPGGE

SEQ ID NO: 64189 - protein, 13 aa, Homo Sapiens
GSGHASSTPGGEK

SEQ ID NO: 64190 - protein, 13 aa, Homo Sapiens
SGHASSTPGGEKE

SEQ ID NO: 64191 - protein, 13 aa, Homo Sapiens
GHASSTPGGEKET

SEQ ID NO: 64192 - protein, 13 aa, Homo Sapiens
HASSTPGGEKETS

SEQ ID NO: 64193 - protein, 13 aa, Homo Sapiens
ASSTPGGEKETSA

SEQ ID NO: 64194 - protein, 13 aa, Homo Sapiens
SSTPGGEKETSAT

SEQ ID NO: 64195 - protein, 13 aa, Homo Sapiens
STPGGEKETSATQ

SEQ ID NO: 64196 - protein, 13 aa, Homo Sapiens
TPGGEKETSATQR

SEQ ID NO: 64197 - protein, 13 aa, Homo Sapiens
PGGEKETSATQRS

SEQ ID NO: 64198 - protein, 13 aa, Homo Sapiens
GGEKETSATQRSS

SEQ ID NO: 64199 - protein, 13 aa, Homo Sapiens
GEKETSATQRSSV

SEQ ID NO: 64200 - protein, 13 aa, Homo Sapiens
EKETSATQRSSVP

SEQ ID NO: 64201 - protein, 13 aa, Homo Sapiens
KETSATQRSSVPS

SEQ ID NO: 64202 - protein, 13 aa, Homo Sapiens
ETSATQRSSVPSS

SEQ ID NO: 64203 - protein, 13 aa, Homo Sapiens
TSATQRSSVPSST

SEQ ID NO: 64204 - protein, 13 aa, Homo Sapiens
SATQRSSVPSSTE

SEQ ID NO: 64205 - protein, 13 aa, Homo Sapiens
ATQRSSVPSSTEK

SEQ ID NO: 64206 - protein, 13 aa, Homo Sapiens
TQRSSVPSSTEKN

SEQ ID NO: 64207 - protein, 13 aa, Homo Sapiens
QRSSVPSSTEKNA

SEQ ID NO: 64208 - protein, 13 aa, Homo Sapiens
RSSVPSSTEKNAV

SEQ ID NO: 64209 - protein, 13 aa, Homo Sapiens
SSVPSSTEKNAVS

SEQ ID NO: 64210 - protein, 13 aa, Homo Sapiens
SVPSSTEKNAVSM

SEQ ID NO: 64211 - protein, 13 aa, Homo Sapiens
VPSSTEKNAVSMT

SEQ ID NO: 64212 - protein, 13 aa, Homo Sapiens
PSSTEKNAVSMTS

SEQ ID NO: 64213 - protein, 13 aa, Homo Sapiens
SSTEKNAVSMTSS

SEQ ID NO: 64214 - protein, 13 aa, Homo Sapiens
STEKNAVSMTSSV

SEQ ID NO: 64215 - protein, 13 aa, Homo Sapiens
TEKNAVSMTSSVL

SEQ ID NO: 64216 - protein, 13 aa, Homo Sapiens
EKNAVSMTSSVLS

SEQ ID NO: 64217 - protein, 13 aa, Homo Sapiens
KNAVSMTSSVLSS

SEQ ID NO: 64218 - protein, 13 aa, Homo Sapiens
NAVSMTSSVLSSH

SEQ ID NO: 64219 - protein, 13 aa, Homo Sapiens
AVSMTSSVLSSHS

SEQ ID NO: 64220 - protein, 13 aa, Homo Sapiens
VSMTSSVLSSHSP

SEQ ID NO: 64221 - protein, 13 aa, Homo Sapiens
SMTSSVLSSHSPG

SEQ ID NO: 64222 - protein, 13 aa, Homo Sapiens
MTSSVLSSHSPGS

SEQ ID NO: 64223 - protein, 13 aa, Homo Sapiens
TSSVLSSHSPGSG

SEQ ID NO: 64224 - protein, 13 aa, Homo Sapiens
SSVLSSHSPGSGS

SEQ ID NO: 64225 - protein, 13 aa, Homo Sapiens
SVLSSHSPGSGSS

SEQ ID NO: 64226 - protein, 13 aa, Homo Sapiens
VLSSHSPGSGSST

SEQ ID NO: 64227 - protein, 13 aa, Homo Sapiens
LSSHSPGSGSSTT

SEQ ID NO: 64228 - protein, 13 aa, Homo Sapiens
SSHSPGSGSSTTQ

SEQ ID NO: 64229 - protein, 13 aa, Homo Sapiens
SHSPGSGSSTTQG

SEQ ID NO: 64230 - protein, 13 aa, Homo Sapiens
HSPGSGSSTTQGQ

SEQ ID NO: 64231 - protein, 13 aa, Homo Sapiens
SPGSGSSTTQGQD

SEQ ID NO: 64232 - protein, 13 aa, Homo Sapiens
PGSGSSTTQGQDV

SEQ ID NO: 64233 - protein, 13 aa, Homo Sapiens
GSGSSTTQGQDVT

SEQ ID NO: 64234 - protein, 13 aa, Homo Sapiens
SGSSTTQGQDVTL

SEQ ID NO: 64235 - protein, 13 aa, Homo Sapiens
GSSTTQGQDVTLA

SEQ ID NO: 64236 - protein, 13 aa, Homo Sapiens
SSTTQGQDVTLAP

SEQ ID NO: 64237 - protein, 13 aa, Homo Sapiens
STTQGQDVTLAPA

SEQ ID NO: 64238 - protein, 13 aa, Homo Sapiens
TTQGQDVTLAPAT

SEQ ID NO: 64239 - protein, 13 aa, Homo Sapiens
TQGQDVTLAPATE

SEQ ID NO: 64240 - protein, 13 aa, Homo Sapiens
QGQDVTLAPATEP

SEQ ID NO: 64241 - protein, 13 aa, Homo Sapiens
GQDVTLAPATEPA

SEQ ID NO: 64242 - protein, 13 aa, Homo Sapiens
QDVTLAPATEPAS

SEQ ID NO: 64243 - protein, 13 aa, Homo Sapiens
DVTLAPATEPASG

SEQ ID NO: 64244 - protein, 13 aa, Homo Sapiens
VTLAPATEPASGS

SEQ ID NO: 64245 - protein, 13 aa, Homo Sapiens
TLAPATEPASGSA

SEQ ID NO: 64246 - protein, 13 aa, Homo Sapiens
LAPATEPASGSAA

SEQ ID NO: 64247 - protein, 13 aa, Homo Sapiens
APATEPASGSAAT

SEQ ID NO: 64248 - protein, 13 aa, Homo Sapiens
PATEPASGSAATW

SEQ ID NO: 64249 - protein, 13 aa, Homo Sapiens
ATEPASGSAATWG

SEQ ID NO: 64250 - protein, 13 aa, Homo Sapiens
TEPASGSAATWGQ

SEQ ID NO: 64251 - protein, 13 aa, Homo Sapiens
EPASGSAATWGQD

SEQ ID NO: 64252 - protein, 13 aa, Homo Sapiens
PASGSAATWGQDV

SEQ ID NO: 64253 - protein, 13 aa, Homo Sapiens
ASGSAATWGQDVT

SEQ ID NO: 64254 - protein, 13 aa, Homo Sapiens
SGSAATWGQDVTS

SEQ ID NO: 64255 - protein, 13 aa, Homo Sapiens
GSAATWGQDVTSV

SEQ ID NO: 64256 - protein, 13 aa, Homo Sapiens
SAATWGQDVTSVP

SEQ ID NO: 64257 - protein, 13 aa, Homo Sapiens
AATWGQDVTSVPV

SEQ ID NO: 64258 - protein, 13 aa, Homo Sapiens
ATWGQDVTSVPVT

SEQ ID NO: 64259 - protein, 13 aa, Homo Sapiens
TWGQDVTSVPVTR

SEQ ID NO: 64260 - protein, 13 aa, Homo Sapiens
WGQDVTSVPVTRP

SEQ ID NO: 64261 - protein, 13 aa, Homo Sapiens
GQDVTSVPVTRPA

SEQ ID NO: 64262 - protein, 13 aa, Homo Sapiens
QDVTSVPVTRPAL

SEQ ID NO: 64263 - protein, 13 aa, Homo Sapiens
DVTSVPVTRPALG

SEQ ID NO: 64264 - protein, 13 aa, Homo Sapiens
VTSVPVTRPALGS

SEQ ID NO: 64265 - protein, 13 aa, Homo Sapiens
TSVPVTRPALGST

SEQ ID NO: 64266 - protein, 13 aa, Homo Sapiens
SVPVTRPALGSTT

SEQ ID NO: 64267 - protein, 13 aa, Homo Sapiens
VPVTRPALGSTTP

SEQ ID NO: 64268 - protein, 13 aa, Homo Sapiens
PVTRPALGSTTPP

SEQ ID NO: 64269 - protein, 13 aa, Homo Sapiens
VTRPALGSTTPPA

SEQ ID NO: 64270 - protein, 13 aa, Homo Sapiens
TRPALGSTTPPAH

SEQ ID NO: 64271 - protein, 13 aa, Homo Sapiens
RPALGSTTPPAHD

SEQ ID NO: 64272 - protein, 13 aa, Homo Sapiens
PALGSTTPPAHDV

SEQ ID NO: 64273 - protein, 13 aa, Homo Sapiens
ALGSTTPPAHDVT

SEQ ID NO: 64274 - protein, 13 aa, Homo Sapiens
LGSTTPPAHDVTS

SEQ ID NO: 64275 - protein, 13 aa, Homo Sapiens
GSTTPPAHDVTSA

SEQ ID NO: 64276 - protein, 13 aa, Homo Sapiens
STTPPAHDVTSAP

SEQ ID NO: 64277 - protein, 13 aa, Homo Sapiens
TTPPAHDVTSAPD

SEQ ID NO: 64278 - protein, 13 aa, Homo Sapiens
TPPAHDVTSAPDN

SEQ ID NO: 64279 - protein, 13 aa, Homo Sapiens
PPAHDVTSAPDNK

SEQ ID NO: 64280 - protein, 13 aa, Homo Sapiens
PAHDVTSAPDNKP

SEQ ID NO: 64281 - protein, 13 aa, Homo Sapiens
AHDVTSAPDNKPA

SEQ ID NO: 64282 - protein, 13 aa, Homo Sapiens
HDVTSAPDNKPAP

SEQ ID NO: 64283 - protein, 13 aa, Homo Sapiens
DVTSAPDNKPAPG

SEQ ID NO: 64284 - protein, 13 aa, Homo Sapiens
VTSAPDNKPAPGS

SEQ ID NO: 64285 - protein, 13 aa, Homo Sapiens
TSAPDNKPAPGST

SEQ ID NO: 64286 - protein, 13 aa, Homo Sapiens
SAPDNKPAPGSTA

SEQ ID NO: 64287 - protein, 13 aa, Homo Sapiens
APDNKPAPGSTAP

SEQ ID NO: 64288 - protein, 13 aa, Homo Sapiens
PDNKPAPGSTAPP

SEQ ID NO: 64289 - protein, 13 aa, Homo Sapiens
DNKPAPGSTAPPA

SEQ ID NO: 64290 - protein, 13 aa, Homo Sapiens
NKPAPGSTAPPAH

SEQ ID NO: 64291 - protein, 13 aa, Homo Sapiens
KPAPGSTAPPAHG

SEQ ID NO: 64292 - protein, 13 aa, Homo Sapiens
PAPGSTAPPAHGV

SEQ ID NO: 64293 - protein, 13 aa, Homo Sapiens
APGSTAPPAHGVT

SEQ ID NO: 64294 - protein, 13 aa, Homo Sapiens
PGSTAPPAHGVTS

SEQ ID NO: 64295 - protein, 13 aa, Homo Sapiens
GSTAPPAHGVTSA

SEQ ID NO: 64296 - protein, 13 aa, Homo Sapiens
STAPPAHGVTSAP

SEQ ID NO: 64297 - protein, 13 aa, Homo Sapiens
TAPPAHGVTSAPD

SEQ ID NO: 64298 - protein, 13 aa, Homo Sapiens
APPAHGVTSAPDT

SEQ ID NO: 64299 - protein, 13 aa, Homo Sapiens
PPAHGVTSAPDTR

SEQ ID NO: 64300 - protein, 13 aa, Homo Sapiens
PAHGVTSAPDTRP

SEQ ID NO: 64301 - protein, 13 aa, Homo Sapiens
AHGVTSAPDTRPA

SEQ ID NO: 64302 - protein, 13 aa, Homo Sapiens
HGVTSAPDTRPAP

SEQ ID NO: 64303 - protein, 13 aa, Homo Sapiens
GVTSAPDTRPAPG

SEQ ID NO: 64304 - protein, 13 aa, Homo Sapiens
VTSAPDTRPAPGS

SEQ ID NO: 64305 - protein, 13 aa, Homo Sapiens
TSAPDTRPAPGST

SEQ ID NO: 64306 - protein, 13 aa, Homo Sapiens
SAPDTRPAPGSTA

SEQ ID NO: 64307 - protein, 13 aa, Homo Sapiens
APDTRPAPGSTAP

SEQ ID NO: 64308 - protein, 13 aa, Homo Sapiens
PDTRPAPGSTAPP

SEQ ID NO: 64309 - protein, 13 aa, Homo Sapiens
DTRPAPGSTAPPA

SEQ ID NO: 64310 - protein, 13 aa, Homo Sapiens
TRPAPGSTAPPAH

SEQ ID NO: 64311 - protein, 13 aa, Homo Sapiens
RPAPGSTAPPAHG

SEQ ID NO: 64312 - protein, 13 aa, Homo Sapiens
PAPGSTAPPAHGV

SEQ ID NO: 64313 - protein, 13 aa, Homo Sapiens
APGSTAPPAHGVT

SEQ ID NO: 64314 - protein, 13 aa, Homo Sapiens
PGSTAPPAHGVTS

SEQ ID NO: 64315 - protein, 13 aa, Homo Sapiens
GSTAPPAHGVTSA

SEQ ID NO: 64316 - protein, 13 aa, Homo Sapiens
STAPPAHGVTSAP

SEQ ID NO: 64317 - protein, 13 aa, Homo Sapiens
TAPPAHGVTSAPD

SEQ ID NO: 64318 - protein, 13 aa, Homo Sapiens
APPAHGVTSAPDT

SEQ ID NO: 64319 - protein, 13 aa, Homo Sapiens
PPAHGVTSAPDTR

SEQ ID NO: 64320 - protein, 13 aa, Homo Sapiens
PAHGVTSAPDTRP

SEQ ID NO: 64321 - protein, 13 aa, Homo Sapiens
AHGVTSAPDTRPA

SEQ ID NO: 64322 - protein, 13 aa, Homo Sapiens
HGVTSAPDTRPAP

SEQ ID NO: 64323 - protein, 13 aa, Homo Sapiens
GVTSAPDTRPAPG

SEQ ID NO: 64324 - protein, 13 aa, Homo Sapiens
VTSAPDTRPAPGS

SEQ ID NO: 64325 - protein, 13 aa, Homo Sapiens
TSAPDTRPAPGST

SEQ ID NO: 64326 - protein, 13 aa, Homo Sapiens
SAPDTRPAPGSTA

SEQ ID NO: 64327 - protein, 13 aa, Homo Sapiens
APDTRPAPGSTAP

SEQ ID NO: 64328 - protein, 13 aa, Homo Sapiens
PDTRPAPGSTAPP

SEQ ID NO: 64329 - protein, 13 aa, Homo Sapiens
DTRPAPGSTAPPA

SEQ ID NO: 64330 - protein, 13 aa, Homo Sapiens
TRPAPGSTAPPAH

SEQ ID NO: 64331 - protein, 13 aa, Homo Sapiens
RPAPGSTAPPAHG

SEQ ID NO: 64332 - protein, 13 aa, Homo Sapiens
PAPGSTAPPAHGV

SEQ ID NO: 64333 - protein, 13 aa, Homo Sapiens
APGSTAPPAHGVT

SEQ ID NO: 64334 - protein, 13 aa, Homo Sapiens
PGSTAPPAHGVTS

SEQ ID NO: 64335 - protein, 13 aa, Homo Sapiens
GSTAPPAHGVTSA

SEQ ID NO: 64336 - protein, 13 aa, Homo Sapiens
STAPPAHGVTSAP

SEQ ID NO: 64337 - protein, 13 aa, Homo Sapiens
TAPPAHGVTSAPD

SEQ ID NO: 64338 - protein, 13 aa, Homo Sapiens
APPAHGVTSAPDT

SEQ ID NO: 64339 - protein, 13 aa, Homo Sapiens
PPAHGVTSAPDTR

SEQ ID NO: 64340 - protein, 13 aa, Homo Sapiens
PAHGVTSAPDTRP

SEQ ID NO: 64341 - protein, 13 aa, Homo Sapiens
AHGVTSAPDTRPA

SEQ ID NO: 64342 - protein, 13 aa, Homo Sapiens
HGVTSAPDTRPAP

SEQ ID NO: 64343 - protein, 13 aa, Homo Sapiens
GVTSAPDTRPAPG

SEQ ID NO: 64344 - protein, 13 aa, Homo Sapiens
VTSAPDTRPAPGS

SEQ ID NO: 64345 - protein, 13 aa, Homo Sapiens
TSAPDTRPAPGST

SEQ ID NO: 64346 - protein, 13 aa, Homo Sapiens
SAPDTRPAPGSTA

SEQ ID NO: 64347 - protein, 13 aa, Homo Sapiens
APDTRPAPGSTAP

SEQ ID NO: 64348 - protein, 13 aa, Homo Sapiens
PDTRPAPGSTAPP

SEQ ID NO: 64349 - protein, 13 aa, Homo Sapiens
DTRPAPGSTAPPA

SEQ ID NO: 64350 - protein, 13 aa, Homo Sapiens
TRPAPGSTAPPAH

SEQ ID NO: 64351 - protein, 13 aa, Homo Sapiens
RPAPGSTAPPAHG

SEQ ID NO: 64352 - protein, 13 aa, Homo Sapiens
PAPGSTAPPAHGV

SEQ ID NO: 64353 - protein, 13 aa, Homo Sapiens
APGSTAPPAHGVT

SEQ ID NO: 64354 - protein, 13 aa, Homo Sapiens
PGSTAPPAHGVTS

SEQ ID NO: 64355 - protein, 13 aa, Homo Sapiens
GSTAPPAHGVTSA

SEQ ID NO: 64356 - protein, 13 aa, Homo Sapiens
STAPPAHGVTSAP

SEQ ID NO: 64357 - protein, 13 aa, Homo Sapiens
TAPPAHGVTSAPD

SEQ ID NO: 64358 - protein, 13 aa, Homo Sapiens
APPAHGVTSAPDT

SEQ ID NO: 64359 - protein, 13 aa, Homo Sapiens
PPAHGVTSAPDTR

SEQ ID NO: 64360 - protein, 13 aa, Homo Sapiens
PAHGVTSAPDTRP

SEQ ID NO: 64361 - protein, 13 aa, Homo Sapiens
AHGVTSAPDTRPA

SEQ ID NO: 64362 - protein, 13 aa, Homo Sapiens
HGVTSAPDTRPAP

SEQ ID NO: 64363 - protein, 13 aa, Homo Sapiens
GVTSAPDTRPAPG

SEQ ID NO: 64364 - protein, 13 aa, Homo Sapiens
VTSAPDTRPAPGS

SEQ ID NO: 64365 - protein, 13 aa, Homo Sapiens
TSAPDTRPAPGST

SEQ ID NO: 64366 - protein, 13 aa, Homo Sapiens
SAPDTRPAPGSTA

SEQ ID NO: 64367 - protein, 13 aa, Homo Sapiens
APDTRPAPGSTAP

SEQ ID NO: 64368 - protein, 13 aa, Homo Sapiens
PDTRPAPGSTAPP

SEQ ID NO: 64369 - protein, 13 aa, Homo Sapiens
DTRPAPGSTAPPA

SEQ ID NO: 64370 - protein, 13 aa, Homo Sapiens
TRPAPGSTAPPAH

SEQ ID NO: 64371 - protein, 13 aa, Homo Sapiens
RPAPGSTAPPAHG

SEQ ID NO: 64372 - protein, 13 aa, Homo Sapiens
PAPGSTAPPAHGV

SEQ ID NO: 64373 - protein, 13 aa, Homo Sapiens
APGSTAPPAHGVT

SEQ ID NO: 64374 - protein, 13 aa, Homo Sapiens
PGSTAPPAHGVTS

SEQ ID NO: 64375 - protein, 13 aa, Homo Sapiens
GSTAPPAHGVTSA

SEQ ID NO: 64376 - protein, 13 aa, Homo Sapiens
STAPPAHGVTSAP

SEQ ID NO: 64377 - protein, 13 aa, Homo Sapiens
TAPPAHGVTSAPD

SEQ ID NO: 64378 - protein, 13 aa, Homo Sapiens
APPAHGVTSAPDT

SEQ ID NO: 64379 - protein, 13 aa, Homo Sapiens
PPAHGVTSAPDTR

SEQ ID NO: 64380 - protein, 13 aa, Homo Sapiens
PAHGVTSAPDTRP

SEQ ID NO: 64381 - protein, 13 aa, Homo Sapiens
AHGVTSAPDTRPA

SEQ ID NO: 64382 - protein, 13 aa, Homo Sapiens
HGVTSAPDTRPAP

SEQ ID NO: 64383 - protein, 13 aa, Homo Sapiens
GVTSAPDTRPAPG

SEQ ID NO: 64384 - protein, 13 aa, Homo Sapiens
VTSAPDTRPAPGS

SEQ ID NO: 64385 - protein, 13 aa, Homo Sapiens
TSAPDTRPAPGST

SEQ ID NO: 64386 - protein, 13 aa, Homo Sapiens
SAPDTRPAPGSTA

SEQ ID NO: 64387 - protein, 13 aa, Homo Sapiens
APDTRPAPGSTAP

SEQ ID NO: 64388 - protein, 13 aa, Homo Sapiens
PDTRPAPGSTAPP

SEQ ID NO: 64389 - protein, 13 aa, Homo Sapiens
DTRPAPGSTAPPA

SEQ ID NO: 64390 - protein, 13 aa, Homo Sapiens
TRPAPGSTAPPAH

SEQ ID NO: 64391 - protein, 13 aa, Homo Sapiens
RPAPGSTAPPAHG

SEQ ID NO: 64392 - protein, 13 aa, Homo Sapiens
PAPGSTAPPAHGV

SEQ ID NO: 64393 - protein, 13 aa, Homo Sapiens
APGSTAPPAHGVT

SEQ ID NO: 64394 - protein, 13 aa, Homo Sapiens
PGSTAPPAHGVTS

SEQ ID NO: 64395 - protein, 13 aa, Homo Sapiens
GSTAPPAHGVTSA

SEQ ID NO: 64396 - protein, 13 aa, Homo Sapiens
STAPPAHGVTSAP

SEQ ID NO: 64397 - protein, 13 aa, Homo Sapiens
TAPPAHGVTSAPD

SEQ ID NO: 64398 - protein, 13 aa, Homo Sapiens
APPAHGVTSAPDT

SEQ ID NO: 64399 - protein, 13 aa, Homo Sapiens
PPAHGVTSAPDTR

SEQ ID NO: 64400 - protein, 13 aa, Homo Sapiens
PAHGVTSAPDTRP

SEQ ID NO: 64401 - protein, 13 aa, Homo Sapiens
AHGVTSAPDTRPA

SEQ ID NO: 64402 - protein, 13 aa, Homo Sapiens
HGVTSAPDTRPAP

SEQ ID NO: 64403 - protein, 13 aa, Homo Sapiens
GVTSAPDTRPAPG

SEQ ID NO: 64404 - protein, 13 aa, Homo Sapiens
VTSAPDTRPAPGS

SEQ ID NO: 64405 - protein, 13 aa, Homo Sapiens
TSAPDTRPAPGST

SEQ ID NO: 64406 - protein, 13 aa, Homo Sapiens
SAPDTRPAPGSTA

SEQ ID NO: 64407 - protein, 13 aa, Homo Sapiens
APDTRPAPGSTAP

SEQ ID NO: 64408 - protein, 13 aa, Homo Sapiens
PDTRPAPGSTAPP

SEQ ID NO: 64409 - protein, 13 aa, Homo Sapiens
DTRPAPGSTAPPA

SEQ ID NO: 64410 - protein, 13 aa, Homo Sapiens
TRPAPGSTAPPAH

SEQ ID NO: 64411 - protein, 13 aa, Homo Sapiens
RPAPGSTAPPAHG

SEQ ID NO: 64412 - protein, 13 aa, Homo Sapiens
PAPGSTAPPAHGV

SEQ ID NO: 64413 - protein, 13 aa, Homo Sapiens
APGSTAPPAHGVT

SEQ ID NO: 64414 - protein, 13 aa, Homo Sapiens
PGSTAPPAHGVTS

SEQ ID NO: 64415 - protein, 13 aa, Homo Sapiens
GSTAPPAHGVTSA

SEQ ID NO: 64416 - protein, 13 aa, Homo Sapiens
STAPPAHGVTSAP

SEQ ID NO: 64417 - protein, 13 aa, Homo Sapiens
TAPPAHGVTSAPD

SEQ ID NO: 64418 - protein, 13 aa, Homo Sapiens
APPAHGVTSAPDT

SEQ ID NO: 64419 - protein, 13 aa, Homo Sapiens
PPAHGVTSAPDTR

SEQ ID NO: 64420 - protein, 13 aa, Homo Sapiens
PAHGVTSAPDTRP

SEQ ID NO: 64421 - protein, 13 aa, Homo Sapiens
AHGVTSAPDTRPA

SEQ ID NO: 64422 - protein, 13 aa, Homo Sapiens
HGVTSAPDTRPAP

SEQ ID NO: 64423 - protein, 13 aa, Homo Sapiens
GVTSAPDTRPAPG

SEQ ID NO: 64424 - protein, 13 aa, Homo Sapiens
VTSAPDTRPAPGS

SEQ ID NO: 64425 - protein, 13 aa, Homo Sapiens
TSAPDTRPAPGST

SEQ ID NO: 64426 - protein, 13 aa, Homo Sapiens
SAPDTRPAPGSTA

SEQ ID NO: 64427 - protein, 13 aa, Homo Sapiens
APDTRPAPGSTAP

SEQ ID NO: 64428 - protein, 13 aa, Homo Sapiens
PDTRPAPGSTAPP

SEQ ID NO: 64429 - protein, 13 aa, Homo Sapiens
DTRPAPGSTAPPA

SEQ ID NO: 64430 - protein, 13 aa, Homo Sapiens
TRPAPGSTAPPAH

SEQ ID NO: 64431 - protein, 13 aa, Homo Sapiens
RPAPGSTAPPAHG

SEQ ID NO: 64432 - protein, 13 aa, Homo Sapiens
PAPGSTAPPAHGV

SEQ ID NO: 64433 - protein, 13 aa, Homo Sapiens
APGSTAPPAHGVT

SEQ ID NO: 64434 - protein, 13 aa, Homo Sapiens
PGSTAPPAHGVTS

SEQ ID NO: 64435 - protein, 13 aa, Homo Sapiens
GSTAPPAHGVTSA

SEQ ID NO: 64436 - protein, 13 aa, Homo Sapiens
STAPPAHGVTSAP

SEQ ID NO: 64437 - protein, 13 aa, Homo Sapiens
TAPPAHGVTSAPD

SEQ ID NO: 64438 - protein, 13 aa, Homo Sapiens
APPAHGVTSAPDT

SEQ ID NO: 64439 - protein, 13 aa, Homo Sapiens
PPAHGVTSAPDTR

SEQ ID NO: 64440 - protein, 13 aa, Homo Sapiens
PAHGVTSAPDTRP

SEQ ID NO: 64441 - protein, 13 aa, Homo Sapiens
AHGVTSAPDTRPA

SEQ ID NO: 64442 - protein, 13 aa, Homo Sapiens
HGVTSAPDTRPAP

SEQ ID NO: 64443 - protein, 13 aa, Homo Sapiens
GVTSAPDTRPAPG

SEQ ID NO: 64444 - protein, 13 aa, Homo Sapiens
VTSAPDTRPAPGS

SEQ ID NO: 64445 - protein, 13 aa, Homo Sapiens
TSAPDTRPAPGST

SEQ ID NO: 64446 - protein, 13 aa, Homo Sapiens
SAPDTRPAPGSTA

SEQ ID NO: 64447 - protein, 13 aa, Homo Sapiens
APDTRPAPGSTAP

SEQ ID NO: 64448 - protein, 13 aa, Homo Sapiens
PDTRPAPGSTAPP

SEQ ID NO: 64449 - protein, 13 aa, Homo Sapiens
DTRPAPGSTAPPA

SEQ ID NO: 64450 - protein, 13 aa, Homo Sapiens
TRPAPGSTAPPAH

SEQ ID NO: 64451 - protein, 13 aa, Homo Sapiens
RPAPGSTAPPAHG

SEQ ID NO: 64452 - protein, 13 aa, Homo Sapiens
PAPGSTAPPAHGV

SEQ ID NO: 64453 - protein, 13 aa, Homo Sapiens
APGSTAPPAHGVT

SEQ ID NO: 64454 - protein, 13 aa, Homo Sapiens
PGSTAPPAHGVTS

SEQ ID NO: 64455 - protein, 13 aa, Homo Sapiens
GSTAPPAHGVTSA

SEQ ID NO: 64456 - protein, 13 aa, Homo Sapiens
STAPPAHGVTSAP

SEQ ID NO: 64457 - protein, 13 aa, Homo Sapiens
TAPPAHGVTSAPD

SEQ ID NO: 64458 - protein, 13 aa, Homo Sapiens
APPAHGVTSAPDT

SEQ ID NO: 64459 - protein, 13 aa, Homo Sapiens
PPAHGVTSAPDTR

SEQ ID NO: 64460 - protein, 13 aa, Homo Sapiens
PAHGVTSAPDTRP

SEQ ID NO: 64461 - protein, 13 aa, Homo Sapiens
AHGVTSAPDTRPA

SEQ ID NO: 64462 - protein, 13 aa, Homo Sapiens
HGVTSAPDTRPAP

SEQ ID NO: 64463 - protein, 13 aa, Homo Sapiens
GVTSAPDTRPAPG

SEQ ID NO: 64464 - protein, 13 aa, Homo Sapiens
VTSAPDTRPAPGS

SEQ ID NO: 64465 - protein, 13 aa, Homo Sapiens
TSAPDTRPAPGST

SEQ ID NO: 64466 - protein, 13 aa, Homo Sapiens
SAPDTRPAPGSTA

SEQ ID NO: 64467 - protein, 13 aa, Homo Sapiens
APDTRPAPGSTAP

SEQ ID NO: 64468 - protein, 13 aa, Homo Sapiens
PDTRPAPGSTAPP

SEQ ID NO: 64469 - protein, 13 aa, Homo Sapiens
DTRPAPGSTAPPA

SEQ ID NO: 64470 - protein, 13 aa, Homo Sapiens
TRPAPGSTAPPAH

SEQ ID NO: 64471 - protein, 13 aa, Homo Sapiens
RPAPGSTAPPAHG

SEQ ID NO: 64472 - protein, 13 aa, Homo Sapiens
PAPGSTAPPAHGV

SEQ ID NO: 64473 - protein, 13 aa, Homo Sapiens
APGSTAPPAHGVT

SEQ ID NO: 64474 - protein, 13 aa, Homo Sapiens
PGSTAPPAHGVTS

SEQ ID NO: 64475 - protein, 13 aa, Homo Sapiens
GSTAPPAHGVTSA

SEQ ID NO: 64476 - protein, 13 aa, Homo Sapiens
STAPPAHGVTSAP

SEQ ID NO: 64477 - protein, 13 aa, Homo Sapiens
TAPPAHGVTSAPD

SEQ ID NO: 64478 - protein, 13 aa, Homo Sapiens
APPAHGVTSAPDT

SEQ ID NO: 64479 - protein, 13 aa, Homo Sapiens
PPAHGVTSAPDTR

SEQ ID NO: 64480 - protein, 13 aa, Homo Sapiens
PAHGVTSAPDTRP

SEQ ID NO: 64481 - protein, 13 aa, Homo Sapiens
AHGVTSAPDTRPA

SEQ ID NO: 64482 - protein, 13 aa, Homo Sapiens
HGVTSAPDTRPAP

SEQ ID NO: 64483 - protein, 13 aa, Homo Sapiens
GVTSAPDTRPAPG

SEQ ID NO: 64484 - protein, 13 aa, Homo Sapiens
VTSAPDTRPAPGS

SEQ ID NO: 64485 - protein, 13 aa, Homo Sapiens
TSAPDTRPAPGST

SEQ ID NO: 64486 - protein, 13 aa, Homo Sapiens
SAPDTRPAPGSTA

SEQ ID NO: 64487 - protein, 13 aa, Homo Sapiens
APDTRPAPGSTAP

SEQ ID NO: 64488 - protein, 13 aa, Homo Sapiens
PDTRPAPGSTAPP

SEQ ID NO: 64489 - protein, 13 aa, Homo Sapiens
DTRPAPGSTAPPA

SEQ ID NO: 64490 - protein, 13 aa, Homo Sapiens
TRPAPGSTAPPAH

SEQ ID NO: 64491 - protein, 13 aa, Homo Sapiens
RPAPGSTAPPAHG

SEQ ID NO: 64492 - protein, 13 aa, Homo Sapiens
PAPGSTAPPAHGV

SEQ ID NO: 64493 - protein, 13 aa, Homo Sapiens
APGSTAPPAHGVT

SEQ ID NO: 64494 - protein, 13 aa, Homo Sapiens
PGSTAPPAHGVTS

SEQ ID NO: 64495 - protein, 13 aa, Homo Sapiens
GSTAPPAHGVTSA

SEQ ID NO: 64496 - protein, 13 aa, Homo Sapiens
STAPPAHGVTSAP

SEQ ID NO: 64497 - protein, 13 aa, Homo Sapiens
TAPPAHGVTSAPD

SEQ ID NO: 64498 - protein, 13 aa, Homo Sapiens
APPAHGVTSAPDT

SEQ ID NO: 64499 - protein, 13 aa, Homo Sapiens
PPAHGVTSAPDTR

SEQ ID NO: 64500 - protein, 13 aa, Homo Sapiens
PAHGVTSAPDTRP

SEQ ID NO: 64501 - protein, 13 aa, Homo Sapiens
AHGVTSAPDTRPA

SEQ ID NO: 64502 - protein, 13 aa, Homo Sapiens
HGVTSAPDTRPAP

SEQ ID NO: 64503 - protein, 13 aa, Homo Sapiens
GVTSAPDTRPAPG

SEQ ID NO: 64504 - protein, 13 aa, Homo Sapiens
VTSAPDTRPAPGS

SEQ ID NO: 64505 - protein, 13 aa, Homo Sapiens
TSAPDTRPAPGST

SEQ ID NO: 64506 - protein, 13 aa, Homo Sapiens
SAPDTRPAPGSTA

SEQ ID NO: 64507 - protein, 13 aa, Homo Sapiens
APDTRPAPGSTAP

SEQ ID NO: 64508 - protein, 13 aa, Homo Sapiens
PDTRPAPGSTAPP

SEQ ID NO: 64509 - protein, 13 aa, Homo Sapiens
DTRPAPGSTAPPA

SEQ ID NO: 64510 - protein, 13 aa, Homo Sapiens
TRPAPGSTAPPAH

SEQ ID NO: 64511 - protein, 13 aa, Homo Sapiens
RPAPGSTAPPAHG

SEQ ID NO: 64512 - protein, 13 aa, Homo Sapiens
PAPGSTAPPAHGV

SEQ ID NO: 64513 - protein, 13 aa, Homo Sapiens
APGSTAPPAHGVT

SEQ ID NO: 64514 - protein, 13 aa, Homo Sapiens
PGSTAPPAHGVTS

SEQ ID NO: 64515 - protein, 13 aa, Homo Sapiens
GSTAPPAHGVTSA

SEQ ID NO: 64516 - protein, 13 aa, Homo Sapiens
STAPPAHGVTSAP

SEQ ID NO: 64517 - protein, 13 aa, Homo Sapiens
TAPPAHGVTSAPD

SEQ ID NO: 64518 - protein, 13 aa, Homo Sapiens
APPAHGVTSAPDT

SEQ ID NO: 64519 - protein, 13 aa, Homo Sapiens
PPAHGVTSAPDTR

SEQ ID NO: 64520 - protein, 13 aa, Homo Sapiens
PAHGVTSAPDTRP

SEQ ID NO: 64521 - protein, 13 aa, Homo Sapiens
AHGVTSAPDTRPA

SEQ ID NO: 64522 - protein, 13 aa, Homo Sapiens
HGVTSAPDTRPAP

SEQ ID NO: 64523 - protein, 13 aa, Homo Sapiens
GVTSAPDTRPAPG

SEQ ID NO: 64524 - protein, 13 aa, Homo Sapiens
VTSAPDTRPAPGS

SEQ ID NO: 64525 - protein, 13 aa, Homo Sapiens
TSAPDTRPAPGST

SEQ ID NO: 64526 - protein, 13 aa, Homo Sapiens
SAPDTRPAPGSTA

SEQ ID NO: 64527 - protein, 13 aa, Homo Sapiens
APDTRPAPGSTAP

SEQ ID NO: 64528 - protein, 13 aa, Homo Sapiens
PDTRPAPGSTAPP

SEQ ID NO: 64529 - protein, 13 aa, Homo Sapiens
DTRPAPGSTAPPA

SEQ ID NO: 64530 - protein, 13 aa, Homo Sapiens
TRPAPGSTAPPAH

SEQ ID NO: 64531 - protein, 13 aa, Homo Sapiens
RPAPGSTAPPAHG

SEQ ID NO: 64532 - protein, 13 aa, Homo Sapiens
PAPGSTAPPAHGV

SEQ ID NO: 64533 - protein, 13 aa, Homo Sapiens
APGSTAPPAHGVT

SEQ ID NO: 64534 - protein, 13 aa, Homo Sapiens
PGSTAPPAHGVTS

SEQ ID NO: 64535 - protein, 13 aa, Homo Sapiens
GSTAPPAHGVTSA

SEQ ID NO: 64536 - protein, 13 aa, Homo Sapiens
STAPPAHGVTSAP

SEQ ID NO: 64537 - protein, 13 aa, Homo Sapiens
TAPPAHGVTSAPD

SEQ ID NO: 64538 - protein, 13 aa, Homo Sapiens
APPAHGVTSAPDT

SEQ ID NO: 64539 - protein, 13 aa, Homo Sapiens
PPAHGVTSAPDTR

SEQ ID NO: 64540 - protein, 13 aa, Homo Sapiens
PAHGVTSAPDTRP

SEQ ID NO: 64541 - protein, 13 aa, Homo Sapiens
AHGVTSAPDTRPA

SEQ ID NO: 64542 - protein, 13 aa, Homo Sapiens
HGVTSAPDTRPAP

SEQ ID NO: 64543 - protein, 13 aa, Homo Sapiens
GVTSAPDTRPAPG

SEQ ID NO: 64544 - protein, 13 aa, Homo Sapiens
VTSAPDTRPAPGS

SEQ ID NO: 64545 - protein, 13 aa, Homo Sapiens
TSAPDTRPAPGST

SEQ ID NO: 64546 - protein, 13 aa, Homo Sapiens
SAPDTRPAPGSTA

SEQ ID NO: 64547 - protein, 13 aa, Homo Sapiens
APDTRPAPGSTAP

SEQ ID NO: 64548 - protein, 13 aa, Homo Sapiens
PDTRPAPGSTAPP

SEQ ID NO: 64549 - protein, 13 aa, Homo Sapiens
DTRPAPGSTAPPA

SEQ ID NO: 64550 - protein, 13 aa, Homo Sapiens
TRPAPGSTAPPAH

SEQ ID NO: 64551 - protein, 13 aa, Homo Sapiens
RPAPGSTAPPAHG

SEQ ID NO: 64552 - protein, 13 aa, Homo Sapiens
PAPGSTAPPAHGV

SEQ ID NO: 64553 - protein, 13 aa, Homo Sapiens
APGSTAPPAHGVT

SEQ ID NO: 64554 - protein, 13 aa, Homo Sapiens
PGSTAPPAHGVTS

SEQ ID NO: 64555 - protein, 13 aa, Homo Sapiens
GSTAPPAHGVTSA

SEQ ID NO: 64556 - protein, 13 aa, Homo Sapiens
STAPPAHGVTSAP

SEQ ID NO: 64557 - protein, 13 aa, Homo Sapiens
TAPPAHGVTSAPD

SEQ ID NO: 64558 - protein, 13 aa, Homo Sapiens
APPAHGVTSAPDT

SEQ ID NO: 64559 - protein, 13 aa, Homo Sapiens
PPAHGVTSAPDTR

SEQ ID NO: 64560 - protein, 13 aa, Homo Sapiens
PAHGVTSAPDTRP

SEQ ID NO: 64561 - protein, 13 aa, Homo Sapiens
AHGVTSAPDTRPA

SEQ ID NO: 64562 - protein, 13 aa, Homo Sapiens
HGVTSAPDTRPAP

SEQ ID NO: 64563 - protein, 13 aa, Homo Sapiens
GVTSAPDTRPAPG

SEQ ID NO: 64564 - protein, 13 aa, Homo Sapiens
VTSAPDTRPAPGS

SEQ ID NO: 64565 - protein, 13 aa, Homo Sapiens
TSAPDTRPAPGST

SEQ ID NO: 64566 - protein, 13 aa, Homo Sapiens
SAPDTRPAPGSTA

SEQ ID NO: 64567 - protein, 13 aa, Homo Sapiens
APDTRPAPGSTAP

SEQ ID NO: 64568 - protein, 13 aa, Homo Sapiens
PDTRPAPGSTAPP

SEQ ID NO: 64569 - protein, 13 aa, Homo Sapiens
DTRPAPGSTAPPA

SEQ ID NO: 64570 - protein, 13 aa, Homo Sapiens
TRPAPGSTAPPAH

SEQ ID NO: 64571 - protein, 13 aa, Homo Sapiens
RPAPGSTAPPAHG

SEQ ID NO: 64572 - protein, 13 aa, Homo Sapiens
PAPGSTAPPAHGV

SEQ ID NO: 64573 - protein, 13 aa, Homo Sapiens
APGSTAPPAHGVT

SEQ ID NO: 64574 - protein, 13 aa, Homo Sapiens
PGSTAPPAHGVTS

SEQ ID NO: 64575 - protein, 13 aa, Homo Sapiens
GSTAPPAHGVTSA

SEQ ID NO: 64576 - protein, 13 aa, Homo Sapiens
STAPPAHGVTSAP

SEQ ID NO: 64577 - protein, 13 aa, Homo Sapiens
TAPPAHGVTSAPD

SEQ ID NO: 64578 - protein, 13 aa, Homo Sapiens
APPAHGVTSAPDT

SEQ ID NO: 64579 - protein, 13 aa, Homo Sapiens
PPAHGVTSAPDTR

SEQ ID NO: 64580 - protein, 13 aa, Homo Sapiens
PAHGVTSAPDTRP

SEQ ID NO: 64581 - protein, 13 aa, Homo Sapiens
AHGVTSAPDTRPA

SEQ ID NO: 64582 - protein, 13 aa, Homo Sapiens
HGVTSAPDTRPAP

SEQ ID NO: 64583 - protein, 13 aa, Homo Sapiens
GVTSAPDTRPAPG

SEQ ID NO: 64584 - protein, 13 aa, Homo Sapiens
VTSAPDTRPAPGS

SEQ ID NO: 64585 - protein, 13 aa, Homo Sapiens
TSAPDTRPAPGST

SEQ ID NO: 64586 - protein, 13 aa, Homo Sapiens
SAPDTRPAPGSTA

SEQ ID NO: 64587 - protein, 13 aa, Homo Sapiens
APDTRPAPGSTAP

SEQ ID NO: 64588 - protein, 13 aa, Homo Sapiens
PDTRPAPGSTAPP

SEQ ID NO: 64589 - protein, 13 aa, Homo Sapiens
DTRPAPGSTAPPA

SEQ ID NO: 64590 - protein, 13 aa, Homo Sapiens
TRPAPGSTAPPAH

SEQ ID NO: 64591 - protein, 13 aa, Homo Sapiens
RPAPGSTAPPAHG

SEQ ID NO: 64592 - protein, 13 aa, Homo Sapiens
PAPGSTAPPAHGV

SEQ ID NO: 64593 - protein, 13 aa, Homo Sapiens
APGSTAPPAHGVT

SEQ ID NO: 64594 - protein, 13 aa, Homo Sapiens
PGSTAPPAHGVTS

SEQ ID NO: 64595 - protein, 13 aa, Homo Sapiens
GSTAPPAHGVTSA

SEQ ID NO: 64596 - protein, 13 aa, Homo Sapiens
STAPPAHGVTSAP

SEQ ID NO: 64597 - protein, 13 aa, Homo Sapiens
TAPPAHGVTSAPD

SEQ ID NO: 64598 - protein, 13 aa, Homo Sapiens
APPAHGVTSAPDT

SEQ ID NO: 64599 - protein, 13 aa, Homo Sapiens
PPAHGVTSAPDTR

SEQ ID NO: 64600 - protein, 13 aa, Homo Sapiens
PAHGVTSAPDTRP

SEQ ID NO: 64601 - protein, 13 aa, Homo Sapiens
AHGVTSAPDTRPA

SEQ ID NO: 64602 - protein, 13 aa, Homo Sapiens
HGVTSAPDTRPAP

SEQ ID NO: 64603 - protein, 13 aa, Homo Sapiens
GVTSAPDTRPAPG

SEQ ID NO: 64604 - protein, 13 aa, Homo Sapiens
VTSAPDTRPAPGS

SEQ ID NO: 64605 - protein, 13 aa, Homo Sapiens
TSAPDTRPAPGST

SEQ ID NO: 64606 - protein, 13 aa, Homo Sapiens
SAPDTRPAPGSTA

SEQ ID NO: 64607 - protein, 13 aa, Homo Sapiens
APDTRPAPGSTAP

SEQ ID NO: 64608 - protein, 13 aa, Homo Sapiens
PDTRPAPGSTAPP

SEQ ID NO: 64609 - protein, 13 aa, Homo Sapiens
DTRPAPGSTAPPA

SEQ ID NO: 64610 - protein, 13 aa, Homo Sapiens
TRPAPGSTAPPAH

SEQ ID NO: 64611 - protein, 13 aa, Homo Sapiens
RPAPGSTAPPAHG

SEQ ID NO: 64612 - protein, 13 aa, Homo Sapiens
PAPGSTAPPAHGV

SEQ ID NO: 64613 - protein, 13 aa, Homo Sapiens
APGSTAPPAHGVT

SEQ ID NO: 64614 - protein, 13 aa, Homo Sapiens
PGSTAPPAHGVTS

SEQ ID NO: 64615 - protein, 13 aa, Homo Sapiens
GSTAPPAHGVTSA

SEQ ID NO: 64616 - protein, 13 aa, Homo Sapiens
STAPPAHGVTSAP

SEQ ID NO: 64617 - protein, 13 aa, Homo Sapiens
TAPPAHGVTSAPD

SEQ ID NO: 64618 - protein, 13 aa, Homo Sapiens
APPAHGVTSAPDT

SEQ ID NO: 64619 - protein, 13 aa, Homo Sapiens
PPAHGVTSAPDTR

SEQ ID NO: 64620 - protein, 13 aa, Homo Sapiens
PAHGVTSAPDTRP

SEQ ID NO: 64621 - protein, 13 aa, Homo Sapiens
AHGVTSAPDTRPA

SEQ ID NO: 64622 - protein, 13 aa, Homo Sapiens
HGVTSAPDTRPAP

SEQ ID NO: 64623 - protein, 13 aa, Homo Sapiens
GVTSAPDTRPAPG

SEQ ID NO: 64624 - protein, 13 aa, Homo Sapiens
VTSAPDTRPAPGS

SEQ ID NO: 64625 - protein, 13 aa, Homo Sapiens
TSAPDTRPAPGST

SEQ ID NO: 64626 - protein, 13 aa, Homo Sapiens
SAPDTRPAPGSTA

SEQ ID NO: 64627 - protein, 13 aa, Homo Sapiens
APDTRPAPGSTAP

SEQ ID NO: 64628 - protein, 13 aa, Homo Sapiens
PDTRPAPGSTAPP

SEQ ID NO: 64629 - protein, 13 aa, Homo Sapiens
DTRPAPGSTAPPA

SEQ ID NO: 64630 - protein, 13 aa, Homo Sapiens
TRPAPGSTAPPAH

SEQ ID NO: 64631 - protein, 13 aa, Homo Sapiens
RPAPGSTAPPAHG

SEQ ID NO: 64632 - protein, 13 aa, Homo Sapiens
PAPGSTAPPAHGV

SEQ ID NO: 64633 - protein, 13 aa, Homo Sapiens
APGSTAPPAHGVT

SEQ ID NO: 64634 - protein, 13 aa, Homo Sapiens
PGSTAPPAHGVTS

SEQ ID NO: 64635 - protein, 13 aa, Homo Sapiens
GSTAPPAHGVTSA

SEQ ID NO: 64636 - protein, 13 aa, Homo Sapiens
STAPPAHGVTSAP

SEQ ID NO: 64637 - protein, 13 aa, Homo Sapiens
TAPPAHGVTSAPD

SEQ ID NO: 64638 - protein, 13 aa, Homo Sapiens
APPAHGVTSAPDT

SEQ ID NO: 64639 - protein, 13 aa, Homo Sapiens
PPAHGVTSAPDTR

SEQ ID NO: 64640 - protein, 13 aa, Homo Sapiens
PAHGVTSAPDTRP

SEQ ID NO: 64641 - protein, 13 aa, Homo Sapiens
AHGVTSAPDTRPA

SEQ ID NO: 64642 - protein, 13 aa, Homo Sapiens
HGVTSAPDTRPAP

SEQ ID NO: 64643 - protein, 13 aa, Homo Sapiens
GVTSAPDTRPAPG

SEQ ID NO: 64644 - protein, 13 aa, Homo Sapiens
VTSAPDTRPAPGS

SEQ ID NO: 64645 - protein, 13 aa, Homo Sapiens
TSAPDTRPAPGST

SEQ ID NO: 64646 - protein, 13 aa, Homo Sapiens
SAPDTRPAPGSTA

SEQ ID NO: 64647 - protein, 13 aa, Homo Sapiens
APDTRPAPGSTAP

SEQ ID NO: 64648 - protein, 13 aa, Homo Sapiens
PDTRPAPGSTAPP

SEQ ID NO: 64649 - protein, 13 aa, Homo Sapiens
DTRPAPGSTAPPA

SEQ ID NO: 64650 - protein, 13 aa, Homo Sapiens
TRPAPGSTAPPAH

SEQ ID NO: 64651 - protein, 13 aa, Homo Sapiens
RPAPGSTAPPAHG

SEQ ID NO: 64652 - protein, 13 aa, Homo Sapiens
PAPGSTAPPAHGV

SEQ ID NO: 64653 - protein, 13 aa, Homo Sapiens
APGSTAPPAHGVT

SEQ ID NO: 64654 - protein, 13 aa, Homo Sapiens
PGSTAPPAHGVTS

SEQ ID NO: 64655 - protein, 13 aa, Homo Sapiens
GSTAPPAHGVTSA

SEQ ID NO: 64656 - protein, 13 aa, Homo Sapiens
STAPPAHGVTSAP

SEQ ID NO: 64657 - protein, 13 aa, Homo Sapiens
TAPPAHGVTSAPD

SEQ ID NO: 64658 - protein, 13 aa, Homo Sapiens
APPAHGVTSAPDT

SEQ ID NO: 64659 - protein, 13 aa, Homo Sapiens
PPAHGVTSAPDTR

SEQ ID NO: 64660 - protein, 13 aa, Homo Sapiens
PAHGVTSAPDTRP

SEQ ID NO: 64661 - protein, 13 aa, Homo Sapiens
AHGVTSAPDTRPA

SEQ ID NO: 64662 - protein, 13 aa, Homo Sapiens
HGVTSAPDTRPAP

SEQ ID NO: 64663 - protein, 13 aa, Homo Sapiens
GVTSAPDTRPAPG

SEQ ID NO: 64664 - protein, 13 aa, Homo Sapiens
VTSAPDTRPAPGS

SEQ ID NO: 64665 - protein, 13 aa, Homo Sapiens
TSAPDTRPAPGST

SEQ ID NO: 64666 - protein, 13 aa, Homo Sapiens
SAPDTRPAPGSTA

SEQ ID NO: 64667 - protein, 13 aa, Homo Sapiens
APDTRPAPGSTAP

SEQ ID NO: 64668 - protein, 13 aa, Homo Sapiens
PDTRPAPGSTAPP

SEQ ID NO: 64669 - protein, 13 aa, Homo Sapiens
DTRPAPGSTAPPA

SEQ ID NO: 64670 - protein, 13 aa, Homo Sapiens
TRPAPGSTAPPAH

SEQ ID NO: 64671 - protein, 13 aa, Homo Sapiens
RPAPGSTAPPAHG

SEQ ID NO: 64672 - protein, 13 aa, Homo Sapiens
PAPGSTAPPAHGV

SEQ ID NO: 64673 - protein, 13 aa, Homo Sapiens
APGSTAPPAHGVT

SEQ ID NO: 64674 - protein, 13 aa, Homo Sapiens
PGSTAPPAHGVTS

SEQ ID NO: 64675 - protein, 13 aa, Homo Sapiens
GSTAPPAHGVTSA

SEQ ID NO: 64676 - protein, 13 aa, Homo Sapiens
STAPPAHGVTSAP

SEQ ID NO: 64677 - protein, 13 aa, Homo Sapiens
TAPPAHGVTSAPD

SEQ ID NO: 64678 - protein, 13 aa, Homo Sapiens
APPAHGVTSAPDT

SEQ ID NO: 64679 - protein, 13 aa, Homo Sapiens
PPAHGVTSAPDTR

SEQ ID NO: 64680 - protein, 13 aa, Homo Sapiens
PAHGVTSAPDTRP

SEQ ID NO: 64681 - protein, 13 aa, Homo Sapiens
AHGVTSAPDTRPA

SEQ ID NO: 64682 - protein, 13 aa, Homo Sapiens
HGVTSAPDTRPAP

SEQ ID NO: 64683 - protein, 13 aa, Homo Sapiens
GVTSAPDTRPAPG

SEQ ID NO: 64684 - protein, 13 aa, Homo Sapiens
VTSAPDTRPAPGS

SEQ ID NO: 64685 - protein, 13 aa, Homo Sapiens
TSAPDTRPAPGST

SEQ ID NO: 64686 - protein, 13 aa, Homo Sapiens
SAPDTRPAPGSTA

SEQ ID NO: 64687 - protein, 13 aa, Homo Sapiens
APDTRPAPGSTAP

SEQ ID NO: 64688 - protein, 13 aa, Homo Sapiens
PDTRPAPGSTAPP

SEQ ID NO: 64689 - protein, 13 aa, Homo Sapiens
DTRPAPGSTAPPA

SEQ ID NO: 64690 - protein, 13 aa, Homo Sapiens
TRPAPGSTAPPAH

SEQ ID NO: 64691 - protein, 13 aa, Homo Sapiens
RPAPGSTAPPAHG

SEQ ID NO: 64692 - protein, 13 aa, Homo Sapiens
PAPGSTAPPAHGV

SEQ ID NO: 64693 - protein, 13 aa, Homo Sapiens
APGSTAPPAHGVT

SEQ ID NO: 64694 - protein, 13 aa, Homo Sapiens
PGSTAPPAHGVTS

SEQ ID NO: 64695 - protein, 13 aa, Homo Sapiens
GSTAPPAHGVTSA

SEQ ID NO: 64696 - protein, 13 aa, Homo Sapiens
STAPPAHGVTSAP

SEQ ID NO: 64697 - protein, 13 aa, Homo Sapiens
TAPPAHGVTSAPD

SEQ ID NO: 64698 - protein, 13 aa, Homo Sapiens
APPAHGVTSAPDT

SEQ ID NO: 64699 - protein, 13 aa, Homo Sapiens
PPAHGVTSAPDTR

SEQ ID NO: 64700 - protein, 13 aa, Homo Sapiens
PAHGVTSAPDTRP

SEQ ID NO: 64701 - protein, 13 aa, Homo Sapiens
AHGVTSAPDTRPA

SEQ ID NO: 64702 - protein, 13 aa, Homo Sapiens
HGVTSAPDTRPAP

SEQ ID NO: 64703 - protein, 13 aa, Homo Sapiens
GVTSAPDTRPAPG

SEQ ID NO: 64704 - protein, 13 aa, Homo Sapiens
VTSAPDTRPAPGS

SEQ ID NO: 64705 - protein, 13 aa, Homo Sapiens
TSAPDTRPAPGST

SEQ ID NO: 64706 - protein, 13 aa, Homo Sapiens
SAPDTRPAPGSTA

SEQ ID NO: 64707 - protein, 13 aa, Homo Sapiens
APDTRPAPGSTAP

SEQ ID NO: 64708 - protein, 13 aa, Homo Sapiens
PDTRPAPGSTAPP

SEQ ID NO: 64709 - protein, 13 aa, Homo Sapiens
DTRPAPGSTAPPA

SEQ ID NO: 64710 - protein, 13 aa, Homo Sapiens
TRPAPGSTAPPAH

SEQ ID NO: 64711 - protein, 13 aa, Homo Sapiens
RPAPGSTAPPAHG

SEQ ID NO: 64712 - protein, 13 aa, Homo Sapiens
PAPGSTAPPAHGV

SEQ ID NO: 64713 - protein, 13 aa, Homo Sapiens
APGSTAPPAHGVT

SEQ ID NO: 64714 - protein, 13 aa, Homo Sapiens
PGSTAPPAHGVTS

SEQ ID NO: 64715 - protein, 13 aa, Homo Sapiens
GSTAPPAHGVTSA

SEQ ID NO: 64716 - protein, 13 aa, Homo Sapiens
STAPPAHGVTSAP

SEQ ID NO: 64717 - protein, 13 aa, Homo Sapiens
TAPPAHGVTSAPD

SEQ ID NO: 64718 - protein, 13 aa, Homo Sapiens
APPAHGVTSAPDT

SEQ ID NO: 64719 - protein, 13 aa, Homo Sapiens
PPAHGVTSAPDTR

SEQ ID NO: 64720 - protein, 13 aa, Homo Sapiens
PAHGVTSAPDTRP

SEQ ID NO: 64721 - protein, 13 aa, Homo Sapiens
AHGVTSAPDTRPA

SEQ ID NO: 64722 - protein, 13 aa, Homo Sapiens
HGVTSAPDTRPAP

SEQ ID NO: 64723 - protein, 13 aa, Homo Sapiens
GVTSAPDTRPAPG

SEQ ID NO: 64724 - protein, 13 aa, Homo Sapiens
VTSAPDTRPAPGS

SEQ ID NO: 64725 - protein, 13 aa, Homo Sapiens
TSAPDTRPAPGST

SEQ ID NO: 64726 - protein, 13 aa, Homo Sapiens
SAPDTRPAPGSTA

SEQ ID NO: 64727 - protein, 13 aa, Homo Sapiens
APDTRPAPGSTAP

SEQ ID NO: 64728 - protein, 13 aa, Homo Sapiens
PDTRPAPGSTAPP

SEQ ID NO: 64729 - protein, 13 aa, Homo Sapiens
DTRPAPGSTAPPA

SEQ ID NO: 64730 - protein, 13 aa, Homo Sapiens
TRPAPGSTAPPAH

SEQ ID NO: 64731 - protein, 13 aa, Homo Sapiens
RPAPGSTAPPAHG

SEQ ID NO: 64732 - protein, 13 aa, Homo Sapiens
PAPGSTAPPAHGV

SEQ ID NO: 64733 - protein, 13 aa, Homo Sapiens
APGSTAPPAHGVT

SEQ ID NO: 64734 - protein, 13 aa, Homo Sapiens
PGSTAPPAHGVTS

SEQ ID NO: 64735 - protein, 13 aa, Homo Sapiens
GSTAPPAHGVTSA

SEQ ID NO: 64736 - protein, 13 aa, Homo Sapiens
STAPPAHGVTSAP

SEQ ID NO: 64737 - protein, 13 aa, Homo Sapiens
TAPPAHGVTSAPD

SEQ ID NO: 64738 - protein, 13 aa, Homo Sapiens
APPAHGVTSAPDT

SEQ ID NO: 64739 - protein, 13 aa, Homo Sapiens
PPAHGVTSAPDTR

SEQ ID NO: 64740 - protein, 13 aa, Homo Sapiens
PAHGVTSAPDTRP

SEQ ID NO: 64741 - protein, 13 aa, Homo Sapiens
AHGVTSAPDTRPA

SEQ ID NO: 64742 - protein, 13 aa, Homo Sapiens
HGVTSAPDTRPAP

SEQ ID NO: 64743 - protein, 13 aa, Homo Sapiens
GVTSAPDTRPAPG

SEQ ID NO: 64744 - protein, 13 aa, Homo Sapiens
VTSAPDTRPAPGS

SEQ ID NO: 64745 - protein, 13 aa, Homo Sapiens
TSAPDTRPAPGST

SEQ ID NO: 64746 - protein, 13 aa, Homo Sapiens
SAPDTRPAPGSTA

SEQ ID NO: 64747 - protein, 13 aa, Homo Sapiens
APDTRPAPGSTAP

SEQ ID NO: 64748 - protein, 13 aa, Homo Sapiens
PDTRPAPGSTAPP

SEQ ID NO: 64749 - protein, 13 aa, Homo Sapiens
DTRPAPGSTAPPA

SEQ ID NO: 64750 - protein, 13 aa, Homo Sapiens
TRPAPGSTAPPAH

SEQ ID NO: 64751 - protein, 13 aa, Homo Sapiens
RPAPGSTAPPAHG

SEQ ID NO: 64752 - protein, 13 aa, Homo Sapiens
PAPGSTAPPAHGV

SEQ ID NO: 64753 - protein, 13 aa, Homo Sapiens
APGSTAPPAHGVT

SEQ ID NO: 64754 - protein, 13 aa, Homo Sapiens
PGSTAPPAHGVTS

SEQ ID NO: 64755 - protein, 13 aa, Homo Sapiens
GSTAPPAHGVTSA

SEQ ID NO: 64756 - protein, 13 aa, Homo Sapiens
STAPPAHGVTSAP

SEQ ID NO: 64757 - protein, 13 aa, Homo Sapiens
TAPPAHGVTSAPD

SEQ ID NO: 64758 - protein, 13 aa, Homo Sapiens
APPAHGVTSAPDT

SEQ ID NO: 64759 - protein, 13 aa, Homo Sapiens
PPAHGVTSAPDTR

SEQ ID NO: 64760 - protein, 13 aa, Homo Sapiens
PAHGVTSAPDTRP

SEQ ID NO: 64761 - protein, 13 aa, Homo Sapiens
AHGVTSAPDTRPA

SEQ ID NO: 64762 - protein, 13 aa, Homo Sapiens
HGVTSAPDTRPAP

SEQ ID NO: 64763 - protein, 13 aa, Homo Sapiens
GVTSAPDTRPAPG

SEQ ID NO: 64764 - protein, 13 aa, Homo Sapiens
VTSAPDTRPAPGS

SEQ ID NO: 64765 - protein, 13 aa, Homo Sapiens
TSAPDTRPAPGST

SEQ ID NO: 64766 - protein, 13 aa, Homo Sapiens
SAPDTRPAPGSTA

SEQ ID NO: 64767 - protein, 13 aa, Homo Sapiens
APDTRPAPGSTAP

SEQ ID NO: 64768 - protein, 13 aa, Homo Sapiens
PDTRPAPGSTAPP

SEQ ID NO: 64769 - protein, 13 aa, Homo Sapiens
DTRPAPGSTAPPA

SEQ ID NO: 64770 - protein, 13 aa, Homo Sapiens
TRPAPGSTAPPAH

SEQ ID NO: 64771 - protein, 13 aa, Homo Sapiens
RPAPGSTAPPAHG

SEQ ID NO: 64772 - protein, 13 aa, Homo Sapiens
PAPGSTAPPAHGV

SEQ ID NO: 64773 - protein, 13 aa, Homo Sapiens
APGSTAPPAHGVT

SEQ ID NO: 64774 - protein, 13 aa, Homo Sapiens
PGSTAPPAHGVTS

SEQ ID NO: 64775 - protein, 13 aa, Homo Sapiens
GSTAPPAHGVTSA

SEQ ID NO: 64776 - protein, 13 aa, Homo Sapiens
STAPPAHGVTSAP

SEQ ID NO: 64777 - protein, 13 aa, Homo Sapiens
TAPPAHGVTSAPD

SEQ ID NO: 64778 - protein, 13 aa, Homo Sapiens
APPAHGVTSAPDT

SEQ ID NO: 64779 - protein, 13 aa, Homo Sapiens
PPAHGVTSAPDTR

SEQ ID NO: 64780 - protein, 13 aa, Homo Sapiens
PAHGVTSAPDTRP

SEQ ID NO: 64781 - protein, 13 aa, Homo Sapiens
AHGVTSAPDTRPA

SEQ ID NO: 64782 - protein, 13 aa, Homo Sapiens
HGVTSAPDTRPAP

SEQ ID NO: 64783 - protein, 13 aa, Homo Sapiens
GVTSAPDTRPAPG

SEQ ID NO: 64784 - protein, 13 aa, Homo Sapiens
VTSAPDTRPAPGS

SEQ ID NO: 64785 - protein, 13 aa, Homo Sapiens
TSAPDTRPAPGST

SEQ ID NO: 64786 - protein, 13 aa, Homo Sapiens
SAPDTRPAPGSTA

SEQ ID NO: 64787 - protein, 13 aa, Homo Sapiens
APDTRPAPGSTAP

SEQ ID NO: 64788 - protein, 13 aa, Homo Sapiens
PDTRPAPGSTAPP

SEQ ID NO: 64789 - protein, 13 aa, Homo Sapiens
DTRPAPGSTAPPA

SEQ ID NO: 64790 - protein, 13 aa, Homo Sapiens
TRPAPGSTAPPAH

SEQ ID NO: 64791 - protein, 13 aa, Homo Sapiens
RPAPGSTAPPAHG

SEQ ID NO: 64792 - protein, 13 aa, Homo Sapiens
PAPGSTAPPAHGV

SEQ ID NO: 64793 - protein, 13 aa, Homo Sapiens
APGSTAPPAHGVT

SEQ ID NO: 64794 - protein, 13 aa, Homo Sapiens
PGSTAPPAHGVTS

SEQ ID NO: 64795 - protein, 13 aa, Homo Sapiens
GSTAPPAHGVTSA

SEQ ID NO: 64796 - protein, 13 aa, Homo Sapiens
STAPPAHGVTSAP

SEQ ID NO: 64797 - protein, 13 aa, Homo Sapiens
TAPPAHGVTSAPD

SEQ ID NO: 64798 - protein, 13 aa, Homo Sapiens
APPAHGVTSAPDT

SEQ ID NO: 64799 - protein, 13 aa, Homo Sapiens
PPAHGVTSAPDTR

SEQ ID NO: 64800 - protein, 13 aa, Homo Sapiens
PAHGVTSAPDTRP

SEQ ID NO: 64801 - protein, 13 aa, Homo Sapiens
AHGVTSAPDTRPA

SEQ ID NO: 64802 - protein, 13 aa, Homo Sapiens
HGVTSAPDTRPAP

SEQ ID NO: 64803 - protein, 13 aa, Homo Sapiens
GVTSAPDTRPAPG

SEQ ID NO: 64804 - protein, 13 aa, Homo Sapiens
VTSAPDTRPAPGS

SEQ ID NO: 64805 - protein, 13 aa, Homo Sapiens
TSAPDTRPAPGST

SEQ ID NO: 64806 - protein, 13 aa, Homo Sapiens
SAPDTRPAPGSTA

SEQ ID NO: 64807 - protein, 13 aa, Homo Sapiens
APDTRPAPGSTAP

SEQ ID NO: 64808 - protein, 13 aa, Homo Sapiens
PDTRPAPGSTAPP

SEQ ID NO: 64809 - protein, 13 aa, Homo Sapiens
DTRPAPGSTAPPA

SEQ ID NO: 64810 - protein, 13 aa, Homo Sapiens
TRPAPGSTAPPAH

SEQ ID NO: 64811 - protein, 13 aa, Homo Sapiens
RPAPGSTAPPAHG

SEQ ID NO: 64812 - protein, 13 aa, Homo Sapiens
PAPGSTAPPAHGV

SEQ ID NO: 64813 - protein, 13 aa, Homo Sapiens
APGSTAPPAHGVT

SEQ ID NO: 64814 - protein, 13 aa, Homo Sapiens
PGSTAPPAHGVTS

SEQ ID NO: 64815 - protein, 13 aa, Homo Sapiens
GSTAPPAHGVTSA

SEQ ID NO: 64816 - protein, 13 aa, Homo Sapiens
STAPPAHGVTSAP

SEQ ID NO: 64817 - protein, 13 aa, Homo Sapiens
TAPPAHGVTSAPD

SEQ ID NO: 64818 - protein, 13 aa, Homo Sapiens
APPAHGVTSAPDT

SEQ ID NO: 64819 - protein, 13 aa, Homo Sapiens
PPAHGVTSAPDTR

SEQ ID NO: 64820 - protein, 13 aa, Homo Sapiens
PAHGVTSAPDTRP

SEQ ID NO: 64821 - protein, 13 aa, Homo Sapiens
AHGVTSAPDTRPA

SEQ ID NO: 64822 - protein, 13 aa, Homo Sapiens
HGVTSAPDTRPAP

SEQ ID NO: 64823 - protein, 13 aa, Homo Sapiens
GVTSAPDTRPAPG

SEQ ID NO: 64824 - protein, 13 aa, Homo Sapiens
VTSAPDTRPAPGS

SEQ ID NO: 64825 - protein, 13 aa, Homo Sapiens
TSAPDTRPAPGST

SEQ ID NO: 64826 - protein, 13 aa, Homo Sapiens
SAPDTRPAPGSTA

SEQ ID NO: 64827 - protein, 13 aa, Homo Sapiens
APDTRPAPGSTAP

SEQ ID NO: 64828 - protein, 13 aa, Homo Sapiens
PDTRPAPGSTAPP

SEQ ID NO: 64829 - protein, 13 aa, Homo Sapiens
DTRPAPGSTAPPA

SEQ ID NO: 64830 - protein, 13 aa, Homo Sapiens
TRPAPGSTAPPAH

SEQ ID NO: 64831 - protein, 13 aa, Homo Sapiens
RPAPGSTAPPAHG

SEQ ID NO: 64832 - protein, 13 aa, Homo Sapiens
PAPGSTAPPAHGV

SEQ ID NO: 64833 - protein, 13 aa, Homo Sapiens
APGSTAPPAHGVT

SEQ ID NO: 64834 - protein, 13 aa, Homo Sapiens
PGSTAPPAHGVTS

SEQ ID NO: 64835 - protein, 13 aa, Homo Sapiens
GSTAPPAHGVTSA

SEQ ID NO: 64836 - protein, 13 aa, Homo Sapiens
STAPPAHGVTSAP

SEQ ID NO: 64837 - protein, 13 aa, Homo Sapiens
TAPPAHGVTSAPD

SEQ ID NO: 64838 - protein, 13 aa, Homo Sapiens
APPAHGVTSAPDT

SEQ ID NO: 64839 - protein, 13 aa, Homo Sapiens
PPAHGVTSAPDTR

SEQ ID NO: 64840 - protein, 13 aa, Homo Sapiens
PAHGVTSAPDTRP

SEQ ID NO: 64841 - protein, 13 aa, Homo Sapiens
AHGVTSAPDTRPA

SEQ ID NO: 64842 - protein, 13 aa, Homo Sapiens
HGVTSAPDTRPAP

SEQ ID NO: 64843 - protein, 13 aa, Homo Sapiens
GVTSAPDTRPAPG

SEQ ID NO: 64844 - protein, 13 aa, Homo Sapiens
VTSAPDTRPAPGS

SEQ ID NO: 64845 - protein, 13 aa, Homo Sapiens
TSAPDTRPAPGST

SEQ ID NO: 64846 - protein, 13 aa, Homo Sapiens
SAPDTRPAPGSTA

SEQ ID NO: 64847 - protein, 13 aa, Homo Sapiens
APDTRPAPGSTAP

SEQ ID NO: 64848 - protein, 13 aa, Homo Sapiens
PDTRPAPGSTAPP

SEQ ID NO: 64849 - protein, 13 aa, Homo Sapiens
DTRPAPGSTAPPA

SEQ ID NO: 64850 - protein, 13 aa, Homo Sapiens
TRPAPGSTAPPAH

SEQ ID NO: 64851 - protein, 13 aa, Homo Sapiens
RPAPGSTAPPAHG

SEQ ID NO: 64852 - protein, 13 aa, Homo Sapiens
PAPGSTAPPAHGV

SEQ ID NO: 64853 - protein, 13 aa, Homo Sapiens
APGSTAPPAHGVT

SEQ ID NO: 64854 - protein, 13 aa, Homo Sapiens
PGSTAPPAHGVTS

SEQ ID NO: 64855 - protein, 13 aa, Homo Sapiens
GSTAPPAHGVTSA

SEQ ID NO: 64856 - protein, 13 aa, Homo Sapiens
STAPPAHGVTSAP

SEQ ID NO: 64857 - protein, 13 aa, Homo Sapiens
TAPPAHGVTSAPD

SEQ ID NO: 64858 - protein, 13 aa, Homo Sapiens
APPAHGVTSAPDT

SEQ ID NO: 64859 - protein, 13 aa, Homo Sapiens
PPAHGVTSAPDTR

SEQ ID NO: 64860 - protein, 13 aa, Homo Sapiens
PAHGVTSAPDTRP

SEQ ID NO: 64861 - protein, 13 aa, Homo Sapiens
AHGVTSAPDTRPA

SEQ ID NO: 64862 - protein, 13 aa, Homo Sapiens
HGVTSAPDTRPAP

SEQ ID NO: 64863 - protein, 13 aa, Homo Sapiens
GVTSAPDTRPAPG

SEQ ID NO: 64864 - protein, 13 aa, Homo Sapiens
VTSAPDTRPAPGS

SEQ ID NO: 64865 - protein, 13 aa, Homo Sapiens
TSAPDTRPAPGST

SEQ ID NO: 64866 - protein, 13 aa, Homo Sapiens
SAPDTRPAPGSTA

SEQ ID NO: 64867 - protein, 13 aa, Homo Sapiens
APDTRPAPGSTAP

SEQ ID NO: 64868 - protein, 13 aa, Homo Sapiens
PDTRPAPGSTAPP

SEQ ID NO: 64869 - protein, 13 aa, Homo Sapiens
DTRPAPGSTAPPA

SEQ ID NO: 64870 - protein, 13 aa, Homo Sapiens
TRPAPGSTAPPAH

SEQ ID NO: 64871 - protein, 13 aa, Homo Sapiens
RPAPGSTAPPAHG

SEQ ID NO: 64872 - protein, 13 aa, Homo Sapiens
PAPGSTAPPAHGV

SEQ ID NO: 64873 - protein, 13 aa, Homo Sapiens
APGSTAPPAHGVT

SEQ ID NO: 64874 - protein, 13 aa, Homo Sapiens
PGSTAPPAHGVTS

SEQ ID NO: 64875 - protein, 13 aa, Homo Sapiens
GSTAPPAHGVTSA

SEQ ID NO: 64876 - protein, 13 aa, Homo Sapiens
STAPPAHGVTSAP

SEQ ID NO: 64877 - protein, 13 aa, Homo Sapiens
TAPPAHGVTSAPD

SEQ ID NO: 64878 - protein, 13 aa, Homo Sapiens
APPAHGVTSAPDT

SEQ ID NO: 64879 - protein, 13 aa, Homo Sapiens
PPAHGVTSAPDTR

SEQ ID NO: 64880 - protein, 13 aa, Homo Sapiens
PAHGVTSAPDTRP

SEQ ID NO: 64881 - protein, 13 aa, Homo Sapiens
AHGVTSAPDTRPA

SEQ ID NO: 64882 - protein, 13 aa, Homo Sapiens
HGVTSAPDTRPAP

SEQ ID NO: 64883 - protein, 13 aa, Homo Sapiens
GVTSAPDTRPAPG

SEQ ID NO: 64884 - protein, 13 aa, Homo Sapiens
VTSAPDTRPAPGS

SEQ ID NO: 64885 - protein, 13 aa, Homo Sapiens
TSAPDTRPAPGST

SEQ ID NO: 64886 - protein, 13 aa, Homo Sapiens
SAPDTRPAPGSTA

SEQ ID NO: 64887 - protein, 13 aa, Homo Sapiens
APDTRPAPGSTAP

SEQ ID NO: 64888 - protein, 13 aa, Homo Sapiens
PDTRPAPGSTAPP

SEQ ID NO: 64889 - protein, 13 aa, Homo Sapiens
DTRPAPGSTAPPA

SEQ ID NO: 64890 - protein, 13 aa, Homo Sapiens
TRPAPGSTAPPAH

SEQ ID NO: 64891 - protein, 13 aa, Homo Sapiens
RPAPGSTAPPAHG

SEQ ID NO: 64892 - protein, 13 aa, Homo Sapiens
PAPGSTAPPAHGV

SEQ ID NO: 64893 - protein, 13 aa, Homo Sapiens
APGSTAPPAHGVT

SEQ ID NO: 64894 - protein, 13 aa, Homo Sapiens
PGSTAPPAHGVTS

SEQ ID NO: 64895 - protein, 13 aa, Homo Sapiens
GSTAPPAHGVTSA

SEQ ID NO: 64896 - protein, 13 aa, Homo Sapiens
STAPPAHGVTSAP

SEQ ID NO: 64897 - protein, 13 aa, Homo Sapiens
TAPPAHGVTSAPD

SEQ ID NO: 64898 - protein, 13 aa, Homo Sapiens
APPAHGVTSAPDT

SEQ ID NO: 64899 - protein, 13 aa, Homo Sapiens
PPAHGVTSAPDTR

SEQ ID NO: 64900 - protein, 13 aa, Homo Sapiens
PAHGVTSAPDTRP

SEQ ID NO: 64901 - protein, 13 aa, Homo Sapiens
AHGVTSAPDTRPA

SEQ ID NO: 64902 - protein, 13 aa, Homo Sapiens
HGVTSAPDTRPAP

SEQ ID NO: 64903 - protein, 13 aa, Homo Sapiens
GVTSAPDTRPAPG

SEQ ID NO: 64904 - protein, 13 aa, Homo Sapiens
VTSAPDTRPAPGS

SEQ ID NO: 64905 - protein, 13 aa, Homo Sapiens
TSAPDTRPAPGST

SEQ ID NO: 64906 - protein, 13 aa, Homo Sapiens
SAPDTRPAPGSTA

SEQ ID NO: 64907 - protein, 13 aa, Homo Sapiens
APDTRPAPGSTAP

SEQ ID NO: 64908 - protein, 13 aa, Homo Sapiens
PDTRPAPGSTAPP

SEQ ID NO: 64909 - protein, 13 aa, Homo Sapiens
DTRPAPGSTAPPA

SEQ ID NO: 64910 - protein, 13 aa, Homo Sapiens
TRPAPGSTAPPAH

SEQ ID NO: 64911 - protein, 13 aa, Homo Sapiens
RPAPGSTAPPAHG

SEQ ID NO: 64912 - protein, 13 aa, Homo Sapiens
PAPGSTAPPAHGV

SEQ ID NO: 64913 - protein, 13 aa, Homo Sapiens
APGSTAPPAHGVT

SEQ ID NO: 64914 - protein, 13 aa, Homo Sapiens
PGSTAPPAHGVTS

SEQ ID NO: 64915 - protein, 13 aa, Homo Sapiens
GSTAPPAHGVTSA

SEQ ID NO: 64916 - protein, 13 aa, Homo Sapiens
STAPPAHGVTSAP

SEQ ID NO: 64917 - protein, 13 aa, Homo Sapiens
TAPPAHGVTSAPD

SEQ ID NO: 64918 - protein, 13 aa, Homo Sapiens
APPAHGVTSAPDT

SEQ ID NO: 64919 - protein, 13 aa, Homo Sapiens
PPAHGVTSAPDTR

SEQ ID NO: 64920 - protein, 13 aa, Homo Sapiens
PAHGVTSAPDTRP

SEQ ID NO: 64921 - protein, 13 aa, Homo Sapiens
AHGVTSAPDTRPA

SEQ ID NO: 64922 - protein, 13 aa, Homo Sapiens
HGVTSAPDTRPAP

SEQ ID NO: 64923 - protein, 13 aa, Homo Sapiens
GVTSAPDTRPAPG

SEQ ID NO: 64924 - protein, 13 aa, Homo Sapiens
VTSAPDTRPAPGS

SEQ ID NO: 64925 - protein, 13 aa, Homo Sapiens
TSAPDTRPAPGST

SEQ ID NO: 64926 - protein, 13 aa, Homo Sapiens
SAPDTRPAPGSTA

SEQ ID NO: 64927 - protein, 13 aa, Homo Sapiens
APDTRPAPGSTAP

SEQ ID NO: 64928 - protein, 13 aa, Homo Sapiens
PDTRPAPGSTAPP

SEQ ID NO: 64929 - protein, 13 aa, Homo Sapiens
DTRPAPGSTAPPA

SEQ ID NO: 64930 - protein, 13 aa, Homo Sapiens
TRPAPGSTAPPAH

SEQ ID NO: 64931 - protein, 13 aa, Homo Sapiens
RPAPGSTAPPAHG

SEQ ID NO: 64932 - protein, 13 aa, Homo Sapiens
PAPGSTAPPAHGV

SEQ ID NO: 64933 - protein, 13 aa, Homo Sapiens
APGSTAPPAHGVT

SEQ ID NO: 64934 - protein, 13 aa, Homo Sapiens
PGSTAPPAHGVTS

SEQ ID NO: 64935 - protein, 13 aa, Homo Sapiens
GSTAPPAHGVTSA

SEQ ID NO: 64936 - protein, 13 aa, Homo Sapiens
STAPPAHGVTSAP

SEQ ID NO: 64937 - protein, 13 aa, Homo Sapiens
TAPPAHGVTSAPD

SEQ ID NO: 64938 - protein, 13 aa, Homo Sapiens
APPAHGVTSAPDT

SEQ ID NO: 64939 - protein, 13 aa, Homo Sapiens
PPAHGVTSAPDTR

SEQ ID NO: 64940 - protein, 13 aa, Homo Sapiens
PAHGVTSAPDTRP

SEQ ID NO: 64941 - protein, 13 aa, Homo Sapiens
AHGVTSAPDTRPA

SEQ ID NO: 64942 - protein, 13 aa, Homo Sapiens
HGVTSAPDTRPAP

SEQ ID NO: 64943 - protein, 13 aa, Homo Sapiens
GVTSAPDTRPAPG

SEQ ID NO: 64944 - protein, 13 aa, Homo Sapiens
VTSAPDTRPAPGS

SEQ ID NO: 64945 - protein, 13 aa, Homo Sapiens
TSAPDTRPAPGST

SEQ ID NO: 64946 - protein, 13 aa, Homo Sapiens
SAPDTRPAPGSTA

SEQ ID NO: 64947 - protein, 13 aa, Homo Sapiens
APDTRPAPGSTAP

SEQ ID NO: 64948 - protein, 13 aa, Homo Sapiens
PDTRPAPGSTAPP

SEQ ID NO: 64949 - protein, 13 aa, Homo Sapiens
DTRPAPGSTAPPA

SEQ ID NO: 64950 - protein, 13 aa, Homo Sapiens
TRPAPGSTAPPAH

SEQ ID NO: 64951 - protein, 13 aa, Homo Sapiens
RPAPGSTAPPAHG

SEQ ID NO: 64952 - protein, 13 aa, Homo Sapiens
PAPGSTAPPAHGV

SEQ ID NO: 64953 - protein, 13 aa, Homo Sapiens
APGSTAPPAHGVT

SEQ ID NO: 64954 - protein, 13 aa, Homo Sapiens
PGSTAPPAHGVTS

SEQ ID NO: 64955 - protein, 13 aa, Homo Sapiens
GSTAPPAHGVTSA

SEQ ID NO: 64956 - protein, 13 aa, Homo Sapiens
STAPPAHGVTSAP

SEQ ID NO: 64957 - protein, 13 aa, Homo Sapiens
TAPPAHGVTSAPD

SEQ ID NO: 64958 - protein, 13 aa, Homo Sapiens
APPAHGVTSAPDT

SEQ ID NO: 64959 - protein, 13 aa, Homo Sapiens
PPAHGVTSAPDTR

SEQ ID NO: 64960 - protein, 13 aa, Homo Sapiens
PAHGVTSAPDTRP

SEQ ID NO: 64961 - protein, 13 aa, Homo Sapiens
AHGVTSAPDTRPA

SEQ ID NO: 64962 - protein, 13 aa, Homo Sapiens
HGVTSAPDTRPAP

SEQ ID NO: 64963 - protein, 13 aa, Homo Sapiens
GVTSAPDTRPAPG

SEQ ID NO: 64964 - protein, 13 aa, Homo Sapiens
VTSAPDTRPAPGS

SEQ ID NO: 64965 - protein, 13 aa, Homo Sapiens
TSAPDTRPAPGST

SEQ ID NO: 64966 - protein, 13 aa, Homo Sapiens
SAPDTRPAPGSTA

SEQ ID NO: 64967 - protein, 13 aa, Homo Sapiens
APDTRPAPGSTAP

SEQ ID NO: 64968 - protein, 13 aa, Homo Sapiens
PDTRPAPGSTAPP

SEQ ID NO: 64969 - protein, 13 aa, Homo Sapiens
DTRPAPGSTAPPA

SEQ ID NO: 64970 - protein, 13 aa, Homo Sapiens
TRPAPGSTAPPAH

SEQ ID NO: 64971 - protein, 13 aa, Homo Sapiens
RPAPGSTAPPAHG

SEQ ID NO: 64972 - protein, 13 aa, Homo Sapiens
PAPGSTAPPAHGV

SEQ ID NO: 64973 - protein, 13 aa, Homo Sapiens
APGSTAPPAHGVT

SEQ ID NO: 64974 - protein, 13 aa, Homo Sapiens
PGSTAPPAHGVTS

SEQ ID NO: 64975 - protein, 13 aa, Homo Sapiens
GSTAPPAHGVTSA

SEQ ID NO: 64976 - protein, 13 aa, Homo Sapiens
STAPPAHGVTSAP

SEQ ID NO: 64977 - protein, 13 aa, Homo Sapiens
TAPPAHGVTSAPD

SEQ ID NO: 64978 - protein, 13 aa, Homo Sapiens
APPAHGVTSAPDT

SEQ ID NO: 64979 - protein, 13 aa, Homo Sapiens
PPAHGVTSAPDTR

SEQ ID NO: 64980 - protein, 13 aa, Homo Sapiens
PAHGVTSAPDTRP

SEQ ID NO: 64981 - protein, 13 aa, Homo Sapiens
AHGVTSAPDTRPA

SEQ ID NO: 64982 - protein, 13 aa, Homo Sapiens
HGVTSAPDTRPAP

SEQ ID NO: 64983 - protein, 13 aa, Homo Sapiens
GVTSAPDTRPAPG

SEQ ID NO: 64984 - protein, 13 aa, Homo Sapiens
VTSAPDTRPAPGS

SEQ ID NO: 64985 - protein, 13 aa, Homo Sapiens
TSAPDTRPAPGST

SEQ ID NO: 64986 - protein, 13 aa, Homo Sapiens
SAPDTRPAPGSTA

SEQ ID NO: 64987 - protein, 13 aa, Homo Sapiens
APDTRPAPGSTAP

SEQ ID NO: 64988 - protein, 13 aa, Homo Sapiens
PDTRPAPGSTAPP

SEQ ID NO: 64989 - protein, 13 aa, Homo Sapiens
DTRPAPGSTAPPA

SEQ ID NO: 64990 - protein, 13 aa, Homo Sapiens
TRPAPGSTAPPAH

SEQ ID NO: 64991 - protein, 13 aa, Homo Sapiens
RPAPGSTAPPAHG

SEQ ID NO: 64992 - protein, 13 aa, Homo Sapiens
PAPGSTAPPAHGV

SEQ ID NO: 64993 - protein, 13 aa, Homo Sapiens
APGSTAPPAHGVT

SEQ ID NO: 64994 - protein, 13 aa, Homo Sapiens
PGSTAPPAHGVTS

SEQ ID NO: 64995 - protein, 13 aa, Homo Sapiens
GSTAPPAHGVTSA

SEQ ID NO: 64996 - protein, 13 aa, Homo Sapiens
STAPPAHGVTSAP

SEQ ID NO: 64997 - protein, 13 aa, Homo Sapiens
TAPPAHGVTSAPD

SEQ ID NO: 64998 - protein, 13 aa, Homo Sapiens
APPAHGVTSAPDT

SEQ ID NO: 64999 - protein, 13 aa, Homo Sapiens
PPAHGVTSAPDTR

SEQ ID NO: 65000 - protein, 13 aa, Homo Sapiens
PAHGVTSAPDTRP

SEQ ID NO: 65001 - protein, 13 aa, Homo Sapiens
AHGVTSAPDTRPA

SEQ ID NO: 65002 - protein, 13 aa, Homo Sapiens
HGVTSAPDTRPAP

SEQ ID NO: 65003 - protein, 13 aa, Homo Sapiens
GVTSAPDTRPAPG

SEQ ID NO: 65004 - protein, 13 aa, Homo Sapiens
VTSAPDTRPAPGS

SEQ ID NO: 65005 - protein, 13 aa, Homo Sapiens
TSAPDTRPAPGST

SEQ ID NO: 65006 - protein, 13 aa, Homo Sapiens
SAPDTRPAPGSTA

SEQ ID NO: 65007 - protein, 13 aa, Homo Sapiens
APDTRPAPGSTAP

SEQ ID NO: 65008 - protein, 13 aa, Homo Sapiens
PDTRPAPGSTAPP

SEQ ID NO: 65009 - protein, 13 aa, Homo Sapiens
DTRPAPGSTAPPA

SEQ ID NO: 65010 - protein, 13 aa, Homo Sapiens
TRPAPGSTAPPAH

SEQ ID NO: 65011 - protein, 13 aa, Homo Sapiens
RPAPGSTAPPAHG

SEQ ID NO: 65012 - protein, 13 aa, Homo Sapiens
PAPGSTAPPAHGV

SEQ ID NO: 65013 - protein, 13 aa, Homo Sapiens
APGSTAPPAHGVT

SEQ ID NO: 65014 - protein, 13 aa, Homo Sapiens
PGSTAPPAHGVTS

SEQ ID NO: 65015 - protein, 13 aa, Homo Sapiens
GSTAPPAHGVTSA

SEQ ID NO: 65016 - protein, 13 aa, Homo Sapiens
STAPPAHGVTSAP

SEQ ID NO: 65017 - protein, 13 aa, Homo Sapiens
TAPPAHGVTSAPD

SEQ ID NO: 65018 - protein, 13 aa, Homo Sapiens
APPAHGVTSAPDT

SEQ ID NO: 65019 - protein, 13 aa, Homo Sapiens
PPAHGVTSAPDTR

SEQ ID NO: 65020 - protein, 13 aa, Homo Sapiens
PAHGVTSAPDTRP

SEQ ID NO: 65021 - protein, 13 aa, Homo Sapiens
AHGVTSAPDTRPA

SEQ ID NO: 65022 - protein, 13 aa, Homo Sapiens
HGVTSAPDTRPAP

SEQ ID NO: 65023 - protein, 13 aa, Homo Sapiens
GVTSAPDTRPAPG

SEQ ID NO: 65024 - protein, 13 aa, Homo Sapiens
VTSAPDTRPAPGS

SEQ ID NO: 65025 - protein, 13 aa, Homo Sapiens
TSAPDTRPAPGST

SEQ ID NO: 65026 - protein, 13 aa, Homo Sapiens
SAPDTRPAPGSTA

SEQ ID NO: 65027 - protein, 13 aa, Homo Sapiens
APDTRPAPGSTAP

SEQ ID NO: 65028 - protein, 13 aa, Homo Sapiens
PDTRPAPGSTAPP

SEQ ID NO: 65029 - protein, 13 aa, Homo Sapiens
DTRPAPGSTAPPA

SEQ ID NO: 65030 - protein, 13 aa, Homo Sapiens
TRPAPGSTAPPAH

SEQ ID NO: 65031 - protein, 13 aa, Homo Sapiens
RPAPGSTAPPAHG

SEQ ID NO: 65032 - protein, 13 aa, Homo Sapiens
PAPGSTAPPAHGV

SEQ ID NO: 65033 - protein, 13 aa, Homo Sapiens
APGSTAPPAHGVT

SEQ ID NO: 65034 - protein, 13 aa, Homo Sapiens
PGSTAPPAHGVTS

SEQ ID NO: 65035 - protein, 13 aa, Homo Sapiens
GSTAPPAHGVTSA

SEQ ID NO: 65036 - protein, 13 aa, Homo Sapiens
STAPPAHGVTSAP

SEQ ID NO: 65037 - protein, 13 aa, Homo Sapiens
TAPPAHGVTSAPD

SEQ ID NO: 65038 - protein, 13 aa, Homo Sapiens
APPAHGVTSAPDT

SEQ ID NO: 65039 - protein, 13 aa, Homo Sapiens
PPAHGVTSAPDTR

SEQ ID NO: 65040 - protein, 13 aa, Homo Sapiens
PAHGVTSAPDTRP

SEQ ID NO: 65041 - protein, 13 aa, Homo Sapiens
AHGVTSAPDTRPA

SEQ ID NO: 65042 - protein, 13 aa, Homo Sapiens
HGVTSAPDTRPAP

SEQ ID NO: 65043 - protein, 13 aa, Homo Sapiens
GVTSAPDTRPAPG

SEQ ID NO: 65044 - protein, 13 aa, Homo Sapiens
VTSAPDTRPAPGS

SEQ ID NO: 65045 - protein, 13 aa, Homo Sapiens
TSAPDTRPAPGST

SEQ ID NO: 65046 - protein, 13 aa, Homo Sapiens
SAPDTRPAPGSTA

SEQ ID NO: 65047 - protein, 13 aa, Homo Sapiens
APDTRPAPGSTAP

SEQ ID NO: 65048 - protein, 13 aa, Homo Sapiens
PDTRPAPGSTAPP

SEQ ID NO: 65049 - protein, 13 aa, Homo Sapiens
DTRPAPGSTAPPA

SEQ ID NO: 65050 - protein, 13 aa, Homo Sapiens
TRPAPGSTAPPAH

SEQ ID NO: 65051 - protein, 13 aa, Homo Sapiens
RPAPGSTAPPAHG

SEQ ID NO: 65052 - protein, 13 aa, Homo Sapiens
PAPGSTAPPAHGV

SEQ ID NO: 65053 - protein, 13 aa, Homo Sapiens
APGSTAPPAHGVT

SEQ ID NO: 65054 - protein, 13 aa, Homo Sapiens
PGSTAPPAHGVTS

SEQ ID NO: 65055 - protein, 13 aa, Homo Sapiens
GSTAPPAHGVTSA

SEQ ID NO: 65056 - protein, 13 aa, Homo Sapiens
STAPPAHGVTSAP

SEQ ID NO: 65057 - protein, 13 aa, Homo Sapiens
TAPPAHGVTSAPD

SEQ ID NO: 65058 - protein, 13 aa, Homo Sapiens
APPAHGVTSAPDT

SEQ ID NO: 65059 - protein, 13 aa, Homo Sapiens
PPAHGVTSAPDTR

SEQ ID NO: 65060 - protein, 13 aa, Homo Sapiens
PAHGVTSAPDTRP

SEQ ID NO: 65061 - protein, 13 aa, Homo Sapiens
AHGVTSAPDTRPA

SEQ ID NO: 65062 - protein, 13 aa, Homo Sapiens
HGVTSAPDTRPAP

SEQ ID NO: 65063 - protein, 13 aa, Homo Sapiens
GVTSAPDTRPAPG

SEQ ID NO: 65064 - protein, 13 aa, Homo Sapiens
VTSAPDTRPAPGS

SEQ ID NO: 65065 - protein, 13 aa, Homo Sapiens
TSAPDTRPAPGST

SEQ ID NO: 65066 - protein, 13 aa, Homo Sapiens
SAPDTRPAPGSTA

SEQ ID NO: 65067 - protein, 13 aa, Homo Sapiens
APDTRPAPGSTAP

SEQ ID NO: 65068 - protein, 13 aa, Homo Sapiens
PDTRPAPGSTAPP

SEQ ID NO: 65069 - protein, 13 aa, Homo Sapiens
DTRPAPGSTAPPA

SEQ ID NO: 65070 - protein, 13 aa, Homo Sapiens
TRPAPGSTAPPAH

SEQ ID NO: 65071 - protein, 13 aa, Homo Sapiens
RPAPGSTAPPAHG

SEQ ID NO: 65072 - protein, 13 aa, Homo Sapiens
PAPGSTAPPAHGV

SEQ ID NO: 65073 - protein, 13 aa, Homo Sapiens
APGSTAPPAHGVT

SEQ ID NO: 65074 - protein, 13 aa, Homo Sapiens
PGSTAPPAHGVTS

SEQ ID NO: 65075 - protein, 13 aa, Homo Sapiens
GSTAPPAHGVTSA

SEQ ID NO: 65076 - protein, 13 aa, Homo Sapiens
STAPPAHGVTSAP

SEQ ID NO: 65077 - protein, 13 aa, Homo Sapiens
TAPPAHGVTSAPD

SEQ ID NO: 65078 - protein, 13 aa, Homo Sapiens
APPAHGVTSAPDT

SEQ ID NO: 65079 - protein, 13 aa, Homo Sapiens
PPAHGVTSAPDTR

SEQ ID NO: 65080 - protein, 13 aa, Homo Sapiens
PAHGVTSAPDTRP

SEQ ID NO: 65081 - protein, 13 aa, Homo Sapiens
AHGVTSAPDTRPA

SEQ ID NO: 65082 - protein, 13 aa, Homo Sapiens
HGVTSAPDTRPAP

SEQ ID NO: 65083 - protein, 13 aa, Homo Sapiens
GVTSAPDTRPAPG

SEQ ID NO: 65084 - protein, 13 aa, Homo Sapiens
VTSAPDTRPAPGS

SEQ ID NO: 65085 - protein, 13 aa, Homo Sapiens
TSAPDTRPAPGST

SEQ ID NO: 65086 - protein, 13 aa, Homo Sapiens
SAPDTRPAPGSTA

SEQ ID NO: 65087 - protein, 13 aa, Homo Sapiens
APDTRPAPGSTAP

SEQ ID NO: 65088 - protein, 13 aa, Homo Sapiens
PDTRPAPGSTAPP

SEQ ID NO: 65089 - protein, 13 aa, Homo Sapiens
DTRPAPGSTAPPA

SEQ ID NO: 65090 - protein, 13 aa, Homo Sapiens
TRPAPGSTAPPAH

SEQ ID NO: 65091 - protein, 13 aa, Homo Sapiens
RPAPGSTAPPAHG

SEQ ID NO: 65092 - protein, 13 aa, Homo Sapiens
PAPGSTAPPAHGV

SEQ ID NO: 65093 - protein, 13 aa, Homo Sapiens
APGSTAPPAHGVT

SEQ ID NO: 65094 - protein, 13 aa, Homo Sapiens
PGSTAPPAHGVTS

SEQ ID NO: 65095 - protein, 13 aa, Homo Sapiens
GSTAPPAHGVTSA

SEQ ID NO: 65096 - protein, 13 aa, Homo Sapiens
STAPPAHGVTSAP

SEQ ID NO: 65097 - protein, 13 aa, Homo Sapiens
TAPPAHGVTSAPD

SEQ ID NO: 65098 - protein, 13 aa, Homo Sapiens
APPAHGVTSAPDN

SEQ ID NO: 65099 - protein, 13 aa, Homo Sapiens
PPAHGVTSAPDNR

SEQ ID NO: 65100 - protein, 13 aa, Homo Sapiens
PAHGVTSAPDNRP

SEQ ID NO: 65101 - protein, 13 aa, Homo Sapiens
AHGVTSAPDNRPA

SEQ ID NO: 65102 - protein, 13 aa, Homo Sapiens
HGVTSAPDNRPAL

SEQ ID NO: 65103 - protein, 13 aa, Homo Sapiens
GVTSAPDNRPALG

SEQ ID NO: 65104 - protein, 13 aa, Homo Sapiens
VTSAPDNRPALGS

SEQ ID NO: 65105 - protein, 13 aa, Homo Sapiens
TSAPDNRPALGST

SEQ ID NO: 65106 - protein, 13 aa, Homo Sapiens
SAPDNRPALGSTA

SEQ ID NO: 65107 - protein, 13 aa, Homo Sapiens
APDNRPALGSTAP

SEQ ID NO: 65108 - protein, 13 aa, Homo Sapiens
PDNRPALGSTAPP

SEQ ID NO: 65109 - protein, 13 aa, Homo Sapiens
DNRPALGSTAPPV

SEQ ID NO: 65110 - protein, 13 aa, Homo Sapiens
NRPALGSTAPPVH

SEQ ID NO: 65111 - protein, 13 aa, Homo Sapiens
RPALGSTAPPVHN

SEQ ID NO: 65112 - protein, 13 aa, Homo Sapiens
PALGSTAPPVHNV

SEQ ID NO: 65113 - protein, 13 aa, Homo Sapiens
ALGSTAPPVHNVT

SEQ ID NO: 65114 - protein, 13 aa, Homo Sapiens
LGSTAPPVHNVTS

SEQ ID NO: 65115 - protein, 13 aa, Homo Sapiens
GSTAPPVHNVTSA

SEQ ID NO: 65116 - protein, 13 aa, Homo Sapiens
STAPPVHNVTSAS

SEQ ID NO: 65117 - protein, 13 aa, Homo Sapiens
TAPPVHNVTSASG

SEQ ID NO: 65118 - protein, 13 aa, Homo Sapiens
APPVHNVTSASGS

SEQ ID NO: 65119 - protein, 13 aa, Homo Sapiens
PPVHNVTSASGSA

SEQ ID NO: 65120 - protein, 13 aa, Homo Sapiens
PVHNVTSASGSAS

SEQ ID NO: 65121 - protein, 13 aa, Homo Sapiens
VHNVTSASGSASG

SEQ ID NO: 65122 - protein, 13 aa, Homo Sapiens
HNVTSASGSASGS

SEQ ID NO: 65123 - protein, 13 aa, Homo Sapiens
NVTSASGSASGSA

SEQ ID NO: 65124 - protein, 13 aa, Homo Sapiens
VTSASGSASGSAS

SEQ ID NO: 65125 - protein, 13 aa, Homo Sapiens
TSASGSASGSAST

SEQ ID NO: 65126 - protein, 13 aa, Homo Sapiens
SASGSASGSASTL

SEQ ID NO: 65127 - protein, 13 aa, Homo Sapiens
ASGSASGSASTLV

SEQ ID NO: 65128 - protein, 13 aa, Homo Sapiens
SGSASGSASTLVH

SEQ ID NO: 65129 - protein, 13 aa, Homo Sapiens
GSASGSASTLVHN

SEQ ID NO: 65130 - protein, 13 aa, Homo Sapiens
SASGSASTLVHNG

SEQ ID NO: 65131 - protein, 13 aa, Homo Sapiens
ASGSASTLVHNGT

SEQ ID NO: 65132 - protein, 13 aa, Homo Sapiens
SGSASTLVHNGTS

SEQ ID NO: 65133 - protein, 13 aa, Homo Sapiens
GSASTLVHNGTSA

SEQ ID NO: 65134 - protein, 13 aa, Homo Sapiens
SASTLVHNGTSAR

SEQ ID NO: 65135 - protein, 13 aa, Homo Sapiens
ASTLVHNGTSARA

SEQ ID NO: 65136 - protein, 13 aa, Homo Sapiens
STLVHNGTSARAT

SEQ ID NO: 65137 - protein, 13 aa, Homo Sapiens
TLVHNGTSARATT

SEQ ID NO: 65138 - protein, 13 aa, Homo Sapiens
LVHNGTSARATTT

SEQ ID NO: 65139 - protein, 13 aa, Homo Sapiens
VHNGTSARATTTP

SEQ ID NO: 65140 - protein, 13 aa, Homo Sapiens
HNGTSARATTTPA

SEQ ID NO: 65141 - protein, 13 aa, Homo Sapiens
NGTSARATTTPAS

SEQ ID NO: 65142 - protein, 13 aa, Homo Sapiens
GTSARATTTPASK

SEQ ID NO: 65143 - protein, 13 aa, Homo Sapiens
TSARATTTPASKS

SEQ ID NO: 65144 - protein, 13 aa, Homo Sapiens
SARATTTPASKST

SEQ ID NO: 65145 - protein, 13 aa, Homo Sapiens
ARATTTPASKSTP

SEQ ID NO: 65146 - protein, 13 aa, Homo Sapiens
RATTTPASKSTPF

SEQ ID NO: 65147 - protein, 13 aa, Homo Sapiens
ATTTPASKSTPFS

SEQ ID NO: 65148 - protein, 13 aa, Homo Sapiens
TTTPASKSTPFSI

SEQ ID NO: 65149 - protein, 13 aa, Homo Sapiens
TTPASKSTPFSIP

SEQ ID NO: 65150 - protein, 13 aa, Homo Sapiens
TPASKSTPFSIPS

SEQ ID NO: 65151 - protein, 13 aa, Homo Sapiens
PASKSTPFSIPSH

SEQ ID NO: 65152 - protein, 13 aa, Homo Sapiens
ASKSTPFSIPSHH

SEQ ID NO: 65153 - protein, 13 aa, Homo Sapiens
SKSTPFSIPSHHS

SEQ ID NO: 65154 - protein, 13 aa, Homo Sapiens
KSTPFSIPSHHSD

SEQ ID NO: 65155 - protein, 13 aa, Homo Sapiens
STPFSIPSHHSDT

SEQ ID NO: 65156 - protein, 13 aa, Homo Sapiens
TPFSIPSHHSDTP

SEQ ID NO: 65157 - protein, 13 aa, Homo Sapiens
PFSIPSHHSDTPT

SEQ ID NO: 65158 - protein, 13 aa, Homo Sapiens
FSIPSHHSDTPTT

SEQ ID NO: 65159 - protein, 13 aa, Homo Sapiens
SIPSHHSDTPTTL

SEQ ID NO: 65160 - protein, 13 aa, Homo Sapiens
IPSHHSDTPTTLA

SEQ ID NO: 65161 - protein, 13 aa, Homo Sapiens
PSHHSDTPTTLAS

SEQ ID NO: 65162 - protein, 13 aa, Homo Sapiens
SHHSDTPTTLASH

SEQ ID NO: 65163 - protein, 13 aa, Homo Sapiens
HHSDTPTTLASHS

SEQ ID NO: 65164 - protein, 13 aa, Homo Sapiens
HSDTPTTLASHST

SEQ ID NO: 65165 - protein, 13 aa, Homo Sapiens
SDTPTTLASHSTK

SEQ ID NO: 65166 - protein, 13 aa, Homo Sapiens
DTPTTLASHSTKT

SEQ ID NO: 65167 - protein, 13 aa, Homo Sapiens
TPTTLASHSTKTD

SEQ ID NO: 65168 - protein, 13 aa, Homo Sapiens
PTTLASHSTKTDA

SEQ ID NO: 65169 - protein, 13 aa, Homo Sapiens
TTLASHSTKTDAS

SEQ ID NO: 65170 - protein, 13 aa, Homo Sapiens
TLASHSTKTDASS

SEQ ID NO: 65171 - protein, 13 aa, Homo Sapiens
LASHSTKTDASST

SEQ ID NO: 65172 - protein, 13 aa, Homo Sapiens
ASHSTKTDASSTH

SEQ ID NO: 65173 - protein, 13 aa, Homo Sapiens
SHSTKTDASSTHH

SEQ ID NO: 65174 - protein, 13 aa, Homo Sapiens
HSTKTDASSTHHS

SEQ ID NO: 65175 - protein, 13 aa, Homo Sapiens
STKTDASSTHHSS

SEQ ID NO: 65176 - protein, 13 aa, Homo Sapiens
TKTDASSTHHSSV

SEQ ID NO: 65177 - protein, 13 aa, Homo Sapiens
KTDASSTHHSSVP

SEQ ID NO: 65178 - protein, 13 aa, Homo Sapiens
TDASSTHHSSVPP

SEQ ID NO: 65179 - protein, 13 aa, Homo Sapiens
DASSTHHSSVPPL

SEQ ID NO: 65180 - protein, 13 aa, Homo Sapiens
ASSTHHSSVPPLT

SEQ ID NO: 65181 - protein, 13 aa, Homo Sapiens
SSTHHSSVPPLTS

SEQ ID NO: 65182 - protein, 13 aa, Homo Sapiens
STHHSSVPPLTSS

SEQ ID NO: 65183 - protein, 13 aa, Homo Sapiens
THHSSVPPLTSSN

SEQ ID NO: 65184 - protein, 13 aa, Homo Sapiens
HHSSVPPLTSSNH

SEQ ID NO: 65185 - protein, 13 aa, Homo Sapiens
HSSVPPLTSSNHS

SEQ ID NO: 65186 - protein, 13 aa, Homo Sapiens
SSVPPLTSSNHST

SEQ ID NO: 65187 - protein, 13 aa, Homo Sapiens
SVPPLTSSNHSTS

SEQ ID NO: 65188 - protein, 13 aa, Homo Sapiens
VPPLTSSNHSTSP

SEQ ID NO: 65189 - protein, 13 aa, Homo Sapiens
PPLTSSNHSTSPQ

SEQ ID NO: 65190 - protein, 13 aa, Homo Sapiens
PLTSSNHSTSPQL

SEQ ID NO: 65191 - protein, 13 aa, Homo Sapiens
LTSSNHSTSPQLS

SEQ ID NO: 65192 - protein, 13 aa, Homo Sapiens
TSSNHSTSPQLST

SEQ ID NO: 65193 - protein, 13 aa, Homo Sapiens
SSNHSTSPQLSTG

SEQ ID NO: 65194 - protein, 13 aa, Homo Sapiens
SNHSTSPQLSTGV

SEQ ID NO: 65195 - protein, 13 aa, Homo Sapiens
NHSTSPQLSTGVS

SEQ ID NO: 65196 - protein, 13 aa, Homo Sapiens
HSTSPQLSTGVSF

SEQ ID NO: 65197 - protein, 13 aa, Homo Sapiens
STSPQLSTGVSFF

SEQ ID NO: 65198 - protein, 13 aa, Homo Sapiens
TSPQLSTGVSFFF

SEQ ID NO: 65199 - protein, 13 aa, Homo Sapiens
SPQLSTGVSFFFL

SEQ ID NO: 65200 - protein, 13 aa, Homo Sapiens
PQLSTGVSFFFLS

SEQ ID NO: 65201 - protein, 13 aa, Homo Sapiens
QLSTGVSFFFLSF

SEQ ID NO: 65202 - protein, 13 aa, Homo Sapiens
LSTGVSFFFLSFH

SEQ ID NO: 65203 - protein, 13 aa, Homo Sapiens
STGVSFFFLSFHI

SEQ ID NO: 65204 - protein, 13 aa, Homo Sapiens
TGVSFFFLSFHIS

SEQ ID NO: 65205 - protein, 13 aa, Homo Sapiens
GVSFFFLSFHISN

SEQ ID NO: 65206 - protein, 13 aa, Homo Sapiens
VSFFFLSFHISNL

SEQ ID NO: 65207 - protein, 13 aa, Homo Sapiens
SFFFLSFHISNLQ

SEQ ID NO: 65208 - protein, 13 aa, Homo Sapiens
FFFLSFHISNLQF

SEQ ID NO: 65209 - protein, 13 aa, Homo Sapiens
FFLSFHISNLQFN

SEQ ID NO: 65210 - protein, 13 aa, Homo Sapiens
FLSFHISNLQFNS

SEQ ID NO: 65211 - protein, 13 aa, Homo Sapiens
LSFHISNLQFNSS

SEQ ID NO: 65212 - protein, 13 aa, Homo Sapiens
SFHISNLQFNSSL

SEQ ID NO: 65213 - protein, 13 aa, Homo Sapiens
FHISNLQFNSSLE

SEQ ID NO: 65214 - protein, 13 aa, Homo Sapiens
HISNLQFNSSLED

SEQ ID NO: 65215 - protein, 13 aa, Homo Sapiens
ISNLQFNSSLEDP

SEQ ID NO: 65216 - protein, 13 aa, Homo Sapiens
SNLQFNSSLEDPS

SEQ ID NO: 65217 - protein, 13 aa, Homo Sapiens
NLQFNSSLEDPST

SEQ ID NO: 65218 - protein, 13 aa, Homo Sapiens
LQFNSSLEDPSTD

SEQ ID NO: 65219 - protein, 13 aa, Homo Sapiens
QFNSSLEDPSTDY

SEQ ID NO: 65220 - protein, 13 aa, Homo Sapiens
FNSSLEDPSTDYY

SEQ ID NO: 65221 - protein, 13 aa, Homo Sapiens
NSSLEDPSTDYYQ

SEQ ID NO: 65222 - protein, 13 aa, Homo Sapiens
SSLEDPSTDYYQE

SEQ ID NO: 65223 - protein, 13 aa, Homo Sapiens
SLEDPSTDYYQEL

SEQ ID NO: 65224 - protein, 13 aa, Homo Sapiens
LEDPSTDYYQELQ

SEQ ID NO: 65225 - protein, 13 aa, Homo Sapiens
EDPSTDYYQELQR

SEQ ID NO: 65226 - protein, 13 aa, Homo Sapiens
DPSTDYYQELQRD

SEQ ID NO: 65227 - protein, 13 aa, Homo Sapiens
PSTDYYQELQRDI

SEQ ID NO: 65228 - protein, 13 aa, Homo Sapiens
STDYYQELQRDIS

SEQ ID NO: 65229 - protein, 13 aa, Homo Sapiens
TDYYQELQRDISE

SEQ ID NO: 65230 - protein, 13 aa, Homo Sapiens
DYYQELQRDISEM

SEQ ID NO: 65231 - protein, 13 aa, Homo Sapiens
YYQELQRDISEMF

SEQ ID NO: 65232 - protein, 13 aa, Homo Sapiens
YQELQRDISEMFL

SEQ ID NO: 65233 - protein, 13 aa, Homo Sapiens
QELQRDISEMFLQ

SEQ ID NO: 65234 - protein, 13 aa, Homo Sapiens
ELQRDISEMFLQI

SEQ ID NO: 65235 - protein, 13 aa, Homo Sapiens
LQRDISEMFLQIY

SEQ ID NO: 65236 - protein, 13 aa, Homo Sapiens
QRDISEMFLQIYK

SEQ ID NO: 65237 - protein, 13 aa, Homo Sapiens
RDISEMFLQIYKQ

SEQ ID NO: 65238 - protein, 13 aa, Homo Sapiens
DISEMFLQIYKQG

SEQ ID NO: 65239 - protein, 13 aa, Homo Sapiens
ISEMFLQIYKQGG

SEQ ID NO: 65240 - protein, 13 aa, Homo Sapiens
SEMFLQIYKQGGF

SEQ ID NO: 65241 - protein, 13 aa, Homo Sapiens
EMFLQIYKQGGFL

SEQ ID NO: 65242 - protein, 13 aa, Homo Sapiens
MFLQIYKQGGFLG

SEQ ID NO: 65243 - protein, 13 aa, Homo Sapiens
FLQIYKQGGFLGL

SEQ ID NO: 65244 - protein, 13 aa, Homo Sapiens
LQIYKQGGFLGLS

SEQ ID NO: 65245 - protein, 13 aa, Homo Sapiens
QIYKQGGFLGLSN

SEQ ID NO: 65246 - protein, 13 aa, Homo Sapiens
IYKQGGFLGLSNI

SEQ ID NO: 65247 - protein, 13 aa, Homo Sapiens
YKQGGFLGLSNIK

SEQ ID NO: 65248 - protein, 13 aa, Homo Sapiens
KQGGFLGLSNIKF

SEQ ID NO: 65249 - protein, 13 aa, Homo Sapiens
QGGFLGLSNIKFR

SEQ ID NO: 65250 - protein, 13 aa, Homo Sapiens
GGFLGLSNIKFRP

SEQ ID NO: 65251 - protein, 13 aa, Homo Sapiens
GFLGLSNIKFRPG

SEQ ID NO: 65252 - protein, 13 aa, Homo Sapiens
FLGLSNIKFRPGS

SEQ ID NO: 65253 - protein, 13 aa, Homo Sapiens
LGLSNIKFRPGSV

SEQ ID NO: 65254 - protein, 13 aa, Homo Sapiens
GLSNIKFRPGSVV

SEQ ID NO: 65255 - protein, 13 aa, Homo Sapiens
LSNIKFRPGSVVV

SEQ ID NO: 65256 - protein, 13 aa, Homo Sapiens
SNIKFRPGSVVVQ

SEQ ID NO: 65257 - protein, 13 aa, Homo Sapiens
NIKFRPGSVVVQL

SEQ ID NO: 65258 - protein, 13 aa, Homo Sapiens
IKFRPGSVVVQLT

SEQ ID NO: 65259 - protein, 13 aa, Homo Sapiens
KFRPGSVVVQLTL

SEQ ID NO: 65260 - protein, 13 aa, Homo Sapiens
FRPGSVVVQLTLA

SEQ ID NO: 65261 - protein, 13 aa, Homo Sapiens
RPGSVVVQLTLAF

SEQ ID NO: 65262 - protein, 13 aa, Homo Sapiens
PGSVVVQLTLAFR

SEQ ID NO: 65263 - protein, 13 aa, Homo Sapiens
GSVVVQLTLAFRE

SEQ ID NO: 65264 - protein, 13 aa, Homo Sapiens
SVVVQLTLAFREG

SEQ ID NO: 65265 - protein, 13 aa, Homo Sapiens
VVVQLTLAFREGT

SEQ ID NO: 65266 - protein, 13 aa, Homo Sapiens
VVQLTLAFREGTI

SEQ ID NO: 65267 - protein, 13 aa, Homo Sapiens
VQLTLAFREGTIN

SEQ ID NO: 65268 - protein, 13 aa, Homo Sapiens
QLTLAFREGTINV

SEQ ID NO: 65269 - protein, 13 aa, Homo Sapiens
LTLAFREGTINVH

SEQ ID NO: 65270 - protein, 13 aa, Homo Sapiens
TLAFREGTINVHD

SEQ ID NO: 65271 - protein, 13 aa, Homo Sapiens
LAFREGTINVHDV

SEQ ID NO: 65272 - protein, 13 aa, Homo Sapiens
AFREGTINVHDVE

SEQ ID NO: 65273 - protein, 13 aa, Homo Sapiens
FREGTINVHDVET

SEQ ID NO: 65274 - protein, 13 aa, Homo Sapiens
REGTINVHDVETQ

SEQ ID NO: 65275 - protein, 13 aa, Homo Sapiens
EGTINVHDVETQF

SEQ ID NO: 65276 - protein, 13 aa, Homo Sapiens
GTINVHDVETQFN

SEQ ID NO: 65277 - protein, 13 aa, Homo Sapiens
TINVHDVETQFNQ

SEQ ID NO: 65278 - protein, 13 aa, Homo Sapiens
INVHDVETQFNQY

SEQ ID NO: 65279 - protein, 13 aa, Homo Sapiens
NVHDVETQFNQYK

SEQ ID NO: 65280 - protein, 13 aa, Homo Sapiens
VHDVETQFNQYKT

SEQ ID NO: 65281 - protein, 13 aa, Homo Sapiens
HDVETQFNQYKTE

SEQ ID NO: 65282 - protein, 13 aa, Homo Sapiens
DVETQFNQYKTEA

SEQ ID NO: 65283 - protein, 13 aa, Homo Sapiens
VETQFNQYKTEAA

SEQ ID NO: 65284 - protein, 13 aa, Homo Sapiens
ETQFNQYKTEAAS

SEQ ID NO: 65285 - protein, 13 aa, Homo Sapiens
TQFNQYKTEAASR

SEQ ID NO: 65286 - protein, 13 aa, Homo Sapiens
QFNQYKTEAASRY

SEQ ID NO: 65287 - protein, 13 aa, Homo Sapiens
FNQYKTEAASRYN

SEQ ID NO: 65288 - protein, 13 aa, Homo Sapiens
NQYKTEAASRYNL

SEQ ID NO: 65289 - protein, 13 aa, Homo Sapiens
QYKTEAASRYNLT

SEQ ID NO: 65290 - protein, 13 aa, Homo Sapiens
YKTEAASRYNLTI

SEQ ID NO: 65291 - protein, 13 aa, Homo Sapiens
KTEAASRYNLTIS

SEQ ID NO: 65292 - protein, 13 aa, Homo Sapiens
TEAASRYNLTISD

SEQ ID NO: 65293 - protein, 13 aa, Homo Sapiens
EAASRYNLTISDV

SEQ ID NO: 65294 - protein, 13 aa, Homo Sapiens
AASRYNLTISDVS

SEQ ID NO: 65295 - protein, 13 aa, Homo Sapiens
ASRYNLTISDVSV

SEQ ID NO: 65296 - protein, 13 aa, Homo Sapiens
SRYNLTISDVSVS

SEQ ID NO: 65297 - protein, 13 aa, Homo Sapiens
RYNLTISDVSVSD

SEQ ID NO: 65298 - protein, 13 aa, Homo Sapiens
YNLTISDVSVSDV

SEQ ID NO: 65299 - protein, 13 aa, Homo Sapiens
NLTISDVSVSDVP

SEQ ID NO: 65300 - protein, 13 aa, Homo Sapiens
LTISDVSVSDVPF

SEQ ID NO: 65301 - protein, 13 aa, Homo Sapiens
TISDVSVSDVPFP

SEQ ID NO: 65302 - protein, 13 aa, Homo Sapiens
ISDVSVSDVPFPF

SEQ ID NO: 65303 - protein, 13 aa, Homo Sapiens
SDVSVSDVPFPFS

SEQ ID NO: 65304 - protein, 13 aa, Homo Sapiens
DVSVSDVPFPFSA

SEQ ID NO: 65305 - protein, 13 aa, Homo Sapiens
VSVSDVPFPFSAQ

SEQ ID NO: 65306 - protein, 13 aa, Homo Sapiens
SVSDVPFPFSAQS

SEQ ID NO: 65307 - protein, 13 aa, Homo Sapiens
VSDVPFPFSAQSG

SEQ ID NO: 65308 - protein, 13 aa, Homo Sapiens
SDVPFPFSAQSGA

SEQ ID NO: 65309 - protein, 13 aa, Homo Sapiens
DVPFPFSAQSGAG

SEQ ID NO: 65310 - protein, 13 aa, Homo Sapiens
VPFPFSAQSGAGV

SEQ ID NO: 65311 - protein, 13 aa, Homo Sapiens
PFPFSAQSGAGVP

SEQ ID NO: 65312 - protein, 13 aa, Homo Sapiens
FPFSAQSGAGVPG

SEQ ID NO: 65313 - protein, 13 aa, Homo Sapiens
PFSAQSGAGVPGW

SEQ ID NO: 65314 - protein, 13 aa, Homo Sapiens
FSAQSGAGVPGWG

SEQ ID NO: 65315 - protein, 13 aa, Homo Sapiens
SAQSGAGVPGWGI

SEQ ID NO: 65316 - protein, 13 aa, Homo Sapiens
AQSGAGVPGWGIA

SEQ ID NO: 65317 - protein, 13 aa, Homo Sapiens
QSGAGVPGWGIAL

SEQ ID NO: 65318 - protein, 13 aa, Homo Sapiens
SGAGVPGWGIALL

SEQ ID NO: 65319 - protein, 13 aa, Homo Sapiens
GAGVPGWGIALLV

SEQ ID NO: 65320 - protein, 13 aa, Homo Sapiens
AGVPGWGIALLVL

SEQ ID NO: 65321 - protein, 13 aa, Homo Sapiens
GVPGWGIALLVLV

SEQ ID NO: 65322 - protein, 13 aa, Homo Sapiens
VPGWGIALLVLVC

SEQ ID NO: 65323 - protein, 13 aa, Homo Sapiens
PGWGIALLVLVCV

SEQ ID NO: 65324 - protein, 13 aa, Homo Sapiens
GWGIALLVLVCVL

SEQ ID NO: 65325 - protein, 13 aa, Homo Sapiens
WGIALLVLVCVLV

SEQ ID NO: 65326 - protein, 13 aa, Homo Sapiens
GIALLVLVCVLVA

SEQ ID NO: 65327 - protein, 13 aa, Homo Sapiens
IALLVLVCVLVAL

SEQ ID NO: 65328 - protein, 13 aa, Homo Sapiens
ALLVLVCVLVALA

SEQ ID NO: 65329 - protein, 13 aa, Homo Sapiens
LLVLVCVLVALAI

SEQ ID NO: 65330 - protein, 13 aa, Homo Sapiens
LVLVCVLVALAIV

SEQ ID NO: 65331 - protein, 13 aa, Homo Sapiens
VLVCVLVALAIVY

SEQ ID NO: 65332 - protein, 13 aa, Homo Sapiens
LVCVLVALAIVYL

SEQ ID NO: 65333 - protein, 13 aa, Homo Sapiens
VCVLVALAIVYLI

SEQ ID NO: 65334 - protein, 13 aa, Homo Sapiens
CVLVALAIVYLIA

SEQ ID NO: 65335 - protein, 13 aa, Homo Sapiens
VLVALAIVYLIAL

SEQ ID NO: 65336 - protein, 13 aa, Homo Sapiens
LVALAIVYLIALA

SEQ ID NO: 65337 - protein, 13 aa, Homo Sapiens
VALAIVYLIALAV

SEQ ID NO: 65338 - protein, 13 aa, Homo Sapiens
ALAIVYLIALAVC

SEQ ID NO: 65339 - protein, 13 aa, Homo Sapiens
LAIVYLIALAVCQ

SEQ ID NO: 65340 - protein, 13 aa, Homo Sapiens
AIVYLIALAVCQC

SEQ ID NO: 65341 - protein, 13 aa, Homo Sapiens
IVYLIALAVCQCR

SEQ ID NO: 65342 - protein, 13 aa, Homo Sapiens
VYLIALAVCQCRR

SEQ ID NO: 65343 - protein, 13 aa, Homo Sapiens
YLIALAVCQCRRK

SEQ ID NO: 65344 - protein, 13 aa, Homo Sapiens
LIALAVCQCRRKN

SEQ ID NO: 65345 - protein, 13 aa, Homo Sapiens
IALAVCQCRRKNY

SEQ ID NO: 65346 - protein, 13 aa, Homo Sapiens
ALAVCQCRRKNYG

SEQ ID NO: 65347 - protein, 13 aa, Homo Sapiens
LAVCQCRRKNYGQ

SEQ ID NO: 65348 - protein, 13 aa, Homo Sapiens
AVCQCRRKNYGQL

SEQ ID NO: 65349 - protein, 13 aa, Homo Sapiens
VCQCRRKNYGQLD

SEQ ID NO: 65350 - protein, 13 aa, Homo Sapiens
CQCRRKNYGQLDI

SEQ ID NO: 65351 - protein, 13 aa, Homo Sapiens
QCRRKNYGQLDIF

SEQ ID NO: 65352 - protein, 13 aa, Homo Sapiens
CRRKNYGQLDIFP

SEQ ID NO: 65353 - protein, 13 aa, Homo Sapiens
RRKNYGQLDIFPA

SEQ ID NO: 65354 - protein, 13 aa, Homo Sapiens
RKNYGQLDIFPAR

SEQ ID NO: 65355 - protein, 13 aa, Homo Sapiens
KNYGQLDIFPARD

SEQ ID NO: 65356 - protein, 13 aa, Homo Sapiens
NYGQLDIFPARDT

SEQ ID NO: 65357 - protein, 13 aa, Homo Sapiens
YGQLDIFPARDTY

SEQ ID NO: 65358 - protein, 13 aa, Homo Sapiens
GQLDIFPARDTYH

SEQ ID NO: 65359 - protein, 13 aa, Homo Sapiens
QLDIFPARDTYHP

SEQ ID NO: 65360 - protein, 13 aa, Homo Sapiens
LDIFPARDTYHPM

SEQ ID NO: 65361 - protein, 13 aa, Homo Sapiens
DIFPARDTYHPMS

SEQ ID NO: 65362 - protein, 13 aa, Homo Sapiens
IFPARDTYHPMSE

SEQ ID NO: 65363 - protein, 13 aa, Homo Sapiens
FPARDTYHPMSEY

SEQ ID NO: 65364 - protein, 13 aa, Homo Sapiens
PARDTYHPMSEYP

SEQ ID NO: 65365 - protein, 13 aa, Homo Sapiens
ARDTYHPMSEYPT

SEQ ID NO: 65366 - protein, 13 aa, Homo Sapiens
RDTYHPMSEYPTY

SEQ ID NO: 65367 - protein, 13 aa, Homo Sapiens
DTYHPMSEYPTYH

SEQ ID NO: 65368 - protein, 13 aa, Homo Sapiens
TYHPMSEYPTYHT

SEQ ID NO: 65369 - protein, 13 aa, Homo Sapiens
YHPMSEYPTYHTH

SEQ ID NO: 65370 - protein, 13 aa, Homo Sapiens
HPMSEYPTYHTHG

SEQ ID NO: 65371 - protein, 13 aa, Homo Sapiens
PMSEYPTYHTHGR

SEQ ID NO: 65372 - protein, 13 aa, Homo Sapiens
MSEYPTYHTHGRY

SEQ ID NO: 65373 - protein, 13 aa, Homo Sapiens
SEYPTYHTHGRYV

SEQ ID NO: 65374 - protein, 13 aa, Homo Sapiens
EYPTYHTHGRYVP

SEQ ID NO: 65375 - protein, 13 aa, Homo Sapiens
YPTYHTHGRYVPP

SEQ ID NO: 65376 - protein, 13 aa, Homo Sapiens
PTYHTHGRYVPPS

SEQ ID NO: 65377 - protein, 13 aa, Homo Sapiens
TYHTHGRYVPPSS

SEQ ID NO: 65378 - protein, 13 aa, Homo Sapiens
YHTHGRYVPPSST

SEQ ID NO: 65379 - protein, 13 aa, Homo Sapiens
HTHGRYVPPSSTD

SEQ ID NO: 65380 - protein, 13 aa, Homo Sapiens
THGRYVPPSSTDR

SEQ ID NO: 65381 - protein, 13 aa, Homo Sapiens
HGRYVPPSSTDRS

SEQ ID NO: 65382 - protein, 13 aa, Homo Sapiens
GRYVPPSSTDRSP

SEQ ID NO: 65383 - protein, 13 aa, Homo Sapiens
RYVPPSSTDRSPY

SEQ ID NO: 65384 - protein, 13 aa, Homo Sapiens
YVPPSSTDRSPYE

SEQ ID NO: 65385 - protein, 13 aa, Homo Sapiens
VPPSSTDRSPYEK

SEQ ID NO: 65386 - protein, 13 aa, Homo Sapiens
PPSSTDRSPYEKV

SEQ ID NO: 65387 - protein, 13 aa, Homo Sapiens
PSSTDRSPYEKVS

SEQ ID NO: 65388 - protein, 13 aa, Homo Sapiens
SSTDRSPYEKVSA

SEQ ID NO: 65389 - protein, 13 aa, Homo Sapiens
STDRSPYEKVSAG

SEQ ID NO: 65390 - protein, 13 aa, Homo Sapiens
TDRSPYEKVSAGN

SEQ ID NO: 65391 - protein, 13 aa, Homo Sapiens
DRSPYEKVSAGNG

SEQ ID NO: 65392 - protein, 13 aa, Homo Sapiens
RSPYEKVSAGNGG

SEQ ID NO: 65393 - protein, 13 aa, Homo Sapiens
SPYEKVSAGNGGS

SEQ ID NO: 65394 - protein, 13 aa, Homo Sapiens
PYEKVSAGNGGSS

SEQ ID NO: 65395 - protein, 13 aa, Homo Sapiens
YEKVSAGNGGSSL

SEQ ID NO: 65396 - protein, 13 aa, Homo Sapiens
EKVSAGNGGSSLS

SEQ ID NO: 65397 - protein, 13 aa, Homo Sapiens
KVSAGNGGSSLSY

SEQ ID NO: 65398 - protein, 13 aa, Homo Sapiens
VSAGNGGSSLSYT

SEQ ID NO: 65399 - protein, 13 aa, Homo Sapiens
SAGNGGSSLSYTN

SEQ ID NO: 65400 - protein, 13 aa, Homo Sapiens
AGNGGSSLSYTNP

SEQ ID NO: 65401 - protein, 13 aa, Homo Sapiens
GNGGSSLSYTNPA

SEQ ID NO: 65402 - protein, 13 aa, Homo Sapiens
NGGSSLSYTNPAV

SEQ ID NO: 65403 - protein, 13 aa, Homo Sapiens
GGSSLSYTNPAVA

SEQ ID NO: 65404 - protein, 13 aa, Homo Sapiens
GSSLSYTNPAVAA

SEQ ID NO: 65405 - protein, 13 aa, Homo Sapiens
SSLSYTNPAVAAA

SEQ ID NO: 65406 - protein, 13 aa, Homo Sapiens
SLSYTNPAVAAAS

SEQ ID NO: 65407 - protein, 13 aa, Homo Sapiens
LSYTNPAVAAASA

SEQ ID NO: 65408 - protein, 13 aa, Homo Sapiens
SYTNPAVAAASAN

SEQ ID NO: 65409 - protein, 13 aa, Homo Sapiens
YTNPAVAAASANL

SEQ ID NO: 65410 - protein, 14 aa, Homo Sapiens
MTPGTQSPFFLLLL

SEQ ID NO: 65411 - protein, 14 aa, Homo Sapiens
TPGTQSPFFLLLLL

SEQ ID NO: 65412 - protein, 14 aa, Homo Sapiens
PGTQSPFFLLLLLT

SEQ ID NO: 65413 - protein, 14 aa, Homo Sapiens
GTQSPFFLLLLLTV

SEQ ID NO: 65414 - protein, 14 aa, Homo Sapiens
TQSPFFLLLLLTVL

SEQ ID NO: 65415 - protein, 14 aa, Homo Sapiens
QSPFFLLLLLTVLT

SEQ ID NO: 65416 - protein, 14 aa, Homo Sapiens
SPFFLLLLLTVLTV

SEQ ID NO: 65417 - protein, 14 aa, Homo Sapiens
PFFLLLLLTVLTVV

SEQ ID NO: 65418 - protein, 14 aa, Homo Sapiens
FFLLLLLTVLTVVT

SEQ ID NO: 65419 - protein, 14 aa, Homo Sapiens
FLLLLLTVLTVVTG

SEQ ID NO: 65420 - protein, 14 aa, Homo Sapiens
LLLLLTVLTVVTGS

SEQ ID NO: 65421 - protein, 14 aa, Homo Sapiens
LLLLTVLTVVTGSG

SEQ ID NO: 65422 - protein, 14 aa, Homo Sapiens
LLLTVLTVVTGSGH

SEQ ID NO: 65423 - protein, 14 aa, Homo Sapiens
LLTVLTVVTGSGHA

SEQ ID NO: 65424 - protein, 14 aa, Homo Sapiens
LTVLTVVTGSGHAS

SEQ ID NO: 65425 - protein, 14 aa, Homo Sapiens
TVLTVVTGSGHASS

SEQ ID NO: 65426 - protein, 14 aa, Homo Sapiens
VLTVVTGSGHASST

SEQ ID NO: 65427 - protein, 14 aa, Homo Sapiens
LTVVTGSGHASSTP

SEQ ID NO: 65428 - protein, 14 aa, Homo Sapiens
TVVTGSGHASSTPG

SEQ ID NO: 65429 - protein, 14 aa, Homo Sapiens
VVTGSGHASSTPGG

SEQ ID NO: 65430 - protein, 14 aa, Homo Sapiens
VTGSGHASSTPGGE

SEQ ID NO: 65431 - protein, 14 aa, Homo Sapiens
TGSGHASSTPGGEK

SEQ ID NO: 65432 - protein, 14 aa, Homo Sapiens
GSGHASSTPGGEKE

SEQ ID NO: 65433 - protein, 14 aa, Homo Sapiens
SGHASSTPGGEKET

SEQ ID NO: 65434 - protein, 14 aa, Homo Sapiens
GHASSTPGGEKETS

SEQ ID NO: 65435 - protein, 14 aa, Homo Sapiens
HASSTPGGEKETSA

SEQ ID NO: 65436 - protein, 14 aa, Homo Sapiens
ASSTPGGEKETSAT

SEQ ID NO: 65437 - protein, 14 aa, Homo Sapiens
SSTPGGEKETSATQ

SEQ ID NO: 65438 - protein, 14 aa, Homo Sapiens
STPGGEKETSATQR

SEQ ID NO: 65439 - protein, 14 aa, Homo Sapiens
TPGGEKETSATQRS

SEQ ID NO: 65440 - protein, 14 aa, Homo Sapiens
PGGEKETSATQRSS

SEQ ID NO: 65441 - protein, 14 aa, Homo Sapiens
GGEKETSATQRSSV

SEQ ID NO: 65442 - protein, 14 aa, Homo Sapiens
GEKETSATQRSSVP

SEQ ID NO: 65443 - protein, 14 aa, Homo Sapiens
EKETSATQRSSVPS

SEQ ID NO: 65444 - protein, 14 aa, Homo Sapiens
KETSATQRSSVPSS

SEQ ID NO: 65445 - protein, 14 aa, Homo Sapiens
ETSATQRSSVPSST

SEQ ID NO: 65446 - protein, 14 aa, Homo Sapiens
TSATQRSSVPSSTE

SEQ ID NO: 65447 - protein, 14 aa, Homo Sapiens
SATQRSSVPSSTEK

SEQ ID NO: 65448 - protein, 14 aa, Homo Sapiens
ATQRSSVPSSTEKN

SEQ ID NO: 65449 - protein, 14 aa, Homo Sapiens
TQRSSVPSSTEKNA

SEQ ID NO: 65450 - protein, 14 aa, Homo Sapiens
QRSSVPSSTEKNAV

SEQ ID NO: 65451 - protein, 14 aa, Homo Sapiens
RSSVPSSTEKNAVS

SEQ ID NO: 65452 - protein, 14 aa, Homo Sapiens
SSVPSSTEKNAVSM

SEQ ID NO: 65453 - protein, 14 aa, Homo Sapiens
SVPSSTEKNAVSMT

SEQ ID NO: 65454 - protein, 14 aa, Homo Sapiens
VPSSTEKNAVSMTS

SEQ ID NO: 65455 - protein, 14 aa, Homo Sapiens
PSSTEKNAVSMTSS

SEQ ID NO: 65456 - protein, 14 aa, Homo Sapiens
SSTEKNAVSMTSSV

SEQ ID NO: 65457 - protein, 14 aa, Homo Sapiens
STEKNAVSMTSSVL

SEQ ID NO: 65458 - protein, 14 aa, Homo Sapiens
TEKNAVSMTSSVLS

SEQ ID NO: 65459 - protein, 14 aa, Homo Sapiens
EKNAVSMTSSVLSS

SEQ ID NO: 65460 - protein, 14 aa, Homo Sapiens
KNAVSMTSSVLSSH

SEQ ID NO: 65461 - protein, 14 aa, Homo Sapiens
NAVSMTSSVLSSHS

SEQ ID NO: 65462 - protein, 14 aa, Homo Sapiens
AVSMTSSVLSSHSP

SEQ ID NO: 65463 - protein, 14 aa, Homo Sapiens
VSMTSSVLSSHSPG

SEQ ID NO: 65464 - protein, 14 aa, Homo Sapiens
SMTSSVLSSHSPGS

SEQ ID NO: 65465 - protein, 14 aa, Homo Sapiens
MTSSVLSSHSPGSG

SEQ ID NO: 65466 - protein, 14 aa, Homo Sapiens
TSSVLSSHSPGSGS

SEQ ID NO: 65467 - protein, 14 aa, Homo Sapiens
SSVLSSHSPGSGSS

SEQ ID NO: 65468 - protein, 14 aa, Homo Sapiens
SVLSSHSPGSGSST

SEQ ID NO: 65469 - protein, 14 aa, Homo Sapiens
VLSSHSPGSGSSTT

SEQ ID NO: 65470 - protein, 14 aa, Homo Sapiens
LSSHSPGSGSSTTQ

SEQ ID NO: 65471 - protein, 14 aa, Homo Sapiens
SSHSPGSGSSTTQG

SEQ ID NO: 65472 - protein, 14 aa, Homo Sapiens
SHSPGSGSSTTQGQ

SEQ ID NO: 65473 - protein, 14 aa, Homo Sapiens
HSPGSGSSTTQGQD

SEQ ID NO: 65474 - protein, 14 aa, Homo Sapiens
SPGSGSSTTQGQDV

SEQ ID NO: 65475 - protein, 14 aa, Homo Sapiens
PGSGSSTTQGQDVT

SEQ ID NO: 65476 - protein, 14 aa, Homo Sapiens
GSGSSTTQGQDVTL

SEQ ID NO: 65477 - protein, 14 aa, Homo Sapiens
SGSSTTQGQDVTLA

SEQ ID NO: 65478 - protein, 14 aa, Homo Sapiens
GSSTTQGQDVTLAP

SEQ ID NO: 65479 - protein, 14 aa, Homo Sapiens
SSTTQGQDVTLAPA

SEQ ID NO: 65480 - protein, 14 aa, Homo Sapiens
STTQGQDVTLAPAT

SEQ ID NO: 65481 - protein, 14 aa, Homo Sapiens
TTQGQDVTLAPATE

SEQ ID NO: 65482 - protein, 14 aa, Homo Sapiens
TQGQDVTLAPATEP

SEQ ID NO: 65483 - protein, 14 aa, Homo Sapiens
QGQDVTLAPATEPA

SEQ ID NO: 65484 - protein, 14 aa, Homo Sapiens
GQDVTLAPATEPAS

SEQ ID NO: 65485 - protein, 14 aa, Homo Sapiens
QDVTLAPATEPASG

SEQ ID NO: 65486 - protein, 14 aa, Homo Sapiens
DVTLAPATEPASGS

SEQ ID NO: 65487 - protein, 14 aa, Homo Sapiens
VTLAPATEPASGSA

SEQ ID NO: 65488 - protein, 14 aa, Homo Sapiens
TLAPATEPASGSAA

SEQ ID NO: 65489 - protein, 14 aa, Homo Sapiens
LAPATEPASGSAAT

SEQ ID NO: 65490 - protein, 14 aa, Homo Sapiens
APATEPASGSAATW

SEQ ID NO: 65491 - protein, 14 aa, Homo Sapiens
PATEPASGSAATWG

SEQ ID NO: 65492 - protein, 14 aa, Homo Sapiens
ATEPASGSAATWGQ

SEQ ID NO: 65493 - protein, 14 aa, Homo Sapiens
TEPASGSAATWGQD

SEQ ID NO: 65494 - protein, 14 aa, Homo Sapiens
EPASGSAATWGQDV

SEQ ID NO: 65495 - protein, 14 aa, Homo Sapiens
PASGSAATWGQDVT

SEQ ID NO: 65496 - protein, 14 aa, Homo Sapiens
ASGSAATWGQDVTS

SEQ ID NO: 65497 - protein, 14 aa, Homo Sapiens
SGSAATWGQDVTSV

SEQ ID NO: 65498 - protein, 14 aa, Homo Sapiens
GSAATWGQDVTSVP

SEQ ID NO: 65499 - protein, 14 aa, Homo Sapiens
SAATWGQDVTSVPV

SEQ ID NO: 65500 - protein, 14 aa, Homo Sapiens
AATWGQDVTSVPVT

SEQ ID NO: 65501 - protein, 14 aa, Homo Sapiens
ATWGQDVTSVPVTR

SEQ ID NO: 65502 - protein, 14 aa, Homo Sapiens
TWGQDVTSVPVTRP

SEQ ID NO: 65503 - protein, 14 aa, Homo Sapiens
WGQDVTSVPVTRPA

SEQ ID NO: 65504 - protein, 14 aa, Homo Sapiens
GQDVTSVPVTRPAL

SEQ ID NO: 65505 - protein, 14 aa, Homo Sapiens
QDVTSVPVTRPALG

SEQ ID NO: 65506 - protein, 14 aa, Homo Sapiens
DVTSVPVTRPALGS

SEQ ID NO: 65507 - protein, 14 aa, Homo Sapiens
VTSVPVTRPALGST

SEQ ID NO: 65508 - protein, 14 aa, Homo Sapiens
TSVPVTRPALGSTT

SEQ ID NO: 65509 - protein, 14 aa, Homo Sapiens
SVPVTRPALGSTTP

SEQ ID NO: 65510 - protein, 14 aa, Homo Sapiens
VPVTRPALGSTTPP

SEQ ID NO: 65511 - protein, 14 aa, Homo Sapiens
PVTRPALGSTTPPA

SEQ ID NO: 65512 - protein, 14 aa, Homo Sapiens
VTRPALGSTTPPAH

SEQ ID NO: 65513 - protein, 14 aa, Homo Sapiens
TRPALGSTTPPAHD

SEQ ID NO: 65514 - protein, 14 aa, Homo Sapiens
RPALGSTTPPAHDV

SEQ ID NO: 65515 - protein, 14 aa, Homo Sapiens
PALGSTTPPAHDVT

SEQ ID NO: 65516 - protein, 14 aa, Homo Sapiens
ALGSTTPPAHDVTS

SEQ ID NO: 65517 - protein, 14 aa, Homo Sapiens
LGSTTPPAHDVTSA

SEQ ID NO: 65518 - protein, 14 aa, Homo Sapiens
GSTTPPAHDVTSAP

SEQ ID NO: 65519 - protein, 14 aa, Homo Sapiens
STTPPAHDVTSAPD

SEQ ID NO: 65520 - protein, 14 aa, Homo Sapiens
TTPPAHDVTSAPDN

SEQ ID NO: 65521 - protein, 14 aa, Homo Sapiens
TPPAHDVTSAPDNK

SEQ ID NO: 65522 - protein, 14 aa, Homo Sapiens
PPAHDVTSAPDNKP

SEQ ID NO: 65523 - protein, 14 aa, Homo Sapiens
PAHDVTSAPDNKPA

SEQ ID NO: 65524 - protein, 14 aa, Homo Sapiens
AHDVTSAPDNKPAP

SEQ ID NO: 65525 - protein, 14 aa, Homo Sapiens
HDVTSAPDNKPAPG

SEQ ID NO: 65526 - protein, 14 aa, Homo Sapiens
DVTSAPDNKPAPGS

SEQ ID NO: 65527 - protein, 14 aa, Homo Sapiens
VTSAPDNKPAPGST

SEQ ID NO: 65528 - protein, 14 aa, Homo Sapiens
TSAPDNKPAPGSTA

SEQ ID NO: 65529 - protein, 14 aa, Homo Sapiens
SAPDNKPAPGSTAP

SEQ ID NO: 65530 - protein, 14 aa, Homo Sapiens
APDNKPAPGSTAPP

SEQ ID NO: 65531 - protein, 14 aa, Homo Sapiens
PDNKPAPGSTAPPA

SEQ ID NO: 65532 - protein, 14 aa, Homo Sapiens
DNKPAPGSTAPPAH

SEQ ID NO: 65533 - protein, 14 aa, Homo Sapiens
NKPAPGSTAPPAHG

SEQ ID NO: 65534 - protein, 14 aa, Homo Sapiens
KPAPGSTAPPAHGV

SEQ ID NO: 65535 - protein, 14 aa, Homo Sapiens
PAPGSTAPPAHGVT

SEQ ID NO: 65536 - protein, 14 aa, Homo Sapiens
APGSTAPPAHGVTS

SEQ ID NO: 65537 - protein, 14 aa, Homo Sapiens
PGSTAPPAHGVTSA

SEQ ID NO: 65538 - protein, 14 aa, Homo Sapiens
GSTAPPAHGVTSAP

SEQ ID NO: 65539 - protein, 14 aa, Homo Sapiens
STAPPAHGVTSAPD

SEQ ID NO: 65540 - protein, 14 aa, Homo Sapiens
TAPPAHGVTSAPDT

SEQ ID NO: 65541 - protein, 14 aa, Homo Sapiens
APPAHGVTSAPDTR

SEQ ID NO: 65542 - protein, 14 aa, Homo Sapiens
PPAHGVTSAPDTRP

SEQ ID NO: 65543 - protein, 14 aa, Homo Sapiens
PAHGVTSAPDTRPA

SEQ ID NO: 65544 - protein, 14 aa, Homo Sapiens
AHGVTSAPDTRPAP

SEQ ID NO: 65545 - protein, 14 aa, Homo Sapiens
HGVTSAPDTRPAPG

SEQ ID NO: 65546 - protein, 14 aa, Homo Sapiens
GVTSAPDTRPAPGS

SEQ ID NO: 65547 - protein, 14 aa, Homo Sapiens
VTSAPDTRPAPGST

SEQ ID NO: 65548 - protein, 14 aa, Homo Sapiens
TSAPDTRPAPGSTA

SEQ ID NO: 65549 - protein, 14 aa, Homo Sapiens
SAPDTRPAPGSTAP

SEQ ID NO: 65550 - protein, 14 aa, Homo Sapiens
APDTRPAPGSTAPP

SEQ ID NO: 65551 - protein, 14 aa, Homo Sapiens
PDTRPAPGSTAPPA

SEQ ID NO: 65552 - protein, 14 aa, Homo Sapiens
DTRPAPGSTAPPAH

SEQ ID NO: 65553 - protein, 14 aa, Homo Sapiens
TRPAPGSTAPPAHG

SEQ ID NO: 65554 - protein, 14 aa, Homo Sapiens
RPAPGSTAPPAHGV

SEQ ID NO: 65555 - protein, 14 aa, Homo Sapiens
PAPGSTAPPAHGVT

SEQ ID NO: 65556 - protein, 14 aa, Homo Sapiens
APGSTAPPAHGVTS

SEQ ID NO: 65557 - protein, 14 aa, Homo Sapiens
PGSTAPPAHGVTSA

SEQ ID NO: 65558 - protein, 14 aa, Homo Sapiens
GSTAPPAHGVTSAP

SEQ ID NO: 65559 - protein, 14 aa, Homo Sapiens
STAPPAHGVTSAPD

SEQ ID NO: 65560 - protein, 14 aa, Homo Sapiens
TAPPAHGVTSAPDT

SEQ ID NO: 65561 - protein, 14 aa, Homo Sapiens
APPAHGVTSAPDTR

SEQ ID NO: 65562 - protein, 14 aa, Homo Sapiens
PPAHGVTSAPDTRP

SEQ ID NO: 65563 - protein, 14 aa, Homo Sapiens
PAHGVTSAPDTRPA

SEQ ID NO: 65564 - protein, 14 aa, Homo Sapiens
AHGVTSAPDTRPAP

SEQ ID NO: 65565 - protein, 14 aa, Homo Sapiens
HGVTSAPDTRPAPG

SEQ ID NO: 65566 - protein, 14 aa, Homo Sapiens
GVTSAPDTRPAPGS

SEQ ID NO: 65567 - protein, 14 aa, Homo Sapiens
VTSAPDTRPAPGST

SEQ ID NO: 65568 - protein, 14 aa, Homo Sapiens
TSAPDTRPAPGSTA

SEQ ID NO: 65569 - protein, 14 aa, Homo Sapiens
SAPDTRPAPGSTAP

SEQ ID NO: 65570 - protein, 14 aa, Homo Sapiens
APDTRPAPGSTAPP

SEQ ID NO: 65571 - protein, 14 aa, Homo Sapiens
PDTRPAPGSTAPPA

SEQ ID NO: 65572 - protein, 14 aa, Homo Sapiens
DTRPAPGSTAPPAH

SEQ ID NO: 65573 - protein, 14 aa, Homo Sapiens
TRPAPGSTAPPAHG

SEQ ID NO: 65574 - protein, 14 aa, Homo Sapiens
RPAPGSTAPPAHGV

SEQ ID NO: 65575 - protein, 14 aa, Homo Sapiens
PAPGSTAPPAHGVT

SEQ ID NO: 65576 - protein, 14 aa, Homo Sapiens
APGSTAPPAHGVTS

SEQ ID NO: 65577 - protein, 14 aa, Homo Sapiens
PGSTAPPAHGVTSA

SEQ ID NO: 65578 - protein, 14 aa, Homo Sapiens
GSTAPPAHGVTSAP

SEQ ID NO: 65579 - protein, 14 aa, Homo Sapiens
STAPPAHGVTSAPD

SEQ ID NO: 65580 - protein, 14 aa, Homo Sapiens
TAPPAHGVTSAPDT

SEQ ID NO: 65581 - protein, 14 aa, Homo Sapiens
APPAHGVTSAPDTR

SEQ ID NO: 65582 - protein, 14 aa, Homo Sapiens
PPAHGVTSAPDTRP

SEQ ID NO: 65583 - protein, 14 aa, Homo Sapiens
PAHGVTSAPDTRPA

SEQ ID NO: 65584 - protein, 14 aa, Homo Sapiens
AHGVTSAPDTRPAP

SEQ ID NO: 65585 - protein, 14 aa, Homo Sapiens
HGVTSAPDTRPAPG

SEQ ID NO: 65586 - protein, 14 aa, Homo Sapiens
GVTSAPDTRPAPGS

SEQ ID NO: 65587 - protein, 14 aa, Homo Sapiens
VTSAPDTRPAPGST

SEQ ID NO: 65588 - protein, 14 aa, Homo Sapiens
TSAPDTRPAPGSTA

SEQ ID NO: 65589 - protein, 14 aa, Homo Sapiens
SAPDTRPAPGSTAP

SEQ ID NO: 65590 - protein, 14 aa, Homo Sapiens
APDTRPAPGSTAPP

SEQ ID NO: 65591 - protein, 14 aa, Homo Sapiens
PDTRPAPGSTAPPA

SEQ ID NO: 65592 - protein, 14 aa, Homo Sapiens
DTRPAPGSTAPPAH

SEQ ID NO: 65593 - protein, 14 aa, Homo Sapiens
TRPAPGSTAPPAHG

SEQ ID NO: 65594 - protein, 14 aa, Homo Sapiens
RPAPGSTAPPAHGV

SEQ ID NO: 65595 - protein, 14 aa, Homo Sapiens
PAPGSTAPPAHGVT

SEQ ID NO: 65596 - protein, 14 aa, Homo Sapiens
APGSTAPPAHGVTS

SEQ ID NO: 65597 - protein, 14 aa, Homo Sapiens
PGSTAPPAHGVTSA

SEQ ID NO: 65598 - protein, 14 aa, Homo Sapiens
GSTAPPAHGVTSAP

SEQ ID NO: 65599 - protein, 14 aa, Homo Sapiens
STAPPAHGVTSAPD

SEQ ID NO: 65600 - protein, 14 aa, Homo Sapiens
TAPPAHGVTSAPDT

SEQ ID NO: 65601 - protein, 14 aa, Homo Sapiens
APPAHGVTSAPDTR

SEQ ID NO: 65602 - protein, 14 aa, Homo Sapiens
PPAHGVTSAPDTRP

SEQ ID NO: 65603 - protein, 14 aa, Homo Sapiens
PAHGVTSAPDTRPA

SEQ ID NO: 65604 - protein, 14 aa, Homo Sapiens
AHGVTSAPDTRPAP

SEQ ID NO: 65605 - protein, 14 aa, Homo Sapiens
HGVTSAPDTRPAPG

SEQ ID NO: 65606 - protein, 14 aa, Homo Sapiens
GVTSAPDTRPAPGS

SEQ ID NO: 65607 - protein, 14 aa, Homo Sapiens
VTSAPDTRPAPGST

SEQ ID NO: 65608 - protein, 14 aa, Homo Sapiens
TSAPDTRPAPGSTA

SEQ ID NO: 65609 - protein, 14 aa, Homo Sapiens
SAPDTRPAPGSTAP

SEQ ID NO: 65610 - protein, 14 aa, Homo Sapiens
APDTRPAPGSTAPP

SEQ ID NO: 65611 - protein, 14 aa, Homo Sapiens
PDTRPAPGSTAPPA

SEQ ID NO: 65612 - protein, 14 aa, Homo Sapiens
DTRPAPGSTAPPAH

SEQ ID NO: 65613 - protein, 14 aa, Homo Sapiens
TRPAPGSTAPPAHG

SEQ ID NO: 65614 - protein, 14 aa, Homo Sapiens
RPAPGSTAPPAHGV

SEQ ID NO: 65615 - protein, 14 aa, Homo Sapiens
PAPGSTAPPAHGVT

SEQ ID NO: 65616 - protein, 14 aa, Homo Sapiens
APGSTAPPAHGVTS

SEQ ID NO: 65617 - protein, 14 aa, Homo Sapiens
PGSTAPPAHGVTSA

SEQ ID NO: 65618 - protein, 14 aa, Homo Sapiens
GSTAPPAHGVTSAP

SEQ ID NO: 65619 - protein, 14 aa, Homo Sapiens
STAPPAHGVTSAPD

SEQ ID NO: 65620 - protein, 14 aa, Homo Sapiens
TAPPAHGVTSAPDT

SEQ ID NO: 65621 - protein, 14 aa, Homo Sapiens
APPAHGVTSAPDTR

SEQ ID NO: 65622 - protein, 14 aa, Homo Sapiens
PPAHGVTSAPDTRP

SEQ ID NO: 65623 - protein, 14 aa, Homo Sapiens
PAHGVTSAPDTRPA

SEQ ID NO: 65624 - protein, 14 aa, Homo Sapiens
AHGVTSAPDTRPAP

SEQ ID NO: 65625 - protein, 14 aa, Homo Sapiens
HGVTSAPDTRPAPG

SEQ ID NO: 65626 - protein, 14 aa, Homo Sapiens
GVTSAPDTRPAPGS

SEQ ID NO: 65627 - protein, 14 aa, Homo Sapiens
VTSAPDTRPAPGST

SEQ ID NO: 65628 - protein, 14 aa, Homo Sapiens
TSAPDTRPAPGSTA

SEQ ID NO: 65629 - protein, 14 aa, Homo Sapiens
SAPDTRPAPGSTAP

SEQ ID NO: 65630 - protein, 14 aa, Homo Sapiens
APDTRPAPGSTAPP

SEQ ID NO: 65631 - protein, 14 aa, Homo Sapiens
PDTRPAPGSTAPPA

SEQ ID NO: 65632 - protein, 14 aa, Homo Sapiens
DTRPAPGSTAPPAH

SEQ ID NO: 65633 - protein, 14 aa, Homo Sapiens
TRPAPGSTAPPAHG

SEQ ID NO: 65634 - protein, 14 aa, Homo Sapiens
RPAPGSTAPPAHGV

SEQ ID NO: 65635 - protein, 14 aa, Homo Sapiens
PAPGSTAPPAHGVT

SEQ ID NO: 65636 - protein, 14 aa, Homo Sapiens
APGSTAPPAHGVTS

SEQ ID NO: 65637 - protein, 14 aa, Homo Sapiens
PGSTAPPAHGVTSA

SEQ ID NO: 65638 - protein, 14 aa, Homo Sapiens
GSTAPPAHGVTSAP

SEQ ID NO: 65639 - protein, 14 aa, Homo Sapiens
STAPPAHGVTSAPD

SEQ ID NO: 65640 - protein, 14 aa, Homo Sapiens
TAPPAHGVTSAPDT

SEQ ID NO: 65641 - protein, 14 aa, Homo Sapiens
APPAHGVTSAPDTR

SEQ ID NO: 65642 - protein, 14 aa, Homo Sapiens
PPAHGVTSAPDTRP

SEQ ID NO: 65643 - protein, 14 aa, Homo Sapiens
PAHGVTSAPDTRPA

SEQ ID NO: 65644 - protein, 14 aa, Homo Sapiens
AHGVTSAPDTRPAP

SEQ ID NO: 65645 - protein, 14 aa, Homo Sapiens
HGVTSAPDTRPAPG

SEQ ID NO: 65646 - protein, 14 aa, Homo Sapiens
GVTSAPDTRPAPGS

SEQ ID NO: 65647 - protein, 14 aa, Homo Sapiens
VTSAPDTRPAPGST

SEQ ID NO: 65648 - protein, 14 aa, Homo Sapiens
TSAPDTRPAPGSTA

SEQ ID NO: 65649 - protein, 14 aa, Homo Sapiens
SAPDTRPAPGSTAP

SEQ ID NO: 65650 - protein, 14 aa, Homo Sapiens
APDTRPAPGSTAPP

SEQ ID NO: 65651 - protein, 14 aa, Homo Sapiens
PDTRPAPGSTAPPA

SEQ ID NO: 65652 - protein, 14 aa, Homo Sapiens
DTRPAPGSTAPPAH

SEQ ID NO: 65653 - protein, 14 aa, Homo Sapiens
TRPAPGSTAPPAHG

SEQ ID NO: 65654 - protein, 14 aa, Homo Sapiens
RPAPGSTAPPAHGV

SEQ ID NO: 65655 - protein, 14 aa, Homo Sapiens
PAPGSTAPPAHGVT

SEQ ID NO: 65656 - protein, 14 aa, Homo Sapiens
APGSTAPPAHGVTS

SEQ ID NO: 65657 - protein, 14 aa, Homo Sapiens
PGSTAPPAHGVTSA

SEQ ID NO: 65658 - protein, 14 aa, Homo Sapiens
GSTAPPAHGVTSAP

SEQ ID NO: 65659 - protein, 14 aa, Homo Sapiens
STAPPAHGVTSAPD

SEQ ID NO: 65660 - protein, 14 aa, Homo Sapiens
TAPPAHGVTSAPDT

SEQ ID NO: 65661 - protein, 14 aa, Homo Sapiens
APPAHGVTSAPDTR

SEQ ID NO: 65662 - protein, 14 aa, Homo Sapiens
PPAHGVTSAPDTRP

SEQ ID NO: 65663 - protein, 14 aa, Homo Sapiens
PAHGVTSAPDTRPA

SEQ ID NO: 65664 - protein, 14 aa, Homo Sapiens
AHGVTSAPDTRPAP

SEQ ID NO: 65665 - protein, 14 aa, Homo Sapiens
HGVTSAPDTRPAPG

SEQ ID NO: 65666 - protein, 14 aa, Homo Sapiens
GVTSAPDTRPAPGS

SEQ ID NO: 65667 - protein, 14 aa, Homo Sapiens
VTSAPDTRPAPGST

SEQ ID NO: 65668 - protein, 14 aa, Homo Sapiens
TSAPDTRPAPGSTA

SEQ ID NO: 65669 - protein, 14 aa, Homo Sapiens
SAPDTRPAPGSTAP

SEQ ID NO: 65670 - protein, 14 aa, Homo Sapiens
APDTRPAPGSTAPP

SEQ ID NO: 65671 - protein, 14 aa, Homo Sapiens
PDTRPAPGSTAPPA

SEQ ID NO: 65672 - protein, 14 aa, Homo Sapiens
DTRPAPGSTAPPAH

SEQ ID NO: 65673 - protein, 14 aa, Homo Sapiens
TRPAPGSTAPPAHG

SEQ ID NO: 65674 - protein, 14 aa, Homo Sapiens
RPAPGSTAPPAHGV

SEQ ID NO: 65675 - protein, 14 aa, Homo Sapiens
PAPGSTAPPAHGVT

SEQ ID NO: 65676 - protein, 14 aa, Homo Sapiens
APGSTAPPAHGVTS

SEQ ID NO: 65677 - protein, 14 aa, Homo Sapiens
PGSTAPPAHGVTSA

SEQ ID NO: 65678 - protein, 14 aa, Homo Sapiens
GSTAPPAHGVTSAP

SEQ ID NO: 65679 - protein, 14 aa, Homo Sapiens
STAPPAHGVTSAPD

SEQ ID NO: 65680 - protein, 14 aa, Homo Sapiens
TAPPAHGVTSAPDT

SEQ ID NO: 65681 - protein, 14 aa, Homo Sapiens
APPAHGVTSAPDTR

SEQ ID NO: 65682 - protein, 14 aa, Homo Sapiens
PPAHGVTSAPDTRP

SEQ ID NO: 65683 - protein, 14 aa, Homo Sapiens
PAHGVTSAPDTRPA

SEQ ID NO: 65684 - protein, 14 aa, Homo Sapiens
AHGVTSAPDTRPAP

SEQ ID NO: 65685 - protein, 14 aa, Homo Sapiens
HGVTSAPDTRPAPG

SEQ ID NO: 65686 - protein, 14 aa, Homo Sapiens
GVTSAPDTRPAPGS

SEQ ID NO: 65687 - protein, 14 aa, Homo Sapiens
VTSAPDTRPAPGST

SEQ ID NO: 65688 - protein, 14 aa, Homo Sapiens
TSAPDTRPAPGSTA

SEQ ID NO: 65689 - protein, 14 aa, Homo Sapiens
SAPDTRPAPGSTAP

SEQ ID NO: 65690 - protein, 14 aa, Homo Sapiens
APDTRPAPGSTAPP

SEQ ID NO: 65691 - protein, 14 aa, Homo Sapiens
PDTRPAPGSTAPPA

SEQ ID NO: 65692 - protein, 14 aa, Homo Sapiens
DTRPAPGSTAPPAH

SEQ ID NO: 65693 - protein, 14 aa, Homo Sapiens
TRPAPGSTAPPAHG

SEQ ID NO: 65694 - protein, 14 aa, Homo Sapiens
RPAPGSTAPPAHGV

SEQ ID NO: 65695 - protein, 14 aa, Homo Sapiens
PAPGSTAPPAHGVT

SEQ ID NO: 65696 - protein, 14 aa, Homo Sapiens
APGSTAPPAHGVTS

SEQ ID NO: 65697 - protein, 14 aa, Homo Sapiens
PGSTAPPAHGVTSA

SEQ ID NO: 65698 - protein, 14 aa, Homo Sapiens
GSTAPPAHGVTSAP

SEQ ID NO: 65699 - protein, 14 aa, Homo Sapiens
STAPPAHGVTSAPD

SEQ ID NO: 65700 - protein, 14 aa, Homo Sapiens
TAPPAHGVTSAPDT

SEQ ID NO: 65701 - protein, 14 aa, Homo Sapiens
APPAHGVTSAPDTR

SEQ ID NO: 65702 - protein, 14 aa, Homo Sapiens
PPAHGVTSAPDTRP

SEQ ID NO: 65703 - protein, 14 aa, Homo Sapiens
PAHGVTSAPDTRPA

SEQ ID NO: 65704 - protein, 14 aa, Homo Sapiens
AHGVTSAPDTRPAP

SEQ ID NO: 65705 - protein, 14 aa, Homo Sapiens
HGVTSAPDTRPAPG

SEQ ID NO: 65706 - protein, 14 aa, Homo Sapiens
GVTSAPDTRPAPGS

SEQ ID NO: 65707 - protein, 14 aa, Homo Sapiens
VTSAPDTRPAPGST

SEQ ID NO: 65708 - protein, 14 aa, Homo Sapiens
TSAPDTRPAPGSTA

SEQ ID NO: 65709 - protein, 14 aa, Homo Sapiens
SAPDTRPAPGSTAP

SEQ ID NO: 65710 - protein, 14 aa, Homo Sapiens
APDTRPAPGSTAPP

SEQ ID NO: 65711 - protein, 14 aa, Homo Sapiens
PDTRPAPGSTAPPA

SEQ ID NO: 65712 - protein, 14 aa, Homo Sapiens
DTRPAPGSTAPPAH

SEQ ID NO: 65713 - protein, 14 aa, Homo Sapiens
TRPAPGSTAPPAHG

SEQ ID NO: 65714 - protein, 14 aa, Homo Sapiens
RPAPGSTAPPAHGV

SEQ ID NO: 65715 - protein, 14 aa, Homo Sapiens
PAPGSTAPPAHGVT

SEQ ID NO: 65716 - protein, 14 aa, Homo Sapiens
APGSTAPPAHGVTS

SEQ ID NO: 65717 - protein, 14 aa, Homo Sapiens
PGSTAPPAHGVTSA

SEQ ID NO: 65718 - protein, 14 aa, Homo Sapiens
GSTAPPAHGVTSAP

SEQ ID NO: 65719 - protein, 14 aa, Homo Sapiens
STAPPAHGVTSAPD

SEQ ID NO: 65720 - protein, 14 aa, Homo Sapiens
TAPPAHGVTSAPDT

SEQ ID NO: 65721 - protein, 14 aa, Homo Sapiens
APPAHGVTSAPDTR

SEQ ID NO: 65722 - protein, 14 aa, Homo Sapiens
PPAHGVTSAPDTRP

SEQ ID NO: 65723 - protein, 14 aa, Homo Sapiens
PAHGVTSAPDTRPA

SEQ ID NO: 65724 - protein, 14 aa, Homo Sapiens
AHGVTSAPDTRPAP

SEQ ID NO: 65725 - protein, 14 aa, Homo Sapiens
HGVTSAPDTRPAPG

SEQ ID NO: 65726 - protein, 14 aa, Homo Sapiens
GVTSAPDTRPAPGS

SEQ ID NO: 65727 - protein, 14 aa, Homo Sapiens
VTSAPDTRPAPGST

SEQ ID NO: 65728 - protein, 14 aa, Homo Sapiens
TSAPDTRPAPGSTA

SEQ ID NO: 65729 - protein, 14 aa, Homo Sapiens
SAPDTRPAPGSTAP

SEQ ID NO: 65730 - protein, 14 aa, Homo Sapiens
APDTRPAPGSTAPP

SEQ ID NO: 65731 - protein, 14 aa, Homo Sapiens
PDTRPAPGSTAPPA

SEQ ID NO: 65732 - protein, 14 aa, Homo Sapiens
DTRPAPGSTAPPAH

SEQ ID NO: 65733 - protein, 14 aa, Homo Sapiens
TRPAPGSTAPPAHG

SEQ ID NO: 65734 - protein, 14 aa, Homo Sapiens
RPAPGSTAPPAHGV

SEQ ID NO: 65735 - protein, 14 aa, Homo Sapiens
PAPGSTAPPAHGVT

SEQ ID NO: 65736 - protein, 14 aa, Homo Sapiens
APGSTAPPAHGVTS

SEQ ID NO: 65737 - protein, 14 aa, Homo Sapiens
PGSTAPPAHGVTSA

SEQ ID NO: 65738 - protein, 14 aa, Homo Sapiens
GSTAPPAHGVTSAP

SEQ ID NO: 65739 - protein, 14 aa, Homo Sapiens
STAPPAHGVTSAPD

SEQ ID NO: 65740 - protein, 14 aa, Homo Sapiens
TAPPAHGVTSAPDT

SEQ ID NO: 65741 - protein, 14 aa, Homo Sapiens
APPAHGVTSAPDTR

SEQ ID NO: 65742 - protein, 14 aa, Homo Sapiens
PPAHGVTSAPDTRP

SEQ ID NO: 65743 - protein, 14 aa, Homo Sapiens
PAHGVTSAPDTRPA

SEQ ID NO: 65744 - protein, 14 aa, Homo Sapiens
AHGVTSAPDTRPAP

SEQ ID NO: 65745 - protein, 14 aa, Homo Sapiens
HGVTSAPDTRPAPG

SEQ ID NO: 65746 - protein, 14 aa, Homo Sapiens
GVTSAPDTRPAPGS

SEQ ID NO: 65747 - protein, 14 aa, Homo Sapiens
VTSAPDTRPAPGST

SEQ ID NO: 65748 - protein, 14 aa, Homo Sapiens
TSAPDTRPAPGSTA

SEQ ID NO: 65749 - protein, 14 aa, Homo Sapiens
SAPDTRPAPGSTAP

SEQ ID NO: 65750 - protein, 14 aa, Homo Sapiens
APDTRPAPGSTAPP

SEQ ID NO: 65751 - protein, 14 aa, Homo Sapiens
PDTRPAPGSTAPPA

SEQ ID NO: 65752 - protein, 14 aa, Homo Sapiens
DTRPAPGSTAPPAH

SEQ ID NO: 65753 - protein, 14 aa, Homo Sapiens
TRPAPGSTAPPAHG

SEQ ID NO: 65754 - protein, 14 aa, Homo Sapiens
RPAPGSTAPPAHGV

SEQ ID NO: 65755 - protein, 14 aa, Homo Sapiens
PAPGSTAPPAHGVT

SEQ ID NO: 65756 - protein, 14 aa, Homo Sapiens
APGSTAPPAHGVTS

SEQ ID NO: 65757 - protein, 14 aa, Homo Sapiens
PGSTAPPAHGVTSA

SEQ ID NO: 65758 - protein, 14 aa, Homo Sapiens
GSTAPPAHGVTSAP

SEQ ID NO: 65759 - protein, 14 aa, Homo Sapiens
STAPPAHGVTSAPD

SEQ ID NO: 65760 - protein, 14 aa, Homo Sapiens
TAPPAHGVTSAPDT

SEQ ID NO: 65761 - protein, 14 aa, Homo Sapiens
APPAHGVTSAPDTR

SEQ ID NO: 65762 - protein, 14 aa, Homo Sapiens
PPAHGVTSAPDTRP

SEQ ID NO: 65763 - protein, 14 aa, Homo Sapiens
PAHGVTSAPDTRPA

SEQ ID NO: 65764 - protein, 14 aa, Homo Sapiens
AHGVTSAPDTRPAP

SEQ ID NO: 65765 - protein, 14 aa, Homo Sapiens
HGVTSAPDTRPAPG

SEQ ID NO: 65766 - protein, 14 aa, Homo Sapiens
GVTSAPDTRPAPGS

SEQ ID NO: 65767 - protein, 14 aa, Homo Sapiens
VTSAPDTRPAPGST

SEQ ID NO: 65768 - protein, 14 aa, Homo Sapiens
TSAPDTRPAPGSTA

SEQ ID NO: 65769 - protein, 14 aa, Homo Sapiens
SAPDTRPAPGSTAP

SEQ ID NO: 65770 - protein, 14 aa, Homo Sapiens
APDTRPAPGSTAPP

SEQ ID NO: 65771 - protein, 14 aa, Homo Sapiens
PDTRPAPGSTAPPA

SEQ ID NO: 65772 - protein, 14 aa, Homo Sapiens
DTRPAPGSTAPPAH

SEQ ID NO: 65773 - protein, 14 aa, Homo Sapiens
TRPAPGSTAPPAHG

SEQ ID NO: 65774 - protein, 14 aa, Homo Sapiens
RPAPGSTAPPAHGV

SEQ ID NO: 65775 - protein, 14 aa, Homo Sapiens
PAPGSTAPPAHGVT

SEQ ID NO: 65776 - protein, 14 aa, Homo Sapiens
APGSTAPPAHGVTS

SEQ ID NO: 65777 - protein, 14 aa, Homo Sapiens
PGSTAPPAHGVTSA

SEQ ID NO: 65778 - protein, 14 aa, Homo Sapiens
GSTAPPAHGVTSAP

SEQ ID NO: 65779 - protein, 14 aa, Homo Sapiens
STAPPAHGVTSAPD

SEQ ID NO: 65780 - protein, 14 aa, Homo Sapiens
TAPPAHGVTSAPDT

SEQ ID NO: 65781 - protein, 14 aa, Homo Sapiens
APPAHGVTSAPDTR

SEQ ID NO: 65782 - protein, 14 aa, Homo Sapiens
PPAHGVTSAPDTRP

SEQ ID NO: 65783 - protein, 14 aa, Homo Sapiens
PAHGVTSAPDTRPA

SEQ ID NO: 65784 - protein, 14 aa, Homo Sapiens
AHGVTSAPDTRPAP

SEQ ID NO: 65785 - protein, 14 aa, Homo Sapiens
HGVTSAPDTRPAPG

SEQ ID NO: 65786 - protein, 14 aa, Homo Sapiens
GVTSAPDTRPAPGS

SEQ ID NO: 65787 - protein, 14 aa, Homo Sapiens
VTSAPDTRPAPGST

SEQ ID NO: 65788 - protein, 14 aa, Homo Sapiens
TSAPDTRPAPGSTA

SEQ ID NO: 65789 - protein, 14 aa, Homo Sapiens
SAPDTRPAPGSTAP

SEQ ID NO: 65790 - protein, 14 aa, Homo Sapiens
APDTRPAPGSTAPP

SEQ ID NO: 65791 - protein, 14 aa, Homo Sapiens
PDTRPAPGSTAPPA

SEQ ID NO: 65792 - protein, 14 aa, Homo Sapiens
DTRPAPGSTAPPAH

SEQ ID NO: 65793 - protein, 14 aa, Homo Sapiens
TRPAPGSTAPPAHG

SEQ ID NO: 65794 - protein, 14 aa, Homo Sapiens
RPAPGSTAPPAHGV

SEQ ID NO: 65795 - protein, 14 aa, Homo Sapiens
PAPGSTAPPAHGVT

SEQ ID NO: 65796 - protein, 14 aa, Homo Sapiens
APGSTAPPAHGVTS

SEQ ID NO: 65797 - protein, 14 aa, Homo Sapiens
PGSTAPPAHGVTSA

SEQ ID NO: 65798 - protein, 14 aa, Homo Sapiens
GSTAPPAHGVTSAP

SEQ ID NO: 65799 - protein, 14 aa, Homo Sapiens
STAPPAHGVTSAPD

SEQ ID NO: 65800 - protein, 14 aa, Homo Sapiens
TAPPAHGVTSAPDT

SEQ ID NO: 65801 - protein, 14 aa, Homo Sapiens
APPAHGVTSAPDTR

SEQ ID NO: 65802 - protein, 14 aa, Homo Sapiens
PPAHGVTSAPDTRP

SEQ ID NO: 65803 - protein, 14 aa, Homo Sapiens
PAHGVTSAPDTRPA

SEQ ID NO: 65804 - protein, 14 aa, Homo Sapiens
AHGVTSAPDTRPAP

SEQ ID NO: 65805 - protein, 14 aa, Homo Sapiens
HGVTSAPDTRPAPG

SEQ ID NO: 65806 - protein, 14 aa, Homo Sapiens
GVTSAPDTRPAPGS

SEQ ID NO: 65807 - protein, 14 aa, Homo Sapiens
VTSAPDTRPAPGST

SEQ ID NO: 65808 - protein, 14 aa, Homo Sapiens
TSAPDTRPAPGSTA

SEQ ID NO: 65809 - protein, 14 aa, Homo Sapiens
SAPDTRPAPGSTAP

SEQ ID NO: 65810 - protein, 14 aa, Homo Sapiens
APDTRPAPGSTAPP

SEQ ID NO: 65811 - protein, 14 aa, Homo Sapiens
PDTRPAPGSTAPPA

SEQ ID NO: 65812 - protein, 14 aa, Homo Sapiens
DTRPAPGSTAPPAH

SEQ ID NO: 65813 - protein, 14 aa, Homo Sapiens
TRPAPGSTAPPAHG

SEQ ID NO: 65814 - protein, 14 aa, Homo Sapiens
RPAPGSTAPPAHGV

SEQ ID NO: 65815 - protein, 14 aa, Homo Sapiens
PAPGSTAPPAHGVT

SEQ ID NO: 65816 - protein, 14 aa, Homo Sapiens
APGSTAPPAHGVTS

SEQ ID NO: 65817 - protein, 14 aa, Homo Sapiens
PGSTAPPAHGVTSA

SEQ ID NO: 65818 - protein, 14 aa, Homo Sapiens
GSTAPPAHGVTSAP

SEQ ID NO: 65819 - protein, 14 aa, Homo Sapiens
STAPPAHGVTSAPD

SEQ ID NO: 65820 - protein, 14 aa, Homo Sapiens
TAPPAHGVTSAPDT

SEQ ID NO: 65821 - protein, 14 aa, Homo Sapiens
APPAHGVTSAPDTR

SEQ ID NO: 65822 - protein, 14 aa, Homo Sapiens
PPAHGVTSAPDTRP

SEQ ID NO: 65823 - protein, 14 aa, Homo Sapiens
PAHGVTSAPDTRPA

SEQ ID NO: 65824 - protein, 14 aa, Homo Sapiens
AHGVTSAPDTRPAP

SEQ ID NO: 65825 - protein, 14 aa, Homo Sapiens
HGVTSAPDTRPAPG

SEQ ID NO: 65826 - protein, 14 aa, Homo Sapiens
GVTSAPDTRPAPGS

SEQ ID NO: 65827 - protein, 14 aa, Homo Sapiens
VTSAPDTRPAPGST

SEQ ID NO: 65828 - protein, 14 aa, Homo Sapiens
TSAPDTRPAPGSTA

SEQ ID NO: 65829 - protein, 14 aa, Homo Sapiens
SAPDTRPAPGSTAP

SEQ ID NO: 65830 - protein, 14 aa, Homo Sapiens
APDTRPAPGSTAPP

SEQ ID NO: 65831 - protein, 14 aa, Homo Sapiens
PDTRPAPGSTAPPA

SEQ ID NO: 65832 - protein, 14 aa, Homo Sapiens
DTRPAPGSTAPPAH

SEQ ID NO: 65833 - protein, 14 aa, Homo Sapiens
TRPAPGSTAPPAHG

SEQ ID NO: 65834 - protein, 14 aa, Homo Sapiens
RPAPGSTAPPAHGV

SEQ ID NO: 65835 - protein, 14 aa, Homo Sapiens
PAPGSTAPPAHGVT

SEQ ID NO: 65836 - protein, 14 aa, Homo Sapiens
APGSTAPPAHGVTS

SEQ ID NO: 65837 - protein, 14 aa, Homo Sapiens
PGSTAPPAHGVTSA

SEQ ID NO: 65838 - protein, 14 aa, Homo Sapiens
GSTAPPAHGVTSAP

SEQ ID NO: 65839 - protein, 14 aa, Homo Sapiens
STAPPAHGVTSAPD

SEQ ID NO: 65840 - protein, 14 aa, Homo Sapiens
TAPPAHGVTSAPDT

SEQ ID NO: 65841 - protein, 14 aa, Homo Sapiens
APPAHGVTSAPDTR

SEQ ID NO: 65842 - protein, 14 aa, Homo Sapiens
PPAHGVTSAPDTRP

SEQ ID NO: 65843 - protein, 14 aa, Homo Sapiens
PAHGVTSAPDTRPA

SEQ ID NO: 65844 - protein, 14 aa, Homo Sapiens
AHGVTSAPDTRPAP

SEQ ID NO: 65845 - protein, 14 aa, Homo Sapiens
HGVTSAPDTRPAPG

SEQ ID NO: 65846 - protein, 14 aa, Homo Sapiens
GVTSAPDTRPAPGS

SEQ ID NO: 65847 - protein, 14 aa, Homo Sapiens
VTSAPDTRPAPGST

SEQ ID NO: 65848 - protein, 14 aa, Homo Sapiens
TSAPDTRPAPGSTA

SEQ ID NO: 65849 - protein, 14 aa, Homo Sapiens
SAPDTRPAPGSTAP

SEQ ID NO: 65850 - protein, 14 aa, Homo Sapiens
APDTRPAPGSTAPP

SEQ ID NO: 65851 - protein, 14 aa, Homo Sapiens
PDTRPAPGSTAPPA

SEQ ID NO: 65852 - protein, 14 aa, Homo Sapiens
DTRPAPGSTAPPAH

SEQ ID NO: 65853 - protein, 14 aa, Homo Sapiens
TRPAPGSTAPPAHG

SEQ ID NO: 65854 - protein, 14 aa, Homo Sapiens
RPAPGSTAPPAHGV

SEQ ID NO: 65855 - protein, 14 aa, Homo Sapiens
PAPGSTAPPAHGVT

SEQ ID NO: 65856 - protein, 14 aa, Homo Sapiens
APGSTAPPAHGVTS

SEQ ID NO: 65857 - protein, 14 aa, Homo Sapiens
PGSTAPPAHGVTSA

SEQ ID NO: 65858 - protein, 14 aa, Homo Sapiens
GSTAPPAHGVTSAP

SEQ ID NO: 65859 - protein, 14 aa, Homo Sapiens
STAPPAHGVTSAPD

SEQ ID NO: 65860 - protein, 14 aa, Homo Sapiens
TAPPAHGVTSAPDT

SEQ ID NO: 65861 - protein, 14 aa, Homo Sapiens
APPAHGVTSAPDTR

SEQ ID NO: 65862 - protein, 14 aa, Homo Sapiens
PPAHGVTSAPDTRP

SEQ ID NO: 65863 - protein, 14 aa, Homo Sapiens
PAHGVTSAPDTRPA

SEQ ID NO: 65864 - protein, 14 aa, Homo Sapiens
AHGVTSAPDTRPAP

SEQ ID NO: 65865 - protein, 14 aa, Homo Sapiens
HGVTSAPDTRPAPG

SEQ ID NO: 65866 - protein, 14 aa, Homo Sapiens
GVTSAPDTRPAPGS

SEQ ID NO: 65867 - protein, 14 aa, Homo Sapiens
VTSAPDTRPAPGST

SEQ ID NO: 65868 - protein, 14 aa, Homo Sapiens
TSAPDTRPAPGSTA

SEQ ID NO: 65869 - protein, 14 aa, Homo Sapiens
SAPDTRPAPGSTAP

SEQ ID NO: 65870 - protein, 14 aa, Homo Sapiens
APDTRPAPGSTAPP

SEQ ID NO: 65871 - protein, 14 aa, Homo Sapiens
PDTRPAPGSTAPPA

SEQ ID NO: 65872 - protein, 14 aa, Homo Sapiens
DTRPAPGSTAPPAH

SEQ ID NO: 65873 - protein, 14 aa, Homo Sapiens
TRPAPGSTAPPAHG

SEQ ID NO: 65874 - protein, 14 aa, Homo Sapiens
RPAPGSTAPPAHGV

SEQ ID NO: 65875 - protein, 14 aa, Homo Sapiens
PAPGSTAPPAHGVT

SEQ ID NO: 65876 - protein, 14 aa, Homo Sapiens
APGSTAPPAHGVTS

SEQ ID NO: 65877 - protein, 14 aa, Homo Sapiens
PGSTAPPAHGVTSA

SEQ ID NO: 65878 - protein, 14 aa, Homo Sapiens
GSTAPPAHGVTSAP

SEQ ID NO: 65879 - protein, 14 aa, Homo Sapiens
STAPPAHGVTSAPD

SEQ ID NO: 65880 - protein, 14 aa, Homo Sapiens
TAPPAHGVTSAPDT

SEQ ID NO: 65881 - protein, 14 aa, Homo Sapiens
APPAHGVTSAPDTR

SEQ ID NO: 65882 - protein, 14 aa, Homo Sapiens
PPAHGVTSAPDTRP

SEQ ID NO: 65883 - protein, 14 aa, Homo Sapiens
PAHGVTSAPDTRPA

SEQ ID NO: 65884 - protein, 14 aa, Homo Sapiens
AHGVTSAPDTRPAP

SEQ ID NO: 65885 - protein, 14 aa, Homo Sapiens
HGVTSAPDTRPAPG

SEQ ID NO: 65886 - protein, 14 aa, Homo Sapiens
GVTSAPDTRPAPGS

SEQ ID NO: 65887 - protein, 14 aa, Homo Sapiens
VTSAPDTRPAPGST

SEQ ID NO: 65888 - protein, 14 aa, Homo Sapiens
TSAPDTRPAPGSTA

SEQ ID NO: 65889 - protein, 14 aa, Homo Sapiens
SAPDTRPAPGSTAP

SEQ ID NO: 65890 - protein, 14 aa, Homo Sapiens
APDTRPAPGSTAPP

SEQ ID NO: 65891 - protein, 14 aa, Homo Sapiens
PDTRPAPGSTAPPA

SEQ ID NO: 65892 - protein, 14 aa, Homo Sapiens
DTRPAPGSTAPPAH

SEQ ID NO: 65893 - protein, 14 aa, Homo Sapiens
TRPAPGSTAPPAHG

SEQ ID NO: 65894 - protein, 14 aa, Homo Sapiens
RPAPGSTAPPAHGV

SEQ ID NO: 65895 - protein, 14 aa, Homo Sapiens
PAPGSTAPPAHGVT

SEQ ID NO: 65896 - protein, 14 aa, Homo Sapiens
APGSTAPPAHGVTS

SEQ ID NO: 65897 - protein, 14 aa, Homo Sapiens
PGSTAPPAHGVTSA

SEQ ID NO: 65898 - protein, 14 aa, Homo Sapiens
GSTAPPAHGVTSAP

SEQ ID NO: 65899 - protein, 14 aa, Homo Sapiens
STAPPAHGVTSAPD

SEQ ID NO: 65900 - protein, 14 aa, Homo Sapiens
TAPPAHGVTSAPDT

SEQ ID NO: 65901 - protein, 14 aa, Homo Sapiens
APPAHGVTSAPDTR

SEQ ID NO: 65902 - protein, 14 aa, Homo Sapiens
PPAHGVTSAPDTRP

SEQ ID NO: 65903 - protein, 14 aa, Homo Sapiens
PAHGVTSAPDTRPA

SEQ ID NO: 65904 - protein, 14 aa, Homo Sapiens
AHGVTSAPDTRPAP

SEQ ID NO: 65905 - protein, 14 aa, Homo Sapiens
HGVTSAPDTRPAPG

SEQ ID NO: 65906 - protein, 14 aa, Homo Sapiens
GVTSAPDTRPAPGS

SEQ ID NO: 65907 - protein, 14 aa, Homo Sapiens
VTSAPDTRPAPGST

SEQ ID NO: 65908 - protein, 14 aa, Homo Sapiens
TSAPDTRPAPGSTA

SEQ ID NO: 65909 - protein, 14 aa, Homo Sapiens
SAPDTRPAPGSTAP

SEQ ID NO: 65910 - protein, 14 aa, Homo Sapiens
APDTRPAPGSTAPP

SEQ ID NO: 65911 - protein, 14 aa, Homo Sapiens
PDTRPAPGSTAPPA

SEQ ID NO: 65912 - protein, 14 aa, Homo Sapiens
DTRPAPGSTAPPAH

SEQ ID NO: 65913 - protein, 14 aa, Homo Sapiens
TRPAPGSTAPPAHG

SEQ ID NO: 65914 - protein, 14 aa, Homo Sapiens
RPAPGSTAPPAHGV

SEQ ID NO: 65915 - protein, 14 aa, Homo Sapiens
PAPGSTAPPAHGVT

SEQ ID NO: 65916 - protein, 14 aa, Homo Sapiens
APGSTAPPAHGVTS

SEQ ID NO: 65917 - protein, 14 aa, Homo Sapiens
PGSTAPPAHGVTSA

SEQ ID NO: 65918 - protein, 14 aa, Homo Sapiens
GSTAPPAHGVTSAP

SEQ ID NO: 65919 - protein, 14 aa, Homo Sapiens
STAPPAHGVTSAPD

SEQ ID NO: 65920 - protein, 14 aa, Homo Sapiens
TAPPAHGVTSAPDT

SEQ ID NO: 65921 - protein, 14 aa, Homo Sapiens
APPAHGVTSAPDTR

SEQ ID NO: 65922 - protein, 14 aa, Homo Sapiens
PPAHGVTSAPDTRP

SEQ ID NO: 65923 - protein, 14 aa, Homo Sapiens
PAHGVTSAPDTRPA

SEQ ID NO: 65924 - protein, 14 aa, Homo Sapiens
AHGVTSAPDTRPAP

SEQ ID NO: 65925 - protein, 14 aa, Homo Sapiens
HGVTSAPDTRPAPG

SEQ ID NO: 65926 - protein, 14 aa, Homo Sapiens
GVTSAPDTRPAPGS

SEQ ID NO: 65927 - protein, 14 aa, Homo Sapiens
VTSAPDTRPAPGST

SEQ ID NO: 65928 - protein, 14 aa, Homo Sapiens
TSAPDTRPAPGSTA

SEQ ID NO: 65929 - protein, 14 aa, Homo Sapiens
SAPDTRPAPGSTAP

SEQ ID NO: 65930 - protein, 14 aa, Homo Sapiens
APDTRPAPGSTAPP

SEQ ID NO: 65931 - protein, 14 aa, Homo Sapiens
PDTRPAPGSTAPPA

SEQ ID NO: 65932 - protein, 14 aa, Homo Sapiens
DTRPAPGSTAPPAH

SEQ ID NO: 65933 - protein, 14 aa, Homo Sapiens
TRPAPGSTAPPAHG

SEQ ID NO: 65934 - protein, 14 aa, Homo Sapiens
RPAPGSTAPPAHGV

SEQ ID NO: 65935 - protein, 14 aa, Homo Sapiens
PAPGSTAPPAHGVT

SEQ ID NO: 65936 - protein, 14 aa, Homo Sapiens
APGSTAPPAHGVTS

SEQ ID NO: 65937 - protein, 14 aa, Homo Sapiens
PGSTAPPAHGVTSA

SEQ ID NO: 65938 - protein, 14 aa, Homo Sapiens
GSTAPPAHGVTSAP

SEQ ID NO: 65939 - protein, 14 aa, Homo Sapiens
STAPPAHGVTSAPD

SEQ ID NO: 65940 - protein, 14 aa, Homo Sapiens
TAPPAHGVTSAPDT

SEQ ID NO: 65941 - protein, 14 aa, Homo Sapiens
APPAHGVTSAPDTR

SEQ ID NO: 65942 - protein, 14 aa, Homo Sapiens
PPAHGVTSAPDTRP

SEQ ID NO: 65943 - protein, 14 aa, Homo Sapiens
PAHGVTSAPDTRPA

SEQ ID NO: 65944 - protein, 14 aa, Homo Sapiens
AHGVTSAPDTRPAP

SEQ ID NO: 65945 - protein, 14 aa, Homo Sapiens
HGVTSAPDTRPAPG

SEQ ID NO: 65946 - protein, 14 aa, Homo Sapiens
GVTSAPDTRPAPGS

SEQ ID NO: 65947 - protein, 14 aa, Homo Sapiens
VTSAPDTRPAPGST

SEQ ID NO: 65948 - protein, 14 aa, Homo Sapiens
TSAPDTRPAPGSTA

SEQ ID NO: 65949 - protein, 14 aa, Homo Sapiens
SAPDTRPAPGSTAP

SEQ ID NO: 65950 - protein, 14 aa, Homo Sapiens
APDTRPAPGSTAPP

SEQ ID NO: 65951 - protein, 14 aa, Homo Sapiens
PDTRPAPGSTAPPA

SEQ ID NO: 65952 - protein, 14 aa, Homo Sapiens
DTRPAPGSTAPPAH

SEQ ID NO: 65953 - protein, 14 aa, Homo Sapiens
TRPAPGSTAPPAHG

SEQ ID NO: 65954 - protein, 14 aa, Homo Sapiens
RPAPGSTAPPAHGV

SEQ ID NO: 65955 - protein, 14 aa, Homo Sapiens
PAPGSTAPPAHGVT

SEQ ID NO: 65956 - protein, 14 aa, Homo Sapiens
APGSTAPPAHGVTS

SEQ ID NO: 65957 - protein, 14 aa, Homo Sapiens
PGSTAPPAHGVTSA

SEQ ID NO: 65958 - protein, 14 aa, Homo Sapiens
GSTAPPAHGVTSAP

SEQ ID NO: 65959 - protein, 14 aa, Homo Sapiens
STAPPAHGVTSAPD

SEQ ID NO: 65960 - protein, 14 aa, Homo Sapiens
TAPPAHGVTSAPDT

SEQ ID NO: 65961 - protein, 14 aa, Homo Sapiens
APPAHGVTSAPDTR

SEQ ID NO: 65962 - protein, 14 aa, Homo Sapiens
PPAHGVTSAPDTRP

SEQ ID NO: 65963 - protein, 14 aa, Homo Sapiens
PAHGVTSAPDTRPA

SEQ ID NO: 65964 - protein, 14 aa, Homo Sapiens
AHGVTSAPDTRPAP

SEQ ID NO: 65965 - protein, 14 aa, Homo Sapiens
HGVTSAPDTRPAPG

SEQ ID NO: 65966 - protein, 14 aa, Homo Sapiens
GVTSAPDTRPAPGS

SEQ ID NO: 65967 - protein, 14 aa, Homo Sapiens
VTSAPDTRPAPGST

SEQ ID NO: 65968 - protein, 14 aa, Homo Sapiens
TSAPDTRPAPGSTA

SEQ ID NO: 65969 - protein, 14 aa, Homo Sapiens
SAPDTRPAPGSTAP

SEQ ID NO: 65970 - protein, 14 aa, Homo Sapiens
APDTRPAPGSTAPP

SEQ ID NO: 65971 - protein, 14 aa, Homo Sapiens
PDTRPAPGSTAPPA

SEQ ID NO: 65972 - protein, 14 aa, Homo Sapiens
DTRPAPGSTAPPAH

SEQ ID NO: 65973 - protein, 14 aa, Homo Sapiens
TRPAPGSTAPPAHG

SEQ ID NO: 65974 - protein, 14 aa, Homo Sapiens
RPAPGSTAPPAHGV

SEQ ID NO: 65975 - protein, 14 aa, Homo Sapiens
PAPGSTAPPAHGVT

SEQ ID NO: 65976 - protein, 14 aa, Homo Sapiens
APGSTAPPAHGVTS

SEQ ID NO: 65977 - protein, 14 aa, Homo Sapiens
PGSTAPPAHGVTSA

SEQ ID NO: 65978 - protein, 14 aa, Homo Sapiens
GSTAPPAHGVTSAP

SEQ ID NO: 65979 - protein, 14 aa, Homo Sapiens
STAPPAHGVTSAPD

SEQ ID NO: 65980 - protein, 14 aa, Homo Sapiens
TAPPAHGVTSAPDT

SEQ ID NO: 65981 - protein, 14 aa, Homo Sapiens
APPAHGVTSAPDTR

SEQ ID NO: 65982 - protein, 14 aa, Homo Sapiens
PPAHGVTSAPDTRP

SEQ ID NO: 65983 - protein, 14 aa, Homo Sapiens
PAHGVTSAPDTRPA

SEQ ID NO: 65984 - protein, 14 aa, Homo Sapiens
AHGVTSAPDTRPAP

SEQ ID NO: 65985 - protein, 14 aa, Homo Sapiens
HGVTSAPDTRPAPG

SEQ ID NO: 65986 - protein, 14 aa, Homo Sapiens
GVTSAPDTRPAPGS

SEQ ID NO: 65987 - protein, 14 aa, Homo Sapiens
VTSAPDTRPAPGST

SEQ ID NO: 65988 - protein, 14 aa, Homo Sapiens
TSAPDTRPAPGSTA

SEQ ID NO: 65989 - protein, 14 aa, Homo Sapiens
SAPDTRPAPGSTAP

SEQ ID NO: 65990 - protein, 14 aa, Homo Sapiens
APDTRPAPGSTAPP

SEQ ID NO: 65991 - protein, 14 aa, Homo Sapiens
PDTRPAPGSTAPPA

SEQ ID NO: 65992 - protein, 14 aa, Homo Sapiens
DTRPAPGSTAPPAH

SEQ ID NO: 65993 - protein, 14 aa, Homo Sapiens
TRPAPGSTAPPAHG

SEQ ID NO: 65994 - protein, 14 aa, Homo Sapiens
RPAPGSTAPPAHGV

SEQ ID NO: 65995 - protein, 14 aa, Homo Sapiens
PAPGSTAPPAHGVT

SEQ ID NO: 65996 - protein, 14 aa, Homo Sapiens
APGSTAPPAHGVTS

SEQ ID NO: 65997 - protein, 14 aa, Homo Sapiens
PGSTAPPAHGVTSA

SEQ ID NO: 65998 - protein, 14 aa, Homo Sapiens
GSTAPPAHGVTSAP

SEQ ID NO: 65999 - protein, 14 aa, Homo Sapiens
STAPPAHGVTSAPD

SEQ ID NO: 66000 - protein, 14 aa, Homo Sapiens
TAPPAHGVTSAPDT

SEQ ID NO: 66001 - protein, 14 aa, Homo Sapiens
APPAHGVTSAPDTR

SEQ ID NO: 66002 - protein, 14 aa, Homo Sapiens
PPAHGVTSAPDTRP

SEQ ID NO: 66003 - protein, 14 aa, Homo Sapiens
PAHGVTSAPDTRPA

SEQ ID NO: 66004 - protein, 14 aa, Homo Sapiens
AHGVTSAPDTRPAP

SEQ ID NO: 66005 - protein, 14 aa, Homo Sapiens
HGVTSAPDTRPAPG

SEQ ID NO: 66006 - protein, 14 aa, Homo Sapiens
GVTSAPDTRPAPGS

SEQ ID NO: 66007 - protein, 14 aa, Homo Sapiens
VTSAPDTRPAPGST

SEQ ID NO: 66008 - protein, 14 aa, Homo Sapiens
TSAPDTRPAPGSTA

SEQ ID NO: 66009 - protein, 14 aa, Homo Sapiens
SAPDTRPAPGSTAP

SEQ ID NO: 66010 - protein, 14 aa, Homo Sapiens
APDTRPAPGSTAPP

SEQ ID NO: 66011 - protein, 14 aa, Homo Sapiens
PDTRPAPGSTAPPA

SEQ ID NO: 66012 - protein, 14 aa, Homo Sapiens
DTRPAPGSTAPPAH

SEQ ID NO: 66013 - protein, 14 aa, Homo Sapiens
TRPAPGSTAPPAHG

SEQ ID NO: 66014 - protein, 14 aa, Homo Sapiens
RPAPGSTAPPAHGV

SEQ ID NO: 66015 - protein, 14 aa, Homo Sapiens
PAPGSTAPPAHGVT

SEQ ID NO: 66016 - protein, 14 aa, Homo Sapiens
APGSTAPPAHGVTS

SEQ ID NO: 66017 - protein, 14 aa, Homo Sapiens
PGSTAPPAHGVTSA

SEQ ID NO: 66018 - protein, 14 aa, Homo Sapiens
GSTAPPAHGVTSAP

SEQ ID NO: 66019 - protein, 14 aa, Homo Sapiens
STAPPAHGVTSAPD

SEQ ID NO: 66020 - protein, 14 aa, Homo Sapiens
TAPPAHGVTSAPDT

SEQ ID NO: 66021 - protein, 14 aa, Homo Sapiens
APPAHGVTSAPDTR

SEQ ID NO: 66022 - protein, 14 aa, Homo Sapiens
PPAHGVTSAPDTRP

SEQ ID NO: 66023 - protein, 14 aa, Homo Sapiens
PAHGVTSAPDTRPA

SEQ ID NO: 66024 - protein, 14 aa, Homo Sapiens
AHGVTSAPDTRPAP

SEQ ID NO: 66025 - protein, 14 aa, Homo Sapiens
HGVTSAPDTRPAPG

SEQ ID NO: 66026 - protein, 14 aa, Homo Sapiens
GVTSAPDTRPAPGS

SEQ ID NO: 66027 - protein, 14 aa, Homo Sapiens
VTSAPDTRPAPGST

SEQ ID NO: 66028 - protein, 14 aa, Homo Sapiens
TSAPDTRPAPGSTA

SEQ ID NO: 66029 - protein, 14 aa, Homo Sapiens
SAPDTRPAPGSTAP

SEQ ID NO: 66030 - protein, 14 aa, Homo Sapiens
APDTRPAPGSTAPP

SEQ ID NO: 66031 - protein, 14 aa, Homo Sapiens
PDTRPAPGSTAPPA

SEQ ID NO: 66032 - protein, 14 aa, Homo Sapiens
DTRPAPGSTAPPAH

SEQ ID NO: 66033 - protein, 14 aa, Homo Sapiens
TRPAPGSTAPPAHG

SEQ ID NO: 66034 - protein, 14 aa, Homo Sapiens
RPAPGSTAPPAHGV

SEQ ID NO: 66035 - protein, 14 aa, Homo Sapiens
PAPGSTAPPAHGVT

SEQ ID NO: 66036 - protein, 14 aa, Homo Sapiens
APGSTAPPAHGVTS

SEQ ID NO: 66037 - protein, 14 aa, Homo Sapiens
PGSTAPPAHGVTSA

SEQ ID NO: 66038 - protein, 14 aa, Homo Sapiens
GSTAPPAHGVTSAP

SEQ ID NO: 66039 - protein, 14 aa, Homo Sapiens
STAPPAHGVTSAPD

SEQ ID NO: 66040 - protein, 14 aa, Homo Sapiens
TAPPAHGVTSAPDT

SEQ ID NO: 66041 - protein, 14 aa, Homo Sapiens
APPAHGVTSAPDTR

SEQ ID NO: 66042 - protein, 14 aa, Homo Sapiens
PPAHGVTSAPDTRP

SEQ ID NO: 66043 - protein, 14 aa, Homo Sapiens
PAHGVTSAPDTRPA

SEQ ID NO: 66044 - protein, 14 aa, Homo Sapiens
AHGVTSAPDTRPAP

SEQ ID NO: 66045 - protein, 14 aa, Homo Sapiens
HGVTSAPDTRPAPG

SEQ ID NO: 66046 - protein, 14 aa, Homo Sapiens
GVTSAPDTRPAPGS

SEQ ID NO: 66047 - protein, 14 aa, Homo Sapiens
VTSAPDTRPAPGST

SEQ ID NO: 66048 - protein, 14 aa, Homo Sapiens
TSAPDTRPAPGSTA

SEQ ID NO: 66049 - protein, 14 aa, Homo Sapiens
SAPDTRPAPGSTAP

SEQ ID NO: 66050 - protein, 14 aa, Homo Sapiens
APDTRPAPGSTAPP

SEQ ID NO: 66051 - protein, 14 aa, Homo Sapiens
PDTRPAPGSTAPPA

SEQ ID NO: 66052 - protein, 14 aa, Homo Sapiens
DTRPAPGSTAPPAH

SEQ ID NO: 66053 - protein, 14 aa, Homo Sapiens
TRPAPGSTAPPAHG

SEQ ID NO: 66054 - protein, 14 aa, Homo Sapiens
RPAPGSTAPPAHGV

SEQ ID NO: 66055 - protein, 14 aa, Homo Sapiens
PAPGSTAPPAHGVT

SEQ ID NO: 66056 - protein, 14 aa, Homo Sapiens
APGSTAPPAHGVTS

SEQ ID NO: 66057 - protein, 14 aa, Homo Sapiens
PGSTAPPAHGVTSA

SEQ ID NO: 66058 - protein, 14 aa, Homo Sapiens
GSTAPPAHGVTSAP

SEQ ID NO: 66059 - protein, 14 aa, Homo Sapiens
STAPPAHGVTSAPD

SEQ ID NO: 66060 - protein, 14 aa, Homo Sapiens
TAPPAHGVTSAPDT

SEQ ID NO: 66061 - protein, 14 aa, Homo Sapiens
APPAHGVTSAPDTR

SEQ ID NO: 66062 - protein, 14 aa, Homo Sapiens
PPAHGVTSAPDTRP

SEQ ID NO: 66063 - protein, 14 aa, Homo Sapiens
PAHGVTSAPDTRPA

SEQ ID NO: 66064 - protein, 14 aa, Homo Sapiens
AHGVTSAPDTRPAP

SEQ ID NO: 66065 - protein, 14 aa, Homo Sapiens
HGVTSAPDTRPAPG

SEQ ID NO: 66066 - protein, 14 aa, Homo Sapiens
GVTSAPDTRPAPGS

SEQ ID NO: 66067 - protein, 14 aa, Homo Sapiens
VTSAPDTRPAPGST

SEQ ID NO: 66068 - protein, 14 aa, Homo Sapiens
TSAPDTRPAPGSTA

SEQ ID NO: 66069 - protein, 14 aa, Homo Sapiens
SAPDTRPAPGSTAP

SEQ ID NO: 66070 - protein, 14 aa, Homo Sapiens
APDTRPAPGSTAPP

SEQ ID NO: 66071 - protein, 14 aa, Homo Sapiens
PDTRPAPGSTAPPA

SEQ ID NO: 66072 - protein, 14 aa, Homo Sapiens
DTRPAPGSTAPPAH

SEQ ID NO: 66073 - protein, 14 aa, Homo Sapiens
TRPAPGSTAPPAHG

SEQ ID NO: 66074 - protein, 14 aa, Homo Sapiens
RPAPGSTAPPAHGV

SEQ ID NO: 66075 - protein, 14 aa, Homo Sapiens
PAPGSTAPPAHGVT

SEQ ID NO: 66076 - protein, 14 aa, Homo Sapiens
APGSTAPPAHGVTS

SEQ ID NO: 66077 - protein, 14 aa, Homo Sapiens
PGSTAPPAHGVTSA

SEQ ID NO: 66078 - protein, 14 aa, Homo Sapiens
GSTAPPAHGVTSAP

SEQ ID NO: 66079 - protein, 14 aa, Homo Sapiens
STAPPAHGVTSAPD

SEQ ID NO: 66080 - protein, 14 aa, Homo Sapiens
TAPPAHGVTSAPDT

SEQ ID NO: 66081 - protein, 14 aa, Homo Sapiens
APPAHGVTSAPDTR

SEQ ID NO: 66082 - protein, 14 aa, Homo Sapiens
PPAHGVTSAPDTRP

SEQ ID NO: 66083 - protein, 14 aa, Homo Sapiens
PAHGVTSAPDTRPA

SEQ ID NO: 66084 - protein, 14 aa, Homo Sapiens
AHGVTSAPDTRPAP

SEQ ID NO: 66085 - protein, 14 aa, Homo Sapiens
HGVTSAPDTRPAPG

SEQ ID NO: 66086 - protein, 14 aa, Homo Sapiens
GVTSAPDTRPAPGS

SEQ ID NO: 66087 - protein, 14 aa, Homo Sapiens
VTSAPDTRPAPGST

SEQ ID NO: 66088 - protein, 14 aa, Homo Sapiens
TSAPDTRPAPGSTA

SEQ ID NO: 66089 - protein, 14 aa, Homo Sapiens
SAPDTRPAPGSTAP

SEQ ID NO: 66090 - protein, 14 aa, Homo Sapiens
APDTRPAPGSTAPP

SEQ ID NO: 66091 - protein, 14 aa, Homo Sapiens
PDTRPAPGSTAPPA

SEQ ID NO: 66092 - protein, 14 aa, Homo Sapiens
DTRPAPGSTAPPAH

SEQ ID NO: 66093 - protein, 14 aa, Homo Sapiens
TRPAPGSTAPPAHG

SEQ ID NO: 66094 - protein, 14 aa, Homo Sapiens
RPAPGSTAPPAHGV

SEQ ID NO: 66095 - protein, 14 aa, Homo Sapiens
PAPGSTAPPAHGVT

SEQ ID NO: 66096 - protein, 14 aa, Homo Sapiens
APGSTAPPAHGVTS

SEQ ID NO: 66097 - protein, 14 aa, Homo Sapiens
PGSTAPPAHGVTSA

SEQ ID NO: 66098 - protein, 14 aa, Homo Sapiens
GSTAPPAHGVTSAP

SEQ ID NO: 66099 - protein, 14 aa, Homo Sapiens
STAPPAHGVTSAPD

SEQ ID NO: 66100 - protein, 14 aa, Homo Sapiens
TAPPAHGVTSAPDT

SEQ ID NO: 66101 - protein, 14 aa, Homo Sapiens
APPAHGVTSAPDTR

SEQ ID NO: 66102 - protein, 14 aa, Homo Sapiens
PPAHGVTSAPDTRP

SEQ ID NO: 66103 - protein, 14 aa, Homo Sapiens
PAHGVTSAPDTRPA

SEQ ID NO: 66104 - protein, 14 aa, Homo Sapiens
AHGVTSAPDTRPAP

SEQ ID NO: 66105 - protein, 14 aa, Homo Sapiens
HGVTSAPDTRPAPG

SEQ ID NO: 66106 - protein, 14 aa, Homo Sapiens
GVTSAPDTRPAPGS

SEQ ID NO: 66107 - protein, 14 aa, Homo Sapiens
VTSAPDTRPAPGST

SEQ ID NO: 66108 - protein, 14 aa, Homo Sapiens
TSAPDTRPAPGSTA

SEQ ID NO: 66109 - protein, 14 aa, Homo Sapiens
SAPDTRPAPGSTAP

SEQ ID NO: 66110 - protein, 14 aa, Homo Sapiens
APDTRPAPGSTAPP

SEQ ID NO: 66111 - protein, 14 aa, Homo Sapiens
PDTRPAPGSTAPPA

SEQ ID NO: 66112 - protein, 14 aa, Homo Sapiens
DTRPAPGSTAPPAH

SEQ ID NO: 66113 - protein, 14 aa, Homo Sapiens
TRPAPGSTAPPAHG

SEQ ID NO: 66114 - protein, 14 aa, Homo Sapiens
RPAPGSTAPPAHGV

SEQ ID NO: 66115 - protein, 14 aa, Homo Sapiens
PAPGSTAPPAHGVT

SEQ ID NO: 66116 - protein, 14 aa, Homo Sapiens
APGSTAPPAHGVTS

SEQ ID NO: 66117 - protein, 14 aa, Homo Sapiens
PGSTAPPAHGVTSA

SEQ ID NO: 66118 - protein, 14 aa, Homo Sapiens
GSTAPPAHGVTSAP

SEQ ID NO: 66119 - protein, 14 aa, Homo Sapiens
STAPPAHGVTSAPD

SEQ ID NO: 66120 - protein, 14 aa, Homo Sapiens
TAPPAHGVTSAPDT

SEQ ID NO: 66121 - protein, 14 aa, Homo Sapiens
APPAHGVTSAPDTR

SEQ ID NO: 66122 - protein, 14 aa, Homo Sapiens
PPAHGVTSAPDTRP

SEQ ID NO: 66123 - protein, 14 aa, Homo Sapiens
PAHGVTSAPDTRPA

SEQ ID NO: 66124 - protein, 14 aa, Homo Sapiens
AHGVTSAPDTRPAP

SEQ ID NO: 66125 - protein, 14 aa, Homo Sapiens
HGVTSAPDTRPAPG

SEQ ID NO: 66126 - protein, 14 aa, Homo Sapiens
GVTSAPDTRPAPGS

SEQ ID NO: 66127 - protein, 14 aa, Homo Sapiens
VTSAPDTRPAPGST

SEQ ID NO: 66128 - protein, 14 aa, Homo Sapiens
TSAPDTRPAPGSTA

SEQ ID NO: 66129 - protein, 14 aa, Homo Sapiens
SAPDTRPAPGSTAP

SEQ ID NO: 66130 - protein, 14 aa, Homo Sapiens
APDTRPAPGSTAPP

SEQ ID NO: 66131 - protein, 14 aa, Homo Sapiens
PDTRPAPGSTAPPA

SEQ ID NO: 66132 - protein, 14 aa, Homo Sapiens
DTRPAPGSTAPPAH

SEQ ID NO: 66133 - protein, 14 aa, Homo Sapiens
TRPAPGSTAPPAHG

SEQ ID NO: 66134 - protein, 14 aa, Homo Sapiens
RPAPGSTAPPAHGV

SEQ ID NO: 66135 - protein, 14 aa, Homo Sapiens
PAPGSTAPPAHGVT

SEQ ID NO: 66136 - protein, 14 aa, Homo Sapiens
APGSTAPPAHGVTS

SEQ ID NO: 66137 - protein, 14 aa, Homo Sapiens
PGSTAPPAHGVTSA

SEQ ID NO: 66138 - protein, 14 aa, Homo Sapiens
GSTAPPAHGVTSAP

SEQ ID NO: 66139 - protein, 14 aa, Homo Sapiens
STAPPAHGVTSAPD

SEQ ID NO: 66140 - protein, 14 aa, Homo Sapiens
TAPPAHGVTSAPDT

SEQ ID NO: 66141 - protein, 14 aa, Homo Sapiens
APPAHGVTSAPDTR

SEQ ID NO: 66142 - protein, 14 aa, Homo Sapiens
PPAHGVTSAPDTRP

SEQ ID NO: 66143 - protein, 14 aa, Homo Sapiens
PAHGVTSAPDTRPA

SEQ ID NO: 66144 - protein, 14 aa, Homo Sapiens
AHGVTSAPDTRPAP

SEQ ID NO: 66145 - protein, 14 aa, Homo Sapiens
HGVTSAPDTRPAPG

SEQ ID NO: 66146 - protein, 14 aa, Homo Sapiens
GVTSAPDTRPAPGS

SEQ ID NO: 66147 - protein, 14 aa, Homo Sapiens
VTSAPDTRPAPGST

SEQ ID NO: 66148 - protein, 14 aa, Homo Sapiens
TSAPDTRPAPGSTA

SEQ ID NO: 66149 - protein, 14 aa, Homo Sapiens
SAPDTRPAPGSTAP

SEQ ID NO: 66150 - protein, 14 aa, Homo Sapiens
APDTRPAPGSTAPP

SEQ ID NO: 66151 - protein, 14 aa, Homo Sapiens
PDTRPAPGSTAPPA

SEQ ID NO: 66152 - protein, 14 aa, Homo Sapiens
DTRPAPGSTAPPAH

SEQ ID NO: 66153 - protein, 14 aa, Homo Sapiens
TRPAPGSTAPPAHG

SEQ ID NO: 66154 - protein, 14 aa, Homo Sapiens
RPAPGSTAPPAHGV

SEQ ID NO: 66155 - protein, 14 aa, Homo Sapiens
PAPGSTAPPAHGVT

SEQ ID NO: 66156 - protein, 14 aa, Homo Sapiens
APGSTAPPAHGVTS

SEQ ID NO: 66157 - protein, 14 aa, Homo Sapiens
PGSTAPPAHGVTSA

SEQ ID NO: 66158 - protein, 14 aa, Homo Sapiens
GSTAPPAHGVTSAP

SEQ ID NO: 66159 - protein, 14 aa, Homo Sapiens
STAPPAHGVTSAPD

SEQ ID NO: 66160 - protein, 14 aa, Homo Sapiens
TAPPAHGVTSAPDT

SEQ ID NO: 66161 - protein, 14 aa, Homo Sapiens
APPAHGVTSAPDTR

SEQ ID NO: 66162 - protein, 14 aa, Homo Sapiens
PPAHGVTSAPDTRP

SEQ ID NO: 66163 - protein, 14 aa, Homo Sapiens
PAHGVTSAPDTRPA

SEQ ID NO: 66164 - protein, 14 aa, Homo Sapiens
AHGVTSAPDTRPAP

SEQ ID NO: 66165 - protein, 14 aa, Homo Sapiens
HGVTSAPDTRPAPG

SEQ ID NO: 66166 - protein, 14 aa, Homo Sapiens
GVTSAPDTRPAPGS

SEQ ID NO: 66167 - protein, 14 aa, Homo Sapiens
VTSAPDTRPAPGST

SEQ ID NO: 66168 - protein, 14 aa, Homo Sapiens
TSAPDTRPAPGSTA

SEQ ID NO: 66169 - protein, 14 aa, Homo Sapiens
SAPDTRPAPGSTAP

SEQ ID NO: 66170 - protein, 14 aa, Homo Sapiens
APDTRPAPGSTAPP

SEQ ID NO: 66171 - protein, 14 aa, Homo Sapiens
PDTRPAPGSTAPPA

SEQ ID NO: 66172 - protein, 14 aa, Homo Sapiens
DTRPAPGSTAPPAH

SEQ ID NO: 66173 - protein, 14 aa, Homo Sapiens
TRPAPGSTAPPAHG

SEQ ID NO: 66174 - protein, 14 aa, Homo Sapiens
RPAPGSTAPPAHGV

SEQ ID NO: 66175 - protein, 14 aa, Homo Sapiens
PAPGSTAPPAHGVT

SEQ ID NO: 66176 - protein, 14 aa, Homo Sapiens
APGSTAPPAHGVTS

SEQ ID NO: 66177 - protein, 14 aa, Homo Sapiens
PGSTAPPAHGVTSA

SEQ ID NO: 66178 - protein, 14 aa, Homo Sapiens
GSTAPPAHGVTSAP

SEQ ID NO: 66179 - protein, 14 aa, Homo Sapiens
STAPPAHGVTSAPD

SEQ ID NO: 66180 - protein, 14 aa, Homo Sapiens
TAPPAHGVTSAPDT

SEQ ID NO: 66181 - protein, 14 aa, Homo Sapiens
APPAHGVTSAPDTR

SEQ ID NO: 66182 - protein, 14 aa, Homo Sapiens
PPAHGVTSAPDTRP

SEQ ID NO: 66183 - protein, 14 aa, Homo Sapiens
PAHGVTSAPDTRPA

SEQ ID NO: 66184 - protein, 14 aa, Homo Sapiens
AHGVTSAPDTRPAP

SEQ ID NO: 66185 - protein, 14 aa, Homo Sapiens
HGVTSAPDTRPAPG

SEQ ID NO: 66186 - protein, 14 aa, Homo Sapiens
GVTSAPDTRPAPGS

SEQ ID NO: 66187 - protein, 14 aa, Homo Sapiens
VTSAPDTRPAPGST

SEQ ID NO: 66188 - protein, 14 aa, Homo Sapiens
TSAPDTRPAPGSTA

SEQ ID NO: 66189 - protein, 14 aa, Homo Sapiens
SAPDTRPAPGSTAP

SEQ ID NO: 66190 - protein, 14 aa, Homo Sapiens
APDTRPAPGSTAPP

SEQ ID NO: 66191 - protein, 14 aa, Homo Sapiens
PDTRPAPGSTAPPA

SEQ ID NO: 66192 - protein, 14 aa, Homo Sapiens
DTRPAPGSTAPPAH

SEQ ID NO: 66193 - protein, 14 aa, Homo Sapiens
TRPAPGSTAPPAHG

SEQ ID NO: 66194 - protein, 14 aa, Homo Sapiens
RPAPGSTAPPAHGV

SEQ ID NO: 66195 - protein, 14 aa, Homo Sapiens
PAPGSTAPPAHGVT

SEQ ID NO: 66196 - protein, 14 aa, Homo Sapiens
APGSTAPPAHGVTS

SEQ ID NO: 66197 - protein, 14 aa, Homo Sapiens
PGSTAPPAHGVTSA

SEQ ID NO: 66198 - protein, 14 aa, Homo Sapiens
GSTAPPAHGVTSAP

SEQ ID NO: 66199 - protein, 14 aa, Homo Sapiens
STAPPAHGVTSAPD

SEQ ID NO: 66200 - protein, 14 aa, Homo Sapiens
TAPPAHGVTSAPDT

SEQ ID NO: 66201 - protein, 14 aa, Homo Sapiens
APPAHGVTSAPDTR

SEQ ID NO: 66202 - protein, 14 aa, Homo Sapiens
PPAHGVTSAPDTRP

SEQ ID NO: 66203 - protein, 14 aa, Homo Sapiens
PAHGVTSAPDTRPA

SEQ ID NO: 66204 - protein, 14 aa, Homo Sapiens
AHGVTSAPDTRPAP

SEQ ID NO: 66205 - protein, 14 aa, Homo Sapiens
HGVTSAPDTRPAPG

SEQ ID NO: 66206 - protein, 14 aa, Homo Sapiens
GVTSAPDTRPAPGS

SEQ ID NO: 66207 - protein, 14 aa, Homo Sapiens
VTSAPDTRPAPGST

SEQ ID NO: 66208 - protein, 14 aa, Homo Sapiens
TSAPDTRPAPGSTA

SEQ ID NO: 66209 - protein, 14 aa, Homo Sapiens
SAPDTRPAPGSTAP

SEQ ID NO: 66210 - protein, 14 aa, Homo Sapiens
APDTRPAPGSTAPP

SEQ ID NO: 66211 - protein, 14 aa, Homo Sapiens
PDTRPAPGSTAPPA

SEQ ID NO: 66212 - protein, 14 aa, Homo Sapiens
DTRPAPGSTAPPAH

SEQ ID NO: 66213 - protein, 14 aa, Homo Sapiens
TRPAPGSTAPPAHG

SEQ ID NO: 66214 - protein, 14 aa, Homo Sapiens
RPAPGSTAPPAHGV

SEQ ID NO: 66215 - protein, 14 aa, Homo Sapiens
PAPGSTAPPAHGVT

SEQ ID NO: 66216 - protein, 14 aa, Homo Sapiens
APGSTAPPAHGVTS

SEQ ID NO: 66217 - protein, 14 aa, Homo Sapiens
PGSTAPPAHGVTSA

SEQ ID NO: 66218 - protein, 14 aa, Homo Sapiens
GSTAPPAHGVTSAP

SEQ ID NO: 66219 - protein, 14 aa, Homo Sapiens
STAPPAHGVTSAPD

SEQ ID NO: 66220 - protein, 14 aa, Homo Sapiens
TAPPAHGVTSAPDT

SEQ ID NO: 66221 - protein, 14 aa, Homo Sapiens
APPAHGVTSAPDTR

SEQ ID NO: 66222 - protein, 14 aa, Homo Sapiens
PPAHGVTSAPDTRP

SEQ ID NO: 66223 - protein, 14 aa, Homo Sapiens
PAHGVTSAPDTRPA

SEQ ID NO: 66224 - protein, 14 aa, Homo Sapiens
AHGVTSAPDTRPAP

SEQ ID NO: 66225 - protein, 14 aa, Homo Sapiens
HGVTSAPDTRPAPG

SEQ ID NO: 66226 - protein, 14 aa, Homo Sapiens
GVTSAPDTRPAPGS

SEQ ID NO: 66227 - protein, 14 aa, Homo Sapiens
VTSAPDTRPAPGST

SEQ ID NO: 66228 - protein, 14 aa, Homo Sapiens
TSAPDTRPAPGSTA

SEQ ID NO: 66229 - protein, 14 aa, Homo Sapiens
SAPDTRPAPGSTAP

SEQ ID NO: 66230 - protein, 14 aa, Homo Sapiens
APDTRPAPGSTAPP

SEQ ID NO: 66231 - protein, 14 aa, Homo Sapiens
PDTRPAPGSTAPPA

SEQ ID NO: 66232 - protein, 14 aa, Homo Sapiens
DTRPAPGSTAPPAH

SEQ ID NO: 66233 - protein, 14 aa, Homo Sapiens
TRPAPGSTAPPAHG

SEQ ID NO: 66234 - protein, 14 aa, Homo Sapiens
RPAPGSTAPPAHGV

SEQ ID NO: 66235 - protein, 14 aa, Homo Sapiens
PAPGSTAPPAHGVT

SEQ ID NO: 66236 - protein, 14 aa, Homo Sapiens
APGSTAPPAHGVTS

SEQ ID NO: 66237 - protein, 14 aa, Homo Sapiens
PGSTAPPAHGVTSA

SEQ ID NO: 66238 - protein, 14 aa, Homo Sapiens
GSTAPPAHGVTSAP

SEQ ID NO: 66239 - protein, 14 aa, Homo Sapiens
STAPPAHGVTSAPD

SEQ ID NO: 66240 - protein, 14 aa, Homo Sapiens
TAPPAHGVTSAPDT

SEQ ID NO: 66241 - protein, 14 aa, Homo Sapiens
APPAHGVTSAPDTR

SEQ ID NO: 66242 - protein, 14 aa, Homo Sapiens
PPAHGVTSAPDTRP

SEQ ID NO: 66243 - protein, 14 aa, Homo Sapiens
PAHGVTSAPDTRPA

SEQ ID NO: 66244 - protein, 14 aa, Homo Sapiens
AHGVTSAPDTRPAP

SEQ ID NO: 66245 - protein, 14 aa, Homo Sapiens
HGVTSAPDTRPAPG

SEQ ID NO: 66246 - protein, 14 aa, Homo Sapiens
GVTSAPDTRPAPGS

SEQ ID NO: 66247 - protein, 14 aa, Homo Sapiens
VTSAPDTRPAPGST

SEQ ID NO: 66248 - protein, 14 aa, Homo Sapiens
TSAPDTRPAPGSTA

SEQ ID NO: 66249 - protein, 14 aa, Homo Sapiens
SAPDTRPAPGSTAP

SEQ ID NO: 66250 - protein, 14 aa, Homo Sapiens
APDTRPAPGSTAPP

SEQ ID NO: 66251 - protein, 14 aa, Homo Sapiens
PDTRPAPGSTAPPA

SEQ ID NO: 66252 - protein, 14 aa, Homo Sapiens
DTRPAPGSTAPPAH

SEQ ID NO: 66253 - protein, 14 aa, Homo Sapiens
TRPAPGSTAPPAHG

SEQ ID NO: 66254 - protein, 14 aa, Homo Sapiens
RPAPGSTAPPAHGV

SEQ ID NO: 66255 - protein, 14 aa, Homo Sapiens
PAPGSTAPPAHGVT

SEQ ID NO: 66256 - protein, 14 aa, Homo Sapiens
APGSTAPPAHGVTS

SEQ ID NO: 66257 - protein, 14 aa, Homo Sapiens
PGSTAPPAHGVTSA

SEQ ID NO: 66258 - protein, 14 aa, Homo Sapiens
GSTAPPAHGVTSAP

SEQ ID NO: 66259 - protein, 14 aa, Homo Sapiens
STAPPAHGVTSAPD

SEQ ID NO: 66260 - protein, 14 aa, Homo Sapiens
TAPPAHGVTSAPDT

SEQ ID NO: 66261 - protein, 14 aa, Homo Sapiens
APPAHGVTSAPDTR

SEQ ID NO: 66262 - protein, 14 aa, Homo Sapiens
PPAHGVTSAPDTRP

SEQ ID NO: 66263 - protein, 14 aa, Homo Sapiens
PAHGVTSAPDTRPA

SEQ ID NO: 66264 - protein, 14 aa, Homo Sapiens
AHGVTSAPDTRPAP

SEQ ID NO: 66265 - protein, 14 aa, Homo Sapiens
HGVTSAPDTRPAPG

SEQ ID NO: 66266 - protein, 14 aa, Homo Sapiens
GVTSAPDTRPAPGS

SEQ ID NO: 66267 - protein, 14 aa, Homo Sapiens
VTSAPDTRPAPGST

SEQ ID NO: 66268 - protein, 14 aa, Homo Sapiens
TSAPDTRPAPGSTA

SEQ ID NO: 66269 - protein, 14 aa, Homo Sapiens
SAPDTRPAPGSTAP

SEQ ID NO: 66270 - protein, 14 aa, Homo Sapiens
APDTRPAPGSTAPP

SEQ ID NO: 66271 - protein, 14 aa, Homo Sapiens
PDTRPAPGSTAPPA

SEQ ID NO: 66272 - protein, 14 aa, Homo Sapiens
DTRPAPGSTAPPAH

SEQ ID NO: 66273 - protein, 14 aa, Homo Sapiens
TRPAPGSTAPPAHG

SEQ ID NO: 66274 - protein, 14 aa, Homo Sapiens
RPAPGSTAPPAHGV

SEQ ID NO: 66275 - protein, 14 aa, Homo Sapiens
PAPGSTAPPAHGVT

SEQ ID NO: 66276 - protein, 14 aa, Homo Sapiens
APGSTAPPAHGVTS

SEQ ID NO: 66277 - protein, 14 aa, Homo Sapiens
PGSTAPPAHGVTSA

SEQ ID NO: 66278 - protein, 14 aa, Homo Sapiens
GSTAPPAHGVTSAP

SEQ ID NO: 66279 - protein, 14 aa, Homo Sapiens
STAPPAHGVTSAPD

SEQ ID NO: 66280 - protein, 14 aa, Homo Sapiens
TAPPAHGVTSAPDT

SEQ ID NO: 66281 - protein, 14 aa, Homo Sapiens
APPAHGVTSAPDTR

SEQ ID NO: 66282 - protein, 14 aa, Homo Sapiens
PPAHGVTSAPDTRP

SEQ ID NO: 66283 - protein, 14 aa, Homo Sapiens
PAHGVTSAPDTRPA

SEQ ID NO: 66284 - protein, 14 aa, Homo Sapiens
AHGVTSAPDTRPAP

SEQ ID NO: 66285 - protein, 14 aa, Homo Sapiens
HGVTSAPDTRPAPG

SEQ ID NO: 66286 - protein, 14 aa, Homo Sapiens
GVTSAPDTRPAPGS

SEQ ID NO: 66287 - protein, 14 aa, Homo Sapiens
VTSAPDTRPAPGST

SEQ ID NO: 66288 - protein, 14 aa, Homo Sapiens
TSAPDTRPAPGSTA

SEQ ID NO: 66289 - protein, 14 aa, Homo Sapiens
SAPDTRPAPGSTAP

SEQ ID NO: 66290 - protein, 14 aa, Homo Sapiens
APDTRPAPGSTAPP

SEQ ID NO: 66291 - protein, 14 aa, Homo Sapiens
PDTRPAPGSTAPPA

SEQ ID NO: 66292 - protein, 14 aa, Homo Sapiens
DTRPAPGSTAPPAH

SEQ ID NO: 66293 - protein, 14 aa, Homo Sapiens
TRPAPGSTAPPAHG

SEQ ID NO: 66294 - protein, 14 aa, Homo Sapiens
RPAPGSTAPPAHGV

SEQ ID NO: 66295 - protein, 14 aa, Homo Sapiens
PAPGSTAPPAHGVT

SEQ ID NO: 66296 - protein, 14 aa, Homo Sapiens
APGSTAPPAHGVTS

SEQ ID NO: 66297 - protein, 14 aa, Homo Sapiens
PGSTAPPAHGVTSA

SEQ ID NO: 66298 - protein, 14 aa, Homo Sapiens
GSTAPPAHGVTSAP

SEQ ID NO: 66299 - protein, 14 aa, Homo Sapiens
STAPPAHGVTSAPD

SEQ ID NO: 66300 - protein, 14 aa, Homo Sapiens
TAPPAHGVTSAPDT

SEQ ID NO: 66301 - protein, 14 aa, Homo Sapiens
APPAHGVTSAPDTR

SEQ ID NO: 66302 - protein, 14 aa, Homo Sapiens
PPAHGVTSAPDTRP

SEQ ID NO: 66303 - protein, 14 aa, Homo Sapiens
PAHGVTSAPDTRPA

SEQ ID NO: 66304 - protein, 14 aa, Homo Sapiens
AHGVTSAPDTRPAP

SEQ ID NO: 66305 - protein, 14 aa, Homo Sapiens
HGVTSAPDTRPAPG

SEQ ID NO: 66306 - protein, 14 aa, Homo Sapiens
GVTSAPDTRPAPGS

SEQ ID NO: 66307 - protein, 14 aa, Homo Sapiens
VTSAPDTRPAPGST

SEQ ID NO: 66308 - protein, 14 aa, Homo Sapiens
TSAPDTRPAPGSTA

SEQ ID NO: 66309 - protein, 14 aa, Homo Sapiens
SAPDTRPAPGSTAP

SEQ ID NO: 66310 - protein, 14 aa, Homo Sapiens
APDTRPAPGSTAPP

SEQ ID NO: 66311 - protein, 14 aa, Homo Sapiens
PDTRPAPGSTAPPA

SEQ ID NO: 66312 - protein, 14 aa, Homo Sapiens
DTRPAPGSTAPPAH

SEQ ID NO: 66313 - protein, 14 aa, Homo Sapiens
TRPAPGSTAPPAHG

SEQ ID NO: 66314 - protein, 14 aa, Homo Sapiens
RPAPGSTAPPAHGV

SEQ ID NO: 66315 - protein, 14 aa, Homo Sapiens
PAPGSTAPPAHGVT

SEQ ID NO: 66316 - protein, 14 aa, Homo Sapiens
APGSTAPPAHGVTS

SEQ ID NO: 66317 - protein, 14 aa, Homo Sapiens
PGSTAPPAHGVTSA

SEQ ID NO: 66318 - protein, 14 aa, Homo Sapiens
GSTAPPAHGVTSAP

SEQ ID NO: 66319 - protein, 14 aa, Homo Sapiens
STAPPAHGVTSAPD

SEQ ID NO: 66320 - protein, 14 aa, Homo Sapiens
TAPPAHGVTSAPDT

SEQ ID NO: 66321 - protein, 14 aa, Homo Sapiens
APPAHGVTSAPDTR

SEQ ID NO: 66322 - protein, 14 aa, Homo Sapiens
PPAHGVTSAPDTRP

SEQ ID NO: 66323 - protein, 14 aa, Homo Sapiens
PAHGVTSAPDTRPA

SEQ ID NO: 66324 - protein, 14 aa, Homo Sapiens
AHGVTSAPDTRPAP

SEQ ID NO: 66325 - protein, 14 aa, Homo Sapiens
HGVTSAPDTRPAPG

SEQ ID NO: 66326 - protein, 14 aa, Homo Sapiens
GVTSAPDTRPAPGS

SEQ ID NO: 66327 - protein, 14 aa, Homo Sapiens
VTSAPDTRPAPGST

SEQ ID NO: 66328 - protein, 14 aa, Homo Sapiens
TSAPDTRPAPGSTA

SEQ ID NO: 66329 - protein, 14 aa, Homo Sapiens
SAPDTRPAPGSTAP

SEQ ID NO: 66330 - protein, 14 aa, Homo Sapiens
APDTRPAPGSTAPP

SEQ ID NO: 66331 - protein, 14 aa, Homo Sapiens
PDTRPAPGSTAPPA

SEQ ID NO: 66332 - protein, 14 aa, Homo Sapiens
DTRPAPGSTAPPAH

SEQ ID NO: 66333 - protein, 14 aa, Homo Sapiens
TRPAPGSTAPPAHG

SEQ ID NO: 66334 - protein, 14 aa, Homo Sapiens
RPAPGSTAPPAHGV

SEQ ID NO: 66335 - protein, 14 aa, Homo Sapiens
PAPGSTAPPAHGVT

SEQ ID NO: 66336 - protein, 14 aa, Homo Sapiens
APGSTAPPAHGVTS

SEQ ID NO: 66337 - protein, 14 aa, Homo Sapiens
PGSTAPPAHGVTSA

SEQ ID NO: 66338 - protein, 14 aa, Homo Sapiens
GSTAPPAHGVTSAP

SEQ ID NO: 66339 - protein, 14 aa, Homo Sapiens
STAPPAHGVTSAPD

SEQ ID NO: 66340 - protein, 14 aa, Homo Sapiens
TAPPAHGVTSAPDN

SEQ ID NO: 66341 - protein, 14 aa, Homo Sapiens
APPAHGVTSAPDNR

SEQ ID NO: 66342 - protein, 14 aa, Homo Sapiens
PPAHGVTSAPDNRP

SEQ ID NO: 66343 - protein, 14 aa, Homo Sapiens
PAHGVTSAPDNRPA

SEQ ID NO: 66344 - protein, 14 aa, Homo Sapiens
AHGVTSAPDNRPAL

SEQ ID NO: 66345 - protein, 14 aa, Homo Sapiens
HGVTSAPDNRPALG

SEQ ID NO: 66346 - protein, 14 aa, Homo Sapiens
GVTSAPDNRPALGS

SEQ ID NO: 66347 - protein, 14 aa, Homo Sapiens
VTSAPDNRPALGST

SEQ ID NO: 66348 - protein, 14 aa, Homo Sapiens
TSAPDNRPALGSTA

SEQ ID NO: 66349 - protein, 14 aa, Homo Sapiens
SAPDNRPALGSTAP

SEQ ID NO: 66350 - protein, 14 aa, Homo Sapiens
APDNRPALGSTAPP

SEQ ID NO: 66351 - protein, 14 aa, Homo Sapiens
PDNRPALGSTAPPV

SEQ ID NO: 66352 - protein, 14 aa, Homo Sapiens
DNRPALGSTAPPVH

SEQ ID NO: 66353 - protein, 14 aa, Homo Sapiens
NRPALGSTAPPVHN

SEQ ID NO: 66354 - protein, 14 aa, Homo Sapiens
RPALGSTAPPVHNV

SEQ ID NO: 66355 - protein, 14 aa, Homo Sapiens
PALGSTAPPVHNVT

SEQ ID NO: 66356 - protein, 14 aa, Homo Sapiens
ALGSTAPPVHNVTS

SEQ ID NO: 66357 - protein, 14 aa, Homo Sapiens
LGSTAPPVHNVTSA

SEQ ID NO: 66358 - protein, 14 aa, Homo Sapiens
GSTAPPVHNVTSAS

SEQ ID NO: 66359 - protein, 14 aa, Homo Sapiens
STAPPVHNVTSASG

SEQ ID NO: 66360 - protein, 14 aa, Homo Sapiens
TAPPVHNVTSASGS

SEQ ID NO: 66361 - protein, 14 aa, Homo Sapiens
APPVHNVTSASGSA

SEQ ID NO: 66362 - protein, 14 aa, Homo Sapiens
PPVHNVTSASGSAS

SEQ ID NO: 66363 - protein, 14 aa, Homo Sapiens
PVHNVTSASGSASG

SEQ ID NO: 66364 - protein, 14 aa, Homo Sapiens
VHNVTSASGSASGS

SEQ ID NO: 66365 - protein, 14 aa, Homo Sapiens
HNVTSASGSASGSA

SEQ ID NO: 66366 - protein, 14 aa, Homo Sapiens
NVTSASGSASGSAS

SEQ ID NO: 66367 - protein, 14 aa, Homo Sapiens
VTSASGSASGSAST

SEQ ID NO: 66368 - protein, 14 aa, Homo Sapiens
TSASGSASGSASTL

SEQ ID NO: 66369 - protein, 14 aa, Homo Sapiens
SASGSASGSASTLV

SEQ ID NO: 66370 - protein, 14 aa, Homo Sapiens
ASGSASGSASTLVH

SEQ ID NO: 66371 - protein, 14 aa, Homo Sapiens
SGSASGSASTLVHN

SEQ ID NO: 66372 - protein, 14 aa, Homo Sapiens
GSASGSASTLVHNG

SEQ ID NO: 66373 - protein, 14 aa, Homo Sapiens
SASGSASTLVHNGT

SEQ ID NO: 66374 - protein, 14 aa, Homo Sapiens
ASGSASTLVHNGTS

SEQ ID NO: 66375 - protein, 14 aa, Homo Sapiens
SGSASTLVHNGTSA

SEQ ID NO: 66376 - protein, 14 aa, Homo Sapiens
GSASTLVHNGTSAR

SEQ ID NO: 66377 - protein, 14 aa, Homo Sapiens
SASTLVHNGTSARA

SEQ ID NO: 66378 - protein, 14 aa, Homo Sapiens
ASTLVHNGTSARAT

SEQ ID NO: 66379 - protein, 14 aa, Homo Sapiens
STLVHNGTSARATT

SEQ ID NO: 66380 - protein, 14 aa, Homo Sapiens
TLVHNGTSARATTT

SEQ ID NO: 66381 - protein, 14 aa, Homo Sapiens
LVHNGTSARATTTP

SEQ ID NO: 66382 - protein, 14 aa, Homo Sapiens
VHNGTSARATTTPA

SEQ ID NO: 66383 - protein, 14 aa, Homo Sapiens
HNGTSARATTTPAS

SEQ ID NO: 66384 - protein, 14 aa, Homo Sapiens
NGTSARATTTPASK

SEQ ID NO: 66385 - protein, 14 aa, Homo Sapiens
GTSARATTTPASKS

SEQ ID NO: 66386 - protein, 14 aa, Homo Sapiens
TSARATTTPASKST

SEQ ID NO: 66387 - protein, 14 aa, Homo Sapiens
SARATTTPASKSTP

SEQ ID NO: 66388 - protein, 14 aa, Homo Sapiens
ARATTTPASKSTPF

SEQ ID NO: 66389 - protein, 14 aa, Homo Sapiens
RATTTPASKSTPFS

SEQ ID NO: 66390 - protein, 14 aa, Homo Sapiens
ATTTPASKSTPFSI

SEQ ID NO: 66391 - protein, 14 aa, Homo Sapiens
TTTPASKSTPFSIP

SEQ ID NO: 66392 - protein, 14 aa, Homo Sapiens
TTPASKSTPFSIPS

SEQ ID NO: 66393 - protein, 14 aa, Homo Sapiens
TPASKSTPFSIPSH

SEQ ID NO: 66394 - protein, 14 aa, Homo Sapiens
PASKSTPFSIPSHH

SEQ ID NO: 66395 - protein, 14 aa, Homo Sapiens
ASKSTPFSIPSHHS

SEQ ID NO: 66396 - protein, 14 aa, Homo Sapiens
SKSTPFSIPSHHSD

SEQ ID NO: 66397 - protein, 14 aa, Homo Sapiens
KSTPFSIPSHHSDT

SEQ ID NO: 66398 - protein, 14 aa, Homo Sapiens
STPFSIPSHHSDTP

SEQ ID NO: 66399 - protein, 14 aa, Homo Sapiens
TPFSIPSHHSDTPT

SEQ ID NO: 66400 - protein, 14 aa, Homo Sapiens
PFSIPSHHSDTPTT

SEQ ID NO: 66401 - protein, 14 aa, Homo Sapiens
FSIPSHHSDTPTTL

SEQ ID NO: 66402 - protein, 14 aa, Homo Sapiens
SIPSHHSDTPTTLA

SEQ ID NO: 66403 - protein, 14 aa, Homo Sapiens
IPSHHSDTPTTLAS

SEQ ID NO: 66404 - protein, 14 aa, Homo Sapiens
PSHHSDTPTTLASH

SEQ ID NO: 66405 - protein, 14 aa, Homo Sapiens
SHHSDTPTTLASHS

SEQ ID NO: 66406 - protein, 14 aa, Homo Sapiens
HHSDTPTTLASHST

SEQ ID NO: 66407 - protein, 14 aa, Homo Sapiens
HSDTPTTLASHSTK

SEQ ID NO: 66408 - protein, 14 aa, Homo Sapiens
SDTPTTLASHSTKT

SEQ ID NO: 66409 - protein, 14 aa, Homo Sapiens
DTPTTLASHSTKTD

SEQ ID NO: 66410 - protein, 14 aa, Homo Sapiens
TPTTLASHSTKTDA

SEQ ID NO: 66411 - protein, 14 aa, Homo Sapiens
PTTLASHSTKTDAS

SEQ ID NO: 66412 - protein, 14 aa, Homo Sapiens
TTLASHSTKTDASS

SEQ ID NO: 66413 - protein, 14 aa, Homo Sapiens
TLASHSTKTDASST

SEQ ID NO: 66414 - protein, 14 aa, Homo Sapiens
LASHSTKTDASSTH

SEQ ID NO: 66415 - protein, 14 aa, Homo Sapiens
ASHSTKTDASSTHH

SEQ ID NO: 66416 - protein, 14 aa, Homo Sapiens
SHSTKTDASSTHHS

SEQ ID NO: 66417 - protein, 14 aa, Homo Sapiens
HSTKTDASSTHHSS

SEQ ID NO: 66418 - protein, 14 aa, Homo Sapiens
STKTDASSTHHSSV

SEQ ID NO: 66419 - protein, 14 aa, Homo Sapiens
TKTDASSTHHSSVP

SEQ ID NO: 66420 - protein, 14 aa, Homo Sapiens
KTDASSTHHSSVPP

SEQ ID NO: 66421 - protein, 14 aa, Homo Sapiens
TDASSTHHSSVPPL

SEQ ID NO: 66422 - protein, 14 aa, Homo Sapiens
DASSTHHSSVPPLT

SEQ ID NO: 66423 - protein, 14 aa, Homo Sapiens
ASSTHHSSVPPLTS

SEQ ID NO: 66424 - protein, 14 aa, Homo Sapiens
SSTHHSSVPPLTSS

SEQ ID NO: 66425 - protein, 14 aa, Homo Sapiens
STHHSSVPPLTSSN

SEQ ID NO: 66426 - protein, 14 aa, Homo Sapiens
THHSSVPPLTSSNH

SEQ ID NO: 66427 - protein, 14 aa, Homo Sapiens
HHSSVPPLTSSNHS

SEQ ID NO: 66428 - protein, 14 aa, Homo Sapiens
HSSVPPLTSSNHST

SEQ ID NO: 66429 - protein, 14 aa, Homo Sapiens
SSVPPLTSSNHSTS

SEQ ID NO: 66430 - protein, 14 aa, Homo Sapiens
SVPPLTSSNHSTSP

SEQ ID NO: 66431 - protein, 14 aa, Homo Sapiens
VPPLTSSNHSTSPQ

SEQ ID NO: 66432 - protein, 14 aa, Homo Sapiens
PPLTSSNHSTSPQL

SEQ ID NO: 66433 - protein, 14 aa, Homo Sapiens
PLTSSNHSTSPQLS

SEQ ID NO: 66434 - protein, 14 aa, Homo Sapiens
LTSSNHSTSPQLST

SEQ ID NO: 66435 - protein, 14 aa, Homo Sapiens
TSSNHSTSPQLSTG

SEQ ID NO: 66436 - protein, 14 aa, Homo Sapiens
SSNHSTSPQLSTGV

SEQ ID NO: 66437 - protein, 14 aa, Homo Sapiens
SNHSTSPQLSTGVS

SEQ ID NO: 66438 - protein, 14 aa, Homo Sapiens
NHSTSPQLSTGVSF

SEQ ID NO: 66439 - protein, 14 aa, Homo Sapiens
HSTSPQLSTGVSFF

SEQ ID NO: 66440 - protein, 14 aa, Homo Sapiens
STSPQLSTGVSFFF

SEQ ID NO: 66441 - protein, 14 aa, Homo Sapiens
TSPQLSTGVSFFFL

SEQ ID NO: 66442 - protein, 14 aa, Homo Sapiens
SPQLSTGVSFFFLS

SEQ ID NO: 66443 - protein, 14 aa, Homo Sapiens
PQLSTGVSFFFLSF

SEQ ID NO: 66444 - protein, 14 aa, Homo Sapiens
QLSTGVSFFFLSFH

SEQ ID NO: 66445 - protein, 14 aa, Homo Sapiens
LSTGVSFFFLSFHI

SEQ ID NO: 66446 - protein, 14 aa, Homo Sapiens
STGVSFFFLSFHIS

SEQ ID NO: 66447 - protein, 14 aa, Homo Sapiens
TGVSFFFLSFHISN

SEQ ID NO: 66448 - protein, 14 aa, Homo Sapiens
GVSFFFLSFHISNL

SEQ ID NO: 66449 - protein, 14 aa, Homo Sapiens
VSFFFLSFHISNLQ

SEQ ID NO: 66450 - protein, 14 aa, Homo Sapiens
SFFFLSFHISNLQF

SEQ ID NO: 66451 - protein, 14 aa, Homo Sapiens
FFFLSFHISNLQFN

SEQ ID NO: 66452 - protein, 14 aa, Homo Sapiens
FFLSFHISNLQFNS

SEQ ID NO: 66453 - protein, 14 aa, Homo Sapiens
FLSFHISNLQFNSS

SEQ ID NO: 66454 - protein, 14 aa, Homo Sapiens
LSFHISNLQFNSSL

SEQ ID NO: 66455 - protein, 14 aa, Homo Sapiens
SFHISNLQFNSSLE

SEQ ID NO: 66456 - protein, 14 aa, Homo Sapiens
FHISNLQFNSSLED

SEQ ID NO: 66457 - protein, 14 aa, Homo Sapiens
HISNLQFNSSLEDP

SEQ ID NO: 66458 - protein, 14 aa, Homo Sapiens
ISNLQFNSSLEDPS

SEQ ID NO: 66459 - protein, 14 aa, Homo Sapiens
SNLQFNSSLEDPST

SEQ ID NO: 66460 - protein, 14 aa, Homo Sapiens
NLQFNSSLEDPSTD

SEQ ID NO: 66461 - protein, 14 aa, Homo Sapiens
LQFNSSLEDPSTDY

SEQ ID NO: 66462 - protein, 14 aa, Homo Sapiens
QFNSSLEDPSTDYY

SEQ ID NO: 66463 - protein, 14 aa, Homo Sapiens
FNSSLEDPSTDYYQ

SEQ ID NO: 66464 - protein, 14 aa, Homo Sapiens
NSSLEDPSTDYYQE

SEQ ID NO: 66465 - protein, 14 aa, Homo Sapiens
SSLEDPSTDYYQEL

SEQ ID NO: 66466 - protein, 14 aa, Homo Sapiens
SLEDPSTDYYQELQ

SEQ ID NO: 66467 - protein, 14 aa, Homo Sapiens
LEDPSTDYYQELQR

SEQ ID NO: 66468 - protein, 14 aa, Homo Sapiens
EDPSTDYYQELQRD

SEQ ID NO: 66469 - protein, 14 aa, Homo Sapiens
DPSTDYYQELQRDI

SEQ ID NO: 66470 - protein, 14 aa, Homo Sapiens
PSTDYYQELQRDIS

SEQ ID NO: 66471 - protein, 14 aa, Homo Sapiens
STDYYQELQRDISE

SEQ ID NO: 66472 - protein, 14 aa, Homo Sapiens
TDYYQELQRDISEM

SEQ ID NO: 66473 - protein, 14 aa, Homo Sapiens
DYYQELQRDISEMF

SEQ ID NO: 66474 - protein, 14 aa, Homo Sapiens
YYQELQRDISEMFL

SEQ ID NO: 66475 - protein, 14 aa, Homo Sapiens
YQELQRDISEMFLQ

SEQ ID NO: 66476 - protein, 14 aa, Homo Sapiens
QELQRDISEMFLQI

SEQ ID NO: 66477 - protein, 14 aa, Homo Sapiens
ELQRDISEMFLQIY

SEQ ID NO: 66478 - protein, 14 aa, Homo Sapiens
LQRDISEMFLQIYK

SEQ ID NO: 66479 - protein, 14 aa, Homo Sapiens
QRDISEMFLQIYKQ

SEQ ID NO: 66480 - protein, 14 aa, Homo Sapiens
RDISEMFLQIYKQG

SEQ ID NO: 66481 - protein, 14 aa, Homo Sapiens
DISEMFLQIYKQGG

SEQ ID NO: 66482 - protein, 14 aa, Homo Sapiens
ISEMFLQIYKQGGF

SEQ ID NO: 66483 - protein, 14 aa, Homo Sapiens
SEMFLQIYKQGGFL

SEQ ID NO: 66484 - protein, 14 aa, Homo Sapiens
EMFLQIYKQGGFLG

SEQ ID NO: 66485 - protein, 14 aa, Homo Sapiens
MFLQIYKQGGFLGL

SEQ ID NO: 66486 - protein, 14 aa, Homo Sapiens
FLQIYKQGGFLGLS

SEQ ID NO: 66487 - protein, 14 aa, Homo Sapiens
LQIYKQGGFLGLSN

SEQ ID NO: 66488 - protein, 14 aa, Homo Sapiens
QIYKQGGFLGLSNI

SEQ ID NO: 66489 - protein, 14 aa, Homo Sapiens
IYKQGGFLGLSNIK

SEQ ID NO: 66490 - protein, 14 aa, Homo Sapiens
YKQGGFLGLSNIKF

SEQ ID NO: 66491 - protein, 14 aa, Homo Sapiens
KQGGFLGLSNIKFR

SEQ ID NO: 66492 - protein, 14 aa, Homo Sapiens
QGGFLGLSNIKFRP

SEQ ID NO: 66493 - protein, 14 aa, Homo Sapiens
GGFLGLSNIKFRPG

SEQ ID NO: 66494 - protein, 14 aa, Homo Sapiens
GFLGLSNIKFRPGS

SEQ ID NO: 66495 - protein, 14 aa, Homo Sapiens
FLGLSNIKFRPGSV

SEQ ID NO: 66496 - protein, 14 aa, Homo Sapiens
LGLSNIKFRPGSVV

SEQ ID NO: 66497 - protein, 14 aa, Homo Sapiens
GLSNIKFRPGSVVV

SEQ ID NO: 66498 - protein, 14 aa, Homo Sapiens
LSNIKFRPGSVVVQ

SEQ ID NO: 66499 - protein, 14 aa, Homo Sapiens
SNIKFRPGSVVVQL

SEQ ID NO: 66500 - protein, 14 aa, Homo Sapiens
NIKFRPGSVVVQLT

SEQ ID NO: 66501 - protein, 14 aa, Homo Sapiens
IKFRPGSVVVQLTL

SEQ ID NO: 66502 - protein, 14 aa, Homo Sapiens
KFRPGSVVVQLTLA

SEQ ID NO: 66503 - protein, 14 aa, Homo Sapiens
FRPGSVVVQLTLAF

SEQ ID NO: 66504 - protein, 14 aa, Homo Sapiens
RPGSVVVQLTLAFR

SEQ ID NO: 66505 - protein, 14 aa, Homo Sapiens
PGSVVVQLTLAFRE

SEQ ID NO: 66506 - protein, 14 aa, Homo Sapiens
GSVVVQLTLAFREG

SEQ ID NO: 66507 - protein, 14 aa, Homo Sapiens
SVVVQLTLAFREGT

SEQ ID NO: 66508 - protein, 14 aa, Homo Sapiens
VVVQLTLAFREGTI

SEQ ID NO: 66509 - protein, 14 aa, Homo Sapiens
VVQLTLAFREGTIN

SEQ ID NO: 66510 - protein, 14 aa, Homo Sapiens
VQLTLAFREGTINV

SEQ ID NO: 66511 - protein, 14 aa, Homo Sapiens
QLTLAFREGTINVH

SEQ ID NO: 66512 - protein, 14 aa, Homo Sapiens
LTLAFREGTINVHD

SEQ ID NO: 66513 - protein, 14 aa, Homo Sapiens
TLAFREGTINVHDV

SEQ ID NO: 66514 - protein, 14 aa, Homo Sapiens
LAFREGTINVHDVE

SEQ ID NO: 66515 - protein, 14 aa, Homo Sapiens
AFREGTINVHDVET

SEQ ID NO: 66516 - protein, 14 aa, Homo Sapiens
FREGTINVHDVETQ

SEQ ID NO: 66517 - protein, 14 aa, Homo Sapiens
REGTINVHDVETQF

SEQ ID NO: 66518 - protein, 14 aa, Homo Sapiens
EGTINVHDVETQFN

SEQ ID NO: 66519 - protein, 14 aa, Homo Sapiens
GTINVHDVETQFNQ

SEQ ID NO: 66520 - protein, 14 aa, Homo Sapiens
TINVHDVETQFNQY

SEQ ID NO: 66521 - protein, 14 aa, Homo Sapiens
INVHDVETQFNQYK

SEQ ID NO: 66522 - protein, 14 aa, Homo Sapiens
NVHDVETQFNQYKT

SEQ ID NO: 66523 - protein, 14 aa, Homo Sapiens
VHDVETQFNQYKTE

SEQ ID NO: 66524 - protein, 14 aa, Homo Sapiens
HDVETQFNQYKTEA

SEQ ID NO: 66525 - protein, 14 aa, Homo Sapiens
DVETQFNQYKTEAA

SEQ ID NO: 66526 - protein, 14 aa, Homo Sapiens
VETQFNQYKTEAAS

SEQ ID NO: 66527 - protein, 14 aa, Homo Sapiens
ETQFNQYKTEAASR

SEQ ID NO: 66528 - protein, 14 aa, Homo Sapiens
TQFNQYKTEAASRY

SEQ ID NO: 66529 - protein, 14 aa, Homo Sapiens
QFNQYKTEAASRYN

SEQ ID NO: 66530 - protein, 14 aa, Homo Sapiens
FNQYKTEAASRYNL

SEQ ID NO: 66531 - protein, 14 aa, Homo Sapiens
NQYKTEAASRYNLT

SEQ ID NO: 66532 - protein, 14 aa, Homo Sapiens
QYKTEAASRYNLTI

SEQ ID NO: 66533 - protein, 14 aa, Homo Sapiens
YKTEAASRYNLTIS

SEQ ID NO: 66534 - protein, 14 aa, Homo Sapiens
KTEAASRYNLTISD

SEQ ID NO: 66535 - protein, 14 aa, Homo Sapiens
TEAASRYNLTISDV

SEQ ID NO: 66536 - protein, 14 aa, Homo Sapiens
EAASRYNLTISDVS

SEQ ID NO: 66537 - protein, 14 aa, Homo Sapiens
AASRYNLTISDVSV

SEQ ID NO: 66538 - protein, 14 aa, Homo Sapiens
ASRYNLTISDVSVS

SEQ ID NO: 66539 - protein, 14 aa, Homo Sapiens
SRYNLTISDVSVSD

SEQ ID NO: 66540 - protein, 14 aa, Homo Sapiens
RYNLTISDVSVSDV

SEQ ID NO: 66541 - protein, 14 aa, Homo Sapiens
YNLTISDVSVSDVP

SEQ ID NO: 66542 - protein, 14 aa, Homo Sapiens
NLTISDVSVSDVPF

SEQ ID NO: 66543 - protein, 14 aa, Homo Sapiens
LTISDVSVSDVPFP

SEQ ID NO: 66544 - protein, 14 aa, Homo Sapiens
TISDVSVSDVPFPF

SEQ ID NO: 66545 - protein, 14 aa, Homo Sapiens
ISDVSVSDVPFPFS

SEQ ID NO: 66546 - protein, 14 aa, Homo Sapiens
SDVSVSDVPFPFSA

SEQ ID NO: 66547 - protein, 14 aa, Homo Sapiens
DVSVSDVPFPFSAQ

SEQ ID NO: 66548 - protein, 14 aa, Homo Sapiens
VSVSDVPFPFSAQS

SEQ ID NO: 66549 - protein, 14 aa, Homo Sapiens
SVSDVPFPFSAQSG

SEQ ID NO: 66550 - protein, 14 aa, Homo Sapiens
VSDVPFPFSAQSGA

SEQ ID NO: 66551 - protein, 14 aa, Homo Sapiens
SDVPFPFSAQSGAG

SEQ ID NO: 66552 - protein, 14 aa, Homo Sapiens
DVPFPFSAQSGAGV

SEQ ID NO: 66553 - protein, 14 aa, Homo Sapiens
VPFPFSAQSGAGVP

SEQ ID NO: 66554 - protein, 14 aa, Homo Sapiens
PFPFSAQSGAGVPG

SEQ ID NO: 66555 - protein, 14 aa, Homo Sapiens
FPFSAQSGAGVPGW

SEQ ID NO: 66556 - protein, 14 aa, Homo Sapiens
PFSAQSGAGVPGWG

SEQ ID NO: 66557 - protein, 14 aa, Homo Sapiens
FSAQSGAGVPGWGI

SEQ ID NO: 66558 - protein, 14 aa, Homo Sapiens
SAQSGAGVPGWGIA

SEQ ID NO: 66559 - protein, 14 aa, Homo Sapiens
AQSGAGVPGWGIAL

SEQ ID NO: 66560 - protein, 14 aa, Homo Sapiens
QSGAGVPGWGIALL

SEQ ID NO: 66561 - protein, 14 aa, Homo Sapiens
SGAGVPGWGIALLV

SEQ ID NO: 66562 - protein, 14 aa, Homo Sapiens
GAGVPGWGIALLVL

SEQ ID NO: 66563 - protein, 14 aa, Homo Sapiens
AGVPGWGIALLVLV

SEQ ID NO: 66564 - protein, 14 aa, Homo Sapiens
GVPGWGIALLVLVC

SEQ ID NO: 66565 - protein, 14 aa, Homo Sapiens
VPGWGIALLVLVCV

SEQ ID NO: 66566 - protein, 14 aa, Homo Sapiens
PGWGIALLVLVCVL

SEQ ID NO: 66567 - protein, 14 aa, Homo Sapiens
GWGIALLVLVCVLV

SEQ ID NO: 66568 - protein, 14 aa, Homo Sapiens
WGIALLVLVCVLVA

SEQ ID NO: 66569 - protein, 14 aa, Homo Sapiens
GIALLVLVCVLVAL

SEQ ID NO: 66570 - protein, 14 aa, Homo Sapiens
IALLVLVCVLVALA

SEQ ID NO: 66571 - protein, 14 aa, Homo Sapiens
ALLVLVCVLVALAI

SEQ ID NO: 66572 - protein, 14 aa, Homo Sapiens
LLVLVCVLVALAIV

SEQ ID NO: 66573 - protein, 14 aa, Homo Sapiens
LVLVCVLVALAIVY

SEQ ID NO: 66574 - protein, 14 aa, Homo Sapiens
VLVCVLVALAIVYL

SEQ ID NO: 66575 - protein, 14 aa, Homo Sapiens
LVCVLVALAIVYLI

SEQ ID NO: 66576 - protein, 14 aa, Homo Sapiens
VCVLVALAIVYLIA

SEQ ID NO: 66577 - protein, 14 aa, Homo Sapiens
CVLVALAIVYLIAL

SEQ ID NO: 66578 - protein, 14 aa, Homo Sapiens
VLVALAIVYLIALA

SEQ ID NO: 66579 - protein, 14 aa, Homo Sapiens
LVALAIVYLIALAV

SEQ ID NO: 66580 - protein, 14 aa, Homo Sapiens
VALAIVYLIALAVC

SEQ ID NO: 66581 - protein, 14 aa, Homo Sapiens
ALAIVYLIALAVCQ

SEQ ID NO: 66582 - protein, 14 aa, Homo Sapiens
LAIVYLIALAVCQC

SEQ ID NO: 66583 - protein, 14 aa, Homo Sapiens
AIVYLIALAVCQCR

SEQ ID NO: 66584 - protein, 14 aa, Homo Sapiens
IVYLIALAVCQCRR

SEQ ID NO: 66585 - protein, 14 aa, Homo Sapiens
VYLIALAVCQCRRK

SEQ ID NO: 66586 - protein, 14 aa, Homo Sapiens
YLIALAVCQCRRKN

SEQ ID NO: 66587 - protein, 14 aa, Homo Sapiens
LIALAVCQCRRKNY

SEQ ID NO: 66588 - protein, 14 aa, Homo Sapiens
IALAVCQCRRKNYG

SEQ ID NO: 66589 - protein, 14 aa, Homo Sapiens
ALAVCQCRRKNYGQ

SEQ ID NO: 66590 - protein, 14 aa, Homo Sapiens
LAVCQCRRKNYGQL

SEQ ID NO: 66591 - protein, 14 aa, Homo Sapiens
AVCQCRRKNYGQLD

SEQ ID NO: 66592 - protein, 14 aa, Homo Sapiens
VCQCRRKNYGQLDI

SEQ ID NO: 66593 - protein, 14 aa, Homo Sapiens
CQCRRKNYGQLDIF

SEQ ID NO: 66594 - protein, 14 aa, Homo Sapiens
QCRRKNYGQLDIFP

SEQ ID NO: 66595 - protein, 14 aa, Homo Sapiens
CRRKNYGQLDIFPA

SEQ ID NO: 66596 - protein, 14 aa, Homo Sapiens
RRKNYGQLDIFPAR

SEQ ID NO: 66597 - protein, 14 aa, Homo Sapiens
RKNYGQLDIFPARD

SEQ ID NO: 66598 - protein, 14 aa, Homo Sapiens
KNYGQLDIFPARDT

SEQ ID NO: 66599 - protein, 14 aa, Homo Sapiens
NYGQLDIFPARDTY

SEQ ID NO: 66600 - protein, 14 aa, Homo Sapiens
YGQLDIFPARDTYH

SEQ ID NO: 66601 - protein, 14 aa, Homo Sapiens
GQLDIFPARDTYHP

SEQ ID NO: 66602 - protein, 14 aa, Homo Sapiens
QLDIFPARDTYHPM

SEQ ID NO: 66603 - protein, 14 aa, Homo Sapiens
LDIFPARDTYHPMS

SEQ ID NO: 66604 - protein, 14 aa, Homo Sapiens
DIFPARDTYHPMSE

SEQ ID NO: 66605 - protein, 14 aa, Homo Sapiens
IFPARDTYHPMSEY

SEQ ID NO: 66606 - protein, 14 aa, Homo Sapiens
FPARDTYHPMSEYP

SEQ ID NO: 66607 - protein, 14 aa, Homo Sapiens
PARDTYHPMSEYPT

SEQ ID NO: 66608 - protein, 14 aa, Homo Sapiens
ARDTYHPMSEYPTY

SEQ ID NO: 66609 - protein, 14 aa, Homo Sapiens
RDTYHPMSEYPTYH

SEQ ID NO: 66610 - protein, 14 aa, Homo Sapiens
DTYHPMSEYPTYHT

SEQ ID NO: 66611 - protein, 14 aa, Homo Sapiens
TYHPMSEYPTYHTH

SEQ ID NO: 66612 - protein, 14 aa, Homo Sapiens
YHPMSEYPTYHTHG

SEQ ID NO: 66613 - protein, 14 aa, Homo Sapiens
HPMSEYPTYHTHGR

SEQ ID NO: 66614 - protein, 14 aa, Homo Sapiens
PMSEYPTYHTHGRY

SEQ ID NO: 66615 - protein, 14 aa, Homo Sapiens
MSEYPTYHTHGRYV

SEQ ID NO: 66616 - protein, 14 aa, Homo Sapiens
SEYPTYHTHGRYVP

SEQ ID NO: 66617 - protein, 14 aa, Homo Sapiens
EYPTYHTHGRYVPP

SEQ ID NO: 66618 - protein, 14 aa, Homo Sapiens
YPTYHTHGRYVPPS

SEQ ID NO: 66619 - protein, 14 aa, Homo Sapiens
PTYHTHGRYVPPSS

SEQ ID NO: 66620 - protein, 14 aa, Homo Sapiens
TYHTHGRYVPPSST

SEQ ID NO: 66621 - protein, 14 aa, Homo Sapiens
YHTHGRYVPPSSTD

SEQ ID NO: 66622 - protein, 14 aa, Homo Sapiens
HTHGRYVPPSSTDR

SEQ ID NO: 66623 - protein, 14 aa, Homo Sapiens
THGRYVPPSSTDRS

SEQ ID NO: 66624 - protein, 14 aa, Homo Sapiens
HGRYVPPSSTDRSP

SEQ ID NO: 66625 - protein, 14 aa, Homo Sapiens
GRYVPPSSTDRSPY

SEQ ID NO: 66626 - protein, 14 aa, Homo Sapiens
RYVPPSSTDRSPYE

SEQ ID NO: 66627 - protein, 14 aa, Homo Sapiens
YVPPSSTDRSPYEK

SEQ ID NO: 66628 - protein, 14 aa, Homo Sapiens
VPPSSTDRSPYEKV

SEQ ID NO: 66629 - protein, 14 aa, Homo Sapiens
PPSSTDRSPYEKVS

SEQ ID NO: 66630 - protein, 14 aa, Homo Sapiens
PSSTDRSPYEKVSA

SEQ ID NO: 66631 - protein, 14 aa, Homo Sapiens
SSTDRSPYEKVSAG

SEQ ID NO: 66632 - protein, 14 aa, Homo Sapiens
STDRSPYEKVSAGN

SEQ ID NO: 66633 - protein, 14 aa, Homo Sapiens
TDRSPYEKVSAGNG

SEQ ID NO: 66634 - protein, 14 aa, Homo Sapiens
DRSPYEKVSAGNGG

SEQ ID NO: 66635 - protein, 14 aa, Homo Sapiens
RSPYEKVSAGNGGS

SEQ ID NO: 66636 - protein, 14 aa, Homo Sapiens
SPYEKVSAGNGGSS

SEQ ID NO: 66637 - protein, 14 aa, Homo Sapiens
PYEKVSAGNGGSSL

SEQ ID NO: 66638 - protein, 14 aa, Homo Sapiens
YEKVSAGNGGSSLS

SEQ ID NO: 66639 - protein, 14 aa, Homo Sapiens
EKVSAGNGGSSLSY

SEQ ID NO: 66640 - protein, 14 aa, Homo Sapiens
KVSAGNGGSSLSYT

SEQ ID NO: 66641 - protein, 14 aa, Homo Sapiens
VSAGNGGSSLSYTN

SEQ ID NO: 66642 - protein, 14 aa, Homo Sapiens
SAGNGGSSLSYTNP

SEQ ID NO: 66643 - protein, 14 aa, Homo Sapiens
AGNGGSSLSYTNPA

SEQ ID NO: 66644 - protein, 14 aa, Homo Sapiens
GNGGSSLSYTNPAV

SEQ ID NO: 66645 - protein, 14 aa, Homo Sapiens
NGGSSLSYTNPAVA

SEQ ID NO: 66646 - protein, 14 aa, Homo Sapiens
GGSSLSYTNPAVAA

SEQ ID NO: 66647 - protein, 14 aa, Homo Sapiens
GSSLSYTNPAVAAA

SEQ ID NO: 66648 - protein, 14 aa, Homo Sapiens
SSLSYTNPAVAAAS

SEQ ID NO: 66649 - protein, 14 aa, Homo Sapiens
SLSYTNPAVAAASA

SEQ ID NO: 66650 - protein, 14 aa, Homo Sapiens
LSYTNPAVAAASAN

SEQ ID NO: 66651 - protein, 14 aa, Homo Sapiens
SYTNPAVAAASANL

SEQ ID NO: 66652 - protein, 15 aa, Homo Sapiens
MTPGTQSPFFLLLLL

SEQ ID NO: 66653 - protein, 15 aa, Homo Sapiens
TPGTQSPFFLLLLLT

SEQ ID NO: 66654 - protein, 15 aa, Homo Sapiens
PGTQSPFFLLLLLTV

SEQ ID NO: 66655 - protein, 15 aa, Homo Sapiens
GTQSPFFLLLLLTVL

SEQ ID NO: 66656 - protein, 15 aa, Homo Sapiens
TQSPFFLLLLLTVLT

SEQ ID NO: 66657 - protein, 15 aa, Homo Sapiens
QSPFFLLLLLTVLTV

SEQ ID NO: 66658 - protein, 15 aa, Homo Sapiens
SPFFLLLLLTVLTVV

SEQ ID NO: 66659 - protein, 15 aa, Homo Sapiens
PFFLLLLLTVLTVVT

SEQ ID NO: 66660 - protein, 15 aa, Homo Sapiens
FFLLLLLTVLTVVTG

SEQ ID NO: 66661 - protein, 15 aa, Homo Sapiens
FLLLLLTVLTVVTGS

SEQ ID NO: 66662 - protein, 15 aa, Homo Sapiens
LLLLLTVLTVVTGSG

SEQ ID NO: 66663 - protein, 15 aa, Homo Sapiens
LLLLTVLTVVTGSGH

SEQ ID NO: 66664 - protein, 15 aa, Homo Sapiens
LLLTVLTVVTGSGHA

SEQ ID NO: 66665 - protein, 15 aa, Homo Sapiens
LLTVLTVVTGSGHAS

SEQ ID NO: 66666 - protein, 15 aa, Homo Sapiens
LTVLTVVTGSGHASS

SEQ ID NO: 66667 - protein, 15 aa, Homo Sapiens
TVLTVVTGSGHASST

SEQ ID NO: 66668 - protein, 15 aa, Homo Sapiens
VLTVVTGSGHASSTP

SEQ ID NO: 66669 - protein, 15 aa, Homo Sapiens
LTVVTGSGHASSTPG

SEQ ID NO: 66670 - protein, 15 aa, Homo Sapiens
TVVTGSGHASSTPGG

SEQ ID NO: 66671 - protein, 15 aa, Homo Sapiens
VVTGSGHASSTPGGE

SEQ ID NO: 66672 - protein, 15 aa, Homo Sapiens
VTGSGHASSTPGGEK

SEQ ID NO: 66673 - protein, 15 aa, Homo Sapiens
TGSGHASSTPGGEKE

SEQ ID NO: 66674 - protein, 15 aa, Homo Sapiens
GSGHASSTPGGEKET

SEQ ID NO: 66675 - protein, 15 aa, Homo Sapiens
SGHASSTPGGEKETS

SEQ ID NO: 66676 - protein, 15 aa, Homo Sapiens
GHASSTPGGEKETSA

SEQ ID NO: 66677 - protein, 15 aa, Homo Sapiens
HASSTPGGEKETSAT

SEQ ID NO: 66678 - protein, 15 aa, Homo Sapiens
ASSTPGGEKETSATQ

SEQ ID NO: 66679 - protein, 15 aa, Homo Sapiens
SSTPGGEKETSATQR

SEQ ID NO: 66680 - protein, 15 aa, Homo Sapiens
STPGGEKETSATQRS

SEQ ID NO: 66681 - protein, 15 aa, Homo Sapiens
TPGGEKETSATQRSS

SEQ ID NO: 66682 - protein, 15 aa, Homo Sapiens
PGGEKETSATQRSSV

SEQ ID NO: 66683 - protein, 15 aa, Homo Sapiens
GGEKETSATQRSSVP

SEQ ID NO: 66684 - protein, 15 aa, Homo Sapiens
GEKETSATQRSSVPS

SEQ ID NO: 66685 - protein, 15 aa, Homo Sapiens
EKETSATQRSSVPSS

SEQ ID NO: 66686 - protein, 15 aa, Homo Sapiens
KETSATQRSSVPSST

SEQ ID NO: 66687 - protein, 15 aa, Homo Sapiens
ETSATQRSSVPSSTE

SEQ ID NO: 66688 - protein, 15 aa, Homo Sapiens
TSATQRSSVPSSTEK

SEQ ID NO: 66689 - protein, 15 aa, Homo Sapiens
SATQRSSVPSSTEKN

SEQ ID NO: 66690 - protein, 15 aa, Homo Sapiens
ATQRSSVPSSTEKNA

SEQ ID NO: 66691 - protein, 15 aa, Homo Sapiens
TQRSSVPSSTEKNAV

SEQ ID NO: 66692 - protein, 15 aa, Homo Sapiens
QRSSVPSSTEKNAVS

SEQ ID NO: 66693 - protein, 15 aa, Homo Sapiens
RSSVPSSTEKNAVSM

SEQ ID NO: 66694 - protein, 15 aa, Homo Sapiens
SSVPSSTEKNAVSMT

SEQ ID NO: 66695 - protein, 15 aa, Homo Sapiens
SVPSSTEKNAVSMTS

SEQ ID NO: 66696 - protein, 15 aa, Homo Sapiens
VPSSTEKNAVSMTSS

SEQ ID NO: 66697 - protein, 15 aa, Homo Sapiens
PSSTEKNAVSMTSSV

SEQ ID NO: 66698 - protein, 15 aa, Homo Sapiens
SSTEKNAVSMTSSVL

SEQ ID NO: 66699 - protein, 15 aa, Homo Sapiens
STEKNAVSMTSSVLS

SEQ ID NO: 66700 - protein, 15 aa, Homo Sapiens
TEKNAVSMTSSVLSS

SEQ ID NO: 66701 - protein, 15 aa, Homo Sapiens
EKNAVSMTSSVLSSH

SEQ ID NO: 66702 - protein, 15 aa, Homo Sapiens
KNAVSMTSSVLSSHS

SEQ ID NO: 66703 - protein, 15 aa, Homo Sapiens
NAVSMTSSVLSSHSP

SEQ ID NO: 66704 - protein, 15 aa, Homo Sapiens
AVSMTSSVLSSHSPG

SEQ ID NO: 66705 - protein, 15 aa, Homo Sapiens
VSMTSSVLSSHSPGS

SEQ ID NO: 66706 - protein, 15 aa, Homo Sapiens
SMTSSVLSSHSPGSG

SEQ ID NO: 66707 - protein, 15 aa, Homo Sapiens
MTSSVLSSHSPGSGS

SEQ ID NO: 66708 - protein, 15 aa, Homo Sapiens
TSSVLSSHSPGSGSS

SEQ ID NO: 66709 - protein, 15 aa, Homo Sapiens
SSVLSSHSPGSGSST

SEQ ID NO: 66710 - protein, 15 aa, Homo Sapiens
SVLSSHSPGSGSSTT

SEQ ID NO: 66711 - protein, 15 aa, Homo Sapiens
VLSSHSPGSGSSTTQ

SEQ ID NO: 66712 - protein, 15 aa, Homo Sapiens
LSSHSPGSGSSTTQG

SEQ ID NO: 66713 - protein, 15 aa, Homo Sapiens
SSHSPGSGSSTTQGQ

SEQ ID NO: 66714 - protein, 15 aa, Homo Sapiens
SHSPGSGSSTTQGQD

SEQ ID NO: 66715 - protein, 15 aa, Homo Sapiens
HSPGSGSSTTQGQDV

SEQ ID NO: 66716 - protein, 15 aa, Homo Sapiens
SPGSGSSTTQGQDVT

SEQ ID NO: 66717 - protein, 15 aa, Homo Sapiens
PGSGSSTTQGQDVTL

SEQ ID NO: 66718 - protein, 15 aa, Homo Sapiens
GSGSSTTQGQDVTLA

SEQ ID NO: 66719 - protein, 15 aa, Homo Sapiens
SGSSTTQGQDVTLAP

SEQ ID NO: 66720 - protein, 15 aa, Homo Sapiens
GSSTTQGQDVTLAPA

SEQ ID NO: 66721 - protein, 15 aa, Homo Sapiens
SSTTQGQDVTLAPAT

SEQ ID NO: 66722 - protein, 15 aa, Homo Sapiens
STTQGQDVTLAPATE

SEQ ID NO: 66723 - protein, 15 aa, Homo Sapiens
TTQGQDVTLAPATEP

SEQ ID NO: 66724 - protein, 15 aa, Homo Sapiens
TQGQDVTLAPATEPA

SEQ ID NO: 66725 - protein, 15 aa, Homo Sapiens
QGQDVTLAPATEPAS

SEQ ID NO: 66726 - protein, 15 aa, Homo Sapiens
GQDVTLAPATEPASG

SEQ ID NO: 66727 - protein, 15 aa, Homo Sapiens
QDVTLAPATEPASGS

SEQ ID NO: 66728 - protein, 15 aa, Homo Sapiens
DVTLAPATEPASGSA

SEQ ID NO: 66729 - protein, 15 aa, Homo Sapiens
VTLAPATEPASGSAA

SEQ ID NO: 66730 - protein, 15 aa, Homo Sapiens
TLAPATEPASGSAAT

SEQ ID NO: 66731 - protein, 15 aa, Homo Sapiens
LAPATEPASGSAATW

SEQ ID NO: 66732 - protein, 15 aa, Homo Sapiens
APATEPASGSAATWG

SEQ ID NO: 66733 - protein, 15 aa, Homo Sapiens
PATEPASGSAATWGQ

SEQ ID NO: 66734 - protein, 15 aa, Homo Sapiens
ATEPASGSAATWGQD

SEQ ID NO: 66735 - protein, 15 aa, Homo Sapiens
TEPASGSAATWGQDV

SEQ ID NO: 66736 - protein, 15 aa, Homo Sapiens
EPASGSAATWGQDVT

SEQ ID NO: 66737 - protein, 15 aa, Homo Sapiens
PASGSAATWGQDVTS

SEQ ID NO: 66738 - protein, 15 aa, Homo Sapiens
ASGSAATWGQDVTSV

SEQ ID NO: 66739 - protein, 15 aa, Homo Sapiens
SGSAATWGQDVTSVP

SEQ ID NO: 66740 - protein, 15 aa, Homo Sapiens
GSAATWGQDVTSVPV

SEQ ID NO: 66741 - protein, 15 aa, Homo Sapiens
SAATWGQDVTSVPVT

SEQ ID NO: 66742 - protein, 15 aa, Homo Sapiens
AATWGQDVTSVPVTR

SEQ ID NO: 66743 - protein, 15 aa, Homo Sapiens
ATWGQDVTSVPVTRP

SEQ ID NO: 66744 - protein, 15 aa, Homo Sapiens
TWGQDVTSVPVTRPA

SEQ ID NO: 66745 - protein, 15 aa, Homo Sapiens
WGQDVTSVPVTRPAL

SEQ ID NO: 66746 - protein, 15 aa, Homo Sapiens
GQDVTSVPVTRPALG

SEQ ID NO: 66747 - protein, 15 aa, Homo Sapiens
QDVTSVPVTRPALGS

SEQ ID NO: 66748 - protein, 15 aa, Homo Sapiens
DVTSVPVTRPALGST

SEQ ID NO: 66749 - protein, 15 aa, Homo Sapiens
VTSVPVTRPALGSTT

SEQ ID NO: 66750 - protein, 15 aa, Homo Sapiens
TSVPVTRPALGSTTP

SEQ ID NO: 66751 - protein, 15 aa, Homo Sapiens
SVPVTRPALGSTTPP

SEQ ID NO: 66752 - protein, 15 aa, Homo Sapiens
VPVTRPALGSTTPPA

SEQ ID NO: 66753 - protein, 15 aa, Homo Sapiens
PVTRPALGSTTPPAH

SEQ ID NO: 66754 - protein, 15 aa, Homo Sapiens
VTRPALGSTTPPAHD

SEQ ID NO: 66755 - protein, 15 aa, Homo Sapiens
TRPALGSTTPPAHDV

SEQ ID NO: 66756 - protein, 15 aa, Homo Sapiens
RPALGSTTPPAHDVT

SEQ ID NO: 66757 - protein, 15 aa, Homo Sapiens
PALGSTTPPAHDVTS

SEQ ID NO: 66758 - protein, 15 aa, Homo Sapiens
ALGSTTPPAHDVTSA

SEQ ID NO: 66759 - protein, 15 aa, Homo Sapiens
LGSTTPPAHDVTSAP

SEQ ID NO: 66760 - protein, 15 aa, Homo Sapiens
GSTTPPAHDVTSAPD

SEQ ID NO: 66761 - protein, 15 aa, Homo Sapiens
STTPPAHDVTSAPDN

SEQ ID NO: 66762 - protein, 15 aa, Homo Sapiens
TTPPAHDVTSAPDNK

SEQ ID NO: 66763 - protein, 15 aa, Homo Sapiens
TPPAHDVTSAPDNKP

SEQ ID NO: 66764 - protein, 15 aa, Homo Sapiens
PPAHDVTSAPDNKPA

SEQ ID NO: 66765 - protein, 15 aa, Homo Sapiens
PAHDVTSAPDNKPAP

SEQ ID NO: 66766 - protein, 15 aa, Homo Sapiens
AHDVTSAPDNKPAPG

SEQ ID NO: 66767 - protein, 15 aa, Homo Sapiens
HDVTSAPDNKPAPGS

SEQ ID NO: 66768 - protein, 15 aa, Homo Sapiens
DVTSAPDNKPAPGST

SEQ ID NO: 66769 - protein, 15 aa, Homo Sapiens
VTSAPDNKPAPGSTA

SEQ ID NO: 66770 - protein, 15 aa, Homo Sapiens
TSAPDNKPAPGSTAP

SEQ ID NO: 66771 - protein, 15 aa, Homo Sapiens
SAPDNKPAPGSTAPP

SEQ ID NO: 66772 - protein, 15 aa, Homo Sapiens
APDNKPAPGSTAPPA

SEQ ID NO: 66773 - protein, 15 aa, Homo Sapiens
PDNKPAPGSTAPPAH

SEQ ID NO: 66774 - protein, 15 aa, Homo Sapiens
DNKPAPGSTAPPAHG

SEQ ID NO: 66775 - protein, 15 aa, Homo Sapiens
NKPAPGSTAPPAHGV

SEQ ID NO: 66776 - protein, 15 aa, Homo Sapiens
KPAPGSTAPPAHGVT

SEQ ID NO: 66777 - protein, 15 aa, Homo Sapiens
PAPGSTAPPAHGVTS

SEQ ID NO: 66778 - protein, 15 aa, Homo Sapiens
APGSTAPPAHGVTSA

SEQ ID NO: 66779 - protein, 15 aa, Homo Sapiens
PGSTAPPAHGVTSAP

SEQ ID NO: 66780 - protein, 15 aa, Homo Sapiens
GSTAPPAHGVTSAPD

SEQ ID NO: 66781 - protein, 15 aa, Homo Sapiens
STAPPAHGVTSAPDT

SEQ ID NO: 66782 - protein, 15 aa, Homo Sapiens
TAPPAHGVTSAPDTR

SEQ ID NO: 66783 - protein, 15 aa, Homo Sapiens
APPAHGVTSAPDTRP

SEQ ID NO: 66784 - protein, 15 aa, Homo Sapiens
PPAHGVTSAPDTRPA

SEQ ID NO: 66785 - protein, 15 aa, Homo Sapiens
PAHGVTSAPDTRPAP

SEQ ID NO: 66786 - protein, 15 aa, Homo Sapiens
AHGVTSAPDTRPAPG

SEQ ID NO: 66787 - protein, 15 aa, Homo Sapiens
HGVTSAPDTRPAPGS

SEQ ID NO: 66788 - protein, 15 aa, Homo Sapiens
GVTSAPDTRPAPGST

SEQ ID NO: 66789 - protein, 15 aa, Homo Sapiens
VTSAPDTRPAPGSTA

SEQ ID NO: 66790 - protein, 15 aa, Homo Sapiens
TSAPDTRPAPGSTAP

SEQ ID NO: 66791 - protein, 15 aa, Homo Sapiens
SAPDTRPAPGSTAPP

SEQ ID NO: 66792 - protein, 15 aa, Homo Sapiens
APDTRPAPGSTAPPA

SEQ ID NO: 66793 - protein, 15 aa, Homo Sapiens
PDTRPAPGSTAPPAH

SEQ ID NO: 66794 - protein, 15 aa, Homo Sapiens
DTRPAPGSTAPPAHG

SEQ ID NO: 66795 - protein, 15 aa, Homo Sapiens
TRPAPGSTAPPAHGV

SEQ ID NO: 66796 - protein, 15 aa, Homo Sapiens
RPAPGSTAPPAHGVT

SEQ ID NO: 66797 - protein, 15 aa, Homo Sapiens
PAPGSTAPPAHGVTS

SEQ ID NO: 66798 - protein, 15 aa, Homo Sapiens
APGSTAPPAHGVTSA

SEQ ID NO: 66799 - protein, 15 aa, Homo Sapiens
PGSTAPPAHGVTSAP

SEQ ID NO: 66800 - protein, 15 aa, Homo Sapiens
GSTAPPAHGVTSAPD

SEQ ID NO: 66801 - protein, 15 aa, Homo Sapiens
STAPPAHGVTSAPDT

SEQ ID NO: 66802 - protein, 15 aa, Homo Sapiens
TAPPAHGVTSAPDTR

SEQ ID NO: 66803 - protein, 15 aa, Homo Sapiens
APPAHGVTSAPDTRP

SEQ ID NO: 66804 - protein, 15 aa, Homo Sapiens
PPAHGVTSAPDTRPA

SEQ ID NO: 66805 - protein, 15 aa, Homo Sapiens
PAHGVTSAPDTRPAP

SEQ ID NO: 66806 - protein, 15 aa, Homo Sapiens
AHGVTSAPDTRPAPG

SEQ ID NO: 66807 - protein, 15 aa, Homo Sapiens
HGVTSAPDTRPAPGS

SEQ ID NO: 66808 - protein, 15 aa, Homo Sapiens
GVTSAPDTRPAPGST

SEQ ID NO: 66809 - protein, 15 aa, Homo Sapiens
VTSAPDTRPAPGSTA

SEQ ID NO: 66810 - protein, 15 aa, Homo Sapiens
TSAPDTRPAPGSTAP

SEQ ID NO: 66811 - protein, 15 aa, Homo Sapiens
SAPDTRPAPGSTAPP

SEQ ID NO: 66812 - protein, 15 aa, Homo Sapiens
APDTRPAPGSTAPPA

SEQ ID NO: 66813 - protein, 15 aa, Homo Sapiens
PDTRPAPGSTAPPAH

SEQ ID NO: 66814 - protein, 15 aa, Homo Sapiens
DTRPAPGSTAPPAHG

SEQ ID NO: 66815 - protein, 15 aa, Homo Sapiens
TRPAPGSTAPPAHGV

SEQ ID NO: 66816 - protein, 15 aa, Homo Sapiens
RPAPGSTAPPAHGVT

SEQ ID NO: 66817 - protein, 15 aa, Homo Sapiens
PAPGSTAPPAHGVTS

SEQ ID NO: 66818 - protein, 15 aa, Homo Sapiens
APGSTAPPAHGVTSA

SEQ ID NO: 66819 - protein, 15 aa, Homo Sapiens
PGSTAPPAHGVTSAP

SEQ ID NO: 66820 - protein, 15 aa, Homo Sapiens
GSTAPPAHGVTSAPD

SEQ ID NO: 66821 - protein, 15 aa, Homo Sapiens
STAPPAHGVTSAPDT

SEQ ID NO: 66822 - protein, 15 aa, Homo Sapiens
TAPPAHGVTSAPDTR

SEQ ID NO: 66823 - protein, 15 aa, Homo Sapiens
APPAHGVTSAPDTRP

SEQ ID NO: 66824 - protein, 15 aa, Homo Sapiens
PPAHGVTSAPDTRPA

SEQ ID NO: 66825 - protein, 15 aa, Homo Sapiens
PAHGVTSAPDTRPAP

SEQ ID NO: 66826 - protein, 15 aa, Homo Sapiens
AHGVTSAPDTRPAPG

SEQ ID NO: 66827 - protein, 15 aa, Homo Sapiens
HGVTSAPDTRPAPGS

SEQ ID NO: 66828 - protein, 15 aa, Homo Sapiens
GVTSAPDTRPAPGST

SEQ ID NO: 66829 - protein, 15 aa, Homo Sapiens
VTSAPDTRPAPGSTA

SEQ ID NO: 66830 - protein, 15 aa, Homo Sapiens
TSAPDTRPAPGSTAP

SEQ ID NO: 66831 - protein, 15 aa, Homo Sapiens
SAPDTRPAPGSTAPP

SEQ ID NO: 66832 - protein, 15 aa, Homo Sapiens
APDTRPAPGSTAPPA

SEQ ID NO: 66833 - protein, 15 aa, Homo Sapiens
PDTRPAPGSTAPPAH

SEQ ID NO: 66834 - protein, 15 aa, Homo Sapiens
DTRPAPGSTAPPAHG

SEQ ID NO: 66835 - protein, 15 aa, Homo Sapiens
TRPAPGSTAPPAHGV

SEQ ID NO: 66836 - protein, 15 aa, Homo Sapiens
RPAPGSTAPPAHGVT

SEQ ID NO: 66837 - protein, 15 aa, Homo Sapiens
PAPGSTAPPAHGVTS

SEQ ID NO: 66838 - protein, 15 aa, Homo Sapiens
APGSTAPPAHGVTSA

SEQ ID NO: 66839 - protein, 15 aa, Homo Sapiens
PGSTAPPAHGVTSAP

SEQ ID NO: 66840 - protein, 15 aa, Homo Sapiens
GSTAPPAHGVTSAPD

SEQ ID NO: 66841 - protein, 15 aa, Homo Sapiens
STAPPAHGVTSAPDT

SEQ ID NO: 66842 - protein, 15 aa, Homo Sapiens
TAPPAHGVTSAPDTR

SEQ ID NO: 66843 - protein, 15 aa, Homo Sapiens
APPAHGVTSAPDTRP

SEQ ID NO: 66844 - protein, 15 aa, Homo Sapiens
PPAHGVTSAPDTRPA

SEQ ID NO: 66845 - protein, 15 aa, Homo Sapiens
PAHGVTSAPDTRPAP

SEQ ID NO: 66846 - protein, 15 aa, Homo Sapiens
AHGVTSAPDTRPAPG

SEQ ID NO: 66847 - protein, 15 aa, Homo Sapiens
HGVTSAPDTRPAPGS

SEQ ID NO: 66848 - protein, 15 aa, Homo Sapiens
GVTSAPDTRPAPGST

SEQ ID NO: 66849 - protein, 15 aa, Homo Sapiens
VTSAPDTRPAPGSTA

SEQ ID NO: 66850 - protein, 15 aa, Homo Sapiens
TSAPDTRPAPGSTAP

SEQ ID NO: 66851 - protein, 15 aa, Homo Sapiens
SAPDTRPAPGSTAPP

SEQ ID NO: 66852 - protein, 15 aa, Homo Sapiens
APDTRPAPGSTAPPA

SEQ ID NO: 66853 - protein, 15 aa, Homo Sapiens
PDTRPAPGSTAPPAH

SEQ ID NO: 66854 - protein, 15 aa, Homo Sapiens
DTRPAPGSTAPPAHG

SEQ ID NO: 66855 - protein, 15 aa, Homo Sapiens
TRPAPGSTAPPAHGV

SEQ ID NO: 66856 - protein, 15 aa, Homo Sapiens
RPAPGSTAPPAHGVT

SEQ ID NO: 66857 - protein, 15 aa, Homo Sapiens
PAPGSTAPPAHGVTS

SEQ ID NO: 66858 - protein, 15 aa, Homo Sapiens
APGSTAPPAHGVTSA

SEQ ID NO: 66859 - protein, 15 aa, Homo Sapiens
PGSTAPPAHGVTSAP

SEQ ID NO: 66860 - protein, 15 aa, Homo Sapiens
GSTAPPAHGVTSAPD

SEQ ID NO: 66861 - protein, 15 aa, Homo Sapiens
STAPPAHGVTSAPDT

SEQ ID NO: 66862 - protein, 15 aa, Homo Sapiens
TAPPAHGVTSAPDTR

SEQ ID NO: 66863 - protein, 15 aa, Homo Sapiens
APPAHGVTSAPDTRP

SEQ ID NO: 66864 - protein, 15 aa, Homo Sapiens
PPAHGVTSAPDTRPA

SEQ ID NO: 66865 - protein, 15 aa, Homo Sapiens
PAHGVTSAPDTRPAP

SEQ ID NO: 66866 - protein, 15 aa, Homo Sapiens
AHGVTSAPDTRPAPG

SEQ ID NO: 66867 - protein, 15 aa, Homo Sapiens
HGVTSAPDTRPAPGS

SEQ ID NO: 66868 - protein, 15 aa, Homo Sapiens
GVTSAPDTRPAPGST

SEQ ID NO: 66869 - protein, 15 aa, Homo Sapiens
VTSAPDTRPAPGSTA

SEQ ID NO: 66870 - protein, 15 aa, Homo Sapiens
TSAPDTRPAPGSTAP

SEQ ID NO: 66871 - protein, 15 aa, Homo Sapiens
SAPDTRPAPGSTAPP

SEQ ID NO: 66872 - protein, 15 aa, Homo Sapiens
APDTRPAPGSTAPPA

SEQ ID NO: 66873 - protein, 15 aa, Homo Sapiens
PDTRPAPGSTAPPAH

SEQ ID NO: 66874 - protein, 15 aa, Homo Sapiens
DTRPAPGSTAPPAHG

SEQ ID NO: 66875 - protein, 15 aa, Homo Sapiens
TRPAPGSTAPPAHGV

SEQ ID NO: 66876 - protein, 15 aa, Homo Sapiens
RPAPGSTAPPAHGVT

SEQ ID NO: 66877 - protein, 15 aa, Homo Sapiens
PAPGSTAPPAHGVTS

SEQ ID NO: 66878 - protein, 15 aa, Homo Sapiens
APGSTAPPAHGVTSA

SEQ ID NO: 66879 - protein, 15 aa, Homo Sapiens
PGSTAPPAHGVTSAP

SEQ ID NO: 66880 - protein, 15 aa, Homo Sapiens
GSTAPPAHGVTSAPD

SEQ ID NO: 66881 - protein, 15 aa, Homo Sapiens
STAPPAHGVTSAPDT

SEQ ID NO: 66882 - protein, 15 aa, Homo Sapiens
TAPPAHGVTSAPDTR

SEQ ID NO: 66883 - protein, 15 aa, Homo Sapiens
APPAHGVTSAPDTRP

SEQ ID NO: 66884 - protein, 15 aa, Homo Sapiens
PPAHGVTSAPDTRPA

SEQ ID NO: 66885 - protein, 15 aa, Homo Sapiens
PAHGVTSAPDTRPAP

SEQ ID NO: 66886 - protein, 15 aa, Homo Sapiens
AHGVTSAPDTRPAPG

SEQ ID NO: 66887 - protein, 15 aa, Homo Sapiens
HGVTSAPDTRPAPGS

SEQ ID NO: 66888 - protein, 15 aa, Homo Sapiens
GVTSAPDTRPAPGST

SEQ ID NO: 66889 - protein, 15 aa, Homo Sapiens
VTSAPDTRPAPGSTA

SEQ ID NO: 66890 - protein, 15 aa, Homo Sapiens
TSAPDTRPAPGSTAP

SEQ ID NO: 66891 - protein, 15 aa, Homo Sapiens
SAPDTRPAPGSTAPP

SEQ ID NO: 66892 - protein, 15 aa, Homo Sapiens
APDTRPAPGSTAPPA

SEQ ID NO: 66893 - protein, 15 aa, Homo Sapiens
PDTRPAPGSTAPPAH

SEQ ID NO: 66894 - protein, 15 aa, Homo Sapiens
DTRPAPGSTAPPAHG

SEQ ID NO: 66895 - protein, 15 aa, Homo Sapiens
TRPAPGSTAPPAHGV

SEQ ID NO: 66896 - protein, 15 aa, Homo Sapiens
RPAPGSTAPPAHGVT

SEQ ID NO: 66897 - protein, 15 aa, Homo Sapiens
PAPGSTAPPAHGVTS

SEQ ID NO: 66898 - protein, 15 aa, Homo Sapiens
APGSTAPPAHGVTSA

SEQ ID NO: 66899 - protein, 15 aa, Homo Sapiens
PGSTAPPAHGVTSAP

SEQ ID NO: 66900 - protein, 15 aa, Homo Sapiens
GSTAPPAHGVTSAPD

SEQ ID NO: 66901 - protein, 15 aa, Homo Sapiens
STAPPAHGVTSAPDT

SEQ ID NO: 66902 - protein, 15 aa, Homo Sapiens
TAPPAHGVTSAPDTR

SEQ ID NO: 66903 - protein, 15 aa, Homo Sapiens
APPAHGVTSAPDTRP

SEQ ID NO: 66904 - protein, 15 aa, Homo Sapiens
PPAHGVTSAPDTRPA

SEQ ID NO: 66905 - protein, 15 aa, Homo Sapiens
PAHGVTSAPDTRPAP

SEQ ID NO: 66906 - protein, 15 aa, Homo Sapiens
AHGVTSAPDTRPAPG

SEQ ID NO: 66907 - protein, 15 aa, Homo Sapiens
HGVTSAPDTRPAPGS

SEQ ID NO: 66908 - protein, 15 aa, Homo Sapiens
GVTSAPDTRPAPGST

SEQ ID NO: 66909 - protein, 15 aa, Homo Sapiens
VTSAPDTRPAPGSTA

SEQ ID NO: 66910 - protein, 15 aa, Homo Sapiens
TSAPDTRPAPGSTAP

SEQ ID NO: 66911 - protein, 15 aa, Homo Sapiens
SAPDTRPAPGSTAPP

SEQ ID NO: 66912 - protein, 15 aa, Homo Sapiens
APDTRPAPGSTAPPA

SEQ ID NO: 66913 - protein, 15 aa, Homo Sapiens
PDTRPAPGSTAPPAH

SEQ ID NO: 66914 - protein, 15 aa, Homo Sapiens
DTRPAPGSTAPPAHG

SEQ ID NO: 66915 - protein, 15 aa, Homo Sapiens
TRPAPGSTAPPAHGV

SEQ ID NO: 66916 - protein, 15 aa, Homo Sapiens
RPAPGSTAPPAHGVT

SEQ ID NO: 66917 - protein, 15 aa, Homo Sapiens
PAPGSTAPPAHGVTS

SEQ ID NO: 66918 - protein, 15 aa, Homo Sapiens
APGSTAPPAHGVTSA

SEQ ID NO: 66919 - protein, 15 aa, Homo Sapiens
PGSTAPPAHGVTSAP

SEQ ID NO: 66920 - protein, 15 aa, Homo Sapiens
GSTAPPAHGVTSAPD

SEQ ID NO: 66921 - protein, 15 aa, Homo Sapiens
STAPPAHGVTSAPDT

SEQ ID NO: 66922 - protein, 15 aa, Homo Sapiens
TAPPAHGVTSAPDTR

SEQ ID NO: 66923 - protein, 15 aa, Homo Sapiens
APPAHGVTSAPDTRP

SEQ ID NO: 66924 - protein, 15 aa, Homo Sapiens
PPAHGVTSAPDTRPA

SEQ ID NO: 66925 - protein, 15 aa, Homo Sapiens
PAHGVTSAPDTRPAP

SEQ ID NO: 66926 - protein, 15 aa, Homo Sapiens
AHGVTSAPDTRPAPG

SEQ ID NO: 66927 - protein, 15 aa, Homo Sapiens
HGVTSAPDTRPAPGS

SEQ ID NO: 66928 - protein, 15 aa, Homo Sapiens
GVTSAPDTRPAPGST

SEQ ID NO: 66929 - protein, 15 aa, Homo Sapiens
VTSAPDTRPAPGSTA

SEQ ID NO: 66930 - protein, 15 aa, Homo Sapiens
TSAPDTRPAPGSTAP

SEQ ID NO: 66931 - protein, 15 aa, Homo Sapiens
SAPDTRPAPGSTAPP

SEQ ID NO: 66932 - protein, 15 aa, Homo Sapiens
APDTRPAPGSTAPPA

SEQ ID NO: 66933 - protein, 15 aa, Homo Sapiens
PDTRPAPGSTAPPAH

SEQ ID NO: 66934 - protein, 15 aa, Homo Sapiens
DTRPAPGSTAPPAHG

SEQ ID NO: 66935 - protein, 15 aa, Homo Sapiens
TRPAPGSTAPPAHGV

SEQ ID NO: 66936 - protein, 15 aa, Homo Sapiens
RPAPGSTAPPAHGVT

SEQ ID NO: 66937 - protein, 15 aa, Homo Sapiens
PAPGSTAPPAHGVTS

SEQ ID NO: 66938 - protein, 15 aa, Homo Sapiens
APGSTAPPAHGVTSA

SEQ ID NO: 66939 - protein, 15 aa, Homo Sapiens
PGSTAPPAHGVTSAP

SEQ ID NO: 66940 - protein, 15 aa, Homo Sapiens
GSTAPPAHGVTSAPD

SEQ ID NO: 66941 - protein, 15 aa, Homo Sapiens
STAPPAHGVTSAPDT

SEQ ID NO: 66942 - protein, 15 aa, Homo Sapiens
TAPPAHGVTSAPDTR

SEQ ID NO: 66943 - protein, 15 aa, Homo Sapiens
APPAHGVTSAPDTRP

SEQ ID NO: 66944 - protein, 15 aa, Homo Sapiens
PPAHGVTSAPDTRPA

SEQ ID NO: 66945 - protein, 15 aa, Homo Sapiens
PAHGVTSAPDTRPAP

SEQ ID NO: 66946 - protein, 15 aa, Homo Sapiens
AHGVTSAPDTRPAPG

SEQ ID NO: 66947 - protein, 15 aa, Homo Sapiens
HGVTSAPDTRPAPGS

SEQ ID NO: 66948 - protein, 15 aa, Homo Sapiens
GVTSAPDTRPAPGST

SEQ ID NO: 66949 - protein, 15 aa, Homo Sapiens
VTSAPDTRPAPGSTA

SEQ ID NO: 66950 - protein, 15 aa, Homo Sapiens
TSAPDTRPAPGSTAP

SEQ ID NO: 66951 - protein, 15 aa, Homo Sapiens
SAPDTRPAPGSTAPP

SEQ ID NO: 66952 - protein, 15 aa, Homo Sapiens
APDTRPAPGSTAPPA

SEQ ID NO: 66953 - protein, 15 aa, Homo Sapiens
PDTRPAPGSTAPPAH

SEQ ID NO: 66954 - protein, 15 aa, Homo Sapiens
DTRPAPGSTAPPAHG

SEQ ID NO: 66955 - protein, 15 aa, Homo Sapiens
TRPAPGSTAPPAHGV

SEQ ID NO: 66956 - protein, 15 aa, Homo Sapiens
RPAPGSTAPPAHGVT

SEQ ID NO: 66957 - protein, 15 aa, Homo Sapiens
PAPGSTAPPAHGVTS

SEQ ID NO: 66958 - protein, 15 aa, Homo Sapiens
APGSTAPPAHGVTSA

SEQ ID NO: 66959 - protein, 15 aa, Homo Sapiens
PGSTAPPAHGVTSAP

SEQ ID NO: 66960 - protein, 15 aa, Homo Sapiens
GSTAPPAHGVTSAPD

SEQ ID NO: 66961 - protein, 15 aa, Homo Sapiens
STAPPAHGVTSAPDT

SEQ ID NO: 66962 - protein, 15 aa, Homo Sapiens
TAPPAHGVTSAPDTR

SEQ ID NO: 66963 - protein, 15 aa, Homo Sapiens
APPAHGVTSAPDTRP

SEQ ID NO: 66964 - protein, 15 aa, Homo Sapiens
PPAHGVTSAPDTRPA

SEQ ID NO: 66965 - protein, 15 aa, Homo Sapiens
PAHGVTSAPDTRPAP

SEQ ID NO: 66966 - protein, 15 aa, Homo Sapiens
AHGVTSAPDTRPAPG

SEQ ID NO: 66967 - protein, 15 aa, Homo Sapiens
HGVTSAPDTRPAPGS

SEQ ID NO: 66968 - protein, 15 aa, Homo Sapiens
GVTSAPDTRPAPGST

SEQ ID NO: 66969 - protein, 15 aa, Homo Sapiens
VTSAPDTRPAPGSTA

SEQ ID NO: 66970 - protein, 15 aa, Homo Sapiens
TSAPDTRPAPGSTAP

SEQ ID NO: 66971 - protein, 15 aa, Homo Sapiens
SAPDTRPAPGSTAPP

SEQ ID NO: 66972 - protein, 15 aa, Homo Sapiens
APDTRPAPGSTAPPA

SEQ ID NO: 66973 - protein, 15 aa, Homo Sapiens
PDTRPAPGSTAPPAH

SEQ ID NO: 66974 - protein, 15 aa, Homo Sapiens
DTRPAPGSTAPPAHG

SEQ ID NO: 66975 - protein, 15 aa, Homo Sapiens
TRPAPGSTAPPAHGV

SEQ ID NO: 66976 - protein, 15 aa, Homo Sapiens
RPAPGSTAPPAHGVT

SEQ ID NO: 66977 - protein, 15 aa, Homo Sapiens
PAPGSTAPPAHGVTS

SEQ ID NO: 66978 - protein, 15 aa, Homo Sapiens
APGSTAPPAHGVTSA

SEQ ID NO: 66979 - protein, 15 aa, Homo Sapiens
PGSTAPPAHGVTSAP

SEQ ID NO: 66980 - protein, 15 aa, Homo Sapiens
GSTAPPAHGVTSAPD

SEQ ID NO: 66981 - protein, 15 aa, Homo Sapiens
STAPPAHGVTSAPDT

SEQ ID NO: 66982 - protein, 15 aa, Homo Sapiens
TAPPAHGVTSAPDTR

SEQ ID NO: 66983 - protein, 15 aa, Homo Sapiens
APPAHGVTSAPDTRP

SEQ ID NO: 66984 - protein, 15 aa, Homo Sapiens
PPAHGVTSAPDTRPA

SEQ ID NO: 66985 - protein, 15 aa, Homo Sapiens
PAHGVTSAPDTRPAP

SEQ ID NO: 66986 - protein, 15 aa, Homo Sapiens
AHGVTSAPDTRPAPG

SEQ ID NO: 66987 - protein, 15 aa, Homo Sapiens
HGVTSAPDTRPAPGS

SEQ ID NO: 66988 - protein, 15 aa, Homo Sapiens
GVTSAPDTRPAPGST

SEQ ID NO: 66989 - protein, 15 aa, Homo Sapiens
VTSAPDTRPAPGSTA

SEQ ID NO: 66990 - protein, 15 aa, Homo Sapiens
TSAPDTRPAPGSTAP

SEQ ID NO: 66991 - protein, 15 aa, Homo Sapiens
SAPDTRPAPGSTAPP

SEQ ID NO: 66992 - protein, 15 aa, Homo Sapiens
APDTRPAPGSTAPPA

SEQ ID NO: 66993 - protein, 15 aa, Homo Sapiens
PDTRPAPGSTAPPAH

SEQ ID NO: 66994 - protein, 15 aa, Homo Sapiens
DTRPAPGSTAPPAHG

SEQ ID NO: 66995 - protein, 15 aa, Homo Sapiens
TRPAPGSTAPPAHGV

SEQ ID NO: 66996 - protein, 15 aa, Homo Sapiens
RPAPGSTAPPAHGVT

SEQ ID NO: 66997 - protein, 15 aa, Homo Sapiens
PAPGSTAPPAHGVTS

SEQ ID NO: 66998 - protein, 15 aa, Homo Sapiens
APGSTAPPAHGVTSA

SEQ ID NO: 66999 - protein, 15 aa, Homo Sapiens
PGSTAPPAHGVTSAP

SEQ ID NO: 67000 - protein, 15 aa, Homo Sapiens
GSTAPPAHGVTSAPD

SEQ ID NO: 67001 - protein, 15 aa, Homo Sapiens
STAPPAHGVTSAPDT

SEQ ID NO: 67002 - protein, 15 aa, Homo Sapiens
TAPPAHGVTSAPDTR

SEQ ID NO: 67003 - protein, 15 aa, Homo Sapiens
APPAHGVTSAPDTRP

SEQ ID NO: 67004 - protein, 15 aa, Homo Sapiens
PPAHGVTSAPDTRPA

SEQ ID NO: 67005 - protein, 15 aa, Homo Sapiens
PAHGVTSAPDTRPAP

SEQ ID NO: 67006 - protein, 15 aa, Homo Sapiens
AHGVTSAPDTRPAPG

SEQ ID NO: 67007 - protein, 15 aa, Homo Sapiens
HGVTSAPDTRPAPGS

SEQ ID NO: 67008 - protein, 15 aa, Homo Sapiens
GVTSAPDTRPAPGST

SEQ ID NO: 67009 - protein, 15 aa, Homo Sapiens
VTSAPDTRPAPGSTA

SEQ ID NO: 67010 - protein, 15 aa, Homo Sapiens
TSAPDTRPAPGSTAP

SEQ ID NO: 67011 - protein, 15 aa, Homo Sapiens
SAPDTRPAPGSTAPP

SEQ ID NO: 67012 - protein, 15 aa, Homo Sapiens
APDTRPAPGSTAPPA

SEQ ID NO: 67013 - protein, 15 aa, Homo Sapiens
PDTRPAPGSTAPPAH

SEQ ID NO: 67014 - protein, 15 aa, Homo Sapiens
DTRPAPGSTAPPAHG

SEQ ID NO: 67015 - protein, 15 aa, Homo Sapiens
TRPAPGSTAPPAHGV

SEQ ID NO: 67016 - protein, 15 aa, Homo Sapiens
RPAPGSTAPPAHGVT

SEQ ID NO: 67017 - protein, 15 aa, Homo Sapiens
PAPGSTAPPAHGVTS

SEQ ID NO: 67018 - protein, 15 aa, Homo Sapiens
APGSTAPPAHGVTSA

SEQ ID NO: 67019 - protein, 15 aa, Homo Sapiens
PGSTAPPAHGVTSAP

SEQ ID NO: 67020 - protein, 15 aa, Homo Sapiens
GSTAPPAHGVTSAPD

SEQ ID NO: 67021 - protein, 15 aa, Homo Sapiens
STAPPAHGVTSAPDT

SEQ ID NO: 67022 - protein, 15 aa, Homo Sapiens
TAPPAHGVTSAPDTR

SEQ ID NO: 67023 - protein, 15 aa, Homo Sapiens
APPAHGVTSAPDTRP

SEQ ID NO: 67024 - protein, 15 aa, Homo Sapiens
PPAHGVTSAPDTRPA

SEQ ID NO: 67025 - protein, 15 aa, Homo Sapiens
PAHGVTSAPDTRPAP

SEQ ID NO: 67026 - protein, 15 aa, Homo Sapiens
AHGVTSAPDTRPAPG

SEQ ID NO: 67027 - protein, 15 aa, Homo Sapiens
HGVTSAPDTRPAPGS

SEQ ID NO: 67028 - protein, 15 aa, Homo Sapiens
GVTSAPDTRPAPGST

SEQ ID NO: 67029 - protein, 15 aa, Homo Sapiens
VTSAPDTRPAPGSTA

SEQ ID NO: 67030 - protein, 15 aa, Homo Sapiens
TSAPDTRPAPGSTAP

SEQ ID NO: 67031 - protein, 15 aa, Homo Sapiens
SAPDTRPAPGSTAPP

SEQ ID NO: 67032 - protein, 15 aa, Homo Sapiens
APDTRPAPGSTAPPA

SEQ ID NO: 67033 - protein, 15 aa, Homo Sapiens
PDTRPAPGSTAPPAH

SEQ ID NO: 67034 - protein, 15 aa, Homo Sapiens
DTRPAPGSTAPPAHG

SEQ ID NO: 67035 - protein, 15 aa, Homo Sapiens
TRPAPGSTAPPAHGV

SEQ ID NO: 67036 - protein, 15 aa, Homo Sapiens
RPAPGSTAPPAHGVT

SEQ ID NO: 67037 - protein, 15 aa, Homo Sapiens
PAPGSTAPPAHGVTS

SEQ ID NO: 67038 - protein, 15 aa, Homo Sapiens
APGSTAPPAHGVTSA

SEQ ID NO: 67039 - protein, 15 aa, Homo Sapiens
PGSTAPPAHGVTSAP

SEQ ID NO: 67040 - protein, 15 aa, Homo Sapiens
GSTAPPAHGVTSAPD

SEQ ID NO: 67041 - protein, 15 aa, Homo Sapiens
STAPPAHGVTSAPDT

SEQ ID NO: 67042 - protein, 15 aa, Homo Sapiens
TAPPAHGVTSAPDTR

SEQ ID NO: 67043 - protein, 15 aa, Homo Sapiens
APPAHGVTSAPDTRP

SEQ ID NO: 67044 - protein, 15 aa, Homo Sapiens
PPAHGVTSAPDTRPA

SEQ ID NO: 67045 - protein, 15 aa, Homo Sapiens
PAHGVTSAPDTRPAP

SEQ ID NO: 67046 - protein, 15 aa, Homo Sapiens
AHGVTSAPDTRPAPG

SEQ ID NO: 67047 - protein, 15 aa, Homo Sapiens
HGVTSAPDTRPAPGS

SEQ ID NO: 67048 - protein, 15 aa, Homo Sapiens
GVTSAPDTRPAPGST

SEQ ID NO: 67049 - protein, 15 aa, Homo Sapiens
VTSAPDTRPAPGSTA

SEQ ID NO: 67050 - protein, 15 aa, Homo Sapiens
TSAPDTRPAPGSTAP

SEQ ID NO: 67051 - protein, 15 aa, Homo Sapiens
SAPDTRPAPGSTAPP

SEQ ID NO: 67052 - protein, 15 aa, Homo Sapiens
APDTRPAPGSTAPPA

SEQ ID NO: 67053 - protein, 15 aa, Homo Sapiens
PDTRPAPGSTAPPAH

SEQ ID NO: 67054 - protein, 15 aa, Homo Sapiens
DTRPAPGSTAPPAHG

SEQ ID NO: 67055 - protein, 15 aa, Homo Sapiens
TRPAPGSTAPPAHGV

SEQ ID NO: 67056 - protein, 15 aa, Homo Sapiens
RPAPGSTAPPAHGVT

SEQ ID NO: 67057 - protein, 15 aa, Homo Sapiens
PAPGSTAPPAHGVTS

SEQ ID NO: 67058 - protein, 15 aa, Homo Sapiens
APGSTAPPAHGVTSA

SEQ ID NO: 67059 - protein, 15 aa, Homo Sapiens
PGSTAPPAHGVTSAP

SEQ ID NO: 67060 - protein, 15 aa, Homo Sapiens
GSTAPPAHGVTSAPD

SEQ ID NO: 67061 - protein, 15 aa, Homo Sapiens
STAPPAHGVTSAPDT

SEQ ID NO: 67062 - protein, 15 aa, Homo Sapiens
TAPPAHGVTSAPDTR

SEQ ID NO: 67063 - protein, 15 aa, Homo Sapiens
APPAHGVTSAPDTRP

SEQ ID NO: 67064 - protein, 15 aa, Homo Sapiens
PPAHGVTSAPDTRPA

SEQ ID NO: 67065 - protein, 15 aa, Homo Sapiens
PAHGVTSAPDTRPAP

SEQ ID NO: 67066 - protein, 15 aa, Homo Sapiens
AHGVTSAPDTRPAPG

SEQ ID NO: 67067 - protein, 15 aa, Homo Sapiens
HGVTSAPDTRPAPGS

SEQ ID NO: 67068 - protein, 15 aa, Homo Sapiens
GVTSAPDTRPAPGST

SEQ ID NO: 67069 - protein, 15 aa, Homo Sapiens
VTSAPDTRPAPGSTA

SEQ ID NO: 67070 - protein, 15 aa, Homo Sapiens
TSAPDTRPAPGSTAP

SEQ ID NO: 67071 - protein, 15 aa, Homo Sapiens
SAPDTRPAPGSTAPP

SEQ ID NO: 67072 - protein, 15 aa, Homo Sapiens
APDTRPAPGSTAPPA

SEQ ID NO: 67073 - protein, 15 aa, Homo Sapiens
PDTRPAPGSTAPPAH

SEQ ID NO: 67074 - protein, 15 aa, Homo Sapiens
DTRPAPGSTAPPAHG

SEQ ID NO: 67075 - protein, 15 aa, Homo Sapiens
TRPAPGSTAPPAHGV

SEQ ID NO: 67076 - protein, 15 aa, Homo Sapiens
RPAPGSTAPPAHGVT

SEQ ID NO: 67077 - protein, 15 aa, Homo Sapiens
PAPGSTAPPAHGVTS

SEQ ID NO: 67078 - protein, 15 aa, Homo Sapiens
APGSTAPPAHGVTSA

SEQ ID NO: 67079 - protein, 15 aa, Homo Sapiens
PGSTAPPAHGVTSAP

SEQ ID NO: 67080 - protein, 15 aa, Homo Sapiens
GSTAPPAHGVTSAPD

SEQ ID NO: 67081 - protein, 15 aa, Homo Sapiens
STAPPAHGVTSAPDT

SEQ ID NO: 67082 - protein, 15 aa, Homo Sapiens
TAPPAHGVTSAPDTR

SEQ ID NO: 67083 - protein, 15 aa, Homo Sapiens
APPAHGVTSAPDTRP

SEQ ID NO: 67084 - protein, 15 aa, Homo Sapiens
PPAHGVTSAPDTRPA

SEQ ID NO: 67085 - protein, 15 aa, Homo Sapiens
PAHGVTSAPDTRPAP

SEQ ID NO: 67086 - protein, 15 aa, Homo Sapiens
AHGVTSAPDTRPAPG

SEQ ID NO: 67087 - protein, 15 aa, Homo Sapiens
HGVTSAPDTRPAPGS

SEQ ID NO: 67088 - protein, 15 aa, Homo Sapiens
GVTSAPDTRPAPGST

SEQ ID NO: 67089 - protein, 15 aa, Homo Sapiens
VTSAPDTRPAPGSTA

SEQ ID NO: 67090 - protein, 15 aa, Homo Sapiens
TSAPDTRPAPGSTAP

SEQ ID NO: 67091 - protein, 15 aa, Homo Sapiens
SAPDTRPAPGSTAPP

SEQ ID NO: 67092 - protein, 15 aa, Homo Sapiens
APDTRPAPGSTAPPA

SEQ ID NO: 67093 - protein, 15 aa, Homo Sapiens
PDTRPAPGSTAPPAH

SEQ ID NO: 67094 - protein, 15 aa, Homo Sapiens
DTRPAPGSTAPPAHG

SEQ ID NO: 67095 - protein, 15 aa, Homo Sapiens
TRPAPGSTAPPAHGV

SEQ ID NO: 67096 - protein, 15 aa, Homo Sapiens
RPAPGSTAPPAHGVT

SEQ ID NO: 67097 - protein, 15 aa, Homo Sapiens
PAPGSTAPPAHGVTS

SEQ ID NO: 67098 - protein, 15 aa, Homo Sapiens
APGSTAPPAHGVTSA

SEQ ID NO: 67099 - protein, 15 aa, Homo Sapiens
PGSTAPPAHGVTSAP

SEQ ID NO: 67100 - protein, 15 aa, Homo Sapiens
GSTAPPAHGVTSAPD

SEQ ID NO: 67101 - protein, 15 aa, Homo Sapiens
STAPPAHGVTSAPDT

SEQ ID NO: 67102 - protein, 15 aa, Homo Sapiens
TAPPAHGVTSAPDTR

SEQ ID NO: 67103 - protein, 15 aa, Homo Sapiens
APPAHGVTSAPDTRP

SEQ ID NO: 67104 - protein, 15 aa, Homo Sapiens
PPAHGVTSAPDTRPA

SEQ ID NO: 67105 - protein, 15 aa, Homo Sapiens
PAHGVTSAPDTRPAP

SEQ ID NO: 67106 - protein, 15 aa, Homo Sapiens
AHGVTSAPDTRPAPG

SEQ ID NO: 67107 - protein, 15 aa, Homo Sapiens
HGVTSAPDTRPAPGS

SEQ ID NO: 67108 - protein, 15 aa, Homo Sapiens
GVTSAPDTRPAPGST

SEQ ID NO: 67109 - protein, 15 aa, Homo Sapiens
VTSAPDTRPAPGSTA

SEQ ID NO: 67110 - protein, 15 aa, Homo Sapiens
TSAPDTRPAPGSTAP

SEQ ID NO: 67111 - protein, 15 aa, Homo Sapiens
SAPDTRPAPGSTAPP

SEQ ID NO: 67112 - protein, 15 aa, Homo Sapiens
APDTRPAPGSTAPPA

SEQ ID NO: 67113 - protein, 15 aa, Homo Sapiens
PDTRPAPGSTAPPAH

SEQ ID NO: 67114 - protein, 15 aa, Homo Sapiens
DTRPAPGSTAPPAHG

SEQ ID NO: 67115 - protein, 15 aa, Homo Sapiens
TRPAPGSTAPPAHGV

SEQ ID NO: 67116 - protein, 15 aa, Homo Sapiens
RPAPGSTAPPAHGVT

SEQ ID NO: 67117 - protein, 15 aa, Homo Sapiens
PAPGSTAPPAHGVTS

SEQ ID NO: 67118 - protein, 15 aa, Homo Sapiens
APGSTAPPAHGVTSA

SEQ ID NO: 67119 - protein, 15 aa, Homo Sapiens
PGSTAPPAHGVTSAP

SEQ ID NO: 67120 - protein, 15 aa, Homo Sapiens
GSTAPPAHGVTSAPD

SEQ ID NO: 67121 - protein, 15 aa, Homo Sapiens
STAPPAHGVTSAPDT

SEQ ID NO: 67122 - protein, 15 aa, Homo Sapiens
TAPPAHGVTSAPDTR

SEQ ID NO: 67123 - protein, 15 aa, Homo Sapiens
APPAHGVTSAPDTRP

SEQ ID NO: 67124 - protein, 15 aa, Homo Sapiens
PPAHGVTSAPDTRPA

SEQ ID NO: 67125 - protein, 15 aa, Homo Sapiens
PAHGVTSAPDTRPAP

SEQ ID NO: 67126 - protein, 15 aa, Homo Sapiens
AHGVTSAPDTRPAPG

SEQ ID NO: 67127 - protein, 15 aa, Homo Sapiens
HGVTSAPDTRPAPGS

SEQ ID NO: 67128 - protein, 15 aa, Homo Sapiens
GVTSAPDTRPAPGST

SEQ ID NO: 67129 - protein, 15 aa, Homo Sapiens
VTSAPDTRPAPGSTA

SEQ ID NO: 67130 - protein, 15 aa, Homo Sapiens
TSAPDTRPAPGSTAP

SEQ ID NO: 67131 - protein, 15 aa, Homo Sapiens
SAPDTRPAPGSTAPP

SEQ ID NO: 67132 - protein, 15 aa, Homo Sapiens
APDTRPAPGSTAPPA

SEQ ID NO: 67133 - protein, 15 aa, Homo Sapiens
PDTRPAPGSTAPPAH

SEQ ID NO: 67134 - protein, 15 aa, Homo Sapiens
DTRPAPGSTAPPAHG

SEQ ID NO: 67135 - protein, 15 aa, Homo Sapiens
TRPAPGSTAPPAHGV

SEQ ID NO: 67136 - protein, 15 aa, Homo Sapiens
RPAPGSTAPPAHGVT

SEQ ID NO: 67137 - protein, 15 aa, Homo Sapiens
PAPGSTAPPAHGVTS

SEQ ID NO: 67138 - protein, 15 aa, Homo Sapiens
APGSTAPPAHGVTSA

SEQ ID NO: 67139 - protein, 15 aa, Homo Sapiens
PGSTAPPAHGVTSAP

SEQ ID NO: 67140 - protein, 15 aa, Homo Sapiens
GSTAPPAHGVTSAPD

SEQ ID NO: 67141 - protein, 15 aa, Homo Sapiens
STAPPAHGVTSAPDT

SEQ ID NO: 67142 - protein, 15 aa, Homo Sapiens
TAPPAHGVTSAPDTR

SEQ ID NO: 67143 - protein, 15 aa, Homo Sapiens
APPAHGVTSAPDTRP

SEQ ID NO: 67144 - protein, 15 aa, Homo Sapiens
PPAHGVTSAPDTRPA

SEQ ID NO: 67145 - protein, 15 aa, Homo Sapiens
PAHGVTSAPDTRPAP

SEQ ID NO: 67146 - protein, 15 aa, Homo Sapiens
AHGVTSAPDTRPAPG

SEQ ID NO: 67147 - protein, 15 aa, Homo Sapiens
HGVTSAPDTRPAPGS

SEQ ID NO: 67148 - protein, 15 aa, Homo Sapiens
GVTSAPDTRPAPGST

SEQ ID NO: 67149 - protein, 15 aa, Homo Sapiens
VTSAPDTRPAPGSTA

SEQ ID NO: 67150 - protein, 15 aa, Homo Sapiens
TSAPDTRPAPGSTAP

SEQ ID NO: 67151 - protein, 15 aa, Homo Sapiens
SAPDTRPAPGSTAPP

SEQ ID NO: 67152 - protein, 15 aa, Homo Sapiens
APDTRPAPGSTAPPA

SEQ ID NO: 67153 - protein, 15 aa, Homo Sapiens
PDTRPAPGSTAPPAH

SEQ ID NO: 67154 - protein, 15 aa, Homo Sapiens
DTRPAPGSTAPPAHG

SEQ ID NO: 67155 - protein, 15 aa, Homo Sapiens
TRPAPGSTAPPAHGV

SEQ ID NO: 67156 - protein, 15 aa, Homo Sapiens
RPAPGSTAPPAHGVT

SEQ ID NO: 67157 - protein, 15 aa, Homo Sapiens
PAPGSTAPPAHGVTS

SEQ ID NO: 67158 - protein, 15 aa, Homo Sapiens
APGSTAPPAHGVTSA

SEQ ID NO: 67159 - protein, 15 aa, Homo Sapiens
PGSTAPPAHGVTSAP

SEQ ID NO: 67160 - protein, 15 aa, Homo Sapiens
GSTAPPAHGVTSAPD

SEQ ID NO: 67161 - protein, 15 aa, Homo Sapiens
STAPPAHGVTSAPDT

SEQ ID NO: 67162 - protein, 15 aa, Homo Sapiens
TAPPAHGVTSAPDTR

SEQ ID NO: 67163 - protein, 15 aa, Homo Sapiens
APPAHGVTSAPDTRP

SEQ ID NO: 67164 - protein, 15 aa, Homo Sapiens
PPAHGVTSAPDTRPA

SEQ ID NO: 67165 - protein, 15 aa, Homo Sapiens
PAHGVTSAPDTRPAP

SEQ ID NO: 67166 - protein, 15 aa, Homo Sapiens
AHGVTSAPDTRPAPG

SEQ ID NO: 67167 - protein, 15 aa, Homo Sapiens
HGVTSAPDTRPAPGS

SEQ ID NO: 67168 - protein, 15 aa, Homo Sapiens
GVTSAPDTRPAPGST

SEQ ID NO: 67169 - protein, 15 aa, Homo Sapiens
VTSAPDTRPAPGSTA

SEQ ID NO: 67170 - protein, 15 aa, Homo Sapiens
TSAPDTRPAPGSTAP

SEQ ID NO: 67171 - protein, 15 aa, Homo Sapiens
SAPDTRPAPGSTAPP

SEQ ID NO: 67172 - protein, 15 aa, Homo Sapiens
APDTRPAPGSTAPPA

SEQ ID NO: 67173 - protein, 15 aa, Homo Sapiens
PDTRPAPGSTAPPAH

SEQ ID NO: 67174 - protein, 15 aa, Homo Sapiens
DTRPAPGSTAPPAHG

SEQ ID NO: 67175 - protein, 15 aa, Homo Sapiens
TRPAPGSTAPPAHGV

SEQ ID NO: 67176 - protein, 15 aa, Homo Sapiens
RPAPGSTAPPAHGVT

SEQ ID NO: 67177 - protein, 15 aa, Homo Sapiens
PAPGSTAPPAHGVTS

SEQ ID NO: 67178 - protein, 15 aa, Homo Sapiens
APGSTAPPAHGVTSA

SEQ ID NO: 67179 - protein, 15 aa, Homo Sapiens
PGSTAPPAHGVTSAP

SEQ ID NO: 67180 - protein, 15 aa, Homo Sapiens
GSTAPPAHGVTSAPD

SEQ ID NO: 67181 - protein, 15 aa, Homo Sapiens
STAPPAHGVTSAPDT

SEQ ID NO: 67182 - protein, 15 aa, Homo Sapiens
TAPPAHGVTSAPDTR

SEQ ID NO: 67183 - protein, 15 aa, Homo Sapiens
APPAHGVTSAPDTRP

SEQ ID NO: 67184 - protein, 15 aa, Homo Sapiens
PPAHGVTSAPDTRPA

SEQ ID NO: 67185 - protein, 15 aa, Homo Sapiens
PAHGVTSAPDTRPAP

SEQ ID NO: 67186 - protein, 15 aa, Homo Sapiens
AHGVTSAPDTRPAPG

SEQ ID NO: 67187 - protein, 15 aa, Homo Sapiens
HGVTSAPDTRPAPGS

SEQ ID NO: 67188 - protein, 15 aa, Homo Sapiens
GVTSAPDTRPAPGST

SEQ ID NO: 67189 - protein, 15 aa, Homo Sapiens
VTSAPDTRPAPGSTA

SEQ ID NO: 67190 - protein, 15 aa, Homo Sapiens
TSAPDTRPAPGSTAP

SEQ ID NO: 67191 - protein, 15 aa, Homo Sapiens
SAPDTRPAPGSTAPP

SEQ ID NO: 67192 - protein, 15 aa, Homo Sapiens
APDTRPAPGSTAPPA

SEQ ID NO: 67193 - protein, 15 aa, Homo Sapiens
PDTRPAPGSTAPPAH

SEQ ID NO: 67194 - protein, 15 aa, Homo Sapiens
DTRPAPGSTAPPAHG

SEQ ID NO: 67195 - protein, 15 aa, Homo Sapiens
TRPAPGSTAPPAHGV

SEQ ID NO: 67196 - protein, 15 aa, Homo Sapiens
RPAPGSTAPPAHGVT

SEQ ID NO: 67197 - protein, 15 aa, Homo Sapiens
PAPGSTAPPAHGVTS

SEQ ID NO: 67198 - protein, 15 aa, Homo Sapiens
APGSTAPPAHGVTSA

SEQ ID NO: 67199 - protein, 15 aa, Homo Sapiens
PGSTAPPAHGVTSAP

SEQ ID NO: 67200 - protein, 15 aa, Homo Sapiens
GSTAPPAHGVTSAPD

SEQ ID NO: 67201 - protein, 15 aa, Homo Sapiens
STAPPAHGVTSAPDT

SEQ ID NO: 67202 - protein, 15 aa, Homo Sapiens
TAPPAHGVTSAPDTR

SEQ ID NO: 67203 - protein, 15 aa, Homo Sapiens
APPAHGVTSAPDTRP

SEQ ID NO: 67204 - protein, 15 aa, Homo Sapiens
PPAHGVTSAPDTRPA

SEQ ID NO: 67205 - protein, 15 aa, Homo Sapiens
PAHGVTSAPDTRPAP

SEQ ID NO: 67206 - protein, 15 aa, Homo Sapiens
AHGVTSAPDTRPAPG

SEQ ID NO: 67207 - protein, 15 aa, Homo Sapiens
HGVTSAPDTRPAPGS

SEQ ID NO: 67208 - protein, 15 aa, Homo Sapiens
GVTSAPDTRPAPGST

SEQ ID NO: 67209 - protein, 15 aa, Homo Sapiens
VTSAPDTRPAPGSTA

SEQ ID NO: 67210 - protein, 15 aa, Homo Sapiens
TSAPDTRPAPGSTAP

SEQ ID NO: 67211 - protein, 15 aa, Homo Sapiens
SAPDTRPAPGSTAPP

SEQ ID NO: 67212 - protein, 15 aa, Homo Sapiens
APDTRPAPGSTAPPA

SEQ ID NO: 67213 - protein, 15 aa, Homo Sapiens
PDTRPAPGSTAPPAH

SEQ ID NO: 67214 - protein, 15 aa, Homo Sapiens
DTRPAPGSTAPPAHG

SEQ ID NO: 67215 - protein, 15 aa, Homo Sapiens
TRPAPGSTAPPAHGV

SEQ ID NO: 67216 - protein, 15 aa, Homo Sapiens
RPAPGSTAPPAHGVT

SEQ ID NO: 67217 - protein, 15 aa, Homo Sapiens
PAPGSTAPPAHGVTS

SEQ ID NO: 67218 - protein, 15 aa, Homo Sapiens
APGSTAPPAHGVTSA

SEQ ID NO: 67219 - protein, 15 aa, Homo Sapiens
PGSTAPPAHGVTSAP

SEQ ID NO: 67220 - protein, 15 aa, Homo Sapiens
GSTAPPAHGVTSAPD

SEQ ID NO: 67221 - protein, 15 aa, Homo Sapiens
STAPPAHGVTSAPDT

SEQ ID NO: 67222 - protein, 15 aa, Homo Sapiens
TAPPAHGVTSAPDTR

SEQ ID NO: 67223 - protein, 15 aa, Homo Sapiens
APPAHGVTSAPDTRP

SEQ ID NO: 67224 - protein, 15 aa, Homo Sapiens
PPAHGVTSAPDTRPA

SEQ ID NO: 67225 - protein, 15 aa, Homo Sapiens
PAHGVTSAPDTRPAP

SEQ ID NO: 67226 - protein, 15 aa, Homo Sapiens
AHGVTSAPDTRPAPG

SEQ ID NO: 67227 - protein, 15 aa, Homo Sapiens
HGVTSAPDTRPAPGS

SEQ ID NO: 67228 - protein, 15 aa, Homo Sapiens
GVTSAPDTRPAPGST

SEQ ID NO: 67229 - protein, 15 aa, Homo Sapiens
VTSAPDTRPAPGSTA

SEQ ID NO: 67230 - protein, 15 aa, Homo Sapiens
TSAPDTRPAPGSTAP

SEQ ID NO: 67231 - protein, 15 aa, Homo Sapiens
SAPDTRPAPGSTAPP

SEQ ID NO: 67232 - protein, 15 aa, Homo Sapiens
APDTRPAPGSTAPPA

SEQ ID NO: 67233 - protein, 15 aa, Homo Sapiens
PDTRPAPGSTAPPAH

SEQ ID NO: 67234 - protein, 15 aa, Homo Sapiens
DTRPAPGSTAPPAHG

SEQ ID NO: 67235 - protein, 15 aa, Homo Sapiens
TRPAPGSTAPPAHGV

SEQ ID NO: 67236 - protein, 15 aa, Homo Sapiens
RPAPGSTAPPAHGVT

SEQ ID NO: 67237 - protein, 15 aa, Homo Sapiens
PAPGSTAPPAHGVTS

SEQ ID NO: 67238 - protein, 15 aa, Homo Sapiens
APGSTAPPAHGVTSA

SEQ ID NO: 67239 - protein, 15 aa, Homo Sapiens
PGSTAPPAHGVTSAP

SEQ ID NO: 67240 - protein, 15 aa, Homo Sapiens
GSTAPPAHGVTSAPD

SEQ ID NO: 67241 - protein, 15 aa, Homo Sapiens
STAPPAHGVTSAPDT

SEQ ID NO: 67242 - protein, 15 aa, Homo Sapiens
TAPPAHGVTSAPDTR

SEQ ID NO: 67243 - protein, 15 aa, Homo Sapiens
APPAHGVTSAPDTRP

SEQ ID NO: 67244 - protein, 15 aa, Homo Sapiens
PPAHGVTSAPDTRPA

SEQ ID NO: 67245 - protein, 15 aa, Homo Sapiens
PAHGVTSAPDTRPAP

SEQ ID NO: 67246 - protein, 15 aa, Homo Sapiens
AHGVTSAPDTRPAPG

SEQ ID NO: 67247 - protein, 15 aa, Homo Sapiens
HGVTSAPDTRPAPGS

SEQ ID NO: 67248 - protein, 15 aa, Homo Sapiens
GVTSAPDTRPAPGST

SEQ ID NO: 67249 - protein, 15 aa, Homo Sapiens
VTSAPDTRPAPGSTA

SEQ ID NO: 67250 - protein, 15 aa, Homo Sapiens
TSAPDTRPAPGSTAP

SEQ ID NO: 67251 - protein, 15 aa, Homo Sapiens
SAPDTRPAPGSTAPP

SEQ ID NO: 67252 - protein, 15 aa, Homo Sapiens
APDTRPAPGSTAPPA

SEQ ID NO: 67253 - protein, 15 aa, Homo Sapiens
PDTRPAPGSTAPPAH

SEQ ID NO: 67254 - protein, 15 aa, Homo Sapiens
DTRPAPGSTAPPAHG

SEQ ID NO: 67255 - protein, 15 aa, Homo Sapiens
TRPAPGSTAPPAHGV

SEQ ID NO: 67256 - protein, 15 aa, Homo Sapiens
RPAPGSTAPPAHGVT

SEQ ID NO: 67257 - protein, 15 aa, Homo Sapiens
PAPGSTAPPAHGVTS

SEQ ID NO: 67258 - protein, 15 aa, Homo Sapiens
APGSTAPPAHGVTSA

SEQ ID NO: 67259 - protein, 15 aa, Homo Sapiens
PGSTAPPAHGVTSAP

SEQ ID NO: 67260 - protein, 15 aa, Homo Sapiens
GSTAPPAHGVTSAPD

SEQ ID NO: 67261 - protein, 15 aa, Homo Sapiens
STAPPAHGVTSAPDT

SEQ ID NO: 67262 - protein, 15 aa, Homo Sapiens
TAPPAHGVTSAPDTR

SEQ ID NO: 67263 - protein, 15 aa, Homo Sapiens
APPAHGVTSAPDTRP

SEQ ID NO: 67264 - protein, 15 aa, Homo Sapiens
PPAHGVTSAPDTRPA

SEQ ID NO: 67265 - protein, 15 aa, Homo Sapiens
PAHGVTSAPDTRPAP

SEQ ID NO: 67266 - protein, 15 aa, Homo Sapiens
AHGVTSAPDTRPAPG

SEQ ID NO: 67267 - protein, 15 aa, Homo Sapiens
HGVTSAPDTRPAPGS

SEQ ID NO: 67268 - protein, 15 aa, Homo Sapiens
GVTSAPDTRPAPGST

SEQ ID NO: 67269 - protein, 15 aa, Homo Sapiens
VTSAPDTRPAPGSTA

SEQ ID NO: 67270 - protein, 15 aa, Homo Sapiens
TSAPDTRPAPGSTAP

SEQ ID NO: 67271 - protein, 15 aa, Homo Sapiens
SAPDTRPAPGSTAPP

SEQ ID NO: 67272 - protein, 15 aa, Homo Sapiens
APDTRPAPGSTAPPA

SEQ ID NO: 67273 - protein, 15 aa, Homo Sapiens
PDTRPAPGSTAPPAH

SEQ ID NO: 67274 - protein, 15 aa, Homo Sapiens
DTRPAPGSTAPPAHG

SEQ ID NO: 67275 - protein, 15 aa, Homo Sapiens
TRPAPGSTAPPAHGV

SEQ ID NO: 67276 - protein, 15 aa, Homo Sapiens
RPAPGSTAPPAHGVT

SEQ ID NO: 67277 - protein, 15 aa, Homo Sapiens
PAPGSTAPPAHGVTS

SEQ ID NO: 67278 - protein, 15 aa, Homo Sapiens
APGSTAPPAHGVTSA

SEQ ID NO: 67279 - protein, 15 aa, Homo Sapiens
PGSTAPPAHGVTSAP

SEQ ID NO: 67280 - protein, 15 aa, Homo Sapiens
GSTAPPAHGVTSAPD

SEQ ID NO: 67281 - protein, 15 aa, Homo Sapiens
STAPPAHGVTSAPDT

SEQ ID NO: 67282 - protein, 15 aa, Homo Sapiens
TAPPAHGVTSAPDTR

SEQ ID NO: 67283 - protein, 15 aa, Homo Sapiens
APPAHGVTSAPDTRP

SEQ ID NO: 67284 - protein, 15 aa, Homo Sapiens
PPAHGVTSAPDTRPA

SEQ ID NO: 67285 - protein, 15 aa, Homo Sapiens
PAHGVTSAPDTRPAP

SEQ ID NO: 67286 - protein, 15 aa, Homo Sapiens
AHGVTSAPDTRPAPG

SEQ ID NO: 67287 - protein, 15 aa, Homo Sapiens
HGVTSAPDTRPAPGS

SEQ ID NO: 67288 - protein, 15 aa, Homo Sapiens
GVTSAPDTRPAPGST

SEQ ID NO: 67289 - protein, 15 aa, Homo Sapiens
VTSAPDTRPAPGSTA

SEQ ID NO: 67290 - protein, 15 aa, Homo Sapiens
TSAPDTRPAPGSTAP

SEQ ID NO: 67291 - protein, 15 aa, Homo Sapiens
SAPDTRPAPGSTAPP

SEQ ID NO: 67292 - protein, 15 aa, Homo Sapiens
APDTRPAPGSTAPPA

SEQ ID NO: 67293 - protein, 15 aa, Homo Sapiens
PDTRPAPGSTAPPAH

SEQ ID NO: 67294 - protein, 15 aa, Homo Sapiens
DTRPAPGSTAPPAHG

SEQ ID NO: 67295 - protein, 15 aa, Homo Sapiens
TRPAPGSTAPPAHGV

SEQ ID NO: 67296 - protein, 15 aa, Homo Sapiens
RPAPGSTAPPAHGVT

SEQ ID NO: 67297 - protein, 15 aa, Homo Sapiens
PAPGSTAPPAHGVTS

SEQ ID NO: 67298 - protein, 15 aa, Homo Sapiens
APGSTAPPAHGVTSA

SEQ ID NO: 67299 - protein, 15 aa, Homo Sapiens
PGSTAPPAHGVTSAP

SEQ ID NO: 67300 - protein, 15 aa, Homo Sapiens
GSTAPPAHGVTSAPD

SEQ ID NO: 67301 - protein, 15 aa, Homo Sapiens
STAPPAHGVTSAPDT

SEQ ID NO: 67302 - protein, 15 aa, Homo Sapiens
TAPPAHGVTSAPDTR

SEQ ID NO: 67303 - protein, 15 aa, Homo Sapiens
APPAHGVTSAPDTRP

SEQ ID NO: 67304 - protein, 15 aa, Homo Sapiens
PPAHGVTSAPDTRPA

SEQ ID NO: 67305 - protein, 15 aa, Homo Sapiens
PAHGVTSAPDTRPAP

SEQ ID NO: 67306 - protein, 15 aa, Homo Sapiens
AHGVTSAPDTRPAPG

SEQ ID NO: 67307 - protein, 15 aa, Homo Sapiens
HGVTSAPDTRPAPGS

SEQ ID NO: 67308 - protein, 15 aa, Homo Sapiens
GVTSAPDTRPAPGST

SEQ ID NO: 67309 - protein, 15 aa, Homo Sapiens
VTSAPDTRPAPGSTA

SEQ ID NO: 67310 - protein, 15 aa, Homo Sapiens
TSAPDTRPAPGSTAP

SEQ ID NO: 67311 - protein, 15 aa, Homo Sapiens
SAPDTRPAPGSTAPP

SEQ ID NO: 67312 - protein, 15 aa, Homo Sapiens
APDTRPAPGSTAPPA

SEQ ID NO: 67313 - protein, 15 aa, Homo Sapiens
PDTRPAPGSTAPPAH

SEQ ID NO: 67314 - protein, 15 aa, Homo Sapiens
DTRPAPGSTAPPAHG

SEQ ID NO: 67315 - protein, 15 aa, Homo Sapiens
TRPAPGSTAPPAHGV

SEQ ID NO: 67316 - protein, 15 aa, Homo Sapiens
RPAPGSTAPPAHGVT

SEQ ID NO: 67317 - protein, 15 aa, Homo Sapiens
PAPGSTAPPAHGVTS

SEQ ID NO: 67318 - protein, 15 aa, Homo Sapiens
APGSTAPPAHGVTSA

SEQ ID NO: 67319 - protein, 15 aa, Homo Sapiens
PGSTAPPAHGVTSAP

SEQ ID NO: 67320 - protein, 15 aa, Homo Sapiens
GSTAPPAHGVTSAPD

SEQ ID NO: 67321 - protein, 15 aa, Homo Sapiens
STAPPAHGVTSAPDT

SEQ ID NO: 67322 - protein, 15 aa, Homo Sapiens
TAPPAHGVTSAPDTR

SEQ ID NO: 67323 - protein, 15 aa, Homo Sapiens
APPAHGVTSAPDTRP

SEQ ID NO: 67324 - protein, 15 aa, Homo Sapiens
PPAHGVTSAPDTRPA

SEQ ID NO: 67325 - protein, 15 aa, Homo Sapiens
PAHGVTSAPDTRPAP

SEQ ID NO: 67326 - protein, 15 aa, Homo Sapiens
AHGVTSAPDTRPAPG

SEQ ID NO: 67327 - protein, 15 aa, Homo Sapiens
HGVTSAPDTRPAPGS

SEQ ID NO: 67328 - protein, 15 aa, Homo Sapiens
GVTSAPDTRPAPGST

SEQ ID NO: 67329 - protein, 15 aa, Homo Sapiens
VTSAPDTRPAPGSTA

SEQ ID NO: 67330 - protein, 15 aa, Homo Sapiens
TSAPDTRPAPGSTAP

SEQ ID NO: 67331 - protein, 15 aa, Homo Sapiens
SAPDTRPAPGSTAPP

SEQ ID NO: 67332 - protein, 15 aa, Homo Sapiens
APDTRPAPGSTAPPA

SEQ ID NO: 67333 - protein, 15 aa, Homo Sapiens
PDTRPAPGSTAPPAH

SEQ ID NO: 67334 - protein, 15 aa, Homo Sapiens
DTRPAPGSTAPPAHG

SEQ ID NO: 67335 - protein, 15 aa, Homo Sapiens
TRPAPGSTAPPAHGV

SEQ ID NO: 67336 - protein, 15 aa, Homo Sapiens
RPAPGSTAPPAHGVT

SEQ ID NO: 67337 - protein, 15 aa, Homo Sapiens
PAPGSTAPPAHGVTS

SEQ ID NO: 67338 - protein, 15 aa, Homo Sapiens
APGSTAPPAHGVTSA

SEQ ID NO: 67339 - protein, 15 aa, Homo Sapiens
PGSTAPPAHGVTSAP

SEQ ID NO: 67340 - protein, 15 aa, Homo Sapiens
GSTAPPAHGVTSAPD

SEQ ID NO: 67341 - protein, 15 aa, Homo Sapiens
STAPPAHGVTSAPDT

SEQ ID NO: 67342 - protein, 15 aa, Homo Sapiens
TAPPAHGVTSAPDTR

SEQ ID NO: 67343 - protein, 15 aa, Homo Sapiens
APPAHGVTSAPDTRP

SEQ ID NO: 67344 - protein, 15 aa, Homo Sapiens
PPAHGVTSAPDTRPA

SEQ ID NO: 67345 - protein, 15 aa, Homo Sapiens
PAHGVTSAPDTRPAP

SEQ ID NO: 67346 - protein, 15 aa, Homo Sapiens
AHGVTSAPDTRPAPG

SEQ ID NO: 67347 - protein, 15 aa, Homo Sapiens
HGVTSAPDTRPAPGS

SEQ ID NO: 67348 - protein, 15 aa, Homo Sapiens
GVTSAPDTRPAPGST

SEQ ID NO: 67349 - protein, 15 aa, Homo Sapiens
VTSAPDTRPAPGSTA

SEQ ID NO: 67350 - protein, 15 aa, Homo Sapiens
TSAPDTRPAPGSTAP

SEQ ID NO: 67351 - protein, 15 aa, Homo Sapiens
SAPDTRPAPGSTAPP

SEQ ID NO: 67352 - protein, 15 aa, Homo Sapiens
APDTRPAPGSTAPPA

SEQ ID NO: 67353 - protein, 15 aa, Homo Sapiens
PDTRPAPGSTAPPAH

SEQ ID NO: 67354 - protein, 15 aa, Homo Sapiens
DTRPAPGSTAPPAHG

SEQ ID NO: 67355 - protein, 15 aa, Homo Sapiens
TRPAPGSTAPPAHGV

SEQ ID NO: 67356 - protein, 15 aa, Homo Sapiens
RPAPGSTAPPAHGVT

SEQ ID NO: 67357 - protein, 15 aa, Homo Sapiens
PAPGSTAPPAHGVTS

SEQ ID NO: 67358 - protein, 15 aa, Homo Sapiens
APGSTAPPAHGVTSA

SEQ ID NO: 67359 - protein, 15 aa, Homo Sapiens
PGSTAPPAHGVTSAP

SEQ ID NO: 67360 - protein, 15 aa, Homo Sapiens
GSTAPPAHGVTSAPD

SEQ ID NO: 67361 - protein, 15 aa, Homo Sapiens
STAPPAHGVTSAPDT

SEQ ID NO: 67362 - protein, 15 aa, Homo Sapiens
TAPPAHGVTSAPDTR

SEQ ID NO: 67363 - protein, 15 aa, Homo Sapiens
APPAHGVTSAPDTRP

SEQ ID NO: 67364 - protein, 15 aa, Homo Sapiens
PPAHGVTSAPDTRPA

SEQ ID NO: 67365 - protein, 15 aa, Homo Sapiens
PAHGVTSAPDTRPAP

SEQ ID NO: 67366 - protein, 15 aa, Homo Sapiens
AHGVTSAPDTRPAPG

SEQ ID NO: 67367 - protein, 15 aa, Homo Sapiens
HGVTSAPDTRPAPGS

SEQ ID NO: 67368 - protein, 15 aa, Homo Sapiens
GVTSAPDTRPAPGST

SEQ ID NO: 67369 - protein, 15 aa, Homo Sapiens
VTSAPDTRPAPGSTA

SEQ ID NO: 67370 - protein, 15 aa, Homo Sapiens
TSAPDTRPAPGSTAP

SEQ ID NO: 67371 - protein, 15 aa, Homo Sapiens
SAPDTRPAPGSTAPP

SEQ ID NO: 67372 - protein, 15 aa, Homo Sapiens
APDTRPAPGSTAPPA

SEQ ID NO: 67373 - protein, 15 aa, Homo Sapiens
PDTRPAPGSTAPPAH

SEQ ID NO: 67374 - protein, 15 aa, Homo Sapiens
DTRPAPGSTAPPAHG

SEQ ID NO: 67375 - protein, 15 aa, Homo Sapiens
TRPAPGSTAPPAHGV

SEQ ID NO: 67376 - protein, 15 aa, Homo Sapiens
RPAPGSTAPPAHGVT

SEQ ID NO: 67377 - protein, 15 aa, Homo Sapiens
PAPGSTAPPAHGVTS

SEQ ID NO: 67378 - protein, 15 aa, Homo Sapiens
APGSTAPPAHGVTSA

SEQ ID NO: 67379 - protein, 15 aa, Homo Sapiens
PGSTAPPAHGVTSAP

SEQ ID NO: 67380 - protein, 15 aa, Homo Sapiens
GSTAPPAHGVTSAPD

SEQ ID NO: 67381 - protein, 15 aa, Homo Sapiens
STAPPAHGVTSAPDT

SEQ ID NO: 67382 - protein, 15 aa, Homo Sapiens
TAPPAHGVTSAPDTR

SEQ ID NO: 67383 - protein, 15 aa, Homo Sapiens
APPAHGVTSAPDTRP

SEQ ID NO: 67384 - protein, 15 aa, Homo Sapiens
PPAHGVTSAPDTRPA

SEQ ID NO: 67385 - protein, 15 aa, Homo Sapiens
PAHGVTSAPDTRPAP

SEQ ID NO: 67386 - protein, 15 aa, Homo Sapiens
AHGVTSAPDTRPAPG

SEQ ID NO: 67387 - protein, 15 aa, Homo Sapiens
HGVTSAPDTRPAPGS

SEQ ID NO: 67388 - protein, 15 aa, Homo Sapiens
GVTSAPDTRPAPGST

SEQ ID NO: 67389 - protein, 15 aa, Homo Sapiens
VTSAPDTRPAPGSTA

SEQ ID NO: 67390 - protein, 15 aa, Homo Sapiens
TSAPDTRPAPGSTAP

SEQ ID NO: 67391 - protein, 15 aa, Homo Sapiens
SAPDTRPAPGSTAPP

SEQ ID NO: 67392 - protein, 15 aa, Homo Sapiens
APDTRPAPGSTAPPA

SEQ ID NO: 67393 - protein, 15 aa, Homo Sapiens
PDTRPAPGSTAPPAH

SEQ ID NO: 67394 - protein, 15 aa, Homo Sapiens
DTRPAPGSTAPPAHG

SEQ ID NO: 67395 - protein, 15 aa, Homo Sapiens
TRPAPGSTAPPAHGV

SEQ ID NO: 67396 - protein, 15 aa, Homo Sapiens
RPAPGSTAPPAHGVT

SEQ ID NO: 67397 - protein, 15 aa, Homo Sapiens
PAPGSTAPPAHGVTS

SEQ ID NO: 67398 - protein, 15 aa, Homo Sapiens
APGSTAPPAHGVTSA

SEQ ID NO: 67399 - protein, 15 aa, Homo Sapiens
PGSTAPPAHGVTSAP

SEQ ID NO: 67400 - protein, 15 aa, Homo Sapiens
GSTAPPAHGVTSAPD

SEQ ID NO: 67401 - protein, 15 aa, Homo Sapiens
STAPPAHGVTSAPDT

SEQ ID NO: 67402 - protein, 15 aa, Homo Sapiens
TAPPAHGVTSAPDTR

SEQ ID NO: 67403 - protein, 15 aa, Homo Sapiens
APPAHGVTSAPDTRP

SEQ ID NO: 67404 - protein, 15 aa, Homo Sapiens
PPAHGVTSAPDTRPA

SEQ ID NO: 67405 - protein, 15 aa, Homo Sapiens
PAHGVTSAPDTRPAP

SEQ ID NO: 67406 - protein, 15 aa, Homo Sapiens
AHGVTSAPDTRPAPG

SEQ ID NO: 67407 - protein, 15 aa, Homo Sapiens
HGVTSAPDTRPAPGS

SEQ ID NO: 67408 - protein, 15 aa, Homo Sapiens
GVTSAPDTRPAPGST

SEQ ID NO: 67409 - protein, 15 aa, Homo Sapiens
VTSAPDTRPAPGSTA

SEQ ID NO: 67410 - protein, 15 aa, Homo Sapiens
TSAPDTRPAPGSTAP

SEQ ID NO: 67411 - protein, 15 aa, Homo Sapiens
SAPDTRPAPGSTAPP

SEQ ID NO: 67412 - protein, 15 aa, Homo Sapiens
APDTRPAPGSTAPPA

SEQ ID NO: 67413 - protein, 15 aa, Homo Sapiens
PDTRPAPGSTAPPAH

SEQ ID NO: 67414 - protein, 15 aa, Homo Sapiens
DTRPAPGSTAPPAHG

SEQ ID NO: 67415 - protein, 15 aa, Homo Sapiens
TRPAPGSTAPPAHGV

SEQ ID NO: 67416 - protein, 15 aa, Homo Sapiens
RPAPGSTAPPAHGVT

SEQ ID NO: 67417 - protein, 15 aa, Homo Sapiens
PAPGSTAPPAHGVTS

SEQ ID NO: 67418 - protein, 15 aa, Homo Sapiens
APGSTAPPAHGVTSA

SEQ ID NO: 67419 - protein, 15 aa, Homo Sapiens
PGSTAPPAHGVTSAP

SEQ ID NO: 67420 - protein, 15 aa, Homo Sapiens
GSTAPPAHGVTSAPD

SEQ ID NO: 67421 - protein, 15 aa, Homo Sapiens
STAPPAHGVTSAPDT

SEQ ID NO: 67422 - protein, 15 aa, Homo Sapiens
TAPPAHGVTSAPDTR

SEQ ID NO: 67423 - protein, 15 aa, Homo Sapiens
APPAHGVTSAPDTRP

SEQ ID NO: 67424 - protein, 15 aa, Homo Sapiens
PPAHGVTSAPDTRPA

SEQ ID NO: 67425 - protein, 15 aa, Homo Sapiens
PAHGVTSAPDTRPAP

SEQ ID NO: 67426 - protein, 15 aa, Homo Sapiens
AHGVTSAPDTRPAPG

SEQ ID NO: 67427 - protein, 15 aa, Homo Sapiens
HGVTSAPDTRPAPGS

SEQ ID NO: 67428 - protein, 15 aa, Homo Sapiens
GVTSAPDTRPAPGST

SEQ ID NO: 67429 - protein, 15 aa, Homo Sapiens
VTSAPDTRPAPGSTA

SEQ ID NO: 67430 - protein, 15 aa, Homo Sapiens
TSAPDTRPAPGSTAP

SEQ ID NO: 67431 - protein, 15 aa, Homo Sapiens
SAPDTRPAPGSTAPP

SEQ ID NO: 67432 - protein, 15 aa, Homo Sapiens
APDTRPAPGSTAPPA

SEQ ID NO: 67433 - protein, 15 aa, Homo Sapiens
PDTRPAPGSTAPPAH

SEQ ID NO: 67434 - protein, 15 aa, Homo Sapiens
DTRPAPGSTAPPAHG

SEQ ID NO: 67435 - protein, 15 aa, Homo Sapiens
TRPAPGSTAPPAHGV

SEQ ID NO: 67436 - protein, 15 aa, Homo Sapiens
RPAPGSTAPPAHGVT

SEQ ID NO: 67437 - protein, 15 aa, Homo Sapiens
PAPGSTAPPAHGVTS

SEQ ID NO: 67438 - protein, 15 aa, Homo Sapiens
APGSTAPPAHGVTSA

SEQ ID NO: 67439 - protein, 15 aa, Homo Sapiens
PGSTAPPAHGVTSAP

SEQ ID NO: 67440 - protein, 15 aa, Homo Sapiens
GSTAPPAHGVTSAPD

SEQ ID NO: 67441 - protein, 15 aa, Homo Sapiens
STAPPAHGVTSAPDT

SEQ ID NO: 67442 - protein, 15 aa, Homo Sapiens
TAPPAHGVTSAPDTR

SEQ ID NO: 67443 - protein, 15 aa, Homo Sapiens
APPAHGVTSAPDTRP

SEQ ID NO: 67444 - protein, 15 aa, Homo Sapiens
PPAHGVTSAPDTRPA

SEQ ID NO: 67445 - protein, 15 aa, Homo Sapiens
PAHGVTSAPDTRPAP

SEQ ID NO: 67446 - protein, 15 aa, Homo Sapiens
AHGVTSAPDTRPAPG

SEQ ID NO: 67447 - protein, 15 aa, Homo Sapiens
HGVTSAPDTRPAPGS

SEQ ID NO: 67448 - protein, 15 aa, Homo Sapiens
GVTSAPDTRPAPGST

SEQ ID NO: 67449 - protein, 15 aa, Homo Sapiens
VTSAPDTRPAPGSTA

SEQ ID NO: 67450 - protein, 15 aa, Homo Sapiens
TSAPDTRPAPGSTAP

SEQ ID NO: 67451 - protein, 15 aa, Homo Sapiens
SAPDTRPAPGSTAPP

SEQ ID NO: 67452 - protein, 15 aa, Homo Sapiens
APDTRPAPGSTAPPA

SEQ ID NO: 67453 - protein, 15 aa, Homo Sapiens
PDTRPAPGSTAPPAH

SEQ ID NO: 67454 - protein, 15 aa, Homo Sapiens
DTRPAPGSTAPPAHG

SEQ ID NO: 67455 - protein, 15 aa, Homo Sapiens
TRPAPGSTAPPAHGV

SEQ ID NO: 67456 - protein, 15 aa, Homo Sapiens
RPAPGSTAPPAHGVT

SEQ ID NO: 67457 - protein, 15 aa, Homo Sapiens
PAPGSTAPPAHGVTS

SEQ ID NO: 67458 - protein, 15 aa, Homo Sapiens
APGSTAPPAHGVTSA

SEQ ID NO: 67459 - protein, 15 aa, Homo Sapiens
PGSTAPPAHGVTSAP

SEQ ID NO: 67460 - protein, 15 aa, Homo Sapiens
GSTAPPAHGVTSAPD

SEQ ID NO: 67461 - protein, 15 aa, Homo Sapiens
STAPPAHGVTSAPDT

SEQ ID NO: 67462 - protein, 15 aa, Homo Sapiens
TAPPAHGVTSAPDTR

SEQ ID NO: 67463 - protein, 15 aa, Homo Sapiens
APPAHGVTSAPDTRP

SEQ ID NO: 67464 - protein, 15 aa, Homo Sapiens
PPAHGVTSAPDTRPA

SEQ ID NO: 67465 - protein, 15 aa, Homo Sapiens
PAHGVTSAPDTRPAP

SEQ ID NO: 67466 - protein, 15 aa, Homo Sapiens
AHGVTSAPDTRPAPG

SEQ ID NO: 67467 - protein, 15 aa, Homo Sapiens
HGVTSAPDTRPAPGS

SEQ ID NO: 67468 - protein, 15 aa, Homo Sapiens
GVTSAPDTRPAPGST

SEQ ID NO: 67469 - protein, 15 aa, Homo Sapiens
VTSAPDTRPAPGSTA

SEQ ID NO: 67470 - protein, 15 aa, Homo Sapiens
TSAPDTRPAPGSTAP

SEQ ID NO: 67471 - protein, 15 aa, Homo Sapiens
SAPDTRPAPGSTAPP

SEQ ID NO: 67472 - protein, 15 aa, Homo Sapiens
APDTRPAPGSTAPPA

SEQ ID NO: 67473 - protein, 15 aa, Homo Sapiens
PDTRPAPGSTAPPAH

SEQ ID NO: 67474 - protein, 15 aa, Homo Sapiens
DTRPAPGSTAPPAHG

SEQ ID NO: 67475 - protein, 15 aa, Homo Sapiens
TRPAPGSTAPPAHGV

SEQ ID NO: 67476 - protein, 15 aa, Homo Sapiens
RPAPGSTAPPAHGVT

SEQ ID NO: 67477 - protein, 15 aa, Homo Sapiens
PAPGSTAPPAHGVTS

SEQ ID NO: 67478 - protein, 15 aa, Homo Sapiens
APGSTAPPAHGVTSA

SEQ ID NO: 67479 - protein, 15 aa, Homo Sapiens
PGSTAPPAHGVTSAP

SEQ ID NO: 67480 - protein, 15 aa, Homo Sapiens
GSTAPPAHGVTSAPD

SEQ ID NO: 67481 - protein, 15 aa, Homo Sapiens
STAPPAHGVTSAPDT

SEQ ID NO: 67482 - protein, 15 aa, Homo Sapiens
TAPPAHGVTSAPDTR

SEQ ID NO: 67483 - protein, 15 aa, Homo Sapiens
APPAHGVTSAPDTRP

SEQ ID NO: 67484 - protein, 15 aa, Homo Sapiens
PPAHGVTSAPDTRPA

SEQ ID NO: 67485 - protein, 15 aa, Homo Sapiens
PAHGVTSAPDTRPAP

SEQ ID NO: 67486 - protein, 15 aa, Homo Sapiens
AHGVTSAPDTRPAPG

SEQ ID NO: 67487 - protein, 15 aa, Homo Sapiens
HGVTSAPDTRPAPGS

SEQ ID NO: 67488 - protein, 15 aa, Homo Sapiens
GVTSAPDTRPAPGST

SEQ ID NO: 67489 - protein, 15 aa, Homo Sapiens
VTSAPDTRPAPGSTA

SEQ ID NO: 67490 - protein, 15 aa, Homo Sapiens
TSAPDTRPAPGSTAP

SEQ ID NO: 67491 - protein, 15 aa, Homo Sapiens
SAPDTRPAPGSTAPP

SEQ ID NO: 67492 - protein, 15 aa, Homo Sapiens
APDTRPAPGSTAPPA

SEQ ID NO: 67493 - protein, 15 aa, Homo Sapiens
PDTRPAPGSTAPPAH

SEQ ID NO: 67494 - protein, 15 aa, Homo Sapiens
DTRPAPGSTAPPAHG

SEQ ID NO: 67495 - protein, 15 aa, Homo Sapiens
TRPAPGSTAPPAHGV

SEQ ID NO: 67496 - protein, 15 aa, Homo Sapiens
RPAPGSTAPPAHGVT

SEQ ID NO: 67497 - protein, 15 aa, Homo Sapiens
PAPGSTAPPAHGVTS

SEQ ID NO: 67498 - protein, 15 aa, Homo Sapiens
APGSTAPPAHGVTSA

SEQ ID NO: 67499 - protein, 15 aa, Homo Sapiens
PGSTAPPAHGVTSAP

SEQ ID NO: 67500 - protein, 15 aa, Homo Sapiens
GSTAPPAHGVTSAPD

SEQ ID NO: 67501 - protein, 15 aa, Homo Sapiens
STAPPAHGVTSAPDT

SEQ ID NO: 67502 - protein, 15 aa, Homo Sapiens
TAPPAHGVTSAPDTR

SEQ ID NO: 67503 - protein, 15 aa, Homo Sapiens
APPAHGVTSAPDTRP

SEQ ID NO: 67504 - protein, 15 aa, Homo Sapiens
PPAHGVTSAPDTRPA

SEQ ID NO: 67505 - protein, 15 aa, Homo Sapiens
PAHGVTSAPDTRPAP

SEQ ID NO: 67506 - protein, 15 aa, Homo Sapiens
AHGVTSAPDTRPAPG

SEQ ID NO: 67507 - protein, 15 aa, Homo Sapiens
HGVTSAPDTRPAPGS

SEQ ID NO: 67508 - protein, 15 aa, Homo Sapiens
GVTSAPDTRPAPGST

SEQ ID NO: 67509 - protein, 15 aa, Homo Sapiens
VTSAPDTRPAPGSTA

SEQ ID NO: 67510 - protein, 15 aa, Homo Sapiens
TSAPDTRPAPGSTAP

SEQ ID NO: 67511 - protein, 15 aa, Homo Sapiens
SAPDTRPAPGSTAPP

SEQ ID NO: 67512 - protein, 15 aa, Homo Sapiens
APDTRPAPGSTAPPA

SEQ ID NO: 67513 - protein, 15 aa, Homo Sapiens
PDTRPAPGSTAPPAH

SEQ ID NO: 67514 - protein, 15 aa, Homo Sapiens
DTRPAPGSTAPPAHG

SEQ ID NO: 67515 - protein, 15 aa, Homo Sapiens
TRPAPGSTAPPAHGV

SEQ ID NO: 67516 - protein, 15 aa, Homo Sapiens
RPAPGSTAPPAHGVT

SEQ ID NO: 67517 - protein, 15 aa, Homo Sapiens
PAPGSTAPPAHGVTS

SEQ ID NO: 67518 - protein, 15 aa, Homo Sapiens
APGSTAPPAHGVTSA

SEQ ID NO: 67519 - protein, 15 aa, Homo Sapiens
PGSTAPPAHGVTSAP

SEQ ID NO: 67520 - protein, 15 aa, Homo Sapiens
GSTAPPAHGVTSAPD

SEQ ID NO: 67521 - protein, 15 aa, Homo Sapiens
STAPPAHGVTSAPDT

SEQ ID NO: 67522 - protein, 15 aa, Homo Sapiens
TAPPAHGVTSAPDTR

SEQ ID NO: 67523 - protein, 15 aa, Homo Sapiens
APPAHGVTSAPDTRP

SEQ ID NO: 67524 - protein, 15 aa, Homo Sapiens
PPAHGVTSAPDTRPA

SEQ ID NO: 67525 - protein, 15 aa, Homo Sapiens
PAHGVTSAPDTRPAP

SEQ ID NO: 67526 - protein, 15 aa, Homo Sapiens
AHGVTSAPDTRPAPG

SEQ ID NO: 67527 - protein, 15 aa, Homo Sapiens
HGVTSAPDTRPAPGS

SEQ ID NO: 67528 - protein, 15 aa, Homo Sapiens
GVTSAPDTRPAPGST

SEQ ID NO: 67529 - protein, 15 aa, Homo Sapiens
VTSAPDTRPAPGSTA

SEQ ID NO: 67530 - protein, 15 aa, Homo Sapiens
TSAPDTRPAPGSTAP

SEQ ID NO: 67531 - protein, 15 aa, Homo Sapiens
SAPDTRPAPGSTAPP

SEQ ID NO: 67532 - protein, 15 aa, Homo Sapiens
APDTRPAPGSTAPPA

SEQ ID NO: 67533 - protein, 15 aa, Homo Sapiens
PDTRPAPGSTAPPAH

SEQ ID NO: 67534 - protein, 15 aa, Homo Sapiens
DTRPAPGSTAPPAHG

SEQ ID NO: 67535 - protein, 15 aa, Homo Sapiens
TRPAPGSTAPPAHGV

SEQ ID NO: 67536 - protein, 15 aa, Homo Sapiens
RPAPGSTAPPAHGVT

SEQ ID NO: 67537 - protein, 15 aa, Homo Sapiens
PAPGSTAPPAHGVTS

SEQ ID NO: 67538 - protein, 15 aa, Homo Sapiens
APGSTAPPAHGVTSA

SEQ ID NO: 67539 - protein, 15 aa, Homo Sapiens
PGSTAPPAHGVTSAP

SEQ ID NO: 67540 - protein, 15 aa, Homo Sapiens
GSTAPPAHGVTSAPD

SEQ ID NO: 67541 - protein, 15 aa, Homo Sapiens
STAPPAHGVTSAPDT

SEQ ID NO: 67542 - protein, 15 aa, Homo Sapiens
TAPPAHGVTSAPDTR

SEQ ID NO: 67543 - protein, 15 aa, Homo Sapiens
APPAHGVTSAPDTRP

SEQ ID NO: 67544 - protein, 15 aa, Homo Sapiens
PPAHGVTSAPDTRPA

SEQ ID NO: 67545 - protein, 15 aa, Homo Sapiens
PAHGVTSAPDTRPAP

SEQ ID NO: 67546 - protein, 15 aa, Homo Sapiens
AHGVTSAPDTRPAPG

SEQ ID NO: 67547 - protein, 15 aa, Homo Sapiens
HGVTSAPDTRPAPGS

SEQ ID NO: 67548 - protein, 15 aa, Homo Sapiens
GVTSAPDTRPAPGST

SEQ ID NO: 67549 - protein, 15 aa, Homo Sapiens
VTSAPDTRPAPGSTA

SEQ ID NO: 67550 - protein, 15 aa, Homo Sapiens
TSAPDTRPAPGSTAP

SEQ ID NO: 67551 - protein, 15 aa, Homo Sapiens
SAPDTRPAPGSTAPP

SEQ ID NO: 67552 - protein, 15 aa, Homo Sapiens
APDTRPAPGSTAPPA

SEQ ID NO: 67553 - protein, 15 aa, Homo Sapiens
PDTRPAPGSTAPPAH

SEQ ID NO: 67554 - protein, 15 aa, Homo Sapiens
DTRPAPGSTAPPAHG

SEQ ID NO: 67555 - protein, 15 aa, Homo Sapiens
TRPAPGSTAPPAHGV

SEQ ID NO: 67556 - protein, 15 aa, Homo Sapiens
RPAPGSTAPPAHGVT

SEQ ID NO: 67557 - protein, 15 aa, Homo Sapiens
PAPGSTAPPAHGVTS

SEQ ID NO: 67558 - protein, 15 aa, Homo Sapiens
APGSTAPPAHGVTSA

SEQ ID NO: 67559 - protein, 15 aa, Homo Sapiens
PGSTAPPAHGVTSAP

SEQ ID NO: 67560 - protein, 15 aa, Homo Sapiens
GSTAPPAHGVTSAPD

SEQ ID NO: 67561 - protein, 15 aa, Homo Sapiens
STAPPAHGVTSAPDT

SEQ ID NO: 67562 - protein, 15 aa, Homo Sapiens
TAPPAHGVTSAPDTR

SEQ ID NO: 67563 - protein, 15 aa, Homo Sapiens
APPAHGVTSAPDTRP

SEQ ID NO: 67564 - protein, 15 aa, Homo Sapiens
PPAHGVTSAPDTRPA

SEQ ID NO: 67565 - protein, 15 aa, Homo Sapiens
PAHGVTSAPDTRPAP

SEQ ID NO: 67566 - protein, 15 aa, Homo Sapiens
AHGVTSAPDTRPAPG

SEQ ID NO: 67567 - protein, 15 aa, Homo Sapiens
HGVTSAPDTRPAPGS

SEQ ID NO: 67568 - protein, 15 aa, Homo Sapiens
GVTSAPDTRPAPGST

SEQ ID NO: 67569 - protein, 15 aa, Homo Sapiens
VTSAPDTRPAPGSTA

SEQ ID NO: 67570 - protein, 15 aa, Homo Sapiens
TSAPDTRPAPGSTAP

SEQ ID NO: 67571 - protein, 15 aa, Homo Sapiens
SAPDTRPAPGSTAPP

SEQ ID NO: 67572 - protein, 15 aa, Homo Sapiens
APDTRPAPGSTAPPA

SEQ ID NO: 67573 - protein, 15 aa, Homo Sapiens
PDTRPAPGSTAPPAH

SEQ ID NO: 67574 - protein, 15 aa, Homo Sapiens
DTRPAPGSTAPPAHG

SEQ ID NO: 67575 - protein, 15 aa, Homo Sapiens
TRPAPGSTAPPAHGV

SEQ ID NO: 67576 - protein, 15 aa, Homo Sapiens
RPAPGSTAPPAHGVT

SEQ ID NO: 67577 - protein, 15 aa, Homo Sapiens
PAPGSTAPPAHGVTS

SEQ ID NO: 67578 - protein, 15 aa, Homo Sapiens
APGSTAPPAHGVTSA

SEQ ID NO: 67579 - protein, 15 aa, Homo Sapiens
PGSTAPPAHGVTSAP

SEQ ID NO: 67580 - protein, 15 aa, Homo Sapiens
GSTAPPAHGVTSAPD

SEQ ID NO: 67581 - protein, 15 aa, Homo Sapiens
STAPPAHGVTSAPDN

SEQ ID NO: 67582 - protein, 15 aa, Homo Sapiens
TAPPAHGVTSAPDNR

SEQ ID NO: 67583 - protein, 15 aa, Homo Sapiens
APPAHGVTSAPDNRP

SEQ ID NO: 67584 - protein, 15 aa, Homo Sapiens
PPAHGVTSAPDNRPA

SEQ ID NO: 67585 - protein, 15 aa, Homo Sapiens
PAHGVTSAPDNRPAL

SEQ ID NO: 67586 - protein, 15 aa, Homo Sapiens
AHGVTSAPDNRPALG

SEQ ID NO: 67587 - protein, 15 aa, Homo Sapiens
HGVTSAPDNRPALGS

SEQ ID NO: 67588 - protein, 15 aa, Homo Sapiens
GVTSAPDNRPALGST

SEQ ID NO: 67589 - protein, 15 aa, Homo Sapiens
VTSAPDNRPALGSTA

SEQ ID NO: 67590 - protein, 15 aa, Homo Sapiens
TSAPDNRPALGSTAP

SEQ ID NO: 67591 - protein, 15 aa, Homo Sapiens
SAPDNRPALGSTAPP

SEQ ID NO: 67592 - protein, 15 aa, Homo Sapiens
APDNRPALGSTAPPV

SEQ ID NO: 67593 - protein, 15 aa, Homo Sapiens
PDNRPALGSTAPPVH

SEQ ID NO: 67594 - protein, 15 aa, Homo Sapiens
DNRPALGSTAPPVHN

SEQ ID NO: 67595 - protein, 15 aa, Homo Sapiens
NRPALGSTAPPVHNV

SEQ ID NO: 67596 - protein, 15 aa, Homo Sapiens
RPALGSTAPPVHNVT

SEQ ID NO: 67597 - protein, 15 aa, Homo Sapiens
PALGSTAPPVHNVTS

SEQ ID NO: 67598 - protein, 15 aa, Homo Sapiens
ALGSTAPPVHNVTSA

SEQ ID NO: 67599 - protein, 15 aa, Homo Sapiens
LGSTAPPVHNVTSAS

SEQ ID NO: 67600 - protein, 15 aa, Homo Sapiens
GSTAPPVHNVTSASG

SEQ ID NO: 67601 - protein, 15 aa, Homo Sapiens
STAPPVHNVTSASGS

SEQ ID NO: 67602 - protein, 15 aa, Homo Sapiens
TAPPVHNVTSASGSA

SEQ ID NO: 67603 - protein, 15 aa, Homo Sapiens
APPVHNVTSASGSAS

SEQ ID NO: 67604 - protein, 15 aa, Homo Sapiens
PPVHNVTSASGSASG

SEQ ID NO: 67605 - protein, 15 aa, Homo Sapiens
PVHNVTSASGSASGS

SEQ ID NO: 67606 - protein, 15 aa, Homo Sapiens
VHNVTSASGSASGSA

SEQ ID NO: 67607 - protein, 15 aa, Homo Sapiens
HNVTSASGSASGSAS

SEQ ID NO: 67608 - protein, 15 aa, Homo Sapiens
NVTSASGSASGSAST

SEQ ID NO: 67609 - protein, 15 aa, Homo Sapiens
VTSASGSASGSASTL

SEQ ID NO: 67610 - protein, 15 aa, Homo Sapiens
TSASGSASGSASTLV

SEQ ID NO: 67611 - protein, 15 aa, Homo Sapiens
SASGSASGSASTLVH

SEQ ID NO: 67612 - protein, 15 aa, Homo Sapiens
ASGSASGSASTLVHN

SEQ ID NO: 67613 - protein, 15 aa, Homo Sapiens
SGSASGSASTLVHNG

SEQ ID NO: 67614 - protein, 15 aa, Homo Sapiens
GSASGSASTLVHNGT

SEQ ID NO: 67615 - protein, 15 aa, Homo Sapiens
SASGSASTLVHNGTS

SEQ ID NO: 67616 - protein, 15 aa, Homo Sapiens
ASGSASTLVHNGTSA

SEQ ID NO: 67617 - protein, 15 aa, Homo Sapiens
SGSASTLVHNGTSAR

SEQ ID NO: 67618 - protein, 15 aa, Homo Sapiens
GSASTLVHNGTSARA

SEQ ID NO: 67619 - protein, 15 aa, Homo Sapiens
SASTLVHNGTSARAT

SEQ ID NO: 67620 - protein, 15 aa, Homo Sapiens
ASTLVHNGTSARATT

SEQ ID NO: 67621 - protein, 15 aa, Homo Sapiens
STLVHNGTSARATTT

SEQ ID NO: 67622 - protein, 15 aa, Homo Sapiens
TLVHNGTSARATTTP

SEQ ID NO: 67623 - protein, 15 aa, Homo Sapiens
LVHNGTSARATTTPA

SEQ ID NO: 67624 - protein, 15 aa, Homo Sapiens
VHNGTSARATTTPAS

SEQ ID NO: 67625 - protein, 15 aa, Homo Sapiens
HNGTSARATTTPASK

SEQ ID NO: 67626 - protein, 15 aa, Homo Sapiens
NGTSARATTTPASKS

SEQ ID NO: 67627 - protein, 15 aa, Homo Sapiens
GTSARATTTPASKST

SEQ ID NO: 67628 - protein, 15 aa, Homo Sapiens
TSARATTTPASKSTP

SEQ ID NO: 67629 - protein, 15 aa, Homo Sapiens
SARATTTPASKSTPF

SEQ ID NO: 67630 - protein, 15 aa, Homo Sapiens
ARATTTPASKSTPFS

SEQ ID NO: 67631 - protein, 15 aa, Homo Sapiens
RATTTPASKSTPFSI

SEQ ID NO: 67632 - protein, 15 aa, Homo Sapiens
ATTTPASKSTPFSIP

SEQ ID NO: 67633 - protein, 15 aa, Homo Sapiens
TTTPASKSTPFSIPS

SEQ ID NO: 67634 - protein, 15 aa, Homo Sapiens
TTPASKSTPFSIPSH

SEQ ID NO: 67635 - protein, 15 aa, Homo Sapiens
TPASKSTPFSIPSHH

SEQ ID NO: 67636 - protein, 15 aa, Homo Sapiens
PASKSTPFSIPSHHS

SEQ ID NO: 67637 - protein, 15 aa, Homo Sapiens
ASKSTPFSIPSHHSD

SEQ ID NO: 67638 - protein, 15 aa, Homo Sapiens
SKSTPFSIPSHHSDT

SEQ ID NO: 67639 - protein, 15 aa, Homo Sapiens
KSTPFSIPSHHSDTP

SEQ ID NO: 67640 - protein, 15 aa, Homo Sapiens
STPFSIPSHHSDTPT

SEQ ID NO: 67641 - protein, 15 aa, Homo Sapiens
TPFSIPSHHSDTPTT

SEQ ID NO: 67642 - protein, 15 aa, Homo Sapiens
PFSIPSHHSDTPTTL

SEQ ID NO: 67643 - protein, 15 aa, Homo Sapiens
FSIPSHHSDTPTTLA

SEQ ID NO: 67644 - protein, 15 aa, Homo Sapiens
SIPSHHSDTPTTLAS

SEQ ID NO: 67645 - protein, 15 aa, Homo Sapiens
IPSHHSDTPTTLASH

SEQ ID NO: 67646 - protein, 15 aa, Homo Sapiens
PSHHSDTPTTLASHS

SEQ ID NO: 67647 - protein, 15 aa, Homo Sapiens
SHHSDTPTTLASHST

SEQ ID NO: 67648 - protein, 15 aa, Homo Sapiens
HHSDTPTTLASHSTK

SEQ ID NO: 67649 - protein, 15 aa, Homo Sapiens
HSDTPTTLASHSTKT

SEQ ID NO: 67650 - protein, 15 aa, Homo Sapiens
SDTPTTLASHSTKTD

SEQ ID NO: 67651 - protein, 15 aa, Homo Sapiens
DTPTTLASHSTKTDA

SEQ ID NO: 67652 - protein, 15 aa, Homo Sapiens
TPTTLASHSTKTDAS

SEQ ID NO: 67653 - protein, 15 aa, Homo Sapiens
PTTLASHSTKTDASS

SEQ ID NO: 67654 - protein, 15 aa, Homo Sapiens
TTLASHSTKTDASST

SEQ ID NO: 67655 - protein, 15 aa, Homo Sapiens
TLASHSTKTDASSTH

SEQ ID NO: 67656 - protein, 15 aa, Homo Sapiens
LASHSTKTDASSTHH

SEQ ID NO: 67657 - protein, 15 aa, Homo Sapiens
ASHSTKTDASSTHHS

SEQ ID NO: 67658 - protein, 15 aa, Homo Sapiens
SHSTKTDASSTHHSS

SEQ ID NO: 67659 - protein, 15 aa, Homo Sapiens
HSTKTDASSTHHSSV

SEQ ID NO: 67660 - protein, 15 aa, Homo Sapiens
STKTDASSTHHSSVP

SEQ ID NO: 67661 - protein, 15 aa, Homo Sapiens
TKTDASSTHHSSVPP

SEQ ID NO: 67662 - protein, 15 aa, Homo Sapiens
KTDASSTHHSSVPPL

SEQ ID NO: 67663 - protein, 15 aa, Homo Sapiens
TDASSTHHSSVPPLT

SEQ ID NO: 67664 - protein, 15 aa, Homo Sapiens
DASSTHHSSVPPLTS

SEQ ID NO: 67665 - protein, 15 aa, Homo Sapiens
ASSTHHSSVPPLTSS

SEQ ID NO: 67666 - protein, 15 aa, Homo Sapiens
SSTHHSSVPPLTSSN

SEQ ID NO: 67667 - protein, 15 aa, Homo Sapiens
STHHSSVPPLTSSNH

SEQ ID NO: 67668 - protein, 15 aa, Homo Sapiens
THHSSVPPLTSSNHS

SEQ ID NO: 67669 - protein, 15 aa, Homo Sapiens
HHSSVPPLTSSNHST

SEQ ID NO: 67670 - protein, 15 aa, Homo Sapiens
HSSVPPLTSSNHSTS

SEQ ID NO: 67671 - protein, 15 aa, Homo Sapiens
SSVPPLTSSNHSTSP

SEQ ID NO: 67672 - protein, 15 aa, Homo Sapiens
SVPPLTSSNHSTSPQ

SEQ ID NO: 67673 - protein, 15 aa, Homo Sapiens
VPPLTSSNHSTSPQL

SEQ ID NO: 67674 - protein, 15 aa, Homo Sapiens
PPLTSSNHSTSPQLS

SEQ ID NO: 67675 - protein, 15 aa, Homo Sapiens
PLTSSNHSTSPQLST

SEQ ID NO: 67676 - protein, 15 aa, Homo Sapiens
LTSSNHSTSPQLSTG

SEQ ID NO: 67677 - protein, 15 aa, Homo Sapiens
TSSNHSTSPQLSTGV

SEQ ID NO: 67678 - protein, 15 aa, Homo Sapiens
SSNHSTSPQLSTGVS

SEQ ID NO: 67679 - protein, 15 aa, Homo Sapiens
SNHSTSPQLSTGVSF

SEQ ID NO: 67680 - protein, 15 aa, Homo Sapiens
NHSTSPQLSTGVSFF

SEQ ID NO: 67681 - protein, 15 aa, Homo Sapiens
HSTSPQLSTGVSFFF

SEQ ID NO: 67682 - protein, 15 aa, Homo Sapiens
STSPQLSTGVSFFFL

SEQ ID NO: 67683 - protein, 15 aa, Homo Sapiens
TSPQLSTGVSFFFLS

SEQ ID NO: 67684 - protein, 15 aa, Homo Sapiens
SPQLSTGVSFFFLSF

SEQ ID NO: 67685 - protein, 15 aa, Homo Sapiens
PQLSTGVSFFFLSFH

SEQ ID NO: 67686 - protein, 15 aa, Homo Sapiens
QLSTGVSFFFLSFHI

SEQ ID NO: 67687 - protein, 15 aa, Homo Sapiens
LSTGVSFFFLSFHIS

SEQ ID NO: 67688 - protein, 15 aa, Homo Sapiens
STGVSFFFLSFHISN

SEQ ID NO: 67689 - protein, 15 aa, Homo Sapiens
TGVSFFFLSFHISNL

SEQ ID NO: 67690 - protein, 15 aa, Homo Sapiens
GVSFFFLSFHISNLQ

SEQ ID NO: 67691 - protein, 15 aa, Homo Sapiens
VSFFFLSFHISNLQF

SEQ ID NO: 67692 - protein, 15 aa, Homo Sapiens
SFFFLSFHISNLQFN

SEQ ID NO: 67693 - protein, 15 aa, Homo Sapiens
FFFLSFHISNLQFNS

SEQ ID NO: 67694 - protein, 15 aa, Homo Sapiens
FFLSFHISNLQFNSS

SEQ ID NO: 67695 - protein, 15 aa, Homo Sapiens
FLSFHISNLQFNSSL

SEQ ID NO: 67696 - protein, 15 aa, Homo Sapiens
LSFHISNLQFNSSLE

SEQ ID NO: 67697 - protein, 15 aa, Homo Sapiens
SFHISNLQFNSSLED

SEQ ID NO: 67698 - protein, 15 aa, Homo Sapiens
FHISNLQFNSSLEDP

SEQ ID NO: 67699 - protein, 15 aa, Homo Sapiens
HISNLQFNSSLEDPS

SEQ ID NO: 67700 - protein, 15 aa, Homo Sapiens
ISNLQFNSSLEDPST

SEQ ID NO: 67701 - protein, 15 aa, Homo Sapiens
SNLQFNSSLEDPSTD

SEQ ID NO: 67702 - protein, 15 aa, Homo Sapiens
NLQFNSSLEDPSTDY

SEQ ID NO: 67703 - protein, 15 aa, Homo Sapiens
LQFNSSLEDPSTDYY

SEQ ID NO: 67704 - protein, 15 aa, Homo Sapiens
QFNSSLEDPSTDYYQ

SEQ ID NO: 67705 - protein, 15 aa, Homo Sapiens
FNSSLEDPSTDYYQE

SEQ ID NO: 67706 - protein, 15 aa, Homo Sapiens
NSSLEDPSTDYYQEL

SEQ ID NO: 67707 - protein, 15 aa, Homo Sapiens
SSLEDPSTDYYQELQ

SEQ ID NO: 67708 - protein, 15 aa, Homo Sapiens
SLEDPSTDYYQELQR

SEQ ID NO: 67709 - protein, 15 aa, Homo Sapiens
LEDPSTDYYQELQRD

SEQ ID NO: 67710 - protein, 15 aa, Homo Sapiens
EDPSTDYYQELQRDI

SEQ ID NO: 67711 - protein, 15 aa, Homo Sapiens
DPSTDYYQELQRDIS

SEQ ID NO: 67712 - protein, 15 aa, Homo Sapiens
PSTDYYQELQRDISE

SEQ ID NO: 67713 - protein, 15 aa, Homo Sapiens
STDYYQELQRDISEM

SEQ ID NO: 67714 - protein, 15 aa, Homo Sapiens
TDYYQELQRDISEMF

SEQ ID NO: 67715 - protein, 15 aa, Homo Sapiens
DYYQELQRDISEMFL

SEQ ID NO: 67716 - protein, 15 aa, Homo Sapiens
YYQELQRDISEMFLQ

SEQ ID NO: 67717 - protein, 15 aa, Homo Sapiens
YQELQRDISEMFLQI

SEQ ID NO: 67718 - protein, 15 aa, Homo Sapiens
QELQRDISEMFLQIY

SEQ ID NO: 67719 - protein, 15 aa, Homo Sapiens
ELQRDISEMFLQIYK

SEQ ID NO: 67720 - protein, 15 aa, Homo Sapiens
LQRDISEMFLQIYKQ

SEQ ID NO: 67721 - protein, 15 aa, Homo Sapiens
QRDISEMFLQIYKQG

SEQ ID NO: 67722 - protein, 15 aa, Homo Sapiens
RDISEMFLQIYKQGG

SEQ ID NO: 67723 - protein, 15 aa, Homo Sapiens
DISEMFLQIYKQGGF

SEQ ID NO: 67724 - protein, 15 aa, Homo Sapiens
ISEMFLQIYKQGGFL

SEQ ID NO: 67725 - protein, 15 aa, Homo Sapiens
SEMFLQIYKQGGFLG

SEQ ID NO: 67726 - protein, 15 aa, Homo Sapiens
EMFLQIYKQGGFLGL

SEQ ID NO: 67727 - protein, 15 aa, Homo Sapiens
MFLQIYKQGGFLGLS

SEQ ID NO: 67728 - protein, 15 aa, Homo Sapiens
FLQIYKQGGFLGLSN

SEQ ID NO: 67729 - protein, 15 aa, Homo Sapiens
LQIYKQGGFLGLSNI

SEQ ID NO: 67730 - protein, 15 aa, Homo Sapiens
QIYKQGGFLGLSNIK

SEQ ID NO: 67731 - protein, 15 aa, Homo Sapiens
IYKQGGFLGLSNIKF

SEQ ID NO: 67732 - protein, 15 aa, Homo Sapiens
YKQGGFLGLSNIKFR

SEQ ID NO: 67733 - protein, 15 aa, Homo Sapiens
KQGGFLGLSNIKFRP

SEQ ID NO: 67734 - protein, 15 aa, Homo Sapiens
QGGFLGLSNIKFRPG

SEQ ID NO: 67735 - protein, 15 aa, Homo Sapiens
GGFLGLSNIKFRPGS

SEQ ID NO: 67736 - protein, 15 aa, Homo Sapiens
GFLGLSNIKFRPGSV

SEQ ID NO: 67737 - protein, 15 aa, Homo Sapiens
FLGLSNIKFRPGSVV

SEQ ID NO: 67738 - protein, 15 aa, Homo Sapiens
LGLSNIKFRPGSVVV

SEQ ID NO: 67739 - protein, 15 aa, Homo Sapiens
GLSNIKFRPGSVVVQ

SEQ ID NO: 67740 - protein, 15 aa, Homo Sapiens
LSNIKFRPGSVVVQL

SEQ ID NO: 67741 - protein, 15 aa, Homo Sapiens
SNIKFRPGSVVVQLT

SEQ ID NO: 67742 - protein, 15 aa, Homo Sapiens
NIKFRPGSVVVQLTL

SEQ ID NO: 67743 - protein, 15 aa, Homo Sapiens
IKFRPGSVVVQLTLA

SEQ ID NO: 67744 - protein, 15 aa, Homo Sapiens
KFRPGSVVVQLTLAF

SEQ ID NO: 67745 - protein, 15 aa, Homo Sapiens
FRPGSVVVQLTLAFR

SEQ ID NO: 67746 - protein, 15 aa, Homo Sapiens
RPGSVVVQLTLAFRE

SEQ ID NO: 67747 - protein, 15 aa, Homo Sapiens
PGSVVVQLTLAFREG

SEQ ID NO: 67748 - protein, 15 aa, Homo Sapiens
GSVVVQLTLAFREGT

SEQ ID NO: 67749 - protein, 15 aa, Homo Sapiens
SVVVQLTLAFREGTI

SEQ ID NO: 67750 - protein, 15 aa, Homo Sapiens
VVVQLTLAFREGTIN

SEQ ID NO: 67751 - protein, 15 aa, Homo Sapiens
VVQLTLAFREGTINV

SEQ ID NO: 67752 - protein, 15 aa, Homo Sapiens
VQLTLAFREGTINVH

SEQ ID NO: 67753 - protein, 15 aa, Homo Sapiens
QLTLAFREGTINVHD

SEQ ID NO: 67754 - protein, 15 aa, Homo Sapiens
LTLAFREGTINVHDV

SEQ ID NO: 67755 - protein, 15 aa, Homo Sapiens
TLAFREGTINVHDVE

SEQ ID NO: 67756 - protein, 15 aa, Homo Sapiens
LAFREGTINVHDVET

SEQ ID NO: 67757 - protein, 15 aa, Homo Sapiens
AFREGTINVHDVETQ

SEQ ID NO: 67758 - protein, 15 aa, Homo Sapiens
FREGTINVHDVETQF

SEQ ID NO: 67759 - protein, 15 aa, Homo Sapiens
REGTINVHDVETQFN

SEQ ID NO: 67760 - protein, 15 aa, Homo Sapiens
EGTINVHDVETQFNQ

SEQ ID NO: 67761 - protein, 15 aa, Homo Sapiens
GTINVHDVETQFNQY

SEQ ID NO: 67762 - protein, 15 aa, Homo Sapiens
TINVHDVETQFNQYK

SEQ ID NO: 67763 - protein, 15 aa, Homo Sapiens
INVHDVETQFNQYKT

SEQ ID NO: 67764 - protein, 15 aa, Homo Sapiens
NVHDVETQFNQYKTE

SEQ ID NO: 67765 - protein, 15 aa, Homo Sapiens
VHDVETQFNQYKTEA

SEQ ID NO: 67766 - protein, 15 aa, Homo Sapiens
HDVETQFNQYKTEAA

SEQ ID NO: 67767 - protein, 15 aa, Homo Sapiens
DVETQFNQYKTEAAS

SEQ ID NO: 67768 - protein, 15 aa, Homo Sapiens
VETQFNQYKTEAASR

SEQ ID NO: 67769 - protein, 15 aa, Homo Sapiens
ETQFNQYKTEAASRY

SEQ ID NO: 67770 - protein, 15 aa, Homo Sapiens
TQFNQYKTEAASRYN

SEQ ID NO: 67771 - protein, 15 aa, Homo Sapiens
QFNQYKTEAASRYNL

SEQ ID NO: 67772 - protein, 15 aa, Homo Sapiens
FNQYKTEAASRYNLT

SEQ ID NO: 67773 - protein, 15 aa, Homo Sapiens
NQYKTEAASRYNLTI

SEQ ID NO: 67774 - protein, 15 aa, Homo Sapiens
QYKTEAASRYNLTIS

SEQ ID NO: 67775 - protein, 15 aa, Homo Sapiens
YKTEAASRYNLTISD

SEQ ID NO: 67776 - protein, 15 aa, Homo Sapiens
KTEAASRYNLTISDV

SEQ ID NO: 67777 - protein, 15 aa, Homo Sapiens
TEAASRYNLTISDVS

SEQ ID NO: 67778 - protein, 15 aa, Homo Sapiens
EAASRYNLTISDVSV

SEQ ID NO: 67779 - protein, 15 aa, Homo Sapiens
AASRYNLTISDVSVS

SEQ ID NO: 67780 - protein, 15 aa, Homo Sapiens
ASRYNLTISDVSVSD

SEQ ID NO: 67781 - protein, 15 aa, Homo Sapiens
SRYNLTISDVSVSDV

SEQ ID NO: 67782 - protein, 15 aa, Homo Sapiens
RYNLTISDVSVSDVP

SEQ ID NO: 67783 - protein, 15 aa, Homo Sapiens
YNLTISDVSVSDVPF

SEQ ID NO: 67784 - protein, 15 aa, Homo Sapiens
NLTISDVSVSDVPFP

SEQ ID NO: 67785 - protein, 15 aa, Homo Sapiens
LTISDVSVSDVPFPF

SEQ ID NO: 67786 - protein, 15 aa, Homo Sapiens
TISDVSVSDVPFPFS

SEQ ID NO: 67787 - protein, 15 aa, Homo Sapiens
ISDVSVSDVPFPFSA

SEQ ID NO: 67788 - protein, 15 aa, Homo Sapiens
SDVSVSDVPFPFSAQ

SEQ ID NO: 67789 - protein, 15 aa, Homo Sapiens
DVSVSDVPFPFSAQS

SEQ ID NO: 67790 - protein, 15 aa, Homo Sapiens
VSVSDVPFPFSAQSG

SEQ ID NO: 67791 - protein, 15 aa, Homo Sapiens
SVSDVPFPFSAQSGA

SEQ ID NO: 67792 - protein, 15 aa, Homo Sapiens
VSDVPFPFSAQSGAG

SEQ ID NO: 67793 - protein, 15 aa, Homo Sapiens
SDVPFPFSAQSGAGV

SEQ ID NO: 67794 - protein, 15 aa, Homo Sapiens
DVPFPFSAQSGAGVP

SEQ ID NO: 67795 - protein, 15 aa, Homo Sapiens
VPFPFSAQSGAGVPG

SEQ ID NO: 67796 - protein, 15 aa, Homo Sapiens
PFPFSAQSGAGVPGW

SEQ ID NO: 67797 - protein, 15 aa, Homo Sapiens
FPFSAQSGAGVPGWG

SEQ ID NO: 67798 - protein, 15 aa, Homo Sapiens
PFSAQSGAGVPGWGI

SEQ ID NO: 67799 - protein, 15 aa, Homo Sapiens
FSAQSGAGVPGWGIA

SEQ ID NO: 67800 - protein, 15 aa, Homo Sapiens
SAQSGAGVPGWGIAL

SEQ ID NO: 67801 - protein, 15 aa, Homo Sapiens
AQSGAGVPGWGIALL

SEQ ID NO: 67802 - protein, 15 aa, Homo Sapiens
QSGAGVPGWGIALLV

SEQ ID NO: 67803 - protein, 15 aa, Homo Sapiens
SGAGVPGWGIALLVL

SEQ ID NO: 67804 - protein, 15 aa, Homo Sapiens
GAGVPGWGIALLVLV

SEQ ID NO: 67805 - protein, 15 aa, Homo Sapiens
AGVPGWGIALLVLVC

SEQ ID NO: 67806 - protein, 15 aa, Homo Sapiens
GVPGWGIALLVLVCV

SEQ ID NO: 67807 - protein, 15 aa, Homo Sapiens
VPGWGIALLVLVCVL

SEQ ID NO: 67808 - protein, 15 aa, Homo Sapiens
PGWGIALLVLVCVLV

SEQ ID NO: 67809 - protein, 15 aa, Homo Sapiens
GWGIALLVLVCVLVA

SEQ ID NO: 67810 - protein, 15 aa, Homo Sapiens
WGIALLVLVCVLVAL

SEQ ID NO: 67811 - protein, 15 aa, Homo Sapiens
GIALLVLVCVLVALA

SEQ ID NO: 67812 - protein, 15 aa, Homo Sapiens
IALLVLVCVLVALAI

SEQ ID NO: 67813 - protein, 15 aa, Homo Sapiens
ALLVLVCVLVALAIV

SEQ ID NO: 67814 - protein, 15 aa, Homo Sapiens
LLVLVCVLVALAIVY

SEQ ID NO: 67815 - protein, 15 aa, Homo Sapiens
LVLVCVLVALAIVYL

SEQ ID NO: 67816 - protein, 15 aa, Homo Sapiens
VLVCVLVALAIVYLI

SEQ ID NO: 67817 - protein, 15 aa, Homo Sapiens
LVCVLVALAIVYLIA

SEQ ID NO: 67818 - protein, 15 aa, Homo Sapiens
VCVLVALAIVYLIAL

SEQ ID NO: 67819 - protein, 15 aa, Homo Sapiens
CVLVALAIVYLIALA

SEQ ID NO: 67820 - protein, 15 aa, Homo Sapiens
VLVALAIVYLIALAV

SEQ ID NO: 67821 - protein, 15 aa, Homo Sapiens
LVALAIVYLIALAVC

SEQ ID NO: 67822 - protein, 15 aa, Homo Sapiens
VALAIVYLIALAVCQ

SEQ ID NO: 67823 - protein, 15 aa, Homo Sapiens
ALAIVYLIALAVCQC

SEQ ID NO: 67824 - protein, 15 aa, Homo Sapiens
LAIVYLIALAVCQCR

SEQ ID NO: 67825 - protein, 15 aa, Homo Sapiens
AIVYLIALAVCQCRR

SEQ ID NO: 67826 - protein, 15 aa, Homo Sapiens
IVYLIALAVCQCRRK

SEQ ID NO: 67827 - protein, 15 aa, Homo Sapiens
VYLIALAVCQCRRKN

SEQ ID NO: 67828 - protein, 15 aa, Homo Sapiens
YLIALAVCQCRRKNY

SEQ ID NO: 67829 - protein, 15 aa, Homo Sapiens
LIALAVCQCRRKNYG

SEQ ID NO: 67830 - protein, 15 aa, Homo Sapiens
IALAVCQCRRKNYGQ

SEQ ID NO: 67831 - protein, 15 aa, Homo Sapiens
ALAVCQCRRKNYGQL

SEQ ID NO: 67832 - protein, 15 aa, Homo Sapiens
LAVCQCRRKNYGQLD

SEQ ID NO: 67833 - protein, 15 aa, Homo Sapiens
AVCQCRRKNYGQLDI

SEQ ID NO: 67834 - protein, 15 aa, Homo Sapiens
VCQCRRKNYGQLDIF

SEQ ID NO: 67835 - protein, 15 aa, Homo Sapiens
CQCRRKNYGQLDIFP

SEQ ID NO: 67836 - protein, 15 aa, Homo Sapiens
QCRRKNYGQLDIFPA

SEQ ID NO: 67837 - protein, 15 aa, Homo Sapiens
CRRKNYGQLDIFPAR

SEQ ID NO: 67838 - protein, 15 aa, Homo Sapiens
RRKNYGQLDIFPARD

SEQ ID NO: 67839 - protein, 15 aa, Homo Sapiens
RKNYGQLDIFPARDT

SEQ ID NO: 67840 - protein, 15 aa, Homo Sapiens
KNYGQLDIFPARDTY

SEQ ID NO: 67841 - protein, 15 aa, Homo Sapiens
NYGQLDIFPARDTYH

SEQ ID NO: 67842 - protein, 15 aa, Homo Sapiens
YGQLDIFPARDTYHP

SEQ ID NO: 67843 - protein, 15 aa, Homo Sapiens
GQLDIFPARDTYHPM

SEQ ID NO: 67844 - protein, 15 aa, Homo Sapiens
QLDIFPARDTYHPMS

SEQ ID NO: 67845 - protein, 15 aa, Homo Sapiens
LDIFPARDTYHPMSE

SEQ ID NO: 67846 - protein, 15 aa, Homo Sapiens
DIFPARDTYHPMSEY

SEQ ID NO: 67847 - protein, 15 aa, Homo Sapiens
IFPARDTYHPMSEYP

SEQ ID NO: 67848 - protein, 15 aa, Homo Sapiens
FPARDTYHPMSEYPT

SEQ ID NO: 67849 - protein, 15 aa, Homo Sapiens
PARDTYHPMSEYPTY

SEQ ID NO: 67850 - protein, 15 aa, Homo Sapiens
ARDTYHPMSEYPTYH

SEQ ID NO: 67851 - protein, 15 aa, Homo Sapiens
RDTYHPMSEYPTYHT

SEQ ID NO: 67852 - protein, 15 aa, Homo Sapiens
DTYHPMSEYPTYHTH

SEQ ID NO: 67853 - protein, 15 aa, Homo Sapiens
TYHPMSEYPTYHTHG

SEQ ID NO: 67854 - protein, 15 aa, Homo Sapiens
YHPMSEYPTYHTHGR

SEQ ID NO: 67855 - protein, 15 aa, Homo Sapiens
HPMSEYPTYHTHGRY

SEQ ID NO: 67856 - protein, 15 aa, Homo Sapiens
PMSEYPTYHTHGRYV

SEQ ID NO: 67857 - protein, 15 aa, Homo Sapiens
MSEYPTYHTHGRYVP

SEQ ID NO: 67858 - protein, 15 aa, Homo Sapiens
SEYPTYHTHGRYVPP

SEQ ID NO: 67859 - protein, 15 aa, Homo Sapiens
EYPTYHTHGRYVPPS

SEQ ID NO: 67860 - protein, 15 aa, Homo Sapiens
YPTYHTHGRYVPPSS

SEQ ID NO: 67861 - protein, 15 aa, Homo Sapiens
PTYHTHGRYVPPSST

SEQ ID NO: 67862 - protein, 15 aa, Homo Sapiens
TYHTHGRYVPPSSTD

SEQ ID NO: 67863 - protein, 15 aa, Homo Sapiens
YHTHGRYVPPSSTDR

SEQ ID NO: 67864 - protein, 15 aa, Homo Sapiens
HTHGRYVPPSSTDRS

SEQ ID NO: 67865 - protein, 15 aa, Homo Sapiens
THGRYVPPSSTDRSP

SEQ ID NO: 67866 - protein, 15 aa, Homo Sapiens
HGRYVPPSSTDRSPY

SEQ ID NO: 67867 - protein, 15 aa, Homo Sapiens
GRYVPPSSTDRSPYE

SEQ ID NO: 67868 - protein, 15 aa, Homo Sapiens
RYVPPSSTDRSPYEK

SEQ ID NO: 67869 - protein, 15 aa, Homo Sapiens
YVPPSSTDRSPYEKV

SEQ ID NO: 67870 - protein, 15 aa, Homo Sapiens
VPPSSTDRSPYEKVS

SEQ ID NO: 67871 - protein, 15 aa, Homo Sapiens
PPSSTDRSPYEKVSA

SEQ ID NO: 67872 - protein, 15 aa, Homo Sapiens
PSSTDRSPYEKVSAG

SEQ ID NO: 67873 - protein, 15 aa, Homo Sapiens
SSTDRSPYEKVSAGN

SEQ ID NO: 67874 - protein, 15 aa, Homo Sapiens
STDRSPYEKVSAGNG

SEQ ID NO: 67875 - protein, 15 aa, Homo Sapiens
TDRSPYEKVSAGNGG

SEQ ID NO: 67876 - protein, 15 aa, Homo Sapiens
DRSPYEKVSAGNGGS

SEQ ID NO: 67877 - protein, 15 aa, Homo Sapiens
RSPYEKVSAGNGGSS

SEQ ID NO: 67878 - protein, 15 aa, Homo Sapiens
SPYEKVSAGNGGSSL

SEQ ID NO: 67879 - protein, 15 aa, Homo Sapiens
PYEKVSAGNGGSSLS

SEQ ID NO: 67880 - protein, 15 aa, Homo Sapiens
YEKVSAGNGGSSLSY

SEQ ID NO: 67881 - protein, 15 aa, Homo Sapiens
EKVSAGNGGSSLSYT

SEQ ID NO: 67882 - protein, 15 aa, Homo Sapiens
KVSAGNGGSSLSYTN

SEQ ID NO: 67883 - protein, 15 aa, Homo Sapiens
VSAGNGGSSLSYTNP

SEQ ID NO: 67884 - protein, 15 aa, Homo Sapiens
SAGNGGSSLSYTNPA

SEQ ID NO: 67885 - protein, 15 aa, Homo Sapiens
AGNGGSSLSYTNPAV

SEQ ID NO: 67886 - protein, 15 aa, Homo Sapiens
GNGGSSLSYTNPAVA

SEQ ID NO: 67887 - protein, 15 aa, Homo Sapiens
NGGSSLSYTNPAVAA

SEQ ID NO: 67888 - protein, 15 aa, Homo Sapiens
GGSSLSYTNPAVAAA

SEQ ID NO: 67889 - protein, 15 aa, Homo Sapiens
GSSLSYTNPAVAAAS

SEQ ID NO: 67890 - protein, 15 aa, Homo Sapiens
SSLSYTNPAVAAASA

SEQ ID NO: 67891 - protein, 15 aa, Homo Sapiens
SLSYTNPAVAAASAN

SEQ ID NO: 67892 - protein, 15 aa, Homo Sapiens
LSYTNPAVAAASANL

SEQ ID NO: 67893 - protein, 16 aa, Homo Sapiens
MTPGTQSPFFLLLLLT

SEQ ID NO: 67894 - protein, 16 aa, Homo Sapiens
TPGTQSPFFLLLLLTV

SEQ ID NO: 67895 - protein, 16 aa, Homo Sapiens
PGTQSPFFLLLLLTVL

SEQ ID NO: 67896 - protein, 16 aa, Homo Sapiens
GTQSPFFLLLLLTVLT

SEQ ID NO: 67897 - protein, 16 aa, Homo Sapiens
TQSPFFLLLLLTVLTV

SEQ ID NO: 67898 - protein, 16 aa, Homo Sapiens
QSPFFLLLLLTVLTVV

SEQ ID NO: 67899 - protein, 16 aa, Homo Sapiens
SPFFLLLLLTVLTVVT

SEQ ID NO: 67900 - protein, 16 aa, Homo Sapiens
PFFLLLLLTVLTVVTG

SEQ ID NO: 67901 - protein, 16 aa, Homo Sapiens
FFLLLLLTVLTVVTGS

SEQ ID NO: 67902 - protein, 16 aa, Homo Sapiens
FLLLLLTVLTVVTGSG

SEQ ID NO: 67903 - protein, 16 aa, Homo Sapiens
LLLLLTVLTVVTGSGH

SEQ ID NO: 67904 - protein, 16 aa, Homo Sapiens
LLLLTVLTVVTGSGHA

SEQ ID NO: 67905 - protein, 16 aa, Homo Sapiens
LLLTVLTVVTGSGHAS

SEQ ID NO: 67906 - protein, 16 aa, Homo Sapiens
LLTVLTVVTGSGHASS

SEQ ID NO: 67907 - protein, 16 aa, Homo Sapiens
LTVLTVVTGSGHASST

SEQ ID NO: 67908 - protein, 16 aa, Homo Sapiens
TVLTVVTGSGHASSTP

SEQ ID NO: 67909 - protein, 16 aa, Homo Sapiens
VLTVVTGSGHASSTPG

SEQ ID NO: 67910 - protein, 16 aa, Homo Sapiens
LTVVTGSGHASSTPGG

SEQ ID NO: 67911 - protein, 16 aa, Homo Sapiens
TVVTGSGHASSTPGGE

SEQ ID NO: 67912 - protein, 16 aa, Homo Sapiens
VVTGSGHASSTPGGEK

SEQ ID NO: 67913 - protein, 16 aa, Homo Sapiens
VTGSGHASSTPGGEKE

SEQ ID NO: 67914 - protein, 16 aa, Homo Sapiens
TGSGHASSTPGGEKET

SEQ ID NO: 67915 - protein, 16 aa, Homo Sapiens
GSGHASSTPGGEKETS

SEQ ID NO: 67916 - protein, 16 aa, Homo Sapiens
SGHASSTPGGEKETSA

SEQ ID NO: 67917 - protein, 16 aa, Homo Sapiens
GHASSTPGGEKETSAT

SEQ ID NO: 67918 - protein, 16 aa, Homo Sapiens
HASSTPGGEKETSATQ

SEQ ID NO: 67919 - protein, 16 aa, Homo Sapiens
ASSTPGGEKETSATQR

SEQ ID NO: 67920 - protein, 16 aa, Homo Sapiens
SSTPGGEKETSATQRS

SEQ ID NO: 67921 - protein, 16 aa, Homo Sapiens
STPGGEKETSATQRSS

SEQ ID NO: 67922 - protein, 16 aa, Homo Sapiens
TPGGEKETSATQRSSV

SEQ ID NO: 67923 - protein, 16 aa, Homo Sapiens
PGGEKETSATQRSSVP

SEQ ID NO: 67924 - protein, 16 aa, Homo Sapiens
GGEKETSATQRSSVPS

SEQ ID NO: 67925 - protein, 16 aa, Homo Sapiens
GEKETSATQRSSVPSS

SEQ ID NO: 67926 - protein, 16 aa, Homo Sapiens
EKETSATQRSSVPSST

SEQ ID NO: 67927 - protein, 16 aa, Homo Sapiens
KETSATQRSSVPSSTE

SEQ ID NO: 67928 - protein, 16 aa, Homo Sapiens
ETSATQRSSVPSSTEK

SEQ ID NO: 67929 - protein, 16 aa, Homo Sapiens
TSATQRSSVPSSTEKN

SEQ ID NO: 67930 - protein, 16 aa, Homo Sapiens
SATQRSSVPSSTEKNA

SEQ ID NO: 67931 - protein, 16 aa, Homo Sapiens
ATQRSSVPSSTEKNAV

SEQ ID NO: 67932 - protein, 16 aa, Homo Sapiens
TQRSSVPSSTEKNAVS

SEQ ID NO: 67933 - protein, 16 aa, Homo Sapiens
QRSSVPSSTEKNAVSM

SEQ ID NO: 67934 - protein, 16 aa, Homo Sapiens
RSSVPSSTEKNAVSMT

SEQ ID NO: 67935 - protein, 16 aa, Homo Sapiens
SSVPSSTEKNAVSMTS

SEQ ID NO: 67936 - protein, 16 aa, Homo Sapiens
SVPSSTEKNAVSMTSS

SEQ ID NO: 67937 - protein, 16 aa, Homo Sapiens
VPSSTEKNAVSMTSSV

SEQ ID NO: 67938 - protein, 16 aa, Homo Sapiens
PSSTEKNAVSMTSSVL

SEQ ID NO: 67939 - protein, 16 aa, Homo Sapiens
SSTEKNAVSMTSSVLS

SEQ ID NO: 67940 - protein, 16 aa, Homo Sapiens
STEKNAVSMTSSVLSS

SEQ ID NO: 67941 - protein, 16 aa, Homo Sapiens
TEKNAVSMTSSVLSSH

SEQ ID NO: 67942 - protein, 16 aa, Homo Sapiens
EKNAVSMTSSVLSSHS

SEQ ID NO: 67943 - protein, 16 aa, Homo Sapiens
KNAVSMTSSVLSSHSP

SEQ ID NO: 67944 - protein, 16 aa, Homo Sapiens
NAVSMTSSVLSSHSPG

SEQ ID NO: 67945 - protein, 16 aa, Homo Sapiens
AVSMTSSVLSSHSPGS

SEQ ID NO: 67946 - protein, 16 aa, Homo Sapiens
VSMTSSVLSSHSPGSG

SEQ ID NO: 67947 - protein, 16 aa, Homo Sapiens
SMTSSVLSSHSPGSGS

SEQ ID NO: 67948 - protein, 16 aa, Homo Sapiens
MTSSVLSSHSPGSGSS

SEQ ID NO: 67949 - protein, 16 aa, Homo Sapiens
TSSVLSSHSPGSGSST

SEQ ID NO: 67950 - protein, 16 aa, Homo Sapiens
SSVLSSHSPGSGSSTT

SEQ ID NO: 67951 - protein, 16 aa, Homo Sapiens
SVLSSHSPGSGSSTTQ

SEQ ID NO: 67952 - protein, 16 aa, Homo Sapiens
VLSSHSPGSGSSTTQG

SEQ ID NO: 67953 - protein, 16 aa, Homo Sapiens
LSSHSPGSGSSTTQGQ

SEQ ID NO: 67954 - protein, 16 aa, Homo Sapiens
SSHSPGSGSSTTQGQD

SEQ ID NO: 67955 - protein, 16 aa, Homo Sapiens
SHSPGSGSSTTQGQDV

SEQ ID NO: 67956 - protein, 16 aa, Homo Sapiens
HSPGSGSSTTQGQDVT

SEQ ID NO: 67957 - protein, 16 aa, Homo Sapiens
SPGSGSSTTQGQDVTL

SEQ ID NO: 67958 - protein, 16 aa, Homo Sapiens
PGSGSSTTQGQDVTLA

SEQ ID NO: 67959 - protein, 16 aa, Homo Sapiens
GSGSSTTQGQDVTLAP

SEQ ID NO: 67960 - protein, 16 aa, Homo Sapiens
SGSSTTQGQDVTLAPA

SEQ ID NO: 67961 - protein, 16 aa, Homo Sapiens
GSSTTQGQDVTLAPAT

SEQ ID NO: 67962 - protein, 16 aa, Homo Sapiens
SSTTQGQDVTLAPATE

SEQ ID NO: 67963 - protein, 16 aa, Homo Sapiens
STTQGQDVTLAPATEP

SEQ ID NO: 67964 - protein, 16 aa, Homo Sapiens
TTQGQDVTLAPATEPA

SEQ ID NO: 67965 - protein, 16 aa, Homo Sapiens
TQGQDVTLAPATEPAS

SEQ ID NO: 67966 - protein, 16 aa, Homo Sapiens
QGQDVTLAPATEPASG

SEQ ID NO: 67967 - protein, 16 aa, Homo Sapiens
GQDVTLAPATEPASGS

SEQ ID NO: 67968 - protein, 16 aa, Homo Sapiens
QDVTLAPATEPASGSA

SEQ ID NO: 67969 - protein, 16 aa, Homo Sapiens
DVTLAPATEPASGSAA

SEQ ID NO: 67970 - protein, 16 aa, Homo Sapiens
VTLAPATEPASGSAAT

SEQ ID NO: 67971 - protein, 16 aa, Homo Sapiens
TLAPATEPASGSAATW

SEQ ID NO: 67972 - protein, 16 aa, Homo Sapiens
LAPATEPASGSAATWG

SEQ ID NO: 67973 - protein, 16 aa, Homo Sapiens
APATEPASGSAATWGQ

SEQ ID NO: 67974 - protein, 16 aa, Homo Sapiens
PATEPASGSAATWGQD

SEQ ID NO: 67975 - protein, 16 aa, Homo Sapiens
ATEPASGSAATWGQDV

SEQ ID NO: 67976 - protein, 16 aa, Homo Sapiens
TEPASGSAATWGQDVT

SEQ ID NO: 67977 - protein, 16 aa, Homo Sapiens
EPASGSAATWGQDVTS

SEQ ID NO: 67978 - protein, 16 aa, Homo Sapiens
PASGSAATWGQDVTSV

SEQ ID NO: 67979 - protein, 16 aa, Homo Sapiens
ASGSAATWGQDVTSVP

SEQ ID NO: 67980 - protein, 16 aa, Homo Sapiens
SGSAATWGQDVTSVPV

SEQ ID NO: 67981 - protein, 16 aa, Homo Sapiens
GSAATWGQDVTSVPVT

SEQ ID NO: 67982 - protein, 16 aa, Homo Sapiens
SAATWGQDVTSVPVTR

SEQ ID NO: 67983 - protein, 16 aa, Homo Sapiens
AATWGQDVTSVPVTRP

SEQ ID NO: 67984 - protein, 16 aa, Homo Sapiens
ATWGQDVTSVPVTRPA

SEQ ID NO: 67985 - protein, 16 aa, Homo Sapiens
TWGQDVTSVPVTRPAL

SEQ ID NO: 67986 - protein, 16 aa, Homo Sapiens
WGQDVTSVPVTRPALG

SEQ ID NO: 67987 - protein, 16 aa, Homo Sapiens
GQDVTSVPVTRPALGS

SEQ ID NO: 67988 - protein, 16 aa, Homo Sapiens
QDVTSVPVTRPALGST

SEQ ID NO: 67989 - protein, 16 aa, Homo Sapiens
DVTSVPVTRPALGSTT

SEQ ID NO: 67990 - protein, 16 aa, Homo Sapiens
VTSVPVTRPALGSTTP

SEQ ID NO: 67991 - protein, 16 aa, Homo Sapiens
TSVPVTRPALGSTTPP

SEQ ID NO: 67992 - protein, 16 aa, Homo Sapiens
SVPVTRPALGSTTPPA

SEQ ID NO: 67993 - protein, 16 aa, Homo Sapiens
VPVTRPALGSTTPPAH

SEQ ID NO: 67994 - protein, 16 aa, Homo Sapiens
PVTRPALGSTTPPAHD

SEQ ID NO: 67995 - protein, 16 aa, Homo Sapiens
VTRPALGSTTPPAHDV

SEQ ID NO: 67996 - protein, 16 aa, Homo Sapiens
TRPALGSTTPPAHDVT

SEQ ID NO: 67997 - protein, 16 aa, Homo Sapiens
RPALGSTTPPAHDVTS

SEQ ID NO: 67998 - protein, 16 aa, Homo Sapiens
PALGSTTPPAHDVTSA

SEQ ID NO: 67999 - protein, 16 aa, Homo Sapiens
ALGSTTPPAHDVTSAP

SEQ ID NO: 68000 - protein, 16 aa, Homo Sapiens
LGSTTPPAHDVTSAPD

SEQ ID NO: 68001 - protein, 16 aa, Homo Sapiens
GSTTPPAHDVTSAPDN

SEQ ID NO: 68002 - protein, 16 aa, Homo Sapiens
STTPPAHDVTSAPDNK

SEQ ID NO: 68003 - protein, 16 aa, Homo Sapiens
TTPPAHDVTSAPDNKP

SEQ ID NO: 68004 - protein, 16 aa, Homo Sapiens
TPPAHDVTSAPDNKPA

SEQ ID NO: 68005 - protein, 16 aa, Homo Sapiens
PPAHDVTSAPDNKPAP

SEQ ID NO: 68006 - protein, 16 aa, Homo Sapiens
PAHDVTSAPDNKPAPG

SEQ ID NO: 68007 - protein, 16 aa, Homo Sapiens
AHDVTSAPDNKPAPGS

SEQ ID NO: 68008 - protein, 16 aa, Homo Sapiens
HDVTSAPDNKPAPGST

SEQ ID NO: 68009 - protein, 16 aa, Homo Sapiens
DVTSAPDNKPAPGSTA

SEQ ID NO: 68010 - protein, 16 aa, Homo Sapiens
VTSAPDNKPAPGSTAP

SEQ ID NO: 68011 - protein, 16 aa, Homo Sapiens
TSAPDNKPAPGSTAPP

SEQ ID NO: 68012 - protein, 16 aa, Homo Sapiens
SAPDNKPAPGSTAPPA

SEQ ID NO: 68013 - protein, 16 aa, Homo Sapiens
APDNKPAPGSTAPPAH

SEQ ID NO: 68014 - protein, 16 aa, Homo Sapiens
PDNKPAPGSTAPPAHG

SEQ ID NO: 68015 - protein, 16 aa, Homo Sapiens
DNKPAPGSTAPPAHGV

SEQ ID NO: 68016 - protein, 16 aa, Homo Sapiens
NKPAPGSTAPPAHGVT

SEQ ID NO: 68017 - protein, 16 aa, Homo Sapiens
KPAPGSTAPPAHGVTS

SEQ ID NO: 68018 - protein, 16 aa, Homo Sapiens
PAPGSTAPPAHGVTSA

SEQ ID NO: 68019 - protein, 16 aa, Homo Sapiens
APGSTAPPAHGVTSAP

SEQ ID NO: 68020 - protein, 16 aa, Homo Sapiens
PGSTAPPAHGVTSAPD

SEQ ID NO: 68021 - protein, 16 aa, Homo Sapiens
GSTAPPAHGVTSAPDT

SEQ ID NO: 68022 - protein, 16 aa, Homo Sapiens
STAPPAHGVTSAPDTR

SEQ ID NO: 68023 - protein, 16 aa, Homo Sapiens
TAPPAHGVTSAPDTRP

SEQ ID NO: 68024 - protein, 16 aa, Homo Sapiens
APPAHGVTSAPDTRPA

SEQ ID NO: 68025 - protein, 16 aa, Homo Sapiens
PPAHGVTSAPDTRPAP

SEQ ID NO: 68026 - protein, 16 aa, Homo Sapiens
PAHGVTSAPDTRPAPG

SEQ ID NO: 68027 - protein, 16 aa, Homo Sapiens
AHGVTSAPDTRPAPGS

SEQ ID NO: 68028 - protein, 16 aa, Homo Sapiens
HGVTSAPDTRPAPGST

SEQ ID NO: 68029 - protein, 16 aa, Homo Sapiens
GVTSAPDTRPAPGSTA

SEQ ID NO: 68030 - protein, 16 aa, Homo Sapiens
VTSAPDTRPAPGSTAP

SEQ ID NO: 68031 - protein, 16 aa, Homo Sapiens
TSAPDTRPAPGSTAPP

SEQ ID NO: 68032 - protein, 16 aa, Homo Sapiens
SAPDTRPAPGSTAPPA

SEQ ID NO: 68033 - protein, 16 aa, Homo Sapiens
APDTRPAPGSTAPPAH

SEQ ID NO: 68034 - protein, 16 aa, Homo Sapiens
PDTRPAPGSTAPPAHG

SEQ ID NO: 68035 - protein, 16 aa, Homo Sapiens
DTRPAPGSTAPPAHGV

SEQ ID NO: 68036 - protein, 16 aa, Homo Sapiens
TRPAPGSTAPPAHGVT

SEQ ID NO: 68037 - protein, 16 aa, Homo Sapiens
RPAPGSTAPPAHGVTS

SEQ ID NO: 68038 - protein, 16 aa, Homo Sapiens
PAPGSTAPPAHGVTSA

SEQ ID NO: 68039 - protein, 16 aa, Homo Sapiens
APGSTAPPAHGVTSAP

SEQ ID NO: 68040 - protein, 16 aa, Homo Sapiens
PGSTAPPAHGVTSAPD

SEQ ID NO: 68041 - protein, 16 aa, Homo Sapiens
GSTAPPAHGVTSAPDT

SEQ ID NO: 68042 - protein, 16 aa, Homo Sapiens
STAPPAHGVTSAPDTR

SEQ ID NO: 68043 - protein, 16 aa, Homo Sapiens
TAPPAHGVTSAPDTRP

SEQ ID NO: 68044 - protein, 16 aa, Homo Sapiens
APPAHGVTSAPDTRPA

SEQ ID NO: 68045 - protein, 16 aa, Homo Sapiens
PPAHGVTSAPDTRPAP

SEQ ID NO: 68046 - protein, 16 aa, Homo Sapiens
PAHGVTSAPDTRPAPG

SEQ ID NO: 68047 - protein, 16 aa, Homo Sapiens
AHGVTSAPDTRPAPGS

SEQ ID NO: 68048 - protein, 16 aa, Homo Sapiens
HGVTSAPDTRPAPGST

SEQ ID NO: 68049 - protein, 16 aa, Homo Sapiens
GVTSAPDTRPAPGSTA

SEQ ID NO: 68050 - protein, 16 aa, Homo Sapiens
VTSAPDTRPAPGSTAP

SEQ ID NO: 68051 - protein, 16 aa, Homo Sapiens
TSAPDTRPAPGSTAPP

SEQ ID NO: 68052 - protein, 16 aa, Homo Sapiens
SAPDTRPAPGSTAPPA

SEQ ID NO: 68053 - protein, 16 aa, Homo Sapiens
APDTRPAPGSTAPPAH

SEQ ID NO: 68054 - protein, 16 aa, Homo Sapiens
PDTRPAPGSTAPPAHG

SEQ ID NO: 68055 - protein, 16 aa, Homo Sapiens
DTRPAPGSTAPPAHGV

SEQ ID NO: 68056 - protein, 16 aa, Homo Sapiens
TRPAPGSTAPPAHGVT

SEQ ID NO: 68057 - protein, 16 aa, Homo Sapiens
RPAPGSTAPPAHGVTS

SEQ ID NO: 68058 - protein, 16 aa, Homo Sapiens
PAPGSTAPPAHGVTSA

SEQ ID NO: 68059 - protein, 16 aa, Homo Sapiens
APGSTAPPAHGVTSAP

SEQ ID NO: 68060 - protein, 16 aa, Homo Sapiens
PGSTAPPAHGVTSAPD

SEQ ID NO: 68061 - protein, 16 aa, Homo Sapiens
GSTAPPAHGVTSAPDT

SEQ ID NO: 68062 - protein, 16 aa, Homo Sapiens
STAPPAHGVTSAPDTR

SEQ ID NO: 68063 - protein, 16 aa, Homo Sapiens
TAPPAHGVTSAPDTRP

SEQ ID NO: 68064 - protein, 16 aa, Homo Sapiens
APPAHGVTSAPDTRPA

SEQ ID NO: 68065 - protein, 16 aa, Homo Sapiens
PPAHGVTSAPDTRPAP

SEQ ID NO: 68066 - protein, 16 aa, Homo Sapiens
PAHGVTSAPDTRPAPG

SEQ ID NO: 68067 - protein, 16 aa, Homo Sapiens
AHGVTSAPDTRPAPGS

SEQ ID NO: 68068 - protein, 16 aa, Homo Sapiens
HGVTSAPDTRPAPGST

SEQ ID NO: 68069 - protein, 16 aa, Homo Sapiens
GVTSAPDTRPAPGSTA

SEQ ID NO: 68070 - protein, 16 aa, Homo Sapiens
VTSAPDTRPAPGSTAP

SEQ ID NO: 68071 - protein, 16 aa, Homo Sapiens
TSAPDTRPAPGSTAPP

SEQ ID NO: 68072 - protein, 16 aa, Homo Sapiens
SAPDTRPAPGSTAPPA

SEQ ID NO: 68073 - protein, 16 aa, Homo Sapiens
APDTRPAPGSTAPPAH

SEQ ID NO: 68074 - protein, 16 aa, Homo Sapiens
PDTRPAPGSTAPPAHG

SEQ ID NO: 68075 - protein, 16 aa, Homo Sapiens
DTRPAPGSTAPPAHGV

SEQ ID NO: 68076 - protein, 16 aa, Homo Sapiens
TRPAPGSTAPPAHGVT

SEQ ID NO: 68077 - protein, 16 aa, Homo Sapiens
RPAPGSTAPPAHGVTS

SEQ ID NO: 68078 - protein, 16 aa, Homo Sapiens
PAPGSTAPPAHGVTSA

SEQ ID NO: 68079 - protein, 16 aa, Homo Sapiens
APGSTAPPAHGVTSAP

SEQ ID NO: 68080 - protein, 16 aa, Homo Sapiens
PGSTAPPAHGVTSAPD

SEQ ID NO: 68081 - protein, 16 aa, Homo Sapiens
GSTAPPAHGVTSAPDT

SEQ ID NO: 68082 - protein, 16 aa, Homo Sapiens
STAPPAHGVTSAPDTR

SEQ ID NO: 68083 - protein, 16 aa, Homo Sapiens
TAPPAHGVTSAPDTRP

SEQ ID NO: 68084 - protein, 16 aa, Homo Sapiens
APPAHGVTSAPDTRPA

SEQ ID NO: 68085 - protein, 16 aa, Homo Sapiens
PPAHGVTSAPDTRPAP

SEQ ID NO: 68086 - protein, 16 aa, Homo Sapiens
PAHGVTSAPDTRPAPG

SEQ ID NO: 68087 - protein, 16 aa, Homo Sapiens
AHGVTSAPDTRPAPGS

SEQ ID NO: 68088 - protein, 16 aa, Homo Sapiens
HGVTSAPDTRPAPGST

SEQ ID NO: 68089 - protein, 16 aa, Homo Sapiens
GVTSAPDTRPAPGSTA

SEQ ID NO: 68090 - protein, 16 aa, Homo Sapiens
VTSAPDTRPAPGSTAP

SEQ ID NO: 68091 - protein, 16 aa, Homo Sapiens
TSAPDTRPAPGSTAPP

SEQ ID NO: 68092 - protein, 16 aa, Homo Sapiens
SAPDTRPAPGSTAPPA

SEQ ID NO: 68093 - protein, 16 aa, Homo Sapiens
APDTRPAPGSTAPPAH

SEQ ID NO: 68094 - protein, 16 aa, Homo Sapiens
PDTRPAPGSTAPPAHG

SEQ ID NO: 68095 - protein, 16 aa, Homo Sapiens
DTRPAPGSTAPPAHGV

SEQ ID NO: 68096 - protein, 16 aa, Homo Sapiens
TRPAPGSTAPPAHGVT

SEQ ID NO: 68097 - protein, 16 aa, Homo Sapiens
RPAPGSTAPPAHGVTS

SEQ ID NO: 68098 - protein, 16 aa, Homo Sapiens
PAPGSTAPPAHGVTSA

SEQ ID NO: 68099 - protein, 16 aa, Homo Sapiens
APGSTAPPAHGVTSAP

SEQ ID NO: 68100 - protein, 16 aa, Homo Sapiens
PGSTAPPAHGVTSAPD

SEQ ID NO: 68101 - protein, 16 aa, Homo Sapiens
GSTAPPAHGVTSAPDT

SEQ ID NO: 68102 - protein, 16 aa, Homo Sapiens
STAPPAHGVTSAPDTR

SEQ ID NO: 68103 - protein, 16 aa, Homo Sapiens
TAPPAHGVTSAPDTRP

SEQ ID NO: 68104 - protein, 16 aa, Homo Sapiens
APPAHGVTSAPDTRPA

SEQ ID NO: 68105 - protein, 16 aa, Homo Sapiens
PPAHGVTSAPDTRPAP

SEQ ID NO: 68106 - protein, 16 aa, Homo Sapiens
PAHGVTSAPDTRPAPG

SEQ ID NO: 68107 - protein, 16 aa, Homo Sapiens
AHGVTSAPDTRPAPGS

SEQ ID NO: 68108 - protein, 16 aa, Homo Sapiens
HGVTSAPDTRPAPGST

SEQ ID NO: 68109 - protein, 16 aa, Homo Sapiens
GVTSAPDTRPAPGSTA

SEQ ID NO: 68110 - protein, 16 aa, Homo Sapiens
VTSAPDTRPAPGSTAP

SEQ ID NO: 68111 - protein, 16 aa, Homo Sapiens
TSAPDTRPAPGSTAPP

SEQ ID NO: 68112 - protein, 16 aa, Homo Sapiens
SAPDTRPAPGSTAPPA

SEQ ID NO: 68113 - protein, 16 aa, Homo Sapiens
APDTRPAPGSTAPPAH

SEQ ID NO: 68114 - protein, 16 aa, Homo Sapiens
PDTRPAPGSTAPPAHG

SEQ ID NO: 68115 - protein, 16 aa, Homo Sapiens
DTRPAPGSTAPPAHGV

SEQ ID NO: 68116 - protein, 16 aa, Homo Sapiens
TRPAPGSTAPPAHGVT

SEQ ID NO: 68117 - protein, 16 aa, Homo Sapiens
RPAPGSTAPPAHGVTS

SEQ ID NO: 68118 - protein, 16 aa, Homo Sapiens
PAPGSTAPPAHGVTSA

SEQ ID NO: 68119 - protein, 16 aa, Homo Sapiens
APGSTAPPAHGVTSAP

SEQ ID NO: 68120 - protein, 16 aa, Homo Sapiens
PGSTAPPAHGVTSAPD

SEQ ID NO: 68121 - protein, 16 aa, Homo Sapiens
GSTAPPAHGVTSAPDT

SEQ ID NO: 68122 - protein, 16 aa, Homo Sapiens
STAPPAHGVTSAPDTR

SEQ ID NO: 68123 - protein, 16 aa, Homo Sapiens
TAPPAHGVTSAPDTRP

SEQ ID NO: 68124 - protein, 16 aa, Homo Sapiens
APPAHGVTSAPDTRPA

SEQ ID NO: 68125 - protein, 16 aa, Homo Sapiens
PPAHGVTSAPDTRPAP

SEQ ID NO: 68126 - protein, 16 aa, Homo Sapiens
PAHGVTSAPDTRPAPG

SEQ ID NO: 68127 - protein, 16 aa, Homo Sapiens
AHGVTSAPDTRPAPGS

SEQ ID NO: 68128 - protein, 16 aa, Homo Sapiens
HGVTSAPDTRPAPGST

SEQ ID NO: 68129 - protein, 16 aa, Homo Sapiens
GVTSAPDTRPAPGSTA

SEQ ID NO: 68130 - protein, 16 aa, Homo Sapiens
VTSAPDTRPAPGSTAP

SEQ ID NO: 68131 - protein, 16 aa, Homo Sapiens
TSAPDTRPAPGSTAPP

SEQ ID NO: 68132 - protein, 16 aa, Homo Sapiens
SAPDTRPAPGSTAPPA

SEQ ID NO: 68133 - protein, 16 aa, Homo Sapiens
APDTRPAPGSTAPPAH

SEQ ID NO: 68134 - protein, 16 aa, Homo Sapiens
PDTRPAPGSTAPPAHG

SEQ ID NO: 68135 - protein, 16 aa, Homo Sapiens
DTRPAPGSTAPPAHGV

SEQ ID NO: 68136 - protein, 16 aa, Homo Sapiens
TRPAPGSTAPPAHGVT

SEQ ID NO: 68137 - protein, 16 aa, Homo Sapiens
RPAPGSTAPPAHGVTS

SEQ ID NO: 68138 - protein, 16 aa, Homo Sapiens
PAPGSTAPPAHGVTSA

SEQ ID NO: 68139 - protein, 16 aa, Homo Sapiens
APGSTAPPAHGVTSAP

SEQ ID NO: 68140 - protein, 16 aa, Homo Sapiens
PGSTAPPAHGVTSAPD

SEQ ID NO: 68141 - protein, 16 aa, Homo Sapiens
GSTAPPAHGVTSAPDT

SEQ ID NO: 68142 - protein, 16 aa, Homo Sapiens
STAPPAHGVTSAPDTR

SEQ ID NO: 68143 - protein, 16 aa, Homo Sapiens
TAPPAHGVTSAPDTRP

SEQ ID NO: 68144 - protein, 16 aa, Homo Sapiens
APPAHGVTSAPDTRPA

SEQ ID NO: 68145 - protein, 16 aa, Homo Sapiens
PPAHGVTSAPDTRPAP

SEQ ID NO: 68146 - protein, 16 aa, Homo Sapiens
PAHGVTSAPDTRPAPG

SEQ ID NO: 68147 - protein, 16 aa, Homo Sapiens
AHGVTSAPDTRPAPGS

SEQ ID NO: 68148 - protein, 16 aa, Homo Sapiens
HGVTSAPDTRPAPGST

SEQ ID NO: 68149 - protein, 16 aa, Homo Sapiens
GVTSAPDTRPAPGSTA

SEQ ID NO: 68150 - protein, 16 aa, Homo Sapiens
VTSAPDTRPAPGSTAP

SEQ ID NO: 68151 - protein, 16 aa, Homo Sapiens
TSAPDTRPAPGSTAPP

SEQ ID NO: 68152 - protein, 16 aa, Homo Sapiens
SAPDTRPAPGSTAPPA

SEQ ID NO: 68153 - protein, 16 aa, Homo Sapiens
APDTRPAPGSTAPPAH

SEQ ID NO: 68154 - protein, 16 aa, Homo Sapiens
PDTRPAPGSTAPPAHG

SEQ ID NO: 68155 - protein, 16 aa, Homo Sapiens
DTRPAPGSTAPPAHGV

SEQ ID NO: 68156 - protein, 16 aa, Homo Sapiens
TRPAPGSTAPPAHGVT

SEQ ID NO: 68157 - protein, 16 aa, Homo Sapiens
RPAPGSTAPPAHGVTS

SEQ ID NO: 68158 - protein, 16 aa, Homo Sapiens
PAPGSTAPPAHGVTSA

SEQ ID NO: 68159 - protein, 16 aa, Homo Sapiens
APGSTAPPAHGVTSAP

SEQ ID NO: 68160 - protein, 16 aa, Homo Sapiens
PGSTAPPAHGVTSAPD

SEQ ID NO: 68161 - protein, 16 aa, Homo Sapiens
GSTAPPAHGVTSAPDT

SEQ ID NO: 68162 - protein, 16 aa, Homo Sapiens
STAPPAHGVTSAPDTR

SEQ ID NO: 68163 - protein, 16 aa, Homo Sapiens
TAPPAHGVTSAPDTRP

SEQ ID NO: 68164 - protein, 16 aa, Homo Sapiens
APPAHGVTSAPDTRPA

SEQ ID NO: 68165 - protein, 16 aa, Homo Sapiens
PPAHGVTSAPDTRPAP

SEQ ID NO: 68166 - protein, 16 aa, Homo Sapiens
PAHGVTSAPDTRPAPG

SEQ ID NO: 68167 - protein, 16 aa, Homo Sapiens
AHGVTSAPDTRPAPGS

SEQ ID NO: 68168 - protein, 16 aa, Homo Sapiens
HGVTSAPDTRPAPGST

SEQ ID NO: 68169 - protein, 16 aa, Homo Sapiens
GVTSAPDTRPAPGSTA

SEQ ID NO: 68170 - protein, 16 aa, Homo Sapiens
VTSAPDTRPAPGSTAP

SEQ ID NO: 68171 - protein, 16 aa, Homo Sapiens
TSAPDTRPAPGSTAPP

SEQ ID NO: 68172 - protein, 16 aa, Homo Sapiens
SAPDTRPAPGSTAPPA

SEQ ID NO: 68173 - protein, 16 aa, Homo Sapiens
APDTRPAPGSTAPPAH

SEQ ID NO: 68174 - protein, 16 aa, Homo Sapiens
PDTRPAPGSTAPPAHG

SEQ ID NO: 68175 - protein, 16 aa, Homo Sapiens
DTRPAPGSTAPPAHGV

SEQ ID NO: 68176 - protein, 16 aa, Homo Sapiens
TRPAPGSTAPPAHGVT

SEQ ID NO: 68177 - protein, 16 aa, Homo Sapiens
RPAPGSTAPPAHGVTS

SEQ ID NO: 68178 - protein, 16 aa, Homo Sapiens
PAPGSTAPPAHGVTSA

SEQ ID NO: 68179 - protein, 16 aa, Homo Sapiens
APGSTAPPAHGVTSAP

SEQ ID NO: 68180 - protein, 16 aa, Homo Sapiens
PGSTAPPAHGVTSAPD

SEQ ID NO: 68181 - protein, 16 aa, Homo Sapiens
GSTAPPAHGVTSAPDT

SEQ ID NO: 68182 - protein, 16 aa, Homo Sapiens
STAPPAHGVTSAPDTR

SEQ ID NO: 68183 - protein, 16 aa, Homo Sapiens
TAPPAHGVTSAPDTRP

SEQ ID NO: 68184 - protein, 16 aa, Homo Sapiens
APPAHGVTSAPDTRPA

SEQ ID NO: 68185 - protein, 16 aa, Homo Sapiens
PPAHGVTSAPDTRPAP

SEQ ID NO: 68186 - protein, 16 aa, Homo Sapiens
PAHGVTSAPDTRPAPG

SEQ ID NO: 68187 - protein, 16 aa, Homo Sapiens
AHGVTSAPDTRPAPGS

SEQ ID NO: 68188 - protein, 16 aa, Homo Sapiens
HGVTSAPDTRPAPGST

SEQ ID NO: 68189 - protein, 16 aa, Homo Sapiens
GVTSAPDTRPAPGSTA

SEQ ID NO: 68190 - protein, 16 aa, Homo Sapiens
VTSAPDTRPAPGSTAP

SEQ ID NO: 68191 - protein, 16 aa, Homo Sapiens
TSAPDTRPAPGSTAPP

SEQ ID NO: 68192 - protein, 16 aa, Homo Sapiens
SAPDTRPAPGSTAPPA

SEQ ID NO: 68193 - protein, 16 aa, Homo Sapiens
APDTRPAPGSTAPPAH

SEQ ID NO: 68194 - protein, 16 aa, Homo Sapiens
PDTRPAPGSTAPPAHG

SEQ ID NO: 68195 - protein, 16 aa, Homo Sapiens
DTRPAPGSTAPPAHGV

SEQ ID NO: 68196 - protein, 16 aa, Homo Sapiens
TRPAPGSTAPPAHGVT

SEQ ID NO: 68197 - protein, 16 aa, Homo Sapiens
RPAPGSTAPPAHGVTS

SEQ ID NO: 68198 - protein, 16 aa, Homo Sapiens
PAPGSTAPPAHGVTSA

SEQ ID NO: 68199 - protein, 16 aa, Homo Sapiens
APGSTAPPAHGVTSAP

SEQ ID NO: 68200 - protein, 16 aa, Homo Sapiens
PGSTAPPAHGVTSAPD

SEQ ID NO: 68201 - protein, 16 aa, Homo Sapiens
GSTAPPAHGVTSAPDT

SEQ ID NO: 68202 - protein, 16 aa, Homo Sapiens
STAPPAHGVTSAPDTR

SEQ ID NO: 68203 - protein, 16 aa, Homo Sapiens
TAPPAHGVTSAPDTRP

SEQ ID NO: 68204 - protein, 16 aa, Homo Sapiens
APPAHGVTSAPDTRPA

SEQ ID NO: 68205 - protein, 16 aa, Homo Sapiens
PPAHGVTSAPDTRPAP

SEQ ID NO: 68206 - protein, 16 aa, Homo Sapiens
PAHGVTSAPDTRPAPG

SEQ ID NO: 68207 - protein, 16 aa, Homo Sapiens
AHGVTSAPDTRPAPGS

SEQ ID NO: 68208 - protein, 16 aa, Homo Sapiens
HGVTSAPDTRPAPGST

SEQ ID NO: 68209 - protein, 16 aa, Homo Sapiens
GVTSAPDTRPAPGSTA

SEQ ID NO: 68210 - protein, 16 aa, Homo Sapiens
VTSAPDTRPAPGSTAP

SEQ ID NO: 68211 - protein, 16 aa, Homo Sapiens
TSAPDTRPAPGSTAPP

SEQ ID NO: 68212 - protein, 16 aa, Homo Sapiens
SAPDTRPAPGSTAPPA

SEQ ID NO: 68213 - protein, 16 aa, Homo Sapiens
APDTRPAPGSTAPPAH

SEQ ID NO: 68214 - protein, 16 aa, Homo Sapiens
PDTRPAPGSTAPPAHG

SEQ ID NO: 68215 - protein, 16 aa, Homo Sapiens
DTRPAPGSTAPPAHGV

SEQ ID NO: 68216 - protein, 16 aa, Homo Sapiens
TRPAPGSTAPPAHGVT

SEQ ID NO: 68217 - protein, 16 aa, Homo Sapiens
RPAPGSTAPPAHGVTS

SEQ ID NO: 68218 - protein, 16 aa, Homo Sapiens
PAPGSTAPPAHGVTSA

SEQ ID NO: 68219 - protein, 16 aa, Homo Sapiens
APGSTAPPAHGVTSAP

SEQ ID NO: 68220 - protein, 16 aa, Homo Sapiens
PGSTAPPAHGVTSAPD

SEQ ID NO: 68221 - protein, 16 aa, Homo Sapiens
GSTAPPAHGVTSAPDT

SEQ ID NO: 68222 - protein, 16 aa, Homo Sapiens
STAPPAHGVTSAPDTR

SEQ ID NO: 68223 - protein, 16 aa, Homo Sapiens
TAPPAHGVTSAPDTRP

SEQ ID NO: 68224 - protein, 16 aa, Homo Sapiens
APPAHGVTSAPDTRPA

SEQ ID NO: 68225 - protein, 16 aa, Homo Sapiens
PPAHGVTSAPDTRPAP

SEQ ID NO: 68226 - protein, 16 aa, Homo Sapiens
PAHGVTSAPDTRPAPG

SEQ ID NO: 68227 - protein, 16 aa, Homo Sapiens
AHGVTSAPDTRPAPGS

SEQ ID NO: 68228 - protein, 16 aa, Homo Sapiens
HGVTSAPDTRPAPGST

SEQ ID NO: 68229 - protein, 16 aa, Homo Sapiens
GVTSAPDTRPAPGSTA

SEQ ID NO: 68230 - protein, 16 aa, Homo Sapiens
VTSAPDTRPAPGSTAP

SEQ ID NO: 68231 - protein, 16 aa, Homo Sapiens
TSAPDTRPAPGSTAPP

SEQ ID NO: 68232 - protein, 16 aa, Homo Sapiens
SAPDTRPAPGSTAPPA

SEQ ID NO: 68233 - protein, 16 aa, Homo Sapiens
APDTRPAPGSTAPPAH

SEQ ID NO: 68234 - protein, 16 aa, Homo Sapiens
PDTRPAPGSTAPPAHG

SEQ ID NO: 68235 - protein, 16 aa, Homo Sapiens
DTRPAPGSTAPPAHGV

SEQ ID NO: 68236 - protein, 16 aa, Homo Sapiens
TRPAPGSTAPPAHGVT

SEQ ID NO: 68237 - protein, 16 aa, Homo Sapiens
RPAPGSTAPPAHGVTS

SEQ ID NO: 68238 - protein, 16 aa, Homo Sapiens
PAPGSTAPPAHGVTSA

SEQ ID NO: 68239 - protein, 16 aa, Homo Sapiens
APGSTAPPAHGVTSAP

SEQ ID NO: 68240 - protein, 16 aa, Homo Sapiens
PGSTAPPAHGVTSAPD

SEQ ID NO: 68241 - protein, 16 aa, Homo Sapiens
GSTAPPAHGVTSAPDT

SEQ ID NO: 68242 - protein, 16 aa, Homo Sapiens
STAPPAHGVTSAPDTR

SEQ ID NO: 68243 - protein, 16 aa, Homo Sapiens
TAPPAHGVTSAPDTRP

SEQ ID NO: 68244 - protein, 16 aa, Homo Sapiens
APPAHGVTSAPDTRPA

SEQ ID NO: 68245 - protein, 16 aa, Homo Sapiens
PPAHGVTSAPDTRPAP

SEQ ID NO: 68246 - protein, 16 aa, Homo Sapiens
PAHGVTSAPDTRPAPG

SEQ ID NO: 68247 - protein, 16 aa, Homo Sapiens
AHGVTSAPDTRPAPGS

SEQ ID NO: 68248 - protein, 16 aa, Homo Sapiens
HGVTSAPDTRPAPGST

SEQ ID NO: 68249 - protein, 16 aa, Homo Sapiens
GVTSAPDTRPAPGSTA

SEQ ID NO: 68250 - protein, 16 aa, Homo Sapiens
VTSAPDTRPAPGSTAP

SEQ ID NO: 68251 - protein, 16 aa, Homo Sapiens
TSAPDTRPAPGSTAPP

SEQ ID NO: 68252 - protein, 16 aa, Homo Sapiens
SAPDTRPAPGSTAPPA

SEQ ID NO: 68253 - protein, 16 aa, Homo Sapiens
APDTRPAPGSTAPPAH

SEQ ID NO: 68254 - protein, 16 aa, Homo Sapiens
PDTRPAPGSTAPPAHG

SEQ ID NO: 68255 - protein, 16 aa, Homo Sapiens
DTRPAPGSTAPPAHGV

SEQ ID NO: 68256 - protein, 16 aa, Homo Sapiens
TRPAPGSTAPPAHGVT

SEQ ID NO: 68257 - protein, 16 aa, Homo Sapiens
RPAPGSTAPPAHGVTS

SEQ ID NO: 68258 - protein, 16 aa, Homo Sapiens
PAPGSTAPPAHGVTSA

SEQ ID NO: 68259 - protein, 16 aa, Homo Sapiens
APGSTAPPAHGVTSAP

SEQ ID NO: 68260 - protein, 16 aa, Homo Sapiens
PGSTAPPAHGVTSAPD

SEQ ID NO: 68261 - protein, 16 aa, Homo Sapiens
GSTAPPAHGVTSAPDT

SEQ ID NO: 68262 - protein, 16 aa, Homo Sapiens
STAPPAHGVTSAPDTR

SEQ ID NO: 68263 - protein, 16 aa, Homo Sapiens
TAPPAHGVTSAPDTRP

SEQ ID NO: 68264 - protein, 16 aa, Homo Sapiens
APPAHGVTSAPDTRPA

SEQ ID NO: 68265 - protein, 16 aa, Homo Sapiens
PPAHGVTSAPDTRPAP

SEQ ID NO: 68266 - protein, 16 aa, Homo Sapiens
PAHGVTSAPDTRPAPG

SEQ ID NO: 68267 - protein, 16 aa, Homo Sapiens
AHGVTSAPDTRPAPGS

SEQ ID NO: 68268 - protein, 16 aa, Homo Sapiens
HGVTSAPDTRPAPGST

SEQ ID NO: 68269 - protein, 16 aa, Homo Sapiens
GVTSAPDTRPAPGSTA

SEQ ID NO: 68270 - protein, 16 aa, Homo Sapiens
VTSAPDTRPAPGSTAP

SEQ ID NO: 68271 - protein, 16 aa, Homo Sapiens
TSAPDTRPAPGSTAPP

SEQ ID NO: 68272 - protein, 16 aa, Homo Sapiens
SAPDTRPAPGSTAPPA

SEQ ID NO: 68273 - protein, 16 aa, Homo Sapiens
APDTRPAPGSTAPPAH

SEQ ID NO: 68274 - protein, 16 aa, Homo Sapiens
PDTRPAPGSTAPPAHG

SEQ ID NO: 68275 - protein, 16 aa, Homo Sapiens
DTRPAPGSTAPPAHGV

SEQ ID NO: 68276 - protein, 16 aa, Homo Sapiens
TRPAPGSTAPPAHGVT

SEQ ID NO: 68277 - protein, 16 aa, Homo Sapiens
RPAPGSTAPPAHGVTS

SEQ ID NO: 68278 - protein, 16 aa, Homo Sapiens
PAPGSTAPPAHGVTSA

SEQ ID NO: 68279 - protein, 16 aa, Homo Sapiens
APGSTAPPAHGVTSAP

SEQ ID NO: 68280 - protein, 16 aa, Homo Sapiens
PGSTAPPAHGVTSAPD

SEQ ID NO: 68281 - protein, 16 aa, Homo Sapiens
GSTAPPAHGVTSAPDT

SEQ ID NO: 68282 - protein, 16 aa, Homo Sapiens
STAPPAHGVTSAPDTR

SEQ ID NO: 68283 - protein, 16 aa, Homo Sapiens
TAPPAHGVTSAPDTRP

SEQ ID NO: 68284 - protein, 16 aa, Homo Sapiens
APPAHGVTSAPDTRPA

SEQ ID NO: 68285 - protein, 16 aa, Homo Sapiens
PPAHGVTSAPDTRPAP

SEQ ID NO: 68286 - protein, 16 aa, Homo Sapiens
PAHGVTSAPDTRPAPG

SEQ ID NO: 68287 - protein, 16 aa, Homo Sapiens
AHGVTSAPDTRPAPGS

SEQ ID NO: 68288 - protein, 16 aa, Homo Sapiens
HGVTSAPDTRPAPGST

SEQ ID NO: 68289 - protein, 16 aa, Homo Sapiens
GVTSAPDTRPAPGSTA

SEQ ID NO: 68290 - protein, 16 aa, Homo Sapiens
VTSAPDTRPAPGSTAP

SEQ ID NO: 68291 - protein, 16 aa, Homo Sapiens
TSAPDTRPAPGSTAPP

SEQ ID NO: 68292 - protein, 16 aa, Homo Sapiens
SAPDTRPAPGSTAPPA

SEQ ID NO: 68293 - protein, 16 aa, Homo Sapiens
APDTRPAPGSTAPPAH

SEQ ID NO: 68294 - protein, 16 aa, Homo Sapiens
PDTRPAPGSTAPPAHG

SEQ ID NO: 68295 - protein, 16 aa, Homo Sapiens
DTRPAPGSTAPPAHGV

SEQ ID NO: 68296 - protein, 16 aa, Homo Sapiens
TRPAPGSTAPPAHGVT

SEQ ID NO: 68297 - protein, 16 aa, Homo Sapiens
RPAPGSTAPPAHGVTS

SEQ ID NO: 68298 - protein, 16 aa, Homo Sapiens
PAPGSTAPPAHGVTSA

SEQ ID NO: 68299 - protein, 16 aa, Homo Sapiens
APGSTAPPAHGVTSAP

SEQ ID NO: 68300 - protein, 16 aa, Homo Sapiens
PGSTAPPAHGVTSAPD

SEQ ID NO: 68301 - protein, 16 aa, Homo Sapiens
GSTAPPAHGVTSAPDT

SEQ ID NO: 68302 - protein, 16 aa, Homo Sapiens
STAPPAHGVTSAPDTR

SEQ ID NO: 68303 - protein, 16 aa, Homo Sapiens
TAPPAHGVTSAPDTRP

SEQ ID NO: 68304 - protein, 16 aa, Homo Sapiens
APPAHGVTSAPDTRPA

SEQ ID NO: 68305 - protein, 16 aa, Homo Sapiens
PPAHGVTSAPDTRPAP

SEQ ID NO: 68306 - protein, 16 aa, Homo Sapiens
PAHGVTSAPDTRPAPG

SEQ ID NO: 68307 - protein, 16 aa, Homo Sapiens
AHGVTSAPDTRPAPGS

SEQ ID NO: 68308 - protein, 16 aa, Homo Sapiens
HGVTSAPDTRPAPGST

SEQ ID NO: 68309 - protein, 16 aa, Homo Sapiens
GVTSAPDTRPAPGSTA

SEQ ID NO: 68310 - protein, 16 aa, Homo Sapiens
VTSAPDTRPAPGSTAP

SEQ ID NO: 68311 - protein, 16 aa, Homo Sapiens
TSAPDTRPAPGSTAPP

SEQ ID NO: 68312 - protein, 16 aa, Homo Sapiens
SAPDTRPAPGSTAPPA

SEQ ID NO: 68313 - protein, 16 aa, Homo Sapiens
APDTRPAPGSTAPPAH

SEQ ID NO: 68314 - protein, 16 aa, Homo Sapiens
PDTRPAPGSTAPPAHG

SEQ ID NO: 68315 - protein, 16 aa, Homo Sapiens
DTRPAPGSTAPPAHGV

SEQ ID NO: 68316 - protein, 16 aa, Homo Sapiens
TRPAPGSTAPPAHGVT

SEQ ID NO: 68317 - protein, 16 aa, Homo Sapiens
RPAPGSTAPPAHGVTS

SEQ ID NO: 68318 - protein, 16 aa, Homo Sapiens
PAPGSTAPPAHGVTSA

SEQ ID NO: 68319 - protein, 16 aa, Homo Sapiens
APGSTAPPAHGVTSAP

SEQ ID NO: 68320 - protein, 16 aa, Homo Sapiens
PGSTAPPAHGVTSAPD

SEQ ID NO: 68321 - protein, 16 aa, Homo Sapiens
GSTAPPAHGVTSAPDT

SEQ ID NO: 68322 - protein, 16 aa, Homo Sapiens
STAPPAHGVTSAPDTR

SEQ ID NO: 68323 - protein, 16 aa, Homo Sapiens
TAPPAHGVTSAPDTRP

SEQ ID NO: 68324 - protein, 16 aa, Homo Sapiens
APPAHGVTSAPDTRPA

SEQ ID NO: 68325 - protein, 16 aa, Homo Sapiens
PPAHGVTSAPDTRPAP

SEQ ID NO: 68326 - protein, 16 aa, Homo Sapiens
PAHGVTSAPDTRPAPG

SEQ ID NO: 68327 - protein, 16 aa, Homo Sapiens
AHGVTSAPDTRPAPGS

SEQ ID NO: 68328 - protein, 16 aa, Homo Sapiens
HGVTSAPDTRPAPGST

SEQ ID NO: 68329 - protein, 16 aa, Homo Sapiens
GVTSAPDTRPAPGSTA

SEQ ID NO: 68330 - protein, 16 aa, Homo Sapiens
VTSAPDTRPAPGSTAP

SEQ ID NO: 68331 - protein, 16 aa, Homo Sapiens
TSAPDTRPAPGSTAPP

SEQ ID NO: 68332 - protein, 16 aa, Homo Sapiens
SAPDTRPAPGSTAPPA

SEQ ID NO: 68333 - protein, 16 aa, Homo Sapiens
APDTRPAPGSTAPPAH

SEQ ID NO: 68334 - protein, 16 aa, Homo Sapiens
PDTRPAPGSTAPPAHG

SEQ ID NO: 68335 - protein, 16 aa, Homo Sapiens
DTRPAPGSTAPPAHGV

SEQ ID NO: 68336 - protein, 16 aa, Homo Sapiens
TRPAPGSTAPPAHGVT

SEQ ID NO: 68337 - protein, 16 aa, Homo Sapiens
RPAPGSTAPPAHGVTS

SEQ ID NO: 68338 - protein, 16 aa, Homo Sapiens
PAPGSTAPPAHGVTSA

SEQ ID NO: 68339 - protein, 16 aa, Homo Sapiens
APGSTAPPAHGVTSAP

SEQ ID NO: 68340 - protein, 16 aa, Homo Sapiens
PGSTAPPAHGVTSAPD

SEQ ID NO: 68341 - protein, 16 aa, Homo Sapiens
GSTAPPAHGVTSAPDT

SEQ ID NO: 68342 - protein, 16 aa, Homo Sapiens
STAPPAHGVTSAPDTR

SEQ ID NO: 68343 - protein, 16 aa, Homo Sapiens
TAPPAHGVTSAPDTRP

SEQ ID NO: 68344 - protein, 16 aa, Homo Sapiens
APPAHGVTSAPDTRPA

SEQ ID NO: 68345 - protein, 16 aa, Homo Sapiens
PPAHGVTSAPDTRPAP

SEQ ID NO: 68346 - protein, 16 aa, Homo Sapiens
PAHGVTSAPDTRPAPG

SEQ ID NO: 68347 - protein, 16 aa, Homo Sapiens
AHGVTSAPDTRPAPGS

SEQ ID NO: 68348 - protein, 16 aa, Homo Sapiens
HGVTSAPDTRPAPGST

SEQ ID NO: 68349 - protein, 16 aa, Homo Sapiens
GVTSAPDTRPAPGSTA

SEQ ID NO: 68350 - protein, 16 aa, Homo Sapiens
VTSAPDTRPAPGSTAP

SEQ ID NO: 68351 - protein, 16 aa, Homo Sapiens
TSAPDTRPAPGSTAPP

SEQ ID NO: 68352 - protein, 16 aa, Homo Sapiens
SAPDTRPAPGSTAPPA

SEQ ID NO: 68353 - protein, 16 aa, Homo Sapiens
APDTRPAPGSTAPPAH

SEQ ID NO: 68354 - protein, 16 aa, Homo Sapiens
PDTRPAPGSTAPPAHG

SEQ ID NO: 68355 - protein, 16 aa, Homo Sapiens
DTRPAPGSTAPPAHGV

SEQ ID NO: 68356 - protein, 16 aa, Homo Sapiens
TRPAPGSTAPPAHGVT

SEQ ID NO: 68357 - protein, 16 aa, Homo Sapiens
RPAPGSTAPPAHGVTS

SEQ ID NO: 68358 - protein, 16 aa, Homo Sapiens
PAPGSTAPPAHGVTSA

SEQ ID NO: 68359 - protein, 16 aa, Homo Sapiens
APGSTAPPAHGVTSAP

SEQ ID NO: 68360 - protein, 16 aa, Homo Sapiens
PGSTAPPAHGVTSAPD

SEQ ID NO: 68361 - protein, 16 aa, Homo Sapiens
GSTAPPAHGVTSAPDT

SEQ ID NO: 68362 - protein, 16 aa, Homo Sapiens
STAPPAHGVTSAPDTR

SEQ ID NO: 68363 - protein, 16 aa, Homo Sapiens
TAPPAHGVTSAPDTRP

SEQ ID NO: 68364 - protein, 16 aa, Homo Sapiens
APPAHGVTSAPDTRPA

SEQ ID NO: 68365 - protein, 16 aa, Homo Sapiens
PPAHGVTSAPDTRPAP

SEQ ID NO: 68366 - protein, 16 aa, Homo Sapiens
PAHGVTSAPDTRPAPG

SEQ ID NO: 68367 - protein, 16 aa, Homo Sapiens
AHGVTSAPDTRPAPGS

SEQ ID NO: 68368 - protein, 16 aa, Homo Sapiens
HGVTSAPDTRPAPGST

SEQ ID NO: 68369 - protein, 16 aa, Homo Sapiens
GVTSAPDTRPAPGSTA

SEQ ID NO: 68370 - protein, 16 aa, Homo Sapiens
VTSAPDTRPAPGSTAP

SEQ ID NO: 68371 - protein, 16 aa, Homo Sapiens
TSAPDTRPAPGSTAPP

SEQ ID NO: 68372 - protein, 16 aa, Homo Sapiens
SAPDTRPAPGSTAPPA

SEQ ID NO: 68373 - protein, 16 aa, Homo Sapiens
APDTRPAPGSTAPPAH

SEQ ID NO: 68374 - protein, 16 aa, Homo Sapiens
PDTRPAPGSTAPPAHG

SEQ ID NO: 68375 - protein, 16 aa, Homo Sapiens
DTRPAPGSTAPPAHGV

SEQ ID NO: 68376 - protein, 16 aa, Homo Sapiens
TRPAPGSTAPPAHGVT

SEQ ID NO: 68377 - protein, 16 aa, Homo Sapiens
RPAPGSTAPPAHGVTS

SEQ ID NO: 68378 - protein, 16 aa, Homo Sapiens
PAPGSTAPPAHGVTSA

SEQ ID NO: 68379 - protein, 16 aa, Homo Sapiens
APGSTAPPAHGVTSAP

SEQ ID NO: 68380 - protein, 16 aa, Homo Sapiens
PGSTAPPAHGVTSAPD

SEQ ID NO: 68381 - protein, 16 aa, Homo Sapiens
GSTAPPAHGVTSAPDT

SEQ ID NO: 68382 - protein, 16 aa, Homo Sapiens
STAPPAHGVTSAPDTR

SEQ ID NO: 68383 - protein, 16 aa, Homo Sapiens
TAPPAHGVTSAPDTRP

SEQ ID NO: 68384 - protein, 16 aa, Homo Sapiens
APPAHGVTSAPDTRPA

SEQ ID NO: 68385 - protein, 16 aa, Homo Sapiens
PPAHGVTSAPDTRPAP

SEQ ID NO: 68386 - protein, 16 aa, Homo Sapiens
PAHGVTSAPDTRPAPG

SEQ ID NO: 68387 - protein, 16 aa, Homo Sapiens
AHGVTSAPDTRPAPGS

SEQ ID NO: 68388 - protein, 16 aa, Homo Sapiens
HGVTSAPDTRPAPGST

SEQ ID NO: 68389 - protein, 16 aa, Homo Sapiens
GVTSAPDTRPAPGSTA

SEQ ID NO: 68390 - protein, 16 aa, Homo Sapiens
VTSAPDTRPAPGSTAP

SEQ ID NO: 68391 - protein, 16 aa, Homo Sapiens
TSAPDTRPAPGSTAPP

SEQ ID NO: 68392 - protein, 16 aa, Homo Sapiens
SAPDTRPAPGSTAPPA

SEQ ID NO: 68393 - protein, 16 aa, Homo Sapiens
APDTRPAPGSTAPPAH

SEQ ID NO: 68394 - protein, 16 aa, Homo Sapiens
PDTRPAPGSTAPPAHG

SEQ ID NO: 68395 - protein, 16 aa, Homo Sapiens
DTRPAPGSTAPPAHGV

SEQ ID NO: 68396 - protein, 16 aa, Homo Sapiens
TRPAPGSTAPPAHGVT

SEQ ID NO: 68397 - protein, 16 aa, Homo Sapiens
RPAPGSTAPPAHGVTS

SEQ ID NO: 68398 - protein, 16 aa, Homo Sapiens
PAPGSTAPPAHGVTSA

SEQ ID NO: 68399 - protein, 16 aa, Homo Sapiens
APGSTAPPAHGVTSAP

SEQ ID NO: 68400 - protein, 16 aa, Homo Sapiens
PGSTAPPAHGVTSAPD

SEQ ID NO: 68401 - protein, 16 aa, Homo Sapiens
GSTAPPAHGVTSAPDT

SEQ ID NO: 68402 - protein, 16 aa, Homo Sapiens
STAPPAHGVTSAPDTR

SEQ ID NO: 68403 - protein, 16 aa, Homo Sapiens
TAPPAHGVTSAPDTRP

SEQ ID NO: 68404 - protein, 16 aa, Homo Sapiens
APPAHGVTSAPDTRPA

SEQ ID NO: 68405 - protein, 16 aa, Homo Sapiens
PPAHGVTSAPDTRPAP

SEQ ID NO: 68406 - protein, 16 aa, Homo Sapiens
PAHGVTSAPDTRPAPG

SEQ ID NO: 68407 - protein, 16 aa, Homo Sapiens
AHGVTSAPDTRPAPGS

SEQ ID NO: 68408 - protein, 16 aa, Homo Sapiens
HGVTSAPDTRPAPGST

SEQ ID NO: 68409 - protein, 16 aa, Homo Sapiens
GVTSAPDTRPAPGSTA

SEQ ID NO: 68410 - protein, 16 aa, Homo Sapiens
VTSAPDTRPAPGSTAP

SEQ ID NO: 68411 - protein, 16 aa, Homo Sapiens
TSAPDTRPAPGSTAPP

SEQ ID NO: 68412 - protein, 16 aa, Homo Sapiens
SAPDTRPAPGSTAPPA

SEQ ID NO: 68413 - protein, 16 aa, Homo Sapiens
APDTRPAPGSTAPPAH

SEQ ID NO: 68414 - protein, 16 aa, Homo Sapiens
PDTRPAPGSTAPPAHG

SEQ ID NO: 68415 - protein, 16 aa, Homo Sapiens
DTRPAPGSTAPPAHGV

SEQ ID NO: 68416 - protein, 16 aa, Homo Sapiens
TRPAPGSTAPPAHGVT

SEQ ID NO: 68417 - protein, 16 aa, Homo Sapiens
RPAPGSTAPPAHGVTS

SEQ ID NO: 68418 - protein, 16 aa, Homo Sapiens
PAPGSTAPPAHGVTSA

SEQ ID NO: 68419 - protein, 16 aa, Homo Sapiens
APGSTAPPAHGVTSAP

SEQ ID NO: 68420 - protein, 16 aa, Homo Sapiens
PGSTAPPAHGVTSAPD

SEQ ID NO: 68421 - protein, 16 aa, Homo Sapiens
GSTAPPAHGVTSAPDT

SEQ ID NO: 68422 - protein, 16 aa, Homo Sapiens
STAPPAHGVTSAPDTR

SEQ ID NO: 68423 - protein, 16 aa, Homo Sapiens
TAPPAHGVTSAPDTRP

SEQ ID NO: 68424 - protein, 16 aa, Homo Sapiens
APPAHGVTSAPDTRPA

SEQ ID NO: 68425 - protein, 16 aa, Homo Sapiens
PPAHGVTSAPDTRPAP

SEQ ID NO: 68426 - protein, 16 aa, Homo Sapiens
PAHGVTSAPDTRPAPG

SEQ ID NO: 68427 - protein, 16 aa, Homo Sapiens
AHGVTSAPDTRPAPGS

SEQ ID NO: 68428 - protein, 16 aa, Homo Sapiens
HGVTSAPDTRPAPGST

SEQ ID NO: 68429 - protein, 16 aa, Homo Sapiens
GVTSAPDTRPAPGSTA

SEQ ID NO: 68430 - protein, 16 aa, Homo Sapiens
VTSAPDTRPAPGSTAP

SEQ ID NO: 68431 - protein, 16 aa, Homo Sapiens
TSAPDTRPAPGSTAPP

SEQ ID NO: 68432 - protein, 16 aa, Homo Sapiens
SAPDTRPAPGSTAPPA

SEQ ID NO: 68433 - protein, 16 aa, Homo Sapiens
APDTRPAPGSTAPPAH

SEQ ID NO: 68434 - protein, 16 aa, Homo Sapiens
PDTRPAPGSTAPPAHG

SEQ ID NO: 68435 - protein, 16 aa, Homo Sapiens
DTRPAPGSTAPPAHGV

SEQ ID NO: 68436 - protein, 16 aa, Homo Sapiens
TRPAPGSTAPPAHGVT

SEQ ID NO: 68437 - protein, 16 aa, Homo Sapiens
RPAPGSTAPPAHGVTS

SEQ ID NO: 68438 - protein, 16 aa, Homo Sapiens
PAPGSTAPPAHGVTSA

SEQ ID NO: 68439 - protein, 16 aa, Homo Sapiens
APGSTAPPAHGVTSAP

SEQ ID NO: 68440 - protein, 16 aa, Homo Sapiens
PGSTAPPAHGVTSAPD

SEQ ID NO: 68441 - protein, 16 aa, Homo Sapiens
GSTAPPAHGVTSAPDT

SEQ ID NO: 68442 - protein, 16 aa, Homo Sapiens
STAPPAHGVTSAPDTR

SEQ ID NO: 68443 - protein, 16 aa, Homo Sapiens
TAPPAHGVTSAPDTRP

SEQ ID NO: 68444 - protein, 16 aa, Homo Sapiens
APPAHGVTSAPDTRPA

SEQ ID NO: 68445 - protein, 16 aa, Homo Sapiens
PPAHGVTSAPDTRPAP

SEQ ID NO: 68446 - protein, 16 aa, Homo Sapiens
PAHGVTSAPDTRPAPG

SEQ ID NO: 68447 - protein, 16 aa, Homo Sapiens
AHGVTSAPDTRPAPGS

SEQ ID NO: 68448 - protein, 16 aa, Homo Sapiens
HGVTSAPDTRPAPGST

SEQ ID NO: 68449 - protein, 16 aa, Homo Sapiens
GVTSAPDTRPAPGSTA

SEQ ID NO: 68450 - protein, 16 aa, Homo Sapiens
VTSAPDTRPAPGSTAP

SEQ ID NO: 68451 - protein, 16 aa, Homo Sapiens
TSAPDTRPAPGSTAPP

SEQ ID NO: 68452 - protein, 16 aa, Homo Sapiens
SAPDTRPAPGSTAPPA

SEQ ID NO: 68453 - protein, 16 aa, Homo Sapiens
APDTRPAPGSTAPPAH

SEQ ID NO: 68454 - protein, 16 aa, Homo Sapiens
PDTRPAPGSTAPPAHG

SEQ ID NO: 68455 - protein, 16 aa, Homo Sapiens
DTRPAPGSTAPPAHGV

SEQ ID NO: 68456 - protein, 16 aa, Homo Sapiens
TRPAPGSTAPPAHGVT

SEQ ID NO: 68457 - protein, 16 aa, Homo Sapiens
RPAPGSTAPPAHGVTS

SEQ ID NO: 68458 - protein, 16 aa, Homo Sapiens
PAPGSTAPPAHGVTSA

SEQ ID NO: 68459 - protein, 16 aa, Homo Sapiens
APGSTAPPAHGVTSAP

SEQ ID NO: 68460 - protein, 16 aa, Homo Sapiens
PGSTAPPAHGVTSAPD

SEQ ID NO: 68461 - protein, 16 aa, Homo Sapiens
GSTAPPAHGVTSAPDT

SEQ ID NO: 68462 - protein, 16 aa, Homo Sapiens
STAPPAHGVTSAPDTR

SEQ ID NO: 68463 - protein, 16 aa, Homo Sapiens
TAPPAHGVTSAPDTRP

SEQ ID NO: 68464 - protein, 16 aa, Homo Sapiens
APPAHGVTSAPDTRPA

SEQ ID NO: 68465 - protein, 16 aa, Homo Sapiens
PPAHGVTSAPDTRPAP

SEQ ID NO: 68466 - protein, 16 aa, Homo Sapiens
PAHGVTSAPDTRPAPG

SEQ ID NO: 68467 - protein, 16 aa, Homo Sapiens
AHGVTSAPDTRPAPGS

SEQ ID NO: 68468 - protein, 16 aa, Homo Sapiens
HGVTSAPDTRPAPGST

SEQ ID NO: 68469 - protein, 16 aa, Homo Sapiens
GVTSAPDTRPAPGSTA

SEQ ID NO: 68470 - protein, 16 aa, Homo Sapiens
VTSAPDTRPAPGSTAP

SEQ ID NO: 68471 - protein, 16 aa, Homo Sapiens
TSAPDTRPAPGSTAPP

SEQ ID NO: 68472 - protein, 16 aa, Homo Sapiens
SAPDTRPAPGSTAPPA

SEQ ID NO: 68473 - protein, 16 aa, Homo Sapiens
APDTRPAPGSTAPPAH

SEQ ID NO: 68474 - protein, 16 aa, Homo Sapiens
PDTRPAPGSTAPPAHG

SEQ ID NO: 68475 - protein, 16 aa, Homo Sapiens
DTRPAPGSTAPPAHGV

SEQ ID NO: 68476 - protein, 16 aa, Homo Sapiens
TRPAPGSTAPPAHGVT

SEQ ID NO: 68477 - protein, 16 aa, Homo Sapiens
RPAPGSTAPPAHGVTS

SEQ ID NO: 68478 - protein, 16 aa, Homo Sapiens
PAPGSTAPPAHGVTSA

SEQ ID NO: 68479 - protein, 16 aa, Homo Sapiens
APGSTAPPAHGVTSAP

SEQ ID NO: 68480 - protein, 16 aa, Homo Sapiens
PGSTAPPAHGVTSAPD

SEQ ID NO: 68481 - protein, 16 aa, Homo Sapiens
GSTAPPAHGVTSAPDT

SEQ ID NO: 68482 - protein, 16 aa, Homo Sapiens
STAPPAHGVTSAPDTR

SEQ ID NO: 68483 - protein, 16 aa, Homo Sapiens
TAPPAHGVTSAPDTRP

SEQ ID NO: 68484 - protein, 16 aa, Homo Sapiens
APPAHGVTSAPDTRPA

SEQ ID NO: 68485 - protein, 16 aa, Homo Sapiens
PPAHGVTSAPDTRPAP

SEQ ID NO: 68486 - protein, 16 aa, Homo Sapiens
PAHGVTSAPDTRPAPG

SEQ ID NO: 68487 - protein, 16 aa, Homo Sapiens
AHGVTSAPDTRPAPGS

SEQ ID NO: 68488 - protein, 16 aa, Homo Sapiens
HGVTSAPDTRPAPGST

SEQ ID NO: 68489 - protein, 16 aa, Homo Sapiens
GVTSAPDTRPAPGSTA

SEQ ID NO: 68490 - protein, 16 aa, Homo Sapiens
VTSAPDTRPAPGSTAP

SEQ ID NO: 68491 - protein, 16 aa, Homo Sapiens
TSAPDTRPAPGSTAPP

SEQ ID NO: 68492 - protein, 16 aa, Homo Sapiens
SAPDTRPAPGSTAPPA

SEQ ID NO: 68493 - protein, 16 aa, Homo Sapiens
APDTRPAPGSTAPPAH

SEQ ID NO: 68494 - protein, 16 aa, Homo Sapiens
PDTRPAPGSTAPPAHG

SEQ ID NO: 68495 - protein, 16 aa, Homo Sapiens
DTRPAPGSTAPPAHGV

SEQ ID NO: 68496 - protein, 16 aa, Homo Sapiens
TRPAPGSTAPPAHGVT

SEQ ID NO: 68497 - protein, 16 aa, Homo Sapiens
RPAPGSTAPPAHGVTS

SEQ ID NO: 68498 - protein, 16 aa, Homo Sapiens
PAPGSTAPPAHGVTSA

SEQ ID NO: 68499 - protein, 16 aa, Homo Sapiens
APGSTAPPAHGVTSAP

SEQ ID NO: 68500 - protein, 16 aa, Homo Sapiens
PGSTAPPAHGVTSAPD

SEQ ID NO: 68501 - protein, 16 aa, Homo Sapiens
GSTAPPAHGVTSAPDT

SEQ ID NO: 68502 - protein, 16 aa, Homo Sapiens
STAPPAHGVTSAPDTR

SEQ ID NO: 68503 - protein, 16 aa, Homo Sapiens
TAPPAHGVTSAPDTRP

SEQ ID NO: 68504 - protein, 16 aa, Homo Sapiens
APPAHGVTSAPDTRPA

SEQ ID NO: 68505 - protein, 16 aa, Homo Sapiens
PPAHGVTSAPDTRPAP

SEQ ID NO: 68506 - protein, 16 aa, Homo Sapiens
PAHGVTSAPDTRPAPG

SEQ ID NO: 68507 - protein, 16 aa, Homo Sapiens
AHGVTSAPDTRPAPGS

SEQ ID NO: 68508 - protein, 16 aa, Homo Sapiens
HGVTSAPDTRPAPGST

SEQ ID NO: 68509 - protein, 16 aa, Homo Sapiens
GVTSAPDTRPAPGSTA

SEQ ID NO: 68510 - protein, 16 aa, Homo Sapiens
VTSAPDTRPAPGSTAP

SEQ ID NO: 68511 - protein, 16 aa, Homo Sapiens
TSAPDTRPAPGSTAPP

SEQ ID NO: 68512 - protein, 16 aa, Homo Sapiens
SAPDTRPAPGSTAPPA

SEQ ID NO: 68513 - protein, 16 aa, Homo Sapiens
APDTRPAPGSTAPPAH

SEQ ID NO: 68514 - protein, 16 aa, Homo Sapiens
PDTRPAPGSTAPPAHG

SEQ ID NO: 68515 - protein, 16 aa, Homo Sapiens
DTRPAPGSTAPPAHGV

SEQ ID NO: 68516 - protein, 16 aa, Homo Sapiens
TRPAPGSTAPPAHGVT

SEQ ID NO: 68517 - protein, 16 aa, Homo Sapiens
RPAPGSTAPPAHGVTS

SEQ ID NO: 68518 - protein, 16 aa, Homo Sapiens
PAPGSTAPPAHGVTSA

SEQ ID NO: 68519 - protein, 16 aa, Homo Sapiens
APGSTAPPAHGVTSAP

SEQ ID NO: 68520 - protein, 16 aa, Homo Sapiens
PGSTAPPAHGVTSAPD

SEQ ID NO: 68521 - protein, 16 aa, Homo Sapiens
GSTAPPAHGVTSAPDT

SEQ ID NO: 68522 - protein, 16 aa, Homo Sapiens
STAPPAHGVTSAPDTR

SEQ ID NO: 68523 - protein, 16 aa, Homo Sapiens
TAPPAHGVTSAPDTRP

SEQ ID NO: 68524 - protein, 16 aa, Homo Sapiens
APPAHGVTSAPDTRPA

SEQ ID NO: 68525 - protein, 16 aa, Homo Sapiens
PPAHGVTSAPDTRPAP

SEQ ID NO: 68526 - protein, 16 aa, Homo Sapiens
PAHGVTSAPDTRPAPG

SEQ ID NO: 68527 - protein, 16 aa, Homo Sapiens
AHGVTSAPDTRPAPGS

SEQ ID NO: 68528 - protein, 16 aa, Homo Sapiens
HGVTSAPDTRPAPGST

SEQ ID NO: 68529 - protein, 16 aa, Homo Sapiens
GVTSAPDTRPAPGSTA

SEQ ID NO: 68530 - protein, 16 aa, Homo Sapiens
VTSAPDTRPAPGSTAP

SEQ ID NO: 68531 - protein, 16 aa, Homo Sapiens
TSAPDTRPAPGSTAPP

SEQ ID NO: 68532 - protein, 16 aa, Homo Sapiens
SAPDTRPAPGSTAPPA

SEQ ID NO: 68533 - protein, 16 aa, Homo Sapiens
APDTRPAPGSTAPPAH

SEQ ID NO: 68534 - protein, 16 aa, Homo Sapiens
PDTRPAPGSTAPPAHG

SEQ ID NO: 68535 - protein, 16 aa, Homo Sapiens
DTRPAPGSTAPPAHGV

SEQ ID NO: 68536 - protein, 16 aa, Homo Sapiens
TRPAPGSTAPPAHGVT

SEQ ID NO: 68537 - protein, 16 aa, Homo Sapiens
RPAPGSTAPPAHGVTS

SEQ ID NO: 68538 - protein, 16 aa, Homo Sapiens
PAPGSTAPPAHGVTSA

SEQ ID NO: 68539 - protein, 16 aa, Homo Sapiens
APGSTAPPAHGVTSAP

SEQ ID NO: 68540 - protein, 16 aa, Homo Sapiens
PGSTAPPAHGVTSAPD

SEQ ID NO: 68541 - protein, 16 aa, Homo Sapiens
GSTAPPAHGVTSAPDT

SEQ ID NO: 68542 - protein, 16 aa, Homo Sapiens
STAPPAHGVTSAPDTR

SEQ ID NO: 68543 - protein, 16 aa, Homo Sapiens
TAPPAHGVTSAPDTRP

SEQ ID NO: 68544 - protein, 16 aa, Homo Sapiens
APPAHGVTSAPDTRPA

SEQ ID NO: 68545 - protein, 16 aa, Homo Sapiens
PPAHGVTSAPDTRPAP

SEQ ID NO: 68546 - protein, 16 aa, Homo Sapiens
PAHGVTSAPDTRPAPG

SEQ ID NO: 68547 - protein, 16 aa, Homo Sapiens
AHGVTSAPDTRPAPGS

SEQ ID NO: 68548 - protein, 16 aa, Homo Sapiens
HGVTSAPDTRPAPGST

SEQ ID NO: 68549 - protein, 16 aa, Homo Sapiens
GVTSAPDTRPAPGSTA

SEQ ID NO: 68550 - protein, 16 aa, Homo Sapiens
VTSAPDTRPAPGSTAP

SEQ ID NO: 68551 - protein, 16 aa, Homo Sapiens
TSAPDTRPAPGSTAPP

SEQ ID NO: 68552 - protein, 16 aa, Homo Sapiens
SAPDTRPAPGSTAPPA

SEQ ID NO: 68553 - protein, 16 aa, Homo Sapiens
APDTRPAPGSTAPPAH

SEQ ID NO: 68554 - protein, 16 aa, Homo Sapiens
PDTRPAPGSTAPPAHG

SEQ ID NO: 68555 - protein, 16 aa, Homo Sapiens
DTRPAPGSTAPPAHGV

SEQ ID NO: 68556 - protein, 16 aa, Homo Sapiens
TRPAPGSTAPPAHGVT

SEQ ID NO: 68557 - protein, 16 aa, Homo Sapiens
RPAPGSTAPPAHGVTS

SEQ ID NO: 68558 - protein, 16 aa, Homo Sapiens
PAPGSTAPPAHGVTSA

SEQ ID NO: 68559 - protein, 16 aa, Homo Sapiens
APGSTAPPAHGVTSAP

SEQ ID NO: 68560 - protein, 16 aa, Homo Sapiens
PGSTAPPAHGVTSAPD

SEQ ID NO: 68561 - protein, 16 aa, Homo Sapiens
GSTAPPAHGVTSAPDT

SEQ ID NO: 68562 - protein, 16 aa, Homo Sapiens
STAPPAHGVTSAPDTR

SEQ ID NO: 68563 - protein, 16 aa, Homo Sapiens
TAPPAHGVTSAPDTRP

SEQ ID NO: 68564 - protein, 16 aa, Homo Sapiens
APPAHGVTSAPDTRPA

SEQ ID NO: 68565 - protein, 16 aa, Homo Sapiens
PPAHGVTSAPDTRPAP

SEQ ID NO: 68566 - protein, 16 aa, Homo Sapiens
PAHGVTSAPDTRPAPG

SEQ ID NO: 68567 - protein, 16 aa, Homo Sapiens
AHGVTSAPDTRPAPGS

SEQ ID NO: 68568 - protein, 16 aa, Homo Sapiens
HGVTSAPDTRPAPGST

SEQ ID NO: 68569 - protein, 16 aa, Homo Sapiens
GVTSAPDTRPAPGSTA

SEQ ID NO: 68570 - protein, 16 aa, Homo Sapiens
VTSAPDTRPAPGSTAP

SEQ ID NO: 68571 - protein, 16 aa, Homo Sapiens
TSAPDTRPAPGSTAPP

SEQ ID NO: 68572 - protein, 16 aa, Homo Sapiens
SAPDTRPAPGSTAPPA

SEQ ID NO: 68573 - protein, 16 aa, Homo Sapiens
APDTRPAPGSTAPPAH

SEQ ID NO: 68574 - protein, 16 aa, Homo Sapiens
PDTRPAPGSTAPPAHG

SEQ ID NO: 68575 - protein, 16 aa, Homo Sapiens
DTRPAPGSTAPPAHGV

SEQ ID NO: 68576 - protein, 16 aa, Homo Sapiens
TRPAPGSTAPPAHGVT

SEQ ID NO: 68577 - protein, 16 aa, Homo Sapiens
RPAPGSTAPPAHGVTS

SEQ ID NO: 68578 - protein, 16 aa, Homo Sapiens
PAPGSTAPPAHGVTSA

SEQ ID NO: 68579 - protein, 16 aa, Homo Sapiens
APGSTAPPAHGVTSAP

SEQ ID NO: 68580 - protein, 16 aa, Homo Sapiens
PGSTAPPAHGVTSAPD

SEQ ID NO: 68581 - protein, 16 aa, Homo Sapiens
GSTAPPAHGVTSAPDT

SEQ ID NO: 68582 - protein, 16 aa, Homo Sapiens
STAPPAHGVTSAPDTR

SEQ ID NO: 68583 - protein, 16 aa, Homo Sapiens
TAPPAHGVTSAPDTRP

SEQ ID NO: 68584 - protein, 16 aa, Homo Sapiens
APPAHGVTSAPDTRPA

SEQ ID NO: 68585 - protein, 16 aa, Homo Sapiens
PPAHGVTSAPDTRPAP

SEQ ID NO: 68586 - protein, 16 aa, Homo Sapiens
PAHGVTSAPDTRPAPG

SEQ ID NO: 68587 - protein, 16 aa, Homo Sapiens
AHGVTSAPDTRPAPGS

SEQ ID NO: 68588 - protein, 16 aa, Homo Sapiens
HGVTSAPDTRPAPGST

SEQ ID NO: 68589 - protein, 16 aa, Homo Sapiens
GVTSAPDTRPAPGSTA

SEQ ID NO: 68590 - protein, 16 aa, Homo Sapiens
VTSAPDTRPAPGSTAP

SEQ ID NO: 68591 - protein, 16 aa, Homo Sapiens
TSAPDTRPAPGSTAPP

SEQ ID NO: 68592 - protein, 16 aa, Homo Sapiens
SAPDTRPAPGSTAPPA

SEQ ID NO: 68593 - protein, 16 aa, Homo Sapiens
APDTRPAPGSTAPPAH

SEQ ID NO: 68594 - protein, 16 aa, Homo Sapiens
PDTRPAPGSTAPPAHG

SEQ ID NO: 68595 - protein, 16 aa, Homo Sapiens
DTRPAPGSTAPPAHGV

SEQ ID NO: 68596 - protein, 16 aa, Homo Sapiens
TRPAPGSTAPPAHGVT

SEQ ID NO: 68597 - protein, 16 aa, Homo Sapiens
RPAPGSTAPPAHGVTS

SEQ ID NO: 68598 - protein, 16 aa, Homo Sapiens
PAPGSTAPPAHGVTSA

SEQ ID NO: 68599 - protein, 16 aa, Homo Sapiens
APGSTAPPAHGVTSAP

SEQ ID NO: 68600 - protein, 16 aa, Homo Sapiens
PGSTAPPAHGVTSAPD

SEQ ID NO: 68601 - protein, 16 aa, Homo Sapiens
GSTAPPAHGVTSAPDT

SEQ ID NO: 68602 - protein, 16 aa, Homo Sapiens
STAPPAHGVTSAPDTR

SEQ ID NO: 68603 - protein, 16 aa, Homo Sapiens
TAPPAHGVTSAPDTRP

SEQ ID NO: 68604 - protein, 16 aa, Homo Sapiens
APPAHGVTSAPDTRPA

SEQ ID NO: 68605 - protein, 16 aa, Homo Sapiens
PPAHGVTSAPDTRPAP

SEQ ID NO: 68606 - protein, 16 aa, Homo Sapiens
PAHGVTSAPDTRPAPG

SEQ ID NO: 68607 - protein, 16 aa, Homo Sapiens
AHGVTSAPDTRPAPGS

SEQ ID NO: 68608 - protein, 16 aa, Homo Sapiens
HGVTSAPDTRPAPGST

SEQ ID NO: 68609 - protein, 16 aa, Homo Sapiens
GVTSAPDTRPAPGSTA

SEQ ID NO: 68610 - protein, 16 aa, Homo Sapiens
VTSAPDTRPAPGSTAP

SEQ ID NO: 68611 - protein, 16 aa, Homo Sapiens
TSAPDTRPAPGSTAPP

SEQ ID NO: 68612 - protein, 16 aa, Homo Sapiens
SAPDTRPAPGSTAPPA

SEQ ID NO: 68613 - protein, 16 aa, Homo Sapiens
APDTRPAPGSTAPPAH

SEQ ID NO: 68614 - protein, 16 aa, Homo Sapiens
PDTRPAPGSTAPPAHG

SEQ ID NO: 68615 - protein, 16 aa, Homo Sapiens
DTRPAPGSTAPPAHGV

SEQ ID NO: 68616 - protein, 16 aa, Homo Sapiens
TRPAPGSTAPPAHGVT

SEQ ID NO: 68617 - protein, 16 aa, Homo Sapiens
RPAPGSTAPPAHGVTS

SEQ ID NO: 68618 - protein, 16 aa, Homo Sapiens
PAPGSTAPPAHGVTSA

SEQ ID NO: 68619 - protein, 16 aa, Homo Sapiens
APGSTAPPAHGVTSAP

SEQ ID NO: 68620 - protein, 16 aa, Homo Sapiens
PGSTAPPAHGVTSAPD

SEQ ID NO: 68621 - protein, 16 aa, Homo Sapiens
GSTAPPAHGVTSAPDT

SEQ ID NO: 68622 - protein, 16 aa, Homo Sapiens
STAPPAHGVTSAPDTR

SEQ ID NO: 68623 - protein, 16 aa, Homo Sapiens
TAPPAHGVTSAPDTRP

SEQ ID NO: 68624 - protein, 16 aa, Homo Sapiens
APPAHGVTSAPDTRPA

SEQ ID NO: 68625 - protein, 16 aa, Homo Sapiens
PPAHGVTSAPDTRPAP

SEQ ID NO: 68626 - protein, 16 aa, Homo Sapiens
PAHGVTSAPDTRPAPG

SEQ ID NO: 68627 - protein, 16 aa, Homo Sapiens
AHGVTSAPDTRPAPGS

SEQ ID NO: 68628 - protein, 16 aa, Homo Sapiens
HGVTSAPDTRPAPGST

SEQ ID NO: 68629 - protein, 16 aa, Homo Sapiens
GVTSAPDTRPAPGSTA

SEQ ID NO: 68630 - protein, 16 aa, Homo Sapiens
VTSAPDTRPAPGSTAP

SEQ ID NO: 68631 - protein, 16 aa, Homo Sapiens
TSAPDTRPAPGSTAPP

SEQ ID NO: 68632 - protein, 16 aa, Homo Sapiens
SAPDTRPAPGSTAPPA

SEQ ID NO: 68633 - protein, 16 aa, Homo Sapiens
APDTRPAPGSTAPPAH

SEQ ID NO: 68634 - protein, 16 aa, Homo Sapiens
PDTRPAPGSTAPPAHG

SEQ ID NO: 68635 - protein, 16 aa, Homo Sapiens
DTRPAPGSTAPPAHGV

SEQ ID NO: 68636 - protein, 16 aa, Homo Sapiens
TRPAPGSTAPPAHGVT

SEQ ID NO: 68637 - protein, 16 aa, Homo Sapiens
RPAPGSTAPPAHGVTS

SEQ ID NO: 68638 - protein, 16 aa, Homo Sapiens
PAPGSTAPPAHGVTSA

SEQ ID NO: 68639 - protein, 16 aa, Homo Sapiens
APGSTAPPAHGVTSAP

SEQ ID NO: 68640 - protein, 16 aa, Homo Sapiens
PGSTAPPAHGVTSAPD

SEQ ID NO: 68641 - protein, 16 aa, Homo Sapiens
GSTAPPAHGVTSAPDT

SEQ ID NO: 68642 - protein, 16 aa, Homo Sapiens
STAPPAHGVTSAPDTR

SEQ ID NO: 68643 - protein, 16 aa, Homo Sapiens
TAPPAHGVTSAPDTRP

SEQ ID NO: 68644 - protein, 16 aa, Homo Sapiens
APPAHGVTSAPDTRPA

SEQ ID NO: 68645 - protein, 16 aa, Homo Sapiens
PPAHGVTSAPDTRPAP

SEQ ID NO: 68646 - protein, 16 aa, Homo Sapiens
PAHGVTSAPDTRPAPG

SEQ ID NO: 68647 - protein, 16 aa, Homo Sapiens
AHGVTSAPDTRPAPGS

SEQ ID NO: 68648 - protein, 16 aa, Homo Sapiens
HGVTSAPDTRPAPGST

SEQ ID NO: 68649 - protein, 16 aa, Homo Sapiens
GVTSAPDTRPAPGSTA

SEQ ID NO: 68650 - protein, 16 aa, Homo Sapiens
VTSAPDTRPAPGSTAP

SEQ ID NO: 68651 - protein, 16 aa, Homo Sapiens
TSAPDTRPAPGSTAPP

SEQ ID NO: 68652 - protein, 16 aa, Homo Sapiens
SAPDTRPAPGSTAPPA

SEQ ID NO: 68653 - protein, 16 aa, Homo Sapiens
APDTRPAPGSTAPPAH

SEQ ID NO: 68654 - protein, 16 aa, Homo Sapiens
PDTRPAPGSTAPPAHG

SEQ ID NO: 68655 - protein, 16 aa, Homo Sapiens
DTRPAPGSTAPPAHGV

SEQ ID NO: 68656 - protein, 16 aa, Homo Sapiens
TRPAPGSTAPPAHGVT

SEQ ID NO: 68657 - protein, 16 aa, Homo Sapiens
RPAPGSTAPPAHGVTS

SEQ ID NO: 68658 - protein, 16 aa, Homo Sapiens
PAPGSTAPPAHGVTSA

SEQ ID NO: 68659 - protein, 16 aa, Homo Sapiens
APGSTAPPAHGVTSAP

SEQ ID NO: 68660 - protein, 16 aa, Homo Sapiens
PGSTAPPAHGVTSAPD

SEQ ID NO: 68661 - protein, 16 aa, Homo Sapiens
GSTAPPAHGVTSAPDT

SEQ ID NO: 68662 - protein, 16 aa, Homo Sapiens
STAPPAHGVTSAPDTR

SEQ ID NO: 68663 - protein, 16 aa, Homo Sapiens
TAPPAHGVTSAPDTRP

SEQ ID NO: 68664 - protein, 16 aa, Homo Sapiens
APPAHGVTSAPDTRPA

SEQ ID NO: 68665 - protein, 16 aa, Homo Sapiens
PPAHGVTSAPDTRPAP

SEQ ID NO: 68666 - protein, 16 aa, Homo Sapiens
PAHGVTSAPDTRPAPG

SEQ ID NO: 68667 - protein, 16 aa, Homo Sapiens
AHGVTSAPDTRPAPGS

SEQ ID NO: 68668 - protein, 16 aa, Homo Sapiens
HGVTSAPDTRPAPGST

SEQ ID NO: 68669 - protein, 16 aa, Homo Sapiens
GVTSAPDTRPAPGSTA

SEQ ID NO: 68670 - protein, 16 aa, Homo Sapiens
VTSAPDTRPAPGSTAP

SEQ ID NO: 68671 - protein, 16 aa, Homo Sapiens
TSAPDTRPAPGSTAPP

SEQ ID NO: 68672 - protein, 16 aa, Homo Sapiens
SAPDTRPAPGSTAPPA

SEQ ID NO: 68673 - protein, 16 aa, Homo Sapiens
APDTRPAPGSTAPPAH

SEQ ID NO: 68674 - protein, 16 aa, Homo Sapiens
PDTRPAPGSTAPPAHG

SEQ ID NO: 68675 - protein, 16 aa, Homo Sapiens
DTRPAPGSTAPPAHGV

SEQ ID NO: 68676 - protein, 16 aa, Homo Sapiens
TRPAPGSTAPPAHGVT

SEQ ID NO: 68677 - protein, 16 aa, Homo Sapiens
RPAPGSTAPPAHGVTS

SEQ ID NO: 68678 - protein, 16 aa, Homo Sapiens
PAPGSTAPPAHGVTSA

SEQ ID NO: 68679 - protein, 16 aa, Homo Sapiens
APGSTAPPAHGVTSAP

SEQ ID NO: 68680 - protein, 16 aa, Homo Sapiens
PGSTAPPAHGVTSAPD

SEQ ID NO: 68681 - protein, 16 aa, Homo Sapiens
GSTAPPAHGVTSAPDT

SEQ ID NO: 68682 - protein, 16 aa, Homo Sapiens
STAPPAHGVTSAPDTR

SEQ ID NO: 68683 - protein, 16 aa, Homo Sapiens
TAPPAHGVTSAPDTRP

SEQ ID NO: 68684 - protein, 16 aa, Homo Sapiens
APPAHGVTSAPDTRPA

SEQ ID NO: 68685 - protein, 16 aa, Homo Sapiens
PPAHGVTSAPDTRPAP

SEQ ID NO: 68686 - protein, 16 aa, Homo Sapiens
PAHGVTSAPDTRPAPG

SEQ ID NO: 68687 - protein, 16 aa, Homo Sapiens
AHGVTSAPDTRPAPGS

SEQ ID NO: 68688 - protein, 16 aa, Homo Sapiens
HGVTSAPDTRPAPGST

SEQ ID NO: 68689 - protein, 16 aa, Homo Sapiens
GVTSAPDTRPAPGSTA

SEQ ID NO: 68690 - protein, 16 aa, Homo Sapiens
VTSAPDTRPAPGSTAP

SEQ ID NO: 68691 - protein, 16 aa, Homo Sapiens
TSAPDTRPAPGSTAPP

SEQ ID NO: 68692 - protein, 16 aa, Homo Sapiens
SAPDTRPAPGSTAPPA

SEQ ID NO: 68693 - protein, 16 aa, Homo Sapiens
APDTRPAPGSTAPPAH

SEQ ID NO: 68694 - protein, 16 aa, Homo Sapiens
PDTRPAPGSTAPPAHG

SEQ ID NO: 68695 - protein, 16 aa, Homo Sapiens
DTRPAPGSTAPPAHGV

SEQ ID NO: 68696 - protein, 16 aa, Homo Sapiens
TRPAPGSTAPPAHGVT

SEQ ID NO: 68697 - protein, 16 aa, Homo Sapiens
RPAPGSTAPPAHGVTS

SEQ ID NO: 68698 - protein, 16 aa, Homo Sapiens
PAPGSTAPPAHGVTSA

SEQ ID NO: 68699 - protein, 16 aa, Homo Sapiens
APGSTAPPAHGVTSAP

SEQ ID NO: 68700 - protein, 16 aa, Homo Sapiens
PGSTAPPAHGVTSAPD

SEQ ID NO: 68701 - protein, 16 aa, Homo Sapiens
GSTAPPAHGVTSAPDT

SEQ ID NO: 68702 - protein, 16 aa, Homo Sapiens
STAPPAHGVTSAPDTR

SEQ ID NO: 68703 - protein, 16 aa, Homo Sapiens
TAPPAHGVTSAPDTRP

SEQ ID NO: 68704 - protein, 16 aa, Homo Sapiens
APPAHGVTSAPDTRPA

SEQ ID NO: 68705 - protein, 16 aa, Homo Sapiens
PPAHGVTSAPDTRPAP

SEQ ID NO: 68706 - protein, 16 aa, Homo Sapiens
PAHGVTSAPDTRPAPG

SEQ ID NO: 68707 - protein, 16 aa, Homo Sapiens
AHGVTSAPDTRPAPGS

SEQ ID NO: 68708 - protein, 16 aa, Homo Sapiens
HGVTSAPDTRPAPGST

SEQ ID NO: 68709 - protein, 16 aa, Homo Sapiens
GVTSAPDTRPAPGSTA

SEQ ID NO: 68710 - protein, 16 aa, Homo Sapiens
VTSAPDTRPAPGSTAP

SEQ ID NO: 68711 - protein, 16 aa, Homo Sapiens
TSAPDTRPAPGSTAPP

SEQ ID NO: 68712 - protein, 16 aa, Homo Sapiens
SAPDTRPAPGSTAPPA

SEQ ID NO: 68713 - protein, 16 aa, Homo Sapiens
APDTRPAPGSTAPPAH

SEQ ID NO: 68714 - protein, 16 aa, Homo Sapiens
PDTRPAPGSTAPPAHG

SEQ ID NO: 68715 - protein, 16 aa, Homo Sapiens
DTRPAPGSTAPPAHGV

SEQ ID NO: 68716 - protein, 16 aa, Homo Sapiens
TRPAPGSTAPPAHGVT

SEQ ID NO: 68717 - protein, 16 aa, Homo Sapiens
RPAPGSTAPPAHGVTS

SEQ ID NO: 68718 - protein, 16 aa, Homo Sapiens
PAPGSTAPPAHGVTSA

SEQ ID NO: 68719 - protein, 16 aa, Homo Sapiens
APGSTAPPAHGVTSAP

SEQ ID NO: 68720 - protein, 16 aa, Homo Sapiens
PGSTAPPAHGVTSAPD

SEQ ID NO: 68721 - protein, 16 aa, Homo Sapiens
GSTAPPAHGVTSAPDT

SEQ ID NO: 68722 - protein, 16 aa, Homo Sapiens
STAPPAHGVTSAPDTR

SEQ ID NO: 68723 - protein, 16 aa, Homo Sapiens
TAPPAHGVTSAPDTRP

SEQ ID NO: 68724 - protein, 16 aa, Homo Sapiens
APPAHGVTSAPDTRPA

SEQ ID NO: 68725 - protein, 16 aa, Homo Sapiens
PPAHGVTSAPDTRPAP

SEQ ID NO: 68726 - protein, 16 aa, Homo Sapiens
PAHGVTSAPDTRPAPG

SEQ ID NO: 68727 - protein, 16 aa, Homo Sapiens
AHGVTSAPDTRPAPGS

SEQ ID NO: 68728 - protein, 16 aa, Homo Sapiens
HGVTSAPDTRPAPGST

SEQ ID NO: 68729 - protein, 16 aa, Homo Sapiens
GVTSAPDTRPAPGSTA

SEQ ID NO: 68730 - protein, 16 aa, Homo Sapiens
VTSAPDTRPAPGSTAP

SEQ ID NO: 68731 - protein, 16 aa, Homo Sapiens
TSAPDTRPAPGSTAPP

SEQ ID NO: 68732 - protein, 16 aa, Homo Sapiens
SAPDTRPAPGSTAPPA

SEQ ID NO: 68733 - protein, 16 aa, Homo Sapiens
APDTRPAPGSTAPPAH

SEQ ID NO: 68734 - protein, 16 aa, Homo Sapiens
PDTRPAPGSTAPPAHG

SEQ ID NO: 68735 - protein, 16 aa, Homo Sapiens
DTRPAPGSTAPPAHGV

SEQ ID NO: 68736 - protein, 16 aa, Homo Sapiens
TRPAPGSTAPPAHGVT

SEQ ID NO: 68737 - protein, 16 aa, Homo Sapiens
RPAPGSTAPPAHGVTS

SEQ ID NO: 68738 - protein, 16 aa, Homo Sapiens
PAPGSTAPPAHGVTSA

SEQ ID NO: 68739 - protein, 16 aa, Homo Sapiens
APGSTAPPAHGVTSAP

SEQ ID NO: 68740 - protein, 16 aa, Homo Sapiens
PGSTAPPAHGVTSAPD

SEQ ID NO: 68741 - protein, 16 aa, Homo Sapiens
GSTAPPAHGVTSAPDT

SEQ ID NO: 68742 - protein, 16 aa, Homo Sapiens
STAPPAHGVTSAPDTR

SEQ ID NO: 68743 - protein, 16 aa, Homo Sapiens
TAPPAHGVTSAPDTRP

SEQ ID NO: 68744 - protein, 16 aa, Homo Sapiens
APPAHGVTSAPDTRPA

SEQ ID NO: 68745 - protein, 16 aa, Homo Sapiens
PPAHGVTSAPDTRPAP

SEQ ID NO: 68746 - protein, 16 aa, Homo Sapiens
PAHGVTSAPDTRPAPG

SEQ ID NO: 68747 - protein, 16 aa, Homo Sapiens
AHGVTSAPDTRPAPGS

SEQ ID NO: 68748 - protein, 16 aa, Homo Sapiens
HGVTSAPDTRPAPGST

SEQ ID NO: 68749 - protein, 16 aa, Homo Sapiens
GVTSAPDTRPAPGSTA

SEQ ID NO: 68750 - protein, 16 aa, Homo Sapiens
VTSAPDTRPAPGSTAP

SEQ ID NO: 68751 - protein, 16 aa, Homo Sapiens
TSAPDTRPAPGSTAPP

SEQ ID NO: 68752 - protein, 16 aa, Homo Sapiens
SAPDTRPAPGSTAPPA

SEQ ID NO: 68753 - protein, 16 aa, Homo Sapiens
APDTRPAPGSTAPPAH

SEQ ID NO: 68754 - protein, 16 aa, Homo Sapiens
PDTRPAPGSTAPPAHG

SEQ ID NO: 68755 - protein, 16 aa, Homo Sapiens
DTRPAPGSTAPPAHGV

SEQ ID NO: 68756 - protein, 16 aa, Homo Sapiens
TRPAPGSTAPPAHGVT

SEQ ID NO: 68757 - protein, 16 aa, Homo Sapiens
RPAPGSTAPPAHGVTS

SEQ ID NO: 68758 - protein, 16 aa, Homo Sapiens
PAPGSTAPPAHGVTSA

SEQ ID NO: 68759 - protein, 16 aa, Homo Sapiens
APGSTAPPAHGVTSAP

SEQ ID NO: 68760 - protein, 16 aa, Homo Sapiens
PGSTAPPAHGVTSAPD

SEQ ID NO: 68761 - protein, 16 aa, Homo Sapiens
GSTAPPAHGVTSAPDT

SEQ ID NO: 68762 - protein, 16 aa, Homo Sapiens
STAPPAHGVTSAPDTR

SEQ ID NO: 68763 - protein, 16 aa, Homo Sapiens
TAPPAHGVTSAPDTRP

SEQ ID NO: 68764 - protein, 16 aa, Homo Sapiens
APPAHGVTSAPDTRPA

SEQ ID NO: 68765 - protein, 16 aa, Homo Sapiens
PPAHGVTSAPDTRPAP

SEQ ID NO: 68766 - protein, 16 aa, Homo Sapiens
PAHGVTSAPDTRPAPG

SEQ ID NO: 68767 - protein, 16 aa, Homo Sapiens
AHGVTSAPDTRPAPGS

SEQ ID NO: 68768 - protein, 16 aa, Homo Sapiens
HGVTSAPDTRPAPGST

SEQ ID NO: 68769 - protein, 16 aa, Homo Sapiens
GVTSAPDTRPAPGSTA

SEQ ID NO: 68770 - protein, 16 aa, Homo Sapiens
VTSAPDTRPAPGSTAP

SEQ ID NO: 68771 - protein, 16 aa, Homo Sapiens
TSAPDTRPAPGSTAPP

SEQ ID NO: 68772 - protein, 16 aa, Homo Sapiens
SAPDTRPAPGSTAPPA

SEQ ID NO: 68773 - protein, 16 aa, Homo Sapiens
APDTRPAPGSTAPPAH

SEQ ID NO: 68774 - protein, 16 aa, Homo Sapiens
PDTRPAPGSTAPPAHG

SEQ ID NO: 68775 - protein, 16 aa, Homo Sapiens
DTRPAPGSTAPPAHGV

SEQ ID NO: 68776 - protein, 16 aa, Homo Sapiens
TRPAPGSTAPPAHGVT

SEQ ID NO: 68777 - protein, 16 aa, Homo Sapiens
RPAPGSTAPPAHGVTS

SEQ ID NO: 68778 - protein, 16 aa, Homo Sapiens
PAPGSTAPPAHGVTSA

SEQ ID NO: 68779 - protein, 16 aa, Homo Sapiens
APGSTAPPAHGVTSAP

SEQ ID NO: 68780 - protein, 16 aa, Homo Sapiens
PGSTAPPAHGVTSAPD

SEQ ID NO: 68781 - protein, 16 aa, Homo Sapiens
GSTAPPAHGVTSAPDT

SEQ ID NO: 68782 - protein, 16 aa, Homo Sapiens
STAPPAHGVTSAPDTR

SEQ ID NO: 68783 - protein, 16 aa, Homo Sapiens
TAPPAHGVTSAPDTRP

SEQ ID NO: 68784 - protein, 16 aa, Homo Sapiens
APPAHGVTSAPDTRPA

SEQ ID NO: 68785 - protein, 16 aa, Homo Sapiens
PPAHGVTSAPDTRPAP

SEQ ID NO: 68786 - protein, 16 aa, Homo Sapiens
PAHGVTSAPDTRPAPG

SEQ ID NO: 68787 - protein, 16 aa, Homo Sapiens
AHGVTSAPDTRPAPGS

SEQ ID NO: 68788 - protein, 16 aa, Homo Sapiens
HGVTSAPDTRPAPGST

SEQ ID NO: 68789 - protein, 16 aa, Homo Sapiens
GVTSAPDTRPAPGSTA

SEQ ID NO: 68790 - protein, 16 aa, Homo Sapiens
VTSAPDTRPAPGSTAP

SEQ ID NO: 68791 - protein, 16 aa, Homo Sapiens
TSAPDTRPAPGSTAPP

SEQ ID NO: 68792 - protein, 16 aa, Homo Sapiens
SAPDTRPAPGSTAPPA

SEQ ID NO: 68793 - protein, 16 aa, Homo Sapiens
APDTRPAPGSTAPPAH

SEQ ID NO: 68794 - protein, 16 aa, Homo Sapiens
PDTRPAPGSTAPPAHG

SEQ ID NO: 68795 - protein, 16 aa, Homo Sapiens
DTRPAPGSTAPPAHGV

SEQ ID NO: 68796 - protein, 16 aa, Homo Sapiens
TRPAPGSTAPPAHGVT

SEQ ID NO: 68797 - protein, 16 aa, Homo Sapiens
RPAPGSTAPPAHGVTS

SEQ ID NO: 68798 - protein, 16 aa, Homo Sapiens
PAPGSTAPPAHGVTSA

SEQ ID NO: 68799 - protein, 16 aa, Homo Sapiens
APGSTAPPAHGVTSAP

SEQ ID NO: 68800 - protein, 16 aa, Homo Sapiens
PGSTAPPAHGVTSAPD

SEQ ID NO: 68801 - protein, 16 aa, Homo Sapiens
GSTAPPAHGVTSAPDT

SEQ ID NO: 68802 - protein, 16 aa, Homo Sapiens
STAPPAHGVTSAPDTR

SEQ ID NO: 68803 - protein, 16 aa, Homo Sapiens
TAPPAHGVTSAPDTRP

SEQ ID NO: 68804 - protein, 16 aa, Homo Sapiens
APPAHGVTSAPDTRPA

SEQ ID NO: 68805 - protein, 16 aa, Homo Sapiens
PPAHGVTSAPDTRPAP

SEQ ID NO: 68806 - protein, 16 aa, Homo Sapiens
PAHGVTSAPDTRPAPG

SEQ ID NO: 68807 - protein, 16 aa, Homo Sapiens
AHGVTSAPDTRPAPGS

SEQ ID NO: 68808 - protein, 16 aa, Homo Sapiens
HGVTSAPDTRPAPGST

SEQ ID NO: 68809 - protein, 16 aa, Homo Sapiens
GVTSAPDTRPAPGSTA

SEQ ID NO: 68810 - protein, 16 aa, Homo Sapiens
VTSAPDTRPAPGSTAP

SEQ ID NO: 68811 - protein, 16 aa, Homo Sapiens
TSAPDTRPAPGSTAPP

SEQ ID NO: 68812 - protein, 16 aa, Homo Sapiens
SAPDTRPAPGSTAPPA

SEQ ID NO: 68813 - protein, 16 aa, Homo Sapiens
APDTRPAPGSTAPPAH

SEQ ID NO: 68814 - protein, 16 aa, Homo Sapiens
PDTRPAPGSTAPPAHG

SEQ ID NO: 68815 - protein, 16 aa, Homo Sapiens
DTRPAPGSTAPPAHGV

SEQ ID NO: 68816 - protein, 16 aa, Homo Sapiens
TRPAPGSTAPPAHGVT

SEQ ID NO: 68817 - protein, 16 aa, Homo Sapiens
RPAPGSTAPPAHGVTS

SEQ ID NO: 68818 - protein, 16 aa, Homo Sapiens
PAPGSTAPPAHGVTSA

SEQ ID NO: 68819 - protein, 16 aa, Homo Sapiens
APGSTAPPAHGVTSAP

SEQ ID NO: 68820 - protein, 16 aa, Homo Sapiens
PGSTAPPAHGVTSAPD

SEQ ID NO: 68821 - protein, 16 aa, Homo Sapiens
GSTAPPAHGVTSAPDN

SEQ ID NO: 68822 - protein, 16 aa, Homo Sapiens
STAPPAHGVTSAPDNR

SEQ ID NO: 68823 - protein, 16 aa, Homo Sapiens
TAPPAHGVTSAPDNRP

SEQ ID NO: 68824 - protein, 16 aa, Homo Sapiens
APPAHGVTSAPDNRPA

SEQ ID NO: 68825 - protein, 16 aa, Homo Sapiens
PPAHGVTSAPDNRPAL

SEQ ID NO: 68826 - protein, 16 aa, Homo Sapiens
PAHGVTSAPDNRPALG

SEQ ID NO: 68827 - protein, 16 aa, Homo Sapiens
AHGVTSAPDNRPALGS

SEQ ID NO: 68828 - protein, 16 aa, Homo Sapiens
HGVTSAPDNRPALGST

SEQ ID NO: 68829 - protein, 16 aa, Homo Sapiens
GVTSAPDNRPALGSTA

SEQ ID NO: 68830 - protein, 16 aa, Homo Sapiens
VTSAPDNRPALGSTAP

SEQ ID NO: 68831 - protein, 16 aa, Homo Sapiens
TSAPDNRPALGSTAPP

SEQ ID NO: 68832 - protein, 16 aa, Homo Sapiens
SAPDNRPALGSTAPPV

SEQ ID NO: 68833 - protein, 16 aa, Homo Sapiens
APDNRPALGSTAPPVH

SEQ ID NO: 68834 - protein, 16 aa, Homo Sapiens
PDNRPALGSTAPPVHN

SEQ ID NO: 68835 - protein, 16 aa, Homo Sapiens
DNRPALGSTAPPVHNV

SEQ ID NO: 68836 - protein, 16 aa, Homo Sapiens
NRPALGSTAPPVHNVT

SEQ ID NO: 68837 - protein, 16 aa, Homo Sapiens
RPALGSTAPPVHNVTS

SEQ ID NO: 68838 - protein, 16 aa, Homo Sapiens
PALGSTAPPVHNVTSA

SEQ ID NO: 68839 - protein, 16 aa, Homo Sapiens
ALGSTAPPVHNVTSAS

SEQ ID NO: 68840 - protein, 16 aa, Homo Sapiens
LGSTAPPVHNVTSASG

SEQ ID NO: 68841 - protein, 16 aa, Homo Sapiens
GSTAPPVHNVTSASGS

SEQ ID NO: 68842 - protein, 16 aa, Homo Sapiens
STAPPVHNVTSASGSA

SEQ ID NO: 68843 - protein, 16 aa, Homo Sapiens
TAPPVHNVTSASGSAS

SEQ ID NO: 68844 - protein, 16 aa, Homo Sapiens
APPVHNVTSASGSASG

SEQ ID NO: 68845 - protein, 16 aa, Homo Sapiens
PPVHNVTSASGSASGS

SEQ ID NO: 68846 - protein, 16 aa, Homo Sapiens
PVHNVTSASGSASGSA

SEQ ID NO: 68847 - protein, 16 aa, Homo Sapiens
VHNVTSASGSASGSAS

SEQ ID NO: 68848 - protein, 16 aa, Homo Sapiens
HNVTSASGSASGSAST

SEQ ID NO: 68849 - protein, 16 aa, Homo Sapiens
NVTSASGSASGSASTL

SEQ ID NO: 68850 - protein, 16 aa, Homo Sapiens
VTSASGSASGSASTLV

SEQ ID NO: 68851 - protein, 16 aa, Homo Sapiens
TSASGSASGSASTLVH

SEQ ID NO: 68852 - protein, 16 aa, Homo Sapiens
SASGSASGSASTLVHN

SEQ ID NO: 68853 - protein, 16 aa, Homo Sapiens
ASGSASGSASTLVHNG

SEQ ID NO: 68854 - protein, 16 aa, Homo Sapiens
SGSASGSASTLVHNGT

SEQ ID NO: 68855 - protein, 16 aa, Homo Sapiens
GSASGSASTLVHNGTS

SEQ ID NO: 68856 - protein, 16 aa, Homo Sapiens
SASGSASTLVHNGTSA

SEQ ID NO: 68857 - protein, 16 aa, Homo Sapiens
ASGSASTLVHNGTSAR

SEQ ID NO: 68858 - protein, 16 aa, Homo Sapiens
SGSASTLVHNGTSARA

SEQ ID NO: 68859 - protein, 16 aa, Homo Sapiens
GSASTLVHNGTSARAT

SEQ ID NO: 68860 - protein, 16 aa, Homo Sapiens
SASTLVHNGTSARATT

SEQ ID NO: 68861 - protein, 16 aa, Homo Sapiens
ASTLVHNGTSARATTT

SEQ ID NO: 68862 - protein, 16 aa, Homo Sapiens
STLVHNGTSARATTTP

SEQ ID NO: 68863 - protein, 16 aa, Homo Sapiens
TLVHNGTSARATTTPA

SEQ ID NO: 68864 - protein, 16 aa, Homo Sapiens
LVHNGTSARATTTPAS

SEQ ID NO: 68865 - protein, 16 aa, Homo Sapiens
VHNGTSARATTTPASK

SEQ ID NO: 68866 - protein, 16 aa, Homo Sapiens
HNGTSARATTTPASKS

SEQ ID NO: 68867 - protein, 16 aa, Homo Sapiens
NGTSARATTTPASKST

SEQ ID NO: 68868 - protein, 16 aa, Homo Sapiens
GTSARATTTPASKSTP

SEQ ID NO: 68869 - protein, 16 aa, Homo Sapiens
TSARATTTPASKSTPF

SEQ ID NO: 68870 - protein, 16 aa, Homo Sapiens
SARATTTPASKSTPFS

SEQ ID NO: 68871 - protein, 16 aa, Homo Sapiens
ARATTTPASKSTPFSI

SEQ ID NO: 68872 - protein, 16 aa, Homo Sapiens
RATTTPASKSTPFSIP

SEQ ID NO: 68873 - protein, 16 aa, Homo Sapiens
ATTTPASKSTPFSIPS

SEQ ID NO: 68874 - protein, 16 aa, Homo Sapiens
TTTPASKSTPFSIPSH

SEQ ID NO: 68875 - protein, 16 aa, Homo Sapiens
TTPASKSTPFSIPSHH

SEQ ID NO: 68876 - protein, 16 aa, Homo Sapiens
TPASKSTPFSIPSHHS

SEQ ID NO: 68877 - protein, 16 aa, Homo Sapiens
PASKSTPFSIPSHHSD

SEQ ID NO: 68878 - protein, 16 aa, Homo Sapiens
ASKSTPFSIPSHHSDT

SEQ ID NO: 68879 - protein, 16 aa, Homo Sapiens
SKSTPFSIPSHHSDTP

SEQ ID NO: 68880 - protein, 16 aa, Homo Sapiens
KSTPFSIPSHHSDTPT

SEQ ID NO: 68881 - protein, 16 aa, Homo Sapiens
STPFSIPSHHSDTPTT

SEQ ID NO: 68882 - protein, 16 aa, Homo Sapiens
TPFSIPSHHSDTPTTL

SEQ ID NO: 68883 - protein, 16 aa, Homo Sapiens
PFSIPSHHSDTPTTLA

SEQ ID NO: 68884 - protein, 16 aa, Homo Sapiens
FSIPSHHSDTPTTLAS

SEQ ID NO: 68885 - protein, 16 aa, Homo Sapiens
SIPSHHSDTPTTLASH

SEQ ID NO: 68886 - protein, 16 aa, Homo Sapiens
IPSHHSDTPTTLASHS

SEQ ID NO: 68887 - protein, 16 aa, Homo Sapiens
PSHHSDTPTTLASHST

SEQ ID NO: 68888 - protein, 16 aa, Homo Sapiens
SHHSDTPTTLASHSTK

SEQ ID NO: 68889 - protein, 16 aa, Homo Sapiens
HHSDTPTTLASHSTKT

SEQ ID NO: 68890 - protein, 16 aa, Homo Sapiens
HSDTPTTLASHSTKTD

SEQ ID NO: 68891 - protein, 16 aa, Homo Sapiens
SDTPTTLASHSTKTDA

SEQ ID NO: 68892 - protein, 16 aa, Homo Sapiens
DTPTTLASHSTKTDAS

SEQ ID NO: 68893 - protein, 16 aa, Homo Sapiens
TPTTLASHSTKTDASS

SEQ ID NO: 68894 - protein, 16 aa, Homo Sapiens
PTTLASHSTKTDASST

SEQ ID NO: 68895 - protein, 16 aa, Homo Sapiens
TTLASHSTKTDASSTH

SEQ ID NO: 68896 - protein, 16 aa, Homo Sapiens
TLASHSTKTDASSTHH

SEQ ID NO: 68897 - protein, 16 aa, Homo Sapiens
LASHSTKTDASSTHHS

SEQ ID NO: 68898 - protein, 16 aa, Homo Sapiens
ASHSTKTDASSTHHSS

SEQ ID NO: 68899 - protein, 16 aa, Homo Sapiens
SHSTKTDASSTHHSSV

SEQ ID NO: 68900 - protein, 16 aa, Homo Sapiens
HSTKTDASSTHHSSVP

SEQ ID NO: 68901 - protein, 16 aa, Homo Sapiens
STKTDASSTHHSSVPP

SEQ ID NO: 68902 - protein, 16 aa, Homo Sapiens
TKTDASSTHHSSVPPL

SEQ ID NO: 68903 - protein, 16 aa, Homo Sapiens
KTDASSTHHSSVPPLT

SEQ ID NO: 68904 - protein, 16 aa, Homo Sapiens
TDASSTHHSSVPPLTS

SEQ ID NO: 68905 - protein, 16 aa, Homo Sapiens
DASSTHHSSVPPLTSS

SEQ ID NO: 68906 - protein, 16 aa, Homo Sapiens
ASSTHHSSVPPLTSSN

SEQ ID NO: 68907 - protein, 16 aa, Homo Sapiens
SSTHHSSVPPLTSSNH

SEQ ID NO: 68908 - protein, 16 aa, Homo Sapiens
STHHSSVPPLTSSNHS

SEQ ID NO: 68909 - protein, 16 aa, Homo Sapiens
THHSSVPPLTSSNHST

SEQ ID NO: 68910 - protein, 16 aa, Homo Sapiens
HHSSVPPLTSSNHSTS

SEQ ID NO: 68911 - protein, 16 aa, Homo Sapiens
HSSVPPLTSSNHSTSP

SEQ ID NO: 68912 - protein, 16 aa, Homo Sapiens
SSVPPLTSSNHSTSPQ

SEQ ID NO: 68913 - protein, 16 aa, Homo Sapiens
SVPPLTSSNHSTSPQL

SEQ ID NO: 68914 - protein, 16 aa, Homo Sapiens
VPPLTSSNHSTSPQLS

SEQ ID NO: 68915 - protein, 16 aa, Homo Sapiens
PPLTSSNHSTSPQLST

SEQ ID NO: 68916 - protein, 16 aa, Homo Sapiens
PLTSSNHSTSPQLSTG

SEQ ID NO: 68917 - protein, 16 aa, Homo Sapiens
LTSSNHSTSPQLSTGV

SEQ ID NO: 68918 - protein, 16 aa, Homo Sapiens
TSSNHSTSPQLSTGVS

SEQ ID NO: 68919 - protein, 16 aa, Homo Sapiens
SSNHSTSPQLSTGVSF

SEQ ID NO: 68920 - protein, 16 aa, Homo Sapiens
SNHSTSPQLSTGVSFF

SEQ ID NO: 68921 - protein, 16 aa, Homo Sapiens
NHSTSPQLSTGVSFFF

SEQ ID NO: 68922 - protein, 16 aa, Homo Sapiens
HSTSPQLSTGVSFFFL

SEQ ID NO: 68923 - protein, 16 aa, Homo Sapiens
STSPQLSTGVSFFFLS

SEQ ID NO: 68924 - protein, 16 aa, Homo Sapiens
TSPQLSTGVSFFFLSF

SEQ ID NO: 68925 - protein, 16 aa, Homo Sapiens
SPQLSTGVSFFFLSFH

SEQ ID NO: 68926 - protein, 16 aa, Homo Sapiens
PQLSTGVSFFFLSFHI

SEQ ID NO: 68927 - protein, 16 aa, Homo Sapiens
QLSTGVSFFFLSFHIS

SEQ ID NO: 68928 - protein, 16 aa, Homo Sapiens
LSTGVSFFFLSFHISN

SEQ ID NO: 68929 - protein, 16 aa, Homo Sapiens
STGVSFFFLSFHISNL

SEQ ID NO: 68930 - protein, 16 aa, Homo Sapiens
TGVSFFFLSFHISNLQ

SEQ ID NO: 68931 - protein, 16 aa, Homo Sapiens
GVSFFFLSFHISNLQF

SEQ ID NO: 68932 - protein, 16 aa, Homo Sapiens
VSFFFLSFHISNLQFN

SEQ ID NO: 68933 - protein, 16 aa, Homo Sapiens
SFFFLSFHISNLQFNS

SEQ ID NO: 68934 - protein, 16 aa, Homo Sapiens
FFFLSFHISNLQFNSS

SEQ ID NO: 68935 - protein, 16 aa, Homo Sapiens
FFLSFHISNLQFNSSL

SEQ ID NO: 68936 - protein, 16 aa, Homo Sapiens
FLSFHISNLQFNSSLE

SEQ ID NO: 68937 - protein, 16 aa, Homo Sapiens
LSFHISNLQFNSSLED

SEQ ID NO: 68938 - protein, 16 aa, Homo Sapiens
SFHISNLQFNSSLEDP

SEQ ID NO: 68939 - protein, 16 aa, Homo Sapiens
FHISNLQFNSSLEDPS

SEQ ID NO: 68940 - protein, 16 aa, Homo Sapiens
HISNLQFNSSLEDPST

SEQ ID NO: 68941 - protein, 16 aa, Homo Sapiens
ISNLQFNSSLEDPSTD

SEQ ID NO: 68942 - protein, 16 aa, Homo Sapiens
SNLQFNSSLEDPSTDY

SEQ ID NO: 68943 - protein, 16 aa, Homo Sapiens
NLQFNSSLEDPSTDYY

SEQ ID NO: 68944 - protein, 16 aa, Homo Sapiens
LQFNSSLEDPSTDYYQ

SEQ ID NO: 68945 - protein, 16 aa, Homo Sapiens
QFNSSLEDPSTDYYQE

SEQ ID NO: 68946 - protein, 16 aa, Homo Sapiens
FNSSLEDPSTDYYQEL

SEQ ID NO: 68947 - protein, 16 aa, Homo Sapiens
NSSLEDPSTDYYQELQ

SEQ ID NO: 68948 - protein, 16 aa, Homo Sapiens
SSLEDPSTDYYQELQR

SEQ ID NO: 68949 - protein, 16 aa, Homo Sapiens
SLEDPSTDYYQELQRD

SEQ ID NO: 68950 - protein, 16 aa, Homo Sapiens
LEDPSTDYYQELQRDI

SEQ ID NO: 68951 - protein, 16 aa, Homo Sapiens
EDPSTDYYQELQRDIS

SEQ ID NO: 68952 - protein, 16 aa, Homo Sapiens
DPSTDYYQELQRDISE

SEQ ID NO: 68953 - protein, 16 aa, Homo Sapiens
PSTDYYQELQRDISEM

SEQ ID NO: 68954 - protein, 16 aa, Homo Sapiens
STDYYQELQRDISEMF

SEQ ID NO: 68955 - protein, 16 aa, Homo Sapiens
TDYYQELQRDISEMFL

SEQ ID NO: 68956 - protein, 16 aa, Homo Sapiens
DYYQELQRDISEMFLQ

SEQ ID NO: 68957 - protein, 16 aa, Homo Sapiens
YYQELQRDISEMFLQI

SEQ ID NO: 68958 - protein, 16 aa, Homo Sapiens
YQELQRDISEMFLQIY

SEQ ID NO: 68959 - protein, 16 aa, Homo Sapiens
QELQRDISEMFLQIYK

SEQ ID NO: 68960 - protein, 16 aa, Homo Sapiens
ELQRDISEMFLQIYKQ

SEQ ID NO: 68961 - protein, 16 aa, Homo Sapiens
LQRDISEMFLQIYKQG

SEQ ID NO: 68962 - protein, 16 aa, Homo Sapiens
QRDISEMFLQIYKQGG

SEQ ID NO: 68963 - protein, 16 aa, Homo Sapiens
RDISEMFLQIYKQGGF

SEQ ID NO: 68964 - protein, 16 aa, Homo Sapiens
DISEMFLQIYKQGGFL

SEQ ID NO: 68965 - protein, 16 aa, Homo Sapiens
ISEMFLQIYKQGGFLG

SEQ ID NO: 68966 - protein, 16 aa, Homo Sapiens
SEMFLQIYKQGGFLGL

SEQ ID NO: 68967 - protein, 16 aa, Homo Sapiens
EMFLQIYKQGGFLGLS

SEQ ID NO: 68968 - protein, 16 aa, Homo Sapiens
MFLQIYKQGGFLGLSN

SEQ ID NO: 68969 - protein, 16 aa, Homo Sapiens
FLQIYKQGGFLGLSNI

SEQ ID NO: 68970 - protein, 16 aa, Homo Sapiens
LQIYKQGGFLGLSNIK

SEQ ID NO: 68971 - protein, 16 aa, Homo Sapiens
QIYKQGGFLGLSNIKF

SEQ ID NO: 68972 - protein, 16 aa, Homo Sapiens
IYKQGGFLGLSNIKFR

SEQ ID NO: 68973 - protein, 16 aa, Homo Sapiens
YKQGGFLGLSNIKFRP

SEQ ID NO: 68974 - protein, 16 aa, Homo Sapiens
KQGGFLGLSNIKFRPG

SEQ ID NO: 68975 - protein, 16 aa, Homo Sapiens
QGGFLGLSNIKFRPGS

SEQ ID NO: 68976 - protein, 16 aa, Homo Sapiens
GGFLGLSNIKFRPGSV

SEQ ID NO: 68977 - protein, 16 aa, Homo Sapiens
GFLGLSNIKFRPGSVV

SEQ ID NO: 68978 - protein, 16 aa, Homo Sapiens
FLGLSNIKFRPGSVVV

SEQ ID NO: 68979 - protein, 16 aa, Homo Sapiens
LGLSNIKFRPGSVVVQ

SEQ ID NO: 68980 - protein, 16 aa, Homo Sapiens
GLSNIKFRPGSVVVQL

SEQ ID NO: 68981 - protein, 16 aa, Homo Sapiens
LSNIKFRPGSVVVQLT

SEQ ID NO: 68982 - protein, 16 aa, Homo Sapiens
SNIKFRPGSVVVQLTL

SEQ ID NO: 68983 - protein, 16 aa, Homo Sapiens
NIKFRPGSVVVQLTLA

SEQ ID NO: 68984 - protein, 16 aa, Homo Sapiens
IKFRPGSVVVQLTLAF

SEQ ID NO: 68985 - protein, 16 aa, Homo Sapiens
KFRPGSVVVQLTLAFR

SEQ ID NO: 68986 - protein, 16 aa, Homo Sapiens
FRPGSVVVQLTLAFRE

SEQ ID NO: 68987 - protein, 16 aa, Homo Sapiens
RPGSVVVQLTLAFREG

SEQ ID NO: 68988 - protein, 16 aa, Homo Sapiens
PGSVVVQLTLAFREGT

SEQ ID NO: 68989 - protein, 16 aa, Homo Sapiens
GSVVVQLTLAFREGTI

SEQ ID NO: 68990 - protein, 16 aa, Homo Sapiens
SVVVQLTLAFREGTIN

SEQ ID NO: 68991 - protein, 16 aa, Homo Sapiens
VVVQLTLAFREGTINV

SEQ ID NO: 68992 - protein, 16 aa, Homo Sapiens
VVQLTLAFREGTINVH

SEQ ID NO: 68993 - protein, 16 aa, Homo Sapiens
VQLTLAFREGTINVHD

SEQ ID NO: 68994 - protein, 16 aa, Homo Sapiens
QLTLAFREGTINVHDV

SEQ ID NO: 68995 - protein, 16 aa, Homo Sapiens
LTLAFREGTINVHDVE

SEQ ID NO: 68996 - protein, 16 aa, Homo Sapiens
TLAFREGTINVHDVET

SEQ ID NO: 68997 - protein, 16 aa, Homo Sapiens
LAFREGTINVHDVETQ

SEQ ID NO: 68998 - protein, 16 aa, Homo Sapiens
AFREGTINVHDVETQF

SEQ ID NO: 68999 - protein, 16 aa, Homo Sapiens
FREGTINVHDVETQFN

SEQ ID NO: 69000 - protein, 16 aa, Homo Sapiens
REGTINVHDVETQFNQ

SEQ ID NO: 69001 - protein, 16 aa, Homo Sapiens
EGTINVHDVETQFNQY

SEQ ID NO: 69002 - protein, 16 aa, Homo Sapiens
GTINVHDVETQFNQYK

SEQ ID NO: 69003 - protein, 16 aa, Homo Sapiens
TINVHDVETQFNQYKT

SEQ ID NO: 69004 - protein, 16 aa, Homo Sapiens
INVHDVETQFNQYKTE

SEQ ID NO: 69005 - protein, 16 aa, Homo Sapiens
NVHDVETQFNQYKTEA

SEQ ID NO: 69006 - protein, 16 aa, Homo Sapiens
VHDVETQFNQYKTEAA

SEQ ID NO: 69007 - protein, 16 aa, Homo Sapiens
HDVETQFNQYKTEAAS

SEQ ID NO: 69008 - protein, 16 aa, Homo Sapiens
DVETQFNQYKTEAASR

SEQ ID NO: 69009 - protein, 16 aa, Homo Sapiens
VETQFNQYKTEAASRY

SEQ ID NO: 69010 - protein, 16 aa, Homo Sapiens
ETQFNQYKTEAASRYN

SEQ ID NO: 69011 - protein, 16 aa, Homo Sapiens
TQFNQYKTEAASRYNL

SEQ ID NO: 69012 - protein, 16 aa, Homo Sapiens
QFNQYKTEAASRYNLT

SEQ ID NO: 69013 - protein, 16 aa, Homo Sapiens
FNQYKTEAASRYNLTI

SEQ ID NO: 69014 - protein, 16 aa, Homo Sapiens
NQYKTEAASRYNLTIS

SEQ ID NO: 69015 - protein, 16 aa, Homo Sapiens
QYKTEAASRYNLTISD

SEQ ID NO: 69016 - protein, 16 aa, Homo Sapiens
YKTEAASRYNLTISDV

SEQ ID NO: 69017 - protein, 16 aa, Homo Sapiens
KTEAASRYNLTISDVS

SEQ ID NO: 69018 - protein, 16 aa, Homo Sapiens
TEAASRYNLTISDVSV

SEQ ID NO: 69019 - protein, 16 aa, Homo Sapiens
EAASRYNLTISDVSVS

SEQ ID NO: 69020 - protein, 16 aa, Homo Sapiens
AASRYNLTISDVSVSD

SEQ ID NO: 69021 - protein, 16 aa, Homo Sapiens
ASRYNLTISDVSVSDV

SEQ ID NO: 69022 - protein, 16 aa, Homo Sapiens
SRYNLTISDVSVSDVP

SEQ ID NO: 69023 - protein, 16 aa, Homo Sapiens
RYNLTISDVSVSDVPF

SEQ ID NO: 69024 - protein, 16 aa, Homo Sapiens
YNLTISDVSVSDVPFP

SEQ ID NO: 69025 - protein, 16 aa, Homo Sapiens
NLTISDVSVSDVPFPF

SEQ ID NO: 69026 - protein, 16 aa, Homo Sapiens
LTISDVSVSDVPFPFS

SEQ ID NO: 69027 - protein, 16 aa, Homo Sapiens
TISDVSVSDVPFPFSA

SEQ ID NO: 69028 - protein, 16 aa, Homo Sapiens
ISDVSVSDVPFPFSAQ

SEQ ID NO: 69029 - protein, 16 aa, Homo Sapiens
SDVSVSDVPFPFSAQS

SEQ ID NO: 69030 - protein, 16 aa, Homo Sapiens
DVSVSDVPFPFSAQSG

SEQ ID NO: 69031 - protein, 16 aa, Homo Sapiens
VSVSDVPFPFSAQSGA

SEQ ID NO: 69032 - protein, 16 aa, Homo Sapiens
SVSDVPFPFSAQSGAG

SEQ ID NO: 69033 - protein, 16 aa, Homo Sapiens
VSDVPFPFSAQSGAGV

SEQ ID NO: 69034 - protein, 16 aa, Homo Sapiens
SDVPFPFSAQSGAGVP

SEQ ID NO: 69035 - protein, 16 aa, Homo Sapiens
DVPFPFSAQSGAGVPG

SEQ ID NO: 69036 - protein, 16 aa, Homo Sapiens
VPFPFSAQSGAGVPGW

SEQ ID NO: 69037 - protein, 16 aa, Homo Sapiens
PFPFSAQSGAGVPGWG

SEQ ID NO: 69038 - protein, 16 aa, Homo Sapiens
FPFSAQSGAGVPGWGI

SEQ ID NO: 69039 - protein, 16 aa, Homo Sapiens
PFSAQSGAGVPGWGIA

SEQ ID NO: 69040 - protein, 16 aa, Homo Sapiens
FSAQSGAGVPGWGIAL

SEQ ID NO: 69041 - protein, 16 aa, Homo Sapiens
SAQSGAGVPGWGIALL

SEQ ID NO: 69042 - protein, 16 aa, Homo Sapiens
AQSGAGVPGWGIALLV

SEQ ID NO: 69043 - protein, 16 aa, Homo Sapiens
QSGAGVPGWGIALLVL

SEQ ID NO: 69044 - protein, 16 aa, Homo Sapiens
SGAGVPGWGIALLVLV

SEQ ID NO: 69045 - protein, 16 aa, Homo Sapiens
GAGVPGWGIALLVLVC

SEQ ID NO: 69046 - protein, 16 aa, Homo Sapiens
AGVPGWGIALLVLVCV

SEQ ID NO: 69047 - protein, 16 aa, Homo Sapiens
GVPGWGIALLVLVCVL

SEQ ID NO: 69048 - protein, 16 aa, Homo Sapiens
VPGWGIALLVLVCVLV

SEQ ID NO: 69049 - protein, 16 aa, Homo Sapiens
PGWGIALLVLVCVLVA

SEQ ID NO: 69050 - protein, 16 aa, Homo Sapiens
GWGIALLVLVCVLVAL

SEQ ID NO: 69051 - protein, 16 aa, Homo Sapiens
WGIALLVLVCVLVALA

SEQ ID NO: 69052 - protein, 16 aa, Homo Sapiens
GIALLVLVCVLVALAI

SEQ ID NO: 69053 - protein, 16 aa, Homo Sapiens
IALLVLVCVLVALAIV

SEQ ID NO: 69054 - protein, 16 aa, Homo Sapiens
ALLVLVCVLVALAIVY

SEQ ID NO: 69055 - protein, 16 aa, Homo Sapiens
LLVLVCVLVALAIVYL

SEQ ID NO: 69056 - protein, 16 aa, Homo Sapiens
LVLVCVLVALAIVYLI

SEQ ID NO: 69057 - protein, 16 aa, Homo Sapiens
VLVCVLVALAIVYLIA

SEQ ID NO: 69058 - protein, 16 aa, Homo Sapiens
LVCVLVALAIVYLIAL

SEQ ID NO: 69059 - protein, 16 aa, Homo Sapiens
VCVLVALAIVYLIALA

SEQ ID NO: 69060 - protein, 16 aa, Homo Sapiens
CVLVALAIVYLIALAV

SEQ ID NO: 69061 - protein, 16 aa, Homo Sapiens
VLVALAIVYLIALAVC

SEQ ID NO: 69062 - protein, 16 aa, Homo Sapiens
LVALAIVYLIALAVCQ

SEQ ID NO: 69063 - protein, 16 aa, Homo Sapiens
VALAIVYLIALAVCQC

SEQ ID NO: 69064 - protein, 16 aa, Homo Sapiens
ALAIVYLIALAVCQCR

SEQ ID NO: 69065 - protein, 16 aa, Homo Sapiens
LAIVYLIALAVCQCRR

SEQ ID NO: 69066 - protein, 16 aa, Homo Sapiens
AIVYLIALAVCQCRRK

SEQ ID NO: 69067 - protein, 16 aa, Homo Sapiens
IVYLIALAVCQCRRKN

SEQ ID NO: 69068 - protein, 16 aa, Homo Sapiens
VYLIALAVCQCRRKNY

SEQ ID NO: 69069 - protein, 16 aa, Homo Sapiens
YLIALAVCQCRRKNYG

SEQ ID NO: 69070 - protein, 16 aa, Homo Sapiens
LIALAVCQCRRKNYGQ

SEQ ID NO: 69071 - protein, 16 aa, Homo Sapiens
IALAVCQCRRKNYGQL

SEQ ID NO: 69072 - protein, 16 aa, Homo Sapiens
ALAVCQCRRKNYGQLD

SEQ ID NO: 69073 - protein, 16 aa, Homo Sapiens
LAVCQCRRKNYGQLDI

SEQ ID NO: 69074 - protein, 16 aa, Homo Sapiens
AVCQCRRKNYGQLDIF

SEQ ID NO: 69075 - protein, 16 aa, Homo Sapiens
VCQCRRKNYGQLDIFP

SEQ ID NO: 69076 - protein, 16 aa, Homo Sapiens
CQCRRKNYGQLDIFPA

SEQ ID NO: 69077 - protein, 16 aa, Homo Sapiens
QCRRKNYGQLDIFPAR

SEQ ID NO: 69078 - protein, 16 aa, Homo Sapiens
CRRKNYGQLDIFPARD

SEQ ID NO: 69079 - protein, 16 aa, Homo Sapiens
RRKNYGQLDIFPARDT

SEQ ID NO: 69080 - protein, 16 aa, Homo Sapiens
RKNYGQLDIFPARDTY

SEQ ID NO: 69081 - protein, 16 aa, Homo Sapiens
KNYGQLDIFPARDTYH

SEQ ID NO: 69082 - protein, 16 aa, Homo Sapiens
NYGQLDIFPARDTYHP

SEQ ID NO: 69083 - protein, 16 aa, Homo Sapiens
YGQLDIFPARDTYHPM

SEQ ID NO: 69084 - protein, 16 aa, Homo Sapiens
GQLDIFPARDTYHPMS

SEQ ID NO: 69085 - protein, 16 aa, Homo Sapiens
QLDIFPARDTYHPMSE

SEQ ID NO: 69086 - protein, 16 aa, Homo Sapiens
LDIFPARDTYHPMSEY

SEQ ID NO: 69087 - protein, 16 aa, Homo Sapiens
DIFPARDTYHPMSEYP

SEQ ID NO: 69088 - protein, 16 aa, Homo Sapiens
IFPARDTYHPMSEYPT

SEQ ID NO: 69089 - protein, 16 aa, Homo Sapiens
FPARDTYHPMSEYPTY

SEQ ID NO: 69090 - protein, 16 aa, Homo Sapiens
PARDTYHPMSEYPTYH

SEQ ID NO: 69091 - protein, 16 aa, Homo Sapiens
ARDTYHPMSEYPTYHT

SEQ ID NO: 69092 - protein, 16 aa, Homo Sapiens
RDTYHPMSEYPTYHTH

SEQ ID NO: 69093 - protein, 16 aa, Homo Sapiens
DTYHPMSEYPTYHTHG

SEQ ID NO: 69094 - protein, 16 aa, Homo Sapiens
TYHPMSEYPTYHTHGR

SEQ ID NO: 69095 - protein, 16 aa, Homo Sapiens
YHPMSEYPTYHTHGRY

SEQ ID NO: 69096 - protein, 16 aa, Homo Sapiens
HPMSEYPTYHTHGRYV

SEQ ID NO: 69097 - protein, 16 aa, Homo Sapiens
PMSEYPTYHTHGRYVP

SEQ ID NO: 69098 - protein, 16 aa, Homo Sapiens
MSEYPTYHTHGRYVPP

SEQ ID NO: 69099 - protein, 16 aa, Homo Sapiens
SEYPTYHTHGRYVPPS

SEQ ID NO: 69100 - protein, 16 aa, Homo Sapiens
EYPTYHTHGRYVPPSS

SEQ ID NO: 69101 - protein, 16 aa, Homo Sapiens
YPTYHTHGRYVPPSST

SEQ ID NO: 69102 - protein, 16 aa, Homo Sapiens
PTYHTHGRYVPPSSTD

SEQ ID NO: 69103 - protein, 16 aa, Homo Sapiens
TYHTHGRYVPPSSTDR

SEQ ID NO: 69104 - protein, 16 aa, Homo Sapiens
YHTHGRYVPPSSTDRS

SEQ ID NO: 69105 - protein, 16 aa, Homo Sapiens
HTHGRYVPPSSTDRSP

SEQ ID NO: 69106 - protein, 16 aa, Homo Sapiens
THGRYVPPSSTDRSPY

SEQ ID NO: 69107 - protein, 16 aa, Homo Sapiens
HGRYVPPSSTDRSPYE

SEQ ID NO: 69108 - protein, 16 aa, Homo Sapiens
GRYVPPSSTDRSPYEK

SEQ ID NO: 69109 - protein, 16 aa, Homo Sapiens
RYVPPSSTDRSPYEKV

SEQ ID NO: 69110 - protein, 16 aa, Homo Sapiens
YVPPSSTDRSPYEKVS

SEQ ID NO: 69111 - protein, 16 aa, Homo Sapiens
VPPSSTDRSPYEKVSA

SEQ ID NO: 69112 - protein, 16 aa, Homo Sapiens
PPSSTDRSPYEKVSAG

SEQ ID NO: 69113 - protein, 16 aa, Homo Sapiens
PSSTDRSPYEKVSAGN

SEQ ID NO: 69114 - protein, 16 aa, Homo Sapiens
SSTDRSPYEKVSAGNG

SEQ ID NO: 69115 - protein, 16 aa, Homo Sapiens
STDRSPYEKVSAGNGG

SEQ ID NO: 69116 - protein, 16 aa, Homo Sapiens
TDRSPYEKVSAGNGGS

SEQ ID NO: 69117 - protein, 16 aa, Homo Sapiens
DRSPYEKVSAGNGGSS

SEQ ID NO: 69118 - protein, 16 aa, Homo Sapiens
RSPYEKVSAGNGGSSL

SEQ ID NO: 69119 - protein, 16 aa, Homo Sapiens
SPYEKVSAGNGGSSLS

SEQ ID NO: 69120 - protein, 16 aa, Homo Sapiens
PYEKVSAGNGGSSLSY

SEQ ID NO: 69121 - protein, 16 aa, Homo Sapiens
YEKVSAGNGGSSLSYT

SEQ ID NO: 69122 - protein, 16 aa, Homo Sapiens
EKVSAGNGGSSLSYTN

SEQ ID NO: 69123 - protein, 16 aa, Homo Sapiens
KVSAGNGGSSLSYTNP

SEQ ID NO: 69124 - protein, 16 aa, Homo Sapiens
VSAGNGGSSLSYTNPA

SEQ ID NO: 69125 - protein, 16 aa, Homo Sapiens
SAGNGGSSLSYTNPAV

SEQ ID NO: 69126 - protein, 16 aa, Homo Sapiens
AGNGGSSLSYTNPAVA

SEQ ID NO: 69127 - protein, 16 aa, Homo Sapiens
GNGGSSLSYTNPAVAA

SEQ ID NO: 69128 - protein, 16 aa, Homo Sapiens
NGGSSLSYTNPAVAAA

SEQ ID NO: 69129 - protein, 16 aa, Homo Sapiens
GGSSLSYTNPAVAAAS

SEQ ID NO: 69130 - protein, 16 aa, Homo Sapiens
GSSLSYTNPAVAAASA

SEQ ID NO: 69131 - protein, 16 aa, Homo Sapiens
SSLSYTNPAVAAASAN

SEQ ID NO: 69132 - protein, 16 aa, Homo Sapiens
SLSYTNPAVAAASANL

SEQ ID NO: 69133 - protein, 543 aa, Homo Sapiens
MGTSLSPNDPWPLNPLSIQQTTLLLLLSVLATVHVGQRLLRQRRRQLRSAPPGPFAWPLIGNAAAVGQAAHLSFARLARRYGDVFQIRLGSCPIVVLNGERAIHQALVQQGSAFADRPAFASFRVVSGGRSMAFGHYSEHWKVQRRAAHSMMRNFFTRQPRSRQVLEGHVLSEARELVALLVRGSADGAFLDPRPLTVVAVANVMSAVCFGCRYSHDDPEFRELLSHNEEFGRTVGAGSLVDVMPWLQYFPNPVRTVFREFEQLNRNFSNFILDKFLRHCESLRPGAAPRDMMDAFILSAEKKAAGDSHGGGARLDLENVPATITDIFGASQDTLSTALQWLLLLFTRYPDVQTRVQAELDQVVGRDRLPCMGDQPNLPYVLAFLYEAMRFSSFVPVTIPHATTANTSVLGYHIPKDTVVFVNQWSVNHDPLKWPNPENFDPARFLDKDGLINKDLTSRVMIFSVGKRRCIGEELSKMQLFLFISILAHQCDFRANPNEPAKMNFSYGLTIKPKSFKVNVTLRESMELLDSAVQNLQAKETCQ

SEQ ID NO: 69134 - protein, 8 aa, Homo Sapiens
SLSPNDPW

SEQ ID NO: 69135 - protein, 8 aa, Homo Sapiens
SPNDPWPL

SEQ ID NO: 69136 - protein, 8 aa, Homo Sapiens
DPWPLNPL

SEQ ID NO: 69137 - protein, 8 aa, Homo Sapiens
WPLNPLSI

SEQ ID NO: 69138 - protein, 8 aa, Homo Sapiens
PLNPLSIQ

SEQ ID NO: 69139 - protein, 8 aa, Homo Sapiens
SIQQTTLL

SEQ ID NO: 69140 - protein, 8 aa, Homo Sapiens
IQQTTLLL

SEQ ID NO: 69141 - protein, 8 aa, Homo Sapiens
QQTTLLLL

SEQ ID NO: 69142 - protein, 8 aa, Homo Sapiens
QTTLLLLL

SEQ ID NO: 69143 - protein, 8 aa, Homo Sapiens
TLLLLLSV

SEQ ID NO: 69144 - protein, 8 aa, Homo Sapiens
LLLLLSVL

SEQ ID NO: 69145 - protein, 8 aa, Homo Sapiens
LLLLSVLA

SEQ ID NO: 69146 - protein, 8 aa, Homo Sapiens
LLLSVLAT

SEQ ID NO: 69147 - protein, 8 aa, Homo Sapiens
LLSVLATV

SEQ ID NO: 69148 - protein, 8 aa, Homo Sapiens
SVLATVHV

SEQ ID NO: 69149 - protein, 8 aa, Homo Sapiens
ATVHVGQR

SEQ ID NO: 69150 - protein, 8 aa, Homo Sapiens
HVGQRLLR

SEQ ID NO: 69151 - protein, 8 aa, Homo Sapiens
GQRLLRQR

SEQ ID NO: 69152 - protein, 8 aa, Homo Sapiens
QRLLRQRR

SEQ ID NO: 69153 - protein, 8 aa, Homo Sapiens
RLLRQRRR

SEQ ID NO: 69154 - protein, 8 aa, Homo Sapiens
RQRRRQLR

SEQ ID NO: 69155 - protein, 8 aa, Homo Sapiens
RRRQLRSA

SEQ ID NO: 69156 - protein, 8 aa, Homo Sapiens
RRQLRSAP

SEQ ID NO: 69157 - protein, 8 aa, Homo Sapiens
RQLRSAPP

SEQ ID NO: 69158 - protein, 8 aa, Homo Sapiens
RSAPPGPF

SEQ ID NO: 69159 - protein, 8 aa, Homo Sapiens
SAPPGPFA

SEQ ID NO: 69160 - protein, 8 aa, Homo Sapiens
APPGPFAW

SEQ ID NO: 69161 - protein, 8 aa, Homo Sapiens
GPFAWPLI

SEQ ID NO: 69162 - protein, 8 aa, Homo Sapiens
WPLIGNAA

SEQ ID NO: 69163 - protein, 8 aa, Homo Sapiens
PLIGNAAA

SEQ ID NO: 69164 - protein, 8 aa, Homo Sapiens
LIGNAAAV

SEQ ID NO: 69165 - protein, 8 aa, Homo Sapiens
NAAAVGQA

SEQ ID NO: 69166 - protein, 8 aa, Homo Sapiens
AVGQAAHL

SEQ ID NO: 69167 - protein, 8 aa, Homo Sapiens
GQAAHLSF

SEQ ID NO: 69168 - protein, 8 aa, Homo Sapiens
QAAHLSFA

SEQ ID NO: 69169 - protein, 8 aa, Homo Sapiens
AAHLSFAR

SEQ ID NO: 69170 - protein, 8 aa, Homo Sapiens
HLSFARLA

SEQ ID NO: 69171 - protein, 8 aa, Homo Sapiens
LSFARLAR

SEQ ID NO: 69172 - protein, 8 aa, Homo Sapiens
SFARLARR

SEQ ID NO: 69173 - protein, 8 aa, Homo Sapiens
FARLARRY

SEQ ID NO: 69174 - protein, 8 aa, Homo Sapiens
RRYGDVFQ

SEQ ID NO: 69175 - protein, 8 aa, Homo Sapiens
RYGDVFQI

SEQ ID NO: 69176 - protein, 8 aa, Homo Sapiens
FQIRLGSC

SEQ ID NO: 69177 - protein, 8 aa, Homo Sapiens
RLGSCPIV

SEQ ID NO: 69178 - protein, 8 aa, Homo Sapiens
LGSCPIVV

SEQ ID NO: 69179 - protein, 8 aa, Homo Sapiens
IVVLNGER

SEQ ID NO: 69180 - protein, 8 aa, Homo Sapiens
VLNGERAI

SEQ ID NO: 69181 - protein, 8 aa, Homo Sapiens
ERAIHQAL

SEQ ID NO: 69182 - protein, 8 aa, Homo Sapiens
RAIHQALV

SEQ ID NO: 69183 - protein, 8 aa, Homo Sapiens
ALVQQGSA

SEQ ID NO: 69184 - protein, 8 aa, Homo Sapiens
LVQQGSAF

SEQ ID NO: 69185 - protein, 8 aa, Homo Sapiens
VQQGSAFA

SEQ ID NO: 69186 - protein, 8 aa, Homo Sapiens
AFADRPAF

SEQ ID NO: 69187 - protein, 8 aa, Homo Sapiens
FADRPAFA

SEQ ID NO: 69188 - protein, 8 aa, Homo Sapiens
RPAFASFR

SEQ ID NO: 69189 - protein, 8 aa, Homo Sapiens
PAFASFRV

SEQ ID NO: 69190 - protein, 8 aa, Homo Sapiens
VVSGGRSM

SEQ ID NO: 69191 - protein, 8 aa, Homo Sapiens
RSMAFGHY

SEQ ID NO: 69192 - protein, 8 aa, Homo Sapiens
SMAFGHYS

SEQ ID NO: 69193 - protein, 8 aa, Homo Sapiens
MAFGHYSE

SEQ ID NO: 69194 - protein, 8 aa, Homo Sapiens
FGHYSEHW

SEQ ID NO: 69195 - protein, 8 aa, Homo Sapiens
HYSEHWKV

SEQ ID NO: 69196 - protein, 8 aa, Homo Sapiens
EHWKVQRR

SEQ ID NO: 69197 - protein, 8 aa, Homo Sapiens
KVQRRAAH

SEQ ID NO: 69198 - protein, 8 aa, Homo Sapiens
RRAAHSMM

SEQ ID NO: 69199 - protein, 8 aa, Homo Sapiens
RAAHSMMR

SEQ ID NO: 69200 - protein, 8 aa, Homo Sapiens
HSMMRNFF

SEQ ID NO: 69201 - protein, 8 aa, Homo Sapiens
SMMRNFFT

SEQ ID NO: 69202 - protein, 8 aa, Homo Sapiens
MMRNFFTR

SEQ ID NO: 69203 - protein, 8 aa, Homo Sapiens
NFFTRQPR

SEQ ID NO: 69204 - protein, 8 aa, Homo Sapiens
FTRQPRSR

SEQ ID NO: 69205 - protein, 8 aa, Homo Sapiens
RQPRSRQV

SEQ ID NO: 69206 - protein, 8 aa, Homo Sapiens
QPRSRQVL

SEQ ID NO: 69207 - protein, 8 aa, Homo Sapiens
RQVLEGHV

SEQ ID NO: 69208 - protein, 8 aa, Homo Sapiens
QVLEGHVL

SEQ ID NO: 69209 - protein, 8 aa, Homo Sapiens
VLEGHVLS

SEQ ID NO: 69210 - protein, 8 aa, Homo Sapiens
VLSEAREL

SEQ ID NO: 69211 - protein, 8 aa, Homo Sapiens
EARELVAL

SEQ ID NO: 69212 - protein, 8 aa, Homo Sapiens
RELVALLV

SEQ ID NO: 69213 - protein, 8 aa, Homo Sapiens
ELVALLVR

SEQ ID NO: 69214 - protein, 8 aa, Homo Sapiens
ALLVRGSA

SEQ ID NO: 69215 - protein, 8 aa, Homo Sapiens
RGSADGAF

SEQ ID NO: 69216 - protein, 8 aa, Homo Sapiens
GSADGAFL

SEQ ID NO: 69217 - protein, 8 aa, Homo Sapiens
DGAFLDPR

SEQ ID NO: 69218 - protein, 8 aa, Homo Sapiens
FLDPRPLT

SEQ ID NO: 69219 - protein, 8 aa, Homo Sapiens
DPRPLTVV

SEQ ID NO: 69220 - protein, 8 aa, Homo Sapiens
RPLTVVAV

SEQ ID NO: 69221 - protein, 8 aa, Homo Sapiens
PLTVVAVA

SEQ ID NO: 69222 - protein, 8 aa, Homo Sapiens
TVVAVANV

SEQ ID NO: 69223 - protein, 8 aa, Homo Sapiens
VVAVANVM

SEQ ID NO: 69224 - protein, 8 aa, Homo Sapiens
AVANVMSA

SEQ ID NO: 69225 - protein, 8 aa, Homo Sapiens
VANVMSAV

SEQ ID NO: 69226 - protein, 8 aa, Homo Sapiens
NVMSAVCF

SEQ ID NO: 69227 - protein, 8 aa, Homo Sapiens
SAVCFGCR

SEQ ID NO: 69228 - protein, 8 aa, Homo Sapiens
AVCFGCRY

SEQ ID NO: 69229 - protein, 8 aa, Homo Sapiens
YSHDDPEF

SEQ ID NO: 69230 - protein, 8 aa, Homo Sapiens
LLSHNEEF

SEQ ID NO: 69231 - protein, 8 aa, Homo Sapiens
RTVGAGSL

SEQ ID NO: 69232 - protein, 8 aa, Homo Sapiens
TVGAGSLV

SEQ ID NO: 69233 - protein, 8 aa, Homo Sapiens
SLVDVMPW

SEQ ID NO: 69234 - protein, 8 aa, Homo Sapiens
LVDVMPWL

SEQ ID NO: 69235 - protein, 8 aa, Homo Sapiens
DVMPWLQY

SEQ ID NO: 69236 - protein, 8 aa, Homo Sapiens
VMPWLQYF

SEQ ID NO: 69237 - protein, 8 aa, Homo Sapiens
MPWLQYFP

SEQ ID NO: 69238 - protein, 8 aa, Homo Sapiens
LQYFPNPV

SEQ ID NO: 69239 - protein, 8 aa, Homo Sapiens
QYFPNPVR

SEQ ID NO: 69240 - protein, 8 aa, Homo Sapiens
FPNPVRTV

SEQ ID NO: 69241 - protein, 8 aa, Homo Sapiens
NPVRTVFR

SEQ ID NO: 69242 - protein, 8 aa, Homo Sapiens
TVFREFEQ

SEQ ID NO: 69243 - protein, 8 aa, Homo Sapiens
REFEQLNR

SEQ ID NO: 69244 - protein, 8 aa, Homo Sapiens
FEQLNRNF

SEQ ID NO: 69245 - protein, 8 aa, Homo Sapiens
FSNFILDK

SEQ ID NO: 69246 - protein, 8 aa, Homo Sapiens
FILDKFLR

SEQ ID NO: 69247 - protein, 8 aa, Homo Sapiens
FLRHCESL

SEQ ID NO: 69248 - protein, 8 aa, Homo Sapiens
APRDMMDA

SEQ ID NO: 69249 - protein, 8 aa, Homo Sapiens
DMMDAFIL

SEQ ID NO: 69250 - protein, 8 aa, Homo Sapiens
MMDAFILS

SEQ ID NO: 69251 - protein, 8 aa, Homo Sapiens
MDAFILSA

SEQ ID NO: 69252 - protein, 8 aa, Homo Sapiens
AFILSAEK

SEQ ID NO: 69253 - protein, 8 aa, Homo Sapiens
FILSAEKK

SEQ ID NO: 69254 - protein, 8 aa, Homo Sapiens
ILSAEKKA

SEQ ID NO: 69255 - protein, 8 aa, Homo Sapiens
DSHGGGAR

SEQ ID NO: 69256 - protein, 8 aa, Homo Sapiens
SHGGGARL

SEQ ID NO: 69257 - protein, 8 aa, Homo Sapiens
VPATITDI

SEQ ID NO: 69258 - protein, 8 aa, Homo Sapiens
TITDIFGA

SEQ ID NO: 69259 - protein, 8 aa, Homo Sapiens
FGASQDTL

SEQ ID NO: 69260 - protein, 8 aa, Homo Sapiens
SQDTLSTA

SEQ ID NO: 69261 - protein, 8 aa, Homo Sapiens
TLSTALQW

SEQ ID NO: 69262 - protein, 8 aa, Homo Sapiens
STALQWLL

SEQ ID NO: 69263 - protein, 8 aa, Homo Sapiens
TALQWLLL

SEQ ID NO: 69264 - protein, 8 aa, Homo Sapiens
ALQWLLLL

SEQ ID NO: 69265 - protein, 8 aa, Homo Sapiens
LQWLLLLF

SEQ ID NO: 69266 - protein, 8 aa, Homo Sapiens
WLLLLFTR

SEQ ID NO: 69267 - protein, 8 aa, Homo Sapiens
LLLLFTRY

SEQ ID NO: 69268 - protein, 8 aa, Homo Sapiens
RYPDVQTR

SEQ ID NO: 69269 - protein, 8 aa, Homo Sapiens
YPDVQTRV

SEQ ID NO: 69270 - protein, 8 aa, Homo Sapiens
VQAELDQV

SEQ ID NO: 69271 - protein, 8 aa, Homo Sapiens
ELDQVVGR

SEQ ID NO: 69272 - protein, 8 aa, Homo Sapiens
QVVGRDRL

SEQ ID NO: 69273 - protein, 8 aa, Homo Sapiens
LPCMGDQP

SEQ ID NO: 69274 - protein, 8 aa, Homo Sapiens
CMGDQPNL

SEQ ID NO: 69275 - protein, 8 aa, Homo Sapiens
QPNLPYVL

SEQ ID NO: 69276 - protein, 8 aa, Homo Sapiens
LPYVLAFL

SEQ ID NO: 69277 - protein, 8 aa, Homo Sapiens
PYVLAFLY

SEQ ID NO: 69278 - protein, 8 aa, Homo Sapiens
VLAFLYEA

SEQ ID NO: 69279 - protein, 8 aa, Homo Sapiens
LAFLYEAM

SEQ ID NO: 69280 - protein, 8 aa, Homo Sapiens
AFLYEAMR

SEQ ID NO: 69281 - protein, 8 aa, Homo Sapiens
FLYEAMRF

SEQ ID NO: 69282 - protein, 8 aa, Homo Sapiens
EAMRFSSF

SEQ ID NO: 69283 - protein, 8 aa, Homo Sapiens
AMRFSSFV

SEQ ID NO: 69284 - protein, 8 aa, Homo Sapiens
RFSSFVPV

SEQ ID NO: 69285 - protein, 8 aa, Homo Sapiens
SSFVPVTI

SEQ ID NO: 69286 - protein, 8 aa, Homo Sapiens
VPVTIPHA

SEQ ID NO: 69287 - protein, 8 aa, Homo Sapiens
TIPHATTA

SEQ ID NO: 69288 - protein, 8 aa, Homo Sapiens
ATTANTSV

SEQ ID NO: 69289 - protein, 8 aa, Homo Sapiens
TTANTSVL

SEQ ID NO: 69290 - protein, 8 aa, Homo Sapiens
TSVLGYHI

SEQ ID NO: 69291 - protein, 8 aa, Homo Sapiens
VLGYHIPK

SEQ ID NO: 69292 - protein, 8 aa, Homo Sapiens
HIPKDTVV

SEQ ID NO: 69293 - protein, 8 aa, Homo Sapiens
IPKDTVVF

SEQ ID NO: 69294 - protein, 8 aa, Homo Sapiens
TVVFVNQW

SEQ ID NO: 69295 - protein, 8 aa, Homo Sapiens
VFVNQWSV

SEQ ID NO: 69296 - protein, 8 aa, Homo Sapiens
WSVNHDPL

SEQ ID NO: 69297 - protein, 8 aa, Homo Sapiens
SVNHDPLK

SEQ ID NO: 69298 - protein, 8 aa, Homo Sapiens
KWPNPENF

SEQ ID NO: 69299 - protein, 8 aa, Homo Sapiens
NPENFDPA

SEQ ID NO: 69300 - protein, 8 aa, Homo Sapiens
RFLDKDGL

SEQ ID NO: 69301 - protein, 8 aa, Homo Sapiens
FLDKDGLI

SEQ ID NO: 69302 - protein, 8 aa, Homo Sapiens
INKDLTSR

SEQ ID NO: 69303 - protein, 8 aa, Homo Sapiens
DLTSRVMI

SEQ ID NO: 69304 - protein, 8 aa, Homo Sapiens
LTSRVMIF

SEQ ID NO: 69305 - protein, 8 aa, Homo Sapiens
SRVMIFSV

SEQ ID NO: 69306 - protein, 8 aa, Homo Sapiens
VMIFSVGK

SEQ ID NO: 69307 - protein, 8 aa, Homo Sapiens
MIFSVGKR

SEQ ID NO: 69308 - protein, 8 aa, Homo Sapiens
IFSVGKRR

SEQ ID NO: 69309 - protein, 8 aa, Homo Sapiens
CIGEELSK

SEQ ID NO: 69310 - protein, 8 aa, Homo Sapiens
EELSKMQL

SEQ ID NO: 69311 - protein, 8 aa, Homo Sapiens
ELSKMQLF

SEQ ID NO: 69312 - protein, 8 aa, Homo Sapiens
KMQLFLFI

SEQ ID NO: 69313 - protein, 8 aa, Homo Sapiens
MQLFLFIS

SEQ ID NO: 69314 - protein, 8 aa, Homo Sapiens
QLFLFISI

SEQ ID NO: 69315 - protein, 8 aa, Homo Sapiens
LFLFISIL

SEQ ID NO: 69316 - protein, 8 aa, Homo Sapiens
FLFISILA

SEQ ID NO: 69317 - protein, 8 aa, Homo Sapiens
LAHQCDFR

SEQ ID NO: 69318 - protein, 8 aa, Homo Sapiens
NPNEPAKM

SEQ ID NO: 69319 - protein, 8 aa, Homo Sapiens
KMNFSYGL

SEQ ID NO: 69320 - protein, 8 aa, Homo Sapiens
FSYGLTIK

SEQ ID NO: 69321 - protein, 8 aa, Homo Sapiens
LTIKPKSF

SEQ ID NO: 69322 - protein, 8 aa, Homo Sapiens
TIKPKSFK

SEQ ID NO: 69323 - protein, 8 aa, Homo Sapiens
FKVNVTLR

SEQ ID NO: 69324 - protein, 8 aa, Homo Sapiens
TLRESMEL

SEQ ID NO: 69325 - protein, 8 aa, Homo Sapiens
SMELLDSA

SEQ ID NO: 69326 - protein, 8 aa, Homo Sapiens
MELLDSAV

SEQ ID NO: 69327 - protein, 8 aa, Homo Sapiens
ELLDSAVQ

SEQ ID NO: 69328 - protein, 8 aa, Homo Sapiens
AVQNLQAK

SEQ ID NO: 69329 - protein, 9 aa, Homo Sapiens
TSLSPNDPW

SEQ ID NO: 69330 - protein, 9 aa, Homo Sapiens
SLSPNDPWP

SEQ ID NO: 69331 - protein, 9 aa, Homo Sapiens
DPWPLNPLS

SEQ ID NO: 69332 - protein, 9 aa, Homo Sapiens
PWPLNPLSI

SEQ ID NO: 69333 - protein, 9 aa, Homo Sapiens
PLNPLSIQQ

SEQ ID NO: 69334 - protein, 9 aa, Homo Sapiens
PLSIQQTTL

SEQ ID NO: 69335 - protein, 9 aa, Homo Sapiens
LSIQQTTLL

SEQ ID NO: 69336 - protein, 9 aa, Homo Sapiens
SIQQTTLLL

SEQ ID NO: 69337 - protein, 9 aa, Homo Sapiens
IQQTTLLLL

SEQ ID NO: 69338 - protein, 9 aa, Homo Sapiens
QQTTLLLLL

SEQ ID NO: 69339 - protein, 9 aa, Homo Sapiens
TTLLLLLSV

SEQ ID NO: 69340 - protein, 9 aa, Homo Sapiens
TLLLLLSVL

SEQ ID NO: 69341 - protein, 9 aa, Homo Sapiens
LLLLLSVLA

SEQ ID NO: 69342 - protein, 9 aa, Homo Sapiens
LLLLSVLAT

SEQ ID NO: 69343 - protein, 9 aa, Homo Sapiens
LLLSVLATV

SEQ ID NO: 69344 - protein, 9 aa, Homo Sapiens
LSVLATVHV

SEQ ID NO: 69345 - protein, 9 aa, Homo Sapiens
VLATVHVGQ

SEQ ID NO: 69346 - protein, 9 aa, Homo Sapiens
LATVHVGQR

SEQ ID NO: 69347 - protein, 9 aa, Homo Sapiens
GQRLLRQRR

SEQ ID NO: 69348 - protein, 9 aa, Homo Sapiens
QRLLRQRRR

SEQ ID NO: 69349 - protein, 9 aa, Homo Sapiens
LLRQRRRQL

SEQ ID NO: 69350 - protein, 9 aa, Homo Sapiens
RRRQLRSAP

SEQ ID NO: 69351 - protein, 9 aa, Homo Sapiens
RRQLRSAPP

SEQ ID NO: 69352 - protein, 9 aa, Homo Sapiens
SAPPGPFAW

SEQ ID NO: 69353 - protein, 9 aa, Homo Sapiens
FAWPLIGNA

SEQ ID NO: 69354 - protein, 9 aa, Homo Sapiens
WPLIGNAAA

SEQ ID NO: 69355 - protein, 9 aa, Homo Sapiens
PLIGNAAAV

SEQ ID NO: 69356 - protein, 9 aa, Homo Sapiens
NAAAVGQAA

SEQ ID NO: 69357 - protein, 9 aa, Homo Sapiens
VGQAAHLSF

SEQ ID NO: 69358 - protein, 9 aa, Homo Sapiens
GQAAHLSFA

SEQ ID NO: 69359 - protein, 9 aa, Homo Sapiens
QAAHLSFAR

SEQ ID NO: 69360 - protein, 9 aa, Homo Sapiens
HLSFARLAR

SEQ ID NO: 69361 - protein, 9 aa, Homo Sapiens
LSFARLARR

SEQ ID NO: 69362 - protein, 9 aa, Homo Sapiens
SFARLARRY

SEQ ID NO: 69363 - protein, 9 aa, Homo Sapiens
RLARRYGDV

SEQ ID NO: 69364 - protein, 9 aa, Homo Sapiens
LARRYGDVF

SEQ ID NO: 69365 - protein, 9 aa, Homo Sapiens
RRYGDVFQI

SEQ ID NO: 69366 - protein, 9 aa, Homo Sapiens
RYGDVFQIR

SEQ ID NO: 69367 - protein, 9 aa, Homo Sapiens
YGDVFQIRL

SEQ ID NO: 69368 - protein, 9 aa, Homo Sapiens
QIRLGSCPI

SEQ ID NO: 69369 - protein, 9 aa, Homo Sapiens
RLGSCPIVV

SEQ ID NO: 69370 - protein, 9 aa, Homo Sapiens
CPIVVLNGE

SEQ ID NO: 69371 - protein, 9 aa, Homo Sapiens
VVLNGERAI

SEQ ID NO: 69372 - protein, 9 aa, Homo Sapiens
GERAIHQAL

SEQ ID NO: 69373 - protein, 9 aa, Homo Sapiens
ERAIHQALV

SEQ ID NO: 69374 - protein, 9 aa, Homo Sapiens
ALVQQGSAF

SEQ ID NO: 69375 - protein, 9 aa, Homo Sapiens
LVQQGSAFA

SEQ ID NO: 69376 - protein, 9 aa, Homo Sapiens
SAFADRPAF

SEQ ID NO: 69377 - protein, 9 aa, Homo Sapiens
DRPAFASFR

SEQ ID NO: 69378 - protein, 9 aa, Homo Sapiens
RPAFASFRV

SEQ ID NO: 69379 - protein, 9 aa, Homo Sapiens
SFRVVSGGR

SEQ ID NO: 69380 - protein, 9 aa, Homo Sapiens
RVVSGGRSM

SEQ ID NO: 69381 - protein, 9 aa, Homo Sapiens
VVSGGRSMA

SEQ ID NO: 69382 - protein, 9 aa, Homo Sapiens
VSGGRSMAF

SEQ ID NO: 69383 - protein, 9 aa, Homo Sapiens
SMAFGHYSE

SEQ ID NO: 69384 - protein, 9 aa, Homo Sapiens
MAFGHYSEH

SEQ ID NO: 69385 - protein, 9 aa, Homo Sapiens
AFGHYSEHW

SEQ ID NO: 69386 - protein, 9 aa, Homo Sapiens
YSEHWKVQR

SEQ ID NO: 69387 - protein, 9 aa, Homo Sapiens
VQRRAAHSM

SEQ ID NO: 69388 - protein, 9 aa, Homo Sapiens
RRAAHSMMR

SEQ ID NO: 69389 - protein, 9 aa, Homo Sapiens
HSMMRNFFT

SEQ ID NO: 69390 - protein, 9 aa, Homo Sapiens
SMMRNFFTR

SEQ ID NO: 69391 - protein, 9 aa, Homo Sapiens
MMRNFFTRQ

SEQ ID NO: 69392 - protein, 9 aa, Homo Sapiens
RNFFTRQPR

SEQ ID NO: 69393 - protein, 9 aa, Homo Sapiens
FFTRQPRSR

SEQ ID NO: 69394 - protein, 9 aa, Homo Sapiens
RQPRSRQVL

SEQ ID NO: 69395 - protein, 9 aa, Homo Sapiens
RQVLEGHVL

SEQ ID NO: 69396 - protein, 9 aa, Homo Sapiens
QVLEGHVLS

SEQ ID NO: 69397 - protein, 9 aa, Homo Sapiens
VLEGHVLSE

SEQ ID NO: 69398 - protein, 9 aa, Homo Sapiens
VLSEARELV

SEQ ID NO: 69399 - protein, 9 aa, Homo Sapiens
SEARELVAL

SEQ ID NO: 69400 - protein, 9 aa, Homo Sapiens
EARELVALL

SEQ ID NO: 69401 - protein, 9 aa, Homo Sapiens
FLDPRPLTV

SEQ ID NO: 69402 - protein, 9 aa, Homo Sapiens
RPLTVVAVA

SEQ ID NO: 69403 - protein, 9 aa, Homo Sapiens
LTVVAVANV

SEQ ID NO: 69404 - protein, 9 aa, Homo Sapiens
TVVAVANVM

SEQ ID NO: 69405 - protein, 9 aa, Homo Sapiens
AVANVMSAV

SEQ ID NO: 69406 - protein, 9 aa, Homo Sapiens
VMSAVCFGC

SEQ ID NO: 69407 - protein, 9 aa, Homo Sapiens
MSAVCFGCR

SEQ ID NO: 69408 - protein, 9 aa, Homo Sapiens
SAVCFGCRY

SEQ ID NO: 69409 - protein, 9 aa, Homo Sapiens
RYSHDDPEF

SEQ ID NO: 69410 - protein, 9 aa, Homo Sapiens
YSHDDPEFR

SEQ ID NO: 69411 - protein, 9 aa, Homo Sapiens
ELLSHNEEF

SEQ ID NO: 69412 - protein, 9 aa, Homo Sapiens
LSHNEEFGR

SEQ ID NO: 69413 - protein, 9 aa, Homo Sapiens
EEFGRTVGA

SEQ ID NO: 69414 - protein, 9 aa, Homo Sapiens
RTVGAGSLV

SEQ ID NO: 69415 - protein, 9 aa, Homo Sapiens
GSLVDVMPW

SEQ ID NO: 69416 - protein, 9 aa, Homo Sapiens
SLVDVMPWL

SEQ ID NO: 69417 - protein, 9 aa, Homo Sapiens
DVMPWLQYF

SEQ ID NO: 69418 - protein, 9 aa, Homo Sapiens
VMPWLQYFP

SEQ ID NO: 69419 - protein, 9 aa, Homo Sapiens
MPWLQYFPN

SEQ ID NO: 69420 - protein, 9 aa, Homo Sapiens
WLQYFPNPV

SEQ ID NO: 69421 - protein, 9 aa, Homo Sapiens
LQYFPNPVR

SEQ ID NO: 69422 - protein, 9 aa, Homo Sapiens
YFPNPVRTV

SEQ ID NO: 69423 - protein, 9 aa, Homo Sapiens
FPNPVRTVF

SEQ ID NO: 69424 - protein, 9 aa, Homo Sapiens
TVFREFEQL

SEQ ID NO: 69425 - protein, 9 aa, Homo Sapiens
EFEQLNRNF

SEQ ID NO: 69426 - protein, 9 aa, Homo Sapiens
QLNRNFSNF

SEQ ID NO: 69427 - protein, 9 aa, Homo Sapiens
NRNFSNFIL

SEQ ID NO: 69428 - protein, 9 aa, Homo Sapiens
NFSNFILDK

SEQ ID NO: 69429 - protein, 9 aa, Homo Sapiens
FSNFILDKF

SEQ ID NO: 69430 - protein, 9 aa, Homo Sapiens
NFILDKFLR

SEQ ID NO: 69431 - protein, 9 aa, Homo Sapiens
ILDKFLRHC

SEQ ID NO: 69432 - protein, 9 aa, Homo Sapiens
KFLRHCESL

SEQ ID NO: 69433 - protein, 9 aa, Homo Sapiens
FLRHCESLR

SEQ ID NO: 69434 - protein, 9 aa, Homo Sapiens
SLRPGAAPR

SEQ ID NO: 69435 - protein, 9 aa, Homo Sapiens
RPGAAPRDM

SEQ ID NO: 69436 - protein, 9 aa, Homo Sapiens
APRDMMDAF

SEQ ID NO: 69437 - protein, 9 aa, Homo Sapiens
MMDAFILSA

SEQ ID NO: 69438 - protein, 9 aa, Homo Sapiens
DAFILSAEK

SEQ ID NO: 69439 - protein, 9 aa, Homo Sapiens
AFILSAEKK

SEQ ID NO: 69440 - protein, 9 aa, Homo Sapiens
ILSAEKKAA

SEQ ID NO: 69441 - protein, 9 aa, Homo Sapiens
AEKKAAGDS

SEQ ID NO: 69442 - protein, 9 aa, Homo Sapiens
RLDLENVPA

SEQ ID NO: 69443 - protein, 9 aa, Homo Sapiens
DLENVPATI

SEQ ID NO: 69444 - protein, 9 aa, Homo Sapiens
NVPATITDI

SEQ ID NO: 69445 - protein, 9 aa, Homo Sapiens
VPATITDIF

SEQ ID NO: 69446 - protein, 9 aa, Homo Sapiens
ATITDIFGA

SEQ ID NO: 69447 - protein, 9 aa, Homo Sapiens
TITDIFGAS

SEQ ID NO: 69448 - protein, 9 aa, Homo Sapiens
SQDTLSTAL

SEQ ID NO: 69449 - protein, 9 aa, Homo Sapiens
DTLSTALQW

SEQ ID NO: 69450 - protein, 9 aa, Homo Sapiens
TLSTALQWL

SEQ ID NO: 69451 - protein, 9 aa, Homo Sapiens
LSTALQWLL

SEQ ID NO: 69452 - protein, 9 aa, Homo Sapiens
STALQWLLL

SEQ ID NO: 69453 - protein, 9 aa, Homo Sapiens
TALQWLLLL

SEQ ID NO: 69454 - protein, 9 aa, Homo Sapiens
ALQWLLLLF

SEQ ID NO: 69455 - protein, 9 aa, Homo Sapiens
LQWLLLLFT

SEQ ID NO: 69456 - protein, 9 aa, Homo Sapiens
QWLLLLFTR

SEQ ID NO: 69457 - protein, 9 aa, Homo Sapiens
WLLLLFTRY

SEQ ID NO: 69458 - protein, 9 aa, Homo Sapiens
LLFTRYPDV

SEQ ID NO: 69459 - protein, 9 aa, Homo Sapiens
RYPDVQTRV

SEQ ID NO: 69460 - protein, 9 aa, Homo Sapiens
YPDVQTRVQ

SEQ ID NO: 69461 - protein, 9 aa, Homo Sapiens
RVQAELDQV

SEQ ID NO: 69462 - protein, 9 aa, Homo Sapiens
VQAELDQVV

SEQ ID NO: 69463 - protein, 9 aa, Homo Sapiens
LPCMGDQPN

SEQ ID NO: 69464 - protein, 9 aa, Homo Sapiens
MGDQPNLPY

SEQ ID NO: 69465 - protein, 9 aa, Homo Sapiens
QPNLPYVLA

SEQ ID NO: 69466 - protein, 9 aa, Homo Sapiens
PNLPYVLAF

SEQ ID NO: 69467 - protein, 9 aa, Homo Sapiens
NLPYVLAFL

SEQ ID NO: 69468 - protein, 9 aa, Homo Sapiens
LPYVLAFLY

SEQ ID NO: 69469 - protein, 9 aa, Homo Sapiens
YVLAFLYEA

SEQ ID NO: 69470 - protein, 9 aa, Homo Sapiens
VLAFLYEAM

SEQ ID NO: 69471 - protein, 9 aa, Homo Sapiens
LAFLYEAMR

SEQ ID NO: 69472 - protein, 9 aa, Homo Sapiens
AFLYEAMRF

SEQ ID NO: 69473 - protein, 9 aa, Homo Sapiens
FLYEAMRFS

SEQ ID NO: 69474 - protein, 9 aa, Homo Sapiens
YEAMRFSSF

SEQ ID NO: 69475 - protein, 9 aa, Homo Sapiens
EAMRFSSFV

SEQ ID NO: 69476 - protein, 9 aa, Homo Sapiens
MRFSSFVPV

SEQ ID NO: 69477 - protein, 9 aa, Homo Sapiens
FSSFVPVTI

SEQ ID NO: 69478 - protein, 9 aa, Homo Sapiens
FVPVTIPHA

SEQ ID NO: 69479 - protein, 9 aa, Homo Sapiens
VPVTIPHAT

SEQ ID NO: 69480 - protein, 9 aa, Homo Sapiens
VTIPHATTA

SEQ ID NO: 69481 - protein, 9 aa, Homo Sapiens
HATTANTSV

SEQ ID NO: 69482 - protein, 9 aa, Homo Sapiens
ATTANTSVL

SEQ ID NO: 69483 - protein, 9 aa, Homo Sapiens
TANTSVLGY

SEQ ID NO: 69484 - protein, 9 aa, Homo Sapiens
NTSVLGYHI

SEQ ID NO: 69485 - protein, 9 aa, Homo Sapiens
SVLGYHIPK

SEQ ID NO: 69486 - protein, 9 aa, Homo Sapiens
HIPKDTVVF

SEQ ID NO: 69487 - protein, 9 aa, Homo Sapiens
IPKDTVVFV

SEQ ID NO: 69488 - protein, 9 aa, Homo Sapiens
DTVVFVNQW

SEQ ID NO: 69489 - protein, 9 aa, Homo Sapiens
TVVFVNQWS

SEQ ID NO: 69490 - protein, 9 aa, Homo Sapiens
VVFVNQWSV

SEQ ID NO: 69491 - protein, 9 aa, Homo Sapiens
WSVNHDPLK

SEQ ID NO: 69492 - protein, 9 aa, Homo Sapiens
SVNHDPLKW

SEQ ID NO: 69493 - protein, 9 aa, Homo Sapiens
NPENFDPAR

SEQ ID NO: 69494 - protein, 9 aa, Homo Sapiens
LINKDLTSR

SEQ ID NO: 69495 - protein, 9 aa, Homo Sapiens
DLTSRVMIF

SEQ ID NO: 69496 - protein, 9 aa, Homo Sapiens
LTSRVMIFS

SEQ ID NO: 69497 - protein, 9 aa, Homo Sapiens
TSRVMIFSV

SEQ ID NO: 69498 - protein, 9 aa, Homo Sapiens
RVMIFSVGK

SEQ ID NO: 69499 - protein, 9 aa, Homo Sapiens
VMIFSVGKR

SEQ ID NO: 69500 - protein, 9 aa, Homo Sapiens
MIFSVGKRR

SEQ ID NO: 69501 - protein, 9 aa, Homo Sapiens
GEELSKMQL

SEQ ID NO: 69502 - protein, 9 aa, Homo Sapiens
EELSKMQLF

SEQ ID NO: 69503 - protein, 9 aa, Homo Sapiens
ELSKMQLFL

SEQ ID NO: 69504 - protein, 9 aa, Homo Sapiens
SKMQLFLFI

SEQ ID NO: 69505 - protein, 9 aa, Homo Sapiens
MQLFLFISI

SEQ ID NO: 69506 - protein, 9 aa, Homo Sapiens
QLFLFISIL

SEQ ID NO: 69507 - protein, 9 aa, Homo Sapiens
FLFISILAH

SEQ ID NO: 69508 - protein, 9 aa, Homo Sapiens
FISILAHQC

SEQ ID NO: 69509 - protein, 9 aa, Homo Sapiens
SILAHQCDF

SEQ ID NO: 69510 - protein, 9 aa, Homo Sapiens
ILAHQCDFR

SEQ ID NO: 69511 - protein, 9 aa, Homo Sapiens
FRANPNEPA

SEQ ID NO: 69512 - protein, 9 aa, Homo Sapiens
RANPNEPAK

SEQ ID NO: 69513 - protein, 9 aa, Homo Sapiens
EPAKMNFSY

SEQ ID NO: 69514 - protein, 9 aa, Homo Sapiens
AKMNFSYGL

SEQ ID NO: 69515 - protein, 9 aa, Homo Sapiens
KMNFSYGLT

SEQ ID NO: 69516 - protein, 9 aa, Homo Sapiens
SYGLTIKPK

SEQ ID NO: 69517 - protein, 9 aa, Homo Sapiens
LTIKPKSFK

SEQ ID NO: 69518 - protein, 9 aa, Homo Sapiens
TIKPKSFKV

SEQ ID NO: 69519 - protein, 9 aa, Homo Sapiens
KSFKVNVTL

SEQ ID NO: 69520 - protein, 9 aa, Homo Sapiens
SFKVNVTLR

SEQ ID NO: 69521 - protein, 9 aa, Homo Sapiens
VTLRESMEL

SEQ ID NO: 69522 - protein, 9 aa, Homo Sapiens
TLRESMELL

SEQ ID NO: 69523 - protein, 9 aa, Homo Sapiens
ESMELLDSA

SEQ ID NO: 69524 - protein, 9 aa, Homo Sapiens
SMELLDSAV

SEQ ID NO: 69525 - protein, 9 aa, Homo Sapiens
ELLDSAVQN

SEQ ID NO: 69526 - protein, 9 aa, Homo Sapiens
LLDSAVQNL

SEQ ID NO: 69527 - protein, 9 aa, Homo Sapiens
SAVQNLQAK

SEQ ID NO: 69528 - protein, 10 aa, Homo Sapiens
GTSLSPNDPW

SEQ ID NO: 69529 - protein, 10 aa, Homo Sapiens
SLSPNDPWPL

SEQ ID NO: 69530 - protein, 10 aa, Homo Sapiens
DPWPLNPLSI

SEQ ID NO: 69531 - protein, 10 aa, Homo Sapiens
PLNPLSIQQT

SEQ ID NO: 69532 - protein, 10 aa, Homo Sapiens
NPLSIQQTTL

SEQ ID NO: 69533 - protein, 10 aa, Homo Sapiens
PLSIQQTTLL

SEQ ID NO: 69534 - protein, 10 aa, Homo Sapiens
SIQQTTLLLL

SEQ ID NO: 69535 - protein, 10 aa, Homo Sapiens
IQQTTLLLLL

SEQ ID NO: 69536 - protein, 10 aa, Homo Sapiens
QTTLLLLLSV

SEQ ID NO: 69537 - protein, 10 aa, Homo Sapiens
TTLLLLLSVL

SEQ ID NO: 69538 - protein, 10 aa, Homo Sapiens
TLLLLLSVLA

SEQ ID NO: 69539 - protein, 10 aa, Homo Sapiens
LLLLLSVLAT

SEQ ID NO: 69540 - protein, 10 aa, Homo Sapiens
LLLLSVLATV

SEQ ID NO: 69541 - protein, 10 aa, Homo Sapiens
LLSVLATVHV

SEQ ID NO: 69542 - protein, 10 aa, Homo Sapiens
VLATVHVGQR

SEQ ID NO: 69543 - protein, 10 aa, Homo Sapiens
TVHVGQRLLR

SEQ ID NO: 69544 - protein, 10 aa, Homo Sapiens
HVGQRLLRQR

SEQ ID NO: 69545 - protein, 10 aa, Homo Sapiens
VGQRLLRQRR

SEQ ID NO: 69546 - protein, 10 aa, Homo Sapiens
GQRLLRQRRR

SEQ ID NO: 69547 - protein, 10 aa, Homo Sapiens
RLLRQRRRQL

SEQ ID NO: 69548 - protein, 10 aa, Homo Sapiens
LLRQRRRQLR

SEQ ID NO: 69549 - protein, 10 aa, Homo Sapiens
RQRRRQLRSA

SEQ ID NO: 69550 - protein, 10 aa, Homo Sapiens
RRRQLRSAPP

SEQ ID NO: 69551 - protein, 10 aa, Homo Sapiens
QLRSAPPGPF

SEQ ID NO: 69552 - protein, 10 aa, Homo Sapiens
RSAPPGPFAW

SEQ ID NO: 69553 - protein, 10 aa, Homo Sapiens
APPGPFAWPL

SEQ ID NO: 69554 - protein, 10 aa, Homo Sapiens
PPGPFAWPLI

SEQ ID NO: 69555 - protein, 10 aa, Homo Sapiens
FAWPLIGNAA

SEQ ID NO: 69556 - protein, 10 aa, Homo Sapiens
WPLIGNAAAV

SEQ ID NO: 69557 - protein, 10 aa, Homo Sapiens
NAAAVGQAAH

SEQ ID NO: 69558 - protein, 10 aa, Homo Sapiens
AVGQAAHLSF

SEQ ID NO: 69559 - protein, 10 aa, Homo Sapiens
GQAAHLSFAR

SEQ ID NO: 69560 - protein, 10 aa, Homo Sapiens
QAAHLSFARL

SEQ ID NO: 69561 - protein, 10 aa, Homo Sapiens
AHLSFARLAR

SEQ ID NO: 69562 - protein, 10 aa, Homo Sapiens
HLSFARLARR

SEQ ID NO: 69563 - protein, 10 aa, Homo Sapiens
LSFARLARRY

SEQ ID NO: 69564 - protein, 10 aa, Homo Sapiens
RLARRYGDVF

SEQ ID NO: 69565 - protein, 10 aa, Homo Sapiens
RRYGDVFQIR

SEQ ID NO: 69566 - protein, 10 aa, Homo Sapiens
RYGDVFQIRL

SEQ ID NO: 69567 - protein, 10 aa, Homo Sapiens
FQIRLGSCPI

SEQ ID NO: 69568 - protein, 10 aa, Homo Sapiens
QIRLGSCPIV

SEQ ID NO: 69569 - protein, 10 aa, Homo Sapiens
RLGSCPIVVL

SEQ ID NO: 69570 - protein, 10 aa, Homo Sapiens
CPIVVLNGER

SEQ ID NO: 69571 - protein, 10 aa, Homo Sapiens
VLNGERAIHQ

SEQ ID NO: 69572 - protein, 10 aa, Homo Sapiens
GERAIHQALV

SEQ ID NO: 69573 - protein, 10 aa, Homo Sapiens
QALVQQGSAF

SEQ ID NO: 69574 - protein, 10 aa, Homo Sapiens
ALVQQGSAFA

SEQ ID NO: 69575 - protein, 10 aa, Homo Sapiens
GSAFADRPAF

SEQ ID NO: 69576 - protein, 10 aa, Homo Sapiens
SAFADRPAFA

SEQ ID NO: 69577 - protein, 10 aa, Homo Sapiens
FADRPAFASF

SEQ ID NO: 69578 - protein, 10 aa, Homo Sapiens
DRPAFASFRV

SEQ ID NO: 69579 - protein, 10 aa, Homo Sapiens
RPAFASFRVV

SEQ ID NO: 69580 - protein, 10 aa, Homo Sapiens
ASFRVVSGGR

SEQ ID NO: 69581 - protein, 10 aa, Homo Sapiens
VVSGGRSMAF

SEQ ID NO: 69582 - protein, 10 aa, Homo Sapiens
MAFGHYSEHW

SEQ ID NO: 69583 - protein, 10 aa, Homo Sapiens
AFGHYSEHWK

SEQ ID NO: 69584 - protein, 10 aa, Homo Sapiens
HYSEHWKVQR

SEQ ID NO: 69585 - protein, 10 aa, Homo Sapiens
YSEHWKVQRR

SEQ ID NO: 69586 - protein, 10 aa, Homo Sapiens
KVQRRAAHSM

SEQ ID NO: 69587 - protein, 10 aa, Homo Sapiens
VQRRAAHSMM

SEQ ID NO: 69588 - protein, 10 aa, Homo Sapiens
RRAAHSMMRN

SEQ ID NO: 69589 - protein, 10 aa, Homo Sapiens
RAAHSMMRNF

SEQ ID NO: 69590 - protein, 10 aa, Homo Sapiens
AAHSMMRNFF

SEQ ID NO: 69591 - protein, 10 aa, Homo Sapiens
HSMMRNFFTR

SEQ ID NO: 69592 - protein, 10 aa, Homo Sapiens
SMMRNFFTRQ

SEQ ID NO: 69593 - protein, 10 aa, Homo Sapiens
MRNFFTRQPR

SEQ ID NO: 69594 - protein, 10 aa, Homo Sapiens
NFFTRQPRSR

SEQ ID NO: 69595 - protein, 10 aa, Homo Sapiens
FTRQPRSRQV

SEQ ID NO: 69596 - protein, 10 aa, Homo Sapiens
TRQPRSRQVL

SEQ ID NO: 69597 - protein, 10 aa, Homo Sapiens
VLEGHVLSEA

SEQ ID NO: 69598 - protein, 10 aa, Homo Sapiens
HVLSEARELV

SEQ ID NO: 69599 - protein, 10 aa, Homo Sapiens
VLSEARELVA

SEQ ID NO: 69600 - protein, 10 aa, Homo Sapiens
SEARELVALL

SEQ ID NO: 69601 - protein, 10 aa, Homo Sapiens
EARELVALLV

SEQ ID NO: 69602 - protein, 10 aa, Homo Sapiens
LVALLVRGSA

SEQ ID NO: 69603 - protein, 10 aa, Homo Sapiens
LLVRGSADGA

SEQ ID NO: 69604 - protein, 10 aa, Homo Sapiens
LVRGSADGAF

SEQ ID NO: 69605 - protein, 10 aa, Homo Sapiens
SADGAFLDPR

SEQ ID NO: 69606 - protein, 10 aa, Homo Sapiens
AFLDPRPLTV

SEQ ID NO: 69607 - protein, 10 aa, Homo Sapiens
FLDPRPLTVV

SEQ ID NO: 69608 - protein, 10 aa, Homo Sapiens
DPRPLTVVAV

SEQ ID NO: 69609 - protein, 10 aa, Homo Sapiens
PLTVVAVANV

SEQ ID NO: 69610 - protein, 10 aa, Homo Sapiens
LTVVAVANVM

SEQ ID NO: 69611 - protein, 10 aa, Homo Sapiens
TVVAVANVMS

SEQ ID NO: 69612 - protein, 10 aa, Homo Sapiens
VVAVANVMSA

SEQ ID NO: 69613 - protein, 10 aa, Homo Sapiens
VAVANVMSAV

SEQ ID NO: 69614 - protein, 10 aa, Homo Sapiens
VANVMSAVCF

SEQ ID NO: 69615 - protein, 10 aa, Homo Sapiens
VMSAVCFGCR

SEQ ID NO: 69616 - protein, 10 aa, Homo Sapiens
MSAVCFGCRY

SEQ ID NO: 69617 - protein, 10 aa, Homo Sapiens
AVCFGCRYSH

SEQ ID NO: 69618 - protein, 10 aa, Homo Sapiens
RYSHDDPEFR

SEQ ID NO: 69619 - protein, 10 aa, Homo Sapiens
SHDDPEFREL

SEQ ID NO: 69620 - protein, 10 aa, Homo Sapiens
RELLSHNEEF

SEQ ID NO: 69621 - protein, 10 aa, Homo Sapiens
LLSHNEEFGR

SEQ ID NO: 69622 - protein, 10 aa, Homo Sapiens
TVGAGSLVDV

SEQ ID NO: 69623 - protein, 10 aa, Homo Sapiens
SLVDVMPWLQ

SEQ ID NO: 69624 - protein, 10 aa, Homo Sapiens
LVDVMPWLQY

SEQ ID NO: 69625 - protein, 10 aa, Homo Sapiens
MPWLQYFPNP

SEQ ID NO: 69626 - protein, 10 aa, Homo Sapiens
WLQYFPNPVR

SEQ ID NO: 69627 - protein, 10 aa, Homo Sapiens
QYFPNPVRTV

SEQ ID NO: 69628 - protein, 10 aa, Homo Sapiens
YFPNPVRTVF

SEQ ID NO: 69629 - protein, 10 aa, Homo Sapiens
FPNPVRTVFR

SEQ ID NO: 69630 - protein, 10 aa, Homo Sapiens
NPVRTVFREF

SEQ ID NO: 69631 - protein, 10 aa, Homo Sapiens
RTVFREFEQL

SEQ ID NO: 69632 - protein, 10 aa, Homo Sapiens
VFREFEQLNR

SEQ ID NO: 69633 - protein, 10 aa, Homo Sapiens
REFEQLNRNF

SEQ ID NO: 69634 - protein, 10 aa, Homo Sapiens
EQLNRNFSNF

SEQ ID NO: 69635 - protein, 10 aa, Homo Sapiens
QLNRNFSNFI

SEQ ID NO: 69636 - protein, 10 aa, Homo Sapiens
RNFSNFILDK

SEQ ID NO: 69637 - protein, 10 aa, Homo Sapiens
NFSNFILDKF

SEQ ID NO: 69638 - protein, 10 aa, Homo Sapiens
FSNFILDKFL

SEQ ID NO: 69639 - protein, 10 aa, Homo Sapiens
SNFILDKFLR

SEQ ID NO: 69640 - protein, 10 aa, Homo Sapiens
FILDKFLRHC

SEQ ID NO: 69641 - protein, 10 aa, Homo Sapiens
ILDKFLRHCE

SEQ ID NO: 69642 - protein, 10 aa, Homo Sapiens
KFLRHCESLR

SEQ ID NO: 69643 - protein, 10 aa, Homo Sapiens
ESLRPGAAPR

SEQ ID NO: 69644 - protein, 10 aa, Homo Sapiens
RPGAAPRDMM

SEQ ID NO: 69645 - protein, 10 aa, Homo Sapiens
AAPRDMMDAF

SEQ ID NO: 69646 - protein, 10 aa, Homo Sapiens
APRDMMDAFI

SEQ ID NO: 69647 - protein, 10 aa, Homo Sapiens
DMMDAFILSA

SEQ ID NO: 69648 - protein, 10 aa, Homo Sapiens
MMDAFILSAE

SEQ ID NO: 69649 - protein, 10 aa, Homo Sapiens
MDAFILSAEK

SEQ ID NO: 69650 - protein, 10 aa, Homo Sapiens
DAFILSAEKK

SEQ ID NO: 69651 - protein, 10 aa, Homo Sapiens
FILSAEKKAA

SEQ ID NO: 69652 - protein, 10 aa, Homo Sapiens
AEKKAAGDSH

SEQ ID NO: 69653 - protein, 10 aa, Homo Sapiens
SHGGGARLDL

SEQ ID NO: 69654 - protein, 10 aa, Homo Sapiens
RLDLENVPAT

SEQ ID NO: 69655 - protein, 10 aa, Homo Sapiens
NVPATITDIF

SEQ ID NO: 69656 - protein, 10 aa, Homo Sapiens
DIFGASQDTL

SEQ ID NO: 69657 - protein, 10 aa, Homo Sapiens
DTLSTALQWL

SEQ ID NO: 69658 - protein, 10 aa, Homo Sapiens
TLSTALQWLL

SEQ ID NO: 69659 - protein, 10 aa, Homo Sapiens
STALQWLLLL

SEQ ID NO: 69660 - protein, 10 aa, Homo Sapiens
TALQWLLLLF

SEQ ID NO: 69661 - protein, 10 aa, Homo Sapiens
ALQWLLLLFT

SEQ ID NO: 69662 - protein, 10 aa, Homo Sapiens
LQWLLLLFTR

SEQ ID NO: 69663 - protein, 10 aa, Homo Sapiens
QWLLLLFTRY

SEQ ID NO: 69664 - protein, 10 aa, Homo Sapiens
LLLFTRYPDV

SEQ ID NO: 69665 - protein, 10 aa, Homo Sapiens
LLFTRYPDVQ

SEQ ID NO: 69666 - protein, 10 aa, Homo Sapiens
FTRYPDVQTR

SEQ ID NO: 69667 - protein, 10 aa, Homo Sapiens
TRYPDVQTRV

SEQ ID NO: 69668 - protein, 10 aa, Homo Sapiens
YPDVQTRVQA

SEQ ID NO: 69669 - protein, 10 aa, Homo Sapiens
DVQTRVQAEL

SEQ ID NO: 69670 - protein, 10 aa, Homo Sapiens
RVQAELDQVV

SEQ ID NO: 69671 - protein, 10 aa, Homo Sapiens
QAELDQVVGR

SEQ ID NO: 69672 - protein, 10 aa, Homo Sapiens
VVGRDRLPCM

SEQ ID NO: 69673 - protein, 10 aa, Homo Sapiens
LPCMGDQPNL

SEQ ID NO: 69674 - protein, 10 aa, Homo Sapiens
CMGDQPNLPY

SEQ ID NO: 69675 - protein, 10 aa, Homo Sapiens
MGDQPNLPYV

SEQ ID NO: 69676 - protein, 10 aa, Homo Sapiens
QPNLPYVLAF

SEQ ID NO: 69677 - protein, 10 aa, Homo Sapiens
NLPYVLAFLY

SEQ ID NO: 69678 - protein, 10 aa, Homo Sapiens
LPYVLAFLYE

SEQ ID NO: 69679 - protein, 10 aa, Homo Sapiens
YVLAFLYEAM

SEQ ID NO: 69680 - protein, 10 aa, Homo Sapiens
VLAFLYEAMR

SEQ ID NO: 69681 - protein, 10 aa, Homo Sapiens
LAFLYEAMRF

SEQ ID NO: 69682 - protein, 10 aa, Homo Sapiens
FLYEAMRFSS

SEQ ID NO: 69683 - protein, 10 aa, Homo Sapiens
LYEAMRFSSF

SEQ ID NO: 69684 - protein, 10 aa, Homo Sapiens
YEAMRFSSFV

SEQ ID NO: 69685 - protein, 10 aa, Homo Sapiens
AMRFSSFVPV

SEQ ID NO: 69686 - protein, 10 aa, Homo Sapiens
RFSSFVPVTI

SEQ ID NO: 69687 - protein, 10 aa, Homo Sapiens
SSFVPVTIPH

SEQ ID NO: 69688 - protein, 10 aa, Homo Sapiens
VPVTIPHATT

SEQ ID NO: 69689 - protein, 10 aa, Homo Sapiens
IPHATTANTS

SEQ ID NO: 69690 - protein, 10 aa, Homo Sapiens
HATTANTSVL

SEQ ID NO: 69691 - protein, 10 aa, Homo Sapiens
TTANTSVLGY

SEQ ID NO: 69692 - protein, 10 aa, Homo Sapiens
TSVLGYHIPK

SEQ ID NO: 69693 - protein, 10 aa, Homo Sapiens
YHIPKDTVVF

SEQ ID NO: 69694 - protein, 10 aa, Homo Sapiens
HIPKDTVVFV

SEQ ID NO: 69695 - protein, 10 aa, Homo Sapiens
TVVFVNQWSV

SEQ ID NO: 69696 - protein, 10 aa, Homo Sapiens
NQWSVNHDPL

SEQ ID NO: 69697 - protein, 10 aa, Homo Sapiens
WSVNHDPLKW

SEQ ID NO: 69698 - protein, 10 aa, Homo Sapiens
WPNPENFDPA

SEQ ID NO: 69699 - protein, 10 aa, Homo Sapiens
NPENFDPARF

SEQ ID NO: 69700 - protein, 10 aa, Homo Sapiens
PENFDPARFL

SEQ ID NO: 69701 - protein, 10 aa, Homo Sapiens
NFDPARFLDK

SEQ ID NO: 69702 - protein, 10 aa, Homo Sapiens
FLDKDGLINK

SEQ ID NO: 69703 - protein, 10 aa, Homo Sapiens
LINKDLTSRV

SEQ ID NO: 69704 - protein, 10 aa, Homo Sapiens
LTSRVMIFSV

SEQ ID NO: 69705 - protein, 10 aa, Homo Sapiens
SRVMIFSVGK

SEQ ID NO: 69706 - protein, 10 aa, Homo Sapiens
RVMIFSVGKR

SEQ ID NO: 69707 - protein, 10 aa, Homo Sapiens
VMIFSVGKRR

SEQ ID NO: 69708 - protein, 10 aa, Homo Sapiens
RRCIGEELSK

SEQ ID NO: 69709 - protein, 10 aa, Homo Sapiens
GEELSKMQLF

SEQ ID NO: 69710 - protein, 10 aa, Homo Sapiens
EELSKMQLFL

SEQ ID NO: 69711 - protein, 10 aa, Homo Sapiens
ELSKMQLFLF

SEQ ID NO: 69712 - protein, 10 aa, Homo Sapiens
KMQLFLFISI

SEQ ID NO: 69713 - protein, 10 aa, Homo Sapiens
MQLFLFISIL

SEQ ID NO: 69714 - protein, 10 aa, Homo Sapiens
QLFLFISILA

SEQ ID NO: 69715 - protein, 10 aa, Homo Sapiens
FLFISILAHQ

SEQ ID NO: 69716 - protein, 10 aa, Homo Sapiens
ISILAHQCDF

SEQ ID NO: 69717 - protein, 10 aa, Homo Sapiens
SILAHQCDFR

SEQ ID NO: 69718 - protein, 10 aa, Homo Sapiens
ILAHQCDFRA

SEQ ID NO: 69719 - protein, 10 aa, Homo Sapiens
RANPNEPAKM

SEQ ID NO: 69720 - protein, 10 aa, Homo Sapiens
NPNEPAKMNF

SEQ ID NO: 69721 - protein, 10 aa, Homo Sapiens
KMNFSYGLTI

SEQ ID NO: 69722 - protein, 10 aa, Homo Sapiens
MNFSYGLTIK

SEQ ID NO: 69723 - protein, 10 aa, Homo Sapiens
FSYGLTIKPK

SEQ ID NO: 69724 - protein, 10 aa, Homo Sapiens
GLTIKPKSFK

SEQ ID NO: 69725 - protein, 10 aa, Homo Sapiens
LTIKPKSFKV

SEQ ID NO: 69726 - protein, 10 aa, Homo Sapiens
KSFKVNVTLR

SEQ ID NO: 69727 - protein, 10 aa, Homo Sapiens
ESMELLDSAV

SEQ ID NO: 69728 - protein, 10 aa, Homo Sapiens
ELLDSAVQNL

SEQ ID NO: 69729 - protein, 10 aa, Homo Sapiens
LLDSAVQNLQ

SEQ ID NO: 69730 - protein, 10 aa, Homo Sapiens
DSAVQNLQAK

SEQ ID NO: 69731 - protein, 11 aa, Homo Sapiens
TSLSPNDPWPL

SEQ ID NO: 69732 - protein, 11 aa, Homo Sapiens
SLSPNDPWPLN

SEQ ID NO: 69733 - protein, 11 aa, Homo Sapiens
SPNDPWPLNPL

SEQ ID NO: 69734 - protein, 11 aa, Homo Sapiens
WPLNPLSIQQT

SEQ ID NO: 69735 - protein, 11 aa, Homo Sapiens
PLNPLSIQQTT

SEQ ID NO: 69736 - protein, 11 aa, Homo Sapiens
NPLSIQQTTLL

SEQ ID NO: 69737 - protein, 11 aa, Homo Sapiens
PLSIQQTTLLL

SEQ ID NO: 69738 - protein, 11 aa, Homo Sapiens
SIQQTTLLLLL

SEQ ID NO: 69739 - protein, 11 aa, Homo Sapiens
QQTTLLLLLSV

SEQ ID NO: 69740 - protein, 11 aa, Homo Sapiens
QTTLLLLLSVL

SEQ ID NO: 69741 - protein, 11 aa, Homo Sapiens
TTLLLLLSVLA

SEQ ID NO: 69742 - protein, 11 aa, Homo Sapiens
TLLLLLSVLAT

SEQ ID NO: 69743 - protein, 11 aa, Homo Sapiens
LLLLLSVLATV

SEQ ID NO: 69744 - protein, 11 aa, Homo Sapiens
LLLSVLATVHV

SEQ ID NO: 69745 - protein, 11 aa, Homo Sapiens
SVLATVHVGQR

SEQ ID NO: 69746 - protein, 11 aa, Homo Sapiens
VLATVHVGQRL

SEQ ID NO: 69747 - protein, 11 aa, Homo Sapiens
ATVHVGQRLLR

SEQ ID NO: 69748 - protein, 11 aa, Homo Sapiens
HVGQRLLRQRR

SEQ ID NO: 69749 - protein, 11 aa, Homo Sapiens
QRLLRQRRRQL

SEQ ID NO: 69750 - protein, 11 aa, Homo Sapiens
RLLRQRRRQLR

SEQ ID NO: 69751 - protein, 11 aa, Homo Sapiens
RRQLRSAPPGP

SEQ ID NO: 69752 - protein, 11 aa, Homo Sapiens
RQLRSAPPGPF

SEQ ID NO: 69753 - protein, 11 aa, Homo Sapiens
QLRSAPPGPFA

SEQ ID NO: 69754 - protein, 11 aa, Homo Sapiens
SAPPGPFAWPL

SEQ ID NO: 69755 - protein, 11 aa, Homo Sapiens
APPGPFAWPLI

SEQ ID NO: 69756 - protein, 11 aa, Homo Sapiens
GPFAWPLIGNA

SEQ ID NO: 69757 - protein, 11 aa, Homo Sapiens
FAWPLIGNAAA

SEQ ID NO: 69758 - protein, 11 aa, Homo Sapiens
WPLIGNAAAVG

SEQ ID NO: 69759 - protein, 11 aa, Homo Sapiens
PLIGNAAAVGQ

SEQ ID NO: 69760 - protein, 11 aa, Homo Sapiens
NAAAVGQAAHL

SEQ ID NO: 69761 - protein, 11 aa, Homo Sapiens
AAVGQAAHLSF

SEQ ID NO: 69762 - protein, 11 aa, Homo Sapiens
AVGQAAHLSFA

SEQ ID NO: 69763 - protein, 11 aa, Homo Sapiens
VGQAAHLSFAR

SEQ ID NO: 69764 - protein, 11 aa, Homo Sapiens
GQAAHLSFARL

SEQ ID NO: 69765 - protein, 11 aa, Homo Sapiens
QAAHLSFARLA

SEQ ID NO: 69766 - protein, 11 aa, Homo Sapiens
AAHLSFARLAR

SEQ ID NO: 69767 - protein, 11 aa, Homo Sapiens
HLSFARLARRY

SEQ ID NO: 69768 - protein, 11 aa, Homo Sapiens
FARLARRYGDV

SEQ ID NO: 69769 - protein, 11 aa, Homo Sapiens
ARLARRYGDVF

SEQ ID NO: 69770 - protein, 11 aa, Homo Sapiens
RLARRYGDVFQ

SEQ ID NO: 69771 - protein, 11 aa, Homo Sapiens
RRYGDVFQIRL

SEQ ID NO: 69772 - protein, 11 aa, Homo Sapiens
FQIRLGSCPIV

SEQ ID NO: 69773 - protein, 11 aa, Homo Sapiens
QIRLGSCPIVV

SEQ ID NO: 69774 - protein, 11 aa, Homo Sapiens
CPIVVLNGERA

SEQ ID NO: 69775 - protein, 11 aa, Homo Sapiens
VLNGERAIHQA

SEQ ID NO: 69776 - protein, 11 aa, Homo Sapiens
HQALVQQGSAF

SEQ ID NO: 69777 - protein, 11 aa, Homo Sapiens
QALVQQGSAFA

SEQ ID NO: 69778 - protein, 11 aa, Homo Sapiens
LVQQGSAFADR

SEQ ID NO: 69779 - protein, 11 aa, Homo Sapiens
AFADRPAFASF

SEQ ID NO: 69780 - protein, 11 aa, Homo Sapiens
FADRPAFASFR

SEQ ID NO: 69781 - protein, 11 aa, Homo Sapiens
RPAFASFRVVS

SEQ ID NO: 69782 - protein, 11 aa, Homo Sapiens
FASFRVVSGGR

SEQ ID NO: 69783 - protein, 11 aa, Homo Sapiens
RVVSGGRSMAF

SEQ ID NO: 69784 - protein, 11 aa, Homo Sapiens
RSMAFGHYSEH

SEQ ID NO: 69785 - protein, 11 aa, Homo Sapiens
SMAFGHYSEHW

SEQ ID NO: 69786 - protein, 11 aa, Homo Sapiens
MAFGHYSEHWK

SEQ ID NO: 69787 - protein, 11 aa, Homo Sapiens
AFGHYSEHWKV

SEQ ID NO: 69788 - protein, 11 aa, Homo Sapiens
HYSEHWKVQRR

SEQ ID NO: 69789 - protein, 11 aa, Homo Sapiens
KVQRRAAHSMM

SEQ ID NO: 69790 - protein, 11 aa, Homo Sapiens
VQRRAAHSMMR

SEQ ID NO: 69791 - protein, 11 aa, Homo Sapiens
RRAAHSMMRNF

SEQ ID NO: 69792 - protein, 11 aa, Homo Sapiens
RAAHSMMRNFF

SEQ ID NO: 69793 - protein, 11 aa, Homo Sapiens
AHSMMRNFFTR

SEQ ID NO: 69794 - protein, 11 aa, Homo Sapiens
MMRNFFTRQPR

SEQ ID NO: 69795 - protein, 11 aa, Homo Sapiens
RNFFTRQPRSR

SEQ ID NO: 69796 - protein, 11 aa, Homo Sapiens
FTRQPRSRQVL

SEQ ID NO: 69797 - protein, 11 aa, Homo Sapiens
RSRQVLEGHVL

SEQ ID NO: 69798 - protein, 11 aa, Homo Sapiens
QVLEGHVLSEA

SEQ ID NO: 69799 - protein, 11 aa, Homo Sapiens
VLSEARELVAL

SEQ ID NO: 69800 - protein, 11 aa, Homo Sapiens
EARELVALLVR

SEQ ID NO: 69801 - protein, 11 aa, Homo Sapiens
ELVALLVRGSA

SEQ ID NO: 69802 - protein, 11 aa, Homo Sapiens
ALLVRGSADGA

SEQ ID NO: 69803 - protein, 11 aa, Homo Sapiens
LLVRGSADGAF

SEQ ID NO: 69804 - protein, 11 aa, Homo Sapiens
LVRGSADGAFL

SEQ ID NO: 69805 - protein, 11 aa, Homo Sapiens
GSADGAFLDPR

SEQ ID NO: 69806 - protein, 11 aa, Homo Sapiens
GAFLDPRPLTV

SEQ ID NO: 69807 - protein, 11 aa, Homo Sapiens
AFLDPRPLTVV

SEQ ID NO: 69808 - protein, 11 aa, Homo Sapiens
FLDPRPLTVVA

SEQ ID NO: 69809 - protein, 11 aa, Homo Sapiens
RPLTVVAVANV

SEQ ID NO: 69810 - protein, 11 aa, Homo Sapiens
TVVAVANVMSA

SEQ ID NO: 69811 - protein, 11 aa, Homo Sapiens
VVAVANVMSAV

SEQ ID NO: 69812 - protein, 11 aa, Homo Sapiens
AVANVMSAVCF

SEQ ID NO: 69813 - protein, 11 aa, Homo Sapiens
NVMSAVCFGCR

SEQ ID NO: 69814 - protein, 11 aa, Homo Sapiens
VMSAVCFGCRY

SEQ ID NO: 69815 - protein, 11 aa, Homo Sapiens
CRYSHDDPEFR

SEQ ID NO: 69816 - protein, 11 aa, Homo Sapiens
SHDDPEFRELL

SEQ ID NO: 69817 - protein, 11 aa, Homo Sapiens
ELLSHNEEFGR

SEQ ID NO: 69818 - protein, 11 aa, Homo Sapiens
EEFGRTVGAGS

SEQ ID NO: 69819 - protein, 11 aa, Homo Sapiens
RTVGAGSLVDV

SEQ ID NO: 69820 - protein, 11 aa, Homo Sapiens
TVGAGSLVDVM

SEQ ID NO: 69821 - protein, 11 aa, Homo Sapiens
GAGSLVDVMPW

SEQ ID NO: 69822 - protein, 11 aa, Homo Sapiens
SLVDVMPWLQY

SEQ ID NO: 69823 - protein, 11 aa, Homo Sapiens
LVDVMPWLQYF

SEQ ID NO: 69824 - protein, 11 aa, Homo Sapiens
MPWLQYFPNPV

SEQ ID NO: 69825 - protein, 11 aa, Homo Sapiens
LQYFPNPVRTV

SEQ ID NO: 69826 - protein, 11 aa, Homo Sapiens
QYFPNPVRTVF

SEQ ID NO: 69827 - protein, 11 aa, Homo Sapiens
YFPNPVRTVFR

SEQ ID NO: 69828 - protein, 11 aa, Homo Sapiens
TVFREFEQLNR

SEQ ID NO: 69829 - protein, 11 aa, Homo Sapiens
REFEQLNRNFS

SEQ ID NO: 69830 - protein, 11 aa, Homo Sapiens
FEQLNRNFSNF

SEQ ID NO: 69831 - protein, 11 aa, Homo Sapiens
EQLNRNFSNFI

SEQ ID NO: 69832 - protein, 11 aa, Homo Sapiens
QLNRNFSNFIL

SEQ ID NO: 69833 - protein, 11 aa, Homo Sapiens
FSNFILDKFLR

SEQ ID NO: 69834 - protein, 11 aa, Homo Sapiens
FILDKFLRHCE

SEQ ID NO: 69835 - protein, 11 aa, Homo Sapiens
ILDKFLRHCES

SEQ ID NO: 69836 - protein, 11 aa, Homo Sapiens
DKFLRHCESLR

SEQ ID NO: 69837 - protein, 11 aa, Homo Sapiens
SLRPGAAPRDM

SEQ ID NO: 69838 - protein, 11 aa, Homo Sapiens
GAAPRDMMDAF

SEQ ID NO: 69839 - protein, 11 aa, Homo Sapiens
APRDMMDAFIL

SEQ ID NO: 69840 - protein, 11 aa, Homo Sapiens
MMDAFILSAEK

SEQ ID NO: 69841 - protein, 11 aa, Homo Sapiens
MDAFILSAEKK

SEQ ID NO: 69842 - protein, 11 aa, Homo Sapiens
RLDLENVPATI

SEQ ID NO: 69843 - protein, 11 aa, Homo Sapiens
ENVPATITDIF

SEQ ID NO: 69844 - protein, 11 aa, Homo Sapiens
VPATITDIFGA

SEQ ID NO: 69845 - protein, 11 aa, Homo Sapiens
FGASQDTLSTA

SEQ ID NO: 69846 - protein, 11 aa, Homo Sapiens
GASQDTLSTAL

SEQ ID NO: 69847 - protein, 11 aa, Homo Sapiens
DTLSTALQWLL

SEQ ID NO: 69848 - protein, 11 aa, Homo Sapiens
TLSTALQWLLL

SEQ ID NO: 69849 - protein, 11 aa, Homo Sapiens
STALQWLLLLF

SEQ ID NO: 69850 - protein, 11 aa, Homo Sapiens
ALQWLLLLFTR

SEQ ID NO: 69851 - protein, 11 aa, Homo Sapiens
LQWLLLLFTRY

SEQ ID NO: 69852 - protein, 11 aa, Homo Sapiens
LLLLFTRYPDV

SEQ ID NO: 69853 - protein, 11 aa, Homo Sapiens
LLFTRYPDVQT

SEQ ID NO: 69854 - protein, 11 aa, Homo Sapiens
LFTRYPDVQTR

SEQ ID NO: 69855 - protein, 11 aa, Homo Sapiens
FTRYPDVQTRV

SEQ ID NO: 69856 - protein, 11 aa, Homo Sapiens
YPDVQTRVQAE

SEQ ID NO: 69857 - protein, 11 aa, Homo Sapiens
ELDQVVGRDRL

SEQ ID NO: 69858 - protein, 11 aa, Homo Sapiens
QVVGRDRLPCM

SEQ ID NO: 69859 - protein, 11 aa, Homo Sapiens
RLPCMGDQPNL

SEQ ID NO: 69860 - protein, 11 aa, Homo Sapiens
LPCMGDQPNLP

SEQ ID NO: 69861 - protein, 11 aa, Homo Sapiens
PCMGDQPNLPY

SEQ ID NO: 69862 - protein, 11 aa, Homo Sapiens
CMGDQPNLPYV

SEQ ID NO: 69863 - protein, 11 aa, Homo Sapiens
LPYVLAFLYEA

SEQ ID NO: 69864 - protein, 11 aa, Homo Sapiens
YVLAFLYEAMR

SEQ ID NO: 69865 - protein, 11 aa, Homo Sapiens
FLYEAMRFSSF

SEQ ID NO: 69866 - protein, 11 aa, Homo Sapiens
LYEAMRFSSFV

SEQ ID NO: 69867 - protein, 11 aa, Homo Sapiens
EAMRFSSFVPV

SEQ ID NO: 69868 - protein, 11 aa, Homo Sapiens
AMRFSSFVPVT

SEQ ID NO: 69869 - protein, 11 aa, Homo Sapiens
MRFSSFVPVTI

SEQ ID NO: 69870 - protein, 11 aa, Homo Sapiens
VPVTIPHATTA

SEQ ID NO: 69871 - protein, 11 aa, Homo Sapiens
IPHATTANTSV

SEQ ID NO: 69872 - protein, 11 aa, Homo Sapiens
PHATTANTSVL

SEQ ID NO: 69873 - protein, 11 aa, Homo Sapiens
ATTANTSVLGY

SEQ ID NO: 69874 - protein, 11 aa, Homo Sapiens
TTANTSVLGYH

SEQ ID NO: 69875 - protein, 11 aa, Homo Sapiens
TANTSVLGYHI

SEQ ID NO: 69876 - protein, 11 aa, Homo Sapiens
NTSVLGYHIPK

SEQ ID NO: 69877 - protein, 11 aa, Homo Sapiens
VLGYHIPKDTV

SEQ ID NO: 69878 - protein, 11 aa, Homo Sapiens
GYHIPKDTVVF

SEQ ID NO: 69879 - protein, 11 aa, Homo Sapiens
YHIPKDTVVFV

SEQ ID NO: 69880 - protein, 11 aa, Homo Sapiens
DTVVFVNQWSV

SEQ ID NO: 69881 - protein, 11 aa, Homo Sapiens
NQWSVNHDPLK

SEQ ID NO: 69882 - protein, 11 aa, Homo Sapiens
QWSVNHDPLKW

SEQ ID NO: 69883 - protein, 11 aa, Homo Sapiens
DPLKWPNPENF

SEQ ID NO: 69884 - protein, 11 aa, Homo Sapiens
WPNPENFDPAR

SEQ ID NO: 69885 - protein, 11 aa, Homo Sapiens
NPENFDPARFL

SEQ ID NO: 69886 - protein, 11 aa, Homo Sapiens
ENFDPARFLDK

SEQ ID NO: 69887 - protein, 11 aa, Homo Sapiens
RFLDKDGLINK

SEQ ID NO: 69888 - protein, 11 aa, Homo Sapiens
GLINKDLTSRV

SEQ ID NO: 69889 - protein, 11 aa, Homo Sapiens
LINKDLTSRVM

SEQ ID NO: 69890 - protein, 11 aa, Homo Sapiens
DLTSRVMIFSV

SEQ ID NO: 69891 - protein, 11 aa, Homo Sapiens
TSRVMIFSVGK

SEQ ID NO: 69892 - protein, 11 aa, Homo Sapiens
RVMIFSVGKRR

SEQ ID NO: 69893 - protein, 11 aa, Homo Sapiens
MIFSVGKRRCI

SEQ ID NO: 69894 - protein, 11 aa, Homo Sapiens
KRRCIGEELSK

SEQ ID NO: 69895 - protein, 11 aa, Homo Sapiens
RRCIGEELSKM

SEQ ID NO: 69896 - protein, 11 aa, Homo Sapiens
CIGEELSKMQL

SEQ ID NO: 69897 - protein, 11 aa, Homo Sapiens
GEELSKMQLFL

SEQ ID NO: 69898 - protein, 11 aa, Homo Sapiens
EELSKMQLFLF

SEQ ID NO: 69899 - protein, 11 aa, Homo Sapiens
ELSKMQLFLFI

SEQ ID NO: 69900 - protein, 11 aa, Homo Sapiens
SKMQLFLFISI

SEQ ID NO: 69901 - protein, 11 aa, Homo Sapiens
KMQLFLFISIL

SEQ ID NO: 69902 - protein, 11 aa, Homo Sapiens
MQLFLFISILA

SEQ ID NO: 69903 - protein, 11 aa, Homo Sapiens
QLFLFISILAH

SEQ ID NO: 69904 - protein, 11 aa, Homo Sapiens
FLFISILAHQC

SEQ ID NO: 69905 - protein, 11 aa, Homo Sapiens
FISILAHQCDF

SEQ ID NO: 69906 - protein, 11 aa, Homo Sapiens
ISILAHQCDFR

SEQ ID NO: 69907 - protein, 11 aa, Homo Sapiens
SILAHQCDFRA

SEQ ID NO: 69908 - protein, 11 aa, Homo Sapiens
DFRANPNEPAK

SEQ ID NO: 69909 - protein, 11 aa, Homo Sapiens
EPAKMNFSYGL

SEQ ID NO: 69910 - protein, 11 aa, Homo Sapiens
AKMNFSYGLTI

SEQ ID NO: 69911 - protein, 11 aa, Homo Sapiens
KMNFSYGLTIK

SEQ ID NO: 69912 - protein, 11 aa, Homo Sapiens
SYGLTIKPKSF

SEQ ID NO: 69913 - protein, 11 aa, Homo Sapiens
GLTIKPKSFKV

SEQ ID NO: 69914 - protein, 11 aa, Homo Sapiens
TIKPKSFKVNV

SEQ ID NO: 69915 - protein, 11 aa, Homo Sapiens
KPKSFKVNVTL

SEQ ID NO: 69916 - protein, 11 aa, Homo Sapiens
NVTLRESMELL

SEQ ID NO: 69917 - protein, 11 aa, Homo Sapiens
RESMELLDSAV

SEQ ID NO: 69918 - protein, 11 aa, Homo Sapiens
MELLDSAVQNL

SEQ ID NO: 69919 - protein, 11 aa, Homo Sapiens
ELLDSAVQNLQ

SEQ ID NO: 69920 - protein, 11 aa, Homo Sapiens
LLDSAVQNLQA

SEQ ID NO: 69921 - protein, 13 aa, Homo Sapiens
MGTSLSPNDPWPL

SEQ ID NO: 69922 - protein, 13 aa, Homo Sapiens
GTSLSPNDPWPLN

SEQ ID NO: 69923 - protein, 13 aa, Homo Sapiens
TSLSPNDPWPLNP

SEQ ID NO: 69924 - protein, 13 aa, Homo Sapiens
SLSPNDPWPLNPL

SEQ ID NO: 69925 - protein, 13 aa, Homo Sapiens
LSPNDPWPLNPLS

SEQ ID NO: 69926 - protein, 13 aa, Homo Sapiens
SPNDPWPLNPLSI

SEQ ID NO: 69927 - protein, 13 aa, Homo Sapiens
PNDPWPLNPLSIQ

SEQ ID NO: 69928 - protein, 13 aa, Homo Sapiens
NDPWPLNPLSIQQ

SEQ ID NO: 69929 - protein, 13 aa, Homo Sapiens
DPWPLNPLSIQQT

SEQ ID NO: 69930 - protein, 13 aa, Homo Sapiens
PWPLNPLSIQQTT

SEQ ID NO: 69931 - protein, 13 aa, Homo Sapiens
WPLNPLSIQQTTL

SEQ ID NO: 69932 - protein, 13 aa, Homo Sapiens
PLNPLSIQQTTLL

SEQ ID NO: 69933 - protein, 13 aa, Homo Sapiens
LNPLSIQQTTLLL

SEQ ID NO: 69934 - protein, 13 aa, Homo Sapiens
NPLSIQQTTLLLL

SEQ ID NO: 69935 - protein, 13 aa, Homo Sapiens
PLSIQQTTLLLLL

SEQ ID NO: 69936 - protein, 13 aa, Homo Sapiens
LSIQQTTLLLLLS

SEQ ID NO: 69937 - protein, 13 aa, Homo Sapiens
SIQQTTLLLLLSV

SEQ ID NO: 69938 - protein, 13 aa, Homo Sapiens
IQQTTLLLLLSVL

SEQ ID NO: 69939 - protein, 13 aa, Homo Sapiens
QQTTLLLLLSVLA

SEQ ID NO: 69940 - protein, 13 aa, Homo Sapiens
QTTLLLLLSVLAT

SEQ ID NO: 69941 - protein, 13 aa, Homo Sapiens
TTLLLLLSVLATV

SEQ ID NO: 69942 - protein, 13 aa, Homo Sapiens
TLLLLLSVLATVH

SEQ ID NO: 69943 - protein, 13 aa, Homo Sapiens
LLLLLSVLATVHV

SEQ ID NO: 69944 - protein, 13 aa, Homo Sapiens
LLLLSVLATVHVG

SEQ ID NO: 69945 - protein, 13 aa, Homo Sapiens
LLLSVLATVHVGQ

SEQ ID NO: 69946 - protein, 13 aa, Homo Sapiens
LLSVLATVHVGQR

SEQ ID NO: 69947 - protein, 13 aa, Homo Sapiens
LSVLATVHVGQRL

SEQ ID NO: 69948 - protein, 13 aa, Homo Sapiens
SVLATVHVGQRLL

SEQ ID NO: 69949 - protein, 13 aa, Homo Sapiens
VLATVHVGQRLLR

SEQ ID NO: 69950 - protein, 13 aa, Homo Sapiens
LATVHVGQRLLRQ

SEQ ID NO: 69951 - protein, 13 aa, Homo Sapiens
ATVHVGQRLLRQR

SEQ ID NO: 69952 - protein, 13 aa, Homo Sapiens
TVHVGQRLLRQRR

SEQ ID NO: 69953 - protein, 13 aa, Homo Sapiens
VHVGQRLLRQRRR

SEQ ID NO: 69954 - protein, 13 aa, Homo Sapiens
HVGQRLLRQRRRQ

SEQ ID NO: 69955 - protein, 13 aa, Homo Sapiens
VGQRLLRQRRRQL

SEQ ID NO: 69956 - protein, 13 aa, Homo Sapiens
GQRLLRQRRRQLR

SEQ ID NO: 69957 - protein, 13 aa, Homo Sapiens
QRLLRQRRRQLRS

SEQ ID NO: 69958 - protein, 13 aa, Homo Sapiens
RLLRQRRRQLRSA

SEQ ID NO: 69959 - protein, 13 aa, Homo Sapiens
LLRQRRRQLRSAP

SEQ ID NO: 69960 - protein, 13 aa, Homo Sapiens
LRQRRRQLRSAPP

SEQ ID NO: 69961 - protein, 13 aa, Homo Sapiens
RQRRRQLRSAPPG

SEQ ID NO: 69962 - protein, 13 aa, Homo Sapiens
QRRRQLRSAPPGP

SEQ ID NO: 69963 - protein, 13 aa, Homo Sapiens
RRRQLRSAPPGPF

SEQ ID NO: 69964 - protein, 13 aa, Homo Sapiens
RRQLRSAPPGPFA

SEQ ID NO: 69965 - protein, 13 aa, Homo Sapiens
RQLRSAPPGPFAW

SEQ ID NO: 69966 - protein, 13 aa, Homo Sapiens
QLRSAPPGPFAWP

SEQ ID NO: 69967 - protein, 13 aa, Homo Sapiens
LRSAPPGPFAWPL

SEQ ID NO: 69968 - protein, 13 aa, Homo Sapiens
RSAPPGPFAWPLI

SEQ ID NO: 69969 - protein, 13 aa, Homo Sapiens
SAPPGPFAWPLIG

SEQ ID NO: 69970 - protein, 13 aa, Homo Sapiens
APPGPFAWPLIGN

SEQ ID NO: 69971 - protein, 13 aa, Homo Sapiens
PPGPFAWPLIGNA

SEQ ID NO: 69972 - protein, 13 aa, Homo Sapiens
PGPFAWPLIGNAA

SEQ ID NO: 69973 - protein, 13 aa, Homo Sapiens
GPFAWPLIGNAAA

SEQ ID NO: 69974 - protein, 13 aa, Homo Sapiens
PFAWPLIGNAAAV

SEQ ID NO: 69975 - protein, 13 aa, Homo Sapiens
FAWPLIGNAAAVG

SEQ ID NO: 69976 - protein, 13 aa, Homo Sapiens
AWPLIGNAAAVGQ

SEQ ID NO: 69977 - protein, 13 aa, Homo Sapiens
WPLIGNAAAVGQA

SEQ ID NO: 69978 - protein, 13 aa, Homo Sapiens
PLIGNAAAVGQAA

SEQ ID NO: 69979 - protein, 13 aa, Homo Sapiens
LIGNAAAVGQAAH

SEQ ID NO: 69980 - protein, 13 aa, Homo Sapiens
IGNAAAVGQAAHL

SEQ ID NO: 69981 - protein, 13 aa, Homo Sapiens
GNAAAVGQAAHLS

SEQ ID NO: 69982 - protein, 13 aa, Homo Sapiens
NAAAVGQAAHLSF

SEQ ID NO: 69983 - protein, 13 aa, Homo Sapiens
AAAVGQAAHLSFA

SEQ ID NO: 69984 - protein, 13 aa, Homo Sapiens
AAVGQAAHLSFAR

SEQ ID NO: 69985 - protein, 13 aa, Homo Sapiens
AVGQAAHLSFARL

SEQ ID NO: 69986 - protein, 13 aa, Homo Sapiens
VGQAAHLSFARLA

SEQ ID NO: 69987 - protein, 13 aa, Homo Sapiens
GQAAHLSFARLAR

SEQ ID NO: 69988 - protein, 13 aa, Homo Sapiens
QAAHLSFARLARR

SEQ ID NO: 69989 - protein, 13 aa, Homo Sapiens
AAHLSFARLARRY

SEQ ID NO: 69990 - protein, 13 aa, Homo Sapiens
AHLSFARLARRYG

SEQ ID NO: 69991 - protein, 13 aa, Homo Sapiens
HLSFARLARRYGD

SEQ ID NO: 69992 - protein, 13 aa, Homo Sapiens
LSFARLARRYGDV

SEQ ID NO: 69993 - protein, 13 aa, Homo Sapiens
SFARLARRYGDVF

SEQ ID NO: 69994 - protein, 13 aa, Homo Sapiens
FARLARRYGDVFQ

SEQ ID NO: 69995 - protein, 13 aa, Homo Sapiens
ARLARRYGDVFQI

SEQ ID NO: 69996 - protein, 13 aa, Homo Sapiens
RLARRYGDVFQIR

SEQ ID NO: 69997 - protein, 13 aa, Homo Sapiens
LARRYGDVFQIRL

SEQ ID NO: 69998 - protein, 13 aa, Homo Sapiens
ARRYGDVFQIRLG

SEQ ID NO: 69999 - protein, 13 aa, Homo Sapiens
RRYGDVFQIRLGS

SEQ ID NO: 70000 - protein, 13 aa, Homo Sapiens
RYGDVFQIRLGSC

SEQ ID NO: 70001 - protein, 13 aa, Homo Sapiens
YGDVFQIRLGSCP

SEQ ID NO: 70002 - protein, 13 aa, Homo Sapiens
GDVFQIRLGSCPI

SEQ ID NO: 70003 - protein, 13 aa, Homo Sapiens
DVFQIRLGSCPIV

SEQ ID NO: 70004 - protein, 13 aa, Homo Sapiens
VFQIRLGSCPIVV

SEQ ID NO: 70005 - protein, 13 aa, Homo Sapiens
FQIRLGSCPIVVL

SEQ ID NO: 70006 - protein, 13 aa, Homo Sapiens
QIRLGSCPIVVLN

SEQ ID NO: 70007 - protein, 13 aa, Homo Sapiens
IRLGSCPIVVLNG

SEQ ID NO: 70008 - protein, 13 aa, Homo Sapiens
RLGSCPIVVLNGE

SEQ ID NO: 70009 - protein, 13 aa, Homo Sapiens
LGSCPIVVLNGER

SEQ ID NO: 70010 - protein, 13 aa, Homo Sapiens
GSCPIVVLNGERA

SEQ ID NO: 70011 - protein, 13 aa, Homo Sapiens
SCPIVVLNGERAI

SEQ ID NO: 70012 - protein, 13 aa, Homo Sapiens
CPIVVLNGERAIH

SEQ ID NO: 70013 - protein, 13 aa, Homo Sapiens
PIVVLNGERAIHQ

SEQ ID NO: 70014 - protein, 13 aa, Homo Sapiens
IVVLNGERAIHQA

SEQ ID NO: 70015 - protein, 13 aa, Homo Sapiens
VVLNGERAIHQAL

SEQ ID NO: 70016 - protein, 13 aa, Homo Sapiens
VLNGERAIHQALV

SEQ ID NO: 70017 - protein, 13 aa, Homo Sapiens
LNGERAIHQALVQ

SEQ ID NO: 70018 - protein, 13 aa, Homo Sapiens
NGERAIHQALVQQ

SEQ ID NO: 70019 - protein, 13 aa, Homo Sapiens
GERAIHQALVQQG

SEQ ID NO: 70020 - protein, 13 aa, Homo Sapiens
ERAIHQALVQQGS

SEQ ID NO: 70021 - protein, 13 aa, Homo Sapiens
RAIHQALVQQGSA

SEQ ID NO: 70022 - protein, 13 aa, Homo Sapiens
AIHQALVQQGSAF

SEQ ID NO: 70023 - protein, 13 aa, Homo Sapiens
IHQALVQQGSAFA

SEQ ID NO: 70024 - protein, 13 aa, Homo Sapiens
HQALVQQGSAFAD

SEQ ID NO: 70025 - protein, 13 aa, Homo Sapiens
QALVQQGSAFADR

SEQ ID NO: 70026 - protein, 13 aa, Homo Sapiens
ALVQQGSAFADRP

SEQ ID NO: 70027 - protein, 13 aa, Homo Sapiens
LVQQGSAFADRPA

SEQ ID NO: 70028 - protein, 13 aa, Homo Sapiens
VQQGSAFADRPAF

SEQ ID NO: 70029 - protein, 13 aa, Homo Sapiens
QQGSAFADRPAFA

SEQ ID NO: 70030 - protein, 13 aa, Homo Sapiens
QGSAFADRPAFAS

SEQ ID NO: 70031 - protein, 13 aa, Homo Sapiens
GSAFADRPAFASF

SEQ ID NO: 70032 - protein, 13 aa, Homo Sapiens
SAFADRPAFASFR

SEQ ID NO: 70033 - protein, 13 aa, Homo Sapiens
AFADRPAFASFRV

SEQ ID NO: 70034 - protein, 13 aa, Homo Sapiens
FADRPAFASFRVV

SEQ ID NO: 70035 - protein, 13 aa, Homo Sapiens
ADRPAFASFRVVS

SEQ ID NO: 70036 - protein, 13 aa, Homo Sapiens
DRPAFASFRVVSG

SEQ ID NO: 70037 - protein, 13 aa, Homo Sapiens
RPAFASFRVVSGG

SEQ ID NO: 70038 - protein, 13 aa, Homo Sapiens
PAFASFRVVSGGR

SEQ ID NO: 70039 - protein, 13 aa, Homo Sapiens
AFASFRVVSGGRS

SEQ ID NO: 70040 - protein, 13 aa, Homo Sapiens
FASFRVVSGGRSM

SEQ ID NO: 70041 - protein, 13 aa, Homo Sapiens
ASFRVVSGGRSMA

SEQ ID NO: 70042 - protein, 13 aa, Homo Sapiens
SFRVVSGGRSMAF

SEQ ID NO: 70043 - protein, 13 aa, Homo Sapiens
FRVVSGGRSMAFG

SEQ ID NO: 70044 - protein, 13 aa, Homo Sapiens
RVVSGGRSMAFGH

SEQ ID NO: 70045 - protein, 13 aa, Homo Sapiens
VVSGGRSMAFGHY

SEQ ID NO: 70046 - protein, 13 aa, Homo Sapiens
VSGGRSMAFGHYS

SEQ ID NO: 70047 - protein, 13 aa, Homo Sapiens
SGGRSMAFGHYSE

SEQ ID NO: 70048 - protein, 13 aa, Homo Sapiens
GGRSMAFGHYSEH

SEQ ID NO: 70049 - protein, 13 aa, Homo Sapiens
GRSMAFGHYSEHW

SEQ ID NO: 70050 - protein, 13 aa, Homo Sapiens
RSMAFGHYSEHWK

SEQ ID NO: 70051 - protein, 13 aa, Homo Sapiens
SMAFGHYSEHWKV

SEQ ID NO: 70052 - protein, 13 aa, Homo Sapiens
MAFGHYSEHWKVQ

SEQ ID NO: 70053 - protein, 13 aa, Homo Sapiens
AFGHYSEHWKVQR

SEQ ID NO: 70054 - protein, 13 aa, Homo Sapiens
FGHYSEHWKVQRR

SEQ ID NO: 70055 - protein, 13 aa, Homo Sapiens
GHYSEHWKVQRRA

SEQ ID NO: 70056 - protein, 13 aa, Homo Sapiens
HYSEHWKVQRRAA

SEQ ID NO: 70057 - protein, 13 aa, Homo Sapiens
YSEHWKVQRRAAH

SEQ ID NO: 70058 - protein, 13 aa, Homo Sapiens
SEHWKVQRRAAHS

SEQ ID NO: 70059 - protein, 13 aa, Homo Sapiens
EHWKVQRRAAHSM

SEQ ID NO: 70060 - protein, 13 aa, Homo Sapiens
HWKVQRRAAHSMM

SEQ ID NO: 70061 - protein, 13 aa, Homo Sapiens
WKVQRRAAHSMMR

SEQ ID NO: 70062 - protein, 13 aa, Homo Sapiens
KVQRRAAHSMMRN

SEQ ID NO: 70063 - protein, 13 aa, Homo Sapiens
VQRRAAHSMMRNF

SEQ ID NO: 70064 - protein, 13 aa, Homo Sapiens
QRRAAHSMMRNFF

SEQ ID NO: 70065 - protein, 13 aa, Homo Sapiens
RRAAHSMMRNFFT

SEQ ID NO: 70066 - protein, 13 aa, Homo Sapiens
RAAHSMMRNFFTR

SEQ ID NO: 70067 - protein, 13 aa, Homo Sapiens
AAHSMMRNFFTRQ

SEQ ID NO: 70068 - protein, 13 aa, Homo Sapiens
AHSMMRNFFTRQP

SEQ ID NO: 70069 - protein, 13 aa, Homo Sapiens
HSMMRNFFTRQPR

SEQ ID NO: 70070 - protein, 13 aa, Homo Sapiens
SMMRNFFTRQPRS

SEQ ID NO: 70071 - protein, 13 aa, Homo Sapiens
MMRNFFTRQPRSR

SEQ ID NO: 70072 - protein, 13 aa, Homo Sapiens
MRNFFTRQPRSRQ

SEQ ID NO: 70073 - protein, 13 aa, Homo Sapiens
RNFFTRQPRSRQV

SEQ ID NO: 70074 - protein, 13 aa, Homo Sapiens
NFFTRQPRSRQVL

SEQ ID NO: 70075 - protein, 13 aa, Homo Sapiens
FFTRQPRSRQVLE

SEQ ID NO: 70076 - protein, 13 aa, Homo Sapiens
FTRQPRSRQVLEG

SEQ ID NO: 70077 - protein, 13 aa, Homo Sapiens
TRQPRSRQVLEGH

SEQ ID NO: 70078 - protein, 13 aa, Homo Sapiens
RQPRSRQVLEGHV

SEQ ID NO: 70079 - protein, 13 aa, Homo Sapiens
QPRSRQVLEGHVL

SEQ ID NO: 70080 - protein, 13 aa, Homo Sapiens
PRSRQVLEGHVLS

SEQ ID NO: 70081 - protein, 13 aa, Homo Sapiens
RSRQVLEGHVLSE

SEQ ID NO: 70082 - protein, 13 aa, Homo Sapiens
SRQVLEGHVLSEA

SEQ ID NO: 70083 - protein, 13 aa, Homo Sapiens
RQVLEGHVLSEAR

SEQ ID NO: 70084 - protein, 13 aa, Homo Sapiens
QVLEGHVLSEARE

SEQ ID NO: 70085 - protein, 13 aa, Homo Sapiens
VLEGHVLSEAREL

SEQ ID NO: 70086 - protein, 13 aa, Homo Sapiens
LEGHVLSEARELV

SEQ ID NO: 70087 - protein, 13 aa, Homo Sapiens
EGHVLSEARELVA

SEQ ID NO: 70088 - protein, 13 aa, Homo Sapiens
GHVLSEARELVAL

SEQ ID NO: 70089 - protein, 13 aa, Homo Sapiens
HVLSEARELVALL

SEQ ID NO: 70090 - protein, 13 aa, Homo Sapiens
VLSEARELVALLV

SEQ ID NO: 70091 - protein, 13 aa, Homo Sapiens
LSEARELVALLVR

SEQ ID NO: 70092 - protein, 13 aa, Homo Sapiens
SEARELVALLVRG

SEQ ID NO: 70093 - protein, 13 aa, Homo Sapiens
EARELVALLVRGS

SEQ ID NO: 70094 - protein, 13 aa, Homo Sapiens
ARELVALLVRGSA

SEQ ID NO: 70095 - protein, 13 aa, Homo Sapiens
RELVALLVRGSAD

SEQ ID NO: 70096 - protein, 13 aa, Homo Sapiens
ELVALLVRGSADG

SEQ ID NO: 70097 - protein, 13 aa, Homo Sapiens
LVALLVRGSADGA

SEQ ID NO: 70098 - protein, 13 aa, Homo Sapiens
VALLVRGSADGAF

SEQ ID NO: 70099 - protein, 13 aa, Homo Sapiens
ALLVRGSADGAFL

SEQ ID NO: 70100 - protein, 13 aa, Homo Sapiens
LLVRGSADGAFLD

SEQ ID NO: 70101 - protein, 13 aa, Homo Sapiens
LVRGSADGAFLDP

SEQ ID NO: 70102 - protein, 13 aa, Homo Sapiens
VRGSADGAFLDPR

SEQ ID NO: 70103 - protein, 13 aa, Homo Sapiens
RGSADGAFLDPRP

SEQ ID NO: 70104 - protein, 13 aa, Homo Sapiens
GSADGAFLDPRPL

SEQ ID NO: 70105 - protein, 13 aa, Homo Sapiens
SADGAFLDPRPLT

SEQ ID NO: 70106 - protein, 13 aa, Homo Sapiens
ADGAFLDPRPLTV

SEQ ID NO: 70107 - protein, 13 aa, Homo Sapiens
DGAFLDPRPLTVV

SEQ ID NO: 70108 - protein, 13 aa, Homo Sapiens
GAFLDPRPLTVVA

SEQ ID NO: 70109 - protein, 13 aa, Homo Sapiens
AFLDPRPLTVVAV

SEQ ID NO: 70110 - protein, 13 aa, Homo Sapiens
FLDPRPLTVVAVA

SEQ ID NO: 70111 - protein, 13 aa, Homo Sapiens
LDPRPLTVVAVAN

SEQ ID NO: 70112 - protein, 13 aa, Homo Sapiens
DPRPLTVVAVANV

SEQ ID NO: 70113 - protein, 13 aa, Homo Sapiens
PRPLTVVAVANVM

SEQ ID NO: 70114 - protein, 13 aa, Homo Sapiens
RPLTVVAVANVMS

SEQ ID NO: 70115 - protein, 13 aa, Homo Sapiens
PLTVVAVANVMSA

SEQ ID NO: 70116 - protein, 13 aa, Homo Sapiens
LTVVAVANVMSAV

SEQ ID NO: 70117 - protein, 13 aa, Homo Sapiens
TVVAVANVMSAVC

SEQ ID NO: 70118 - protein, 13 aa, Homo Sapiens
VVAVANVMSAVCF

SEQ ID NO: 70119 - protein, 13 aa, Homo Sapiens
VAVANVMSAVCFG

SEQ ID NO: 70120 - protein, 13 aa, Homo Sapiens
AVANVMSAVCFGC

SEQ ID NO: 70121 - protein, 13 aa, Homo Sapiens
VANVMSAVCFGCR

SEQ ID NO: 70122 - protein, 13 aa, Homo Sapiens
ANVMSAVCFGCRY

SEQ ID NO: 70123 - protein, 13 aa, Homo Sapiens
NVMSAVCFGCRYS

SEQ ID NO: 70124 - protein, 13 aa, Homo Sapiens
VMSAVCFGCRYSH

SEQ ID NO: 70125 - protein, 13 aa, Homo Sapiens
MSAVCFGCRYSHD

SEQ ID NO: 70126 - protein, 13 aa, Homo Sapiens
SAVCFGCRYSHDD

SEQ ID NO: 70127 - protein, 13 aa, Homo Sapiens
AVCFGCRYSHDDP

SEQ ID NO: 70128 - protein, 13 aa, Homo Sapiens
VCFGCRYSHDDPE

SEQ ID NO: 70129 - protein, 13 aa, Homo Sapiens
CFGCRYSHDDPEF

SEQ ID NO: 70130 - protein, 13 aa, Homo Sapiens
FGCRYSHDDPEFR

SEQ ID NO: 70131 - protein, 13 aa, Homo Sapiens
GCRYSHDDPEFRE

SEQ ID NO: 70132 - protein, 13 aa, Homo Sapiens
CRYSHDDPEFREL

SEQ ID NO: 70133 - protein, 13 aa, Homo Sapiens
RYSHDDPEFRELL

SEQ ID NO: 70134 - protein, 13 aa, Homo Sapiens
YSHDDPEFRELLS

SEQ ID NO: 70135 - protein, 13 aa, Homo Sapiens
SHDDPEFRELLSH

SEQ ID NO: 70136 - protein, 13 aa, Homo Sapiens
HDDPEFRELLSHN

SEQ ID NO: 70137 - protein, 13 aa, Homo Sapiens
DDPEFRELLSHNE

SEQ ID NO: 70138 - protein, 13 aa, Homo Sapiens
DPEFRELLSHNEE

SEQ ID NO: 70139 - protein, 13 aa, Homo Sapiens
PEFRELLSHNEEF

SEQ ID NO: 70140 - protein, 13 aa, Homo Sapiens
EFRELLSHNEEFG

SEQ ID NO: 70141 - protein, 13 aa, Homo Sapiens
FRELLSHNEEFGR

SEQ ID NO: 70142 - protein, 13 aa, Homo Sapiens
RELLSHNEEFGRT

SEQ ID NO: 70143 - protein, 13 aa, Homo Sapiens
ELLSHNEEFGRTV

SEQ ID NO: 70144 - protein, 13 aa, Homo Sapiens
LLSHNEEFGRTVG

SEQ ID NO: 70145 - protein, 13 aa, Homo Sapiens
LSHNEEFGRTVGA

SEQ ID NO: 70146 - protein, 13 aa, Homo Sapiens
SHNEEFGRTVGAG

SEQ ID NO: 70147 - protein, 13 aa, Homo Sapiens
HNEEFGRTVGAGS

SEQ ID NO: 70148 - protein, 13 aa, Homo Sapiens
NEEFGRTVGAGSL

SEQ ID NO: 70149 - protein, 13 aa, Homo Sapiens
EEFGRTVGAGSLV

SEQ ID NO: 70150 - protein, 13 aa, Homo Sapiens
EFGRTVGAGSLVD

SEQ ID NO: 70151 - protein, 13 aa, Homo Sapiens
FGRTVGAGSLVDV

SEQ ID NO: 70152 - protein, 13 aa, Homo Sapiens
GRTVGAGSLVDVM

SEQ ID NO: 70153 - protein, 13 aa, Homo Sapiens
RTVGAGSLVDVMP

SEQ ID NO: 70154 - protein, 13 aa, Homo Sapiens
TVGAGSLVDVMPW

SEQ ID NO: 70155 - protein, 13 aa, Homo Sapiens
VGAGSLVDVMPWL

SEQ ID NO: 70156 - protein, 13 aa, Homo Sapiens
GAGSLVDVMPWLQ

SEQ ID NO: 70157 - protein, 13 aa, Homo Sapiens
AGSLVDVMPWLQY

SEQ ID NO: 70158 - protein, 13 aa, Homo Sapiens
GSLVDVMPWLQYF

SEQ ID NO: 70159 - protein, 13 aa, Homo Sapiens
SLVDVMPWLQYFP

SEQ ID NO: 70160 - protein, 13 aa, Homo Sapiens
LVDVMPWLQYFPN

SEQ ID NO: 70161 - protein, 13 aa, Homo Sapiens
VDVMPWLQYFPNP

SEQ ID NO: 70162 - protein, 13 aa, Homo Sapiens
DVMPWLQYFPNPV

SEQ ID NO: 70163 - protein, 13 aa, Homo Sapiens
VMPWLQYFPNPVR

SEQ ID NO: 70164 - protein, 13 aa, Homo Sapiens
MPWLQYFPNPVRT

SEQ ID NO: 70165 - protein, 13 aa, Homo Sapiens
PWLQYFPNPVRTV

SEQ ID NO: 70166 - protein, 13 aa, Homo Sapiens
WLQYFPNPVRTVF

SEQ ID NO: 70167 - protein, 13 aa, Homo Sapiens
LQYFPNPVRTVFR

SEQ ID NO: 70168 - protein, 13 aa, Homo Sapiens
QYFPNPVRTVFRE

SEQ ID NO: 70169 - protein, 13 aa, Homo Sapiens
YFPNPVRTVFREF

SEQ ID NO: 70170 - protein, 13 aa, Homo Sapiens
FPNPVRTVFREFE

SEQ ID NO: 70171 - protein, 13 aa, Homo Sapiens
PNPVRTVFREFEQ

SEQ ID NO: 70172 - protein, 13 aa, Homo Sapiens
NPVRTVFREFEQL

SEQ ID NO: 70173 - protein, 13 aa, Homo Sapiens
PVRTVFREFEQLN

SEQ ID NO: 70174 - protein, 13 aa, Homo Sapiens
VRTVFREFEQLNR

SEQ ID NO: 70175 - protein, 13 aa, Homo Sapiens
RTVFREFEQLNRN

SEQ ID NO: 70176 - protein, 13 aa, Homo Sapiens
TVFREFEQLNRNF

SEQ ID NO: 70177 - protein, 13 aa, Homo Sapiens
VFREFEQLNRNFS

SEQ ID NO: 70178 - protein, 13 aa, Homo Sapiens
FREFEQLNRNFSN

SEQ ID NO: 70179 - protein, 13 aa, Homo Sapiens
REFEQLNRNFSNF

SEQ ID NO: 70180 - protein, 13 aa, Homo Sapiens
EFEQLNRNFSNFI

SEQ ID NO: 70181 - protein, 13 aa, Homo Sapiens
FEQLNRNFSNFIL

SEQ ID NO: 70182 - protein, 13 aa, Homo Sapiens
EQLNRNFSNFILD

SEQ ID NO: 70183 - protein, 13 aa, Homo Sapiens
QLNRNFSNFILDK

SEQ ID NO: 70184 - protein, 13 aa, Homo Sapiens
LNRNFSNFILDKF

SEQ ID NO: 70185 - protein, 13 aa, Homo Sapiens
NRNFSNFILDKFL

SEQ ID NO: 70186 - protein, 13 aa, Homo Sapiens
RNFSNFILDKFLR

SEQ ID NO: 70187 - protein, 13 aa, Homo Sapiens
NFSNFILDKFLRH

SEQ ID NO: 70188 - protein, 13 aa, Homo Sapiens
FSNFILDKFLRHC

SEQ ID NO: 70189 - protein, 13 aa, Homo Sapiens
SNFILDKFLRHCE

SEQ ID NO: 70190 - protein, 13 aa, Homo Sapiens
NFILDKFLRHCES

SEQ ID NO: 70191 - protein, 13 aa, Homo Sapiens
FILDKFLRHCESL

SEQ ID NO: 70192 - protein, 13 aa, Homo Sapiens
ILDKFLRHCESLR

SEQ ID NO: 70193 - protein, 13 aa, Homo Sapiens
LDKFLRHCESLRP

SEQ ID NO: 70194 - protein, 13 aa, Homo Sapiens
DKFLRHCESLRPG

SEQ ID NO: 70195 - protein, 13 aa, Homo Sapiens
KFLRHCESLRPGA

SEQ ID NO: 70196 - protein, 13 aa, Homo Sapiens
FLRHCESLRPGAA

SEQ ID NO: 70197 - protein, 13 aa, Homo Sapiens
LRHCESLRPGAAP

SEQ ID NO: 70198 - protein, 13 aa, Homo Sapiens
RHCESLRPGAAPR

SEQ ID NO: 70199 - protein, 13 aa, Homo Sapiens
HCESLRPGAAPRD

SEQ ID NO: 70200 - protein, 13 aa, Homo Sapiens
CESLRPGAAPRDM

SEQ ID NO: 70201 - protein, 13 aa, Homo Sapiens
ESLRPGAAPRDMM

SEQ ID NO: 70202 - protein, 13 aa, Homo Sapiens
SLRPGAAPRDMMD

SEQ ID NO: 70203 - protein, 13 aa, Homo Sapiens
LRPGAAPRDMMDA

SEQ ID NO: 70204 - protein, 13 aa, Homo Sapiens
RPGAAPRDMMDAF

SEQ ID NO: 70205 - protein, 13 aa, Homo Sapiens
PGAAPRDMMDAFI

SEQ ID NO: 70206 - protein, 13 aa, Homo Sapiens
GAAPRDMMDAFIL

SEQ ID NO: 70207 - protein, 13 aa, Homo Sapiens
AAPRDMMDAFILS

SEQ ID NO: 70208 - protein, 13 aa, Homo Sapiens
APRDMMDAFILSA

SEQ ID NO: 70209 - protein, 13 aa, Homo Sapiens
PRDMMDAFILSAE

SEQ ID NO: 70210 - protein, 13 aa, Homo Sapiens
RDMMDAFILSAEK

SEQ ID NO: 70211 - protein, 13 aa, Homo Sapiens
DMMDAFILSAEKK

SEQ ID NO: 70212 - protein, 13 aa, Homo Sapiens
MMDAFILSAEKKA

SEQ ID NO: 70213 - protein, 13 aa, Homo Sapiens
MDAFILSAEKKAA

SEQ ID NO: 70214 - protein, 13 aa, Homo Sapiens
DAFILSAEKKAAG

SEQ ID NO: 70215 - protein, 13 aa, Homo Sapiens
AFILSAEKKAAGD

SEQ ID NO: 70216 - protein, 13 aa, Homo Sapiens
FILSAEKKAAGDS

SEQ ID NO: 70217 - protein, 13 aa, Homo Sapiens
ILSAEKKAAGDSH

SEQ ID NO: 70218 - protein, 13 aa, Homo Sapiens
LSAEKKAAGDSHG

SEQ ID NO: 70219 - protein, 13 aa, Homo Sapiens
SAEKKAAGDSHGG

SEQ ID NO: 70220 - protein, 13 aa, Homo Sapiens
AEKKAAGDSHGGG

SEQ ID NO: 70221 - protein, 13 aa, Homo Sapiens
EKKAAGDSHGGGA

SEQ ID NO: 70222 - protein, 13 aa, Homo Sapiens
KKAAGDSHGGGAR

SEQ ID NO: 70223 - protein, 13 aa, Homo Sapiens
KAAGDSHGGGARL

SEQ ID NO: 70224 - protein, 13 aa, Homo Sapiens
AAGDSHGGGARLD

SEQ ID NO: 70225 - protein, 13 aa, Homo Sapiens
AGDSHGGGARLDL

SEQ ID NO: 70226 - protein, 13 aa, Homo Sapiens
GDSHGGGARLDLE

SEQ ID NO: 70227 - protein, 13 aa, Homo Sapiens
DSHGGGARLDLEN

SEQ ID NO: 70228 - protein, 13 aa, Homo Sapiens
SHGGGARLDLENV

SEQ ID NO: 70229 - protein, 13 aa, Homo Sapiens
HGGGARLDLENVP

SEQ ID NO: 70230 - protein, 13 aa, Homo Sapiens
GGGARLDLENVPA

SEQ ID NO: 70231 - protein, 13 aa, Homo Sapiens
GGARLDLENVPAT

SEQ ID NO: 70232 - protein, 13 aa, Homo Sapiens
GARLDLENVPATI

SEQ ID NO: 70233 - protein, 13 aa, Homo Sapiens
ARLDLENVPATIT

SEQ ID NO: 70234 - protein, 13 aa, Homo Sapiens
RLDLENVPATITD

SEQ ID NO: 70235 - protein, 13 aa, Homo Sapiens
LDLENVPATITDI

SEQ ID NO: 70236 - protein, 13 aa, Homo Sapiens
DLENVPATITDIF

SEQ ID NO: 70237 - protein, 13 aa, Homo Sapiens
LENVPATITDIFG

SEQ ID NO: 70238 - protein, 13 aa, Homo Sapiens
ENVPATITDIFGA

SEQ ID NO: 70239 - protein, 13 aa, Homo Sapiens
NVPATITDIFGAS

SEQ ID NO: 70240 - protein, 13 aa, Homo Sapiens
VPATITDIFGASQ

SEQ ID NO: 70241 - protein, 13 aa, Homo Sapiens
PATITDIFGASQD

SEQ ID NO: 70242 - protein, 13 aa, Homo Sapiens
ATITDIFGASQDT

SEQ ID NO: 70243 - protein, 13 aa, Homo Sapiens
TITDIFGASQDTL

SEQ ID NO: 70244 - protein, 13 aa, Homo Sapiens
ITDIFGASQDTLS

SEQ ID NO: 70245 - protein, 13 aa, Homo Sapiens
TDIFGASQDTLST

SEQ ID NO: 70246 - protein, 13 aa, Homo Sapiens
DIFGASQDTLSTA

SEQ ID NO: 70247 - protein, 13 aa, Homo Sapiens
IFGASQDTLSTAL

SEQ ID NO: 70248 - protein, 13 aa, Homo Sapiens
FGASQDTLSTALQ

SEQ ID NO: 70249 - protein, 13 aa, Homo Sapiens
GASQDTLSTALQW

SEQ ID NO: 70250 - protein, 13 aa, Homo Sapiens
ASQDTLSTALQWL

SEQ ID NO: 70251 - protein, 13 aa, Homo Sapiens
SQDTLSTALQWLL

SEQ ID NO: 70252 - protein, 13 aa, Homo Sapiens
QDTLSTALQWLLL

SEQ ID NO: 70253 - protein, 13 aa, Homo Sapiens
DTLSTALQWLLLL

SEQ ID NO: 70254 - protein, 13 aa, Homo Sapiens
TLSTALQWLLLLF

SEQ ID NO: 70255 - protein, 13 aa, Homo Sapiens
LSTALQWLLLLFT

SEQ ID NO: 70256 - protein, 13 aa, Homo Sapiens
STALQWLLLLFTR

SEQ ID NO: 70257 - protein, 13 aa, Homo Sapiens
TALQWLLLLFTRY

SEQ ID NO: 70258 - protein, 13 aa, Homo Sapiens
ALQWLLLLFTRYP

SEQ ID NO: 70259 - protein, 13 aa, Homo Sapiens
LQWLLLLFTRYPD

SEQ ID NO: 70260 - protein, 13 aa, Homo Sapiens
QWLLLLFTRYPDV

SEQ ID NO: 70261 - protein, 13 aa, Homo Sapiens
WLLLLFTRYPDVQ

SEQ ID NO: 70262 - protein, 13 aa, Homo Sapiens
LLLLFTRYPDVQT

SEQ ID NO: 70263 - protein, 13 aa, Homo Sapiens
LLLFTRYPDVQTR

SEQ ID NO: 70264 - protein, 13 aa, Homo Sapiens
LLFTRYPDVQTRV

SEQ ID NO: 70265 - protein, 13 aa, Homo Sapiens
LFTRYPDVQTRVQ

SEQ ID NO: 70266 - protein, 13 aa, Homo Sapiens
FTRYPDVQTRVQA

SEQ ID NO: 70267 - protein, 13 aa, Homo Sapiens
TRYPDVQTRVQAE

SEQ ID NO: 70268 - protein, 13 aa, Homo Sapiens
RYPDVQTRVQAEL

SEQ ID NO: 70269 - protein, 13 aa, Homo Sapiens
YPDVQTRVQAELD

SEQ ID NO: 70270 - protein, 13 aa, Homo Sapiens
PDVQTRVQAELDQ

SEQ ID NO: 70271 - protein, 13 aa, Homo Sapiens
DVQTRVQAELDQV

SEQ ID NO: 70272 - protein, 13 aa, Homo Sapiens
VQTRVQAELDQVV

SEQ ID NO: 70273 - protein, 13 aa, Homo Sapiens
QTRVQAELDQVVG

SEQ ID NO: 70274 - protein, 13 aa, Homo Sapiens
TRVQAELDQVVGR

SEQ ID NO: 70275 - protein, 13 aa, Homo Sapiens
RVQAELDQVVGRD

SEQ ID NO: 70276 - protein, 13 aa, Homo Sapiens
VQAELDQVVGRDR

SEQ ID NO: 70277 - protein, 13 aa, Homo Sapiens
QAELDQVVGRDRL

SEQ ID NO: 70278 - protein, 13 aa, Homo Sapiens
AELDQVVGRDRLP

SEQ ID NO: 70279 - protein, 13 aa, Homo Sapiens
ELDQVVGRDRLPC

SEQ ID NO: 70280 - protein, 13 aa, Homo Sapiens
LDQVVGRDRLPCM

SEQ ID NO: 70281 - protein, 13 aa, Homo Sapiens
DQVVGRDRLPCMG

SEQ ID NO: 70282 - protein, 13 aa, Homo Sapiens
QVVGRDRLPCMGD

SEQ ID NO: 70283 - protein, 13 aa, Homo Sapiens
VVGRDRLPCMGDQ

SEQ ID NO: 70284 - protein, 13 aa, Homo Sapiens
VGRDRLPCMGDQP

SEQ ID NO: 70285 - protein, 13 aa, Homo Sapiens
GRDRLPCMGDQPN

SEQ ID NO: 70286 - protein, 13 aa, Homo Sapiens
RDRLPCMGDQPNL

SEQ ID NO: 70287 - protein, 13 aa, Homo Sapiens
DRLPCMGDQPNLP

SEQ ID NO: 70288 - protein, 13 aa, Homo Sapiens
RLPCMGDQPNLPY

SEQ ID NO: 70289 - protein, 13 aa, Homo Sapiens
LPCMGDQPNLPYV

SEQ ID NO: 70290 - protein, 13 aa, Homo Sapiens
PCMGDQPNLPYVL

SEQ ID NO: 70291 - protein, 13 aa, Homo Sapiens
CMGDQPNLPYVLA

SEQ ID NO: 70292 - protein, 13 aa, Homo Sapiens
MGDQPNLPYVLAF

SEQ ID NO: 70293 - protein, 13 aa, Homo Sapiens
GDQPNLPYVLAFL

SEQ ID NO: 70294 - protein, 13 aa, Homo Sapiens
DQPNLPYVLAFLY

SEQ ID NO: 70295 - protein, 13 aa, Homo Sapiens
QPNLPYVLAFLYE

SEQ ID NO: 70296 - protein, 13 aa, Homo Sapiens
PNLPYVLAFLYEA

SEQ ID NO: 70297 - protein, 13 aa, Homo Sapiens
NLPYVLAFLYEAM

SEQ ID NO: 70298 - protein, 13 aa, Homo Sapiens
LPYVLAFLYEAMR

SEQ ID NO: 70299 - protein, 13 aa, Homo Sapiens
PYVLAFLYEAMRF

SEQ ID NO: 70300 - protein, 13 aa, Homo Sapiens
YVLAFLYEAMRFS

SEQ ID NO: 70301 - protein, 13 aa, Homo Sapiens
VLAFLYEAMRFSS

SEQ ID NO: 70302 - protein, 13 aa, Homo Sapiens
LAFLYEAMRFSSF

SEQ ID NO: 70303 - protein, 13 aa, Homo Sapiens
AFLYEAMRFSSFV

SEQ ID NO: 70304 - protein, 13 aa, Homo Sapiens
FLYEAMRFSSFVP

SEQ ID NO: 70305 - protein, 13 aa, Homo Sapiens
LYEAMRFSSFVPV

SEQ ID NO: 70306 - protein, 13 aa, Homo Sapiens
YEAMRFSSFVPVT

SEQ ID NO: 70307 - protein, 13 aa, Homo Sapiens
EAMRFSSFVPVTI

SEQ ID NO: 70308 - protein, 13 aa, Homo Sapiens
AMRFSSFVPVTIP

SEQ ID NO: 70309 - protein, 13 aa, Homo Sapiens
MRFSSFVPVTIPH

SEQ ID NO: 70310 - protein, 13 aa, Homo Sapiens
RFSSFVPVTIPHA

SEQ ID NO: 70311 - protein, 13 aa, Homo Sapiens
FSSFVPVTIPHAT

SEQ ID NO: 70312 - protein, 13 aa, Homo Sapiens
SSFVPVTIPHATT

SEQ ID NO: 70313 - protein, 13 aa, Homo Sapiens
SFVPVTIPHATTA

SEQ ID NO: 70314 - protein, 13 aa, Homo Sapiens
FVPVTIPHATTAN

SEQ ID NO: 70315 - protein, 13 aa, Homo Sapiens
VPVTIPHATTANT

SEQ ID NO: 70316 - protein, 13 aa, Homo Sapiens
PVTIPHATTANTS

SEQ ID NO: 70317 - protein, 13 aa, Homo Sapiens
VTIPHATTANTSV

SEQ ID NO: 70318 - protein, 13 aa, Homo Sapiens
TIPHATTANTSVL

SEQ ID NO: 70319 - protein, 13 aa, Homo Sapiens
IPHATTANTSVLG

SEQ ID NO: 70320 - protein, 13 aa, Homo Sapiens
PHATTANTSVLGY

SEQ ID NO: 70321 - protein, 13 aa, Homo Sapiens
HATTANTSVLGYH

SEQ ID NO: 70322 - protein, 13 aa, Homo Sapiens
ATTANTSVLGYHI

SEQ ID NO: 70323 - protein, 13 aa, Homo Sapiens
TTANTSVLGYHIP

SEQ ID NO: 70324 - protein, 13 aa, Homo Sapiens
TANTSVLGYHIPK

SEQ ID NO: 70325 - protein, 13 aa, Homo Sapiens
ANTSVLGYHIPKD

SEQ ID NO: 70326 - protein, 13 aa, Homo Sapiens
NTSVLGYHIPKDT

SEQ ID NO: 70327 - protein, 13 aa, Homo Sapiens
TSVLGYHIPKDTV

SEQ ID NO: 70328 - protein, 13 aa, Homo Sapiens
SVLGYHIPKDTVV

SEQ ID NO: 70329 - protein, 13 aa, Homo Sapiens
VLGYHIPKDTVVF

SEQ ID NO: 70330 - protein, 13 aa, Homo Sapiens
LGYHIPKDTVVFV

SEQ ID NO: 70331 - protein, 13 aa, Homo Sapiens
GYHIPKDTVVFVN

SEQ ID NO: 70332 - protein, 13 aa, Homo Sapiens
YHIPKDTVVFVNQ

SEQ ID NO: 70333 - protein, 13 aa, Homo Sapiens
HIPKDTVVFVNQW

SEQ ID NO: 70334 - protein, 13 aa, Homo Sapiens
IPKDTVVFVNQWS

SEQ ID NO: 70335 - protein, 13 aa, Homo Sapiens
PKDTVVFVNQWSV

SEQ ID NO: 70336 - protein, 13 aa, Homo Sapiens
KDTVVFVNQWSVN

SEQ ID NO: 70337 - protein, 13 aa, Homo Sapiens
DTVVFVNQWSVNH

SEQ ID NO: 70338 - protein, 13 aa, Homo Sapiens
TVVFVNQWSVNHD

SEQ ID NO: 70339 - protein, 13 aa, Homo Sapiens
VVFVNQWSVNHDP

SEQ ID NO: 70340 - protein, 13 aa, Homo Sapiens
VFVNQWSVNHDPL

SEQ ID NO: 70341 - protein, 13 aa, Homo Sapiens
FVNQWSVNHDPLK

SEQ ID NO: 70342 - protein, 13 aa, Homo Sapiens
VNQWSVNHDPLKW

SEQ ID NO: 70343 - protein, 13 aa, Homo Sapiens
NQWSVNHDPLKWP

SEQ ID NO: 70344 - protein, 13 aa, Homo Sapiens
QWSVNHDPLKWPN

SEQ ID NO: 70345 - protein, 13 aa, Homo Sapiens
WSVNHDPLKWPNP

SEQ ID NO: 70346 - protein, 13 aa, Homo Sapiens
SVNHDPLKWPNPE

SEQ ID NO: 70347 - protein, 13 aa, Homo Sapiens
VNHDPLKWPNPEN

SEQ ID NO: 70348 - protein, 13 aa, Homo Sapiens
NHDPLKWPNPENF

SEQ ID NO: 70349 - protein, 13 aa, Homo Sapiens
HDPLKWPNPENFD

SEQ ID NO: 70350 - protein, 13 aa, Homo Sapiens
DPLKWPNPENFDP

SEQ ID NO: 70351 - protein, 13 aa, Homo Sapiens
PLKWPNPENFDPA

SEQ ID NO: 70352 - protein, 13 aa, Homo Sapiens
LKWPNPENFDPAR

SEQ ID NO: 70353 - protein, 13 aa, Homo Sapiens
KWPNPENFDPARF

SEQ ID NO: 70354 - protein, 13 aa, Homo Sapiens
WPNPENFDPARFL

SEQ ID NO: 70355 - protein, 13 aa, Homo Sapiens
PNPENFDPARFLD

SEQ ID NO: 70356 - protein, 13 aa, Homo Sapiens
NPENFDPARFLDK

SEQ ID NO: 70357 - protein, 13 aa, Homo Sapiens
PENFDPARFLDKD

SEQ ID NO: 70358 - protein, 13 aa, Homo Sapiens
ENFDPARFLDKDG

SEQ ID NO: 70359 - protein, 13 aa, Homo Sapiens
NFDPARFLDKDGL

SEQ ID NO: 70360 - protein, 13 aa, Homo Sapiens
FDPARFLDKDGLI

SEQ ID NO: 70361 - protein, 13 aa, Homo Sapiens
DPARFLDKDGLIN

SEQ ID NO: 70362 - protein, 13 aa, Homo Sapiens
PARFLDKDGLINK

SEQ ID NO: 70363 - protein, 13 aa, Homo Sapiens
ARFLDKDGLINKD

SEQ ID NO: 70364 - protein, 13 aa, Homo Sapiens
RFLDKDGLINKDL

SEQ ID NO: 70365 - protein, 13 aa, Homo Sapiens
FLDKDGLINKDLT

SEQ ID NO: 70366 - protein, 13 aa, Homo Sapiens
LDKDGLINKDLTS

SEQ ID NO: 70367 - protein, 13 aa, Homo Sapiens
DKDGLINKDLTSR

SEQ ID NO: 70368 - protein, 13 aa, Homo Sapiens
KDGLINKDLTSRV

SEQ ID NO: 70369 - protein, 13 aa, Homo Sapiens
DGLINKDLTSRVM

SEQ ID NO: 70370 - protein, 13 aa, Homo Sapiens
GLINKDLTSRVMI

SEQ ID NO: 70371 - protein, 13 aa, Homo Sapiens
LINKDLTSRVMIF

SEQ ID NO: 70372 - protein, 13 aa, Homo Sapiens
INKDLTSRVMIFS

SEQ ID NO: 70373 - protein, 13 aa, Homo Sapiens
NKDLTSRVMIFSV

SEQ ID NO: 70374 - protein, 13 aa, Homo Sapiens
KDLTSRVMIFSVG

SEQ ID NO: 70375 - protein, 13 aa, Homo Sapiens
DLTSRVMIFSVGK

SEQ ID NO: 70376 - protein, 13 aa, Homo Sapiens
LTSRVMIFSVGKR

SEQ ID NO: 70377 - protein, 13 aa, Homo Sapiens
TSRVMIFSVGKRR

SEQ ID NO: 70378 - protein, 13 aa, Homo Sapiens
SRVMIFSVGKRRC

SEQ ID NO: 70379 - protein, 13 aa, Homo Sapiens
RVMIFSVGKRRCI

SEQ ID NO: 70380 - protein, 13 aa, Homo Sapiens
VMIFSVGKRRCIG

SEQ ID NO: 70381 - protein, 13 aa, Homo Sapiens
MIFSVGKRRCIGE

SEQ ID NO: 70382 - protein, 13 aa, Homo Sapiens
IFSVGKRRCIGEE

SEQ ID NO: 70383 - protein, 13 aa, Homo Sapiens
FSVGKRRCIGEEL

SEQ ID NO: 70384 - protein, 13 aa, Homo Sapiens
SVGKRRCIGEELS

SEQ ID NO: 70385 - protein, 13 aa, Homo Sapiens
VGKRRCIGEELSK

SEQ ID NO: 70386 - protein, 13 aa, Homo Sapiens
GKRRCIGEELSKM

SEQ ID NO: 70387 - protein, 13 aa, Homo Sapiens
KRRCIGEELSKMQ

SEQ ID NO: 70388 - protein, 13 aa, Homo Sapiens
RRCIGEELSKMQL

SEQ ID NO: 70389 - protein, 13 aa, Homo Sapiens
RCIGEELSKMQLF

SEQ ID NO: 70390 - protein, 13 aa, Homo Sapiens
CIGEELSKMQLFL

SEQ ID NO: 70391 - protein, 13 aa, Homo Sapiens
IGEELSKMQLFLF

SEQ ID NO: 70392 - protein, 13 aa, Homo Sapiens
GEELSKMQLFLFI

SEQ ID NO: 70393 - protein, 13 aa, Homo Sapiens
EELSKMQLFLFIS

SEQ ID NO: 70394 - protein, 13 aa, Homo Sapiens
ELSKMQLFLFISI

SEQ ID NO: 70395 - protein, 13 aa, Homo Sapiens
LSKMQLFLFISIL

SEQ ID NO: 70396 - protein, 13 aa, Homo Sapiens
SKMQLFLFISILA

SEQ ID NO: 70397 - protein, 13 aa, Homo Sapiens
KMQLFLFISILAH

SEQ ID NO: 70398 - protein, 13 aa, Homo Sapiens
MQLFLFISILAHQ

SEQ ID NO: 70399 - protein, 13 aa, Homo Sapiens
QLFLFISILAHQC

SEQ ID NO: 70400 - protein, 13 aa, Homo Sapiens
LFLFISILAHQCD

SEQ ID NO: 70401 - protein, 13 aa, Homo Sapiens
FLFISILAHQCDF

SEQ ID NO: 70402 - protein, 13 aa, Homo Sapiens
LFISILAHQCDFR

SEQ ID NO: 70403 - protein, 13 aa, Homo Sapiens
FISILAHQCDFRA

SEQ ID NO: 70404 - protein, 13 aa, Homo Sapiens
ISILAHQCDFRAN

SEQ ID NO: 70405 - protein, 13 aa, Homo Sapiens
SILAHQCDFRANP

SEQ ID NO: 70406 - protein, 13 aa, Homo Sapiens
ILAHQCDFRANPN

SEQ ID NO: 70407 - protein, 13 aa, Homo Sapiens
LAHQCDFRANPNE

SEQ ID NO: 70408 - protein, 13 aa, Homo Sapiens
AHQCDFRANPNEP

SEQ ID NO: 70409 - protein, 13 aa, Homo Sapiens
HQCDFRANPNEPA

SEQ ID NO: 70410 - protein, 13 aa, Homo Sapiens
QCDFRANPNEPAK

SEQ ID NO: 70411 - protein, 13 aa, Homo Sapiens
CDFRANPNEPAKM

SEQ ID NO: 70412 - protein, 13 aa, Homo Sapiens
DFRANPNEPAKMN

SEQ ID NO: 70413 - protein, 13 aa, Homo Sapiens
FRANPNEPAKMNF

SEQ ID NO: 70414 - protein, 13 aa, Homo Sapiens
RANPNEPAKMNFS

SEQ ID NO: 70415 - protein, 13 aa, Homo Sapiens
ANPNEPAKMNFSY

SEQ ID NO: 70416 - protein, 13 aa, Homo Sapiens
NPNEPAKMNFSYG

SEQ ID NO: 70417 - protein, 13 aa, Homo Sapiens
PNEPAKMNFSYGL

SEQ ID NO: 70418 - protein, 13 aa, Homo Sapiens
NEPAKMNFSYGLT

SEQ ID NO: 70419 - protein, 13 aa, Homo Sapiens
EPAKMNFSYGLTI

SEQ ID NO: 70420 - protein, 13 aa, Homo Sapiens
PAKMNFSYGLTIK

SEQ ID NO: 70421 - protein, 13 aa, Homo Sapiens
AKMNFSYGLTIKP

SEQ ID NO: 70422 - protein, 13 aa, Homo Sapiens
KMNFSYGLTIKPK

SEQ ID NO: 70423 - protein, 13 aa, Homo Sapiens
MNFSYGLTIKPKS

SEQ ID NO: 70424 - protein, 13 aa, Homo Sapiens
NFSYGLTIKPKSF

SEQ ID NO: 70425 - protein, 13 aa, Homo Sapiens
FSYGLTIKPKSFK

SEQ ID NO: 70426 - protein, 13 aa, Homo Sapiens
SYGLTIKPKSFKV

SEQ ID NO: 70427 - protein, 13 aa, Homo Sapiens
YGLTIKPKSFKVN

SEQ ID NO: 70428 - protein, 13 aa, Homo Sapiens
GLTIKPKSFKVNV

SEQ ID NO: 70429 - protein, 13 aa, Homo Sapiens
LTIKPKSFKVNVT

SEQ ID NO: 70430 - protein, 13 aa, Homo Sapiens
TIKPKSFKVNVTL

SEQ ID NO: 70431 - protein, 13 aa, Homo Sapiens
IKPKSFKVNVTLR

SEQ ID NO: 70432 - protein, 13 aa, Homo Sapiens
KPKSFKVNVTLRE

SEQ ID NO: 70433 - protein, 13 aa, Homo Sapiens
PKSFKVNVTLRES

SEQ ID NO: 70434 - protein, 13 aa, Homo Sapiens
KSFKVNVTLRESM

SEQ ID NO: 70435 - protein, 13 aa, Homo Sapiens
SFKVNVTLRESME

SEQ ID NO: 70436 - protein, 13 aa, Homo Sapiens
FKVNVTLRESMEL

SEQ ID NO: 70437 - protein, 13 aa, Homo Sapiens
KVNVTLRESMELL

SEQ ID NO: 70438 - protein, 13 aa, Homo Sapiens
VNVTLRESMELLD

SEQ ID NO: 70439 - protein, 13 aa, Homo Sapiens
NVTLRESMELLDS

SEQ ID NO: 70440 - protein, 13 aa, Homo Sapiens
VTLRESMELLDSA

SEQ ID NO: 70441 - protein, 13 aa, Homo Sapiens
TLRESMELLDSAV

SEQ ID NO: 70442 - protein, 13 aa, Homo Sapiens
LRESMELLDSAVQ

SEQ ID NO: 70443 - protein, 13 aa, Homo Sapiens
RESMELLDSAVQN

SEQ ID NO: 70444 - protein, 13 aa, Homo Sapiens
ESMELLDSAVQNL

SEQ ID NO: 70445 - protein, 13 aa, Homo Sapiens
SMELLDSAVQNLQ

SEQ ID NO: 70446 - protein, 13 aa, Homo Sapiens
MELLDSAVQNLQA

SEQ ID NO: 70447 - protein, 13 aa, Homo Sapiens
ELLDSAVQNLQAK

SEQ ID NO: 70448 - protein, 13 aa, Homo Sapiens
LLDSAVQNLQAKE

SEQ ID NO: 70449 - protein, 13 aa, Homo Sapiens
LDSAVQNLQAKET

SEQ ID NO: 70450 - protein, 13 aa, Homo Sapiens
DSAVQNLQAKETC

SEQ ID NO: 70451 - protein, 13 aa, Homo Sapiens
SAVQNLQAKETCQ

SEQ ID NO: 70452 - protein, 13 aa, Homo Sapiens
AVQNLQAKETCQH

SEQ ID NO: 70453 - protein, 13 aa, Homo Sapiens
VQNLQAKETCQHG

SEQ ID NO: 70454 - protein, 13 aa, Homo Sapiens
QNLQAKETCQHGR

SEQ ID NO: 70455 - protein, 13 aa, Homo Sapiens
NLQAKETCQHGRY

SEQ ID NO: 70456 - protein, 13 aa, Homo Sapiens
LQAKETCQHGRYV

SEQ ID NO: 70457 - protein, 13 aa, Homo Sapiens
QAKETCQHGRYVP

SEQ ID NO: 70458 - protein, 13 aa, Homo Sapiens
AKETCQHGRYVPP

SEQ ID NO: 70459 - protein, 13 aa, Homo Sapiens
KETCQHGRYVPPS

SEQ ID NO: 70460 - protein, 13 aa, Homo Sapiens
ETCQHGRYVPPSS

SEQ ID NO: 70461 - protein, 13 aa, Homo Sapiens
TCQHGRYVPPSST

SEQ ID NO: 70462 - protein, 13 aa, Homo Sapiens
CQHGRYVPPSSTD

SEQ ID NO: 70463 - protein, 13 aa, Homo Sapiens
QHGRYVPPSSTDR

SEQ ID NO: 70464 - protein, 13 aa, Homo Sapiens
HGRYVPPSSTDRS

SEQ ID NO: 70465 - protein, 13 aa, Homo Sapiens
GRYVPPSSTDRSP

SEQ ID NO: 70466 - protein, 13 aa, Homo Sapiens
RYVPPSSTDRSPY

SEQ ID NO: 70467 - protein, 13 aa, Homo Sapiens
YVPPSSTDRSPYE

SEQ ID NO: 70468 - protein, 13 aa, Homo Sapiens
VPPSSTDRSPYEK

SEQ ID NO: 70469 - protein, 13 aa, Homo Sapiens
PPSSTDRSPYEKV

SEQ ID NO: 70470 - protein, 13 aa, Homo Sapiens
PSSTDRSPYEKVS

SEQ ID NO: 70471 - protein, 13 aa, Homo Sapiens
SSTDRSPYEKVSA

SEQ ID NO: 70472 - protein, 13 aa, Homo Sapiens
STDRSPYEKVSAG

SEQ ID NO: 70473 - protein, 13 aa, Homo Sapiens
TDRSPYEKVSAGN

SEQ ID NO: 70474 - protein, 13 aa, Homo Sapiens
DRSPYEKVSAGNG

SEQ ID NO: 70475 - protein, 13 aa, Homo Sapiens
RSPYEKVSAGNGG

SEQ ID NO: 70476 - protein, 13 aa, Homo Sapiens
SPYEKVSAGNGGS

SEQ ID NO: 70477 - protein, 13 aa, Homo Sapiens
PYEKVSAGNGGSS

SEQ ID NO: 70478 - protein, 13 aa, Homo Sapiens
YEKVSAGNGGSSL

SEQ ID NO: 70479 - protein, 13 aa, Homo Sapiens
EKVSAGNGGSSLS

SEQ ID NO: 70480 - protein, 13 aa, Homo Sapiens
KVSAGNGGSSLSY

SEQ ID NO: 70481 - protein, 13 aa, Homo Sapiens
VSAGNGGSSLSYT

SEQ ID NO: 70482 - protein, 13 aa, Homo Sapiens
SAGNGGSSLSYTN

SEQ ID NO: 70483 - protein, 13 aa, Homo Sapiens
AGNGGSSLSYTNP

SEQ ID NO: 70484 - protein, 13 aa, Homo Sapiens
GNGGSSLSYTNPA

SEQ ID NO: 70485 - protein, 13 aa, Homo Sapiens
NGGSSLSYTNPAV

SEQ ID NO: 70486 - protein, 13 aa, Homo Sapiens
GGSSLSYTNPAVA

SEQ ID NO: 70487 - protein, 13 aa, Homo Sapiens
GSSLSYTNPAVAA

SEQ ID NO: 70488 - protein, 13 aa, Homo Sapiens
SSLSYTNPAVAAA

SEQ ID NO: 70489 - protein, 13 aa, Homo Sapiens
SLSYTNPAVAAAS

SEQ ID NO: 70490 - protein, 13 aa, Homo Sapiens
LSYTNPAVAAASA

SEQ ID NO: 70491 - protein, 13 aa, Homo Sapiens
SYTNPAVAAASAN

SEQ ID NO: 70492 - protein, 13 aa, Homo Sapiens
YTNPAVAAASANL

SEQ ID NO: 70493 - protein, 14 aa, Homo Sapiens
MGTSLSPNDPWPLN

SEQ ID NO: 70494 - protein, 14 aa, Homo Sapiens
GTSLSPNDPWPLNP

SEQ ID NO: 70495 - protein, 14 aa, Homo Sapiens
TSLSPNDPWPLNPL

SEQ ID NO: 70496 - protein, 14 aa, Homo Sapiens
SLSPNDPWPLNPLS

SEQ ID NO: 70497 - protein, 14 aa, Homo Sapiens
LSPNDPWPLNPLSI

SEQ ID NO: 70498 - protein, 14 aa, Homo Sapiens
SPNDPWPLNPLSIQ

SEQ ID NO: 70499 - protein, 14 aa, Homo Sapiens
PNDPWPLNPLSIQQ

SEQ ID NO: 70500 - protein, 14 aa, Homo Sapiens
NDPWPLNPLSIQQT

SEQ ID NO: 70501 - protein, 14 aa, Homo Sapiens
DPWPLNPLSIQQTT

SEQ ID NO: 70502 - protein, 14 aa, Homo Sapiens
PWPLNPLSIQQTTL

SEQ ID NO: 70503 - protein, 14 aa, Homo Sapiens
WPLNPLSIQQTTLL

SEQ ID NO: 70504 - protein, 14 aa, Homo Sapiens
PLNPLSIQQTTLLL

SEQ ID NO: 70505 - protein, 14 aa, Homo Sapiens
LNPLSIQQTTLLLL

SEQ ID NO: 70506 - protein, 14 aa, Homo Sapiens
NPLSIQQTTLLLLL

SEQ ID NO: 70507 - protein, 14 aa, Homo Sapiens
PLSIQQTTLLLLLS

SEQ ID NO: 70508 - protein, 14 aa, Homo Sapiens
LSIQQTTLLLLLSV

SEQ ID NO: 70509 - protein, 14 aa, Homo Sapiens
SIQQTTLLLLLSVL

SEQ ID NO: 70510 - protein, 14 aa, Homo Sapiens
IQQTTLLLLLSVLA

SEQ ID NO: 70511 - protein, 14 aa, Homo Sapiens
QQTTLLLLLSVLAT

SEQ ID NO: 70512 - protein, 14 aa, Homo Sapiens
QTTLLLLLSVLATV

SEQ ID NO: 70513 - protein, 14 aa, Homo Sapiens
TTLLLLLSVLATVH

SEQ ID NO: 70514 - protein, 14 aa, Homo Sapiens
TLLLLLSVLATVHV

SEQ ID NO: 70515 - protein, 14 aa, Homo Sapiens
LLLLLSVLATVHVG

SEQ ID NO: 70516 - protein, 14 aa, Homo Sapiens
LLLLSVLATVHVGQ

SEQ ID NO: 70517 - protein, 14 aa, Homo Sapiens
LLLSVLATVHVGQR

SEQ ID NO: 70518 - protein, 14 aa, Homo Sapiens
LLSVLATVHVGQRL

SEQ ID NO: 70519 - protein, 14 aa, Homo Sapiens
LSVLATVHVGQRLL

SEQ ID NO: 70520 - protein, 14 aa, Homo Sapiens
SVLATVHVGQRLLR

SEQ ID NO: 70521 - protein, 14 aa, Homo Sapiens
VLATVHVGQRLLRQ

SEQ ID NO: 70522 - protein, 14 aa, Homo Sapiens
LATVHVGQRLLRQR

SEQ ID NO: 70523 - protein, 14 aa, Homo Sapiens
ATVHVGQRLLRQRR

SEQ ID NO: 70524 - protein, 14 aa, Homo Sapiens
TVHVGQRLLRQRRR

SEQ ID NO: 70525 - protein, 14 aa, Homo Sapiens
VHVGQRLLRQRRRQ

SEQ ID NO: 70526 - protein, 14 aa, Homo Sapiens
HVGQRLLRQRRRQL

SEQ ID NO: 70527 - protein, 14 aa, Homo Sapiens
VGQRLLRQRRRQLR

SEQ ID NO: 70528 - protein, 14 aa, Homo Sapiens
GQRLLRQRRRQLRS

SEQ ID NO: 70529 - protein, 14 aa, Homo Sapiens
QRLLRQRRRQLRSA

SEQ ID NO: 70530 - protein, 14 aa, Homo Sapiens
RLLRQRRRQLRSAP

SEQ ID NO: 70531 - protein, 14 aa, Homo Sapiens
LLRQRRRQLRSAPP

SEQ ID NO: 70532 - protein, 14 aa, Homo Sapiens
LRQRRRQLRSAPPG

SEQ ID NO: 70533 - protein, 14 aa, Homo Sapiens
RQRRRQLRSAPPGP

SEQ ID NO: 70534 - protein, 14 aa, Homo Sapiens
QRRRQLRSAPPGPF

SEQ ID NO: 70535 - protein, 14 aa, Homo Sapiens
RRRQLRSAPPGPFA

SEQ ID NO: 70536 - protein, 14 aa, Homo Sapiens
RRQLRSAPPGPFAW

SEQ ID NO: 70537 - protein, 14 aa, Homo Sapiens
RQLRSAPPGPFAWP

SEQ ID NO: 70538 - protein, 14 aa, Homo Sapiens
QLRSAPPGPFAWPL

SEQ ID NO: 70539 - protein, 14 aa, Homo Sapiens
LRSAPPGPFAWPLI

SEQ ID NO: 70540 - protein, 14 aa, Homo Sapiens
RSAPPGPFAWPLIG

SEQ ID NO: 70541 - protein, 14 aa, Homo Sapiens
SAPPGPFAWPLIGN

SEQ ID NO: 70542 - protein, 14 aa, Homo Sapiens
APPGPFAWPLIGNA

SEQ ID NO: 70543 - protein, 14 aa, Homo Sapiens
PPGPFAWPLIGNAA

SEQ ID NO: 70544 - protein, 14 aa, Homo Sapiens
PGPFAWPLIGNAAA

SEQ ID NO: 70545 - protein, 14 aa, Homo Sapiens
GPFAWPLIGNAAAV

SEQ ID NO: 70546 - protein, 14 aa, Homo Sapiens
PFAWPLIGNAAAVG

SEQ ID NO: 70547 - protein, 14 aa, Homo Sapiens
FAWPLIGNAAAVGQ

SEQ ID NO: 70548 - protein, 14 aa, Homo Sapiens
AWPLIGNAAAVGQA

SEQ ID NO: 70549 - protein, 14 aa, Homo Sapiens
WPLIGNAAAVGQAA

SEQ ID NO: 70550 - protein, 14 aa, Homo Sapiens
PLIGNAAAVGQAAH

SEQ ID NO: 70551 - protein, 14 aa, Homo Sapiens
LIGNAAAVGQAAHL

SEQ ID NO: 70552 - protein, 14 aa, Homo Sapiens
IGNAAAVGQAAHLS

SEQ ID NO: 70553 - protein, 14 aa, Homo Sapiens
GNAAAVGQAAHLSF

SEQ ID NO: 70554 - protein, 14 aa, Homo Sapiens
NAAAVGQAAHLSFA

SEQ ID NO: 70555 - protein, 14 aa, Homo Sapiens
AAAVGQAAHLSFAR

SEQ ID NO: 70556 - protein, 14 aa, Homo Sapiens
AAVGQAAHLSFARL

SEQ ID NO: 70557 - protein, 14 aa, Homo Sapiens
AVGQAAHLSFARLA

SEQ ID NO: 70558 - protein, 14 aa, Homo Sapiens
VGQAAHLSFARLAR

SEQ ID NO: 70559 - protein, 14 aa, Homo Sapiens
GQAAHLSFARLARR

SEQ ID NO: 70560 - protein, 14 aa, Homo Sapiens
QAAHLSFARLARRY

SEQ ID NO: 70561 - protein, 14 aa, Homo Sapiens
AAHLSFARLARRYG

SEQ ID NO: 70562 - protein, 14 aa, Homo Sapiens
AHLSFARLARRYGD

SEQ ID NO: 70563 - protein, 14 aa, Homo Sapiens
HLSFARLARRYGDV

SEQ ID NO: 70564 - protein, 14 aa, Homo Sapiens
LSFARLARRYGDVF

SEQ ID NO: 70565 - protein, 14 aa, Homo Sapiens
SFARLARRYGDVFQ

SEQ ID NO: 70566 - protein, 14 aa, Homo Sapiens
FARLARRYGDVFQI

SEQ ID NO: 70567 - protein, 14 aa, Homo Sapiens
ARLARRYGDVFQIR

SEQ ID NO: 70568 - protein, 14 aa, Homo Sapiens
RLARRYGDVFQIRL

SEQ ID NO: 70569 - protein, 14 aa, Homo Sapiens
LARRYGDVFQIRLG

SEQ ID NO: 70570 - protein, 14 aa, Homo Sapiens
ARRYGDVFQIRLGS

SEQ ID NO: 70571 - protein, 14 aa, Homo Sapiens
RRYGDVFQIRLGSC

SEQ ID NO: 70572 - protein, 14 aa, Homo Sapiens
RYGDVFQIRLGSCP

SEQ ID NO: 70573 - protein, 14 aa, Homo Sapiens
YGDVFQIRLGSCPI

SEQ ID NO: 70574 - protein, 14 aa, Homo Sapiens
GDVFQIRLGSCPIV

SEQ ID NO: 70575 - protein, 14 aa, Homo Sapiens
DVFQIRLGSCPIVV

SEQ ID NO: 70576 - protein, 14 aa, Homo Sapiens
VFQIRLGSCPIVVL

SEQ ID NO: 70577 - protein, 14 aa, Homo Sapiens
FQIRLGSCPIVVLN

SEQ ID NO: 70578 - protein, 14 aa, Homo Sapiens
QIRLGSCPIVVLNG

SEQ ID NO: 70579 - protein, 14 aa, Homo Sapiens
IRLGSCPIVVLNGE

SEQ ID NO: 70580 - protein, 14 aa, Homo Sapiens
RLGSCPIVVLNGER

SEQ ID NO: 70581 - protein, 14 aa, Homo Sapiens
LGSCPIVVLNGERA

SEQ ID NO: 70582 - protein, 14 aa, Homo Sapiens
GSCPIVVLNGERAI

SEQ ID NO: 70583 - protein, 14 aa, Homo Sapiens
SCPIVVLNGERAIH

SEQ ID NO: 70584 - protein, 14 aa, Homo Sapiens
CPIVVLNGERAIHQ

SEQ ID NO: 70585 - protein, 14 aa, Homo Sapiens
PIVVLNGERAIHQA

SEQ ID NO: 70586 - protein, 14 aa, Homo Sapiens
IVVLNGERAIHQAL

SEQ ID NO: 70587 - protein, 14 aa, Homo Sapiens
VVLNGERAIHQALV

SEQ ID NO: 70588 - protein, 14 aa, Homo Sapiens
VLNGERAIHQALVQ

SEQ ID NO: 70589 - protein, 14 aa, Homo Sapiens
LNGERAIHQALVQQ

SEQ ID NO: 70590 - protein, 14 aa, Homo Sapiens
NGERAIHQALVQQG

SEQ ID NO: 70591 - protein, 14 aa, Homo Sapiens
GERAIHQALVQQGS

SEQ ID NO: 70592 - protein, 14 aa, Homo Sapiens
ERAIHQALVQQGSA

SEQ ID NO: 70593 - protein, 14 aa, Homo Sapiens
RAIHQALVQQGSAF

SEQ ID NO: 70594 - protein, 14 aa, Homo Sapiens
AIHQALVQQGSAFA

SEQ ID NO: 70595 - protein, 14 aa, Homo Sapiens
IHQALVQQGSAFAD

SEQ ID NO: 70596 - protein, 14 aa, Homo Sapiens
HQALVQQGSAFADR

SEQ ID NO: 70597 - protein, 14 aa, Homo Sapiens
QALVQQGSAFADRP

SEQ ID NO: 70598 - protein, 14 aa, Homo Sapiens
ALVQQGSAFADRPA

SEQ ID NO: 70599 - protein, 14 aa, Homo Sapiens
LVQQGSAFADRPAF

SEQ ID NO: 70600 - protein, 14 aa, Homo Sapiens
VQQGSAFADRPAFA

SEQ ID NO: 70601 - protein, 14 aa, Homo Sapiens
QQGSAFADRPAFAS

SEQ ID NO: 70602 - protein, 14 aa, Homo Sapiens
QGSAFADRPAFASF

SEQ ID NO: 70603 - protein, 14 aa, Homo Sapiens
GSAFADRPAFASFR

SEQ ID NO: 70604 - protein, 14 aa, Homo Sapiens
SAFADRPAFASFRV

SEQ ID NO: 70605 - protein, 14 aa, Homo Sapiens
AFADRPAFASFRVV

SEQ ID NO: 70606 - protein, 14 aa, Homo Sapiens
FADRPAFASFRVVS

SEQ ID NO: 70607 - protein, 14 aa, Homo Sapiens
ADRPAFASFRVVSG

SEQ ID NO: 70608 - protein, 14 aa, Homo Sapiens
DRPAFASFRVVSGG

SEQ ID NO: 70609 - protein, 14 aa, Homo Sapiens
RPAFASFRVVSGGR

SEQ ID NO: 70610 - protein, 14 aa, Homo Sapiens
PAFASFRVVSGGRS

SEQ ID NO: 70611 - protein, 14 aa, Homo Sapiens
AFASFRVVSGGRSM

SEQ ID NO: 70612 - protein, 14 aa, Homo Sapiens
FASFRVVSGGRSMA

SEQ ID NO: 70613 - protein, 14 aa, Homo Sapiens
ASFRVVSGGRSMAF

SEQ ID NO: 70614 - protein, 14 aa, Homo Sapiens
SFRVVSGGRSMAFG

SEQ ID NO: 70615 - protein, 14 aa, Homo Sapiens
FRVVSGGRSMAFGH

SEQ ID NO: 70616 - protein, 14 aa, Homo Sapiens
RVVSGGRSMAFGHY

SEQ ID NO: 70617 - protein, 14 aa, Homo Sapiens
VVSGGRSMAFGHYS

SEQ ID NO: 70618 - protein, 14 aa, Homo Sapiens
VSGGRSMAFGHYSE

SEQ ID NO: 70619 - protein, 14 aa, Homo Sapiens
SGGRSMAFGHYSEH

SEQ ID NO: 70620 - protein, 14 aa, Homo Sapiens
GGRSMAFGHYSEHW

SEQ ID NO: 70621 - protein, 14 aa, Homo Sapiens
GRSMAFGHYSEHWK

SEQ ID NO: 70622 - protein, 14 aa, Homo Sapiens
RSMAFGHYSEHWKV

SEQ ID NO: 70623 - protein, 14 aa, Homo Sapiens
SMAFGHYSEHWKVQ

SEQ ID NO: 70624 - protein, 14 aa, Homo Sapiens
MAFGHYSEHWKVQR

SEQ ID NO: 70625 - protein, 14 aa, Homo Sapiens
AFGHYSEHWKVQRR

SEQ ID NO: 70626 - protein, 14 aa, Homo Sapiens
FGHYSEHWKVQRRA

SEQ ID NO: 70627 - protein, 14 aa, Homo Sapiens
GHYSEHWKVQRRAA

SEQ ID NO: 70628 - protein, 14 aa, Homo Sapiens
HYSEHWKVQRRAAH

SEQ ID NO: 70629 - protein, 14 aa, Homo Sapiens
YSEHWKVQRRAAHS

SEQ ID NO: 70630 - protein, 14 aa, Homo Sapiens
SEHWKVQRRAAHSM

SEQ ID NO: 70631 - protein, 14 aa, Homo Sapiens
EHWKVQRRAAHSMM

SEQ ID NO: 70632 - protein, 14 aa, Homo Sapiens
HWKVQRRAAHSMMR

SEQ ID NO: 70633 - protein, 14 aa, Homo Sapiens
WKVQRRAAHSMMRN

SEQ ID NO: 70634 - protein, 14 aa, Homo Sapiens
KVQRRAAHSMMRNF

SEQ ID NO: 70635 - protein, 14 aa, Homo Sapiens
VQRRAAHSMMRNFF

SEQ ID NO: 70636 - protein, 14 aa, Homo Sapiens
QRRAAHSMMRNFFT

SEQ ID NO: 70637 - protein, 14 aa, Homo Sapiens
RRAAHSMMRNFFTR

SEQ ID NO: 70638 - protein, 14 aa, Homo Sapiens
RAAHSMMRNFFTRQ

SEQ ID NO: 70639 - protein, 14 aa, Homo Sapiens
AAHSMMRNFFTRQP

SEQ ID NO: 70640 - protein, 14 aa, Homo Sapiens
AHSMMRNFFTRQPR

SEQ ID NO: 70641 - protein, 14 aa, Homo Sapiens
HSMMRNFFTRQPRS

SEQ ID NO: 70642 - protein, 14 aa, Homo Sapiens
SMMRNFFTRQPRSR

SEQ ID NO: 70643 - protein, 14 aa, Homo Sapiens
MMRNFFTRQPRSRQ

SEQ ID NO: 70644 - protein, 14 aa, Homo Sapiens
MRNFFTRQPRSRQV

SEQ ID NO: 70645 - protein, 14 aa, Homo Sapiens
RNFFTRQPRSRQVL

SEQ ID NO: 70646 - protein, 14 aa, Homo Sapiens
NFFTRQPRSRQVLE

SEQ ID NO: 70647 - protein, 14 aa, Homo Sapiens
FFTRQPRSRQVLEG

SEQ ID NO: 70648 - protein, 14 aa, Homo Sapiens
FTRQPRSRQVLEGH

SEQ ID NO: 70649 - protein, 14 aa, Homo Sapiens
TRQPRSRQVLEGHV

SEQ ID NO: 70650 - protein, 14 aa, Homo Sapiens
RQPRSRQVLEGHVL

SEQ ID NO: 70651 - protein, 14 aa, Homo Sapiens
QPRSRQVLEGHVLS

SEQ ID NO: 70652 - protein, 14 aa, Homo Sapiens
PRSRQVLEGHVLSE

SEQ ID NO: 70653 - protein, 14 aa, Homo Sapiens
RSRQVLEGHVLSEA

SEQ ID NO: 70654 - protein, 14 aa, Homo Sapiens
SRQVLEGHVLSEAR

SEQ ID NO: 70655 - protein, 14 aa, Homo Sapiens
RQVLEGHVLSEARE

SEQ ID NO: 70656 - protein, 14 aa, Homo Sapiens
QVLEGHVLSEAREL

SEQ ID NO: 70657 - protein, 14 aa, Homo Sapiens
VLEGHVLSEARELV

SEQ ID NO: 70658 - protein, 14 aa, Homo Sapiens
LEGHVLSEARELVA

SEQ ID NO: 70659 - protein, 14 aa, Homo Sapiens
EGHVLSEARELVAL

SEQ ID NO: 70660 - protein, 14 aa, Homo Sapiens
GHVLSEARELVALL

SEQ ID NO: 70661 - protein, 14 aa, Homo Sapiens
HVLSEARELVALLV

SEQ ID NO: 70662 - protein, 14 aa, Homo Sapiens
VLSEARELVALLVR

SEQ ID NO: 70663 - protein, 14 aa, Homo Sapiens
LSEARELVALLVRG

SEQ ID NO: 70664 - protein, 14 aa, Homo Sapiens
SEARELVALLVRGS

SEQ ID NO: 70665 - protein, 14 aa, Homo Sapiens
EARELVALLVRGSA

SEQ ID NO: 70666 - protein, 14 aa, Homo Sapiens
ARELVALLVRGSAD

SEQ ID NO: 70667 - protein, 14 aa, Homo Sapiens
RELVALLVRGSADG

SEQ ID NO: 70668 - protein, 14 aa, Homo Sapiens
ELVALLVRGSADGA

SEQ ID NO: 70669 - protein, 14 aa, Homo Sapiens
LVALLVRGSADGAF

SEQ ID NO: 70670 - protein, 14 aa, Homo Sapiens
VALLVRGSADGAFL

SEQ ID NO: 70671 - protein, 14 aa, Homo Sapiens
ALLVRGSADGAFLD

SEQ ID NO: 70672 - protein, 14 aa, Homo Sapiens
LLVRGSADGAFLDP

SEQ ID NO: 70673 - protein, 14 aa, Homo Sapiens
LVRGSADGAFLDPR

SEQ ID NO: 70674 - protein, 14 aa, Homo Sapiens
VRGSADGAFLDPRP

SEQ ID NO: 70675 - protein, 14 aa, Homo Sapiens
RGSADGAFLDPRPL

SEQ ID NO: 70676 - protein, 14 aa, Homo Sapiens
GSADGAFLDPRPLT

SEQ ID NO: 70677 - protein, 14 aa, Homo Sapiens
SADGAFLDPRPLTV

SEQ ID NO: 70678 - protein, 14 aa, Homo Sapiens
ADGAFLDPRPLTVV

SEQ ID NO: 70679 - protein, 14 aa, Homo Sapiens
DGAFLDPRPLTVVA

SEQ ID NO: 70680 - protein, 14 aa, Homo Sapiens
GAFLDPRPLTVVAV

SEQ ID NO: 70681 - protein, 14 aa, Homo Sapiens
AFLDPRPLTVVAVA

SEQ ID NO: 70682 - protein, 14 aa, Homo Sapiens
FLDPRPLTVVAVAN

SEQ ID NO: 70683 - protein, 14 aa, Homo Sapiens
LDPRPLTVVAVANV

SEQ ID NO: 70684 - protein, 14 aa, Homo Sapiens
DPRPLTVVAVANVM

SEQ ID NO: 70685 - protein, 14 aa, Homo Sapiens
PRPLTVVAVANVMS

SEQ ID NO: 70686 - protein, 14 aa, Homo Sapiens
RPLTVVAVANVMSA

SEQ ID NO: 70687 - protein, 14 aa, Homo Sapiens
PLTVVAVANVMSAV

SEQ ID NO: 70688 - protein, 14 aa, Homo Sapiens
LTVVAVANVMSAVC

SEQ ID NO: 70689 - protein, 14 aa, Homo Sapiens
TVVAVANVMSAVCF

SEQ ID NO: 70690 - protein, 14 aa, Homo Sapiens
VVAVANVMSAVCFG

SEQ ID NO: 70691 - protein, 14 aa, Homo Sapiens
VAVANVMSAVCFGC

SEQ ID NO: 70692 - protein, 14 aa, Homo Sapiens
AVANVMSAVCFGCR

SEQ ID NO: 70693 - protein, 14 aa, Homo Sapiens
VANVMSAVCFGCRY

SEQ ID NO: 70694 - protein, 14 aa, Homo Sapiens
ANVMSAVCFGCRYS

SEQ ID NO: 70695 - protein, 14 aa, Homo Sapiens
NVMSAVCFGCRYSH

SEQ ID NO: 70696 - protein, 14 aa, Homo Sapiens
VMSAVCFGCRYSHD

SEQ ID NO: 70697 - protein, 14 aa, Homo Sapiens
MSAVCFGCRYSHDD

SEQ ID NO: 70698 - protein, 14 aa, Homo Sapiens
SAVCFGCRYSHDDP

SEQ ID NO: 70699 - protein, 14 aa, Homo Sapiens
AVCFGCRYSHDDPE

SEQ ID NO: 70700 - protein, 14 aa, Homo Sapiens
VCFGCRYSHDDPEF

SEQ ID NO: 70701 - protein, 14 aa, Homo Sapiens
CFGCRYSHDDPEFR

SEQ ID NO: 70702 - protein, 14 aa, Homo Sapiens
FGCRYSHDDPEFRE

SEQ ID NO: 70703 - protein, 14 aa, Homo Sapiens
GCRYSHDDPEFREL

SEQ ID NO: 70704 - protein, 14 aa, Homo Sapiens
CRYSHDDPEFRELL

SEQ ID NO: 70705 - protein, 14 aa, Homo Sapiens
RYSHDDPEFRELLS

SEQ ID NO: 70706 - protein, 14 aa, Homo Sapiens
YSHDDPEFRELLSH

SEQ ID NO: 70707 - protein, 14 aa, Homo Sapiens
SHDDPEFRELLSHN

SEQ ID NO: 70708 - protein, 14 aa, Homo Sapiens
HDDPEFRELLSHNE

SEQ ID NO: 70709 - protein, 14 aa, Homo Sapiens
DDPEFRELLSHNEE

SEQ ID NO: 70710 - protein, 14 aa, Homo Sapiens
DPEFRELLSHNEEF

SEQ ID NO: 70711 - protein, 14 aa, Homo Sapiens
PEFRELLSHNEEFG

SEQ ID NO: 70712 - protein, 14 aa, Homo Sapiens
EFRELLSHNEEFGR

SEQ ID NO: 70713 - protein, 14 aa, Homo Sapiens
FRELLSHNEEFGRT

SEQ ID NO: 70714 - protein, 14 aa, Homo Sapiens
RELLSHNEEFGRTV

SEQ ID NO: 70715 - protein, 14 aa, Homo Sapiens
ELLSHNEEFGRTVG

SEQ ID NO: 70716 - protein, 14 aa, Homo Sapiens
LLSHNEEFGRTVGA

SEQ ID NO: 70717 - protein, 14 aa, Homo Sapiens
LSHNEEFGRTVGAG

SEQ ID NO: 70718 - protein, 14 aa, Homo Sapiens
SHNEEFGRTVGAGS

SEQ ID NO: 70719 - protein, 14 aa, Homo Sapiens
HNEEFGRTVGAGSL

SEQ ID NO: 70720 - protein, 14 aa, Homo Sapiens
NEEFGRTVGAGSLV

SEQ ID NO: 70721 - protein, 14 aa, Homo Sapiens
EEFGRTVGAGSLVD

SEQ ID NO: 70722 - protein, 14 aa, Homo Sapiens
EFGRTVGAGSLVDV

SEQ ID NO: 70723 - protein, 14 aa, Homo Sapiens
FGRTVGAGSLVDVM

SEQ ID NO: 70724 - protein, 14 aa, Homo Sapiens
GRTVGAGSLVDVMP

SEQ ID NO: 70725 - protein, 14 aa, Homo Sapiens
RTVGAGSLVDVMPW

SEQ ID NO: 70726 - protein, 14 aa, Homo Sapiens
TVGAGSLVDVMPWL

SEQ ID NO: 70727 - protein, 14 aa, Homo Sapiens
VGAGSLVDVMPWLQ

SEQ ID NO: 70728 - protein, 14 aa, Homo Sapiens
GAGSLVDVMPWLQY

SEQ ID NO: 70729 - protein, 14 aa, Homo Sapiens
AGSLVDVMPWLQYF

SEQ ID NO: 70730 - protein, 14 aa, Homo Sapiens
GSLVDVMPWLQYFP

SEQ ID NO: 70731 - protein, 14 aa, Homo Sapiens
SLVDVMPWLQYFPN

SEQ ID NO: 70732 - protein, 14 aa, Homo Sapiens
LVDVMPWLQYFPNP

SEQ ID NO: 70733 - protein, 14 aa, Homo Sapiens
VDVMPWLQYFPNPV

SEQ ID NO: 70734 - protein, 14 aa, Homo Sapiens
DVMPWLQYFPNPVR

SEQ ID NO: 70735 - protein, 14 aa, Homo Sapiens
VMPWLQYFPNPVRT

SEQ ID NO: 70736 - protein, 14 aa, Homo Sapiens
MPWLQYFPNPVRTV

SEQ ID NO: 70737 - protein, 14 aa, Homo Sapiens
PWLQYFPNPVRTVF

SEQ ID NO: 70738 - protein, 14 aa, Homo Sapiens
WLQYFPNPVRTVFR

SEQ ID NO: 70739 - protein, 14 aa, Homo Sapiens
LQYFPNPVRTVFRE

SEQ ID NO: 70740 - protein, 14 aa, Homo Sapiens
QYFPNPVRTVFREF

SEQ ID NO: 70741 - protein, 14 aa, Homo Sapiens
YFPNPVRTVFREFE

SEQ ID NO: 70742 - protein, 14 aa, Homo Sapiens
FPNPVRTVFREFEQ

SEQ ID NO: 70743 - protein, 14 aa, Homo Sapiens
PNPVRTVFREFEQL

SEQ ID NO: 70744 - protein, 14 aa, Homo Sapiens
NPVRTVFREFEQLN

SEQ ID NO: 70745 - protein, 14 aa, Homo Sapiens
PVRTVFREFEQLNR

SEQ ID NO: 70746 - protein, 14 aa, Homo Sapiens
VRTVFREFEQLNRN

SEQ ID NO: 70747 - protein, 14 aa, Homo Sapiens
RTVFREFEQLNRNF

SEQ ID NO: 70748 - protein, 14 aa, Homo Sapiens
TVFREFEQLNRNFS

SEQ ID NO: 70749 - protein, 14 aa, Homo Sapiens
VFREFEQLNRNFSN

SEQ ID NO: 70750 - protein, 14 aa, Homo Sapiens
FREFEQLNRNFSNF

SEQ ID NO: 70751 - protein, 14 aa, Homo Sapiens
REFEQLNRNFSNFI

SEQ ID NO: 70752 - protein, 14 aa, Homo Sapiens
EFEQLNRNFSNFIL

SEQ ID NO: 70753 - protein, 14 aa, Homo Sapiens
FEQLNRNFSNFILD

SEQ ID NO: 70754 - protein, 14 aa, Homo Sapiens
EQLNRNFSNFILDK

SEQ ID NO: 70755 - protein, 14 aa, Homo Sapiens
QLNRNFSNFILDKF

SEQ ID NO: 70756 - protein, 14 aa, Homo Sapiens
LNRNFSNFILDKFL

SEQ ID NO: 70757 - protein, 14 aa, Homo Sapiens
NRNFSNFILDKFLR

SEQ ID NO: 70758 - protein, 14 aa, Homo Sapiens
RNFSNFILDKFLRH

SEQ ID NO: 70759 - protein, 14 aa, Homo Sapiens
NFSNFILDKFLRHC

SEQ ID NO: 70760 - protein, 14 aa, Homo Sapiens
FSNFILDKFLRHCE

SEQ ID NO: 70761 - protein, 14 aa, Homo Sapiens
SNFILDKFLRHCES

SEQ ID NO: 70762 - protein, 14 aa, Homo Sapiens
NFILDKFLRHCESL

SEQ ID NO: 70763 - protein, 14 aa, Homo Sapiens
FILDKFLRHCESLR

SEQ ID NO: 70764 - protein, 14 aa, Homo Sapiens
ILDKFLRHCESLRP

SEQ ID NO: 70765 - protein, 14 aa, Homo Sapiens
LDKFLRHCESLRPG

SEQ ID NO: 70766 - protein, 14 aa, Homo Sapiens
DKFLRHCESLRPGA

SEQ ID NO: 70767 - protein, 14 aa, Homo Sapiens
KFLRHCESLRPGAA

SEQ ID NO: 70768 - protein, 14 aa, Homo Sapiens
FLRHCESLRPGAAP

SEQ ID NO: 70769 - protein, 14 aa, Homo Sapiens
LRHCESLRPGAAPR

SEQ ID NO: 70770 - protein, 14 aa, Homo Sapiens
RHCESLRPGAAPRD

SEQ ID NO: 70771 - protein, 14 aa, Homo Sapiens
HCESLRPGAAPRDM

SEQ ID NO: 70772 - protein, 14 aa, Homo Sapiens
CESLRPGAAPRDMM

SEQ ID NO: 70773 - protein, 14 aa, Homo Sapiens
ESLRPGAAPRDMMD

SEQ ID NO: 70774 - protein, 14 aa, Homo Sapiens
SLRPGAAPRDMMDA

SEQ ID NO: 70775 - protein, 14 aa, Homo Sapiens
LRPGAAPRDMMDAF

SEQ ID NO: 70776 - protein, 14 aa, Homo Sapiens
RPGAAPRDMMDAFI

SEQ ID NO: 70777 - protein, 14 aa, Homo Sapiens
PGAAPRDMMDAFIL

SEQ ID NO: 70778 - protein, 14 aa, Homo Sapiens
GAAPRDMMDAFILS

SEQ ID NO: 70779 - protein, 14 aa, Homo Sapiens
AAPRDMMDAFILSA

SEQ ID NO: 70780 - protein, 14 aa, Homo Sapiens
APRDMMDAFILSAE

SEQ ID NO: 70781 - protein, 14 aa, Homo Sapiens
PRDMMDAFILSAEK

SEQ ID NO: 70782 - protein, 14 aa, Homo Sapiens
RDMMDAFILSAEKK

SEQ ID NO: 70783 - protein, 14 aa, Homo Sapiens
DMMDAFILSAEKKA

SEQ ID NO: 70784 - protein, 14 aa, Homo Sapiens
MMDAFILSAEKKAA

SEQ ID NO: 70785 - protein, 14 aa, Homo Sapiens
MDAFILSAEKKAAG

SEQ ID NO: 70786 - protein, 14 aa, Homo Sapiens
DAFILSAEKKAAGD

SEQ ID NO: 70787 - protein, 14 aa, Homo Sapiens
AFILSAEKKAAGDS

SEQ ID NO: 70788 - protein, 14 aa, Homo Sapiens
FILSAEKKAAGDSH

SEQ ID NO: 70789 - protein, 14 aa, Homo Sapiens
ILSAEKKAAGDSHG

SEQ ID NO: 70790 - protein, 14 aa, Homo Sapiens
LSAEKKAAGDSHGG

SEQ ID NO: 70791 - protein, 14 aa, Homo Sapiens
SAEKKAAGDSHGGG

SEQ ID NO: 70792 - protein, 14 aa, Homo Sapiens
AEKKAAGDSHGGGA

SEQ ID NO: 70793 - protein, 14 aa, Homo Sapiens
EKKAAGDSHGGGAR

SEQ ID NO: 70794 - protein, 14 aa, Homo Sapiens
KKAAGDSHGGGARL

SEQ ID NO: 70795 - protein, 14 aa, Homo Sapiens
KAAGDSHGGGARLD

SEQ ID NO: 70796 - protein, 14 aa, Homo Sapiens
AAGDSHGGGARLDL

SEQ ID NO: 70797 - protein, 14 aa, Homo Sapiens
AGDSHGGGARLDLE

SEQ ID NO: 70798 - protein, 14 aa, Homo Sapiens
GDSHGGGARLDLEN

SEQ ID NO: 70799 - protein, 14 aa, Homo Sapiens
DSHGGGARLDLENV

SEQ ID NO: 70800 - protein, 14 aa, Homo Sapiens
SHGGGARLDLENVP

SEQ ID NO: 70801 - protein, 14 aa, Homo Sapiens
HGGGARLDLENVPA

SEQ ID NO: 70802 - protein, 14 aa, Homo Sapiens
GGGARLDLENVPAT

SEQ ID NO: 70803 - protein, 14 aa, Homo Sapiens
GGARLDLENVPATI

SEQ ID NO: 70804 - protein, 14 aa, Homo Sapiens
GARLDLENVPATIT

SEQ ID NO: 70805 - protein, 14 aa, Homo Sapiens
ARLDLENVPATITD

SEQ ID NO: 70806 - protein, 14 aa, Homo Sapiens
RLDLENVPATITDI

SEQ ID NO: 70807 - protein, 14 aa, Homo Sapiens
LDLENVPATITDIF

SEQ ID NO: 70808 - protein, 14 aa, Homo Sapiens
DLENVPATITDIFG

SEQ ID NO: 70809 - protein, 14 aa, Homo Sapiens
LENVPATITDIFGA

SEQ ID NO: 70810 - protein, 14 aa, Homo Sapiens
ENVPATITDIFGAS

SEQ ID NO: 70811 - protein, 14 aa, Homo Sapiens
NVPATITDIFGASQ

SEQ ID NO: 70812 - protein, 14 aa, Homo Sapiens
VPATITDIFGASQD

SEQ ID NO: 70813 - protein, 14 aa, Homo Sapiens
PATITDIFGASQDT

SEQ ID NO: 70814 - protein, 14 aa, Homo Sapiens
ATITDIFGASQDTL

SEQ ID NO: 70815 - protein, 14 aa, Homo Sapiens
TITDIFGASQDTLS

SEQ ID NO: 70816 - protein, 14 aa, Homo Sapiens
ITDIFGASQDTLST

SEQ ID NO: 70817 - protein, 14 aa, Homo Sapiens
TDIFGASQDTLSTA

SEQ ID NO: 70818 - protein, 14 aa, Homo Sapiens
DIFGASQDTLSTAL

SEQ ID NO: 70819 - protein, 14 aa, Homo Sapiens
IFGASQDTLSTALQ

SEQ ID NO: 70820 - protein, 14 aa, Homo Sapiens
FGASQDTLSTALQW

SEQ ID NO: 70821 - protein, 14 aa, Homo Sapiens
GASQDTLSTALQWL

SEQ ID NO: 70822 - protein, 14 aa, Homo Sapiens
ASQDTLSTALQWLL

SEQ ID NO: 70823 - protein, 14 aa, Homo Sapiens
SQDTLSTALQWLLL

SEQ ID NO: 70824 - protein, 14 aa, Homo Sapiens
QDTLSTALQWLLLL

SEQ ID NO: 70825 - protein, 14 aa, Homo Sapiens
DTLSTALQWLLLLF

SEQ ID NO: 70826 - protein, 14 aa, Homo Sapiens
TLSTALQWLLLLFT

SEQ ID NO: 70827 - protein, 14 aa, Homo Sapiens
LSTALQWLLLLFTR

SEQ ID NO: 70828 - protein, 14 aa, Homo Sapiens
STALQWLLLLFTRY

SEQ ID NO: 70829 - protein, 14 aa, Homo Sapiens
TALQWLLLLFTRYP

SEQ ID NO: 70830 - protein, 14 aa, Homo Sapiens
ALQWLLLLFTRYPD

SEQ ID NO: 70831 - protein, 14 aa, Homo Sapiens
LQWLLLLFTRYPDV

SEQ ID NO: 70832 - protein, 14 aa, Homo Sapiens
QWLLLLFTRYPDVQ

SEQ ID NO: 70833 - protein, 14 aa, Homo Sapiens
WLLLLFTRYPDVQT

SEQ ID NO: 70834 - protein, 14 aa, Homo Sapiens
LLLLFTRYPDVQTR

SEQ ID NO: 70835 - protein, 14 aa, Homo Sapiens
LLLFTRYPDVQTRV

SEQ ID NO: 70836 - protein, 14 aa, Homo Sapiens
LLFTRYPDVQTRVQ

SEQ ID NO: 70837 - protein, 14 aa, Homo Sapiens
LFTRYPDVQTRVQA

SEQ ID NO: 70838 - protein, 14 aa, Homo Sapiens
FTRYPDVQTRVQAE

SEQ ID NO: 70839 - protein, 14 aa, Homo Sapiens
TRYPDVQTRVQAEL

SEQ ID NO: 70840 - protein, 14 aa, Homo Sapiens
RYPDVQTRVQAELD

SEQ ID NO: 70841 - protein, 14 aa, Homo Sapiens
YPDVQTRVQAELDQ

SEQ ID NO: 70842 - protein, 14 aa, Homo Sapiens
PDVQTRVQAELDQV

SEQ ID NO: 70843 - protein, 14 aa, Homo Sapiens
DVQTRVQAELDQVV

SEQ ID NO: 70844 - protein, 14 aa, Homo Sapiens
VQTRVQAELDQVVG

SEQ ID NO: 70845 - protein, 14 aa, Homo Sapiens
QTRVQAELDQVVGR

SEQ ID NO: 70846 - protein, 14 aa, Homo Sapiens
TRVQAELDQVVGRD

SEQ ID NO: 70847 - protein, 14 aa, Homo Sapiens
RVQAELDQVVGRDR

SEQ ID NO: 70848 - protein, 14 aa, Homo Sapiens
VQAELDQVVGRDRL

SEQ ID NO: 70849 - protein, 14 aa, Homo Sapiens
QAELDQVVGRDRLP

SEQ ID NO: 70850 - protein, 14 aa, Homo Sapiens
AELDQVVGRDRLPC

SEQ ID NO: 70851 - protein, 14 aa, Homo Sapiens
ELDQVVGRDRLPCM

SEQ ID NO: 70852 - protein, 14 aa, Homo Sapiens
LDQVVGRDRLPCMG

SEQ ID NO: 70853 - protein, 14 aa, Homo Sapiens
DQVVGRDRLPCMGD

SEQ ID NO: 70854 - protein, 14 aa, Homo Sapiens
QVVGRDRLPCMGDQ

SEQ ID NO: 70855 - protein, 14 aa, Homo Sapiens
VVGRDRLPCMGDQP

SEQ ID NO: 70856 - protein, 14 aa, Homo Sapiens
VGRDRLPCMGDQPN

SEQ ID NO: 70857 - protein, 14 aa, Homo Sapiens
GRDRLPCMGDQPNL

SEQ ID NO: 70858 - protein, 14 aa, Homo Sapiens
RDRLPCMGDQPNLP

SEQ ID NO: 70859 - protein, 14 aa, Homo Sapiens
DRLPCMGDQPNLPY

SEQ ID NO: 70860 - protein, 14 aa, Homo Sapiens
RLPCMGDQPNLPYV

SEQ ID NO: 70861 - protein, 14 aa, Homo Sapiens
LPCMGDQPNLPYVL

SEQ ID NO: 70862 - protein, 14 aa, Homo Sapiens
PCMGDQPNLPYVLA

SEQ ID NO: 70863 - protein, 14 aa, Homo Sapiens
CMGDQPNLPYVLAF

SEQ ID NO: 70864 - protein, 14 aa, Homo Sapiens
MGDQPNLPYVLAFL

SEQ ID NO: 70865 - protein, 14 aa, Homo Sapiens
GDQPNLPYVLAFLY

SEQ ID NO: 70866 - protein, 14 aa, Homo Sapiens
DQPNLPYVLAFLYE

SEQ ID NO: 70867 - protein, 14 aa, Homo Sapiens
QPNLPYVLAFLYEA

SEQ ID NO: 70868 - protein, 14 aa, Homo Sapiens
PNLPYVLAFLYEAM

SEQ ID NO: 70869 - protein, 14 aa, Homo Sapiens
NLPYVLAFLYEAMR

SEQ ID NO: 70870 - protein, 14 aa, Homo Sapiens
LPYVLAFLYEAMRF

SEQ ID NO: 70871 - protein, 14 aa, Homo Sapiens
PYVLAFLYEAMRFS

SEQ ID NO: 70872 - protein, 14 aa, Homo Sapiens
YVLAFLYEAMRFSS

SEQ ID NO: 70873 - protein, 14 aa, Homo Sapiens
VLAFLYEAMRFSSF

SEQ ID NO: 70874 - protein, 14 aa, Homo Sapiens
LAFLYEAMRFSSFV

SEQ ID NO: 70875 - protein, 14 aa, Homo Sapiens
AFLYEAMRFSSFVP

SEQ ID NO: 70876 - protein, 14 aa, Homo Sapiens
FLYEAMRFSSFVPV

SEQ ID NO: 70877 - protein, 14 aa, Homo Sapiens
LYEAMRFSSFVPVT

SEQ ID NO: 70878 - protein, 14 aa, Homo Sapiens
YEAMRFSSFVPVTI

SEQ ID NO: 70879 - protein, 14 aa, Homo Sapiens
EAMRFSSFVPVTIP

SEQ ID NO: 70880 - protein, 14 aa, Homo Sapiens
AMRFSSFVPVTIPH

SEQ ID NO: 70881 - protein, 14 aa, Homo Sapiens
MRFSSFVPVTIPHA

SEQ ID NO: 70882 - protein, 14 aa, Homo Sapiens
RFSSFVPVTIPHAT

SEQ ID NO: 70883 - protein, 14 aa, Homo Sapiens
FSSFVPVTIPHATT

SEQ ID NO: 70884 - protein, 14 aa, Homo Sapiens
SSFVPVTIPHATTA

SEQ ID NO: 70885 - protein, 14 aa, Homo Sapiens
SFVPVTIPHATTAN

SEQ ID NO: 70886 - protein, 14 aa, Homo Sapiens
FVPVTIPHATTANT

SEQ ID NO: 70887 - protein, 14 aa, Homo Sapiens
VPVTIPHATTANTS

SEQ ID NO: 70888 - protein, 14 aa, Homo Sapiens
PVTIPHATTANTSV

SEQ ID NO: 70889 - protein, 14 aa, Homo Sapiens
VTIPHATTANTSVL

SEQ ID NO: 70890 - protein, 14 aa, Homo Sapiens
TIPHATTANTSVLG

SEQ ID NO: 70891 - protein, 14 aa, Homo Sapiens
IPHATTANTSVLGY

SEQ ID NO: 70892 - protein, 14 aa, Homo Sapiens
PHATTANTSVLGYH

SEQ ID NO: 70893 - protein, 14 aa, Homo Sapiens
HATTANTSVLGYHI

SEQ ID NO: 70894 - protein, 14 aa, Homo Sapiens
ATTANTSVLGYHIP

SEQ ID NO: 70895 - protein, 14 aa, Homo Sapiens
TTANTSVLGYHIPK

SEQ ID NO: 70896 - protein, 14 aa, Homo Sapiens
TANTSVLGYHIPKD

SEQ ID NO: 70897 - protein, 14 aa, Homo Sapiens
ANTSVLGYHIPKDT

SEQ ID NO: 70898 - protein, 14 aa, Homo Sapiens
NTSVLGYHIPKDTV

SEQ ID NO: 70899 - protein, 14 aa, Homo Sapiens
TSVLGYHIPKDTVV

SEQ ID NO: 70900 - protein, 14 aa, Homo Sapiens
SVLGYHIPKDTVVF

SEQ ID NO: 70901 - protein, 14 aa, Homo Sapiens
VLGYHIPKDTVVFV

SEQ ID NO: 70902 - protein, 14 aa, Homo Sapiens
LGYHIPKDTVVFVN

SEQ ID NO: 70903 - protein, 14 aa, Homo Sapiens
GYHIPKDTVVFVNQ

SEQ ID NO: 70904 - protein, 14 aa, Homo Sapiens
YHIPKDTVVFVNQW

SEQ ID NO: 70905 - protein, 14 aa, Homo Sapiens
HIPKDTVVFVNQWS

SEQ ID NO: 70906 - protein, 14 aa, Homo Sapiens
IPKDTVVFVNQWSV

SEQ ID NO: 70907 - protein, 14 aa, Homo Sapiens
PKDTVVFVNQWSVN

SEQ ID NO: 70908 - protein, 14 aa, Homo Sapiens
KDTVVFVNQWSVNH

SEQ ID NO: 70909 - protein, 14 aa, Homo Sapiens
DTVVFVNQWSVNHD

SEQ ID NO: 70910 - protein, 14 aa, Homo Sapiens
TVVFVNQWSVNHDP

SEQ ID NO: 70911 - protein, 14 aa, Homo Sapiens
VVFVNQWSVNHDPL

SEQ ID NO: 70912 - protein, 14 aa, Homo Sapiens
VFVNQWSVNHDPLK

SEQ ID NO: 70913 - protein, 14 aa, Homo Sapiens
FVNQWSVNHDPLKW

SEQ ID NO: 70914 - protein, 14 aa, Homo Sapiens
VNQWSVNHDPLKWP

SEQ ID NO: 70915 - protein, 14 aa, Homo Sapiens
NQWSVNHDPLKWPN

SEQ ID NO: 70916 - protein, 14 aa, Homo Sapiens
QWSVNHDPLKWPNP

SEQ ID NO: 70917 - protein, 14 aa, Homo Sapiens
WSVNHDPLKWPNPE

SEQ ID NO: 70918 - protein, 14 aa, Homo Sapiens
SVNHDPLKWPNPEN

SEQ ID NO: 70919 - protein, 14 aa, Homo Sapiens
VNHDPLKWPNPENF

SEQ ID NO: 70920 - protein, 14 aa, Homo Sapiens
NHDPLKWPNPENFD

SEQ ID NO: 70921 - protein, 14 aa, Homo Sapiens
HDPLKWPNPENFDP

SEQ ID NO: 70922 - protein, 14 aa, Homo Sapiens
DPLKWPNPENFDPA

SEQ ID NO: 70923 - protein, 14 aa, Homo Sapiens
PLKWPNPENFDPAR

SEQ ID NO: 70924 - protein, 14 aa, Homo Sapiens
LKWPNPENFDPARF

SEQ ID NO: 70925 - protein, 14 aa, Homo Sapiens
KWPNPENFDPARFL

SEQ ID NO: 70926 - protein, 14 aa, Homo Sapiens
WPNPENFDPARFLD

SEQ ID NO: 70927 - protein, 14 aa, Homo Sapiens
PNPENFDPARFLDK

SEQ ID NO: 70928 - protein, 14 aa, Homo Sapiens
NPENFDPARFLDKD

SEQ ID NO: 70929 - protein, 14 aa, Homo Sapiens
PENFDPARFLDKDG

SEQ ID NO: 70930 - protein, 14 aa, Homo Sapiens
ENFDPARFLDKDGL

SEQ ID NO: 70931 - protein, 14 aa, Homo Sapiens
NFDPARFLDKDGLI

SEQ ID NO: 70932 - protein, 14 aa, Homo Sapiens
FDPARFLDKDGLIN

SEQ ID NO: 70933 - protein, 14 aa, Homo Sapiens
DPARFLDKDGLINK

SEQ ID NO: 70934 - protein, 14 aa, Homo Sapiens
PARFLDKDGLINKD

SEQ ID NO: 70935 - protein, 14 aa, Homo Sapiens
ARFLDKDGLINKDL

SEQ ID NO: 70936 - protein, 14 aa, Homo Sapiens
RFLDKDGLINKDLT

SEQ ID NO: 70937 - protein, 14 aa, Homo Sapiens
FLDKDGLINKDLTS

SEQ ID NO: 70938 - protein, 14 aa, Homo Sapiens
LDKDGLINKDLTSR

SEQ ID NO: 70939 - protein, 14 aa, Homo Sapiens
DKDGLINKDLTSRV

SEQ ID NO: 70940 - protein, 14 aa, Homo Sapiens
KDGLINKDLTSRVM

SEQ ID NO: 70941 - protein, 14 aa, Homo Sapiens
DGLINKDLTSRVMI

SEQ ID NO: 70942 - protein, 14 aa, Homo Sapiens
GLINKDLTSRVMIF

SEQ ID NO: 70943 - protein, 14 aa, Homo Sapiens
LINKDLTSRVMIFS

SEQ ID NO: 70944 - protein, 14 aa, Homo Sapiens
INKDLTSRVMIFSV

SEQ ID NO: 70945 - protein, 14 aa, Homo Sapiens
NKDLTSRVMIFSVG

SEQ ID NO: 70946 - protein, 14 aa, Homo Sapiens
KDLTSRVMIFSVGK

SEQ ID NO: 70947 - protein, 14 aa, Homo Sapiens
DLTSRVMIFSVGKR

SEQ ID NO: 70948 - protein, 14 aa, Homo Sapiens
LTSRVMIFSVGKRR

SEQ ID NO: 70949 - protein, 14 aa, Homo Sapiens
TSRVMIFSVGKRRC

SEQ ID NO: 70950 - protein, 14 aa, Homo Sapiens
SRVMIFSVGKRRCI

SEQ ID NO: 70951 - protein, 14 aa, Homo Sapiens
RVMIFSVGKRRCIG

SEQ ID NO: 70952 - protein, 14 aa, Homo Sapiens
VMIFSVGKRRCIGE

SEQ ID NO: 70953 - protein, 14 aa, Homo Sapiens
MIFSVGKRRCIGEE

SEQ ID NO: 70954 - protein, 14 aa, Homo Sapiens
IFSVGKRRCIGEEL

SEQ ID NO: 70955 - protein, 14 aa, Homo Sapiens
FSVGKRRCIGEELS

SEQ ID NO: 70956 - protein, 14 aa, Homo Sapiens
SVGKRRCIGEELSK

SEQ ID NO: 70957 - protein, 14 aa, Homo Sapiens
VGKRRCIGEELSKM

SEQ ID NO: 70958 - protein, 14 aa, Homo Sapiens
GKRRCIGEELSKMQ

SEQ ID NO: 70959 - protein, 14 aa, Homo Sapiens
KRRCIGEELSKMQL

SEQ ID NO: 70960 - protein, 14 aa, Homo Sapiens
RRCIGEELSKMQLF

SEQ ID NO: 70961 - protein, 14 aa, Homo Sapiens
RCIGEELSKMQLFL

SEQ ID NO: 70962 - protein, 14 aa, Homo Sapiens
CIGEELSKMQLFLF

SEQ ID NO: 70963 - protein, 14 aa, Homo Sapiens
IGEELSKMQLFLFI

SEQ ID NO: 70964 - protein, 14 aa, Homo Sapiens
GEELSKMQLFLFIS

SEQ ID NO: 70965 - protein, 14 aa, Homo Sapiens
EELSKMQLFLFISI

SEQ ID NO: 70966 - protein, 14 aa, Homo Sapiens
ELSKMQLFLFISIL

SEQ ID NO: 70967 - protein, 14 aa, Homo Sapiens
LSKMQLFLFISILA

SEQ ID NO: 70968 - protein, 14 aa, Homo Sapiens
SKMQLFLFISILAH

SEQ ID NO: 70969 - protein, 14 aa, Homo Sapiens
KMQLFLFISILAHQ

SEQ ID NO: 70970 - protein, 14 aa, Homo Sapiens
MQLFLFISILAHQC

SEQ ID NO: 70971 - protein, 14 aa, Homo Sapiens
QLFLFISILAHQCD

SEQ ID NO: 70972 - protein, 14 aa, Homo Sapiens
LFLFISILAHQCDF

SEQ ID NO: 70973 - protein, 14 aa, Homo Sapiens
FLFISILAHQCDFR

SEQ ID NO: 70974 - protein, 14 aa, Homo Sapiens
LFISILAHQCDFRA

SEQ ID NO: 70975 - protein, 14 aa, Homo Sapiens
FISILAHQCDFRAN

SEQ ID NO: 70976 - protein, 14 aa, Homo Sapiens
ISILAHQCDFRANP

SEQ ID NO: 70977 - protein, 14 aa, Homo Sapiens
SILAHQCDFRANPN

SEQ ID NO: 70978 - protein, 14 aa, Homo Sapiens
ILAHQCDFRANPNE

SEQ ID NO: 70979 - protein, 14 aa, Homo Sapiens
LAHQCDFRANPNEP

SEQ ID NO: 70980 - protein, 14 aa, Homo Sapiens
AHQCDFRANPNEPA

SEQ ID NO: 70981 - protein, 14 aa, Homo Sapiens
HQCDFRANPNEPAK

SEQ ID NO: 70982 - protein, 14 aa, Homo Sapiens
QCDFRANPNEPAKM

SEQ ID NO: 70983 - protein, 14 aa, Homo Sapiens
CDFRANPNEPAKMN

SEQ ID NO: 70984 - protein, 14 aa, Homo Sapiens
DFRANPNEPAKMNF

SEQ ID NO: 70985 - protein, 14 aa, Homo Sapiens
FRANPNEPAKMNFS

SEQ ID NO: 70986 - protein, 14 aa, Homo Sapiens
RANPNEPAKMNFSY

SEQ ID NO: 70987 - protein, 14 aa, Homo Sapiens
ANPNEPAKMNFSYG

SEQ ID NO: 70988 - protein, 14 aa, Homo Sapiens
NPNEPAKMNFSYGL

SEQ ID NO: 70989 - protein, 14 aa, Homo Sapiens
PNEPAKMNFSYGLT

SEQ ID NO: 70990 - protein, 14 aa, Homo Sapiens
NEPAKMNFSYGLTI

SEQ ID NO: 70991 - protein, 14 aa, Homo Sapiens
EPAKMNFSYGLTIK

SEQ ID NO: 70992 - protein, 14 aa, Homo Sapiens
PAKMNFSYGLTIKP

SEQ ID NO: 70993 - protein, 14 aa, Homo Sapiens
AKMNFSYGLTIKPK

SEQ ID NO: 70994 - protein, 14 aa, Homo Sapiens
KMNFSYGLTIKPKS

SEQ ID NO: 70995 - protein, 14 aa, Homo Sapiens
MNFSYGLTIKPKSF

SEQ ID NO: 70996 - protein, 14 aa, Homo Sapiens
NFSYGLTIKPKSFK

SEQ ID NO: 70997 - protein, 14 aa, Homo Sapiens
FSYGLTIKPKSFKV

SEQ ID NO: 70998 - protein, 14 aa, Homo Sapiens
SYGLTIKPKSFKVN

SEQ ID NO: 70999 - protein, 14 aa, Homo Sapiens
YGLTIKPKSFKVNV

SEQ ID NO: 71000 - protein, 14 aa, Homo Sapiens
GLTIKPKSFKVNVT

SEQ ID NO: 71001 - protein, 14 aa, Homo Sapiens
LTIKPKSFKVNVTL

SEQ ID NO: 71002 - protein, 14 aa, Homo Sapiens
TIKPKSFKVNVTLR

SEQ ID NO: 71003 - protein, 14 aa, Homo Sapiens
IKPKSFKVNVTLRE

SEQ ID NO: 71004 - protein, 14 aa, Homo Sapiens
KPKSFKVNVTLRES

SEQ ID NO: 71005 - protein, 14 aa, Homo Sapiens
PKSFKVNVTLRESM

SEQ ID NO: 71006 - protein, 14 aa, Homo Sapiens
KSFKVNVTLRESME

SEQ ID NO: 71007 - protein, 14 aa, Homo Sapiens
SFKVNVTLRESMEL

SEQ ID NO: 71008 - protein, 14 aa, Homo Sapiens
FKVNVTLRESMELL

SEQ ID NO: 71009 - protein, 14 aa, Homo Sapiens
KVNVTLRESMELLD

SEQ ID NO: 71010 - protein, 14 aa, Homo Sapiens
VNVTLRESMELLDS

SEQ ID NO: 71011 - protein, 14 aa, Homo Sapiens
NVTLRESMELLDSA

SEQ ID NO: 71012 - protein, 14 aa, Homo Sapiens
VTLRESMELLDSAV

SEQ ID NO: 71013 - protein, 14 aa, Homo Sapiens
TLRESMELLDSAVQ

SEQ ID NO: 71014 - protein, 14 aa, Homo Sapiens
LRESMELLDSAVQN

SEQ ID NO: 71015 - protein, 14 aa, Homo Sapiens
RESMELLDSAVQNL

SEQ ID NO: 71016 - protein, 14 aa, Homo Sapiens
ESMELLDSAVQNLQ

SEQ ID NO: 71017 - protein, 14 aa, Homo Sapiens
SMELLDSAVQNLQA

SEQ ID NO: 71018 - protein, 14 aa, Homo Sapiens
MELLDSAVQNLQAK

SEQ ID NO: 71019 - protein, 14 aa, Homo Sapiens
ELLDSAVQNLQAKE

SEQ ID NO: 71020 - protein, 14 aa, Homo Sapiens
LLDSAVQNLQAKET

SEQ ID NO: 71021 - protein, 14 aa, Homo Sapiens
LDSAVQNLQAKETC

SEQ ID NO: 71022 - protein, 14 aa, Homo Sapiens
DSAVQNLQAKETCQ

SEQ ID NO: 71023 - protein, 14 aa, Homo Sapiens
SAVQNLQAKETCQH

SEQ ID NO: 71024 - protein, 14 aa, Homo Sapiens
AVQNLQAKETCQHG

SEQ ID NO: 71025 - protein, 14 aa, Homo Sapiens
VQNLQAKETCQHGR

SEQ ID NO: 71026 - protein, 14 aa, Homo Sapiens
QNLQAKETCQHGRY

SEQ ID NO: 71027 - protein, 14 aa, Homo Sapiens
NLQAKETCQHGRYV

SEQ ID NO: 71028 - protein, 14 aa, Homo Sapiens
LQAKETCQHGRYVP

SEQ ID NO: 71029 - protein, 14 aa, Homo Sapiens
QAKETCQHGRYVPP

SEQ ID NO: 71030 - protein, 14 aa, Homo Sapiens
AKETCQHGRYVPPS

SEQ ID NO: 71031 - protein, 14 aa, Homo Sapiens
KETCQHGRYVPPSS

SEQ ID NO: 71032 - protein, 14 aa, Homo Sapiens
ETCQHGRYVPPSST

SEQ ID NO: 71033 - protein, 14 aa, Homo Sapiens
TCQHGRYVPPSSTD

SEQ ID NO: 71034 - protein, 14 aa, Homo Sapiens
CQHGRYVPPSSTDR

SEQ ID NO: 71035 - protein, 14 aa, Homo Sapiens
QHGRYVPPSSTDRS

SEQ ID NO: 71036 - protein, 14 aa, Homo Sapiens
HGRYVPPSSTDRSP

SEQ ID NO: 71037 - protein, 14 aa, Homo Sapiens
GRYVPPSSTDRSPY

SEQ ID NO: 71038 - protein, 14 aa, Homo Sapiens
RYVPPSSTDRSPYE

SEQ ID NO: 71039 - protein, 14 aa, Homo Sapiens
YVPPSSTDRSPYEK

SEQ ID NO: 71040 - protein, 14 aa, Homo Sapiens
VPPSSTDRSPYEKV

SEQ ID NO: 71041 - protein, 14 aa, Homo Sapiens
PPSSTDRSPYEKVS

SEQ ID NO: 71042 - protein, 14 aa, Homo Sapiens
PSSTDRSPYEKVSA

SEQ ID NO: 71043 - protein, 14 aa, Homo Sapiens
SSTDRSPYEKVSAG

SEQ ID NO: 71044 - protein, 14 aa, Homo Sapiens
STDRSPYEKVSAGN

SEQ ID NO: 71045 - protein, 14 aa, Homo Sapiens
TDRSPYEKVSAGNG

SEQ ID NO: 71046 - protein, 14 aa, Homo Sapiens
DRSPYEKVSAGNGG

SEQ ID NO: 71047 - protein, 14 aa, Homo Sapiens
RSPYEKVSAGNGGS

SEQ ID NO: 71048 - protein, 14 aa, Homo Sapiens
SPYEKVSAGNGGSS

SEQ ID NO: 71049 - protein, 14 aa, Homo Sapiens
PYEKVSAGNGGSSL

SEQ ID NO: 71050 - protein, 14 aa, Homo Sapiens
YEKVSAGNGGSSLS

SEQ ID NO: 71051 - protein, 14 aa, Homo Sapiens
EKVSAGNGGSSLSY

SEQ ID NO: 71052 - protein, 14 aa, Homo Sapiens
KVSAGNGGSSLSYT

SEQ ID NO: 71053 - protein, 14 aa, Homo Sapiens
VSAGNGGSSLSYTN

SEQ ID NO: 71054 - protein, 14 aa, Homo Sapiens
SAGNGGSSLSYTNP

SEQ ID NO: 71055 - protein, 14 aa, Homo Sapiens
AGNGGSSLSYTNPA

SEQ ID NO: 71056 - protein, 14 aa, Homo Sapiens
GNGGSSLSYTNPAV

SEQ ID NO: 71057 - protein, 14 aa, Homo Sapiens
NGGSSLSYTNPAVA

SEQ ID NO: 71058 - protein, 14 aa, Homo Sapiens
GGSSLSYTNPAVAA

SEQ ID NO: 71059 - protein, 14 aa, Homo Sapiens
GSSLSYTNPAVAAA

SEQ ID NO: 71060 - protein, 14 aa, Homo Sapiens
SSLSYTNPAVAAAS

SEQ ID NO: 71061 - protein, 14 aa, Homo Sapiens
SLSYTNPAVAAASA

SEQ ID NO: 71062 - protein, 14 aa, Homo Sapiens
LSYTNPAVAAASAN

SEQ ID NO: 71063 - protein, 14 aa, Homo Sapiens
SYTNPAVAAASANL

SEQ ID NO: 71064 - protein, 15 aa, Homo Sapiens
MGTSLSPNDPWPLNP

SEQ ID NO: 71065 - protein, 15 aa, Homo Sapiens
GTSLSPNDPWPLNPL

SEQ ID NO: 71066 - protein, 15 aa, Homo Sapiens
TSLSPNDPWPLNPLS

SEQ ID NO: 71067 - protein, 15 aa, Homo Sapiens
SLSPNDPWPLNPLSI

SEQ ID NO: 71068 - protein, 15 aa, Homo Sapiens
LSPNDPWPLNPLSIQ

SEQ ID NO: 71069 - protein, 15 aa, Homo Sapiens
SPNDPWPLNPLSIQQ

SEQ ID NO: 71070 - protein, 15 aa, Homo Sapiens
PNDPWPLNPLSIQQT

SEQ ID NO: 71071 - protein, 15 aa, Homo Sapiens
NDPWPLNPLSIQQTT

SEQ ID NO: 71072 - protein, 15 aa, Homo Sapiens
DPWPLNPLSIQQTTL

SEQ ID NO: 71073 - protein, 15 aa, Homo Sapiens
PWPLNPLSIQQTTLL

SEQ ID NO: 71074 - protein, 15 aa, Homo Sapiens
WPLNPLSIQQTTLLL

SEQ ID NO: 71075 - protein, 15 aa, Homo Sapiens
PLNPLSIQQTTLLLL

SEQ ID NO: 71076 - protein, 15 aa, Homo Sapiens
LNPLSIQQTTLLLLL

SEQ ID NO: 71077 - protein, 15 aa, Homo Sapiens
NPLSIQQTTLLLLLS

SEQ ID NO: 71078 - protein, 15 aa, Homo Sapiens
PLSIQQTTLLLLLSV

SEQ ID NO: 71079 - protein, 15 aa, Homo Sapiens
LSIQQTTLLLLLSVL

SEQ ID NO: 71080 - protein, 15 aa, Homo Sapiens
SIQQTTLLLLLSVLA

SEQ ID NO: 71081 - protein, 15 aa, Homo Sapiens
IQQTTLLLLLSVLAT

SEQ ID NO: 71082 - protein, 15 aa, Homo Sapiens
QQTTLLLLLSVLATV

SEQ ID NO: 71083 - protein, 15 aa, Homo Sapiens
QTTLLLLLSVLATVH

SEQ ID NO: 71084 - protein, 15 aa, Homo Sapiens
TTLLLLLSVLATVHV

SEQ ID NO: 71085 - protein, 15 aa, Homo Sapiens
TLLLLLSVLATVHVG

SEQ ID NO: 71086 - protein, 15 aa, Homo Sapiens
LLLLLSVLATVHVGQ

SEQ ID NO: 71087 - protein, 15 aa, Homo Sapiens
LLLLSVLATVHVGQR

SEQ ID NO: 71088 - protein, 15 aa, Homo Sapiens
LLLSVLATVHVGQRL

SEQ ID NO: 71089 - protein, 15 aa, Homo Sapiens
LLSVLATVHVGQRLL

SEQ ID NO: 71090 - protein, 15 aa, Homo Sapiens
LSVLATVHVGQRLLR

SEQ ID NO: 71091 - protein, 15 aa, Homo Sapiens
SVLATVHVGQRLLRQ

SEQ ID NO: 71092 - protein, 15 aa, Homo Sapiens
VLATVHVGQRLLRQR

SEQ ID NO: 71093 - protein, 15 aa, Homo Sapiens
LATVHVGQRLLRQRR

SEQ ID NO: 71094 - protein, 15 aa, Homo Sapiens
ATVHVGQRLLRQRRR

SEQ ID NO: 71095 - protein, 15 aa, Homo Sapiens
TVHVGQRLLRQRRRQ

SEQ ID NO: 71096 - protein, 15 aa, Homo Sapiens
VHVGQRLLRQRRRQL

SEQ ID NO: 71097 - protein, 15 aa, Homo Sapiens
HVGQRLLRQRRRQLR

SEQ ID NO: 71098 - protein, 15 aa, Homo Sapiens
VGQRLLRQRRRQLRS

SEQ ID NO: 71099 - protein, 15 aa, Homo Sapiens
GQRLLRQRRRQLRSA

SEQ ID NO: 71100 - protein, 15 aa, Homo Sapiens
QRLLRQRRRQLRSAP

SEQ ID NO: 71101 - protein, 15 aa, Homo Sapiens
RLLRQRRRQLRSAPP

SEQ ID NO: 71102 - protein, 15 aa, Homo Sapiens
LLRQRRRQLRSAPPG

SEQ ID NO: 71103 - protein, 15 aa, Homo Sapiens
LRQRRRQLRSAPPGP

SEQ ID NO: 71104 - protein, 15 aa, Homo Sapiens
RQRRRQLRSAPPGPF

SEQ ID NO: 71105 - protein, 15 aa, Homo Sapiens
QRRRQLRSAPPGPFA

SEQ ID NO: 71106 - protein, 15 aa, Homo Sapiens
RRRQLRSAPPGPFAW

SEQ ID NO: 71107 - protein, 15 aa, Homo Sapiens
RRQLRSAPPGPFAWP

SEQ ID NO: 71108 - protein, 15 aa, Homo Sapiens
RQLRSAPPGPFAWPL

SEQ ID NO: 71109 - protein, 15 aa, Homo Sapiens
QLRSAPPGPFAWPLI

SEQ ID NO: 71110 - protein, 15 aa, Homo Sapiens
LRSAPPGPFAWPLIG

SEQ ID NO: 71111 - protein, 15 aa, Homo Sapiens
RSAPPGPFAWPLIGN

SEQ ID NO: 71112 - protein, 15 aa, Homo Sapiens
SAPPGPFAWPLIGNA

SEQ ID NO: 71113 - protein, 15 aa, Homo Sapiens
APPGPFAWPLIGNAA

SEQ ID NO: 71114 - protein, 15 aa, Homo Sapiens
PPGPFAWPLIGNAAA

SEQ ID NO: 71115 - protein, 15 aa, Homo Sapiens
PGPFAWPLIGNAAAV

SEQ ID NO: 71116 - protein, 15 aa, Homo Sapiens
GPFAWPLIGNAAAVG

SEQ ID NO: 71117 - protein, 15 aa, Homo Sapiens
PFAWPLIGNAAAVGQ

SEQ ID NO: 71118 - protein, 15 aa, Homo Sapiens
FAWPLIGNAAAVGQA

SEQ ID NO: 71119 - protein, 15 aa, Homo Sapiens
AWPLIGNAAAVGQAA

SEQ ID NO: 71120 - protein, 15 aa, Homo Sapiens
WPLIGNAAAVGQAAH

SEQ ID NO: 71121 - protein, 15 aa, Homo Sapiens
PLIGNAAAVGQAAHL

SEQ ID NO: 71122 - protein, 15 aa, Homo Sapiens
LIGNAAAVGQAAHLS

SEQ ID NO: 71123 - protein, 15 aa, Homo Sapiens
IGNAAAVGQAAHLSF

SEQ ID NO: 71124 - protein, 15 aa, Homo Sapiens
GNAAAVGQAAHLSFA

SEQ ID NO: 71125 - protein, 15 aa, Homo Sapiens
NAAAVGQAAHLSFAR

SEQ ID NO: 71126 - protein, 15 aa, Homo Sapiens
AAAVGQAAHLSFARL

SEQ ID NO: 71127 - protein, 15 aa, Homo Sapiens
AAVGQAAHLSFARLA

SEQ ID NO: 71128 - protein, 15 aa, Homo Sapiens
AVGQAAHLSFARLAR

SEQ ID NO: 71129 - protein, 15 aa, Homo Sapiens
VGQAAHLSFARLARR

SEQ ID NO: 71130 - protein, 15 aa, Homo Sapiens
GQAAHLSFARLARRY

SEQ ID NO: 71131 - protein, 15 aa, Homo Sapiens
QAAHLSFARLARRYG

SEQ ID NO: 71132 - protein, 15 aa, Homo Sapiens
AAHLSFARLARRYGD

SEQ ID NO: 71133 - protein, 15 aa, Homo Sapiens
AHLSFARLARRYGDV

SEQ ID NO: 71134 - protein, 15 aa, Homo Sapiens
HLSFARLARRYGDVF

SEQ ID NO: 71135 - protein, 15 aa, Homo Sapiens
LSFARLARRYGDVFQ

SEQ ID NO: 71136 - protein, 15 aa, Homo Sapiens
SFARLARRYGDVFQI

SEQ ID NO: 71137 - protein, 15 aa, Homo Sapiens
FARLARRYGDVFQIR

SEQ ID NO: 71138 - protein, 15 aa, Homo Sapiens
ARLARRYGDVFQIRL

SEQ ID NO: 71139 - protein, 15 aa, Homo Sapiens
RLARRYGDVFQIRLG

SEQ ID NO: 71140 - protein, 15 aa, Homo Sapiens
LARRYGDVFQIRLGS

SEQ ID NO: 71141 - protein, 15 aa, Homo Sapiens
ARRYGDVFQIRLGSC

SEQ ID NO: 71142 - protein, 15 aa, Homo Sapiens
RRYGDVFQIRLGSCP

SEQ ID NO: 71143 - protein, 15 aa, Homo Sapiens
RYGDVFQIRLGSCPI

SEQ ID NO: 71144 - protein, 15 aa, Homo Sapiens
YGDVFQIRLGSCPIV

SEQ ID NO: 71145 - protein, 15 aa, Homo Sapiens
GDVFQIRLGSCPIVV

SEQ ID NO: 71146 - protein, 15 aa, Homo Sapiens
DVFQIRLGSCPIVVL

SEQ ID NO: 71147 - protein, 15 aa, Homo Sapiens
VFQIRLGSCPIVVLN

SEQ ID NO: 71148 - protein, 15 aa, Homo Sapiens
FQIRLGSCPIVVLNG

SEQ ID NO: 71149 - protein, 15 aa, Homo Sapiens
QIRLGSCPIVVLNGE

SEQ ID NO: 71150 - protein, 15 aa, Homo Sapiens
IRLGSCPIVVLNGER

SEQ ID NO: 71151 - protein, 15 aa, Homo Sapiens
RLGSCPIVVLNGERA

SEQ ID NO: 71152 - protein, 15 aa, Homo Sapiens
LGSCPIVVLNGERAI

SEQ ID NO: 71153 - protein, 15 aa, Homo Sapiens
GSCPIVVLNGERAIH

SEQ ID NO: 71154 - protein, 15 aa, Homo Sapiens
SCPIVVLNGERAIHQ

SEQ ID NO: 71155 - protein, 15 aa, Homo Sapiens
CPIVVLNGERAIHQA

SEQ ID NO: 71156 - protein, 15 aa, Homo Sapiens
PIVVLNGERAIHQAL

SEQ ID NO: 71157 - protein, 15 aa, Homo Sapiens
IVVLNGERAIHQALV

SEQ ID NO: 71158 - protein, 15 aa, Homo Sapiens
VVLNGERAIHQALVQ

SEQ ID NO: 71159 - protein, 15 aa, Homo Sapiens
VLNGERAIHQALVQQ

SEQ ID NO: 71160 - protein, 15 aa, Homo Sapiens
LNGERAIHQALVQQG

SEQ ID NO: 71161 - protein, 15 aa, Homo Sapiens
NGERAIHQALVQQGS

SEQ ID NO: 71162 - protein, 15 aa, Homo Sapiens
GERAIHQALVQQGSA

SEQ ID NO: 71163 - protein, 15 aa, Homo Sapiens
ERAIHQALVQQGSAF

SEQ ID NO: 71164 - protein, 15 aa, Homo Sapiens
RAIHQALVQQGSAFA

SEQ ID NO: 71165 - protein, 15 aa, Homo Sapiens
AIHQALVQQGSAFAD

SEQ ID NO: 71166 - protein, 15 aa, Homo Sapiens
IHQALVQQGSAFADR

SEQ ID NO: 71167 - protein, 15 aa, Homo Sapiens
HQALVQQGSAFADRP

SEQ ID NO: 71168 - protein, 15 aa, Homo Sapiens
QALVQQGSAFADRPA

SEQ ID NO: 71169 - protein, 15 aa, Homo Sapiens
ALVQQGSAFADRPAF

SEQ ID NO: 71170 - protein, 15 aa, Homo Sapiens
LVQQGSAFADRPAFA

SEQ ID NO: 71171 - protein, 15 aa, Homo Sapiens
VQQGSAFADRPAFAS

SEQ ID NO: 71172 - protein, 15 aa, Homo Sapiens
QQGSAFADRPAFASF

SEQ ID NO: 71173 - protein, 15 aa, Homo Sapiens
QGSAFADRPAFASFR

SEQ ID NO: 71174 - protein, 15 aa, Homo Sapiens
GSAFADRPAFASFRV

SEQ ID NO: 71175 - protein, 15 aa, Homo Sapiens
SAFADRPAFASFRVV

SEQ ID NO: 71176 - protein, 15 aa, Homo Sapiens
AFADRPAFASFRVVS

SEQ ID NO: 71177 - protein, 15 aa, Homo Sapiens
FADRPAFASFRVVSG

SEQ ID NO: 71178 - protein, 15 aa, Homo Sapiens
ADRPAFASFRVVSGG

SEQ ID NO: 71179 - protein, 15 aa, Homo Sapiens
DRPAFASFRVVSGGR

SEQ ID NO: 71180 - protein, 15 aa, Homo Sapiens
RPAFASFRVVSGGRS

SEQ ID NO: 71181 - protein, 15 aa, Homo Sapiens
PAFASFRVVSGGRSM

SEQ ID NO: 71182 - protein, 15 aa, Homo Sapiens
AFASFRVVSGGRSMA

SEQ ID NO: 71183 - protein, 15 aa, Homo Sapiens
FASFRVVSGGRSMAF

SEQ ID NO: 71184 - protein, 15 aa, Homo Sapiens
ASFRVVSGGRSMAFG

SEQ ID NO: 71185 - protein, 15 aa, Homo Sapiens
SFRVVSGGRSMAFGH

SEQ ID NO: 71186 - protein, 15 aa, Homo Sapiens
FRVVSGGRSMAFGHY

SEQ ID NO: 71187 - protein, 15 aa, Homo Sapiens
RVVSGGRSMAFGHYS

SEQ ID NO: 71188 - protein, 15 aa, Homo Sapiens
VVSGGRSMAFGHYSE

SEQ ID NO: 71189 - protein, 15 aa, Homo Sapiens
VSGGRSMAFGHYSEH

SEQ ID NO: 71190 - protein, 15 aa, Homo Sapiens
SGGRSMAFGHYSEHW

SEQ ID NO: 71191 - protein, 15 aa, Homo Sapiens
GGRSMAFGHYSEHWK

SEQ ID NO: 71192 - protein, 15 aa, Homo Sapiens
GRSMAFGHYSEHWKV

SEQ ID NO: 71193 - protein, 15 aa, Homo Sapiens
RSMAFGHYSEHWKVQ

SEQ ID NO: 71194 - protein, 15 aa, Homo Sapiens
SMAFGHYSEHWKVQR

SEQ ID NO: 71195 - protein, 15 aa, Homo Sapiens
MAFGHYSEHWKVQRR

SEQ ID NO: 71196 - protein, 15 aa, Homo Sapiens
AFGHYSEHWKVQRRA

SEQ ID NO: 71197 - protein, 15 aa, Homo Sapiens
FGHYSEHWKVQRRAA

SEQ ID NO: 71198 - protein, 15 aa, Homo Sapiens
GHYSEHWKVQRRAAH

SEQ ID NO: 71199 - protein, 15 aa, Homo Sapiens
HYSEHWKVQRRAAHS

SEQ ID NO: 71200 - protein, 15 aa, Homo Sapiens
YSEHWKVQRRAAHSM

SEQ ID NO: 71201 - protein, 15 aa, Homo Sapiens
SEHWKVQRRAAHSMM

SEQ ID NO: 71202 - protein, 15 aa, Homo Sapiens
EHWKVQRRAAHSMMR

SEQ ID NO: 71203 - protein, 15 aa, Homo Sapiens
HWKVQRRAAHSMMRN

SEQ ID NO: 71204 - protein, 15 aa, Homo Sapiens
WKVQRRAAHSMMRNF

SEQ ID NO: 71205 - protein, 15 aa, Homo Sapiens
KVQRRAAHSMMRNFF

SEQ ID NO: 71206 - protein, 15 aa, Homo Sapiens
VQRRAAHSMMRNFFT

SEQ ID NO: 71207 - protein, 15 aa, Homo Sapiens
QRRAAHSMMRNFFTR

SEQ ID NO: 71208 - protein, 15 aa, Homo Sapiens
RRAAHSMMRNFFTRQ

SEQ ID NO: 71209 - protein, 15 aa, Homo Sapiens
RAAHSMMRNFFTRQP

SEQ ID NO: 71210 - protein, 15 aa, Homo Sapiens
AAHSMMRNFFTRQPR

SEQ ID NO: 71211 - protein, 15 aa, Homo Sapiens
AHSMMRNFFTRQPRS

SEQ ID NO: 71212 - protein, 15 aa, Homo Sapiens
HSMMRNFFTRQPRSR

SEQ ID NO: 71213 - protein, 15 aa, Homo Sapiens
SMMRNFFTRQPRSRQ

SEQ ID NO: 71214 - protein, 15 aa, Homo Sapiens
MMRNFFTRQPRSRQV

SEQ ID NO: 71215 - protein, 15 aa, Homo Sapiens
MRNFFTRQPRSRQVL

SEQ ID NO: 71216 - protein, 15 aa, Homo Sapiens
RNFFTRQPRSRQVLE

SEQ ID NO: 71217 - protein, 15 aa, Homo Sapiens
NFFTRQPRSRQVLEG

SEQ ID NO: 71218 - protein, 15 aa, Homo Sapiens
FFTRQPRSRQVLEGH

SEQ ID NO: 71219 - protein, 15 aa, Homo Sapiens
FTRQPRSRQVLEGHV

SEQ ID NO: 71220 - protein, 15 aa, Homo Sapiens
TRQPRSRQVLEGHVL

SEQ ID NO: 71221 - protein, 15 aa, Homo Sapiens
RQPRSRQVLEGHVLS

SEQ ID NO: 71222 - protein, 15 aa, Homo Sapiens
QPRSRQVLEGHVLSE

SEQ ID NO: 71223 - protein, 15 aa, Homo Sapiens
PRSRQVLEGHVLSEA

SEQ ID NO: 71224 - protein, 15 aa, Homo Sapiens
RSRQVLEGHVLSEAR

SEQ ID NO: 71225 - protein, 15 aa, Homo Sapiens
SRQVLEGHVLSEARE

SEQ ID NO: 71226 - protein, 15 aa, Homo Sapiens
RQVLEGHVLSEAREL

SEQ ID NO: 71227 - protein, 15 aa, Homo Sapiens
QVLEGHVLSEARELV

SEQ ID NO: 71228 - protein, 15 aa, Homo Sapiens
VLEGHVLSEARELVA

SEQ ID NO: 71229 - protein, 15 aa, Homo Sapiens
LEGHVLSEARELVAL

SEQ ID NO: 71230 - protein, 15 aa, Homo Sapiens
EGHVLSEARELVALL

SEQ ID NO: 71231 - protein, 15 aa, Homo Sapiens
GHVLSEARELVALLV

SEQ ID NO: 71232 - protein, 15 aa, Homo Sapiens
HVLSEARELVALLVR

SEQ ID NO: 71233 - protein, 15 aa, Homo Sapiens
VLSEARELVALLVRG

SEQ ID NO: 71234 - protein, 15 aa, Homo Sapiens
LSEARELVALLVRGS

SEQ ID NO: 71235 - protein, 15 aa, Homo Sapiens
SEARELVALLVRGSA

SEQ ID NO: 71236 - protein, 15 aa, Homo Sapiens
EARELVALLVRGSAD

SEQ ID NO: 71237 - protein, 15 aa, Homo Sapiens
ARELVALLVRGSADG

SEQ ID NO: 71238 - protein, 15 aa, Homo Sapiens
RELVALLVRGSADGA

SEQ ID NO: 71239 - protein, 15 aa, Homo Sapiens
ELVALLVRGSADGAF

SEQ ID NO: 71240 - protein, 15 aa, Homo Sapiens
LVALLVRGSADGAFL

SEQ ID NO: 71241 - protein, 15 aa, Homo Sapiens
VALLVRGSADGAFLD

SEQ ID NO: 71242 - protein, 15 aa, Homo Sapiens
ALLVRGSADGAFLDP

SEQ ID NO: 71243 - protein, 15 aa, Homo Sapiens
LLVRGSADGAFLDPR

SEQ ID NO: 71244 - protein, 15 aa, Homo Sapiens
LVRGSADGAFLDPRP

SEQ ID NO: 71245 - protein, 15 aa, Homo Sapiens
VRGSADGAFLDPRPL

SEQ ID NO: 71246 - protein, 15 aa, Homo Sapiens
RGSADGAFLDPRPLT

SEQ ID NO: 71247 - protein, 15 aa, Homo Sapiens
GSADGAFLDPRPLTV

SEQ ID NO: 71248 - protein, 15 aa, Homo Sapiens
SADGAFLDPRPLTVV

SEQ ID NO: 71249 - protein, 15 aa, Homo Sapiens
ADGAFLDPRPLTVVA

SEQ ID NO: 71250 - protein, 15 aa, Homo Sapiens
DGAFLDPRPLTVVAV

SEQ ID NO: 71251 - protein, 15 aa, Homo Sapiens
GAFLDPRPLTVVAVA

SEQ ID NO: 71252 - protein, 15 aa, Homo Sapiens
AFLDPRPLTVVAVAN

SEQ ID NO: 71253 - protein, 15 aa, Homo Sapiens
FLDPRPLTVVAVANV

SEQ ID NO: 71254 - protein, 15 aa, Homo Sapiens
LDPRPLTVVAVANVM

SEQ ID NO: 71255 - protein, 15 aa, Homo Sapiens
DPRPLTVVAVANVMS

SEQ ID NO: 71256 - protein, 15 aa, Homo Sapiens
PRPLTVVAVANVMSA

SEQ ID NO: 71257 - protein, 15 aa, Homo Sapiens
RPLTVVAVANVMSAV

SEQ ID NO: 71258 - protein, 15 aa, Homo Sapiens
PLTVVAVANVMSAVC

SEQ ID NO: 71259 - protein, 15 aa, Homo Sapiens
LTVVAVANVMSAVCF

SEQ ID NO: 71260 - protein, 15 aa, Homo Sapiens
TVVAVANVMSAVCFG

SEQ ID NO: 71261 - protein, 15 aa, Homo Sapiens
VVAVANVMSAVCFGC

SEQ ID NO: 71262 - protein, 15 aa, Homo Sapiens
VAVANVMSAVCFGCR

SEQ ID NO: 71263 - protein, 15 aa, Homo Sapiens
AVANVMSAVCFGCRY

SEQ ID NO: 71264 - protein, 15 aa, Homo Sapiens
VANVMSAVCFGCRYS

SEQ ID NO: 71265 - protein, 15 aa, Homo Sapiens
ANVMSAVCFGCRYSH

SEQ ID NO: 71266 - protein, 15 aa, Homo Sapiens
NVMSAVCFGCRYSHD

SEQ ID NO: 71267 - protein, 15 aa, Homo Sapiens
VMSAVCFGCRYSHDD

SEQ ID NO: 71268 - protein, 15 aa, Homo Sapiens
MSAVCFGCRYSHDDP

SEQ ID NO: 71269 - protein, 15 aa, Homo Sapiens
SAVCFGCRYSHDDPE

SEQ ID NO: 71270 - protein, 15 aa, Homo Sapiens
AVCFGCRYSHDDPEF

SEQ ID NO: 71271 - protein, 15 aa, Homo Sapiens
VCFGCRYSHDDPEFR

SEQ ID NO: 71272 - protein, 15 aa, Homo Sapiens
CFGCRYSHDDPEFRE

SEQ ID NO: 71273 - protein, 15 aa, Homo Sapiens
FGCRYSHDDPEFREL

SEQ ID NO: 71274 - protein, 15 aa, Homo Sapiens
GCRYSHDDPEFRELL

SEQ ID NO: 71275 - protein, 15 aa, Homo Sapiens
CRYSHDDPEFRELLS

SEQ ID NO: 71276 - protein, 15 aa, Homo Sapiens
RYSHDDPEFRELLSH

SEQ ID NO: 71277 - protein, 15 aa, Homo Sapiens
YSHDDPEFRELLSHN

SEQ ID NO: 71278 - protein, 15 aa, Homo Sapiens
SHDDPEFRELLSHNE

SEQ ID NO: 71279 - protein, 15 aa, Homo Sapiens
HDDPEFRELLSHNEE

SEQ ID NO: 71280 - protein, 15 aa, Homo Sapiens
DDPEFRELLSHNEEF

SEQ ID NO: 71281 - protein, 15 aa, Homo Sapiens
DPEFRELLSHNEEFG

SEQ ID NO: 71282 - protein, 15 aa, Homo Sapiens
PEFRELLSHNEEFGR

SEQ ID NO: 71283 - protein, 15 aa, Homo Sapiens
EFRELLSHNEEFGRT

SEQ ID NO: 71284 - protein, 15 aa, Homo Sapiens
FRELLSHNEEFGRTV

SEQ ID NO: 71285 - protein, 15 aa, Homo Sapiens
RELLSHNEEFGRTVG

SEQ ID NO: 71286 - protein, 15 aa, Homo Sapiens
ELLSHNEEFGRTVGA

SEQ ID NO: 71287 - protein, 15 aa, Homo Sapiens
LLSHNEEFGRTVGAG

SEQ ID NO: 71288 - protein, 15 aa, Homo Sapiens
LSHNEEFGRTVGAGS

SEQ ID NO: 71289 - protein, 15 aa, Homo Sapiens
SHNEEFGRTVGAGSL

SEQ ID NO: 71290 - protein, 15 aa, Homo Sapiens
HNEEFGRTVGAGSLV

SEQ ID NO: 71291 - protein, 15 aa, Homo Sapiens
NEEFGRTVGAGSLVD

SEQ ID NO: 71292 - protein, 15 aa, Homo Sapiens
EEFGRTVGAGSLVDV

SEQ ID NO: 71293 - protein, 15 aa, Homo Sapiens
EFGRTVGAGSLVDVM

SEQ ID NO: 71294 - protein, 15 aa, Homo Sapiens
FGRTVGAGSLVDVMP

SEQ ID NO: 71295 - protein, 15 aa, Homo Sapiens
GRTVGAGSLVDVMPW

SEQ ID NO: 71296 - protein, 15 aa, Homo Sapiens
RTVGAGSLVDVMPWL

SEQ ID NO: 71297 - protein, 15 aa, Homo Sapiens
TVGAGSLVDVMPWLQ

SEQ ID NO: 71298 - protein, 15 aa, Homo Sapiens
VGAGSLVDVMPWLQY

SEQ ID NO: 71299 - protein, 15 aa, Homo Sapiens
GAGSLVDVMPWLQYF

SEQ ID NO: 71300 - protein, 15 aa, Homo Sapiens
AGSLVDVMPWLQYFP

SEQ ID NO: 71301 - protein, 15 aa, Homo Sapiens
GSLVDVMPWLQYFPN

SEQ ID NO: 71302 - protein, 15 aa, Homo Sapiens
SLVDVMPWLQYFPNP

SEQ ID NO: 71303 - protein, 15 aa, Homo Sapiens
LVDVMPWLQYFPNPV

SEQ ID NO: 71304 - protein, 15 aa, Homo Sapiens
VDVMPWLQYFPNPVR

SEQ ID NO: 71305 - protein, 15 aa, Homo Sapiens
DVMPWLQYFPNPVRT

SEQ ID NO: 71306 - protein, 15 aa, Homo Sapiens
VMPWLQYFPNPVRTV

SEQ ID NO: 71307 - protein, 15 aa, Homo Sapiens
MPWLQYFPNPVRTVF

SEQ ID NO: 71308 - protein, 15 aa, Homo Sapiens
PWLQYFPNPVRTVFR

SEQ ID NO: 71309 - protein, 15 aa, Homo Sapiens
WLQYFPNPVRTVFRE

SEQ ID NO: 71310 - protein, 15 aa, Homo Sapiens
LQYFPNPVRTVFREF

SEQ ID NO: 71311 - protein, 15 aa, Homo Sapiens
QYFPNPVRTVFREFE

SEQ ID NO: 71312 - protein, 15 aa, Homo Sapiens
YFPNPVRTVFREFEQ

SEQ ID NO: 71313 - protein, 15 aa, Homo Sapiens
FPNPVRTVFREFEQL

SEQ ID NO: 71314 - protein, 15 aa, Homo Sapiens
PNPVRTVFREFEQLN

SEQ ID NO: 71315 - protein, 15 aa, Homo Sapiens
NPVRTVFREFEQLNR

SEQ ID NO: 71316 - protein, 15 aa, Homo Sapiens
PVRTVFREFEQLNRN

SEQ ID NO: 71317 - protein, 15 aa, Homo Sapiens
VRTVFREFEQLNRNF

SEQ ID NO: 71318 - protein, 15 aa, Homo Sapiens
RTVFREFEQLNRNFS

SEQ ID NO: 71319 - protein, 15 aa, Homo Sapiens
TVFREFEQLNRNFSN

SEQ ID NO: 71320 - protein, 15 aa, Homo Sapiens
VFREFEQLNRNFSNF

SEQ ID NO: 71321 - protein, 15 aa, Homo Sapiens
FREFEQLNRNFSNFI

SEQ ID NO: 71322 - protein, 15 aa, Homo Sapiens
REFEQLNRNFSNFIL

SEQ ID NO: 71323 - protein, 15 aa, Homo Sapiens
EFEQLNRNFSNFILD

SEQ ID NO: 71324 - protein, 15 aa, Homo Sapiens
FEQLNRNFSNFILDK

SEQ ID NO: 71325 - protein, 15 aa, Homo Sapiens
EQLNRNFSNFILDKF

SEQ ID NO: 71326 - protein, 15 aa, Homo Sapiens
QLNRNFSNFILDKFL

SEQ ID NO: 71327 - protein, 15 aa, Homo Sapiens
LNRNFSNFILDKFLR

SEQ ID NO: 71328 - protein, 15 aa, Homo Sapiens
NRNFSNFILDKFLRH

SEQ ID NO: 71329 - protein, 15 aa, Homo Sapiens
RNFSNFILDKFLRHC

SEQ ID NO: 71330 - protein, 15 aa, Homo Sapiens
NFSNFILDKFLRHCE

SEQ ID NO: 71331 - protein, 15 aa, Homo Sapiens
FSNFILDKFLRHCES

SEQ ID NO: 71332 - protein, 15 aa, Homo Sapiens
SNFILDKFLRHCESL

SEQ ID NO: 71333 - protein, 15 aa, Homo Sapiens
NFILDKFLRHCESLR

SEQ ID NO: 71334 - protein, 15 aa, Homo Sapiens
FILDKFLRHCESLRP

SEQ ID NO: 71335 - protein, 15 aa, Homo Sapiens
ILDKFLRHCESLRPG

SEQ ID NO: 71336 - protein, 15 aa, Homo Sapiens
LDKFLRHCESLRPGA

SEQ ID NO: 71337 - protein, 15 aa, Homo Sapiens
DKFLRHCESLRPGAA

SEQ ID NO: 71338 - protein, 15 aa, Homo Sapiens
KFLRHCESLRPGAAP

SEQ ID NO: 71339 - protein, 15 aa, Homo Sapiens
FLRHCESLRPGAAPR

SEQ ID NO: 71340 - protein, 15 aa, Homo Sapiens
LRHCESLRPGAAPRD

SEQ ID NO: 71341 - protein, 15 aa, Homo Sapiens
RHCESLRPGAAPRDM

SEQ ID NO: 71342 - protein, 15 aa, Homo Sapiens
HCESLRPGAAPRDMM

SEQ ID NO: 71343 - protein, 15 aa, Homo Sapiens
CESLRPGAAPRDMMD

SEQ ID NO: 71344 - protein, 15 aa, Homo Sapiens
ESLRPGAAPRDMMDA

SEQ ID NO: 71345 - protein, 15 aa, Homo Sapiens
SLRPGAAPRDMMDAF

SEQ ID NO: 71346 - protein, 15 aa, Homo Sapiens
LRPGAAPRDMMDAFI

SEQ ID NO: 71347 - protein, 15 aa, Homo Sapiens
RPGAAPRDMMDAFIL

SEQ ID NO: 71348 - protein, 15 aa, Homo Sapiens
PGAAPRDMMDAFILS

SEQ ID NO: 71349 - protein, 15 aa, Homo Sapiens
GAAPRDMMDAFILSA

SEQ ID NO: 71350 - protein, 15 aa, Homo Sapiens
AAPRDMMDAFILSAE

SEQ ID NO: 71351 - protein, 15 aa, Homo Sapiens
APRDMMDAFILSAEK

SEQ ID NO: 71352 - protein, 15 aa, Homo Sapiens
PRDMMDAFILSAEKK

SEQ ID NO: 71353 - protein, 15 aa, Homo Sapiens
RDMMDAFILSAEKKA

SEQ ID NO: 71354 - protein, 15 aa, Homo Sapiens
DMMDAFILSAEKKAA

SEQ ID NO: 71355 - protein, 15 aa, Homo Sapiens
MMDAFILSAEKKAAG

SEQ ID NO: 71356 - protein, 15 aa, Homo Sapiens
MDAFILSAEKKAAGD

SEQ ID NO: 71357 - protein, 15 aa, Homo Sapiens
DAFILSAEKKAAGDS

SEQ ID NO: 71358 - protein, 15 aa, Homo Sapiens
AFILSAEKKAAGDSH

SEQ ID NO: 71359 - protein, 15 aa, Homo Sapiens
FILSAEKKAAGDSHG

SEQ ID NO: 71360 - protein, 15 aa, Homo Sapiens
ILSAEKKAAGDSHGG

SEQ ID NO: 71361 - protein, 15 aa, Homo Sapiens
LSAEKKAAGDSHGGG

SEQ ID NO: 71362 - protein, 15 aa, Homo Sapiens
SAEKKAAGDSHGGGA

SEQ ID NO: 71363 - protein, 15 aa, Homo Sapiens
AEKKAAGDSHGGGAR

SEQ ID NO: 71364 - protein, 15 aa, Homo Sapiens
EKKAAGDSHGGGARL

SEQ ID NO: 71365 - protein, 15 aa, Homo Sapiens
KKAAGDSHGGGARLD

SEQ ID NO: 71366 - protein, 15 aa, Homo Sapiens
KAAGDSHGGGARLDL

SEQ ID NO: 71367 - protein, 15 aa, Homo Sapiens
AAGDSHGGGARLDLE

SEQ ID NO: 71368 - protein, 15 aa, Homo Sapiens
AGDSHGGGARLDLEN

SEQ ID NO: 71369 - protein, 15 aa, Homo Sapiens
GDSHGGGARLDLENV

SEQ ID NO: 71370 - protein, 15 aa, Homo Sapiens
DSHGGGARLDLENVP

SEQ ID NO: 71371 - protein, 15 aa, Homo Sapiens
SHGGGARLDLENVPA

SEQ ID NO: 71372 - protein, 15 aa, Homo Sapiens
HGGGARLDLENVPAT

SEQ ID NO: 71373 - protein, 15 aa, Homo Sapiens
GGGARLDLENVPATI

SEQ ID NO: 71374 - protein, 15 aa, Homo Sapiens
GGARLDLENVPATIT

SEQ ID NO: 71375 - protein, 15 aa, Homo Sapiens
GARLDLENVPATITD

SEQ ID NO: 71376 - protein, 15 aa, Homo Sapiens
ARLDLENVPATITDI

SEQ ID NO: 71377 - protein, 15 aa, Homo Sapiens
RLDLENVPATITDIF

SEQ ID NO: 71378 - protein, 15 aa, Homo Sapiens
LDLENVPATITDIFG

SEQ ID NO: 71379 - protein, 15 aa, Homo Sapiens
DLENVPATITDIFGA

SEQ ID NO: 71380 - protein, 15 aa, Homo Sapiens
LENVPATITDIFGAS

SEQ ID NO: 71381 - protein, 15 aa, Homo Sapiens
ENVPATITDIFGASQ

SEQ ID NO: 71382 - protein, 15 aa, Homo Sapiens
NVPATITDIFGASQD

SEQ ID NO: 71383 - protein, 15 aa, Homo Sapiens
VPATITDIFGASQDT

SEQ ID NO: 71384 - protein, 15 aa, Homo Sapiens
PATITDIFGASQDTL

SEQ ID NO: 71385 - protein, 15 aa, Homo Sapiens
ATITDIFGASQDTLS

SEQ ID NO: 71386 - protein, 15 aa, Homo Sapiens
TITDIFGASQDTLST

SEQ ID NO: 71387 - protein, 15 aa, Homo Sapiens
ITDIFGASQDTLSTA

SEQ ID NO: 71388 - protein, 15 aa, Homo Sapiens
TDIFGASQDTLSTAL

SEQ ID NO: 71389 - protein, 15 aa, Homo Sapiens
DIFGASQDTLSTALQ

SEQ ID NO: 71390 - protein, 15 aa, Homo Sapiens
IFGASQDTLSTALQW

SEQ ID NO: 71391 - protein, 15 aa, Homo Sapiens
FGASQDTLSTALQWL

SEQ ID NO: 71392 - protein, 15 aa, Homo Sapiens
GASQDTLSTALQWLL

SEQ ID NO: 71393 - protein, 15 aa, Homo Sapiens
ASQDTLSTALQWLLL

SEQ ID NO: 71394 - protein, 15 aa, Homo Sapiens
SQDTLSTALQWLLLL

SEQ ID NO: 71395 - protein, 15 aa, Homo Sapiens
QDTLSTALQWLLLLF

SEQ ID NO: 71396 - protein, 15 aa, Homo Sapiens
DTLSTALQWLLLLFT

SEQ ID NO: 71397 - protein, 15 aa, Homo Sapiens
TLSTALQWLLLLFTR

SEQ ID NO: 71398 - protein, 15 aa, Homo Sapiens
LSTALQWLLLLFTRY

SEQ ID NO: 71399 - protein, 15 aa, Homo Sapiens
STALQWLLLLFTRYP

SEQ ID NO: 71400 - protein, 15 aa, Homo Sapiens
TALQWLLLLFTRYPD

SEQ ID NO: 71401 - protein, 15 aa, Homo Sapiens
ALQWLLLLFTRYPDV

SEQ ID NO: 71402 - protein, 15 aa, Homo Sapiens
LQWLLLLFTRYPDVQ

SEQ ID NO: 71403 - protein, 15 aa, Homo Sapiens
QWLLLLFTRYPDVQT

SEQ ID NO: 71404 - protein, 15 aa, Homo Sapiens
WLLLLFTRYPDVQTR

SEQ ID NO: 71405 - protein, 15 aa, Homo Sapiens
LLLLFTRYPDVQTRV

SEQ ID NO: 71406 - protein, 15 aa, Homo Sapiens
LLLFTRYPDVQTRVQ

SEQ ID NO: 71407 - protein, 15 aa, Homo Sapiens
LLFTRYPDVQTRVQA

SEQ ID NO: 71408 - protein, 15 aa, Homo Sapiens
LFTRYPDVQTRVQAE

SEQ ID NO: 71409 - protein, 15 aa, Homo Sapiens
FTRYPDVQTRVQAEL

SEQ ID NO: 71410 - protein, 15 aa, Homo Sapiens
TRYPDVQTRVQAELD

SEQ ID NO: 71411 - protein, 15 aa, Homo Sapiens
RYPDVQTRVQAELDQ

SEQ ID NO: 71412 - protein, 15 aa, Homo Sapiens
YPDVQTRVQAELDQV

SEQ ID NO: 71413 - protein, 15 aa, Homo Sapiens
PDVQTRVQAELDQVV

SEQ ID NO: 71414 - protein, 15 aa, Homo Sapiens
DVQTRVQAELDQVVG

SEQ ID NO: 71415 - protein, 15 aa, Homo Sapiens
VQTRVQAELDQVVGR

SEQ ID NO: 71416 - protein, 15 aa, Homo Sapiens
QTRVQAELDQVVGRD

SEQ ID NO: 71417 - protein, 15 aa, Homo Sapiens
TRVQAELDQVVGRDR

SEQ ID NO: 71418 - protein, 15 aa, Homo Sapiens
RVQAELDQVVGRDRL

SEQ ID NO: 71419 - protein, 15 aa, Homo Sapiens
VQAELDQVVGRDRLP

SEQ ID NO: 71420 - protein, 15 aa, Homo Sapiens
QAELDQVVGRDRLPC

SEQ ID NO: 71421 - protein, 15 aa, Homo Sapiens
AELDQVVGRDRLPCM

SEQ ID NO: 71422 - protein, 15 aa, Homo Sapiens
ELDQVVGRDRLPCMG

SEQ ID NO: 71423 - protein, 15 aa, Homo Sapiens
LDQVVGRDRLPCMGD

SEQ ID NO: 71424 - protein, 15 aa, Homo Sapiens
DQVVGRDRLPCMGDQ

SEQ ID NO: 71425 - protein, 15 aa, Homo Sapiens
QVVGRDRLPCMGDQP

SEQ ID NO: 71426 - protein, 15 aa, Homo Sapiens
VVGRDRLPCMGDQPN

SEQ ID NO: 71427 - protein, 15 aa, Homo Sapiens
VGRDRLPCMGDQPNL

SEQ ID NO: 71428 - protein, 15 aa, Homo Sapiens
GRDRLPCMGDQPNLP

SEQ ID NO: 71429 - protein, 15 aa, Homo Sapiens
RDRLPCMGDQPNLPY

SEQ ID NO: 71430 - protein, 15 aa, Homo Sapiens
DRLPCMGDQPNLPYV

SEQ ID NO: 71431 - protein, 15 aa, Homo Sapiens
RLPCMGDQPNLPYVL

SEQ ID NO: 71432 - protein, 15 aa, Homo Sapiens
LPCMGDQPNLPYVLA

SEQ ID NO: 71433 - protein, 15 aa, Homo Sapiens
PCMGDQPNLPYVLAF

SEQ ID NO: 71434 - protein, 15 aa, Homo Sapiens
CMGDQPNLPYVLAFL

SEQ ID NO: 71435 - protein, 15 aa, Homo Sapiens
MGDQPNLPYVLAFLY

SEQ ID NO: 71436 - protein, 15 aa, Homo Sapiens
GDQPNLPYVLAFLYE

SEQ ID NO: 71437 - protein, 15 aa, Homo Sapiens
DQPNLPYVLAFLYEA

SEQ ID NO: 71438 - protein, 15 aa, Homo Sapiens
QPNLPYVLAFLYEAM

SEQ ID NO: 71439 - protein, 15 aa, Homo Sapiens
PNLPYVLAFLYEAMR

SEQ ID NO: 71440 - protein, 15 aa, Homo Sapiens
NLPYVLAFLYEAMRF

SEQ ID NO: 71441 - protein, 15 aa, Homo Sapiens
LPYVLAFLYEAMRFS

SEQ ID NO: 71442 - protein, 15 aa, Homo Sapiens
PYVLAFLYEAMRFSS

SEQ ID NO: 71443 - protein, 15 aa, Homo Sapiens
YVLAFLYEAMRFSSF

SEQ ID NO: 71444 - protein, 15 aa, Homo Sapiens
VLAFLYEAMRFSSFV

SEQ ID NO: 71445 - protein, 15 aa, Homo Sapiens
LAFLYEAMRFSSFVP

SEQ ID NO: 71446 - protein, 15 aa, Homo Sapiens
AFLYEAMRFSSFVPV

SEQ ID NO: 71447 - protein, 15 aa, Homo Sapiens
FLYEAMRFSSFVPVT

SEQ ID NO: 71448 - protein, 15 aa, Homo Sapiens
LYEAMRFSSFVPVTI

SEQ ID NO: 71449 - protein, 15 aa, Homo Sapiens
YEAMRFSSFVPVTIP

SEQ ID NO: 71450 - protein, 15 aa, Homo Sapiens
EAMRFSSFVPVTIPH

SEQ ID NO: 71451 - protein, 15 aa, Homo Sapiens
AMRFSSFVPVTIPHA

SEQ ID NO: 71452 - protein, 15 aa, Homo Sapiens
MRFSSFVPVTIPHAT

SEQ ID NO: 71453 - protein, 15 aa, Homo Sapiens
RFSSFVPVTIPHATT

SEQ ID NO: 71454 - protein, 15 aa, Homo Sapiens
FSSFVPVTIPHATTA

SEQ ID NO: 71455 - protein, 15 aa, Homo Sapiens
SSFVPVTIPHATTAN

SEQ ID NO: 71456 - protein, 15 aa, Homo Sapiens
SFVPVTIPHATTANT

SEQ ID NO: 71457 - protein, 15 aa, Homo Sapiens
FVPVTIPHATTANTS

SEQ ID NO: 71458 - protein, 15 aa, Homo Sapiens
VPVTIPHATTANTSV

SEQ ID NO: 71459 - protein, 15 aa, Homo Sapiens
PVTIPHATTANTSVL

SEQ ID NO: 71460 - protein, 15 aa, Homo Sapiens
VTIPHATTANTSVLG

SEQ ID NO: 71461 - protein, 15 aa, Homo Sapiens
TIPHATTANTSVLGY

SEQ ID NO: 71462 - protein, 15 aa, Homo Sapiens
IPHATTANTSVLGYH

SEQ ID NO: 71463 - protein, 15 aa, Homo Sapiens
PHATTANTSVLGYHI

SEQ ID NO: 71464 - protein, 15 aa, Homo Sapiens
HATTANTSVLGYHIP

SEQ ID NO: 71465 - protein, 15 aa, Homo Sapiens
ATTANTSVLGYHIPK

SEQ ID NO: 71466 - protein, 15 aa, Homo Sapiens
TTANTSVLGYHIPKD

SEQ ID NO: 71467 - protein, 15 aa, Homo Sapiens
TANTSVLGYHIPKDT

SEQ ID NO: 71468 - protein, 15 aa, Homo Sapiens
ANTSVLGYHIPKDTV

SEQ ID NO: 71469 - protein, 15 aa, Homo Sapiens
NTSVLGYHIPKDTVV

SEQ ID NO: 71470 - protein, 15 aa, Homo Sapiens
TSVLGYHIPKDTVVF

SEQ ID NO: 71471 - protein, 15 aa, Homo Sapiens
SVLGYHIPKDTVVFV

SEQ ID NO: 71472 - protein, 15 aa, Homo Sapiens
VLGYHIPKDTVVFVN

SEQ ID NO: 71473 - protein, 15 aa, Homo Sapiens
LGYHIPKDTVVFVNQ

SEQ ID NO: 71474 - protein, 15 aa, Homo Sapiens
GYHIPKDTVVFVNQW

SEQ ID NO: 71475 - protein, 15 aa, Homo Sapiens
YHIPKDTVVFVNQWS

SEQ ID NO: 71476 - protein, 15 aa, Homo Sapiens
HIPKDTVVFVNQWSV

SEQ ID NO: 71477 - protein, 15 aa, Homo Sapiens
IPKDTVVFVNQWSVN

SEQ ID NO: 71478 - protein, 15 aa, Homo Sapiens
PKDTVVFVNQWSVNH

SEQ ID NO: 71479 - protein, 15 aa, Homo Sapiens
KDTVVFVNQWSVNHD

SEQ ID NO: 71480 - protein, 15 aa, Homo Sapiens
DTVVFVNQWSVNHDP

SEQ ID NO: 71481 - protein, 15 aa, Homo Sapiens
TVVFVNQWSVNHDPL

SEQ ID NO: 71482 - protein, 15 aa, Homo Sapiens
VVFVNQWSVNHDPLK

SEQ ID NO: 71483 - protein, 15 aa, Homo Sapiens
VFVNQWSVNHDPLKW

SEQ ID NO: 71484 - protein, 15 aa, Homo Sapiens
FVNQWSVNHDPLKWP

SEQ ID NO: 71485 - protein, 15 aa, Homo Sapiens
VNQWSVNHDPLKWPN

SEQ ID NO: 71486 - protein, 15 aa, Homo Sapiens
NQWSVNHDPLKWPNP

SEQ ID NO: 71487 - protein, 15 aa, Homo Sapiens
QWSVNHDPLKWPNPE

SEQ ID NO: 71488 - protein, 15 aa, Homo Sapiens
WSVNHDPLKWPNPEN

SEQ ID NO: 71489 - protein, 15 aa, Homo Sapiens
SVNHDPLKWPNPENF

SEQ ID NO: 71490 - protein, 15 aa, Homo Sapiens
VNHDPLKWPNPENFD

SEQ ID NO: 71491 - protein, 15 aa, Homo Sapiens
NHDPLKWPNPENFDP

SEQ ID NO: 71492 - protein, 15 aa, Homo Sapiens
HDPLKWPNPENFDPA

SEQ ID NO: 71493 - protein, 15 aa, Homo Sapiens
DPLKWPNPENFDPAR

SEQ ID NO: 71494 - protein, 15 aa, Homo Sapiens
PLKWPNPENFDPARF

SEQ ID NO: 71495 - protein, 15 aa, Homo Sapiens
LKWPNPENFDPARFL

SEQ ID NO: 71496 - protein, 15 aa, Homo Sapiens
KWPNPENFDPARFLD

SEQ ID NO: 71497 - protein, 15 aa, Homo Sapiens
WPNPENFDPARFLDK

SEQ ID NO: 71498 - protein, 15 aa, Homo Sapiens
PNPENFDPARFLDKD

SEQ ID NO: 71499 - protein, 15 aa, Homo Sapiens
NPENFDPARFLDKDG

SEQ ID NO: 71500 - protein, 15 aa, Homo Sapiens
PENFDPARFLDKDGL

SEQ ID NO: 71501 - protein, 15 aa, Homo Sapiens
ENFDPARFLDKDGLI

SEQ ID NO: 71502 - protein, 15 aa, Homo Sapiens
NFDPARFLDKDGLIN

SEQ ID NO: 71503 - protein, 15 aa, Homo Sapiens
FDPARFLDKDGLINK

SEQ ID NO: 71504 - protein, 15 aa, Homo Sapiens
DPARFLDKDGLINKD

SEQ ID NO: 71505 - protein, 15 aa, Homo Sapiens
PARFLDKDGLINKDL

SEQ ID NO: 71506 - protein, 15 aa, Homo Sapiens
ARFLDKDGLINKDLT

SEQ ID NO: 71507 - protein, 15 aa, Homo Sapiens
RFLDKDGLINKDLTS

SEQ ID NO: 71508 - protein, 15 aa, Homo Sapiens
FLDKDGLINKDLTSR

SEQ ID NO: 71509 - protein, 15 aa, Homo Sapiens
LDKDGLINKDLTSRV

SEQ ID NO: 71510 - protein, 15 aa, Homo Sapiens
DKDGLINKDLTSRVM

SEQ ID NO: 71511 - protein, 15 aa, Homo Sapiens
KDGLINKDLTSRVMI

SEQ ID NO: 71512 - protein, 15 aa, Homo Sapiens
DGLINKDLTSRVMIF

SEQ ID NO: 71513 - protein, 15 aa, Homo Sapiens
GLINKDLTSRVMIFS

SEQ ID NO: 71514 - protein, 15 aa, Homo Sapiens
LINKDLTSRVMIFSV

SEQ ID NO: 71515 - protein, 15 aa, Homo Sapiens
INKDLTSRVMIFSVG

SEQ ID NO: 71516 - protein, 15 aa, Homo Sapiens
NKDLTSRVMIFSVGK

SEQ ID NO: 71517 - protein, 15 aa, Homo Sapiens
KDLTSRVMIFSVGKR

SEQ ID NO: 71518 - protein, 15 aa, Homo Sapiens
DLTSRVMIFSVGKRR

SEQ ID NO: 71519 - protein, 15 aa, Homo Sapiens
LTSRVMIFSVGKRRC

SEQ ID NO: 71520 - protein, 15 aa, Homo Sapiens
TSRVMIFSVGKRRCI

SEQ ID NO: 71521 - protein, 15 aa, Homo Sapiens
SRVMIFSVGKRRCIG

SEQ ID NO: 71522 - protein, 15 aa, Homo Sapiens
RVMIFSVGKRRCIGE

SEQ ID NO: 71523 - protein, 15 aa, Homo Sapiens
VMIFSVGKRRCIGEE

SEQ ID NO: 71524 - protein, 15 aa, Homo Sapiens
MIFSVGKRRCIGEEL

SEQ ID NO: 71525 - protein, 15 aa, Homo Sapiens
IFSVGKRRCIGEELS

SEQ ID NO: 71526 - protein, 15 aa, Homo Sapiens
FSVGKRRCIGEELSK

SEQ ID NO: 71527 - protein, 15 aa, Homo Sapiens
SVGKRRCIGEELSKM

SEQ ID NO: 71528 - protein, 15 aa, Homo Sapiens
VGKRRCIGEELSKMQ

SEQ ID NO: 71529 - protein, 15 aa, Homo Sapiens
GKRRCIGEELSKMQL

SEQ ID NO: 71530 - protein, 15 aa, Homo Sapiens
KRRCIGEELSKMQLF

SEQ ID NO: 71531 - protein, 15 aa, Homo Sapiens
RRCIGEELSKMQLFL

SEQ ID NO: 71532 - protein, 15 aa, Homo Sapiens
RCIGEELSKMQLFLF

SEQ ID NO: 71533 - protein, 15 aa, Homo Sapiens
CIGEELSKMQLFLFI

SEQ ID NO: 71534 - protein, 15 aa, Homo Sapiens
IGEELSKMQLFLFIS

SEQ ID NO: 71535 - protein, 15 aa, Homo Sapiens
GEELSKMQLFLFISI

SEQ ID NO: 71536 - protein, 15 aa, Homo Sapiens
EELSKMQLFLFISIL

SEQ ID NO: 71537 - protein, 15 aa, Homo Sapiens
ELSKMQLFLFISILA

SEQ ID NO: 71538 - protein, 15 aa, Homo Sapiens
LSKMQLFLFISILAH

SEQ ID NO: 71539 - protein, 15 aa, Homo Sapiens
SKMQLFLFISILAHQ

SEQ ID NO: 71540 - protein, 15 aa, Homo Sapiens
KMQLFLFISILAHQC

SEQ ID NO: 71541 - protein, 15 aa, Homo Sapiens
MQLFLFISILAHQCD

SEQ ID NO: 71542 - protein, 15 aa, Homo Sapiens
QLFLFISILAHQCDF

SEQ ID NO: 71543 - protein, 15 aa, Homo Sapiens
LFLFISILAHQCDFR

SEQ ID NO: 71544 - protein, 15 aa, Homo Sapiens
FLFISILAHQCDFRA

SEQ ID NO: 71545 - protein, 15 aa, Homo Sapiens
LFISILAHQCDFRAN

SEQ ID NO: 71546 - protein, 15 aa, Homo Sapiens
FISILAHQCDFRANP

SEQ ID NO: 71547 - protein, 15 aa, Homo Sapiens
ISILAHQCDFRANPN

SEQ ID NO: 71548 - protein, 15 aa, Homo Sapiens
SILAHQCDFRANPNE

SEQ ID NO: 71549 - protein, 15 aa, Homo Sapiens
ILAHQCDFRANPNEP

SEQ ID NO: 71550 - protein, 15 aa, Homo Sapiens
LAHQCDFRANPNEPA

SEQ ID NO: 71551 - protein, 15 aa, Homo Sapiens
AHQCDFRANPNEPAK

SEQ ID NO: 71552 - protein, 15 aa, Homo Sapiens
HQCDFRANPNEPAKM

SEQ ID NO: 71553 - protein, 15 aa, Homo Sapiens
QCDFRANPNEPAKMN

SEQ ID NO: 71554 - protein, 15 aa, Homo Sapiens
CDFRANPNEPAKMNF

SEQ ID NO: 71555 - protein, 15 aa, Homo Sapiens
DFRANPNEPAKMNFS

SEQ ID NO: 71556 - protein, 15 aa, Homo Sapiens
FRANPNEPAKMNFSY

SEQ ID NO: 71557 - protein, 15 aa, Homo Sapiens
RANPNEPAKMNFSYG

SEQ ID NO: 71558 - protein, 15 aa, Homo Sapiens
ANPNEPAKMNFSYGL

SEQ ID NO: 71559 - protein, 15 aa, Homo Sapiens
NPNEPAKMNFSYGLT

SEQ ID NO: 71560 - protein, 15 aa, Homo Sapiens
PNEPAKMNFSYGLTI

SEQ ID NO: 71561 - protein, 15 aa, Homo Sapiens
NEPAKMNFSYGLTIK

SEQ ID NO: 71562 - protein, 15 aa, Homo Sapiens
EPAKMNFSYGLTIKP

SEQ ID NO: 71563 - protein, 15 aa, Homo Sapiens
PAKMNFSYGLTIKPK

SEQ ID NO: 71564 - protein, 15 aa, Homo Sapiens
AKMNFSYGLTIKPKS

SEQ ID NO: 71565 - protein, 15 aa, Homo Sapiens
KMNFSYGLTIKPKSF

SEQ ID NO: 71566 - protein, 15 aa, Homo Sapiens
MNFSYGLTIKPKSFK

SEQ ID NO: 71567 - protein, 15 aa, Homo Sapiens
NFSYGLTIKPKSFKV

SEQ ID NO: 71568 - protein, 15 aa, Homo Sapiens
FSYGLTIKPKSFKVN

SEQ ID NO: 71569 - protein, 15 aa, Homo Sapiens
SYGLTIKPKSFKVNV

SEQ ID NO: 71570 - protein, 15 aa, Homo Sapiens
YGLTIKPKSFKVNVT

SEQ ID NO: 71571 - protein, 15 aa, Homo Sapiens
GLTIKPKSFKVNVTL

SEQ ID NO: 71572 - protein, 15 aa, Homo Sapiens
LTIKPKSFKVNVTLR

SEQ ID NO: 71573 - protein, 15 aa, Homo Sapiens
TIKPKSFKVNVTLRE

SEQ ID NO: 71574 - protein, 15 aa, Homo Sapiens
IKPKSFKVNVTLRES

SEQ ID NO: 71575 - protein, 15 aa, Homo Sapiens
KPKSFKVNVTLRESM

SEQ ID NO: 71576 - protein, 15 aa, Homo Sapiens
PKSFKVNVTLRESME

SEQ ID NO: 71577 - protein, 15 aa, Homo Sapiens
KSFKVNVTLRESMEL

SEQ ID NO: 71578 - protein, 15 aa, Homo Sapiens
SFKVNVTLRESMELL

SEQ ID NO: 71579 - protein, 15 aa, Homo Sapiens
FKVNVTLRESMELLD

SEQ ID NO: 71580 - protein, 15 aa, Homo Sapiens
KVNVTLRESMELLDS

SEQ ID NO: 71581 - protein, 15 aa, Homo Sapiens
VNVTLRESMELLDSA

SEQ ID NO: 71582 - protein, 15 aa, Homo Sapiens
NVTLRESMELLDSAV

SEQ ID NO: 71583 - protein, 15 aa, Homo Sapiens
VTLRESMELLDSAVQ

SEQ ID NO: 71584 - protein, 15 aa, Homo Sapiens
TLRESMELLDSAVQN

SEQ ID NO: 71585 - protein, 15 aa, Homo Sapiens
LRESMELLDSAVQNL

SEQ ID NO: 71586 - protein, 15 aa, Homo Sapiens
RESMELLDSAVQNLQ

SEQ ID NO: 71587 - protein, 15 aa, Homo Sapiens
ESMELLDSAVQNLQA

SEQ ID NO: 71588 - protein, 15 aa, Homo Sapiens
SMELLDSAVQNLQAK

SEQ ID NO: 71589 - protein, 15 aa, Homo Sapiens
MELLDSAVQNLQAKE

SEQ ID NO: 71590 - protein, 15 aa, Homo Sapiens
ELLDSAVQNLQAKET

SEQ ID NO: 71591 - protein, 15 aa, Homo Sapiens
LLDSAVQNLQAKETC

SEQ ID NO: 71592 - protein, 15 aa, Homo Sapiens
LDSAVQNLQAKETCQ

SEQ ID NO: 71593 - protein, 15 aa, Homo Sapiens
DSAVQNLQAKETCQH

SEQ ID NO: 71594 - protein, 15 aa, Homo Sapiens
SAVQNLQAKETCQHG

SEQ ID NO: 71595 - protein, 15 aa, Homo Sapiens
AVQNLQAKETCQHGR

SEQ ID NO: 71596 - protein, 15 aa, Homo Sapiens
VQNLQAKETCQHGRY

SEQ ID NO: 71597 - protein, 15 aa, Homo Sapiens
QNLQAKETCQHGRYV

SEQ ID NO: 71598 - protein, 15 aa, Homo Sapiens
NLQAKETCQHGRYVP

SEQ ID NO: 71599 - protein, 15 aa, Homo Sapiens
LQAKETCQHGRYVPP

SEQ ID NO: 71600 - protein, 15 aa, Homo Sapiens
QAKETCQHGRYVPPS

SEQ ID NO: 71601 - protein, 15 aa, Homo Sapiens
AKETCQHGRYVPPSS

SEQ ID NO: 71602 - protein, 15 aa, Homo Sapiens
KETCQHGRYVPPSST

SEQ ID NO: 71603 - protein, 15 aa, Homo Sapiens
ETCQHGRYVPPSSTD

SEQ ID NO: 71604 - protein, 15 aa, Homo Sapiens
TCQHGRYVPPSSTDR

SEQ ID NO: 71605 - protein, 15 aa, Homo Sapiens
CQHGRYVPPSSTDRS

SEQ ID NO: 71606 - protein, 15 aa, Homo Sapiens
QHGRYVPPSSTDRSP

SEQ ID NO: 71607 - protein, 15 aa, Homo Sapiens
HGRYVPPSSTDRSPY

SEQ ID NO: 71608 - protein, 15 aa, Homo Sapiens
GRYVPPSSTDRSPYE

SEQ ID NO: 71609 - protein, 15 aa, Homo Sapiens
RYVPPSSTDRSPYEK

SEQ ID NO: 71610 - protein, 15 aa, Homo Sapiens
YVPPSSTDRSPYEKV

SEQ ID NO: 71611 - protein, 15 aa, Homo Sapiens
VPPSSTDRSPYEKVS

SEQ ID NO: 71612 - protein, 15 aa, Homo Sapiens
PPSSTDRSPYEKVSA

SEQ ID NO: 71613 - protein, 15 aa, Homo Sapiens
PSSTDRSPYEKVSAG

SEQ ID NO: 71614 - protein, 15 aa, Homo Sapiens
SSTDRSPYEKVSAGN

SEQ ID NO: 71615 - protein, 15 aa, Homo Sapiens
STDRSPYEKVSAGNG

SEQ ID NO: 71616 - protein, 15 aa, Homo Sapiens
TDRSPYEKVSAGNGG

SEQ ID NO: 71617 - protein, 15 aa, Homo Sapiens
DRSPYEKVSAGNGGS

SEQ ID NO: 71618 - protein, 15 aa, Homo Sapiens
RSPYEKVSAGNGGSS

SEQ ID NO: 71619 - protein, 15 aa, Homo Sapiens
SPYEKVSAGNGGSSL

SEQ ID NO: 71620 - protein, 15 aa, Homo Sapiens
PYEKVSAGNGGSSLS

SEQ ID NO: 71621 - protein, 15 aa, Homo Sapiens
YEKVSAGNGGSSLSY

SEQ ID NO: 71622 - protein, 15 aa, Homo Sapiens
EKVSAGNGGSSLSYT

SEQ ID NO: 71623 - protein, 15 aa, Homo Sapiens
KVSAGNGGSSLSYTN

SEQ ID NO: 71624 - protein, 15 aa, Homo Sapiens
VSAGNGGSSLSYTNP

SEQ ID NO: 71625 - protein, 15 aa, Homo Sapiens
SAGNGGSSLSYTNPA

SEQ ID NO: 71626 - protein, 15 aa, Homo Sapiens
AGNGGSSLSYTNPAV

SEQ ID NO: 71627 - protein, 15 aa, Homo Sapiens
GNGGSSLSYTNPAVA

SEQ ID NO: 71628 - protein, 15 aa, Homo Sapiens
NGGSSLSYTNPAVAA

SEQ ID NO: 71629 - protein, 15 aa, Homo Sapiens
GGSSLSYTNPAVAAA

SEQ ID NO: 71630 - protein, 15 aa, Homo Sapiens
GSSLSYTNPAVAAAS

SEQ ID NO: 71631 - protein, 15 aa, Homo Sapiens
SSLSYTNPAVAAASA

SEQ ID NO: 71632 - protein, 15 aa, Homo Sapiens
SLSYTNPAVAAASAN

SEQ ID NO: 71633 - protein, 15 aa, Homo Sapiens
LSYTNPAVAAASANL

SEQ ID NO: 71634 - protein, 16 aa, Homo Sapiens
MGTSLSPNDPWPLNPL

SEQ ID NO: 71635 - protein, 16 aa, Homo Sapiens
GTSLSPNDPWPLNPLS

SEQ ID NO: 71636 - protein, 16 aa, Homo Sapiens
TSLSPNDPWPLNPLSI

SEQ ID NO: 71637 - protein, 16 aa, Homo Sapiens
SLSPNDPWPLNPLSIQ

SEQ ID NO: 71638 - protein, 16 aa, Homo Sapiens
LSPNDPWPLNPLSIQQ

SEQ ID NO: 71639 - protein, 16 aa, Homo Sapiens
SPNDPWPLNPLSIQQT

SEQ ID NO: 71640 - protein, 16 aa, Homo Sapiens
PNDPWPLNPLSIQQTT

SEQ ID NO: 71641 - protein, 16 aa, Homo Sapiens
NDPWPLNPLSIQQTTL

SEQ ID NO: 71642 - protein, 16 aa, Homo Sapiens
DPWPLNPLSIQQTTLL

SEQ ID NO: 71643 - protein, 16 aa, Homo Sapiens
PWPLNPLSIQQTTLLL

SEQ ID NO: 71644 - protein, 16 aa, Homo Sapiens
WPLNPLSIQQTTLLLL

SEQ ID NO: 71645 - protein, 16 aa, Homo Sapiens
PLNPLSIQQTTLLLLL

SEQ ID NO: 71646 - protein, 16 aa, Homo Sapiens
LNPLSIQQTTLLLLLS

SEQ ID NO: 71647 - protein, 16 aa, Homo Sapiens
NPLSIQQTTLLLLLSV

SEQ ID NO: 71648 - protein, 16 aa, Homo Sapiens
PLSIQQTTLLLLLSVL

SEQ ID NO: 71649 - protein, 16 aa, Homo Sapiens
LSIQQTTLLLLLSVLA

SEQ ID NO: 71650 - protein, 16 aa, Homo Sapiens
SIQQTTLLLLLSVLAT

SEQ ID NO: 71651 - protein, 16 aa, Homo Sapiens
IQQTTLLLLLSVLATV

SEQ ID NO: 71652 - protein, 16 aa, Homo Sapiens
QQTTLLLLLSVLATVH

SEQ ID NO: 71653 - protein, 16 aa, Homo Sapiens
QTTLLLLLSVLATVHV

SEQ ID NO: 71654 - protein, 16 aa, Homo Sapiens
TTLLLLLSVLATVHVG

SEQ ID NO: 71655 - protein, 16 aa, Homo Sapiens
TLLLLLSVLATVHVGQ

SEQ ID NO: 71656 - protein, 16 aa, Homo Sapiens
LLLLLSVLATVHVGQR

SEQ ID NO: 71657 - protein, 16 aa, Homo Sapiens
LLLLSVLATVHVGQRL

SEQ ID NO: 71658 - protein, 16 aa, Homo Sapiens
LLLSVLATVHVGQRLL

SEQ ID NO: 71659 - protein, 16 aa, Homo Sapiens
LLSVLATVHVGQRLLR

SEQ ID NO: 71660 - protein, 16 aa, Homo Sapiens
LSVLATVHVGQRLLRQ

SEQ ID NO: 71661 - protein, 16 aa, Homo Sapiens
SVLATVHVGQRLLRQR

SEQ ID NO: 71662 - protein, 16 aa, Homo Sapiens
VLATVHVGQRLLRQRR

SEQ ID NO: 71663 - protein, 16 aa, Homo Sapiens
LATVHVGQRLLRQRRR

SEQ ID NO: 71664 - protein, 16 aa, Homo Sapiens
ATVHVGQRLLRQRRRQ

SEQ ID NO: 71665 - protein, 16 aa, Homo Sapiens
TVHVGQRLLRQRRRQL

SEQ ID NO: 71666 - protein, 16 aa, Homo Sapiens
VHVGQRLLRQRRRQLR

SEQ ID NO: 71667 - protein, 16 aa, Homo Sapiens
HVGQRLLRQRRRQLRS

SEQ ID NO: 71668 - protein, 16 aa, Homo Sapiens
VGQRLLRQRRRQLRSA

SEQ ID NO: 71669 - protein, 16 aa, Homo Sapiens
GQRLLRQRRRQLRSAP

SEQ ID NO: 71670 - protein, 16 aa, Homo Sapiens
QRLLRQRRRQLRSAPP

SEQ ID NO: 71671 - protein, 16 aa, Homo Sapiens
RLLRQRRRQLRSAPPG

SEQ ID NO: 71672 - protein, 16 aa, Homo Sapiens
LLRQRRRQLRSAPPGP

SEQ ID NO: 71673 - protein, 16 aa, Homo Sapiens
LRQRRRQLRSAPPGPF

SEQ ID NO: 71674 - protein, 16 aa, Homo Sapiens
RQRRRQLRSAPPGPFA

SEQ ID NO: 71675 - protein, 16 aa, Homo Sapiens
QRRRQLRSAPPGPFAW

SEQ ID NO: 71676 - protein, 16 aa, Homo Sapiens
RRRQLRSAPPGPFAWP

SEQ ID NO: 71677 - protein, 16 aa, Homo Sapiens
RRQLRSAPPGPFAWPL

SEQ ID NO: 71678 - protein, 16 aa, Homo Sapiens
RQLRSAPPGPFAWPLI

SEQ ID NO: 71679 - protein, 16 aa, Homo Sapiens
QLRSAPPGPFAWPLIG

SEQ ID NO: 71680 - protein, 16 aa, Homo Sapiens
LRSAPPGPFAWPLIGN

SEQ ID NO: 71681 - protein, 16 aa, Homo Sapiens
RSAPPGPFAWPLIGNA

SEQ ID NO: 71682 - protein, 16 aa, Homo Sapiens
SAPPGPFAWPLIGNAA

SEQ ID NO: 71683 - protein, 16 aa, Homo Sapiens
APPGPFAWPLIGNAAA

SEQ ID NO: 71684 - protein, 16 aa, Homo Sapiens
PPGPFAWPLIGNAAAV

SEQ ID NO: 71685 - protein, 16 aa, Homo Sapiens
PGPFAWPLIGNAAAVG

SEQ ID NO: 71686 - protein, 16 aa, Homo Sapiens
GPFAWPLIGNAAAVGQ

SEQ ID NO: 71687 - protein, 16 aa, Homo Sapiens
PFAWPLIGNAAAVGQA

SEQ ID NO: 71688 - protein, 16 aa, Homo Sapiens
FAWPLIGNAAAVGQAA

SEQ ID NO: 71689 - protein, 16 aa, Homo Sapiens
AWPLIGNAAAVGQAAH

SEQ ID NO: 71690 - protein, 16 aa, Homo Sapiens
WPLIGNAAAVGQAAHL

SEQ ID NO: 71691 - protein, 16 aa, Homo Sapiens
PLIGNAAAVGQAAHLS

SEQ ID NO: 71692 - protein, 16 aa, Homo Sapiens
LIGNAAAVGQAAHLSF

SEQ ID NO: 71693 - protein, 16 aa, Homo Sapiens
IGNAAAVGQAAHLSFA

SEQ ID NO: 71694 - protein, 16 aa, Homo Sapiens
GNAAAVGQAAHLSFAR

SEQ ID NO: 71695 - protein, 16 aa, Homo Sapiens
NAAAVGQAAHLSFARL

SEQ ID NO: 71696 - protein, 16 aa, Homo Sapiens
AAAVGQAAHLSFARLA

SEQ ID NO: 71697 - protein, 16 aa, Homo Sapiens
AAVGQAAHLSFARLAR

SEQ ID NO: 71698 - protein, 16 aa, Homo Sapiens
AVGQAAHLSFARLARR

SEQ ID NO: 71699 - protein, 16 aa, Homo Sapiens
VGQAAHLSFARLARRY

SEQ ID NO: 71700 - protein, 16 aa, Homo Sapiens
GQAAHLSFARLARRYG

SEQ ID NO: 71701 - protein, 16 aa, Homo Sapiens
QAAHLSFARLARRYGD

SEQ ID NO: 71702 - protein, 16 aa, Homo Sapiens
AAHLSFARLARRYGDV

SEQ ID NO: 71703 - protein, 16 aa, Homo Sapiens
AHLSFARLARRYGDVF

SEQ ID NO: 71704 - protein, 16 aa, Homo Sapiens
HLSFARLARRYGDVFQ

SEQ ID NO: 71705 - protein, 16 aa, Homo Sapiens
LSFARLARRYGDVFQI

SEQ ID NO: 71706 - protein, 16 aa, Homo Sapiens
SFARLARRYGDVFQIR

SEQ ID NO: 71707 - protein, 16 aa, Homo Sapiens
FARLARRYGDVFQIRL

SEQ ID NO: 71708 - protein, 16 aa, Homo Sapiens
ARLARRYGDVFQIRLG

SEQ ID NO: 71709 - protein, 16 aa, Homo Sapiens
RLARRYGDVFQIRLGS

SEQ ID NO: 71710 - protein, 16 aa, Homo Sapiens
LARRYGDVFQIRLGSC

SEQ ID NO: 71711 - protein, 16 aa, Homo Sapiens
ARRYGDVFQIRLGSCP

SEQ ID NO: 71712 - protein, 16 aa, Homo Sapiens
RRYGDVFQIRLGSCPI

SEQ ID NO: 71713 - protein, 16 aa, Homo Sapiens
RYGDVFQIRLGSCPIV

SEQ ID NO: 71714 - protein, 16 aa, Homo Sapiens
YGDVFQIRLGSCPIVV

SEQ ID NO: 71715 - protein, 16 aa, Homo Sapiens
GDVFQIRLGSCPIVVL

SEQ ID NO: 71716 - protein, 16 aa, Homo Sapiens
DVFQIRLGSCPIVVLN

SEQ ID NO: 71717 - protein, 16 aa, Homo Sapiens
VFQIRLGSCPIVVLNG

SEQ ID NO: 71718 - protein, 16 aa, Homo Sapiens
FQIRLGSCPIVVLNGE

SEQ ID NO: 71719 - protein, 16 aa, Homo Sapiens
QIRLGSCPIVVLNGER

SEQ ID NO: 71720 - protein, 16 aa, Homo Sapiens
IRLGSCPIVVLNGERA

SEQ ID NO: 71721 - protein, 16 aa, Homo Sapiens
RLGSCPIVVLNGERAI

SEQ ID NO: 71722 - protein, 16 aa, Homo Sapiens
LGSCPIVVLNGERAIH

SEQ ID NO: 71723 - protein, 16 aa, Homo Sapiens
GSCPIVVLNGERAIHQ

SEQ ID NO: 71724 - protein, 16 aa, Homo Sapiens
SCPIVVLNGERAIHQA

SEQ ID NO: 71725 - protein, 16 aa, Homo Sapiens
CPIVVLNGERAIHQAL

SEQ ID NO: 71726 - protein, 16 aa, Homo Sapiens
PIVVLNGERAIHQALV

SEQ ID NO: 71727 - protein, 16 aa, Homo Sapiens
IVVLNGERAIHQALVQ

SEQ ID NO: 71728 - protein, 16 aa, Homo Sapiens
VVLNGERAIHQALVQQ

SEQ ID NO: 71729 - protein, 16 aa, Homo Sapiens
VLNGERAIHQALVQQG

SEQ ID NO: 71730 - protein, 16 aa, Homo Sapiens
LNGERAIHQALVQQGS

SEQ ID NO: 71731 - protein, 16 aa, Homo Sapiens
NGERAIHQALVQQGSA

SEQ ID NO: 71732 - protein, 16 aa, Homo Sapiens
GERAIHQALVQQGSAF

SEQ ID NO: 71733 - protein, 16 aa, Homo Sapiens
ERAIHQALVQQGSAFA

SEQ ID NO: 71734 - protein, 16 aa, Homo Sapiens
RAIHQALVQQGSAFAD

SEQ ID NO: 71735 - protein, 16 aa, Homo Sapiens
AIHQALVQQGSAFADR

SEQ ID NO: 71736 - protein, 16 aa, Homo Sapiens
IHQALVQQGSAFADRP

SEQ ID NO: 71737 - protein, 16 aa, Homo Sapiens
HQALVQQGSAFADRPA

SEQ ID NO: 71738 - protein, 16 aa, Homo Sapiens
QALVQQGSAFADRPAF

SEQ ID NO: 71739 - protein, 16 aa, Homo Sapiens
ALVQQGSAFADRPAFA

SEQ ID NO: 71740 - protein, 16 aa, Homo Sapiens
LVQQGSAFADRPAFAS

SEQ ID NO: 71741 - protein, 16 aa, Homo Sapiens
VQQGSAFADRPAFASF

SEQ ID NO: 71742 - protein, 16 aa, Homo Sapiens
QQGSAFADRPAFASFR

SEQ ID NO: 71743 - protein, 16 aa, Homo Sapiens
QGSAFADRPAFASFRV

SEQ ID NO: 71744 - protein, 16 aa, Homo Sapiens
GSAFADRPAFASFRVV

SEQ ID NO: 71745 - protein, 16 aa, Homo Sapiens
SAFADRPAFASFRVVS

SEQ ID NO: 71746 - protein, 16 aa, Homo Sapiens
AFADRPAFASFRVVSG

SEQ ID NO: 71747 - protein, 16 aa, Homo Sapiens
FADRPAFASFRVVSGG

SEQ ID NO: 71748 - protein, 16 aa, Homo Sapiens
ADRPAFASFRVVSGGR

SEQ ID NO: 71749 - protein, 16 aa, Homo Sapiens
DRPAFASFRVVSGGRS

SEQ ID NO: 71750 - protein, 16 aa, Homo Sapiens
RPAFASFRVVSGGRSM

SEQ ID NO: 71751 - protein, 16 aa, Homo Sapiens
PAFASFRVVSGGRSMA

SEQ ID NO: 71752 - protein, 16 aa, Homo Sapiens
AFASFRVVSGGRSMAF

SEQ ID NO: 71753 - protein, 16 aa, Homo Sapiens
FASFRVVSGGRSMAFG

SEQ ID NO: 71754 - protein, 16 aa, Homo Sapiens
ASFRVVSGGRSMAFGH

SEQ ID NO: 71755 - protein, 16 aa, Homo Sapiens
SFRVVSGGRSMAFGHY

SEQ ID NO: 71756 - protein, 16 aa, Homo Sapiens
FRVVSGGRSMAFGHYS

SEQ ID NO: 71757 - protein, 16 aa, Homo Sapiens
RVVSGGRSMAFGHYSE

SEQ ID NO: 71758 - protein, 16 aa, Homo Sapiens
VVSGGRSMAFGHYSEH

SEQ ID NO: 71759 - protein, 16 aa, Homo Sapiens
VSGGRSMAFGHYSEHW

SEQ ID NO: 71760 - protein, 16 aa, Homo Sapiens
SGGRSMAFGHYSEHWK

SEQ ID NO: 71761 - protein, 16 aa, Homo Sapiens
GGRSMAFGHYSEHWKV

SEQ ID NO: 71762 - protein, 16 aa, Homo Sapiens
GRSMAFGHYSEHWKVQ

SEQ ID NO: 71763 - protein, 16 aa, Homo Sapiens
RSMAFGHYSEHWKVQR

SEQ ID NO: 71764 - protein, 16 aa, Homo Sapiens
SMAFGHYSEHWKVQRR

SEQ ID NO: 71765 - protein, 16 aa, Homo Sapiens
MAFGHYSEHWKVQRRA

SEQ ID NO: 71766 - protein, 16 aa, Homo Sapiens
AFGHYSEHWKVQRRAA

SEQ ID NO: 71767 - protein, 16 aa, Homo Sapiens
FGHYSEHWKVQRRAAH

SEQ ID NO: 71768 - protein, 16 aa, Homo Sapiens
GHYSEHWKVQRRAAHS

SEQ ID NO: 71769 - protein, 16 aa, Homo Sapiens
HYSEHWKVQRRAAHSM

SEQ ID NO: 71770 - protein, 16 aa, Homo Sapiens
YSEHWKVQRRAAHSMM

SEQ ID NO: 71771 - protein, 16 aa, Homo Sapiens
SEHWKVQRRAAHSMMR

SEQ ID NO: 71772 - protein, 16 aa, Homo Sapiens
EHWKVQRRAAHSMMRN

SEQ ID NO: 71773 - protein, 16 aa, Homo Sapiens
HWKVQRRAAHSMMRNF

SEQ ID NO: 71774 - protein, 16 aa, Homo Sapiens
WKVQRRAAHSMMRNFF

SEQ ID NO: 71775 - protein, 16 aa, Homo Sapiens
KVQRRAAHSMMRNFFT

SEQ ID NO: 71776 - protein, 16 aa, Homo Sapiens
VQRRAAHSMMRNFFTR

SEQ ID NO: 71777 - protein, 16 aa, Homo Sapiens
QRRAAHSMMRNFFTRQ

SEQ ID NO: 71778 - protein, 16 aa, Homo Sapiens
RRAAHSMMRNFFTRQP

SEQ ID NO: 71779 - protein, 16 aa, Homo Sapiens
RAAHSMMRNFFTRQPR

SEQ ID NO: 71780 - protein, 16 aa, Homo Sapiens
AAHSMMRNFFTRQPRS

SEQ ID NO: 71781 - protein, 16 aa, Homo Sapiens
AHSMMRNFFTRQPRSR

SEQ ID NO: 71782 - protein, 16 aa, Homo Sapiens
HSMMRNFFTRQPRSRQ

SEQ ID NO: 71783 - protein, 16 aa, Homo Sapiens
SMMRNFFTRQPRSRQV

SEQ ID NO: 71784 - protein, 16 aa, Homo Sapiens
MMRNFFTRQPRSRQVL

SEQ ID NO: 71785 - protein, 16 aa, Homo Sapiens
MRNFFTRQPRSRQVLE

SEQ ID NO: 71786 - protein, 16 aa, Homo Sapiens
RNFFTRQPRSRQVLEG

SEQ ID NO: 71787 - protein, 16 aa, Homo Sapiens
NFFTRQPRSRQVLEGH

SEQ ID NO: 71788 - protein, 16 aa, Homo Sapiens
FFTRQPRSRQVLEGHV

SEQ ID NO: 71789 - protein, 16 aa, Homo Sapiens
FTRQPRSRQVLEGHVL

SEQ ID NO: 71790 - protein, 16 aa, Homo Sapiens
TRQPRSRQVLEGHVLS

SEQ ID NO: 71791 - protein, 16 aa, Homo Sapiens
RQPRSRQVLEGHVLSE

SEQ ID NO: 71792 - protein, 16 aa, Homo Sapiens
QPRSRQVLEGHVLSEA

SEQ ID NO: 71793 - protein, 16 aa, Homo Sapiens
PRSRQVLEGHVLSEAR

SEQ ID NO: 71794 - protein, 16 aa, Homo Sapiens
RSRQVLEGHVLSEARE

SEQ ID NO: 71795 - protein, 16 aa, Homo Sapiens
SRQVLEGHVLSEAREL

SEQ ID NO: 71796 - protein, 16 aa, Homo Sapiens
RQVLEGHVLSEARELV

SEQ ID NO: 71797 - protein, 16 aa, Homo Sapiens
QVLEGHVLSEARELVA

SEQ ID NO: 71798 - protein, 16 aa, Homo Sapiens
VLEGHVLSEARELVAL

SEQ ID NO: 71799 - protein, 16 aa, Homo Sapiens
LEGHVLSEARELVALL

SEQ ID NO: 71800 - protein, 16 aa, Homo Sapiens
EGHVLSEARELVALLV

SEQ ID NO: 71801 - protein, 16 aa, Homo Sapiens
GHVLSEARELVALLVR

SEQ ID NO: 71802 - protein, 16 aa, Homo Sapiens
HVLSEARELVALLVRG

SEQ ID NO: 71803 - protein, 16 aa, Homo Sapiens
VLSEARELVALLVRGS

SEQ ID NO: 71804 - protein, 16 aa, Homo Sapiens
LSEARELVALLVRGSA

SEQ ID NO: 71805 - protein, 16 aa, Homo Sapiens
SEARELVALLVRGSAD

SEQ ID NO: 71806 - protein, 16 aa, Homo Sapiens
EARELVALLVRGSADG

SEQ ID NO: 71807 - protein, 16 aa, Homo Sapiens
ARELVALLVRGSADGA

SEQ ID NO: 71808 - protein, 16 aa, Homo Sapiens
RELVALLVRGSADGAF

SEQ ID NO: 71809 - protein, 16 aa, Homo Sapiens
ELVALLVRGSADGAFL

SEQ ID NO: 71810 - protein, 16 aa, Homo Sapiens
LVALLVRGSADGAFLD

SEQ ID NO: 71811 - protein, 16 aa, Homo Sapiens
VALLVRGSADGAFLDP

SEQ ID NO: 71812 - protein, 16 aa, Homo Sapiens
ALLVRGSADGAFLDPR

SEQ ID NO: 71813 - protein, 16 aa, Homo Sapiens
LLVRGSADGAFLDPRP

SEQ ID NO: 71814 - protein, 16 aa, Homo Sapiens
LVRGSADGAFLDPRPL

SEQ ID NO: 71815 - protein, 16 aa, Homo Sapiens
VRGSADGAFLDPRPLT

SEQ ID NO: 71816 - protein, 16 aa, Homo Sapiens
RGSADGAFLDPRPLTV

SEQ ID NO: 71817 - protein, 16 aa, Homo Sapiens
GSADGAFLDPRPLTVV

SEQ ID NO: 71818 - protein, 16 aa, Homo Sapiens
SADGAFLDPRPLTVVA

SEQ ID NO: 71819 - protein, 16 aa, Homo Sapiens
ADGAFLDPRPLTVVAV

SEQ ID NO: 71820 - protein, 16 aa, Homo Sapiens
DGAFLDPRPLTVVAVA

SEQ ID NO: 71821 - protein, 16 aa, Homo Sapiens
GAFLDPRPLTVVAVAN

SEQ ID NO: 71822 - protein, 16 aa, Homo Sapiens
AFLDPRPLTVVAVANV

SEQ ID NO: 71823 - protein, 16 aa, Homo Sapiens
FLDPRPLTVVAVANVM

SEQ ID NO: 71824 - protein, 16 aa, Homo Sapiens
LDPRPLTVVAVANVMS

SEQ ID NO: 71825 - protein, 16 aa, Homo Sapiens
DPRPLTVVAVANVMSA

SEQ ID NO: 71826 - protein, 16 aa, Homo Sapiens
PRPLTVVAVANVMSAV

SEQ ID NO: 71827 - protein, 16 aa, Homo Sapiens
RPLTVVAVANVMSAVC

SEQ ID NO: 71828 - protein, 16 aa, Homo Sapiens
PLTVVAVANVMSAVCF

SEQ ID NO: 71829 - protein, 16 aa, Homo Sapiens
LTVVAVANVMSAVCFG

SEQ ID NO: 71830 - protein, 16 aa, Homo Sapiens
TVVAVANVMSAVCFGC

SEQ ID NO: 71831 - protein, 16 aa, Homo Sapiens
VVAVANVMSAVCFGCR

SEQ ID NO: 71832 - protein, 16 aa, Homo Sapiens
VAVANVMSAVCFGCRY

SEQ ID NO: 71833 - protein, 16 aa, Homo Sapiens
AVANVMSAVCFGCRYS

SEQ ID NO: 71834 - protein, 16 aa, Homo Sapiens
VANVMSAVCFGCRYSH

SEQ ID NO: 71835 - protein, 16 aa, Homo Sapiens
ANVMSAVCFGCRYSHD

SEQ ID NO: 71836 - protein, 16 aa, Homo Sapiens
NVMSAVCFGCRYSHDD

SEQ ID NO: 71837 - protein, 16 aa, Homo Sapiens
VMSAVCFGCRYSHDDP

SEQ ID NO: 71838 - protein, 16 aa, Homo Sapiens
MSAVCFGCRYSHDDPE

SEQ ID NO: 71839 - protein, 16 aa, Homo Sapiens
SAVCFGCRYSHDDPEF

SEQ ID NO: 71840 - protein, 16 aa, Homo Sapiens
AVCFGCRYSHDDPEFR

SEQ ID NO: 71841 - protein, 16 aa, Homo Sapiens
VCFGCRYSHDDPEFRE

SEQ ID NO: 71842 - protein, 16 aa, Homo Sapiens
CFGCRYSHDDPEFREL

SEQ ID NO: 71843 - protein, 16 aa, Homo Sapiens
FGCRYSHDDPEFRELL

SEQ ID NO: 71844 - protein, 16 aa, Homo Sapiens
GCRYSHDDPEFRELLS

SEQ ID NO: 71845 - protein, 16 aa, Homo Sapiens
CRYSHDDPEFRELLSH

SEQ ID NO: 71846 - protein, 16 aa, Homo Sapiens
RYSHDDPEFRELLSHN

SEQ ID NO: 71847 - protein, 16 aa, Homo Sapiens
YSHDDPEFRELLSHNE

SEQ ID NO: 71848 - protein, 16 aa, Homo Sapiens
SHDDPEFRELLSHNEE

SEQ ID NO: 71849 - protein, 16 aa, Homo Sapiens
HDDPEFRELLSHNEEF

SEQ ID NO: 71850 - protein, 16 aa, Homo Sapiens
DDPEFRELLSHNEEFG

SEQ ID NO: 71851 - protein, 16 aa, Homo Sapiens
DPEFRELLSHNEEFGR

SEQ ID NO: 71852 - protein, 16 aa, Homo Sapiens
PEFRELLSHNEEFGRT

SEQ ID NO: 71853 - protein, 16 aa, Homo Sapiens
EFRELLSHNEEFGRTV

SEQ ID NO: 71854 - protein, 16 aa, Homo Sapiens
FRELLSHNEEFGRTVG

SEQ ID NO: 71855 - protein, 16 aa, Homo Sapiens
RELLSHNEEFGRTVGA

SEQ ID NO: 71856 - protein, 16 aa, Homo Sapiens
ELLSHNEEFGRTVGAG

SEQ ID NO: 71857 - protein, 16 aa, Homo Sapiens
LLSHNEEFGRTVGAGS

SEQ ID NO: 71858 - protein, 16 aa, Homo Sapiens
LSHNEEFGRTVGAGSL

SEQ ID NO: 71859 - protein, 16 aa, Homo Sapiens
SHNEEFGRTVGAGSLV

SEQ ID NO: 71860 - protein, 16 aa, Homo Sapiens
HNEEFGRTVGAGSLVD

SEQ ID NO: 71861 - protein, 16 aa, Homo Sapiens
NEEFGRTVGAGSLVDV

SEQ ID NO: 71862 - protein, 16 aa, Homo Sapiens
EEFGRTVGAGSLVDVM

SEQ ID NO: 71863 - protein, 16 aa, Homo Sapiens
EFGRTVGAGSLVDVMP

SEQ ID NO: 71864 - protein, 16 aa, Homo Sapiens
FGRTVGAGSLVDVMPW

SEQ ID NO: 71865 - protein, 16 aa, Homo Sapiens
GRTVGAGSLVDVMPWL

SEQ ID NO: 71866 - protein, 16 aa, Homo Sapiens
RTVGAGSLVDVMPWLQ

SEQ ID NO: 71867 - protein, 16 aa, Homo Sapiens
TVGAGSLVDVMPWLQY

SEQ ID NO: 71868 - protein, 16 aa, Homo Sapiens
VGAGSLVDVMPWLQYF

SEQ ID NO: 71869 - protein, 16 aa, Homo Sapiens
GAGSLVDVMPWLQYFP

SEQ ID NO: 71870 - protein, 16 aa, Homo Sapiens
AGSLVDVMPWLQYFPN

SEQ ID NO: 71871 - protein, 16 aa, Homo Sapiens
GSLVDVMPWLQYFPNP

SEQ ID NO: 71872 - protein, 16 aa, Homo Sapiens
SLVDVMPWLQYFPNPV

SEQ ID NO: 71873 - protein, 16 aa, Homo Sapiens
LVDVMPWLQYFPNPVR

SEQ ID NO: 71874 - protein, 16 aa, Homo Sapiens
VDVMPWLQYFPNPVRT

SEQ ID NO: 71875 - protein, 16 aa, Homo Sapiens
DVMPWLQYFPNPVRTV

SEQ ID NO: 71876 - protein, 16 aa, Homo Sapiens
VMPWLQYFPNPVRTVF

SEQ ID NO: 71877 - protein, 16 aa, Homo Sapiens
MPWLQYFPNPVRTVFR

SEQ ID NO: 71878 - protein, 16 aa, Homo Sapiens
PWLQYFPNPVRTVFRE

SEQ ID NO: 71879 - protein, 16 aa, Homo Sapiens
WLQYFPNPVRTVFREF

SEQ ID NO: 71880 - protein, 16 aa, Homo Sapiens
LQYFPNPVRTVFREFE

SEQ ID NO: 71881 - protein, 16 aa, Homo Sapiens
QYFPNPVRTVFREFEQ

SEQ ID NO: 71882 - protein, 16 aa, Homo Sapiens
YFPNPVRTVFREFEQL

SEQ ID NO: 71883 - protein, 16 aa, Homo Sapiens
FPNPVRTVFREFEQLN

SEQ ID NO: 71884 - protein, 16 aa, Homo Sapiens
PNPVRTVFREFEQLNR

SEQ ID NO: 71885 - protein, 16 aa, Homo Sapiens
NPVRTVFREFEQLNRN

SEQ ID NO: 71886 - protein, 16 aa, Homo Sapiens
PVRTVFREFEQLNRNF

SEQ ID NO: 71887 - protein, 16 aa, Homo Sapiens
VRTVFREFEQLNRNFS

SEQ ID NO: 71888 - protein, 16 aa, Homo Sapiens
RTVFREFEQLNRNFSN

SEQ ID NO: 71889 - protein, 16 aa, Homo Sapiens
TVFREFEQLNRNFSNF

SEQ ID NO: 71890 - protein, 16 aa, Homo Sapiens
VFREFEQLNRNFSNFI

SEQ ID NO: 71891 - protein, 16 aa, Homo Sapiens
FREFEQLNRNFSNFIL

SEQ ID NO: 71892 - protein, 16 aa, Homo Sapiens
REFEQLNRNFSNFILD

SEQ ID NO: 71893 - protein, 16 aa, Homo Sapiens
EFEQLNRNFSNFILDK

SEQ ID NO: 71894 - protein, 16 aa, Homo Sapiens
FEQLNRNFSNFILDKF

SEQ ID NO: 71895 - protein, 16 aa, Homo Sapiens
EQLNRNFSNFILDKFL

SEQ ID NO: 71896 - protein, 16 aa, Homo Sapiens
QLNRNFSNFILDKFLR

SEQ ID NO: 71897 - protein, 16 aa, Homo Sapiens
LNRNFSNFILDKFLRH

SEQ ID NO: 71898 - protein, 16 aa, Homo Sapiens
NRNFSNFILDKFLRHC

SEQ ID NO: 71899 - protein, 16 aa, Homo Sapiens
RNFSNFILDKFLRHCE

SEQ ID NO: 71900 - protein, 16 aa, Homo Sapiens
NFSNFILDKFLRHCES

SEQ ID NO: 71901 - protein, 16 aa, Homo Sapiens
FSNFILDKFLRHCESL

SEQ ID NO: 71902 - protein, 16 aa, Homo Sapiens
SNFILDKFLRHCESLR

SEQ ID NO: 71903 - protein, 16 aa, Homo Sapiens
NFILDKFLRHCESLRP

SEQ ID NO: 71904 - protein, 16 aa, Homo Sapiens
FILDKFLRHCESLRPG

SEQ ID NO: 71905 - protein, 16 aa, Homo Sapiens
ILDKFLRHCESLRPGA

SEQ ID NO: 71906 - protein, 16 aa, Homo Sapiens
LDKFLRHCESLRPGAA

SEQ ID NO: 71907 - protein, 16 aa, Homo Sapiens
DKFLRHCESLRPGAAP

SEQ ID NO: 71908 - protein, 16 aa, Homo Sapiens
KFLRHCESLRPGAAPR

SEQ ID NO: 71909 - protein, 16 aa, Homo Sapiens
FLRHCESLRPGAAPRD

SEQ ID NO: 71910 - protein, 16 aa, Homo Sapiens
LRHCESLRPGAAPRDM

SEQ ID NO: 71911 - protein, 16 aa, Homo Sapiens
RHCESLRPGAAPRDMM

SEQ ID NO: 71912 - protein, 16 aa, Homo Sapiens
HCESLRPGAAPRDMMD

SEQ ID NO: 71913 - protein, 16 aa, Homo Sapiens
CESLRPGAAPRDMMDA

SEQ ID NO: 71914 - protein, 16 aa, Homo Sapiens
ESLRPGAAPRDMMDAF

SEQ ID NO: 71915 - protein, 16 aa, Homo Sapiens
SLRPGAAPRDMMDAFI

SEQ ID NO: 71916 - protein, 16 aa, Homo Sapiens
LRPGAAPRDMMDAFIL

SEQ ID NO: 71917 - protein, 16 aa, Homo Sapiens
RPGAAPRDMMDAFILS

SEQ ID NO: 71918 - protein, 16 aa, Homo Sapiens
PGAAPRDMMDAFILSA

SEQ ID NO: 71919 - protein, 16 aa, Homo Sapiens
GAAPRDMMDAFILSAE

SEQ ID NO: 71920 - protein, 16 aa, Homo Sapiens
AAPRDMMDAFILSAEK

SEQ ID NO: 71921 - protein, 16 aa, Homo Sapiens
APRDMMDAFILSAEKK

SEQ ID NO: 71922 - protein, 16 aa, Homo Sapiens
PRDMMDAFILSAEKKA

SEQ ID NO: 71923 - protein, 16 aa, Homo Sapiens
RDMMDAFILSAEKKAA

SEQ ID NO: 71924 - protein, 16 aa, Homo Sapiens
DMMDAFILSAEKKAAG

SEQ ID NO: 71925 - protein, 16 aa, Homo Sapiens
MMDAFILSAEKKAAGD

SEQ ID NO: 71926 - protein, 16 aa, Homo Sapiens
MDAFILSAEKKAAGDS

SEQ ID NO: 71927 - protein, 16 aa, Homo Sapiens
DAFILSAEKKAAGDSH

SEQ ID NO: 71928 - protein, 16 aa, Homo Sapiens
AFILSAEKKAAGDSHG

SEQ ID NO: 71929 - protein, 16 aa, Homo Sapiens
FILSAEKKAAGDSHGG

SEQ ID NO: 71930 - protein, 16 aa, Homo Sapiens
ILSAEKKAAGDSHGGG

SEQ ID NO: 71931 - protein, 16 aa, Homo Sapiens
LSAEKKAAGDSHGGGA

SEQ ID NO: 71932 - protein, 16 aa, Homo Sapiens
SAEKKAAGDSHGGGAR

SEQ ID NO: 71933 - protein, 16 aa, Homo Sapiens
AEKKAAGDSHGGGARL

SEQ ID NO: 71934 - protein, 16 aa, Homo Sapiens
EKKAAGDSHGGGARLD

SEQ ID NO: 71935 - protein, 16 aa, Homo Sapiens
KKAAGDSHGGGARLDL

SEQ ID NO: 71936 - protein, 16 aa, Homo Sapiens
KAAGDSHGGGARLDLE

SEQ ID NO: 71937 - protein, 16 aa, Homo Sapiens
AAGDSHGGGARLDLEN

SEQ ID NO: 71938 - protein, 16 aa, Homo Sapiens
AGDSHGGGARLDLENV

SEQ ID NO: 71939 - protein, 16 aa, Homo Sapiens
GDSHGGGARLDLENVP

SEQ ID NO: 71940 - protein, 16 aa, Homo Sapiens
DSHGGGARLDLENVPA

SEQ ID NO: 71941 - protein, 16 aa, Homo Sapiens
SHGGGARLDLENVPAT

SEQ ID NO: 71942 - protein, 16 aa, Homo Sapiens
HGGGARLDLENVPATI

SEQ ID NO: 71943 - protein, 16 aa, Homo Sapiens
GGGARLDLENVPATIT

SEQ ID NO: 71944 - protein, 16 aa, Homo Sapiens
GGARLDLENVPATITD

SEQ ID NO: 71945 - protein, 16 aa, Homo Sapiens
GARLDLENVPATITDI

SEQ ID NO: 71946 - protein, 16 aa, Homo Sapiens
ARLDLENVPATITDIF

SEQ ID NO: 71947 - protein, 16 aa, Homo Sapiens
RLDLENVPATITDIFG

SEQ ID NO: 71948 - protein, 16 aa, Homo Sapiens
LDLENVPATITDIFGA

SEQ ID NO: 71949 - protein, 16 aa, Homo Sapiens
DLENVPATITDIFGAS

SEQ ID NO: 71950 - protein, 16 aa, Homo Sapiens
LENVPATITDIFGASQ

SEQ ID NO: 71951 - protein, 16 aa, Homo Sapiens
ENVPATITDIFGASQD

SEQ ID NO: 71952 - protein, 16 aa, Homo Sapiens
NVPATITDIFGASQDT

SEQ ID NO: 71953 - protein, 16 aa, Homo Sapiens
VPATITDIFGASQDTL

SEQ ID NO: 71954 - protein, 16 aa, Homo Sapiens
PATITDIFGASQDTLS

SEQ ID NO: 71955 - protein, 16 aa, Homo Sapiens
ATITDIFGASQDTLST

SEQ ID NO: 71956 - protein, 16 aa, Homo Sapiens
TITDIFGASQDTLSTA

SEQ ID NO: 71957 - protein, 16 aa, Homo Sapiens
ITDIFGASQDTLSTAL

SEQ ID NO: 71958 - protein, 16 aa, Homo Sapiens
TDIFGASQDTLSTALQ

SEQ ID NO: 71959 - protein, 16 aa, Homo Sapiens
DIFGASQDTLSTALQW

SEQ ID NO: 71960 - protein, 16 aa, Homo Sapiens
IFGASQDTLSTALQWL

SEQ ID NO: 71961 - protein, 16 aa, Homo Sapiens
FGASQDTLSTALQWLL

SEQ ID NO: 71962 - protein, 16 aa, Homo Sapiens
GASQDTLSTALQWLLL

SEQ ID NO: 71963 - protein, 16 aa, Homo Sapiens
ASQDTLSTALQWLLLL

SEQ ID NO: 71964 - protein, 16 aa, Homo Sapiens
SQDTLSTALQWLLLLF

SEQ ID NO: 71965 - protein, 16 aa, Homo Sapiens
QDTLSTALQWLLLLFT

SEQ ID NO: 71966 - protein, 16 aa, Homo Sapiens
DTLSTALQWLLLLFTR

SEQ ID NO: 71967 - protein, 16 aa, Homo Sapiens
TLSTALQWLLLLFTRY

SEQ ID NO: 71968 - protein, 16 aa, Homo Sapiens
LSTALQWLLLLFTRYP

SEQ ID NO: 71969 - protein, 16 aa, Homo Sapiens
STALQWLLLLFTRYPD

SEQ ID NO: 71970 - protein, 16 aa, Homo Sapiens
TALQWLLLLFTRYPDV

SEQ ID NO: 71971 - protein, 16 aa, Homo Sapiens
ALQWLLLLFTRYPDVQ

SEQ ID NO: 71972 - protein, 16 aa, Homo Sapiens
LQWLLLLFTRYPDVQT

SEQ ID NO: 71973 - protein, 16 aa, Homo Sapiens
QWLLLLFTRYPDVQTR

SEQ ID NO: 71974 - protein, 16 aa, Homo Sapiens
WLLLLFTRYPDVQTRV

SEQ ID NO: 71975 - protein, 16 aa, Homo Sapiens
LLLLFTRYPDVQTRVQ

SEQ ID NO: 71976 - protein, 16 aa, Homo Sapiens
LLLFTRYPDVQTRVQA

SEQ ID NO: 71977 - protein, 16 aa, Homo Sapiens
LLFTRYPDVQTRVQAE

SEQ ID NO: 71978 - protein, 16 aa, Homo Sapiens
LFTRYPDVQTRVQAEL

SEQ ID NO: 71979 - protein, 16 aa, Homo Sapiens
FTRYPDVQTRVQAELD

SEQ ID NO: 71980 - protein, 16 aa, Homo Sapiens
TRYPDVQTRVQAELDQ

SEQ ID NO: 71981 - protein, 16 aa, Homo Sapiens
RYPDVQTRVQAELDQV

SEQ ID NO: 71982 - protein, 16 aa, Homo Sapiens
YPDVQTRVQAELDQVV

SEQ ID NO: 71983 - protein, 16 aa, Homo Sapiens
PDVQTRVQAELDQVVG

SEQ ID NO: 71984 - protein, 16 aa, Homo Sapiens
DVQTRVQAELDQVVGR

SEQ ID NO: 71985 - protein, 16 aa, Homo Sapiens
VQTRVQAELDQVVGRD

SEQ ID NO: 71986 - protein, 16 aa, Homo Sapiens
QTRVQAELDQVVGRDR

SEQ ID NO: 71987 - protein, 16 aa, Homo Sapiens
TRVQAELDQVVGRDRL

SEQ ID NO: 71988 - protein, 16 aa, Homo Sapiens
RVQAELDQVVGRDRLP

SEQ ID NO: 71989 - protein, 16 aa, Homo Sapiens
VQAELDQVVGRDRLPC

SEQ ID NO: 71990 - protein, 16 aa, Homo Sapiens
QAELDQVVGRDRLPCM

SEQ ID NO: 71991 - protein, 16 aa, Homo Sapiens
AELDQVVGRDRLPCMG

SEQ ID NO: 71992 - protein, 16 aa, Homo Sapiens
ELDQVVGRDRLPCMGD

SEQ ID NO: 71993 - protein, 16 aa, Homo Sapiens
LDQVVGRDRLPCMGDQ

SEQ ID NO: 71994 - protein, 16 aa, Homo Sapiens
DQVVGRDRLPCMGDQP

SEQ ID NO: 71995 - protein, 16 aa, Homo Sapiens
QVVGRDRLPCMGDQPN

SEQ ID NO: 71996 - protein, 16 aa, Homo Sapiens
VVGRDRLPCMGDQPNL

SEQ ID NO: 71997 - protein, 16 aa, Homo Sapiens
VGRDRLPCMGDQPNLP

SEQ ID NO: 71998 - protein, 16 aa, Homo Sapiens
GRDRLPCMGDQPNLPY

SEQ ID NO: 71999 - protein, 16 aa, Homo Sapiens
RDRLPCMGDQPNLPYV

SEQ ID NO: 72000 - protein, 16 aa, Homo Sapiens
DRLPCMGDQPNLPYVL

SEQ ID NO: 72001 - protein, 16 aa, Homo Sapiens
RLPCMGDQPNLPYVLA

SEQ ID NO: 72002 - protein, 16 aa, Homo Sapiens
LPCMGDQPNLPYVLAF

SEQ ID NO: 72003 - protein, 16 aa, Homo Sapiens
PCMGDQPNLPYVLAFL

SEQ ID NO: 72004 - protein, 16 aa, Homo Sapiens
CMGDQPNLPYVLAFLY

SEQ ID NO: 72005 - protein, 16 aa, Homo Sapiens
MGDQPNLPYVLAFLYE

SEQ ID NO: 72006 - protein, 16 aa, Homo Sapiens
GDQPNLPYVLAFLYEA

SEQ ID NO: 72007 - protein, 16 aa, Homo Sapiens
DQPNLPYVLAFLYEAM

SEQ ID NO: 72008 - protein, 16 aa, Homo Sapiens
QPNLPYVLAFLYEAMR

SEQ ID NO: 72009 - protein, 16 aa, Homo Sapiens
PNLPYVLAFLYEAMRF

SEQ ID NO: 72010 - protein, 16 aa, Homo Sapiens
NLPYVLAFLYEAMRFS

SEQ ID NO: 72011 - protein, 16 aa, Homo Sapiens
LPYVLAFLYEAMRFSS

SEQ ID NO: 72012 - protein, 16 aa, Homo Sapiens
PYVLAFLYEAMRFSSF

SEQ ID NO: 72013 - protein, 16 aa, Homo Sapiens
YVLAFLYEAMRFSSFV

SEQ ID NO: 72014 - protein, 16 aa, Homo Sapiens
VLAFLYEAMRFSSFVP

SEQ ID NO: 72015 - protein, 16 aa, Homo Sapiens
LAFLYEAMRFSSFVPV

SEQ ID NO: 72016 - protein, 16 aa, Homo Sapiens
AFLYEAMRFSSFVPVT

SEQ ID NO: 72017 - protein, 16 aa, Homo Sapiens
FLYEAMRFSSFVPVTI

SEQ ID NO: 72018 - protein, 16 aa, Homo Sapiens
LYEAMRFSSFVPVTIP

SEQ ID NO: 72019 - protein, 16 aa, Homo Sapiens
YEAMRFSSFVPVTIPH

SEQ ID NO: 72020 - protein, 16 aa, Homo Sapiens
EAMRFSSFVPVTIPHA

SEQ ID NO: 72021 - protein, 16 aa, Homo Sapiens
AMRFSSFVPVTIPHAT

SEQ ID NO: 72022 - protein, 16 aa, Homo Sapiens
MRFSSFVPVTIPHATT

SEQ ID NO: 72023 - protein, 16 aa, Homo Sapiens
RFSSFVPVTIPHATTA

SEQ ID NO: 72024 - protein, 16 aa, Homo Sapiens
FSSFVPVTIPHATTAN

SEQ ID NO: 72025 - protein, 16 aa, Homo Sapiens
SSFVPVTIPHATTANT

SEQ ID NO: 72026 - protein, 16 aa, Homo Sapiens
SFVPVTIPHATTANTS

SEQ ID NO: 72027 - protein, 16 aa, Homo Sapiens
FVPVTIPHATTANTSV

SEQ ID NO: 72028 - protein, 16 aa, Homo Sapiens
VPVTIPHATTANTSVL

SEQ ID NO: 72029 - protein, 16 aa, Homo Sapiens
PVTIPHATTANTSVLG

SEQ ID NO: 72030 - protein, 16 aa, Homo Sapiens
VTIPHATTANTSVLGY

SEQ ID NO: 72031 - protein, 16 aa, Homo Sapiens
TIPHATTANTSVLGYH

SEQ ID NO: 72032 - protein, 16 aa, Homo Sapiens
IPHATTANTSVLGYHI

SEQ ID NO: 72033 - protein, 16 aa, Homo Sapiens
PHATTANTSVLGYHIP

SEQ ID NO: 72034 - protein, 16 aa, Homo Sapiens
HATTANTSVLGYHIPK

SEQ ID NO: 72035 - protein, 16 aa, Homo Sapiens
ATTANTSVLGYHIPKD

SEQ ID NO: 72036 - protein, 16 aa, Homo Sapiens
TTANTSVLGYHIPKDT

SEQ ID NO: 72037 - protein, 16 aa, Homo Sapiens
TANTSVLGYHIPKDTV

SEQ ID NO: 72038 - protein, 16 aa, Homo Sapiens
ANTSVLGYHIPKDTVV

SEQ ID NO: 72039 - protein, 16 aa, Homo Sapiens
NTSVLGYHIPKDTVVF

SEQ ID NO: 72040 - protein, 16 aa, Homo Sapiens
TSVLGYHIPKDTVVFV

SEQ ID NO: 72041 - protein, 16 aa, Homo Sapiens
SVLGYHIPKDTVVFVN

SEQ ID NO: 72042 - protein, 16 aa, Homo Sapiens
VLGYHIPKDTVVFVNQ

SEQ ID NO: 72043 - protein, 16 aa, Homo Sapiens
LGYHIPKDTVVFVNQW

SEQ ID NO: 72044 - protein, 16 aa, Homo Sapiens
GYHIPKDTVVFVNQWS

SEQ ID NO: 72045 - protein, 16 aa, Homo Sapiens
YHIPKDTVVFVNQWSV

SEQ ID NO: 72046 - protein, 16 aa, Homo Sapiens
HIPKDTVVFVNQWSVN

SEQ ID NO: 72047 - protein, 16 aa, Homo Sapiens
IPKDTVVFVNQWSVNH

SEQ ID NO: 72048 - protein, 16 aa, Homo Sapiens
PKDTVVFVNQWSVNHD

SEQ ID NO: 72049 - protein, 16 aa, Homo Sapiens
KDTVVFVNQWSVNHDP

SEQ ID NO: 72050 - protein, 16 aa, Homo Sapiens
DTVVFVNQWSVNHDPL

SEQ ID NO: 72051 - protein, 16 aa, Homo Sapiens
TVVFVNQWSVNHDPLK

SEQ ID NO: 72052 - protein, 16 aa, Homo Sapiens
VVFVNQWSVNHDPLKW

SEQ ID NO: 72053 - protein, 16 aa, Homo Sapiens
VFVNQWSVNHDPLKWP

SEQ ID NO: 72054 - protein, 16 aa, Homo Sapiens
FVNQWSVNHDPLKWPN

SEQ ID NO: 72055 - protein, 16 aa, Homo Sapiens
VNQWSVNHDPLKWPNP

SEQ ID NO: 72056 - protein, 16 aa, Homo Sapiens
NQWSVNHDPLKWPNPE

SEQ ID NO: 72057 - protein, 16 aa, Homo Sapiens
QWSVNHDPLKWPNPEN

SEQ ID NO: 72058 - protein, 16 aa, Homo Sapiens
WSVNHDPLKWPNPENF

SEQ ID NO: 72059 - protein, 16 aa, Homo Sapiens
SVNHDPLKWPNPENFD

SEQ ID NO: 72060 - protein, 16 aa, Homo Sapiens
VNHDPLKWPNPENFDP

SEQ ID NO: 72061 - protein, 16 aa, Homo Sapiens
NHDPLKWPNPENFDPA

SEQ ID NO: 72062 - protein, 16 aa, Homo Sapiens
HDPLKWPNPENFDPAR

SEQ ID NO: 72063 - protein, 16 aa, Homo Sapiens
DPLKWPNPENFDPARF

SEQ ID NO: 72064 - protein, 16 aa, Homo Sapiens
PLKWPNPENFDPARFL

SEQ ID NO: 72065 - protein, 16 aa, Homo Sapiens
LKWPNPENFDPARFLD

SEQ ID NO: 72066 - protein, 16 aa, Homo Sapiens
KWPNPENFDPARFLDK

SEQ ID NO: 72067 - protein, 16 aa, Homo Sapiens
WPNPENFDPARFLDKD

SEQ ID NO: 72068 - protein, 16 aa, Homo Sapiens
PNPENFDPARFLDKDG

SEQ ID NO: 72069 - protein, 16 aa, Homo Sapiens
NPENFDPARFLDKDGL

SEQ ID NO: 72070 - protein, 16 aa, Homo Sapiens
PENFDPARFLDKDGLI

SEQ ID NO: 72071 - protein, 16 aa, Homo Sapiens
ENFDPARFLDKDGLIN

SEQ ID NO: 72072 - protein, 16 aa, Homo Sapiens
NFDPARFLDKDGLINK

SEQ ID NO: 72073 - protein, 16 aa, Homo Sapiens
FDPARFLDKDGLINKD

SEQ ID NO: 72074 - protein, 16 aa, Homo Sapiens
DPARFLDKDGLINKDL

SEQ ID NO: 72075 - protein, 16 aa, Homo Sapiens
PARFLDKDGLINKDLT

SEQ ID NO: 72076 - protein, 16 aa, Homo Sapiens
ARFLDKDGLINKDLTS

SEQ ID NO: 72077 - protein, 16 aa, Homo Sapiens
RFLDKDGLINKDLTSR

SEQ ID NO: 72078 - protein, 16 aa, Homo Sapiens
FLDKDGLINKDLTSRV

SEQ ID NO: 72079 - protein, 16 aa, Homo Sapiens
LDKDGLINKDLTSRVM

SEQ ID NO: 72080 - protein, 16 aa, Homo Sapiens
DKDGLINKDLTSRVMI

SEQ ID NO: 72081 - protein, 16 aa, Homo Sapiens
KDGLINKDLTSRVMIF

SEQ ID NO: 72082 - protein, 16 aa, Homo Sapiens
DGLINKDLTSRVMIFS

SEQ ID NO: 72083 - protein, 16 aa, Homo Sapiens
GLINKDLTSRVMIFSV

SEQ ID NO: 72084 - protein, 16 aa, Homo Sapiens
LINKDLTSRVMIFSVG

SEQ ID NO: 72085 - protein, 16 aa, Homo Sapiens
INKDLTSRVMIFSVGK

SEQ ID NO: 72086 - protein, 16 aa, Homo Sapiens
NKDLTSRVMIFSVGKR

SEQ ID NO: 72087 - protein, 16 aa, Homo Sapiens
KDLTSRVMIFSVGKRR

SEQ ID NO: 72088 - protein, 16 aa, Homo Sapiens
DLTSRVMIFSVGKRRC

SEQ ID NO: 72089 - protein, 16 aa, Homo Sapiens
LTSRVMIFSVGKRRCI

SEQ ID NO: 72090 - protein, 16 aa, Homo Sapiens
TSRVMIFSVGKRRCIG

SEQ ID NO: 72091 - protein, 16 aa, Homo Sapiens
SRVMIFSVGKRRCIGE

SEQ ID NO: 72092 - protein, 16 aa, Homo Sapiens
RVMIFSVGKRRCIGEE

SEQ ID NO: 72093 - protein, 16 aa, Homo Sapiens
VMIFSVGKRRCIGEEL

SEQ ID NO: 72094 - protein, 16 aa, Homo Sapiens
MIFSVGKRRCIGEELS

SEQ ID NO: 72095 - protein, 16 aa, Homo Sapiens
IFSVGKRRCIGEELSK

SEQ ID NO: 72096 - protein, 16 aa, Homo Sapiens
FSVGKRRCIGEELSKM

SEQ ID NO: 72097 - protein, 16 aa, Homo Sapiens
SVGKRRCIGEELSKMQ

SEQ ID NO: 72098 - protein, 16 aa, Homo Sapiens
VGKRRCIGEELSKMQL

SEQ ID NO: 72099 - protein, 16 aa, Homo Sapiens
GKRRCIGEELSKMQLF

SEQ ID NO: 72100 - protein, 16 aa, Homo Sapiens
KRRCIGEELSKMQLFL

SEQ ID NO: 72101 - protein, 16 aa, Homo Sapiens
RRCIGEELSKMQLFLF

SEQ ID NO: 72102 - protein, 16 aa, Homo Sapiens
RCIGEELSKMQLFLFI

SEQ ID NO: 72103 - protein, 16 aa, Homo Sapiens
CIGEELSKMQLFLFIS

SEQ ID NO: 72104 - protein, 16 aa, Homo Sapiens
IGEELSKMQLFLFISI

SEQ ID NO: 72105 - protein, 16 aa, Homo Sapiens
GEELSKMQLFLFISIL

SEQ ID NO: 72106 - protein, 16 aa, Homo Sapiens
EELSKMQLFLFISILA

SEQ ID NO: 72107 - protein, 16 aa, Homo Sapiens
ELSKMQLFLFISILAH

SEQ ID NO: 72108 - protein, 16 aa, Homo Sapiens
LSKMQLFLFISILAHQ

SEQ ID NO: 72109 - protein, 16 aa, Homo Sapiens
SKMQLFLFISILAHQC

SEQ ID NO: 72110 - protein, 16 aa, Homo Sapiens
KMQLFLFISILAHQCD

SEQ ID NO: 72111 - protein, 16 aa, Homo Sapiens
MQLFLFISILAHQCDF

SEQ ID NO: 72112 - protein, 16 aa, Homo Sapiens
QLFLFISILAHQCDFR

SEQ ID NO: 72113 - protein, 16 aa, Homo Sapiens
LFLFISILAHQCDFRA

SEQ ID NO: 72114 - protein, 16 aa, Homo Sapiens
FLFISILAHQCDFRAN

SEQ ID NO: 72115 - protein, 16 aa, Homo Sapiens
LFISILAHQCDFRANP

SEQ ID NO: 72116 - protein, 16 aa, Homo Sapiens
FISILAHQCDFRANPN

SEQ ID NO: 72117 - protein, 16 aa, Homo Sapiens
ISILAHQCDFRANPNE

SEQ ID NO: 72118 - protein, 16 aa, Homo Sapiens
SILAHQCDFRANPNEP

SEQ ID NO: 72119 - protein, 16 aa, Homo Sapiens
ILAHQCDFRANPNEPA

SEQ ID NO: 72120 - protein, 16 aa, Homo Sapiens
LAHQCDFRANPNEPAK

SEQ ID NO: 72121 - protein, 16 aa, Homo Sapiens
AHQCDFRANPNEPAKM

SEQ ID NO: 72122 - protein, 16 aa, Homo Sapiens
HQCDFRANPNEPAKMN

SEQ ID NO: 72123 - protein, 16 aa, Homo Sapiens
QCDFRANPNEPAKMNF

SEQ ID NO: 72124 - protein, 16 aa, Homo Sapiens
CDFRANPNEPAKMNFS

SEQ ID NO: 72125 - protein, 16 aa, Homo Sapiens
DFRANPNEPAKMNFSY

SEQ ID NO: 72126 - protein, 16 aa, Homo Sapiens
FRANPNEPAKMNFSYG

SEQ ID NO: 72127 - protein, 16 aa, Homo Sapiens
RANPNEPAKMNFSYGL

SEQ ID NO: 72128 - protein, 16 aa, Homo Sapiens
ANPNEPAKMNFSYGLT

SEQ ID NO: 72129 - protein, 16 aa, Homo Sapiens
NPNEPAKMNFSYGLTI

SEQ ID NO: 72130 - protein, 16 aa, Homo Sapiens
PNEPAKMNFSYGLTIK

SEQ ID NO: 72131 - protein, 16 aa, Homo Sapiens
NEPAKMNFSYGLTIKP

SEQ ID NO: 72132 - protein, 16 aa, Homo Sapiens
EPAKMNFSYGLTIKPK

SEQ ID NO: 72133 - protein, 16 aa, Homo Sapiens
PAKMNFSYGLTIKPKS

SEQ ID NO: 72134 - protein, 16 aa, Homo Sapiens
AKMNFSYGLTIKPKSF

SEQ ID NO: 72135 - protein, 16 aa, Homo Sapiens
KMNFSYGLTIKPKSFK

SEQ ID NO: 72136 - protein, 16 aa, Homo Sapiens
MNFSYGLTIKPKSFKV

SEQ ID NO: 72137 - protein, 16 aa, Homo Sapiens
NFSYGLTIKPKSFKVN

SEQ ID NO: 72138 - protein, 16 aa, Homo Sapiens
FSYGLTIKPKSFKVNV

SEQ ID NO: 72139 - protein, 16 aa, Homo Sapiens
SYGLTIKPKSFKVNVT

SEQ ID NO: 72140 - protein, 16 aa, Homo Sapiens
YGLTIKPKSFKVNVTL

SEQ ID NO: 72141 - protein, 16 aa, Homo Sapiens
GLTIKPKSFKVNVTLR

SEQ ID NO: 72142 - protein, 16 aa, Homo Sapiens
LTIKPKSFKVNVTLRE

SEQ ID NO: 72143 - protein, 16 aa, Homo Sapiens
TIKPKSFKVNVTLRES

SEQ ID NO: 72144 - protein, 16 aa, Homo Sapiens
IKPKSFKVNVTLRESM

SEQ ID NO: 72145 - protein, 16 aa, Homo Sapiens
KPKSFKVNVTLRESME

SEQ ID NO: 72146 - protein, 16 aa, Homo Sapiens
PKSFKVNVTLRESMEL

SEQ ID NO: 72147 - protein, 16 aa, Homo Sapiens
KSFKVNVTLRESMELL

SEQ ID NO: 72148 - protein, 16 aa, Homo Sapiens
SFKVNVTLRESMELLD

SEQ ID NO: 72149 - protein, 16 aa, Homo Sapiens
FKVNVTLRESMELLDS

SEQ ID NO: 72150 - protein, 16 aa, Homo Sapiens
KVNVTLRESMELLDSA

SEQ ID NO: 72151 - protein, 16 aa, Homo Sapiens
VNVTLRESMELLDSAV

SEQ ID NO: 72152 - protein, 16 aa, Homo Sapiens
NVTLRESMELLDSAVQ

SEQ ID NO: 72153 - protein, 16 aa, Homo Sapiens
VTLRESMELLDSAVQN

SEQ ID NO: 72154 - protein, 16 aa, Homo Sapiens
TLRESMELLDSAVQNL

SEQ ID NO: 72155 - protein, 16 aa, Homo Sapiens
LRESMELLDSAVQNLQ

SEQ ID NO: 72156 - protein, 16 aa, Homo Sapiens
RESMELLDSAVQNLQA

SEQ ID NO: 72157 - protein, 16 aa, Homo Sapiens
ESMELLDSAVQNLQAK

SEQ ID NO: 72158 - protein, 16 aa, Homo Sapiens
SMELLDSAVQNLQAKE

SEQ ID NO: 72159 - protein, 16 aa, Homo Sapiens
MELLDSAVQNLQAKET

SEQ ID NO: 72160 - protein, 16 aa, Homo Sapiens
ELLDSAVQNLQAKETC

SEQ ID NO: 72161 - protein, 16 aa, Homo Sapiens
LLDSAVQNLQAKETCQ

SEQ ID NO: 72162 - protein, 16 aa, Homo Sapiens
LDSAVQNLQAKETCQH

SEQ ID NO: 72163 - protein, 16 aa, Homo Sapiens
DSAVQNLQAKETCQHG

SEQ ID NO: 72164 - protein, 16 aa, Homo Sapiens
SAVQNLQAKETCQHGR

SEQ ID NO: 72165 - protein, 16 aa, Homo Sapiens
AVQNLQAKETCQHGRY

SEQ ID NO: 72166 - protein, 16 aa, Homo Sapiens
VQNLQAKETCQHGRYV

SEQ ID NO: 72167 - protein, 16 aa, Homo Sapiens
QNLQAKETCQHGRYVP

SEQ ID NO: 72168 - protein, 16 aa, Homo Sapiens
NLQAKETCQHGRYVPP

SEQ ID NO: 72169 - protein, 16 aa, Homo Sapiens
LQAKETCQHGRYVPPS

SEQ ID NO: 72170 - protein, 16 aa, Homo Sapiens
QAKETCQHGRYVPPSS

SEQ ID NO: 72171 - protein, 16 aa, Homo Sapiens
AKETCQHGRYVPPSST

SEQ ID NO: 72172 - protein, 16 aa, Homo Sapiens
KETCQHGRYVPPSSTD

SEQ ID NO: 72173 - protein, 16 aa, Homo Sapiens
ETCQHGRYVPPSSTDR

SEQ ID NO: 72174 - protein, 16 aa, Homo Sapiens
TCQHGRYVPPSSTDRS

SEQ ID NO: 72175 - protein, 16 aa, Homo Sapiens
CQHGRYVPPSSTDRSP

SEQ ID NO: 72176 - protein, 16 aa, Homo Sapiens
QHGRYVPPSSTDRSPY

SEQ ID NO: 72177 - protein, 16 aa, Homo Sapiens
HGRYVPPSSTDRSPYE

SEQ ID NO: 72178 - protein, 16 aa, Homo Sapiens
GRYVPPSSTDRSPYEK

SEQ ID NO: 72179 - protein, 16 aa, Homo Sapiens
RYVPPSSTDRSPYEKV

SEQ ID NO: 72180 - protein, 16 aa, Homo Sapiens
YVPPSSTDRSPYEKVS

SEQ ID NO: 72181 - protein, 16 aa, Homo Sapiens
VPPSSTDRSPYEKVSA

SEQ ID NO: 72182 - protein, 16 aa, Homo Sapiens
PPSSTDRSPYEKVSAG

SEQ ID NO: 72183 - protein, 16 aa, Homo Sapiens
PSSTDRSPYEKVSAGN

SEQ ID NO: 72184 - protein, 16 aa, Homo Sapiens
SSTDRSPYEKVSAGNG

SEQ ID NO: 72185 - protein, 16 aa, Homo Sapiens
STDRSPYEKVSAGNGG

SEQ ID NO: 72186 - protein, 16 aa, Homo Sapiens
TDRSPYEKVSAGNGGS

SEQ ID NO: 72187 - protein, 16 aa, Homo Sapiens
DRSPYEKVSAGNGGSS

SEQ ID NO: 72188 - protein, 16 aa, Homo Sapiens
RSPYEKVSAGNGGSSL

SEQ ID NO: 72189 - protein, 16 aa, Homo Sapiens
SPYEKVSAGNGGSSLS

SEQ ID NO: 72190 - protein, 16 aa, Homo Sapiens
PYEKVSAGNGGSSLSY

SEQ ID NO: 72191 - protein, 16 aa, Homo Sapiens
YEKVSAGNGGSSLSYT

SEQ ID NO: 72192 - protein, 16 aa, Homo Sapiens
EKVSAGNGGSSLSYTN

SEQ ID NO: 72193 - protein, 16 aa, Homo Sapiens
KVSAGNGGSSLSYTNP

SEQ ID NO: 72194 - protein, 16 aa, Homo Sapiens
VSAGNGGSSLSYTNPA

SEQ ID NO: 72195 - protein, 16 aa, Homo Sapiens
SAGNGGSSLSYTNPAV

SEQ ID NO: 72196 - protein, 16 aa, Homo Sapiens
AGNGGSSLSYTNPAVA

SEQ ID NO: 72197 - protein, 16 aa, Homo Sapiens
GNGGSSLSYTNPAVAA

SEQ ID NO: 72198 - protein, 16 aa, Homo Sapiens
NGGSSLSYTNPAVAAA

SEQ ID NO: 72199 - protein, 16 aa, Homo Sapiens
GGSSLSYTNPAVAAAS

SEQ ID NO: 72200 - protein, 16 aa, Homo Sapiens
GSSLSYTNPAVAAASA

SEQ ID NO: 72201 - protein, 16 aa, Homo Sapiens
SSLSYTNPAVAAASAN

SEQ ID NO: 72202 - protein, 16 aa, Homo Sapiens
SLSYTNPAVAAASANL

SEQ ID NO: 72203 - protein, 491 aa, Homo Sapiens
MELSVLLFLALLTGLLLLLVQRHPNTHDRLPPGPRPLPLLGNLLQMDRRGLLKSFLRFREKYGDVFTVHLGPRPVVMLCGVEAIREALVDKAEAFSGRGKIAMVDPFFRGYGVIFANGNRWKVLRRFSVTTMRDFGMGKRSVEERIQEEAQCLIEELRKSKGALMDPTFLFQSITANIICSIVFGKRFHYQDQEFLKMLNLFYQTFSLISSVFGQLFELFSGFLKYFPGAHRQVYKNLQEINAYIGHSVEKHRETLDPSAPKDLIDTYLLHMEKEKSNAHSEFSHQNLNLNTLSLFFAGTETTSTTLRYGFLLMLKYPHVAERVYREIEQVIGPHRPPELHDRAKMPYTEAVIYEIQRFSDLLPMGVPHIVTQHTSFRGYIIPKDTEVFLILSTALHDPHYFEKPDAFNPDHFLDANGALKKTEAFIPFSLGKRICLGEGIARAELFLFFTTILQNFSMASPVAPEDIDLTPQECGVGKIPPTYQIRFLPR

SEQ ID NO: 72204 - protein, 8 aa, Homo Sapiens
MELSVLLF

SEQ ID NO: 72205 - protein, 8 aa, Homo Sapiens
ELSVLLFL

SEQ ID NO: 72206 - protein, 8 aa, Homo Sapiens
LSVLLFLA

SEQ ID NO: 72207 - protein, 8 aa, Homo Sapiens
SVLLFLAL

SEQ ID NO: 72208 - protein, 8 aa, Homo Sapiens
VLLFLALL

SEQ ID NO: 72209 - protein, 8 aa, Homo Sapiens
LLFLALLT

SEQ ID NO: 72210 - protein, 8 aa, Homo Sapiens
FLALLTGL

SEQ ID NO: 72211 - protein, 8 aa, Homo Sapiens
ALLTGLLL

SEQ ID NO: 72212 - protein, 8 aa, Homo Sapiens
LLTGLLLL

SEQ ID NO: 72213 - protein, 8 aa, Homo Sapiens
LTGLLLLL

SEQ ID NO: 72214 - protein, 8 aa, Homo Sapiens
GLLLLLVQ

SEQ ID NO: 72215 - protein, 8 aa, Homo Sapiens
LLLLLVQR

SEQ ID NO: 72216 - protein, 8 aa, Homo Sapiens
VQRHPNTH

SEQ ID NO: 72217 - protein, 8 aa, Homo Sapiens
HPNTHDRL

SEQ ID NO: 72218 - protein, 8 aa, Homo Sapiens
LPPGPRPL

SEQ ID NO: 72219 - protein, 8 aa, Homo Sapiens
GPRPLPLL

SEQ ID NO: 72220 - protein, 8 aa, Homo Sapiens
PLPLLGNL

SEQ ID NO: 72221 - protein, 8 aa, Homo Sapiens
LPLLGNLL

SEQ ID NO: 72222 - protein, 8 aa, Homo Sapiens
PLLGNLLQ

SEQ ID NO: 72223 - protein, 8 aa, Homo Sapiens
LLGNLLQM

SEQ ID NO: 72224 - protein, 8 aa, Homo Sapiens
NLLQMDRR

SEQ ID NO: 72225 - protein, 8 aa, Homo Sapiens
LQMDRRGL

SEQ ID NO: 72226 - protein, 8 aa, Homo Sapiens
QMDRRGLL

SEQ ID NO: 72227 - protein, 8 aa, Homo Sapiens
MDRRGLLK

SEQ ID NO: 72228 - protein, 8 aa, Homo Sapiens
RRGLLKSF

SEQ ID NO: 72229 - protein, 8 aa, Homo Sapiens
GLLKSFLR

SEQ ID NO: 72230 - protein, 8 aa, Homo Sapiens
LKSFLRFR

SEQ ID NO: 72231 - protein, 8 aa, Homo Sapiens
SFLRFREK

SEQ ID NO: 72232 - protein, 8 aa, Homo Sapiens
FLRFREKY

SEQ ID NO: 72233 - protein, 8 aa, Homo Sapiens
REKYGDVF

SEQ ID NO: 72234 - protein, 8 aa, Homo Sapiens
KYGDVFTV

SEQ ID NO: 72235 - protein, 8 aa, Homo Sapiens
FTVHLGPR

SEQ ID NO: 72236 - protein, 8 aa, Homo Sapiens
HLGPRPVV

SEQ ID NO: 72237 - protein, 8 aa, Homo Sapiens
GPRPVVML

SEQ ID NO: 72238 - protein, 8 aa, Homo Sapiens
PVVMLCGV

SEQ ID NO: 72239 - protein, 8 aa, Homo Sapiens
VMLCGVEA

SEQ ID NO: 72240 - protein, 8 aa, Homo Sapiens
MLCGVEAI

SEQ ID NO: 72241 - protein, 8 aa, Homo Sapiens
VEAIREAL

SEQ ID NO: 72242 - protein, 8 aa, Homo Sapiens
EAIREALV

SEQ ID NO: 72243 - protein, 8 aa, Homo Sapiens
ALVDKAEA

SEQ ID NO: 72244 - protein, 8 aa, Homo Sapiens
LVDKAEAF

SEQ ID NO: 72245 - protein, 8 aa, Homo Sapiens
KAEAFSGR

SEQ ID NO: 72246 - protein, 8 aa, Homo Sapiens
EAFSGRGK

SEQ ID NO: 72247 - protein, 8 aa, Homo Sapiens
IAMVDPFF

SEQ ID NO: 72248 - protein, 8 aa, Homo Sapiens
AMVDPFFR

SEQ ID NO: 72249 - protein, 8 aa, Homo Sapiens
VIFANGNR

SEQ ID NO: 72250 - protein, 8 aa, Homo Sapiens
FANGNRWK

SEQ ID NO: 72251 - protein, 8 aa, Homo Sapiens
GNRWKVLR

SEQ ID NO: 72252 - protein, 8 aa, Homo Sapiens
NRWKVLRR

SEQ ID NO: 72253 - protein, 8 aa, Homo Sapiens
RWKVLRRF

SEQ ID NO: 72254 - protein, 8 aa, Homo Sapiens
KVLRRFSV

SEQ ID NO: 72255 - protein, 8 aa, Homo Sapiens
VLRRFSVT

SEQ ID NO: 72256 - protein, 8 aa, Homo Sapiens
RRFSVTTM

SEQ ID NO: 72257 - protein, 8 aa, Homo Sapiens
RFSVTTMR

SEQ ID NO: 72258 - protein, 8 aa, Homo Sapiens
SVTTMRDF

SEQ ID NO: 72259 - protein, 8 aa, Homo Sapiens
TTMRDFGM

SEQ ID NO: 72260 - protein, 8 aa, Homo Sapiens
FGMGKRSV

SEQ ID NO: 72261 - protein, 8 aa, Homo Sapiens
EERIQEEA

SEQ ID NO: 72262 - protein, 8 aa, Homo Sapiens
QEEAQCLI

SEQ ID NO: 72263 - protein, 8 aa, Homo Sapiens
AQCLIEEL

SEQ ID NO: 72264 - protein, 8 aa, Homo Sapiens
CLIEELRK

SEQ ID NO: 72265 - protein, 8 aa, Homo Sapiens
ALMDPTFL

SEQ ID NO: 72266 - protein, 8 aa, Homo Sapiens
LMDPTFLF

SEQ ID NO: 72267 - protein, 8 aa, Homo Sapiens
FLFQSITA

SEQ ID NO: 72268 - protein, 8 aa, Homo Sapiens
FQSITANI

SEQ ID NO: 72269 - protein, 8 aa, Homo Sapiens
TANIICSI

SEQ ID NO: 72270 - protein, 8 aa, Homo Sapiens
NIICSIVF

SEQ ID NO: 72271 - protein, 8 aa, Homo Sapiens
CSIVFGKR

SEQ ID NO: 72272 - protein, 8 aa, Homo Sapiens
VFGKRFHY

SEQ ID NO: 72273 - protein, 8 aa, Homo Sapiens
FHYQDQEF

SEQ ID NO: 72274 - protein, 8 aa, Homo Sapiens
HYQDQEFL

SEQ ID NO: 72275 - protein, 8 aa, Homo Sapiens
YQDQEFLK

SEQ ID NO: 72276 - protein, 8 aa, Homo Sapiens
EFLKMLNL

SEQ ID NO: 72277 - protein, 8 aa, Homo Sapiens
FLKMLNLF

SEQ ID NO: 72278 - protein, 8 aa, Homo Sapiens
KMLNLFYQ

SEQ ID NO: 72279 - protein, 8 aa, Homo Sapiens
MLNLFYQT

SEQ ID NO: 72280 - protein, 8 aa, Homo Sapiens
NLFYQTFS

SEQ ID NO: 72281 - protein, 8 aa, Homo Sapiens
LFYQTFSL

SEQ ID NO: 72282 - protein, 8 aa, Homo Sapiens
FYQTFSLI

SEQ ID NO: 72283 - protein, 8 aa, Homo Sapiens
QTFSLISS

SEQ ID NO: 72284 - protein, 8 aa, Homo Sapiens
TFSLISSV

SEQ ID NO: 72285 - protein, 8 aa, Homo Sapiens
FSLISSVF

SEQ ID NO: 72286 - protein, 8 aa, Homo Sapiens
VFGQLFEL

SEQ ID NO: 72287 - protein, 8 aa, Homo Sapiens
QLFELFSG

SEQ ID NO: 72288 - protein, 8 aa, Homo Sapiens
LFELFSGF

SEQ ID NO: 72289 - protein, 8 aa, Homo Sapiens
FELFSGFL

SEQ ID NO: 72290 - protein, 8 aa, Homo Sapiens
ELFSGFLK

SEQ ID NO: 72291 - protein, 8 aa, Homo Sapiens
LFSGFLKY

SEQ ID NO: 72292 - protein, 8 aa, Homo Sapiens
FLKYFPGA

SEQ ID NO: 72293 - protein, 8 aa, Homo Sapiens
KYFPGAHR

SEQ ID NO: 72294 - protein, 8 aa, Homo Sapiens
FPGAHRQV

SEQ ID NO: 72295 - protein, 8 aa, Homo Sapiens
GAHRQVYK

SEQ ID NO: 72296 - protein, 8 aa, Homo Sapiens
VYKNLQEI

SEQ ID NO: 72297 - protein, 8 aa, Homo Sapiens
NLQEINAY

SEQ ID NO: 72298 - protein, 8 aa, Homo Sapiens
LQEINAYI

SEQ ID NO: 72299 - protein, 8 aa, Homo Sapiens
NAYIGHSV

SEQ ID NO: 72300 - protein, 8 aa, Homo Sapiens
YIGHSVEK

SEQ ID NO: 72301 - protein, 8 aa, Homo Sapiens
TLDPSAPK

SEQ ID NO: 72302 - protein, 8 aa, Homo Sapiens
DLIDTYLL

SEQ ID NO: 72303 - protein, 8 aa, Homo Sapiens
DTYLLHME

SEQ ID NO: 72304 - protein, 8 aa, Homo Sapiens
TYLLHMEK

SEQ ID NO: 72305 - protein, 8 aa, Homo Sapiens
YLLHMEKE

SEQ ID NO: 72306 - protein, 8 aa, Homo Sapiens
LLHMEKEK

SEQ ID NO: 72307 - protein, 8 aa, Homo Sapiens
KSNAHSEF

SEQ ID NO: 72308 - protein, 8 aa, Homo Sapiens
SEFSHQNL

SEQ ID NO: 72309 - protein, 8 aa, Homo Sapiens
NTLSLFFA

SEQ ID NO: 72310 - protein, 8 aa, Homo Sapiens
TETTSTTL

SEQ ID NO: 72311 - protein, 8 aa, Homo Sapiens
ETTSTTLR

SEQ ID NO: 72312 - protein, 8 aa, Homo Sapiens
TTSTTLRY

SEQ ID NO: 72313 - protein, 8 aa, Homo Sapiens
STTLRYGF

SEQ ID NO: 72314 - protein, 8 aa, Homo Sapiens
TTLRYGFL

SEQ ID NO: 72315 - protein, 8 aa, Homo Sapiens
TLRYGFLL

SEQ ID NO: 72316 - protein, 8 aa, Homo Sapiens
LRYGFLLM

SEQ ID NO: 72317 - protein, 8 aa, Homo Sapiens
RYGFLLML

SEQ ID NO: 72318 - protein, 8 aa, Homo Sapiens
YGFLLMLK

SEQ ID NO: 72319 - protein, 8 aa, Homo Sapiens
GFLLMLKY

SEQ ID NO: 72320 - protein, 8 aa, Homo Sapiens
FLLMLKYP

SEQ ID NO: 72321 - protein, 8 aa, Homo Sapiens
LMLKYPHV

SEQ ID NO: 72322 - protein, 8 aa, Homo Sapiens
MLKYPHVA

SEQ ID NO: 72323 - protein, 8 aa, Homo Sapiens
KYPHVAER

SEQ ID NO: 72324 - protein, 8 aa, Homo Sapiens
YPHVAERV

SEQ ID NO: 72325 - protein, 8 aa, Homo Sapiens
HVAERVYR

SEQ ID NO: 72326 - protein, 8 aa, Homo Sapiens
AERVYREI

SEQ ID NO: 72327 - protein, 8 aa, Homo Sapiens
VYREIEQV

SEQ ID NO: 72328 - protein, 8 aa, Homo Sapiens
EQVIGPHR

SEQ ID NO: 72329 - protein, 8 aa, Homo Sapiens
GPHRPPEL

SEQ ID NO: 72330 - protein, 8 aa, Homo Sapiens
ELHDRAKM

SEQ ID NO: 72331 - protein, 8 aa, Homo Sapiens
KMPYTEAV

SEQ ID NO: 72332 - protein, 8 aa, Homo Sapiens
MPYTEAVI

SEQ ID NO: 72333 - protein, 8 aa, Homo Sapiens
PYTEAVIY

SEQ ID NO: 72334 - protein, 8 aa, Homo Sapiens
TEAVIYEI

SEQ ID NO: 72335 - protein, 8 aa, Homo Sapiens
AVIYEIQR

SEQ ID NO: 72336 - protein, 8 aa, Homo Sapiens
VIYEIQRF

SEQ ID NO: 72337 - protein, 8 aa, Homo Sapiens
EIQRFSDL

SEQ ID NO: 72338 - protein, 8 aa, Homo Sapiens
IQRFSDLL

SEQ ID NO: 72339 - protein, 8 aa, Homo Sapiens
LPMGVPHI

SEQ ID NO: 72340 - protein, 8 aa, Homo Sapiens
PMGVPHIV

SEQ ID NO: 72341 - protein, 8 aa, Homo Sapiens
IVTQHTSF

SEQ ID NO: 72342 - protein, 8 aa, Homo Sapiens
VTQHTSFR

SEQ ID NO: 72343 - protein, 8 aa, Homo Sapiens
HTSFRGYI

SEQ ID NO: 72344 - protein, 8 aa, Homo Sapiens
TSFRGYII

SEQ ID NO: 72345 - protein, 8 aa, Homo Sapiens
FRGYIIPK

SEQ ID NO: 72346 - protein, 8 aa, Homo Sapiens
IIPKDTEV

SEQ ID NO: 72347 - protein, 8 aa, Homo Sapiens
IPKDTEVF

SEQ ID NO: 72348 - protein, 8 aa, Homo Sapiens
DTEVFLIL

SEQ ID NO: 72349 - protein, 8 aa, Homo Sapiens
EVFLILST

SEQ ID NO: 72350 - protein, 8 aa, Homo Sapiens
FLILSTAL

SEQ ID NO: 72351 - protein, 8 aa, Homo Sapiens
TALHDPHY

SEQ ID NO: 72352 - protein, 8 aa, Homo Sapiens
ALHDPHYF

SEQ ID NO: 72353 - protein, 8 aa, Homo Sapiens
YFEKPDAF

SEQ ID NO: 72354 - protein, 8 aa, Homo Sapiens
DAFNPDHF

SEQ ID NO: 72355 - protein, 8 aa, Homo Sapiens
AFNPDHFL

SEQ ID NO: 72356 - protein, 8 aa, Homo Sapiens
FLDANGAL

SEQ ID NO: 72357 - protein, 8 aa, Homo Sapiens
DANGALKK

SEQ ID NO: 72358 - protein, 8 aa, Homo Sapiens
ALKKTEAF

SEQ ID NO: 72359 - protein, 8 aa, Homo Sapiens
KTEAFIPF

SEQ ID NO: 72360 - protein, 8 aa, Homo Sapiens
EAFIPFSL

SEQ ID NO: 72361 - protein, 8 aa, Homo Sapiens
FIPFSLGK

SEQ ID NO: 72362 - protein, 8 aa, Homo Sapiens
IPFSLGKR

SEQ ID NO: 72363 - protein, 8 aa, Homo Sapiens
SLGKRICL

SEQ ID NO: 72364 - protein, 8 aa, Homo Sapiens
EGIARAEL

SEQ ID NO: 72365 - protein, 8 aa, Homo Sapiens
AELFLFFT

SEQ ID NO: 72366 - protein, 8 aa, Homo Sapiens
ELFLFFTT

SEQ ID NO: 72367 - protein, 8 aa, Homo Sapiens
LFLFFTTI

SEQ ID NO: 72368 - protein, 8 aa, Homo Sapiens
FLFFTTIL

SEQ ID NO: 72369 - protein, 8 aa, Homo Sapiens
FTTILQNF

SEQ ID NO: 72370 - protein, 8 aa, Homo Sapiens
TTILQNFS

SEQ ID NO: 72371 - protein, 8 aa, Homo Sapiens
TILQNFSM

SEQ ID NO: 72372 - protein, 8 aa, Homo Sapiens
ILQNFSMA

SEQ ID NO: 72373 - protein, 8 aa, Homo Sapiens
FSMASPVA

SEQ ID NO: 72374 - protein, 8 aa, Homo Sapiens
LTPQECGV

SEQ ID NO: 72375 - protein, 8 aa, Homo Sapiens
KIPPTYQI

SEQ ID NO: 72376 - protein, 8 aa, Homo Sapiens
YQIRFLPR

SEQ ID NO: 72377 - protein, 9 aa, Homo Sapiens
MELSVLLFL

SEQ ID NO: 72378 - protein, 9 aa, Homo Sapiens
ELSVLLFLA

SEQ ID NO: 72379 - protein, 9 aa, Homo Sapiens
LSVLLFLAL

SEQ ID NO: 72380 - protein, 9 aa, Homo Sapiens
SVLLFLALL

SEQ ID NO: 72381 - protein, 9 aa, Homo Sapiens
VLLFLALLT

SEQ ID NO: 72382 - protein, 9 aa, Homo Sapiens
LFLALLTGL

SEQ ID NO: 72383 - protein, 9 aa, Homo Sapiens
FLALLTGLL

SEQ ID NO: 72384 - protein, 9 aa, Homo Sapiens
ALLTGLLLL

SEQ ID NO: 72385 - protein, 9 aa, Homo Sapiens
LLTGLLLLL

SEQ ID NO: 72386 - protein, 9 aa, Homo Sapiens
LTGLLLLLV

SEQ ID NO: 72387 - protein, 9 aa, Homo Sapiens
GLLLLLVQR

SEQ ID NO: 72388 - protein, 9 aa, Homo Sapiens
RLPPGPRPL

SEQ ID NO: 72389 - protein, 9 aa, Homo Sapiens
LPPGPRPLP

SEQ ID NO: 72390 - protein, 9 aa, Homo Sapiens
PPGPRPLPL

SEQ ID NO: 72391 - protein, 9 aa, Homo Sapiens
RPLPLLGNL

SEQ ID NO: 72392 - protein, 9 aa, Homo Sapiens
PLPLLGNLL

SEQ ID NO: 72393 - protein, 9 aa, Homo Sapiens
PLLGNLLQM

SEQ ID NO: 72394 - protein, 9 aa, Homo Sapiens
LLQMDRRGL

SEQ ID NO: 72395 - protein, 9 aa, Homo Sapiens
LQMDRRGLL

SEQ ID NO: 72396 - protein, 9 aa, Homo Sapiens
QMDRRGLLK

SEQ ID NO: 72397 - protein, 9 aa, Homo Sapiens
RRGLLKSFL

SEQ ID NO: 72398 - protein, 9 aa, Homo Sapiens
RGLLKSFLR

SEQ ID NO: 72399 - protein, 9 aa, Homo Sapiens
GLLKSFLRF

SEQ ID NO: 72400 - protein, 9 aa, Homo Sapiens
LLKSFLRFR

SEQ ID NO: 72401 - protein, 9 aa, Homo Sapiens
KSFLRFREK

SEQ ID NO: 72402 - protein, 9 aa, Homo Sapiens
FREKYGDVF

SEQ ID NO: 72403 - protein, 9 aa, Homo Sapiens
EKYGDVFTV

SEQ ID NO: 72404 - protein, 9 aa, Homo Sapiens
VFTVHLGPR

SEQ ID NO: 72405 - protein, 9 aa, Homo Sapiens
TVHLGPRPV

SEQ ID NO: 72406 - protein, 9 aa, Homo Sapiens
HLGPRPVVM

SEQ ID NO: 72407 - protein, 9 aa, Homo Sapiens
RPVVMLCGV

SEQ ID NO: 72408 - protein, 9 aa, Homo Sapiens
VMLCGVEAI

SEQ ID NO: 72409 - protein, 9 aa, Homo Sapiens
MLCGVEAIR

SEQ ID NO: 72410 - protein, 9 aa, Homo Sapiens
AIREALVDK

SEQ ID NO: 72411 - protein, 9 aa, Homo Sapiens
EALVDKAEA

SEQ ID NO: 72412 - protein, 9 aa, Homo Sapiens
ALVDKAEAF

SEQ ID NO: 72413 - protein, 9 aa, Homo Sapiens
DKAEAFSGR

SEQ ID NO: 72414 - protein, 9 aa, Homo Sapiens
EAFSGRGKI

SEQ ID NO: 72415 - protein, 9 aa, Homo Sapiens
KIAMVDPFF

SEQ ID NO: 72416 - protein, 9 aa, Homo Sapiens
IAMVDPFFR

SEQ ID NO: 72417 - protein, 9 aa, Homo Sapiens
AMVDPFFRG

SEQ ID NO: 72418 - protein, 9 aa, Homo Sapiens
MVDPFFRGY

SEQ ID NO: 72419 - protein, 9 aa, Homo Sapiens
DPFFRGYGV

SEQ ID NO: 72420 - protein, 9 aa, Homo Sapiens
FFRGYGVIF

SEQ ID NO: 72421 - protein, 9 aa, Homo Sapiens
GVIFANGNR

SEQ ID NO: 72422 - protein, 9 aa, Homo Sapiens
VIFANGNRW

SEQ ID NO: 72423 - protein, 9 aa, Homo Sapiens
IFANGNRWK

SEQ ID NO: 72424 - protein, 9 aa, Homo Sapiens
FANGNRWKV

SEQ ID NO: 72425 - protein, 9 aa, Homo Sapiens
NGNRWKVLR

SEQ ID NO: 72426 - protein, 9 aa, Homo Sapiens
NRWKVLRRF

SEQ ID NO: 72427 - protein, 9 aa, Homo Sapiens
RWKVLRRFS

SEQ ID NO: 72428 - protein, 9 aa, Homo Sapiens
WKVLRRFSV

SEQ ID NO: 72429 - protein, 9 aa, Homo Sapiens
VLRRFSVTT

SEQ ID NO: 72430 - protein, 9 aa, Homo Sapiens
RRFSVTTMR

SEQ ID NO: 72431 - protein, 9 aa, Homo Sapiens
FSVTTMRDF

SEQ ID NO: 72432 - protein, 9 aa, Homo Sapiens
TMRDFGMGK

SEQ ID NO: 72433 - protein, 9 aa, Homo Sapiens
MGKRSVEER

SEQ ID NO: 72434 - protein, 9 aa, Homo Sapiens
RIQEEAQCL

SEQ ID NO: 72435 - protein, 9 aa, Homo Sapiens
IQEEAQCLI

SEQ ID NO: 72436 - protein, 9 aa, Homo Sapiens
EAQCLIEEL

SEQ ID NO: 72437 - protein, 9 aa, Homo Sapiens
AQCLIEELR

SEQ ID NO: 72438 - protein, 9 aa, Homo Sapiens
ELRKSKGAL

SEQ ID NO: 72439 - protein, 9 aa, Homo Sapiens
KGALMDPTF

SEQ ID NO: 72440 - protein, 9 aa, Homo Sapiens
ALMDPTFLF

SEQ ID NO: 72441 - protein, 9 aa, Homo Sapiens
LMDPTFLFQ

SEQ ID NO: 72442 - protein, 9 aa, Homo Sapiens
DPTFLFQSI

SEQ ID NO: 72443 - protein, 9 aa, Homo Sapiens
FLFQSITAN

SEQ ID NO: 72444 - protein, 9 aa, Homo Sapiens
LFQSITANI

SEQ ID NO: 72445 - protein, 9 aa, Homo Sapiens
FQSITANII

SEQ ID NO: 72446 - protein, 9 aa, Homo Sapiens
ITANIICSI

SEQ ID NO: 72447 - protein, 9 aa, Homo Sapiens
TANIICSIV

SEQ ID NO: 72448 - protein, 9 aa, Homo Sapiens
IICSIVFGK

SEQ ID NO: 72449 - protein, 9 aa, Homo Sapiens
CSIVFGKRF

SEQ ID NO: 72450 - protein, 9 aa, Homo Sapiens
IVFGKRFHY

SEQ ID NO: 72451 - protein, 9 aa, Homo Sapiens
RFHYQDQEF

SEQ ID NO: 72452 - protein, 9 aa, Homo Sapiens
FHYQDQEFL

SEQ ID NO: 72453 - protein, 9 aa, Homo Sapiens
HYQDQEFLK

SEQ ID NO: 72454 - protein, 9 aa, Homo Sapiens
YQDQEFLKM

SEQ ID NO: 72455 - protein, 9 aa, Homo Sapiens
QEFLKMLNL

SEQ ID NO: 72456 - protein, 9 aa, Homo Sapiens
EFLKMLNLF

SEQ ID NO: 72457 - protein, 9 aa, Homo Sapiens
FLKMLNLFY

SEQ ID NO: 72458 - protein, 9 aa, Homo Sapiens
KMLNLFYQT

SEQ ID NO: 72459 - protein, 9 aa, Homo Sapiens
MLNLFYQTF

SEQ ID NO: 72460 - protein, 9 aa, Homo Sapiens
NLFYQTFSL

SEQ ID NO: 72461 - protein, 9 aa, Homo Sapiens
LFYQTFSLI

SEQ ID NO: 72462 - protein, 9 aa, Homo Sapiens
YQTFSLISS

SEQ ID NO: 72463 - protein, 9 aa, Homo Sapiens
QTFSLISSV

SEQ ID NO: 72464 - protein, 9 aa, Homo Sapiens
TFSLISSVF

SEQ ID NO: 72465 - protein, 9 aa, Homo Sapiens
SLISSVFGQ

SEQ ID NO: 72466 - protein, 9 aa, Homo Sapiens
LISSVFGQL

SEQ ID NO: 72467 - protein, 9 aa, Homo Sapiens
ISSVFGQLF

SEQ ID NO: 72468 - protein, 9 aa, Homo Sapiens
SVFGQLFEL

SEQ ID NO: 72469 - protein, 9 aa, Homo Sapiens
VFGQLFELF

SEQ ID NO: 72470 - protein, 9 aa, Homo Sapiens
QLFELFSGF

SEQ ID NO: 72471 - protein, 9 aa, Homo Sapiens
ELFSGFLKY

SEQ ID NO: 72472 - protein, 9 aa, Homo Sapiens
LFSGFLKYF

SEQ ID NO: 72473 - protein, 9 aa, Homo Sapiens
KYFPGAHRQ

SEQ ID NO: 72474 - protein, 9 aa, Homo Sapiens
YFPGAHRQV

SEQ ID NO: 72475 - protein, 9 aa, Homo Sapiens
FPGAHRQVY

SEQ ID NO: 72476 - protein, 9 aa, Homo Sapiens
QVYKNLQEI

SEQ ID NO: 72477 - protein, 9 aa, Homo Sapiens
NLQEINAYI

SEQ ID NO: 72478 - protein, 9 aa, Homo Sapiens
QEINAYIGH

SEQ ID NO: 72479 - protein, 9 aa, Homo Sapiens
INAYIGHSV

SEQ ID NO: 72480 - protein, 9 aa, Homo Sapiens
AYIGHSVEK

SEQ ID NO: 72481 - protein, 9 aa, Homo Sapiens
SVEKHRETL

SEQ ID NO: 72482 - protein, 9 aa, Homo Sapiens
ETLDPSAPK

SEQ ID NO: 72483 - protein, 9 aa, Homo Sapiens
APKDLIDTY

SEQ ID NO: 72484 - protein, 9 aa, Homo Sapiens
DLIDTYLLH

SEQ ID NO: 72485 - protein, 9 aa, Homo Sapiens
LIDTYLLHM

SEQ ID NO: 72486 - protein, 9 aa, Homo Sapiens
DTYLLHMEK

SEQ ID NO: 72487 - protein, 9 aa, Homo Sapiens
YLLHMEKEK

SEQ ID NO: 72488 - protein, 9 aa, Homo Sapiens
HSEFSHQNL

SEQ ID NO: 72489 - protein, 9 aa, Homo Sapiens
EFSHQNLNL

SEQ ID NO: 72490 - protein, 9 aa, Homo Sapiens
HQNLNLNTL

SEQ ID NO: 72491 - protein, 9 aa, Homo Sapiens
NLNLNTLSL

SEQ ID NO: 72492 - protein, 9 aa, Homo Sapiens
NLNTLSLFF

SEQ ID NO: 72493 - protein, 9 aa, Homo Sapiens
TLSLFFAGT

SEQ ID NO: 72494 - protein, 9 aa, Homo Sapiens
SLFFAGTET

SEQ ID NO: 72495 - protein, 9 aa, Homo Sapiens
TETTSTTLR

SEQ ID NO: 72496 - protein, 9 aa, Homo Sapiens
ETTSTTLRY

SEQ ID NO: 72497 - protein, 9 aa, Homo Sapiens
STTLRYGFL

SEQ ID NO: 72498 - protein, 9 aa, Homo Sapiens
TTLRYGFLL

SEQ ID NO: 72499 - protein, 9 aa, Homo Sapiens
TLRYGFLLM

SEQ ID NO: 72500 - protein, 9 aa, Homo Sapiens
LRYGFLLML

SEQ ID NO: 72501 - protein, 9 aa, Homo Sapiens
RYGFLLMLK

SEQ ID NO: 72502 - protein, 9 aa, Homo Sapiens
YGFLLMLKY

SEQ ID NO: 72503 - protein, 9 aa, Homo Sapiens
FLLMLKYPH

SEQ ID NO: 72504 - protein, 9 aa, Homo Sapiens
LLMLKYPHV

SEQ ID NO: 72505 - protein, 9 aa, Homo Sapiens
LMLKYPHVA

SEQ ID NO: 72506 - protein, 9 aa, Homo Sapiens
KYPHVAERV

SEQ ID NO: 72507 - protein, 9 aa, Homo Sapiens
YPHVAERVY

SEQ ID NO: 72508 - protein, 9 aa, Homo Sapiens
RVYREIEQV

SEQ ID NO: 72509 - protein, 9 aa, Homo Sapiens
VYREIEQVI

SEQ ID NO: 72510 - protein, 9 aa, Homo Sapiens
AKMPYTEAV

SEQ ID NO: 72511 - protein, 9 aa, Homo Sapiens
KMPYTEAVI

SEQ ID NO: 72512 - protein, 9 aa, Homo Sapiens
MPYTEAVIY

SEQ ID NO: 72513 - protein, 9 aa, Homo Sapiens
YTEAVIYEI

SEQ ID NO: 72514 - protein, 9 aa, Homo Sapiens
EAVIYEIQR

SEQ ID NO: 72515 - protein, 9 aa, Homo Sapiens
AVIYEIQRF

SEQ ID NO: 72516 - protein, 9 aa, Homo Sapiens
YEIQRFSDL

SEQ ID NO: 72517 - protein, 9 aa, Homo Sapiens
EIQRFSDLL

SEQ ID NO: 72518 - protein, 9 aa, Homo Sapiens
QRFSDLLPM

SEQ ID NO: 72519 - protein, 9 aa, Homo Sapiens
FSDLLPMGV

SEQ ID NO: 72520 - protein, 9 aa, Homo Sapiens
LLPMGVPHI

SEQ ID NO: 72521 - protein, 9 aa, Homo Sapiens
LPMGVPHIV

SEQ ID NO: 72522 - protein, 9 aa, Homo Sapiens
HIVTQHTSF

SEQ ID NO: 72523 - protein, 9 aa, Homo Sapiens
IVTQHTSFR

SEQ ID NO: 72524 - protein, 9 aa, Homo Sapiens
TQHTSFRGY

SEQ ID NO: 72525 - protein, 9 aa, Homo Sapiens
HTSFRGYII

SEQ ID NO: 72526 - protein, 9 aa, Homo Sapiens
SFRGYIIPK

SEQ ID NO: 72527 - protein, 9 aa, Homo Sapiens
YIIPKDTEV

SEQ ID NO: 72528 - protein, 9 aa, Homo Sapiens
IIPKDTEVF

SEQ ID NO: 72529 - protein, 9 aa, Homo Sapiens
EVFLILSTA

SEQ ID NO: 72530 - protein, 9 aa, Homo Sapiens
VFLILSTAL

SEQ ID NO: 72531 - protein, 9 aa, Homo Sapiens
STALHDPHY

SEQ ID NO: 72532 - protein, 9 aa, Homo Sapiens
TALHDPHYF

SEQ ID NO: 72533 - protein, 9 aa, Homo Sapiens
ALHDPHYFE

SEQ ID NO: 72534 - protein, 9 aa, Homo Sapiens
HYFEKPDAF

SEQ ID NO: 72535 - protein, 9 aa, Homo Sapiens
DAFNPDHFL

SEQ ID NO: 72536 - protein, 9 aa, Homo Sapiens
HFLDANGAL

SEQ ID NO: 72537 - protein, 9 aa, Homo Sapiens
FLDANGALK

SEQ ID NO: 72538 - protein, 9 aa, Homo Sapiens
GALKKTEAF

SEQ ID NO: 72539 - protein, 9 aa, Homo Sapiens
ALKKTEAFI

SEQ ID NO: 72540 - protein, 9 aa, Homo Sapiens
TEAFIPFSL

SEQ ID NO: 72541 - protein, 9 aa, Homo Sapiens
AFIPFSLGK

SEQ ID NO: 72542 - protein, 9 aa, Homo Sapiens
FIPFSLGKR

SEQ ID NO: 72543 - protein, 9 aa, Homo Sapiens
IPFSLGKRI

SEQ ID NO: 72544 - protein, 9 aa, Homo Sapiens
CLGEGIARA

SEQ ID NO: 72545 - protein, 9 aa, Homo Sapiens
GEGIARAEL

SEQ ID NO: 72546 - protein, 9 aa, Homo Sapiens
EGIARAELF

SEQ ID NO: 72547 - protein, 9 aa, Homo Sapiens
GIARAELFL

SEQ ID NO: 72548 - protein, 9 aa, Homo Sapiens
IARAELFLF

SEQ ID NO: 72549 - protein, 9 aa, Homo Sapiens
ARAELFLFF

SEQ ID NO: 72550 - protein, 9 aa, Homo Sapiens
AELFLFFTT

SEQ ID NO: 72551 - protein, 9 aa, Homo Sapiens
ELFLFFTTI

SEQ ID NO: 72552 - protein, 9 aa, Homo Sapiens
LFLFFTTIL

SEQ ID NO: 72553 - protein, 9 aa, Homo Sapiens
FLFFTTILQ

SEQ ID NO: 72554 - protein, 9 aa, Homo Sapiens
FFTTILQNF

SEQ ID NO: 72555 - protein, 9 aa, Homo Sapiens
TTILQNFSM

SEQ ID NO: 72556 - protein, 9 aa, Homo Sapiens
TILQNFSMA

SEQ ID NO: 72557 - protein, 9 aa, Homo Sapiens
ILQNFSMAS

SEQ ID NO: 72558 - protein, 9 aa, Homo Sapiens
QNFSMASPV

SEQ ID NO: 72559 - protein, 9 aa, Homo Sapiens
DLTPQECGV

SEQ ID NO: 72560 - protein, 9 aa, Homo Sapiens
KIPPTYQIR

SEQ ID NO: 72561 - protein, 9 aa, Homo Sapiens
IPPTYQIRF

SEQ ID NO: 72562 - protein, 9 aa, Homo Sapiens
TYQIRFLPR

SEQ ID NO: 72563 - protein, 10 aa, Homo Sapiens
MELSVLLFLA

SEQ ID NO: 72564 - protein, 10 aa, Homo Sapiens
ELSVLLFLAL

SEQ ID NO: 72565 - protein, 10 aa, Homo Sapiens
LSVLLFLALL

SEQ ID NO: 72566 - protein, 10 aa, Homo Sapiens
LLFLALLTGL

SEQ ID NO: 72567 - protein, 10 aa, Homo Sapiens
FLALLTGLLL

SEQ ID NO: 72568 - protein, 10 aa, Homo Sapiens
LALLTGLLLL

SEQ ID NO: 72569 - protein, 10 aa, Homo Sapiens
ALLTGLLLLL

SEQ ID NO: 72570 - protein, 10 aa, Homo Sapiens
LLTGLLLLLV

SEQ ID NO: 72571 - protein, 10 aa, Homo Sapiens
VQRHPNTHDR

SEQ ID NO: 72572 - protein, 10 aa, Homo Sapiens
RLPPGPRPLP

SEQ ID NO: 72573 - protein, 10 aa, Homo Sapiens
LPPGPRPLPL

SEQ ID NO: 72574 - protein, 10 aa, Homo Sapiens
RPLPLLGNLL

SEQ ID NO: 72575 - protein, 10 aa, Homo Sapiens
LPLLGNLLQM

SEQ ID NO: 72576 - protein, 10 aa, Homo Sapiens
LLGNLLQMDR

SEQ ID NO: 72577 - protein, 10 aa, Homo Sapiens
NLLQMDRRGL

SEQ ID NO: 72578 - protein, 10 aa, Homo Sapiens
LLQMDRRGLL

SEQ ID NO: 72579 - protein, 10 aa, Homo Sapiens
LQMDRRGLLK

SEQ ID NO: 72580 - protein, 10 aa, Homo Sapiens
RRGLLKSFLR

SEQ ID NO: 72581 - protein, 10 aa, Homo Sapiens
GLLKSFLRFR

SEQ ID NO: 72582 - protein, 10 aa, Homo Sapiens
LKSFLRFREK

SEQ ID NO: 72583 - protein, 10 aa, Homo Sapiens
KSFLRFREKY

SEQ ID NO: 72584 - protein, 10 aa, Homo Sapiens
RFREKYGDVF

SEQ ID NO: 72585 - protein, 10 aa, Homo Sapiens
REKYGDVFTV

SEQ ID NO: 72586 - protein, 10 aa, Homo Sapiens
KYGDVFTVHL

SEQ ID NO: 72587 - protein, 10 aa, Homo Sapiens
DVFTVHLGPR

SEQ ID NO: 72588 - protein, 10 aa, Homo Sapiens
FTVHLGPRPV

SEQ ID NO: 72589 - protein, 10 aa, Homo Sapiens
TVHLGPRPVV

SEQ ID NO: 72590 - protein, 10 aa, Homo Sapiens
HLGPRPVVML

SEQ ID NO: 72591 - protein, 10 aa, Homo Sapiens
VVMLCGVEAI

SEQ ID NO: 72592 - protein, 10 aa, Homo Sapiens
VMLCGVEAIR

SEQ ID NO: 72593 - protein, 10 aa, Homo Sapiens
CGVEAIREAL

SEQ ID NO: 72594 - protein, 10 aa, Homo Sapiens
GVEAIREALV

SEQ ID NO: 72595 - protein, 10 aa, Homo Sapiens
EAIREALVDK

SEQ ID NO: 72596 - protein, 10 aa, Homo Sapiens
AIREALVDKA

SEQ ID NO: 72597 - protein, 10 aa, Homo Sapiens
EALVDKAEAF

SEQ ID NO: 72598 - protein, 10 aa, Homo Sapiens
ALVDKAEAFS

SEQ ID NO: 72599 - protein, 10 aa, Homo Sapiens
KAEAFSGRGK

SEQ ID NO: 72600 - protein, 10 aa, Homo Sapiens
AEAFSGRGKI

SEQ ID NO: 72601 - protein, 10 aa, Homo Sapiens
FSGRGKIAMV

SEQ ID NO: 72602 - protein, 10 aa, Homo Sapiens
KIAMVDPFFR

SEQ ID NO: 72603 - protein, 10 aa, Homo Sapiens
AMVDPFFRGY

SEQ ID NO: 72604 - protein, 10 aa, Homo Sapiens
DPFFRGYGVI

SEQ ID NO: 72605 - protein, 10 aa, Homo Sapiens
PFFRGYGVIF

SEQ ID NO: 72606 - protein, 10 aa, Homo Sapiens
YGVIFANGNR

SEQ ID NO: 72607 - protein, 10 aa, Homo Sapiens
GVIFANGNRW

SEQ ID NO: 72608 - protein, 10 aa, Homo Sapiens
VIFANGNRWK

SEQ ID NO: 72609 - protein, 10 aa, Homo Sapiens
IFANGNRWKV

SEQ ID NO: 72610 - protein, 10 aa, Homo Sapiens
FANGNRWKVL

SEQ ID NO: 72611 - protein, 10 aa, Homo Sapiens
ANGNRWKVLR

SEQ ID NO: 72612 - protein, 10 aa, Homo Sapiens
RWKVLRRFSV

SEQ ID NO: 72613 - protein, 10 aa, Homo Sapiens
KVLRRFSVTT

SEQ ID NO: 72614 - protein, 10 aa, Homo Sapiens
VLRRFSVTTM

SEQ ID NO: 72615 - protein, 10 aa, Homo Sapiens
LRRFSVTTMR

SEQ ID NO: 72616 - protein, 10 aa, Homo Sapiens
RRFSVTTMRD

SEQ ID NO: 72617 - protein, 10 aa, Homo Sapiens
RFSVTTMRDF

SEQ ID NO: 72618 - protein, 10 aa, Homo Sapiens
TTMRDFGMGK

SEQ ID NO: 72619 - protein, 10 aa, Homo Sapiens
TMRDFGMGKR

SEQ ID NO: 72620 - protein, 10 aa, Homo Sapiens
GMGKRSVEER

SEQ ID NO: 72621 - protein, 10 aa, Homo Sapiens
RIQEEAQCLI

SEQ ID NO: 72622 - protein, 10 aa, Homo Sapiens
EEAQCLIEEL

SEQ ID NO: 72623 - protein, 10 aa, Homo Sapiens
EAQCLIEELR

SEQ ID NO: 72624 - protein, 10 aa, Homo Sapiens
AQCLIEELRK

SEQ ID NO: 72625 - protein, 10 aa, Homo Sapiens
EELRKSKGAL

SEQ ID NO: 72626 - protein, 10 aa, Homo Sapiens
ELRKSKGALM

SEQ ID NO: 72627 - protein, 10 aa, Homo Sapiens
GALMDPTFLF

SEQ ID NO: 72628 - protein, 10 aa, Homo Sapiens
ALMDPTFLFQ

SEQ ID NO: 72629 - protein, 10 aa, Homo Sapiens
LMDPTFLFQS

SEQ ID NO: 72630 - protein, 10 aa, Homo Sapiens
MDPTFLFQSI

SEQ ID NO: 72631 - protein, 10 aa, Homo Sapiens
FLFQSITANI

SEQ ID NO: 72632 - protein, 10 aa, Homo Sapiens
LFQSITANII

SEQ ID NO: 72633 - protein, 10 aa, Homo Sapiens
FQSITANIIC

SEQ ID NO: 72634 - protein, 10 aa, Homo Sapiens
SITANIICSI

SEQ ID NO: 72635 - protein, 10 aa, Homo Sapiens
ITANIICSIV

SEQ ID NO: 72636 - protein, 10 aa, Homo Sapiens
TANIICSIVF

SEQ ID NO: 72637 - protein, 10 aa, Homo Sapiens
NIICSIVFGK

SEQ ID NO: 72638 - protein, 10 aa, Homo Sapiens
IICSIVFGKR

SEQ ID NO: 72639 - protein, 10 aa, Homo Sapiens
SIVFGKRFHY

SEQ ID NO: 72640 - protein, 10 aa, Homo Sapiens
IVFGKRFHYQ

SEQ ID NO: 72641 - protein, 10 aa, Homo Sapiens
KRFHYQDQEF

SEQ ID NO: 72642 - protein, 10 aa, Homo Sapiens
RFHYQDQEFL

SEQ ID NO: 72643 - protein, 10 aa, Homo Sapiens
FHYQDQEFLK

SEQ ID NO: 72644 - protein, 10 aa, Homo Sapiens
HYQDQEFLKM

SEQ ID NO: 72645 - protein, 10 aa, Homo Sapiens
YQDQEFLKML

SEQ ID NO: 72646 - protein, 10 aa, Homo Sapiens
QEFLKMLNLF

SEQ ID NO: 72647 - protein, 10 aa, Homo Sapiens
EFLKMLNLFY

SEQ ID NO: 72648 - protein, 10 aa, Homo Sapiens
FLKMLNLFYQ

SEQ ID NO: 72649 - protein, 10 aa, Homo Sapiens
KMLNLFYQTF

SEQ ID NO: 72650 - protein, 10 aa, Homo Sapiens
MLNLFYQTFS

SEQ ID NO: 72651 - protein, 10 aa, Homo Sapiens
NLFYQTFSLI

SEQ ID NO: 72652 - protein, 10 aa, Homo Sapiens
YQTFSLISSV

SEQ ID NO: 72653 - protein, 10 aa, Homo Sapiens
QTFSLISSVF

SEQ ID NO: 72654 - protein, 10 aa, Homo Sapiens
SLISSVFGQL

SEQ ID NO: 72655 - protein, 10 aa, Homo Sapiens
SSVFGQLFEL

SEQ ID NO: 72656 - protein, 10 aa, Homo Sapiens
SVFGQLFELF

SEQ ID NO: 72657 - protein, 10 aa, Homo Sapiens
GQLFELFSGF

SEQ ID NO: 72658 - protein, 10 aa, Homo Sapiens
QLFELFSGFL

SEQ ID NO: 72659 - protein, 10 aa, Homo Sapiens
LFELFSGFLK

SEQ ID NO: 72660 - protein, 10 aa, Homo Sapiens
FELFSGFLKY

SEQ ID NO: 72661 - protein, 10 aa, Homo Sapiens
ELFSGFLKYF

SEQ ID NO: 72662 - protein, 10 aa, Homo Sapiens
FLKYFPGAHR

SEQ ID NO: 72663 - protein, 10 aa, Homo Sapiens
KYFPGAHRQV

SEQ ID NO: 72664 - protein, 10 aa, Homo Sapiens
YFPGAHRQVY

SEQ ID NO: 72665 - protein, 10 aa, Homo Sapiens
RQVYKNLQEI

SEQ ID NO: 72666 - protein, 10 aa, Homo Sapiens
YKNLQEINAY

SEQ ID NO: 72667 - protein, 10 aa, Homo Sapiens
KNLQEINAYI

SEQ ID NO: 72668 - protein, 10 aa, Homo Sapiens
EINAYIGHSV

SEQ ID NO: 72669 - protein, 10 aa, Homo Sapiens
NAYIGHSVEK

SEQ ID NO: 72670 - protein, 10 aa, Homo Sapiens
YIGHSVEKHR

SEQ ID NO: 72671 - protein, 10 aa, Homo Sapiens
TLDPSAPKDL

SEQ ID NO: 72672 - protein, 10 aa, Homo Sapiens
APKDLIDTYL

SEQ ID NO: 72673 - protein, 10 aa, Homo Sapiens
DLIDTYLLHM

SEQ ID NO: 72674 - protein, 10 aa, Homo Sapiens
IDTYLLHMEK

SEQ ID NO: 72675 - protein, 10 aa, Homo Sapiens
TYLLHMEKEK

SEQ ID NO: 72676 - protein, 10 aa, Homo Sapiens
YLLHMEKEKS

SEQ ID NO: 72677 - protein, 10 aa, Homo Sapiens
KEKSNAHSEF

SEQ ID NO: 72678 - protein, 10 aa, Homo Sapiens
KSNAHSEFSH

SEQ ID NO: 72679 - protein, 10 aa, Homo Sapiens
AHSEFSHQNL

SEQ ID NO: 72680 - protein, 10 aa, Homo Sapiens
SEFSHQNLNL

SEQ ID NO: 72681 - protein, 10 aa, Homo Sapiens
SHQNLNLNTL

SEQ ID NO: 72682 - protein, 10 aa, Homo Sapiens
NLNTLSLFFA

SEQ ID NO: 72683 - protein, 10 aa, Homo Sapiens
NTLSLFFAGT

SEQ ID NO: 72684 - protein, 10 aa, Homo Sapiens
SLFFAGTETT

SEQ ID NO: 72685 - protein, 10 aa, Homo Sapiens
GTETTSTTLR

SEQ ID NO: 72686 - protein, 10 aa, Homo Sapiens
TETTSTTLRY

SEQ ID NO: 72687 - protein, 10 aa, Homo Sapiens
TTSTTLRYGF

SEQ ID NO: 72688 - protein, 10 aa, Homo Sapiens
TSTTLRYGFL

SEQ ID NO: 72689 - protein, 10 aa, Homo Sapiens
STTLRYGFLL

SEQ ID NO: 72690 - protein, 10 aa, Homo Sapiens
TTLRYGFLLM

SEQ ID NO: 72691 - protein, 10 aa, Homo Sapiens
TLRYGFLLML

SEQ ID NO: 72692 - protein, 10 aa, Homo Sapiens
LRYGFLLMLK

SEQ ID NO: 72693 - protein, 10 aa, Homo Sapiens
RYGFLLMLKY

SEQ ID NO: 72694 - protein, 10 aa, Homo Sapiens
FLLMLKYPHV

SEQ ID NO: 72695 - protein, 10 aa, Homo Sapiens
LLMLKYPHVA

SEQ ID NO: 72696 - protein, 10 aa, Homo Sapiens
LMLKYPHVAE

SEQ ID NO: 72697 - protein, 10 aa, Homo Sapiens
MLKYPHVAER

SEQ ID NO: 72698 - protein, 10 aa, Homo Sapiens
LKYPHVAERV

SEQ ID NO: 72699 - protein, 10 aa, Homo Sapiens
KYPHVAERVY

SEQ ID NO: 72700 - protein, 10 aa, Homo Sapiens
YPHVAERVYR

SEQ ID NO: 72701 - protein, 10 aa, Homo Sapiens
HVAERVYREI

SEQ ID NO: 72702 - protein, 10 aa, Homo Sapiens
AERVYREIEQ

SEQ ID NO: 72703 - protein, 10 aa, Homo Sapiens
RVYREIEQVI

SEQ ID NO: 72704 - protein, 10 aa, Homo Sapiens
REIEQVIGPH

SEQ ID NO: 72705 - protein, 10 aa, Homo Sapiens
EIEQVIGPHR

SEQ ID NO: 72706 - protein, 10 aa, Homo Sapiens
VIGPHRPPEL

SEQ ID NO: 72707 - protein, 10 aa, Homo Sapiens
ELHDRAKMPY

SEQ ID NO: 72708 - protein, 10 aa, Homo Sapiens
RAKMPYTEAV

SEQ ID NO: 72709 - protein, 10 aa, Homo Sapiens
KMPYTEAVIY

SEQ ID NO: 72710 - protein, 10 aa, Homo Sapiens
MPYTEAVIYE

SEQ ID NO: 72711 - protein, 10 aa, Homo Sapiens
PYTEAVIYEI

SEQ ID NO: 72712 - protein, 10 aa, Homo Sapiens
TEAVIYEIQR

SEQ ID NO: 72713 - protein, 10 aa, Homo Sapiens
EAVIYEIQRF

SEQ ID NO: 72714 - protein, 10 aa, Homo Sapiens
IYEIQRFSDL

SEQ ID NO: 72715 - protein, 10 aa, Homo Sapiens
YEIQRFSDLL

SEQ ID NO: 72716 - protein, 10 aa, Homo Sapiens
IQRFSDLLPM

SEQ ID NO: 72717 - protein, 10 aa, Homo Sapiens
RFSDLLPMGV

SEQ ID NO: 72718 - protein, 10 aa, Homo Sapiens
DLLPMGVPHI

SEQ ID NO: 72719 - protein, 10 aa, Homo Sapiens
LLPMGVPHIV

SEQ ID NO: 72720 - protein, 10 aa, Homo Sapiens
LPMGVPHIVT

SEQ ID NO: 72721 - protein, 10 aa, Homo Sapiens
HIVTQHTSFR

SEQ ID NO: 72722 - protein, 10 aa, Homo Sapiens
VTQHTSFRGY

SEQ ID NO: 72723 - protein, 10 aa, Homo Sapiens
TSFRGYIIPK

SEQ ID NO: 72724 - protein, 10 aa, Homo Sapiens
GYIIPKDTEV

SEQ ID NO: 72725 - protein, 10 aa, Homo Sapiens
YIIPKDTEVF

SEQ ID NO: 72726 - protein, 10 aa, Homo Sapiens
IIPKDTEVFL

SEQ ID NO: 72727 - protein, 10 aa, Homo Sapiens
IPKDTEVFLI

SEQ ID NO: 72728 - protein, 10 aa, Homo Sapiens
EVFLILSTAL

SEQ ID NO: 72729 - protein, 10 aa, Homo Sapiens
LSTALHDPHY

SEQ ID NO: 72730 - protein, 10 aa, Homo Sapiens
STALHDPHYF

SEQ ID NO: 72731 - protein, 10 aa, Homo Sapiens
ALHDPHYFEK

SEQ ID NO: 72732 - protein, 10 aa, Homo Sapiens
HFLDANGALK

SEQ ID NO: 72733 - protein, 10 aa, Homo Sapiens
FLDANGALKK

SEQ ID NO: 72734 - protein, 10 aa, Homo Sapiens
KTEAFIPFSL

SEQ ID NO: 72735 - protein, 10 aa, Homo Sapiens
EAFIPFSLGK

SEQ ID NO: 72736 - protein, 10 aa, Homo Sapiens
AFIPFSLGKR

SEQ ID NO: 72737 - protein, 10 aa, Homo Sapiens
FIPFSLGKRI

SEQ ID NO: 72738 - protein, 10 aa, Homo Sapiens
IPFSLGKRIC

SEQ ID NO: 72739 - protein, 10 aa, Homo Sapiens
RICLGEGIAR

SEQ ID NO: 72740 - protein, 10 aa, Homo Sapiens
EGIARAELFL

SEQ ID NO: 72741 - protein, 10 aa, Homo Sapiens
GIARAELFLF

SEQ ID NO: 72742 - protein, 10 aa, Homo Sapiens
AELFLFFTTI

SEQ ID NO: 72743 - protein, 10 aa, Homo Sapiens
ELFLFFTTIL

SEQ ID NO: 72744 - protein, 10 aa, Homo Sapiens
FLFFTTILQN

SEQ ID NO: 72745 - protein, 10 aa, Homo Sapiens
LFFTTILQNF

SEQ ID NO: 72746 - protein, 10 aa, Homo Sapiens
FTTILQNFSM

SEQ ID NO: 72747 - protein, 10 aa, Homo Sapiens
TTILQNFSMA

SEQ ID NO: 72748 - protein, 10 aa, Homo Sapiens
LQNFSMASPV

SEQ ID NO: 72749 - protein, 10 aa, Homo Sapiens
MASPVAPEDI

SEQ ID NO: 72750 - protein, 10 aa, Homo Sapiens
TPQECGVGKI

SEQ ID NO: 72751 - protein, 10 aa, Homo Sapiens
KIPPTYQIRF

SEQ ID NO: 72752 - protein, 10 aa, Homo Sapiens
IPPTYQIRFL

SEQ ID NO: 72753 - protein, 10 aa, Homo Sapiens
PTYQIRFLPR

SEQ ID NO: 72754 - protein, 11 aa, Homo Sapiens
MELSVLLFLAL

SEQ ID NO: 72755 - protein, 11 aa, Homo Sapiens
ELSVLLFLALL

SEQ ID NO: 72756 - protein, 11 aa, Homo Sapiens
VLLFLALLTGL

SEQ ID NO: 72757 - protein, 11 aa, Homo Sapiens
LLFLALLTGLL

SEQ ID NO: 72758 - protein, 11 aa, Homo Sapiens
LFLALLTGLLL

SEQ ID NO: 72759 - protein, 11 aa, Homo Sapiens
FLALLTGLLLL

SEQ ID NO: 72760 - protein, 11 aa, Homo Sapiens
ALLTGLLLLLV

SEQ ID NO: 72761 - protein, 11 aa, Homo Sapiens
LLTGLLLLLVQ

SEQ ID NO: 72762 - protein, 11 aa, Homo Sapiens
LTGLLLLLVQR

SEQ ID NO: 72763 - protein, 11 aa, Homo Sapiens
LVQRHPNTHDR

SEQ ID NO: 72764 - protein, 11 aa, Homo Sapiens
NTHDRLPPGPR

SEQ ID NO: 72765 - protein, 11 aa, Homo Sapiens
RLPPGPRPLPL

SEQ ID NO: 72766 - protein, 11 aa, Homo Sapiens
LPPGPRPLPLL

SEQ ID NO: 72767 - protein, 11 aa, Homo Sapiens
GPRPLPLLGNL

SEQ ID NO: 72768 - protein, 11 aa, Homo Sapiens
PLPLLGNLLQM

SEQ ID NO: 72769 - protein, 11 aa, Homo Sapiens
NLLQMDRRGLL

SEQ ID NO: 72770 - protein, 11 aa, Homo Sapiens
LLQMDRRGLLK

SEQ ID NO: 72771 - protein, 11 aa, Homo Sapiens
LQMDRRGLLKS

SEQ ID NO: 72772 - protein, 11 aa, Homo Sapiens
QMDRRGLLKSF

SEQ ID NO: 72773 - protein, 11 aa, Homo Sapiens
DRRGLLKSFLR

SEQ ID NO: 72774 - protein, 11 aa, Homo Sapiens
RRGLLKSFLRF

SEQ ID NO: 72775 - protein, 11 aa, Homo Sapiens
RGLLKSFLRFR

SEQ ID NO: 72776 - protein, 11 aa, Homo Sapiens
LLKSFLRFREK

SEQ ID NO: 72777 - protein, 11 aa, Homo Sapiens
FLRFREKYGDV

SEQ ID NO: 72778 - protein, 11 aa, Homo Sapiens
FTVHLGPRPVV

SEQ ID NO: 72779 - protein, 11 aa, Homo Sapiens
TVHLGPRPVVM

SEQ ID NO: 72780 - protein, 11 aa, Homo Sapiens
VHLGPRPVVML

SEQ ID NO: 72781 - protein, 11 aa, Homo Sapiens
HLGPRPVVMLC

SEQ ID NO: 72782 - protein, 11 aa, Homo Sapiens
GPRPVVMLCGV

SEQ ID NO: 72783 - protein, 11 aa, Homo Sapiens
RPVVMLCGVEA

SEQ ID NO: 72784 - protein, 11 aa, Homo Sapiens
VVMLCGVEAIR

SEQ ID NO: 72785 - protein, 11 aa, Homo Sapiens
MLCGVEAIREA

SEQ ID NO: 72786 - protein, 11 aa, Homo Sapiens
REALVDKAEAF

SEQ ID NO: 72787 - protein, 11 aa, Homo Sapiens
LVDKAEAFSGR

SEQ ID NO: 72788 - protein, 11 aa, Homo Sapiens
AEAFSGRGKIA

SEQ ID NO: 72789 - protein, 11 aa, Homo Sapiens
EAFSGRGKIAM

SEQ ID NO: 72790 - protein, 11 aa, Homo Sapiens
AFSGRGKIAMV

SEQ ID NO: 72791 - protein, 11 aa, Homo Sapiens
GRGKIAMVDPF

SEQ ID NO: 72792 - protein, 11 aa, Homo Sapiens
IAMVDPFFRGY

SEQ ID NO: 72793 - protein, 11 aa, Homo Sapiens
MVDPFFRGYGV

SEQ ID NO: 72794 - protein, 11 aa, Homo Sapiens
DPFFRGYGVIF

SEQ ID NO: 72795 - protein, 11 aa, Homo Sapiens
GYGVIFANGNR

SEQ ID NO: 72796 - protein, 11 aa, Homo Sapiens
YGVIFANGNRW

SEQ ID NO: 72797 - protein, 11 aa, Homo Sapiens
GVIFANGNRWK

SEQ ID NO: 72798 - protein, 11 aa, Homo Sapiens
VIFANGNRWKV

SEQ ID NO: 72799 - protein, 11 aa, Homo Sapiens
FANGNRWKVLR

SEQ ID NO: 72800 - protein, 11 aa, Homo Sapiens
NRWKVLRRFSV

SEQ ID NO: 72801 - protein, 11 aa, Homo Sapiens
KVLRRFSVTTM

SEQ ID NO: 72802 - protein, 11 aa, Homo Sapiens
VLRRFSVTTMR

SEQ ID NO: 72803 - protein, 11 aa, Homo Sapiens
RRFSVTTMRDF

SEQ ID NO: 72804 - protein, 11 aa, Homo Sapiens
VTTMRDFGMGK

SEQ ID NO: 72805 - protein, 11 aa, Homo Sapiens
TTMRDFGMGKR

SEQ ID NO: 72806 - protein, 11 aa, Homo Sapiens
FGMGKRSVEER

SEQ ID NO: 72807 - protein, 11 aa, Homo Sapiens
GMGKRSVEERI

SEQ ID NO: 72808 - protein, 11 aa, Homo Sapiens
EERIQEEAQCL

SEQ ID NO: 72809 - protein, 11 aa, Homo Sapiens
QEEAQCLIEEL

SEQ ID NO: 72810 - protein, 11 aa, Homo Sapiens
EEAQCLIEELR

SEQ ID NO: 72811 - protein, 11 aa, Homo Sapiens
EAQCLIEELRK

SEQ ID NO: 72812 - protein, 11 aa, Homo Sapiens
KSKGALMDPTF

SEQ ID NO: 72813 - protein, 11 aa, Homo Sapiens
KGALMDPTFLF

SEQ ID NO: 72814 - protein, 11 aa, Homo Sapiens
ALMDPTFLFQS

SEQ ID NO: 72815 - protein, 11 aa, Homo Sapiens
LMDPTFLFQSI

SEQ ID NO: 72816 - protein, 11 aa, Homo Sapiens
DPTFLFQSITA

SEQ ID NO: 72817 - protein, 11 aa, Homo Sapiens
TFLFQSITANI

SEQ ID NO: 72818 - protein, 11 aa, Homo Sapiens
FLFQSITANII

SEQ ID NO: 72819 - protein, 11 aa, Homo Sapiens
QSITANIICSI

SEQ ID NO: 72820 - protein, 11 aa, Homo Sapiens
SITANIICSIV

SEQ ID NO: 72821 - protein, 11 aa, Homo Sapiens
ITANIICSIVF

SEQ ID NO: 72822 - protein, 11 aa, Homo Sapiens
ANIICSIVFGK

SEQ ID NO: 72823 - protein, 11 aa, Homo Sapiens
NIICSIVFGKR

SEQ ID NO: 72824 - protein, 11 aa, Homo Sapiens
CSIVFGKRFHY

SEQ ID NO: 72825 - protein, 11 aa, Homo Sapiens
RFHYQDQEFLK

SEQ ID NO: 72826 - protein, 11 aa, Homo Sapiens
FHYQDQEFLKM

SEQ ID NO: 72827 - protein, 11 aa, Homo Sapiens
HYQDQEFLKML

SEQ ID NO: 72828 - protein, 11 aa, Homo Sapiens
QEFLKMLNLFY

SEQ ID NO: 72829 - protein, 11 aa, Homo Sapiens
FLKMLNLFYQT

SEQ ID NO: 72830 - protein, 11 aa, Homo Sapiens
KMLNLFYQTFS

SEQ ID NO: 72831 - protein, 11 aa, Homo Sapiens
MLNLFYQTFSL

SEQ ID NO: 72832 - protein, 11 aa, Homo Sapiens
FYQTFSLISSV

SEQ ID NO: 72833 - protein, 11 aa, Homo Sapiens
YQTFSLISSVF

SEQ ID NO: 72834 - protein, 11 aa, Homo Sapiens
SLISSVFGQLF

SEQ ID NO: 72835 - protein, 11 aa, Homo Sapiens
ISSVFGQLFEL

SEQ ID NO: 72836 - protein, 11 aa, Homo Sapiens
GQLFELFSGFL

SEQ ID NO: 72837 - protein, 11 aa, Homo Sapiens
QLFELFSGFLK

SEQ ID NO: 72838 - protein, 11 aa, Homo Sapiens
LFELFSGFLKY

SEQ ID NO: 72839 - protein, 11 aa, Homo Sapiens
FELFSGFLKYF

SEQ ID NO: 72840 - protein, 11 aa, Homo Sapiens
ELFSGFLKYFP

SEQ ID NO: 72841 - protein, 11 aa, Homo Sapiens
GFLKYFPGAHR

SEQ ID NO: 72842 - protein, 11 aa, Homo Sapiens
FLKYFPGAHRQ

SEQ ID NO: 72843 - protein, 11 aa, Homo Sapiens
KYFPGAHRQVY

SEQ ID NO: 72844 - protein, 11 aa, Homo Sapiens
FPGAHRQVYKN

SEQ ID NO: 72845 - protein, 11 aa, Homo Sapiens
VYKNLQEINAY

SEQ ID NO: 72846 - protein, 11 aa, Homo Sapiens
QEINAYIGHSV

SEQ ID NO: 72847 - protein, 11 aa, Homo Sapiens
INAYIGHSVEK

SEQ ID NO: 72848 - protein, 11 aa, Homo Sapiens
AYIGHSVEKHR

SEQ ID NO: 72849 - protein, 11 aa, Homo Sapiens
GHSVEKHRETL

SEQ ID NO: 72850 - protein, 11 aa, Homo Sapiens
HRETLDPSAPK

SEQ ID NO: 72851 - protein, 11 aa, Homo Sapiens
ETLDPSAPKDL

SEQ ID NO: 72852 - protein, 11 aa, Homo Sapiens
TLDPSAPKDLI

SEQ ID NO: 72853 - protein, 11 aa, Homo Sapiens
PSAPKDLIDTY

SEQ ID NO: 72854 - protein, 11 aa, Homo Sapiens
APKDLIDTYLL

SEQ ID NO: 72855 - protein, 11 aa, Homo Sapiens
LIDTYLLHMEK

SEQ ID NO: 72856 - protein, 11 aa, Homo Sapiens
DTYLLHMEKEK

SEQ ID NO: 72857 - protein, 11 aa, Homo Sapiens
LLHMEKEKSNA

SEQ ID NO: 72858 - protein, 11 aa, Homo Sapiens
HSEFSHQNLNL

SEQ ID NO: 72859 - protein, 11 aa, Homo Sapiens
FSHQNLNLNTL

SEQ ID NO: 72860 - protein, 11 aa, Homo Sapiens
HQNLNLNTLSL

SEQ ID NO: 72861 - protein, 11 aa, Homo Sapiens
TLSLFFAGTET

SEQ ID NO: 72862 - protein, 11 aa, Homo Sapiens
FAGTETTSTTL

SEQ ID NO: 72863 - protein, 11 aa, Homo Sapiens
GTETTSTTLRY

SEQ ID NO: 72864 - protein, 11 aa, Homo Sapiens
ETTSTTLRYGF

SEQ ID NO: 72865 - protein, 11 aa, Homo Sapiens
TTSTTLRYGFL

SEQ ID NO: 72866 - protein, 11 aa, Homo Sapiens
TSTTLRYGFLL

SEQ ID NO: 72867 - protein, 11 aa, Homo Sapiens
STTLRYGFLLM

SEQ ID NO: 72868 - protein, 11 aa, Homo Sapiens
TTLRYGFLLML

SEQ ID NO: 72869 - protein, 11 aa, Homo Sapiens
TLRYGFLLMLK

SEQ ID NO: 72870 - protein, 11 aa, Homo Sapiens
LRYGFLLMLKY

SEQ ID NO: 72871 - protein, 11 aa, Homo Sapiens
FLLMLKYPHVA

SEQ ID NO: 72872 - protein, 11 aa, Homo Sapiens
LMLKYPHVAER

SEQ ID NO: 72873 - protein, 11 aa, Homo Sapiens
MLKYPHVAERV

SEQ ID NO: 72874 - protein, 11 aa, Homo Sapiens
KYPHVAERVYR

SEQ ID NO: 72875 - protein, 11 aa, Homo Sapiens
AERVYREIEQV

SEQ ID NO: 72876 - protein, 11 aa, Homo Sapiens
QVIGPHRPPEL

SEQ ID NO: 72877 - protein, 11 aa, Homo Sapiens
RPPELHDRAKM

SEQ ID NO: 72878 - protein, 11 aa, Homo Sapiens
PELHDRAKMPY

SEQ ID NO: 72879 - protein, 11 aa, Homo Sapiens
ELHDRAKMPYT

SEQ ID NO: 72880 - protein, 11 aa, Homo Sapiens
DRAKMPYTEAV

SEQ ID NO: 72881 - protein, 11 aa, Homo Sapiens
MPYTEAVIYEI

SEQ ID NO: 72882 - protein, 11 aa, Homo Sapiens
YTEAVIYEIQR

SEQ ID NO: 72883 - protein, 11 aa, Homo Sapiens
TEAVIYEIQRF

SEQ ID NO: 72884 - protein, 11 aa, Homo Sapiens
VIYEIQRFSDL

SEQ ID NO: 72885 - protein, 11 aa, Homo Sapiens
IYEIQRFSDLL

SEQ ID NO: 72886 - protein, 11 aa, Homo Sapiens
EIQRFSDLLPM

SEQ ID NO: 72887 - protein, 11 aa, Homo Sapiens
QRFSDLLPMGV

SEQ ID NO: 72888 - protein, 11 aa, Homo Sapiens
DLLPMGVPHIV

SEQ ID NO: 72889 - protein, 11 aa, Homo Sapiens
LLPMGVPHIVT

SEQ ID NO: 72890 - protein, 11 aa, Homo Sapiens
LPMGVPHIVTQ

SEQ ID NO: 72891 - protein, 11 aa, Homo Sapiens
VPHIVTQHTSF

SEQ ID NO: 72892 - protein, 11 aa, Homo Sapiens
IVTQHTSFRGY

SEQ ID NO: 72893 - protein, 11 aa, Homo Sapiens
HTSFRGYIIPK

SEQ ID NO: 72894 - protein, 11 aa, Homo Sapiens
GYIIPKDTEVF

SEQ ID NO: 72895 - protein, 11 aa, Homo Sapiens
YIIPKDTEVFL

SEQ ID NO: 72896 - protein, 11 aa, Homo Sapiens
IIPKDTEVFLI

SEQ ID NO: 72897 - protein, 11 aa, Homo Sapiens
IPKDTEVFLIL

SEQ ID NO: 72898 - protein, 11 aa, Homo Sapiens
TEVFLILSTAL

SEQ ID NO: 72899 - protein, 11 aa, Homo Sapiens
EVFLILSTALH

SEQ ID NO: 72900 - protein, 11 aa, Homo Sapiens
ILSTALHDPHY

SEQ ID NO: 72901 - protein, 11 aa, Homo Sapiens
LSTALHDPHYF

SEQ ID NO: 72902 - protein, 11 aa, Homo Sapiens
TALHDPHYFEK

SEQ ID NO: 72903 - protein, 11 aa, Homo Sapiens
ALHDPHYFEKP

SEQ ID NO: 72904 - protein, 11 aa, Homo Sapiens
DPHYFEKPDAF

SEQ ID NO: 72905 - protein, 11 aa, Homo Sapiens
NPDHFLDANGA

SEQ ID NO: 72906 - protein, 11 aa, Homo Sapiens
HFLDANGALKK

SEQ ID NO: 72907 - protein, 11 aa, Homo Sapiens
FLDANGALKKT

SEQ ID NO: 72908 - protein, 11 aa, Homo Sapiens
ALKKTEAFIPF

SEQ ID NO: 72909 - protein, 11 aa, Homo Sapiens
TEAFIPFSLGK

SEQ ID NO: 72910 - protein, 11 aa, Homo Sapiens
EAFIPFSLGKR

SEQ ID NO: 72911 - protein, 11 aa, Homo Sapiens
IPFSLGKRICL

SEQ ID NO: 72912 - protein, 11 aa, Homo Sapiens
KRICLGEGIAR

SEQ ID NO: 72913 - protein, 11 aa, Homo Sapiens
CLGEGIARAEL

SEQ ID NO: 72914 - protein, 11 aa, Homo Sapiens
GEGIARAELFL

SEQ ID NO: 72915 - protein, 11 aa, Homo Sapiens
EGIARAELFLF

SEQ ID NO: 72916 - protein, 11 aa, Homo Sapiens
GIARAELFLFF

SEQ ID NO: 72917 - protein, 11 aa, Homo Sapiens
RAELFLFFTTI

SEQ ID NO: 72918 - protein, 11 aa, Homo Sapiens
AELFLFFTTIL

SEQ ID NO: 72919 - protein, 11 aa, Homo Sapiens
ELFLFFTTILQ

SEQ ID NO: 72920 - protein, 11 aa, Homo Sapiens
FLFFTTILQNF

SEQ ID NO: 72921 - protein, 11 aa, Homo Sapiens
FTTILQNFSMA

SEQ ID NO: 72922 - protein, 11 aa, Homo Sapiens
TTILQNFSMAS

SEQ ID NO: 72923 - protein, 11 aa, Homo Sapiens
ILQNFSMASPV

SEQ ID NO: 72924 - protein, 11 aa, Homo Sapiens
LQNFSMASPVA

SEQ ID NO: 72925 - protein, 11 aa, Homo Sapiens
SMASPVAPEDI

SEQ ID NO: 72926 - protein, 11 aa, Homo Sapiens
DIDLTPQECGV

SEQ ID NO: 72927 - protein, 11 aa, Homo Sapiens
GVGKIPPTYQI

SEQ ID NO: 72928 - protein, 11 aa, Homo Sapiens
KIPPTYQIRFL

SEQ ID NO: 72929 - protein, 13 aa, Homo Sapiens
MELSVLLFLALLT

SEQ ID NO: 72930 - protein, 13 aa, Homo Sapiens
ELSVLLFLALLTG

SEQ ID NO: 72931 - protein, 13 aa, Homo Sapiens
LSVLLFLALLTGL

SEQ ID NO: 72932 - protein, 13 aa, Homo Sapiens
SVLLFLALLTGLL

SEQ ID NO: 72933 - protein, 13 aa, Homo Sapiens
VLLFLALLTGLLL

SEQ ID NO: 72934 - protein, 13 aa, Homo Sapiens
LLFLALLTGLLLL

SEQ ID NO: 72935 - protein, 13 aa, Homo Sapiens
LFLALLTGLLLLL

SEQ ID NO: 72936 - protein, 13 aa, Homo Sapiens
FLALLTGLLLLLV

SEQ ID NO: 72937 - protein, 13 aa, Homo Sapiens
LALLTGLLLLLVQ

SEQ ID NO: 72938 - protein, 13 aa, Homo Sapiens
ALLTGLLLLLVQR

SEQ ID NO: 72939 - protein, 13 aa, Homo Sapiens
LLTGLLLLLVQRH

SEQ ID NO: 72940 - protein, 13 aa, Homo Sapiens
LTGLLLLLVQRHP

SEQ ID NO: 72941 - protein, 13 aa, Homo Sapiens
TGLLLLLVQRHPN

SEQ ID NO: 72942 - protein, 13 aa, Homo Sapiens
GLLLLLVQRHPNT

SEQ ID NO: 72943 - protein, 13 aa, Homo Sapiens
LLLLLVQRHPNTH

SEQ ID NO: 72944 - protein, 13 aa, Homo Sapiens
LLLLVQRHPNTHD

SEQ ID NO: 72945 - protein, 13 aa, Homo Sapiens
LLLVQRHPNTHDR

SEQ ID NO: 72946 - protein, 13 aa, Homo Sapiens
LLVQRHPNTHDRL

SEQ ID NO: 72947 - protein, 13 aa, Homo Sapiens
LVQRHPNTHDRLP

SEQ ID NO: 72948 - protein, 13 aa, Homo Sapiens
VQRHPNTHDRLPP

SEQ ID NO: 72949 - protein, 13 aa, Homo Sapiens
QRHPNTHDRLPPG

SEQ ID NO: 72950 - protein, 13 aa, Homo Sapiens
RHPNTHDRLPPGP

SEQ ID NO: 72951 - protein, 13 aa, Homo Sapiens
HPNTHDRLPPGPR

SEQ ID NO: 72952 - protein, 13 aa, Homo Sapiens
PNTHDRLPPGPRP

SEQ ID NO: 72953 - protein, 13 aa, Homo Sapiens
NTHDRLPPGPRPL

SEQ ID NO: 72954 - protein, 13 aa, Homo Sapiens
THDRLPPGPRPLP

SEQ ID NO: 72955 - protein, 13 aa, Homo Sapiens
HDRLPPGPRPLPL

SEQ ID NO: 72956 - protein, 13 aa, Homo Sapiens
DRLPPGPRPLPLL

SEQ ID NO: 72957 - protein, 13 aa, Homo Sapiens
RLPPGPRPLPLLG

SEQ ID NO: 72958 - protein, 13 aa, Homo Sapiens
LPPGPRPLPLLGN

SEQ ID NO: 72959 - protein, 13 aa, Homo Sapiens
PPGPRPLPLLGNL

SEQ ID NO: 72960 - protein, 13 aa, Homo Sapiens
PGPRPLPLLGNLL

SEQ ID NO: 72961 - protein, 13 aa, Homo Sapiens
GPRPLPLLGNLLQ

SEQ ID NO: 72962 - protein, 13 aa, Homo Sapiens
PRPLPLLGNLLQM

SEQ ID NO: 72963 - protein, 13 aa, Homo Sapiens
RPLPLLGNLLQMD

SEQ ID NO: 72964 - protein, 13 aa, Homo Sapiens
PLPLLGNLLQMDR

SEQ ID NO: 72965 - protein, 13 aa, Homo Sapiens
LPLLGNLLQMDRR

SEQ ID NO: 72966 - protein, 13 aa, Homo Sapiens
PLLGNLLQMDRRG

SEQ ID NO: 72967 - protein, 13 aa, Homo Sapiens
LLGNLLQMDRRGL

SEQ ID NO: 72968 - protein, 13 aa, Homo Sapiens
LGNLLQMDRRGLL

SEQ ID NO: 72969 - protein, 13 aa, Homo Sapiens
GNLLQMDRRGLLK

SEQ ID NO: 72970 - protein, 13 aa, Homo Sapiens
NLLQMDRRGLLKS

SEQ ID NO: 72971 - protein, 13 aa, Homo Sapiens
LLQMDRRGLLKSF

SEQ ID NO: 72972 - protein, 13 aa, Homo Sapiens
LQMDRRGLLKSFL

SEQ ID NO: 72973 - protein, 13 aa, Homo Sapiens
QMDRRGLLKSFLR

SEQ ID NO: 72974 - protein, 13 aa, Homo Sapiens
MDRRGLLKSFLRF

SEQ ID NO: 72975 - protein, 13 aa, Homo Sapiens
DRRGLLKSFLRFR

SEQ ID NO: 72976 - protein, 13 aa, Homo Sapiens
RRGLLKSFLRFRE

SEQ ID NO: 72977 - protein, 13 aa, Homo Sapiens
RGLLKSFLRFREK

SEQ ID NO: 72978 - protein, 13 aa, Homo Sapiens
GLLKSFLRFREKY

SEQ ID NO: 72979 - protein, 13 aa, Homo Sapiens
LLKSFLRFREKYG

SEQ ID NO: 72980 - protein, 13 aa, Homo Sapiens
LKSFLRFREKYGD

SEQ ID NO: 72981 - protein, 13 aa, Homo Sapiens
KSFLRFREKYGDV

SEQ ID NO: 72982 - protein, 13 aa, Homo Sapiens
SFLRFREKYGDVF

SEQ ID NO: 72983 - protein, 13 aa, Homo Sapiens
FLRFREKYGDVFT

SEQ ID NO: 72984 - protein, 13 aa, Homo Sapiens
LRFREKYGDVFTV

SEQ ID NO: 72985 - protein, 13 aa, Homo Sapiens
RFREKYGDVFTVH

SEQ ID NO: 72986 - protein, 13 aa, Homo Sapiens
FREKYGDVFTVHL

SEQ ID NO: 72987 - protein, 13 aa, Homo Sapiens
REKYGDVFTVHLG

SEQ ID NO: 72988 - protein, 13 aa, Homo Sapiens
EKYGDVFTVHLGP

SEQ ID NO: 72989 - protein, 13 aa, Homo Sapiens
KYGDVFTVHLGPR

SEQ ID NO: 72990 - protein, 13 aa, Homo Sapiens
YGDVFTVHLGPRP

SEQ ID NO: 72991 - protein, 13 aa, Homo Sapiens
GDVFTVHLGPRPV

SEQ ID NO: 72992 - protein, 13 aa, Homo Sapiens
DVFTVHLGPRPVV

SEQ ID NO: 72993 - protein, 13 aa, Homo Sapiens
VFTVHLGPRPVVM

SEQ ID NO: 72994 - protein, 13 aa, Homo Sapiens
FTVHLGPRPVVML

SEQ ID NO: 72995 - protein, 13 aa, Homo Sapiens
TVHLGPRPVVMLC

SEQ ID NO: 72996 - protein, 13 aa, Homo Sapiens
VHLGPRPVVMLCG

SEQ ID NO: 72997 - protein, 13 aa, Homo Sapiens
HLGPRPVVMLCGV

SEQ ID NO: 72998 - protein, 13 aa, Homo Sapiens
LGPRPVVMLCGVE

SEQ ID NO: 72999 - protein, 13 aa, Homo Sapiens
GPRPVVMLCGVEA

SEQ ID NO: 73000 - protein, 13 aa, Homo Sapiens
PRPVVMLCGVEAI

SEQ ID NO: 73001 - protein, 13 aa, Homo Sapiens
RPVVMLCGVEAIR

SEQ ID NO: 73002 - protein, 13 aa, Homo Sapiens
PVVMLCGVEAIRE

SEQ ID NO: 73003 - protein, 13 aa, Homo Sapiens
VVMLCGVEAIREA

SEQ ID NO: 73004 - protein, 13 aa, Homo Sapiens
VMLCGVEAIREAL

SEQ ID NO: 73005 - protein, 13 aa, Homo Sapiens
MLCGVEAIREALV

SEQ ID NO: 73006 - protein, 13 aa, Homo Sapiens
LCGVEAIREALVD

SEQ ID NO: 73007 - protein, 13 aa, Homo Sapiens
CGVEAIREALVDK

SEQ ID NO: 73008 - protein, 13 aa, Homo Sapiens
GVEAIREALVDKA

SEQ ID NO: 73009 - protein, 13 aa, Homo Sapiens
VEAIREALVDKAE

SEQ ID NO: 73010 - protein, 13 aa, Homo Sapiens
EAIREALVDKAEA

SEQ ID NO: 73011 - protein, 13 aa, Homo Sapiens
AIREALVDKAEAF

SEQ ID NO: 73012 - protein, 13 aa, Homo Sapiens
IREALVDKAEAFS

SEQ ID NO: 73013 - protein, 13 aa, Homo Sapiens
REALVDKAEAFSG

SEQ ID NO: 73014 - protein, 13 aa, Homo Sapiens
EALVDKAEAFSGR

SEQ ID NO: 73015 - protein, 13 aa, Homo Sapiens
ALVDKAEAFSGRG

SEQ ID NO: 73016 - protein, 13 aa, Homo Sapiens
LVDKAEAFSGRGK

SEQ ID NO: 73017 - protein, 13 aa, Homo Sapiens
VDKAEAFSGRGKI

SEQ ID NO: 73018 - protein, 13 aa, Homo Sapiens
DKAEAFSGRGKIA

SEQ ID NO: 73019 - protein, 13 aa, Homo Sapiens
KAEAFSGRGKIAM

SEQ ID NO: 73020 - protein, 13 aa, Homo Sapiens
AEAFSGRGKIAMV

SEQ ID NO: 73021 - protein, 13 aa, Homo Sapiens
EAFSGRGKIAMVD

SEQ ID NO: 73022 - protein, 13 aa, Homo Sapiens
AFSGRGKIAMVDP

SEQ ID NO: 73023 - protein, 13 aa, Homo Sapiens
FSGRGKIAMVDPF

SEQ ID NO: 73024 - protein, 13 aa, Homo Sapiens
SGRGKIAMVDPFF

SEQ ID NO: 73025 - protein, 13 aa, Homo Sapiens
GRGKIAMVDPFFR

SEQ ID NO: 73026 - protein, 13 aa, Homo Sapiens
RGKIAMVDPFFRG

SEQ ID NO: 73027 - protein, 13 aa, Homo Sapiens
GKIAMVDPFFRGY

SEQ ID NO: 73028 - protein, 13 aa, Homo Sapiens
KIAMVDPFFRGYG

SEQ ID NO: 73029 - protein, 13 aa, Homo Sapiens
IAMVDPFFRGYGV

SEQ ID NO: 73030 - protein, 13 aa, Homo Sapiens
AMVDPFFRGYGVI

SEQ ID NO: 73031 - protein, 13 aa, Homo Sapiens
MVDPFFRGYGVIF

SEQ ID NO: 73032 - protein, 13 aa, Homo Sapiens
VDPFFRGYGVIFA

SEQ ID NO: 73033 - protein, 13 aa, Homo Sapiens
DPFFRGYGVIFAN

SEQ ID NO: 73034 - protein, 13 aa, Homo Sapiens
PFFRGYGVIFANG

SEQ ID NO: 73035 - protein, 13 aa, Homo Sapiens
FFRGYGVIFANGN

SEQ ID NO: 73036 - protein, 13 aa, Homo Sapiens
FRGYGVIFANGNR

SEQ ID NO: 73037 - protein, 13 aa, Homo Sapiens
RGYGVIFANGNRW

SEQ ID NO: 73038 - protein, 13 aa, Homo Sapiens
GYGVIFANGNRWK

SEQ ID NO: 73039 - protein, 13 aa, Homo Sapiens
YGVIFANGNRWKV

SEQ ID NO: 73040 - protein, 13 aa, Homo Sapiens
GVIFANGNRWKVL

SEQ ID NO: 73041 - protein, 13 aa, Homo Sapiens
VIFANGNRWKVLR

SEQ ID NO: 73042 - protein, 13 aa, Homo Sapiens
IFANGNRWKVLRR

SEQ ID NO: 73043 - protein, 13 aa, Homo Sapiens
FANGNRWKVLRRF

SEQ ID NO: 73044 - protein, 13 aa, Homo Sapiens
ANGNRWKVLRRFS

SEQ ID NO: 73045 - protein, 13 aa, Homo Sapiens
NGNRWKVLRRFSV

SEQ ID NO: 73046 - protein, 13 aa, Homo Sapiens
GNRWKVLRRFSVT

SEQ ID NO: 73047 - protein, 13 aa, Homo Sapiens
NRWKVLRRFSVTT

SEQ ID NO: 73048 - protein, 13 aa, Homo Sapiens
RWKVLRRFSVTTM

SEQ ID NO: 73049 - protein, 13 aa, Homo Sapiens
WKVLRRFSVTTMR

SEQ ID NO: 73050 - protein, 13 aa, Homo Sapiens
KVLRRFSVTTMRD

SEQ ID NO: 73051 - protein, 13 aa, Homo Sapiens
VLRRFSVTTMRDF

SEQ ID NO: 73052 - protein, 13 aa, Homo Sapiens
LRRFSVTTMRDFG

SEQ ID NO: 73053 - protein, 13 aa, Homo Sapiens
RRFSVTTMRDFGM

SEQ ID NO: 73054 - protein, 13 aa, Homo Sapiens
RFSVTTMRDFGMG

SEQ ID NO: 73055 - protein, 13 aa, Homo Sapiens
FSVTTMRDFGMGK

SEQ ID NO: 73056 - protein, 13 aa, Homo Sapiens
SVTTMRDFGMGKR

SEQ ID NO: 73057 - protein, 13 aa, Homo Sapiens
VTTMRDFGMGKRS

SEQ ID NO: 73058 - protein, 13 aa, Homo Sapiens
TTMRDFGMGKRSV

SEQ ID NO: 73059 - protein, 13 aa, Homo Sapiens
TMRDFGMGKRSVE

SEQ ID NO: 73060 - protein, 13 aa, Homo Sapiens
MRDFGMGKRSVEE

SEQ ID NO: 73061 - protein, 13 aa, Homo Sapiens
RDFGMGKRSVEER

SEQ ID NO: 73062 - protein, 13 aa, Homo Sapiens
DFGMGKRSVEERI

SEQ ID NO: 73063 - protein, 13 aa, Homo Sapiens
FGMGKRSVEERIQ

SEQ ID NO: 73064 - protein, 13 aa, Homo Sapiens
GMGKRSVEERIQE

SEQ ID NO: 73065 - protein, 13 aa, Homo Sapiens
MGKRSVEERIQEE

SEQ ID NO: 73066 - protein, 13 aa, Homo Sapiens
GKRSVEERIQEEA

SEQ ID NO: 73067 - protein, 13 aa, Homo Sapiens
KRSVEERIQEEAQ

SEQ ID NO: 73068 - protein, 13 aa, Homo Sapiens
RSVEERIQEEAQC

SEQ ID NO: 73069 - protein, 13 aa, Homo Sapiens
SVEERIQEEAQCL

SEQ ID NO: 73070 - protein, 13 aa, Homo Sapiens
VEERIQEEAQCLI

SEQ ID NO: 73071 - protein, 13 aa, Homo Sapiens
EERIQEEAQCLIE

SEQ ID NO: 73072 - protein, 13 aa, Homo Sapiens
ERIQEEAQCLIEE

SEQ ID NO: 73073 - protein, 13 aa, Homo Sapiens
RIQEEAQCLIEEL

SEQ ID NO: 73074 - protein, 13 aa, Homo Sapiens
IQEEAQCLIEELR

SEQ ID NO: 73075 - protein, 13 aa, Homo Sapiens
QEEAQCLIEELRK

SEQ ID NO: 73076 - protein, 13 aa, Homo Sapiens
EEAQCLIEELRKS

SEQ ID NO: 73077 - protein, 13 aa, Homo Sapiens
EAQCLIEELRKSK

SEQ ID NO: 73078 - protein, 13 aa, Homo Sapiens
AQCLIEELRKSKG

SEQ ID NO: 73079 - protein, 13 aa, Homo Sapiens
QCLIEELRKSKGA

SEQ ID NO: 73080 - protein, 13 aa, Homo Sapiens
CLIEELRKSKGAL

SEQ ID NO: 73081 - protein, 13 aa, Homo Sapiens
LIEELRKSKGALM

SEQ ID NO: 73082 - protein, 13 aa, Homo Sapiens
IEELRKSKGALMD

SEQ ID NO: 73083 - protein, 13 aa, Homo Sapiens
EELRKSKGALMDP

SEQ ID NO: 73084 - protein, 13 aa, Homo Sapiens
ELRKSKGALMDPT

SEQ ID NO: 73085 - protein, 13 aa, Homo Sapiens
LRKSKGALMDPTF

SEQ ID NO: 73086 - protein, 13 aa, Homo Sapiens
RKSKGALMDPTFL

SEQ ID NO: 73087 - protein, 13 aa, Homo Sapiens
KSKGALMDPTFLF

SEQ ID NO: 73088 - protein, 13 aa, Homo Sapiens
SKGALMDPTFLFQ

SEQ ID NO: 73089 - protein, 13 aa, Homo Sapiens
KGALMDPTFLFQS

SEQ ID NO: 73090 - protein, 13 aa, Homo Sapiens
GALMDPTFLFQSI

SEQ ID NO: 73091 - protein, 13 aa, Homo Sapiens
ALMDPTFLFQSIT

SEQ ID NO: 73092 - protein, 13 aa, Homo Sapiens
LMDPTFLFQSITA

SEQ ID NO: 73093 - protein, 13 aa, Homo Sapiens
MDPTFLFQSITAN

SEQ ID NO: 73094 - protein, 13 aa, Homo Sapiens
DPTFLFQSITANI

SEQ ID NO: 73095 - protein, 13 aa, Homo Sapiens
PTFLFQSITANII

SEQ ID NO: 73096 - protein, 13 aa, Homo Sapiens
TFLFQSITANIIC

SEQ ID NO: 73097 - protein, 13 aa, Homo Sapiens
FLFQSITANIICS

SEQ ID NO: 73098 - protein, 13 aa, Homo Sapiens
LFQSITANIICSI

SEQ ID NO: 73099 - protein, 13 aa, Homo Sapiens
FQSITANIICSIV

SEQ ID NO: 73100 - protein, 13 aa, Homo Sapiens
QSITANIICSIVF

SEQ ID NO: 73101 - protein, 13 aa, Homo Sapiens
SITANIICSIVFG

SEQ ID NO: 73102 - protein, 13 aa, Homo Sapiens
ITANIICSIVFGK

SEQ ID NO: 73103 - protein, 13 aa, Homo Sapiens
TANIICSIVFGKR

SEQ ID NO: 73104 - protein, 13 aa, Homo Sapiens
ANIICSIVFGKRF

SEQ ID NO: 73105 - protein, 13 aa, Homo Sapiens
NIICSIVFGKRFH

SEQ ID NO: 73106 - protein, 13 aa, Homo Sapiens
IICSIVFGKRFHY

SEQ ID NO: 73107 - protein, 13 aa, Homo Sapiens
ICSIVFGKRFHYQ

SEQ ID NO: 73108 - protein, 13 aa, Homo Sapiens
CSIVFGKRFHYQD

SEQ ID NO: 73109 - protein, 13 aa, Homo Sapiens
SIVFGKRFHYQDQ

SEQ ID NO: 73110 - protein, 13 aa, Homo Sapiens
IVFGKRFHYQDQE

SEQ ID NO: 73111 - protein, 13 aa, Homo Sapiens
VFGKRFHYQDQEF

SEQ ID NO: 73112 - protein, 13 aa, Homo Sapiens
FGKRFHYQDQEFL

SEQ ID NO: 73113 - protein, 13 aa, Homo Sapiens
GKRFHYQDQEFLK

SEQ ID NO: 73114 - protein, 13 aa, Homo Sapiens
KRFHYQDQEFLKM

SEQ ID NO: 73115 - protein, 13 aa, Homo Sapiens
RFHYQDQEFLKML

SEQ ID NO: 73116 - protein, 13 aa, Homo Sapiens
FHYQDQEFLKMLN

SEQ ID NO: 73117 - protein, 13 aa, Homo Sapiens
HYQDQEFLKMLNL

SEQ ID NO: 73118 - protein, 13 aa, Homo Sapiens
YQDQEFLKMLNLF

SEQ ID NO: 73119 - protein, 13 aa, Homo Sapiens
QDQEFLKMLNLFY

SEQ ID NO: 73120 - protein, 13 aa, Homo Sapiens
DQEFLKMLNLFYQ

SEQ ID NO: 73121 - protein, 13 aa, Homo Sapiens
QEFLKMLNLFYQT

SEQ ID NO: 73122 - protein, 13 aa, Homo Sapiens
EFLKMLNLFYQTF

SEQ ID NO: 73123 - protein, 13 aa, Homo Sapiens
FLKMLNLFYQTFS

SEQ ID NO: 73124 - protein, 13 aa, Homo Sapiens
LKMLNLFYQTFSL

SEQ ID NO: 73125 - protein, 13 aa, Homo Sapiens
KMLNLFYQTFSLI

SEQ ID NO: 73126 - protein, 13 aa, Homo Sapiens
MLNLFYQTFSLIS

SEQ ID NO: 73127 - protein, 13 aa, Homo Sapiens
LNLFYQTFSLISS

SEQ ID NO: 73128 - protein, 13 aa, Homo Sapiens
NLFYQTFSLISSV

SEQ ID NO: 73129 - protein, 13 aa, Homo Sapiens
LFYQTFSLISSVF

SEQ ID NO: 73130 - protein, 13 aa, Homo Sapiens
FYQTFSLISSVFG

SEQ ID NO: 73131 - protein, 13 aa, Homo Sapiens
YQTFSLISSVFGQ

SEQ ID NO: 73132 - protein, 13 aa, Homo Sapiens
QTFSLISSVFGQL

SEQ ID NO: 73133 - protein, 13 aa, Homo Sapiens
TFSLISSVFGQLF

SEQ ID NO: 73134 - protein, 13 aa, Homo Sapiens
FSLISSVFGQLFE

SEQ ID NO: 73135 - protein, 13 aa, Homo Sapiens
SLISSVFGQLFEL

SEQ ID NO: 73136 - protein, 13 aa, Homo Sapiens
LISSVFGQLFELF

SEQ ID NO: 73137 - protein, 13 aa, Homo Sapiens
ISSVFGQLFELFS

SEQ ID NO: 73138 - protein, 13 aa, Homo Sapiens
SSVFGQLFELFSG

SEQ ID NO: 73139 - protein, 13 aa, Homo Sapiens
SVFGQLFELFSGF

SEQ ID NO: 73140 - protein, 13 aa, Homo Sapiens
VFGQLFELFSGFL

SEQ ID NO: 73141 - protein, 13 aa, Homo Sapiens
FGQLFELFSGFLK

SEQ ID NO: 73142 - protein, 13 aa, Homo Sapiens
GQLFELFSGFLKY

SEQ ID NO: 73143 - protein, 13 aa, Homo Sapiens
QLFELFSGFLKYF

SEQ ID NO: 73144 - protein, 13 aa, Homo Sapiens
LFELFSGFLKYFP

SEQ ID NO: 73145 - protein, 13 aa, Homo Sapiens
FELFSGFLKYFPG

SEQ ID NO: 73146 - protein, 13 aa, Homo Sapiens
ELFSGFLKYFPGA

SEQ ID NO: 73147 - protein, 13 aa, Homo Sapiens
LFSGFLKYFPGAH

SEQ ID NO: 73148 - protein, 13 aa, Homo Sapiens
FSGFLKYFPGAHR

SEQ ID NO: 73149 - protein, 13 aa, Homo Sapiens
SGFLKYFPGAHRQ

SEQ ID NO: 73150 - protein, 13 aa, Homo Sapiens
GFLKYFPGAHRQV

SEQ ID NO: 73151 - protein, 13 aa, Homo Sapiens
FLKYFPGAHRQVY

SEQ ID NO: 73152 - protein, 13 aa, Homo Sapiens
LKYFPGAHRQVYK

SEQ ID NO: 73153 - protein, 13 aa, Homo Sapiens
KYFPGAHRQVYKN

SEQ ID NO: 73154 - protein, 13 aa, Homo Sapiens
YFPGAHRQVYKNL

SEQ ID NO: 73155 - protein, 13 aa, Homo Sapiens
FPGAHRQVYKNLQ

SEQ ID NO: 73156 - protein, 13 aa, Homo Sapiens
PGAHRQVYKNLQE

SEQ ID NO: 73157 - protein, 13 aa, Homo Sapiens
GAHRQVYKNLQEI

SEQ ID NO: 73158 - protein, 13 aa, Homo Sapiens
AHRQVYKNLQEIN

SEQ ID NO: 73159 - protein, 13 aa, Homo Sapiens
HRQVYKNLQEINA

SEQ ID NO: 73160 - protein, 13 aa, Homo Sapiens
RQVYKNLQEINAY

SEQ ID NO: 73161 - protein, 13 aa, Homo Sapiens
QVYKNLQEINAYI

SEQ ID NO: 73162 - protein, 13 aa, Homo Sapiens
VYKNLQEINAYIG

SEQ ID NO: 73163 - protein, 13 aa, Homo Sapiens
YKNLQEINAYIGH

SEQ ID NO: 73164 - protein, 13 aa, Homo Sapiens
KNLQEINAYIGHS

SEQ ID NO: 73165 - protein, 13 aa, Homo Sapiens
NLQEINAYIGHSV

SEQ ID NO: 73166 - protein, 13 aa, Homo Sapiens
LQEINAYIGHSVE

SEQ ID NO: 73167 - protein, 13 aa, Homo Sapiens
QEINAYIGHSVEK

SEQ ID NO: 73168 - protein, 13 aa, Homo Sapiens
EINAYIGHSVEKH

SEQ ID NO: 73169 - protein, 13 aa, Homo Sapiens
INAYIGHSVEKHR

SEQ ID NO: 73170 - protein, 13 aa, Homo Sapiens
NAYIGHSVEKHRE

SEQ ID NO: 73171 - protein, 13 aa, Homo Sapiens
AYIGHSVEKHRET

SEQ ID NO: 73172 - protein, 13 aa, Homo Sapiens
YIGHSVEKHRETL

SEQ ID NO: 73173 - protein, 13 aa, Homo Sapiens
IGHSVEKHRETLD

SEQ ID NO: 73174 - protein, 13 aa, Homo Sapiens
GHSVEKHRETLDP

SEQ ID NO: 73175 - protein, 13 aa, Homo Sapiens
HSVEKHRETLDPS

SEQ ID NO: 73176 - protein, 13 aa, Homo Sapiens
SVEKHRETLDPSA

SEQ ID NO: 73177 - protein, 13 aa, Homo Sapiens
VEKHRETLDPSAP

SEQ ID NO: 73178 - protein, 13 aa, Homo Sapiens
EKHRETLDPSAPK

SEQ ID NO: 73179 - protein, 13 aa, Homo Sapiens
KHRETLDPSAPKD

SEQ ID NO: 73180 - protein, 13 aa, Homo Sapiens
HRETLDPSAPKDL

SEQ ID NO: 73181 - protein, 13 aa, Homo Sapiens
RETLDPSAPKDLI

SEQ ID NO: 73182 - protein, 13 aa, Homo Sapiens
ETLDPSAPKDLID

SEQ ID NO: 73183 - protein, 13 aa, Homo Sapiens
TLDPSAPKDLIDT

SEQ ID NO: 73184 - protein, 13 aa, Homo Sapiens
LDPSAPKDLIDTY

SEQ ID NO: 73185 - protein, 13 aa, Homo Sapiens
DPSAPKDLIDTYL

SEQ ID NO: 73186 - protein, 13 aa, Homo Sapiens
PSAPKDLIDTYLL

SEQ ID NO: 73187 - protein, 13 aa, Homo Sapiens
SAPKDLIDTYLLH

SEQ ID NO: 73188 - protein, 13 aa, Homo Sapiens
APKDLIDTYLLHM

SEQ ID NO: 73189 - protein, 13 aa, Homo Sapiens
PKDLIDTYLLHME

SEQ ID NO: 73190 - protein, 13 aa, Homo Sapiens
KDLIDTYLLHMEK

SEQ ID NO: 73191 - protein, 13 aa, Homo Sapiens
DLIDTYLLHMEKE

SEQ ID NO: 73192 - protein, 13 aa, Homo Sapiens
LIDTYLLHMEKEK

SEQ ID NO: 73193 - protein, 13 aa, Homo Sapiens
IDTYLLHMEKEKS

SEQ ID NO: 73194 - protein, 13 aa, Homo Sapiens
DTYLLHMEKEKSN

SEQ ID NO: 73195 - protein, 13 aa, Homo Sapiens
TYLLHMEKEKSNA

SEQ ID NO: 73196 - protein, 13 aa, Homo Sapiens
YLLHMEKEKSNAH

SEQ ID NO: 73197 - protein, 13 aa, Homo Sapiens
LLHMEKEKSNAHS

SEQ ID NO: 73198 - protein, 13 aa, Homo Sapiens
LHMEKEKSNAHSE

SEQ ID NO: 73199 - protein, 13 aa, Homo Sapiens
HMEKEKSNAHSEF

SEQ ID NO: 73200 - protein, 13 aa, Homo Sapiens
MEKEKSNAHSEFS

SEQ ID NO: 73201 - protein, 13 aa, Homo Sapiens
EKEKSNAHSEFSH

SEQ ID NO: 73202 - protein, 13 aa, Homo Sapiens
KEKSNAHSEFSHQ

SEQ ID NO: 73203 - protein, 13 aa, Homo Sapiens
EKSNAHSEFSHQN

SEQ ID NO: 73204 - protein, 13 aa, Homo Sapiens
KSNAHSEFSHQNL

SEQ ID NO: 73205 - protein, 13 aa, Homo Sapiens
SNAHSEFSHQNLN

SEQ ID NO: 73206 - protein, 13 aa, Homo Sapiens
NAHSEFSHQNLNL

SEQ ID NO: 73207 - protein, 13 aa, Homo Sapiens
AHSEFSHQNLNLN

SEQ ID NO: 73208 - protein, 13 aa, Homo Sapiens
HSEFSHQNLNLNT

SEQ ID NO: 73209 - protein, 13 aa, Homo Sapiens
SEFSHQNLNLNTL

SEQ ID NO: 73210 - protein, 13 aa, Homo Sapiens
EFSHQNLNLNTLS

SEQ ID NO: 73211 - protein, 13 aa, Homo Sapiens
FSHQNLNLNTLSL

SEQ ID NO: 73212 - protein, 13 aa, Homo Sapiens
SHQNLNLNTLSLF

SEQ ID NO: 73213 - protein, 13 aa, Homo Sapiens
HQNLNLNTLSLFF

SEQ ID NO: 73214 - protein, 13 aa, Homo Sapiens
QNLNLNTLSLFFA

SEQ ID NO: 73215 - protein, 13 aa, Homo Sapiens
NLNLNTLSLFFAG

SEQ ID NO: 73216 - protein, 13 aa, Homo Sapiens
LNLNTLSLFFAGT

SEQ ID NO: 73217 - protein, 13 aa, Homo Sapiens
NLNTLSLFFAGTE

SEQ ID NO: 73218 - protein, 13 aa, Homo Sapiens
LNTLSLFFAGTET

SEQ ID NO: 73219 - protein, 13 aa, Homo Sapiens
NTLSLFFAGTETT

SEQ ID NO: 73220 - protein, 13 aa, Homo Sapiens
TLSLFFAGTETTS

SEQ ID NO: 73221 - protein, 13 aa, Homo Sapiens
LSLFFAGTETTST

SEQ ID NO: 73222 - protein, 13 aa, Homo Sapiens
SLFFAGTETTSTT

SEQ ID NO: 73223 - protein, 13 aa, Homo Sapiens
LFFAGTETTSTTL

SEQ ID NO: 73224 - protein, 13 aa, Homo Sapiens
FFAGTETTSTTLR

SEQ ID NO: 73225 - protein, 13 aa, Homo Sapiens
FAGTETTSTTLRY

SEQ ID NO: 73226 - protein, 13 aa, Homo Sapiens
AGTETTSTTLRYG

SEQ ID NO: 73227 - protein, 13 aa, Homo Sapiens
GTETTSTTLRYGF

SEQ ID NO: 73228 - protein, 13 aa, Homo Sapiens
TETTSTTLRYGFL

SEQ ID NO: 73229 - protein, 13 aa, Homo Sapiens
ETTSTTLRYGFLL

SEQ ID NO: 73230 - protein, 13 aa, Homo Sapiens
TTSTTLRYGFLLM

SEQ ID NO: 73231 - protein, 13 aa, Homo Sapiens
TSTTLRYGFLLML

SEQ ID NO: 73232 - protein, 13 aa, Homo Sapiens
STTLRYGFLLMLK

SEQ ID NO: 73233 - protein, 13 aa, Homo Sapiens
TTLRYGFLLMLKY

SEQ ID NO: 73234 - protein, 13 aa, Homo Sapiens
TLRYGFLLMLKYP

SEQ ID NO: 73235 - protein, 13 aa, Homo Sapiens
LRYGFLLMLKYPH

SEQ ID NO: 73236 - protein, 13 aa, Homo Sapiens
RYGFLLMLKYPHV

SEQ ID NO: 73237 - protein, 13 aa, Homo Sapiens
YGFLLMLKYPHVA

SEQ ID NO: 73238 - protein, 13 aa, Homo Sapiens
GFLLMLKYPHVAE

SEQ ID NO: 73239 - protein, 13 aa, Homo Sapiens
FLLMLKYPHVAER

SEQ ID NO: 73240 - protein, 13 aa, Homo Sapiens
LLMLKYPHVAERV

SEQ ID NO: 73241 - protein, 13 aa, Homo Sapiens
LMLKYPHVAERVY

SEQ ID NO: 73242 - protein, 13 aa, Homo Sapiens
MLKYPHVAERVYR

SEQ ID NO: 73243 - protein, 13 aa, Homo Sapiens
LKYPHVAERVYRE

SEQ ID NO: 73244 - protein, 13 aa, Homo Sapiens
KYPHVAERVYREI

SEQ ID NO: 73245 - protein, 13 aa, Homo Sapiens
YPHVAERVYREIE

SEQ ID NO: 73246 - protein, 13 aa, Homo Sapiens
PHVAERVYREIEQ

SEQ ID NO: 73247 - protein, 13 aa, Homo Sapiens
HVAERVYREIEQV

SEQ ID NO: 73248 - protein, 13 aa, Homo Sapiens
VAERVYREIEQVI

SEQ ID NO: 73249 - protein, 13 aa, Homo Sapiens
AERVYREIEQVIG

SEQ ID NO: 73250 - protein, 13 aa, Homo Sapiens
ERVYREIEQVIGP

SEQ ID NO: 73251 - protein, 13 aa, Homo Sapiens
RVYREIEQVIGPH

SEQ ID NO: 73252 - protein, 13 aa, Homo Sapiens
VYREIEQVIGPHR

SEQ ID NO: 73253 - protein, 13 aa, Homo Sapiens
YREIEQVIGPHRP

SEQ ID NO: 73254 - protein, 13 aa, Homo Sapiens
REIEQVIGPHRPP

SEQ ID NO: 73255 - protein, 13 aa, Homo Sapiens
EIEQVIGPHRPPE

SEQ ID NO: 73256 - protein, 13 aa, Homo Sapiens
IEQVIGPHRPPEL

SEQ ID NO: 73257 - protein, 13 aa, Homo Sapiens
EQVIGPHRPPELH

SEQ ID NO: 73258 - protein, 13 aa, Homo Sapiens
QVIGPHRPPELHD

SEQ ID NO: 73259 - protein, 13 aa, Homo Sapiens
VIGPHRPPELHDR

SEQ ID NO: 73260 - protein, 13 aa, Homo Sapiens
IGPHRPPELHDRA

SEQ ID NO: 73261 - protein, 13 aa, Homo Sapiens
GPHRPPELHDRAK

SEQ ID NO: 73262 - protein, 13 aa, Homo Sapiens
PHRPPELHDRAKM

SEQ ID NO: 73263 - protein, 13 aa, Homo Sapiens
HRPPELHDRAKMP

SEQ ID NO: 73264 - protein, 13 aa, Homo Sapiens
RPPELHDRAKMPY

SEQ ID NO: 73265 - protein, 13 aa, Homo Sapiens
PPELHDRAKMPYT

SEQ ID NO: 73266 - protein, 13 aa, Homo Sapiens
PELHDRAKMPYTE

SEQ ID NO: 73267 - protein, 13 aa, Homo Sapiens
ELHDRAKMPYTEA

SEQ ID NO: 73268 - protein, 13 aa, Homo Sapiens
LHDRAKMPYTEAV

SEQ ID NO: 73269 - protein, 13 aa, Homo Sapiens
HDRAKMPYTEAVI

SEQ ID NO: 73270 - protein, 13 aa, Homo Sapiens
DRAKMPYTEAVIY

SEQ ID NO: 73271 - protein, 13 aa, Homo Sapiens
RAKMPYTEAVIYE

SEQ ID NO: 73272 - protein, 13 aa, Homo Sapiens
AKMPYTEAVIYEI

SEQ ID NO: 73273 - protein, 13 aa, Homo Sapiens
KMPYTEAVIYEIQ

SEQ ID NO: 73274 - protein, 13 aa, Homo Sapiens
MPYTEAVIYEIQR

SEQ ID NO: 73275 - protein, 13 aa, Homo Sapiens
PYTEAVIYEIQRF

SEQ ID NO: 73276 - protein, 13 aa, Homo Sapiens
YTEAVIYEIQRFS

SEQ ID NO: 73277 - protein, 13 aa, Homo Sapiens
TEAVIYEIQRFSD

SEQ ID NO: 73278 - protein, 13 aa, Homo Sapiens
EAVIYEIQRFSDL

SEQ ID NO: 73279 - protein, 13 aa, Homo Sapiens
AVIYEIQRFSDLL

SEQ ID NO: 73280 - protein, 13 aa, Homo Sapiens
VIYEIQRFSDLLP

SEQ ID NO: 73281 - protein, 13 aa, Homo Sapiens
IYEIQRFSDLLPM

SEQ ID NO: 73282 - protein, 13 aa, Homo Sapiens
YEIQRFSDLLPMG

SEQ ID NO: 73283 - protein, 13 aa, Homo Sapiens
EIQRFSDLLPMGV

SEQ ID NO: 73284 - protein, 13 aa, Homo Sapiens
IQRFSDLLPMGVP

SEQ ID NO: 73285 - protein, 13 aa, Homo Sapiens
QRFSDLLPMGVPH

SEQ ID NO: 73286 - protein, 13 aa, Homo Sapiens
RFSDLLPMGVPHI

SEQ ID NO: 73287 - protein, 13 aa, Homo Sapiens
FSDLLPMGVPHIV

SEQ ID NO: 73288 - protein, 13 aa, Homo Sapiens
SDLLPMGVPHIVT

SEQ ID NO: 73289 - protein, 13 aa, Homo Sapiens
DLLPMGVPHIVTQ

SEQ ID NO: 73290 - protein, 13 aa, Homo Sapiens
LLPMGVPHIVTQH

SEQ ID NO: 73291 - protein, 13 aa, Homo Sapiens
LPMGVPHIVTQHT

SEQ ID NO: 73292 - protein, 13 aa, Homo Sapiens
PMGVPHIVTQHTS

SEQ ID NO: 73293 - protein, 13 aa, Homo Sapiens
MGVPHIVTQHTSF

SEQ ID NO: 73294 - protein, 13 aa, Homo Sapiens
GVPHIVTQHTSFR

SEQ ID NO: 73295 - protein, 13 aa, Homo Sapiens
VPHIVTQHTSFRG

SEQ ID NO: 73296 - protein, 13 aa, Homo Sapiens
PHIVTQHTSFRGY

SEQ ID NO: 73297 - protein, 13 aa, Homo Sapiens
HIVTQHTSFRGYI

SEQ ID NO: 73298 - protein, 13 aa, Homo Sapiens
IVTQHTSFRGYII

SEQ ID NO: 73299 - protein, 13 aa, Homo Sapiens
VTQHTSFRGYIIP

SEQ ID NO: 73300 - protein, 13 aa, Homo Sapiens
TQHTSFRGYIIPK

SEQ ID NO: 73301 - protein, 13 aa, Homo Sapiens
QHTSFRGYIIPKD

SEQ ID NO: 73302 - protein, 13 aa, Homo Sapiens
HTSFRGYIIPKDT

SEQ ID NO: 73303 - protein, 13 aa, Homo Sapiens
TSFRGYIIPKDTE

SEQ ID NO: 73304 - protein, 13 aa, Homo Sapiens
SFRGYIIPKDTEV

SEQ ID NO: 73305 - protein, 13 aa, Homo Sapiens
FRGYIIPKDTEVF

SEQ ID NO: 73306 - protein, 13 aa, Homo Sapiens
RGYIIPKDTEVFL

SEQ ID NO: 73307 - protein, 13 aa, Homo Sapiens
GYIIPKDTEVFLI

SEQ ID NO: 73308 - protein, 13 aa, Homo Sapiens
YIIPKDTEVFLIL

SEQ ID NO: 73309 - protein, 13 aa, Homo Sapiens
IIPKDTEVFLILS

SEQ ID NO: 73310 - protein, 13 aa, Homo Sapiens
IPKDTEVFLILST

SEQ ID NO: 73311 - protein, 13 aa, Homo Sapiens
PKDTEVFLILSTA

SEQ ID NO: 73312 - protein, 13 aa, Homo Sapiens
KDTEVFLILSTAL

SEQ ID NO: 73313 - protein, 13 aa, Homo Sapiens
DTEVFLILSTALH

SEQ ID NO: 73314 - protein, 13 aa, Homo Sapiens
TEVFLILSTALHD

SEQ ID NO: 73315 - protein, 13 aa, Homo Sapiens
EVFLILSTALHDP

SEQ ID NO: 73316 - protein, 13 aa, Homo Sapiens
VFLILSTALHDPH

SEQ ID NO: 73317 - protein, 13 aa, Homo Sapiens
FLILSTALHDPHY

SEQ ID NO: 73318 - protein, 13 aa, Homo Sapiens
LILSTALHDPHYF

SEQ ID NO: 73319 - protein, 13 aa, Homo Sapiens
ILSTALHDPHYFE

SEQ ID NO: 73320 - protein, 13 aa, Homo Sapiens
LSTALHDPHYFEK

SEQ ID NO: 73321 - protein, 13 aa, Homo Sapiens
STALHDPHYFEKP

SEQ ID NO: 73322 - protein, 13 aa, Homo Sapiens
TALHDPHYFEKPD

SEQ ID NO: 73323 - protein, 13 aa, Homo Sapiens
ALHDPHYFEKPDA

SEQ ID NO: 73324 - protein, 13 aa, Homo Sapiens
LHDPHYFEKPDAF

SEQ ID NO: 73325 - protein, 13 aa, Homo Sapiens
HDPHYFEKPDAFN

SEQ ID NO: 73326 - protein, 13 aa, Homo Sapiens
DPHYFEKPDAFNP

SEQ ID NO: 73327 - protein, 13 aa, Homo Sapiens
PHYFEKPDAFNPD

SEQ ID NO: 73328 - protein, 13 aa, Homo Sapiens
HYFEKPDAFNPDH

SEQ ID NO: 73329 - protein, 13 aa, Homo Sapiens
YFEKPDAFNPDHF

SEQ ID NO: 73330 - protein, 13 aa, Homo Sapiens
FEKPDAFNPDHFL

SEQ ID NO: 73331 - protein, 13 aa, Homo Sapiens
EKPDAFNPDHFLD

SEQ ID NO: 73332 - protein, 13 aa, Homo Sapiens
KPDAFNPDHFLDA

SEQ ID NO: 73333 - protein, 13 aa, Homo Sapiens
PDAFNPDHFLDAN

SEQ ID NO: 73334 - protein, 13 aa, Homo Sapiens
DAFNPDHFLDANG

SEQ ID NO: 73335 - protein, 13 aa, Homo Sapiens
AFNPDHFLDANGA

SEQ ID NO: 73336 - protein, 13 aa, Homo Sapiens
FNPDHFLDANGAL

SEQ ID NO: 73337 - protein, 13 aa, Homo Sapiens
NPDHFLDANGALK

SEQ ID NO: 73338 - protein, 13 aa, Homo Sapiens
PDHFLDANGALKK

SEQ ID NO: 73339 - protein, 13 aa, Homo Sapiens
DHFLDANGALKKT

SEQ ID NO: 73340 - protein, 13 aa, Homo Sapiens
HFLDANGALKKTE

SEQ ID NO: 73341 - protein, 13 aa, Homo Sapiens
FLDANGALKKTEA

SEQ ID NO: 73342 - protein, 13 aa, Homo Sapiens
LDANGALKKTEAF

SEQ ID NO: 73343 - protein, 13 aa, Homo Sapiens
DANGALKKTEAFI

SEQ ID NO: 73344 - protein, 13 aa, Homo Sapiens
ANGALKKTEAFIP

SEQ ID NO: 73345 - protein, 13 aa, Homo Sapiens
NGALKKTEAFIPF

SEQ ID NO: 73346 - protein, 13 aa, Homo Sapiens
GALKKTEAFIPFS

SEQ ID NO: 73347 - protein, 13 aa, Homo Sapiens
ALKKTEAFIPFSL

SEQ ID NO: 73348 - protein, 13 aa, Homo Sapiens
LKKTEAFIPFSLG

SEQ ID NO: 73349 - protein, 13 aa, Homo Sapiens
KKTEAFIPFSLGK

SEQ ID NO: 73350 - protein, 13 aa, Homo Sapiens
KTEAFIPFSLGKR

SEQ ID NO: 73351 - protein, 13 aa, Homo Sapiens
TEAFIPFSLGKRI

SEQ ID NO: 73352 - protein, 13 aa, Homo Sapiens
EAFIPFSLGKRIC

SEQ ID NO: 73353 - protein, 13 aa, Homo Sapiens
AFIPFSLGKRICL

SEQ ID NO: 73354 - protein, 13 aa, Homo Sapiens
FIPFSLGKRICLG

SEQ ID NO: 73355 - protein, 13 aa, Homo Sapiens
IPFSLGKRICLGE

SEQ ID NO: 73356 - protein, 13 aa, Homo Sapiens
PFSLGKRICLGEG

SEQ ID NO: 73357 - protein, 13 aa, Homo Sapiens
FSLGKRICLGEGI

SEQ ID NO: 73358 - protein, 13 aa, Homo Sapiens
SLGKRICLGEGIA

SEQ ID NO: 73359 - protein, 13 aa, Homo Sapiens
LGKRICLGEGIAR

SEQ ID NO: 73360 - protein, 13 aa, Homo Sapiens
GKRICLGEGIARA

SEQ ID NO: 73361 - protein, 13 aa, Homo Sapiens
KRICLGEGIARAE

SEQ ID NO: 73362 - protein, 13 aa, Homo Sapiens
RICLGEGIARAEL

SEQ ID NO: 73363 - protein, 13 aa, Homo Sapiens
ICLGEGIARAELF

SEQ ID NO: 73364 - protein, 13 aa, Homo Sapiens
CLGEGIARAELFL

SEQ ID NO: 73365 - protein, 13 aa, Homo Sapiens
LGEGIARAELFLF

SEQ ID NO: 73366 - protein, 13 aa, Homo Sapiens
GEGIARAELFLFF

SEQ ID NO: 73367 - protein, 13 aa, Homo Sapiens
EGIARAELFLFFT

SEQ ID NO: 73368 - protein, 13 aa, Homo Sapiens
GIARAELFLFFTT

SEQ ID NO: 73369 - protein, 13 aa, Homo Sapiens
IARAELFLFFTTI

SEQ ID NO: 73370 - protein, 13 aa, Homo Sapiens
ARAELFLFFTTIL

SEQ ID NO: 73371 - protein, 13 aa, Homo Sapiens
RAELFLFFTTILQ

SEQ ID NO: 73372 - protein, 13 aa, Homo Sapiens
AELFLFFTTILQN

SEQ ID NO: 73373 - protein, 13 aa, Homo Sapiens
ELFLFFTTILQNF

SEQ ID NO: 73374 - protein, 13 aa, Homo Sapiens
LFLFFTTILQNFS

SEQ ID NO: 73375 - protein, 13 aa, Homo Sapiens
FLFFTTILQNFSM

SEQ ID NO: 73376 - protein, 13 aa, Homo Sapiens
LFFTTILQNFSMA

SEQ ID NO: 73377 - protein, 13 aa, Homo Sapiens
FFTTILQNFSMAS

SEQ ID NO: 73378 - protein, 13 aa, Homo Sapiens
FTTILQNFSMASP

SEQ ID NO: 73379 - protein, 13 aa, Homo Sapiens
TTILQNFSMASPV

SEQ ID NO: 73380 - protein, 13 aa, Homo Sapiens
TILQNFSMASPVA

SEQ ID NO: 73381 - protein, 13 aa, Homo Sapiens
ILQNFSMASPVAP

SEQ ID NO: 73382 - protein, 13 aa, Homo Sapiens
LQNFSMASPVAPE

SEQ ID NO: 73383 - protein, 13 aa, Homo Sapiens
QNFSMASPVAPED

SEQ ID NO: 73384 - protein, 13 aa, Homo Sapiens
NFSMASPVAPEDI

SEQ ID NO: 73385 - protein, 13 aa, Homo Sapiens
FSMASPVAPEDID

SEQ ID NO: 73386 - protein, 13 aa, Homo Sapiens
SMASPVAPEDIDL

SEQ ID NO: 73387 - protein, 13 aa, Homo Sapiens
MASPVAPEDIDLT

SEQ ID NO: 73388 - protein, 13 aa, Homo Sapiens
ASPVAPEDIDLTP

SEQ ID NO: 73389 - protein, 13 aa, Homo Sapiens
SPVAPEDIDLTPQ

SEQ ID NO: 73390 - protein, 13 aa, Homo Sapiens
PVAPEDIDLTPQE

SEQ ID NO: 73391 - protein, 13 aa, Homo Sapiens
VAPEDIDLTPQEC

SEQ ID NO: 73392 - protein, 13 aa, Homo Sapiens
APEDIDLTPQECG

SEQ ID NO: 73393 - protein, 13 aa, Homo Sapiens
PEDIDLTPQECGV

SEQ ID NO: 73394 - protein, 13 aa, Homo Sapiens
EDIDLTPQECGVG

SEQ ID NO: 73395 - protein, 13 aa, Homo Sapiens
DIDLTPQECGVGK

SEQ ID NO: 73396 - protein, 13 aa, Homo Sapiens
IDLTPQECGVGKI

SEQ ID NO: 73397 - protein, 13 aa, Homo Sapiens
DLTPQECGVGKIP

SEQ ID NO: 73398 - protein, 13 aa, Homo Sapiens
LTPQECGVGKIPP

SEQ ID NO: 73399 - protein, 13 aa, Homo Sapiens
TPQECGVGKIPPT

SEQ ID NO: 73400 - protein, 13 aa, Homo Sapiens
PQECGVGKIPPTY

SEQ ID NO: 73401 - protein, 13 aa, Homo Sapiens
QECGVGKIPPTYQ

SEQ ID NO: 73402 - protein, 13 aa, Homo Sapiens
ECGVGKIPPTYQI

SEQ ID NO: 73403 - protein, 13 aa, Homo Sapiens
CGVGKIPPTYQIR

SEQ ID NO: 73404 - protein, 13 aa, Homo Sapiens
GVGKIPPTYQIRF

SEQ ID NO: 73405 - protein, 13 aa, Homo Sapiens
VGKIPPTYQIRFL

SEQ ID NO: 73406 - protein, 13 aa, Homo Sapiens
GKIPPTYQIRFLP

SEQ ID NO: 73407 - protein, 13 aa, Homo Sapiens
KIPPTYQIRFLPR

SEQ ID NO: 73408 - protein, 14 aa, Homo Sapiens
MELSVLLFLALLTG

SEQ ID NO: 73409 - protein, 14 aa, Homo Sapiens
ELSVLLFLALLTGL

SEQ ID NO: 73410 - protein, 14 aa, Homo Sapiens
LSVLLFLALLTGLL

SEQ ID NO: 73411 - protein, 14 aa, Homo Sapiens
SVLLFLALLTGLLL

SEQ ID NO: 73412 - protein, 14 aa, Homo Sapiens
VLLFLALLTGLLLL

SEQ ID NO: 73413 - protein, 14 aa, Homo Sapiens
LLFLALLTGLLLLL

SEQ ID NO: 73414 - protein, 14 aa, Homo Sapiens
LFLALLTGLLLLLV

SEQ ID NO: 73415 - protein, 14 aa, Homo Sapiens
FLALLTGLLLLLVQ

SEQ ID NO: 73416 - protein, 14 aa, Homo Sapiens
LALLTGLLLLLVQR

SEQ ID NO: 73417 - protein, 14 aa, Homo Sapiens
ALLTGLLLLLVQRH

SEQ ID NO: 73418 - protein, 14 aa, Homo Sapiens
LLTGLLLLLVQRHP

SEQ ID NO: 73419 - protein, 14 aa, Homo Sapiens
LTGLLLLLVQRHPN

SEQ ID NO: 73420 - protein, 14 aa, Homo Sapiens
TGLLLLLVQRHPNT

SEQ ID NO: 73421 - protein, 14 aa, Homo Sapiens
GLLLLLVQRHPNTH

SEQ ID NO: 73422 - protein, 14 aa, Homo Sapiens
LLLLLVQRHPNTHD

SEQ ID NO: 73423 - protein, 14 aa, Homo Sapiens
LLLLVQRHPNTHDR

SEQ ID NO: 73424 - protein, 14 aa, Homo Sapiens
LLLVQRHPNTHDRL

SEQ ID NO: 73425 - protein, 14 aa, Homo Sapiens
LLVQRHPNTHDRLP

SEQ ID NO: 73426 - protein, 14 aa, Homo Sapiens
LVQRHPNTHDRLPP

SEQ ID NO: 73427 - protein, 14 aa, Homo Sapiens
VQRHPNTHDRLPPG

SEQ ID NO: 73428 - protein, 14 aa, Homo Sapiens
QRHPNTHDRLPPGP

SEQ ID NO: 73429 - protein, 14 aa, Homo Sapiens
RHPNTHDRLPPGPR

SEQ ID NO: 73430 - protein, 14 aa, Homo Sapiens
HPNTHDRLPPGPRP

SEQ ID NO: 73431 - protein, 14 aa, Homo Sapiens
PNTHDRLPPGPRPL

SEQ ID NO: 73432 - protein, 14 aa, Homo Sapiens
NTHDRLPPGPRPLP

SEQ ID NO: 73433 - protein, 14 aa, Homo Sapiens
THDRLPPGPRPLPL

SEQ ID NO: 73434 - protein, 14 aa, Homo Sapiens
HDRLPPGPRPLPLL

SEQ ID NO: 73435 - protein, 14 aa, Homo Sapiens
DRLPPGPRPLPLLG

SEQ ID NO: 73436 - protein, 14 aa, Homo Sapiens
RLPPGPRPLPLLGN

SEQ ID NO: 73437 - protein, 14 aa, Homo Sapiens
LPPGPRPLPLLGNL

SEQ ID NO: 73438 - protein, 14 aa, Homo Sapiens
PPGPRPLPLLGNLL

SEQ ID NO: 73439 - protein, 14 aa, Homo Sapiens
PGPRPLPLLGNLLQ

SEQ ID NO: 73440 - protein, 14 aa, Homo Sapiens
GPRPLPLLGNLLQM

SEQ ID NO: 73441 - protein, 14 aa, Homo Sapiens
PRPLPLLGNLLQMD

SEQ ID NO: 73442 - protein, 14 aa, Homo Sapiens
RPLPLLGNLLQMDR

SEQ ID NO: 73443 - protein, 14 aa, Homo Sapiens
PLPLLGNLLQMDRR

SEQ ID NO: 73444 - protein, 14 aa, Homo Sapiens
LPLLGNLLQMDRRG

SEQ ID NO: 73445 - protein, 14 aa, Homo Sapiens
PLLGNLLQMDRRGL

SEQ ID NO: 73446 - protein, 14 aa, Homo Sapiens
LLGNLLQMDRRGLL

SEQ ID NO: 73447 - protein, 14 aa, Homo Sapiens
LGNLLQMDRRGLLK

SEQ ID NO: 73448 - protein, 14 aa, Homo Sapiens
GNLLQMDRRGLLKS

SEQ ID NO: 73449 - protein, 14 aa, Homo Sapiens
NLLQMDRRGLLKSF

SEQ ID NO: 73450 - protein, 14 aa, Homo Sapiens
LLQMDRRGLLKSFL

SEQ ID NO: 73451 - protein, 14 aa, Homo Sapiens
LQMDRRGLLKSFLR

SEQ ID NO: 73452 - protein, 14 aa, Homo Sapiens
QMDRRGLLKSFLRF

SEQ ID NO: 73453 - protein, 14 aa, Homo Sapiens
MDRRGLLKSFLRFR

SEQ ID NO: 73454 - protein, 14 aa, Homo Sapiens
DRRGLLKSFLRFRE

SEQ ID NO: 73455 - protein, 14 aa, Homo Sapiens
RRGLLKSFLRFREK

SEQ ID NO: 73456 - protein, 14 aa, Homo Sapiens
RGLLKSFLRFREKY

SEQ ID NO: 73457 - protein, 14 aa, Homo Sapiens
GLLKSFLRFREKYG

SEQ ID NO: 73458 - protein, 14 aa, Homo Sapiens
LLKSFLRFREKYGD

SEQ ID NO: 73459 - protein, 14 aa, Homo Sapiens
LKSFLRFREKYGDV

SEQ ID NO: 73460 - protein, 14 aa, Homo Sapiens
KSFLRFREKYGDVF

SEQ ID NO: 73461 - protein, 14 aa, Homo Sapiens
SFLRFREKYGDVFT

SEQ ID NO: 73462 - protein, 14 aa, Homo Sapiens
FLRFREKYGDVFTV

SEQ ID NO: 73463 - protein, 14 aa, Homo Sapiens
LRFREKYGDVFTVH

SEQ ID NO: 73464 - protein, 14 aa, Homo Sapiens
RFREKYGDVFTVHL

SEQ ID NO: 73465 - protein, 14 aa, Homo Sapiens
FREKYGDVFTVHLG

SEQ ID NO: 73466 - protein, 14 aa, Homo Sapiens
REKYGDVFTVHLGP

SEQ ID NO: 73467 - protein, 14 aa, Homo Sapiens
EKYGDVFTVHLGPR

SEQ ID NO: 73468 - protein, 14 aa, Homo Sapiens
KYGDVFTVHLGPRP

SEQ ID NO: 73469 - protein, 14 aa, Homo Sapiens
YGDVFTVHLGPRPV

SEQ ID NO: 73470 - protein, 14 aa, Homo Sapiens
GDVFTVHLGPRPVV

SEQ ID NO: 73471 - protein, 14 aa, Homo Sapiens
DVFTVHLGPRPVVM

SEQ ID NO: 73472 - protein, 14 aa, Homo Sapiens
VFTVHLGPRPVVML

SEQ ID NO: 73473 - protein, 14 aa, Homo Sapiens
FTVHLGPRPVVMLC

SEQ ID NO: 73474 - protein, 14 aa, Homo Sapiens
TVHLGPRPVVMLCG

SEQ ID NO: 73475 - protein, 14 aa, Homo Sapiens
VHLGPRPVVMLCGV

SEQ ID NO: 73476 - protein, 14 aa, Homo Sapiens
HLGPRPVVMLCGVE

SEQ ID NO: 73477 - protein, 14 aa, Homo Sapiens
LGPRPVVMLCGVEA

SEQ ID NO: 73478 - protein, 14 aa, Homo Sapiens
GPRPVVMLCGVEAI

SEQ ID NO: 73479 - protein, 14 aa, Homo Sapiens
PRPVVMLCGVEAIR

SEQ ID NO: 73480 - protein, 14 aa, Homo Sapiens
RPVVMLCGVEAIRE

SEQ ID NO: 73481 - protein, 14 aa, Homo Sapiens
PVVMLCGVEAIREA

SEQ ID NO: 73482 - protein, 14 aa, Homo Sapiens
VVMLCGVEAIREAL

SEQ ID NO: 73483 - protein, 14 aa, Homo Sapiens
VMLCGVEAIREALV

SEQ ID NO: 73484 - protein, 14 aa, Homo Sapiens
MLCGVEAIREALVD

SEQ ID NO: 73485 - protein, 14 aa, Homo Sapiens
LCGVEAIREALVDK

SEQ ID NO: 73486 - protein, 14 aa, Homo Sapiens
CGVEAIREALVDKA

SEQ ID NO: 73487 - protein, 14 aa, Homo Sapiens
GVEAIREALVDKAE

SEQ ID NO: 73488 - protein, 14 aa, Homo Sapiens
VEAIREALVDKAEA

SEQ ID NO: 73489 - protein, 14 aa, Homo Sapiens
EAIREALVDKAEAF

SEQ ID NO: 73490 - protein, 14 aa, Homo Sapiens
AIREALVDKAEAFS

SEQ ID NO: 73491 - protein, 14 aa, Homo Sapiens
IREALVDKAEAFSG

SEQ ID NO: 73492 - protein, 14 aa, Homo Sapiens
REALVDKAEAFSGR

SEQ ID NO: 73493 - protein, 14 aa, Homo Sapiens
EALVDKAEAFSGRG

SEQ ID NO: 73494 - protein, 14 aa, Homo Sapiens
ALVDKAEAFSGRGK

SEQ ID NO: 73495 - protein, 14 aa, Homo Sapiens
LVDKAEAFSGRGKI

SEQ ID NO: 73496 - protein, 14 aa, Homo Sapiens
VDKAEAFSGRGKIA

SEQ ID NO: 73497 - protein, 14 aa, Homo Sapiens
DKAEAFSGRGKIAM

SEQ ID NO: 73498 - protein, 14 aa, Homo Sapiens
KAEAFSGRGKIAMV

SEQ ID NO: 73499 - protein, 14 aa, Homo Sapiens
AEAFSGRGKIAMVD

SEQ ID NO: 73500 - protein, 14 aa, Homo Sapiens
EAFSGRGKIAMVDP

SEQ ID NO: 73501 - protein, 14 aa, Homo Sapiens
AFSGRGKIAMVDPF

SEQ ID NO: 73502 - protein, 14 aa, Homo Sapiens
FSGRGKIAMVDPFF

SEQ ID NO: 73503 - protein, 14 aa, Homo Sapiens
SGRGKIAMVDPFFR

SEQ ID NO: 73504 - protein, 14 aa, Homo Sapiens
GRGKIAMVDPFFRG

SEQ ID NO: 73505 - protein, 14 aa, Homo Sapiens
RGKIAMVDPFFRGY

SEQ ID NO: 73506 - protein, 14 aa, Homo Sapiens
GKIAMVDPFFRGYG

SEQ ID NO: 73507 - protein, 14 aa, Homo Sapiens
KIAMVDPFFRGYGV

SEQ ID NO: 73508 - protein, 14 aa, Homo Sapiens
IAMVDPFFRGYGVI

SEQ ID NO: 73509 - protein, 14 aa, Homo Sapiens
AMVDPFFRGYGVIF

SEQ ID NO: 73510 - protein, 14 aa, Homo Sapiens
MVDPFFRGYGVIFA

SEQ ID NO: 73511 - protein, 14 aa, Homo Sapiens
VDPFFRGYGVIFAN

SEQ ID NO: 73512 - protein, 14 aa, Homo Sapiens
DPFFRGYGVIFANG

SEQ ID NO: 73513 - protein, 14 aa, Homo Sapiens
PFFRGYGVIFANGN

SEQ ID NO: 73514 - protein, 14 aa, Homo Sapiens
FFRGYGVIFANGNR

SEQ ID NO: 73515 - protein, 14 aa, Homo Sapiens
FRGYGVIFANGNRW

SEQ ID NO: 73516 - protein, 14 aa, Homo Sapiens
RGYGVIFANGNRWK

SEQ ID NO: 73517 - protein, 14 aa, Homo Sapiens
GYGVIFANGNRWKV

SEQ ID NO: 73518 - protein, 14 aa, Homo Sapiens
YGVIFANGNRWKVL

SEQ ID NO: 73519 - protein, 14 aa, Homo Sapiens
GVIFANGNRWKVLR

SEQ ID NO: 73520 - protein, 14 aa, Homo Sapiens
VIFANGNRWKVLRR

SEQ ID NO: 73521 - protein, 14 aa, Homo Sapiens
IFANGNRWKVLRRF

SEQ ID NO: 73522 - protein, 14 aa, Homo Sapiens
FANGNRWKVLRRFS

SEQ ID NO: 73523 - protein, 14 aa, Homo Sapiens
ANGNRWKVLRRFSV

SEQ ID NO: 73524 - protein, 14 aa, Homo Sapiens
NGNRWKVLRRFSVT

SEQ ID NO: 73525 - protein, 14 aa, Homo Sapiens
GNRWKVLRRFSVTT

SEQ ID NO: 73526 - protein, 14 aa, Homo Sapiens
NRWKVLRRFSVTTM

SEQ ID NO: 73527 - protein, 14 aa, Homo Sapiens
RWKVLRRFSVTTMR

SEQ ID NO: 73528 - protein, 14 aa, Homo Sapiens
WKVLRRFSVTTMRD

SEQ ID NO: 73529 - protein, 14 aa, Homo Sapiens
KVLRRFSVTTMRDF

SEQ ID NO: 73530 - protein, 14 aa, Homo Sapiens
VLRRFSVTTMRDFG

SEQ ID NO: 73531 - protein, 14 aa, Homo Sapiens
LRRFSVTTMRDFGM

SEQ ID NO: 73532 - protein, 14 aa, Homo Sapiens
RRFSVTTMRDFGMG

SEQ ID NO: 73533 - protein, 14 aa, Homo Sapiens
RFSVTTMRDFGMGK

SEQ ID NO: 73534 - protein, 14 aa, Homo Sapiens
FSVTTMRDFGMGKR

SEQ ID NO: 73535 - protein, 14 aa, Homo Sapiens
SVTTMRDFGMGKRS

SEQ ID NO: 73536 - protein, 14 aa, Homo Sapiens
VTTMRDFGMGKRSV

SEQ ID NO: 73537 - protein, 14 aa, Homo Sapiens
TTMRDFGMGKRSVE

SEQ ID NO: 73538 - protein, 14 aa, Homo Sapiens
TMRDFGMGKRSVEE

SEQ ID NO: 73539 - protein, 14 aa, Homo Sapiens
MRDFGMGKRSVEER

SEQ ID NO: 73540 - protein, 14 aa, Homo Sapiens
RDFGMGKRSVEERI

SEQ ID NO: 73541 - protein, 14 aa, Homo Sapiens
DFGMGKRSVEERIQ

SEQ ID NO: 73542 - protein, 14 aa, Homo Sapiens
FGMGKRSVEERIQE

SEQ ID NO: 73543 - protein, 14 aa, Homo Sapiens
GMGKRSVEERIQEE

SEQ ID NO: 73544 - protein, 14 aa, Homo Sapiens
MGKRSVEERIQEEA

SEQ ID NO: 73545 - protein, 14 aa, Homo Sapiens
GKRSVEERIQEEAQ

SEQ ID NO: 73546 - protein, 14 aa, Homo Sapiens
KRSVEERIQEEAQC

SEQ ID NO: 73547 - protein, 14 aa, Homo Sapiens
RSVEERIQEEAQCL

SEQ ID NO: 73548 - protein, 14 aa, Homo Sapiens
SVEERIQEEAQCLI

SEQ ID NO: 73549 - protein, 14 aa, Homo Sapiens
VEERIQEEAQCLIE

SEQ ID NO: 73550 - protein, 14 aa, Homo Sapiens
EERIQEEAQCLIEE

SEQ ID NO: 73551 - protein, 14 aa, Homo Sapiens
ERIQEEAQCLIEEL

SEQ ID NO: 73552 - protein, 14 aa, Homo Sapiens
RIQEEAQCLIEELR

SEQ ID NO: 73553 - protein, 14 aa, Homo Sapiens
IQEEAQCLIEELRK

SEQ ID NO: 73554 - protein, 14 aa, Homo Sapiens
QEEAQCLIEELRKS

SEQ ID NO: 73555 - protein, 14 aa, Homo Sapiens
EEAQCLIEELRKSK

SEQ ID NO: 73556 - protein, 14 aa, Homo Sapiens
EAQCLIEELRKSKG

SEQ ID NO: 73557 - protein, 14 aa, Homo Sapiens
AQCLIEELRKSKGA

SEQ ID NO: 73558 - protein, 14 aa, Homo Sapiens
QCLIEELRKSKGAL

SEQ ID NO: 73559 - protein, 14 aa, Homo Sapiens
CLIEELRKSKGALM

SEQ ID NO: 73560 - protein, 14 aa, Homo Sapiens
LIEELRKSKGALMD

SEQ ID NO: 73561 - protein, 14 aa, Homo Sapiens
IEELRKSKGALMDP

SEQ ID NO: 73562 - protein, 14 aa, Homo Sapiens
EELRKSKGALMDPT

SEQ ID NO: 73563 - protein, 14 aa, Homo Sapiens
ELRKSKGALMDPTF

SEQ ID NO: 73564 - protein, 14 aa, Homo Sapiens
LRKSKGALMDPTFL

SEQ ID NO: 73565 - protein, 14 aa, Homo Sapiens
RKSKGALMDPTFLF

SEQ ID NO: 73566 - protein, 14 aa, Homo Sapiens
KSKGALMDPTFLFQ

SEQ ID NO: 73567 - protein, 14 aa, Homo Sapiens
SKGALMDPTFLFQS

SEQ ID NO: 73568 - protein, 14 aa, Homo Sapiens
KGALMDPTFLFQSI

SEQ ID NO: 73569 - protein, 14 aa, Homo Sapiens
GALMDPTFLFQSIT

SEQ ID NO: 73570 - protein, 14 aa, Homo Sapiens
ALMDPTFLFQSITA

SEQ ID NO: 73571 - protein, 14 aa, Homo Sapiens
LMDPTFLFQSITAN

SEQ ID NO: 73572 - protein, 14 aa, Homo Sapiens
MDPTFLFQSITANI

SEQ ID NO: 73573 - protein, 14 aa, Homo Sapiens
DPTFLFQSITANII

SEQ ID NO: 73574 - protein, 14 aa, Homo Sapiens
PTFLFQSITANIIC

SEQ ID NO: 73575 - protein, 14 aa, Homo Sapiens
TFLFQSITANIICS

SEQ ID NO: 73576 - protein, 14 aa, Homo Sapiens
FLFQSITANIICSI

SEQ ID NO: 73577 - protein, 14 aa, Homo Sapiens
LFQSITANIICSIV

SEQ ID NO: 73578 - protein, 14 aa, Homo Sapiens
FQSITANIICSIVF

SEQ ID NO: 73579 - protein, 14 aa, Homo Sapiens
QSITANIICSIVFG

SEQ ID NO: 73580 - protein, 14 aa, Homo Sapiens
SITANIICSIVFGK

SEQ ID NO: 73581 - protein, 14 aa, Homo Sapiens
ITANIICSIVFGKR

SEQ ID NO: 73582 - protein, 14 aa, Homo Sapiens
TANIICSIVFGKRF

SEQ ID NO: 73583 - protein, 14 aa, Homo Sapiens
ANIICSIVFGKRFH

SEQ ID NO: 73584 - protein, 14 aa, Homo Sapiens
NIICSIVFGKRFHY

SEQ ID NO: 73585 - protein, 14 aa, Homo Sapiens
IICSIVFGKRFHYQ

SEQ ID NO: 73586 - protein, 14 aa, Homo Sapiens
ICSIVFGKRFHYQD

SEQ ID NO: 73587 - protein, 14 aa, Homo Sapiens
CSIVFGKRFHYQDQ

SEQ ID NO: 73588 - protein, 14 aa, Homo Sapiens
SIVFGKRFHYQDQE

SEQ ID NO: 73589 - protein, 14 aa, Homo Sapiens
IVFGKRFHYQDQEF

SEQ ID NO: 73590 - protein, 14 aa, Homo Sapiens
VFGKRFHYQDQEFL

SEQ ID NO: 73591 - protein, 14 aa, Homo Sapiens
FGKRFHYQDQEFLK

SEQ ID NO: 73592 - protein, 14 aa, Homo Sapiens
GKRFHYQDQEFLKM

SEQ ID NO: 73593 - protein, 14 aa, Homo Sapiens
KRFHYQDQEFLKML

SEQ ID NO: 73594 - protein, 14 aa, Homo Sapiens
RFHYQDQEFLKMLN

SEQ ID NO: 73595 - protein, 14 aa, Homo Sapiens
FHYQDQEFLKMLNL

SEQ ID NO: 73596 - protein, 14 aa, Homo Sapiens
HYQDQEFLKMLNLF

SEQ ID NO: 73597 - protein, 14 aa, Homo Sapiens
YQDQEFLKMLNLFY

SEQ ID NO: 73598 - protein, 14 aa, Homo Sapiens
QDQEFLKMLNLFYQ

SEQ ID NO: 73599 - protein, 14 aa, Homo Sapiens
DQEFLKMLNLFYQT

SEQ ID NO: 73600 - protein, 14 aa, Homo Sapiens
QEFLKMLNLFYQTF

SEQ ID NO: 73601 - protein, 14 aa, Homo Sapiens
EFLKMLNLFYQTFS

SEQ ID NO: 73602 - protein, 14 aa, Homo Sapiens
FLKMLNLFYQTFSL

SEQ ID NO: 73603 - protein, 14 aa, Homo Sapiens
LKMLNLFYQTFSLI

SEQ ID NO: 73604 - protein, 14 aa, Homo Sapiens
KMLNLFYQTFSLIS

SEQ ID NO: 73605 - protein, 14 aa, Homo Sapiens
MLNLFYQTFSLISS

SEQ ID NO: 73606 - protein, 14 aa, Homo Sapiens
LNLFYQTFSLISSV

SEQ ID NO: 73607 - protein, 14 aa, Homo Sapiens
NLFYQTFSLISSVF

SEQ ID NO: 73608 - protein, 14 aa, Homo Sapiens
LFYQTFSLISSVFG

SEQ ID NO: 73609 - protein, 14 aa, Homo Sapiens
FYQTFSLISSVFGQ

SEQ ID NO: 73610 - protein, 14 aa, Homo Sapiens
YQTFSLISSVFGQL

SEQ ID NO: 73611 - protein, 14 aa, Homo Sapiens
QTFSLISSVFGQLF

SEQ ID NO: 73612 - protein, 14 aa, Homo Sapiens
TFSLISSVFGQLFE

SEQ ID NO: 73613 - protein, 14 aa, Homo Sapiens
FSLISSVFGQLFEL

SEQ ID NO: 73614 - protein, 14 aa, Homo Sapiens
SLISSVFGQLFELF

SEQ ID NO: 73615 - protein, 14 aa, Homo Sapiens
LISSVFGQLFELFS

SEQ ID NO: 73616 - protein, 14 aa, Homo Sapiens
ISSVFGQLFELFSG

SEQ ID NO: 73617 - protein, 14 aa, Homo Sapiens
SSVFGQLFELFSGF

SEQ ID NO: 73618 - protein, 14 aa, Homo Sapiens
SVFGQLFELFSGFL

SEQ ID NO: 73619 - protein, 14 aa, Homo Sapiens
VFGQLFELFSGFLK

SEQ ID NO: 73620 - protein, 14 aa, Homo Sapiens
FGQLFELFSGFLKY

SEQ ID NO: 73621 - protein, 14 aa, Homo Sapiens
GQLFELFSGFLKYF

SEQ ID NO: 73622 - protein, 14 aa, Homo Sapiens
QLFELFSGFLKYFP

SEQ ID NO: 73623 - protein, 14 aa, Homo Sapiens
LFELFSGFLKYFPG

SEQ ID NO: 73624 - protein, 14 aa, Homo Sapiens
FELFSGFLKYFPGA

SEQ ID NO: 73625 - protein, 14 aa, Homo Sapiens
ELFSGFLKYFPGAH

SEQ ID NO: 73626 - protein, 14 aa, Homo Sapiens
LFSGFLKYFPGAHR

SEQ ID NO: 73627 - protein, 14 aa, Homo Sapiens
FSGFLKYFPGAHRQ

SEQ ID NO: 73628 - protein, 14 aa, Homo Sapiens
SGFLKYFPGAHRQV

SEQ ID NO: 73629 - protein, 14 aa, Homo Sapiens
GFLKYFPGAHRQVY

SEQ ID NO: 73630 - protein, 14 aa, Homo Sapiens
FLKYFPGAHRQVYK

SEQ ID NO: 73631 - protein, 14 aa, Homo Sapiens
LKYFPGAHRQVYKN

SEQ ID NO: 73632 - protein, 14 aa, Homo Sapiens
KYFPGAHRQVYKNL

SEQ ID NO: 73633 - protein, 14 aa, Homo Sapiens
YFPGAHRQVYKNLQ

SEQ ID NO: 73634 - protein, 14 aa, Homo Sapiens
FPGAHRQVYKNLQE

SEQ ID NO: 73635 - protein, 14 aa, Homo Sapiens
PGAHRQVYKNLQEI

SEQ ID NO: 73636 - protein, 14 aa, Homo Sapiens
GAHRQVYKNLQEIN

SEQ ID NO: 73637 - protein, 14 aa, Homo Sapiens
AHRQVYKNLQEINA

SEQ ID NO: 73638 - protein, 14 aa, Homo Sapiens
HRQVYKNLQEINAY

SEQ ID NO: 73639 - protein, 14 aa, Homo Sapiens
RQVYKNLQEINAYI

SEQ ID NO: 73640 - protein, 14 aa, Homo Sapiens
QVYKNLQEINAYIG

SEQ ID NO: 73641 - protein, 14 aa, Homo Sapiens
VYKNLQEINAYIGH

SEQ ID NO: 73642 - protein, 14 aa, Homo Sapiens
YKNLQEINAYIGHS

SEQ ID NO: 73643 - protein, 14 aa, Homo Sapiens
KNLQEINAYIGHSV

SEQ ID NO: 73644 - protein, 14 aa, Homo Sapiens
NLQEINAYIGHSVE

SEQ ID NO: 73645 - protein, 14 aa, Homo Sapiens
LQEINAYIGHSVEK

SEQ ID NO: 73646 - protein, 14 aa, Homo Sapiens
QEINAYIGHSVEKH

SEQ ID NO: 73647 - protein, 14 aa, Homo Sapiens
EINAYIGHSVEKHR

SEQ ID NO: 73648 - protein, 14 aa, Homo Sapiens
INAYIGHSVEKHRE

SEQ ID NO: 73649 - protein, 14 aa, Homo Sapiens
NAYIGHSVEKHRET

SEQ ID NO: 73650 - protein, 14 aa, Homo Sapiens
AYIGHSVEKHRETL

SEQ ID NO: 73651 - protein, 14 aa, Homo Sapiens
YIGHSVEKHRETLD

SEQ ID NO: 73652 - protein, 14 aa, Homo Sapiens
IGHSVEKHRETLDP

SEQ ID NO: 73653 - protein, 14 aa, Homo Sapiens
GHSVEKHRETLDPS

SEQ ID NO: 73654 - protein, 14 aa, Homo Sapiens
HSVEKHRETLDPSA

SEQ ID NO: 73655 - protein, 14 aa, Homo Sapiens
SVEKHRETLDPSAP

SEQ ID NO: 73656 - protein, 14 aa, Homo Sapiens
VEKHRETLDPSAPK

SEQ ID NO: 73657 - protein, 14 aa, Homo Sapiens
EKHRETLDPSAPKD

SEQ ID NO: 73658 - protein, 14 aa, Homo Sapiens
KHRETLDPSAPKDL

SEQ ID NO: 73659 - protein, 14 aa, Homo Sapiens
HRETLDPSAPKDLI

SEQ ID NO: 73660 - protein, 14 aa, Homo Sapiens
RETLDPSAPKDLID

SEQ ID NO: 73661 - protein, 14 aa, Homo Sapiens
ETLDPSAPKDLIDT

SEQ ID NO: 73662 - protein, 14 aa, Homo Sapiens
TLDPSAPKDLIDTY

SEQ ID NO: 73663 - protein, 14 aa, Homo Sapiens
LDPSAPKDLIDTYL

SEQ ID NO: 73664 - protein, 14 aa, Homo Sapiens
DPSAPKDLIDTYLL

SEQ ID NO: 73665 - protein, 14 aa, Homo Sapiens
PSAPKDLIDTYLLH

SEQ ID NO: 73666 - protein, 14 aa, Homo Sapiens
SAPKDLIDTYLLHM

SEQ ID NO: 73667 - protein, 14 aa, Homo Sapiens
APKDLIDTYLLHME

SEQ ID NO: 73668 - protein, 14 aa, Homo Sapiens
PKDLIDTYLLHMEK

SEQ ID NO: 73669 - protein, 14 aa, Homo Sapiens
KDLIDTYLLHMEKE

SEQ ID NO: 73670 - protein, 14 aa, Homo Sapiens
DLIDTYLLHMEKEK

SEQ ID NO: 73671 - protein, 14 aa, Homo Sapiens
LIDTYLLHMEKEKS

SEQ ID NO: 73672 - protein, 14 aa, Homo Sapiens
IDTYLLHMEKEKSN

SEQ ID NO: 73673 - protein, 14 aa, Homo Sapiens
DTYLLHMEKEKSNA

SEQ ID NO: 73674 - protein, 14 aa, Homo Sapiens
TYLLHMEKEKSNAH

SEQ ID NO: 73675 - protein, 14 aa, Homo Sapiens
YLLHMEKEKSNAHS

SEQ ID NO: 73676 - protein, 14 aa, Homo Sapiens
LLHMEKEKSNAHSE

SEQ ID NO: 73677 - protein, 14 aa, Homo Sapiens
LHMEKEKSNAHSEF

SEQ ID NO: 73678 - protein, 14 aa, Homo Sapiens
HMEKEKSNAHSEFS

SEQ ID NO: 73679 - protein, 14 aa, Homo Sapiens
MEKEKSNAHSEFSH

SEQ ID NO: 73680 - protein, 14 aa, Homo Sapiens
EKEKSNAHSEFSHQ

SEQ ID NO: 73681 - protein, 14 aa, Homo Sapiens
KEKSNAHSEFSHQN

SEQ ID NO: 73682 - protein, 14 aa, Homo Sapiens
EKSNAHSEFSHQNL

SEQ ID NO: 73683 - protein, 14 aa, Homo Sapiens
KSNAHSEFSHQNLN

SEQ ID NO: 73684 - protein, 14 aa, Homo Sapiens
SNAHSEFSHQNLNL

SEQ ID NO: 73685 - protein, 14 aa, Homo Sapiens
NAHSEFSHQNLNLN

SEQ ID NO: 73686 - protein, 14 aa, Homo Sapiens
AHSEFSHQNLNLNT

SEQ ID NO: 73687 - protein, 14 aa, Homo Sapiens
HSEFSHQNLNLNTL

SEQ ID NO: 73688 - protein, 14 aa, Homo Sapiens
SEFSHQNLNLNTLS

SEQ ID NO: 73689 - protein, 14 aa, Homo Sapiens
EFSHQNLNLNTLSL

SEQ ID NO: 73690 - protein, 14 aa, Homo Sapiens
FSHQNLNLNTLSLF

SEQ ID NO: 73691 - protein, 14 aa, Homo Sapiens
SHQNLNLNTLSLFF

SEQ ID NO: 73692 - protein, 14 aa, Homo Sapiens
HQNLNLNTLSLFFA

SEQ ID NO: 73693 - protein, 14 aa, Homo Sapiens
QNLNLNTLSLFFAG

SEQ ID NO: 73694 - protein, 14 aa, Homo Sapiens
NLNLNTLSLFFAGT

SEQ ID NO: 73695 - protein, 14 aa, Homo Sapiens
LNLNTLSLFFAGTE

SEQ ID NO: 73696 - protein, 14 aa, Homo Sapiens
NLNTLSLFFAGTET

SEQ ID NO: 73697 - protein, 14 aa, Homo Sapiens
LNTLSLFFAGTETT

SEQ ID NO: 73698 - protein, 14 aa, Homo Sapiens
NTLSLFFAGTETTS

SEQ ID NO: 73699 - protein, 14 aa, Homo Sapiens
TLSLFFAGTETTST

SEQ ID NO: 73700 - protein, 14 aa, Homo Sapiens
LSLFFAGTETTSTT

SEQ ID NO: 73701 - protein, 14 aa, Homo Sapiens
SLFFAGTETTSTTL

SEQ ID NO: 73702 - protein, 14 aa, Homo Sapiens
LFFAGTETTSTTLR

SEQ ID NO: 73703 - protein, 14 aa, Homo Sapiens
FFAGTETTSTTLRY

SEQ ID NO: 73704 - protein, 14 aa, Homo Sapiens
FAGTETTSTTLRYG

SEQ ID NO: 73705 - protein, 14 aa, Homo Sapiens
AGTETTSTTLRYGF

SEQ ID NO: 73706 - protein, 14 aa, Homo Sapiens
GTETTSTTLRYGFL

SEQ ID NO: 73707 - protein, 14 aa, Homo Sapiens
TETTSTTLRYGFLL

SEQ ID NO: 73708 - protein, 14 aa, Homo Sapiens
ETTSTTLRYGFLLM

SEQ ID NO: 73709 - protein, 14 aa, Homo Sapiens
TTSTTLRYGFLLML

SEQ ID NO: 73710 - protein, 14 aa, Homo Sapiens
TSTTLRYGFLLMLK

SEQ ID NO: 73711 - protein, 14 aa, Homo Sapiens
STTLRYGFLLMLKY

SEQ ID NO: 73712 - protein, 14 aa, Homo Sapiens
TTLRYGFLLMLKYP

SEQ ID NO: 73713 - protein, 14 aa, Homo Sapiens
TLRYGFLLMLKYPH

SEQ ID NO: 73714 - protein, 14 aa, Homo Sapiens
LRYGFLLMLKYPHV

SEQ ID NO: 73715 - protein, 14 aa, Homo Sapiens
RYGFLLMLKYPHVA

SEQ ID NO: 73716 - protein, 14 aa, Homo Sapiens
YGFLLMLKYPHVAE

SEQ ID NO: 73717 - protein, 14 aa, Homo Sapiens
GFLLMLKYPHVAER

SEQ ID NO: 73718 - protein, 14 aa, Homo Sapiens
FLLMLKYPHVAERV

SEQ ID NO: 73719 - protein, 14 aa, Homo Sapiens
LLMLKYPHVAERVY

SEQ ID NO: 73720 - protein, 14 aa, Homo Sapiens
LMLKYPHVAERVYR

SEQ ID NO: 73721 - protein, 14 aa, Homo Sapiens
MLKYPHVAERVYRE

SEQ ID NO: 73722 - protein, 14 aa, Homo Sapiens
LKYPHVAERVYREI

SEQ ID NO: 73723 - protein, 14 aa, Homo Sapiens
KYPHVAERVYREIE

SEQ ID NO: 73724 - protein, 14 aa, Homo Sapiens
YPHVAERVYREIEQ

SEQ ID NO: 73725 - protein, 14 aa, Homo Sapiens
PHVAERVYREIEQV

SEQ ID NO: 73726 - protein, 14 aa, Homo Sapiens
HVAERVYREIEQVI

SEQ ID NO: 73727 - protein, 14 aa, Homo Sapiens
VAERVYREIEQVIG

SEQ ID NO: 73728 - protein, 14 aa, Homo Sapiens
AERVYREIEQVIGP

SEQ ID NO: 73729 - protein, 14 aa, Homo Sapiens
ERVYREIEQVIGPH

SEQ ID NO: 73730 - protein, 14 aa, Homo Sapiens
RVYREIEQVIGPHR

SEQ ID NO: 73731 - protein, 14 aa, Homo Sapiens
VYREIEQVIGPHRP

SEQ ID NO: 73732 - protein, 14 aa, Homo Sapiens
YREIEQVIGPHRPP

SEQ ID NO: 73733 - protein, 14 aa, Homo Sapiens
REIEQVIGPHRPPE

SEQ ID NO: 73734 - protein, 14 aa, Homo Sapiens
EIEQVIGPHRPPEL

SEQ ID NO: 73735 - protein, 14 aa, Homo Sapiens
IEQVIGPHRPPELH

SEQ ID NO: 73736 - protein, 14 aa, Homo Sapiens
EQVIGPHRPPELHD

SEQ ID NO: 73737 - protein, 14 aa, Homo Sapiens
QVIGPHRPPELHDR

SEQ ID NO: 73738 - protein, 14 aa, Homo Sapiens
VIGPHRPPELHDRA

SEQ ID NO: 73739 - protein, 14 aa, Homo Sapiens
IGPHRPPELHDRAK

SEQ ID NO: 73740 - protein, 14 aa, Homo Sapiens
GPHRPPELHDRAKM

SEQ ID NO: 73741 - protein, 14 aa, Homo Sapiens
PHRPPELHDRAKMP

SEQ ID NO: 73742 - protein, 14 aa, Homo Sapiens
HRPPELHDRAKMPY

SEQ ID NO: 73743 - protein, 14 aa, Homo Sapiens
RPPELHDRAKMPYT

SEQ ID NO: 73744 - protein, 14 aa, Homo Sapiens
PPELHDRAKMPYTE

SEQ ID NO: 73745 - protein, 14 aa, Homo Sapiens
PELHDRAKMPYTEA

SEQ ID NO: 73746 - protein, 14 aa, Homo Sapiens
ELHDRAKMPYTEAV

SEQ ID NO: 73747 - protein, 14 aa, Homo Sapiens
LHDRAKMPYTEAVI

SEQ ID NO: 73748 - protein, 14 aa, Homo Sapiens
HDRAKMPYTEAVIY

SEQ ID NO: 73749 - protein, 14 aa, Homo Sapiens
DRAKMPYTEAVIYE

SEQ ID NO: 73750 - protein, 14 aa, Homo Sapiens
RAKMPYTEAVIYEI

SEQ ID NO: 73751 - protein, 14 aa, Homo Sapiens
AKMPYTEAVIYEIQ

SEQ ID NO: 73752 - protein, 14 aa, Homo Sapiens
KMPYTEAVIYEIQR

SEQ ID NO: 73753 - protein, 14 aa, Homo Sapiens
MPYTEAVIYEIQRF

SEQ ID NO: 73754 - protein, 14 aa, Homo Sapiens
PYTEAVIYEIQRFS

SEQ ID NO: 73755 - protein, 14 aa, Homo Sapiens
YTEAVIYEIQRFSD

SEQ ID NO: 73756 - protein, 14 aa, Homo Sapiens
TEAVIYEIQRFSDL

SEQ ID NO: 73757 - protein, 14 aa, Homo Sapiens
EAVIYEIQRFSDLL

SEQ ID NO: 73758 - protein, 14 aa, Homo Sapiens
AVIYEIQRFSDLLP

SEQ ID NO: 73759 - protein, 14 aa, Homo Sapiens
VIYEIQRFSDLLPM

SEQ ID NO: 73760 - protein, 14 aa, Homo Sapiens
IYEIQRFSDLLPMG

SEQ ID NO: 73761 - protein, 14 aa, Homo Sapiens
YEIQRFSDLLPMGV

SEQ ID NO: 73762 - protein, 14 aa, Homo Sapiens
EIQRFSDLLPMGVP

SEQ ID NO: 73763 - protein, 14 aa, Homo Sapiens
IQRFSDLLPMGVPH

SEQ ID NO: 73764 - protein, 14 aa, Homo Sapiens
QRFSDLLPMGVPHI

SEQ ID NO: 73765 - protein, 14 aa, Homo Sapiens
RFSDLLPMGVPHIV

SEQ ID NO: 73766 - protein, 14 aa, Homo Sapiens
FSDLLPMGVPHIVT

SEQ ID NO: 73767 - protein, 14 aa, Homo Sapiens
SDLLPMGVPHIVTQ

SEQ ID NO: 73768 - protein, 14 aa, Homo Sapiens
DLLPMGVPHIVTQH

SEQ ID NO: 73769 - protein, 14 aa, Homo Sapiens
LLPMGVPHIVTQHT

SEQ ID NO: 73770 - protein, 14 aa, Homo Sapiens
LPMGVPHIVTQHTS

SEQ ID NO: 73771 - protein, 14 aa, Homo Sapiens
PMGVPHIVTQHTSF

SEQ ID NO: 73772 - protein, 14 aa, Homo Sapiens
MGVPHIVTQHTSFR

SEQ ID NO: 73773 - protein, 14 aa, Homo Sapiens
GVPHIVTQHTSFRG

SEQ ID NO: 73774 - protein, 14 aa, Homo Sapiens
VPHIVTQHTSFRGY

SEQ ID NO: 73775 - protein, 14 aa, Homo Sapiens
PHIVTQHTSFRGYI

SEQ ID NO: 73776 - protein, 14 aa, Homo Sapiens
HIVTQHTSFRGYII

SEQ ID NO: 73777 - protein, 14 aa, Homo Sapiens
IVTQHTSFRGYIIP

SEQ ID NO: 73778 - protein, 14 aa, Homo Sapiens
VTQHTSFRGYIIPK

SEQ ID NO: 73779 - protein, 14 aa, Homo Sapiens
TQHTSFRGYIIPKD

SEQ ID NO: 73780 - protein, 14 aa, Homo Sapiens
QHTSFRGYIIPKDT

SEQ ID NO: 73781 - protein, 14 aa, Homo Sapiens
HTSFRGYIIPKDTE

SEQ ID NO: 73782 - protein, 14 aa, Homo Sapiens
TSFRGYIIPKDTEV

SEQ ID NO: 73783 - protein, 14 aa, Homo Sapiens
SFRGYIIPKDTEVF

SEQ ID NO: 73784 - protein, 14 aa, Homo Sapiens
FRGYIIPKDTEVFL

SEQ ID NO: 73785 - protein, 14 aa, Homo Sapiens
RGYIIPKDTEVFLI

SEQ ID NO: 73786 - protein, 14 aa, Homo Sapiens
GYIIPKDTEVFLIL

SEQ ID NO: 73787 - protein, 14 aa, Homo Sapiens
YIIPKDTEVFLILS

SEQ ID NO: 73788 - protein, 14 aa, Homo Sapiens
IIPKDTEVFLILST

SEQ ID NO: 73789 - protein, 14 aa, Homo Sapiens
IPKDTEVFLILSTA

SEQ ID NO: 73790 - protein, 14 aa, Homo Sapiens
PKDTEVFLILSTAL

SEQ ID NO: 73791 - protein, 14 aa, Homo Sapiens
KDTEVFLILSTALH

SEQ ID NO: 73792 - protein, 14 aa, Homo Sapiens
DTEVFLILSTALHD

SEQ ID NO: 73793 - protein, 14 aa, Homo Sapiens
TEVFLILSTALHDP

SEQ ID NO: 73794 - protein, 14 aa, Homo Sapiens
EVFLILSTALHDPH

SEQ ID NO: 73795 - protein, 14 aa, Homo Sapiens
VFLILSTALHDPHY

SEQ ID NO: 73796 - protein, 14 aa, Homo Sapiens
FLILSTALHDPHYF

SEQ ID NO: 73797 - protein, 14 aa, Homo Sapiens
LILSTALHDPHYFE

SEQ ID NO: 73798 - protein, 14 aa, Homo Sapiens
ILSTALHDPHYFEK

SEQ ID NO: 73799 - protein, 14 aa, Homo Sapiens
LSTALHDPHYFEKP

SEQ ID NO: 73800 - protein, 14 aa, Homo Sapiens
STALHDPHYFEKPD

SEQ ID NO: 73801 - protein, 14 aa, Homo Sapiens
TALHDPHYFEKPDA

SEQ ID NO: 73802 - protein, 14 aa, Homo Sapiens
ALHDPHYFEKPDAF

SEQ ID NO: 73803 - protein, 14 aa, Homo Sapiens
LHDPHYFEKPDAFN

SEQ ID NO: 73804 - protein, 14 aa, Homo Sapiens
HDPHYFEKPDAFNP

SEQ ID NO: 73805 - protein, 14 aa, Homo Sapiens
DPHYFEKPDAFNPD

SEQ ID NO: 73806 - protein, 14 aa, Homo Sapiens
PHYFEKPDAFNPDH

SEQ ID NO: 73807 - protein, 14 aa, Homo Sapiens
HYFEKPDAFNPDHF

SEQ ID NO: 73808 - protein, 14 aa, Homo Sapiens
YFEKPDAFNPDHFL

SEQ ID NO: 73809 - protein, 14 aa, Homo Sapiens
FEKPDAFNPDHFLD

SEQ ID NO: 73810 - protein, 14 aa, Homo Sapiens
EKPDAFNPDHFLDA

SEQ ID NO: 73811 - protein, 14 aa, Homo Sapiens
KPDAFNPDHFLDAN

SEQ ID NO: 73812 - protein, 14 aa, Homo Sapiens
PDAFNPDHFLDANG

SEQ ID NO: 73813 - protein, 14 aa, Homo Sapiens
DAFNPDHFLDANGA

SEQ ID NO: 73814 - protein, 14 aa, Homo Sapiens
AFNPDHFLDANGAL

SEQ ID NO: 73815 - protein, 14 aa, Homo Sapiens
FNPDHFLDANGALK

SEQ ID NO: 73816 - protein, 14 aa, Homo Sapiens
NPDHFLDANGALKK

SEQ ID NO: 73817 - protein, 14 aa, Homo Sapiens
PDHFLDANGALKKT

SEQ ID NO: 73818 - protein, 14 aa, Homo Sapiens
DHFLDANGALKKTE

SEQ ID NO: 73819 - protein, 14 aa, Homo Sapiens
HFLDANGALKKTEA

SEQ ID NO: 73820 - protein, 14 aa, Homo Sapiens
FLDANGALKKTEAF

SEQ ID NO: 73821 - protein, 14 aa, Homo Sapiens
LDANGALKKTEAFI

SEQ ID NO: 73822 - protein, 14 aa, Homo Sapiens
DANGALKKTEAFIP

SEQ ID NO: 73823 - protein, 14 aa, Homo Sapiens
ANGALKKTEAFIPF

SEQ ID NO: 73824 - protein, 14 aa, Homo Sapiens
NGALKKTEAFIPFS

SEQ ID NO: 73825 - protein, 14 aa, Homo Sapiens
GALKKTEAFIPFSL

SEQ ID NO: 73826 - protein, 14 aa, Homo Sapiens
ALKKTEAFIPFSLG

SEQ ID NO: 73827 - protein, 14 aa, Homo Sapiens
LKKTEAFIPFSLGK

SEQ ID NO: 73828 - protein, 14 aa, Homo Sapiens
KKTEAFIPFSLGKR

SEQ ID NO: 73829 - protein, 14 aa, Homo Sapiens
KTEAFIPFSLGKRI

SEQ ID NO: 73830 - protein, 14 aa, Homo Sapiens
TEAFIPFSLGKRIC

SEQ ID NO: 73831 - protein, 14 aa, Homo Sapiens
EAFIPFSLGKRICL

SEQ ID NO: 73832 - protein, 14 aa, Homo Sapiens
AFIPFSLGKRICLG

SEQ ID NO: 73833 - protein, 14 aa, Homo Sapiens
FIPFSLGKRICLGE

SEQ ID NO: 73834 - protein, 14 aa, Homo Sapiens
IPFSLGKRICLGEG

SEQ ID NO: 73835 - protein, 14 aa, Homo Sapiens
PFSLGKRICLGEGI

SEQ ID NO: 73836 - protein, 14 aa, Homo Sapiens
FSLGKRICLGEGIA

SEQ ID NO: 73837 - protein, 14 aa, Homo Sapiens
SLGKRICLGEGIAR

SEQ ID NO: 73838 - protein, 14 aa, Homo Sapiens
LGKRICLGEGIARA

SEQ ID NO: 73839 - protein, 14 aa, Homo Sapiens
GKRICLGEGIARAE

SEQ ID NO: 73840 - protein, 14 aa, Homo Sapiens
KRICLGEGIARAEL

SEQ ID NO: 73841 - protein, 14 aa, Homo Sapiens
RICLGEGIARAELF

SEQ ID NO: 73842 - protein, 14 aa, Homo Sapiens
ICLGEGIARAELFL

SEQ ID NO: 73843 - protein, 14 aa, Homo Sapiens
CLGEGIARAELFLF

SEQ ID NO: 73844 - protein, 14 aa, Homo Sapiens
LGEGIARAELFLFF

SEQ ID NO: 73845 - protein, 14 aa, Homo Sapiens
GEGIARAELFLFFT

SEQ ID NO: 73846 - protein, 14 aa, Homo Sapiens
EGIARAELFLFFTT

SEQ ID NO: 73847 - protein, 14 aa, Homo Sapiens
GIARAELFLFFTTI

SEQ ID NO: 73848 - protein, 14 aa, Homo Sapiens
IARAELFLFFTTIL

SEQ ID NO: 73849 - protein, 14 aa, Homo Sapiens
ARAELFLFFTTILQ

SEQ ID NO: 73850 - protein, 14 aa, Homo Sapiens
RAELFLFFTTILQN

SEQ ID NO: 73851 - protein, 14 aa, Homo Sapiens
AELFLFFTTILQNF

SEQ ID NO: 73852 - protein, 14 aa, Homo Sapiens
ELFLFFTTILQNFS

SEQ ID NO: 73853 - protein, 14 aa, Homo Sapiens
LFLFFTTILQNFSM

SEQ ID NO: 73854 - protein, 14 aa, Homo Sapiens
FLFFTTILQNFSMA

SEQ ID NO: 73855 - protein, 14 aa, Homo Sapiens
LFFTTILQNFSMAS

SEQ ID NO: 73856 - protein, 14 aa, Homo Sapiens
FFTTILQNFSMASP

SEQ ID NO: 73857 - protein, 14 aa, Homo Sapiens
FTTILQNFSMASPV

SEQ ID NO: 73858 - protein, 14 aa, Homo Sapiens
TTILQNFSMASPVA

SEQ ID NO: 73859 - protein, 14 aa, Homo Sapiens
TILQNFSMASPVAP

SEQ ID NO: 73860 - protein, 14 aa, Homo Sapiens
ILQNFSMASPVAPE

SEQ ID NO: 73861 - protein, 14 aa, Homo Sapiens
LQNFSMASPVAPED

SEQ ID NO: 73862 - protein, 14 aa, Homo Sapiens
QNFSMASPVAPEDI

SEQ ID NO: 73863 - protein, 14 aa, Homo Sapiens
NFSMASPVAPEDID

SEQ ID NO: 73864 - protein, 14 aa, Homo Sapiens
FSMASPVAPEDIDL

SEQ ID NO: 73865 - protein, 14 aa, Homo Sapiens
SMASPVAPEDIDLT

SEQ ID NO: 73866 - protein, 14 aa, Homo Sapiens
MASPVAPEDIDLTP

SEQ ID NO: 73867 - protein, 14 aa, Homo Sapiens
ASPVAPEDIDLTPQ

SEQ ID NO: 73868 - protein, 14 aa, Homo Sapiens
SPVAPEDIDLTPQE

SEQ ID NO: 73869 - protein, 14 aa, Homo Sapiens
PVAPEDIDLTPQEC

SEQ ID NO: 73870 - protein, 14 aa, Homo Sapiens
VAPEDIDLTPQECG

SEQ ID NO: 73871 - protein, 14 aa, Homo Sapiens
APEDIDLTPQECGV

SEQ ID NO: 73872 - protein, 14 aa, Homo Sapiens
PEDIDLTPQECGVG

SEQ ID NO: 73873 - protein, 14 aa, Homo Sapiens
EDIDLTPQECGVGK

SEQ ID NO: 73874 - protein, 14 aa, Homo Sapiens
DIDLTPQECGVGKI

SEQ ID NO: 73875 - protein, 14 aa, Homo Sapiens
IDLTPQECGVGKIP

SEQ ID NO: 73876 - protein, 14 aa, Homo Sapiens
DLTPQECGVGKIPP

SEQ ID NO: 73877 - protein, 14 aa, Homo Sapiens
LTPQECGVGKIPPT

SEQ ID NO: 73878 - protein, 14 aa, Homo Sapiens
TPQECGVGKIPPTY

SEQ ID NO: 73879 - protein, 14 aa, Homo Sapiens
PQECGVGKIPPTYQ

SEQ ID NO: 73880 - protein, 14 aa, Homo Sapiens
QECGVGKIPPTYQI

SEQ ID NO: 73881 - protein, 14 aa, Homo Sapiens
ECGVGKIPPTYQIR

SEQ ID NO: 73882 - protein, 14 aa, Homo Sapiens
CGVGKIPPTYQIRF

SEQ ID NO: 73883 - protein, 14 aa, Homo Sapiens
GVGKIPPTYQIRFL

SEQ ID NO: 73884 - protein, 14 aa, Homo Sapiens
VGKIPPTYQIRFLP

SEQ ID NO: 73885 - protein, 14 aa, Homo Sapiens
GKIPPTYQIRFLPR

SEQ ID NO: 73886 - protein, 15 aa, Homo Sapiens
MELSVLLFLALLTGL

SEQ ID NO: 73887 - protein, 15 aa, Homo Sapiens
ELSVLLFLALLTGLL

SEQ ID NO: 73888 - protein, 15 aa, Homo Sapiens
LSVLLFLALLTGLLL

SEQ ID NO: 73889 - protein, 15 aa, Homo Sapiens
SVLLFLALLTGLLLL

SEQ ID NO: 73890 - protein, 15 aa, Homo Sapiens
VLLFLALLTGLLLLL

SEQ ID NO: 73891 - protein, 15 aa, Homo Sapiens
LLFLALLTGLLLLLV

SEQ ID NO: 73892 - protein, 15 aa, Homo Sapiens
LFLALLTGLLLLLVQ

SEQ ID NO: 73893 - protein, 15 aa, Homo Sapiens
FLALLTGLLLLLVQR

SEQ ID NO: 73894 - protein, 15 aa, Homo Sapiens
LALLTGLLLLLVQRH

SEQ ID NO: 73895 - protein, 15 aa, Homo Sapiens
ALLTGLLLLLVQRHP

SEQ ID NO: 73896 - protein, 15 aa, Homo Sapiens
LLTGLLLLLVQRHPN

SEQ ID NO: 73897 - protein, 15 aa, Homo Sapiens
LTGLLLLLVQRHPNT

SEQ ID NO: 73898 - protein, 15 aa, Homo Sapiens
TGLLLLLVQRHPNTH

SEQ ID NO: 73899 - protein, 15 aa, Homo Sapiens
GLLLLLVQRHPNTHD

SEQ ID NO: 73900 - protein, 15 aa, Homo Sapiens
LLLLLVQRHPNTHDR

SEQ ID NO: 73901 - protein, 15 aa, Homo Sapiens
LLLLVQRHPNTHDRL

SEQ ID NO: 73902 - protein, 15 aa, Homo Sapiens
LLLVQRHPNTHDRLP

SEQ ID NO: 73903 - protein, 15 aa, Homo Sapiens
LLVQRHPNTHDRLPP

SEQ ID NO: 73904 - protein, 15 aa, Homo Sapiens
LVQRHPNTHDRLPPG

SEQ ID NO: 73905 - protein, 15 aa, Homo Sapiens
VQRHPNTHDRLPPGP

SEQ ID NO: 73906 - protein, 15 aa, Homo Sapiens
QRHPNTHDRLPPGPR

SEQ ID NO: 73907 - protein, 15 aa, Homo Sapiens
RHPNTHDRLPPGPRP

SEQ ID NO: 73908 - protein, 15 aa, Homo Sapiens
HPNTHDRLPPGPRPL

SEQ ID NO: 73909 - protein, 15 aa, Homo Sapiens
PNTHDRLPPGPRPLP

SEQ ID NO: 73910 - protein, 15 aa, Homo Sapiens
NTHDRLPPGPRPLPL

SEQ ID NO: 73911 - protein, 15 aa, Homo Sapiens
THDRLPPGPRPLPLL

SEQ ID NO: 73912 - protein, 15 aa, Homo Sapiens
HDRLPPGPRPLPLLG

SEQ ID NO: 73913 - protein, 15 aa, Homo Sapiens
DRLPPGPRPLPLLGN

SEQ ID NO: 73914 - protein, 15 aa, Homo Sapiens
RLPPGPRPLPLLGNL

SEQ ID NO: 73915 - protein, 15 aa, Homo Sapiens
LPPGPRPLPLLGNLL

SEQ ID NO: 73916 - protein, 15 aa, Homo Sapiens
PPGPRPLPLLGNLLQ

SEQ ID NO: 73917 - protein, 15 aa, Homo Sapiens
PGPRPLPLLGNLLQM

SEQ ID NO: 73918 - protein, 15 aa, Homo Sapiens
GPRPLPLLGNLLQMD

SEQ ID NO: 73919 - protein, 15 aa, Homo Sapiens
PRPLPLLGNLLQMDR

SEQ ID NO: 73920 - protein, 15 aa, Homo Sapiens
RPLPLLGNLLQMDRR

SEQ ID NO: 73921 - protein, 15 aa, Homo Sapiens
PLPLLGNLLQMDRRG

SEQ ID NO: 73922 - protein, 15 aa, Homo Sapiens
LPLLGNLLQMDRRGL

SEQ ID NO: 73923 - protein, 15 aa, Homo Sapiens
PLLGNLLQMDRRGLL

SEQ ID NO: 73924 - protein, 15 aa, Homo Sapiens
LLGNLLQMDRRGLLK

SEQ ID NO: 73925 - protein, 15 aa, Homo Sapiens
LGNLLQMDRRGLLKS

SEQ ID NO: 73926 - protein, 15 aa, Homo Sapiens
GNLLQMDRRGLLKSF

SEQ ID NO: 73927 - protein, 15 aa, Homo Sapiens
NLLQMDRRGLLKSFL

SEQ ID NO: 73928 - protein, 15 aa, Homo Sapiens
LLQMDRRGLLKSFLR

SEQ ID NO: 73929 - protein, 15 aa, Homo Sapiens
LQMDRRGLLKSFLRF

SEQ ID NO: 73930 - protein, 15 aa, Homo Sapiens
QMDRRGLLKSFLRFR

SEQ ID NO: 73931 - protein, 15 aa, Homo Sapiens
MDRRGLLKSFLRFRE

SEQ ID NO: 73932 - protein, 15 aa, Homo Sapiens
DRRGLLKSFLRFREK

SEQ ID NO: 73933 - protein, 15 aa, Homo Sapiens
RRGLLKSFLRFREKY

SEQ ID NO: 73934 - protein, 15 aa, Homo Sapiens
RGLLKSFLRFREKYG

SEQ ID NO: 73935 - protein, 15 aa, Homo Sapiens
GLLKSFLRFREKYGD

SEQ ID NO: 73936 - protein, 15 aa, Homo Sapiens
LLKSFLRFREKYGDV

SEQ ID NO: 73937 - protein, 15 aa, Homo Sapiens
LKSFLRFREKYGDVF

SEQ ID NO: 73938 - protein, 15 aa, Homo Sapiens
KSFLRFREKYGDVFT

SEQ ID NO: 73939 - protein, 15 aa, Homo Sapiens
SFLRFREKYGDVFTV

SEQ ID NO: 73940 - protein, 15 aa, Homo Sapiens
FLRFREKYGDVFTVH

SEQ ID NO: 73941 - protein, 15 aa, Homo Sapiens
LRFREKYGDVFTVHL

SEQ ID NO: 73942 - protein, 15 aa, Homo Sapiens
RFREKYGDVFTVHLG

SEQ ID NO: 73943 - protein, 15 aa, Homo Sapiens
FREKYGDVFTVHLGP

SEQ ID NO: 73944 - protein, 15 aa, Homo Sapiens
REKYGDVFTVHLGPR

SEQ ID NO: 73945 - protein, 15 aa, Homo Sapiens
EKYGDVFTVHLGPRP

SEQ ID NO: 73946 - protein, 15 aa, Homo Sapiens
KYGDVFTVHLGPRPV

SEQ ID NO: 73947 - protein, 15 aa, Homo Sapiens
YGDVFTVHLGPRPVV

SEQ ID NO: 73948 - protein, 15 aa, Homo Sapiens
GDVFTVHLGPRPVVM

SEQ ID NO: 73949 - protein, 15 aa, Homo Sapiens
DVFTVHLGPRPVVML

SEQ ID NO: 73950 - protein, 15 aa, Homo Sapiens
VFTVHLGPRPVVMLC

SEQ ID NO: 73951 - protein, 15 aa, Homo Sapiens
FTVHLGPRPVVMLCG

SEQ ID NO: 73952 - protein, 15 aa, Homo Sapiens
TVHLGPRPVVMLCGV

SEQ ID NO: 73953 - protein, 15 aa, Homo Sapiens
VHLGPRPVVMLCGVE

SEQ ID NO: 73954 - protein, 15 aa, Homo Sapiens
HLGPRPVVMLCGVEA

SEQ ID NO: 73955 - protein, 15 aa, Homo Sapiens
LGPRPVVMLCGVEAI

SEQ ID NO: 73956 - protein, 15 aa, Homo Sapiens
GPRPVVMLCGVEAIR

SEQ ID NO: 73957 - protein, 15 aa, Homo Sapiens
PRPVVMLCGVEAIRE

SEQ ID NO: 73958 - protein, 15 aa, Homo Sapiens
RPVVMLCGVEAIREA

SEQ ID NO: 73959 - protein, 15 aa, Homo Sapiens
PVVMLCGVEAIREAL

SEQ ID NO: 73960 - protein, 15 aa, Homo Sapiens
VVMLCGVEAIREALV

SEQ ID NO: 73961 - protein, 15 aa, Homo Sapiens
VMLCGVEAIREALVD

SEQ ID NO: 73962 - protein, 15 aa, Homo Sapiens
MLCGVEAIREALVDK

SEQ ID NO: 73963 - protein, 15 aa, Homo Sapiens
LCGVEAIREALVDKA

SEQ ID NO: 73964 - protein, 15 aa, Homo Sapiens
CGVEAIREALVDKAE

SEQ ID NO: 73965 - protein, 15 aa, Homo Sapiens
GVEAIREALVDKAEA

SEQ ID NO: 73966 - protein, 15 aa, Homo Sapiens
VEAIREALVDKAEAF

SEQ ID NO: 73967 - protein, 15 aa, Homo Sapiens
EAIREALVDKAEAFS

SEQ ID NO: 73968 - protein, 15 aa, Homo Sapiens
AIREALVDKAEAFSG

SEQ ID NO: 73969 - protein, 15 aa, Homo Sapiens
IREALVDKAEAFSGR

SEQ ID NO: 73970 - protein, 15 aa, Homo Sapiens
REALVDKAEAFSGRG

SEQ ID NO: 73971 - protein, 15 aa, Homo Sapiens
EALVDKAEAFSGRGK

SEQ ID NO: 73972 - protein, 15 aa, Homo Sapiens
ALVDKAEAFSGRGKI

SEQ ID NO: 73973 - protein, 15 aa, Homo Sapiens
LVDKAEAFSGRGKIA

SEQ ID NO: 73974 - protein, 15 aa, Homo Sapiens
VDKAEAFSGRGKIAM

SEQ ID NO: 73975 - protein, 15 aa, Homo Sapiens
DKAEAFSGRGKIAMV

SEQ ID NO: 73976 - protein, 15 aa, Homo Sapiens
KAEAFSGRGKIAMVD

SEQ ID NO: 73977 - protein, 15 aa, Homo Sapiens
AEAFSGRGKIAMVDP

SEQ ID NO: 73978 - protein, 15 aa, Homo Sapiens
EAFSGRGKIAMVDPF

SEQ ID NO: 73979 - protein, 15 aa, Homo Sapiens
AFSGRGKIAMVDPFF

SEQ ID NO: 73980 - protein, 15 aa, Homo Sapiens
FSGRGKIAMVDPFFR

SEQ ID NO: 73981 - protein, 15 aa, Homo Sapiens
SGRGKIAMVDPFFRG

SEQ ID NO: 73982 - protein, 15 aa, Homo Sapiens
GRGKIAMVDPFFRGY

SEQ ID NO: 73983 - protein, 15 aa, Homo Sapiens
RGKIAMVDPFFRGYG

SEQ ID NO: 73984 - protein, 15 aa, Homo Sapiens
GKIAMVDPFFRGYGV

SEQ ID NO: 73985 - protein, 15 aa, Homo Sapiens
KIAMVDPFFRGYGVI

SEQ ID NO: 73986 - protein, 15 aa, Homo Sapiens
IAMVDPFFRGYGVIF

SEQ ID NO: 73987 - protein, 15 aa, Homo Sapiens
AMVDPFFRGYGVIFA

SEQ ID NO: 73988 - protein, 15 aa, Homo Sapiens
MVDPFFRGYGVIFAN

SEQ ID NO: 73989 - protein, 15 aa, Homo Sapiens
VDPFFRGYGVIFANG

SEQ ID NO: 73990 - protein, 15 aa, Homo Sapiens
DPFFRGYGVIFANGN

SEQ ID NO: 73991 - protein, 15 aa, Homo Sapiens
PFFRGYGVIFANGNR

SEQ ID NO: 73992 - protein, 15 aa, Homo Sapiens
FFRGYGVIFANGNRW

SEQ ID NO: 73993 - protein, 15 aa, Homo Sapiens
FRGYGVIFANGNRWK

SEQ ID NO: 73994 - protein, 15 aa, Homo Sapiens
RGYGVIFANGNRWKV

SEQ ID NO: 73995 - protein, 15 aa, Homo Sapiens
GYGVIFANGNRWKVL

SEQ ID NO: 73996 - protein, 15 aa, Homo Sapiens
YGVIFANGNRWKVLR

SEQ ID NO: 73997 - protein, 15 aa, Homo Sapiens
GVIFANGNRWKVLRR

SEQ ID NO: 73998 - protein, 15 aa, Homo Sapiens
VIFANGNRWKVLRRF

SEQ ID NO: 73999 - protein, 15 aa, Homo Sapiens
IFANGNRWKVLRRFS

SEQ ID NO: 74000 - protein, 15 aa, Homo Sapiens
FANGNRWKVLRRFSV

SEQ ID NO: 74001 - protein, 15 aa, Homo Sapiens
ANGNRWKVLRRFSVT

SEQ ID NO: 74002 - protein, 15 aa, Homo Sapiens
NGNRWKVLRRFSVTT

SEQ ID NO: 74003 - protein, 15 aa, Homo Sapiens
GNRWKVLRRFSVTTM

SEQ ID NO: 74004 - protein, 15 aa, Homo Sapiens
NRWKVLRRFSVTTMR

SEQ ID NO: 74005 - protein, 15 aa, Homo Sapiens
RWKVLRRFSVTTMRD

SEQ ID NO: 74006 - protein, 15 aa, Homo Sapiens
WKVLRRFSVTTMRDF

SEQ ID NO: 74007 - protein, 15 aa, Homo Sapiens
KVLRRFSVTTMRDFG

SEQ ID NO: 74008 - protein, 15 aa, Homo Sapiens
VLRRFSVTTMRDFGM

SEQ ID NO: 74009 - protein, 15 aa, Homo Sapiens
LRRFSVTTMRDFGMG

SEQ ID NO: 74010 - protein, 15 aa, Homo Sapiens
RRFSVTTMRDFGMGK

SEQ ID NO: 74011 - protein, 15 aa, Homo Sapiens
RFSVTTMRDFGMGKR

SEQ ID NO: 74012 - protein, 15 aa, Homo Sapiens
FSVTTMRDFGMGKRS

SEQ ID NO: 74013 - protein, 15 aa, Homo Sapiens
SVTTMRDFGMGKRSV

SEQ ID NO: 74014 - protein, 15 aa, Homo Sapiens
VTTMRDFGMGKRSVE

SEQ ID NO: 74015 - protein, 15 aa, Homo Sapiens
TTMRDFGMGKRSVEE

SEQ ID NO: 74016 - protein, 15 aa, Homo Sapiens
TMRDFGMGKRSVEER

SEQ ID NO: 74017 - protein, 15 aa, Homo Sapiens
MRDFGMGKRSVEERI

SEQ ID NO: 74018 - protein, 15 aa, Homo Sapiens
RDFGMGKRSVEERIQ

SEQ ID NO: 74019 - protein, 15 aa, Homo Sapiens
DFGMGKRSVEERIQE

SEQ ID NO: 74020 - protein, 15 aa, Homo Sapiens
FGMGKRSVEERIQEE

SEQ ID NO: 74021 - protein, 15 aa, Homo Sapiens
GMGKRSVEERIQEEA

SEQ ID NO: 74022 - protein, 15 aa, Homo Sapiens
MGKRSVEERIQEEAQ

SEQ ID NO: 74023 - protein, 15 aa, Homo Sapiens
GKRSVEERIQEEAQC

SEQ ID NO: 74024 - protein, 15 aa, Homo Sapiens
KRSVEERIQEEAQCL

SEQ ID NO: 74025 - protein, 15 aa, Homo Sapiens
RSVEERIQEEAQCLI

SEQ ID NO: 74026 - protein, 15 aa, Homo Sapiens
SVEERIQEEAQCLIE

SEQ ID NO: 74027 - protein, 15 aa, Homo Sapiens
VEERIQEEAQCLIEE

SEQ ID NO: 74028 - protein, 15 aa, Homo Sapiens
EERIQEEAQCLIEEL

SEQ ID NO: 74029 - protein, 15 aa, Homo Sapiens
ERIQEEAQCLIEELR

SEQ ID NO: 74030 - protein, 15 aa, Homo Sapiens
RIQEEAQCLIEELRK

SEQ ID NO: 74031 - protein, 15 aa, Homo Sapiens
IQEEAQCLIEELRKS

SEQ ID NO: 74032 - protein, 15 aa, Homo Sapiens
QEEAQCLIEELRKSK

SEQ ID NO: 74033 - protein, 15 aa, Homo Sapiens
EEAQCLIEELRKSKG

SEQ ID NO: 74034 - protein, 15 aa, Homo Sapiens
EAQCLIEELRKSKGA

SEQ ID NO: 74035 - protein, 15 aa, Homo Sapiens
AQCLIEELRKSKGAL

SEQ ID NO: 74036 - protein, 15 aa, Homo Sapiens
QCLIEELRKSKGALM

SEQ ID NO: 74037 - protein, 15 aa, Homo Sapiens
CLIEELRKSKGALMD

SEQ ID NO: 74038 - protein, 15 aa, Homo Sapiens
LIEELRKSKGALMDP

SEQ ID NO: 74039 - protein, 15 aa, Homo Sapiens
IEELRKSKGALMDPT

SEQ ID NO: 74040 - protein, 15 aa, Homo Sapiens
EELRKSKGALMDPTF

SEQ ID NO: 74041 - protein, 15 aa, Homo Sapiens
ELRKSKGALMDPTFL

SEQ ID NO: 74042 - protein, 15 aa, Homo Sapiens
LRKSKGALMDPTFLF

SEQ ID NO: 74043 - protein, 15 aa, Homo Sapiens
RKSKGALMDPTFLFQ

SEQ ID NO: 74044 - protein, 15 aa, Homo Sapiens
KSKGALMDPTFLFQS

SEQ ID NO: 74045 - protein, 15 aa, Homo Sapiens
SKGALMDPTFLFQSI

SEQ ID NO: 74046 - protein, 15 aa, Homo Sapiens
KGALMDPTFLFQSIT

SEQ ID NO: 74047 - protein, 15 aa, Homo Sapiens
GALMDPTFLFQSITA

SEQ ID NO: 74048 - protein, 15 aa, Homo Sapiens
ALMDPTFLFQSITAN

SEQ ID NO: 74049 - protein, 15 aa, Homo Sapiens
LMDPTFLFQSITANI

SEQ ID NO: 74050 - protein, 15 aa, Homo Sapiens
MDPTFLFQSITANII

SEQ ID NO: 74051 - protein, 15 aa, Homo Sapiens
DPTFLFQSITANIIC

SEQ ID NO: 74052 - protein, 15 aa, Homo Sapiens
PTFLFQSITANIICS

SEQ ID NO: 74053 - protein, 15 aa, Homo Sapiens
TFLFQSITANIICSI

SEQ ID NO: 74054 - protein, 15 aa, Homo Sapiens
FLFQSITANIICSIV

SEQ ID NO: 74055 - protein, 15 aa, Homo Sapiens
LFQSITANIICSIVF

SEQ ID NO: 74056 - protein, 15 aa, Homo Sapiens
FQSITANIICSIVFG

SEQ ID NO: 74057 - protein, 15 aa, Homo Sapiens
QSITANIICSIVFGK

SEQ ID NO: 74058 - protein, 15 aa, Homo Sapiens
SITANIICSIVFGKR

SEQ ID NO: 74059 - protein, 15 aa, Homo Sapiens
ITANIICSIVFGKRF

SEQ ID NO: 74060 - protein, 15 aa, Homo Sapiens
TANIICSIVFGKRFH

SEQ ID NO: 74061 - protein, 15 aa, Homo Sapiens
ANIICSIVFGKRFHY

SEQ ID NO: 74062 - protein, 15 aa, Homo Sapiens
NIICSIVFGKRFHYQ

SEQ ID NO: 74063 - protein, 15 aa, Homo Sapiens
IICSIVFGKRFHYQD

SEQ ID NO: 74064 - protein, 15 aa, Homo Sapiens
ICSIVFGKRFHYQDQ

SEQ ID NO: 74065 - protein, 15 aa, Homo Sapiens
CSIVFGKRFHYQDQE

SEQ ID NO: 74066 - protein, 15 aa, Homo Sapiens
SIVFGKRFHYQDQEF

SEQ ID NO: 74067 - protein, 15 aa, Homo Sapiens
IVFGKRFHYQDQEFL

SEQ ID NO: 74068 - protein, 15 aa, Homo Sapiens
VFGKRFHYQDQEFLK

SEQ ID NO: 74069 - protein, 15 aa, Homo Sapiens
FGKRFHYQDQEFLKM

SEQ ID NO: 74070 - protein, 15 aa, Homo Sapiens
GKRFHYQDQEFLKML

SEQ ID NO: 74071 - protein, 15 aa, Homo Sapiens
KRFHYQDQEFLKMLN

SEQ ID NO: 74072 - protein, 15 aa, Homo Sapiens
RFHYQDQEFLKMLNL

SEQ ID NO: 74073 - protein, 15 aa, Homo Sapiens
FHYQDQEFLKMLNLF

SEQ ID NO: 74074 - protein, 15 aa, Homo Sapiens
HYQDQEFLKMLNLFY

SEQ ID NO: 74075 - protein, 15 aa, Homo Sapiens
YQDQEFLKMLNLFYQ

SEQ ID NO: 74076 - protein, 15 aa, Homo Sapiens
QDQEFLKMLNLFYQT

SEQ ID NO: 74077 - protein, 15 aa, Homo Sapiens
DQEFLKMLNLFYQTF

SEQ ID NO: 74078 - protein, 15 aa, Homo Sapiens
QEFLKMLNLFYQTFS

SEQ ID NO: 74079 - protein, 15 aa, Homo Sapiens
EFLKMLNLFYQTFSL

SEQ ID NO: 74080 - protein, 15 aa, Homo Sapiens
FLKMLNLFYQTFSLI

SEQ ID NO: 74081 - protein, 15 aa, Homo Sapiens
LKMLNLFYQTFSLIS

SEQ ID NO: 74082 - protein, 15 aa, Homo Sapiens
KMLNLFYQTFSLISS

SEQ ID NO: 74083 - protein, 15 aa, Homo Sapiens
MLNLFYQTFSLISSV

SEQ ID NO: 74084 - protein, 15 aa, Homo Sapiens
LNLFYQTFSLISSVF

SEQ ID NO: 74085 - protein, 15 aa, Homo Sapiens
NLFYQTFSLISSVFG

SEQ ID NO: 74086 - protein, 15 aa, Homo Sapiens
LFYQTFSLISSVFGQ

SEQ ID NO: 74087 - protein, 15 aa, Homo Sapiens
FYQTFSLISSVFGQL

SEQ ID NO: 74088 - protein, 15 aa, Homo Sapiens
YQTFSLISSVFGQLF

SEQ ID NO: 74089 - protein, 15 aa, Homo Sapiens
QTFSLISSVFGQLFE

SEQ ID NO: 74090 - protein, 15 aa, Homo Sapiens
TFSLISSVFGQLFEL

SEQ ID NO: 74091 - protein, 15 aa, Homo Sapiens
FSLISSVFGQLFELF

SEQ ID NO: 74092 - protein, 15 aa, Homo Sapiens
SLISSVFGQLFELFS

SEQ ID NO: 74093 - protein, 15 aa, Homo Sapiens
LISSVFGQLFELFSG

SEQ ID NO: 74094 - protein, 15 aa, Homo Sapiens
ISSVFGQLFELFSGF

SEQ ID NO: 74095 - protein, 15 aa, Homo Sapiens
SSVFGQLFELFSGFL

SEQ ID NO: 74096 - protein, 15 aa, Homo Sapiens
SVFGQLFELFSGFLK

SEQ ID NO: 74097 - protein, 15 aa, Homo Sapiens
VFGQLFELFSGFLKY

SEQ ID NO: 74098 - protein, 15 aa, Homo Sapiens
FGQLFELFSGFLKYF

SEQ ID NO: 74099 - protein, 15 aa, Homo Sapiens
GQLFELFSGFLKYFP

SEQ ID NO: 74100 - protein, 15 aa, Homo Sapiens
QLFELFSGFLKYFPG

SEQ ID NO: 74101 - protein, 15 aa, Homo Sapiens
LFELFSGFLKYFPGA

SEQ ID NO: 74102 - protein, 15 aa, Homo Sapiens
FELFSGFLKYFPGAH

SEQ ID NO: 74103 - protein, 15 aa, Homo Sapiens
ELFSGFLKYFPGAHR

SEQ ID NO: 74104 - protein, 15 aa, Homo Sapiens
LFSGFLKYFPGAHRQ

SEQ ID NO: 74105 - protein, 15 aa, Homo Sapiens
FSGFLKYFPGAHRQV

SEQ ID NO: 74106 - protein, 15 aa, Homo Sapiens
SGFLKYFPGAHRQVY

SEQ ID NO: 74107 - protein, 15 aa, Homo Sapiens
GFLKYFPGAHRQVYK

SEQ ID NO: 74108 - protein, 15 aa, Homo Sapiens
FLKYFPGAHRQVYKN

SEQ ID NO: 74109 - protein, 15 aa, Homo Sapiens
LKYFPGAHRQVYKNL

SEQ ID NO: 74110 - protein, 15 aa, Homo Sapiens
KYFPGAHRQVYKNLQ

SEQ ID NO: 74111 - protein, 15 aa, Homo Sapiens
YFPGAHRQVYKNLQE

SEQ ID NO: 74112 - protein, 15 aa, Homo Sapiens
FPGAHRQVYKNLQEI

SEQ ID NO: 74113 - protein, 15 aa, Homo Sapiens
PGAHRQVYKNLQEIN

SEQ ID NO: 74114 - protein, 15 aa, Homo Sapiens
GAHRQVYKNLQEINA

SEQ ID NO: 74115 - protein, 15 aa, Homo Sapiens
AHRQVYKNLQEINAY

SEQ ID NO: 74116 - protein, 15 aa, Homo Sapiens
HRQVYKNLQEINAYI

SEQ ID NO: 74117 - protein, 15 aa, Homo Sapiens
RQVYKNLQEINAYIG

SEQ ID NO: 74118 - protein, 15 aa, Homo Sapiens
QVYKNLQEINAYIGH

SEQ ID NO: 74119 - protein, 15 aa, Homo Sapiens
VYKNLQEINAYIGHS

SEQ ID NO: 74120 - protein, 15 aa, Homo Sapiens
YKNLQEINAYIGHSV

SEQ ID NO: 74121 - protein, 15 aa, Homo Sapiens
KNLQEINAYIGHSVE

SEQ ID NO: 74122 - protein, 15 aa, Homo Sapiens
NLQEINAYIGHSVEK

SEQ ID NO: 74123 - protein, 15 aa, Homo Sapiens
LQEINAYIGHSVEKH

SEQ ID NO: 74124 - protein, 15 aa, Homo Sapiens
QEINAYIGHSVEKHR

SEQ ID NO: 74125 - protein, 15 aa, Homo Sapiens
EINAYIGHSVEKHRE

SEQ ID NO: 74126 - protein, 15 aa, Homo Sapiens
INAYIGHSVEKHRET

SEQ ID NO: 74127 - protein, 15 aa, Homo Sapiens
NAYIGHSVEKHRETL

SEQ ID NO: 74128 - protein, 15 aa, Homo Sapiens
AYIGHSVEKHRETLD

SEQ ID NO: 74129 - protein, 15 aa, Homo Sapiens
YIGHSVEKHRETLDP

SEQ ID NO: 74130 - protein, 15 aa, Homo Sapiens
IGHSVEKHRETLDPS

SEQ ID NO: 74131 - protein, 15 aa, Homo Sapiens
GHSVEKHRETLDPSA

SEQ ID NO: 74132 - protein, 15 aa, Homo Sapiens
HSVEKHRETLDPSAP

SEQ ID NO: 74133 - protein, 15 aa, Homo Sapiens
SVEKHRETLDPSAPK

SEQ ID NO: 74134 - protein, 15 aa, Homo Sapiens
VEKHRETLDPSAPKD

SEQ ID NO: 74135 - protein, 15 aa, Homo Sapiens
EKHRETLDPSAPKDL

SEQ ID NO: 74136 - protein, 15 aa, Homo Sapiens
KHRETLDPSAPKDLI

SEQ ID NO: 74137 - protein, 15 aa, Homo Sapiens
HRETLDPSAPKDLID

SEQ ID NO: 74138 - protein, 15 aa, Homo Sapiens
RETLDPSAPKDLIDT

SEQ ID NO: 74139 - protein, 15 aa, Homo Sapiens
ETLDPSAPKDLIDTY

SEQ ID NO: 74140 - protein, 15 aa, Homo Sapiens
TLDPSAPKDLIDTYL

SEQ ID NO: 74141 - protein, 15 aa, Homo Sapiens
LDPSAPKDLIDTYLL

SEQ ID NO: 74142 - protein, 15 aa, Homo Sapiens
DPSAPKDLIDTYLLH

SEQ ID NO: 74143 - protein, 15 aa, Homo Sapiens
PSAPKDLIDTYLLHM

SEQ ID NO: 74144 - protein, 15 aa, Homo Sapiens
SAPKDLIDTYLLHME

SEQ ID NO: 74145 - protein, 15 aa, Homo Sapiens
APKDLIDTYLLHMEK

SEQ ID NO: 74146 - protein, 15 aa, Homo Sapiens
PKDLIDTYLLHMEKE

SEQ ID NO: 74147 - protein, 15 aa, Homo Sapiens
KDLIDTYLLHMEKEK

SEQ ID NO: 74148 - protein, 15 aa, Homo Sapiens
DLIDTYLLHMEKEKS

SEQ ID NO: 74149 - protein, 15 aa, Homo Sapiens
LIDTYLLHMEKEKSN

SEQ ID NO: 74150 - protein, 15 aa, Homo Sapiens
IDTYLLHMEKEKSNA

SEQ ID NO: 74151 - protein, 15 aa, Homo Sapiens
DTYLLHMEKEKSNAH

SEQ ID NO: 74152 - protein, 15 aa, Homo Sapiens
TYLLHMEKEKSNAHS

SEQ ID NO: 74153 - protein, 15 aa, Homo Sapiens
YLLHMEKEKSNAHSE

SEQ ID NO: 74154 - protein, 15 aa, Homo Sapiens
LLHMEKEKSNAHSEF

SEQ ID NO: 74155 - protein, 15 aa, Homo Sapiens
LHMEKEKSNAHSEFS

SEQ ID NO: 74156 - protein, 15 aa, Homo Sapiens
HMEKEKSNAHSEFSH

SEQ ID NO: 74157 - protein, 15 aa, Homo Sapiens
MEKEKSNAHSEFSHQ

SEQ ID NO: 74158 - protein, 15 aa, Homo Sapiens
EKEKSNAHSEFSHQN

SEQ ID NO: 74159 - protein, 15 aa, Homo Sapiens
KEKSNAHSEFSHQNL

SEQ ID NO: 74160 - protein, 15 aa, Homo Sapiens
EKSNAHSEFSHQNLN

SEQ ID NO: 74161 - protein, 15 aa, Homo Sapiens
KSNAHSEFSHQNLNL

SEQ ID NO: 74162 - protein, 15 aa, Homo Sapiens
SNAHSEFSHQNLNLN

SEQ ID NO: 74163 - protein, 15 aa, Homo Sapiens
NAHSEFSHQNLNLNT

SEQ ID NO: 74164 - protein, 15 aa, Homo Sapiens
AHSEFSHQNLNLNTL

SEQ ID NO: 74165 - protein, 15 aa, Homo Sapiens
HSEFSHQNLNLNTLS

SEQ ID NO: 74166 - protein, 15 aa, Homo Sapiens
SEFSHQNLNLNTLSL

SEQ ID NO: 74167 - protein, 15 aa, Homo Sapiens
EFSHQNLNLNTLSLF

SEQ ID NO: 74168 - protein, 15 aa, Homo Sapiens
FSHQNLNLNTLSLFF

SEQ ID NO: 74169 - protein, 15 aa, Homo Sapiens
SHQNLNLNTLSLFFA

SEQ ID NO: 74170 - protein, 15 aa, Homo Sapiens
HQNLNLNTLSLFFAG

SEQ ID NO: 74171 - protein, 15 aa, Homo Sapiens
QNLNLNTLSLFFAGT

SEQ ID NO: 74172 - protein, 15 aa, Homo Sapiens
NLNLNTLSLFFAGTE

SEQ ID NO: 74173 - protein, 15 aa, Homo Sapiens
LNLNTLSLFFAGTET

SEQ ID NO: 74174 - protein, 15 aa, Homo Sapiens
NLNTLSLFFAGTETT

SEQ ID NO: 74175 - protein, 15 aa, Homo Sapiens
LNTLSLFFAGTETTS

SEQ ID NO: 74176 - protein, 15 aa, Homo Sapiens
NTLSLFFAGTETTST

SEQ ID NO: 74177 - protein, 15 aa, Homo Sapiens
TLSLFFAGTETTSTT

SEQ ID NO: 74178 - protein, 15 aa, Homo Sapiens
LSLFFAGTETTSTTL

SEQ ID NO: 74179 - protein, 15 aa, Homo Sapiens
SLFFAGTETTSTTLR

SEQ ID NO: 74180 - protein, 15 aa, Homo Sapiens
LFFAGTETTSTTLRY

SEQ ID NO: 74181 - protein, 15 aa, Homo Sapiens
FFAGTETTSTTLRYG

SEQ ID NO: 74182 - protein, 15 aa, Homo Sapiens
FAGTETTSTTLRYGF

SEQ ID NO: 74183 - protein, 15 aa, Homo Sapiens
AGTETTSTTLRYGFL

SEQ ID NO: 74184 - protein, 15 aa, Homo Sapiens
GTETTSTTLRYGFLL

SEQ ID NO: 74185 - protein, 15 aa, Homo Sapiens
TETTSTTLRYGFLLM

SEQ ID NO: 74186 - protein, 15 aa, Homo Sapiens
ETTSTTLRYGFLLML

SEQ ID NO: 74187 - protein, 15 aa, Homo Sapiens
TTSTTLRYGFLLMLK

SEQ ID NO: 74188 - protein, 15 aa, Homo Sapiens
TSTTLRYGFLLMLKY

SEQ ID NO: 74189 - protein, 15 aa, Homo Sapiens
STTLRYGFLLMLKYP

SEQ ID NO: 74190 - protein, 15 aa, Homo Sapiens
TTLRYGFLLMLKYPH

SEQ ID NO: 74191 - protein, 15 aa, Homo Sapiens
TLRYGFLLMLKYPHV

SEQ ID NO: 74192 - protein, 15 aa, Homo Sapiens
LRYGFLLMLKYPHVA

SEQ ID NO: 74193 - protein, 15 aa, Homo Sapiens
RYGFLLMLKYPHVAE

SEQ ID NO: 74194 - protein, 15 aa, Homo Sapiens
YGFLLMLKYPHVAER

SEQ ID NO: 74195 - protein, 15 aa, Homo Sapiens
GFLLMLKYPHVAERV

SEQ ID NO: 74196 - protein, 15 aa, Homo Sapiens
FLLMLKYPHVAERVY

SEQ ID NO: 74197 - protein, 15 aa, Homo Sapiens
LLMLKYPHVAERVYR

SEQ ID NO: 74198 - protein, 15 aa, Homo Sapiens
LMLKYPHVAERVYRE

SEQ ID NO: 74199 - protein, 15 aa, Homo Sapiens
MLKYPHVAERVYREI

SEQ ID NO: 74200 - protein, 15 aa, Homo Sapiens
LKYPHVAERVYREIE

SEQ ID NO: 74201 - protein, 15 aa, Homo Sapiens
KYPHVAERVYREIEQ

SEQ ID NO: 74202 - protein, 15 aa, Homo Sapiens
YPHVAERVYREIEQV

SEQ ID NO: 74203 - protein, 15 aa, Homo Sapiens
PHVAERVYREIEQVI

SEQ ID NO: 74204 - protein, 15 aa, Homo Sapiens
HVAERVYREIEQVIG

SEQ ID NO: 74205 - protein, 15 aa, Homo Sapiens
VAERVYREIEQVIGP

SEQ ID NO: 74206 - protein, 15 aa, Homo Sapiens
AERVYREIEQVIGPH

SEQ ID NO: 74207 - protein, 15 aa, Homo Sapiens
ERVYREIEQVIGPHR

SEQ ID NO: 74208 - protein, 15 aa, Homo Sapiens
RVYREIEQVIGPHRP

SEQ ID NO: 74209 - protein, 15 aa, Homo Sapiens
VYREIEQVIGPHRPP

SEQ ID NO: 74210 - protein, 15 aa, Homo Sapiens
YREIEQVIGPHRPPE

SEQ ID NO: 74211 - protein, 15 aa, Homo Sapiens
REIEQVIGPHRPPEL

SEQ ID NO: 74212 - protein, 15 aa, Homo Sapiens
EIEQVIGPHRPPELH

SEQ ID NO: 74213 - protein, 15 aa, Homo Sapiens
IEQVIGPHRPPELHD

SEQ ID NO: 74214 - protein, 15 aa, Homo Sapiens
EQVIGPHRPPELHDR

SEQ ID NO: 74215 - protein, 15 aa, Homo Sapiens
QVIGPHRPPELHDRA

SEQ ID NO: 74216 - protein, 15 aa, Homo Sapiens
VIGPHRPPELHDRAK

SEQ ID NO: 74217 - protein, 15 aa, Homo Sapiens
IGPHRPPELHDRAKM

SEQ ID NO: 74218 - protein, 15 aa, Homo Sapiens
GPHRPPELHDRAKMP

SEQ ID NO: 74219 - protein, 15 aa, Homo Sapiens
PHRPPELHDRAKMPY

SEQ ID NO: 74220 - protein, 15 aa, Homo Sapiens
HRPPELHDRAKMPYT

SEQ ID NO: 74221 - protein, 15 aa, Homo Sapiens
RPPELHDRAKMPYTE

SEQ ID NO: 74222 - protein, 15 aa, Homo Sapiens
PPELHDRAKMPYTEA

SEQ ID NO: 74223 - protein, 15 aa, Homo Sapiens
PELHDRAKMPYTEAV

SEQ ID NO: 74224 - protein, 15 aa, Homo Sapiens
ELHDRAKMPYTEAVI

SEQ ID NO: 74225 - protein, 15 aa, Homo Sapiens
LHDRAKMPYTEAVIY

SEQ ID NO: 74226 - protein, 15 aa, Homo Sapiens
HDRAKMPYTEAVIYE

SEQ ID NO: 74227 - protein, 15 aa, Homo Sapiens
DRAKMPYTEAVIYEI

SEQ ID NO: 74228 - protein, 15 aa, Homo Sapiens
RAKMPYTEAVIYEIQ

SEQ ID NO: 74229 - protein, 15 aa, Homo Sapiens
AKMPYTEAVIYEIQR

SEQ ID NO: 74230 - protein, 15 aa, Homo Sapiens
KMPYTEAVIYEIQRF

SEQ ID NO: 74231 - protein, 15 aa, Homo Sapiens
MPYTEAVIYEIQRFS

SEQ ID NO: 74232 - protein, 15 aa, Homo Sapiens
PYTEAVIYEIQRFSD

SEQ ID NO: 74233 - protein, 15 aa, Homo Sapiens
YTEAVIYEIQRFSDL

SEQ ID NO: 74234 - protein, 15 aa, Homo Sapiens
TEAVIYEIQRFSDLL

SEQ ID NO: 74235 - protein, 15 aa, Homo Sapiens
EAVIYEIQRFSDLLP

SEQ ID NO: 74236 - protein, 15 aa, Homo Sapiens
AVIYEIQRFSDLLPM

SEQ ID NO: 74237 - protein, 15 aa, Homo Sapiens
VIYEIQRFSDLLPMG

SEQ ID NO: 74238 - protein, 15 aa, Homo Sapiens
IYEIQRFSDLLPMGV

SEQ ID NO: 74239 - protein, 15 aa, Homo Sapiens
YEIQRFSDLLPMGVP

SEQ ID NO: 74240 - protein, 15 aa, Homo Sapiens
EIQRFSDLLPMGVPH

SEQ ID NO: 74241 - protein, 15 aa, Homo Sapiens
IQRFSDLLPMGVPHI

SEQ ID NO: 74242 - protein, 15 aa, Homo Sapiens
QRFSDLLPMGVPHIV

SEQ ID NO: 74243 - protein, 15 aa, Homo Sapiens
RFSDLLPMGVPHIVT

SEQ ID NO: 74244 - protein, 15 aa, Homo Sapiens
FSDLLPMGVPHIVTQ

SEQ ID NO: 74245 - protein, 15 aa, Homo Sapiens
SDLLPMGVPHIVTQH

SEQ ID NO: 74246 - protein, 15 aa, Homo Sapiens
DLLPMGVPHIVTQHT

SEQ ID NO: 74247 - protein, 15 aa, Homo Sapiens
LLPMGVPHIVTQHTS

SEQ ID NO: 74248 - protein, 15 aa, Homo Sapiens
LPMGVPHIVTQHTSF

SEQ ID NO: 74249 - protein, 15 aa, Homo Sapiens
PMGVPHIVTQHTSFR

SEQ ID NO: 74250 - protein, 15 aa, Homo Sapiens
MGVPHIVTQHTSFRG

SEQ ID NO: 74251 - protein, 15 aa, Homo Sapiens
GVPHIVTQHTSFRGY

SEQ ID NO: 74252 - protein, 15 aa, Homo Sapiens
VPHIVTQHTSFRGYI

SEQ ID NO: 74253 - protein, 15 aa, Homo Sapiens
PHIVTQHTSFRGYII

SEQ ID NO: 74254 - protein, 15 aa, Homo Sapiens
HIVTQHTSFRGYIIP

SEQ ID NO: 74255 - protein, 15 aa, Homo Sapiens
IVTQHTSFRGYIIPK

SEQ ID NO: 74256 - protein, 15 aa, Homo Sapiens
VTQHTSFRGYIIPKD

SEQ ID NO: 74257 - protein, 15 aa, Homo Sapiens
TQHTSFRGYIIPKDT

SEQ ID NO: 74258 - protein, 15 aa, Homo Sapiens
QHTSFRGYIIPKDTE

SEQ ID NO: 74259 - protein, 15 aa, Homo Sapiens
HTSFRGYIIPKDTEV

SEQ ID NO: 74260 - protein, 15 aa, Homo Sapiens
TSFRGYIIPKDTEVF

SEQ ID NO: 74261 - protein, 15 aa, Homo Sapiens
SFRGYIIPKDTEVFL

SEQ ID NO: 74262 - protein, 15 aa, Homo Sapiens
FRGYIIPKDTEVFLI

SEQ ID NO: 74263 - protein, 15 aa, Homo Sapiens
RGYIIPKDTEVFLIL

SEQ ID NO: 74264 - protein, 15 aa, Homo Sapiens
GYIIPKDTEVFLILS

SEQ ID NO: 74265 - protein, 15 aa, Homo Sapiens
YIIPKDTEVFLILST

SEQ ID NO: 74266 - protein, 15 aa, Homo Sapiens
IIPKDTEVFLILSTA

SEQ ID NO: 74267 - protein, 15 aa, Homo Sapiens
IPKDTEVFLILSTAL

SEQ ID NO: 74268 - protein, 15 aa, Homo Sapiens
PKDTEVFLILSTALH

SEQ ID NO: 74269 - protein, 15 aa, Homo Sapiens
KDTEVFLILSTALHD

SEQ ID NO: 74270 - protein, 15 aa, Homo Sapiens
DTEVFLILSTALHDP

SEQ ID NO: 74271 - protein, 15 aa, Homo Sapiens
TEVFLILSTALHDPH

SEQ ID NO: 74272 - protein, 15 aa, Homo Sapiens
EVFLILSTALHDPHY

SEQ ID NO: 74273 - protein, 15 aa, Homo Sapiens
VFLILSTALHDPHYF

SEQ ID NO: 74274 - protein, 15 aa, Homo Sapiens
FLILSTALHDPHYFE

SEQ ID NO: 74275 - protein, 15 aa, Homo Sapiens
LILSTALHDPHYFEK

SEQ ID NO: 74276 - protein, 15 aa, Homo Sapiens
ILSTALHDPHYFEKP

SEQ ID NO: 74277 - protein, 15 aa, Homo Sapiens
LSTALHDPHYFEKPD

SEQ ID NO: 74278 - protein, 15 aa, Homo Sapiens
STALHDPHYFEKPDA

SEQ ID NO: 74279 - protein, 15 aa, Homo Sapiens
TALHDPHYFEKPDAF

SEQ ID NO: 74280 - protein, 15 aa, Homo Sapiens
ALHDPHYFEKPDAFN

SEQ ID NO: 74281 - protein, 15 aa, Homo Sapiens
LHDPHYFEKPDAFNP

SEQ ID NO: 74282 - protein, 15 aa, Homo Sapiens
HDPHYFEKPDAFNPD

SEQ ID NO: 74283 - protein, 15 aa, Homo Sapiens
DPHYFEKPDAFNPDH

SEQ ID NO: 74284 - protein, 15 aa, Homo Sapiens
PHYFEKPDAFNPDHF

SEQ ID NO: 74285 - protein, 15 aa, Homo Sapiens
HYFEKPDAFNPDHFL

SEQ ID NO: 74286 - protein, 15 aa, Homo Sapiens
YFEKPDAFNPDHFLD

SEQ ID NO: 74287 - protein, 15 aa, Homo Sapiens
FEKPDAFNPDHFLDA

SEQ ID NO: 74288 - protein, 15 aa, Homo Sapiens
EKPDAFNPDHFLDAN

SEQ ID NO: 74289 - protein, 15 aa, Homo Sapiens
KPDAFNPDHFLDANG

SEQ ID NO: 74290 - protein, 15 aa, Homo Sapiens
PDAFNPDHFLDANGA

SEQ ID NO: 74291 - protein, 15 aa, Homo Sapiens
DAFNPDHFLDANGAL

SEQ ID NO: 74292 - protein, 15 aa, Homo Sapiens
AFNPDHFLDANGALK

SEQ ID NO: 74293 - protein, 15 aa, Homo Sapiens
FNPDHFLDANGALKK

SEQ ID NO: 74294 - protein, 15 aa, Homo Sapiens
NPDHFLDANGALKKT

SEQ ID NO: 74295 - protein, 15 aa, Homo Sapiens
PDHFLDANGALKKTE

SEQ ID NO: 74296 - protein, 15 aa, Homo Sapiens
DHFLDANGALKKTEA

SEQ ID NO: 74297 - protein, 15 aa, Homo Sapiens
HFLDANGALKKTEAF

SEQ ID NO: 74298 - protein, 15 aa, Homo Sapiens
FLDANGALKKTEAFI

SEQ ID NO: 74299 - protein, 15 aa, Homo Sapiens
LDANGALKKTEAFIP

SEQ ID NO: 74300 - protein, 15 aa, Homo Sapiens
DANGALKKTEAFIPF

SEQ ID NO: 74301 - protein, 15 aa, Homo Sapiens
ANGALKKTEAFIPFS

SEQ ID NO: 74302 - protein, 15 aa, Homo Sapiens
NGALKKTEAFIPFSL

SEQ ID NO: 74303 - protein, 15 aa, Homo Sapiens
GALKKTEAFIPFSLG

SEQ ID NO: 74304 - protein, 15 aa, Homo Sapiens
ALKKTEAFIPFSLGK

SEQ ID NO: 74305 - protein, 15 aa, Homo Sapiens
LKKTEAFIPFSLGKR

SEQ ID NO: 74306 - protein, 15 aa, Homo Sapiens
KKTEAFIPFSLGKRI

SEQ ID NO: 74307 - protein, 15 aa, Homo Sapiens
KTEAFIPFSLGKRIC

SEQ ID NO: 74308 - protein, 15 aa, Homo Sapiens
TEAFIPFSLGKRICL

SEQ ID NO: 74309 - protein, 15 aa, Homo Sapiens
EAFIPFSLGKRICLG

SEQ ID NO: 74310 - protein, 15 aa, Homo Sapiens
AFIPFSLGKRICLGE

SEQ ID NO: 74311 - protein, 15 aa, Homo Sapiens
FIPFSLGKRICLGEG

SEQ ID NO: 74312 - protein, 15 aa, Homo Sapiens
IPFSLGKRICLGEGI

SEQ ID NO: 74313 - protein, 15 aa, Homo Sapiens
PFSLGKRICLGEGIA

SEQ ID NO: 74314 - protein, 15 aa, Homo Sapiens
FSLGKRICLGEGIAR

SEQ ID NO: 74315 - protein, 15 aa, Homo Sapiens
SLGKRICLGEGIARA

SEQ ID NO: 74316 - protein, 15 aa, Homo Sapiens
LGKRICLGEGIARAE

SEQ ID NO: 74317 - protein, 15 aa, Homo Sapiens
GKRICLGEGIARAEL

SEQ ID NO: 74318 - protein, 15 aa, Homo Sapiens
KRICLGEGIARAELF

SEQ ID NO: 74319 - protein, 15 aa, Homo Sapiens
RICLGEGIARAELFL

SEQ ID NO: 74320 - protein, 15 aa, Homo Sapiens
ICLGEGIARAELFLF

SEQ ID NO: 74321 - protein, 15 aa, Homo Sapiens
CLGEGIARAELFLFF

SEQ ID NO: 74322 - protein, 15 aa, Homo Sapiens
LGEGIARAELFLFFT

SEQ ID NO: 74323 - protein, 15 aa, Homo Sapiens
GEGIARAELFLFFTT

SEQ ID NO: 74324 - protein, 15 aa, Homo Sapiens
EGIARAELFLFFTTI

SEQ ID NO: 74325 - protein, 15 aa, Homo Sapiens
GIARAELFLFFTTIL

SEQ ID NO: 74326 - protein, 15 aa, Homo Sapiens
IARAELFLFFTTILQ

SEQ ID NO: 74327 - protein, 15 aa, Homo Sapiens
ARAELFLFFTTILQN

SEQ ID NO: 74328 - protein, 15 aa, Homo Sapiens
RAELFLFFTTILQNF

SEQ ID NO: 74329 - protein, 15 aa, Homo Sapiens
AELFLFFTTILQNFS

SEQ ID NO: 74330 - protein, 15 aa, Homo Sapiens
ELFLFFTTILQNFSM

SEQ ID NO: 74331 - protein, 15 aa, Homo Sapiens
LFLFFTTILQNFSMA

SEQ ID NO: 74332 - protein, 15 aa, Homo Sapiens
FLFFTTILQNFSMAS

SEQ ID NO: 74333 - protein, 15 aa, Homo Sapiens
LFFTTILQNFSMASP

SEQ ID NO: 74334 - protein, 15 aa, Homo Sapiens
FFTTILQNFSMASPV

SEQ ID NO: 74335 - protein, 15 aa, Homo Sapiens
FTTILQNFSMASPVA

SEQ ID NO: 74336 - protein, 15 aa, Homo Sapiens
TTILQNFSMASPVAP

SEQ ID NO: 74337 - protein, 15 aa, Homo Sapiens
TILQNFSMASPVAPE

SEQ ID NO: 74338 - protein, 15 aa, Homo Sapiens
ILQNFSMASPVAPED

SEQ ID NO: 74339 - protein, 15 aa, Homo Sapiens
LQNFSMASPVAPEDI

SEQ ID NO: 74340 - protein, 15 aa, Homo Sapiens
QNFSMASPVAPEDID

SEQ ID NO: 74341 - protein, 15 aa, Homo Sapiens
NFSMASPVAPEDIDL

SEQ ID NO: 74342 - protein, 15 aa, Homo Sapiens
FSMASPVAPEDIDLT

SEQ ID NO: 74343 - protein, 15 aa, Homo Sapiens
SMASPVAPEDIDLTP

SEQ ID NO: 74344 - protein, 15 aa, Homo Sapiens
MASPVAPEDIDLTPQ

SEQ ID NO: 74345 - protein, 15 aa, Homo Sapiens
ASPVAPEDIDLTPQE

SEQ ID NO: 74346 - protein, 15 aa, Homo Sapiens
SPVAPEDIDLTPQEC

SEQ ID NO: 74347 - protein, 15 aa, Homo Sapiens
PVAPEDIDLTPQECG

SEQ ID NO: 74348 - protein, 15 aa, Homo Sapiens
VAPEDIDLTPQECGV

SEQ ID NO: 74349 - protein, 15 aa, Homo Sapiens
APEDIDLTPQECGVG

SEQ ID NO: 74350 - protein, 15 aa, Homo Sapiens
PEDIDLTPQECGVGK

SEQ ID NO: 74351 - protein, 15 aa, Homo Sapiens
EDIDLTPQECGVGKI

SEQ ID NO: 74352 - protein, 15 aa, Homo Sapiens
DIDLTPQECGVGKIP

SEQ ID NO: 74353 - protein, 15 aa, Homo Sapiens
IDLTPQECGVGKIPP

SEQ ID NO: 74354 - protein, 15 aa, Homo Sapiens
DLTPQECGVGKIPPT

SEQ ID NO: 74355 - protein, 15 aa, Homo Sapiens
LTPQECGVGKIPPTY

SEQ ID NO: 74356 - protein, 15 aa, Homo Sapiens
TPQECGVGKIPPTYQ

SEQ ID NO: 74357 - protein, 15 aa, Homo Sapiens
PQECGVGKIPPTYQI

SEQ ID NO: 74358 - protein, 15 aa, Homo Sapiens
QECGVGKIPPTYQIR

SEQ ID NO: 74359 - protein, 15 aa, Homo Sapiens
ECGVGKIPPTYQIRF

SEQ ID NO: 74360 - protein, 15 aa, Homo Sapiens
CGVGKIPPTYQIRFL

SEQ ID NO: 74361 - protein, 15 aa, Homo Sapiens
GVGKIPPTYQIRFLP

SEQ ID NO: 74362 - protein, 15 aa, Homo Sapiens
VGKIPPTYQIRFLPR

SEQ ID NO: 74363 - protein, 16 aa, Homo Sapiens
MELSVLLFLALLTGLL

SEQ ID NO: 74364 - protein, 16 aa, Homo Sapiens
ELSVLLFLALLTGLLL

SEQ ID NO: 74365 - protein, 16 aa, Homo Sapiens
LSVLLFLALLTGLLLL

SEQ ID NO: 74366 - protein, 16 aa, Homo Sapiens
SVLLFLALLTGLLLLL

SEQ ID NO: 74367 - protein, 16 aa, Homo Sapiens
VLLFLALLTGLLLLLV

SEQ ID NO: 74368 - protein, 16 aa, Homo Sapiens
LLFLALLTGLLLLLVQ

SEQ ID NO: 74369 - protein, 16 aa, Homo Sapiens
LFLALLTGLLLLLVQR

SEQ ID NO: 74370 - protein, 16 aa, Homo Sapiens
FLALLTGLLLLLVQRH

SEQ ID NO: 74371 - protein, 16 aa, Homo Sapiens
LALLTGLLLLLVQRHP

SEQ ID NO: 74372 - protein, 16 aa, Homo Sapiens
ALLTGLLLLLVQRHPN

SEQ ID NO: 74373 - protein, 16 aa, Homo Sapiens
LLTGLLLLLVQRHPNT

SEQ ID NO: 74374 - protein, 16 aa, Homo Sapiens
LTGLLLLLVQRHPNTH

SEQ ID NO: 74375 - protein, 16 aa, Homo Sapiens
TGLLLLLVQRHPNTHD

SEQ ID NO: 74376 - protein, 16 aa, Homo Sapiens
GLLLLLVQRHPNTHDR

SEQ ID NO: 74377 - protein, 16 aa, Homo Sapiens
LLLLLVQRHPNTHDRL

SEQ ID NO: 74378 - protein, 16 aa, Homo Sapiens
LLLLVQRHPNTHDRLP

SEQ ID NO: 74379 - protein, 16 aa, Homo Sapiens
LLLVQRHPNTHDRLPP

SEQ ID NO: 74380 - protein, 16 aa, Homo Sapiens
LLVQRHPNTHDRLPPG

SEQ ID NO: 74381 - protein, 16 aa, Homo Sapiens
LVQRHPNTHDRLPPGP

SEQ ID NO: 74382 - protein, 16 aa, Homo Sapiens
VQRHPNTHDRLPPGPR

SEQ ID NO: 74383 - protein, 16 aa, Homo Sapiens
QRHPNTHDRLPPGPRP

SEQ ID NO: 74384 - protein, 16 aa, Homo Sapiens
RHPNTHDRLPPGPRPL

SEQ ID NO: 74385 - protein, 16 aa, Homo Sapiens
HPNTHDRLPPGPRPLP

SEQ ID NO: 74386 - protein, 16 aa, Homo Sapiens
PNTHDRLPPGPRPLPL

SEQ ID NO: 74387 - protein, 16 aa, Homo Sapiens
NTHDRLPPGPRPLPLL

SEQ ID NO: 74388 - protein, 16 aa, Homo Sapiens
THDRLPPGPRPLPLLG

SEQ ID NO: 74389 - protein, 16 aa, Homo Sapiens
HDRLPPGPRPLPLLGN

SEQ ID NO: 74390 - protein, 16 aa, Homo Sapiens
DRLPPGPRPLPLLGNL

SEQ ID NO: 74391 - protein, 16 aa, Homo Sapiens
RLPPGPRPLPLLGNLL

SEQ ID NO: 74392 - protein, 16 aa, Homo Sapiens
LPPGPRPLPLLGNLLQ

SEQ ID NO: 74393 - protein, 16 aa, Homo Sapiens
PPGPRPLPLLGNLLQM

SEQ ID NO: 74394 - protein, 16 aa, Homo Sapiens
PGPRPLPLLGNLLQMD

SEQ ID NO: 74395 - protein, 16 aa, Homo Sapiens
GPRPLPLLGNLLQMDR

SEQ ID NO: 74396 - protein, 16 aa, Homo Sapiens
PRPLPLLGNLLQMDRR

SEQ ID NO: 74397 - protein, 16 aa, Homo Sapiens
RPLPLLGNLLQMDRRG

SEQ ID NO: 74398 - protein, 16 aa, Homo Sapiens
PLPLLGNLLQMDRRGL

SEQ ID NO: 74399 - protein, 16 aa, Homo Sapiens
LPLLGNLLQMDRRGLL

SEQ ID NO: 74400 - protein, 16 aa, Homo Sapiens
PLLGNLLQMDRRGLLK

SEQ ID NO: 74401 - protein, 16 aa, Homo Sapiens
LLGNLLQMDRRGLLKS

SEQ ID NO: 74402 - protein, 16 aa, Homo Sapiens
LGNLLQMDRRGLLKSF

SEQ ID NO: 74403 - protein, 16 aa, Homo Sapiens
GNLLQMDRRGLLKSFL

SEQ ID NO: 74404 - protein, 16 aa, Homo Sapiens
NLLQMDRRGLLKSFLR

SEQ ID NO: 74405 - protein, 16 aa, Homo Sapiens
LLQMDRRGLLKSFLRF

SEQ ID NO: 74406 - protein, 16 aa, Homo Sapiens
LQMDRRGLLKSFLRFR

SEQ ID NO: 74407 - protein, 16 aa, Homo Sapiens
QMDRRGLLKSFLRFRE

SEQ ID NO: 74408 - protein, 16 aa, Homo Sapiens
MDRRGLLKSFLRFREK

SEQ ID NO: 74409 - protein, 16 aa, Homo Sapiens
DRRGLLKSFLRFREKY

SEQ ID NO: 74410 - protein, 16 aa, Homo Sapiens
RRGLLKSFLRFREKYG

SEQ ID NO: 74411 - protein, 16 aa, Homo Sapiens
RGLLKSFLRFREKYGD

SEQ ID NO: 74412 - protein, 16 aa, Homo Sapiens
GLLKSFLRFREKYGDV

SEQ ID NO: 74413 - protein, 16 aa, Homo Sapiens
LLKSFLRFREKYGDVF

SEQ ID NO: 74414 - protein, 16 aa, Homo Sapiens
LKSFLRFREKYGDVFT

SEQ ID NO: 74415 - protein, 16 aa, Homo Sapiens
KSFLRFREKYGDVFTV

SEQ ID NO: 74416 - protein, 16 aa, Homo Sapiens
SFLRFREKYGDVFTVH

SEQ ID NO: 74417 - protein, 16 aa, Homo Sapiens
FLRFREKYGDVFTVHL

SEQ ID NO: 74418 - protein, 16 aa, Homo Sapiens
LRFREKYGDVFTVHLG

SEQ ID NO: 74419 - protein, 16 aa, Homo Sapiens
RFREKYGDVFTVHLGP

SEQ ID NO: 74420 - protein, 16 aa, Homo Sapiens
FREKYGDVFTVHLGPR

SEQ ID NO: 74421 - protein, 16 aa, Homo Sapiens
REKYGDVFTVHLGPRP

SEQ ID NO: 74422 - protein, 16 aa, Homo Sapiens
EKYGDVFTVHLGPRPV

SEQ ID NO: 74423 - protein, 16 aa, Homo Sapiens
KYGDVFTVHLGPRPVV

SEQ ID NO: 74424 - protein, 16 aa, Homo Sapiens
YGDVFTVHLGPRPVVM

SEQ ID NO: 74425 - protein, 16 aa, Homo Sapiens
GDVFTVHLGPRPVVML

SEQ ID NO: 74426 - protein, 16 aa, Homo Sapiens
DVFTVHLGPRPVVMLC

SEQ ID NO: 74427 - protein, 16 aa, Homo Sapiens
VFTVHLGPRPVVMLCG

SEQ ID NO: 74428 - protein, 16 aa, Homo Sapiens
FTVHLGPRPVVMLCGV

SEQ ID NO: 74429 - protein, 16 aa, Homo Sapiens
TVHLGPRPVVMLCGVE

SEQ ID NO: 74430 - protein, 16 aa, Homo Sapiens
VHLGPRPVVMLCGVEA

SEQ ID NO: 74431 - protein, 16 aa, Homo Sapiens
HLGPRPVVMLCGVEAI

SEQ ID NO: 74432 - protein, 16 aa, Homo Sapiens
LGPRPVVMLCGVEAIR

SEQ ID NO: 74433 - protein, 16 aa, Homo Sapiens
GPRPVVMLCGVEAIRE

SEQ ID NO: 74434 - protein, 16 aa, Homo Sapiens
PRPVVMLCGVEAIREA

SEQ ID NO: 74435 - protein, 16 aa, Homo Sapiens
RPVVMLCGVEAIREAL

SEQ ID NO: 74436 - protein, 16 aa, Homo Sapiens
PVVMLCGVEAIREALV

SEQ ID NO: 74437 - protein, 16 aa, Homo Sapiens
VVMLCGVEAIREALVD

SEQ ID NO: 74438 - protein, 16 aa, Homo Sapiens
VMLCGVEAIREALVDK

SEQ ID NO: 74439 - protein, 16 aa, Homo Sapiens
MLCGVEAIREALVDKA

SEQ ID NO: 74440 - protein, 16 aa, Homo Sapiens
LCGVEAIREALVDKAE

SEQ ID NO: 74441 - protein, 16 aa, Homo Sapiens
CGVEAIREALVDKAEA

SEQ ID NO: 74442 - protein, 16 aa, Homo Sapiens
GVEAIREALVDKAEAF

SEQ ID NO: 74443 - protein, 16 aa, Homo Sapiens
VEAIREALVDKAEAFS

SEQ ID NO: 74444 - protein, 16 aa, Homo Sapiens
EAIREALVDKAEAFSG

SEQ ID NO: 74445 - protein, 16 aa, Homo Sapiens
AIREALVDKAEAFSGR

SEQ ID NO: 74446 - protein, 16 aa, Homo Sapiens
IREALVDKAEAFSGRG

SEQ ID NO: 74447 - protein, 16 aa, Homo Sapiens
REALVDKAEAFSGRGK

SEQ ID NO: 74448 - protein, 16 aa, Homo Sapiens
EALVDKAEAFSGRGKI

SEQ ID NO: 74449 - protein, 16 aa, Homo Sapiens
ALVDKAEAFSGRGKIA

SEQ ID NO: 74450 - protein, 16 aa, Homo Sapiens
LVDKAEAFSGRGKIAM

SEQ ID NO: 74451 - protein, 16 aa, Homo Sapiens
VDKAEAFSGRGKIAMV

SEQ ID NO: 74452 - protein, 16 aa, Homo Sapiens
DKAEAFSGRGKIAMVD

SEQ ID NO: 74453 - protein, 16 aa, Homo Sapiens
KAEAFSGRGKIAMVDP

SEQ ID NO: 74454 - protein, 16 aa, Homo Sapiens
AEAFSGRGKIAMVDPF

SEQ ID NO: 74455 - protein, 16 aa, Homo Sapiens
EAFSGRGKIAMVDPFF

SEQ ID NO: 74456 - protein, 16 aa, Homo Sapiens
AFSGRGKIAMVDPFFR

SEQ ID NO: 74457 - protein, 16 aa, Homo Sapiens
FSGRGKIAMVDPFFRG

SEQ ID NO: 74458 - protein, 16 aa, Homo Sapiens
SGRGKIAMVDPFFRGY

SEQ ID NO: 74459 - protein, 16 aa, Homo Sapiens
GRGKIAMVDPFFRGYG

SEQ ID NO: 74460 - protein, 16 aa, Homo Sapiens
RGKIAMVDPFFRGYGV

SEQ ID NO: 74461 - protein, 16 aa, Homo Sapiens
GKIAMVDPFFRGYGVI

SEQ ID NO: 74462 - protein, 16 aa, Homo Sapiens
KIAMVDPFFRGYGVIF

SEQ ID NO: 74463 - protein, 16 aa, Homo Sapiens
IAMVDPFFRGYGVIFA

SEQ ID NO: 74464 - protein, 16 aa, Homo Sapiens
AMVDPFFRGYGVIFAN

SEQ ID NO: 74465 - protein, 16 aa, Homo Sapiens
MVDPFFRGYGVIFANG

SEQ ID NO: 74466 - protein, 16 aa, Homo Sapiens
VDPFFRGYGVIFANGN

SEQ ID NO: 74467 - protein, 16 aa, Homo Sapiens
DPFFRGYGVIFANGNR

SEQ ID NO: 74468 - protein, 16 aa, Homo Sapiens
PFFRGYGVIFANGNRW

SEQ ID NO: 74469 - protein, 16 aa, Homo Sapiens
FFRGYGVIFANGNRWK

SEQ ID NO: 74470 - protein, 16 aa, Homo Sapiens
FRGYGVIFANGNRWKV

SEQ ID NO: 74471 - protein, 16 aa, Homo Sapiens
RGYGVIFANGNRWKVL

SEQ ID NO: 74472 - protein, 16 aa, Homo Sapiens
GYGVIFANGNRWKVLR

SEQ ID NO: 74473 - protein, 16 aa, Homo Sapiens
YGVIFANGNRWKVLRR

SEQ ID NO: 74474 - protein, 16 aa, Homo Sapiens
GVIFANGNRWKVLRRF

SEQ ID NO: 74475 - protein, 16 aa, Homo Sapiens
VIFANGNRWKVLRRFS

SEQ ID NO: 74476 - protein, 16 aa, Homo Sapiens
IFANGNRWKVLRRFSV

SEQ ID NO: 74477 - protein, 16 aa, Homo Sapiens
FANGNRWKVLRRFSVT

SEQ ID NO: 74478 - protein, 16 aa, Homo Sapiens
ANGNRWKVLRRFSVTT

SEQ ID NO: 74479 - protein, 16 aa, Homo Sapiens
NGNRWKVLRRFSVTTM

SEQ ID NO: 74480 - protein, 16 aa, Homo Sapiens
GNRWKVLRRFSVTTMR

SEQ ID NO: 74481 - protein, 16 aa, Homo Sapiens
NRWKVLRRFSVTTMRD

SEQ ID NO: 74482 - protein, 16 aa, Homo Sapiens
RWKVLRRFSVTTMRDF

SEQ ID NO: 74483 - protein, 16 aa, Homo Sapiens
WKVLRRFSVTTMRDFG

SEQ ID NO: 74484 - protein, 16 aa, Homo Sapiens
KVLRRFSVTTMRDFGM

SEQ ID NO: 74485 - protein, 16 aa, Homo Sapiens
VLRRFSVTTMRDFGMG

SEQ ID NO: 74486 - protein, 16 aa, Homo Sapiens
LRRFSVTTMRDFGMGK

SEQ ID NO: 74487 - protein, 16 aa, Homo Sapiens
RRFSVTTMRDFGMGKR

SEQ ID NO: 74488 - protein, 16 aa, Homo Sapiens
RFSVTTMRDFGMGKRS

SEQ ID NO: 74489 - protein, 16 aa, Homo Sapiens
FSVTTMRDFGMGKRSV

SEQ ID NO: 74490 - protein, 16 aa, Homo Sapiens
SVTTMRDFGMGKRSVE

SEQ ID NO: 74491 - protein, 16 aa, Homo Sapiens
VTTMRDFGMGKRSVEE

SEQ ID NO: 74492 - protein, 16 aa, Homo Sapiens
TTMRDFGMGKRSVEER

SEQ ID NO: 74493 - protein, 16 aa, Homo Sapiens
TMRDFGMGKRSVEERI

SEQ ID NO: 74494 - protein, 16 aa, Homo Sapiens
MRDFGMGKRSVEERIQ

SEQ ID NO: 74495 - protein, 16 aa, Homo Sapiens
RDFGMGKRSVEERIQE

SEQ ID NO: 74496 - protein, 16 aa, Homo Sapiens
DFGMGKRSVEERIQEE

SEQ ID NO: 74497 - protein, 16 aa, Homo Sapiens
FGMGKRSVEERIQEEA

SEQ ID NO: 74498 - protein, 16 aa, Homo Sapiens
GMGKRSVEERIQEEAQ

SEQ ID NO: 74499 - protein, 16 aa, Homo Sapiens
MGKRSVEERIQEEAQC

SEQ ID NO: 74500 - protein, 16 aa, Homo Sapiens
GKRSVEERIQEEAQCL

SEQ ID NO: 74501 - protein, 16 aa, Homo Sapiens
KRSVEERIQEEAQCLI

SEQ ID NO: 74502 - protein, 16 aa, Homo Sapiens
RSVEERIQEEAQCLIE

SEQ ID NO: 74503 - protein, 16 aa, Homo Sapiens
SVEERIQEEAQCLIEE

SEQ ID NO: 74504 - protein, 16 aa, Homo Sapiens
VEERIQEEAQCLIEEL

SEQ ID NO: 74505 - protein, 16 aa, Homo Sapiens
EERIQEEAQCLIEELR

SEQ ID NO: 74506 - protein, 16 aa, Homo Sapiens
ERIQEEAQCLIEELRK

SEQ ID NO: 74507 - protein, 16 aa, Homo Sapiens
RIQEEAQCLIEELRKS

SEQ ID NO: 74508 - protein, 16 aa, Homo Sapiens
IQEEAQCLIEELRKSK

SEQ ID NO: 74509 - protein, 16 aa, Homo Sapiens
QEEAQCLIEELRKSKG

SEQ ID NO: 74510 - protein, 16 aa, Homo Sapiens
EEAQCLIEELRKSKGA

SEQ ID NO: 74511 - protein, 16 aa, Homo Sapiens
EAQCLIEELRKSKGAL

SEQ ID NO: 74512 - protein, 16 aa, Homo Sapiens
AQCLIEELRKSKGALM

SEQ ID NO: 74513 - protein, 16 aa, Homo Sapiens
QCLIEELRKSKGALMD

SEQ ID NO: 74514 - protein, 16 aa, Homo Sapiens
CLIEELRKSKGALMDP

SEQ ID NO: 74515 - protein, 16 aa, Homo Sapiens
LIEELRKSKGALMDPT

SEQ ID NO: 74516 - protein, 16 aa, Homo Sapiens
IEELRKSKGALMDPTF

SEQ ID NO: 74517 - protein, 16 aa, Homo Sapiens
EELRKSKGALMDPTFL

SEQ ID NO: 74518 - protein, 16 aa, Homo Sapiens
ELRKSKGALMDPTFLF

SEQ ID NO: 74519 - protein, 16 aa, Homo Sapiens
LRKSKGALMDPTFLFQ

SEQ ID NO: 74520 - protein, 16 aa, Homo Sapiens
RKSKGALMDPTFLFQS

SEQ ID NO: 74521 - protein, 16 aa, Homo Sapiens
KSKGALMDPTFLFQSI

SEQ ID NO: 74522 - protein, 16 aa, Homo Sapiens
SKGALMDPTFLFQSIT

SEQ ID NO: 74523 - protein, 16 aa, Homo Sapiens
KGALMDPTFLFQSITA

SEQ ID NO: 74524 - protein, 16 aa, Homo Sapiens
GALMDPTFLFQSITAN

SEQ ID NO: 74525 - protein, 16 aa, Homo Sapiens
ALMDPTFLFQSITANI

SEQ ID NO: 74526 - protein, 16 aa, Homo Sapiens
LMDPTFLFQSITANII

SEQ ID NO: 74527 - protein, 16 aa, Homo Sapiens
MDPTFLFQSITANIIC

SEQ ID NO: 74528 - protein, 16 aa, Homo Sapiens
DPTFLFQSITANIICS

SEQ ID NO: 74529 - protein, 16 aa, Homo Sapiens
PTFLFQSITANIICSI

SEQ ID NO: 74530 - protein, 16 aa, Homo Sapiens
TFLFQSITANIICSIV

SEQ ID NO: 74531 - protein, 16 aa, Homo Sapiens
FLFQSITANIICSIVF

SEQ ID NO: 74532 - protein, 16 aa, Homo Sapiens
LFQSITANIICSIVFG

SEQ ID NO: 74533 - protein, 16 aa, Homo Sapiens
FQSITANIICSIVFGK

SEQ ID NO: 74534 - protein, 16 aa, Homo Sapiens
QSITANIICSIVFGKR

SEQ ID NO: 74535 - protein, 16 aa, Homo Sapiens
SITANIICSIVFGKRF

SEQ ID NO: 74536 - protein, 16 aa, Homo Sapiens
ITANIICSIVFGKRFH

SEQ ID NO: 74537 - protein, 16 aa, Homo Sapiens
TANIICSIVFGKRFHY

SEQ ID NO: 74538 - protein, 16 aa, Homo Sapiens
ANIICSIVFGKRFHYQ

SEQ ID NO: 74539 - protein, 16 aa, Homo Sapiens
NIICSIVFGKRFHYQD

SEQ ID NO: 74540 - protein, 16 aa, Homo Sapiens
IICSIVFGKRFHYQDQ

SEQ ID NO: 74541 - protein, 16 aa, Homo Sapiens
ICSIVFGKRFHYQDQE

SEQ ID NO: 74542 - protein, 16 aa, Homo Sapiens
CSIVFGKRFHYQDQEF

SEQ ID NO: 74543 - protein, 16 aa, Homo Sapiens
SIVFGKRFHYQDQEFL

SEQ ID NO: 74544 - protein, 16 aa, Homo Sapiens
IVFGKRFHYQDQEFLK

SEQ ID NO: 74545 - protein, 16 aa, Homo Sapiens
VFGKRFHYQDQEFLKM

SEQ ID NO: 74546 - protein, 16 aa, Homo Sapiens
FGKRFHYQDQEFLKML

SEQ ID NO: 74547 - protein, 16 aa, Homo Sapiens
GKRFHYQDQEFLKMLN

SEQ ID NO: 74548 - protein, 16 aa, Homo Sapiens
KRFHYQDQEFLKMLNL

SEQ ID NO: 74549 - protein, 16 aa, Homo Sapiens
RFHYQDQEFLKMLNLF

SEQ ID NO: 74550 - protein, 16 aa, Homo Sapiens
FHYQDQEFLKMLNLFY

SEQ ID NO: 74551 - protein, 16 aa, Homo Sapiens
HYQDQEFLKMLNLFYQ

SEQ ID NO: 74552 - protein, 16 aa, Homo Sapiens
YQDQEFLKMLNLFYQT

SEQ ID NO: 74553 - protein, 16 aa, Homo Sapiens
QDQEFLKMLNLFYQTF

SEQ ID NO: 74554 - protein, 16 aa, Homo Sapiens
DQEFLKMLNLFYQTFS

SEQ ID NO: 74555 - protein, 16 aa, Homo Sapiens
QEFLKMLNLFYQTFSL

SEQ ID NO: 74556 - protein, 16 aa, Homo Sapiens
EFLKMLNLFYQTFSLI

SEQ ID NO: 74557 - protein, 16 aa, Homo Sapiens
FLKMLNLFYQTFSLIS

SEQ ID NO: 74558 - protein, 16 aa, Homo Sapiens
LKMLNLFYQTFSLISS

SEQ ID NO: 74559 - protein, 16 aa, Homo Sapiens
KMLNLFYQTFSLISSV

SEQ ID NO: 74560 - protein, 16 aa, Homo Sapiens
MLNLFYQTFSLISSVF

SEQ ID NO: 74561 - protein, 16 aa, Homo Sapiens
LNLFYQTFSLISSVFG

SEQ ID NO: 74562 - protein, 16 aa, Homo Sapiens
NLFYQTFSLISSVFGQ

SEQ ID NO: 74563 - protein, 16 aa, Homo Sapiens
LFYQTFSLISSVFGQL

SEQ ID NO: 74564 - protein, 16 aa, Homo Sapiens
FYQTFSLISSVFGQLF

SEQ ID NO: 74565 - protein, 16 aa, Homo Sapiens
YQTFSLISSVFGQLFE

SEQ ID NO: 74566 - protein, 16 aa, Homo Sapiens
QTFSLISSVFGQLFEL

SEQ ID NO: 74567 - protein, 16 aa, Homo Sapiens
TFSLISSVFGQLFELF

SEQ ID NO: 74568 - protein, 16 aa, Homo Sapiens
FSLISSVFGQLFELFS

SEQ ID NO: 74569 - protein, 16 aa, Homo Sapiens
SLISSVFGQLFELFSG

SEQ ID NO: 74570 - protein, 16 aa, Homo Sapiens
LISSVFGQLFELFSGF

SEQ ID NO: 74571 - protein, 16 aa, Homo Sapiens
ISSVFGQLFELFSGFL

SEQ ID NO: 74572 - protein, 16 aa, Homo Sapiens
SSVFGQLFELFSGFLK

SEQ ID NO: 74573 - protein, 16 aa, Homo Sapiens
SVFGQLFELFSGFLKY

SEQ ID NO: 74574 - protein, 16 aa, Homo Sapiens
VFGQLFELFSGFLKYF

SEQ ID NO: 74575 - protein, 16 aa, Homo Sapiens
FGQLFELFSGFLKYFP

SEQ ID NO: 74576 - protein, 16 aa, Homo Sapiens
GQLFELFSGFLKYFPG

SEQ ID NO: 74577 - protein, 16 aa, Homo Sapiens
QLFELFSGFLKYFPGA

SEQ ID NO: 74578 - protein, 16 aa, Homo Sapiens
LFELFSGFLKYFPGAH

SEQ ID NO: 74579 - protein, 16 aa, Homo Sapiens
FELFSGFLKYFPGAHR

SEQ ID NO: 74580 - protein, 16 aa, Homo Sapiens
ELFSGFLKYFPGAHRQ

SEQ ID NO: 74581 - protein, 16 aa, Homo Sapiens
LFSGFLKYFPGAHRQV

SEQ ID NO: 74582 - protein, 16 aa, Homo Sapiens
FSGFLKYFPGAHRQVY

SEQ ID NO: 74583 - protein, 16 aa, Homo Sapiens
SGFLKYFPGAHRQVYK

SEQ ID NO: 74584 - protein, 16 aa, Homo Sapiens
GFLKYFPGAHRQVYKN

SEQ ID NO: 74585 - protein, 16 aa, Homo Sapiens
FLKYFPGAHRQVYKNL

SEQ ID NO: 74586 - protein, 16 aa, Homo Sapiens
LKYFPGAHRQVYKNLQ

SEQ ID NO: 74587 - protein, 16 aa, Homo Sapiens
KYFPGAHRQVYKNLQE

SEQ ID NO: 74588 - protein, 16 aa, Homo Sapiens
YFPGAHRQVYKNLQEI

SEQ ID NO: 74589 - protein, 16 aa, Homo Sapiens
FPGAHRQVYKNLQEIN

SEQ ID NO: 74590 - protein, 16 aa, Homo Sapiens
PGAHRQVYKNLQEINA

SEQ ID NO: 74591 - protein, 16 aa, Homo Sapiens
GAHRQVYKNLQEINAY

SEQ ID NO: 74592 - protein, 16 aa, Homo Sapiens
AHRQVYKNLQEINAYI

SEQ ID NO: 74593 - protein, 16 aa, Homo Sapiens
HRQVYKNLQEINAYIG

SEQ ID NO: 74594 - protein, 16 aa, Homo Sapiens
RQVYKNLQEINAYIGH

SEQ ID NO: 74595 - protein, 16 aa, Homo Sapiens
QVYKNLQEINAYIGHS

SEQ ID NO: 74596 - protein, 16 aa, Homo Sapiens
VYKNLQEINAYIGHSV

SEQ ID NO: 74597 - protein, 16 aa, Homo Sapiens
YKNLQEINAYIGHSVE

SEQ ID NO: 74598 - protein, 16 aa, Homo Sapiens
KNLQEINAYIGHSVEK

SEQ ID NO: 74599 - protein, 16 aa, Homo Sapiens
NLQEINAYIGHSVEKH

SEQ ID NO: 74600 - protein, 16 aa, Homo Sapiens
LQEINAYIGHSVEKHR

SEQ ID NO: 74601 - protein, 16 aa, Homo Sapiens
QEINAYIGHSVEKHRE

SEQ ID NO: 74602 - protein, 16 aa, Homo Sapiens
EINAYIGHSVEKHRET

SEQ ID NO: 74603 - protein, 16 aa, Homo Sapiens
INAYIGHSVEKHRETL

SEQ ID NO: 74604 - protein, 16 aa, Homo Sapiens
NAYIGHSVEKHRETLD

SEQ ID NO: 74605 - protein, 16 aa, Homo Sapiens
AYIGHSVEKHRETLDP

SEQ ID NO: 74606 - protein, 16 aa, Homo Sapiens
YIGHSVEKHRETLDPS

SEQ ID NO: 74607 - protein, 16 aa, Homo Sapiens
IGHSVEKHRETLDPSA

SEQ ID NO: 74608 - protein, 16 aa, Homo Sapiens
GHSVEKHRETLDPSAP

SEQ ID NO: 74609 - protein, 16 aa, Homo Sapiens
HSVEKHRETLDPSAPK

SEQ ID NO: 74610 - protein, 16 aa, Homo Sapiens
SVEKHRETLDPSAPKD

SEQ ID NO: 74611 - protein, 16 aa, Homo Sapiens
VEKHRETLDPSAPKDL

SEQ ID NO: 74612 - protein, 16 aa, Homo Sapiens
EKHRETLDPSAPKDLI

SEQ ID NO: 74613 - protein, 16 aa, Homo Sapiens
KHRETLDPSAPKDLID

SEQ ID NO: 74614 - protein, 16 aa, Homo Sapiens
HRETLDPSAPKDLIDT

SEQ ID NO: 74615 - protein, 16 aa, Homo Sapiens
RETLDPSAPKDLIDTY

SEQ ID NO: 74616 - protein, 16 aa, Homo Sapiens
ETLDPSAPKDLIDTYL

SEQ ID NO: 74617 - protein, 16 aa, Homo Sapiens
TLDPSAPKDLIDTYLL

SEQ ID NO: 74618 - protein, 16 aa, Homo Sapiens
LDPSAPKDLIDTYLLH

SEQ ID NO: 74619 - protein, 16 aa, Homo Sapiens
DPSAPKDLIDTYLLHM

SEQ ID NO: 74620 - protein, 16 aa, Homo Sapiens
PSAPKDLIDTYLLHME

SEQ ID NO: 74621 - protein, 16 aa, Homo Sapiens
SAPKDLIDTYLLHMEK

SEQ ID NO: 74622 - protein, 16 aa, Homo Sapiens
APKDLIDTYLLHMEKE

SEQ ID NO: 74623 - protein, 16 aa, Homo Sapiens
PKDLIDTYLLHMEKEK

SEQ ID NO: 74624 - protein, 16 aa, Homo Sapiens
KDLIDTYLLHMEKEKS

SEQ ID NO: 74625 - protein, 16 aa, Homo Sapiens
DLIDTYLLHMEKEKSN

SEQ ID NO: 74626 - protein, 16 aa, Homo Sapiens
LIDTYLLHMEKEKSNA

SEQ ID NO: 74627 - protein, 16 aa, Homo Sapiens
IDTYLLHMEKEKSNAH

SEQ ID NO: 74628 - protein, 16 aa, Homo Sapiens
DTYLLHMEKEKSNAHS

SEQ ID NO: 74629 - protein, 16 aa, Homo Sapiens
TYLLHMEKEKSNAHSE

SEQ ID NO: 74630 - protein, 16 aa, Homo Sapiens
YLLHMEKEKSNAHSEF

SEQ ID NO: 74631 - protein, 16 aa, Homo Sapiens
LLHMEKEKSNAHSEFS

SEQ ID NO: 74632 - protein, 16 aa, Homo Sapiens
LHMEKEKSNAHSEFSH

SEQ ID NO: 74633 - protein, 16 aa, Homo Sapiens
HMEKEKSNAHSEFSHQ

SEQ ID NO: 74634 - protein, 16 aa, Homo Sapiens
MEKEKSNAHSEFSHQN

SEQ ID NO: 74635 - protein, 16 aa, Homo Sapiens
EKEKSNAHSEFSHQNL

SEQ ID NO: 74636 - protein, 16 aa, Homo Sapiens
KEKSNAHSEFSHQNLN

SEQ ID NO: 74637 - protein, 16 aa, Homo Sapiens
EKSNAHSEFSHQNLNL

SEQ ID NO: 74638 - protein, 16 aa, Homo Sapiens
KSNAHSEFSHQNLNLN

SEQ ID NO: 74639 - protein, 16 aa, Homo Sapiens
SNAHSEFSHQNLNLNT

SEQ ID NO: 74640 - protein, 16 aa, Homo Sapiens
NAHSEFSHQNLNLNTL

SEQ ID NO: 74641 - protein, 16 aa, Homo Sapiens
AHSEFSHQNLNLNTLS

SEQ ID NO: 74642 - protein, 16 aa, Homo Sapiens
HSEFSHQNLNLNTLSL

SEQ ID NO: 74643 - protein, 16 aa, Homo Sapiens
SEFSHQNLNLNTLSLF

SEQ ID NO: 74644 - protein, 16 aa, Homo Sapiens
EFSHQNLNLNTLSLFF

SEQ ID NO: 74645 - protein, 16 aa, Homo Sapiens
FSHQNLNLNTLSLFFA

SEQ ID NO: 74646 - protein, 16 aa, Homo Sapiens
SHQNLNLNTLSLFFAG

SEQ ID NO: 74647 - protein, 16 aa, Homo Sapiens
HQNLNLNTLSLFFAGT

SEQ ID NO: 74648 - protein, 16 aa, Homo Sapiens
QNLNLNTLSLFFAGTE

SEQ ID NO: 74649 - protein, 16 aa, Homo Sapiens
NLNLNTLSLFFAGTET

SEQ ID NO: 74650 - protein, 16 aa, Homo Sapiens
LNLNTLSLFFAGTETT

SEQ ID NO: 74651 - protein, 16 aa, Homo Sapiens
NLNTLSLFFAGTETTS

SEQ ID NO: 74652 - protein, 16 aa, Homo Sapiens
LNTLSLFFAGTETTST

SEQ ID NO: 74653 - protein, 16 aa, Homo Sapiens
NTLSLFFAGTETTSTT

SEQ ID NO: 74654 - protein, 16 aa, Homo Sapiens
TLSLFFAGTETTSTTL

SEQ ID NO: 74655 - protein, 16 aa, Homo Sapiens
LSLFFAGTETTSTTLR

SEQ ID NO: 74656 - protein, 16 aa, Homo Sapiens
SLFFAGTETTSTTLRY

SEQ ID NO: 74657 - protein, 16 aa, Homo Sapiens
LFFAGTETTSTTLRYG

SEQ ID NO: 74658 - protein, 16 aa, Homo Sapiens
FFAGTETTSTTLRYGF

SEQ ID NO: 74659 - protein, 16 aa, Homo Sapiens
FAGTETTSTTLRYGFL

SEQ ID NO: 74660 - protein, 16 aa, Homo Sapiens
AGTETTSTTLRYGFLL

SEQ ID NO: 74661 - protein, 16 aa, Homo Sapiens
GTETTSTTLRYGFLLM

SEQ ID NO: 74662 - protein, 16 aa, Homo Sapiens
TETTSTTLRYGFLLML

SEQ ID NO: 74663 - protein, 16 aa, Homo Sapiens
ETTSTTLRYGFLLMLK

SEQ ID NO: 74664 - protein, 16 aa, Homo Sapiens
TTSTTLRYGFLLMLKY

SEQ ID NO: 74665 - protein, 16 aa, Homo Sapiens
TSTTLRYGFLLMLKYP

SEQ ID NO: 74666 - protein, 16 aa, Homo Sapiens
STTLRYGFLLMLKYPH

SEQ ID NO: 74667 - protein, 16 aa, Homo Sapiens
TTLRYGFLLMLKYPHV

SEQ ID NO: 74668 - protein, 16 aa, Homo Sapiens
TLRYGFLLMLKYPHVA

SEQ ID NO: 74669 - protein, 16 aa, Homo Sapiens
LRYGFLLMLKYPHVAE

SEQ ID NO: 74670 - protein, 16 aa, Homo Sapiens
RYGFLLMLKYPHVAER

SEQ ID NO: 74671 - protein, 16 aa, Homo Sapiens
YGFLLMLKYPHVAERV

SEQ ID NO: 74672 - protein, 16 aa, Homo Sapiens
GFLLMLKYPHVAERVY

SEQ ID NO: 74673 - protein, 16 aa, Homo Sapiens
FLLMLKYPHVAERVYR

SEQ ID NO: 74674 - protein, 16 aa, Homo Sapiens
LLMLKYPHVAERVYRE

SEQ ID NO: 74675 - protein, 16 aa, Homo Sapiens
LMLKYPHVAERVYREI

SEQ ID NO: 74676 - protein, 16 aa, Homo Sapiens
MLKYPHVAERVYREIE

SEQ ID NO: 74677 - protein, 16 aa, Homo Sapiens
LKYPHVAERVYREIEQ

SEQ ID NO: 74678 - protein, 16 aa, Homo Sapiens
KYPHVAERVYREIEQV

SEQ ID NO: 74679 - protein, 16 aa, Homo Sapiens
YPHVAERVYREIEQVI

SEQ ID NO: 74680 - protein, 16 aa, Homo Sapiens
PHVAERVYREIEQVIG

SEQ ID NO: 74681 - protein, 16 aa, Homo Sapiens
HVAERVYREIEQVIGP

SEQ ID NO: 74682 - protein, 16 aa, Homo Sapiens
VAERVYREIEQVIGPH

SEQ ID NO: 74683 - protein, 16 aa, Homo Sapiens
AERVYREIEQVIGPHR

SEQ ID NO: 74684 - protein, 16 aa, Homo Sapiens
ERVYREIEQVIGPHRP

SEQ ID NO: 74685 - protein, 16 aa, Homo Sapiens
RVYREIEQVIGPHRPP

SEQ ID NO: 74686 - protein, 16 aa, Homo Sapiens
VYREIEQVIGPHRPPE

SEQ ID NO: 74687 - protein, 16 aa, Homo Sapiens
YREIEQVIGPHRPPEL

SEQ ID NO: 74688 - protein, 16 aa, Homo Sapiens
REIEQVIGPHRPPELH

SEQ ID NO: 74689 - protein, 16 aa, Homo Sapiens
EIEQVIGPHRPPELHD

SEQ ID NO: 74690 - protein, 16 aa, Homo Sapiens
IEQVIGPHRPPELHDR

SEQ ID NO: 74691 - protein, 16 aa, Homo Sapiens
EQVIGPHRPPELHDRA

SEQ ID NO: 74692 - protein, 16 aa, Homo Sapiens
QVIGPHRPPELHDRAK

SEQ ID NO: 74693 - protein, 16 aa, Homo Sapiens
VIGPHRPPELHDRAKM

SEQ ID NO: 74694 - protein, 16 aa, Homo Sapiens
IGPHRPPELHDRAKMP

SEQ ID NO: 74695 - protein, 16 aa, Homo Sapiens
GPHRPPELHDRAKMPY

SEQ ID NO: 74696 - protein, 16 aa, Homo Sapiens
PHRPPELHDRAKMPYT

SEQ ID NO: 74697 - protein, 16 aa, Homo Sapiens
HRPPELHDRAKMPYTE

SEQ ID NO: 74698 - protein, 16 aa, Homo Sapiens
RPPELHDRAKMPYTEA

SEQ ID NO: 74699 - protein, 16 aa, Homo Sapiens
PPELHDRAKMPYTEAV

SEQ ID NO: 74700 - protein, 16 aa, Homo Sapiens
PELHDRAKMPYTEAVI

SEQ ID NO: 74701 - protein, 16 aa, Homo Sapiens
ELHDRAKMPYTEAVIY

SEQ ID NO: 74702 - protein, 16 aa, Homo Sapiens
LHDRAKMPYTEAVIYE

SEQ ID NO: 74703 - protein, 16 aa, Homo Sapiens
HDRAKMPYTEAVIYEI

SEQ ID NO: 74704 - protein, 16 aa, Homo Sapiens
DRAKMPYTEAVIYEIQ

SEQ ID NO: 74705 - protein, 16 aa, Homo Sapiens
RAKMPYTEAVIYEIQR

SEQ ID NO: 74706 - protein, 16 aa, Homo Sapiens
AKMPYTEAVIYEIQRF

SEQ ID NO: 74707 - protein, 16 aa, Homo Sapiens
KMPYTEAVIYEIQRFS

SEQ ID NO: 74708 - protein, 16 aa, Homo Sapiens
MPYTEAVIYEIQRFSD

SEQ ID NO: 74709 - protein, 16 aa, Homo Sapiens
PYTEAVIYEIQRFSDL

SEQ ID NO: 74710 - protein, 16 aa, Homo Sapiens
YTEAVIYEIQRFSDLL

SEQ ID NO: 74711 - protein, 16 aa, Homo Sapiens
TEAVIYEIQRFSDLLP

SEQ ID NO: 74712 - protein, 16 aa, Homo Sapiens
EAVIYEIQRFSDLLPM

SEQ ID NO: 74713 - protein, 16 aa, Homo Sapiens
AVIYEIQRFSDLLPMG

SEQ ID NO: 74714 - protein, 16 aa, Homo Sapiens
VIYEIQRFSDLLPMGV

SEQ ID NO: 74715 - protein, 16 aa, Homo Sapiens
IYEIQRFSDLLPMGVP

SEQ ID NO: 74716 - protein, 16 aa, Homo Sapiens
YEIQRFSDLLPMGVPH

SEQ ID NO: 74717 - protein, 16 aa, Homo Sapiens
EIQRFSDLLPMGVPHI

SEQ ID NO: 74718 - protein, 16 aa, Homo Sapiens
IQRFSDLLPMGVPHIV

SEQ ID NO: 74719 - protein, 16 aa, Homo Sapiens
QRFSDLLPMGVPHIVT

SEQ ID NO: 74720 - protein, 16 aa, Homo Sapiens
RFSDLLPMGVPHIVTQ

SEQ ID NO: 74721 - protein, 16 aa, Homo Sapiens
FSDLLPMGVPHIVTQH

SEQ ID NO: 74722 - protein, 16 aa, Homo Sapiens
SDLLPMGVPHIVTQHT

SEQ ID NO: 74723 - protein, 16 aa, Homo Sapiens
DLLPMGVPHIVTQHTS

SEQ ID NO: 74724 - protein, 16 aa, Homo Sapiens
LLPMGVPHIVTQHTSF

SEQ ID NO: 74725 - protein, 16 aa, Homo Sapiens
LPMGVPHIVTQHTSFR

SEQ ID NO: 74726 - protein, 16 aa, Homo Sapiens
PMGVPHIVTQHTSFRG

SEQ ID NO: 74727 - protein, 16 aa, Homo Sapiens
MGVPHIVTQHTSFRGY

SEQ ID NO: 74728 - protein, 16 aa, Homo Sapiens
GVPHIVTQHTSFRGYI

SEQ ID NO: 74729 - protein, 16 aa, Homo Sapiens
VPHIVTQHTSFRGYII

SEQ ID NO: 74730 - protein, 16 aa, Homo Sapiens
PHIVTQHTSFRGYIIP

SEQ ID NO: 74731 - protein, 16 aa, Homo Sapiens
HIVTQHTSFRGYIIPK

SEQ ID NO: 74732 - protein, 16 aa, Homo Sapiens
IVTQHTSFRGYIIPKD

SEQ ID NO: 74733 - protein, 16 aa, Homo Sapiens
VTQHTSFRGYIIPKDT

SEQ ID NO: 74734 - protein, 16 aa, Homo Sapiens
TQHTSFRGYIIPKDTE

SEQ ID NO: 74735 - protein, 16 aa, Homo Sapiens
QHTSFRGYIIPKDTEV

SEQ ID NO: 74736 - protein, 16 aa, Homo Sapiens
HTSFRGYIIPKDTEVF

SEQ ID NO: 74737 - protein, 16 aa, Homo Sapiens
TSFRGYIIPKDTEVFL

SEQ ID NO: 74738 - protein, 16 aa, Homo Sapiens
SFRGYIIPKDTEVFLI

SEQ ID NO: 74739 - protein, 16 aa, Homo Sapiens
FRGYIIPKDTEVFLIL

SEQ ID NO: 74740 - protein, 16 aa, Homo Sapiens
RGYIIPKDTEVFLILS

SEQ ID NO: 74741 - protein, 16 aa, Homo Sapiens
GYIIPKDTEVFLILST

SEQ ID NO: 74742 - protein, 16 aa, Homo Sapiens
YIIPKDTEVFLILSTA

SEQ ID NO: 74743 - protein, 16 aa, Homo Sapiens
IIPKDTEVFLILSTAL

SEQ ID NO: 74744 - protein, 16 aa, Homo Sapiens
IPKDTEVFLILSTALH

SEQ ID NO: 74745 - protein, 16 aa, Homo Sapiens
PKDTEVFLILSTALHD

SEQ ID NO: 74746 - protein, 16 aa, Homo Sapiens
KDTEVFLILSTALHDP

SEQ ID NO: 74747 - protein, 16 aa, Homo Sapiens
DTEVFLILSTALHDPH

SEQ ID NO: 74748 - protein, 16 aa, Homo Sapiens
TEVFLILSTALHDPHY

SEQ ID NO: 74749 - protein, 16 aa, Homo Sapiens
EVFLILSTALHDPHYF

SEQ ID NO: 74750 - protein, 16 aa, Homo Sapiens
VFLILSTALHDPHYFE

SEQ ID NO: 74751 - protein, 16 aa, Homo Sapiens
FLILSTALHDPHYFEK

SEQ ID NO: 74752 - protein, 16 aa, Homo Sapiens
LILSTALHDPHYFEKP

SEQ ID NO: 74753 - protein, 16 aa, Homo Sapiens
ILSTALHDPHYFEKPD

SEQ ID NO: 74754 - protein, 16 aa, Homo Sapiens
LSTALHDPHYFEKPDA

SEQ ID NO: 74755 - protein, 16 aa, Homo Sapiens
STALHDPHYFEKPDAF

SEQ ID NO: 74756 - protein, 16 aa, Homo Sapiens
TALHDPHYFEKPDAFN

SEQ ID NO: 74757 - protein, 16 aa, Homo Sapiens
ALHDPHYFEKPDAFNP

SEQ ID NO: 74758 - protein, 16 aa, Homo Sapiens
LHDPHYFEKPDAFNPD

SEQ ID NO: 74759 - protein, 16 aa, Homo Sapiens
HDPHYFEKPDAFNPDH

SEQ ID NO: 74760 - protein, 16 aa, Homo Sapiens
DPHYFEKPDAFNPDHF

SEQ ID NO: 74761 - protein, 16 aa, Homo Sapiens
PHYFEKPDAFNPDHFL

SEQ ID NO: 74762 - protein, 16 aa, Homo Sapiens
HYFEKPDAFNPDHFLD

SEQ ID NO: 74763 - protein, 16 aa, Homo Sapiens
YFEKPDAFNPDHFLDA

SEQ ID NO: 74764 - protein, 16 aa, Homo Sapiens
FEKPDAFNPDHFLDAN

SEQ ID NO: 74765 - protein, 16 aa, Homo Sapiens
EKPDAFNPDHFLDANG

SEQ ID NO: 74766 - protein, 16 aa, Homo Sapiens
KPDAFNPDHFLDANGA

SEQ ID NO: 74767 - protein, 16 aa, Homo Sapiens
PDAFNPDHFLDANGAL

SEQ ID NO: 74768 - protein, 16 aa, Homo Sapiens
DAFNPDHFLDANGALK

SEQ ID NO: 74769 - protein, 16 aa, Homo Sapiens
AFNPDHFLDANGALKK

SEQ ID NO: 74770 - protein, 16 aa, Homo Sapiens
FNPDHFLDANGALKKT

SEQ ID NO: 74771 - protein, 16 aa, Homo Sapiens
NPDHFLDANGALKKTE

SEQ ID NO: 74772 - protein, 16 aa, Homo Sapiens
PDHFLDANGALKKTEA

SEQ ID NO: 74773 - protein, 16 aa, Homo Sapiens
DHFLDANGALKKTEAF

SEQ ID NO: 74774 - protein, 16 aa, Homo Sapiens
HFLDANGALKKTEAFI

SEQ ID NO: 74775 - protein, 16 aa, Homo Sapiens
FLDANGALKKTEAFIP

SEQ ID NO: 74776 - protein, 16 aa, Homo Sapiens
LDANGALKKTEAFIPF

SEQ ID NO: 74777 - protein, 16 aa, Homo Sapiens
DANGALKKTEAFIPFS

SEQ ID NO: 74778 - protein, 16 aa, Homo Sapiens
ANGALKKTEAFIPFSL

SEQ ID NO: 74779 - protein, 16 aa, Homo Sapiens
NGALKKTEAFIPFSLG

SEQ ID NO: 74780 - protein, 16 aa, Homo Sapiens
GALKKTEAFIPFSLGK

SEQ ID NO: 74781 - protein, 16 aa, Homo Sapiens
ALKKTEAFIPFSLGKR

SEQ ID NO: 74782 - protein, 16 aa, Homo Sapiens
LKKTEAFIPFSLGKRI

SEQ ID NO: 74783 - protein, 16 aa, Homo Sapiens
KKTEAFIPFSLGKRIC

SEQ ID NO: 74784 - protein, 16 aa, Homo Sapiens
KTEAFIPFSLGKRICL

SEQ ID NO: 74785 - protein, 16 aa, Homo Sapiens
TEAFIPFSLGKRICLG

SEQ ID NO: 74786 - protein, 16 aa, Homo Sapiens
EAFIPFSLGKRICLGE

SEQ ID NO: 74787 - protein, 16 aa, Homo Sapiens
AFIPFSLGKRICLGEG

SEQ ID NO: 74788 - protein, 16 aa, Homo Sapiens
FIPFSLGKRICLGEGI

SEQ ID NO: 74789 - protein, 16 aa, Homo Sapiens
IPFSLGKRICLGEGIA

SEQ ID NO: 74790 - protein, 16 aa, Homo Sapiens
PFSLGKRICLGEGIAR

SEQ ID NO: 74791 - protein, 16 aa, Homo Sapiens
FSLGKRICLGEGIARA

SEQ ID NO: 74792 - protein, 16 aa, Homo Sapiens
SLGKRICLGEGIARAE

SEQ ID NO: 74793 - protein, 16 aa, Homo Sapiens
LGKRICLGEGIARAEL

SEQ ID NO: 74794 - protein, 16 aa, Homo Sapiens
GKRICLGEGIARAELF

SEQ ID NO: 74795 - protein, 16 aa, Homo Sapiens
KRICLGEGIARAELFL

SEQ ID NO: 74796 - protein, 16 aa, Homo Sapiens
RICLGEGIARAELFLF

SEQ ID NO: 74797 - protein, 16 aa, Homo Sapiens
ICLGEGIARAELFLFF

SEQ ID NO: 74798 - protein, 16 aa, Homo Sapiens
CLGEGIARAELFLFFT

SEQ ID NO: 74799 - protein, 16 aa, Homo Sapiens
LGEGIARAELFLFFTT

SEQ ID NO: 74800 - protein, 16 aa, Homo Sapiens
GEGIARAELFLFFTTI

SEQ ID NO: 74801 - protein, 16 aa, Homo Sapiens
EGIARAELFLFFTTIL

SEQ ID NO: 74802 - protein, 16 aa, Homo Sapiens
GIARAELFLFFTTILQ

SEQ ID NO: 74803 - protein, 16 aa, Homo Sapiens
IARAELFLFFTTILQN

SEQ ID NO: 74804 - protein, 16 aa, Homo Sapiens
ARAELFLFFTTILQNF

SEQ ID NO: 74805 - protein, 16 aa, Homo Sapiens
RAELFLFFTTILQNFS

SEQ ID NO: 74806 - protein, 16 aa, Homo Sapiens
AELFLFFTTILQNFSM

SEQ ID NO: 74807 - protein, 16 aa, Homo Sapiens
ELFLFFTTILQNFSMA

SEQ ID NO: 74808 - protein, 16 aa, Homo Sapiens
LFLFFTTILQNFSMAS

SEQ ID NO: 74809 - protein, 16 aa, Homo Sapiens
FLFFTTILQNFSMASP

SEQ ID NO: 74810 - protein, 16 aa, Homo Sapiens
LFFTTILQNFSMASPV

SEQ ID NO: 74811 - protein, 16 aa, Homo Sapiens
FFTTILQNFSMASPVA

SEQ ID NO: 74812 - protein, 16 aa, Homo Sapiens
FTTILQNFSMASPVAP

SEQ ID NO: 74813 - protein, 16 aa, Homo Sapiens
TTILQNFSMASPVAPE

SEQ ID NO: 74814 - protein, 16 aa, Homo Sapiens
TILQNFSMASPVAPED

SEQ ID NO: 74815 - protein, 16 aa, Homo Sapiens
ILQNFSMASPVAPEDI

SEQ ID NO: 74816 - protein, 16 aa, Homo Sapiens
LQNFSMASPVAPEDID

SEQ ID NO: 74817 - protein, 16 aa, Homo Sapiens
QNFSMASPVAPEDIDL

SEQ ID NO: 74818 - protein, 16 aa, Homo Sapiens
NFSMASPVAPEDIDLT

SEQ ID NO: 74819 - protein, 16 aa, Homo Sapiens
FSMASPVAPEDIDLTP

SEQ ID NO: 74820 - protein, 16 aa, Homo Sapiens
SMASPVAPEDIDLTPQ

SEQ ID NO: 74821 - protein, 16 aa, Homo Sapiens
MASPVAPEDIDLTPQE

SEQ ID NO: 74822 - protein, 16 aa, Homo Sapiens
ASPVAPEDIDLTPQEC

SEQ ID NO: 74823 - protein, 16 aa, Homo Sapiens
SPVAPEDIDLTPQECG

SEQ ID NO: 74824 - protein, 16 aa, Homo Sapiens
PVAPEDIDLTPQECGV

SEQ ID NO: 74825 - protein, 16 aa, Homo Sapiens
VAPEDIDLTPQECGVG

SEQ ID NO: 74826 - protein, 16 aa, Homo Sapiens
APEDIDLTPQECGVGK

SEQ ID NO: 74827 - protein, 16 aa, Homo Sapiens
PEDIDLTPQECGVGKI

SEQ ID NO: 74828 - protein, 16 aa, Homo Sapiens
EDIDLTPQECGVGKIP

SEQ ID NO: 74829 - protein, 16 aa, Homo Sapiens
DIDLTPQECGVGKIPP

SEQ ID NO: 74830 - protein, 16 aa, Homo Sapiens
IDLTPQECGVGKIPPT

SEQ ID NO: 74831 - protein, 16 aa, Homo Sapiens
DLTPQECGVGKIPPTY

SEQ ID NO: 74832 - protein, 16 aa, Homo Sapiens
LTPQECGVGKIPPTYQ

SEQ ID NO: 74833 - protein, 16 aa, Homo Sapiens
TPQECGVGKIPPTYQI

SEQ ID NO: 74834 - protein, 16 aa, Homo Sapiens
PQECGVGKIPPTYQIR

SEQ ID NO: 74835 - protein, 16 aa, Homo Sapiens
QECGVGKIPPTYQIRF

SEQ ID NO: 74836 - protein, 16 aa, Homo Sapiens
ECGVGKIPPTYQIRFL

SEQ ID NO: 74837 - protein, 16 aa, Homo Sapiens
CGVGKIPPTYQIRFLP

SEQ ID NO: 74838 - protein, 16 aa, Homo Sapiens
GVGKIPPTYQIRFLPR

SEQ ID NO: 74839 - protein, 420 aa, Homo Sapiens
MPGGCSRGPAAGDGRLRLARLALVLLGWVSSSSPTSSASSFSSSAPFLASAVSAQPPLPDQCPALCECSEAARTVKCVNRNLTEVPTDLPAYVRNLFLTGNQLAVLPAGAFARRPPLAELAALNLSGSRLDEVRAGAFEHLPSLRQLDLSHNPLADLSPFAFSGSNASVSAPSPLVELILNHIVPPEDERQNRSFEGMVVAALLAGRALQGLRRLELASNHFLYLPRDVLAQLPSLRHLDLSNNSLVSLTYVSFRNLTHLESLHLEDNALKVLHNGTLAELQGLPHIRVFLDNNPWVCDCHMADMVTWLKETEVVQGKDRLTCAYPEKMRNRVLLELNSADLDCDPILPPSLQTSYVFLGIVLALIGAIFLLVLYLNRKGIKKWMHNIRDACRDHMEGYHYRYEINADPRLTNLSSNSDV

SEQ ID NO: 74840 - protein, 8 aa, Homo Sapiens
DGRLRLAR

SEQ ID NO: 74841 - protein, 8 aa, Homo Sapiens
GRLRLARL

SEQ ID NO: 74842 - protein, 8 aa, Homo Sapiens
RLRLARLA

SEQ ID NO: 74843 - protein, 8 aa, Homo Sapiens
LRLARLAL

SEQ ID NO: 74844 - protein, 8 aa, Homo Sapiens
RLARLALV

SEQ ID NO: 74845 - protein, 8 aa, Homo Sapiens
LARLALVL

SEQ ID NO: 74846 - protein, 8 aa, Homo Sapiens
ARLALVLL

SEQ ID NO: 74847 - protein, 8 aa, Homo Sapiens
LALVLLGW

SEQ ID NO: 74848 - protein, 8 aa, Homo Sapiens
ALVLLGWV

SEQ ID NO: 74849 - protein, 8 aa, Homo Sapiens
VLLGWVSS

SEQ ID NO: 74850 - protein, 8 aa, Homo Sapiens
LLGWVSSS

SEQ ID NO: 74851 - protein, 8 aa, Homo Sapiens
SSSPTSSA

SEQ ID NO: 74852 - protein, 8 aa, Homo Sapiens
SPTSSASS

SEQ ID NO: 74853 - protein, 8 aa, Homo Sapiens
SFSSSAPF

SEQ ID NO: 74854 - protein, 8 aa, Homo Sapiens
FSSSAPFL

SEQ ID NO: 74855 - protein, 8 aa, Homo Sapiens
SSSAPFLA

SEQ ID NO: 74856 - protein, 8 aa, Homo Sapiens
APFLASAV

SEQ ID NO: 74857 - protein, 8 aa, Homo Sapiens
FLASAVSA

SEQ ID NO: 74858 - protein, 8 aa, Homo Sapiens
AVSAQPPL

SEQ ID NO: 74859 - protein, 8 aa, Homo Sapiens
PLPDQCPA

SEQ ID NO: 74860 - protein, 8 aa, Homo Sapiens
LPDQCPAL

SEQ ID NO: 74861 - protein, 8 aa, Homo Sapiens
ALCECSEA

SEQ ID NO: 74862 - protein, 8 aa, Homo Sapiens
RTVKCVNR

SEQ ID NO: 74863 - protein, 8 aa, Homo Sapiens
EVPTDLPA

SEQ ID NO: 74864 - protein, 8 aa, Homo Sapiens
VPTDLPAY

SEQ ID NO: 74865 - protein, 8 aa, Homo Sapiens
PTDLPAYV

SEQ ID NO: 74866 - protein, 8 aa, Homo Sapiens
LPAYVRNL

SEQ ID NO: 74867 - protein, 8 aa, Homo Sapiens
AYVRNLFL

SEQ ID NO: 74868 - protein, 8 aa, Homo Sapiens
LFLTGNQL

SEQ ID NO: 74869 - protein, 8 aa, Homo Sapiens
FLTGNQLA

SEQ ID NO: 74870 - protein, 8 aa, Homo Sapiens
LTGNQLAV

SEQ ID NO: 74871 - protein, 8 aa, Homo Sapiens
NQLAVLPA

SEQ ID NO: 74872 - protein, 8 aa, Homo Sapiens
LAVLPAGA

SEQ ID NO: 74873 - protein, 8 aa, Homo Sapiens
AVLPAGAF

SEQ ID NO: 74874 - protein, 8 aa, Homo Sapiens
VLPAGAFA

SEQ ID NO: 74875 - protein, 8 aa, Homo Sapiens
LPAGAFAR

SEQ ID NO: 74876 - protein, 8 aa, Homo Sapiens
PLAELAAL

SEQ ID NO: 74877 - protein, 8 aa, Homo Sapiens
AELAALNL

SEQ ID NO: 74878 - protein, 8 aa, Homo Sapiens
ALNLSGSR

SEQ ID NO: 74879 - protein, 8 aa, Homo Sapiens
RLDEVRAG

SEQ ID NO: 74880 - protein, 8 aa, Homo Sapiens
DEVRAGAF

SEQ ID NO: 74881 - protein, 8 aa, Homo Sapiens
HLPSLRQL

SEQ ID NO: 74882 - protein, 8 aa, Homo Sapiens
DLSHNPLA

SEQ ID NO: 74883 - protein, 8 aa, Homo Sapiens
PLADLSPF

SEQ ID NO: 74884 - protein, 8 aa, Homo Sapiens
DLSPFAFS

SEQ ID NO: 74885 - protein, 8 aa, Homo Sapiens
FAFSGSNA

SEQ ID NO: 74886 - protein, 8 aa, Homo Sapiens
FSGSNASV

SEQ ID NO: 74887 - protein, 8 aa, Homo Sapiens
SVSAPSPL

SEQ ID NO: 74888 - protein, 8 aa, Homo Sapiens
VSAPSPLV

SEQ ID NO: 74889 - protein, 8 aa, Homo Sapiens
APSPLVEL

SEQ ID NO: 74890 - protein, 8 aa, Homo Sapiens
SPLVELIL

SEQ ID NO: 74891 - protein, 8 aa, Homo Sapiens
ELILNHIV

SEQ ID NO: 74892 - protein, 8 aa, Homo Sapiens
IVPPEDER

SEQ ID NO: 74893 - protein, 8 aa, Homo Sapiens
DERQNRSF

SEQ ID NO: 74894 - protein, 8 aa, Homo Sapiens
RSFEGMVV

SEQ ID NO: 74895 - protein, 8 aa, Homo Sapiens
EGMVVAAL

SEQ ID NO: 74896 - protein, 8 aa, Homo Sapiens
GMVVAALL

SEQ ID NO: 74897 - protein, 8 aa, Homo Sapiens
MVVAALLA

SEQ ID NO: 74898 - protein, 8 aa, Homo Sapiens
VAALLAGR

SEQ ID NO: 74899 - protein, 8 aa, Homo Sapiens
ALLAGRAL

SEQ ID NO: 74900 - protein, 8 aa, Homo Sapiens
LLAGRALQ

SEQ ID NO: 74901 - protein, 8 aa, Homo Sapiens
RALQGLRR

SEQ ID NO: 74902 - protein, 8 aa, Homo Sapiens
ALQGLRRL

SEQ ID NO: 74903 - protein, 8 aa, Homo Sapiens
GLRRLELA

SEQ ID NO: 74904 - protein, 8 aa, Homo Sapiens
RRLELASN

SEQ ID NO: 74905 - protein, 8 aa, Homo Sapiens
LELASNHF

SEQ ID NO: 74906 - protein, 8 aa, Homo Sapiens
ELASNHFL

SEQ ID NO: 74907 - protein, 8 aa, Homo Sapiens
LASNHFLY

SEQ ID NO: 74908 - protein, 8 aa, Homo Sapiens
NHFLYLPR

SEQ ID NO: 74909 - protein, 8 aa, Homo Sapiens
FLYLPRDV

SEQ ID NO: 74910 - protein, 8 aa, Homo Sapiens
LYLPRDVL

SEQ ID NO: 74911 - protein, 8 aa, Homo Sapiens
YLPRDVLA

SEQ ID NO: 74912 - protein, 8 aa, Homo Sapiens
LPRDVLAQ

SEQ ID NO: 74913 - protein, 8 aa, Homo Sapiens
VLAQLPSL

SEQ ID NO: 74914 - protein, 8 aa, Homo Sapiens
LAQLPSLR

SEQ ID NO: 74915 - protein, 8 aa, Homo Sapiens
QLPSLRHL

SEQ ID NO: 74916 - protein, 8 aa, Homo Sapiens
DLSNNSLV

SEQ ID NO: 74917 - protein, 8 aa, Homo Sapiens
NSLVSLTY

SEQ ID NO: 74918 - protein, 8 aa, Homo Sapiens
SLVSLTYV

SEQ ID NO: 74919 - protein, 8 aa, Homo Sapiens
VSLTYVSF

SEQ ID NO: 74920 - protein, 8 aa, Homo Sapiens
SLTYVSFR

SEQ ID NO: 74921 - protein, 8 aa, Homo Sapiens
TYVSFRNL

SEQ ID NO: 74922 - protein, 8 aa, Homo Sapiens
SFRNLTHL

SEQ ID NO: 74923 - protein, 8 aa, Homo Sapiens
NLTHLESL

SEQ ID NO: 74924 - protein, 8 aa, Homo Sapiens
THLESLHL

SEQ ID NO: 74925 - protein, 8 aa, Homo Sapiens
SLHLEDNA

SEQ ID NO: 74926 - protein, 8 aa, Homo Sapiens
LHLEDNAL

SEQ ID NO: 74927 - protein, 8 aa, Homo Sapiens
HLEDNALK

SEQ ID NO: 74928 - protein, 8 aa, Homo Sapiens
KVLHNGTL

SEQ ID NO: 74929 - protein, 8 aa, Homo Sapiens
VLHNGTLA

SEQ ID NO: 74930 - protein, 8 aa, Homo Sapiens
TLAELQGL

SEQ ID NO: 74931 - protein, 8 aa, Homo Sapiens
ELQGLPHI

SEQ ID NO: 74932 - protein, 8 aa, Homo Sapiens
LQGLPHIR

SEQ ID NO: 74933 - protein, 8 aa, Homo Sapiens
QGLPHIRV

SEQ ID NO: 74934 - protein, 8 aa, Homo Sapiens
LPHIRVFL

SEQ ID NO: 74935 - protein, 8 aa, Homo Sapiens
FLDNNPWV

SEQ ID NO: 74936 - protein, 8 aa, Homo Sapiens
NPWVCDCH

SEQ ID NO: 74937 - protein, 8 aa, Homo Sapiens
WVCDCHMA

SEQ ID NO: 74938 - protein, 8 aa, Homo Sapiens
HMADMVTW

SEQ ID NO: 74939 - protein, 8 aa, Homo Sapiens
MADMVTWL

SEQ ID NO: 74940 - protein, 8 aa, Homo Sapiens
ADMVTWLK

SEQ ID NO: 74941 - protein, 8 aa, Homo Sapiens
WLKETEVV

SEQ ID NO: 74942 - protein, 8 aa, Homo Sapiens
ETEVVQGK

SEQ ID NO: 74943 - protein, 8 aa, Homo Sapiens
EVVQGKDR

SEQ ID NO: 74944 - protein, 8 aa, Homo Sapiens
VVQGKDRL

SEQ ID NO: 74945 - protein, 8 aa, Homo Sapiens
LTCAYPEK

SEQ ID NO: 74946 - protein, 8 aa, Homo Sapiens
CAYPEKMR

SEQ ID NO: 74947 - protein, 8 aa, Homo Sapiens
EKMRNRVL

SEQ ID NO: 74948 - protein, 8 aa, Homo Sapiens
KMRNRVLL

SEQ ID NO: 74949 - protein, 8 aa, Homo Sapiens
VLLELNSA

SEQ ID NO: 74950 - protein, 8 aa, Homo Sapiens
LELNSADL

SEQ ID NO: 74951 - protein, 8 aa, Homo Sapiens
DLDCDPIL

SEQ ID NO: 74952 - protein, 8 aa, Homo Sapiens
ILPPSLQT

SEQ ID NO: 74953 - protein, 8 aa, Homo Sapiens
LPPSLQTS

SEQ ID NO: 74954 - protein, 8 aa, Homo Sapiens
PPSLQTSY

SEQ ID NO: 74955 - protein, 8 aa, Homo Sapiens
SLQTSYVF

SEQ ID NO: 74956 - protein, 8 aa, Homo Sapiens
LQTSYVFL

SEQ ID NO: 74957 - protein, 8 aa, Homo Sapiens
TSYVFLGI

SEQ ID NO: 74958 - protein, 8 aa, Homo Sapiens
YVFLGIVL

SEQ ID NO: 74959 - protein, 8 aa, Homo Sapiens
FLGIVLAL

SEQ ID NO: 74960 - protein, 8 aa, Homo Sapiens
IVLALIGA

SEQ ID NO: 74961 - protein, 8 aa, Homo Sapiens
VLALIGAI

SEQ ID NO: 74962 - protein, 8 aa, Homo Sapiens
LALIGAIF

SEQ ID NO: 74963 - protein, 8 aa, Homo Sapiens
ALIGAIFL

SEQ ID NO: 74964 - protein, 8 aa, Homo Sapiens
LIGAIFLL

SEQ ID NO: 74965 - protein, 8 aa, Homo Sapiens
IGAIFLLV

SEQ ID NO: 74966 - protein, 8 aa, Homo Sapiens
AIFLLVLY

SEQ ID NO: 74967 - protein, 8 aa, Homo Sapiens
IFLLVLYL

SEQ ID NO: 74968 - protein, 8 aa, Homo Sapiens
FLLVLYLN

SEQ ID NO: 74969 - protein, 8 aa, Homo Sapiens
LLVLYLNR

SEQ ID NO: 74970 - protein, 8 aa, Homo Sapiens
LVLYLNRK

SEQ ID NO: 74971 - protein, 8 aa, Homo Sapiens
LYLNRKGI

SEQ ID NO: 74972 - protein, 8 aa, Homo Sapiens
YLNRKGIK

SEQ ID NO: 74973 - protein, 8 aa, Homo Sapiens
LNRKGIKK

SEQ ID NO: 74974 - protein, 8 aa, Homo Sapiens
KKWMHNIR

SEQ ID NO: 74975 - protein, 8 aa, Homo Sapiens
WMHNIRDA

SEQ ID NO: 74976 - protein, 8 aa, Homo Sapiens
HNIRDACR

SEQ ID NO: 74977 - protein, 8 aa, Homo Sapiens
HMEGYHYR

SEQ ID NO: 74978 - protein, 8 aa, Homo Sapiens
GYHYRYEI

SEQ ID NO: 74979 - protein, 8 aa, Homo Sapiens
EINADPRL

SEQ ID NO: 74980 - protein, 8 aa, Homo Sapiens
NLSSNSDV

SEQ ID NO: 74981 - protein, 9 aa, Homo Sapiens
MPGGCSRGP

SEQ ID NO: 74982 - protein, 9 aa, Homo Sapiens
GPAAGDGRL

SEQ ID NO: 74983 - protein, 9 aa, Homo Sapiens
AAGDGRLRL

SEQ ID NO: 74984 - protein, 9 aa, Homo Sapiens
RLRLARLAL

SEQ ID NO: 74985 - protein, 9 aa, Homo Sapiens
RLARLALVL

SEQ ID NO: 74986 - protein, 9 aa, Homo Sapiens
LARLALVLL

SEQ ID NO: 74987 - protein, 9 aa, Homo Sapiens
RLALVLLGW

SEQ ID NO: 74988 - protein, 9 aa, Homo Sapiens
LALVLLGWV

SEQ ID NO: 74989 - protein, 9 aa, Homo Sapiens
VLLGWVSSS

SEQ ID NO: 74990 - protein, 9 aa, Homo Sapiens
LLGWVSSSS

SEQ ID NO: 74991 - protein, 9 aa, Homo Sapiens
SSSSPTSSA

SEQ ID NO: 74992 - protein, 9 aa, Homo Sapiens
SPTSSASSF

SEQ ID NO: 74993 - protein, 9 aa, Homo Sapiens
SASSFSSSA

SEQ ID NO: 74994 - protein, 9 aa, Homo Sapiens
SSFSSSAPF

SEQ ID NO: 74995 - protein, 9 aa, Homo Sapiens
FSSSAPFLA

SEQ ID NO: 74996 - protein, 9 aa, Homo Sapiens
SSAPFLASA

SEQ ID NO: 74997 - protein, 9 aa, Homo Sapiens
SAPFLASAV

SEQ ID NO: 74998 - protein, 9 aa, Homo Sapiens
APFLASAVS

SEQ ID NO: 74999 - protein, 9 aa, Homo Sapiens
FLASAVSAQ

SEQ ID NO: 75000 - protein, 9 aa, Homo Sapiens
SAVSAQPPL

SEQ ID NO: 75001 - protein, 9 aa, Homo Sapiens
PPLPDQCPA

SEQ ID NO: 75002 - protein, 9 aa, Homo Sapiens
PLPDQCPAL

SEQ ID NO: 75003 - protein, 9 aa, Homo Sapiens
ALCECSEAA

SEQ ID NO: 75004 - protein, 9 aa, Homo Sapiens
CSEAARTVK

SEQ ID NO: 75005 - protein, 9 aa, Homo Sapiens
EAARTVKCV

SEQ ID NO: 75006 - protein, 9 aa, Homo Sapiens
CVNRNLTEV

SEQ ID NO: 75007 - protein, 9 aa, Homo Sapiens
NLTEVPTDL

SEQ ID NO: 75008 - protein, 9 aa, Homo Sapiens
TEVPTDLPA

SEQ ID NO: 75009 - protein, 9 aa, Homo Sapiens
EVPTDLPAY

SEQ ID NO: 75010 - protein, 9 aa, Homo Sapiens
VPTDLPAYV

SEQ ID NO: 75011 - protein, 9 aa, Homo Sapiens
DLPAYVRNL

SEQ ID NO: 75012 - protein, 9 aa, Homo Sapiens
LPAYVRNLF

SEQ ID NO: 75013 - protein, 9 aa, Homo Sapiens
AYVRNLFLT

SEQ ID NO: 75014 - protein, 9 aa, Homo Sapiens
NLFLTGNQL

SEQ ID NO: 75015 - protein, 9 aa, Homo Sapiens
FLTGNQLAV

SEQ ID NO: 75016 - protein, 9 aa, Homo Sapiens
LTGNQLAVL

SEQ ID NO: 75017 - protein, 9 aa, Homo Sapiens
QLAVLPAGA

SEQ ID NO: 75018 - protein, 9 aa, Homo Sapiens
LAVLPAGAF

SEQ ID NO: 75019 - protein, 9 aa, Homo Sapiens
AVLPAGAFA

SEQ ID NO: 75020 - protein, 9 aa, Homo Sapiens
VLPAGAFAR

SEQ ID NO: 75021 - protein, 9 aa, Homo Sapiens
LPAGAFARR

SEQ ID NO: 75022 - protein, 9 aa, Homo Sapiens
RPPLAELAA

SEQ ID NO: 75023 - protein, 9 aa, Homo Sapiens
PPLAELAAL

SEQ ID NO: 75024 - protein, 9 aa, Homo Sapiens
AALNLSGSR

SEQ ID NO: 75025 - protein, 9 aa, Homo Sapiens
ALNLSGSRL

SEQ ID NO: 75026 - protein, 9 aa, Homo Sapiens
RLDEVRAGA

SEQ ID NO: 75027 - protein, 9 aa, Homo Sapiens
GAFEHLPSL

SEQ ID NO: 75028 - protein, 9 aa, Homo Sapiens
AFEHLPSLR

SEQ ID NO: 75029 - protein, 9 aa, Homo Sapiens
LPSLRQLDL

SEQ ID NO: 75030 - protein, 9 aa, Homo Sapiens
QLDLSHNPL

SEQ ID NO: 75031 - protein, 9 aa, Homo Sapiens
NPLADLSPF

SEQ ID NO: 75032 - protein, 9 aa, Homo Sapiens
PLADLSPFA

SEQ ID NO: 75033 - protein, 9 aa, Homo Sapiens
LADLSPFAF

SEQ ID NO: 75034 - protein, 9 aa, Homo Sapiens
DLSPFAFSG

SEQ ID NO: 75035 - protein, 9 aa, Homo Sapiens
FAFSGSNAS

SEQ ID NO: 75036 - protein, 9 aa, Homo Sapiens
AFSGSNASV

SEQ ID NO: 75037 - protein, 9 aa, Homo Sapiens
SVSAPSPLV

SEQ ID NO: 75038 - protein, 9 aa, Homo Sapiens
SAPSPLVEL

SEQ ID NO: 75039 - protein, 9 aa, Homo Sapiens
APSPLVELI

SEQ ID NO: 75040 - protein, 9 aa, Homo Sapiens
LVELILNHI

SEQ ID NO: 75041 - protein, 9 aa, Homo Sapiens
VELILNHIV

SEQ ID NO: 75042 - protein, 9 aa, Homo Sapiens
HIVPPEDER

SEQ ID NO: 75043 - protein, 9 aa, Homo Sapiens
RQNRSFEGM

SEQ ID NO: 75044 - protein, 9 aa, Homo Sapiens
RSFEGMVVA

SEQ ID NO: 75045 - protein, 9 aa, Homo Sapiens
FEGMVVAAL

SEQ ID NO: 75046 - protein, 9 aa, Homo Sapiens
EGMVVAALL

SEQ ID NO: 75047 - protein, 9 aa, Homo Sapiens
GMVVAALLA

SEQ ID NO: 75048 - protein, 9 aa, Homo Sapiens
VVAALLAGR

SEQ ID NO: 75049 - protein, 9 aa, Homo Sapiens
AALLAGRAL

SEQ ID NO: 75050 - protein, 9 aa, Homo Sapiens
ALLAGRALQ

SEQ ID NO: 75051 - protein, 9 aa, Homo Sapiens
LAGRALQGL

SEQ ID NO: 75052 - protein, 9 aa, Homo Sapiens
AGRALQGLR

SEQ ID NO: 75053 - protein, 9 aa, Homo Sapiens
GRALQGLRR

SEQ ID NO: 75054 - protein, 9 aa, Homo Sapiens
RALQGLRRL

SEQ ID NO: 75055 - protein, 9 aa, Homo Sapiens
LQGLRRLEL

SEQ ID NO: 75056 - protein, 9 aa, Homo Sapiens
RRLELASNH

SEQ ID NO: 75057 - protein, 9 aa, Homo Sapiens
RLELASNHF

SEQ ID NO: 75058 - protein, 9 aa, Homo Sapiens
LELASNHFL

SEQ ID NO: 75059 - protein, 9 aa, Homo Sapiens
ELASNHFLY

SEQ ID NO: 75060 - protein, 9 aa, Homo Sapiens
LASNHFLYL

SEQ ID NO: 75061 - protein, 9 aa, Homo Sapiens
SNHFLYLPR

SEQ ID NO: 75062 - protein, 9 aa, Homo Sapiens
FLYLPRDVL

SEQ ID NO: 75063 - protein, 9 aa, Homo Sapiens
YLPRDVLAQ

SEQ ID NO: 75064 - protein, 9 aa, Homo Sapiens
LPRDVLAQL

SEQ ID NO: 75065 - protein, 9 aa, Homo Sapiens
DVLAQLPSL

SEQ ID NO: 75066 - protein, 9 aa, Homo Sapiens
VLAQLPSLR

SEQ ID NO: 75067 - protein, 9 aa, Homo Sapiens
AQLPSLRHL

SEQ ID NO: 75068 - protein, 9 aa, Homo Sapiens
LPSLRHLDL

SEQ ID NO: 75069 - protein, 9 aa, Homo Sapiens
HLDLSNNSL

SEQ ID NO: 75070 - protein, 9 aa, Homo Sapiens
NSLVSLTYV

SEQ ID NO: 75071 - protein, 9 aa, Homo Sapiens
SLVSLTYVS

SEQ ID NO: 75072 - protein, 9 aa, Homo Sapiens
LVSLTYVSF

SEQ ID NO: 75073 - protein, 9 aa, Homo Sapiens
VSLTYVSFR

SEQ ID NO: 75074 - protein, 9 aa, Homo Sapiens
SLHLEDNAL

SEQ ID NO: 75075 - protein, 9 aa, Homo Sapiens
HLEDNALKV

SEQ ID NO: 75076 - protein, 9 aa, Homo Sapiens
LEDNALKVL

SEQ ID NO: 75077 - protein, 9 aa, Homo Sapiens
ALKVLHNGT

SEQ ID NO: 75078 - protein, 9 aa, Homo Sapiens
KVLHNGTLA

SEQ ID NO: 75079 - protein, 9 aa, Homo Sapiens
VLHNGTLAE

SEQ ID NO: 75080 - protein, 9 aa, Homo Sapiens
GTLAELQGL

SEQ ID NO: 75081 - protein, 9 aa, Homo Sapiens
LAELQGLPH

SEQ ID NO: 75082 - protein, 9 aa, Homo Sapiens
AELQGLPHI

SEQ ID NO: 75083 - protein, 9 aa, Homo Sapiens
ELQGLPHIR

SEQ ID NO: 75084 - protein, 9 aa, Homo Sapiens
LQGLPHIRV

SEQ ID NO: 75085 - protein, 9 aa, Homo Sapiens
GLPHIRVFL

SEQ ID NO: 75086 - protein, 9 aa, Homo Sapiens
RVFLDNNPW

SEQ ID NO: 75087 - protein, 9 aa, Homo Sapiens
VFLDNNPWV

SEQ ID NO: 75088 - protein, 9 aa, Homo Sapiens
FLDNNPWVC

SEQ ID NO: 75089 - protein, 9 aa, Homo Sapiens
NPWVCDCHM

SEQ ID NO: 75090 - protein, 9 aa, Homo Sapiens
CHMADMVTW

SEQ ID NO: 75091 - protein, 9 aa, Homo Sapiens
HMADMVTWL

SEQ ID NO: 75092 - protein, 9 aa, Homo Sapiens
MADMVTWLK

SEQ ID NO: 75093 - protein, 9 aa, Homo Sapiens
VTWLKETEV

SEQ ID NO: 75094 - protein, 9 aa, Homo Sapiens
WLKETEVVQ

SEQ ID NO: 75095 - protein, 9 aa, Homo Sapiens
EVVQGKDRL

SEQ ID NO: 75096 - protein, 9 aa, Homo Sapiens
RLTCAYPEK

SEQ ID NO: 75097 - protein, 9 aa, Homo Sapiens
AYPEKMRNR

SEQ ID NO: 75098 - protein, 9 aa, Homo Sapiens
YPEKMRNRV

SEQ ID NO: 75099 - protein, 9 aa, Homo Sapiens
EKMRNRVLL

SEQ ID NO: 75100 - protein, 9 aa, Homo Sapiens
RVLLELNSA

SEQ ID NO: 75101 - protein, 9 aa, Homo Sapiens
VLLELNSAD

SEQ ID NO: 75102 - protein, 9 aa, Homo Sapiens
LLELNSADL

SEQ ID NO: 75103 - protein, 9 aa, Homo Sapiens
ILPPSLQTS

SEQ ID NO: 75104 - protein, 9 aa, Homo Sapiens
LPPSLQTSY

SEQ ID NO: 75105 - protein, 9 aa, Homo Sapiens
PPSLQTSYV

SEQ ID NO: 75106 - protein, 9 aa, Homo Sapiens
PSLQTSYVF

SEQ ID NO: 75107 - protein, 9 aa, Homo Sapiens
SLQTSYVFL

SEQ ID NO: 75108 - protein, 9 aa, Homo Sapiens
QTSYVFLGI

SEQ ID NO: 75109 - protein, 9 aa, Homo Sapiens
TSYVFLGIV

SEQ ID NO: 75110 - protein, 9 aa, Homo Sapiens
SYVFLGIVL

SEQ ID NO: 75111 - protein, 9 aa, Homo Sapiens
YVFLGIVLA

SEQ ID NO: 75112 - protein, 9 aa, Homo Sapiens
VFLGIVLAL

SEQ ID NO: 75113 - protein, 9 aa, Homo Sapiens
FLGIVLALI

SEQ ID NO: 75114 - protein, 9 aa, Homo Sapiens
GIVLALIGA

SEQ ID NO: 75115 - protein, 9 aa, Homo Sapiens
IVLALIGAI

SEQ ID NO: 75116 - protein, 9 aa, Homo Sapiens
VLALIGAIF

SEQ ID NO: 75117 - protein, 9 aa, Homo Sapiens
LALIGAIFL

SEQ ID NO: 75118 - protein, 9 aa, Homo Sapiens
ALIGAIFLL

SEQ ID NO: 75119 - protein, 9 aa, Homo Sapiens
LIGAIFLLV

SEQ ID NO: 75120 - protein, 9 aa, Homo Sapiens
GAIFLLVLY

SEQ ID NO: 75121 - protein, 9 aa, Homo Sapiens
AIFLLVLYL

SEQ ID NO: 75122 - protein, 9 aa, Homo Sapiens
FLLVLYLNR

SEQ ID NO: 75123 - protein, 9 aa, Homo Sapiens
LLVLYLNRK

SEQ ID NO: 75124 - protein, 9 aa, Homo Sapiens
VLYLNRKGI

SEQ ID NO: 75125 - protein, 9 aa, Homo Sapiens
LYLNRKGIK

SEQ ID NO: 75126 - protein, 9 aa, Homo Sapiens
YLNRKGIKK

SEQ ID NO: 75127 - protein, 9 aa, Homo Sapiens
GIKKWMHNI

SEQ ID NO: 75128 - protein, 9 aa, Homo Sapiens
MHNIRDACR

SEQ ID NO: 75129 - protein, 9 aa, Homo Sapiens
ACRDHMEGY

SEQ ID NO: 75130 - protein, 9 aa, Homo Sapiens
DHMEGYHYR

SEQ ID NO: 75131 - protein, 9 aa, Homo Sapiens
HMEGYHYRY

SEQ ID NO: 75132 - protein, 9 aa, Homo Sapiens
EGYHYRYEI

SEQ ID NO: 75133 - protein, 9 aa, Homo Sapiens
YRYEINADP

SEQ ID NO: 75134 - protein, 9 aa, Homo Sapiens
RYEINADPR

SEQ ID NO: 75135 - protein, 9 aa, Homo Sapiens
YEINADPRL

SEQ ID NO: 75136 - protein, 9 aa, Homo Sapiens
NADPRLTNL

SEQ ID NO: 75137 - protein, 10 aa, Homo Sapiens
MPGGCSRGPA

SEQ ID NO: 75138 - protein, 10 aa, Homo Sapiens
GRLRLARLAL

SEQ ID NO: 75139 - protein, 10 aa, Homo Sapiens
RLRLARLALV

SEQ ID NO: 75140 - protein, 10 aa, Homo Sapiens
LRLARLALVL

SEQ ID NO: 75141 - protein, 10 aa, Homo Sapiens
RLARLALVLL

SEQ ID NO: 75142 - protein, 10 aa, Homo Sapiens
RLALVLLGWV

SEQ ID NO: 75143 - protein, 10 aa, Homo Sapiens
VLLGWVSSSS

SEQ ID NO: 75144 - protein, 10 aa, Homo Sapiens
SSASSFSSSA

SEQ ID NO: 75145 - protein, 10 aa, Homo Sapiens
ASSFSSSAPF

SEQ ID NO: 75146 - protein, 10 aa, Homo Sapiens
SSSAPFLASA

SEQ ID NO: 75147 - protein, 10 aa, Homo Sapiens
SSAPFLASAV

SEQ ID NO: 75148 - protein, 10 aa, Homo Sapiens
APFLASAVSA

SEQ ID NO: 75149 - protein, 10 aa, Homo Sapiens
FLASAVSAQP

SEQ ID NO: 75150 - protein, 10 aa, Homo Sapiens
PLPDQCPALC

SEQ ID NO: 75151 - protein, 10 aa, Homo Sapiens
CPALCECSEA

SEQ ID NO: 75152 - protein, 10 aa, Homo Sapiens
ALCECSEAAR

SEQ ID NO: 75153 - protein, 10 aa, Homo Sapiens
AARTVKCVNR

SEQ ID NO: 75154 - protein, 10 aa, Homo Sapiens
KCVNRNLTEV

SEQ ID NO: 75155 - protein, 10 aa, Homo Sapiens
TEVPTDLPAY

SEQ ID NO: 75156 - protein, 10 aa, Homo Sapiens
EVPTDLPAYV

SEQ ID NO: 75157 - protein, 10 aa, Homo Sapiens
LPAYVRNLFL

SEQ ID NO: 75158 - protein, 10 aa, Homo Sapiens
NLFLTGNQLA

SEQ ID NO: 75159 - protein, 10 aa, Homo Sapiens
LFLTGNQLAV

SEQ ID NO: 75160 - protein, 10 aa, Homo Sapiens
FLTGNQLAVL

SEQ ID NO: 75161 - protein, 10 aa, Homo Sapiens
NQLAVLPAGA

SEQ ID NO: 75162 - protein, 10 aa, Homo Sapiens
QLAVLPAGAF

SEQ ID NO: 75163 - protein, 10 aa, Homo Sapiens
LAVLPAGAFA

SEQ ID NO: 75164 - protein, 10 aa, Homo Sapiens
AVLPAGAFAR

SEQ ID NO: 75165 - protein, 10 aa, Homo Sapiens
LPAGAFARRP

SEQ ID NO: 75166 - protein, 10 aa, Homo Sapiens
FARRPPLAEL

SEQ ID NO: 75167 - protein, 10 aa, Homo Sapiens
RPPLAELAAL

SEQ ID NO: 75168 - protein, 10 aa, Homo Sapiens
PLAELAALNL

SEQ ID NO: 75169 - protein, 10 aa, Homo Sapiens
AELAALNLSG

SEQ ID NO: 75170 - protein, 10 aa, Homo Sapiens
LAALNLSGSR

SEQ ID NO: 75171 - protein, 10 aa, Homo Sapiens
NLSGSRLDEV

SEQ ID NO: 75172 - protein, 10 aa, Homo Sapiens
RLDEVRAGAF

SEQ ID NO: 75173 - protein, 10 aa, Homo Sapiens
EVRAGAFEHL

SEQ ID NO: 75174 - protein, 10 aa, Homo Sapiens
GAFEHLPSLR

SEQ ID NO: 75175 - protein, 10 aa, Homo Sapiens
FEHLPSLRQL

SEQ ID NO: 75176 - protein, 10 aa, Homo Sapiens
HLPSLRQLDL

SEQ ID NO: 75177 - protein, 10 aa, Homo Sapiens
LPSLRQLDLS

SEQ ID NO: 75178 - protein, 10 aa, Homo Sapiens
RQLDLSHNPL

SEQ ID NO: 75179 - protein, 10 aa, Homo Sapiens
QLDLSHNPLA

SEQ ID NO: 75180 - protein, 10 aa, Homo Sapiens
DLSHNPLADL

SEQ ID NO: 75181 - protein, 10 aa, Homo Sapiens
NPLADLSPFA

SEQ ID NO: 75182 - protein, 10 aa, Homo Sapiens
PLADLSPFAF

SEQ ID NO: 75183 - protein, 10 aa, Homo Sapiens
SPFAFSGSNA

SEQ ID NO: 75184 - protein, 10 aa, Homo Sapiens
FAFSGSNASV

SEQ ID NO: 75185 - protein, 10 aa, Homo Sapiens
NASVSAPSPL

SEQ ID NO: 75186 - protein, 10 aa, Homo Sapiens
VSAPSPLVEL

SEQ ID NO: 75187 - protein, 10 aa, Homo Sapiens
SAPSPLVELI

SEQ ID NO: 75188 - protein, 10 aa, Homo Sapiens
APSPLVELIL

SEQ ID NO: 75189 - protein, 10 aa, Homo Sapiens
PLVELILNHI

SEQ ID NO: 75190 - protein, 10 aa, Homo Sapiens
LVELILNHIV

SEQ ID NO: 75191 - protein, 10 aa, Homo Sapiens
RQNRSFEGMV

SEQ ID NO: 75192 - protein, 10 aa, Homo Sapiens
RSFEGMVVAA

SEQ ID NO: 75193 - protein, 10 aa, Homo Sapiens
FEGMVVAALL

SEQ ID NO: 75194 - protein, 10 aa, Homo Sapiens
EGMVVAALLA

SEQ ID NO: 75195 - protein, 10 aa, Homo Sapiens
MVVAALLAGR

SEQ ID NO: 75196 - protein, 10 aa, Homo Sapiens
VVAALLAGRA

SEQ ID NO: 75197 - protein, 10 aa, Homo Sapiens
VAALLAGRAL

SEQ ID NO: 75198 - protein, 10 aa, Homo Sapiens
ALLAGRALQG

SEQ ID NO: 75199 - protein, 10 aa, Homo Sapiens
LLAGRALQGL

SEQ ID NO: 75200 - protein, 10 aa, Homo Sapiens
AGRALQGLRR

SEQ ID NO: 75201 - protein, 10 aa, Homo Sapiens
ALQGLRRLEL

SEQ ID NO: 75202 - protein, 10 aa, Homo Sapiens
LQGLRRLELA

SEQ ID NO: 75203 - protein, 10 aa, Homo Sapiens
RRLELASNHF

SEQ ID NO: 75204 - protein, 10 aa, Homo Sapiens
RLELASNHFL

SEQ ID NO: 75205 - protein, 10 aa, Homo Sapiens
LELASNHFLY

SEQ ID NO: 75206 - protein, 10 aa, Homo Sapiens
ELASNHFLYL

SEQ ID NO: 75207 - protein, 10 aa, Homo Sapiens
ASNHFLYLPR

SEQ ID NO: 75208 - protein, 10 aa, Homo Sapiens
HFLYLPRDVL

SEQ ID NO: 75209 - protein, 10 aa, Homo Sapiens
FLYLPRDVLA

SEQ ID NO: 75210 - protein, 10 aa, Homo Sapiens
YLPRDVLAQL

SEQ ID NO: 75211 - protein, 10 aa, Homo Sapiens
DVLAQLPSLR

SEQ ID NO: 75212 - protein, 10 aa, Homo Sapiens
QLPSLRHLDL

SEQ ID NO: 75213 - protein, 10 aa, Homo Sapiens
LPSLRHLDLS

SEQ ID NO: 75214 - protein, 10 aa, Homo Sapiens
RHLDLSNNSL

SEQ ID NO: 75215 - protein, 10 aa, Homo Sapiens
HLDLSNNSLV

SEQ ID NO: 75216 - protein, 10 aa, Homo Sapiens
DLSNNSLVSL

SEQ ID NO: 75217 - protein, 10 aa, Homo Sapiens
NNSLVSLTYV

SEQ ID NO: 75218 - protein, 10 aa, Homo Sapiens
SLVSLTYVSF

SEQ ID NO: 75219 - protein, 10 aa, Homo Sapiens
LVSLTYVSFR

SEQ ID NO: 75220 - protein, 10 aa, Homo Sapiens
SLTYVSFRNL

SEQ ID NO: 75221 - protein, 10 aa, Homo Sapiens
YVSFRNLTHL

SEQ ID NO: 75222 - protein, 10 aa, Homo Sapiens
FRNLTHLESL

SEQ ID NO: 75223 - protein, 10 aa, Homo Sapiens
NLTHLESLHL

SEQ ID NO: 75224 - protein, 10 aa, Homo Sapiens
SLHLEDNALK

SEQ ID NO: 75225 - protein, 10 aa, Homo Sapiens
HLEDNALKVL

SEQ ID NO: 75226 - protein, 10 aa, Homo Sapiens
ALKVLHNGTL

SEQ ID NO: 75227 - protein, 10 aa, Homo Sapiens
VLHNGTLAEL

SEQ ID NO: 75228 - protein, 10 aa, Homo Sapiens
ELQGLPHIRV

SEQ ID NO: 75229 - protein, 10 aa, Homo Sapiens
LQGLPHIRVF

SEQ ID NO: 75230 - protein, 10 aa, Homo Sapiens
RVFLDNNPWV

SEQ ID NO: 75231 - protein, 10 aa, Homo Sapiens
FLDNNPWVCD

SEQ ID NO: 75232 - protein, 10 aa, Homo Sapiens
NPWVCDCHMA

SEQ ID NO: 75233 - protein, 10 aa, Homo Sapiens
WVCDCHMADM

SEQ ID NO: 75234 - protein, 10 aa, Homo Sapiens
HMADMVTWLK

SEQ ID NO: 75235 - protein, 10 aa, Homo Sapiens
MVTWLKETEV

SEQ ID NO: 75236 - protein, 10 aa, Homo Sapiens
VTWLKETEVV

SEQ ID NO: 75237 - protein, 10 aa, Homo Sapiens
ETEVVQGKDR

SEQ ID NO: 75238 - protein, 10 aa, Homo Sapiens
TEVVQGKDRL

SEQ ID NO: 75239 - protein, 10 aa, Homo Sapiens
VQGKDRLTCA

SEQ ID NO: 75240 - protein, 10 aa, Homo Sapiens
QGKDRLTCAY

SEQ ID NO: 75241 - protein, 10 aa, Homo Sapiens
RLTCAYPEKM

SEQ ID NO: 75242 - protein, 10 aa, Homo Sapiens
LTCAYPEKMR

SEQ ID NO: 75243 - protein, 10 aa, Homo Sapiens
CAYPEKMRNR

SEQ ID NO: 75244 - protein, 10 aa, Homo Sapiens
AYPEKMRNRV

SEQ ID NO: 75245 - protein, 10 aa, Homo Sapiens
YPEKMRNRVL

SEQ ID NO: 75246 - protein, 10 aa, Homo Sapiens
KMRNRVLLEL

SEQ ID NO: 75247 - protein, 10 aa, Homo Sapiens
VLLELNSADL

SEQ ID NO: 75248 - protein, 10 aa, Homo Sapiens
NSADLDCDPI

SEQ ID NO: 75249 - protein, 10 aa, Homo Sapiens
ILPPSLQTSY

SEQ ID NO: 75250 - protein, 10 aa, Homo Sapiens
LPPSLQTSYV

SEQ ID NO: 75251 - protein, 10 aa, Homo Sapiens
PPSLQTSYVF

SEQ ID NO: 75252 - protein, 10 aa, Homo Sapiens
LQTSYVFLGI

SEQ ID NO: 75253 - protein, 10 aa, Homo Sapiens
QTSYVFLGIV

SEQ ID NO: 75254 - protein, 10 aa, Homo Sapiens
YVFLGIVLAL

SEQ ID NO: 75255 - protein, 10 aa, Homo Sapiens
VFLGIVLALI

SEQ ID NO: 75256 - protein, 10 aa, Homo Sapiens
GIVLALIGAI

SEQ ID NO: 75257 - protein, 10 aa, Homo Sapiens
IVLALIGAIF

SEQ ID NO: 75258 - protein, 10 aa, Homo Sapiens
VLALIGAIFL

SEQ ID NO: 75259 - protein, 10 aa, Homo Sapiens
LALIGAIFLL

SEQ ID NO: 75260 - protein, 10 aa, Homo Sapiens
ALIGAIFLLV

SEQ ID NO: 75261 - protein, 10 aa, Homo Sapiens
LIGAIFLLVL

SEQ ID NO: 75262 - protein, 10 aa, Homo Sapiens
GAIFLLVLYL

SEQ ID NO: 75263 - protein, 10 aa, Homo Sapiens
IFLLVLYLNR

SEQ ID NO: 75264 - protein, 10 aa, Homo Sapiens
FLLVLYLNRK

SEQ ID NO: 75265 - protein, 10 aa, Homo Sapiens
VLYLNRKGIK

SEQ ID NO: 75266 - protein, 10 aa, Homo Sapiens
LYLNRKGIKK

SEQ ID NO: 75267 - protein, 10 aa, Homo Sapiens
YLNRKGIKKW

SEQ ID NO: 75268 - protein, 10 aa, Homo Sapiens
GIKKWMHNIR

SEQ ID NO: 75269 - protein, 10 aa, Homo Sapiens
WMHNIRDACR

SEQ ID NO: 75270 - protein, 10 aa, Homo Sapiens
MEGYHYRYEI

SEQ ID NO: 75271 - protein, 10 aa, Homo Sapiens
YRYEINADPR

SEQ ID NO: 75272 - protein, 10 aa, Homo Sapiens
RYEINADPRL

SEQ ID NO: 75273 - protein, 10 aa, Homo Sapiens
LTNLSSNSDV

SEQ ID NO: 75274 - protein, 11 aa, Homo Sapiens
MPGGCSRGPAA

SEQ ID NO: 75275 - protein, 11 aa, Homo Sapiens
CSRGPAAGDGR

SEQ ID NO: 75276 - protein, 11 aa, Homo Sapiens
GPAAGDGRLRL

SEQ ID NO: 75277 - protein, 11 aa, Homo Sapiens
AAGDGRLRLAR

SEQ ID NO: 75278 - protein, 11 aa, Homo Sapiens
DGRLRLARLAL

SEQ ID NO: 75279 - protein, 11 aa, Homo Sapiens
RLRLARLALVL

SEQ ID NO: 75280 - protein, 11 aa, Homo Sapiens
LRLARLALVLL

SEQ ID NO: 75281 - protein, 11 aa, Homo Sapiens
LARLALVLLGW

SEQ ID NO: 75282 - protein, 11 aa, Homo Sapiens
ALVLLGWVSSS

SEQ ID NO: 75283 - protein, 11 aa, Homo Sapiens
VLLGWVSSSSP

SEQ ID NO: 75284 - protein, 11 aa, Homo Sapiens
LLGWVSSSSPT

SEQ ID NO: 75285 - protein, 11 aa, Homo Sapiens
WVSSSSPTSSA

SEQ ID NO: 75286 - protein, 11 aa, Homo Sapiens
SSSPTSSASSF

SEQ ID NO: 75287 - protein, 11 aa, Homo Sapiens
SPTSSASSFSS

SEQ ID NO: 75288 - protein, 11 aa, Homo Sapiens
TSSASSFSSSA

SEQ ID NO: 75289 - protein, 11 aa, Homo Sapiens
SASSFSSSAPF

SEQ ID NO: 75290 - protein, 11 aa, Homo Sapiens
SSFSSSAPFLA

SEQ ID NO: 75291 - protein, 11 aa, Homo Sapiens
FSSSAPFLASA

SEQ ID NO: 75292 - protein, 11 aa, Homo Sapiens
SSSAPFLASAV

SEQ ID NO: 75293 - protein, 11 aa, Homo Sapiens
FLASAVSAQPP

SEQ ID NO: 75294 - protein, 11 aa, Homo Sapiens
LASAVSAQPPL

SEQ ID NO: 75295 - protein, 11 aa, Homo Sapiens
AQPPLPDQCPA

SEQ ID NO: 75296 - protein, 11 aa, Homo Sapiens
QPPLPDQCPAL

SEQ ID NO: 75297 - protein, 11 aa, Homo Sapiens
LPDQCPALCEC

SEQ ID NO: 75298 - protein, 11 aa, Homo Sapiens
CPALCECSEAA

SEQ ID NO: 75299 - protein, 11 aa, Homo Sapiens
ALCECSEAART

SEQ ID NO: 75300 - protein, 11 aa, Homo Sapiens
EAARTVKCVNR

SEQ ID NO: 75301 - protein, 11 aa, Homo Sapiens
NLTEVPTDLPA

SEQ ID NO: 75302 - protein, 11 aa, Homo Sapiens
LTEVPTDLPAY

SEQ ID NO: 75303 - protein, 11 aa, Homo Sapiens
TEVPTDLPAYV

SEQ ID NO: 75304 - protein, 11 aa, Homo Sapiens
EVPTDLPAYVR

SEQ ID NO: 75305 - protein, 11 aa, Homo Sapiens
DLPAYVRNLFL

SEQ ID NO: 75306 - protein, 11 aa, Homo Sapiens
LPAYVRNLFLT

SEQ ID NO: 75307 - protein, 11 aa, Homo Sapiens
NLFLTGNQLAV

SEQ ID NO: 75308 - protein, 11 aa, Homo Sapiens
FLTGNQLAVLP

SEQ ID NO: 75309 - protein, 11 aa, Homo Sapiens
LTGNQLAVLPA

SEQ ID NO: 75310 - protein, 11 aa, Homo Sapiens
NQLAVLPAGAF

SEQ ID NO: 75311 - protein, 11 aa, Homo Sapiens
QLAVLPAGAFA

SEQ ID NO: 75312 - protein, 11 aa, Homo Sapiens
LAVLPAGAFAR

SEQ ID NO: 75313 - protein, 11 aa, Homo Sapiens
AVLPAGAFARR

SEQ ID NO: 75314 - protein, 11 aa, Homo Sapiens
LPAGAFARRPP

SEQ ID NO: 75315 - protein, 11 aa, Homo Sapiens
AFARRPPLAEL

SEQ ID NO: 75316 - protein, 11 aa, Homo Sapiens
ELAALNLSGSR

SEQ ID NO: 75317 - protein, 11 aa, Homo Sapiens
NLSGSRLDEVR

SEQ ID NO: 75318 - protein, 11 aa, Homo Sapiens
SRLDEVRAGAF

SEQ ID NO: 75319 - protein, 11 aa, Homo Sapiens
RLDEVRAGAFE

SEQ ID NO: 75320 - protein, 11 aa, Homo Sapiens
DEVRAGAFEHL

SEQ ID NO: 75321 - protein, 11 aa, Homo Sapiens
RAGAFEHLPSL

SEQ ID NO: 75322 - protein, 11 aa, Homo Sapiens
LPSLRQLDLSH

SEQ ID NO: 75323 - protein, 11 aa, Homo Sapiens
RQLDLSHNPLA

SEQ ID NO: 75324 - protein, 11 aa, Homo Sapiens
NPLADLSPFAF

SEQ ID NO: 75325 - protein, 11 aa, Homo Sapiens
PLADLSPFAFS

SEQ ID NO: 75326 - protein, 11 aa, Homo Sapiens
SPFAFSGSNAS

SEQ ID NO: 75327 - protein, 11 aa, Homo Sapiens
FAFSGSNASVS

SEQ ID NO: 75328 - protein, 11 aa, Homo Sapiens
SNASVSAPSPL

SEQ ID NO: 75329 - protein, 11 aa, Homo Sapiens
NASVSAPSPLV

SEQ ID NO: 75330 - protein, 11 aa, Homo Sapiens
SVSAPSPLVEL

SEQ ID NO: 75331 - protein, 11 aa, Homo Sapiens
VSAPSPLVELI

SEQ ID NO: 75332 - protein, 11 aa, Homo Sapiens
SPLVELILNHI

SEQ ID NO: 75333 - protein, 11 aa, Homo Sapiens
PLVELILNHIV

SEQ ID NO: 75334 - protein, 11 aa, Homo Sapiens
IVPPEDERQNR

SEQ ID NO: 75335 - protein, 11 aa, Homo Sapiens
DERQNRSFEGM

SEQ ID NO: 75336 - protein, 11 aa, Homo Sapiens
RQNRSFEGMVV

SEQ ID NO: 75337 - protein, 11 aa, Homo Sapiens
RSFEGMVVAAL

SEQ ID NO: 75338 - protein, 11 aa, Homo Sapiens
GMVVAALLAGR

SEQ ID NO: 75339 - protein, 11 aa, Homo Sapiens
MVVAALLAGRA

SEQ ID NO: 75340 - protein, 11 aa, Homo Sapiens
VVAALLAGRAL

SEQ ID NO: 75341 - protein, 11 aa, Homo Sapiens
ALLAGRALQGL

SEQ ID NO: 75342 - protein, 11 aa, Homo Sapiens
LLAGRALQGLR

SEQ ID NO: 75343 - protein, 11 aa, Homo Sapiens
RALQGLRRLEL

SEQ ID NO: 75344 - protein, 11 aa, Homo Sapiens
ALQGLRRLELA

SEQ ID NO: 75345 - protein, 11 aa, Homo Sapiens
RRLELASNHFL

SEQ ID NO: 75346 - protein, 11 aa, Homo Sapiens
RLELASNHFLY

SEQ ID NO: 75347 - protein, 11 aa, Homo Sapiens
LELASNHFLYL

SEQ ID NO: 75348 - protein, 11 aa, Homo Sapiens
LASNHFLYLPR

SEQ ID NO: 75349 - protein, 11 aa, Homo Sapiens
NHFLYLPRDVL

SEQ ID NO: 75350 - protein, 11 aa, Homo Sapiens
FLYLPRDVLAQ

SEQ ID NO: 75351 - protein, 11 aa, Homo Sapiens
LYLPRDVLAQL

SEQ ID NO: 75352 - protein, 11 aa, Homo Sapiens
YLPRDVLAQLP

SEQ ID NO: 75353 - protein, 11 aa, Homo Sapiens
LPRDVLAQLPS

SEQ ID NO: 75354 - protein, 11 aa, Homo Sapiens
VLAQLPSLRHL

SEQ ID NO: 75355 - protein, 11 aa, Homo Sapiens
AQLPSLRHLDL

SEQ ID NO: 75356 - protein, 11 aa, Homo Sapiens
LSNNSLVSLTY

SEQ ID NO: 75357 - protein, 11 aa, Homo Sapiens
SNNSLVSLTYV

SEQ ID NO: 75358 - protein, 11 aa, Homo Sapiens
NSLVSLTYVSF

SEQ ID NO: 75359 - protein, 11 aa, Homo Sapiens
SLVSLTYVSFR

SEQ ID NO: 75360 - protein, 11 aa, Homo Sapiens
SLTYVSFRNLT

SEQ ID NO: 75361 - protein, 11 aa, Homo Sapiens
TYVSFRNLTHL

SEQ ID NO: 75362 - protein, 11 aa, Homo Sapiens
SFRNLTHLESL

SEQ ID NO: 75363 - protein, 11 aa, Homo Sapiens
LESLHLEDNAL

SEQ ID NO: 75364 - protein, 11 aa, Homo Sapiens
ESLHLEDNALK

SEQ ID NO: 75365 - protein, 11 aa, Homo Sapiens
SLHLEDNALKV

SEQ ID NO: 75366 - protein, 11 aa, Homo Sapiens
LHLEDNALKVL

SEQ ID NO: 75367 - protein, 11 aa, Homo Sapiens
NALKVLHNGTL

SEQ ID NO: 75368 - protein, 11 aa, Homo Sapiens
ALKVLHNGTLA

SEQ ID NO: 75369 - protein, 11 aa, Homo Sapiens
KVLHNGTLAEL

SEQ ID NO: 75370 - protein, 11 aa, Homo Sapiens
VLHNGTLAELQ

SEQ ID NO: 75371 - protein, 11 aa, Homo Sapiens
TLAELQGLPHI

SEQ ID NO: 75372 - protein, 11 aa, Homo Sapiens
AELQGLPHIRV

SEQ ID NO: 75373 - protein, 11 aa, Homo Sapiens
ELQGLPHIRVF

SEQ ID NO: 75374 - protein, 11 aa, Homo Sapiens
LQGLPHIRVFL

SEQ ID NO: 75375 - protein, 11 aa, Homo Sapiens
FLDNNPWVCDC

SEQ ID NO: 75376 - protein, 11 aa, Homo Sapiens
WVCDCHMADMV

SEQ ID NO: 75377 - protein, 11 aa, Homo Sapiens
CHMADMVTWLK

SEQ ID NO: 75378 - protein, 11 aa, Homo Sapiens
DMVTWLKETEV

SEQ ID NO: 75379 - protein, 11 aa, Homo Sapiens
MVTWLKETEVV

SEQ ID NO: 75380 - protein, 11 aa, Homo Sapiens
WLKETEVVQGK

SEQ ID NO: 75381 - protein, 11 aa, Homo Sapiens
ETEVVQGKDRL

SEQ ID NO: 75382 - protein, 11 aa, Homo Sapiens
VQGKDRLTCAY

SEQ ID NO: 75383 - protein, 11 aa, Homo Sapiens
KDRLTCAYPEK

SEQ ID NO: 75384 - protein, 11 aa, Homo Sapiens
RLTCAYPEKMR

SEQ ID NO: 75385 - protein, 11 aa, Homo Sapiens
CAYPEKMRNRV

SEQ ID NO: 75386 - protein, 11 aa, Homo Sapiens
AYPEKMRNRVL

SEQ ID NO: 75387 - protein, 11 aa, Homo Sapiens
YPEKMRNRVLL

SEQ ID NO: 75388 - protein, 11 aa, Homo Sapiens
RVLLELNSADL

SEQ ID NO: 75389 - protein, 11 aa, Homo Sapiens
PILPPSLQTSY

SEQ ID NO: 75390 - protein, 11 aa, Homo Sapiens
ILPPSLQTSYV

SEQ ID NO: 75391 - protein, 11 aa, Homo Sapiens
LPPSLQTSYVF

SEQ ID NO: 75392 - protein, 11 aa, Homo Sapiens
SLQTSYVFLGI

SEQ ID NO: 75393 - protein, 11 aa, Homo Sapiens
LQTSYVFLGIV

SEQ ID NO: 75394 - protein, 11 aa, Homo Sapiens
QTSYVFLGIVL

SEQ ID NO: 75395 - protein, 11 aa, Homo Sapiens
TSYVFLGIVLA

SEQ ID NO: 75396 - protein, 11 aa, Homo Sapiens
SYVFLGIVLAL

SEQ ID NO: 75397 - protein, 11 aa, Homo Sapiens
YVFLGIVLALI

SEQ ID NO: 75398 - protein, 11 aa, Homo Sapiens
FLGIVLALIGA

SEQ ID NO: 75399 - protein, 11 aa, Homo Sapiens
GIVLALIGAIF

SEQ ID NO: 75400 - protein, 11 aa, Homo Sapiens
IVLALIGAIFL

SEQ ID NO: 75401 - protein, 11 aa, Homo Sapiens
VLALIGAIFLL

SEQ ID NO: 75402 - protein, 11 aa, Homo Sapiens
LALIGAIFLLV

SEQ ID NO: 75403 - protein, 11 aa, Homo Sapiens
ALIGAIFLLVL

SEQ ID NO: 75404 - protein, 11 aa, Homo Sapiens
LIGAIFLLVLY

SEQ ID NO: 75405 - protein, 11 aa, Homo Sapiens
AIFLLVLYLNR

SEQ ID NO: 75406 - protein, 11 aa, Homo Sapiens
IFLLVLYLNRK

SEQ ID NO: 75407 - protein, 11 aa, Homo Sapiens
LLVLYLNRKGI

SEQ ID NO: 75408 - protein, 11 aa, Homo Sapiens
LVLYLNRKGIK

SEQ ID NO: 75409 - protein, 11 aa, Homo Sapiens
VLYLNRKGIKK

SEQ ID NO: 75410 - protein, 11 aa, Homo Sapiens
LYLNRKGIKKW

SEQ ID NO: 75411 - protein, 11 aa, Homo Sapiens
YLNRKGIKKWM

SEQ ID NO: 75412 - protein, 11 aa, Homo Sapiens
KGIKKWMHNIR

SEQ ID NO: 75413 - protein, 11 aa, Homo Sapiens
KWMHNIRDACR

SEQ ID NO: 75414 - protein, 11 aa, Homo Sapiens
ACRDHMEGYHY

SEQ ID NO: 75415 - protein, 11 aa, Homo Sapiens
HMEGYHYRYEI

SEQ ID NO: 75416 - protein, 11 aa, Homo Sapiens
HYRYEINADPR

SEQ ID NO: 75417 - protein, 11 aa, Homo Sapiens
YRYEINADPRL

SEQ ID NO: 75418 - protein, 11 aa, Homo Sapiens
EINADPRLTNL

SEQ ID NO: 75419 - protein, 11 aa, Homo Sapiens
RLTNLSSNSDV

SEQ ID NO: 75420 - protein, 13 aa, Homo Sapiens
MPGGCSRGPAAGD

SEQ ID NO: 75421 - protein, 13 aa, Homo Sapiens
PGGCSRGPAAGDG

SEQ ID NO: 75422 - protein, 13 aa, Homo Sapiens
GGCSRGPAAGDGR

SEQ ID NO: 75423 - protein, 13 aa, Homo Sapiens
GCSRGPAAGDGRL

SEQ ID NO: 75424 - protein, 13 aa, Homo Sapiens
CSRGPAAGDGRLR

SEQ ID NO: 75425 - protein, 13 aa, Homo Sapiens
SRGPAAGDGRLRL

SEQ ID NO: 75426 - protein, 13 aa, Homo Sapiens
RGPAAGDGRLRLA

SEQ ID NO: 75427 - protein, 13 aa, Homo Sapiens
GPAAGDGRLRLAR

SEQ ID NO: 75428 - protein, 13 aa, Homo Sapiens
PAAGDGRLRLARL

SEQ ID NO: 75429 - protein, 13 aa, Homo Sapiens
AAGDGRLRLARLA

SEQ ID NO: 75430 - protein, 13 aa, Homo Sapiens
AGDGRLRLARLAL

SEQ ID NO: 75431 - protein, 13 aa, Homo Sapiens
GDGRLRLARLALV

SEQ ID NO: 75432 - protein, 13 aa, Homo Sapiens
DGRLRLARLALVL

SEQ ID NO: 75433 - protein, 13 aa, Homo Sapiens
GRLRLARLALVLL

SEQ ID NO: 75434 - protein, 13 aa, Homo Sapiens
RLRLARLALVLLG

SEQ ID NO: 75435 - protein, 13 aa, Homo Sapiens
LRLARLALVLLGW

SEQ ID NO: 75436 - protein, 13 aa, Homo Sapiens
RLARLALVLLGWV

SEQ ID NO: 75437 - protein, 13 aa, Homo Sapiens
LARLALVLLGWVS

SEQ ID NO: 75438 - protein, 13 aa, Homo Sapiens
ARLALVLLGWVSS

SEQ ID NO: 75439 - protein, 13 aa, Homo Sapiens
RLALVLLGWVSSS

SEQ ID NO: 75440 - protein, 13 aa, Homo Sapiens
LALVLLGWVSSSS

SEQ ID NO: 75441 - protein, 13 aa, Homo Sapiens
ALVLLGWVSSSSP

SEQ ID NO: 75442 - protein, 13 aa, Homo Sapiens
LVLLGWVSSSSPT

SEQ ID NO: 75443 - protein, 13 aa, Homo Sapiens
VLLGWVSSSSPTS

SEQ ID NO: 75444 - protein, 13 aa, Homo Sapiens
LLGWVSSSSPTSS

SEQ ID NO: 75445 - protein, 13 aa, Homo Sapiens
LGWVSSSSPTSSA

SEQ ID NO: 75446 - protein, 13 aa, Homo Sapiens
GWVSSSSPTSSAS

SEQ ID NO: 75447 - protein, 13 aa, Homo Sapiens
WVSSSSPTSSASS

SEQ ID NO: 75448 - protein, 13 aa, Homo Sapiens
VSSSSPTSSASSF

SEQ ID NO: 75449 - protein, 13 aa, Homo Sapiens
SSSSPTSSASSFS

SEQ ID NO: 75450 - protein, 13 aa, Homo Sapiens
SSSPTSSASSFSS

SEQ ID NO: 75451 - protein, 13 aa, Homo Sapiens
SSPTSSASSFSSS

SEQ ID NO: 75452 - protein, 13 aa, Homo Sapiens
SPTSSASSFSSSA

SEQ ID NO: 75453 - protein, 13 aa, Homo Sapiens
PTSSASSFSSSAP

SEQ ID NO: 75454 - protein, 13 aa, Homo Sapiens
TSSASSFSSSAPF

SEQ ID NO: 75455 - protein, 13 aa, Homo Sapiens
SSASSFSSSAPFL

SEQ ID NO: 75456 - protein, 13 aa, Homo Sapiens
SASSFSSSAPFLA

SEQ ID NO: 75457 - protein, 13 aa, Homo Sapiens
ASSFSSSAPFLAS

SEQ ID NO: 75458 - protein, 13 aa, Homo Sapiens
SSFSSSAPFLASA

SEQ ID NO: 75459 - protein, 13 aa, Homo Sapiens
SFSSSAPFLASAV

SEQ ID NO: 75460 - protein, 13 aa, Homo Sapiens
FSSSAPFLASAVS

SEQ ID NO: 75461 - protein, 13 aa, Homo Sapiens
SSSAPFLASAVSA

SEQ ID NO: 75462 - protein, 13 aa, Homo Sapiens
SSAPFLASAVSAQ

SEQ ID NO: 75463 - protein, 13 aa, Homo Sapiens
SAPFLASAVSAQP

SEQ ID NO: 75464 - protein, 13 aa, Homo Sapiens
APFLASAVSAQPP

SEQ ID NO: 75465 - protein, 13 aa, Homo Sapiens
PFLASAVSAQPPL

SEQ ID NO: 75466 - protein, 13 aa, Homo Sapiens
FLASAVSAQPPLP

SEQ ID NO: 75467 - protein, 13 aa, Homo Sapiens
LASAVSAQPPLPD

SEQ ID NO: 75468 - protein, 13 aa, Homo Sapiens
ASAVSAQPPLPDQ

SEQ ID NO: 75469 - protein, 13 aa, Homo Sapiens
SAVSAQPPLPDQC

SEQ ID NO: 75470 - protein, 13 aa, Homo Sapiens
AVSAQPPLPDQCP

SEQ ID NO: 75471 - protein, 13 aa, Homo Sapiens
VSAQPPLPDQCPA

SEQ ID NO: 75472 - protein, 13 aa, Homo Sapiens
SAQPPLPDQCPAL

SEQ ID NO: 75473 - protein, 13 aa, Homo Sapiens
AQPPLPDQCPALC

SEQ ID NO: 75474 - protein, 13 aa, Homo Sapiens
QPPLPDQCPALCE

SEQ ID NO: 75475 - protein, 13 aa, Homo Sapiens
PPLPDQCPALCEC

SEQ ID NO: 75476 - protein, 13 aa, Homo Sapiens
PLPDQCPALCECS

SEQ ID NO: 75477 - protein, 13 aa, Homo Sapiens
LPDQCPALCECSE

SEQ ID NO: 75478 - protein, 13 aa, Homo Sapiens
PDQCPALCECSEA

SEQ ID NO: 75479 - protein, 13 aa, Homo Sapiens
DQCPALCECSEAA

SEQ ID NO: 75480 - protein, 13 aa, Homo Sapiens
QCPALCECSEAAR

SEQ ID NO: 75481 - protein, 13 aa, Homo Sapiens
CPALCECSEAART

SEQ ID NO: 75482 - protein, 13 aa, Homo Sapiens
PALCECSEAARTV

SEQ ID NO: 75483 - protein, 13 aa, Homo Sapiens
ALCECSEAARTVK

SEQ ID NO: 75484 - protein, 13 aa, Homo Sapiens
LCECSEAARTVKC

SEQ ID NO: 75485 - protein, 13 aa, Homo Sapiens
CECSEAARTVKCV

SEQ ID NO: 75486 - protein, 13 aa, Homo Sapiens
ECSEAARTVKCVN

SEQ ID NO: 75487 - protein, 13 aa, Homo Sapiens
CSEAARTVKCVNR

SEQ ID NO: 75488 - protein, 13 aa, Homo Sapiens
SEAARTVKCVNRN

SEQ ID NO: 75489 - protein, 13 aa, Homo Sapiens
EAARTVKCVNRNL

SEQ ID NO: 75490 - protein, 13 aa, Homo Sapiens
AARTVKCVNRNLT

SEQ ID NO: 75491 - protein, 13 aa, Homo Sapiens
ARTVKCVNRNLTE

SEQ ID NO: 75492 - protein, 13 aa, Homo Sapiens
RTVKCVNRNLTEV

SEQ ID NO: 75493 - protein, 13 aa, Homo Sapiens
TVKCVNRNLTEVP

SEQ ID NO: 75494 - protein, 13 aa, Homo Sapiens
VKCVNRNLTEVPT

SEQ ID NO: 75495 - protein, 13 aa, Homo Sapiens
KCVNRNLTEVPTD

SEQ ID NO: 75496 - protein, 13 aa, Homo Sapiens
CVNRNLTEVPTDL

SEQ ID NO: 75497 - protein, 13 aa, Homo Sapiens
VNRNLTEVPTDLP

SEQ ID NO: 75498 - protein, 13 aa, Homo Sapiens
NRNLTEVPTDLPA

SEQ ID NO: 75499 - protein, 13 aa, Homo Sapiens
RNLTEVPTDLPAY

SEQ ID NO: 75500 - protein, 13 aa, Homo Sapiens
NLTEVPTDLPAYV

SEQ ID NO: 75501 - protein, 13 aa, Homo Sapiens
LTEVPTDLPAYVR

SEQ ID NO: 75502 - protein, 13 aa, Homo Sapiens
TEVPTDLPAYVRN

SEQ ID NO: 75503 - protein, 13 aa, Homo Sapiens
EVPTDLPAYVRNL

SEQ ID NO: 75504 - protein, 13 aa, Homo Sapiens
VPTDLPAYVRNLF

SEQ ID NO: 75505 - protein, 13 aa, Homo Sapiens
PTDLPAYVRNLFL

SEQ ID NO: 75506 - protein, 13 aa, Homo Sapiens
TDLPAYVRNLFLT

SEQ ID NO: 75507 - protein, 13 aa, Homo Sapiens
DLPAYVRNLFLTG

SEQ ID NO: 75508 - protein, 13 aa, Homo Sapiens
LPAYVRNLFLTGN

SEQ ID NO: 75509 - protein, 13 aa, Homo Sapiens
PAYVRNLFLTGNQ

SEQ ID NO: 75510 - protein, 13 aa, Homo Sapiens
AYVRNLFLTGNQL

SEQ ID NO: 75511 - protein, 13 aa, Homo Sapiens
YVRNLFLTGNQLA

SEQ ID NO: 75512 - protein, 13 aa, Homo Sapiens
VRNLFLTGNQLAV

SEQ ID NO: 75513 - protein, 13 aa, Homo Sapiens
RNLFLTGNQLAVL

SEQ ID NO: 75514 - protein, 13 aa, Homo Sapiens
NLFLTGNQLAVLP

SEQ ID NO: 75515 - protein, 13 aa, Homo Sapiens
LFLTGNQLAVLPA

SEQ ID NO: 75516 - protein, 13 aa, Homo Sapiens
FLTGNQLAVLPAG

SEQ ID NO: 75517 - protein, 13 aa, Homo Sapiens
LTGNQLAVLPAGA

SEQ ID NO: 75518 - protein, 13 aa, Homo Sapiens
TGNQLAVLPAGAF

SEQ ID NO: 75519 - protein, 13 aa, Homo Sapiens
GNQLAVLPAGAFA

SEQ ID NO: 75520 - protein, 13 aa, Homo Sapiens
NQLAVLPAGAFAR

SEQ ID NO: 75521 - protein, 13 aa, Homo Sapiens
QLAVLPAGAFARR

SEQ ID NO: 75522 - protein, 13 aa, Homo Sapiens
LAVLPAGAFARRP

SEQ ID NO: 75523 - protein, 13 aa, Homo Sapiens
AVLPAGAFARRPP

SEQ ID NO: 75524 - protein, 13 aa, Homo Sapiens
VLPAGAFARRPPL

SEQ ID NO: 75525 - protein, 13 aa, Homo Sapiens
LPAGAFARRPPLA

SEQ ID NO: 75526 - protein, 13 aa, Homo Sapiens
PAGAFARRPPLAE

SEQ ID NO: 75527 - protein, 13 aa, Homo Sapiens
AGAFARRPPLAEL

SEQ ID NO: 75528 - protein, 13 aa, Homo Sapiens
GAFARRPPLAELA

SEQ ID NO: 75529 - protein, 13 aa, Homo Sapiens
AFARRPPLAELAA

SEQ ID NO: 75530 - protein, 13 aa, Homo Sapiens
FARRPPLAELAAL

SEQ ID NO: 75531 - protein, 13 aa, Homo Sapiens
ARRPPLAELAALN

SEQ ID NO: 75532 - protein, 13 aa, Homo Sapiens
RRPPLAELAALNL

SEQ ID NO: 75533 - protein, 13 aa, Homo Sapiens
RPPLAELAALNLS

SEQ ID NO: 75534 - protein, 13 aa, Homo Sapiens
PPLAELAALNLSG

SEQ ID NO: 75535 - protein, 13 aa, Homo Sapiens
PLAELAALNLSGS

SEQ ID NO: 75536 - protein, 13 aa, Homo Sapiens
LAELAALNLSGSR

SEQ ID NO: 75537 - protein, 13 aa, Homo Sapiens
AELAALNLSGSRL

SEQ ID NO: 75538 - protein, 13 aa, Homo Sapiens
ELAALNLSGSRLD

SEQ ID NO: 75539 - protein, 13 aa, Homo Sapiens
LAALNLSGSRLDE

SEQ ID NO: 75540 - protein, 13 aa, Homo Sapiens
AALNLSGSRLDEV

SEQ ID NO: 75541 - protein, 13 aa, Homo Sapiens
ALNLSGSRLDEVR

SEQ ID NO: 75542 - protein, 13 aa, Homo Sapiens
LNLSGSRLDEVRA

SEQ ID NO: 75543 - protein, 13 aa, Homo Sapiens
NLSGSRLDEVRAG

SEQ ID NO: 75544 - protein, 13 aa, Homo Sapiens
LSGSRLDEVRAGA

SEQ ID NO: 75545 - protein, 13 aa, Homo Sapiens
SGSRLDEVRAGAF

SEQ ID NO: 75546 - protein, 13 aa, Homo Sapiens
GSRLDEVRAGAFE

SEQ ID NO: 75547 - protein, 13 aa, Homo Sapiens
SRLDEVRAGAFEH

SEQ ID NO: 75548 - protein, 13 aa, Homo Sapiens
RLDEVRAGAFEHL

SEQ ID NO: 75549 - protein, 13 aa, Homo Sapiens
LDEVRAGAFEHLP

SEQ ID NO: 75550 - protein, 13 aa, Homo Sapiens
DEVRAGAFEHLPS

SEQ ID NO: 75551 - protein, 13 aa, Homo Sapiens
EVRAGAFEHLPSL

SEQ ID NO: 75552 - protein, 13 aa, Homo Sapiens
VRAGAFEHLPSLR

SEQ ID NO: 75553 - protein, 13 aa, Homo Sapiens
RAGAFEHLPSLRQ

SEQ ID NO: 75554 - protein, 13 aa, Homo Sapiens
AGAFEHLPSLRQL

SEQ ID NO: 75555 - protein, 13 aa, Homo Sapiens
GAFEHLPSLRQLD

SEQ ID NO: 75556 - protein, 13 aa, Homo Sapiens
AFEHLPSLRQLDL

SEQ ID NO: 75557 - protein, 13 aa, Homo Sapiens
FEHLPSLRQLDLS

SEQ ID NO: 75558 - protein, 13 aa, Homo Sapiens
EHLPSLRQLDLSH

SEQ ID NO: 75559 - protein, 13 aa, Homo Sapiens
HLPSLRQLDLSHN

SEQ ID NO: 75560 - protein, 13 aa, Homo Sapiens
LPSLRQLDLSHNP

SEQ ID NO: 75561 - protein, 13 aa, Homo Sapiens
PSLRQLDLSHNPL

SEQ ID NO: 75562 - protein, 13 aa, Homo Sapiens
SLRQLDLSHNPLA

SEQ ID NO: 75563 - protein, 13 aa, Homo Sapiens
LRQLDLSHNPLAD

SEQ ID NO: 75564 - protein, 13 aa, Homo Sapiens
RQLDLSHNPLADL

SEQ ID NO: 75565 - protein, 13 aa, Homo Sapiens
QLDLSHNPLADLS

SEQ ID NO: 75566 - protein, 13 aa, Homo Sapiens
LDLSHNPLADLSP

SEQ ID NO: 75567 - protein, 13 aa, Homo Sapiens
DLSHNPLADLSPF

SEQ ID NO: 75568 - protein, 13 aa, Homo Sapiens
LSHNPLADLSPFA

SEQ ID NO: 75569 - protein, 13 aa, Homo Sapiens
SHNPLADLSPFAF

SEQ ID NO: 75570 - protein, 13 aa, Homo Sapiens
HNPLADLSPFAFS

SEQ ID NO: 75571 - protein, 13 aa, Homo Sapiens
NPLADLSPFAFSG

SEQ ID NO: 75572 - protein, 13 aa, Homo Sapiens
PLADLSPFAFSGS

SEQ ID NO: 75573 - protein, 13 aa, Homo Sapiens
LADLSPFAFSGSN

SEQ ID NO: 75574 - protein, 13 aa, Homo Sapiens
ADLSPFAFSGSNA

SEQ ID NO: 75575 - protein, 13 aa, Homo Sapiens
DLSPFAFSGSNAS

SEQ ID NO: 75576 - protein, 13 aa, Homo Sapiens
LSPFAFSGSNASV

SEQ ID NO: 75577 - protein, 13 aa, Homo Sapiens
SPFAFSGSNASVS

SEQ ID NO: 75578 - protein, 13 aa, Homo Sapiens
PFAFSGSNASVSA

SEQ ID NO: 75579 - protein, 13 aa, Homo Sapiens
FAFSGSNASVSAP

SEQ ID NO: 75580 - protein, 13 aa, Homo Sapiens
AFSGSNASVSAPS

SEQ ID NO: 75581 - protein, 13 aa, Homo Sapiens
FSGSNASVSAPSP

SEQ ID NO: 75582 - protein, 13 aa, Homo Sapiens
SGSNASVSAPSPL

SEQ ID NO: 75583 - protein, 13 aa, Homo Sapiens
GSNASVSAPSPLV

SEQ ID NO: 75584 - protein, 13 aa, Homo Sapiens
SNASVSAPSPLVE

SEQ ID NO: 75585 - protein, 13 aa, Homo Sapiens
NASVSAPSPLVEL

SEQ ID NO: 75586 - protein, 13 aa, Homo Sapiens
ASVSAPSPLVELI

SEQ ID NO: 75587 - protein, 13 aa, Homo Sapiens
SVSAPSPLVELIL

SEQ ID NO: 75588 - protein, 13 aa, Homo Sapiens
VSAPSPLVELILN

SEQ ID NO: 75589 - protein, 13 aa, Homo Sapiens
SAPSPLVELILNH

SEQ ID NO: 75590 - protein, 13 aa, Homo Sapiens
APSPLVELILNHI

SEQ ID NO: 75591 - protein, 13 aa, Homo Sapiens
PSPLVELILNHIV

SEQ ID NO: 75592 - protein, 13 aa, Homo Sapiens
SPLVELILNHIVP

SEQ ID NO: 75593 - protein, 13 aa, Homo Sapiens
PLVELILNHIVPP

SEQ ID NO: 75594 - protein, 13 aa, Homo Sapiens
LVELILNHIVPPE

SEQ ID NO: 75595 - protein, 13 aa, Homo Sapiens
VELILNHIVPPED

SEQ ID NO: 75596 - protein, 13 aa, Homo Sapiens
ELILNHIVPPEDE

SEQ ID NO: 75597 - protein, 13 aa, Homo Sapiens
LILNHIVPPEDER

SEQ ID NO: 75598 - protein, 13 aa, Homo Sapiens
ILNHIVPPEDERQ

SEQ ID NO: 75599 - protein, 13 aa, Homo Sapiens
LNHIVPPEDERQN

SEQ ID NO: 75600 - protein, 13 aa, Homo Sapiens
NHIVPPEDERQNR

SEQ ID NO: 75601 - protein, 13 aa, Homo Sapiens
HIVPPEDERQNRS

SEQ ID NO: 75602 - protein, 13 aa, Homo Sapiens
IVPPEDERQNRSF

SEQ ID NO: 75603 - protein, 13 aa, Homo Sapiens
VPPEDERQNRSFE

SEQ ID NO: 75604 - protein, 13 aa, Homo Sapiens
PPEDERQNRSFEG

SEQ ID NO: 75605 - protein, 13 aa, Homo Sapiens
PEDERQNRSFEGM

SEQ ID NO: 75606 - protein, 13 aa, Homo Sapiens
EDERQNRSFEGMV

SEQ ID NO: 75607 - protein, 13 aa, Homo Sapiens
DERQNRSFEGMVV

SEQ ID NO: 75608 - protein, 13 aa, Homo Sapiens
ERQNRSFEGMVVA

SEQ ID NO: 75609 - protein, 13 aa, Homo Sapiens
RQNRSFEGMVVAA

SEQ ID NO: 75610 - protein, 13 aa, Homo Sapiens
QNRSFEGMVVAAL

SEQ ID NO: 75611 - protein, 13 aa, Homo Sapiens
NRSFEGMVVAALL

SEQ ID NO: 75612 - protein, 13 aa, Homo Sapiens
RSFEGMVVAALLA

SEQ ID NO: 75613 - protein, 13 aa, Homo Sapiens
SFEGMVVAALLAG

SEQ ID NO: 75614 - protein, 13 aa, Homo Sapiens
FEGMVVAALLAGR

SEQ ID NO: 75615 - protein, 13 aa, Homo Sapiens
EGMVVAALLAGRA

SEQ ID NO: 75616 - protein, 13 aa, Homo Sapiens
GMVVAALLAGRAL

SEQ ID NO: 75617 - protein, 13 aa, Homo Sapiens
MVVAALLAGRALQ

SEQ ID NO: 75618 - protein, 13 aa, Homo Sapiens
VVAALLAGRALQG

SEQ ID NO: 75619 - protein, 13 aa, Homo Sapiens
VAALLAGRALQGL

SEQ ID NO: 75620 - protein, 13 aa, Homo Sapiens
AALLAGRALQGLR

SEQ ID NO: 75621 - protein, 13 aa, Homo Sapiens
ALLAGRALQGLRR

SEQ ID NO: 75622 - protein, 13 aa, Homo Sapiens
LLAGRALQGLRRL

SEQ ID NO: 75623 - protein, 13 aa, Homo Sapiens
LAGRALQGLRRLE

SEQ ID NO: 75624 - protein, 13 aa, Homo Sapiens
AGRALQGLRRLEL

SEQ ID NO: 75625 - protein, 13 aa, Homo Sapiens
GRALQGLRRLELA

SEQ ID NO: 75626 - protein, 13 aa, Homo Sapiens
RALQGLRRLELAS

SEQ ID NO: 75627 - protein, 13 aa, Homo Sapiens
ALQGLRRLELASN

SEQ ID NO: 75628 - protein, 13 aa, Homo Sapiens
LQGLRRLELASNH

SEQ ID NO: 75629 - protein, 13 aa, Homo Sapiens
QGLRRLELASNHF

SEQ ID NO: 75630 - protein, 13 aa, Homo Sapiens
GLRRLELASNHFL

SEQ ID NO: 75631 - protein, 13 aa, Homo Sapiens
LRRLELASNHFLY

SEQ ID NO: 75632 - protein, 13 aa, Homo Sapiens
RRLELASNHFLYL

SEQ ID NO: 75633 - protein, 13 aa, Homo Sapiens
RLELASNHFLYLP

SEQ ID NO: 75634 - protein, 13 aa, Homo Sapiens
LELASNHFLYLPR

SEQ ID NO: 75635 - protein, 13 aa, Homo Sapiens
ELASNHFLYLPRD

SEQ ID NO: 75636 - protein, 13 aa, Homo Sapiens
LASNHFLYLPRDV

SEQ ID NO: 75637 - protein, 13 aa, Homo Sapiens
ASNHFLYLPRDVL

SEQ ID NO: 75638 - protein, 13 aa, Homo Sapiens
SNHFLYLPRDVLA

SEQ ID NO: 75639 - protein, 13 aa, Homo Sapiens
NHFLYLPRDVLAQ

SEQ ID NO: 75640 - protein, 13 aa, Homo Sapiens
HFLYLPRDVLAQL

SEQ ID NO: 75641 - protein, 13 aa, Homo Sapiens
FLYLPRDVLAQLP

SEQ ID NO: 75642 - protein, 13 aa, Homo Sapiens
LYLPRDVLAQLPS

SEQ ID NO: 75643 - protein, 13 aa, Homo Sapiens
YLPRDVLAQLPSL

SEQ ID NO: 75644 - protein, 13 aa, Homo Sapiens
LPRDVLAQLPSLR

SEQ ID NO: 75645 - protein, 13 aa, Homo Sapiens
PRDVLAQLPSLRH

SEQ ID NO: 75646 - protein, 13 aa, Homo Sapiens
RDVLAQLPSLRHL

SEQ ID NO: 75647 - protein, 13 aa, Homo Sapiens
DVLAQLPSLRHLD

SEQ ID NO: 75648 - protein, 13 aa, Homo Sapiens
VLAQLPSLRHLDL

SEQ ID NO: 75649 - protein, 13 aa, Homo Sapiens
LAQLPSLRHLDLS

SEQ ID NO: 75650 - protein, 13 aa, Homo Sapiens
AQLPSLRHLDLSN

SEQ ID NO: 75651 - protein, 13 aa, Homo Sapiens
QLPSLRHLDLSNN

SEQ ID NO: 75652 - protein, 13 aa, Homo Sapiens
LPSLRHLDLSNNS

SEQ ID NO: 75653 - protein, 13 aa, Homo Sapiens
PSLRHLDLSNNSL

SEQ ID NO: 75654 - protein, 13 aa, Homo Sapiens
SLRHLDLSNNSLV

SEQ ID NO: 75655 - protein, 13 aa, Homo Sapiens
LRHLDLSNNSLVS

SEQ ID NO: 75656 - protein, 13 aa, Homo Sapiens
RHLDLSNNSLVSL

SEQ ID NO: 75657 - protein, 13 aa, Homo Sapiens
HLDLSNNSLVSLT

SEQ ID NO: 75658 - protein, 13 aa, Homo Sapiens
LDLSNNSLVSLTY

SEQ ID NO: 75659 - protein, 13 aa, Homo Sapiens
DLSNNSLVSLTYV

SEQ ID NO: 75660 - protein, 13 aa, Homo Sapiens
LSNNSLVSLTYVS

SEQ ID NO: 75661 - protein, 13 aa, Homo Sapiens
SNNSLVSLTYVSF

SEQ ID NO: 75662 - protein, 13 aa, Homo Sapiens
NNSLVSLTYVSFR

SEQ ID NO: 75663 - protein, 13 aa, Homo Sapiens
NSLVSLTYVSFRN

SEQ ID NO: 75664 - protein, 13 aa, Homo Sapiens
SLVSLTYVSFRNL

SEQ ID NO: 75665 - protein, 13 aa, Homo Sapiens
LVSLTYVSFRNLT

SEQ ID NO: 75666 - protein, 13 aa, Homo Sapiens
VSLTYVSFRNLTH

SEQ ID NO: 75667 - protein, 13 aa, Homo Sapiens
SLTYVSFRNLTHL

SEQ ID NO: 75668 - protein, 13 aa, Homo Sapiens
LTYVSFRNLTHLE

SEQ ID NO: 75669 - protein, 13 aa, Homo Sapiens
TYVSFRNLTHLES

SEQ ID NO: 75670 - protein, 13 aa, Homo Sapiens
YVSFRNLTHLESL

SEQ ID NO: 75671 - protein, 13 aa, Homo Sapiens
VSFRNLTHLESLH

SEQ ID NO: 75672 - protein, 13 aa, Homo Sapiens
SFRNLTHLESLHL

SEQ ID NO: 75673 - protein, 13 aa, Homo Sapiens
FRNLTHLESLHLE

SEQ ID NO: 75674 - protein, 13 aa, Homo Sapiens
RNLTHLESLHLED

SEQ ID NO: 75675 - protein, 13 aa, Homo Sapiens
NLTHLESLHLEDN

SEQ ID NO: 75676 - protein, 13 aa, Homo Sapiens
LTHLESLHLEDNA

SEQ ID NO: 75677 - protein, 13 aa, Homo Sapiens
THLESLHLEDNAL

SEQ ID NO: 75678 - protein, 13 aa, Homo Sapiens
HLESLHLEDNALK

SEQ ID NO: 75679 - protein, 13 aa, Homo Sapiens
LESLHLEDNALKV

SEQ ID NO: 75680 - protein, 13 aa, Homo Sapiens
ESLHLEDNALKVL

SEQ ID NO: 75681 - protein, 13 aa, Homo Sapiens
SLHLEDNALKVLH

SEQ ID NO: 75682 - protein, 13 aa, Homo Sapiens
LHLEDNALKVLHN

SEQ ID NO: 75683 - protein, 13 aa, Homo Sapiens
HLEDNALKVLHNG

SEQ ID NO: 75684 - protein, 13 aa, Homo Sapiens
LEDNALKVLHNGT

SEQ ID NO: 75685 - protein, 13 aa, Homo Sapiens
EDNALKVLHNGTL

SEQ ID NO: 75686 - protein, 13 aa, Homo Sapiens
DNALKVLHNGTLA

SEQ ID NO: 75687 - protein, 13 aa, Homo Sapiens
NALKVLHNGTLAE

SEQ ID NO: 75688 - protein, 13 aa, Homo Sapiens
ALKVLHNGTLAEL

SEQ ID NO: 75689 - protein, 13 aa, Homo Sapiens
LKVLHNGTLAELQ

SEQ ID NO: 75690 - protein, 13 aa, Homo Sapiens
KVLHNGTLAELQG

SEQ ID NO: 75691 - protein, 13 aa, Homo Sapiens
VLHNGTLAELQGL

SEQ ID NO: 75692 - protein, 13 aa, Homo Sapiens
LHNGTLAELQGLP

SEQ ID NO: 75693 - protein, 13 aa, Homo Sapiens
HNGTLAELQGLPH

SEQ ID NO: 75694 - protein, 13 aa, Homo Sapiens
NGTLAELQGLPHI

SEQ ID NO: 75695 - protein, 13 aa, Homo Sapiens
GTLAELQGLPHIR

SEQ ID NO: 75696 - protein, 13 aa, Homo Sapiens
TLAELQGLPHIRV

SEQ ID NO: 75697 - protein, 13 aa, Homo Sapiens
LAELQGLPHIRVF

SEQ ID NO: 75698 - protein, 13 aa, Homo Sapiens
AELQGLPHIRVFL

SEQ ID NO: 75699 - protein, 13 aa, Homo Sapiens
ELQGLPHIRVFLD

SEQ ID NO: 75700 - protein, 13 aa, Homo Sapiens
LQGLPHIRVFLDN

SEQ ID NO: 75701 - protein, 13 aa, Homo Sapiens
QGLPHIRVFLDNN

SEQ ID NO: 75702 - protein, 13 aa, Homo Sapiens
GLPHIRVFLDNNP

SEQ ID NO: 75703 - protein, 13 aa, Homo Sapiens
LPHIRVFLDNNPW

SEQ ID NO: 75704 - protein, 13 aa, Homo Sapiens
PHIRVFLDNNPWV

SEQ ID NO: 75705 - protein, 13 aa, Homo Sapiens
HIRVFLDNNPWVC

SEQ ID NO: 75706 - protein, 13 aa, Homo Sapiens
IRVFLDNNPWVCD

SEQ ID NO: 75707 - protein, 13 aa, Homo Sapiens
RVFLDNNPWVCDC

SEQ ID NO: 75708 - protein, 13 aa, Homo Sapiens
VFLDNNPWVCDCH

SEQ ID NO: 75709 - protein, 13 aa, Homo Sapiens
FLDNNPWVCDCHM

SEQ ID NO: 75710 - protein, 13 aa, Homo Sapiens
LDNNPWVCDCHMA

SEQ ID NO: 75711 - protein, 13 aa, Homo Sapiens
DNNPWVCDCHMAD

SEQ ID NO: 75712 - protein, 13 aa, Homo Sapiens
NNPWVCDCHMADM

SEQ ID NO: 75713 - protein, 13 aa, Homo Sapiens
NPWVCDCHMADMV

SEQ ID NO: 75714 - protein, 13 aa, Homo Sapiens
PWVCDCHMADMVT

SEQ ID NO: 75715 - protein, 13 aa, Homo Sapiens
WVCDCHMADMVTW

SEQ ID NO: 75716 - protein, 13 aa, Homo Sapiens
VCDCHMADMVTWL

SEQ ID NO: 75717 - protein, 13 aa, Homo Sapiens
CDCHMADMVTWLK

SEQ ID NO: 75718 - protein, 13 aa, Homo Sapiens
DCHMADMVTWLKE

SEQ ID NO: 75719 - protein, 13 aa, Homo Sapiens
CHMADMVTWLKET

SEQ ID NO: 75720 - protein, 13 aa, Homo Sapiens
HMADMVTWLKETE

SEQ ID NO: 75721 - protein, 13 aa, Homo Sapiens
MADMVTWLKETEV

SEQ ID NO: 75722 - protein, 13 aa, Homo Sapiens
ADMVTWLKETEVV

SEQ ID NO: 75723 - protein, 13 aa, Homo Sapiens
DMVTWLKETEVVQ

SEQ ID NO: 75724 - protein, 13 aa, Homo Sapiens
MVTWLKETEVVQG

SEQ ID NO: 75725 - protein, 13 aa, Homo Sapiens
VTWLKETEVVQGK

SEQ ID NO: 75726 - protein, 13 aa, Homo Sapiens
TWLKETEVVQGKD

SEQ ID NO: 75727 - protein, 13 aa, Homo Sapiens
WLKETEVVQGKDR

SEQ ID NO: 75728 - protein, 13 aa, Homo Sapiens
LKETEVVQGKDRL

SEQ ID NO: 75729 - protein, 13 aa, Homo Sapiens
KETEVVQGKDRLT

SEQ ID NO: 75730 - protein, 13 aa, Homo Sapiens
ETEVVQGKDRLTC

SEQ ID NO: 75731 - protein, 13 aa, Homo Sapiens
TEVVQGKDRLTCA

SEQ ID NO: 75732 - protein, 13 aa, Homo Sapiens
EVVQGKDRLTCAY

SEQ ID NO: 75733 - protein, 13 aa, Homo Sapiens
VVQGKDRLTCAYP

SEQ ID NO: 75734 - protein, 13 aa, Homo Sapiens
VQGKDRLTCAYPE

SEQ ID NO: 75735 - protein, 13 aa, Homo Sapiens
QGKDRLTCAYPEK

SEQ ID NO: 75736 - protein, 13 aa, Homo Sapiens
GKDRLTCAYPEKM

SEQ ID NO: 75737 - protein, 13 aa, Homo Sapiens
KDRLTCAYPEKMR

SEQ ID NO: 75738 - protein, 13 aa, Homo Sapiens
DRLTCAYPEKMRN

SEQ ID NO: 75739 - protein, 13 aa, Homo Sapiens
RLTCAYPEKMRNR

SEQ ID NO: 75740 - protein, 13 aa, Homo Sapiens
LTCAYPEKMRNRV

SEQ ID NO: 75741 - protein, 13 aa, Homo Sapiens
TCAYPEKMRNRVL

SEQ ID NO: 75742 - protein, 13 aa, Homo Sapiens
CAYPEKMRNRVLL

SEQ ID NO: 75743 - protein, 13 aa, Homo Sapiens
AYPEKMRNRVLLE

SEQ ID NO: 75744 - protein, 13 aa, Homo Sapiens
YPEKMRNRVLLEL

SEQ ID NO: 75745 - protein, 13 aa, Homo Sapiens
PEKMRNRVLLELN

SEQ ID NO: 75746 - protein, 13 aa, Homo Sapiens
EKMRNRVLLELNS

SEQ ID NO: 75747 - protein, 13 aa, Homo Sapiens
KMRNRVLLELNSA

SEQ ID NO: 75748 - protein, 13 aa, Homo Sapiens
MRNRVLLELNSAD

SEQ ID NO: 75749 - protein, 13 aa, Homo Sapiens
RNRVLLELNSADL

SEQ ID NO: 75750 - protein, 13 aa, Homo Sapiens
NRVLLELNSADLD

SEQ ID NO: 75751 - protein, 13 aa, Homo Sapiens
RVLLELNSADLDC

SEQ ID NO: 75752 - protein, 13 aa, Homo Sapiens
VLLELNSADLDCD

SEQ ID NO: 75753 - protein, 13 aa, Homo Sapiens
LLELNSADLDCDP

SEQ ID NO: 75754 - protein, 13 aa, Homo Sapiens
LELNSADLDCDPI

SEQ ID NO: 75755 - protein, 13 aa, Homo Sapiens
ELNSADLDCDPIL

SEQ ID NO: 75756 - protein, 13 aa, Homo Sapiens
LNSADLDCDPILP

SEQ ID NO: 75757 - protein, 13 aa, Homo Sapiens
NSADLDCDPILPP

SEQ ID NO: 75758 - protein, 13 aa, Homo Sapiens
SADLDCDPILPPS

SEQ ID NO: 75759 - protein, 13 aa, Homo Sapiens
ADLDCDPILPPSL

SEQ ID NO: 75760 - protein, 13 aa, Homo Sapiens
DLDCDPILPPSLQ

SEQ ID NO: 75761 - protein, 13 aa, Homo Sapiens
LDCDPILPPSLQT

SEQ ID NO: 75762 - protein, 13 aa, Homo Sapiens
DCDPILPPSLQTS

SEQ ID NO: 75763 - protein, 13 aa, Homo Sapiens
CDPILPPSLQTSY

SEQ ID NO: 75764 - protein, 13 aa, Homo Sapiens
DPILPPSLQTSYV

SEQ ID NO: 75765 - protein, 13 aa, Homo Sapiens
PILPPSLQTSYVF

SEQ ID NO: 75766 - protein, 13 aa, Homo Sapiens
ILPPSLQTSYVFL

SEQ ID NO: 75767 - protein, 13 aa, Homo Sapiens
LPPSLQTSYVFLG

SEQ ID NO: 75768 - protein, 13 aa, Homo Sapiens
PPSLQTSYVFLGI

SEQ ID NO: 75769 - protein, 13 aa, Homo Sapiens
PSLQTSYVFLGIV

SEQ ID NO: 75770 - protein, 13 aa, Homo Sapiens
SLQTSYVFLGIVL

SEQ ID NO: 75771 - protein, 13 aa, Homo Sapiens
LQTSYVFLGIVLA

SEQ ID NO: 75772 - protein, 13 aa, Homo Sapiens
QTSYVFLGIVLAL

SEQ ID NO: 75773 - protein, 13 aa, Homo Sapiens
TSYVFLGIVLALI

SEQ ID NO: 75774 - protein, 13 aa, Homo Sapiens
SYVFLGIVLALIG

SEQ ID NO: 75775 - protein, 13 aa, Homo Sapiens
YVFLGIVLALIGA

SEQ ID NO: 75776 - protein, 13 aa, Homo Sapiens
VFLGIVLALIGAI

SEQ ID NO: 75777 - protein, 13 aa, Homo Sapiens
FLGIVLALIGAIF

SEQ ID NO: 75778 - protein, 13 aa, Homo Sapiens
LGIVLALIGAIFL

SEQ ID NO: 75779 - protein, 13 aa, Homo Sapiens
GIVLALIGAIFLL

SEQ ID NO: 75780 - protein, 13 aa, Homo Sapiens
IVLALIGAIFLLV

SEQ ID NO: 75781 - protein, 13 aa, Homo Sapiens
VLALIGAIFLLVL

SEQ ID NO: 75782 - protein, 13 aa, Homo Sapiens
LALIGAIFLLVLY

SEQ ID NO: 75783 - protein, 13 aa, Homo Sapiens
ALIGAIFLLVLYL

SEQ ID NO: 75784 - protein, 13 aa, Homo Sapiens
LIGAIFLLVLYLN

SEQ ID NO: 75785 - protein, 13 aa, Homo Sapiens
IGAIFLLVLYLNR

SEQ ID NO: 75786 - protein, 13 aa, Homo Sapiens
GAIFLLVLYLNRK

SEQ ID NO: 75787 - protein, 13 aa, Homo Sapiens
AIFLLVLYLNRKG

SEQ ID NO: 75788 - protein, 13 aa, Homo Sapiens
IFLLVLYLNRKGI

SEQ ID NO: 75789 - protein, 13 aa, Homo Sapiens
FLLVLYLNRKGIK

SEQ ID NO: 75790 - protein, 13 aa, Homo Sapiens
LLVLYLNRKGIKK

SEQ ID NO: 75791 - protein, 13 aa, Homo Sapiens
LVLYLNRKGIKKW

SEQ ID NO: 75792 - protein, 13 aa, Homo Sapiens
VLYLNRKGIKKWM

SEQ ID NO: 75793 - protein, 13 aa, Homo Sapiens
LYLNRKGIKKWMH

SEQ ID NO: 75794 - protein, 13 aa, Homo Sapiens
YLNRKGIKKWMHN

SEQ ID NO: 75795 - protein, 13 aa, Homo Sapiens
LNRKGIKKWMHNI

SEQ ID NO: 75796 - protein, 13 aa, Homo Sapiens
NRKGIKKWMHNIR

SEQ ID NO: 75797 - protein, 13 aa, Homo Sapiens
RKGIKKWMHNIRD

SEQ ID NO: 75798 - protein, 13 aa, Homo Sapiens
KGIKKWMHNIRDA

SEQ ID NO: 75799 - protein, 13 aa, Homo Sapiens
GIKKWMHNIRDAC

SEQ ID NO: 75800 - protein, 13 aa, Homo Sapiens
IKKWMHNIRDACR

SEQ ID NO: 75801 - protein, 13 aa, Homo Sapiens
KKWMHNIRDACRD

SEQ ID NO: 75802 - protein, 13 aa, Homo Sapiens
KWMHNIRDACRDH

SEQ ID NO: 75803 - protein, 13 aa, Homo Sapiens
WMHNIRDACRDHM

SEQ ID NO: 75804 - protein, 13 aa, Homo Sapiens
MHNIRDACRDHME

SEQ ID NO: 75805 - protein, 13 aa, Homo Sapiens
HNIRDACRDHMEG

SEQ ID NO: 75806 - protein, 13 aa, Homo Sapiens
NIRDACRDHMEGY

SEQ ID NO: 75807 - protein, 13 aa, Homo Sapiens
IRDACRDHMEGYH

SEQ ID NO: 75808 - protein, 13 aa, Homo Sapiens
RDACRDHMEGYHY

SEQ ID NO: 75809 - protein, 13 aa, Homo Sapiens
DACRDHMEGYHYR

SEQ ID NO: 75810 - protein, 13 aa, Homo Sapiens
ACRDHMEGYHYRY

SEQ ID NO: 75811 - protein, 13 aa, Homo Sapiens
CRDHMEGYHYRYE

SEQ ID NO: 75812 - protein, 13 aa, Homo Sapiens
RDHMEGYHYRYEI

SEQ ID NO: 75813 - protein, 13 aa, Homo Sapiens
DHMEGYHYRYEIN

SEQ ID NO: 75814 - protein, 13 aa, Homo Sapiens
HMEGYHYRYEINA

SEQ ID NO: 75815 - protein, 13 aa, Homo Sapiens
MEGYHYRYEINAD

SEQ ID NO: 75816 - protein, 13 aa, Homo Sapiens
EGYHYRYEINADP

SEQ ID NO: 75817 - protein, 13 aa, Homo Sapiens
GYHYRYEINADPR

SEQ ID NO: 75818 - protein, 13 aa, Homo Sapiens
YHYRYEINADPRL

SEQ ID NO: 75819 - protein, 13 aa, Homo Sapiens
HYRYEINADPRLT

SEQ ID NO: 75820 - protein, 13 aa, Homo Sapiens
YRYEINADPRLTN

SEQ ID NO: 75821 - protein, 13 aa, Homo Sapiens
RYEINADPRLTNL

SEQ ID NO: 75822 - protein, 13 aa, Homo Sapiens
YEINADPRLTNLS

SEQ ID NO: 75823 - protein, 13 aa, Homo Sapiens
EINADPRLTNLSS

SEQ ID NO: 75824 - protein, 13 aa, Homo Sapiens
INADPRLTNLSSN

SEQ ID NO: 75825 - protein, 13 aa, Homo Sapiens
NADPRLTNLSSNS

SEQ ID NO: 75826 - protein, 13 aa, Homo Sapiens
ADPRLTNLSSNSD

SEQ ID NO: 75827 - protein, 13 aa, Homo Sapiens
DPRLTNLSSNSDV

SEQ ID NO: 75828 - protein, 14 aa, Homo Sapiens
MPGGCSRGPAAGDG

SEQ ID NO: 75829 - protein, 14 aa, Homo Sapiens
PGGCSRGPAAGDGR

SEQ ID NO: 75830 - protein, 14 aa, Homo Sapiens
GGCSRGPAAGDGRL

SEQ ID NO: 75831 - protein, 14 aa, Homo Sapiens
GCSRGPAAGDGRLR

SEQ ID NO: 75832 - protein, 14 aa, Homo Sapiens
CSRGPAAGDGRLRL

SEQ ID NO: 75833 - protein, 14 aa, Homo Sapiens
SRGPAAGDGRLRLA

SEQ ID NO: 75834 - protein, 14 aa, Homo Sapiens
RGPAAGDGRLRLAR

SEQ ID NO: 75835 - protein, 14 aa, Homo Sapiens
GPAAGDGRLRLARL

SEQ ID NO: 75836 - protein, 14 aa, Homo Sapiens
PAAGDGRLRLARLA

SEQ ID NO: 75837 - protein, 14 aa, Homo Sapiens
AAGDGRLRLARLAL

SEQ ID NO: 75838 - protein, 14 aa, Homo Sapiens
AGDGRLRLARLALV

SEQ ID NO: 75839 - protein, 14 aa, Homo Sapiens
GDGRLRLARLALVL

SEQ ID NO: 75840 - protein, 14 aa, Homo Sapiens
DGRLRLARLALVLL

SEQ ID NO: 75841 - protein, 14 aa, Homo Sapiens
GRLRLARLALVLLG

SEQ ID NO: 75842 - protein, 14 aa, Homo Sapiens
RLRLARLALVLLGW

SEQ ID NO: 75843 - protein, 14 aa, Homo Sapiens
LRLARLALVLLGWV

SEQ ID NO: 75844 - protein, 14 aa, Homo Sapiens
RLARLALVLLGWVS

SEQ ID NO: 75845 - protein, 14 aa, Homo Sapiens
LARLALVLLGWVSS

SEQ ID NO: 75846 - protein, 14 aa, Homo Sapiens
ARLALVLLGWVSSS

SEQ ID NO: 75847 - protein, 14 aa, Homo Sapiens
RLALVLLGWVSSSS

SEQ ID NO: 75848 - protein, 14 aa, Homo Sapiens
LALVLLGWVSSSSP

SEQ ID NO: 75849 - protein, 14 aa, Homo Sapiens
ALVLLGWVSSSSPT

SEQ ID NO: 75850 - protein, 14 aa, Homo Sapiens
LVLLGWVSSSSPTS

SEQ ID NO: 75851 - protein, 14 aa, Homo Sapiens
VLLGWVSSSSPTSS

SEQ ID NO: 75852 - protein, 14 aa, Homo Sapiens
LLGWVSSSSPTSSA

SEQ ID NO: 75853 - protein, 14 aa, Homo Sapiens
LGWVSSSSPTSSAS

SEQ ID NO: 75854 - protein, 14 aa, Homo Sapiens
GWVSSSSPTSSASS

SEQ ID NO: 75855 - protein, 14 aa, Homo Sapiens
WVSSSSPTSSASSF

SEQ ID NO: 75856 - protein, 14 aa, Homo Sapiens
VSSSSPTSSASSFS

SEQ ID NO: 75857 - protein, 14 aa, Homo Sapiens
SSSSPTSSASSFSS

SEQ ID NO: 75858 - protein, 14 aa, Homo Sapiens
SSSPTSSASSFSSS

SEQ ID NO: 75859 - protein, 14 aa, Homo Sapiens
SSPTSSASSFSSSA

SEQ ID NO: 75860 - protein, 14 aa, Homo Sapiens
SPTSSASSFSSSAP

SEQ ID NO: 75861 - protein, 14 aa, Homo Sapiens
PTSSASSFSSSAPF

SEQ ID NO: 75862 - protein, 14 aa, Homo Sapiens
TSSASSFSSSAPFL

SEQ ID NO: 75863 - protein, 14 aa, Homo Sapiens
SSASSFSSSAPFLA

SEQ ID NO: 75864 - protein, 14 aa, Homo Sapiens
SASSFSSSAPFLAS

SEQ ID NO: 75865 - protein, 14 aa, Homo Sapiens
ASSFSSSAPFLASA

SEQ ID NO: 75866 - protein, 14 aa, Homo Sapiens
SSFSSSAPFLASAV

SEQ ID NO: 75867 - protein, 14 aa, Homo Sapiens
SFSSSAPFLASAVS

SEQ ID NO: 75868 - protein, 14 aa, Homo Sapiens
FSSSAPFLASAVSA

SEQ ID NO: 75869 - protein, 14 aa, Homo Sapiens
SSSAPFLASAVSAQ

SEQ ID NO: 75870 - protein, 14 aa, Homo Sapiens
SSAPFLASAVSAQP

SEQ ID NO: 75871 - protein, 14 aa, Homo Sapiens
SAPFLASAVSAQPP

SEQ ID NO: 75872 - protein, 14 aa, Homo Sapiens
APFLASAVSAQPPL

SEQ ID NO: 75873 - protein, 14 aa, Homo Sapiens
PFLASAVSAQPPLP

SEQ ID NO: 75874 - protein, 14 aa, Homo Sapiens
FLASAVSAQPPLPD

SEQ ID NO: 75875 - protein, 14 aa, Homo Sapiens
LASAVSAQPPLPDQ

SEQ ID NO: 75876 - protein, 14 aa, Homo Sapiens
ASAVSAQPPLPDQC

SEQ ID NO: 75877 - protein, 14 aa, Homo Sapiens
SAVSAQPPLPDQCP

SEQ ID NO: 75878 - protein, 14 aa, Homo Sapiens
AVSAQPPLPDQCPA

SEQ ID NO: 75879 - protein, 14 aa, Homo Sapiens
VSAQPPLPDQCPAL

SEQ ID NO: 75880 - protein, 14 aa, Homo Sapiens
SAQPPLPDQCPALC

SEQ ID NO: 75881 - protein, 14 aa, Homo Sapiens
AQPPLPDQCPALCE

SEQ ID NO: 75882 - protein, 14 aa, Homo Sapiens
QPPLPDQCPALCEC

SEQ ID NO: 75883 - protein, 14 aa, Homo Sapiens
PPLPDQCPALCECS

SEQ ID NO: 75884 - protein, 14 aa, Homo Sapiens
PLPDQCPALCECSE

SEQ ID NO: 75885 - protein, 14 aa, Homo Sapiens
LPDQCPALCECSEA

SEQ ID NO: 75886 - protein, 14 aa, Homo Sapiens
PDQCPALCECSEAA

SEQ ID NO: 75887 - protein, 14 aa, Homo Sapiens
DQCPALCECSEAAR

SEQ ID NO: 75888 - protein, 14 aa, Homo Sapiens
QCPALCECSEAART

SEQ ID NO: 75889 - protein, 14 aa, Homo Sapiens
CPALCECSEAARTV

SEQ ID NO: 75890 - protein, 14 aa, Homo Sapiens
PALCECSEAARTVK

SEQ ID NO: 75891 - protein, 14 aa, Homo Sapiens
ALCECSEAARTVKC

SEQ ID NO: 75892 - protein, 14 aa, Homo Sapiens
LCECSEAARTVKCV

SEQ ID NO: 75893 - protein, 14 aa, Homo Sapiens
CECSEAARTVKCVN

SEQ ID NO: 75894 - protein, 14 aa, Homo Sapiens
ECSEAARTVKCVNR

SEQ ID NO: 75895 - protein, 14 aa, Homo Sapiens
CSEAARTVKCVNRN

SEQ ID NO: 75896 - protein, 14 aa, Homo Sapiens
SEAARTVKCVNRNL

SEQ ID NO: 75897 - protein, 14 aa, Homo Sapiens
EAARTVKCVNRNLT

SEQ ID NO: 75898 - protein, 14 aa, Homo Sapiens
AARTVKCVNRNLTE

SEQ ID NO: 75899 - protein, 14 aa, Homo Sapiens
ARTVKCVNRNLTEV

SEQ ID NO: 75900 - protein, 14 aa, Homo Sapiens
RTVKCVNRNLTEVP

SEQ ID NO: 75901 - protein, 14 aa, Homo Sapiens
TVKCVNRNLTEVPT

SEQ ID NO: 75902 - protein, 14 aa, Homo Sapiens
VKCVNRNLTEVPTD

SEQ ID NO: 75903 - protein, 14 aa, Homo Sapiens
KCVNRNLTEVPTDL

SEQ ID NO: 75904 - protein, 14 aa, Homo Sapiens
CVNRNLTEVPTDLP

SEQ ID NO: 75905 - protein, 14 aa, Homo Sapiens
VNRNLTEVPTDLPA

SEQ ID NO: 75906 - protein, 14 aa, Homo Sapiens
NRNLTEVPTDLPAY

SEQ ID NO: 75907 - protein, 14 aa, Homo Sapiens
RNLTEVPTDLPAYV

SEQ ID NO: 75908 - protein, 14 aa, Homo Sapiens
NLTEVPTDLPAYVR

SEQ ID NO: 75909 - protein, 14 aa, Homo Sapiens
LTEVPTDLPAYVRN

SEQ ID NO: 75910 - protein, 14 aa, Homo Sapiens
TEVPTDLPAYVRNL

SEQ ID NO: 75911 - protein, 14 aa, Homo Sapiens
EVPTDLPAYVRNLF

SEQ ID NO: 75912 - protein, 14 aa, Homo Sapiens
VPTDLPAYVRNLFL

SEQ ID NO: 75913 - protein, 14 aa, Homo Sapiens
PTDLPAYVRNLFLT

SEQ ID NO: 75914 - protein, 14 aa, Homo Sapiens
TDLPAYVRNLFLTG

SEQ ID NO: 75915 - protein, 14 aa, Homo Sapiens
DLPAYVRNLFLTGN

SEQ ID NO: 75916 - protein, 14 aa, Homo Sapiens
LPAYVRNLFLTGNQ

SEQ ID NO: 75917 - protein, 14 aa, Homo Sapiens
PAYVRNLFLTGNQL

SEQ ID NO: 75918 - protein, 14 aa, Homo Sapiens
AYVRNLFLTGNQLA

SEQ ID NO: 75919 - protein, 14 aa, Homo Sapiens
YVRNLFLTGNQLAV

SEQ ID NO: 75920 - protein, 14 aa, Homo Sapiens
VRNLFLTGNQLAVL

SEQ ID NO: 75921 - protein, 14 aa, Homo Sapiens
RNLFLTGNQLAVLP

SEQ ID NO: 75922 - protein, 14 aa, Homo Sapiens
NLFLTGNQLAVLPA

SEQ ID NO: 75923 - protein, 14 aa, Homo Sapiens
LFLTGNQLAVLPAG

SEQ ID NO: 75924 - protein, 14 aa, Homo Sapiens
FLTGNQLAVLPAGA

SEQ ID NO: 75925 - protein, 14 aa, Homo Sapiens
LTGNQLAVLPAGAF

SEQ ID NO: 75926 - protein, 14 aa, Homo Sapiens
TGNQLAVLPAGAFA

SEQ ID NO: 75927 - protein, 14 aa, Homo Sapiens
GNQLAVLPAGAFAR

SEQ ID NO: 75928 - protein, 14 aa, Homo Sapiens
NQLAVLPAGAFARR

SEQ ID NO: 75929 - protein, 14 aa, Homo Sapiens
QLAVLPAGAFARRP

SEQ ID NO: 75930 - protein, 14 aa, Homo Sapiens
LAVLPAGAFARRPP

SEQ ID NO: 75931 - protein, 14 aa, Homo Sapiens
AVLPAGAFARRPPL

SEQ ID NO: 75932 - protein, 14 aa, Homo Sapiens
VLPAGAFARRPPLA

SEQ ID NO: 75933 - protein, 14 aa, Homo Sapiens
LPAGAFARRPPLAE

SEQ ID NO: 75934 - protein, 14 aa, Homo Sapiens
PAGAFARRPPLAEL

SEQ ID NO: 75935 - protein, 14 aa, Homo Sapiens
AGAFARRPPLAELA

SEQ ID NO: 75936 - protein, 14 aa, Homo Sapiens
GAFARRPPLAELAA

SEQ ID NO: 75937 - protein, 14 aa, Homo Sapiens
AFARRPPLAELAAL

SEQ ID NO: 75938 - protein, 14 aa, Homo Sapiens
FARRPPLAELAALN

SEQ ID NO: 75939 - protein, 14 aa, Homo Sapiens
ARRPPLAELAALNL

SEQ ID NO: 75940 - protein, 14 aa, Homo Sapiens
RRPPLAELAALNLS

SEQ ID NO: 75941 - protein, 14 aa, Homo Sapiens
RPPLAELAALNLSG

SEQ ID NO: 75942 - protein, 14 aa, Homo Sapiens
PPLAELAALNLSGS

SEQ ID NO: 75943 - protein, 14 aa, Homo Sapiens
PLAELAALNLSGSR

SEQ ID NO: 75944 - protein, 14 aa, Homo Sapiens
LAELAALNLSGSRL

SEQ ID NO: 75945 - protein, 14 aa, Homo Sapiens
AELAALNLSGSRLD

SEQ ID NO: 75946 - protein, 14 aa, Homo Sapiens
ELAALNLSGSRLDE

SEQ ID NO: 75947 - protein, 14 aa, Homo Sapiens
LAALNLSGSRLDEV

SEQ ID NO: 75948 - protein, 14 aa, Homo Sapiens
AALNLSGSRLDEVR

SEQ ID NO: 75949 - protein, 14 aa, Homo Sapiens
ALNLSGSRLDEVRA

SEQ ID NO: 75950 - protein, 14 aa, Homo Sapiens
LNLSGSRLDEVRAG

SEQ ID NO: 75951 - protein, 14 aa, Homo Sapiens
NLSGSRLDEVRAGA

SEQ ID NO: 75952 - protein, 14 aa, Homo Sapiens
LSGSRLDEVRAGAF

SEQ ID NO: 75953 - protein, 14 aa, Homo Sapiens
SGSRLDEVRAGAFE

SEQ ID NO: 75954 - protein, 14 aa, Homo Sapiens
GSRLDEVRAGAFEH

SEQ ID NO: 75955 - protein, 14 aa, Homo Sapiens
SRLDEVRAGAFEHL

SEQ ID NO: 75956 - protein, 14 aa, Homo Sapiens
RLDEVRAGAFEHLP

SEQ ID NO: 75957 - protein, 14 aa, Homo Sapiens
LDEVRAGAFEHLPS

SEQ ID NO: 75958 - protein, 14 aa, Homo Sapiens
DEVRAGAFEHLPSL

SEQ ID NO: 75959 - protein, 14 aa, Homo Sapiens
EVRAGAFEHLPSLR

SEQ ID NO: 75960 - protein, 14 aa, Homo Sapiens
VRAGAFEHLPSLRQ

SEQ ID NO: 75961 - protein, 14 aa, Homo Sapiens
RAGAFEHLPSLRQL

SEQ ID NO: 75962 - protein, 14 aa, Homo Sapiens
AGAFEHLPSLRQLD

SEQ ID NO: 75963 - protein, 14 aa, Homo Sapiens
GAFEHLPSLRQLDL

SEQ ID NO: 75964 - protein, 14 aa, Homo Sapiens
AFEHLPSLRQLDLS

SEQ ID NO: 75965 - protein, 14 aa, Homo Sapiens
FEHLPSLRQLDLSH

SEQ ID NO: 75966 - protein, 14 aa, Homo Sapiens
EHLPSLRQLDLSHN

SEQ ID NO: 75967 - protein, 14 aa, Homo Sapiens
HLPSLRQLDLSHNP

SEQ ID NO: 75968 - protein, 14 aa, Homo Sapiens
LPSLRQLDLSHNPL

SEQ ID NO: 75969 - protein, 14 aa, Homo Sapiens
PSLRQLDLSHNPLA

SEQ ID NO: 75970 - protein, 14 aa, Homo Sapiens
SLRQLDLSHNPLAD

SEQ ID NO: 75971 - protein, 14 aa, Homo Sapiens
LRQLDLSHNPLADL

SEQ ID NO: 75972 - protein, 14 aa, Homo Sapiens
RQLDLSHNPLADLS

SEQ ID NO: 75973 - protein, 14 aa, Homo Sapiens
QLDLSHNPLADLSP

SEQ ID NO: 75974 - protein, 14 aa, Homo Sapiens
LDLSHNPLADLSPF

SEQ ID NO: 75975 - protein, 14 aa, Homo Sapiens
DLSHNPLADLSPFA

SEQ ID NO: 75976 - protein, 14 aa, Homo Sapiens
LSHNPLADLSPFAF

SEQ ID NO: 75977 - protein, 14 aa, Homo Sapiens
SHNPLADLSPFAFS

SEQ ID NO: 75978 - protein, 14 aa, Homo Sapiens
HNPLADLSPFAFSG

SEQ ID NO: 75979 - protein, 14 aa, Homo Sapiens
NPLADLSPFAFSGS

SEQ ID NO: 75980 - protein, 14 aa, Homo Sapiens
PLADLSPFAFSGSN

SEQ ID NO: 75981 - protein, 14 aa, Homo Sapiens
LADLSPFAFSGSNA

SEQ ID NO: 75982 - protein, 14 aa, Homo Sapiens
ADLSPFAFSGSNAS

SEQ ID NO: 75983 - protein, 14 aa, Homo Sapiens
DLSPFAFSGSNASV

SEQ ID NO: 75984 - protein, 14 aa, Homo Sapiens
LSPFAFSGSNASVS

SEQ ID NO: 75985 - protein, 14 aa, Homo Sapiens
SPFAFSGSNASVSA

SEQ ID NO: 75986 - protein, 14 aa, Homo Sapiens
PFAFSGSNASVSAP

SEQ ID NO: 75987 - protein, 14 aa, Homo Sapiens
FAFSGSNASVSAPS

SEQ ID NO: 75988 - protein, 14 aa, Homo Sapiens
AFSGSNASVSAPSP

SEQ ID NO: 75989 - protein, 14 aa, Homo Sapiens
FSGSNASVSAPSPL

SEQ ID NO: 75990 - protein, 14 aa, Homo Sapiens
SGSNASVSAPSPLV

SEQ ID NO: 75991 - protein, 14 aa, Homo Sapiens
GSNASVSAPSPLVE

SEQ ID NO: 75992 - protein, 14 aa, Homo Sapiens
SNASVSAPSPLVEL

SEQ ID NO: 75993 - protein, 14 aa, Homo Sapiens
NASVSAPSPLVELI

SEQ ID NO: 75994 - protein, 14 aa, Homo Sapiens
ASVSAPSPLVELIL

SEQ ID NO: 75995 - protein, 14 aa, Homo Sapiens
SVSAPSPLVELILN

SEQ ID NO: 75996 - protein, 14 aa, Homo Sapiens
VSAPSPLVELILNH

SEQ ID NO: 75997 - protein, 14 aa, Homo Sapiens
SAPSPLVELILNHI

SEQ ID NO: 75998 - protein, 14 aa, Homo Sapiens
APSPLVELILNHIV

SEQ ID NO: 75999 - protein, 14 aa, Homo Sapiens
PSPLVELILNHIVP

SEQ ID NO: 76000 - protein, 14 aa, Homo Sapiens
SPLVELILNHIVPP

SEQ ID NO: 76001 - protein, 14 aa, Homo Sapiens
PLVELILNHIVPPE

SEQ ID NO: 76002 - protein, 14 aa, Homo Sapiens
LVELILNHIVPPED

SEQ ID NO: 76003 - protein, 14 aa, Homo Sapiens
VELILNHIVPPEDE

SEQ ID NO: 76004 - protein, 14 aa, Homo Sapiens
ELILNHIVPPEDER

SEQ ID NO: 76005 - protein, 14 aa, Homo Sapiens
LILNHIVPPEDERQ

SEQ ID NO: 76006 - protein, 14 aa, Homo Sapiens
ILNHIVPPEDERQN

SEQ ID NO: 76007 - protein, 14 aa, Homo Sapiens
LNHIVPPEDERQNR

SEQ ID NO: 76008 - protein, 14 aa, Homo Sapiens
NHIVPPEDERQNRS

SEQ ID NO: 76009 - protein, 14 aa, Homo Sapiens
HIVPPEDERQNRSF

SEQ ID NO: 76010 - protein, 14 aa, Homo Sapiens
IVPPEDERQNRSFE

SEQ ID NO: 76011 - protein, 14 aa, Homo Sapiens
VPPEDERQNRSFEG

SEQ ID NO: 76012 - protein, 14 aa, Homo Sapiens
PPEDERQNRSFEGM

SEQ ID NO: 76013 - protein, 14 aa, Homo Sapiens
PEDERQNRSFEGMV

SEQ ID NO: 76014 - protein, 14 aa, Homo Sapiens
EDERQNRSFEGMVV

SEQ ID NO: 76015 - protein, 14 aa, Homo Sapiens
DERQNRSFEGMVVA

SEQ ID NO: 76016 - protein, 14 aa, Homo Sapiens
ERQNRSFEGMVVAA

SEQ ID NO: 76017 - protein, 14 aa, Homo Sapiens
RQNRSFEGMVVAAL

SEQ ID NO: 76018 - protein, 14 aa, Homo Sapiens
QNRSFEGMVVAALL

SEQ ID NO: 76019 - protein, 14 aa, Homo Sapiens
NRSFEGMVVAALLA

SEQ ID NO: 76020 - protein, 14 aa, Homo Sapiens
RSFEGMVVAALLAG

SEQ ID NO: 76021 - protein, 14 aa, Homo Sapiens
SFEGMVVAALLAGR

SEQ ID NO: 76022 - protein, 14 aa, Homo Sapiens
FEGMVVAALLAGRA

SEQ ID NO: 76023 - protein, 14 aa, Homo Sapiens
EGMVVAALLAGRAL

SEQ ID NO: 76024 - protein, 14 aa, Homo Sapiens
GMVVAALLAGRALQ

SEQ ID NO: 76025 - protein, 14 aa, Homo Sapiens
MVVAALLAGRALQG

SEQ ID NO: 76026 - protein, 14 aa, Homo Sapiens
VVAALLAGRALQGL

SEQ ID NO: 76027 - protein, 14 aa, Homo Sapiens
VAALLAGRALQGLR

SEQ ID NO: 76028 - protein, 14 aa, Homo Sapiens
AALLAGRALQGLRR

SEQ ID NO: 76029 - protein, 14 aa, Homo Sapiens
ALLAGRALQGLRRL

SEQ ID NO: 76030 - protein, 14 aa, Homo Sapiens
LLAGRALQGLRRLE

SEQ ID NO: 76031 - protein, 14 aa, Homo Sapiens
LAGRALQGLRRLEL

SEQ ID NO: 76032 - protein, 14 aa, Homo Sapiens
AGRALQGLRRLELA

SEQ ID NO: 76033 - protein, 14 aa, Homo Sapiens
GRALQGLRRLELAS

SEQ ID NO: 76034 - protein, 14 aa, Homo Sapiens
RALQGLRRLELASN

SEQ ID NO: 76035 - protein, 14 aa, Homo Sapiens
ALQGLRRLELASNH

SEQ ID NO: 76036 - protein, 14 aa, Homo Sapiens
LQGLRRLELASNHF

SEQ ID NO: 76037 - protein, 14 aa, Homo Sapiens
QGLRRLELASNHFL

SEQ ID NO: 76038 - protein, 14 aa, Homo Sapiens
GLRRLELASNHFLY

SEQ ID NO: 76039 - protein, 14 aa, Homo Sapiens
LRRLELASNHFLYL

SEQ ID NO: 76040 - protein, 14 aa, Homo Sapiens
RRLELASNHFLYLP

SEQ ID NO: 76041 - protein, 14 aa, Homo Sapiens
RLELASNHFLYLPR

SEQ ID NO: 76042 - protein, 14 aa, Homo Sapiens
LELASNHFLYLPRD

SEQ ID NO: 76043 - protein, 14 aa, Homo Sapiens
ELASNHFLYLPRDV

SEQ ID NO: 76044 - protein, 14 aa, Homo Sapiens
LASNHFLYLPRDVL

SEQ ID NO: 76045 - protein, 14 aa, Homo Sapiens
ASNHFLYLPRDVLA

SEQ ID NO: 76046 - protein, 14 aa, Homo Sapiens
SNHFLYLPRDVLAQ

SEQ ID NO: 76047 - protein, 14 aa, Homo Sapiens
NHFLYLPRDVLAQL

SEQ ID NO: 76048 - protein, 14 aa, Homo Sapiens
HFLYLPRDVLAQLP

SEQ ID NO: 76049 - protein, 14 aa, Homo Sapiens
FLYLPRDVLAQLPS

SEQ ID NO: 76050 - protein, 14 aa, Homo Sapiens
LYLPRDVLAQLPSL

SEQ ID NO: 76051 - protein, 14 aa, Homo Sapiens
YLPRDVLAQLPSLR

SEQ ID NO: 76052 - protein, 14 aa, Homo Sapiens
LPRDVLAQLPSLRH

SEQ ID NO: 76053 - protein, 14 aa, Homo Sapiens
PRDVLAQLPSLRHL

SEQ ID NO: 76054 - protein, 14 aa, Homo Sapiens
RDVLAQLPSLRHLD

SEQ ID NO: 76055 - protein, 14 aa, Homo Sapiens
DVLAQLPSLRHLDL

SEQ ID NO: 76056 - protein, 14 aa, Homo Sapiens
VLAQLPSLRHLDLS

SEQ ID NO: 76057 - protein, 14 aa, Homo Sapiens
LAQLPSLRHLDLSN

SEQ ID NO: 76058 - protein, 14 aa, Homo Sapiens
AQLPSLRHLDLSNN

SEQ ID NO: 76059 - protein, 14 aa, Homo Sapiens
QLPSLRHLDLSNNS

SEQ ID NO: 76060 - protein, 14 aa, Homo Sapiens
LPSLRHLDLSNNSL

SEQ ID NO: 76061 - protein, 14 aa, Homo Sapiens
PSLRHLDLSNNSLV

SEQ ID NO: 76062 - protein, 14 aa, Homo Sapiens
SLRHLDLSNNSLVS

SEQ ID NO: 76063 - protein, 14 aa, Homo Sapiens
LRHLDLSNNSLVSL

SEQ ID NO: 76064 - protein, 14 aa, Homo Sapiens
RHLDLSNNSLVSLT

SEQ ID NO: 76065 - protein, 14 aa, Homo Sapiens
HLDLSNNSLVSLTY

SEQ ID NO: 76066 - protein, 14 aa, Homo Sapiens
LDLSNNSLVSLTYV

SEQ ID NO: 76067 - protein, 14 aa, Homo Sapiens
DLSNNSLVSLTYVS

SEQ ID NO: 76068 - protein, 14 aa, Homo Sapiens
LSNNSLVSLTYVSF

SEQ ID NO: 76069 - protein, 14 aa, Homo Sapiens
SNNSLVSLTYVSFR

SEQ ID NO: 76070 - protein, 14 aa, Homo Sapiens
NNSLVSLTYVSFRN

SEQ ID NO: 76071 - protein, 14 aa, Homo Sapiens
NSLVSLTYVSFRNL

SEQ ID NO: 76072 - protein, 14 aa, Homo Sapiens
SLVSLTYVSFRNLT

SEQ ID NO: 76073 - protein, 14 aa, Homo Sapiens
LVSLTYVSFRNLTH

SEQ ID NO: 76074 - protein, 14 aa, Homo Sapiens
VSLTYVSFRNLTHL

SEQ ID NO: 76075 - protein, 14 aa, Homo Sapiens
SLTYVSFRNLTHLE

SEQ ID NO: 76076 - protein, 14 aa, Homo Sapiens
LTYVSFRNLTHLES

SEQ ID NO: 76077 - protein, 14 aa, Homo Sapiens
TYVSFRNLTHLESL

SEQ ID NO: 76078 - protein, 14 aa, Homo Sapiens
YVSFRNLTHLESLH

SEQ ID NO: 76079 - protein, 14 aa, Homo Sapiens
VSFRNLTHLESLHL

SEQ ID NO: 76080 - protein, 14 aa, Homo Sapiens
SFRNLTHLESLHLE

SEQ ID NO: 76081 - protein, 14 aa, Homo Sapiens
FRNLTHLESLHLED

SEQ ID NO: 76082 - protein, 14 aa, Homo Sapiens
RNLTHLESLHLEDN

SEQ ID NO: 76083 - protein, 14 aa, Homo Sapiens
NLTHLESLHLEDNA

SEQ ID NO: 76084 - protein, 14 aa, Homo Sapiens
LTHLESLHLEDNAL

SEQ ID NO: 76085 - protein, 14 aa, Homo Sapiens
THLESLHLEDNALK

SEQ ID NO: 76086 - protein, 14 aa, Homo Sapiens
HLESLHLEDNALKV

SEQ ID NO: 76087 - protein, 14 aa, Homo Sapiens
LESLHLEDNALKVL

SEQ ID NO: 76088 - protein, 14 aa, Homo Sapiens
ESLHLEDNALKVLH

SEQ ID NO: 76089 - protein, 14 aa, Homo Sapiens
SLHLEDNALKVLHN

SEQ ID NO: 76090 - protein, 14 aa, Homo Sapiens
LHLEDNALKVLHNG

SEQ ID NO: 76091 - protein, 14 aa, Homo Sapiens
HLEDNALKVLHNGT

SEQ ID NO: 76092 - protein, 14 aa, Homo Sapiens
LEDNALKVLHNGTL

SEQ ID NO: 76093 - protein, 14 aa, Homo Sapiens
EDNALKVLHNGTLA

SEQ ID NO: 76094 - protein, 14 aa, Homo Sapiens
DNALKVLHNGTLAE

SEQ ID NO: 76095 - protein, 14 aa, Homo Sapiens
NALKVLHNGTLAEL

SEQ ID NO: 76096 - protein, 14 aa, Homo Sapiens
ALKVLHNGTLAELQ

SEQ ID NO: 76097 - protein, 14 aa, Homo Sapiens
LKVLHNGTLAELQG

SEQ ID NO: 76098 - protein, 14 aa, Homo Sapiens
KVLHNGTLAELQGL

SEQ ID NO: 76099 - protein, 14 aa, Homo Sapiens
VLHNGTLAELQGLP

SEQ ID NO: 76100 - protein, 14 aa, Homo Sapiens
LHNGTLAELQGLPH

SEQ ID NO: 76101 - protein, 14 aa, Homo Sapiens
HNGTLAELQGLPHI

SEQ ID NO: 76102 - protein, 14 aa, Homo Sapiens
NGTLAELQGLPHIR

SEQ ID NO: 76103 - protein, 14 aa, Homo Sapiens
GTLAELQGLPHIRV

SEQ ID NO: 76104 - protein, 14 aa, Homo Sapiens
TLAELQGLPHIRVF

SEQ ID NO: 76105 - protein, 14 aa, Homo Sapiens
LAELQGLPHIRVFL

SEQ ID NO: 76106 - protein, 14 aa, Homo Sapiens
AELQGLPHIRVFLD

SEQ ID NO: 76107 - protein, 14 aa, Homo Sapiens
ELQGLPHIRVFLDN

SEQ ID NO: 76108 - protein, 14 aa, Homo Sapiens
LQGLPHIRVFLDNN

SEQ ID NO: 76109 - protein, 14 aa, Homo Sapiens
QGLPHIRVFLDNNP

SEQ ID NO: 76110 - protein, 14 aa, Homo Sapiens
GLPHIRVFLDNNPW

SEQ ID NO: 76111 - protein, 14 aa, Homo Sapiens
LPHIRVFLDNNPWV

SEQ ID NO: 76112 - protein, 14 aa, Homo Sapiens
PHIRVFLDNNPWVC

SEQ ID NO: 76113 - protein, 14 aa, Homo Sapiens
HIRVFLDNNPWVCD

SEQ ID NO: 76114 - protein, 14 aa, Homo Sapiens
IRVFLDNNPWVCDC

SEQ ID NO: 76115 - protein, 14 aa, Homo Sapiens
RVFLDNNPWVCDCH

SEQ ID NO: 76116 - protein, 14 aa, Homo Sapiens
VFLDNNPWVCDCHM

SEQ ID NO: 76117 - protein, 14 aa, Homo Sapiens
FLDNNPWVCDCHMA

SEQ ID NO: 76118 - protein, 14 aa, Homo Sapiens
LDNNPWVCDCHMAD

SEQ ID NO: 76119 - protein, 14 aa, Homo Sapiens
DNNPWVCDCHMADM

SEQ ID NO: 76120 - protein, 14 aa, Homo Sapiens
NNPWVCDCHMADMV

SEQ ID NO: 76121 - protein, 14 aa, Homo Sapiens
NPWVCDCHMADMVT

SEQ ID NO: 76122 - protein, 14 aa, Homo Sapiens
PWVCDCHMADMVTW

SEQ ID NO: 76123 - protein, 14 aa, Homo Sapiens
WVCDCHMADMVTWL

SEQ ID NO: 76124 - protein, 14 aa, Homo Sapiens
VCDCHMADMVTWLK

SEQ ID NO: 76125 - protein, 14 aa, Homo Sapiens
CDCHMADMVTWLKE

SEQ ID NO: 76126 - protein, 14 aa, Homo Sapiens
DCHMADMVTWLKET

SEQ ID NO: 76127 - protein, 14 aa, Homo Sapiens
CHMADMVTWLKETE

SEQ ID NO: 76128 - protein, 14 aa, Homo Sapiens
HMADMVTWLKETEV

SEQ ID NO: 76129 - protein, 14 aa, Homo Sapiens
MADMVTWLKETEVV

SEQ ID NO: 76130 - protein, 14 aa, Homo Sapiens
ADMVTWLKETEVVQ

SEQ ID NO: 76131 - protein, 14 aa, Homo Sapiens
DMVTWLKETEVVQG

SEQ ID NO: 76132 - protein, 14 aa, Homo Sapiens
MVTWLKETEVVQGK

SEQ ID NO: 76133 - protein, 14 aa, Homo Sapiens
VTWLKETEVVQGKD

SEQ ID NO: 76134 - protein, 14 aa, Homo Sapiens
TWLKETEVVQGKDR

SEQ ID NO: 76135 - protein, 14 aa, Homo Sapiens
WLKETEVVQGKDRL

SEQ ID NO: 76136 - protein, 14 aa, Homo Sapiens
LKETEVVQGKDRLT

SEQ ID NO: 76137 - protein, 14 aa, Homo Sapiens
KETEVVQGKDRLTC

SEQ ID NO: 76138 - protein, 14 aa, Homo Sapiens
ETEVVQGKDRLTCA

SEQ ID NO: 76139 - protein, 14 aa, Homo Sapiens
TEVVQGKDRLTCAY

SEQ ID NO: 76140 - protein, 14 aa, Homo Sapiens
EVVQGKDRLTCAYP

SEQ ID NO: 76141 - protein, 14 aa, Homo Sapiens
VVQGKDRLTCAYPE

SEQ ID NO: 76142 - protein, 14 aa, Homo Sapiens
VQGKDRLTCAYPEK

SEQ ID NO: 76143 - protein, 14 aa, Homo Sapiens
QGKDRLTCAYPEKM

SEQ ID NO: 76144 - protein, 14 aa, Homo Sapiens
GKDRLTCAYPEKMR

SEQ ID NO: 76145 - protein, 14 aa, Homo Sapiens
KDRLTCAYPEKMRN

SEQ ID NO: 76146 - protein, 14 aa, Homo Sapiens
DRLTCAYPEKMRNR

SEQ ID NO: 76147 - protein, 14 aa, Homo Sapiens
RLTCAYPEKMRNRV

SEQ ID NO: 76148 - protein, 14 aa, Homo Sapiens
LTCAYPEKMRNRVL

SEQ ID NO: 76149 - protein, 14 aa, Homo Sapiens
TCAYPEKMRNRVLL

SEQ ID NO: 76150 - protein, 14 aa, Homo Sapiens
CAYPEKMRNRVLLE

SEQ ID NO: 76151 - protein, 14 aa, Homo Sapiens
AYPEKMRNRVLLEL

SEQ ID NO: 76152 - protein, 14 aa, Homo Sapiens
YPEKMRNRVLLELN

SEQ ID NO: 76153 - protein, 14 aa, Homo Sapiens
PEKMRNRVLLELNS

SEQ ID NO: 76154 - protein, 14 aa, Homo Sapiens
EKMRNRVLLELNSA

SEQ ID NO: 76155 - protein, 14 aa, Homo Sapiens
KMRNRVLLELNSAD

SEQ ID NO: 76156 - protein, 14 aa, Homo Sapiens
MRNRVLLELNSADL

SEQ ID NO: 76157 - protein, 14 aa, Homo Sapiens
RNRVLLELNSADLD

SEQ ID NO: 76158 - protein, 14 aa, Homo Sapiens
NRVLLELNSADLDC

SEQ ID NO: 76159 - protein, 14 aa, Homo Sapiens
RVLLELNSADLDCD

SEQ ID NO: 76160 - protein, 14 aa, Homo Sapiens
VLLELNSADLDCDP

SEQ ID NO: 76161 - protein, 14 aa, Homo Sapiens
LLELNSADLDCDPI

SEQ ID NO: 76162 - protein, 14 aa, Homo Sapiens
LELNSADLDCDPIL

SEQ ID NO: 76163 - protein, 14 aa, Homo Sapiens
ELNSADLDCDPILP

SEQ ID NO: 76164 - protein, 14 aa, Homo Sapiens
LNSADLDCDPILPP

SEQ ID NO: 76165 - protein, 14 aa, Homo Sapiens
NSADLDCDPILPPS

SEQ ID NO: 76166 - protein, 14 aa, Homo Sapiens
SADLDCDPILPPSL

SEQ ID NO: 76167 - protein, 14 aa, Homo Sapiens
ADLDCDPILPPSLQ

SEQ ID NO: 76168 - protein, 14 aa, Homo Sapiens
DLDCDPILPPSLQT

SEQ ID NO: 76169 - protein, 14 aa, Homo Sapiens
LDCDPILPPSLQTS

SEQ ID NO: 76170 - protein, 14 aa, Homo Sapiens
DCDPILPPSLQTSY

SEQ ID NO: 76171 - protein, 14 aa, Homo Sapiens
CDPILPPSLQTSYV

SEQ ID NO: 76172 - protein, 14 aa, Homo Sapiens
DPILPPSLQTSYVF

SEQ ID NO: 76173 - protein, 14 aa, Homo Sapiens
PILPPSLQTSYVFL

SEQ ID NO: 76174 - protein, 14 aa, Homo Sapiens
ILPPSLQTSYVFLG

SEQ ID NO: 76175 - protein, 14 aa, Homo Sapiens
LPPSLQTSYVFLGI

SEQ ID NO: 76176 - protein, 14 aa, Homo Sapiens
PPSLQTSYVFLGIV

SEQ ID NO: 76177 - protein, 14 aa, Homo Sapiens
PSLQTSYVFLGIVL

SEQ ID NO: 76178 - protein, 14 aa, Homo Sapiens
SLQTSYVFLGIVLA

SEQ ID NO: 76179 - protein, 14 aa, Homo Sapiens
LQTSYVFLGIVLAL

SEQ ID NO: 76180 - protein, 14 aa, Homo Sapiens
QTSYVFLGIVLALI

SEQ ID NO: 76181 - protein, 14 aa, Homo Sapiens
TSYVFLGIVLALIG

SEQ ID NO: 76182 - protein, 14 aa, Homo Sapiens
SYVFLGIVLALIGA

SEQ ID NO: 76183 - protein, 14 aa, Homo Sapiens
YVFLGIVLALIGAI

SEQ ID NO: 76184 - protein, 14 aa, Homo Sapiens
VFLGIVLALIGAIF

SEQ ID NO: 76185 - protein, 14 aa, Homo Sapiens
FLGIVLALIGAIFL

SEQ ID NO: 76186 - protein, 14 aa, Homo Sapiens
LGIVLALIGAIFLL

SEQ ID NO: 76187 - protein, 14 aa, Homo Sapiens
GIVLALIGAIFLLV

SEQ ID NO: 76188 - protein, 14 aa, Homo Sapiens
IVLALIGAIFLLVL

SEQ ID NO: 76189 - protein, 14 aa, Homo Sapiens
VLALIGAIFLLVLY

SEQ ID NO: 76190 - protein, 14 aa, Homo Sapiens
LALIGAIFLLVLYL

SEQ ID NO: 76191 - protein, 14 aa, Homo Sapiens
ALIGAIFLLVLYLN

SEQ ID NO: 76192 - protein, 14 aa, Homo Sapiens
LIGAIFLLVLYLNR

SEQ ID NO: 76193 - protein, 14 aa, Homo Sapiens
IGAIFLLVLYLNRK

SEQ ID NO: 76194 - protein, 14 aa, Homo Sapiens
GAIFLLVLYLNRKG

SEQ ID NO: 76195 - protein, 14 aa, Homo Sapiens
AIFLLVLYLNRKGI

SEQ ID NO: 76196 - protein, 14 aa, Homo Sapiens
IFLLVLYLNRKGIK

SEQ ID NO: 76197 - protein, 14 aa, Homo Sapiens
FLLVLYLNRKGIKK

SEQ ID NO: 76198 - protein, 14 aa, Homo Sapiens
LLVLYLNRKGIKKW

SEQ ID NO: 76199 - protein, 14 aa, Homo Sapiens
LVLYLNRKGIKKWM

SEQ ID NO: 76200 - protein, 14 aa, Homo Sapiens
VLYLNRKGIKKWMH

SEQ ID NO: 76201 - protein, 14 aa, Homo Sapiens
LYLNRKGIKKWMHN

SEQ ID NO: 76202 - protein, 14 aa, Homo Sapiens
YLNRKGIKKWMHNI

SEQ ID NO: 76203 - protein, 14 aa, Homo Sapiens
LNRKGIKKWMHNIR

SEQ ID NO: 76204 - protein, 14 aa, Homo Sapiens
NRKGIKKWMHNIRD

SEQ ID NO: 76205 - protein, 14 aa, Homo Sapiens
RKGIKKWMHNIRDA

SEQ ID NO: 76206 - protein, 14 aa, Homo Sapiens
KGIKKWMHNIRDAC

SEQ ID NO: 76207 - protein, 14 aa, Homo Sapiens
GIKKWMHNIRDACR

SEQ ID NO: 76208 - protein, 14 aa, Homo Sapiens
IKKWMHNIRDACRD

SEQ ID NO: 76209 - protein, 14 aa, Homo Sapiens
KKWMHNIRDACRDH

SEQ ID NO: 76210 - protein, 14 aa, Homo Sapiens
KWMHNIRDACRDHM

SEQ ID NO: 76211 - protein, 14 aa, Homo Sapiens
WMHNIRDACRDHME

SEQ ID NO: 76212 - protein, 14 aa, Homo Sapiens
MHNIRDACRDHMEG

SEQ ID NO: 76213 - protein, 14 aa, Homo Sapiens
HNIRDACRDHMEGY

SEQ ID NO: 76214 - protein, 14 aa, Homo Sapiens
NIRDACRDHMEGYH

SEQ ID NO: 76215 - protein, 14 aa, Homo Sapiens
IRDACRDHMEGYHY

SEQ ID NO: 76216 - protein, 14 aa, Homo Sapiens
RDACRDHMEGYHYR

SEQ ID NO: 76217 - protein, 14 aa, Homo Sapiens
DACRDHMEGYHYRY

SEQ ID NO: 76218 - protein, 14 aa, Homo Sapiens
ACRDHMEGYHYRYE

SEQ ID NO: 76219 - protein, 14 aa, Homo Sapiens
CRDHMEGYHYRYEI

SEQ ID NO: 76220 - protein, 14 aa, Homo Sapiens
RDHMEGYHYRYEIN

SEQ ID NO: 76221 - protein, 14 aa, Homo Sapiens
DHMEGYHYRYEINA

SEQ ID NO: 76222 - protein, 14 aa, Homo Sapiens
HMEGYHYRYEINAD

SEQ ID NO: 76223 - protein, 14 aa, Homo Sapiens
MEGYHYRYEINADP

SEQ ID NO: 76224 - protein, 14 aa, Homo Sapiens
EGYHYRYEINADPR

SEQ ID NO: 76225 - protein, 14 aa, Homo Sapiens
GYHYRYEINADPRL

SEQ ID NO: 76226 - protein, 14 aa, Homo Sapiens
YHYRYEINADPRLT

SEQ ID NO: 76227 - protein, 14 aa, Homo Sapiens
HYRYEINADPRLTN

SEQ ID NO: 76228 - protein, 14 aa, Homo Sapiens
YRYEINADPRLTNL

SEQ ID NO: 76229 - protein, 14 aa, Homo Sapiens
RYEINADPRLTNLS

SEQ ID NO: 76230 - protein, 14 aa, Homo Sapiens
YEINADPRLTNLSS

SEQ ID NO: 76231 - protein, 14 aa, Homo Sapiens
EINADPRLTNLSSN

SEQ ID NO: 76232 - protein, 14 aa, Homo Sapiens
INADPRLTNLSSNS

SEQ ID NO: 76233 - protein, 14 aa, Homo Sapiens
NADPRLTNLSSNSD

SEQ ID NO: 76234 - protein, 14 aa, Homo Sapiens
ADPRLTNLSSNSDV

SEQ ID NO: 76235 - protein, 15 aa, Homo Sapiens
MPGGCSRGPAAGDGR

SEQ ID NO: 76236 - protein, 15 aa, Homo Sapiens
PGGCSRGPAAGDGRL

SEQ ID NO: 76237 - protein, 15 aa, Homo Sapiens
GGCSRGPAAGDGRLR

SEQ ID NO: 76238 - protein, 15 aa, Homo Sapiens
GCSRGPAAGDGRLRL

SEQ ID NO: 76239 - protein, 15 aa, Homo Sapiens
CSRGPAAGDGRLRLA

SEQ ID NO: 76240 - protein, 15 aa, Homo Sapiens
SRGPAAGDGRLRLAR

SEQ ID NO: 76241 - protein, 15 aa, Homo Sapiens
RGPAAGDGRLRLARL

SEQ ID NO: 76242 - protein, 15 aa, Homo Sapiens
GPAAGDGRLRLARLA

SEQ ID NO: 76243 - protein, 15 aa, Homo Sapiens
PAAGDGRLRLARLAL

SEQ ID NO: 76244 - protein, 15 aa, Homo Sapiens
AAGDGRLRLARLALV

SEQ ID NO: 76245 - protein, 15 aa, Homo Sapiens
AGDGRLRLARLALVL

SEQ ID NO: 76246 - protein, 15 aa, Homo Sapiens
GDGRLRLARLALVLL

SEQ ID NO: 76247 - protein, 15 aa, Homo Sapiens
DGRLRLARLALVLLG

SEQ ID NO: 76248 - protein, 15 aa, Homo Sapiens
GRLRLARLALVLLGW

SEQ ID NO: 76249 - protein, 15 aa, Homo Sapiens
RLRLARLALVLLGWV

SEQ ID NO: 76250 - protein, 15 aa, Homo Sapiens
LRLARLALVLLGWVS

SEQ ID NO: 76251 - protein, 15 aa, Homo Sapiens
RLARLALVLLGWVSS

SEQ ID NO: 76252 - protein, 15 aa, Homo Sapiens
LARLALVLLGWVSSS

SEQ ID NO: 76253 - protein, 15 aa, Homo Sapiens
ARLALVLLGWVSSSS

SEQ ID NO: 76254 - protein, 15 aa, Homo Sapiens
RLALVLLGWVSSSSP

SEQ ID NO: 76255 - protein, 15 aa, Homo Sapiens
LALVLLGWVSSSSPT

SEQ ID NO: 76256 - protein, 15 aa, Homo Sapiens
ALVLLGWVSSSSPTS

SEQ ID NO: 76257 - protein, 15 aa, Homo Sapiens
LVLLGWVSSSSPTSS

SEQ ID NO: 76258 - protein, 15 aa, Homo Sapiens
VLLGWVSSSSPTSSA

SEQ ID NO: 76259 - protein, 15 aa, Homo Sapiens
LLGWVSSSSPTSSAS

SEQ ID NO: 76260 - protein, 15 aa, Homo Sapiens
LGWVSSSSPTSSASS

SEQ ID NO: 76261 - protein, 15 aa, Homo Sapiens
GWVSSSSPTSSASSF

SEQ ID NO: 76262 - protein, 15 aa, Homo Sapiens
WVSSSSPTSSASSFS

SEQ ID NO: 76263 - protein, 15 aa, Homo Sapiens
VSSSSPTSSASSFSS

SEQ ID NO: 76264 - protein, 15 aa, Homo Sapiens
SSSSPTSSASSFSSS

SEQ ID NO: 76265 - protein, 15 aa, Homo Sapiens
SSSPTSSASSFSSSA

SEQ ID NO: 76266 - protein, 15 aa, Homo Sapiens
SSPTSSASSFSSSAP

SEQ ID NO: 76267 - protein, 15 aa, Homo Sapiens
SPTSSASSFSSSAPF

SEQ ID NO: 76268 - protein, 15 aa, Homo Sapiens
PTSSASSFSSSAPFL

SEQ ID NO: 76269 - protein, 15 aa, Homo Sapiens
TSSASSFSSSAPFLA

SEQ ID NO: 76270 - protein, 15 aa, Homo Sapiens
SSASSFSSSAPFLAS

SEQ ID NO: 76271 - protein, 15 aa, Homo Sapiens
SASSFSSSAPFLASA

SEQ ID NO: 76272 - protein, 15 aa, Homo Sapiens
ASSFSSSAPFLASAV

SEQ ID NO: 76273 - protein, 15 aa, Homo Sapiens
SSFSSSAPFLASAVS

SEQ ID NO: 76274 - protein, 15 aa, Homo Sapiens
SFSSSAPFLASAVSA

SEQ ID NO: 76275 - protein, 15 aa, Homo Sapiens
FSSSAPFLASAVSAQ

SEQ ID NO: 76276 - protein, 15 aa, Homo Sapiens
SSSAPFLASAVSAQP

SEQ ID NO: 76277 - protein, 15 aa, Homo Sapiens
SSAPFLASAVSAQPP

SEQ ID NO: 76278 - protein, 15 aa, Homo Sapiens
SAPFLASAVSAQPPL

SEQ ID NO: 76279 - protein, 15 aa, Homo Sapiens
APFLASAVSAQPPLP

SEQ ID NO: 76280 - protein, 15 aa, Homo Sapiens
PFLASAVSAQPPLPD

SEQ ID NO: 76281 - protein, 15 aa, Homo Sapiens
FLASAVSAQPPLPDQ

SEQ ID NO: 76282 - protein, 15 aa, Homo Sapiens
LASAVSAQPPLPDQC

SEQ ID NO: 76283 - protein, 15 aa, Homo Sapiens
ASAVSAQPPLPDQCP

SEQ ID NO: 76284 - protein, 15 aa, Homo Sapiens
SAVSAQPPLPDQCPA

SEQ ID NO: 76285 - protein, 15 aa, Homo Sapiens
AVSAQPPLPDQCPAL

SEQ ID NO: 76286 - protein, 15 aa, Homo Sapiens
VSAQPPLPDQCPALC

SEQ ID NO: 76287 - protein, 15 aa, Homo Sapiens
SAQPPLPDQCPALCE

SEQ ID NO: 76288 - protein, 15 aa, Homo Sapiens
AQPPLPDQCPALCEC

SEQ ID NO: 76289 - protein, 15 aa, Homo Sapiens
QPPLPDQCPALCECS

SEQ ID NO: 76290 - protein, 15 aa, Homo Sapiens
PPLPDQCPALCECSE

SEQ ID NO: 76291 - protein, 15 aa, Homo Sapiens
PLPDQCPALCECSEA

SEQ ID NO: 76292 - protein, 15 aa, Homo Sapiens
LPDQCPALCECSEAA

SEQ ID NO: 76293 - protein, 15 aa, Homo Sapiens
PDQCPALCECSEAAR

SEQ ID NO: 76294 - protein, 15 aa, Homo Sapiens
DQCPALCECSEAART

SEQ ID NO: 76295 - protein, 15 aa, Homo Sapiens
QCPALCECSEAARTV

SEQ ID NO: 76296 - protein, 15 aa, Homo Sapiens
CPALCECSEAARTVK

SEQ ID NO: 76297 - protein, 15 aa, Homo Sapiens
PALCECSEAARTVKC

SEQ ID NO: 76298 - protein, 15 aa, Homo Sapiens
ALCECSEAARTVKCV

SEQ ID NO: 76299 - protein, 15 aa, Homo Sapiens
LCECSEAARTVKCVN

SEQ ID NO: 76300 - protein, 15 aa, Homo Sapiens
CECSEAARTVKCVNR

SEQ ID NO: 76301 - protein, 15 aa, Homo Sapiens
ECSEAARTVKCVNRN

SEQ ID NO: 76302 - protein, 15 aa, Homo Sapiens
CSEAARTVKCVNRNL

SEQ ID NO: 76303 - protein, 15 aa, Homo Sapiens
SEAARTVKCVNRNLT

SEQ ID NO: 76304 - protein, 15 aa, Homo Sapiens
EAARTVKCVNRNLTE

SEQ ID NO: 76305 - protein, 15 aa, Homo Sapiens
AARTVKCVNRNLTEV

SEQ ID NO: 76306 - protein, 15 aa, Homo Sapiens
ARTVKCVNRNLTEVP

SEQ ID NO: 76307 - protein, 15 aa, Homo Sapiens
RTVKCVNRNLTEVPT

SEQ ID NO: 76308 - protein, 15 aa, Homo Sapiens
TVKCVNRNLTEVPTD

SEQ ID NO: 76309 - protein, 15 aa, Homo Sapiens
VKCVNRNLTEVPTDL

SEQ ID NO: 76310 - protein, 15 aa, Homo Sapiens
KCVNRNLTEVPTDLP

SEQ ID NO: 76311 - protein, 15 aa, Homo Sapiens
CVNRNLTEVPTDLPA

SEQ ID NO: 76312 - protein, 15 aa, Homo Sapiens
VNRNLTEVPTDLPAY

SEQ ID NO: 76313 - protein, 15 aa, Homo Sapiens
NRNLTEVPTDLPAYV

SEQ ID NO: 76314 - protein, 15 aa, Homo Sapiens
RNLTEVPTDLPAYVR

SEQ ID NO: 76315 - protein, 15 aa, Homo Sapiens
NLTEVPTDLPAYVRN

SEQ ID NO: 76316 - protein, 15 aa, Homo Sapiens
LTEVPTDLPAYVRNL

SEQ ID NO: 76317 - protein, 15 aa, Homo Sapiens
TEVPTDLPAYVRNLF

SEQ ID NO: 76318 - protein, 15 aa, Homo Sapiens
EVPTDLPAYVRNLFL

SEQ ID NO: 76319 - protein, 15 aa, Homo Sapiens
VPTDLPAYVRNLFLT

SEQ ID NO: 76320 - protein, 15 aa, Homo Sapiens
PTDLPAYVRNLFLTG

SEQ ID NO: 76321 - protein, 15 aa, Homo Sapiens
TDLPAYVRNLFLTGN

SEQ ID NO: 76322 - protein, 15 aa, Homo Sapiens
DLPAYVRNLFLTGNQ

SEQ ID NO: 76323 - protein, 15 aa, Homo Sapiens
LPAYVRNLFLTGNQL

SEQ ID NO: 76324 - protein, 15 aa, Homo Sapiens
PAYVRNLFLTGNQLA

SEQ ID NO: 76325 - protein, 15 aa, Homo Sapiens
AYVRNLFLTGNQLAV

SEQ ID NO: 76326 - protein, 15 aa, Homo Sapiens
YVRNLFLTGNQLAVL

SEQ ID NO: 76327 - protein, 15 aa, Homo Sapiens
VRNLFLTGNQLAVLP

SEQ ID NO: 76328 - protein, 15 aa, Homo Sapiens
RNLFLTGNQLAVLPA

SEQ ID NO: 76329 - protein, 15 aa, Homo Sapiens
NLFLTGNQLAVLPAG

SEQ ID NO: 76330 - protein, 15 aa, Homo Sapiens
LFLTGNQLAVLPAGA

SEQ ID NO: 76331 - protein, 15 aa, Homo Sapiens
FLTGNQLAVLPAGAF

SEQ ID NO: 76332 - protein, 15 aa, Homo Sapiens
LTGNQLAVLPAGAFA

SEQ ID NO: 76333 - protein, 15 aa, Homo Sapiens
TGNQLAVLPAGAFAR

SEQ ID NO: 76334 - protein, 15 aa, Homo Sapiens
GNQLAVLPAGAFARR

SEQ ID NO: 76335 - protein, 15 aa, Homo Sapiens
NQLAVLPAGAFARRP

SEQ ID NO: 76336 - protein, 15 aa, Homo Sapiens
QLAVLPAGAFARRPP

SEQ ID NO: 76337 - protein, 15 aa, Homo Sapiens
LAVLPAGAFARRPPL

SEQ ID NO: 76338 - protein, 15 aa, Homo Sapiens
AVLPAGAFARRPPLA

SEQ ID NO: 76339 - protein, 15 aa, Homo Sapiens
VLPAGAFARRPPLAE

SEQ ID NO: 76340 - protein, 15 aa, Homo Sapiens
LPAGAFARRPPLAEL

SEQ ID NO: 76341 - protein, 15 aa, Homo Sapiens
PAGAFARRPPLAELA

SEQ ID NO: 76342 - protein, 15 aa, Homo Sapiens
AGAFARRPPLAELAA

SEQ ID NO: 76343 - protein, 15 aa, Homo Sapiens
GAFARRPPLAELAAL

SEQ ID NO: 76344 - protein, 15 aa, Homo Sapiens
AFARRPPLAELAALN

SEQ ID NO: 76345 - protein, 15 aa, Homo Sapiens
FARRPPLAELAALNL

SEQ ID NO: 76346 - protein, 15 aa, Homo Sapiens
ARRPPLAELAALNLS

SEQ ID NO: 76347 - protein, 15 aa, Homo Sapiens
RRPPLAELAALNLSG

SEQ ID NO: 76348 - protein, 15 aa, Homo Sapiens
RPPLAELAALNLSGS

SEQ ID NO: 76349 - protein, 15 aa, Homo Sapiens
PPLAELAALNLSGSR

SEQ ID NO: 76350 - protein, 15 aa, Homo Sapiens
PLAELAALNLSGSRL

SEQ ID NO: 76351 - protein, 15 aa, Homo Sapiens
LAELAALNLSGSRLD

SEQ ID NO: 76352 - protein, 15 aa, Homo Sapiens
AELAALNLSGSRLDE

SEQ ID NO: 76353 - protein, 15 aa, Homo Sapiens
ELAALNLSGSRLDEV

SEQ ID NO: 76354 - protein, 15 aa, Homo Sapiens
LAALNLSGSRLDEVR

SEQ ID NO: 76355 - protein, 15 aa, Homo Sapiens
AALNLSGSRLDEVRA

SEQ ID NO: 76356 - protein, 15 aa, Homo Sapiens
ALNLSGSRLDEVRAG

SEQ ID NO: 76357 - protein, 15 aa, Homo Sapiens
LNLSGSRLDEVRAGA

SEQ ID NO: 76358 - protein, 15 aa, Homo Sapiens
NLSGSRLDEVRAGAF

SEQ ID NO: 76359 - protein, 15 aa, Homo Sapiens
LSGSRLDEVRAGAFE

SEQ ID NO: 76360 - protein, 15 aa, Homo Sapiens
SGSRLDEVRAGAFEH

SEQ ID NO: 76361 - protein, 15 aa, Homo Sapiens
GSRLDEVRAGAFEHL

SEQ ID NO: 76362 - protein, 15 aa, Homo Sapiens
SRLDEVRAGAFEHLP

SEQ ID NO: 76363 - protein, 15 aa, Homo Sapiens
RLDEVRAGAFEHLPS

SEQ ID NO: 76364 - protein, 15 aa, Homo Sapiens
LDEVRAGAFEHLPSL

SEQ ID NO: 76365 - protein, 15 aa, Homo Sapiens
DEVRAGAFEHLPSLR

SEQ ID NO: 76366 - protein, 15 aa, Homo Sapiens
EVRAGAFEHLPSLRQ

SEQ ID NO: 76367 - protein, 15 aa, Homo Sapiens
VRAGAFEHLPSLRQL

SEQ ID NO: 76368 - protein, 15 aa, Homo Sapiens
RAGAFEHLPSLRQLD

SEQ ID NO: 76369 - protein, 15 aa, Homo Sapiens
AGAFEHLPSLRQLDL

SEQ ID NO: 76370 - protein, 15 aa, Homo Sapiens
GAFEHLPSLRQLDLS

SEQ ID NO: 76371 - protein, 15 aa, Homo Sapiens
AFEHLPSLRQLDLSH

SEQ ID NO: 76372 - protein, 15 aa, Homo Sapiens
FEHLPSLRQLDLSHN

SEQ ID NO: 76373 - protein, 15 aa, Homo Sapiens
EHLPSLRQLDLSHNP

SEQ ID NO: 76374 - protein, 15 aa, Homo Sapiens
HLPSLRQLDLSHNPL

SEQ ID NO: 76375 - protein, 15 aa, Homo Sapiens
LPSLRQLDLSHNPLA

SEQ ID NO: 76376 - protein, 15 aa, Homo Sapiens
PSLRQLDLSHNPLAD

SEQ ID NO: 76377 - protein, 15 aa, Homo Sapiens
SLRQLDLSHNPLADL

SEQ ID NO: 76378 - protein, 15 aa, Homo Sapiens
LRQLDLSHNPLADLS

SEQ ID NO: 76379 - protein, 15 aa, Homo Sapiens
RQLDLSHNPLADLSP

SEQ ID NO: 76380 - protein, 15 aa, Homo Sapiens
QLDLSHNPLADLSPF

SEQ ID NO: 76381 - protein, 15 aa, Homo Sapiens
LDLSHNPLADLSPFA

SEQ ID NO: 76382 - protein, 15 aa, Homo Sapiens
DLSHNPLADLSPFAF

SEQ ID NO: 76383 - protein, 15 aa, Homo Sapiens
LSHNPLADLSPFAFS

SEQ ID NO: 76384 - protein, 15 aa, Homo Sapiens
SHNPLADLSPFAFSG

SEQ ID NO: 76385 - protein, 15 aa, Homo Sapiens
HNPLADLSPFAFSGS

SEQ ID NO: 76386 - protein, 15 aa, Homo Sapiens
NPLADLSPFAFSGSN

SEQ ID NO: 76387 - protein, 15 aa, Homo Sapiens
PLADLSPFAFSGSNA

SEQ ID NO: 76388 - protein, 15 aa, Homo Sapiens
LADLSPFAFSGSNAS

SEQ ID NO: 76389 - protein, 15 aa, Homo Sapiens
ADLSPFAFSGSNASV

SEQ ID NO: 76390 - protein, 15 aa, Homo Sapiens
DLSPFAFSGSNASVS

SEQ ID NO: 76391 - protein, 15 aa, Homo Sapiens
LSPFAFSGSNASVSA

SEQ ID NO: 76392 - protein, 15 aa, Homo Sapiens
SPFAFSGSNASVSAP

SEQ ID NO: 76393 - protein, 15 aa, Homo Sapiens
PFAFSGSNASVSAPS

SEQ ID NO: 76394 - protein, 15 aa, Homo Sapiens
FAFSGSNASVSAPSP

SEQ ID NO: 76395 - protein, 15 aa, Homo Sapiens
AFSGSNASVSAPSPL

SEQ ID NO: 76396 - protein, 15 aa, Homo Sapiens
FSGSNASVSAPSPLV

SEQ ID NO: 76397 - protein, 15 aa, Homo Sapiens
SGSNASVSAPSPLVE

SEQ ID NO: 76398 - protein, 15 aa, Homo Sapiens
GSNASVSAPSPLVEL

SEQ ID NO: 76399 - protein, 15 aa, Homo Sapiens
SNASVSAPSPLVELI

SEQ ID NO: 76400 - protein, 15 aa, Homo Sapiens
NASVSAPSPLVELIL

SEQ ID NO: 76401 - protein, 15 aa, Homo Sapiens
ASVSAPSPLVELILN

SEQ ID NO: 76402 - protein, 15 aa, Homo Sapiens
SVSAPSPLVELILNH

SEQ ID NO: 76403 - protein, 15 aa, Homo Sapiens
VSAPSPLVELILNHI

SEQ ID NO: 76404 - protein, 15 aa, Homo Sapiens
SAPSPLVELILNHIV

SEQ ID NO: 76405 - protein, 15 aa, Homo Sapiens
APSPLVELILNHIVP

SEQ ID NO: 76406 - protein, 15 aa, Homo Sapiens
PSPLVELILNHIVPP

SEQ ID NO: 76407 - protein, 15 aa, Homo Sapiens
SPLVELILNHIVPPE

SEQ ID NO: 76408 - protein, 15 aa, Homo Sapiens
PLVELILNHIVPPED

SEQ ID NO: 76409 - protein, 15 aa, Homo Sapiens
LVELILNHIVPPEDE

SEQ ID NO: 76410 - protein, 15 aa, Homo Sapiens
VELILNHIVPPEDER

SEQ ID NO: 76411 - protein, 15 aa, Homo Sapiens
ELILNHIVPPEDERQ

SEQ ID NO: 76412 - protein, 15 aa, Homo Sapiens
LILNHIVPPEDERQN

SEQ ID NO: 76413 - protein, 15 aa, Homo Sapiens
ILNHIVPPEDERQNR

SEQ ID NO: 76414 - protein, 15 aa, Homo Sapiens
LNHIVPPEDERQNRS

SEQ ID NO: 76415 - protein, 15 aa, Homo Sapiens
NHIVPPEDERQNRSF

SEQ ID NO: 76416 - protein, 15 aa, Homo Sapiens
HIVPPEDERQNRSFE

SEQ ID NO: 76417 - protein, 15 aa, Homo Sapiens
IVPPEDERQNRSFEG

SEQ ID NO: 76418 - protein, 15 aa, Homo Sapiens
VPPEDERQNRSFEGM

SEQ ID NO: 76419 - protein, 15 aa, Homo Sapiens
PPEDERQNRSFEGMV

SEQ ID NO: 76420 - protein, 15 aa, Homo Sapiens
PEDERQNRSFEGMVV

SEQ ID NO: 76421 - protein, 15 aa, Homo Sapiens
EDERQNRSFEGMVVA

SEQ ID NO: 76422 - protein, 15 aa, Homo Sapiens
DERQNRSFEGMVVAA

SEQ ID NO: 76423 - protein, 15 aa, Homo Sapiens
ERQNRSFEGMVVAAL

SEQ ID NO: 76424 - protein, 15 aa, Homo Sapiens
RQNRSFEGMVVAALL

SEQ ID NO: 76425 - protein, 15 aa, Homo Sapiens
QNRSFEGMVVAALLA

SEQ ID NO: 76426 - protein, 15 aa, Homo Sapiens
NRSFEGMVVAALLAG

SEQ ID NO: 76427 - protein, 15 aa, Homo Sapiens
RSFEGMVVAALLAGR

SEQ ID NO: 76428 - protein, 15 aa, Homo Sapiens
SFEGMVVAALLAGRA

SEQ ID NO: 76429 - protein, 15 aa, Homo Sapiens
FEGMVVAALLAGRAL

SEQ ID NO: 76430 - protein, 15 aa, Homo Sapiens
EGMVVAALLAGRALQ

SEQ ID NO: 76431 - protein, 15 aa, Homo Sapiens
GMVVAALLAGRALQG

SEQ ID NO: 76432 - protein, 15 aa, Homo Sapiens
MVVAALLAGRALQGL

SEQ ID NO: 76433 - protein, 15 aa, Homo Sapiens
VVAALLAGRALQGLR

SEQ ID NO: 76434 - protein, 15 aa, Homo Sapiens
VAALLAGRALQGLRR

SEQ ID NO: 76435 - protein, 15 aa, Homo Sapiens
AALLAGRALQGLRRL

SEQ ID NO: 76436 - protein, 15 aa, Homo Sapiens
ALLAGRALQGLRRLE

SEQ ID NO: 76437 - protein, 15 aa, Homo Sapiens
LLAGRALQGLRRLEL

SEQ ID NO: 76438 - protein, 15 aa, Homo Sapiens
LAGRALQGLRRLELA

SEQ ID NO: 76439 - protein, 15 aa, Homo Sapiens
AGRALQGLRRLELAS

SEQ ID NO: 76440 - protein, 15 aa, Homo Sapiens
GRALQGLRRLELASN

SEQ ID NO: 76441 - protein, 15 aa, Homo Sapiens
RALQGLRRLELASNH

SEQ ID NO: 76442 - protein, 15 aa, Homo Sapiens
ALQGLRRLELASNHF

SEQ ID NO: 76443 - protein, 15 aa, Homo Sapiens
LQGLRRLELASNHFL

SEQ ID NO: 76444 - protein, 15 aa, Homo Sapiens
QGLRRLELASNHFLY

SEQ ID NO: 76445 - protein, 15 aa, Homo Sapiens
GLRRLELASNHFLYL

SEQ ID NO: 76446 - protein, 15 aa, Homo Sapiens
LRRLELASNHFLYLP

SEQ ID NO: 76447 - protein, 15 aa, Homo Sapiens
RRLELASNHFLYLPR

SEQ ID NO: 76448 - protein, 15 aa, Homo Sapiens
RLELASNHFLYLPRD

SEQ ID NO: 76449 - protein, 15 aa, Homo Sapiens
LELASNHFLYLPRDV

SEQ ID NO: 76450 - protein, 15 aa, Homo Sapiens
ELASNHFLYLPRDVL

SEQ ID NO: 76451 - protein, 15 aa, Homo Sapiens
LASNHFLYLPRDVLA

SEQ ID NO: 76452 - protein, 15 aa, Homo Sapiens
ASNHFLYLPRDVLAQ

SEQ ID NO: 76453 - protein, 15 aa, Homo Sapiens
SNHFLYLPRDVLAQL

SEQ ID NO: 76454 - protein, 15 aa, Homo Sapiens
NHFLYLPRDVLAQLP

SEQ ID NO: 76455 - protein, 15 aa, Homo Sapiens
HFLYLPRDVLAQLPS

SEQ ID NO: 76456 - protein, 15 aa, Homo Sapiens
FLYLPRDVLAQLPSL

SEQ ID NO: 76457 - protein, 15 aa, Homo Sapiens
LYLPRDVLAQLPSLR

SEQ ID NO: 76458 - protein, 15 aa, Homo Sapiens
YLPRDVLAQLPSLRH

SEQ ID NO: 76459 - protein, 15 aa, Homo Sapiens
LPRDVLAQLPSLRHL

SEQ ID NO: 76460 - protein, 15 aa, Homo Sapiens
PRDVLAQLPSLRHLD

SEQ ID NO: 76461 - protein, 15 aa, Homo Sapiens
RDVLAQLPSLRHLDL

SEQ ID NO: 76462 - protein, 15 aa, Homo Sapiens
DVLAQLPSLRHLDLS

SEQ ID NO: 76463 - protein, 15 aa, Homo Sapiens
VLAQLPSLRHLDLSN

SEQ ID NO: 76464 - protein, 15 aa, Homo Sapiens
LAQLPSLRHLDLSNN

SEQ ID NO: 76465 - protein, 15 aa, Homo Sapiens
AQLPSLRHLDLSNNS

SEQ ID NO: 76466 - protein, 15 aa, Homo Sapiens
QLPSLRHLDLSNNSL

SEQ ID NO: 76467 - protein, 15 aa, Homo Sapiens
LPSLRHLDLSNNSLV

SEQ ID NO: 76468 - protein, 15 aa, Homo Sapiens
PSLRHLDLSNNSLVS

SEQ ID NO: 76469 - protein, 15 aa, Homo Sapiens
SLRHLDLSNNSLVSL

SEQ ID NO: 76470 - protein, 15 aa, Homo Sapiens
LRHLDLSNNSLVSLT

SEQ ID NO: 76471 - protein, 15 aa, Homo Sapiens
RHLDLSNNSLVSLTY

SEQ ID NO: 76472 - protein, 15 aa, Homo Sapiens
HLDLSNNSLVSLTYV

SEQ ID NO: 76473 - protein, 15 aa, Homo Sapiens
LDLSNNSLVSLTYVS

SEQ ID NO: 76474 - protein, 15 aa, Homo Sapiens
DLSNNSLVSLTYVSF

SEQ ID NO: 76475 - protein, 15 aa, Homo Sapiens
LSNNSLVSLTYVSFR

SEQ ID NO: 76476 - protein, 15 aa, Homo Sapiens
SNNSLVSLTYVSFRN

SEQ ID NO: 76477 - protein, 15 aa, Homo Sapiens
NNSLVSLTYVSFRNL

SEQ ID NO: 76478 - protein, 15 aa, Homo Sapiens
NSLVSLTYVSFRNLT

SEQ ID NO: 76479 - protein, 15 aa, Homo Sapiens
SLVSLTYVSFRNLTH

SEQ ID NO: 76480 - protein, 15 aa, Homo Sapiens
LVSLTYVSFRNLTHL

SEQ ID NO: 76481 - protein, 15 aa, Homo Sapiens
VSLTYVSFRNLTHLE

SEQ ID NO: 76482 - protein, 15 aa, Homo Sapiens
SLTYVSFRNLTHLES

SEQ ID NO: 76483 - protein, 15 aa, Homo Sapiens
LTYVSFRNLTHLESL

SEQ ID NO: 76484 - protein, 15 aa, Homo Sapiens
TYVSFRNLTHLESLH

SEQ ID NO: 76485 - protein, 15 aa, Homo Sapiens
YVSFRNLTHLESLHL

SEQ ID NO: 76486 - protein, 15 aa, Homo Sapiens
VSFRNLTHLESLHLE

SEQ ID NO: 76487 - protein, 15 aa, Homo Sapiens
SFRNLTHLESLHLED

SEQ ID NO: 76488 - protein, 15 aa, Homo Sapiens
FRNLTHLESLHLEDN

SEQ ID NO: 76489 - protein, 15 aa, Homo Sapiens
RNLTHLESLHLEDNA

SEQ ID NO: 76490 - protein, 15 aa, Homo Sapiens
NLTHLESLHLEDNAL

SEQ ID NO: 76491 - protein, 15 aa, Homo Sapiens
LTHLESLHLEDNALK

SEQ ID NO: 76492 - protein, 15 aa, Homo Sapiens
THLESLHLEDNALKV

SEQ ID NO: 76493 - protein, 15 aa, Homo Sapiens
HLESLHLEDNALKVL

SEQ ID NO: 76494 - protein, 15 aa, Homo Sapiens
LESLHLEDNALKVLH

SEQ ID NO: 76495 - protein, 15 aa, Homo Sapiens
ESLHLEDNALKVLHN

SEQ ID NO: 76496 - protein, 15 aa, Homo Sapiens
SLHLEDNALKVLHNG

SEQ ID NO: 76497 - protein, 15 aa, Homo Sapiens
LHLEDNALKVLHNGT

SEQ ID NO: 76498 - protein, 15 aa, Homo Sapiens
HLEDNALKVLHNGTL

SEQ ID NO: 76499 - protein, 15 aa, Homo Sapiens
LEDNALKVLHNGTLA

SEQ ID NO: 76500 - protein, 15 aa, Homo Sapiens
EDNALKVLHNGTLAE

SEQ ID NO: 76501 - protein, 15 aa, Homo Sapiens
DNALKVLHNGTLAEL

SEQ ID NO: 76502 - protein, 15 aa, Homo Sapiens
NALKVLHNGTLAELQ

SEQ ID NO: 76503 - protein, 15 aa, Homo Sapiens
ALKVLHNGTLAELQG

SEQ ID NO: 76504 - protein, 15 aa, Homo Sapiens
LKVLHNGTLAELQGL

SEQ ID NO: 76505 - protein, 15 aa, Homo Sapiens
KVLHNGTLAELQGLP

SEQ ID NO: 76506 - protein, 15 aa, Homo Sapiens
VLHNGTLAELQGLPH

SEQ ID NO: 76507 - protein, 15 aa, Homo Sapiens
LHNGTLAELQGLPHI

SEQ ID NO: 76508 - protein, 15 aa, Homo Sapiens
HNGTLAELQGLPHIR

SEQ ID NO: 76509 - protein, 15 aa, Homo Sapiens
NGTLAELQGLPHIRV

SEQ ID NO: 76510 - protein, 15 aa, Homo Sapiens
GTLAELQGLPHIRVF

SEQ ID NO: 76511 - protein, 15 aa, Homo Sapiens
TLAELQGLPHIRVFL

SEQ ID NO: 76512 - protein, 15 aa, Homo Sapiens
LAELQGLPHIRVFLD

SEQ ID NO: 76513 - protein, 15 aa, Homo Sapiens
AELQGLPHIRVFLDN

SEQ ID NO: 76514 - protein, 15 aa, Homo Sapiens
ELQGLPHIRVFLDNN

SEQ ID NO: 76515 - protein, 15 aa, Homo Sapiens
LQGLPHIRVFLDNNP

SEQ ID NO: 76516 - protein, 15 aa, Homo Sapiens
QGLPHIRVFLDNNPW

SEQ ID NO: 76517 - protein, 15 aa, Homo Sapiens
GLPHIRVFLDNNPWV

SEQ ID NO: 76518 - protein, 15 aa, Homo Sapiens
LPHIRVFLDNNPWVC

SEQ ID NO: 76519 - protein, 15 aa, Homo Sapiens
PHIRVFLDNNPWVCD

SEQ ID NO: 76520 - protein, 15 aa, Homo Sapiens
HIRVFLDNNPWVCDC

SEQ ID NO: 76521 - protein, 15 aa, Homo Sapiens
IRVFLDNNPWVCDCH

SEQ ID NO: 76522 - protein, 15 aa, Homo Sapiens
RVFLDNNPWVCDCHM

SEQ ID NO: 76523 - protein, 15 aa, Homo Sapiens
VFLDNNPWVCDCHMA

SEQ ID NO: 76524 - protein, 15 aa, Homo Sapiens
FLDNNPWVCDCHMAD

SEQ ID NO: 76525 - protein, 15 aa, Homo Sapiens
LDNNPWVCDCHMADM

SEQ ID NO: 76526 - protein, 15 aa, Homo Sapiens
DNNPWVCDCHMADMV

SEQ ID NO: 76527 - protein, 15 aa, Homo Sapiens
NNPWVCDCHMADMVT

SEQ ID NO: 76528 - protein, 15 aa, Homo Sapiens
NPWVCDCHMADMVTW

SEQ ID NO: 76529 - protein, 15 aa, Homo Sapiens
PWVCDCHMADMVTWL

SEQ ID NO: 76530 - protein, 15 aa, Homo Sapiens
WVCDCHMADMVTWLK

SEQ ID NO: 76531 - protein, 15 aa, Homo Sapiens
VCDCHMADMVTWLKE

SEQ ID NO: 76532 - protein, 15 aa, Homo Sapiens
CDCHMADMVTWLKET

SEQ ID NO: 76533 - protein, 15 aa, Homo Sapiens
DCHMADMVTWLKETE

SEQ ID NO: 76534 - protein, 15 aa, Homo Sapiens
CHMADMVTWLKETEV

SEQ ID NO: 76535 - protein, 15 aa, Homo Sapiens
HMADMVTWLKETEVV

SEQ ID NO: 76536 - protein, 15 aa, Homo Sapiens
MADMVTWLKETEVVQ

SEQ ID NO: 76537 - protein, 15 aa, Homo Sapiens
ADMVTWLKETEVVQG

SEQ ID NO: 76538 - protein, 15 aa, Homo Sapiens
DMVTWLKETEVVQGK

SEQ ID NO: 76539 - protein, 15 aa, Homo Sapiens
MVTWLKETEVVQGKD

SEQ ID NO: 76540 - protein, 15 aa, Homo Sapiens
VTWLKETEVVQGKDR

SEQ ID NO: 76541 - protein, 15 aa, Homo Sapiens
TWLKETEVVQGKDRL

SEQ ID NO: 76542 - protein, 15 aa, Homo Sapiens
WLKETEVVQGKDRLT

SEQ ID NO: 76543 - protein, 15 aa, Homo Sapiens
LKETEVVQGKDRLTC

SEQ ID NO: 76544 - protein, 15 aa, Homo Sapiens
KETEVVQGKDRLTCA

SEQ ID NO: 76545 - protein, 15 aa, Homo Sapiens
ETEVVQGKDRLTCAY

SEQ ID NO: 76546 - protein, 15 aa, Homo Sapiens
TEVVQGKDRLTCAYP

SEQ ID NO: 76547 - protein, 15 aa, Homo Sapiens
EVVQGKDRLTCAYPE

SEQ ID NO: 76548 - protein, 15 aa, Homo Sapiens
VVQGKDRLTCAYPEK

SEQ ID NO: 76549 - protein, 15 aa, Homo Sapiens
VQGKDRLTCAYPEKM

SEQ ID NO: 76550 - protein, 15 aa, Homo Sapiens
QGKDRLTCAYPEKMR

SEQ ID NO: 76551 - protein, 15 aa, Homo Sapiens
GKDRLTCAYPEKMRN

SEQ ID NO: 76552 - protein, 15 aa, Homo Sapiens
KDRLTCAYPEKMRNR

SEQ ID NO: 76553 - protein, 15 aa, Homo Sapiens
DRLTCAYPEKMRNRV

SEQ ID NO: 76554 - protein, 15 aa, Homo Sapiens
RLTCAYPEKMRNRVL

SEQ ID NO: 76555 - protein, 15 aa, Homo Sapiens
LTCAYPEKMRNRVLL

SEQ ID NO: 76556 - protein, 15 aa, Homo Sapiens
TCAYPEKMRNRVLLE

SEQ ID NO: 76557 - protein, 15 aa, Homo Sapiens
CAYPEKMRNRVLLEL

SEQ ID NO: 76558 - protein, 15 aa, Homo Sapiens
AYPEKMRNRVLLELN

SEQ ID NO: 76559 - protein, 15 aa, Homo Sapiens
YPEKMRNRVLLELNS

SEQ ID NO: 76560 - protein, 15 aa, Homo Sapiens
PEKMRNRVLLELNSA

SEQ ID NO: 76561 - protein, 15 aa, Homo Sapiens
EKMRNRVLLELNSAD

SEQ ID NO: 76562 - protein, 15 aa, Homo Sapiens
KMRNRVLLELNSADL

SEQ ID NO: 76563 - protein, 15 aa, Homo Sapiens
MRNRVLLELNSADLD

SEQ ID NO: 76564 - protein, 15 aa, Homo Sapiens
RNRVLLELNSADLDC

SEQ ID NO: 76565 - protein, 15 aa, Homo Sapiens
NRVLLELNSADLDCD

SEQ ID NO: 76566 - protein, 15 aa, Homo Sapiens
RVLLELNSADLDCDP

SEQ ID NO: 76567 - protein, 15 aa, Homo Sapiens
VLLELNSADLDCDPI

SEQ ID NO: 76568 - protein, 15 aa, Homo Sapiens
LLELNSADLDCDPIL

SEQ ID NO: 76569 - protein, 15 aa, Homo Sapiens
LELNSADLDCDPILP

SEQ ID NO: 76570 - protein, 15 aa, Homo Sapiens
ELNSADLDCDPILPP

SEQ ID NO: 76571 - protein, 15 aa, Homo Sapiens
LNSADLDCDPILPPS

SEQ ID NO: 76572 - protein, 15 aa, Homo Sapiens
NSADLDCDPILPPSL

SEQ ID NO: 76573 - protein, 15 aa, Homo Sapiens
SADLDCDPILPPSLQ

SEQ ID NO: 76574 - protein, 15 aa, Homo Sapiens
ADLDCDPILPPSLQT

SEQ ID NO: 76575 - protein, 15 aa, Homo Sapiens
DLDCDPILPPSLQTS

SEQ ID NO: 76576 - protein, 15 aa, Homo Sapiens
LDCDPILPPSLQTSY

SEQ ID NO: 76577 - protein, 15 aa, Homo Sapiens
DCDPILPPSLQTSYV

SEQ ID NO: 76578 - protein, 15 aa, Homo Sapiens
CDPILPPSLQTSYVF

SEQ ID NO: 76579 - protein, 15 aa, Homo Sapiens
DPILPPSLQTSYVFL

SEQ ID NO: 76580 - protein, 15 aa, Homo Sapiens
PILPPSLQTSYVFLG

SEQ ID NO: 76581 - protein, 15 aa, Homo Sapiens
ILPPSLQTSYVFLGI

SEQ ID NO: 76582 - protein, 15 aa, Homo Sapiens
LPPSLQTSYVFLGIV

SEQ ID NO: 76583 - protein, 15 aa, Homo Sapiens
PPSLQTSYVFLGIVL

SEQ ID NO: 76584 - protein, 15 aa, Homo Sapiens
PSLQTSYVFLGIVLA

SEQ ID NO: 76585 - protein, 15 aa, Homo Sapiens
SLQTSYVFLGIVLAL

SEQ ID NO: 76586 - protein, 15 aa, Homo Sapiens
LQTSYVFLGIVLALI

SEQ ID NO: 76587 - protein, 15 aa, Homo Sapiens
QTSYVFLGIVLALIG

SEQ ID NO: 76588 - protein, 15 aa, Homo Sapiens
TSYVFLGIVLALIGA

SEQ ID NO: 76589 - protein, 15 aa, Homo Sapiens
SYVFLGIVLALIGAI

SEQ ID NO: 76590 - protein, 15 aa, Homo Sapiens
YVFLGIVLALIGAIF

SEQ ID NO: 76591 - protein, 15 aa, Homo Sapiens
VFLGIVLALIGAIFL

SEQ ID NO: 76592 - protein, 15 aa, Homo Sapiens
FLGIVLALIGAIFLL

SEQ ID NO: 76593 - protein, 15 aa, Homo Sapiens
LGIVLALIGAIFLLV

SEQ ID NO: 76594 - protein, 15 aa, Homo Sapiens
GIVLALIGAIFLLVL

SEQ ID NO: 76595 - protein, 15 aa, Homo Sapiens
IVLALIGAIFLLVLY

SEQ ID NO: 76596 - protein, 15 aa, Homo Sapiens
VLALIGAIFLLVLYL

SEQ ID NO: 76597 - protein, 15 aa, Homo Sapiens
LALIGAIFLLVLYLN

SEQ ID NO: 76598 - protein, 15 aa, Homo Sapiens
ALIGAIFLLVLYLNR

SEQ ID NO: 76599 - protein, 15 aa, Homo Sapiens
LIGAIFLLVLYLNRK

SEQ ID NO: 76600 - protein, 15 aa, Homo Sapiens
IGAIFLLVLYLNRKG

SEQ ID NO: 76601 - protein, 15 aa, Homo Sapiens
GAIFLLVLYLNRKGI

SEQ ID NO: 76602 - protein, 15 aa, Homo Sapiens
AIFLLVLYLNRKGIK

SEQ ID NO: 76603 - protein, 15 aa, Homo Sapiens
IFLLVLYLNRKGIKK

SEQ ID NO: 76604 - protein, 15 aa, Homo Sapiens
FLLVLYLNRKGIKKW

SEQ ID NO: 76605 - protein, 15 aa, Homo Sapiens
LLVLYLNRKGIKKWM

SEQ ID NO: 76606 - protein, 15 aa, Homo Sapiens
LVLYLNRKGIKKWMH

SEQ ID NO: 76607 - protein, 15 aa, Homo Sapiens
VLYLNRKGIKKWMHN

SEQ ID NO: 76608 - protein, 15 aa, Homo Sapiens
LYLNRKGIKKWMHNI

SEQ ID NO: 76609 - protein, 15 aa, Homo Sapiens
YLNRKGIKKWMHNIR

SEQ ID NO: 76610 - protein, 15 aa, Homo Sapiens
LNRKGIKKWMHNIRD

SEQ ID NO: 76611 - protein, 15 aa, Homo Sapiens
NRKGIKKWMHNIRDA

SEQ ID NO: 76612 - protein, 15 aa, Homo Sapiens
RKGIKKWMHNIRDAC

SEQ ID NO: 76613 - protein, 15 aa, Homo Sapiens
KGIKKWMHNIRDACR

SEQ ID NO: 76614 - protein, 15 aa, Homo Sapiens
GIKKWMHNIRDACRD

SEQ ID NO: 76615 - protein, 15 aa, Homo Sapiens
IKKWMHNIRDACRDH

SEQ ID NO: 76616 - protein, 15 aa, Homo Sapiens
KKWMHNIRDACRDHM

SEQ ID NO: 76617 - protein, 15 aa, Homo Sapiens
KWMHNIRDACRDHME

SEQ ID NO: 76618 - protein, 15 aa, Homo Sapiens
WMHNIRDACRDHMEG

SEQ ID NO: 76619 - protein, 15 aa, Homo Sapiens
MHNIRDACRDHMEGY

SEQ ID NO: 76620 - protein, 15 aa, Homo Sapiens
HNIRDACRDHMEGYH

SEQ ID NO: 76621 - protein, 15 aa, Homo Sapiens
NIRDACRDHMEGYHY

SEQ ID NO: 76622 - protein, 15 aa, Homo Sapiens
IRDACRDHMEGYHYR

SEQ ID NO: 76623 - protein, 15 aa, Homo Sapiens
RDACRDHMEGYHYRY

SEQ ID NO: 76624 - protein, 15 aa, Homo Sapiens
DACRDHMEGYHYRYE

SEQ ID NO: 76625 - protein, 15 aa, Homo Sapiens
ACRDHMEGYHYRYEI

SEQ ID NO: 76626 - protein, 15 aa, Homo Sapiens
CRDHMEGYHYRYEIN

SEQ ID NO: 76627 - protein, 15 aa, Homo Sapiens
RDHMEGYHYRYEINA

SEQ ID NO: 76628 - protein, 15 aa, Homo Sapiens
DHMEGYHYRYEINAD

SEQ ID NO: 76629 - protein, 15 aa, Homo Sapiens
HMEGYHYRYEINADP

SEQ ID NO: 76630 - protein, 15 aa, Homo Sapiens
MEGYHYRYEINADPR

SEQ ID NO: 76631 - protein, 15 aa, Homo Sapiens
EGYHYRYEINADPRL

SEQ ID NO: 76632 - protein, 15 aa, Homo Sapiens
GYHYRYEINADPRLT

SEQ ID NO: 76633 - protein, 15 aa, Homo Sapiens
YHYRYEINADPRLTN

SEQ ID NO: 76634 - protein, 15 aa, Homo Sapiens
HYRYEINADPRLTNL

SEQ ID NO: 76635 - protein, 15 aa, Homo Sapiens
YRYEINADPRLTNLS

SEQ ID NO: 76636 - protein, 15 aa, Homo Sapiens
RYEINADPRLTNLSS

SEQ ID NO: 76637 - protein, 15 aa, Homo Sapiens
YEINADPRLTNLSSN

SEQ ID NO: 76638 - protein, 15 aa, Homo Sapiens
EINADPRLTNLSSNS

SEQ ID NO: 76639 - protein, 15 aa, Homo Sapiens
INADPRLTNLSSNSD

SEQ ID NO: 76640 - protein, 15 aa, Homo Sapiens
NADPRLTNLSSNSDV

SEQ ID NO: 76641 - protein, 16 aa, Homo Sapiens
MPGGCSRGPAAGDGRL

SEQ ID NO: 76642 - protein, 16 aa, Homo Sapiens
PGGCSRGPAAGDGRLR

SEQ ID NO: 76643 - protein, 16 aa, Homo Sapiens
GGCSRGPAAGDGRLRL

SEQ ID NO: 76644 - protein, 16 aa, Homo Sapiens
GCSRGPAAGDGRLRLA

SEQ ID NO: 76645 - protein, 16 aa, Homo Sapiens
CSRGPAAGDGRLRLAR

SEQ ID NO: 76646 - protein, 16 aa, Homo Sapiens
SRGPAAGDGRLRLARL

SEQ ID NO: 76647 - protein, 16 aa, Homo Sapiens
RGPAAGDGRLRLARLA

SEQ ID NO: 76648 - protein, 16 aa, Homo Sapiens
GPAAGDGRLRLARLAL

SEQ ID NO: 76649 - protein, 16 aa, Homo Sapiens
PAAGDGRLRLARLALV

SEQ ID NO: 76650 - protein, 16 aa, Homo Sapiens
AAGDGRLRLARLALVL

SEQ ID NO: 76651 - protein, 16 aa, Homo Sapiens
AGDGRLRLARLALVLL

SEQ ID NO: 76652 - protein, 16 aa, Homo Sapiens
GDGRLRLARLALVLLG

SEQ ID NO: 76653 - protein, 16 aa, Homo Sapiens
DGRLRLARLALVLLGW

SEQ ID NO: 76654 - protein, 16 aa, Homo Sapiens
GRLRLARLALVLLGWV

SEQ ID NO: 76655 - protein, 16 aa, Homo Sapiens
RLRLARLALVLLGWVS

SEQ ID NO: 76656 - protein, 16 aa, Homo Sapiens
LRLARLALVLLGWVSS

SEQ ID NO: 76657 - protein, 16 aa, Homo Sapiens
RLARLALVLLGWVSSS

SEQ ID NO: 76658 - protein, 16 aa, Homo Sapiens
LARLALVLLGWVSSSS

SEQ ID NO: 76659 - protein, 16 aa, Homo Sapiens
ARLALVLLGWVSSSSP

SEQ ID NO: 76660 - protein, 16 aa, Homo Sapiens
RLALVLLGWVSSSSPT

SEQ ID NO: 76661 - protein, 16 aa, Homo Sapiens
LALVLLGWVSSSSPTS

SEQ ID NO: 76662 - protein, 16 aa, Homo Sapiens
ALVLLGWVSSSSPTSS

SEQ ID NO: 76663 - protein, 16 aa, Homo Sapiens
LVLLGWVSSSSPTSSA

SEQ ID NO: 76664 - protein, 16 aa, Homo Sapiens
VLLGWVSSSSPTSSAS

SEQ ID NO: 76665 - protein, 16 aa, Homo Sapiens
LLGWVSSSSPTSSASS

SEQ ID NO: 76666 - protein, 16 aa, Homo Sapiens
LGWVSSSSPTSSASSF

SEQ ID NO: 76667 - protein, 16 aa, Homo Sapiens
GWVSSSSPTSSASSFS

SEQ ID NO: 76668 - protein, 16 aa, Homo Sapiens
WVSSSSPTSSASSFSS

SEQ ID NO: 76669 - protein, 16 aa, Homo Sapiens
VSSSSPTSSASSFSSS

SEQ ID NO: 76670 - protein, 16 aa, Homo Sapiens
SSSSPTSSASSFSSSA

SEQ ID NO: 76671 - protein, 16 aa, Homo Sapiens
SSSPTSSASSFSSSAP

SEQ ID NO: 76672 - protein, 16 aa, Homo Sapiens
SSPTSSASSFSSSAPF

SEQ ID NO: 76673 - protein, 16 aa, Homo Sapiens
SPTSSASSFSSSAPFL

SEQ ID NO: 76674 - protein, 16 aa, Homo Sapiens
PTSSASSFSSSAPFLA

SEQ ID NO: 76675 - protein, 16 aa, Homo Sapiens
TSSASSFSSSAPFLAS

SEQ ID NO: 76676 - protein, 16 aa, Homo Sapiens
SSASSFSSSAPFLASA

SEQ ID NO: 76677 - protein, 16 aa, Homo Sapiens
SASSFSSSAPFLASAV

SEQ ID NO: 76678 - protein, 16 aa, Homo Sapiens
ASSFSSSAPFLASAVS

SEQ ID NO: 76679 - protein, 16 aa, Homo Sapiens
SSFSSSAPFLASAVSA

SEQ ID NO: 76680 - protein, 16 aa, Homo Sapiens
SFSSSAPFLASAVSAQ

SEQ ID NO: 76681 - protein, 16 aa, Homo Sapiens
FSSSAPFLASAVSAQP

SEQ ID NO: 76682 - protein, 16 aa, Homo Sapiens
SSSAPFLASAVSAQPP

SEQ ID NO: 76683 - protein, 16 aa, Homo Sapiens
SSAPFLASAVSAQPPL

SEQ ID NO: 76684 - protein, 16 aa, Homo Sapiens
SAPFLASAVSAQPPLP

SEQ ID NO: 76685 - protein, 16 aa, Homo Sapiens
APFLASAVSAQPPLPD

SEQ ID NO: 76686 - protein, 16 aa, Homo Sapiens
PFLASAVSAQPPLPDQ

SEQ ID NO: 76687 - protein, 16 aa, Homo Sapiens
FLASAVSAQPPLPDQC

SEQ ID NO: 76688 - protein, 16 aa, Homo Sapiens
LASAVSAQPPLPDQCP

SEQ ID NO: 76689 - protein, 16 aa, Homo Sapiens
ASAVSAQPPLPDQCPA

SEQ ID NO: 76690 - protein, 16 aa, Homo Sapiens
SAVSAQPPLPDQCPAL

SEQ ID NO: 76691 - protein, 16 aa, Homo Sapiens
AVSAQPPLPDQCPALC

SEQ ID NO: 76692 - protein, 16 aa, Homo Sapiens
VSAQPPLPDQCPALCE

SEQ ID NO: 76693 - protein, 16 aa, Homo Sapiens
SAQPPLPDQCPALCEC

SEQ ID NO: 76694 - protein, 16 aa, Homo Sapiens
AQPPLPDQCPALCECS

SEQ ID NO: 76695 - protein, 16 aa, Homo Sapiens
QPPLPDQCPALCECSE

SEQ ID NO: 76696 - protein, 16 aa, Homo Sapiens
PPLPDQCPALCECSEA

SEQ ID NO: 76697 - protein, 16 aa, Homo Sapiens
PLPDQCPALCECSEAA

SEQ ID NO: 76698 - protein, 16 aa, Homo Sapiens
LPDQCPALCECSEAAR

SEQ ID NO: 76699 - protein, 16 aa, Homo Sapiens
PDQCPALCECSEAART

SEQ ID NO: 76700 - protein, 16 aa, Homo Sapiens
DQCPALCECSEAARTV

SEQ ID NO: 76701 - protein, 16 aa, Homo Sapiens
QCPALCECSEAARTVK

SEQ ID NO: 76702 - protein, 16 aa, Homo Sapiens
CPALCECSEAARTVKC

SEQ ID NO: 76703 - protein, 16 aa, Homo Sapiens
PALCECSEAARTVKCV

SEQ ID NO: 76704 - protein, 16 aa, Homo Sapiens
ALCECSEAARTVKCVN

SEQ ID NO: 76705 - protein, 16 aa, Homo Sapiens
LCECSEAARTVKCVNR

SEQ ID NO: 76706 - protein, 16 aa, Homo Sapiens
CECSEAARTVKCVNRN

SEQ ID NO: 76707 - protein, 16 aa, Homo Sapiens
ECSEAARTVKCVNRNL

SEQ ID NO: 76708 - protein, 16 aa, Homo Sapiens
CSEAARTVKCVNRNLT

SEQ ID NO: 76709 - protein, 16 aa, Homo Sapiens
SEAARTVKCVNRNLTE

SEQ ID NO: 76710 - protein, 16 aa, Homo Sapiens
EAARTVKCVNRNLTEV

SEQ ID NO: 76711 - protein, 16 aa, Homo Sapiens
AARTVKCVNRNLTEVP

SEQ ID NO: 76712 - protein, 16 aa, Homo Sapiens
ARTVKCVNRNLTEVPT

SEQ ID NO: 76713 - protein, 16 aa, Homo Sapiens
RTVKCVNRNLTEVPTD

SEQ ID NO: 76714 - protein, 16 aa, Homo Sapiens
TVKCVNRNLTEVPTDL

SEQ ID NO: 76715 - protein, 16 aa, Homo Sapiens
VKCVNRNLTEVPTDLP

SEQ ID NO: 76716 - protein, 16 aa, Homo Sapiens
KCVNRNLTEVPTDLPA

SEQ ID NO: 76717 - protein, 16 aa, Homo Sapiens
CVNRNLTEVPTDLPAY

SEQ ID NO: 76718 - protein, 16 aa, Homo Sapiens
VNRNLTEVPTDLPAYV

SEQ ID NO: 76719 - protein, 16 aa, Homo Sapiens
NRNLTEVPTDLPAYVR

SEQ ID NO: 76720 - protein, 16 aa, Homo Sapiens
RNLTEVPTDLPAYVRN

SEQ ID NO: 76721 - protein, 16 aa, Homo Sapiens
NLTEVPTDLPAYVRNL

SEQ ID NO: 76722 - protein, 16 aa, Homo Sapiens
LTEVPTDLPAYVRNLF

SEQ ID NO: 76723 - protein, 16 aa, Homo Sapiens
TEVPTDLPAYVRNLFL

SEQ ID NO: 76724 - protein, 16 aa, Homo Sapiens
EVPTDLPAYVRNLFLT

SEQ ID NO: 76725 - protein, 16 aa, Homo Sapiens
VPTDLPAYVRNLFLTG

SEQ ID NO: 76726 - protein, 16 aa, Homo Sapiens
PTDLPAYVRNLFLTGN

SEQ ID NO: 76727 - protein, 16 aa, Homo Sapiens
TDLPAYVRNLFLTGNQ

SEQ ID NO: 76728 - protein, 16 aa, Homo Sapiens
DLPAYVRNLFLTGNQL

SEQ ID NO: 76729 - protein, 16 aa, Homo Sapiens
LPAYVRNLFLTGNQLA

SEQ ID NO: 76730 - protein, 16 aa, Homo Sapiens
PAYVRNLFLTGNQLAV

SEQ ID NO: 76731 - protein, 16 aa, Homo Sapiens
AYVRNLFLTGNQLAVL

SEQ ID NO: 76732 - protein, 16 aa, Homo Sapiens
YVRNLFLTGNQLAVLP

SEQ ID NO: 76733 - protein, 16 aa, Homo Sapiens
VRNLFLTGNQLAVLPA

SEQ ID NO: 76734 - protein, 16 aa, Homo Sapiens
RNLFLTGNQLAVLPAG

SEQ ID NO: 76735 - protein, 16 aa, Homo Sapiens
NLFLTGNQLAVLPAGA

SEQ ID NO: 76736 - protein, 16 aa, Homo Sapiens
LFLTGNQLAVLPAGAF

SEQ ID NO: 76737 - protein, 16 aa, Homo Sapiens
FLTGNQLAVLPAGAFA

SEQ ID NO: 76738 - protein, 16 aa, Homo Sapiens
LTGNQLAVLPAGAFAR

SEQ ID NO: 76739 - protein, 16 aa, Homo Sapiens
TGNQLAVLPAGAFARR

SEQ ID NO: 76740 - protein, 16 aa, Homo Sapiens
GNQLAVLPAGAFARRP

SEQ ID NO: 76741 - protein, 16 aa, Homo Sapiens
NQLAVLPAGAFARRPP

SEQ ID NO: 76742 - protein, 16 aa, Homo Sapiens
QLAVLPAGAFARRPPL

SEQ ID NO: 76743 - protein, 16 aa, Homo Sapiens
LAVLPAGAFARRPPLA

SEQ ID NO: 76744 - protein, 16 aa, Homo Sapiens
AVLPAGAFARRPPLAE

SEQ ID NO: 76745 - protein, 16 aa, Homo Sapiens
VLPAGAFARRPPLAEL

SEQ ID NO: 76746 - protein, 16 aa, Homo Sapiens
LPAGAFARRPPLAELA

SEQ ID NO: 76747 - protein, 16 aa, Homo Sapiens
PAGAFARRPPLAELAA

SEQ ID NO: 76748 - protein, 16 aa, Homo Sapiens
AGAFARRPPLAELAAL

SEQ ID NO: 76749 - protein, 16 aa, Homo Sapiens
GAFARRPPLAELAALN

SEQ ID NO: 76750 - protein, 16 aa, Homo Sapiens
AFARRPPLAELAALNL

SEQ ID NO: 76751 - protein, 16 aa, Homo Sapiens
FARRPPLAELAALNLS

SEQ ID NO: 76752 - protein, 16 aa, Homo Sapiens
ARRPPLAELAALNLSG

SEQ ID NO: 76753 - protein, 16 aa, Homo Sapiens
RRPPLAELAALNLSGS

SEQ ID NO: 76754 - protein, 16 aa, Homo Sapiens
RPPLAELAALNLSGSR

SEQ ID NO: 76755 - protein, 16 aa, Homo Sapiens
PPLAELAALNLSGSRL

SEQ ID NO: 76756 - protein, 16 aa, Homo Sapiens
PLAELAALNLSGSRLD

SEQ ID NO: 76757 - protein, 16 aa, Homo Sapiens
LAELAALNLSGSRLDE

SEQ ID NO: 76758 - protein, 16 aa, Homo Sapiens
AELAALNLSGSRLDEV

SEQ ID NO: 76759 - protein, 16 aa, Homo Sapiens
ELAALNLSGSRLDEVR

SEQ ID NO: 76760 - protein, 16 aa, Homo Sapiens
LAALNLSGSRLDEVRA

SEQ ID NO: 76761 - protein, 16 aa, Homo Sapiens
AALNLSGSRLDEVRAG

SEQ ID NO: 76762 - protein, 16 aa, Homo Sapiens
ALNLSGSRLDEVRAGA

SEQ ID NO: 76763 - protein, 16 aa, Homo Sapiens
LNLSGSRLDEVRAGAF

SEQ ID NO: 76764 - protein, 16 aa, Homo Sapiens
NLSGSRLDEVRAGAFE

SEQ ID NO: 76765 - protein, 16 aa, Homo Sapiens
LSGSRLDEVRAGAFEH

SEQ ID NO: 76766 - protein, 16 aa, Homo Sapiens
SGSRLDEVRAGAFEHL

SEQ ID NO: 76767 - protein, 16 aa, Homo Sapiens
GSRLDEVRAGAFEHLP

SEQ ID NO: 76768 - protein, 16 aa, Homo Sapiens
SRLDEVRAGAFEHLPS

SEQ ID NO: 76769 - protein, 16 aa, Homo Sapiens
RLDEVRAGAFEHLPSL

SEQ ID NO: 76770 - protein, 16 aa, Homo Sapiens
LDEVRAGAFEHLPSLR

SEQ ID NO: 76771 - protein, 16 aa, Homo Sapiens
DEVRAGAFEHLPSLRQ

SEQ ID NO: 76772 - protein, 16 aa, Homo Sapiens
EVRAGAFEHLPSLRQL

SEQ ID NO: 76773 - protein, 16 aa, Homo Sapiens
VRAGAFEHLPSLRQLD

SEQ ID NO: 76774 - protein, 16 aa, Homo Sapiens
RAGAFEHLPSLRQLDL

SEQ ID NO: 76775 - protein, 16 aa, Homo Sapiens
AGAFEHLPSLRQLDLS

SEQ ID NO: 76776 - protein, 16 aa, Homo Sapiens
GAFEHLPSLRQLDLSH

SEQ ID NO: 76777 - protein, 16 aa, Homo Sapiens
AFEHLPSLRQLDLSHN

SEQ ID NO: 76778 - protein, 16 aa, Homo Sapiens
FEHLPSLRQLDLSHNP

SEQ ID NO: 76779 - protein, 16 aa, Homo Sapiens
EHLPSLRQLDLSHNPL

SEQ ID NO: 76780 - protein, 16 aa, Homo Sapiens
HLPSLRQLDLSHNPLA

SEQ ID NO: 76781 - protein, 16 aa, Homo Sapiens
LPSLRQLDLSHNPLAD

SEQ ID NO: 76782 - protein, 16 aa, Homo Sapiens
PSLRQLDLSHNPLADL

SEQ ID NO: 76783 - protein, 16 aa, Homo Sapiens
SLRQLDLSHNPLADLS

SEQ ID NO: 76784 - protein, 16 aa, Homo Sapiens
LRQLDLSHNPLADLSP

SEQ ID NO: 76785 - protein, 16 aa, Homo Sapiens
RQLDLSHNPLADLSPF

SEQ ID NO: 76786 - protein, 16 aa, Homo Sapiens
QLDLSHNPLADLSPFA

SEQ ID NO: 76787 - protein, 16 aa, Homo Sapiens
LDLSHNPLADLSPFAF

SEQ ID NO: 76788 - protein, 16 aa, Homo Sapiens
DLSHNPLADLSPFAFS

SEQ ID NO: 76789 - protein, 16 aa, Homo Sapiens
LSHNPLADLSPFAFSG

SEQ ID NO: 76790 - protein, 16 aa, Homo Sapiens
SHNPLADLSPFAFSGS

SEQ ID NO: 76791 - protein, 16 aa, Homo Sapiens
HNPLADLSPFAFSGSN

SEQ ID NO: 76792 - protein, 16 aa, Homo Sapiens
NPLADLSPFAFSGSNA

SEQ ID NO: 76793 - protein, 16 aa, Homo Sapiens
PLADLSPFAFSGSNAS

SEQ ID NO: 76794 - protein, 16 aa, Homo Sapiens
LADLSPFAFSGSNASV

SEQ ID NO: 76795 - protein, 16 aa, Homo Sapiens
ADLSPFAFSGSNASVS

SEQ ID NO: 76796 - protein, 16 aa, Homo Sapiens
DLSPFAFSGSNASVSA

SEQ ID NO: 76797 - protein, 16 aa, Homo Sapiens
LSPFAFSGSNASVSAP

SEQ ID NO: 76798 - protein, 16 aa, Homo Sapiens
SPFAFSGSNASVSAPS

SEQ ID NO: 76799 - protein, 16 aa, Homo Sapiens
PFAFSGSNASVSAPSP

SEQ ID NO: 76800 - protein, 16 aa, Homo Sapiens
FAFSGSNASVSAPSPL

SEQ ID NO: 76801 - protein, 16 aa, Homo Sapiens
AFSGSNASVSAPSPLV

SEQ ID NO: 76802 - protein, 16 aa, Homo Sapiens
FSGSNASVSAPSPLVE

SEQ ID NO: 76803 - protein, 16 aa, Homo Sapiens
SGSNASVSAPSPLVEL

SEQ ID NO: 76804 - protein, 16 aa, Homo Sapiens
GSNASVSAPSPLVELI

SEQ ID NO: 76805 - protein, 16 aa, Homo Sapiens
SNASVSAPSPLVELIL

SEQ ID NO: 76806 - protein, 16 aa, Homo Sapiens
NASVSAPSPLVELILN

SEQ ID NO: 76807 - protein, 16 aa, Homo Sapiens
ASVSAPSPLVELILNH

SEQ ID NO: 76808 - protein, 16 aa, Homo Sapiens
SVSAPSPLVELILNHI

SEQ ID NO: 76809 - protein, 16 aa, Homo Sapiens
VSAPSPLVELILNHIV

SEQ ID NO: 76810 - protein, 16 aa, Homo Sapiens
SAPSPLVELILNHIVP

SEQ ID NO: 76811 - protein, 16 aa, Homo Sapiens
APSPLVELILNHIVPP

SEQ ID NO: 76812 - protein, 16 aa, Homo Sapiens
PSPLVELILNHIVPPE

SEQ ID NO: 76813 - protein, 16 aa, Homo Sapiens
SPLVELILNHIVPPED

SEQ ID NO: 76814 - protein, 16 aa, Homo Sapiens
PLVELILNHIVPPEDE

SEQ ID NO: 76815 - protein, 16 aa, Homo Sapiens
LVELILNHIVPPEDER

SEQ ID NO: 76816 - protein, 16 aa, Homo Sapiens
VELILNHIVPPEDERQ

SEQ ID NO: 76817 - protein, 16 aa, Homo Sapiens
ELILNHIVPPEDERQN

SEQ ID NO: 76818 - protein, 16 aa, Homo Sapiens
LILNHIVPPEDERQNR

SEQ ID NO: 76819 - protein, 16 aa, Homo Sapiens
ILNHIVPPEDERQNRS

SEQ ID NO: 76820 - protein, 16 aa, Homo Sapiens
LNHIVPPEDERQNRSF

SEQ ID NO: 76821 - protein, 16 aa, Homo Sapiens
NHIVPPEDERQNRSFE

SEQ ID NO: 76822 - protein, 16 aa, Homo Sapiens
HIVPPEDERQNRSFEG

SEQ ID NO: 76823 - protein, 16 aa, Homo Sapiens
IVPPEDERQNRSFEGM

SEQ ID NO: 76824 - protein, 16 aa, Homo Sapiens
VPPEDERQNRSFEGMV

SEQ ID NO: 76825 - protein, 16 aa, Homo Sapiens
PPEDERQNRSFEGMVV

SEQ ID NO: 76826 - protein, 16 aa, Homo Sapiens
PEDERQNRSFEGMVVA

SEQ ID NO: 76827 - protein, 16 aa, Homo Sapiens
EDERQNRSFEGMVVAA

SEQ ID NO: 76828 - protein, 16 aa, Homo Sapiens
DERQNRSFEGMVVAAL

SEQ ID NO: 76829 - protein, 16 aa, Homo Sapiens
ERQNRSFEGMVVAALL

SEQ ID NO: 76830 - protein, 16 aa, Homo Sapiens
RQNRSFEGMVVAALLA

SEQ ID NO: 76831 - protein, 16 aa, Homo Sapiens
QNRSFEGMVVAALLAG

SEQ ID NO: 76832 - protein, 16 aa, Homo Sapiens
NRSFEGMVVAALLAGR

SEQ ID NO: 76833 - protein, 16 aa, Homo Sapiens
RSFEGMVVAALLAGRA

SEQ ID NO: 76834 - protein, 16 aa, Homo Sapiens
SFEGMVVAALLAGRAL

SEQ ID NO: 76835 - protein, 16 aa, Homo Sapiens
FEGMVVAALLAGRALQ

SEQ ID NO: 76836 - protein, 16 aa, Homo Sapiens
EGMVVAALLAGRALQG

SEQ ID NO: 76837 - protein, 16 aa, Homo Sapiens
GMVVAALLAGRALQGL

SEQ ID NO: 76838 - protein, 16 aa, Homo Sapiens
MVVAALLAGRALQGLR

SEQ ID NO: 76839 - protein, 16 aa, Homo Sapiens
VVAALLAGRALQGLRR

SEQ ID NO: 76840 - protein, 16 aa, Homo Sapiens
VAALLAGRALQGLRRL

SEQ ID NO: 76841 - protein, 16 aa, Homo Sapiens
AALLAGRALQGLRRLE

SEQ ID NO: 76842 - protein, 16 aa, Homo Sapiens
ALLAGRALQGLRRLEL

SEQ ID NO: 76843 - protein, 16 aa, Homo Sapiens
LLAGRALQGLRRLELA

SEQ ID NO: 76844 - protein, 16 aa, Homo Sapiens
LAGRALQGLRRLELAS

SEQ ID NO: 76845 - protein, 16 aa, Homo Sapiens
AGRALQGLRRLELASN

SEQ ID NO: 76846 - protein, 16 aa, Homo Sapiens
GRALQGLRRLELASNH

SEQ ID NO: 76847 - protein, 16 aa, Homo Sapiens
RALQGLRRLELASNHF

SEQ ID NO: 76848 - protein, 16 aa, Homo Sapiens
ALQGLRRLELASNHFL

SEQ ID NO: 76849 - protein, 16 aa, Homo Sapiens
LQGLRRLELASNHFLY

SEQ ID NO: 76850 - protein, 16 aa, Homo Sapiens
QGLRRLELASNHFLYL

SEQ ID NO: 76851 - protein, 16 aa, Homo Sapiens
GLRRLELASNHFLYLP

SEQ ID NO: 76852 - protein, 16 aa, Homo Sapiens
LRRLELASNHFLYLPR

SEQ ID NO: 76853 - protein, 16 aa, Homo Sapiens
RRLELASNHFLYLPRD

SEQ ID NO: 76854 - protein, 16 aa, Homo Sapiens
RLELASNHFLYLPRDV

SEQ ID NO: 76855 - protein, 16 aa, Homo Sapiens
LELASNHFLYLPRDVL

SEQ ID NO: 76856 - protein, 16 aa, Homo Sapiens
ELASNHFLYLPRDVLA

SEQ ID NO: 76857 - protein, 16 aa, Homo Sapiens
LASNHFLYLPRDVLAQ

SEQ ID NO: 76858 - protein, 16 aa, Homo Sapiens
ASNHFLYLPRDVLAQL

SEQ ID NO: 76859 - protein, 16 aa, Homo Sapiens
SNHFLYLPRDVLAQLP

SEQ ID NO: 76860 - protein, 16 aa, Homo Sapiens
NHFLYLPRDVLAQLPS

SEQ ID NO: 76861 - protein, 16 aa, Homo Sapiens
HFLYLPRDVLAQLPSL

SEQ ID NO: 76862 - protein, 16 aa, Homo Sapiens
FLYLPRDVLAQLPSLR

SEQ ID NO: 76863 - protein, 16 aa, Homo Sapiens
LYLPRDVLAQLPSLRH

SEQ ID NO: 76864 - protein, 16 aa, Homo Sapiens
YLPRDVLAQLPSLRHL

SEQ ID NO: 76865 - protein, 16 aa, Homo Sapiens
LPRDVLAQLPSLRHLD

SEQ ID NO: 76866 - protein, 16 aa, Homo Sapiens
PRDVLAQLPSLRHLDL

SEQ ID NO: 76867 - protein, 16 aa, Homo Sapiens
RDVLAQLPSLRHLDLS

SEQ ID NO: 76868 - protein, 16 aa, Homo Sapiens
DVLAQLPSLRHLDLSN

SEQ ID NO: 76869 - protein, 16 aa, Homo Sapiens
VLAQLPSLRHLDLSNN

SEQ ID NO: 76870 - protein, 16 aa, Homo Sapiens
LAQLPSLRHLDLSNNS

SEQ ID NO: 76871 - protein, 16 aa, Homo Sapiens
AQLPSLRHLDLSNNSL

SEQ ID NO: 76872 - protein, 16 aa, Homo Sapiens
QLPSLRHLDLSNNSLV

SEQ ID NO: 76873 - protein, 16 aa, Homo Sapiens
LPSLRHLDLSNNSLVS

SEQ ID NO: 76874 - protein, 16 aa, Homo Sapiens
PSLRHLDLSNNSLVSL

SEQ ID NO: 76875 - protein, 16 aa, Homo Sapiens
SLRHLDLSNNSLVSLT

SEQ ID NO: 76876 - protein, 16 aa, Homo Sapiens
LRHLDLSNNSLVSLTY

SEQ ID NO: 76877 - protein, 16 aa, Homo Sapiens
RHLDLSNNSLVSLTYV

SEQ ID NO: 76878 - protein, 16 aa, Homo Sapiens
HLDLSNNSLVSLTYVS

SEQ ID NO: 76879 - protein, 16 aa, Homo Sapiens
LDLSNNSLVSLTYVSF

SEQ ID NO: 76880 - protein, 16 aa, Homo Sapiens
DLSNNSLVSLTYVSFR

SEQ ID NO: 76881 - protein, 16 aa, Homo Sapiens
LSNNSLVSLTYVSFRN

SEQ ID NO: 76882 - protein, 16 aa, Homo Sapiens
SNNSLVSLTYVSFRNL

SEQ ID NO: 76883 - protein, 16 aa, Homo Sapiens
NNSLVSLTYVSFRNLT

SEQ ID NO: 76884 - protein, 16 aa, Homo Sapiens
NSLVSLTYVSFRNLTH

SEQ ID NO: 76885 - protein, 16 aa, Homo Sapiens
SLVSLTYVSFRNLTHL

SEQ ID NO: 76886 - protein, 16 aa, Homo Sapiens
LVSLTYVSFRNLTHLE

SEQ ID NO: 76887 - protein, 16 aa, Homo Sapiens
VSLTYVSFRNLTHLES

SEQ ID NO: 76888 - protein, 16 aa, Homo Sapiens
SLTYVSFRNLTHLESL

SEQ ID NO: 76889 - protein, 16 aa, Homo Sapiens
LTYVSFRNLTHLESLH

SEQ ID NO: 76890 - protein, 16 aa, Homo Sapiens
TYVSFRNLTHLESLHL

SEQ ID NO: 76891 - protein, 16 aa, Homo Sapiens
YVSFRNLTHLESLHLE

SEQ ID NO: 76892 - protein, 16 aa, Homo Sapiens
VSFRNLTHLESLHLED

SEQ ID NO: 76893 - protein, 16 aa, Homo Sapiens
SFRNLTHLESLHLEDN

SEQ ID NO: 76894 - protein, 16 aa, Homo Sapiens
FRNLTHLESLHLEDNA

SEQ ID NO: 76895 - protein, 16 aa, Homo Sapiens
RNLTHLESLHLEDNAL

SEQ ID NO: 76896 - protein, 16 aa, Homo Sapiens
NLTHLESLHLEDNALK

SEQ ID NO: 76897 - protein, 16 aa, Homo Sapiens
LTHLESLHLEDNALKV

SEQ ID NO: 76898 - protein, 16 aa, Homo Sapiens
THLESLHLEDNALKVL

SEQ ID NO: 76899 - protein, 16 aa, Homo Sapiens
HLESLHLEDNALKVLH

SEQ ID NO: 76900 - protein, 16 aa, Homo Sapiens
LESLHLEDNALKVLHN

SEQ ID NO: 76901 - protein, 16 aa, Homo Sapiens
ESLHLEDNALKVLHNG

SEQ ID NO: 76902 - protein, 16 aa, Homo Sapiens
SLHLEDNALKVLHNGT

SEQ ID NO: 76903 - protein, 16 aa, Homo Sapiens
LHLEDNALKVLHNGTL

SEQ ID NO: 76904 - protein, 16 aa, Homo Sapiens
HLEDNALKVLHNGTLA

SEQ ID NO: 76905 - protein, 16 aa, Homo Sapiens
LEDNALKVLHNGTLAE

SEQ ID NO: 76906 - protein, 16 aa, Homo Sapiens
EDNALKVLHNGTLAEL

SEQ ID NO: 76907 - protein, 16 aa, Homo Sapiens
DNALKVLHNGTLAELQ

SEQ ID NO: 76908 - protein, 16 aa, Homo Sapiens
NALKVLHNGTLAELQG

SEQ ID NO: 76909 - protein, 16 aa, Homo Sapiens
ALKVLHNGTLAELQGL

SEQ ID NO: 76910 - protein, 16 aa, Homo Sapiens
LKVLHNGTLAELQGLP

SEQ ID NO: 76911 - protein, 16 aa, Homo Sapiens
KVLHNGTLAELQGLPH

SEQ ID NO: 76912 - protein, 16 aa, Homo Sapiens
VLHNGTLAELQGLPHI

SEQ ID NO: 76913 - protein, 16 aa, Homo Sapiens
LHNGTLAELQGLPHIR

SEQ ID NO: 76914 - protein, 16 aa, Homo Sapiens
HNGTLAELQGLPHIRV

SEQ ID NO: 76915 - protein, 16 aa, Homo Sapiens
NGTLAELQGLPHIRVF

SEQ ID NO: 76916 - protein, 16 aa, Homo Sapiens
GTLAELQGLPHIRVFL

SEQ ID NO: 76917 - protein, 16 aa, Homo Sapiens
TLAELQGLPHIRVFLD

SEQ ID NO: 76918 - protein, 16 aa, Homo Sapiens
LAELQGLPHIRVFLDN

SEQ ID NO: 76919 - protein, 16 aa, Homo Sapiens
AELQGLPHIRVFLDNN

SEQ ID NO: 76920 - protein, 16 aa, Homo Sapiens
ELQGLPHIRVFLDNNP

SEQ ID NO: 76921 - protein, 16 aa, Homo Sapiens
LQGLPHIRVFLDNNPW

SEQ ID NO: 76922 - protein, 16 aa, Homo Sapiens
QGLPHIRVFLDNNPWV

SEQ ID NO: 76923 - protein, 16 aa, Homo Sapiens
GLPHIRVFLDNNPWVC

SEQ ID NO: 76924 - protein, 16 aa, Homo Sapiens
LPHIRVFLDNNPWVCD

SEQ ID NO: 76925 - protein, 16 aa, Homo Sapiens
PHIRVFLDNNPWVCDC

SEQ ID NO: 76926 - protein, 16 aa, Homo Sapiens
HIRVFLDNNPWVCDCH

SEQ ID NO: 76927 - protein, 16 aa, Homo Sapiens
IRVFLDNNPWVCDCHM

SEQ ID NO: 76928 - protein, 16 aa, Homo Sapiens
RVFLDNNPWVCDCHMA

SEQ ID NO: 76929 - protein, 16 aa, Homo Sapiens
VFLDNNPWVCDCHMAD

SEQ ID NO: 76930 - protein, 16 aa, Homo Sapiens
FLDNNPWVCDCHMADM

SEQ ID NO: 76931 - protein, 16 aa, Homo Sapiens
LDNNPWVCDCHMADMV

SEQ ID NO: 76932 - protein, 16 aa, Homo Sapiens
DNNPWVCDCHMADMVT

SEQ ID NO: 76933 - protein, 16 aa, Homo Sapiens
NNPWVCDCHMADMVTW

SEQ ID NO: 76934 - protein, 16 aa, Homo Sapiens
NPWVCDCHMADMVTWL

SEQ ID NO: 76935 - protein, 16 aa, Homo Sapiens
PWVCDCHMADMVTWLK

SEQ ID NO: 76936 - protein, 16 aa, Homo Sapiens
WVCDCHMADMVTWLKE

SEQ ID NO: 76937 - protein, 16 aa, Homo Sapiens
VCDCHMADMVTWLKET

SEQ ID NO: 76938 - protein, 16 aa, Homo Sapiens
CDCHMADMVTWLKETE

SEQ ID NO: 76939 - protein, 16 aa, Homo Sapiens
DCHMADMVTWLKETEV

SEQ ID NO: 76940 - protein, 16 aa, Homo Sapiens
CHMADMVTWLKETEVV

SEQ ID NO: 76941 - protein, 16 aa, Homo Sapiens
HMADMVTWLKETEVVQ

SEQ ID NO: 76942 - protein, 16 aa, Homo Sapiens
MADMVTWLKETEVVQG

SEQ ID NO: 76943 - protein, 16 aa, Homo Sapiens
ADMVTWLKETEVVQGK

SEQ ID NO: 76944 - protein, 16 aa, Homo Sapiens
DMVTWLKETEVVQGKD

SEQ ID NO: 76945 - protein, 16 aa, Homo Sapiens
MVTWLKETEVVQGKDR

SEQ ID NO: 76946 - protein, 16 aa, Homo Sapiens
VTWLKETEVVQGKDRL

SEQ ID NO: 76947 - protein, 16 aa, Homo Sapiens
TWLKETEVVQGKDRLT

SEQ ID NO: 76948 - protein, 16 aa, Homo Sapiens
WLKETEVVQGKDRLTC

SEQ ID NO: 76949 - protein, 16 aa, Homo Sapiens
LKETEVVQGKDRLTCA

SEQ ID NO: 76950 - protein, 16 aa, Homo Sapiens
KETEVVQGKDRLTCAY

SEQ ID NO: 76951 - protein, 16 aa, Homo Sapiens
ETEVVQGKDRLTCAYP

SEQ ID NO: 76952 - protein, 16 aa, Homo Sapiens
TEVVQGKDRLTCAYPE

SEQ ID NO: 76953 - protein, 16 aa, Homo Sapiens
EVVQGKDRLTCAYPEK

SEQ ID NO: 76954 - protein, 16 aa, Homo Sapiens
VVQGKDRLTCAYPEKM

SEQ ID NO: 76955 - protein, 16 aa, Homo Sapiens
VQGKDRLTCAYPEKMR

SEQ ID NO: 76956 - protein, 16 aa, Homo Sapiens
QGKDRLTCAYPEKMRN

SEQ ID NO: 76957 - protein, 16 aa, Homo Sapiens
GKDRLTCAYPEKMRNR

SEQ ID NO: 76958 - protein, 16 aa, Homo Sapiens
KDRLTCAYPEKMRNRV

SEQ ID NO: 76959 - protein, 16 aa, Homo Sapiens
DRLTCAYPEKMRNRVL

SEQ ID NO: 76960 - protein, 16 aa, Homo Sapiens
RLTCAYPEKMRNRVLL

SEQ ID NO: 76961 - protein, 16 aa, Homo Sapiens
LTCAYPEKMRNRVLLE

SEQ ID NO: 76962 - protein, 16 aa, Homo Sapiens
TCAYPEKMRNRVLLEL

SEQ ID NO: 76963 - protein, 16 aa, Homo Sapiens
CAYPEKMRNRVLLELN

SEQ ID NO: 76964 - protein, 16 aa, Homo Sapiens
AYPEKMRNRVLLELNS

SEQ ID NO: 76965 - protein, 16 aa, Homo Sapiens
YPEKMRNRVLLELNSA

SEQ ID NO: 76966 - protein, 16 aa, Homo Sapiens
PEKMRNRVLLELNSAD

SEQ ID NO: 76967 - protein, 16 aa, Homo Sapiens
EKMRNRVLLELNSADL

SEQ ID NO: 76968 - protein, 16 aa, Homo Sapiens
KMRNRVLLELNSADLD

SEQ ID NO: 76969 - protein, 16 aa, Homo Sapiens
MRNRVLLELNSADLDC

SEQ ID NO: 76970 - protein, 16 aa, Homo Sapiens
RNRVLLELNSADLDCD

SEQ ID NO: 76971 - protein, 16 aa, Homo Sapiens
NRVLLELNSADLDCDP

SEQ ID NO: 76972 - protein, 16 aa, Homo Sapiens
RVLLELNSADLDCDPI

SEQ ID NO: 76973 - protein, 16 aa, Homo Sapiens
VLLELNSADLDCDPIL

SEQ ID NO: 76974 - protein, 16 aa, Homo Sapiens
LLELNSADLDCDPILP

SEQ ID NO: 76975 - protein, 16 aa, Homo Sapiens
LELNSADLDCDPILPP

SEQ ID NO: 76976 - protein, 16 aa, Homo Sapiens
ELNSADLDCDPILPPS

SEQ ID NO: 76977 - protein, 16 aa, Homo Sapiens
LNSADLDCDPILPPSL

SEQ ID NO: 76978 - protein, 16 aa, Homo Sapiens
NSADLDCDPILPPSLQ

SEQ ID NO: 76979 - protein, 16 aa, Homo Sapiens
SADLDCDPILPPSLQT

SEQ ID NO: 76980 - protein, 16 aa, Homo Sapiens
ADLDCDPILPPSLQTS

SEQ ID NO: 76981 - protein, 16 aa, Homo Sapiens
DLDCDPILPPSLQTSY

SEQ ID NO: 76982 - protein, 16 aa, Homo Sapiens
LDCDPILPPSLQTSYV

SEQ ID NO: 76983 - protein, 16 aa, Homo Sapiens
DCDPILPPSLQTSYVF

SEQ ID NO: 76984 - protein, 16 aa, Homo Sapiens
CDPILPPSLQTSYVFL

SEQ ID NO: 76985 - protein, 16 aa, Homo Sapiens
DPILPPSLQTSYVFLG

SEQ ID NO: 76986 - protein, 16 aa, Homo Sapiens
PILPPSLQTSYVFLGI

SEQ ID NO: 76987 - protein, 16 aa, Homo Sapiens
ILPPSLQTSYVFLGIV

SEQ ID NO: 76988 - protein, 16 aa, Homo Sapiens
LPPSLQTSYVFLGIVL

SEQ ID NO: 76989 - protein, 16 aa, Homo Sapiens
PPSLQTSYVFLGIVLA

SEQ ID NO: 76990 - protein, 16 aa, Homo Sapiens
PSLQTSYVFLGIVLAL

SEQ ID NO: 76991 - protein, 16 aa, Homo Sapiens
SLQTSYVFLGIVLALI

SEQ ID NO: 76992 - protein, 16 aa, Homo Sapiens
LQTSYVFLGIVLALIG

SEQ ID NO: 76993 - protein, 16 aa, Homo Sapiens
QTSYVFLGIVLALIGA

SEQ ID NO: 76994 - protein, 16 aa, Homo Sapiens
TSYVFLGIVLALIGAI

SEQ ID NO: 76995 - protein, 16 aa, Homo Sapiens
SYVFLGIVLALIGAIF

SEQ ID NO: 76996 - protein, 16 aa, Homo Sapiens
YVFLGIVLALIGAIFL

SEQ ID NO: 76997 - protein, 16 aa, Homo Sapiens
VFLGIVLALIGAIFLL

SEQ ID NO: 76998 - protein, 16 aa, Homo Sapiens
FLGIVLALIGAIFLLV

SEQ ID NO: 76999 - protein, 16 aa, Homo Sapiens
LGIVLALIGAIFLLVL

SEQ ID NO: 77000 - protein, 16 aa, Homo Sapiens
GIVLALIGAIFLLVLY

SEQ ID NO: 77001 - protein, 16 aa, Homo Sapiens
IVLALIGAIFLLVLYL

SEQ ID NO: 77002 - protein, 16 aa, Homo Sapiens
VLALIGAIFLLVLYLN

SEQ ID NO: 77003 - protein, 16 aa, Homo Sapiens
LALIGAIFLLVLYLNR

SEQ ID NO: 77004 - protein, 16 aa, Homo Sapiens
ALIGAIFLLVLYLNRK

SEQ ID NO: 77005 - protein, 16 aa, Homo Sapiens
LIGAIFLLVLYLNRKG

SEQ ID NO: 77006 - protein, 16 aa, Homo Sapiens
IGAIFLLVLYLNRKGI

SEQ ID NO: 77007 - protein, 16 aa, Homo Sapiens
GAIFLLVLYLNRKGIK

SEQ ID NO: 77008 - protein, 16 aa, Homo Sapiens
AIFLLVLYLNRKGIKK

SEQ ID NO: 77009 - protein, 16 aa, Homo Sapiens
IFLLVLYLNRKGIKKW

SEQ ID NO: 77010 - protein, 16 aa, Homo Sapiens
FLLVLYLNRKGIKKWM

SEQ ID NO: 77011 - protein, 16 aa, Homo Sapiens
LLVLYLNRKGIKKWMH

SEQ ID NO: 77012 - protein, 16 aa, Homo Sapiens
LVLYLNRKGIKKWMHN

SEQ ID NO: 77013 - protein, 16 aa, Homo Sapiens
VLYLNRKGIKKWMHNI

SEQ ID NO: 77014 - protein, 16 aa, Homo Sapiens
LYLNRKGIKKWMHNIR

SEQ ID NO: 77015 - protein, 16 aa, Homo Sapiens
YLNRKGIKKWMHNIRD

SEQ ID NO: 77016 - protein, 16 aa, Homo Sapiens
LNRKGIKKWMHNIRDA

SEQ ID NO: 77017 - protein, 16 aa, Homo Sapiens
NRKGIKKWMHNIRDAC

SEQ ID NO: 77018 - protein, 16 aa, Homo Sapiens
RKGIKKWMHNIRDACR

SEQ ID NO: 77019 - protein, 16 aa, Homo Sapiens
KGIKKWMHNIRDACRD

SEQ ID NO: 77020 - protein, 16 aa, Homo Sapiens
GIKKWMHNIRDACRDH

SEQ ID NO: 77021 - protein, 16 aa, Homo Sapiens
IKKWMHNIRDACRDHM

SEQ ID NO: 77022 - protein, 16 aa, Homo Sapiens
KKWMHNIRDACRDHME

SEQ ID NO: 77023 - protein, 16 aa, Homo Sapiens
KWMHNIRDACRDHMEG

SEQ ID NO: 77024 - protein, 16 aa, Homo Sapiens
WMHNIRDACRDHMEGY

SEQ ID NO: 77025 - protein, 16 aa, Homo Sapiens
MHNIRDACRDHMEGYH

SEQ ID NO: 77026 - protein, 16 aa, Homo Sapiens
HNIRDACRDHMEGYHY

SEQ ID NO: 77027 - protein, 16 aa, Homo Sapiens
NIRDACRDHMEGYHYR

SEQ ID NO: 77028 - protein, 16 aa, Homo Sapiens
IRDACRDHMEGYHYRY

SEQ ID NO: 77029 - protein, 16 aa, Homo Sapiens
RDACRDHMEGYHYRYE

SEQ ID NO: 77030 - protein, 16 aa, Homo Sapiens
DACRDHMEGYHYRYEI

SEQ ID NO: 77031 - protein, 16 aa, Homo Sapiens
ACRDHMEGYHYRYEIN

SEQ ID NO: 77032 - protein, 16 aa, Homo Sapiens
CRDHMEGYHYRYEINA

SEQ ID NO: 77033 - protein, 16 aa, Homo Sapiens
RDHMEGYHYRYEINAD

SEQ ID NO: 77034 - protein, 16 aa, Homo Sapiens
DHMEGYHYRYEINADP

SEQ ID NO: 77035 - protein, 16 aa, Homo Sapiens
HMEGYHYRYEINADPR

SEQ ID NO: 77036 - protein, 16 aa, Homo Sapiens
MEGYHYRYEINADPRL

SEQ ID NO: 77037 - protein, 16 aa, Homo Sapiens
EGYHYRYEINADPRLT

SEQ ID NO: 77038 - protein, 16 aa, Homo Sapiens
GYHYRYEINADPRLTN

SEQ ID NO: 77039 - protein, 16 aa, Homo Sapiens
YHYRYEINADPRLTNL

SEQ ID NO: 77040 - protein, 16 aa, Homo Sapiens
HYRYEINADPRLTNLS

SEQ ID NO: 77041 - protein, 16 aa, Homo Sapiens
YRYEINADPRLTNLSS

SEQ ID NO: 77042 - protein, 16 aa, Homo Sapiens
RYEINADPRLTNLSSN

SEQ ID NO: 77043 - protein, 16 aa, Homo Sapiens
YEINADPRLTNLSSNS

SEQ ID NO: 77044 - protein, 16 aa, Homo Sapiens
EINADPRLTNLSSNSD

SEQ ID NO: 77045 - protein, 16 aa, Homo Sapiens
INADPRLTNLSSNSDV

SEQ ID NO: 77046 - protein, 98 aa, Homo Sapiens
MSPLWWGFLLSCLGCKILPGAQGQFPRVCMTVDSLVNKECCPRLGAESANVCGSQQGRGQCTEVRADTRPWSGPYILRNQDDRELWPRKFFHRTCKCT

SEQ ID NO: 77047 - protein, 8 aa, Homo Sapiens
SPLWWGFL

SEQ ID NO: 77048 - protein, 8 aa, Homo Sapiens
PLWWGFLL

SEQ ID NO: 77049 - protein, 8 aa, Homo Sapiens
FLLSCLGC

SEQ ID NO: 77050 - protein, 8 aa, Homo Sapiens
LLSCLGCK

SEQ ID NO: 77051 - protein, 8 aa, Homo Sapiens
ILPGAQGQ

SEQ ID NO: 77052 - protein, 8 aa, Homo Sapiens
LPGAQGQF

SEQ ID NO: 77053 - protein, 8 aa, Homo Sapiens
GAQGQFPR

SEQ ID NO: 77054 - protein, 8 aa, Homo Sapiens
AQGQFPRV

SEQ ID NO: 77055 - protein, 8 aa, Homo Sapiens
GQFPRVCM

SEQ ID NO: 77056 - protein, 8 aa, Homo Sapiens
FPRVCMTV

SEQ ID NO: 77057 - protein, 8 aa, Homo Sapiens
CMTVDSLV

SEQ ID NO: 77058 - protein, 8 aa, Homo Sapiens
TVDSLVNK

SEQ ID NO: 77059 - protein, 8 aa, Homo Sapiens
LGAESANV

SEQ ID NO: 77060 - protein, 8 aa, Homo Sapiens
AESANVCG

SEQ ID NO: 77061 - protein, 8 aa, Homo Sapiens
RPWSGPYI

SEQ ID NO: 77062 - protein, 8 aa, Homo Sapiens
WSGPYILR

SEQ ID NO: 77063 - protein, 8 aa, Homo Sapiens
DDRELWPR

SEQ ID NO: 77064 - protein, 8 aa, Homo Sapiens
RELWPRKF

SEQ ID NO: 77065 - protein, 8 aa, Homo Sapiens
ELWPRKFF

SEQ ID NO: 77066 - protein, 8 aa, Homo Sapiens
WPRKFFHR

SEQ ID NO: 77067 - protein, 8 aa, Homo Sapiens
KFFHRTCK

SEQ ID NO: 77068 - protein, 9 aa, Homo Sapiens
MSPLWWGFL

SEQ ID NO: 77069 - protein, 9 aa, Homo Sapiens
SPLWWGFLL

SEQ ID NO: 77070 - protein, 9 aa, Homo Sapiens
PLWWGFLLS

SEQ ID NO: 77071 - protein, 9 aa, Homo Sapiens
FLLSCLGCK

SEQ ID NO: 77072 - protein, 9 aa, Homo Sapiens
LLSCLGCKI

SEQ ID NO: 77073 - protein, 9 aa, Homo Sapiens
KILPGAQGQ

SEQ ID NO: 77074 - protein, 9 aa, Homo Sapiens
GAQGQFPRV

SEQ ID NO: 77075 - protein, 9 aa, Homo Sapiens
GQFPRVCMT

SEQ ID NO: 77076 - protein, 9 aa, Homo Sapiens
QFPRVCMTV

SEQ ID NO: 77077 - protein, 9 aa, Homo Sapiens
FPRVCMTVD

SEQ ID NO: 77078 - protein, 9 aa, Homo Sapiens
VCMTVDSLV

SEQ ID NO: 77079 - protein, 9 aa, Homo Sapiens
MTVDSLVNK

SEQ ID NO: 77080 - protein, 9 aa, Homo Sapiens
LVNKECCPR

SEQ ID NO: 77081 - protein, 9 aa, Homo Sapiens
CPRLGAESA

SEQ ID NO: 77082 - protein, 9 aa, Homo Sapiens
RLGAESANV

SEQ ID NO: 77083 - protein, 9 aa, Homo Sapiens
AESANVCGS

SEQ ID NO: 77084 - protein, 9 aa, Homo Sapiens
NVCGSQQGR

SEQ ID NO: 77085 - protein, 9 aa, Homo Sapiens
CTEVRADTR

SEQ ID NO: 77086 - protein, 9 aa, Homo Sapiens
EVRADTRPW

SEQ ID NO: 77087 - protein, 9 aa, Homo Sapiens
DTRPWSGPY

SEQ ID NO: 77088 - protein, 9 aa, Homo Sapiens
RPWSGPYIL

SEQ ID NO: 77089 - protein, 9 aa, Homo Sapiens
YILRNQDDR

SEQ ID NO: 77090 - protein, 9 aa, Homo Sapiens
RELWPRKFF

SEQ ID NO: 77091 - protein, 9 aa, Homo Sapiens
ELWPRKFFH

SEQ ID NO: 77092 - protein, 9 aa, Homo Sapiens
LWPRKFFHR

SEQ ID NO: 77093 - protein, 9 aa, Homo Sapiens
WPRKFFHRT

SEQ ID NO: 77094 - protein, 9 aa, Homo Sapiens
RKFFHRTCK

SEQ ID NO: 77095 - protein, 10 aa, Homo Sapiens
MSPLWWGFLL

SEQ ID NO: 77096 - protein, 10 aa, Homo Sapiens
SPLWWGFLLS

SEQ ID NO: 77097 - protein, 10 aa, Homo Sapiens
PLWWGFLLSC

SEQ ID NO: 77098 - protein, 10 aa, Homo Sapiens
GFLLSCLGCK

SEQ ID NO: 77099 - protein, 10 aa, Homo Sapiens
FLLSCLGCKI

SEQ ID NO: 77100 - protein, 10 aa, Homo Sapiens
LLSCLGCKIL

SEQ ID NO: 77101 - protein, 10 aa, Homo Sapiens
CLGCKILPGA

SEQ ID NO: 77102 - protein, 10 aa, Homo Sapiens
KILPGAQGQF

SEQ ID NO: 77103 - protein, 10 aa, Homo Sapiens
GQFPRVCMTV

SEQ ID NO: 77104 - protein, 10 aa, Homo Sapiens
FPRVCMTVDS

SEQ ID NO: 77105 - protein, 10 aa, Homo Sapiens
RVCMTVDSLV

SEQ ID NO: 77106 - protein, 10 aa, Homo Sapiens
CMTVDSLVNK

SEQ ID NO: 77107 - protein, 10 aa, Homo Sapiens
MTVDSLVNKE

SEQ ID NO: 77108 - protein, 10 aa, Homo Sapiens
SLVNKECCPR

SEQ ID NO: 77109 - protein, 10 aa, Homo Sapiens
AESANVCGSQ

SEQ ID NO: 77110 - protein, 10 aa, Homo Sapiens
QQGRGQCTEV

SEQ ID NO: 77111 - protein, 10 aa, Homo Sapiens
TEVRADTRPW

SEQ ID NO: 77112 - protein, 10 aa, Homo Sapiens
DTRPWSGPYI

SEQ ID NO: 77113 - protein, 10 aa, Homo Sapiens
ILRNQDDREL

SEQ ID NO: 77114 - protein, 10 aa, Homo Sapiens
ELWPRKFFHR

SEQ ID NO: 77115 - protein, 10 aa, Homo Sapiens
WPRKFFHRTC

SEQ ID NO: 77116 - protein, 11 aa, Homo Sapiens
SPLWWGFLLSC

SEQ ID NO: 77117 - protein, 11 aa, Homo Sapiens
PLWWGFLLSCL

SEQ ID NO: 77118 - protein, 11 aa, Homo Sapiens
FLLSCLGCKIL

SEQ ID NO: 77119 - protein, 11 aa, Homo Sapiens
ILPGAQGQFPR

SEQ ID NO: 77120 - protein, 11 aa, Homo Sapiens
LPGAQGQFPRV

SEQ ID NO: 77121 - protein, 11 aa, Homo Sapiens
FPRVCMTVDSL

SEQ ID NO: 77122 - protein, 11 aa, Homo Sapiens
DSLVNKECCPR

SEQ ID NO: 77123 - protein, 11 aa, Homo Sapiens
SLVNKECCPRL

SEQ ID NO: 77124 - protein, 11 aa, Homo Sapiens
CPRLGAESANV

SEQ ID NO: 77125 - protein, 11 aa, Homo Sapiens
SANVCGSQQGR

SEQ ID NO: 77126 - protein, 11 aa, Homo Sapiens
SQQGRGQCTEV

SEQ ID NO: 77127 - protein, 11 aa, Homo Sapiens
RADTRPWSGPY

SEQ ID NO: 77128 - protein, 11 aa, Homo Sapiens
DTRPWSGPYIL

SEQ ID NO: 77129 - protein, 11 aa, Homo Sapiens
YILRNQDDREL

SEQ ID NO: 77130 - protein, 11 aa, Homo Sapiens
RNQDDRELWPR

SEQ ID NO: 77131 - protein, 11 aa, Homo Sapiens
DDRELWPRKFF

SEQ ID NO: 77132 - protein, 11 aa, Homo Sapiens
RELWPRKFFHR

SEQ ID NO: 77133 - protein, 11 aa, Homo Sapiens
ELWPRKFFHRT

SEQ ID NO: 77134 - protein, 11 aa, Homo Sapiens
WPRKFFHRTCK

SEQ ID NO: 77135 - protein, 13 aa, Homo Sapiens
MSPLWWGFLLSCL

SEQ ID NO: 77136 - protein, 13 aa, Homo Sapiens
SPLWWGFLLSCLG

SEQ ID NO: 77137 - protein, 13 aa, Homo Sapiens
PLWWGFLLSCLGC

SEQ ID NO: 77138 - protein, 13 aa, Homo Sapiens
LWWGFLLSCLGCK

SEQ ID NO: 77139 - protein, 13 aa, Homo Sapiens
WWGFLLSCLGCKI

SEQ ID NO: 77140 - protein, 13 aa, Homo Sapiens
WGFLLSCLGCKIL

SEQ ID NO: 77141 - protein, 13 aa, Homo Sapiens
GFLLSCLGCKILP

SEQ ID NO: 77142 - protein, 13 aa, Homo Sapiens
FLLSCLGCKILPG

SEQ ID NO: 77143 - protein, 13 aa, Homo Sapiens
LLSCLGCKILPGA

SEQ ID NO: 77144 - protein, 13 aa, Homo Sapiens
LSCLGCKILPGAQ

SEQ ID NO: 77145 - protein, 13 aa, Homo Sapiens
SCLGCKILPGAQG

SEQ ID NO: 77146 - protein, 13 aa, Homo Sapiens
CLGCKILPGAQGQ

SEQ ID NO: 77147 - protein, 13 aa, Homo Sapiens
LGCKILPGAQGQF

SEQ ID NO: 77148 - protein, 13 aa, Homo Sapiens
GCKILPGAQGQFP

SEQ ID NO: 77149 - protein, 13 aa, Homo Sapiens
CKILPGAQGQFPR

SEQ ID NO: 77150 - protein, 13 aa, Homo Sapiens
KILPGAQGQFPRV

SEQ ID NO: 77151 - protein, 13 aa, Homo Sapiens
ILPGAQGQFPRVC

SEQ ID NO: 77152 - protein, 13 aa, Homo Sapiens
LPGAQGQFPRVCM

SEQ ID NO: 77153 - protein, 13 aa, Homo Sapiens
PGAQGQFPRVCMT

SEQ ID NO: 77154 - protein, 13 aa, Homo Sapiens
GAQGQFPRVCMTV

SEQ ID NO: 77155 - protein, 13 aa, Homo Sapiens
AQGQFPRVCMTVD

SEQ ID NO: 77156 - protein, 13 aa, Homo Sapiens
QGQFPRVCMTVDS

SEQ ID NO: 77157 - protein, 13 aa, Homo Sapiens
GQFPRVCMTVDSL

SEQ ID NO: 77158 - protein, 13 aa, Homo Sapiens
QFPRVCMTVDSLV

SEQ ID NO: 77159 - protein, 13 aa, Homo Sapiens
FPRVCMTVDSLVN

SEQ ID NO: 77160 - protein, 13 aa, Homo Sapiens
PRVCMTVDSLVNK

SEQ ID NO: 77161 - protein, 13 aa, Homo Sapiens
RVCMTVDSLVNKE

SEQ ID NO: 77162 - protein, 13 aa, Homo Sapiens
VCMTVDSLVNKEC

SEQ ID NO: 77163 - protein, 13 aa, Homo Sapiens
CMTVDSLVNKECC

SEQ ID NO: 77164 - protein, 13 aa, Homo Sapiens
MTVDSLVNKECCP

SEQ ID NO: 77165 - protein, 13 aa, Homo Sapiens
TVDSLVNKECCPR

SEQ ID NO: 77166 - protein, 13 aa, Homo Sapiens
VDSLVNKECCPRL

SEQ ID NO: 77167 - protein, 13 aa, Homo Sapiens
DSLVNKECCPRLG

SEQ ID NO: 77168 - protein, 13 aa, Homo Sapiens
SLVNKECCPRLGA

SEQ ID NO: 77169 - protein, 13 aa, Homo Sapiens
LVNKECCPRLGAE

SEQ ID NO: 77170 - protein, 13 aa, Homo Sapiens
VNKECCPRLGAES

SEQ ID NO: 77171 - protein, 13 aa, Homo Sapiens
NKECCPRLGAESA

SEQ ID NO: 77172 - protein, 13 aa, Homo Sapiens
KECCPRLGAESAN

SEQ ID NO: 77173 - protein, 13 aa, Homo Sapiens
ECCPRLGAESANV

SEQ ID NO: 77174 - protein, 13 aa, Homo Sapiens
CCPRLGAESANVC

SEQ ID NO: 77175 - protein, 13 aa, Homo Sapiens
CPRLGAESANVCG

SEQ ID NO: 77176 - protein, 13 aa, Homo Sapiens
PRLGAESANVCGS

SEQ ID NO: 77177 - protein, 13 aa, Homo Sapiens
RLGAESANVCGSQ

SEQ ID NO: 77178 - protein, 13 aa, Homo Sapiens
LGAESANVCGSQQ

SEQ ID NO: 77179 - protein, 13 aa, Homo Sapiens
GAESANVCGSQQG

SEQ ID NO: 77180 - protein, 13 aa, Homo Sapiens
AESANVCGSQQGR

SEQ ID NO: 77181 - protein, 13 aa, Homo Sapiens
ESANVCGSQQGRG

SEQ ID NO: 77182 - protein, 13 aa, Homo Sapiens
SANVCGSQQGRGQ

SEQ ID NO: 77183 - protein, 13 aa, Homo Sapiens
ANVCGSQQGRGQC

SEQ ID NO: 77184 - protein, 13 aa, Homo Sapiens
NVCGSQQGRGQCT

SEQ ID NO: 77185 - protein, 13 aa, Homo Sapiens
VCGSQQGRGQCTE

SEQ ID NO: 77186 - protein, 13 aa, Homo Sapiens
CGSQQGRGQCTEV

SEQ ID NO: 77187 - protein, 13 aa, Homo Sapiens
GSQQGRGQCTEVR

SEQ ID NO: 77188 - protein, 13 aa, Homo Sapiens
SQQGRGQCTEVRA

SEQ ID NO: 77189 - protein, 13 aa, Homo Sapiens
QQGRGQCTEVRAD

SEQ ID NO: 77190 - protein, 13 aa, Homo Sapiens
QGRGQCTEVRADT

SEQ ID NO: 77191 - protein, 13 aa, Homo Sapiens
GRGQCTEVRADTR

SEQ ID NO: 77192 - protein, 13 aa, Homo Sapiens
RGQCTEVRADTRP

SEQ ID NO: 77193 - protein, 13 aa, Homo Sapiens
GQCTEVRADTRPW

SEQ ID NO: 77194 - protein, 13 aa, Homo Sapiens
QCTEVRADTRPWS

SEQ ID NO: 77195 - protein, 13 aa, Homo Sapiens
CTEVRADTRPWSG

SEQ ID NO: 77196 - protein, 13 aa, Homo Sapiens
TEVRADTRPWSGP

SEQ ID NO: 77197 - protein, 13 aa, Homo Sapiens
EVRADTRPWSGPY

SEQ ID NO: 77198 - protein, 13 aa, Homo Sapiens
VRADTRPWSGPYI

SEQ ID NO: 77199 - protein, 13 aa, Homo Sapiens
RADTRPWSGPYIL

SEQ ID NO: 77200 - protein, 13 aa, Homo Sapiens
ADTRPWSGPYILR

SEQ ID NO: 77201 - protein, 13 aa, Homo Sapiens
DTRPWSGPYILRN

SEQ ID NO: 77202 - protein, 13 aa, Homo Sapiens
TRPWSGPYILRNQ

SEQ ID NO: 77203 - protein, 13 aa, Homo Sapiens
RPWSGPYILRNQD

SEQ ID NO: 77204 - protein, 13 aa, Homo Sapiens
PWSGPYILRNQDD

SEQ ID NO: 77205 - protein, 13 aa, Homo Sapiens
WSGPYILRNQDDR

SEQ ID NO: 77206 - protein, 13 aa, Homo Sapiens
SGPYILRNQDDRE

SEQ ID NO: 77207 - protein, 13 aa, Homo Sapiens
GPYILRNQDDREL

SEQ ID NO: 77208 - protein, 13 aa, Homo Sapiens
PYILRNQDDRELW

SEQ ID NO: 77209 - protein, 13 aa, Homo Sapiens
YILRNQDDRELWP

SEQ ID NO: 77210 - protein, 13 aa, Homo Sapiens
ILRNQDDRELWPR

SEQ ID NO: 77211 - protein, 13 aa, Homo Sapiens
LRNQDDRELWPRK

SEQ ID NO: 77212 - protein, 13 aa, Homo Sapiens
RNQDDRELWPRKF

SEQ ID NO: 77213 - protein, 13 aa, Homo Sapiens
NQDDRELWPRKFF

SEQ ID NO: 77214 - protein, 13 aa, Homo Sapiens
QDDRELWPRKFFH

SEQ ID NO: 77215 - protein, 13 aa, Homo Sapiens
DDRELWPRKFFHR

SEQ ID NO: 77216 - protein, 13 aa, Homo Sapiens
DRELWPRKFFHRT

SEQ ID NO: 77217 - protein, 13 aa, Homo Sapiens
RELWPRKFFHRTC

SEQ ID NO: 77218 - protein, 13 aa, Homo Sapiens
ELWPRKFFHRTCK

SEQ ID NO: 77219 - protein, 13 aa, Homo Sapiens
LWPRKFFHRTCKC

SEQ ID NO: 77220 - protein, 13 aa, Homo Sapiens
WPRKFFHRTCKCT

SEQ ID NO: 77221 - protein, 14 aa, Homo Sapiens
MSPLWWGFLLSCLG

SEQ ID NO: 77222 - protein, 14 aa, Homo Sapiens
SPLWWGFLLSCLGC

SEQ ID NO: 77223 - protein, 14 aa, Homo Sapiens
PLWWGFLLSCLGCK

SEQ ID NO: 77224 - protein, 14 aa, Homo Sapiens
LWWGFLLSCLGCKI

SEQ ID NO: 77225 - protein, 14 aa, Homo Sapiens
WWGFLLSCLGCKIL

SEQ ID NO: 77226 - protein, 14 aa, Homo Sapiens
WGFLLSCLGCKILP

SEQ ID NO: 77227 - protein, 14 aa, Homo Sapiens
GFLLSCLGCKILPG

SEQ ID NO: 77228 - protein, 14 aa, Homo Sapiens
FLLSCLGCKILPGA

SEQ ID NO: 77229 - protein, 14 aa, Homo Sapiens
LLSCLGCKILPGAQ

SEQ ID NO: 77230 - protein, 14 aa, Homo Sapiens
LSCLGCKILPGAQG

SEQ ID NO: 77231 - protein, 14 aa, Homo Sapiens
SCLGCKILPGAQGQ

SEQ ID NO: 77232 - protein, 14 aa, Homo Sapiens
CLGCKILPGAQGQF

SEQ ID NO: 77233 - protein, 14 aa, Homo Sapiens
LGCKILPGAQGQFP

SEQ ID NO: 77234 - protein, 14 aa, Homo Sapiens
GCKILPGAQGQFPR

SEQ ID NO: 77235 - protein, 14 aa, Homo Sapiens
CKILPGAQGQFPRV

SEQ ID NO: 77236 - protein, 14 aa, Homo Sapiens
KILPGAQGQFPRVC

SEQ ID NO: 77237 - protein, 14 aa, Homo Sapiens
ILPGAQGQFPRVCM

SEQ ID NO: 77238 - protein, 14 aa, Homo Sapiens
LPGAQGQFPRVCMT

SEQ ID NO: 77239 - protein, 14 aa, Homo Sapiens
PGAQGQFPRVCMTV

SEQ ID NO: 77240 - protein, 14 aa, Homo Sapiens
GAQGQFPRVCMTVD

SEQ ID NO: 77241 - protein, 14 aa, Homo Sapiens
AQGQFPRVCMTVDS

SEQ ID NO: 77242 - protein, 14 aa, Homo Sapiens
QGQFPRVCMTVDSL

SEQ ID NO: 77243 - protein, 14 aa, Homo Sapiens
GQFPRVCMTVDSLV

SEQ ID NO: 77244 - protein, 14 aa, Homo Sapiens
QFPRVCMTVDSLVN

SEQ ID NO: 77245 - protein, 14 aa, Homo Sapiens
FPRVCMTVDSLVNK

SEQ ID NO: 77246 - protein, 14 aa, Homo Sapiens
PRVCMTVDSLVNKE

SEQ ID NO: 77247 - protein, 14 aa, Homo Sapiens
RVCMTVDSLVNKEC

SEQ ID NO: 77248 - protein, 14 aa, Homo Sapiens
VCMTVDSLVNKECC

SEQ ID NO: 77249 - protein, 14 aa, Homo Sapiens
CMTVDSLVNKECCP

SEQ ID NO: 77250 - protein, 14 aa, Homo Sapiens
MTVDSLVNKECCPR

SEQ ID NO: 77251 - protein, 14 aa, Homo Sapiens
TVDSLVNKECCPRL

SEQ ID NO: 77252 - protein, 14 aa, Homo Sapiens
VDSLVNKECCPRLG

SEQ ID NO: 77253 - protein, 14 aa, Homo Sapiens
DSLVNKECCPRLGA

SEQ ID NO: 77254 - protein, 14 aa, Homo Sapiens
SLVNKECCPRLGAE

SEQ ID NO: 77255 - protein, 14 aa, Homo Sapiens
LVNKECCPRLGAES

SEQ ID NO: 77256 - protein, 14 aa, Homo Sapiens
VNKECCPRLGAESA

SEQ ID NO: 77257 - protein, 14 aa, Homo Sapiens
NKECCPRLGAESAN

SEQ ID NO: 77258 - protein, 14 aa, Homo Sapiens
KECCPRLGAESANV

SEQ ID NO: 77259 - protein, 14 aa, Homo Sapiens
ECCPRLGAESANVC

SEQ ID NO: 77260 - protein, 14 aa, Homo Sapiens
CCPRLGAESANVCG

SEQ ID NO: 77261 - protein, 14 aa, Homo Sapiens
CPRLGAESANVCGS

SEQ ID NO: 77262 - protein, 14 aa, Homo Sapiens
PRLGAESANVCGSQ

SEQ ID NO: 77263 - protein, 14 aa, Homo Sapiens
RLGAESANVCGSQQ

SEQ ID NO: 77264 - protein, 14 aa, Homo Sapiens
LGAESANVCGSQQG

SEQ ID NO: 77265 - protein, 14 aa, Homo Sapiens
GAESANVCGSQQGR

SEQ ID NO: 77266 - protein, 14 aa, Homo Sapiens
AESANVCGSQQGRG

SEQ ID NO: 77267 - protein, 14 aa, Homo Sapiens
ESANVCGSQQGRGQ

SEQ ID NO: 77268 - protein, 14 aa, Homo Sapiens
SANVCGSQQGRGQC

SEQ ID NO: 77269 - protein, 14 aa, Homo Sapiens
ANVCGSQQGRGQCT

SEQ ID NO: 77270 - protein, 14 aa, Homo Sapiens
NVCGSQQGRGQCTE

SEQ ID NO: 77271 - protein, 14 aa, Homo Sapiens
VCGSQQGRGQCTEV

SEQ ID NO: 77272 - protein, 14 aa, Homo Sapiens
CGSQQGRGQCTEVR

SEQ ID NO: 77273 - protein, 14 aa, Homo Sapiens
GSQQGRGQCTEVRA

SEQ ID NO: 77274 - protein, 14 aa, Homo Sapiens
SQQGRGQCTEVRAD

SEQ ID NO: 77275 - protein, 14 aa, Homo Sapiens
QQGRGQCTEVRADT

SEQ ID NO: 77276 - protein, 14 aa, Homo Sapiens
QGRGQCTEVRADTR

SEQ ID NO: 77277 - protein, 14 aa, Homo Sapiens
GRGQCTEVRADTRP

SEQ ID NO: 77278 - protein, 14 aa, Homo Sapiens
RGQCTEVRADTRPW

SEQ ID NO: 77279 - protein, 14 aa, Homo Sapiens
GQCTEVRADTRPWS

SEQ ID NO: 77280 - protein, 14 aa, Homo Sapiens
QCTEVRADTRPWSG

SEQ ID NO: 77281 - protein, 14 aa, Homo Sapiens
CTEVRADTRPWSGP

SEQ ID NO: 77282 - protein, 14 aa, Homo Sapiens
TEVRADTRPWSGPY

SEQ ID NO: 77283 - protein, 14 aa, Homo Sapiens
EVRADTRPWSGPYI

SEQ ID NO: 77284 - protein, 14 aa, Homo Sapiens
VRADTRPWSGPYIL

SEQ ID NO: 77285 - protein, 14 aa, Homo Sapiens
RADTRPWSGPYILR

SEQ ID NO: 77286 - protein, 14 aa, Homo Sapiens
ADTRPWSGPYILRN

SEQ ID NO: 77287 - protein, 14 aa, Homo Sapiens
DTRPWSGPYILRNQ

SEQ ID NO: 77288 - protein, 14 aa, Homo Sapiens
TRPWSGPYILRNQD

SEQ ID NO: 77289 - protein, 14 aa, Homo Sapiens
RPWSGPYILRNQDD

SEQ ID NO: 77290 - protein, 14 aa, Homo Sapiens
PWSGPYILRNQDDR

SEQ ID NO: 77291 - protein, 14 aa, Homo Sapiens
WSGPYILRNQDDRE

SEQ ID NO: 77292 - protein, 14 aa, Homo Sapiens
SGPYILRNQDDREL

SEQ ID NO: 77293 - protein, 14 aa, Homo Sapiens
GPYILRNQDDRELW

SEQ ID NO: 77294 - protein, 14 aa, Homo Sapiens
PYILRNQDDRELWP

SEQ ID NO: 77295 - protein, 14 aa, Homo Sapiens
YILRNQDDRELWPR

SEQ ID NO: 77296 - protein, 14 aa, Homo Sapiens
ILRNQDDRELWPRK

SEQ ID NO: 77297 - protein, 14 aa, Homo Sapiens
LRNQDDRELWPRKF

SEQ ID NO: 77298 - protein, 14 aa, Homo Sapiens
RNQDDRELWPRKFF

SEQ ID NO: 77299 - protein, 14 aa, Homo Sapiens
NQDDRELWPRKFFH

SEQ ID NO: 77300 - protein, 14 aa, Homo Sapiens
QDDRELWPRKFFHR

SEQ ID NO: 77301 - protein, 14 aa, Homo Sapiens
DDRELWPRKFFHRT

SEQ ID NO: 77302 - protein, 14 aa, Homo Sapiens
DRELWPRKFFHRTC

SEQ ID NO: 77303 - protein, 14 aa, Homo Sapiens
RELWPRKFFHRTCK

SEQ ID NO: 77304 - protein, 14 aa, Homo Sapiens
ELWPRKFFHRTCKC

SEQ ID NO: 77305 - protein, 14 aa, Homo Sapiens
LWPRKFFHRTCKCT

SEQ ID NO: 77306 - protein, 15 aa, Homo Sapiens
MSPLWWGFLLSCLGC

SEQ ID NO: 77307 - protein, 15 aa, Homo Sapiens
SPLWWGFLLSCLGCK

SEQ ID NO: 77308 - protein, 15 aa, Homo Sapiens
PLWWGFLLSCLGCKI

SEQ ID NO: 77309 - protein, 15 aa, Homo Sapiens
LWWGFLLSCLGCKIL

SEQ ID NO: 77310 - protein, 15 aa, Homo Sapiens
WWGFLLSCLGCKILP

SEQ ID NO: 77311 - protein, 15 aa, Homo Sapiens
WGFLLSCLGCKILPG

SEQ ID NO: 77312 - protein, 15 aa, Homo Sapiens
GFLLSCLGCKILPGA

SEQ ID NO: 77313 - protein, 15 aa, Homo Sapiens
FLLSCLGCKILPGAQ

SEQ ID NO: 77314 - protein, 15 aa, Homo Sapiens
LLSCLGCKILPGAQG

SEQ ID NO: 77315 - protein, 15 aa, Homo Sapiens
LSCLGCKILPGAQGQ

SEQ ID NO: 77316 - protein, 15 aa, Homo Sapiens
SCLGCKILPGAQGQF

SEQ ID NO: 77317 - protein, 15 aa, Homo Sapiens
CLGCKILPGAQGQFP

SEQ ID NO: 77318 - protein, 15 aa, Homo Sapiens
LGCKILPGAQGQFPR

SEQ ID NO: 77319 - protein, 15 aa, Homo Sapiens
GCKILPGAQGQFPRV

SEQ ID NO: 77320 - protein, 15 aa, Homo Sapiens
CKILPGAQGQFPRVC

SEQ ID NO: 77321 - protein, 15 aa, Homo Sapiens
KILPGAQGQFPRVCM

SEQ ID NO: 77322 - protein, 15 aa, Homo Sapiens
ILPGAQGQFPRVCMT

SEQ ID NO: 77323 - protein, 15 aa, Homo Sapiens
LPGAQGQFPRVCMTV

SEQ ID NO: 77324 - protein, 15 aa, Homo Sapiens
PGAQGQFPRVCMTVD

SEQ ID NO: 77325 - protein, 15 aa, Homo Sapiens
GAQGQFPRVCMTVDS

SEQ ID NO: 77326 - protein, 15 aa, Homo Sapiens
AQGQFPRVCMTVDSL

SEQ ID NO: 77327 - protein, 15 aa, Homo Sapiens
QGQFPRVCMTVDSLV

SEQ ID NO: 77328 - protein, 15 aa, Homo Sapiens
GQFPRVCMTVDSLVN

SEQ ID NO: 77329 - protein, 15 aa, Homo Sapiens
QFPRVCMTVDSLVNK

SEQ ID NO: 77330 - protein, 15 aa, Homo Sapiens
FPRVCMTVDSLVNKE

SEQ ID NO: 77331 - protein, 15 aa, Homo Sapiens
PRVCMTVDSLVNKEC

SEQ ID NO: 77332 - protein, 15 aa, Homo Sapiens
RVCMTVDSLVNKECC

SEQ ID NO: 77333 - protein, 15 aa, Homo Sapiens
VCMTVDSLVNKECCP

SEQ ID NO: 77334 - protein, 15 aa, Homo Sapiens
CMTVDSLVNKECCPR

SEQ ID NO: 77335 - protein, 15 aa, Homo Sapiens
MTVDSLVNKECCPRL

SEQ ID NO: 77336 - protein, 15 aa, Homo Sapiens
TVDSLVNKECCPRLG

SEQ ID NO: 77337 - protein, 15 aa, Homo Sapiens
VDSLVNKECCPRLGA

SEQ ID NO: 77338 - protein, 15 aa, Homo Sapiens
DSLVNKECCPRLGAE

SEQ ID NO: 77339 - protein, 15 aa, Homo Sapiens
SLVNKECCPRLGAES

SEQ ID NO: 77340 - protein, 15 aa, Homo Sapiens
LVNKECCPRLGAESA

SEQ ID NO: 77341 - protein, 15 aa, Homo Sapiens
VNKECCPRLGAESAN

SEQ ID NO: 77342 - protein, 15 aa, Homo Sapiens
NKECCPRLGAESANV

SEQ ID NO: 77343 - protein, 15 aa, Homo Sapiens
KECCPRLGAESANVC

SEQ ID NO: 77344 - protein, 15 aa, Homo Sapiens
ECCPRLGAESANVCG

SEQ ID NO: 77345 - protein, 15 aa, Homo Sapiens
CCPRLGAESANVCGS

SEQ ID NO: 77346 - protein, 15 aa, Homo Sapiens
CPRLGAESANVCGSQ

SEQ ID NO: 77347 - protein, 15 aa, Homo Sapiens
PRLGAESANVCGSQQ

SEQ ID NO: 77348 - protein, 15 aa, Homo Sapiens
RLGAESANVCGSQQG

SEQ ID NO: 77349 - protein, 15 aa, Homo Sapiens
LGAESANVCGSQQGR

SEQ ID NO: 77350 - protein, 15 aa, Homo Sapiens
GAESANVCGSQQGRG

SEQ ID NO: 77351 - protein, 15 aa, Homo Sapiens
AESANVCGSQQGRGQ

SEQ ID NO: 77352 - protein, 15 aa, Homo Sapiens
ESANVCGSQQGRGQC

SEQ ID NO: 77353 - protein, 15 aa, Homo Sapiens
SANVCGSQQGRGQCT

SEQ ID NO: 77354 - protein, 15 aa, Homo Sapiens
ANVCGSQQGRGQCTE

SEQ ID NO: 77355 - protein, 15 aa, Homo Sapiens
NVCGSQQGRGQCTEV

SEQ ID NO: 77356 - protein, 15 aa, Homo Sapiens
VCGSQQGRGQCTEVR

SEQ ID NO: 77357 - protein, 15 aa, Homo Sapiens
CGSQQGRGQCTEVRA

SEQ ID NO: 77358 - protein, 15 aa, Homo Sapiens
GSQQGRGQCTEVRAD

SEQ ID NO: 77359 - protein, 15 aa, Homo Sapiens
SQQGRGQCTEVRADT

SEQ ID NO: 77360 - protein, 15 aa, Homo Sapiens
QQGRGQCTEVRADTR

SEQ ID NO: 77361 - protein, 15 aa, Homo Sapiens
QGRGQCTEVRADTRP

SEQ ID NO: 77362 - protein, 15 aa, Homo Sapiens
GRGQCTEVRADTRPW

SEQ ID NO: 77363 - protein, 15 aa, Homo Sapiens
RGQCTEVRADTRPWS

SEQ ID NO: 77364 - protein, 15 aa, Homo Sapiens
GQCTEVRADTRPWSG

SEQ ID NO: 77365 - protein, 15 aa, Homo Sapiens
QCTEVRADTRPWSGP

SEQ ID NO: 77366 - protein, 15 aa, Homo Sapiens
CTEVRADTRPWSGPY

SEQ ID NO: 77367 - protein, 15 aa, Homo Sapiens
TEVRADTRPWSGPYI

SEQ ID NO: 77368 - protein, 15 aa, Homo Sapiens
EVRADTRPWSGPYIL

SEQ ID NO: 77369 - protein, 15 aa, Homo Sapiens
VRADTRPWSGPYILR

SEQ ID NO: 77370 - protein, 15 aa, Homo Sapiens
RADTRPWSGPYILRN

SEQ ID NO: 77371 - protein, 15 aa, Homo Sapiens
ADTRPWSGPYILRNQ

SEQ ID NO: 77372 - protein, 15 aa, Homo Sapiens
DTRPWSGPYILRNQD

SEQ ID NO: 77373 - protein, 15 aa, Homo Sapiens
TRPWSGPYILRNQDD

SEQ ID NO: 77374 - protein, 15 aa, Homo Sapiens
RPWSGPYILRNQDDR

SEQ ID NO: 77375 - protein, 15 aa, Homo Sapiens
PWSGPYILRNQDDRE

SEQ ID NO: 77376 - protein, 15 aa, Homo Sapiens
WSGPYILRNQDDREL

SEQ ID NO: 77377 - protein, 15 aa, Homo Sapiens
SGPYILRNQDDRELW

SEQ ID NO: 77378 - protein, 15 aa, Homo Sapiens
GPYILRNQDDRELWP

SEQ ID NO: 77379 - protein, 15 aa, Homo Sapiens
PYILRNQDDRELWPR

SEQ ID NO: 77380 - protein, 15 aa, Homo Sapiens
YILRNQDDRELWPRK

SEQ ID NO: 77381 - protein, 15 aa, Homo Sapiens
ILRNQDDRELWPRKF

SEQ ID NO: 77382 - protein, 15 aa, Homo Sapiens
LRNQDDRELWPRKFF

SEQ ID NO: 77383 - protein, 15 aa, Homo Sapiens
RNQDDRELWPRKFFH

SEQ ID NO: 77384 - protein, 15 aa, Homo Sapiens
NQDDRELWPRKFFHR

SEQ ID NO: 77385 - protein, 15 aa, Homo Sapiens
QDDRELWPRKFFHRT

SEQ ID NO: 77386 - protein, 15 aa, Homo Sapiens
DDRELWPRKFFHRTC

SEQ ID NO: 77387 - protein, 15 aa, Homo Sapiens
DRELWPRKFFHRTCK

SEQ ID NO: 77388 - protein, 15 aa, Homo Sapiens
RELWPRKFFHRTCKC

SEQ ID NO: 77389 - protein, 15 aa, Homo Sapiens
ELWPRKFFHRTCKCT

SEQ ID NO: 77390 - protein, 16 aa, Homo Sapiens
MSPLWWGFLLSCLGCK

SEQ ID NO: 77391 - protein, 16 aa, Homo Sapiens
SPLWWGFLLSCLGCKI

SEQ ID NO: 77392 - protein, 16 aa, Homo Sapiens
PLWWGFLLSCLGCKIL

SEQ ID NO: 77393 - protein, 16 aa, Homo Sapiens
LWWGFLLSCLGCKILP

SEQ ID NO: 77394 - protein, 16 aa, Homo Sapiens
WWGFLLSCLGCKILPG

SEQ ID NO: 77395 - protein, 16 aa, Homo Sapiens
WGFLLSCLGCKILPGA

SEQ ID NO: 77396 - protein, 16 aa, Homo Sapiens
GFLLSCLGCKILPGAQ

SEQ ID NO: 77397 - protein, 16 aa, Homo Sapiens
FLLSCLGCKILPGAQG

SEQ ID NO: 77398 - protein, 16 aa, Homo Sapiens
LLSCLGCKILPGAQGQ

SEQ ID NO: 77399 - protein, 16 aa, Homo Sapiens
LSCLGCKILPGAQGQF

SEQ ID NO: 77400 - protein, 16 aa, Homo Sapiens
SCLGCKILPGAQGQFP

SEQ ID NO: 77401 - protein, 16 aa, Homo Sapiens
CLGCKILPGAQGQFPR

SEQ ID NO: 77402 - protein, 16 aa, Homo Sapiens
LGCKILPGAQGQFPRV

SEQ ID NO: 77403 - protein, 16 aa, Homo Sapiens
GCKILPGAQGQFPRVC

SEQ ID NO: 77404 - protein, 16 aa, Homo Sapiens
CKILPGAQGQFPRVCM

SEQ ID NO: 77405 - protein, 16 aa, Homo Sapiens
KILPGAQGQFPRVCMT

SEQ ID NO: 77406 - protein, 16 aa, Homo Sapiens
ILPGAQGQFPRVCMTV

SEQ ID NO: 77407 - protein, 16 aa, Homo Sapiens
LPGAQGQFPRVCMTVD

SEQ ID NO: 77408 - protein, 16 aa, Homo Sapiens
PGAQGQFPRVCMTVDS

SEQ ID NO: 77409 - protein, 16 aa, Homo Sapiens
GAQGQFPRVCMTVDSL

SEQ ID NO: 77410 - protein, 16 aa, Homo Sapiens
AQGQFPRVCMTVDSLV

SEQ ID NO: 77411 - protein, 16 aa, Homo Sapiens
QGQFPRVCMTVDSLVN

SEQ ID NO: 77412 - protein, 16 aa, Homo Sapiens
GQFPRVCMTVDSLVNK

SEQ ID NO: 77413 - protein, 16 aa, Homo Sapiens
QFPRVCMTVDSLVNKE

SEQ ID NO: 77414 - protein, 16 aa, Homo Sapiens
FPRVCMTVDSLVNKEC

SEQ ID NO: 77415 - protein, 16 aa, Homo Sapiens
PRVCMTVDSLVNKECC

SEQ ID NO: 77416 - protein, 16 aa, Homo Sapiens
RVCMTVDSLVNKECCP

SEQ ID NO: 77417 - protein, 16 aa, Homo Sapiens
VCMTVDSLVNKECCPR

SEQ ID NO: 77418 - protein, 16 aa, Homo Sapiens
CMTVDSLVNKECCPRL

SEQ ID NO: 77419 - protein, 16 aa, Homo Sapiens
MTVDSLVNKECCPRLG

SEQ ID NO: 77420 - protein, 16 aa, Homo Sapiens
TVDSLVNKECCPRLGA

SEQ ID NO: 77421 - protein, 16 aa, Homo Sapiens
VDSLVNKECCPRLGAE

SEQ ID NO: 77422 - protein, 16 aa, Homo Sapiens
DSLVNKECCPRLGAES

SEQ ID NO: 77423 - protein, 16 aa, Homo Sapiens
SLVNKECCPRLGAESA

SEQ ID NO: 77424 - protein, 16 aa, Homo Sapiens
LVNKECCPRLGAESAN

SEQ ID NO: 77425 - protein, 16 aa, Homo Sapiens
VNKECCPRLGAESANV

SEQ ID NO: 77426 - protein, 16 aa, Homo Sapiens
NKECCPRLGAESANVC

SEQ ID NO: 77427 - protein, 16 aa, Homo Sapiens
KECCPRLGAESANVCG

SEQ ID NO: 77428 - protein, 16 aa, Homo Sapiens
ECCPRLGAESANVCGS

SEQ ID NO: 77429 - protein, 16 aa, Homo Sapiens
CCPRLGAESANVCGSQ

SEQ ID NO: 77430 - protein, 16 aa, Homo Sapiens
CPRLGAESANVCGSQQ

SEQ ID NO: 77431 - protein, 16 aa, Homo Sapiens
PRLGAESANVCGSQQG

SEQ ID NO: 77432 - protein, 16 aa, Homo Sapiens
RLGAESANVCGSQQGR

SEQ ID NO: 77433 - protein, 16 aa, Homo Sapiens
LGAESANVCGSQQGRG

SEQ ID NO: 77434 - protein, 16 aa, Homo Sapiens
GAESANVCGSQQGRGQ

SEQ ID NO: 77435 - protein, 16 aa, Homo Sapiens
AESANVCGSQQGRGQC

SEQ ID NO: 77436 - protein, 16 aa, Homo Sapiens
ESANVCGSQQGRGQCT

SEQ ID NO: 77437 - protein, 16 aa, Homo Sapiens
SANVCGSQQGRGQCTE

SEQ ID NO: 77438 - protein, 16 aa, Homo Sapiens
ANVCGSQQGRGQCTEV

SEQ ID NO: 77439 - protein, 16 aa, Homo Sapiens
NVCGSQQGRGQCTEVR

SEQ ID NO: 77440 - protein, 16 aa, Homo Sapiens
VCGSQQGRGQCTEVRA

SEQ ID NO: 77441 - protein, 16 aa, Homo Sapiens
CGSQQGRGQCTEVRAD

SEQ ID NO: 77442 - protein, 16 aa, Homo Sapiens
GSQQGRGQCTEVRADT

SEQ ID NO: 77443 - protein, 16 aa, Homo Sapiens
SQQGRGQCTEVRADTR

SEQ ID NO: 77444 - protein, 16 aa, Homo Sapiens
QQGRGQCTEVRADTRP

SEQ ID NO: 77445 - protein, 16 aa, Homo Sapiens
QGRGQCTEVRADTRPW

SEQ ID NO: 77446 - protein, 16 aa, Homo Sapiens
GRGQCTEVRADTRPWS

SEQ ID NO: 77447 - protein, 16 aa, Homo Sapiens
RGQCTEVRADTRPWSG

SEQ ID NO: 77448 - protein, 16 aa, Homo Sapiens
GQCTEVRADTRPWSGP

SEQ ID NO: 77449 - protein, 16 aa, Homo Sapiens
QCTEVRADTRPWSGPY

SEQ ID NO: 77450 - protein, 16 aa, Homo Sapiens
CTEVRADTRPWSGPYI

SEQ ID NO: 77451 - protein, 16 aa, Homo Sapiens
TEVRADTRPWSGPYIL

SEQ ID NO: 77452 - protein, 16 aa, Homo Sapiens
EVRADTRPWSGPYILR

SEQ ID NO: 77453 - protein, 16 aa, Homo Sapiens
VRADTRPWSGPYILRN

SEQ ID NO: 77454 - protein, 16 aa, Homo Sapiens
RADTRPWSGPYILRNQ

SEQ ID NO: 77455 - protein, 16 aa, Homo Sapiens
ADTRPWSGPYILRNQD

SEQ ID NO: 77456 - protein, 16 aa, Homo Sapiens
DTRPWSGPYILRNQDD

SEQ ID NO: 77457 - protein, 16 aa, Homo Sapiens
TRPWSGPYILRNQDDR

SEQ ID NO: 77458 - protein, 16 aa, Homo Sapiens
RPWSGPYILRNQDDRE

SEQ ID NO: 77459 - protein, 16 aa, Homo Sapiens
PWSGPYILRNQDDREL

SEQ ID NO: 77460 - protein, 16 aa, Homo Sapiens
WSGPYILRNQDDRELW

SEQ ID NO: 77461 - protein, 16 aa, Homo Sapiens
SGPYILRNQDDRELWP

SEQ ID NO: 77462 - protein, 16 aa, Homo Sapiens
GPYILRNQDDRELWPR

SEQ ID NO: 77463 - protein, 16 aa, Homo Sapiens
PYILRNQDDRELWPRK

SEQ ID NO: 77464 - protein, 16 aa, Homo Sapiens
YILRNQDDRELWPRKF

SEQ ID NO: 77465 - protein, 16 aa, Homo Sapiens
ILRNQDDRELWPRKFF

SEQ ID NO: 77466 - protein, 16 aa, Homo Sapiens
LRNQDDRELWPRKFFH

SEQ ID NO: 77467 - protein, 16 aa, Homo Sapiens
RNQDDRELWPRKFFHR

SEQ ID NO: 77468 - protein, 16 aa, Homo Sapiens
NQDDRELWPRKFFHRT

SEQ ID NO: 77469 - protein, 16 aa, Homo Sapiens
QDDRELWPRKFFHRTC

SEQ ID NO: 77470 - protein, 16 aa, Homo Sapiens
DDRELWPRKFFHRTCK

SEQ ID NO: 77471 - protein, 16 aa, Homo Sapiens
DRELWPRKFFHRTCKC

SEQ ID NO: 77472 - protein, 16 aa, Homo Sapiens
RELWPRKFFHRTCKCT

SEQ ID NO: 77473 - protein, 101 aa, Homo Sapiens
MQRLCVYVLIFALALAAFSEASWKPRSQQPDAPLGTGANRDLELPWLEQQGPASHHRRQLGPQGPPHLVADPSKKQGPWLEEEEEAYGWMDFGRRSAEDEN

SEQ ID NO: 77474 - protein, 8 aa, Homo Sapiens
MQRLCVYV

SEQ ID NO: 77475 - protein, 8 aa, Homo Sapiens
QRLCVYVL

SEQ ID NO: 77476 - protein, 8 aa, Homo Sapiens
RLCVYVLI

SEQ ID NO: 77477 - protein, 8 aa, Homo Sapiens
CVYVLIFA

SEQ ID NO: 77478 - protein, 8 aa, Homo Sapiens
VYVLIFAL

SEQ ID NO: 77479 - protein, 8 aa, Homo Sapiens
YVLIFALA

SEQ ID NO: 77480 - protein, 8 aa, Homo Sapiens
VLIFALAL

SEQ ID NO: 77481 - protein, 8 aa, Homo Sapiens
LIFALALA

SEQ ID NO: 77482 - protein, 8 aa, Homo Sapiens
FALALAAF

SEQ ID NO: 77483 - protein, 8 aa, Homo Sapiens
ALALAAFS

SEQ ID NO: 77484 - protein, 8 aa, Homo Sapiens
ALAAFSEA

SEQ ID NO: 77485 - protein, 8 aa, Homo Sapiens
AAFSEASW

SEQ ID NO: 77486 - protein, 8 aa, Homo Sapiens
AFSEASWK

SEQ ID NO: 77487 - protein, 8 aa, Homo Sapiens
SQQPDAPL

SEQ ID NO: 77488 - protein, 8 aa, Homo Sapiens
ELPWLEQQ

SEQ ID NO: 77489 - protein, 8 aa, Homo Sapiens
LPWLEQQG

SEQ ID NO: 77490 - protein, 8 aa, Homo Sapiens
WLEQQGPA

SEQ ID NO: 77491 - protein, 8 aa, Homo Sapiens
PQGPPHLV

SEQ ID NO: 77492 - protein, 8 aa, Homo Sapiens
HLVADPSK

SEQ ID NO: 77493 - protein, 8 aa, Homo Sapiens
LVADPSKK

SEQ ID NO: 77494 - protein, 8 aa, Homo Sapiens
KQGPWLEE

SEQ ID NO: 77495 - protein, 8 aa, Homo Sapiens
WLEEEEEA

SEQ ID NO: 77496 - protein, 8 aa, Homo Sapiens
LEEEEEAY

SEQ ID NO: 77497 - protein, 8 aa, Homo Sapiens
EEEEAYGW

SEQ ID NO: 77498 - protein, 8 aa, Homo Sapiens
EEEAYGWM

SEQ ID NO: 77499 - protein, 8 aa, Homo Sapiens
EAYGWMDF

SEQ ID NO: 77500 - protein, 8 aa, Homo Sapiens
YGWMDFGR

SEQ ID NO: 77501 - protein, 8 aa, Homo Sapiens
GWMDFGRR

SEQ ID NO: 77502 - protein, 9 aa, Homo Sapiens
MQRLCVYVL

SEQ ID NO: 77503 - protein, 9 aa, Homo Sapiens
QRLCVYVLI

SEQ ID NO: 77504 - protein, 9 aa, Homo Sapiens
RLCVYVLIF

SEQ ID NO: 77505 - protein, 9 aa, Homo Sapiens
LCVYVLIFA

SEQ ID NO: 77506 - protein, 9 aa, Homo Sapiens
CVYVLIFAL

SEQ ID NO: 77507 - protein, 9 aa, Homo Sapiens
VYVLIFALA

SEQ ID NO: 77508 - protein, 9 aa, Homo Sapiens
YVLIFALAL

SEQ ID NO: 77509 - protein, 9 aa, Homo Sapiens
VLIFALALA

SEQ ID NO: 77510 - protein, 9 aa, Homo Sapiens
LIFALALAA

SEQ ID NO: 77511 - protein, 9 aa, Homo Sapiens
IFALALAAF

SEQ ID NO: 77512 - protein, 9 aa, Homo Sapiens
LALAAFSEA

SEQ ID NO: 77513 - protein, 9 aa, Homo Sapiens
ALAAFSEAS

SEQ ID NO: 77514 - protein, 9 aa, Homo Sapiens
LAAFSEASW

SEQ ID NO: 77515 - protein, 9 aa, Homo Sapiens
AAFSEASWK

SEQ ID NO: 77516 - protein, 9 aa, Homo Sapiens
LPWLEQQGP

SEQ ID NO: 77517 - protein, 9 aa, Homo Sapiens
QQGPASHHR

SEQ ID NO: 77518 - protein, 9 aa, Homo Sapiens
HLVADPSKK

SEQ ID NO: 77519 - protein, 9 aa, Homo Sapiens
KQGPWLEEE

SEQ ID NO: 77520 - protein, 9 aa, Homo Sapiens
WLEEEEEAY

SEQ ID NO: 77521 - protein, 9 aa, Homo Sapiens
EEEEEAYGW

SEQ ID NO: 77522 - protein, 9 aa, Homo Sapiens
EEEEAYGWM

SEQ ID NO: 77523 - protein, 9 aa, Homo Sapiens
EEAYGWMDF

SEQ ID NO: 77524 - protein, 9 aa, Homo Sapiens
AYGWMDFGR

SEQ ID NO: 77525 - protein, 9 aa, Homo Sapiens
YGWMDFGRR

SEQ ID NO: 77526 - protein, 9 aa, Homo Sapiens
WMDFGRRSA

SEQ ID NO: 77527 - protein, 10 aa, Homo Sapiens
MQRLCVYVLI

SEQ ID NO: 77528 - protein, 10 aa, Homo Sapiens
QRLCVYVLIF

SEQ ID NO: 77529 - protein, 10 aa, Homo Sapiens
RLCVYVLIFA

SEQ ID NO: 77530 - protein, 10 aa, Homo Sapiens
LCVYVLIFAL

SEQ ID NO: 77531 - protein, 10 aa, Homo Sapiens
CVYVLIFALA

SEQ ID NO: 77532 - protein, 10 aa, Homo Sapiens
VYVLIFALAL

SEQ ID NO: 77533 - protein, 10 aa, Homo Sapiens
YVLIFALALA

SEQ ID NO: 77534 - protein, 10 aa, Homo Sapiens
VLIFALALAA

SEQ ID NO: 77535 - protein, 10 aa, Homo Sapiens
LIFALALAAF

SEQ ID NO: 77536 - protein, 10 aa, Homo Sapiens
ALALAAFSEA

SEQ ID NO: 77537 - protein, 10 aa, Homo Sapiens
ALAAFSEASW

SEQ ID NO: 77538 - protein, 10 aa, Homo Sapiens
LAAFSEASWK

SEQ ID NO: 77539 - protein, 10 aa, Homo Sapiens
AFSEASWKPR

SEQ ID NO: 77540 - protein, 10 aa, Homo Sapiens
SQQPDAPLGT

SEQ ID NO: 77541 - protein, 10 aa, Homo Sapiens
DAPLGTGANR

SEQ ID NO: 77542 - protein, 10 aa, Homo Sapiens
PLGTGANRDL

SEQ ID NO: 77543 - protein, 10 aa, Homo Sapiens
GANRDLELPW

SEQ ID NO: 77544 - protein, 10 aa, Homo Sapiens
LPWLEQQGPA

SEQ ID NO: 77545 - protein, 10 aa, Homo Sapiens
EQQGPASHHR

SEQ ID NO: 77546 - protein, 10 aa, Homo Sapiens
QQGPASHHRR

SEQ ID NO: 77547 - protein, 10 aa, Homo Sapiens
GPASHHRRQL

SEQ ID NO: 77548 - protein, 10 aa, Homo Sapiens
RQLGPQGPPH

SEQ ID NO: 77549 - protein, 10 aa, Homo Sapiens
QLGPQGPPHL

SEQ ID NO: 77550 - protein, 10 aa, Homo Sapiens
LGPQGPPHLV

SEQ ID NO: 77551 - protein, 10 aa, Homo Sapiens
KQGPWLEEEE

SEQ ID NO: 77552 - protein, 10 aa, Homo Sapiens
PWLEEEEEAY

SEQ ID NO: 77553 - protein, 10 aa, Homo Sapiens
EEEEEAYGWM

SEQ ID NO: 77554 - protein, 10 aa, Homo Sapiens
EEEAYGWMDF

SEQ ID NO: 77555 - protein, 10 aa, Homo Sapiens
EAYGWMDFGR

SEQ ID NO: 77556 - protein, 10 aa, Homo Sapiens
AYGWMDFGRR

SEQ ID NO: 77557 - protein, 11 aa, Homo Sapiens
MQRLCVYVLIF

SEQ ID NO: 77558 - protein, 11 aa, Homo Sapiens
RLCVYVLIFAL

SEQ ID NO: 77559 - protein, 11 aa, Homo Sapiens
LCVYVLIFALA

SEQ ID NO: 77560 - protein, 11 aa, Homo Sapiens
CVYVLIFALAL

SEQ ID NO: 77561 - protein, 11 aa, Homo Sapiens
YVLIFALALAA

SEQ ID NO: 77562 - protein, 11 aa, Homo Sapiens
VLIFALALAAF

SEQ ID NO: 77563 - protein, 11 aa, Homo Sapiens
FALALAAFSEA

SEQ ID NO: 77564 - protein, 11 aa, Homo Sapiens
ALALAAFSEAS

SEQ ID NO: 77565 - protein, 11 aa, Homo Sapiens
LALAAFSEASW

SEQ ID NO: 77566 - protein, 11 aa, Homo Sapiens
ALAAFSEASWK

SEQ ID NO: 77567 - protein, 11 aa, Homo Sapiens
AAFSEASWKPR

SEQ ID NO: 77568 - protein, 11 aa, Homo Sapiens
KPRSQQPDAPL

SEQ ID NO: 77569 - protein, 11 aa, Homo Sapiens
QQPDAPLGTGA

SEQ ID NO: 77570 - protein, 11 aa, Homo Sapiens
APLGTGANRDL

SEQ ID NO: 77571 - protein, 11 aa, Homo Sapiens
TGANRDLELPW

SEQ ID NO: 77572 - protein, 11 aa, Homo Sapiens
ELPWLEQQGPA

SEQ ID NO: 77573 - protein, 11 aa, Homo Sapiens
LPWLEQQGPAS

SEQ ID NO: 77574 - protein, 11 aa, Homo Sapiens
EQQGPASHHRR

SEQ ID NO: 77575 - protein, 11 aa, Homo Sapiens
RRQLGPQGPPH

SEQ ID NO: 77576 - protein, 11 aa, Homo Sapiens
RQLGPQGPPHL

SEQ ID NO: 77577 - protein, 11 aa, Homo Sapiens
QLGPQGPPHLV

SEQ ID NO: 77578 - protein, 11 aa, Homo Sapiens
VADPSKKQGPW

SEQ ID NO: 77579 - protein, 11 aa, Homo Sapiens
KQGPWLEEEEE

SEQ ID NO: 77580 - protein, 11 aa, Homo Sapiens
GPWLEEEEEAY

SEQ ID NO: 77581 - protein, 11 aa, Homo Sapiens
EEEEAYGWMDF

SEQ ID NO: 77582 - protein, 11 aa, Homo Sapiens
EEAYGWMDFGR

SEQ ID NO: 77583 - protein, 11 aa, Homo Sapiens
EAYGWMDFGRR

SEQ ID NO: 77584 - protein, 13 aa, Homo Sapiens
MQRLCVYVLIFAL

SEQ ID NO: 77585 - protein, 13 aa, Homo Sapiens
QRLCVYVLIFALA

SEQ ID NO: 77586 - protein, 13 aa, Homo Sapiens
RLCVYVLIFALAL

SEQ ID NO: 77587 - protein, 13 aa, Homo Sapiens
LCVYVLIFALALA

SEQ ID NO: 77588 - protein, 13 aa, Homo Sapiens
CVYVLIFALALAA

SEQ ID NO: 77589 - protein, 13 aa, Homo Sapiens
VYVLIFALALAAF

SEQ ID NO: 77590 - protein, 13 aa, Homo Sapiens
YVLIFALALAAFS

SEQ ID NO: 77591 - protein, 13 aa, Homo Sapiens
VLIFALALAAFSE

SEQ ID NO: 77592 - protein, 13 aa, Homo Sapiens
LIFALALAAFSEA

SEQ ID NO: 77593 - protein, 13 aa, Homo Sapiens
IFALALAAFSEAS

SEQ ID NO: 77594 - protein, 13 aa, Homo Sapiens
FALALAAFSEASW

SEQ ID NO: 77595 - protein, 13 aa, Homo Sapiens
ALALAAFSEASWK

SEQ ID NO: 77596 - protein, 13 aa, Homo Sapiens
LALAAFSEASWKP

SEQ ID NO: 77597 - protein, 13 aa, Homo Sapiens
ALAAFSEASWKPR

SEQ ID NO: 77598 - protein, 13 aa, Homo Sapiens
LAAFSEASWKPRS

SEQ ID NO: 77599 - protein, 13 aa, Homo Sapiens
AAFSEASWKPRSQ

SEQ ID NO: 77600 - protein, 13 aa, Homo Sapiens
AFSEASWKPRSQQ

SEQ ID NO: 77601 - protein, 13 aa, Homo Sapiens
FSEASWKPRSQQP

SEQ ID NO: 77602 - protein, 13 aa, Homo Sapiens
SEASWKPRSQQPD

SEQ ID NO: 77603 - protein, 13 aa, Homo Sapiens
EASWKPRSQQPDA

SEQ ID NO: 77604 - protein, 13 aa, Homo Sapiens
ASWKPRSQQPDAP

SEQ ID NO: 77605 - protein, 13 aa, Homo Sapiens
SWKPRSQQPDAPL

SEQ ID NO: 77606 - protein, 13 aa, Homo Sapiens
WKPRSQQPDAPLG

SEQ ID NO: 77607 - protein, 13 aa, Homo Sapiens
KPRSQQPDAPLGT

SEQ ID NO: 77608 - protein, 13 aa, Homo Sapiens
PRSQQPDAPLGTG

SEQ ID NO: 77609 - protein, 13 aa, Homo Sapiens
RSQQPDAPLGTGA

SEQ ID NO: 77610 - protein, 13 aa, Homo Sapiens
SQQPDAPLGTGAN

SEQ ID NO: 77611 - protein, 13 aa, Homo Sapiens
QQPDAPLGTGANR

SEQ ID NO: 77612 - protein, 13 aa, Homo Sapiens
QPDAPLGTGANRD

SEQ ID NO: 77613 - protein, 13 aa, Homo Sapiens
PDAPLGTGANRDL

SEQ ID NO: 77614 - protein, 13 aa, Homo Sapiens
DAPLGTGANRDLE

SEQ ID NO: 77615 - protein, 13 aa, Homo Sapiens
APLGTGANRDLEL

SEQ ID NO: 77616 - protein, 13 aa, Homo Sapiens
PLGTGANRDLELP

SEQ ID NO: 77617 - protein, 13 aa, Homo Sapiens
LGTGANRDLELPW

SEQ ID NO: 77618 - protein, 13 aa, Homo Sapiens
GTGANRDLELPWL

SEQ ID NO: 77619 - protein, 13 aa, Homo Sapiens
TGANRDLELPWLE

SEQ ID NO: 77620 - protein, 13 aa, Homo Sapiens
GANRDLELPWLEQ

SEQ ID NO: 77621 - protein, 13 aa, Homo Sapiens
ANRDLELPWLEQQ

SEQ ID NO: 77622 - protein, 13 aa, Homo Sapiens
NRDLELPWLEQQG

SEQ ID NO: 77623 - protein, 13 aa, Homo Sapiens
RDLELPWLEQQGP

SEQ ID NO: 77624 - protein, 13 aa, Homo Sapiens
DLELPWLEQQGPA

SEQ ID NO: 77625 - protein, 13 aa, Homo Sapiens
LELPWLEQQGPAS

SEQ ID NO: 77626 - protein, 13 aa, Homo Sapiens
ELPWLEQQGPASH

SEQ ID NO: 77627 - protein, 13 aa, Homo Sapiens
LPWLEQQGPASHH

SEQ ID NO: 77628 - protein, 13 aa, Homo Sapiens
PWLEQQGPASHHR

SEQ ID NO: 77629 - protein, 13 aa, Homo Sapiens
WLEQQGPASHHRR

SEQ ID NO: 77630 - protein, 13 aa, Homo Sapiens
LEQQGPASHHRRQ

SEQ ID NO: 77631 - protein, 13 aa, Homo Sapiens
EQQGPASHHRRQL

SEQ ID NO: 77632 - protein, 13 aa, Homo Sapiens
QQGPASHHRRQLG

SEQ ID NO: 77633 - protein, 13 aa, Homo Sapiens
QGPASHHRRQLGP

SEQ ID NO: 77634 - protein, 13 aa, Homo Sapiens
GPASHHRRQLGPQ

SEQ ID NO: 77635 - protein, 13 aa, Homo Sapiens
PASHHRRQLGPQG

SEQ ID NO: 77636 - protein, 13 aa, Homo Sapiens
ASHHRRQLGPQGP

SEQ ID NO: 77637 - protein, 13 aa, Homo Sapiens
SHHRRQLGPQGPP

SEQ ID NO: 77638 - protein, 13 aa, Homo Sapiens
HHRRQLGPQGPPH

SEQ ID NO: 77639 - protein, 13 aa, Homo Sapiens
HRRQLGPQGPPHL

SEQ ID NO: 77640 - protein, 13 aa, Homo Sapiens
RRQLGPQGPPHLV

SEQ ID NO: 77641 - protein, 13 aa, Homo Sapiens
RQLGPQGPPHLVA

SEQ ID NO: 77642 - protein, 13 aa, Homo Sapiens
QLGPQGPPHLVAD

SEQ ID NO: 77643 - protein, 13 aa, Homo Sapiens
LGPQGPPHLVADP

SEQ ID NO: 77644 - protein, 13 aa, Homo Sapiens
GPQGPPHLVADPS

SEQ ID NO: 77645 - protein, 13 aa, Homo Sapiens
PQGPPHLVADPSK

SEQ ID NO: 77646 - protein, 13 aa, Homo Sapiens
QGPPHLVADPSKK

SEQ ID NO: 77647 - protein, 13 aa, Homo Sapiens
GPPHLVADPSKKQ

SEQ ID NO: 77648 - protein, 13 aa, Homo Sapiens
PPHLVADPSKKQG

SEQ ID NO: 77649 - protein, 13 aa, Homo Sapiens
PHLVADPSKKQGP

SEQ ID NO: 77650 - protein, 13 aa, Homo Sapiens
HLVADPSKKQGPW

SEQ ID NO: 77651 - protein, 13 aa, Homo Sapiens
LVADPSKKQGPWL

SEQ ID NO: 77652 - protein, 13 aa, Homo Sapiens
VADPSKKQGPWLE

SEQ ID NO: 77653 - protein, 13 aa, Homo Sapiens
ADPSKKQGPWLEE

SEQ ID NO: 77654 - protein, 13 aa, Homo Sapiens
DPSKKQGPWLEEE

SEQ ID NO: 77655 - protein, 13 aa, Homo Sapiens
PSKKQGPWLEEEE

SEQ ID NO: 77656 - protein, 13 aa, Homo Sapiens
SKKQGPWLEEEEE

SEQ ID NO: 77657 - protein, 13 aa, Homo Sapiens
KKQGPWLEEEEEA

SEQ ID NO: 77658 - protein, 13 aa, Homo Sapiens
KQGPWLEEEEEAY

SEQ ID NO: 77659 - protein, 13 aa, Homo Sapiens
QGPWLEEEEEAYG

SEQ ID NO: 77660 - protein, 13 aa, Homo Sapiens
GPWLEEEEEAYGW

SEQ ID NO: 77661 - protein, 13 aa, Homo Sapiens
PWLEEEEEAYGWM

SEQ ID NO: 77662 - protein, 13 aa, Homo Sapiens
WLEEEEEAYGWMD

SEQ ID NO: 77663 - protein, 13 aa, Homo Sapiens
LEEEEEAYGWMDF

SEQ ID NO: 77664 - protein, 13 aa, Homo Sapiens
EEEEEAYGWMDFG

SEQ ID NO: 77665 - protein, 13 aa, Homo Sapiens
EEEEAYGWMDFGR

SEQ ID NO: 77666 - protein, 13 aa, Homo Sapiens
EEEAYGWMDFGRR

SEQ ID NO: 77667 - protein, 13 aa, Homo Sapiens
EEAYGWMDFGRRS

SEQ ID NO: 77668 - protein, 13 aa, Homo Sapiens
EAYGWMDFGRRSA

SEQ ID NO: 77669 - protein, 13 aa, Homo Sapiens
AYGWMDFGRRSAE

SEQ ID NO: 77670 - protein, 13 aa, Homo Sapiens
YGWMDFGRRSAED

SEQ ID NO: 77671 - protein, 13 aa, Homo Sapiens
GWMDFGRRSAEDE

SEQ ID NO: 77672 - protein, 13 aa, Homo Sapiens
WMDFGRRSAEDEN

SEQ ID NO: 77673 - protein, 14 aa, Homo Sapiens
MQRLCVYVLIFALA

SEQ ID NO: 77674 - protein, 14 aa, Homo Sapiens
QRLCVYVLIFALAL

SEQ ID NO: 77675 - protein, 14 aa, Homo Sapiens
RLCVYVLIFALALA

SEQ ID NO: 77676 - protein, 14 aa, Homo Sapiens
LCVYVLIFALALAA

SEQ ID NO: 77677 - protein, 14 aa, Homo Sapiens
CVYVLIFALALAAF

SEQ ID NO: 77678 - protein, 14 aa, Homo Sapiens
VYVLIFALALAAFS

SEQ ID NO: 77679 - protein, 14 aa, Homo Sapiens
YVLIFALALAAFSE

SEQ ID NO: 77680 - protein, 14 aa, Homo Sapiens
VLIFALALAAFSEA

SEQ ID NO: 77681 - protein, 14 aa, Homo Sapiens
LIFALALAAFSEAS

SEQ ID NO: 77682 - protein, 14 aa, Homo Sapiens
IFALALAAFSEASW

SEQ ID NO: 77683 - protein, 14 aa, Homo Sapiens
FALALAAFSEASWK

SEQ ID NO: 77684 - protein, 14 aa, Homo Sapiens
ALALAAFSEASWKP

SEQ ID NO: 77685 - protein, 14 aa, Homo Sapiens
LALAAFSEASWKPR

SEQ ID NO: 77686 - protein, 14 aa, Homo Sapiens
ALAAFSEASWKPRS

SEQ ID NO: 77687 - protein, 14 aa, Homo Sapiens
LAAFSEASWKPRSQ

SEQ ID NO: 77688 - protein, 14 aa, Homo Sapiens
AAFSEASWKPRSQQ

SEQ ID NO: 77689 - protein, 14 aa, Homo Sapiens
AFSEASWKPRSQQP

SEQ ID NO: 77690 - protein, 14 aa, Homo Sapiens
FSEASWKPRSQQPD

SEQ ID NO: 77691 - protein, 14 aa, Homo Sapiens
SEASWKPRSQQPDA

SEQ ID NO: 77692 - protein, 14 aa, Homo Sapiens
EASWKPRSQQPDAP

SEQ ID NO: 77693 - protein, 14 aa, Homo Sapiens
ASWKPRSQQPDAPL

SEQ ID NO: 77694 - protein, 14 aa, Homo Sapiens
SWKPRSQQPDAPLG

SEQ ID NO: 77695 - protein, 14 aa, Homo Sapiens
WKPRSQQPDAPLGT

SEQ ID NO: 77696 - protein, 14 aa, Homo Sapiens
KPRSQQPDAPLGTG

SEQ ID NO: 77697 - protein, 14 aa, Homo Sapiens
PRSQQPDAPLGTGA

SEQ ID NO: 77698 - protein, 14 aa, Homo Sapiens
RSQQPDAPLGTGAN

SEQ ID NO: 77699 - protein, 14 aa, Homo Sapiens
SQQPDAPLGTGANR

SEQ ID NO: 77700 - protein, 14 aa, Homo Sapiens
QQPDAPLGTGANRD

SEQ ID NO: 77701 - protein, 14 aa, Homo Sapiens
QPDAPLGTGANRDL

SEQ ID NO: 77702 - protein, 14 aa, Homo Sapiens
PDAPLGTGANRDLE

SEQ ID NO: 77703 - protein, 14 aa, Homo Sapiens
DAPLGTGANRDLEL

SEQ ID NO: 77704 - protein, 14 aa, Homo Sapiens
APLGTGANRDLELP

SEQ ID NO: 77705 - protein, 14 aa, Homo Sapiens
PLGTGANRDLELPW

SEQ ID NO: 77706 - protein, 14 aa, Homo Sapiens
LGTGANRDLELPWL

SEQ ID NO: 77707 - protein, 14 aa, Homo Sapiens
GTGANRDLELPWLE

SEQ ID NO: 77708 - protein, 14 aa, Homo Sapiens
TGANRDLELPWLEQ

SEQ ID NO: 77709 - protein, 14 aa, Homo Sapiens
GANRDLELPWLEQQ

SEQ ID NO: 77710 - protein, 14 aa, Homo Sapiens
ANRDLELPWLEQQG

SEQ ID NO: 77711 - protein, 14 aa, Homo Sapiens
NRDLELPWLEQQGP

SEQ ID NO: 77712 - protein, 14 aa, Homo Sapiens
RDLELPWLEQQGPA

SEQ ID NO: 77713 - protein, 14 aa, Homo Sapiens
DLELPWLEQQGPAS

SEQ ID NO: 77714 - protein, 14 aa, Homo Sapiens
LELPWLEQQGPASH

SEQ ID NO: 77715 - protein, 14 aa, Homo Sapiens
ELPWLEQQGPASHH

SEQ ID NO: 77716 - protein, 14 aa, Homo Sapiens
LPWLEQQGPASHHR

SEQ ID NO: 77717 - protein, 14 aa, Homo Sapiens
PWLEQQGPASHHRR

SEQ ID NO: 77718 - protein, 14 aa, Homo Sapiens
WLEQQGPASHHRRQ

SEQ ID NO: 77719 - protein, 14 aa, Homo Sapiens
LEQQGPASHHRRQL

SEQ ID NO: 77720 - protein, 14 aa, Homo Sapiens
EQQGPASHHRRQLG

SEQ ID NO: 77721 - protein, 14 aa, Homo Sapiens
QQGPASHHRRQLGP

SEQ ID NO: 77722 - protein, 14 aa, Homo Sapiens
QGPASHHRRQLGPQ

SEQ ID NO: 77723 - protein, 14 aa, Homo Sapiens
GPASHHRRQLGPQG

SEQ ID NO: 77724 - protein, 14 aa, Homo Sapiens
PASHHRRQLGPQGP

SEQ ID NO: 77725 - protein, 14 aa, Homo Sapiens
ASHHRRQLGPQGPP

SEQ ID NO: 77726 - protein, 14 aa, Homo Sapiens
SHHRRQLGPQGPPH

SEQ ID NO: 77727 - protein, 14 aa, Homo Sapiens
HHRRQLGPQGPPHL

SEQ ID NO: 77728 - protein, 14 aa, Homo Sapiens
HRRQLGPQGPPHLV

SEQ ID NO: 77729 - protein, 14 aa, Homo Sapiens
RRQLGPQGPPHLVA

SEQ ID NO: 77730 - protein, 14 aa, Homo Sapiens
RQLGPQGPPHLVAD

SEQ ID NO: 77731 - protein, 14 aa, Homo Sapiens
QLGPQGPPHLVADP

SEQ ID NO: 77732 - protein, 14 aa, Homo Sapiens
LGPQGPPHLVADPS

SEQ ID NO: 77733 - protein, 14 aa, Homo Sapiens
GPQGPPHLVADPSK

SEQ ID NO: 77734 - protein, 14 aa, Homo Sapiens
PQGPPHLVADPSKK

SEQ ID NO: 77735 - protein, 14 aa, Homo Sapiens
QGPPHLVADPSKKQ

SEQ ID NO: 77736 - protein, 14 aa, Homo Sapiens
GPPHLVADPSKKQG

SEQ ID NO: 77737 - protein, 14 aa, Homo Sapiens
PPHLVADPSKKQGP

SEQ ID NO: 77738 - protein, 14 aa, Homo Sapiens
PHLVADPSKKQGPW

SEQ ID NO: 77739 - protein, 14 aa, Homo Sapiens
HLVADPSKKQGPWL

SEQ ID NO: 77740 - protein, 14 aa, Homo Sapiens
LVADPSKKQGPWLE

SEQ ID NO: 77741 - protein, 14 aa, Homo Sapiens
VADPSKKQGPWLEE

SEQ ID NO: 77742 - protein, 14 aa, Homo Sapiens
ADPSKKQGPWLEEE

SEQ ID NO: 77743 - protein, 14 aa, Homo Sapiens
DPSKKQGPWLEEEE

SEQ ID NO: 77744 - protein, 14 aa, Homo Sapiens
PSKKQGPWLEEEEE

SEQ ID NO: 77745 - protein, 14 aa, Homo Sapiens
SKKQGPWLEEEEEA

SEQ ID NO: 77746 - protein, 14 aa, Homo Sapiens
KKQGPWLEEEEEAY

SEQ ID NO: 77747 - protein, 14 aa, Homo Sapiens
KQGPWLEEEEEAYG

SEQ ID NO: 77748 - protein, 14 aa, Homo Sapiens
QGPWLEEEEEAYGW

SEQ ID NO: 77749 - protein, 14 aa, Homo Sapiens
GPWLEEEEEAYGWM

SEQ ID NO: 77750 - protein, 14 aa, Homo Sapiens
PWLEEEEEAYGWMD

SEQ ID NO: 77751 - protein, 14 aa, Homo Sapiens
WLEEEEEAYGWMDF

SEQ ID NO: 77752 - protein, 14 aa, Homo Sapiens
LEEEEEAYGWMDFG

SEQ ID NO: 77753 - protein, 14 aa, Homo Sapiens
EEEEEAYGWMDFGR

SEQ ID NO: 77754 - protein, 14 aa, Homo Sapiens
EEEEAYGWMDFGRR

SEQ ID NO: 77755 - protein, 14 aa, Homo Sapiens
EEEAYGWMDFGRRS

SEQ ID NO: 77756 - protein, 14 aa, Homo Sapiens
EEAYGWMDFGRRSA

SEQ ID NO: 77757 - protein, 14 aa, Homo Sapiens
EAYGWMDFGRRSAE

SEQ ID NO: 77758 - protein, 14 aa, Homo Sapiens
AYGWMDFGRRSAED

SEQ ID NO: 77759 - protein, 14 aa, Homo Sapiens
YGWMDFGRRSAEDE

SEQ ID NO: 77760 - protein, 14 aa, Homo Sapiens
GWMDFGRRSAEDEN

SEQ ID NO: 77761 - protein, 15 aa, Homo Sapiens
MQRLCVYVLIFALAL

SEQ ID NO: 77762 - protein, 15 aa, Homo Sapiens
QRLCVYVLIFALALA

SEQ ID NO: 77763 - protein, 15 aa, Homo Sapiens
RLCVYVLIFALALAA

SEQ ID NO: 77764 - protein, 15 aa, Homo Sapiens
LCVYVLIFALALAAF

SEQ ID NO: 77765 - protein, 15 aa, Homo Sapiens
CVYVLIFALALAAFS

SEQ ID NO: 77766 - protein, 15 aa, Homo Sapiens
VYVLIFALALAAFSE

SEQ ID NO: 77767 - protein, 15 aa, Homo Sapiens
YVLIFALALAAFSEA

SEQ ID NO: 77768 - protein, 15 aa, Homo Sapiens
VLIFALALAAFSEAS

SEQ ID NO: 77769 - protein, 15 aa, Homo Sapiens
LIFALALAAFSEASW

SEQ ID NO: 77770 - protein, 15 aa, Homo Sapiens
IFALALAAFSEASWK

SEQ ID NO: 77771 - protein, 15 aa, Homo Sapiens
FALALAAFSEASWKP

SEQ ID NO: 77772 - protein, 15 aa, Homo Sapiens
ALALAAFSEASWKPR

SEQ ID NO: 77773 - protein, 15 aa, Homo Sapiens
LALAAFSEASWKPRS

SEQ ID NO: 77774 - protein, 15 aa, Homo Sapiens
ALAAFSEASWKPRSQ

SEQ ID NO: 77775 - protein, 15 aa, Homo Sapiens
LAAFSEASWKPRSQQ

SEQ ID NO: 77776 - protein, 15 aa, Homo Sapiens
AAFSEASWKPRSQQP

SEQ ID NO: 77777 - protein, 15 aa, Homo Sapiens
AFSEASWKPRSQQPD

SEQ ID NO: 77778 - protein, 15 aa, Homo Sapiens
FSEASWKPRSQQPDA

SEQ ID NO: 77779 - protein, 15 aa, Homo Sapiens
SEASWKPRSQQPDAP

SEQ ID NO: 77780 - protein, 15 aa, Homo Sapiens
EASWKPRSQQPDAPL

SEQ ID NO: 77781 - protein, 15 aa, Homo Sapiens
ASWKPRSQQPDAPLG

SEQ ID NO: 77782 - protein, 15 aa, Homo Sapiens
SWKPRSQQPDAPLGT

SEQ ID NO: 77783 - protein, 15 aa, Homo Sapiens
WKPRSQQPDAPLGTG

SEQ ID NO: 77784 - protein, 15 aa, Homo Sapiens
KPRSQQPDAPLGTGA

SEQ ID NO: 77785 - protein, 15 aa, Homo Sapiens
PRSQQPDAPLGTGAN

SEQ ID NO: 77786 - protein, 15 aa, Homo Sapiens
RSQQPDAPLGTGANR

SEQ ID NO: 77787 - protein, 15 aa, Homo Sapiens
SQQPDAPLGTGANRD

SEQ ID NO: 77788 - protein, 15 aa, Homo Sapiens
QQPDAPLGTGANRDL

SEQ ID NO: 77789 - protein, 15 aa, Homo Sapiens
QPDAPLGTGANRDLE

SEQ ID NO: 77790 - protein, 15 aa, Homo Sapiens
PDAPLGTGANRDLEL

SEQ ID NO: 77791 - protein, 15 aa, Homo Sapiens
DAPLGTGANRDLELP

SEQ ID NO: 77792 - protein, 15 aa, Homo Sapiens
APLGTGANRDLELPW

SEQ ID NO: 77793 - protein, 15 aa, Homo Sapiens
PLGTGANRDLELPWL

SEQ ID NO: 77794 - protein, 15 aa, Homo Sapiens
LGTGANRDLELPWLE

SEQ ID NO: 77795 - protein, 15 aa, Homo Sapiens
GTGANRDLELPWLEQ

SEQ ID NO: 77796 - protein, 15 aa, Homo Sapiens
TGANRDLELPWLEQQ

SEQ ID NO: 77797 - protein, 15 aa, Homo Sapiens
GANRDLELPWLEQQG

SEQ ID NO: 77798 - protein, 15 aa, Homo Sapiens
ANRDLELPWLEQQGP

SEQ ID NO: 77799 - protein, 15 aa, Homo Sapiens
NRDLELPWLEQQGPA

SEQ ID NO: 77800 - protein, 15 aa, Homo Sapiens
RDLELPWLEQQGPAS

SEQ ID NO: 77801 - protein, 15 aa, Homo Sapiens
DLELPWLEQQGPASH

SEQ ID NO: 77802 - protein, 15 aa, Homo Sapiens
LELPWLEQQGPASHH

SEQ ID NO: 77803 - protein, 15 aa, Homo Sapiens
ELPWLEQQGPASHHR

SEQ ID NO: 77804 - protein, 15 aa, Homo Sapiens
LPWLEQQGPASHHRR

SEQ ID NO: 77805 - protein, 15 aa, Homo Sapiens
PWLEQQGPASHHRRQ

SEQ ID NO: 77806 - protein, 15 aa, Homo Sapiens
WLEQQGPASHHRRQL

SEQ ID NO: 77807 - protein, 15 aa, Homo Sapiens
LEQQGPASHHRRQLG

SEQ ID NO: 77808 - protein, 15 aa, Homo Sapiens
EQQGPASHHRRQLGP

SEQ ID NO: 77809 - protein, 15 aa, Homo Sapiens
QQGPASHHRRQLGPQ

SEQ ID NO: 77810 - protein, 15 aa, Homo Sapiens
QGPASHHRRQLGPQG

SEQ ID NO: 77811 - protein, 15 aa, Homo Sapiens
GPASHHRRQLGPQGP

SEQ ID NO: 77812 - protein, 15 aa, Homo Sapiens
PASHHRRQLGPQGPP

SEQ ID NO: 77813 - protein, 15 aa, Homo Sapiens
ASHHRRQLGPQGPPH

SEQ ID NO: 77814 - protein, 15 aa, Homo Sapiens
SHHRRQLGPQGPPHL

SEQ ID NO: 77815 - protein, 15 aa, Homo Sapiens
HHRRQLGPQGPPHLV

SEQ ID NO: 77816 - protein, 15 aa, Homo Sapiens
HRRQLGPQGPPHLVA

SEQ ID NO: 77817 - protein, 15 aa, Homo Sapiens
RRQLGPQGPPHLVAD

SEQ ID NO: 77818 - protein, 15 aa, Homo Sapiens
RQLGPQGPPHLVADP

SEQ ID NO: 77819 - protein, 15 aa, Homo Sapiens
QLGPQGPPHLVADPS

SEQ ID NO: 77820 - protein, 15 aa, Homo Sapiens
LGPQGPPHLVADPSK

SEQ ID NO: 77821 - protein, 15 aa, Homo Sapiens
GPQGPPHLVADPSKK

SEQ ID NO: 77822 - protein, 15 aa, Homo Sapiens
PQGPPHLVADPSKKQ

SEQ ID NO: 77823 - protein, 15 aa, Homo Sapiens
QGPPHLVADPSKKQG

SEQ ID NO: 77824 - protein, 15 aa, Homo Sapiens
GPPHLVADPSKKQGP

SEQ ID NO: 77825 - protein, 15 aa, Homo Sapiens
PPHLVADPSKKQGPW

SEQ ID NO: 77826 - protein, 15 aa, Homo Sapiens
PHLVADPSKKQGPWL

SEQ ID NO: 77827 - protein, 15 aa, Homo Sapiens
HLVADPSKKQGPWLE

SEQ ID NO: 77828 - protein, 15 aa, Homo Sapiens
LVADPSKKQGPWLEE

SEQ ID NO: 77829 - protein, 15 aa, Homo Sapiens
VADPSKKQGPWLEEE

SEQ ID NO: 77830 - protein, 15 aa, Homo Sapiens
ADPSKKQGPWLEEEE

SEQ ID NO: 77831 - protein, 15 aa, Homo Sapiens
DPSKKQGPWLEEEEE

SEQ ID NO: 77832 - protein, 15 aa, Homo Sapiens
PSKKQGPWLEEEEEA

SEQ ID NO: 77833 - protein, 15 aa, Homo Sapiens
SKKQGPWLEEEEEAY

SEQ ID NO: 77834 - protein, 15 aa, Homo Sapiens
KKQGPWLEEEEEAYG

SEQ ID NO: 77835 - protein, 15 aa, Homo Sapiens
KQGPWLEEEEEAYGW

SEQ ID NO: 77836 - protein, 15 aa, Homo Sapiens
QGPWLEEEEEAYGWM

SEQ ID NO: 77837 - protein, 15 aa, Homo Sapiens
GPWLEEEEEAYGWMD

SEQ ID NO: 77838 - protein, 15 aa, Homo Sapiens
PWLEEEEEAYGWMDF

SEQ ID NO: 77839 - protein, 15 aa, Homo Sapiens
WLEEEEEAYGWMDFG

SEQ ID NO: 77840 - protein, 15 aa, Homo Sapiens
LEEEEEAYGWMDFGR

SEQ ID NO: 77841 - protein, 15 aa, Homo Sapiens
EEEEEAYGWMDFGRR

SEQ ID NO: 77842 - protein, 15 aa, Homo Sapiens
EEEEAYGWMDFGRRS

SEQ ID NO: 77843 - protein, 15 aa, Homo Sapiens
EEEAYGWMDFGRRSA

SEQ ID NO: 77844 - protein, 15 aa, Homo Sapiens
EEAYGWMDFGRRSAE

SEQ ID NO: 77845 - protein, 15 aa, Homo Sapiens
EAYGWMDFGRRSAED

SEQ ID NO: 77846 - protein, 15 aa, Homo Sapiens
AYGWMDFGRRSAEDE

SEQ ID NO: 77847 - protein, 15 aa, Homo Sapiens
YGWMDFGRRSAEDEN

SEQ ID NO: 77848 - protein, 16 aa, Homo Sapiens
MQRLCVYVLIFALALA

SEQ ID NO: 77849 - protein, 16 aa, Homo Sapiens
QRLCVYVLIFALALAA

SEQ ID NO: 77850 - protein, 16 aa, Homo Sapiens
RLCVYVLIFALALAAF

SEQ ID NO: 77851 - protein, 16 aa, Homo Sapiens
LCVYVLIFALALAAFS

SEQ ID NO: 77852 - protein, 16 aa, Homo Sapiens
CVYVLIFALALAAFSE

SEQ ID NO: 77853 - protein, 16 aa, Homo Sapiens
VYVLIFALALAAFSEA

SEQ ID NO: 77854 - protein, 16 aa, Homo Sapiens
YVLIFALALAAFSEAS

SEQ ID NO: 77855 - protein, 16 aa, Homo Sapiens
VLIFALALAAFSEASW

SEQ ID NO: 77856 - protein, 16 aa, Homo Sapiens
LIFALALAAFSEASWK

SEQ ID NO: 77857 - protein, 16 aa, Homo Sapiens
IFALALAAFSEASWKP

SEQ ID NO: 77858 - protein, 16 aa, Homo Sapiens
FALALAAFSEASWKPR

SEQ ID NO: 77859 - protein, 16 aa, Homo Sapiens
ALALAAFSEASWKPRS

SEQ ID NO: 77860 - protein, 16 aa, Homo Sapiens
LALAAFSEASWKPRSQ

SEQ ID NO: 77861 - protein, 16 aa, Homo Sapiens
ALAAFSEASWKPRSQQ

SEQ ID NO: 77862 - protein, 16 aa, Homo Sapiens
LAAFSEASWKPRSQQP

SEQ ID NO: 77863 - protein, 16 aa, Homo Sapiens
AAFSEASWKPRSQQPD

SEQ ID NO: 77864 - protein, 16 aa, Homo Sapiens
AFSEASWKPRSQQPDA

SEQ ID NO: 77865 - protein, 16 aa, Homo Sapiens
FSEASWKPRSQQPDAP

SEQ ID NO: 77866 - protein, 16 aa, Homo Sapiens
SEASWKPRSQQPDAPL

SEQ ID NO: 77867 - protein, 16 aa, Homo Sapiens
EASWKPRSQQPDAPLG

SEQ ID NO: 77868 - protein, 16 aa, Homo Sapiens
ASWKPRSQQPDAPLGT

SEQ ID NO: 77869 - protein, 16 aa, Homo Sapiens
SWKPRSQQPDAPLGTG

SEQ ID NO: 77870 - protein, 16 aa, Homo Sapiens
WKPRSQQPDAPLGTGA

SEQ ID NO: 77871 - protein, 16 aa, Homo Sapiens
KPRSQQPDAPLGTGAN

SEQ ID NO: 77872 - protein, 16 aa, Homo Sapiens
PRSQQPDAPLGTGANR

SEQ ID NO: 77873 - protein, 16 aa, Homo Sapiens
RSQQPDAPLGTGANRD

SEQ ID NO: 77874 - protein, 16 aa, Homo Sapiens
SQQPDAPLGTGANRDL

SEQ ID NO: 77875 - protein, 16 aa, Homo Sapiens
QQPDAPLGTGANRDLE

SEQ ID NO: 77876 - protein, 16 aa, Homo Sapiens
QPDAPLGTGANRDLEL

SEQ ID NO: 77877 - protein, 16 aa, Homo Sapiens
PDAPLGTGANRDLELP

SEQ ID NO: 77878 - protein, 16 aa, Homo Sapiens
DAPLGTGANRDLELPW

SEQ ID NO: 77879 - protein, 16 aa, Homo Sapiens
APLGTGANRDLELPWL

SEQ ID NO: 77880 - protein, 16 aa, Homo Sapiens
PLGTGANRDLELPWLE

SEQ ID NO: 77881 - protein, 16 aa, Homo Sapiens
LGTGANRDLELPWLEQ

SEQ ID NO: 77882 - protein, 16 aa, Homo Sapiens
GTGANRDLELPWLEQQ

SEQ ID NO: 77883 - protein, 16 aa, Homo Sapiens
TGANRDLELPWLEQQG

SEQ ID NO: 77884 - protein, 16 aa, Homo Sapiens
GANRDLELPWLEQQGP

SEQ ID NO: 77885 - protein, 16 aa, Homo Sapiens
ANRDLELPWLEQQGPA

SEQ ID NO: 77886 - protein, 16 aa, Homo Sapiens
NRDLELPWLEQQGPAS

SEQ ID NO: 77887 - protein, 16 aa, Homo Sapiens
RDLELPWLEQQGPASH

SEQ ID NO: 77888 - protein, 16 aa, Homo Sapiens
DLELPWLEQQGPASHH

SEQ ID NO: 77889 - protein, 16 aa, Homo Sapiens
LELPWLEQQGPASHHR

SEQ ID NO: 77890 - protein, 16 aa, Homo Sapiens
ELPWLEQQGPASHHRR

SEQ ID NO: 77891 - protein, 16 aa, Homo Sapiens
LPWLEQQGPASHHRRQ

SEQ ID NO: 77892 - protein, 16 aa, Homo Sapiens
PWLEQQGPASHHRRQL

SEQ ID NO: 77893 - protein, 16 aa, Homo Sapiens
WLEQQGPASHHRRQLG

SEQ ID NO: 77894 - protein, 16 aa, Homo Sapiens
LEQQGPASHHRRQLGP

SEQ ID NO: 77895 - protein, 16 aa, Homo Sapiens
EQQGPASHHRRQLGPQ

SEQ ID NO: 77896 - protein, 16 aa, Homo Sapiens
QQGPASHHRRQLGPQG

SEQ ID NO: 77897 - protein, 16 aa, Homo Sapiens
QGPASHHRRQLGPQGP

SEQ ID NO: 77898 - protein, 16 aa, Homo Sapiens
GPASHHRRQLGPQGPP

SEQ ID NO: 77899 - protein, 16 aa, Homo Sapiens
PASHHRRQLGPQGPPH

SEQ ID NO: 77900 - protein, 16 aa, Homo Sapiens
ASHHRRQLGPQGPPHL

SEQ ID NO: 77901 - protein, 16 aa, Homo Sapiens
SHHRRQLGPQGPPHLV

SEQ ID NO: 77902 - protein, 16 aa, Homo Sapiens
HHRRQLGPQGPPHLVA

SEQ ID NO: 77903 - protein, 16 aa, Homo Sapiens
HRRQLGPQGPPHLVAD

SEQ ID NO: 77904 - protein, 16 aa, Homo Sapiens
RRQLGPQGPPHLVADP

SEQ ID NO: 77905 - protein, 16 aa, Homo Sapiens
RQLGPQGPPHLVADPS

SEQ ID NO: 77906 - protein, 16 aa, Homo Sapiens
QLGPQGPPHLVADPSK

SEQ ID NO: 77907 - protein, 16 aa, Homo Sapiens
LGPQGPPHLVADPSKK

SEQ ID NO: 77908 - protein, 16 aa, Homo Sapiens
GPQGPPHLVADPSKKQ

SEQ ID NO: 77909 - protein, 16 aa, Homo Sapiens
PQGPPHLVADPSKKQG

SEQ ID NO: 77910 - protein, 16 aa, Homo Sapiens
QGPPHLVADPSKKQGP

SEQ ID NO: 77911 - protein, 16 aa, Homo Sapiens
GPPHLVADPSKKQGPW

SEQ ID NO: 77912 - protein, 16 aa, Homo Sapiens
PPHLVADPSKKQGPWL

SEQ ID NO: 77913 - protein, 16 aa, Homo Sapiens
PHLVADPSKKQGPWLE

SEQ ID NO: 77914 - protein, 16 aa, Homo Sapiens
HLVADPSKKQGPWLEE

SEQ ID NO: 77915 - protein, 16 aa, Homo Sapiens
LVADPSKKQGPWLEEE

SEQ ID NO: 77916 - protein, 16 aa, Homo Sapiens
VADPSKKQGPWLEEEE

SEQ ID NO: 77917 - protein, 16 aa, Homo Sapiens
ADPSKKQGPWLEEEEE

SEQ ID NO: 77918 - protein, 16 aa, Homo Sapiens
DPSKKQGPWLEEEEEA

SEQ ID NO: 77919 - protein, 16 aa, Homo Sapiens
PSKKQGPWLEEEEEAY

SEQ ID NO: 77920 - protein, 16 aa, Homo Sapiens
SKKQGPWLEEEEEAYG

SEQ ID NO: 77921 - protein, 16 aa, Homo Sapiens
KKQGPWLEEEEEAYGW

SEQ ID NO: 77922 - protein, 16 aa, Homo Sapiens
KQGPWLEEEEEAYGWM

SEQ ID NO: 77923 - protein, 16 aa, Homo Sapiens
QGPWLEEEEEAYGWMD

SEQ ID NO: 77924 - protein, 16 aa, Homo Sapiens
GPWLEEEEEAYGWMDF

SEQ ID NO: 77925 - protein, 16 aa, Homo Sapiens
PWLEEEEEAYGWMDFG

SEQ ID NO: 77926 - protein, 16 aa, Homo Sapiens
WLEEEEEAYGWMDFGR

SEQ ID NO: 77927 - protein, 16 aa, Homo Sapiens
LEEEEEAYGWMDFGRR

SEQ ID NO: 77928 - protein, 16 aa, Homo Sapiens
EEEEEAYGWMDFGRRS

SEQ ID NO: 77929 - protein, 16 aa, Homo Sapiens
EEEEAYGWMDFGRRSA

SEQ ID NO: 77930 - protein, 16 aa, Homo Sapiens
EEEAYGWMDFGRRSAE

SEQ ID NO: 77931 - protein, 16 aa, Homo Sapiens
EEAYGWMDFGRRSAED

SEQ ID NO: 77932 - protein, 16 aa, Homo Sapiens
EAYGWMDFGRRSAEDE

SEQ ID NO: 77933 - protein, 16 aa, Homo Sapiens
AYGWMDFGRRSAEDEN

SEQ ID NO: 77934 - protein, 256 aa, Homo Sapiens [sequence omitted]

SEQ ID NO: 77935 - protein, 8 aa, Homo Sapiens
HRPPSPAL

SEQ ID NO: 77936 - protein, 8 aa, Homo Sapiens
SPALASVL

SEQ ID NO: 77937 - protein, 8 aa, Homo Sapiens
ALASVLLA

SEQ ID NO: 77938 - protein, 8 aa, Homo Sapiens
LASVLLAL

SEQ ID NO: 77939 - protein, 8 aa, Homo Sapiens
SVLLALLL

SEQ ID NO: 77940 - protein, 8 aa, Homo Sapiens
VLLALLLS

SEQ ID NO: 77941 - protein, 8 aa, Homo Sapiens
LALLLSGA

SEQ ID NO: 77942 - protein, 8 aa, Homo Sapiens
ALLLSGAA

SEQ ID NO: 77943 - protein, 8 aa, Homo Sapiens
LLLSGAAR

SEQ ID NO: 77944 - protein, 8 aa, Homo Sapiens
LLSGAARA

SEQ ID NO: 77945 - protein, 8 aa, Homo Sapiens
EIVGGHEA

SEQ ID NO: 77946 - protein, 8 aa, Homo Sapiens
AQPHSRPY

SEQ ID NO: 77947 - protein, 8 aa, Homo Sapiens
QPHSRPYM

SEQ ID NO: 77948 - protein, 8 aa, Homo Sapiens
RPYMASLQ

SEQ ID NO: 77949 - protein, 8 aa, Homo Sapiens
PYMASLQM

SEQ ID NO: 77950 - protein, 8 aa, Homo Sapiens
YMASLQMR

SEQ ID NO: 77951 - protein, 8 aa, Homo Sapiens
RGNPGSHF

SEQ ID NO: 77952 - protein, 8 aa, Homo Sapiens
SHFCGGTL

SEQ ID NO: 77953 - protein, 8 aa, Homo Sapiens
TLIHPSFV

SEQ ID NO: 77954 - protein, 8 aa, Homo Sapiens
LIHPSFVL

SEQ ID NO: 77955 - protein, 8 aa, Homo Sapiens
HPSFVLTA

SEQ ID NO: 77956 - protein, 8 aa, Homo Sapiens
FVLTAAHC

SEQ ID NO: 77957 - protein, 8 aa, Homo Sapiens
VLTAAHCL

SEQ ID NO: 77958 - protein, 8 aa, Homo Sapiens
LTAAHCLR

SEQ ID NO: 77959 - protein, 8 aa, Homo Sapiens
CLRDIPQR

SEQ ID NO: 77960 - protein, 8 aa, Homo Sapiens
IPQRLVNV

SEQ ID NO: 77961 - protein, 8 aa, Homo Sapiens
QRLVNVVL

SEQ ID NO: 77962 - protein, 8 aa, Homo Sapiens
LVNVVLGA

SEQ ID NO: 77963 - protein, 8 aa, Homo Sapiens
VVLGAHNV

SEQ ID NO: 77964 - protein, 8 aa, Homo Sapiens
VLGAHNVR

SEQ ID NO: 77965 - protein, 8 aa, Homo Sapiens
PTQQHFSV

SEQ ID NO: 77966 - protein, 8 aa, Homo Sapiens
TQQHFSVA

SEQ ID NO: 77967 - protein, 8 aa, Homo Sapiens
HFSVAQVF

SEQ ID NO: 77968 - protein, 8 aa, Homo Sapiens
FSVAQVFL

SEQ ID NO: 77969 - protein, 8 aa, Homo Sapiens
AQVFLNNY

SEQ ID NO: 77970 - protein, 8 aa, Homo Sapiens
FLNNYDAE

SEQ ID NO: 77971 - protein, 8 aa, Homo Sapiens
NNYDAENK

SEQ ID NO: 77972 - protein, 8 aa, Homo Sapiens
NYDAENKL

SEQ ID NO: 77973 - protein, 8 aa, Homo Sapiens
AENKLNDI

SEQ ID NO: 77974 - protein, 8 aa, Homo Sapiens
KLNDILLI

SEQ ID NO: 77975 - protein, 8 aa, Homo Sapiens
LIQLSSPA

SEQ ID NO: 77976 - protein, 8 aa, Homo Sapiens
QLSSPANL

SEQ ID NO: 77977 - protein, 8 aa, Homo Sapiens
SPANLSAS

SEQ ID NO: 77978 - protein, 8 aa, Homo Sapiens
NLSASVAT

SEQ ID NO: 77979 - protein, 8 aa, Homo Sapiens
LSASVATV

SEQ ID NO: 77980 - protein, 8 aa, Homo Sapiens
LPQQDQPV

SEQ ID NO: 77981 - protein, 8 aa, Homo Sapiens
VPHGTQCL

SEQ ID NO: 77982 - protein, 8 aa, Homo Sapiens
CLAMGWGR

SEQ ID NO: 77983 - protein, 8 aa, Homo Sapiens
LAMGWGRV

SEQ ID NO: 77984 - protein, 8 aa, Homo Sapiens
AHDPPAQV

SEQ ID NO: 77985 - protein, 8 aa, Homo Sapiens
QVLQELNV

SEQ ID NO: 77986 - protein, 8 aa, Homo Sapiens
VLQELNVT

SEQ ID NO: 77987 - protein, 8 aa, Homo Sapiens
LQELNVTV

SEQ ID NO: 77988 - protein, 8 aa, Homo Sapiens
QELNVTVV

SEQ ID NO: 77989 - protein, 8 aa, Homo Sapiens
NVTVVTFF

SEQ ID NO: 77990 - protein, 8 aa, Homo Sapiens
TVVTFFCR

SEQ ID NO: 77991 - protein, 8 aa, Homo Sapiens
RPHNICTF

SEQ ID NO: 77992 - protein, 8 aa, Homo Sapiens
NICTFVPR

SEQ ID NO: 77993 - protein, 8 aa, Homo Sapiens
CTFVPRRK

SEQ ID NO: 77994 - protein, 8 aa, Homo Sapiens
VPRRKAGI

SEQ ID NO: 77995 - protein, 8 aa, Homo Sapiens
RRKAGICF

SEQ ID NO: 77996 - protein, 8 aa, Homo Sapiens
IIQGIDSF

SEQ ID NO: 77997 - protein, 8 aa, Homo Sapiens
IQGIDSFV

SEQ ID NO: 77998 - protein, 8 aa, Homo Sapiens
QGIDSFVI

SEQ ID NO: 77999 - protein, 8 aa, Homo Sapiens
FVIWGCAT

SEQ ID NO: 78000 - protein, 8 aa, Homo Sapiens
VIWGCATR

SEQ ID NO: 78001 - protein, 8 aa, Homo Sapiens
RLFPDFFT

SEQ ID NO: 78002 - protein, 8 aa, Homo Sapiens
LFPDFFTR

SEQ ID NO: 78003 - protein, 8 aa, Homo Sapiens
FPDFFTRV

SEQ ID NO: 78004 - protein, 8 aa, Homo Sapiens
DFFTRVAL

SEQ ID NO: 78005 - protein, 8 aa, Homo Sapiens
FFTRVALY

SEQ ID NO: 78006 - protein, 8 aa, Homo Sapiens
FTRVALYV

SEQ ID NO: 78007 - protein, 8 aa, Homo Sapiens
RVALYVDW

SEQ ID NO: 78008 - protein, 8 aa, Homo Sapiens
ALYVDWIR

SEQ ID NO: 78009 - protein, 8 aa, Homo Sapiens
YVDWIRST

SEQ ID NO: 78010 - protein, 8 aa, Homo Sapiens
DWIRSTLR

SEQ ID NO: 78011 - protein, 8 aa, Homo Sapiens
WIRSTLRR

SEQ ID NO: 78012 - protein, 8 aa, Homo Sapiens
TLRRVEAK

SEQ ID NO: 78013 - protein, 8 aa, Homo Sapiens
RRVEAKGR

SEQ ID NO: 78014 - protein, 9 aa, Homo Sapiens
MAHRPPSPA

SEQ ID NO: 78015 - protein, 9 aa, Homo Sapiens
RPPSPALAS

SEQ ID NO: 78016 - protein, 9 aa, Homo Sapiens
PPSPALASV

SEQ ID NO: 78017 - protein, 9 aa, Homo Sapiens
SPALASVLL

SEQ ID NO: 78018 - protein, 9 aa, Homo Sapiens
ALASVLLAL

SEQ ID NO: 78019 - protein, 9 aa, Homo Sapiens
LASVLLALL

SEQ ID NO: 78020 - protein, 9 aa, Homo Sapiens
VLLALLLSG

SEQ ID NO: 78021 - protein, 9 aa, Homo Sapiens
LLALLLSGA

SEQ ID NO: 78022 - protein, 9 aa, Homo Sapiens
LALLLSGAA

SEQ ID NO: 78023 - protein, 9 aa, Homo Sapiens
ALLLSGAAR

SEQ ID NO: 78024 - protein, 9 aa, Homo Sapiens
LLLSGAARA

SEQ ID NO: 78025 - protein, 9 aa, Homo Sapiens
LLSGAARAA

SEQ ID NO: 78026 - protein, 9 aa, Homo Sapiens
SGAARAAEI

SEQ ID NO: 78027 - protein, 9 aa, Homo Sapiens
AEIVGGHEA

SEQ ID NO: 78028 - protein, 9 aa, Homo Sapiens
EAQPHSRPY

SEQ ID NO: 78029 - protein, 9 aa, Homo Sapiens
AQPHSRPYM

SEQ ID NO: 78030 - protein, 9 aa, Homo Sapiens
QPHSRPYMA

SEQ ID NO: 78031 - protein, 9 aa, Homo Sapiens
HSRPYMASL

SEQ ID NO: 78032 - protein, 9 aa, Homo Sapiens
RPYMASLQM

SEQ ID NO: 78033 - protein, 9 aa, Homo Sapiens
PYMASLQMR

SEQ ID NO: 78034 - protein, 9 aa, Homo Sapiens
YMASLQMRG

SEQ ID NO: 78035 - protein, 9 aa, Homo Sapiens
LQMRGNPGS

SEQ ID NO: 78036 - protein, 9 aa, Homo Sapiens
QMRGNPGSH

SEQ ID NO: 78037 - protein, 9 aa, Homo Sapiens
GTLIHPSFV

SEQ ID NO: 78038 - protein, 9 aa, Homo Sapiens
TLIHPSFVL

SEQ ID NO: 78039 - protein, 9 aa, Homo Sapiens
HPSFVLTAA

SEQ ID NO: 78040 - protein, 9 aa, Homo Sapiens
FVLTAAHCL

SEQ ID NO: 78041 - protein, 9 aa, Homo Sapiens
VLTAAHCLR

SEQ ID NO: 78042 - protein, 9 aa, Homo Sapiens
CLRDIPQRL

SEQ ID NO: 78043 - protein, 9 aa, Homo Sapiens
DIPQRLVNV

SEQ ID NO: 78044 - protein, 9 aa, Homo Sapiens
IPQRLVNVV

SEQ ID NO: 78045 - protein, 9 aa, Homo Sapiens
RLVNVVLGA

SEQ ID NO: 78046 - protein, 9 aa, Homo Sapiens
NVVLGAHNV

SEQ ID NO: 78047 - protein, 9 aa, Homo Sapiens
VVLGAHNVR

SEQ ID NO: 78048 - protein, 9 aa, Homo Sapiens
VLGAHNVRT

SEQ ID NO: 78049 - protein, 9 aa, Homo Sapiens
TQEPTQQHF

SEQ ID NO: 78050 - protein, 9 aa, Homo Sapiens
EPTQQHFSV

SEQ ID NO: 78051 - protein, 9 aa, Homo Sapiens
QQHFSVAQV

SEQ ID NO: 78052 - protein, 9 aa, Homo Sapiens
QVFLNNYDA

SEQ ID NO: 78053 - protein, 9 aa, Homo Sapiens
AENKLNDIL

SEQ ID NO: 78054 - protein, 9 aa, Homo Sapiens
KLNDILLIQ

SEQ ID NO: 78055 - protein, 9 aa, Homo Sapiens
LLIQLSSPA

SEQ ID NO: 78056 - protein, 9 aa, Homo Sapiens
SPANLSASV

SEQ ID NO: 78057 - protein, 9 aa, Homo Sapiens
NLSASVATV

SEQ ID NO: 78058 - protein, 9 aa, Homo Sapiens
SASVATVQL

SEQ ID NO: 78059 - protein, 9 aa, Homo Sapiens
SVATVQLPQ

SEQ ID NO: 78060 - protein, 9 aa, Homo Sapiens
QLPQQDQPV

SEQ ID NO: 78061 - protein, 9 aa, Homo Sapiens
PVPHGTQCL

SEQ ID NO: 78062 - protein, 9 aa, Homo Sapiens
VPHGTQCLA

SEQ ID NO: 78063 - protein, 9 aa, Homo Sapiens
CLAMGWGRV

SEQ ID NO: 78064 - protein, 9 aa, Homo Sapiens
AMGWGRVGA

SEQ ID NO: 78065 - protein, 9 aa, Homo Sapiens
RVGAHDPPA

SEQ ID NO: 78066 - protein, 9 aa, Homo Sapiens
GAHDPPAQV

SEQ ID NO: 78067 - protein, 9 aa, Homo Sapiens
AHDPPAQVL

SEQ ID NO: 78068 - protein, 9 aa, Homo Sapiens
AQVLQELNV

SEQ ID NO: 78069 - protein, 9 aa, Homo Sapiens
VLQELNVTV

SEQ ID NO: 78070 - protein, 9 aa, Homo Sapiens
LQELNVTVV

SEQ ID NO: 78071 - protein, 9 aa, Homo Sapiens
ELNVTVVTF

SEQ ID NO: 78072 - protein, 9 aa, Homo Sapiens
VTVVTFFCR

SEQ ID NO: 78073 - protein, 9 aa, Homo Sapiens
RPHNICTFV

SEQ ID NO: 78074 - protein, 9 aa, Homo Sapiens
HNICTFVPR

SEQ ID NO: 78075 - protein, 9 aa, Homo Sapiens
NICTFVPRR

SEQ ID NO: 78076 - protein, 9 aa, Homo Sapiens
FVPRRKAGI

SEQ ID NO: 78077 - protein, 9 aa, Homo Sapiens
VPRRKAGIC

SEQ ID NO: 78078 - protein, 9 aa, Homo Sapiens
GPLICDGII

SEQ ID NO: 78079 - protein, 9 aa, Homo Sapiens
ICDGIIQGI

SEQ ID NO: 78080 - protein, 9 aa, Homo Sapiens
GIIQGIDSF

SEQ ID NO: 78081 - protein, 9 aa, Homo Sapiens
IIQGIDSFV

SEQ ID NO: 78082 - protein, 9 aa, Homo Sapiens
IQGIDSFVI

SEQ ID NO: 78083 - protein, 9 aa, Homo Sapiens
QGIDSFVIW

SEQ ID NO: 78084 - protein, 9 aa, Homo Sapiens
DSFVIWGCA

SEQ ID NO: 78085 - protein, 9 aa, Homo Sapiens
FVIWGCATR

SEQ ID NO: 78086 - protein, 9 aa, Homo Sapiens
VIWGCATRL

SEQ ID NO: 78087 - protein, 9 aa, Homo Sapiens
IWGCATRLF

SEQ ID NO: 78088 - protein, 9 aa, Homo Sapiens
RLFPDFFTR

SEQ ID NO: 78089 - protein, 9 aa, Homo Sapiens
LFPDFFTRV

SEQ ID NO: 78090 - protein, 9 aa, Homo Sapiens
FPDFFTRVA

SEQ ID NO: 78091 - protein, 9 aa, Homo Sapiens
DFFTRVALY

SEQ ID NO: 78092 - protein, 9 aa, Homo Sapiens
FFTRVALYV

SEQ ID NO: 78093 - protein, 9 aa, Homo Sapiens
RVALYVDWI

SEQ ID NO: 78094 - protein, 9 aa, Homo Sapiens
VALYVDWIR

SEQ ID NO: 78095 - protein, 9 aa, Homo Sapiens
YVDWIRSTL

SEQ ID NO: 78096 - protein, 9 aa, Homo Sapiens
VDWIRSTLR

SEQ ID NO: 78097 - protein, 9 aa, Homo Sapiens
DWIRSTLRR

SEQ ID NO: 78098 - protein, 9 aa, Homo Sapiens
WIRSTLRRV

SEQ ID NO: 78099 - protein, 9 aa, Homo Sapiens
STLRRVEAK

SEQ ID NO: 78100 - protein, 10 aa, Homo Sapiens
MAHRPPSPAL

SEQ ID NO: 78101 - protein, 10 aa, Homo Sapiens
RPPSPALASV

SEQ ID NO: 78102 - protein, 10 aa, Homo Sapiens
PPSPALASVL

SEQ ID NO: 78103 - protein, 10 aa, Homo Sapiens
SPALASVLLA

SEQ ID NO: 78104 - protein, 10 aa, Homo Sapiens
ALASVLLALL

SEQ ID NO: 78105 - protein, 10 aa, Homo Sapiens
LASVLLALLL

SEQ ID NO: 78106 - protein, 10 aa, Homo Sapiens
VLLALLLSGA

SEQ ID NO: 78107 - protein, 10 aa, Homo Sapiens
LLALLLSGAA

SEQ ID NO: 78108 - protein, 10 aa, Homo Sapiens
LALLLSGAAR

SEQ ID NO: 78109 - protein, 10 aa, Homo Sapiens
ALLLSGAARA

SEQ ID NO: 78110 - protein, 10 aa, Homo Sapiens
LLLSGAARAA

SEQ ID NO: 78111 - protein, 10 aa, Homo Sapiens
SGAARAAEIV

SEQ ID NO: 78112 - protein, 10 aa, Homo Sapiens
AEIVGGHEAQ

SEQ ID NO: 78113 - protein, 10 aa, Homo Sapiens
HEAQPHSRPY

SEQ ID NO: 78114 - protein, 10 aa, Homo Sapiens
EAQPHSRPYM

SEQ ID NO: 78115 - protein, 10 aa, Homo Sapiens
AQPHSRPYMA

SEQ ID NO: 78116 - protein, 10 aa, Homo Sapiens
PHSRPYMASL

SEQ ID NO: 78117 - protein, 10 aa, Homo Sapiens
RPYMASLQMR

SEQ ID NO: 78118 - protein, 10 aa, Homo Sapiens
LQMRGNPGSH

SEQ ID NO: 78119 - protein, 10 aa, Homo Sapiens
QMRGNPGSHF

SEQ ID NO: 78120 - protein, 10 aa, Homo Sapiens
GTLIHPSFVL

SEQ ID NO: 78121 - protein, 10 aa, Homo Sapiens
TLIHPSFVLT

SEQ ID NO: 78122 - protein, 10 aa, Homo Sapiens
LIHPSFVLTA

SEQ ID NO: 78123 - protein, 10 aa, Homo Sapiens
HPSFVLTAAH

SEQ ID NO: 78124 - protein, 10 aa, Homo Sapiens
SFVLTAAHCL

SEQ ID NO: 78125 - protein, 10 aa, Homo Sapiens
FVLTAAHCLR

SEQ ID NO: 78126 - protein, 10 aa, Homo Sapiens
CLRDIPQRLV

SEQ ID NO: 78127 - protein, 10 aa, Homo Sapiens
DIPQRLVNVV

SEQ ID NO: 78128 - protein, 10 aa, Homo Sapiens
IPQRLVNVVL

SEQ ID NO: 78129 - protein, 10 aa, Homo Sapiens
NVVLGAHNVR

SEQ ID NO: 78130 - protein, 10 aa, Homo Sapiens
VLGAHNVRTQ

SEQ ID NO: 78131 - protein, 10 aa, Homo Sapiens
RTQEPTQQHF

SEQ ID NO: 78132 - protein, 10 aa, Homo Sapiens
EPTQQHFSVA

SEQ ID NO: 78133 - protein, 10 aa, Homo Sapiens
TQQHFSVAQV

SEQ ID NO: 78134 - protein, 10 aa, Homo Sapiens
QQHFSVAQVF

SEQ ID NO: 78135 - protein, 10 aa, Homo Sapiens
SVAQVFLNNY

SEQ ID NO: 78136 - protein, 10 aa, Homo Sapiens
AQVFLNNYDA

SEQ ID NO: 78137 - protein, 10 aa, Homo Sapiens
FLNNYDAENK

SEQ ID NO: 78138 - protein, 10 aa, Homo Sapiens
AENKLNDILL

SEQ ID NO: 78139 - protein, 10 aa, Homo Sapiens
KLNDILLIQL

SEQ ID NO: 78140 - protein, 10 aa, Homo Sapiens
ILLIQLSSPA

SEQ ID NO: 78141 - protein, 10 aa, Homo Sapiens
LIQLSSPANL

SEQ ID NO: 78142 - protein, 10 aa, Homo Sapiens
QLSSPANLSA

SEQ ID NO: 78143 - protein, 10 aa, Homo Sapiens
SSPANLSASV

SEQ ID NO: 78144 - protein, 10 aa, Homo Sapiens
SPANLSASVA

SEQ ID NO: 78145 - protein, 10 aa, Homo Sapiens
LSASVATVQL

SEQ ID NO: 78146 - protein, 10 aa, Homo Sapiens
VQLPQQDQPV

SEQ ID NO: 78147 - protein, 10 aa, Homo Sapiens
LPQQDQPVPH

SEQ ID NO: 78148 - protein, 10 aa, Homo Sapiens
QPVPHGTQCL

SEQ ID NO: 78149 - protein, 10 aa, Homo Sapiens
VPHGTQCLAM

SEQ ID NO: 78150 - protein, 10 aa, Homo Sapiens
HGTQCLAMGW

SEQ ID NO: 78151 - protein, 10 aa, Homo Sapiens
TQCLAMGWGR

SEQ ID NO: 78152 - protein, 10 aa, Homo Sapiens
LAMGWGRVGA

SEQ ID NO: 78153 - protein, 10 aa, Homo Sapiens
AQVLQELNVT

SEQ ID NO: 78154 - protein, 10 aa, Homo Sapiens
QVLQELNVTV

SEQ ID NO: 78155 - protein, 10 aa, Homo Sapiens
VLQELNVTVV

SEQ ID NO: 78156 - protein, 10 aa, Homo Sapiens
QELNVTVVTF

SEQ ID NO: 78157 - protein, 10 aa, Homo Sapiens
ELNVTVVTFF

SEQ ID NO: 78158 - protein, 10 aa, Homo Sapiens
NVTVVTFFCR

SEQ ID NO: 78159 - protein, 10 aa, Homo Sapiens
VTFFCRPHNI

SEQ ID NO: 78160 - protein, 10 aa, Homo Sapiens
FCRPHNICTF

SEQ ID NO: 78161 - protein, 10 aa, Homo Sapiens
PHNICTFVPR

SEQ ID NO: 78162 - protein, 10 aa, Homo Sapiens
HNICTFVPRR

SEQ ID NO: 78163 - protein, 10 aa, Homo Sapiens
NICTFVPRRK

SEQ ID NO: 78164 - protein, 10 aa, Homo Sapiens
VPRRKAGICF

SEQ ID NO: 78165 - protein, 10 aa, Homo Sapiens
LICDGIIQGI

SEQ ID NO: 78166 - protein, 10 aa, Homo Sapiens
GIIQGIDSFV

SEQ ID NO: 78167 - protein, 10 aa, Homo Sapiens
IIQGIDSFVI

SEQ ID NO: 78168 - protein, 10 aa, Homo Sapiens
GIDSFVIWGC

SEQ ID NO: 78169 - protein, 10 aa, Homo Sapiens
SFVIWGCATR

SEQ ID NO: 78170 - protein, 10 aa, Homo Sapiens
FVIWGCATRL

SEQ ID NO: 78171 - protein, 10 aa, Homo Sapiens
ATRLFPDFFT

SEQ ID NO: 78172 - protein, 10 aa, Homo Sapiens
TRLFPDFFTR

SEQ ID NO: 78173 - protein, 10 aa, Homo Sapiens
RLFPDFFTRV

SEQ ID NO: 78174 - protein, 10 aa, Homo Sapiens
FPDFFTRVAL

SEQ ID NO: 78175 - protein, 10 aa, Homo Sapiens
DFFTRVALYV

SEQ ID NO: 78176 - protein, 10 aa, Homo Sapiens
FTRVALYVDW

SEQ ID NO: 78177 - protein, 10 aa, Homo Sapiens
RVALYVDWIR

SEQ ID NO: 78178 - protein, 10 aa, Homo Sapiens
ALYVDWIRST

SEQ ID NO: 78179 - protein, 10 aa, Homo Sapiens
LYVDWIRSTL

SEQ ID NO: 78180 - protein, 10 aa, Homo Sapiens
YVDWIRSTLR

SEQ ID NO: 78181 - protein, 10 aa, Homo Sapiens
RSTLRRVEAK

SEQ ID NO: 78182 - protein, 11 aa, Homo Sapiens
MAHRPPSPALA

SEQ ID NO: 78183 - protein, 11 aa, Homo Sapiens
HRPPSPALASV

SEQ ID NO: 78184 - protein, 11 aa, Homo Sapiens
RPPSPALASVL

SEQ ID NO: 78185 - protein, 11 aa, Homo Sapiens
SPALASVLLAL

SEQ ID NO: 78186 - protein, 11 aa, Homo Sapiens
ALASVLLALLL

SEQ ID NO: 78187 - protein, 11 aa, Homo Sapiens
SVLLALLLSGA

SEQ ID NO: 78188 - protein, 11 aa, Homo Sapiens
VLLALLLSGAA

SEQ ID NO: 78189 - protein, 11 aa, Homo Sapiens
LLALLLSGAAR

SEQ ID NO: 78190 - protein, 11 aa, Homo Sapiens
ALLLSGAARAA

SEQ ID NO: 78191 - protein, 11 aa, Homo Sapiens
LLLSGAARAAE

SEQ ID NO: 78192 - protein, 11 aa, Homo Sapiens
LLSGAARAAEI

SEQ ID NO: 78193 - protein, 11 aa, Homo Sapiens
RAAEIVGGHEA

SEQ ID NO: 78194 - protein, 11 aa, Homo Sapiens
QPHSRPYMASL

SEQ ID NO: 78195 - protein, 11 aa, Homo Sapiens
LQMRGNPGSHF

SEQ ID NO: 78196 - protein, 11 aa, Homo Sapiens
QMRGNPGSHFC

SEQ ID NO: 78197 - protein, 11 aa, Homo Sapiens
NPGSHFCGGTL

SEQ ID NO: 78198 - protein, 11 aa, Homo Sapiens
TLIHPSFVLTA

SEQ ID NO: 78199 - protein, 11 aa, Homo Sapiens
LIHPSFVLTAA

SEQ ID NO: 78200 - protein, 11 aa, Homo Sapiens
SFVLTAAHCLR

SEQ ID NO: 78201 - protein, 11 aa, Homo Sapiens
VLTAAHCLRDI

SEQ ID NO: 78202 - protein, 11 aa, Homo Sapiens
AAHCLRDIPQR

SEQ ID NO: 78203 - protein, 11 aa, Homo Sapiens
HCLRDIPQRLV

SEQ ID NO: 78204 - protein, 11 aa, Homo Sapiens
DIPQRLVNVVL

SEQ ID NO: 78205 - protein, 11 aa, Homo Sapiens
LVNVVLGAHNV

SEQ ID NO: 78206 - protein, 11 aa, Homo Sapiens
TQEPTQQHFSV

SEQ ID NO: 78207 - protein, 11 aa, Homo Sapiens
EPTQQHFSVAQ

SEQ ID NO: 78208 - protein, 11 aa, Homo Sapiens
TQQHFSVAQVF

SEQ ID NO: 78209 - protein, 11 aa, Homo Sapiens
QQHFSVAQVFL

SEQ ID NO: 78210 - protein, 11 aa, Homo Sapiens
FSVAQVFLNNY

SEQ ID NO: 78211 - protein, 11 aa, Homo Sapiens
VFLNNYDAENK

SEQ ID NO: 78212 - protein, 11 aa, Homo Sapiens
FLNNYDAENKL

SEQ ID NO: 78213 - protein, 11 aa, Homo Sapiens
NYDAENKLNDI

SEQ ID NO: 78214 - protein, 11 aa, Homo Sapiens
YDAENKLNDIL

SEQ ID NO: 78215 - protein, 11 aa, Homo Sapiens
AENKLNDILLI

SEQ ID NO: 78216 - protein, 11 aa, Homo Sapiens
KLNDILLIQLS

SEQ ID NO: 78217 - protein, 11 aa, Homo Sapiens
LLIQLSSPANL

SEQ ID NO: 78218 - protein, 11 aa, Homo Sapiens
IQLSSPANLSA

SEQ ID NO: 78219 - protein, 11 aa, Homo Sapiens
LSSPANLSASV

SEQ ID NO: 78220 - protein, 11 aa, Homo Sapiens
SPANLSASVAT

SEQ ID NO: 78221 - protein, 11 aa, Homo Sapiens
NLSASVATVQL

SEQ ID NO: 78222 - protein, 11 aa, Homo Sapiens
TVQLPQQDQPV

SEQ ID NO: 78223 - protein, 11 aa, Homo Sapiens
QPVPHGTQCLA

SEQ ID NO: 78224 - protein, 11 aa, Homo Sapiens
PVPHGTQCLAM

SEQ ID NO: 78225 - protein, 11 aa, Homo Sapiens
GTQCLAMGWGR

SEQ ID NO: 78226 - protein, 11 aa, Homo Sapiens
TQCLAMGWGRV

SEQ ID NO: 78227 - protein, 11 aa, Homo Sapiens
CLAMGWGRVGA

SEQ ID NO: 78228 - protein, 11 aa, Homo Sapiens
LAMGWGRVGAH

SEQ ID NO: 78229 - protein, 11 aa, Homo Sapiens
RVGAHDPPAQV

SEQ ID NO: 78230 - protein, 11 aa, Homo Sapiens
AQVLQELNVTV

SEQ ID NO: 78231 - protein, 11 aa, Homo Sapiens
QVLQELNVTVV

SEQ ID NO: 78232 - protein, 11 aa, Homo Sapiens
VLQELNVTVVT

SEQ ID NO: 78233 - protein, 11 aa, Homo Sapiens
LQELNVTVVTF

SEQ ID NO: 78234 - protein, 11 aa, Homo Sapiens
QELNVTVVTFF

SEQ ID NO: 78235 - protein, 11 aa, Homo Sapiens
ELNVTVVTFFC

SEQ ID NO: 78236 - protein, 11 aa, Homo Sapiens
LNVTVVTFFCR

SEQ ID NO: 78237 - protein, 11 aa, Homo Sapiens
FFCRPHNICTF

SEQ ID NO: 78238 - protein, 11 aa, Homo Sapiens
FCRPHNICTFV

SEQ ID NO: 78239 - protein, 11 aa, Homo Sapiens
RPHNICTFVPR

SEQ ID NO: 78240 - protein, 11 aa, Homo Sapiens
CTFVPRRKAGI

SEQ ID NO: 78241 - protein, 11 aa, Homo Sapiens
FVPRRKAGICF

SEQ ID NO: 78242 - protein, 11 aa, Homo Sapiens
PLICDGIIQGI

SEQ ID NO: 78243 - protein, 11 aa, Homo Sapiens
DGIIQGIDSFV

SEQ ID NO: 78244 - protein, 11 aa, Homo Sapiens
GIIQGIDSFVI

SEQ ID NO: 78245 - protein, 11 aa, Homo Sapiens
GIDSFVIWGCA

SEQ ID NO: 78246 - protein, 11 aa, Homo Sapiens
DSFVIWGCATR

SEQ ID NO: 78247 - protein, 11 aa, Homo Sapiens
FVIWGCATRLF

SEQ ID NO: 78248 - protein, 11 aa, Homo Sapiens
ATRLFPDFFTR

SEQ ID NO: 78249 - protein, 11 aa, Homo Sapiens
TRLFPDFFTRV

SEQ ID NO: 78250 - protein, 11 aa, Homo Sapiens
RLFPDFFTRVA

SEQ ID NO: 78251 - protein, 11 aa, Homo Sapiens
LFPDFFTRVAL

SEQ ID NO: 78252 - protein, 11 aa, Homo Sapiens
FPDFFTRVALY

SEQ ID NO: 78253 - protein, 11 aa, Homo Sapiens
FFTRVALYVDW

SEQ ID NO: 78254 - protein, 11 aa, Homo Sapiens
FTRVALYVDWI

SEQ ID NO: 78255 - protein, 11 aa, Homo Sapiens
ALYVDWIRSTL

SEQ ID NO: 78256 - protein, 11 aa, Homo Sapiens
LYVDWIRSTLR

SEQ ID NO: 78257 - protein, 11 aa, Homo Sapiens
YVDWIRSTLRR

SEQ ID NO: 78258 - protein, 11 aa, Homo Sapiens
STLRRVEAKGR

SEQ ID NO: 78259 - protein, 13 aa, Homo Sapiens
MAHRPPSPALASV

SEQ ID NO: 78260 - protein, 13 aa, Homo Sapiens
AHRPPSPALASVL

SEQ ID NO: 78261 - protein, 13 aa, Homo Sapiens
HRPPSPALASVLL

SEQ ID NO: 78262 - protein, 13 aa, Homo Sapiens
RPPSPALASVLLA

SEQ ID NO: 78263 - protein, 13 aa, Homo Sapiens
PPSPALASVLLAL

SEQ ID NO: 78264 - protein, 13 aa, Homo Sapiens
PSPALASVLLALL

SEQ ID NO: 78265 - protein, 13 aa, Homo Sapiens
SPALASVLLALLL

SEQ ID NO: 78266 - protein, 13 aa, Homo Sapiens
PALASVLLALLLS

SEQ ID NO: 78267 - protein, 13 aa, Homo Sapiens
ALASVLLALLLSG

SEQ ID NO: 78268 - protein, 13 aa, Homo Sapiens
LASVLLALLLSGA

SEQ ID NO: 78269 - protein, 13 aa, Homo Sapiens
ASVLLALLLSGAA

SEQ ID NO: 78270 - protein, 13 aa, Homo Sapiens
SVLLALLLSGAAR

SEQ ID NO: 78271 - protein, 13 aa, Homo Sapiens
VLLALLLSGAARA

SEQ ID NO: 78272 - protein, 13 aa, Homo Sapiens
LLALLLSGAARAA

SEQ ID NO: 78273 - protein, 13 aa, Homo Sapiens
LALLLSGAARAAE

SEQ ID NO: 78274 - protein, 13 aa, Homo Sapiens
ALLLSGAARAAEI

SEQ ID NO: 78275 - protein, 13 aa, Homo Sapiens
LLLSGAARAAEIV

SEQ ID NO: 78276 - protein, 13 aa, Homo Sapiens
LLSGAARAAEIVG

SEQ ID NO: 78277 - protein, 13 aa, Homo Sapiens
LSGAARAAEIVGG

SEQ ID NO: 78278 - protein, 13 aa, Homo Sapiens
SGAARAAEIVGGH

SEQ ID NO: 78279 - protein, 13 aa, Homo Sapiens
GAARAAEIVGGHE

SEQ ID NO: 78280 - protein, 13 aa, Homo Sapiens
AARAAEIVGGHEA

SEQ ID NO: 78281 - protein, 13 aa, Homo Sapiens
ARAAEIVGGHEAQ

SEQ ID NO: 78282 - protein, 13 aa, Homo Sapiens
RAAEIVGGHEAQP

SEQ ID NO: 78283 - protein, 13 aa, Homo Sapiens
AAEIVGGHEAQPH

SEQ ID NO: 78284 - protein, 13 aa, Homo Sapiens
AEIVGGHEAQPHS

SEQ ID NO: 78285 - protein, 13 aa, Homo Sapiens
EIVGGHEAQPHSR

SEQ ID NO: 78286 - protein, 13 aa, Homo Sapiens
IVGGHEAQPHSRP

SEQ ID NO: 78287 - protein, 13 aa, Homo Sapiens
VGGHEAQPHSRPY

SEQ ID NO: 78288 - protein, 13 aa, Homo Sapiens
GGHEAQPHSRPYM

SEQ ID NO: 78289 - protein, 13 aa, Homo Sapiens
GHEAQPHSRPYMA

SEQ ID NO: 78290 - protein, 13 aa, Homo Sapiens
HEAQPHSRPYMAS

SEQ ID NO: 78291 - protein, 13 aa, Homo Sapiens
EAQPHSRPYMASL

SEQ ID NO: 78292 - protein, 13 aa, Homo Sapiens
AQPHSRPYMASLQ

SEQ ID NO: 78293 - protein, 13 aa, Homo Sapiens
QPHSRPYMASLQM

SEQ ID NO: 78294 - protein, 13 aa, Homo Sapiens
PHSRPYMASLQMR

SEQ ID NO: 78295 - protein, 13 aa, Homo Sapiens
HSRPYMASLQMRG

SEQ ID NO: 78296 - protein, 13 aa, Homo Sapiens
SRPYMASLQMRGN

SEQ ID NO: 78297 - protein, 13 aa, Homo Sapiens
RPYMASLQMRGNP

SEQ ID NO: 78298 - protein, 13 aa, Homo Sapiens
PYMASLQMRGNPG

SEQ ID NO: 78299 - protein, 13 aa, Homo Sapiens
YMASLQMRGNPGS

SEQ ID NO: 78300 - protein, 13 aa, Homo Sapiens
MASLQMRGNPGSH

SEQ ID NO: 78301 - protein, 13 aa, Homo Sapiens
ASLQMRGNPGSHF

SEQ ID NO: 78302 - protein, 13 aa, Homo Sapiens
SLQMRGNPGSHFC

SEQ ID NO: 78303 - protein, 13 aa, Homo Sapiens
LQMRGNPGSHFCG

SEQ ID NO: 78304 - protein, 13 aa, Homo Sapiens
QMRGNPGSHFCGG

SEQ ID NO: 78305 - protein, 13 aa, Homo Sapiens
MRGNPGSHFCGGT

SEQ ID NO: 78306 - protein, 13 aa, Homo Sapiens
RGNPGSHFCGGTL

SEQ ID NO: 78307 - protein, 13 aa, Homo Sapiens
GNPGSHFCGGTLI

SEQ ID NO: 78308 - protein, 13 aa, Homo Sapiens
NPGSHFCGGTLIH

SEQ ID NO: 78309 - protein, 13 aa, Homo Sapiens
PGSHFCGGTLIHP

SEQ ID NO: 78310 - protein, 13 aa, Homo Sapiens
GSHFCGGTLIHPS

SEQ ID NO: 78311 - protein, 13 aa, Homo Sapiens
SHFCGGTLIHPSF

SEQ ID NO: 78312 - protein, 13 aa, Homo Sapiens
HFCGGTLIHPSFV

SEQ ID NO: 78313 - protein, 13 aa, Homo Sapiens
FCGGTLIHPSFVL

SEQ ID NO: 78314 - protein, 13 aa, Homo Sapiens
CGGTLIHPSFVLT

SEQ ID NO: 78315 - protein, 13 aa, Homo Sapiens
GGTLIHPSFVLTA

SEQ ID NO: 78316 - protein, 13 aa, Homo Sapiens
GTLIHPSFVLTAA

SEQ ID NO: 78317 - protein, 13 aa, Homo Sapiens
TLIHPSFVLTAAH

SEQ ID NO: 78318 - protein, 13 aa, Homo Sapiens
LIHPSFVLTAAHC

SEQ ID NO: 78319 - protein, 13 aa, Homo Sapiens
IHPSFVLTAAHCL

SEQ ID NO: 78320 - protein, 13 aa, Homo Sapiens
HPSFVLTAAHCLR

SEQ ID NO: 78321 - protein, 13 aa, Homo Sapiens
PSFVLTAAHCLRD

SEQ ID NO: 78322 - protein, 13 aa, Homo Sapiens
SFVLTAAHCLRDI

SEQ ID NO: 78323 - protein, 13 aa, Homo Sapiens
FVLTAAHCLRDIP

SEQ ID NO: 78324 - protein, 13 aa, Homo Sapiens
VLTAAHCLRDIPQ

SEQ ID NO: 78325 - protein, 13 aa, Homo Sapiens
LTAAHCLRDIPQR

SEQ ID NO: 78326 - protein, 13 aa, Homo Sapiens
TAAHCLRDIPQRL

SEQ ID NO: 78327 - protein, 13 aa, Homo Sapiens
AAHCLRDIPQRLV

SEQ ID NO: 78328 - protein, 13 aa, Homo Sapiens
AHCLRDIPQRLVN

SEQ ID NO: 78329 - protein, 13 aa, Homo Sapiens
HCLRDIPQRLVNV

SEQ ID NO: 78330 - protein, 13 aa, Homo Sapiens
CLRDIPQRLVNVV

SEQ ID NO: 78331 - protein, 13 aa, Homo Sapiens
LRDIPQRLVNVVL

SEQ ID NO: 78332 - protein, 13 aa, Homo Sapiens
RDIPQRLVNVVLG

SEQ ID NO: 78333 - protein, 13 aa, Homo Sapiens
DIPQRLVNVVLGA

SEQ ID NO: 78334 - protein, 13 aa, Homo Sapiens
IPQRLVNVVLGAH

SEQ ID NO: 78335 - protein, 13 aa, Homo Sapiens
PQRLVNVVLGAHN

SEQ ID NO: 78336 - protein, 13 aa, Homo Sapiens
QRLVNVVLGAHNV

SEQ ID NO: 78337 - protein, 13 aa, Homo Sapiens
RLVNVVLGAHNVR

SEQ ID NO: 78338 - protein, 13 aa, Homo Sapiens
LVNVVLGAHNVRT

SEQ ID NO: 78339 - protein, 13 aa, Homo Sapiens
VNVVLGAHNVRTQ

SEQ ID NO: 78340 - protein, 13 aa, Homo Sapiens
NVVLGAHNVRTQE

SEQ ID NO: 78341 - protein, 13 aa, Homo Sapiens
VVLGAHNVRTQEP

SEQ ID NO: 78342 - protein, 13 aa, Homo Sapiens
VLGAHNVRTQEPT

SEQ ID NO: 78343 - protein, 13 aa, Homo Sapiens
LGAHNVRTQEPTQ

SEQ ID NO: 78344 - protein, 13 aa, Homo Sapiens
GAHNVRTQEPTQQ

SEQ ID NO: 78345 - protein, 13 aa, Homo Sapiens
AHNVRTQEPTQQH

SEQ ID NO: 78346 - protein, 13 aa, Homo Sapiens
HNVRTQEPTQQHF

SEQ ID NO: 78347 - protein, 13 aa, Homo Sapiens
NVRTQEPTQQHFS

SEQ ID NO: 78348 - protein, 13 aa, Homo Sapiens
VRTQEPTQQHFSV

SEQ ID NO: 78349 - protein, 13 aa, Homo Sapiens
RTQEPTQQHFSVA

SEQ ID NO: 78350 - protein, 13 aa, Homo Sapiens
TQEPTQQHFSVAQ

SEQ ID NO: 78351 - protein, 13 aa, Homo Sapiens
QEPTQQHFSVAQV

SEQ ID NO: 78352 - protein, 13 aa, Homo Sapiens
EPTQQHFSVAQVF

SEQ ID NO: 78353 - protein, 13 aa, Homo Sapiens
PTQQHFSVAQVFL

SEQ ID NO: 78354 - protein, 13 aa, Homo Sapiens
TQQHFSVAQVFLN

SEQ ID NO: 78355 - protein, 13 aa, Homo Sapiens
QQHFSVAQVFLNN

SEQ ID NO: 78356 - protein, 13 aa, Homo Sapiens
QHFSVAQVFLNNY

SEQ ID NO: 78357 - protein, 13 aa, Homo Sapiens
HFSVAQVFLNNYD

SEQ ID NO: 78358 - protein, 13 aa, Homo Sapiens
FSVAQVFLNNYDA

SEQ ID NO: 78359 - protein, 13 aa, Homo Sapiens
SVAQVFLNNYDAE

SEQ ID NO: 78360 - protein, 13 aa, Homo Sapiens
VAQVFLNNYDAEN

SEQ ID NO: 78361 - protein, 13 aa, Homo Sapiens
AQVFLNNYDAENK

SEQ ID NO: 78362 - protein, 13 aa, Homo Sapiens
QVFLNNYDAENKL

SEQ ID NO: 78363 - protein, 13 aa, Homo Sapiens
VFLNNYDAENKLN

SEQ ID NO: 78364 - protein, 13 aa, Homo Sapiens
FLNNYDAENKLND

SEQ ID NO: 78365 - protein, 13 aa, Homo Sapiens
LNNYDAENKLNDI

SEQ ID NO: 78366 - protein, 13 aa, Homo Sapiens
NNYDAENKLNDIL

SEQ ID NO: 78367 - protein, 13 aa, Homo Sapiens
NYDAENKLNDILL

SEQ ID NO: 78368 - protein, 13 aa, Homo Sapiens
YDAENKLNDILLI

SEQ ID NO: 78369 - protein, 13 aa, Homo Sapiens
DAENKLNDILLIQ

SEQ ID NO: 78370 - protein, 13 aa, Homo Sapiens
AENKLNDILLIQL

SEQ ID NO: 78371 - protein, 13 aa, Homo Sapiens
ENKLNDILLIQLS

SEQ ID NO: 78372 - protein, 13 aa, Homo Sapiens
NKLNDILLIQLSS

SEQ ID NO: 78373 - protein, 13 aa, Homo Sapiens
KLNDILLIQLSSP

SEQ ID NO: 78374 - protein, 13 aa, Homo Sapiens
LNDILLIQLSSPA

SEQ ID NO: 78375 - protein, 13 aa, Homo Sapiens
NDILLIQLSSPAN

SEQ ID NO: 78376 - protein, 13 aa, Homo Sapiens
DILLIQLSSPANL

SEQ ID NO: 78377 - protein, 13 aa, Homo Sapiens
ILLIQLSSPANLS

SEQ ID NO: 78378 - protein, 13 aa, Homo Sapiens
LLIQLSSPANLSA

SEQ ID NO: 78379 - protein, 13 aa, Homo Sapiens
LIQLSSPANLSAS

SEQ ID NO: 78380 - protein, 13 aa, Homo Sapiens
IQLSSPANLSASV

SEQ ID NO: 78381 - protein, 13 aa, Homo Sapiens
QLSSPANLSASVA

SEQ ID NO: 78382 - protein, 13 aa, Homo Sapiens
LSSPANLSASVAT

SEQ ID NO: 78383 - protein, 13 aa, Homo Sapiens
SSPANLSASVATV

SEQ ID NO: 78384 - protein, 13 aa, Homo Sapiens
SPANLSASVATVQ

SEQ ID NO: 78385 - protein, 13 aa, Homo Sapiens
PANLSASVATVQL

SEQ ID NO: 78386 - protein, 13 aa, Homo Sapiens
ANLSASVATVQLP

SEQ ID NO: 78387 - protein, 13 aa, Homo Sapiens
NLSASVATVQLPQ

SEQ ID NO: 78388 - protein, 13 aa, Homo Sapiens
LSASVATVQLPQQ

SEQ ID NO: 78389 - protein, 13 aa, Homo Sapiens
SASVATVQLPQQD

SEQ ID NO: 78390 - protein, 13 aa, Homo Sapiens
ASVATVQLPQQDQ

SEQ ID NO: 78391 - protein, 13 aa, Homo Sapiens
SVATVQLPQQDQP

SEQ ID NO: 78392 - protein, 13 aa, Homo Sapiens
VATVQLPQQDQPV

SEQ ID NO: 78393 - protein, 13 aa, Homo Sapiens
ATVQLPQQDQPVP

SEQ ID NO: 78394 - protein, 13 aa, Homo Sapiens
TVQLPQQDQPVPH

SEQ ID NO: 78395 - protein, 13 aa, Homo Sapiens
VQLPQQDQPVPHG

SEQ ID NO: 78396 - protein, 13 aa, Homo Sapiens
QLPQQDQPVPHGT

SEQ ID NO: 78397 - protein, 13 aa, Homo Sapiens
LPQQDQPVPHGTQ

SEQ ID NO: 78398 - protein, 13 aa, Homo Sapiens
PQQDQPVPHGTQC

SEQ ID NO: 78399 - protein, 13 aa, Homo Sapiens
QQDQPVPHGTQCL

SEQ ID NO: 78400 - protein, 13 aa, Homo Sapiens
QDQPVPHGTQCLA

SEQ ID NO: 78401 - protein, 13 aa, Homo Sapiens
DQPVPHGTQCLAM

SEQ ID NO: 78402 - protein, 13 aa, Homo Sapiens
QPVPHGTQCLAMG

SEQ ID NO: 78403 - protein, 13 aa, Homo Sapiens
PVPHGTQCLAMGW

SEQ ID NO: 78404 - protein, 13 aa, Homo Sapiens
VPHGTQCLAMGWG

SEQ ID NO: 78405 - protein, 13 aa, Homo Sapiens
PHGTQCLAMGWGR

SEQ ID NO: 78406 - protein, 13 aa, Homo Sapiens
HGTQCLAMGWGRV

SEQ ID NO: 78407 - protein, 13 aa, Homo Sapiens
GTQCLAMGWGRVG

SEQ ID NO: 78408 - protein, 13 aa, Homo Sapiens
TQCLAMGWGRVGA

SEQ ID NO: 78409 - protein, 13 aa, Homo Sapiens
QCLAMGWGRVGAH

SEQ ID NO: 78410 - protein, 13 aa, Homo Sapiens
CLAMGWGRVGAHD

SEQ ID NO: 78411 - protein, 13 aa, Homo Sapiens
LAMGWGRVGAHDP

SEQ ID NO: 78412 - protein, 13 aa, Homo Sapiens
AMGWGRVGAHDPP

SEQ ID NO: 78413 - protein, 13 aa, Homo Sapiens
MGWGRVGAHDPPA

SEQ ID NO: 78414 - protein, 13 aa, Homo Sapiens
GWGRVGAHDPPAQ

SEQ ID NO: 78415 - protein, 13 aa, Homo Sapiens
WGRVGAHDPPAQV

SEQ ID NO: 78416 - protein, 13 aa, Homo Sapiens
GRVGAHDPPAQVL

SEQ ID NO: 78417 - protein, 13 aa, Homo Sapiens
RVGAHDPPAQVLQ

SEQ ID NO: 78418 - protein, 13 aa, Homo Sapiens
VGAHDPPAQVLQE

SEQ ID NO: 78419 - protein, 13 aa, Homo Sapiens
GAHDPPAQVLQEL

SEQ ID NO: 78420 - protein, 13 aa, Homo Sapiens
AHDPPAQVLQELN

SEQ ID NO: 78421 - protein, 13 aa, Homo Sapiens
HDPPAQVLQELNV

SEQ ID NO: 78422 - protein, 13 aa, Homo Sapiens
DPPAQVLQELNVT

SEQ ID NO: 78423 - protein, 13 aa, Homo Sapiens
PPAQVLQELNVTV

SEQ ID NO: 78424 - protein, 13 aa, Homo Sapiens
PAQVLQELNVTVV

SEQ ID NO: 78425 - protein, 13 aa, Homo Sapiens
AQVLQELNVTVVT

SEQ ID NO: 78426 - protein, 13 aa, Homo Sapiens
QVLQELNVTVVTF

SEQ ID NO: 78427 - protein, 13 aa, Homo Sapiens
VLQELNVTVVTFF

SEQ ID NO: 78428 - protein, 13 aa, Homo Sapiens
LQELNVTVVTFFC

SEQ ID NO: 78429 - protein, 13 aa, Homo Sapiens
QELNVTVVTFFCR

SEQ ID NO: 78430 - protein, 13 aa, Homo Sapiens
ELNVTVVTFFCRP

SEQ ID NO: 78431 - protein, 13 aa, Homo Sapiens
LNVTVVTFFCRPH

SEQ ID NO: 78432 - protein, 13 aa, Homo Sapiens
NVTVVTFFCRPHN

SEQ ID NO: 78433 - protein, 13 aa, Homo Sapiens
VTVVTFFCRPHNI

SEQ ID NO: 78434 - protein, 13 aa, Homo Sapiens
TVVTFFCRPHNIC

SEQ ID NO: 78435 - protein, 13 aa, Homo Sapiens
VVTFFCRPHNICT

SEQ ID NO: 78436 - protein, 13 aa, Homo Sapiens
VTFFCRPHNICTF

SEQ ID NO: 78437 - protein, 13 aa, Homo Sapiens
TFFCRPHNICTFV

SEQ ID NO: 78438 - protein, 13 aa, Homo Sapiens
FFCRPHNICTFVP

SEQ ID NO: 78439 - protein, 13 aa, Homo Sapiens
FCRPHNICTFVPR

SEQ ID NO: 78440 - protein, 13 aa, Homo Sapiens
CRPHNICTFVPRR

SEQ ID NO: 78441 - protein, 13 aa, Homo Sapiens
RPHNICTFVPRRK

SEQ ID NO: 78442 - protein, 13 aa, Homo Sapiens
PHNICTFVPRRKA

SEQ ID NO: 78443 - protein, 13 aa, Homo Sapiens
HNICTFVPRRKAG

SEQ ID NO: 78444 - protein, 13 aa, Homo Sapiens
NICTFVPRRKAGI

SEQ ID NO: 78445 - protein, 13 aa, Homo Sapiens
ICTFVPRRKAGIC

SEQ ID NO: 78446 - protein, 13 aa, Homo Sapiens
CTFVPRRKAGICF

SEQ ID NO: 78447 - protein, 13 aa, Homo Sapiens
TFVPRRKAGICFG

SEQ ID NO: 78448 - protein, 13 aa, Homo Sapiens
FVPRRKAGICFGD

SEQ ID NO: 78449 - protein, 13 aa, Homo Sapiens
VPRRKAGICFGDS

SEQ ID NO: 78450 - protein, 13 aa, Homo Sapiens
PRRKAGICFGDSG

SEQ ID NO: 78451 - protein, 13 aa, Homo Sapiens
RRKAGICFGDSGG

SEQ ID NO: 78452 - protein, 13 aa, Homo Sapiens
RKAGICFGDSGGP

SEQ ID NO: 78453 - protein, 13 aa, Homo Sapiens
KAGICFGDSGGPL

SEQ ID NO: 78454 - protein, 13 aa, Homo Sapiens
AGICFGDSGGPLI

SEQ ID NO: 78455 - protein, 13 aa, Homo Sapiens
GICFGDSGGPLIC

SEQ ID NO: 78456 - protein, 13 aa, Homo Sapiens
ICFGDSGGPLICD

SEQ ID NO: 78457 - protein, 13 aa, Homo Sapiens
CFGDSGGPLICDG

SEQ ID NO: 78458 - protein, 13 aa, Homo Sapiens
FGDSGGPLICDGI

SEQ ID NO: 78459 - protein, 13 aa, Homo Sapiens
GDSGGPLICDGII

SEQ ID NO: 78460 - protein, 13 aa, Homo Sapiens
DSGGPLICDGIIQ

SEQ ID NO: 78461 - protein, 13 aa, Homo Sapiens
SGGPLICDGIIQG

SEQ ID NO: 78462 - protein, 13 aa, Homo Sapiens
GGPLICDGIIQGI

SEQ ID NO: 78463 - protein, 13 aa, Homo Sapiens
GPLICDGIIQGID

SEQ ID NO: 78464 - protein, 13 aa, Homo Sapiens
PLICDGIIQGIDS

SEQ ID NO: 78465 - protein, 13 aa, Homo Sapiens
LICDGIIQGIDSF

SEQ ID NO: 78466 - protein, 13 aa, Homo Sapiens
ICDGIIQGIDSFV

SEQ ID NO: 78467 - protein, 13 aa, Homo Sapiens
CDGIIQGIDSFVI

SEQ ID NO: 78468 - protein, 13 aa, Homo Sapiens
DGIIQGIDSFVIW

SEQ ID NO: 78469 - protein, 13 aa, Homo Sapiens
GIIQGIDSFVIWG

SEQ ID NO: 78470 - protein, 13 aa, Homo Sapiens
IIQGIDSFVIWGC

SEQ ID NO: 78471 - protein, 13 aa, Homo Sapiens
IQGIDSFVIWGCA

SEQ ID NO: 78472 - protein, 13 aa, Homo Sapiens
QGIDSFVIWGCAT

SEQ ID NO: 78473 - protein, 13 aa, Homo Sapiens
GIDSFVIWGCATR

SEQ ID NO: 78474 - protein, 13 aa, Homo Sapiens
IDSFVIWGCATRL

SEQ ID NO: 78475 - protein, 13 aa, Homo Sapiens
DSFVIWGCATRLF

SEQ ID NO: 78476 - protein, 13 aa, Homo Sapiens
SFVIWGCATRLFP

SEQ ID NO: 78477 - protein, 13 aa, Homo Sapiens
FVIWGCATRLFPD

SEQ ID NO: 78478 - protein, 13 aa, Homo Sapiens
VIWGCATRLFPDF

SEQ ID NO: 78479 - protein, 13 aa, Homo Sapiens
IWGCATRLFPDFF

SEQ ID NO: 78480 - protein, 13 aa, Homo Sapiens
WGCATRLFPDFFT

SEQ ID NO: 78481 - protein, 13 aa, Homo Sapiens
GCATRLFPDFFTR

SEQ ID NO: 78482 - protein, 13 aa, Homo Sapiens
CATRLFPDFFTRV

SEQ ID NO: 78483 - protein, 13 aa, Homo Sapiens
ATRLFPDFFTRVA

SEQ ID NO: 78484 - protein, 13 aa, Homo Sapiens
TRLFPDFFTRVAL

SEQ ID NO: 78485 - protein, 13 aa, Homo Sapiens
RLFPDFFTRVALY

SEQ ID NO: 78486 - protein, 13 aa, Homo Sapiens
LFPDFFTRVALYV

SEQ ID NO: 78487 - protein, 13 aa, Homo Sapiens
FPDFFTRVALYVD

SEQ ID NO: 78488 - protein, 13 aa, Homo Sapiens
PDFFTRVALYVDW

SEQ ID NO: 78489 - protein, 13 aa, Homo Sapiens
DFFTRVALYVDWI

SEQ ID NO: 78490 - protein, 13 aa, Homo Sapiens
FFTRVALYVDWIR

SEQ ID NO: 78491 - protein, 13 aa, Homo Sapiens
FTRVALYVDWIRS

SEQ ID NO: 78492 - protein, 13 aa, Homo Sapiens
TRVALYVDWIRST

SEQ ID NO: 78493 - protein, 13 aa, Homo Sapiens
RVALYVDWIRSTL

SEQ ID NO: 78494 - protein, 13 aa, Homo Sapiens
VALYVDWIRSTLR

SEQ ID NO: 78495 - protein, 13 aa, Homo Sapiens
ALYVDWIRSTLRR

SEQ ID NO: 78496 - protein, 13 aa, Homo Sapiens
LYVDWIRSTLRRV

SEQ ID NO: 78497 - protein, 13 aa, Homo Sapiens
YVDWIRSTLRRVE

SEQ ID NO: 78498 - protein, 13 aa, Homo Sapiens
VDWIRSTLRRVEA

SEQ ID NO: 78499 - protein, 13 aa, Homo Sapiens
DWIRSTLRRVEAK

SEQ ID NO: 78500 - protein, 13 aa, Homo Sapiens
WIRSTLRRVEAKG

SEQ ID NO: 78501 - protein, 13 aa, Homo Sapiens
IRSTLRRVEAKGR

SEQ ID NO: 78502 - protein, 13 aa, Homo Sapiens
RSTLRRVEAKGRP

SEQ ID NO: 78503 - protein, 14 aa, Homo Sapiens
MAHRPPSPALASVL

SEQ ID NO: 78504 - protein, 14 aa, Homo Sapiens
AHRPPSPALASVLL

SEQ ID NO: 78505 - protein, 14 aa, Homo Sapiens
HRPPSPALASVLLA

SEQ ID NO: 78506 - protein, 14 aa, Homo Sapiens
RPPSPALASVLLAL

SEQ ID NO: 78507 - protein, 14 aa, Homo Sapiens
PPSPALASVLLALL

SEQ ID NO: 78508 - protein, 14 aa, Homo Sapiens
PSPALASVLLALLL

SEQ ID NO: 78509 - protein, 14 aa, Homo Sapiens
SPALASVLLALLLS

SEQ ID NO: 78510 - protein, 14 aa, Homo Sapiens
PALASVLLALLLSG

SEQ ID NO: 78511 - protein, 14 aa, Homo Sapiens
ALASVLLALLLSGA

SEQ ID NO: 78512 - protein, 14 aa, Homo Sapiens
LASVLLALLLSGAA

SEQ ID NO: 78513 - protein, 14 aa, Homo Sapiens
ASVLLALLLSGAAR

SEQ ID NO: 78514 - protein, 14 aa, Homo Sapiens
SVLLALLLSGAARA

SEQ ID NO: 78515 - protein, 14 aa, Homo Sapiens
VLLALLLSGAARAA

SEQ ID NO: 78516 - protein, 14 aa, Homo Sapiens
LLALLLSGAARAAE

SEQ ID NO: 78517 - protein, 14 aa, Homo Sapiens
LALLLSGAARAAEI

SEQ ID NO: 78518 - protein, 14 aa, Homo Sapiens
ALLLSGAARAAEIV

SEQ ID NO: 78519 - protein, 14 aa, Homo Sapiens
LLLSGAARAAEIVG

SEQ ID NO: 78520 - protein, 14 aa, Homo Sapiens
LLSGAARAAEIVGG

SEQ ID NO: 78521 - protein, 14 aa, Homo Sapiens
LSGAARAAEIVGGH

SEQ ID NO: 78522 - protein, 14 aa, Homo Sapiens
SGAARAAEIVGGHE

SEQ ID NO: 78523 - protein, 14 aa, Homo Sapiens
GAARAAEIVGGHEA

SEQ ID NO: 78524 - protein, 14 aa, Homo Sapiens
AARAAEIVGGHEAQ

SEQ ID NO: 78525 - protein, 14 aa, Homo Sapiens
ARAAEIVGGHEAQP

SEQ ID NO: 78526 - protein, 14 aa, Homo Sapiens
RAAEIVGGHEAQPH

SEQ ID NO: 78527 - protein, 14 aa, Homo Sapiens
AAEIVGGHEAQPHS

SEQ ID NO: 78528 - protein, 14 aa, Homo Sapiens
AEIVGGHEAQPHSR

SEQ ID NO: 78529 - protein, 14 aa, Homo Sapiens
EIVGGHEAQPHSRP

SEQ ID NO: 78530 - protein, 14 aa, Homo Sapiens
IVGGHEAQPHSRPY

SEQ ID NO: 78531 - protein, 14 aa, Homo Sapiens
VGGHEAQPHSRPYM

SEQ ID NO: 78532 - protein, 14 aa, Homo Sapiens
GGHEAQPHSRPYMA

SEQ ID NO: 78533 - protein, 14 aa, Homo Sapiens
GHEAQPHSRPYMAS

SEQ ID NO: 78534 - protein, 14 aa, Homo Sapiens
HEAQPHSRPYMASL

SEQ ID NO: 78535 - protein, 14 aa, Homo Sapiens
EAQPHSRPYMASLQ

SEQ ID NO: 78536 - protein, 14 aa, Homo Sapiens
AQPHSRPYMASLQM

SEQ ID NO: 78537 - protein, 14 aa, Homo Sapiens
QPHSRPYMASLQMR

SEQ ID NO: 78538 - protein, 14 aa, Homo Sapiens
PHSRPYMASLQMRG

SEQ ID NO: 78539 - protein, 14 aa, Homo Sapiens
HSRPYMASLQMRGN

SEQ ID NO: 78540 - protein, 14 aa, Homo Sapiens
SRPYMASLQMRGNP

SEQ ID NO: 78541 - protein, 14 aa, Homo Sapiens
RPYMASLQMRGNPG

SEQ ID NO: 78542 - protein, 14 aa, Homo Sapiens
PYMASLQMRGNPGS

SEQ ID NO: 78543 - protein, 14 aa, Homo Sapiens
YMASLQMRGNPGSH

SEQ ID NO: 78544 - protein, 14 aa, Homo Sapiens
MASLQMRGNPGSHF

SEQ ID NO: 78545 - protein, 14 aa, Homo Sapiens
ASLQMRGNPGSHFC

SEQ ID NO: 78546 - protein, 14 aa, Homo Sapiens
SLQMRGNPGSHFCG

SEQ ID NO: 78547 - protein, 14 aa, Homo Sapiens
LQMRGNPGSHFCGG

SEQ ID NO: 78548 - protein, 14 aa, Homo Sapiens
QMRGNPGSHFCGGT

SEQ ID NO: 78549 - protein, 14 aa, Homo Sapiens
MRGNPGSHFCGGTL

SEQ ID NO: 78550 - protein, 14 aa, Homo Sapiens
RGNPGSHFCGGTLI

SEQ ID NO: 78551 - protein, 14 aa, Homo Sapiens
GNPGSHFCGGTLIH

SEQ ID NO: 78552 - protein, 14 aa, Homo Sapiens
NPGSHFCGGTLIHP

SEQ ID NO: 78553 - protein, 14 aa, Homo Sapiens
PGSHFCGGTLIHPS

SEQ ID NO: 78554 - protein, 14 aa, Homo Sapiens
GSHFCGGTLIHPSF

SEQ ID NO: 78555 - protein, 14 aa, Homo Sapiens
SHFCGGTLIHPSFV

SEQ ID NO: 78556 - protein, 14 aa, Homo Sapiens
HFCGGTLIHPSFVL

SEQ ID NO: 78557 - protein, 14 aa, Homo Sapiens
FCGGTLIHPSFVLT

SEQ ID NO: 78558 - protein, 14 aa, Homo Sapiens
CGGTLIHPSFVLTA

SEQ ID NO: 78559 - protein, 14 aa, Homo Sapiens
GGTLIHPSFVLTAA

SEQ ID NO: 78560 - protein, 14 aa, Homo Sapiens
GTLIHPSFVLTAAH

SEQ ID NO: 78561 - protein, 14 aa, Homo Sapiens
TLIHPSFVLTAAHC

SEQ ID NO: 78562 - protein, 14 aa, Homo Sapiens
LIHPSFVLTAAHCL

SEQ ID NO: 78563 - protein, 14 aa, Homo Sapiens
IHPSFVLTAAHCLR

SEQ ID NO: 78564 - protein, 14 aa, Homo Sapiens
HPSFVLTAAHCLRD

SEQ ID NO: 78565 - protein, 14 aa, Homo Sapiens
PSFVLTAAHCLRDI

SEQ ID NO: 78566 - protein, 14 aa, Homo Sapiens
SFVLTAAHCLRDIP

SEQ ID NO: 78567 - protein, 14 aa, Homo Sapiens
FVLTAAHCLRDIPQ

SEQ ID NO: 78568 - protein, 14 aa, Homo Sapiens
VLTAAHCLRDIPQR

SEQ ID NO: 78569 - protein, 14 aa, Homo Sapiens
LTAAHCLRDIPQRL

SEQ ID NO: 78570 - protein, 14 aa, Homo Sapiens
TAAHCLRDIPQRLV

SEQ ID NO: 78571 - protein, 14 aa, Homo Sapiens
AAHCLRDIPQRLVN

SEQ ID NO: 78572 - protein, 14 aa, Homo Sapiens
AHCLRDIPQRLVNV

SEQ ID NO: 78573 - protein, 14 aa, Homo Sapiens
HCLRDIPQRLVNVV

SEQ ID NO: 78574 - protein, 14 aa, Homo Sapiens
CLRDIPQRLVNVVL

SEQ ID NO: 78575 - protein, 14 aa, Homo Sapiens
LRDIPQRLVNVVLG

SEQ ID NO: 78576 - protein, 14 aa, Homo Sapiens
RDIPQRLVNVVLGA

SEQ ID NO: 78577 - protein, 14 aa, Homo Sapiens
DIPQRLVNVVLGAH

SEQ ID NO: 78578 - protein, 14 aa, Homo Sapiens
IPQRLVNVVLGAHN

SEQ ID NO: 78579 - protein, 14 aa, Homo Sapiens
PQRLVNVVLGAHNV

SEQ ID NO: 78580 - protein, 14 aa, Homo Sapiens
QRLVNVVLGAHNVR

SEQ ID NO: 78581 - protein, 14 aa, Homo Sapiens
RLVNVVLGAHNVRT

SEQ ID NO: 78582 - protein, 14 aa, Homo Sapiens
LVNVVLGAHNVRTQ

SEQ ID NO: 78583 - protein, 14 aa, Homo Sapiens
VNVVLGAHNVRTQE

SEQ ID NO: 78584 - protein, 14 aa, Homo Sapiens
NVVLGAHNVRTQEP

SEQ ID NO: 78585 - protein, 14 aa, Homo Sapiens
VVLGAHNVRTQEPT

SEQ ID NO: 78586 - protein, 14 aa, Homo Sapiens
VLGAHNVRTQEPTQ

SEQ ID NO: 78587 - protein, 14 aa, Homo Sapiens
LGAHNVRTQEPTQQ

SEQ ID NO: 78588 - protein, 14 aa, Homo Sapiens
GAHNVRTQEPTQQH

SEQ ID NO: 78589 - protein, 14 aa, Homo Sapiens
AHNVRTQEPTQQHF

SEQ ID NO: 78590 - protein, 14 aa, Homo Sapiens
HNVRTQEPTQQHFS

SEQ ID NO: 78591 - protein, 14 aa, Homo Sapiens
NVRTQEPTQQHFSV

SEQ ID NO: 78592 - protein, 14 aa, Homo Sapiens
VRTQEPTQQHFSVA

SEQ ID NO: 78593 - protein, 14 aa, Homo Sapiens
RTQEPTQQHFSVAQ

SEQ ID NO: 78594 - protein, 14 aa, Homo Sapiens
TQEPTQQHFSVAQV

SEQ ID NO: 78595 - protein, 14 aa, Homo Sapiens
QEPTQQHFSVAQVF

SEQ ID NO: 78596 - protein, 14 aa, Homo Sapiens
EPTQQHFSVAQVFL

SEQ ID NO: 78597 - protein, 14 aa, Homo Sapiens
PTQQHFSVAQVFLN

SEQ ID NO: 78598 - protein, 14 aa, Homo Sapiens
TQQHFSVAQVFLNN

SEQ ID NO: 78599 - protein, 14 aa, Homo Sapiens
QQHFSVAQVFLNNY

SEQ ID NO: 78600 - protein, 14 aa, Homo Sapiens
QHFSVAQVFLNNYD

SEQ ID NO: 78601 - protein, 14 aa, Homo Sapiens
HFSVAQVFLNNYDA

SEQ ID NO: 78602 - protein, 14 aa, Homo Sapiens
FSVAQVFLNNYDAE

SEQ ID NO: 78603 - protein, 14 aa, Homo Sapiens
SVAQVFLNNYDAEN

SEQ ID NO: 78604 - protein, 14 aa, Homo Sapiens
VAQVFLNNYDAENK

SEQ ID NO: 78605 - protein, 14 aa, Homo Sapiens
AQVFLNNYDAENKL

SEQ ID NO: 78606 - protein, 14 aa, Homo Sapiens
QVFLNNYDAENKLN

SEQ ID NO: 78607 - protein, 14 aa, Homo Sapiens
VFLNNYDAENKLND

SEQ ID NO: 78608 - protein, 14 aa, Homo Sapiens
FLNNYDAENKLNDI

SEQ ID NO: 78609 - protein, 14 aa, Homo Sapiens
LNNYDAENKLNDIL

SEQ ID NO: 78610 - protein, 14 aa, Homo Sapiens
NNYDAENKLNDILL

SEQ ID NO: 78611 - protein, 14 aa, Homo Sapiens
NYDAENKLNDILLI

SEQ ID NO: 78612 - protein, 14 aa, Homo Sapiens
YDAENKLNDILLIQ

SEQ ID NO: 78613 - protein, 14 aa, Homo Sapiens
DAENKLNDILLIQL

SEQ ID NO: 78614 - protein, 14 aa, Homo Sapiens
AENKLNDILLIQLS

SEQ ID NO: 78615 - protein, 14 aa, Homo Sapiens
ENKLNDILLIQLSS

SEQ ID NO: 78616 - protein, 14 aa, Homo Sapiens
NKLNDILLIQLSSP

SEQ ID NO: 78617 - protein, 14 aa, Homo Sapiens
KLNDILLIQLSSPA

SEQ ID NO: 78618 - protein, 14 aa, Homo Sapiens
LNDILLIQLSSPAN

SEQ ID NO: 78619 - protein, 14 aa, Homo Sapiens
NDILLIQLSSPANL

SEQ ID NO: 78620 - protein, 14 aa, Homo Sapiens
DILLIQLSSPANLS

SEQ ID NO: 78621 - protein, 14 aa, Homo Sapiens
ILLIQLSSPANLSA

SEQ ID NO: 78622 - protein, 14 aa, Homo Sapiens
LLIQLSSPANLSAS

SEQ ID NO: 78623 - protein, 14 aa, Homo Sapiens
LIQLSSPANLSASV

SEQ ID NO: 78624 - protein, 14 aa, Homo Sapiens
IQLSSPANLSASVA

SEQ ID NO: 78625 - protein, 14 aa, Homo Sapiens
QLSSPANLSASVAT

SEQ ID NO: 78626 - protein, 14 aa, Homo Sapiens
LSSPANLSASVATV

SEQ ID NO: 78627 - protein, 14 aa, Homo Sapiens
SSPANLSASVATVQ

SEQ ID NO: 78628 - protein, 14 aa, Homo Sapiens
SPANLSASVATVQL

SEQ ID NO: 78629 - protein, 14 aa, Homo Sapiens
PANLSASVATVQLP

SEQ ID NO: 78630 - protein, 14 aa, Homo Sapiens
ANLSASVATVQLPQ

SEQ ID NO: 78631 - protein, 14 aa, Homo Sapiens
NLSASVATVQLPQQ

SEQ ID NO: 78632 - protein, 14 aa, Homo Sapiens
LSASVATVQLPQQD

SEQ ID NO: 78633 - protein, 14 aa, Homo Sapiens
SASVATVQLPQQDQ

SEQ ID NO: 78634 - protein, 14 aa, Homo Sapiens
ASVATVQLPQQDQP

SEQ ID NO: 78635 - protein, 14 aa, Homo Sapiens
SVATVQLPQQDQPV

SEQ ID NO: 78636 - protein, 14 aa, Homo Sapiens
VATVQLPQQDQPVP

SEQ ID NO: 78637 - protein, 14 aa, Homo Sapiens
ATVQLPQQDQPVPH

SEQ ID NO: 78638 - protein, 14 aa, Homo Sapiens
TVQLPQQDQPVPHG

SEQ ID NO: 78639 - protein, 14 aa, Homo Sapiens
VQLPQQDQPVPHGT

SEQ ID NO: 78640 - protein, 14 aa, Homo Sapiens
QLPQQDQPVPHGTQ

SEQ ID NO: 78641 - protein, 14 aa, Homo Sapiens
LPQQDQPVPHGTQC

SEQ ID NO: 78642 - protein, 14 aa, Homo Sapiens
PQQDQPVPHGTQCL

SEQ ID NO: 78643 - protein, 14 aa, Homo Sapiens
QQDQPVPHGTQCLA

SEQ ID NO: 78644 - protein, 14 aa, Homo Sapiens
QDQPVPHGTQCLAM

SEQ ID NO: 78645 - protein, 14 aa, Homo Sapiens
DQPVPHGTQCLAMG

SEQ ID NO: 78646 - protein, 14 aa, Homo Sapiens
QPVPHGTQCLAMGW

SEQ ID NO: 78647 - protein, 14 aa, Homo Sapiens
PVPHGTQCLAMGWG

SEQ ID NO: 78648 - protein, 14 aa, Homo Sapiens
VPHGTQCLAMGWGR

SEQ ID NO: 78649 - protein, 14 aa, Homo Sapiens
PHGTQCLAMGWGRV

SEQ ID NO: 78650 - protein, 14 aa, Homo Sapiens
HGTQCLAMGWGRVG

SEQ ID NO: 78651 - protein, 14 aa, Homo Sapiens
GTQCLAMGWGRVGA

SEQ ID NO: 78652 - protein, 14 aa, Homo Sapiens
TQCLAMGWGRVGAH

SEQ ID NO: 78653 - protein, 14 aa, Homo Sapiens
QCLAMGWGRVGAHD

SEQ ID NO: 78654 - protein, 14 aa, Homo Sapiens
CLAMGWGRVGAHDP

SEQ ID NO: 78655 - protein, 14 aa, Homo Sapiens
LAMGWGRVGAHDPP

SEQ ID NO: 78656 - protein, 14 aa, Homo Sapiens
AMGWGRVGAHDPPA

SEQ ID NO: 78657 - protein, 14 aa, Homo Sapiens
MGWGRVGAHDPPAQ

SEQ ID NO: 78658 - protein, 14 aa, Homo Sapiens
GWGRVGAHDPPAQV

SEQ ID NO: 78659 - protein, 14 aa, Homo Sapiens
WGRVGAHDPPAQVL

SEQ ID NO: 78660 - protein, 14 aa, Homo Sapiens
GRVGAHDPPAQVLQ

SEQ ID NO: 78661 - protein, 14 aa, Homo Sapiens
RVGAHDPPAQVLQE

SEQ ID NO: 78662 - protein, 14 aa, Homo Sapiens
VGAHDPPAQVLQEL

SEQ ID NO: 78663 - protein, 14 aa, Homo Sapiens
GAHDPPAQVLQELN

SEQ ID NO: 78664 - protein, 14 aa, Homo Sapiens
AHDPPAQVLQELNV

SEQ ID NO: 78665 - protein, 14 aa, Homo Sapiens
HDPPAQVLQELNVT

SEQ ID NO: 78666 - protein, 14 aa, Homo Sapiens
DPPAQVLQELNVTV

SEQ ID NO: 78667 - protein, 14 aa, Homo Sapiens
PPAQVLQELNVTVV

SEQ ID NO: 78668 - protein, 14 aa, Homo Sapiens
PAQVLQELNVTVVT

SEQ ID NO: 78669 - protein, 14 aa, Homo Sapiens
AQVLQELNVTVVTF

SEQ ID NO: 78670 - protein, 14 aa, Homo Sapiens
QVLQELNVTVVTFF

SEQ ID NO: 78671 - protein, 14 aa, Homo Sapiens
VLQELNVTVVTFFC

SEQ ID NO: 78672 - protein, 14 aa, Homo Sapiens
LQELNVTVVTFFCR

SEQ ID NO: 78673 - protein, 14 aa, Homo Sapiens
QELNVTVVTFFCRP

SEQ ID NO: 78674 - protein, 14 aa, Homo Sapiens
ELNVTVVTFFCRPH

SEQ ID NO: 78675 - protein, 14 aa, Homo Sapiens
LNVTVVTFFCRPHN

SEQ ID NO: 78676 - protein, 14 aa, Homo Sapiens
NVTVVTFFCRPHNI

SEQ ID NO: 78677 - protein, 14 aa, Homo Sapiens
VTVVTFFCRPHNIC

SEQ ID NO: 78678 - protein, 14 aa, Homo Sapiens
TVVTFFCRPHNICT

SEQ ID NO: 78679 - protein, 14 aa, Homo Sapiens
VVTFFCRPHNICTF

SEQ ID NO: 78680 - protein, 14 aa, Homo Sapiens
VTFFCRPHNICTFV

SEQ ID NO: 78681 - protein, 14 aa, Homo Sapiens
TFFCRPHNICTFVP

SEQ ID NO: 78682 - protein, 14 aa, Homo Sapiens
FFCRPHNICTFVPR

SEQ ID NO: 78683 - protein, 14 aa, Homo Sapiens
FCRPHNICTFVPRR

SEQ ID NO: 78684 - protein, 14 aa, Homo Sapiens
CRPHNICTFVPRRK

SEQ ID NO: 78685 - protein, 14 aa, Homo Sapiens
RPHNICTFVPRRKA

SEQ ID NO: 78686 - protein, 14 aa, Homo Sapiens
PHNICTFVPRRKAG

SEQ ID NO: 78687 - protein, 14 aa, Homo Sapiens
HNICTFVPRRKAGI

SEQ ID NO: 78688 - protein, 14 aa, Homo Sapiens
NICTFVPRRKAGIC

SEQ ID NO: 78689 - protein, 14 aa, Homo Sapiens
ICTFVPRRKAGICF

SEQ ID NO: 78690 - protein, 14 aa, Homo Sapiens
CTFVPRRKAGICFG
